United States Patent Application Publication US 2007/0054278 A1 - sequence listing, part 139

SEQ ID NO: 442036 - DNA, 201 bp, Homo sapiens
ttccagataaccccacgagcttagtaggttgtggctaacacgttacagatgacttagttaactcacccaaggtcacctgtctaggacatagcagagccagrctggctgaagaactcagacttataattctctctgtatctctctgtcacttgtagacagtctctgcccctctaagctccagtgggacagacaccatctctg

SEQ ID NO: 442037 - DNA, 201 bp, Homo sapiens
ataaaacaacggaaaatagtaatcgttggcacattgtggagaaatcacaaccttcacgcattgttggcgcgaatataaaagggtgcagccaagttactatrtgatccatcaattttactcctagctatatatgcagaagaatgaaaaatagggacttttaaaagggacaccagcgcacccgtgttcagagaagcattactc

SEQ ID NO: 442038 - DNA, 201 bp, Homo sapiens
ccagcttgggcaacagaccgagactctgtctcataacaaaaacaaacacacacacacacacacacacacacacacacacacacacactcaaaacaagacayatttaactggcttcaaagaagaggccaggccaggtgcagtggctcacgcctgtaatcccaacactttgggaggccgaggcaggagaggatcacttgagcc

SEQ ID NO: 442039 - DNA, 201 bp, Homo sapiens
aaaacaaacacacacacacacacacacacacacacacacacacacacactcaaaacaagacacatttaactggcttcaaagaagaggccaggccaggtgcrgtggctcacgcctgtaatcccaacactttgggaggccgaggcaggagaggatcacttgagcccaggagttcaagccctgcctgggcaatggcaaaaaccc

SEQ ID NO: 442040 - DNA, 201 bp, Homo sapiens
gtgaaaggagccacagggcgtcacagttgcctcccctgttcaaagctggcgccgggacaggcagtggggctctgtttggaatatatgctcttcatcagacractctgaaacaatcaccctttctggcccgagaggaggaaggcacctctgaggccagcgcttcccccagtgcaaacagcgacccagcctgcccagtcctgc

SEQ ID NO: 442041 - DNA, 201 bp, Homo sapiens
gaggcacacactgcagccacctacagccacacactgacatggctggcccgacgtggtcctctgtgcttccttcctcaggaccccaaatgttttttcatttytctgcttctcagccaggtcccatctgccatgtctgtggctgggattccaggaagccaatggatattttcagctttattgtcccatttgtcacttgctaat

SEQ ID NO: 442042 - DNA, 201 bp, Homo sapiens
agccacacactgacatggctggcccgacgtggtcctctgtgcttccttcctcaggaccccaaatgttttttcatttctctgcttctcagccaggtcccatstgccatgtctgtggctgggattccaggaagccaatggatattttcagctttattgtcccatttgtcacttgctaattagctagaagtgactaatcagaaa

SEQ ID NO: 442043 - DNA, 201 bp, Homo sapiens
atagcagccatgtgaccccaggccacacctagagcacagagggtggaagccacatagacattctttgacgggataagacctgtcaacaccatcctgcccartgctgccaaggtttcccagccaagagtgggaggggggcatgagcagaaagaagcaactaaagccctgcgaccctcctgcacctccatggacagggccaga

SEQ ID NO: 442044 - DNA, 201 bp, Homo sapiens
gaaaaggatcgggattcctcatttccctgggctgccattccctgcctcctggccccagcagcaggatgcccccacgaggtttcaggagacacgataactcrtaagaaccagggtgaatttgagagtctattataaatcaaatgcctttcatcctcgactgctggctgtgatgttctccaacactgctattcacagcgagcg

SEQ ID NO: 442045 - DNA, 201 bp, Homo sapiens
cttctgttcaaatcccatctaagccattgaacagctgtgtgaccttgagtgagtgatttaacctcagcctcagtttccacatcagtaaaaagggagaagasgaggaacaggcacctcctcagggctgtaaggattcaccaaggtgagtaagtgaggcactggcacatgcatgggacaggagttaagtgtccatcatggctc

SEQ ID NO: 442046 - DNA, 201 bp, Homo sapiens
ctccgacaccaagagcctgttttcctctgtgtccttgtagatcagagaagaagaatgaatgttctgagtgggtaccacatggcaggtgctattctaaataytgaacagctgtgaacccatttaatccccgtaagaaactggtgagcttggtttcatttgactcaagaggcccagagacgaaagcaactggtccagggtcac

SEQ ID NO: 442047 - DNA, 201 bp, Homo sapiens
gcctgcctggaagttccacagaagcttctgtgagaaaaccccacggaggcacagccagagccagtggcactgacccggcctccaggagcactcgccccatrggcctgggcggtcactcaagcaggacgggggacactgtcactgcctctgtcaactgggtggccaggcaggggctatgttgagaagagctctgcctcaggg

SEQ ID NO: 442048 - DNA, 201 bp, Homo sapiens
gagtgatgtggccatgagccaaggaatgcggacagcctttagaagctggaaacgaattctccccgagagcctccagaaggaacatagtcctgacaccttcrttttagccccatgggacctgtgttggacttcggacctccagaaccataagagactaaatctgtgttcttttaaccacaaagttaggggcaagcagtcaca

SEQ ID NO: 442049 - DNA, 201 bp, Homo sapiens
acaccttcgttttagccccatgggacctgtgttggacttcggacctccagaaccataagagactaaatctgtgttcttttaaccacaaagttaggggcaakcagtcacagcagcaataggaaataaaagcaggaggtacaaccaggttggtataacgcggatgtgagttgttccactggctctgagggtccacagtggacc

SEQ ID NO: 442050 - DNA, 201 bp, Homo sapiens
tggtataacgcggatgtgagttgttccactggctctgagggtccacagtggacccaggcagtgcctgtaagctgccaccggctggacggaacggccaagcraagacaaaaagaaggtggaggaggacaaccacatccctccctcttctgtgtccactggccccgccaaagtgccctgtatatatgtgtgaccctaagaggg

SEQ ID NO: 442051 - DNA, 201 bp, Homo sapiens
caggcagtgcctgtaagctgccaccggctggacggaacggccaagcaaagacaaaaagaaggtggaggaggacaaccacatccctccctcttctgtgtccrctggccccgccaaagtgccctgtatatatgtgtgaccctaagagggaaggggccacgcatgctctacctaccactgtatcctgtggcctggagcaccagg

SEQ ID NO: 442052 - DNA, 201 bp, Homo sapiens
ctgaatgaatgaacaaaggaatgaatggactaggagttccttgagggcagggtcttatttctgattccacagctaggtgagcagtgcctggctgggccagrgctggttacactggaacgaatgaacacagaaacaaaggaagaaagaggaaagtgacccaggtgtcacaggtggtagagaatgaccagaggagactccctt

SEQ ID NO: 442053 - DNA, 201 bp, Homo sapiens
gtgtattttactgccaaaaacaaaaaagccccctcccctgctcccctcgggagtctgctgacagttgatcctttgaattcctggcaccgctggaaccacgyagaaacttctaggcagccttcgcacatgtatggggtaggggacgtgacgaagcccagccacctctgccaagcccgctgtgagctcggaagggtgttttgg

SEQ ID NO: 442054 - DNA, 201 bp, Homo sapiens
atgtgtattttactgccaaaaacaaaaaagccccctcccctgctcccctcgggagtctgctgacagttgatcctttgaattcctggcaccgctggaaccasgtagaaacttctaggcagccttcgcacatgtatggggtaggggacgtgacgaagcccagccacctctgccaagcccgctgtgagctcggaagggtgtttt

SEQ ID NO: 442055 - DNA, 201 bp, Homo sapiens
tgacctgcctcgctgaccccagggctgaccctgtgagtcaggccctatctcacccccattttacagttgggaacgggctcagcttaggatgtggtggagtytggattcaaacccagccccagtgactccgaagcccgggtttgtcaccttctccagcaatgggaagatgcagcctgcatttcctgcccaaagcacattatg

SEQ ID NO: 442056 - DNA, 201 bp, Homo sapiens; identical to SEQ ID NO: 117507

SEQ ID NO: 442057 - DNA, 201 bp, Homo sapiens
caagggctctgtgtcattctgacctggtcccctgggcctttcccctgcatggggatgagggtgatggatcccgccctcctgagggtgcagccagtggggasatgacccaggccctgccctcagcttcccgtcaggtgggcttcccctctctgagccccaggcactttgccttggtgctggggactttgagggttgtggtcc

SEQ ID NO: 442058 - DNA, 201 bp, Homo sapiens
tttatatttcgtacttcgtttaatcctcacaaagacttgaggaagtgggcgacattcccatctgcattttatggtccagacaacaggtaacgacaggtaaygacaggtaacgacaggtaacgcggagggtgagtgaccccagagctccggcctgtgcacctgggcacaataaccccttgcacagatggccccagtccagct

SEQ ID NO: 442059 - DNA, 201 bp, Homo sapiens
acaaatcccctgagaaaataaaaagctaacccacagcacattcactaatgatgatgaagctgttttggaccacatttcaactttgttccaacaaccccttmgagtgaaattcggcagccttctctcagtgtttatgcaactgggccactgcaggcaggagccaccgccgggggccgcctatgtcttaagtgtctctacttt

SEQ ID NO: 442060 - DNA, 201 bp, Homo sapiens
aattagctgggcgaggtggtttgtgcctgtagtctcagctactcgggaggctgaggcaggagaatcacttgagcctgggaggtcaaggctgcagtgagccrtgattgtgcccgtgtactccagcctgggcaacaaagtgagactcagccagggtgagcaagcccatctcacggatcagaggcggcacaggatggagctctc

SEQ ID NO: 442061 - DNA, 201 bp, Homo sapiens
cagcatcaagcacaggatctgtccagaaccgcaggggtgcattacggacccggcctgccaccctagctcagcacactctgtgcaccccaagggccttgttktgaaaaccagcaaccccactatcccctttctgcagccccggctgtgtaagcctgggcaaatcacctgcccaacttcctgcttgtacaatggtagcaccag

SEQ ID NO: 442062 - DNA, 201 bp, Homo sapiens
tcctgatctcacgtgatccacccgcctcggcctcccaaagtgctgggattacaggcggcagccactgcgcctggccaactcttcagggcttctgactgccrtgtgcccaggccaaagtgatcccacagccagaaaaaagcatgcgctctgcagggtcacaggtgttcatggtgcacagctggcagccctcacgcgatgctg

SEQ ID NO: 442063 - DNA, 201 bp, Homo sapiens
actgcccttttggccgccaagtcttcaacatcaacctaaaacccgctcataacctctcagctccctgctggtgcactccccacagagacaccctgggtcamacacagccccctggccttattccccatgcctgctagcccacacaatccatgtcacaaaatcagcctcggtgctttggctacaattttccagggaaggagg

SEQ ID NO: 442064 - DNA, 201 bp, Homo sapiens
caacttcctgcttgtacaatggtagcaccagtgaccacgcactgaggttctccaggttcaaatgtcaatggacatgggagtctcccaggcatctgcttacygtgcggtgtctggacatggggcaggcccccgggggatgtttgcaggcccctgagcactggtggaaaggccagaagttaagacacctctctctccccagtt

SEQ ID NO: 442065 - DNA, 201 bp, Homo sapiens
ttttcctaagagccaaataataatagtccaggctttgtgggtcatgccacctctgttgtcaccagcttaatgccacagcaggaatgggcagagctgtcccyccctcccccaaatgggcagagctgtccccgccaccctgaaaactccttatttataaaaacaggtgctgggccagatcgtttgcagacgcttgacgtctat

SEQ ID NO: 442066 - DNA, 201 bp, Homo sapiens
tcaaatagactggaagtgtcaccggattctagtctcttctatagtaaatacatgaagtcagtctccataaacaaatgcattattttagggatgaagattcmctggacatcaacaaagctggcggcgtttttgttttgttttgtttttgttgtttttcttttaaactagcagcagcaaccacaacggaaaccccatggtctg

SEQ ID NO: 442067 - DNA, 201 bp, Homo sapiens
aaattatacgggctctgccatctcctgccttcaactccctaggcagagacgcaggaaggaggaggcgattatgatacatttgctacaaacctcaaagacaracaattacactcccgctcctatcaactggggctctgaaatatgcaaaggcagagggaggtgcgtccggcttgctagaaaagacaaaacggagcaaggcca

SEQ ID NO: 442068 - DNA, 201 bp, Homo sapiens
ctgcgcaccagctctaaaagtcgccagaggctggggctggcaggacacagagtgagggagggaaagaggagcagagaccaaggagtggctgaagaaggccrattgccccagggagactgggtatgttctgcatcaggagagagaaggaagaaagggctcctccagaagtcagcagcccaagcaaagcagaggagccaggtg

SEQ ID NO: 442069 - DNA, 201 bp, Homo sapiens
cacacgcaggggcaggaagatatgggctgggtgtgcacggatgtgcaagagggaggtgtgtctgcccgtttgcaaacgtgtggactgtgtgtatacatgaygcctgggggagtgcatgccagggcccaggacatgtgtgctcaaggaccatggggtgtatgcatgcacacacgtgtgtgctcgtggggtatgcaagtgtgt

SEQ ID NO: 442070 - DNA, 201 bp, Homo sapiens
ttggtcacctcctcctggaagtcctccatcatcatcctcccaggaccctccctgacagaggttaagtacctatcctctgcaccccctctaacacccagaasaaacctcagcccttggccatgttatttttgtattatctgttgatctgccaggttctctcagcacacattcagtcctcaatggcaggcctcaagtcttgtc

SEQ ID NO: 442071 - DNA, 201 bp, Homo sapiens
gcaaacgtgtggactgtgtgtatacatgacgcctgggggagtgcatgccagggcccaggacatgtgtgctcaaggaccatggggtgtatgcatgcacacaygtgtgtgctcgtggggtatgcaagtgtgtgcagccatgttctggggcacacatgtgtgggcacctgggcaggggcatggagggatgggagccatgagtca

SEQ ID NO: 442072 - DNA, 201 bp, Homo sapiens
cacagcccatcactctggcctgagaaactaggctgtctgaggcaccagggggctgccatcactatatacacatacatatagatttacttcattgaggtaaratccacacaccataaaattaaccattaaccttatttatttatttatttacttacttattgagacagagtctcgctctgtcacccaggcagtggcatgacc

SEQ ID NO: 442073 - DNA, 201 bp, Homo sapiens
ttagcaccaattcagaaaaccgggattctgcactctatgcgagtcctgtgggatttggggttaacaagacctcggctgcccaggcccagacaccctcggasagccagtctgccgaggcctgggcatcaccggcaagatgggttattagagtgacttctccaagctggctgtgtcctaaggccccgtagggctcaaactaat

SEQ ID NO: 442074 - DNA, 201 bp, Homo sapiens
ctaagcagcaaggttctcacccacatgcctcacttcctctcctccacgaggtggacgtgttacagaggagaggagaggttcataccttgcgcaggtcacayagcttgtgttgtgggtggaactgtgtctgccaaaactgttgtgggttaacatgtgtcttccactgcatataaatcatacacaatgtggccttctgtccac

SEQ ID NO: 442075 - DNA, 201 bp, Homo sapiens
gaaacaatgagacagtcgccttgcttccagagacccttctgggagccaccagctgggttcgggggttgtttagaaacagttcctagagacccctacttatwatgagctccagctctaagtggcctcttggaaaagtggctcaacctcactgagccccaagttcttcctacacagtaacaatcactcatccatgaggggtta

SEQ ID NO: 442076 - DNA, 201 bp, Homo sapiens
tctaatgtgagtttcaagccaggtaatgctgtcatgcttgaatataggagaaggcgcactcctgccctccctggggaggcggctcctcagacactcgtgcrgcagactctactcacccagagaagctcagcgtcctaggagtgagttcaatggtgttcaccacagtgaattctaagtgacctgcacaaacagaggggattc

SEQ ID NO: 442077 - DNA, 201 bp, Homo sapiens
aggcaggggttggaggagggtggactgttgcatgggcaccaccagctccagctgccccatcactgtgcctgggaggcccagggtctacacctccctctccrcctagacatccccacagcccggacaccccttacgaggcccagcatcagggcatctgtgcaatccacttttatggcctcttccaactgttgaaccccccag

SEQ ID NO: 442078 - DNA, 201 bp, Homo sapiens
tgcgctggatgacacacgaacgctcgggtccccccttccttgcccaaagaaacgatgacaacccacaaacgccacttcttccttcgcagtttgggaagccrctgtaatgcgtcatttctgaggctcaggaaagacctttacccagaaggtgggggtgggggtgtcttgaatgtcccaaagcccaaggctggcccttatgta

SEQ ID NO: 442079 - DNA, 201 bp, Homo sapiens
ctgtgcctgggaggcccagggtctacacctccctctccgcctagacatccccacagcccggacaccccttacgaggcccagcatcagggcatctgtgcaayccacttttatggcctcttccaactgttgaaccccccagccagccagcagtaagcaaatggcccagctgccaggctgtgggtgggtgtcccgggcactgcc

SEQ ID NO: 442080 - DNA, 201 bp, Homo sapiens
caagtatacactggtgcaaccactttgcaaaactgcagggcagcatcaacgaatgataattcagctcccaggcatatacgcaacaggactgtggacacacrttcaccaaaagacgtacactagagtgtttacaatggtctattcgtaacagccccaaactggaaagacctatccacagaatgaacaagttaacagagtcta

SEQ ID NO: 442081 - DNA, 201 bp, Homo sapiens
ttggcaactctaaggtggaacttctagctccattacaaacttgccacgtgagttgggcaggtcactcagtatcactgggcctcaatttcctcatctgtgargtgaagacagaaaggcccatctttcagagagaatgtgagttttaaaagagaggctgtctcactttgggaggccaaggcagatggaccatttgaagtcagg

SEQ ID NO: 442082 - DNA, 201 bp, Homo sapiens
caaactgcattttacagataaggaggctgaggactgacagcttcctgtctagttgggggaatgaggtggaaagaaaatgacagccaacagccaagtcactragggaggccagcagatgccccaggagagtgagtggccatggctgaccacagcaggcaggggcttccaggaggaggtgacagctctcacaatgtctcaagt

SEQ ID NO: 442083 - DNA, 201 bp, Homo sapiens
gtgcaaccactttgcaaaactgcagggcagcatcaacgaatgataattcagctcccaggcatatacgcaacaggactgtggacacacgttcaccaaaagaygtacactagagtgtttacaatggtctattcgtaacagccccaaactggaaagacctatccacagaatgaacaagttaacagagtctaaccagacaacaga

SEQ ID NO: 442084 - DNA, 201 bp, Homo sapiens
agaggaacatactaaagaaccgcttccttttgtttctagtttttatttcagtctagtaaagaacattctttgagactctcaaagcttcagtttgctcatcygtgaaagggagcacataacatatttgcaagagatgcacccagaatgggggagcccccaaatcccagaacagcaccgtggctacgttccccccgtttccta

SEQ ID NO: 442085 - DNA, 201 bp, Homo sapiens
agcaagggcgtgcaggaaacacaaaggacttttccccacctcctcctgtcctccgaagaaagctgagagaagttcctcatcatttcctttaggaaaggacrattggctgccaagaatctgttacccacagatattaaactgatcacaacccacacacgagcacacagaaaacaaaggcagtggcttttatttttccctctg

SEQ ID NO: 442086 - DNA, 201 bp, Homo sapiens
ttggagaccagcctggccaacatagggaaactccgtctctaccaaaaatacaaaaattaactgggtgtggtggtgtgcgcccctgtaatcccagctactcrggaggctgaggcaggagaatcacttgaacttaggaggcggagttgcagtgagccgagttcctgccactgcactctagcctgggtgacagagtgagactct

SEQ ID NO: 442087 - DNA, 201 bp, Homo sapiens
ctgcctcccgtgttcagggaaagccccacagccgcaccccaccgtgggccagccactgcgcagaggaaccttggctaataataacccagctctgacgtcakgagcccaggaaatctgcagcaacctgtctcctaagacagccgggaagtgattccaaggaaaagcaagatgttccccttgtgactctttgtcacctgtctg

SEQ ID NO: 442088 - DNA, 201 bp, Homo sapiens
acctggagcaccgtgctgcctcccgtgttcagggaaagccccacagccgcaccccaccgtgggccagccactgcgcagaggaaccttggctaataataacycagctctgacgtcatgagcccaggaaatctgcagcaacctgtctcctaagacagccgggaagtgattccaaggaaaagcaagatgttccccttgtgactc

SEQ ID NO: 442089 - DNA, 201 bp, Homo sapiens
acatacacagaggactccctggggtgaggggtggggggccgggaaggggcggcaagggaaatcaagcgcaccacagccccctttcctcccaggggcctgcygttccaccccacaggctggtcccactgctggacacagcccacgcctctccaaaggacagcgggtgaccgtggcaggaggcaggtaatgggagcggggagg

SEQ ID NO: 442090 - DNA, 201 bp, Homo sapiens
gaggtgatctgttgtgacaggcagaggagcagctggccgttctctcaggatactgggttatttaattccactcttctgggggcatgatacccatgagtccsggaggcagacaaggcccttgtgtgtcctgaggagcccggggcctgtgtgtatccacacctgtatacacacacacacactcatgggtgttcactccctggg

SEQ ID NO: 442091 - DNA, 201 bp, Homo sapiens
tttttcttaccctctgacatgatcttgcacatttacttgtacatgatctcttcctggtagaatggaagccccaagagagcagggaatttgtgatcttgctygctctccagcactgaaattgtgtcaagcacacagcaggcgctcaagaaaaacagatgcaatggctcatgcctgtaacctcagcattctgggaggtccaaa

SEQ ID NO: 442092 - DNA, 201 bp, Homo sapiens
gagatgggagacacacggcccacggactttgaggcttttgctgatctgtccctcacatgggggttgggggcacagctcccttctgatgctcccactttcastgggcagagggcaggcacgtaggcagtggggagaaagaggtgaaagttagagggaaaggcagactttactgaccgcactgaggtcagagccaagggtgag

SEQ ID NO: 442093 - DNA, 201 bp, Homo sapiens; identical to SEQ ID NO: 117259

SEQ ID NO: 442094 - DNA, 201 bp, Homo sapiens
ttgcctttgtggtgagccagctccctcctgcccaaacctgcctgctggtttccatggggattcctctcaaagtgaatacgaatcatgacgtccaggctgastcaaaacatgtgccagggaagggaggagctcccggaccccaaaagaagccagtctggaaaatcctcccatgagcttattcccgaggccagagaaaccttg

SEQ ID NO: 442095 - DNA, 201 bp, Homo sapiens
ccatgtgaacccccagagatcttcagaactggcattccaaaccagatatggcctcagacctgcttccagagtgggtggggaatggggtgagctgacccccscagaaagagcccccattgggcccccgatgctggcagaagacacctagccttcgccttcccttgcctttgtggtgagccagctccctcctgcccaaacctg

SEQ ID NO: 442096 - DNA, 201 bp, Homo sapiens
ttttttttccccacattatcgcacatagatgtccctgctctgaatggcaagctccagaactctcactgtagcagctataaaatattccgccaccatcaatktcatccctgctctcaccccctccctcagggacagtgccactgtttcattttatgctgccatgcacaactccgcagtgaacatccttgtgaaacatgtttt

SEQ ID NO: 442097 - DNA, 201 bp, Homo sapiens
ggaacacgggaggcttgcaggggacatgggctggattgggatggaaagcctctgaacgctgctgttccttgggctcagatatgagctaacactgcccaggyacctctgccgttctgggtactttcctatcgctgggattattttacagataactgataattccctggtaagctgaacatgacgaccggagctccaggggag

SEQ ID NO: 442098 - DNA, 201 bp, Homo sapiens
gacactgtctatgtacttacatgcttggcctccccacaatgaaatgctagcagaaagggcatcaatggaggaaatgggataaacaggccctttctgcaacsagggattctaataacatggcagtgagggagctcacgctgaaaacacaaagcatccaaaacacaccaactggacccacgctggaaggctgggcgcctctgt

SEQ ID NO: 442099 - DNA, 201 bp, Homo sapiens
catccgtgagcattatttctccatggtagctgccctactgatgaagcaggaggaggaaggatgtggcacgcaggagacctcaccttgaaactaagggaagsgccagaacttgcctctaggagagcaggtggaggctgatggagccaaaaaggttgggacaaggccggactgtaaactgctcgttcctttggcttgtctact

SEQ ID NO: 442100 - DNA, 201 bp, Homo sapiens
caattcatcaccagcgcggtgttttgtttttcatactggaaaggaagcccttcacaggctgtgaggacaaggcccagcccctccctcgtgtcctgcacacrtgtatcacccacccggcccccagatgaggatgctagacctgggataagagaaatcagggctcccctgagaaagcaagatgaataaactttcctcagatct

SEQ ID NO: 442101 - DNA, 201 bp, Homo sapiens
ccacgctcaagggtcactttgttatggagccaactccagctctccttgcctttgtggtttctgtcttcttgaacagaacgagccaaggtttgaggctcttrctgatctgttaggttgattcctacttactgggttgaaagcgagaaacaaatgtaaaagtttccaccctcctcccccagcaagccaagggctgtcatgccg

SEQ ID NO: 442102 - DNA, 201 bp, Homo sapiens
caattgtcaactgggccacaagtgcgttttcccaggtcacccactcgcctttcagactggtttatggcgaggctggttgctggtctgcttttccacgctcmagggtcactttgttatggagccaactccagctctccttgcctttgtggtttctgtcttcttgaacagaacgagccaaggtttgaggctcttgctgatctg

SEQ ID NO: 442103 - DNA, 201 bp, Homo sapiens; identical to SEQ ID NO: 117263

SEQ ID NO: 442104 - DNA, 201 bp, Homo sapiens
atcacacctggataatttttgtatttttagtagagacggggtttcaccatgttggccagggtagtctcgaactcctgacctcaggtgatccacccgcctcmgcctcccaaagtgctgggtttacaggagtgagccactgcgcctagacgcattcttttcttgcttagaggtatgcaagaaaatggagtatcttacaagata

SEQ ID NO: 442105 - DNA, 201 bp, Homo sapiens
gtttaatacagtctgttcttctacacgagaggcggatcctcctcggtcctcccagcagttctcctctgccgccgccgctcatggtgtgtaattaggaggcrccaagagcaaggtgggatctgggtgcgttaaagcatccccagacacctgggatcacttagggggtactcgttacaagtgaggcgaggactcatggctgag

SEQ ID NO: 442106 - DNA, 201 bp, Homo sapiens
cctccaggtacttaggcgcccagcacccctccaaagccaagcacccactcacctccaggccttagattgcctgcccaccagcctcactctcccctgctatrataggcacaataatggccctaatcatcctactcccttcaacctgtgactatgtggcctgacatggcaaagggacccttagagttgcttaagctgaggatc

SEQ ID NO: 442107 - DNA, 201 bp, Homo sapiens; identical to SEQ ID NO: 117274

SEQ ID NO: 442108 - DNA, 201 bp, Homo sapiens
aggccaaggagggtggatcacttgcggtcagtagttcgaaaccaccctggccaacatggtgaaacgctgtctctgctaaaaatacaaaaattagctaggtrtggtggcgcacacctataatcccagctactcaggaggctgaggcacaagaatcacctgaacccgggaggcagaggttgcagtgagccaagattgcgccac

SEQ ID NO: 442109 - DNA, 201 bp, Homo sapiens
actgggcagagcagctctcaccgatgtcaaagccatcccgtgaaaacactgcattcagcctcaactttggaccccaccctgacatcacacacaggcttctytcccactctgcttcagctgaggtccccaccaggagggccaaggggagactccctccatgataagtgaggcaaaccacccccgtcctttcccaacaatgtt

SEQ ID NO: 442110 - DNA, 201 bp, Homo sapiens
agtttttaattattttaccccatagcaaacacataagtagcaacaggtgccccttccaaaatcacctgcaaaacaacagagggaggctggagcagcagaakgggtcagggctttggactcaggtggagattttattattattttttgatacagtctcactctgtcgcccaggctgaagtgcagtggcacgatcttggctca

SEQ ID NO: 442111 - DNA, 201 bp, Homo sapiens
ttcggcttcgttcactgccatcgtttgtttctgtcactcattcaccaataacatggtggtccctgctacatccaggcccagtgctcagggctgggggcagwgttgtacacacggagcacgtagagagacataaagcaaccaatggacagttggttattatttcatgtaaattgtgctatgaatcacatgctatgaactgtg

SEQ ID NO: 442112 - DNA, 201 bp, Homo sapiens
tagcaaacacataagtagcaacaggtgccccttccaaaatcacctgcaaaacaacagagggaggctggagcagcagaaggggtcagggctttggactcagrtggagattttattattattttttgatacagtctcactctgtcgcccaggctgaagtgcagtggcacgatcttggctcactgcagcctctgcctctcgggt

SEQ ID NO: 442113 - DNA, 201 bp, Homo sapiens
cttataaaatggtaatcaaatcaacttcctatcaaaaccaggctcttcttaaattgcagatatcaacttactcagctcgcgaagtaagaacatggagacayaggctggccccaaacaaatcccctgagaaaataaaaagctaacccacagcacattcactaatgatgatgaagctgttttggaccacatttcaactttgtt

SEQ ID NO: 442114 - DNA, 201 bp, Homo sapiens; identical to SEQ ID NO: 117278

SEQ ID NO: 442115 - DNA, 201 bp, Homo sapiens
gacggactcaggccttagcccctcttgactccctaccacttccctaatctggagcaagtcattttacttgcctgagcctcagttcccccatctaagaatgkgtacaatgatagcagctacctcacagggttacagggggatgcaacgagactgtggtgtgtgtgtaatggaccaggcacaatgtcttctgcagggcaagcc

SEQ ID NO: 442116 - DNA, 201 bp, Homo sapiens
ggatgggggtgatggttgtgcaacaatgtgaacgtactcaatgaactgcacacttaaaactggttaaaatggcccattttatgttacgtgtattttatcaycatttaaaaaaaggtcacatgctgacagtccctcaagacattcattgcccacctcagctacctgtagcccccacctccttaccataggagatgacatctt

SEQ ID NO: 442117 - DNA, 201 bp, Homo sapiens
agtccctcaagacattcattgcccacctcagctacctgtagcccccacctccttaccataggagatgacatcttcccagtttttccaggcgagcaacttcragtagctgaccgccctctttacaaacaggatggaggctacgcatgtgttttctctgtggggcaaggccagattaagcaaagaaaacacagcagctccttc

SEQ ID NO: 442118 - DNA, 201 bp, Homo sapiens
acacatgtccatctgacctttgcttgcacacctgctttctcagggagctcactatcttctccggcaggctgctcctctccatacaggacgccaaaatctckgccctacaaccccttcccaggagctgctggcgccatgcagaactgtcggctccctgttctactctacggcttgctgataccttaccactccctctgcccc

SEQ ID NO: 442119 - DNA, 201 bp, Homo sapiens
agaaaatggagtatcttacaagatatctcagatctggtgataaatgctagtatctaccctagagggttgttacaggaattagatgagataatacctagtgmctgcttagcgcaaccaggcactaagtaagcatttataagaactattcttattttgaaaagtcttacagtttagccagtctactaaatgtatccaagtgtt

SEQ ID NO: 442120 - DNA, 201 bp, Homo sapiens
gctagtatctaccctagagggttgttacaggaattagatgagataatacctagtgcctgcttagcgcaaccaggcactaagtaagcatttataagaactaytcttattttgaaaagtcttacagtttagccagtctactaaatgtatccaagtgtttgtcaaggaattaaaatagccacacttagagccagaacctgtgtc

SEQ ID NO: 442121 - DNA, 201 bp, Homo sapiens
aggccctgttctaaatgctggggatacagtcatggggaaaaaacaggcaaacccctgcctttctagtgggatggaataataaacaaaataagtaagaaacrcgtggtctgtcagatgataacatatgctcaggagaaaaaaacgtaagtcagggaacgagaaataaaaaattgtgggagtgggtgccaactttttggatgg

SEQ ID NO: 442122 - DNA, 201 bp, Homo sapiens
tcagactcacgtggccaggaagggccagaggcaggacctgaactcagagctcttcagggcccagcacacacctcccaaacacgcaacgtttacatgctggygtcttgggctacaatgtcactgctgtcccgttggcagtaactggagcatccccagaggaaccaaggaggtgacaatacaaaagggagcagggagttgtcc

SEQ ID NO: 442123 - DNA, 201 bp, Homo sapiens
ttcaacttcgacatctaatgatgaggtgatccgtggccagcgtgaagatacgcagaaagcatggactcctgagccctgggactgcagtctgaaagcagcgraaacacttcggacctgggcaccttgcgcacctcgcttctttagctgtccttggcctcgatttccttatctgtagagtggagctcaccagattgctaggag

SEQ ID NO: 442124 - DNA, 201 bp, Homo sapiens
gtgaaggttgaatgagataatctgggtaatgcatttagcatatggctggcatgaagttaagtgctcagttactcagttattatattacgaggcaactctcyttgagcaggttcaggaagcagcagggcacacctgtgtccttaaatgggagcaatgagtatccatccccattacaggatgaaatgaggtaggaatgagcaa

SEQ ID NO: 442125 - DNA, 201 bp, Homo sapiens
caggcagcccccagaagggctgagaggtggcagggtggccaagcagttggaggagggggccgtggggttatcagattcacagcctgcaggtgagggaagtrgggcaggtgggctccctgggccctcagccaggcatccctccagactagcgcggcccaacagaacgtactacgatgacggaaatgttctgtatctgcactg

SEQ ID NO: 442126 - DNA, 201 bp, Homo sapiens
aaaaccttaaatgaggaatagcagggtatacctttccttattaaaagggttcccacactactgcttcacttcacattctgacagctcctattagggaaaasatgccttttttttttttttattttttgagatggagtctagctctgttgtccaggctggagtgcagtgacgcgatctcggctcactgcaacctccacctcc

SEQ ID NO: 442127 - DNA, 201 bp, Homo sapiens
ttgatttttgagaagctgacagtttttcactgtatttctcttttgttctttgcaccttttccccttgaggcagtcacagtttctcactgattcacagctayttcggcttattaaggtcatttaacccttcaattgtcaactgggccacaagtgcgttttcccaggtcacccactcgcctttcagactggtttatggcgagg

SEQ ID NO: 442128 - DNA, 201 bp, Homo sapiens
ttttttttaagtggcagaactctttttttacatgaaatctttgcccagagtcccttaaaacagaaggcaggtgacactcagcgggaggtgttgccttcagsggggagcagggctgggccatgccccctctacctcttccacacctgctatggttcagggacaatctctccaagtccacattttccctcttcccagtgagac

SEQ ID NO: 442129 - DNA, 201 bp, Homo sapiens
cactttgttatggagccaactccagctctccttgcctttgtggtttctgtcttcttgaacagaacgagccaaggtttgaggctcttgctgatctgttaggytgattcctacttactgggttgaaagcgagaaacaaatgtaaaagtttccaccctcctcccccagcaagccaagggctgtcatgccgggtcctcctcccca

SEQ ID NO: 442130 - DNA, 201 bp, Homo sapiens
aaactatgtactgagcatctagcaggtgccaggccctgttctaaatgctggggatacagtcatggggaaaaaacaggcaaacccctgcctttctagtgggrtggaataataaacaaaataagtaagaaacgcgtggtctgtcagatgataacatatgctcaggagaaaaaaacgtaagtcagggaacgagaaataaaaaat

SEQ ID NO: 442131 - DNA, 201 bp, Homo sapiens; identical to SEQ ID NO: 117281

SEQ ID NO: 442132 - DNA, 201 bp, Homo sapiens; identical to SEQ ID NO: 117283

SEQ ID NO: 442133 - DNA, 201 bp, Homo sapiens
ctgtggggtgggattcatggctcccacttacatttcccagatgctcttgcagccggggatgccacatgatggtctggccagtaaggtgaaagcagaagtcwccttaacagggcagaagtccttttccactcccctgccactcccactttctgctaactggaatgcaaacgaaatggtaagatcccatttcccactaactgg

SEQ ID NO: 442134 - DNA, 201 bp, Homo sapiens
ccttggcctcgatttccttatctgtagagtggagctcaccagattgctaggagaactacagaataaagcgcccgacttagtgcctgacatccagaagaagmgccatgaaatggaagctatcaaatcgcaggacagttttagaagtatgtgcagtgcaatcatttcatttagaagacaaaccaaacccatgtaagcaaattt

SEQ ID NO: 442135 - DNA, 201 bp, Homo sapiens
gacgacagtccagccgccttcacacagggagggcagccattgccttcagtgggaaaggaggggacctggatgcacagtccataccctgccctgtatctacsccttaagaattcaggctaggtgcggtggctcacgcctgtaatcccagcactttgggaggccaaggcaggcagatcaactgaggccaggagttcgagacga

SEQ ID NO: 442136 - DNA, 201 bp, Homo sapiens
ggtgagataatcaacaactagccccaactagtaatttgcaacagaaatgaatgtttcttagtcaatcatcttctgtttcccccttcctggtggtgacatgrtttgaatcagccagtctgggaaaagccatgacacacgggttgacctcttgaaagcagttaacttggaaggaaaaggaatgattcttaaacccagtgaacc

SEQ ID NO: 442137 - DNA, 201 bp, Homo sapiens
aaaattagccaggcgtgggtgtggtggtgtaagcttgtaatccccgctactcaggaagctgggacaggaaattacttgaacccaggaggctgaggttgcastgagccgagaccacaccactgcactccagcctgggcaacacagcaagattccatttcaaaaaaaaagagttcagggccgacatttccaagcccgatgtgt

SEQ ID NO: 442138 - DNA, 201 bp, Homo sapiens
ttgtgtacttttgaaagtaagtaatacttcaataaaaagaaagaagaagaaaagaatggatgaatacccttacacccaccacctagattctacaatgaacrtgtccctgttggtgtttttttctggtatctagctattcctttacccgtccatcaggcattatcattattactgacgataaatgatatttctggcatgcag

SEQ ID NO: 442139 - DNA, 201 bp, Homo sapiens
gttgcactgagccgagaccacaccactgcactccagcctgggcaacacagcaagattccatttcaaaaaaaaagagttcagggccgacatttccaagcccratgtgtatcttcaaaatcagaagatagacacaaccagctgccgtttttcaagcatcaaccatatgcccaggtgctcagctcaacgcggcatgaattagcc

SEQ ID NO: 442140 - DNA, 201 bp, Homo sapiens
aacacagcaagattccatttcaaaaaaaaagagttcagggccgacatttccaagcccgatgtgtatcttcaaaatcagaagatagacacaaccagctgccrtttttcaagcatcaaccatatgcccaggtgctcagctcaacgcggcatgaattagccccacgagataaaaatggtcctactatagatgaagcccaaagag

SEQ ID NO: 442141 - DNA, 201 bp, Homo sapiens
cagtactttgggaggccgaggtgggcggatcacttgaggttaggagtttgagaacagcctgtccaacatggtgtaaccccatctctactaaaaatacaatwatcagccaggcatgatgtcatgtgcctgtagtcctagctactaagaggaggctgaggcaggaggatcacttgaacctgggaggtggaggttgcagtgagc

SEQ ID NO: 442142 - DNA, 201 bp, Homo sapiens; identical to SEQ ID NO: 117290

SEQ ID NO: 442143 - DNA, 201 bp, Homo sapiens
caatggatcgtggcattacagggtcctgtctttcaggtctcctaatagatgctgtgacaagcctagcacctcacaggtcagagggttccgcatggaacccstgaaaggggcagaggccaagggagccagtttaagagacagaaaaataagcctactccaaggagcacagaaacactgtccacccatgggcacacatacaca

SEQ ID NO: 442144 - DNA, 201 bp, Homo sapiens; identical to SEQ ID NO: 117291

SEQ ID NO: 442145 - DNA, 201 bp, Homo sapiens
ctgttgaacccccgaccctgcaatgtgatggtatgtggaggtggggcctttgggaggtgattagggtttgaggaggtcatgaagttggggcccccatgacrggataaatgtcctcataagaagagaggccagagtgctctctttctctaccatgtgaggacacagtgagaaggtggctgtctgcaagccaggaagagggcc

SEQ ID NO: 442146 - DNA, 201 bp, Homo sapiens
tcgtggcattacagggtcctgtctttcaggtctcctaatagatgctgtgacaagcctagcacctcacaggtcagagggttccgcatggaacccctgaaagrggcagaggccaagggagccagtttaagagacagaaaaataagcctactccaaggagcacagaaacactgtccacccatgggcacacatacacacgtacag

SEQ ID NO: 442147 - DNA, 201 bp, Homo sapiens; identical to SEQ ID NO: 117292

SEQ ID NO: 442148 - DNA, 201 bp, Homo sapiens
tcttgaacagaacgagccaaggtttgaggctcttgctgatctgttaggttgattcctacttactgggttgaaagcgagaaacaaatgtaaaagtttccacyctcctcccccagcaagccaagggctgtcatgccgggtcctcctccccatcaggccttcactcttgggtcacccctagtccctggagctcctgcctggcac

SEQ ID NO: 442149 - DNA, 201 bp, Homo sapiens
taatgatgaggtgatccgtggccagcgtgaagatacgcagaaagcatggactcctgagccctgggactgcagtctgaaagcagcggaaacacttcggaccygggcaccttgcgcacctcgcttctttagctgtccttggcctcgatttccttatctgtagagtggagctcaccagattgctaggagaactacagaataaag

SEQ ID NO: 442150 - DNA, 201 bp, Homo sapiens
tgggtagtaaattagaggtgaatgtcaagtaattataccttttccagtaatgttttatttctttcacttaaaaaaaaggcaaagcaaagaggacaacatastaacaatgctctagtcggggcggtagaaatgcgattttatgatactaatctttgtggcttttgcttcctgtttgcttgtttatttgttaaccaacctgga

SEQ ID NO: 442151 - DNA, 201 bp, Homo sapiens
ggaaaagctgggtgagagtcggcacatcctgaaggaggcggcgccgtgccccagaaggaggcagacaggaaagccaatcagtgtgtgttgaatgacagcaygaatgagtcaaacccctcctgggtagggggcaggtggcagacagccgctgtctttgtgtcactccctgcccctctgaatctcccctgccccgctgacatg

SEQ ID NO: 442152 - DNA, 201 bp, Homo sapiens
cttgacatcagtaggtggtgaagccacatgtcctactgattgggtatgctaaattgtgtgtttattctttttacttttcaaaattcaaaaagaagaaaagyctatcacagtatgcagtgctcactaaatggcacccttctaacaaaaatccaggcccaggcaccccatggctatgccagaagacacccctctggcctctgg

SEQ ID NO: 442153 - DNA, 201 bp, Homo sapiens
atagtaatcgttggcacattgtggagaaatcacaaccttcacgcattgttggcgcgaatataaaagggtgcagccaagttactatatgatccatcaatttyactcctagctatatatgcagaagaatgaaaaatagggacttttaaaagggacaccagcgcacccgtgttcagagaagcattactctaagtagccaaaagg

SEQ ID NO: 442154 - DNA, 201 bp, Homo sapiens
gcctctggctacttcaagtgagaaggagaactctactgggcactgcatagaccctcagggagctctgggtgtgcttcagtggatggagcagcactgaagckgtgtccctcctgtgtcaatccaggtgtggccacctggcttagggctctgatgacagggcccaacccaccaatcacactccaggaaacccagtgacatcat

SEQ ID NO: 442155 - DNA, 201 bp, Homo sapiens
gggctagaacaggttccgtaacagcaaaatgagatgacgtgcagccaggtaagtggactgttctactcctgagatctctggcctcagttcccaggactcasaaactctgagagaacaaatagctcaccgctgggtctgcattttccagggaaaaaatggcttcagacagagaagacggtgattctgtttggccaggactgg

SEQ ID NO: 442156 - DNA, 201 bp, Homo sapiens
aagtgaaaggacagctctgagccagaaagtagaaatctggaggtaaacatgaattcgattatacacccatatttgccagtctgggattctgcaaacttctmaagcacctggtagtggcctcctggaggtgtgttgtgaacggttctgcagctgcctctgggctcaacaggaaagagtggtgattgattattgatgtctgcc

SEQ ID NO: 442157 - DNA, 201 bp, Homo sapiens
gggccaggggggccacgtgtctgcacacaaagctgaaggtggtccctccaccagcaatttgtctatctttgctaattagaagctcatgcctccttctttgmtttttcctgccccacagaggaatcttggccatgctgcctatagcttttggcaaggggcgagggcacgggaaagagaaaacacaaatggcatctggcaggg

SEQ ID NO: 442158 - DNA, 201 bp, Homo sapiens
aggctgtgtttagaggtctctctctctccccttggcctgagcaccctccccactgccgggtgaaaggagccacagggcgtcacagttgcctcccctgttcraagctggcgccgggacaggcagtggggctctgtttggaatatatgctcttcatcagacgactctgaaacaatcaccctttctggcccgagaggaggaagg

SEQ ID NO: 442159 - DNA, 201 bp, Homo sapiens
tggaaggaaagggcaggagaggttcactgcctccttctgactagtgttccctgcggccctgcatggactccaccccggtcatgctctcagatctgctagtrcagccctctgattgtaaaaataaagcacataggccaggcgcggtggctcatgcctgtaatcccagcacttagggaggcagaggcaggtggactgcctgag

SEQ ID NO: 442160 - DNA, 201 bp, Homo sapiens
atgtggcagctgaacagaataaggtcagtctttggttattagaaccagtgactgagtggtgaacccaaaggagtccattaaaggagaaaattaaaacatgraatagacatttcgtttttgctaaaagtatgtaaaggtgtatatgttctccatcttttgtagtagagatgaggctttccctttgcagacggcctctgggtc

SEQ ID NO: 442161 - DNA, 201 bp, Homo sapiens
actccggggctggccccaggggatgggggacggctgttttactagtcaggcatggcaagcccagggacccctggaagtcaccccactggggtcccactgcktaccatgctggcgaacagctccccgtcatcgtcgcaggccacccctccggggctgtagagctggaaccagccatctttgccggcccgcacgctcagcagg

SEQ ID NO: 442162 - DNA, 201 bp, Homo sapiens
cctcccaccttggcctcctgagtagcggggaccacagatgtgcaccaccacgcctggctaattaaaaacattttttctgtagaaacgaggtctcactgtgytgcctagtcctcccatttttatttatttttattttatttttggatttgttagcatgatttaatcaattattccacattataaacatatattaaattatca

SEQ ID NO: 442163 - DNA, 201 bp, Homo sapiens
catgttagaatcgctcggaaaaggctatggcccagacctcccccagaccaaagccatcagcgtctctggggtggggcctgggttttgggggttacgaagawccccaggtgatcccattgtgcggccagggctgagaaccacacatgcttatgtggacctggcacaaagtaggcactcaagaaatccaagctttcatcatta

SEQ ID NO: 442164 - DNA, 201 bp, Homo sapiens
ctactgtggtcgttgctctatctcctgcacctagaacagctccagaaacacaagaggctttcaataaagaggcacaaaagaatcatgaggctggcccagcrtgaaataagtgaccactgatgctggtgtcataataaatgttcaccttcaccccactcttgggggtcactcttaccccaagcccacctaggccatgttcgg

SEQ ID NO: 442165 - DNA, 201 bp, Homo sapiens
agctcgccgtgaccgcccgggacagccttgcttagcagaggccaccatttctcaagaagtcacgctggggctcccaggtagagcagtgaggctcaggaggmaagggagggtggggagggggcaccccaaagtagcccccacaccccccccggttcactagaagcctcacccctgcagggcctgttctggttctcagggccc

SEQ ID NO: 442166 - DNA, 201 bp, Homo sapiens
taatcctccctgcaacccagtgaggtagacactattatgcccagtttagagacagggaaactgaggcacagggactctcagcgggtgacccaaggtcaccmactaggaagtggaggaagtggaggaagaggaatttaaaacccatgcagactggctctggaatatgagcccttaaccccctacggtcgcactctctcagct

SEQ ID NO: 442167 - DNA, 201 bp, Homo sapiens; identical to SEQ ID NO: 117295

SEQ ID NO: 442168 - DNA, 201 bp, Homo sapiens; identical to SEQ ID NO: 117296

SEQ ID NO: 442169 - DNA, 201 bp, Homo sapiens; identical to SEQ ID NO: 117297

SEQ ID NO: 442170 - DNA, 201 bp, Homo sapiens
ggcttttcactgatgaccttgaaagctgtctgatttttcactgatgaccttggaggccgtctgggtttcaccgatgaccttggaggccgtctggtttttcsctgaagaccttggaggccgtctggttttccactgatgaccttgaaggctgtctggcttttcagtgatgaccttgaaacctgcctgatttttcactgatga

SEQ ID NO: 442171 - DNA, 201 bp, Homo sapiens; identical to SEQ ID NO: 117298

SEQ ID NO: 442172 - DNA, 201 bp, Homo sapiens
tgaaggctgtctggcttttcagtgatgaccttgaaacctgcctgatttttcactgatgaccttggaggccgtctgggtttcactgatgaccttggaggccktctggtttttcactgaagaccttggaggccatctggtttttcactgatgaccttggaggccgtctggtttttcaccgatgaccttgaaggccgtgtggtt

SEQ ID NO: 442173 - DNA, 201 bp, Homo sapiens; identical to SEQ ID NO: 117299

SEQ ID NO: 442174 - DNA, 201 bp, Homo sapiens
tttcactgatgaccttggaggccgtctggtttttcaccgatgaccttgaaggccgtgtggtttttcactgaagaccttggaggccatctggtttttcactrtgctacctgacacatacttgggtatgtgtctatgcaaacatgagagaatttcctgaggacagatgcctagatgcttcgatatctattgccaggcatccca

SEQ ID NO: 442175 - DNA, 201 bp, Homo sapiens; identical to SEQ ID NO: 117300

SEQ ID NO: 442176 - DNA, 201 bp, Homo sapiens
cggcgatgagctgagtcctgaaggcagagctggctggccaagagcaagagcatgagagtgtccagggagagtgtccagggaagggagtggggagggcttcyaagcctggaacacggcacgtatctgcagaaaccaagggctgaaccgaagtagagctcctttaggaaaagaaagcagctcaatatgattgcagtcctactc

SEQ ID NO: 442177 - DNA, 201 bp, Homo sapiens; identical to SEQ ID NO: 117301

SEQ ID NO: 442178 - DNA, 201 bp, Homo sapiens
gtgcctctccttacatcgccacacacgtcagtgccctccaacacagaccttgtgtttttccatctagaagcgtgagggaccacaacgcttcaaggatgagratcagaaggccaaggtgttcctttcagctgtgagtcattttgaggcctcgctgacaggtgagagggttcagcctcacctgcccggtcaatccttcagccc

SEQ ID NO: 442179 - DNA, 201 bp, Homo sapiens; identical to SEQ ID NO: 117302

SEQ ID NO: 442180 - DNA, 201 bp, Homo sapiens
tgcccggtcaatccttcagccctagagcccagaataaagcacagcccccagtaggtttctctctgctggagtcatgcttctagtttaactgggagaagacrgtctggcacagggaaaaggctgagagctttgggacagggcactcctgccaggacaggccacgtggccatgggtcacctcctggcctcagtctccagctct

SEQ ID NO: 442181 - DNA, 201 bp, Homo sapiens; identical to SEQ ID NO: 117303

SEQ ID NO: 442182 - DNA, 201 bp, Homo sapiens
tcctccagggctgttgggcctggcacacagcaggccctcgaacaacgatgctcaggggagtgttcatcgcattttctgttactggaccccagcgccccacytggtctgtggtagctcctctgaaagatgttagtatgagcaacagctagagccaccatggcgcacactggcacggcacacacacaggccaggcagcagcct

SEQ ID NO: 442183 - DNA, 201 bp, Homo sapiens; identical to SEQ ID NO: 117304

SEQ ID NO: 442184 - DNA, 201 bp, Homo sapiens
cttcggtgcctacaatccccagacagcacagctgcaagcagctggggcaagcctccctctcccaactcccacacacggctgggtgggcaactgctcacctycttcggcagcagggcaacaacacagcccacacggagctctgcctgcgcctgctgcttggcatggagccggtgatcggtggagggaaaggcaaacaatgta

SEQ ID NO: 442185 - DNA, 201 bp, Homo sapiens
gcgcagcctcgagcttgagaactcctggctcccggctgctggcagaggccagctttgcttcttctcattctcttattttccttcttccccccacatcaacyctaggggattccagggaggagctcagagccacattacatggaagactagattcctctgtaatagctttgtggttttatttctgctctgagaccattacat

SEQ ID NO: 442186 - DNA, 201 bp, Homo sapiens
ttatatttcgtacttcgtttaatcctcacaaagacttgaggaagtgggcgacattcccatctgcattttatggtccagacaacaggtaacgacaggtaackacaggtaacgacaggtaacgcggagggtgagtgaccccagagctccggcctgtgcacctgggcacaataaccccttgcacagatggccccagtccagctc

SEQ ID NO: 442187 - DNA, 201 bp, Homo sapiens
agggcacctgcgcaatccaatgatttctcatatcctgggtttttcttctcttgttagttcaactcgtgaggacttcaaagacgcagatgcacaaggcttgscttggcacatgcaaagaaggaaggaaagaaagaaggaagggagggaggaagggaaggacagagagggagggaaaggaaacagtgggccggggagggcaca

SEQ ID NO: 442188 - DNA, 201 bp, Homo sapiens
tcactgcacgatcagatgagcaaggctcccgactgatgtgccctggacatttagcatgaaggagaaataaacctcaggtgtgtggagcagctgcgctgccygttaccgttgcacagcccagcctcactggctgattcaaggggtcaaaagagcagggtctaaagcagcactttccaaactgtctgtgggaaaagacccatt

SEQ ID NO: 442189 - DNA, 201 bp, Homo sapiens
cccttggccgaaggagggctttctgtaatgccatggttaccatgccattcccccactccctaaactgagcctgccatcagctaaaatgtcttaaggcccckcttgaagggtcttagcccttcaccaggcacccccgagcactacctcttcatgaaaccccctctggagacccctgctccatcccctcctgccctgcaatgc

SEQ ID NO: 442190 - DNA, 201 bp, Homo sapiens
gtccgtccagtgggagctggagccacggaggagttgcaggtgccatcagagtggcctctggagactgagggaggtagaaacactggcttctccattcctcytgccttccaacctcctagcagctcctcccacgggttgaatccagtgacacgggagcctgggacacaagaacctacagagattggctcccgaccacaccca

SEQ ID NO: 442191 - DNA, 201 bp, Homo sapiens
agcaacccagagattagcaacagcaggaagctgcccccacccgcaggccagagagacacaggggaggtggcaggactgaggcccaggggctggaagcgccracagaggacaggccatagggtccgtccagtgggagctggagccacggaggagttgcaggtgccatcagagtggcctctggagactgagggaggtagaaac

SEQ ID NO: 442192 - DNA, 201 bp, Homo sapiens
ccttcattgctagatcagtcagagtccaaccaggagatggaagccacttgggcactggaactgagagactccaacgcagggcactgggtacacaaggaagragatcccagaacccaaacgggggcaatggagcaacccagagattagcaacagcaggaagctgcccccacccgcaggccagagagacacaggggaggtggc

SEQ ID NO: 442193 - DNA, 201 bp, Homo sapiens; identical to SEQ ID NO: 117320

SEQ ID NO: 442194 - DNA, 201 bp, Homo sapiens; identical to SEQ ID NO: 117322

SEQ ID NO: 442195 - DNA, 201 bp, Homo sapiens; identical to SEQ ID NO: 117324

SEQ ID NO: 442196 - DNA, 201 bp, Homo sapiens; identical to SEQ ID NO: 117326

SEQ ID NO: 442197 - DNA, 201 bp, Homo sapiens; identical to SEQ ID NO: 117328

SEQ ID NO: 442198 - DNA, 201 bp, Homo sapiens; identical to SEQ ID NO: 117330

SEQ ID NO: 442199 - DNA, 201 bp, Homo sapiens; identical to SEQ ID NO: 117332

SEQ ID NO: 442200 - DNA, 201 bp, Homo sapiens; identical to SEQ ID NO: 117334

SEQ ID NO: 442201 - DNA, 201 bp, Homo sapiens; identical to SEQ ID NO: 117335

SEQ ID NO: 442202 - DNA, 201 bp, Homo sapiens; identical to SEQ ID NO: 117336

SEQ ID NO: 442203 - DNA, 201 bp, Homo sapiens
cacgtacaggcacacctggcaaaaacacctacaactcaggagccaggagctgcaaagttctgccggtgtgcaggcgctggcttttagttcaagacgccttracgtttggagggagccaagggatgagctgggtgttacatccaggctcctagctaaaggaagctgtgtctgagcgaggttcagggttacctggtggtgact

SEQ ID NO: 442204 - DNA, 201 bp, Homo sapiens; identical to SEQ ID NO: 117343

SEQ ID NO: 442205 - DNA, 201 bp, Homo sapiens
gggaaactaaatgagcaacctgaaaagttcctagactgcagcaggtgtgcaggagacgctcaggccatgcacagtccttttcgttttctccagtcagaccyggtttacagctttcttatacttggggaataaaatcacccaaagttaaacaacctttcctcttgatagctgctggctccctccaagggaaacgaggggcac

SEQ ID NO: 442206 - DNA, 201 bp, Homo sapiens; identical to SEQ ID NO: 117345

SEQ ID NO: 442207 - DNA, 201 bp, Homo sapiens
actagaaaccaccccaaagctggggccatgtcaccttcattgctagatcagtcagagtccaaccaggagatggaagccacttgggcactggaactgagagrctccaacgcagggcactgggtacacaaggaaggagatcccagaacccaaacgggggcaatggagcaacccagagattagcaacagcaggaagctgccccc

SEQ ID NO: 442208 - DNA, 201 bp, Homo sapiens; identical to SEQ ID NO: 117348

SEQ ID NO: 442209 - DNA, 201 bp, Homo sapiens
ccaggccctgccctcagcttcccgtcaggtgggcttcccctctctgagccccaggcactttgccttggtgctggggactttgagggttgtggtcccccagygccagctcccaacacagaacatggaacagactcattcccgaggcgccgcagccactcatgaggtggaagcgagattgtgaccctcgctgggaggcatctg

SEQ ID NO: 442210 - DNA, 201 bp, Homo sapiens
ggtagcctggcttccaagtctgggcatttaaccatgaccttctcctgccaatggcagaagatcatggtaaacggcacccagcagacctaggctaaacatcrcagcgggtgaaacaaaaccttctcagctccaccccacactagctgtgagtctttggacatctcagcctcaattttcccatctgtaaaatggggacaataa

SEQ ID NO: 442211 - DNA, 201 bp, Homo sapiens
ctaggttcagagcagaacggagaggaaggtagagacctttcccagataccccctgcccccggcacgcacagcctccccaacgatcactgcacatgctcctwttaaggatggggtgggggcgttccaggcggccctgaaatgtaccctgggcacgcaggccagcaggcatgtggggcactggaaaaggaatcctggtggaga

SEQ ID NO: 442212 - DNA, 201 bp, Homo sapiens
gcacacgtggctagtgactactatactagattgcagtccaggtaaaggctccaggggtcaagcctaggcttgggtgttaaatggcgcccccaaaagttggyagaaaatggagggtaggtgaaacgaagcatgtcttatttctgagacacactcactgctcaagaggagtcaggacactgacagctcacattcttgaacaac

SEQ ID NO: 442213 - DNA, 201 bp, Homo sapiens; identical to SEQ ID NO: 117354

SEQ ID NO: 442214 - DNA, 201 bp, Homo sapiens; identical to SEQ ID NO: 117356

SEQ ID NO: 442215 - DNA, 201 bp, Homo sapiens; identical to SEQ ID NO: 117358

SEQ ID NO: 442216 - DNA, 201 bp, Homo sapiens; identical to SEQ ID NO: 117359

SEQ ID NO: 442217 - DNA, 201 bp, Homo sapiens; identical to SEQ ID NO: 117361

SEQ ID NO: 442218 - DNA, 201 bp, Homo sapiens
gacagccggcctgagatgcagaaacaaaggcctcacctcttgcctggggtcttcggcgaacctctgaatcacgtacttcagttccctggaagagacgaggyggccggagttactgccggggtctggaactgagtgggaggtgtgggaaggggaggggatggtgtcaaggaagaacgggccagggagctgggcaaggcggtg

SEQ ID NO: 442219 - DNA, 201 bp, Homo sapiens
gtgtcgtttttatacgtcctatgaagggaatattctgtctaactggcttgttgttgtcgatgttgaccttgatcacctggctgaggctgagtgtgtctggyttctccactgcaaggctactcctgcccccttccatacagtgctctctggaaggacctcgctgtgcgcagcacacactaaaggagtgcaaagtcgcgctct

SEQ ID NO: 442220 - DNA, 201 bp, Homo sapiens
cctttgtgctcacacacctcaagtacatattatgagaaaggagctgggaccacagccaaagccacagctggaaccagcatggcaggggcctcaggtccacycttctgttgctaccccacgcagcaggtcctcagacacctatagatcagcttggcctccaaggcagaaacccatggatgctcatttggggaaggcccgtca

SEQ ID NO: 442221 - DNA, 201 bp, Homo sapiens
agcaagggtgtgcctgagtagagaacagcccagagaacccaattcctctgctgacggagttctgagttaaggggtcaggactttctttgggcagcccaggstctgctctcaaattgaagcagctacagcttagcaagtactagcaaaaatataatcacagggattttactttttgtgtgtgtgtttgctttgagacagggt

SEQ ID NO: 442222 - DNA, 201 bp, Homo sapiens
cagcaagggtgtgcctgagtagagaacagcccagagaacccaattcctctgctgacggagttctgagttaaggggtcaggactttctttgggcagcccagsctctgctctcaaattgaagcagctacagcttagcaagtactagcaaaaatataatcacagggattttactttttgtgtgtgtgtttgctttgagacaggg

SEQ ID NO: 442223 - DNA, 201 bp, Homo sapiens
gtcctcttggttcttttccagacttcgttctaggccaccatggcttttcgcgggaagggggtttggctgggatctaaatgaggcaaccacggttgggctgrgtgactcgagaatttggatttgtcagactggatgagtcagttgcttggccggggcccaggtaagcttgaggtatcgtgagggaagccctgcttctggagt

SEQ ID NO: 442224 - DNA, 201 bp, Homo sapiens
ggagcgtgttcgagaggaacttaccacaatgatgttttcatgctcctgggtggtcaagtttgtgttctaaaggattgaatggagacagcaggaggaaaacraaacaaaagaaaattaagaaaacgagcatttggatttcaagatccacagttttgaaacatcttcagcgtcacagaccaactgtcactgtcattttttctt

SEQ ID NO: 442225 - DNA, 201 bp, Homo sapiens
tcacaacccaaagttgttctccttttctcttcttgccaaattactcgatctcagaaattccttagcaagacaagactgaaatgcaatctccaaccccatcrggcccagtggaatttcaccaacacaaattactgcgttctccaggaaaacggaggacgctggcctgaagtttcagattctcagtaggtcttagaaagctcc

SEQ ID NO: 442226 - DNA, 201 bp, Homo sapiens
cctgtaattccagctactcgggaggctgaggcaggagaattgcgagaacctgggaagcagaagttgcagtgagctgagatcacgacactgcactccagccygggcgacagagcgagacaccgtctcagaaaaaaaaaaaaaaaaaaagaaccagagtcaaacctaagcatcaatgcccatgccacacccatcctgagatcc

SEQ ID NO: 442227 - DNA, 201 bp, Homo sapiens
aaatcagaacaaactggtcaccgtactccggggcctgtgttctttagctgtaatatttaggatgtgctgaactagggcagctctttaatgaaacatcaacraggaggccagagtagatctctggctgcttaacagactgcctgggaaagccacatcccacgacatcacgcaaacatatctaaggacagagagacagggcgt

SEQ ID NO: 442228 - DNA, 201 bp, Homo sapiens
ctcccgggttcaagcgattctcctgcctcagcctcccaagtacttgggattactggcgcccacgaccacgccaggctaatttttgtatttttagtagagasggggtttcaccatgtgggccaggctggtctcaaacttctgaccccaagtgatctgcctccctcggccttcccaagtgctggaattacaggtgtaagccac

SEQ ID NO: 442229 - DNA, 201 bp, Homo sapiens
gccctccatcggctgggtcactgcacgatcagatgagcaaggctcccgactgatgtgccctggacatttagcatgaaggagaaataaacctcaggtgtgtkgagcagctgcgctgcctgttaccgttgcacagcccagcctcactggctgattcaaggggtcaaaagagcagggtctaaagcagcactttccaaactgtct

SEQ ID NO: 442230 - DNA, 201 bp, Homo sapiens; identical to SEQ ID NO: 117397

SEQ ID NO: 442231 - DNA, 201 bp, Homo sapiens
tggcctccacacaggcccagttctctcctttttcagaacacatgagggattccacttcccttccctcttcacccacccctataaattataggtgtggctaygtgacttgtgctggccaatgaaccatgagcagtgatgtgtgtcctgtacaagtggccacacccccgtcctgcctccaggacagcagaagcacatgttgag

SEQ ID NO: 442232 - DNA, 201 bp, Homo sapiens; identical to SEQ ID NO: 117398

SEQ ID NO: 442233 - DNA, 201 bp, Homo sapiens; identical to SEQ ID NO: 117399

SEQ ID NO: 442234 - DNA, 201 bp, Homo sapiens
cagccagccttgtggtcaggattagtacttttaaaaaccacacagatgaggaaaccgagactcagaactacaggggaacagttatgtcctgatcctccagwcccctccctggataagagctgtcacctaaggactgaattcatgaagtcattcaacaagcagaggcctcctaggtgcaaccctatgcccagacctggggat

SEQ ID NO: 442235 - DNA, 201 bp, Homo sapiens
gcctggccaactcttcagggcttctgactgccgtgtgcccaggccaaagtgatcccacagccagaaaaaagcatgcgctctgcagggtcacaggtgttcayggtgcacagctggcagccctcacgcgatgctgagggggtggccagctgcagcttctgccagaggattgttggtgttctctgtgcacagaagcctatcatg

SEQ ID NO: 442236 - DNA, 201 bp, Homo sapiens
gtgctgggattacaggcgtgagccaccactgctgccatatatctttttttaatgatgacagaaggaaggacacctgctatgcagacgctagcctcactacrccccacccatatggacattcacaggtgcccgtggttaacattcatcaagcagttaccatgtggccagcaccatgctaagagctttatatataatccctca

SEQ ID NO: 442237 - DNA, 201 bp, Homo sapiens
acacacaggcagggaactgtgcaggctgagggcacatcagcatcattccggtgggctctccagctgggtggtcctgcccatgccacatctctctgcacctscttgcgcatctataggatggagctaaagagagccctgtggggcaatgacagctgaggacacaggaggtctgccacacggggagcacacggtgttggtgac

SEQ ID NO: 442238 - DNA, 201 bp, Homo sapiens
cacaggtgttcatggtgcacagctggcagccctcacgcgatgctgagggggtggccagctgcagcttctgccagaggattgttggtgttctctgtgcacasaagcctatcatggccccgagaggtcaagagacttgcccagagtcaagcagctagaaagggacaattcaggaatgaaaactggctctggccactgcaaagc

SEQ ID NO: 442239 - DNA, 201 bp, Homo sapiens
acagctggcagccctcacgcgatgctgagggggtggccagctgcagcttctgccagaggattgttggtgttctctgtgcacagaagcctatcatggccccragaggtcaagagacttgcccagagtcaagcagctagaaagggacaattcaggaatgaaaactggctctggccactgcaaagctctttccatcacatcagt

SEQ ID NO: 442240 - DNA, 201 bp, Homo sapiens
agtggaggccaggtaaccagaaggcggtggaagcagcagggggagggtgggctacggctctgcgggtgcggggggagggtgggctacggctctgcgggtgyggggggagggtgggctacggctctgcgggtgcggggggagggtgggctacggctctgcgggtgcggggggagggtgggctacggcgttgtgggtgcgggc

SEQ ID NO: 442241 - DNA, 201 bp, Homo sapiens; identical to SEQ ID NO: 117404

SEQ ID NO: 442242 - DNA, 201 bp, Homo sapiens; identical to SEQ ID NO: 117405

SEQ ID NO: 442243 - DNA, 201 bp, Homo sapiens; identical to SEQ ID NO: 117406

SEQ ID NO: 442244 - DNA, 201 bp, Homo sapiens
ctcatccctctacacccagttcaaatgccccctgtctggggagcctgctttggccccccaggccaaataagttcctccttctctgggctcccagtcctccrcggttgcctctaatttagccattatttccgtaatcatttgtttatggctctgtctccccaggggctgaggggctcttcacgcatggggcctccccgagca

SEQ ID NO: 442245 - DNA, 201 bp, Homo sapiens
gataattcatggagctgttcatttggttgtgtacttttgaaagtaagtaatacttcaataaaaagaaagaagaagaaaagaatggatgaatacccttacasccaccacctagattctacaatgaacatgtccctgttggtgtttttttctggtatctagctattcctttacccgtccatcaggcattatcattattactga

SEQ ID NO: 442246 - DNA, 201 bp, Homo sapiens
tccccatcccaagctcctcaacccagtctcctctgcggaatcctcttcatcctgcaggcagcatattccatttctggggagtaggacatgggcatctttgrgggcccatgagtctgtccaccacacagatctcactgccccacagtttcacagcccatctcctcgaagaccaacaagccccaaccaaactgctgacagatc

SEQ ID NO: 442247 - DNA, 201 bp, Homo sapiens
ggcctcgaggcacagcaggcttggcgtgtccaaggaggcagcccagatcacaccatcagtaagggagggaggctttcacttgccatgctgtctgggcagasaggcgcaggaggcaacacggtgtgtccaaggtcacacagttaatcattgagagatcagccaagcatggcacactggagtcagggcacagagctgcatccc

SEQ ID NO: 442248 - DNA, 201 bp, Homo sapiens
cctctgtcctcagagccaccatggtactctgagaatgaatgaatgaaccaacacatgcatgcatgaatgaatgaacagaccaacaaagaacaatgaaaagraaaccgaaacttagtgcccggaagaggaataaaataagggaagcaccggagagtcggcaggcactgcctggagaagcctctggggggaccacagctggag

SEQ ID NO: 442249 - DNA, 201 bp, Homo sapiens
tgccacaggcaacaactgcgagttgctgggcaggaccggagctgccgcccccaaaactgtttcagattcagagggcgctgctgggtaaaggaggggtaaargactggacggggaagctgagtctcctccaccacttctcaggaagcctttggggagccacctctgctccccgggcagaggccacatgccagcccagtctgc

SEQ ID NO: 442250 - DNA, 201 bp, Homo sapiens
ggtcccacttgggcgactcacacccagggaaacaagggccctgacacctgctccgtggagctcctgggcagctgtgaggagtgagcaccccctcgtccccsatcagaccttgagaactataacacaaagagggtggcagccccgcagcaggatgctgacgtcactgtcgtcaataccttgatagaggcccaagagacaaag

SEQ ID NO: 442251 - DNA, 201 bp, Homo sapiens
tgatgagggcggccatcatggtcccacttgggcgactcacacccagggaaacaagggccctgacacctgctccgtggagctcctgggcagctgtgaggagygagcaccccctcgtccccgatcagaccttgagaactataacacaaagagggtggcagccccgcagcaggatgctgacgtcactgtcgtcaataccttgat

SEQ ID NO: 442252 - DNA, 201 bp, Homo sapiens
tgttacccacagatattaaactgatcacaacccacacacgagcacacagaaaacaaaggcagtggcttttatttttccctctgagctggaagaatatcaasggttcccttatcgacttcaaagcaataaggacttaggagtgttgagatgctattcaacaaatatagcaaataattttaaaggaaacaactttggcttcat

SEQ ID NO: 442253 - DNA, 201 bp, Homo sapiens
tgcacagaaacacctacctagagaggaatcatgccgaaaattttaatccaaatcaaccaaatctctagatcagtgctctccaatagaaatacaatgcaagmcacatgtttaaaactaaatattctagtagccacattttaaaaaagtaaaacaggtgaaatcaatgttaataatatattttaacccaatatatcaaatata

SEQ ID NO: 442254 - DNA, 201 bp, Homo sapiens
ggcccaggaggacggggtgacaggaggcgactgagggcctggctcctccaaccttcccaagatgtgcacgtgtgtttcttaaaacgcccctgccttccacsctccgatcctttttctttcccggatttcacttgctggcctagtgccggtgcagcgcagccctcagtggtgaggcaccagccctgctcaaccctccctgct

SEQ ID NO: 442255 - DNA, 201 bp, Homo sapiens
cccactggaacatgagcaggaaaggtgatgggggtggtgatggatagatcaggcagccagcaccagaacctgcccatcaaccacagcaagaaagacccccmccaaggcatgagggaccctggagtgaggcaactggaagtgcacagaaacacctacctagagaggaatcatgccgaaaattttaatccaaatcaaccaaat

SEQ ID NO: 442256 - DNA, 201 bp, Homo sapiens
tcctgctccctctcaaaatatttatttcctaacagccagagcatgctttgaaaagcatgactcgctgctctgctgtgacctgtgagggctttttccatccrgccccagcccattccctctctcagttcctggttacatttgctgcaaagccaggcctcgcccatctcttctgtctcaggaccttggcacttgcttttcctc

SEQ ID NO: 442257 - DNA, 201 bp, Homo sapiens
tcacaaactgtaggagttgtgacggaaaataaacacagaatatgcaacagaaatccaatgtggcccacaaagccccaaatatttgctatctggccctttgyagaaaacagtttgccaaggtctggctttaaaagtcaaattccagcctaggagtaagcatgcaaagaagatgctcaacgtcattagccctcgggaaaacgc

SEQ ID NO: 442258 - DNA, 201 bp, Homo sapiens
gtcacattaccttcagatataatgcaggcctcataactgtcccatgggtgttacccccaaactgcccttttggccgccaagtcttcaacatcaacctaaamcccgctcataacctctcagctccctgctggtgcactccccacagagacaccctgggtcaaacacagccccctggccttattccccatgcctgctagccca

SEQ ID NO: 442259 - DNA, 201 bp, Homo sapiens
tggtgaagccccgagagcctgtctgaattatgaattttttccctttgaagtcagatgtcctcaaagaacccttatgaaacggtttattgactaacatggartatgcaaaaatgtttatgtgcctgaagaggcattcctctgccaagtatgtcccgggggtgtggctctgccattgacaagttaaggtccttcgcaagaaaa

SEQ ID NO: 442260 - DNA, 201 bp, Homo sapiens
ctggttacatttgctgcaaagccaggcctcgcccatctcttctgtctcaggaccttggcacttgcttttcctctcgcccttggtatttctggcttcttacrttttgggtctcagctcctgcggcctcttcatcaaaggcaccatccctgatcaccccaggccacacaggccttcctatttccaattacttccctgctgctt

SEQ ID NO: 442261 - DNA, 201 bp, Homo sapiens
tggaaatggggtcttcgcagatataattaagatgaggtcatactggattagagttggccctaaatccagtgactggcgtcgttataaaaaggccatgtggrgagagagagagacacacacacacacacacacacacacacacacatgctccagagagacctccacgtatggaggcagagcctggatgccaaggcgcatcaa

SEQ ID NO: 442262 - DNA, 201 bp, Homo sapiens
gcaatgggaagatgcagcctgcatttcctgcccaaagcacattatgctcctagctctccctcttcctgtcactgtgaaagggaagctcctaggtgggggargggcaggggcttccccaacacacaccgtcctcctgggacacgcatgtccaccaggctcaagtgggaacagaggtcctctctccagaagctacttagcagg

SEQ ID NO: 442263 - DNA, 201 bp, Homo sapiens
tcactatgatgaggggacagggacaccaccctggttggaggccccatctgtgccacgctagggaaagcagcgcctgcaccaggcccccggaactaaagtgyccactgcggggctctgtcaaggggccaggtcaaggacacagggacactgcctgtgccggctgagggccatatgtggtggctgccgtgctcggcctcttcc

SEQ ID NO: 442264 - DNA, 201 bp, Homo sapiens
aattcatacagaggacaagaactccagcatggaaggctcatggcccgcacacctgtatcatggtgcacacacacacccacaacccagttacacacacactcacacacacaaacacacacccagcccaatttaaaactgcacctaagtttcagctgcatcatacatgctggctttcttctttttaaccttaccactgccctc

SEQ ID NO: 442265 - DNA, 201 bp, Homo sapiens
attcatacagaggacaagaactccagcatggaaggctcatggcccgcacacctgtatcatggtgcacacacacacccacaacccagttacacacacactcacacacacaaacacacacccagcccaatttaaaactgcacctaagtttcagctgcatcatacatgctggctttcttctttttaaccttaccactgccctcc

SEQ ID NO: 442266 - DNA, 201 bp, Homo sapiens
ttcatacagaggacaagaactccagcatggaaggctcatggcccgcacacctgtatcatggtgcacacacacacccacaacccagttacacacacactcacacacacaaacacacacccagcccaatttaaaactgcacctaagtttcagctgcatcatacatgctggctttcttctttttaaccttaccactgccctccc

SEQ ID NO: 442267 - DNA, 201 bp, Homo sapiens
tcatacagaggacaagaactccagcatggaaggctcatggcccgcacacctgtatcatggtgcacacacacacccacaacccagttacacacacactcacacacacaaacacacacccagcccaatttaaaactgcacctaagtttcagctgcatcatacatgctggctttcttctttttaaccttaccactgccctccct

SEQ ID NO: 442268 - DNA, 201 bp, Homo sapiens
agaccaacaaagaacaatgaaaaggaaaccgaaacttagtgcccggaagaggaataaaataagggaagcaccggagagtcggcaggcactgcctggagaascctctggggggaccacagctggagcagcagccatggtggcctgcaggggacccaggagcccacgctgcacgggcagaaggagctttctttgtagcccttg

SEQ ID NO: 442269 - DNA, 201 bp, Homo sapiens
gaactccagcatggaaggctcatggcccgcacacctgtatcatggtgcacacacacacccacaacccagttacacacacactcacacacacaaacacacamccagcccaatttaaaactgcacctaagtttcagctgcatcatacatgctggctttcttctttttaaccttaccactgccctccctcccgccaccccctga

SEQ ID NO: 442270 - DNA, 201 bp, Homo sapiens
ccggagagtcggcaggcactgcctggagaagcctctggggggaccacagctggagcagcagccatggtggcctgcaggggacccaggagcccacgctgcaygggcagaaggagctttctttgtagcccttgaggctgcagcagcagaggaggcggcggggcacctgtgtcggccaaggctcccagagcacaagccctgtgg

SEQ ID NO: 442271 - DNA, 201 bp, Homo sapiens
gaattcaagactttcagtataattgggacagtattgggcaaatcagaacaaactggtcaccgtactccggggcctgtgttctttagctgtaatatttaggwtgtgctgaactagggcagctctttaatgaaacatcaacgaggaggccagagtagatctctggctgcttaacagactgcctgggaaagccacatcccacga

SEQ ID NO: 442272 - DNA, 201 bp, Homo sapiens
acagggctactaacaatagtgtttcctcagaagactgtcaaaggattaaactaatccaaaccaagtgcttagctgagagcacataataatgttaggtggtrataacactaccattattgacattgtcatcattattattagcaaaaacatcagtgatgaagtgatgagggcggccatcatggtcccacttgggcgactcac

SEQ ID NO: 442273 - DNA, 201 bp, Homo sapiens
ccacagaactgtttccggactcagaggagcacaggggcacatagtgctggacacaggggacactccgtggccagagccgggcagagacagtctcgagggcrggcttcccacccaccctagccctcccaggccatgagtcagccgggaccacctgtggaggctggaaggggctgccagggagacaggccgagccagctgctc

SEQ ID NO: 442274 - DNA, 201 bp, Homo sapiens
gtgcccactggaacatgagcaggaaaggtgatgggggtggtgatggatagatcaggcagccagcaccagaacctgcccatcaaccacagcaagaaagaccyccaccaaggcatgagggaccctggagtgaggcaactggaagtgcacagaaacacctacctagagaggaatcatgccgaaaattttaatccaaatcaacca

SEQ ID NO: 442275 - DNA, 201 bp, Homo sapiens
tgcccaggctagtttcaacctcctgggctcaagtgatcctcctacctcagcatcccaagttgctggaactacaggtgcatgccatggtgctcagttctagracttctcactcaccaaggagcaggtcactcagcccacgcttctcacagcgcctcttgcctgtctcctgtctccctgctcagccctcccccatggcctccg

SEQ ID NO: 442276 - DNA, 201 bp, Homo sapiens
aaacaggggcctgcctagtcagacgtcaattcacattatcttttttttttttttttttttttttttttttttaagcacagtttcactctgtcacccaggcyggagtatagtggcaccatctcggctcactgcaacctccgcctcccgggttcaagcgattctcatgcttcagcctcctgagtagctgggactataggcctg

SEQ ID NO: 442277 - DNA, 201 bp, Homo sapiens
cacggtcctttatcctcatcctttatccacttggacgctcagtcccctctgctatgagatgggggagggatgtggaccccacagaactgtttccggactcagaggagcacaggggcacatagtgctggacacaggggacactccgtggccagagccgggcagagacagtctcgagggcgggcttcccacccaccctagccc

SEQ ID NO: 442278 - DNA, 201 bp, Homo sapiens
acggtcctttatcctcatcctttatccacttggacgctcagtcccctctgctatgagatgggggagggatgtggaccccacagaactgtttccggactcagaggagcacaggggcacatagtgctggacacaggggacactccgtggccagagccgggcagagacagtctcgagggcgggcttcccacccaccctagccct

SEQ ID NO: 442279 - DNA, 201 bp, Homo sapiens
tccccattccacagaggagaaaactgaggcccaaagaaacacactccaaaccagcatactcatagtatccccacaggccacacacacactcacacacacayaaaacagtcatcccacatgccacacacacacactcataaaatagtcaccctacaggccacacacacacacattcataaaatagttggcccatatgccaca

SEQ ID NO: 442280 - DNA, 201 bp, Homo sapiens
tctctctcaaatgtgtgaaaataaaaaaatcgactgaaagtgatttttcttcccaaggggcctttcctgcactccccatgttctctttccagcttggtctcacagtagcatctgactttcagcactttgaactcaagataatccaggcagcatttctcaaacacgagtgtgcccagaaatcccccagggtggggttacctg

SEQ ID NO: 442281 - DNA, 201 bp, Homo sapiens
acacacacataaaatagttaccccacaggacacacacacacactcataaaatagtcaccccatatgcaccccacacacacacacacacacacacacacacwctctctctctctgtcactccacacaccacacacacacccacacccactgtcataaaataatctccccacaccacacaccctcatacaaatgaccccacat

SEQ ID NO: 442282 - DNA, 201 bp, Homo sapiens
ctctctcaaatgtgtgaaaataaaaaaatcgactgaaagtgatttttcttcccaaggggcctttcctgcactccccatgttctctttccagcttggtctcacagtagcatctgactttcagcactttgaactcaagataatccaggcagcatttctcaaacacgagtgtgcccagaaatcccccagggtggggttacctgg

SEQ ID NO: 442283 - DNA, 201 bp, Homo sapiens
ggagggctgggaggaagagcagagctgctcagagaaagaggcaaagatgttcagggtctaatcccgcttgccttcttggtggccttggaaccttgtgcgamtgacttatcctctctacactcaggtttccccatctgcaaatgttgataagaacagaacctattcagtgagaggaagtaattcacaaaatgcagtgtccat

SEQ ID NO: 442284 - DNA, 201 bp, Homo sapiens
gagcttgagggaagggtcgtgtggtaagcaatgcctggggtgtaggcagggaagcgggtgaggggcagggaggagggtgagggggcagggaggagggtgaygggggcagggaggaggatgaaggggtagggaggagggtgaacgagttagggaggagggtgaggggacagggaggagggtggggggcagggaggagaatga

SEQ ID NO: 442285 - DNA, 201 bp, Homo sapiens
cctaaaacttaaagtataataataaaaacaaaagagagttaaaaaattcaagctgaggtggtggaatttctaaaggtcctcaattttgatgttccactgattttttttttttttcagttaaagacagagaaaagagaaaagaaacaaggaaggaaaagaaaaagaaaaacctcaaataggtggttgtaaataaagagggga

SEQ ID NO: 442286 - DNA, 201 bp, Homo sapiens
aagcccttttcaagaagctcccaggggcagcgcctcaatttgtcatcgctgcacaaacatctctgctgagttcagtgtggacagccaaaccagccacccarcagagaggagaatcaccaccggcgtcatttccgagcagcgactgtgccggcccgccgggcgccgtgcatctactgttgcatgcgatcgctgcggtaacct

SEQ ID NO: 442287 - DNA, 201 bp, Homo sapiens; identical to SEQ ID NO: 117451

SEQ ID NO: 442288 - DNA, 201 bp, Homo sapiens
gcagaagcagaggggttatgtcctgggagggctgtggagtcccaatctcagagaaaagcacggtgtgatcaaggaggaggtaggacagccccacagatctsgattgaaatctgctgggcaactgtaggcaagtcacttgatctctctgagccttggttctattacctgcttaacgacaatgaaccagaaatgacctagcca

SEQ ID NO: 442289 - DNA, 201 bp, Homo sapiens
gcccccagcactgactctccctcttgggtgtgtgccttctgccctccctttcttgacttgtgcaggcaccatcctcccctccaggtatctgccctgctaayctctctctctctctctctctccccctctttgggactctgccaccctctcttgttaggtctcatccccacttccttccctgagtctttgtccccctccact

SEQ ID NO: 442290 - DNA, 201 bp, Homo sapiens
cttgatgaacacggctgcactgctttctaaaaatgagtttattttggaggggggccagttctaggttcagagcagaacggagaggaaggtagagacctttmccagataccccctgcccccggcacgcacagcctccccaacgatcactgcacatgctcctattaaggatggggtgggggcgttccaggcggccctgaaatg

SEQ ID NO: 442291 - DNA, 201 bp, Homo sapiens
catccactctggcccctgctgtgattacacagagagagagggaaggagggagaggatggagagcggggagagtgagggagagagacagagcatgagagcawgggcgtgcaggaaacacaaaggacttttccccacctcctcctgtcctccgaagaaagctgagagaagttcctcatcatttcctttaggaaaggacgattg

SEQ ID NO: 442292 - DNA, 201 bp, Homo sapiens
ctccacaaacaggggccagcagcgtcagcagccacggccaggtctgtgctgataaatgcttaacatcaggctctctggaacaacaagccctgatcccggcrtgtgcggatttctgtgttgtgaacaatcccattttggctgattccacaccttcaaggggatgcccctgggccagagctggggagagacgggcacgatcag

SEQ ID NO: 442293 - DNA, 201 bp, Homo sapiens
aaattctatagacagaatcataaacaacaaacattctaagctgtttgtttgtagtttgggtcaaacctcctgatttgttggatcccttttttttctttttytaaaatttattattattatttgagacacagtcctactctgttgcccaggctggagtgcaatggcacgatctcagctcactgcaacctccacctcctgggt

SEQ ID NO: 442294 - DNA, 201 bp, Homo sapiens
accactgctcaatgaaataaaagaggacacaaagaaatggaagaacattccatgctcatggataggaagaatcaatatcgtgaaaatggccatactgcccraggtaatttatagattcaatgccatccccatcaacctaccaatgactttcttcacagaattggaaaaaactactttaaagttcatatggaaccaaaaaag

SEQ ID NO: 442295 - DNA, 201 bp, Homo sapiens
acagaattggaaaaaactactttaaagttcatatggaaccaaaaaagagcccacattgccaagacaatcctaagccaaaagaacaaagctagaggcatcaygctacctgacttcaaactctactacaaggctacagtaaccaaaacagcatggtactggtaccaaaacagagatacagaccaatggaacagaacagggccc

SEQ ID NO: 442296 - DNA, 201 bp, Homo sapiens
atggcctagagatgcaagtccaacttgatcaaaactaagcaatggggacacagtatttaggaggtggcattttttttttttttttttgagacggagtctcrcactttcgcccaggctggaagtggcattctttacatacaggagaacgtattctgacagtatgtgcaccgcagccacaggagacaaatgtatattggtgta

SEQ ID NO: 442297 - DNA, 201 bp, Homo sapiens
cctgagcagtgattgctggtgcccactggaacatgagcaggaaaggtgatgggggtggtgatggatagatcaggcagccagcaccagaacctgcccatcarccacagcaagaaagacccccaccaaggcatgagggaccctggagtgaggcaactggaagtgcacagaaacacctacctagagaggaatcatgccgaaaat

SEQ ID NO: 442298 - DNA, 201 bp, Homo sapiens
ccctgaggctggctgggtatttatgtcccacccacaggattgggagaggaggcaggatccacgtaggattaactgcgactgctccagtgagcctggtgttaaaaaaaaaaaaaaaaaaatacagctgaatgaattaatgacatgtaaggcaaggcacagagatgccgggctgaggacagtctcgatgcggaactctcctgc

SEQ ID NO: 442299 - DNA, 201 bp, Homo sapiens
tagttggaatcgtgcagtgtgcagccttttcagatgggctcctctcacttactaatatgcatttaaagctccccctttctcttcgtggtctgctagctcgtttttttttttagtgctgaataacactgcattgttacacagtttatttatccattcacccactggaaggcattttgggtgcttccacgttctggtagtcat

SEQ ID NO: 442300 - DNA, 201 bp, Homo sapiens
ccctcctcaacagtgtgtgagccagtcctctggcttggccaggcagaggttcttgcccaggactctggatcttgggcaagtgctatggagatggggcaggsagaattcacctgggaggagctgggtcctgccctgcatcttcctgcactggtggtgatgggactaccacctgcatgccccgaccccagctccaggccattc

SEQ ID NO: 442301 - DNA, 201 bp, Homo sapiens
tggcccctggccactggaggtgtagctaacgggactgaggaactgtgttattaatttgatgagtaaattaaatccatctgtgggctgccatgcgtggctgstggtggctgtgccgggcggcaccatttaaggcactttcactcatctgctgactaggagcactaaggtaatgccgttcagatgggcacctggctgtttctt

SEQ ID NO: 442302 - DNA, 201 bp, Homo sapiens
atatacaccatggaatactatgcagccataaaaaaggatgagttcatgtcctctgtagggacatggatgaagctggaaaccatcattctgagcaaactatygcaaggacagaaaacgaacaccgcatgttctcactcataggtgggaactgaaaaatgagaacacttggccacggggtggggaacatcacacaccggggcc

SEQ ID NO: 442303 - DNA, 201 bp, Homo sapiens
aaagccctgagtaccacaccgggggccaagtgcaccccgccccagcctccctagaaccacacagactcgctagccctgtttatagaatgagccagctacayaccacccatgcatcacggtgggcagagtgtgggggtgaggatgagagggaagcaagggagaagccgatccaggtctacctcccctgacggaaatggcagc

SEQ ID NO: 442304 - DNA, 201 bp, Homo sapiens
gccttggctctcaccagccctgaaaggccacggctgtgatcttagcaaaagccaacgcctgcctgggtaaggaaggagggctaaacctcagtgagagcagstgcgggaagcaccgtgctgttcacctgacttcacttaaccctttcatgaaagagcctccttcctgtgtgcagagacagcgggagaggtcagttacccact

SEQ ID NO: 442305 - DNA, 201 bp, Homo sapiens
agggagagaaccacagccgccaggggcaggggctgcacccacctgggttccccttgggggaagggttgggaggccgtgtctgctgctccctcattagctcrgagtccggctctggatctgaggagttgcaagccgcctcctcctcctccttttcctctgcttcctcctctcctgctcctgcctctgactgcgctgtccacg

SEQ ID NO: 442306 - DNA, 201 bp, Homo sapiens
gtgaggctgacgctgctggtccatagaccgcaccttggatggaaagaagtattgctattatcatcattcccattttaccaggaaggaaaccgcagcagcgmgcagagtttgtgacttgcctggagtccacaaaacagaaagaggcagagctgggatttgaactcaggacttctggctccaaggtatgagcccatgatcccc

SEQ ID NO: 442307 - DNA, 201 bp, Homo sapiens
tcatgaatacagctgctgtaacgtcggcatgtagatgtttgtgtggacaggtgtgttgaactcatttggggaaatacctacgagtgccatagccttaaaattttttttttttttttggagttaaaaaagtagacgagatgagagcttttgtttgctttttgtttggttttgaccttaaagcttgagactatttcagatggt

SEQ ID NO: 442308 - DNA, 201 bp, Homo sapiens
ggcatgagaattgcttgaacccaggaggtgaagattgcagtgaagcaagattgcaccacggcactccagcctgggtgacggagactgtctccaaaaagaamaaaaagtcatgcatctcttaacaatggggataggttctgagaaattgcattttcagcgattatgccattgtgtgaacatcatagagtgtatttacacaaa

SEQ ID NO: 442309 - DNA, 201 bp, Homo sapiens
gcggccacagccgggttaaagggacattccaggcactgcttctctgcttttcagcctcactgcccctccatccctgtggcgagtgatgctctggcctcctytggaggccagggctgcccctccagccccagaaggaatgaggcccctttgctggtggagcaggaaagtggaggctcagggcctcctctcctccaactggaa

SEQ ID NO: 442310 - DNA, 201 bp, Homo sapiens
ccgaaaagctgaaaagacagtagagaggattctggtagccctctcacccagcttcccttggtgttgacacctttcagaccatggaacattttcgtcacaascaagaaaccatcattggtctctgatgctgaactaacccggacactttgcgtgaacttcaccagtttttcccaagtgtccttttcccgtccctggatccca

SEQ ID NO: 442311 - DNA, 201 bp, Homo sapiens
ttctgcatgtttggtctgaaagaccttggaaattgggtatgatagtacgagggctttggcatttgaccaccagggtgttgaaaattctgtgactcttcaaytggtggctttagcactcgggtggcagtctgcagacccaattcatcaccagcgcggtgttttgtttttcatactggaaaggaagcccttcacaggctgtga

SEQ ID NO: 442312 - DNA, 201 bp, Homo sapiens
cagcttcccttggtgttgacacctttcagaccatggaacattttcgtcacaagcaagaaaccatcattggtctctgatgctgaactaacccggacactttrcgtgaacttcaccagtttttcccaagtgtccttttcccgtccctggatcccatccagggcaccacatgacattgagtcatcgcgcctccttggcctccct

SEQ ID NO: 442313 - DNA, 201 bp, Homo sapiens
cccaggggtttgcaggagctttagccaaggttcacagggattgctgcatagaaaacagacttgaaaggagacagtggtggcagggggacagcctgcaggctgctgcacaggtccaggtgagcgacaaggctgcctggaccccacaatctaggggaggaggcagctgcgttcatcctgtcctttccaccactgcatcgctca

SEQ ID NO: 442314 - DNA, 201 bp, Homo sapiens
agggaggcagagcccccggagcaagttcagaaaaatgcacgcactggcatgagcacaaacacacacacacacacacacacacacacacacacacacacacwctctctctctctctctctctctctctctttctctccctccctccctccctcctgggttagaaaatgaggcctctgcctcacaagtatttaatctggcttt

SEQ ID NO: 442315 - DNA, 201 bp, Homo sapiens
ctgcatagaaaacagacttgaaaggagacagtggtggcagggggacagcctgcaggctgctgcacaggtccaggtgagcgacaaggctgcctggaccccayaatctaggggaggaggcagctgcgttcatcctgtcctttccaccactgcatcgctcacccctcagaggaccccctggcccccaatcccggcggctgccat

SEQ ID NO: 442316 - DNA, 201 bp, Homo sapiens
ggccaggggggccacgtgtctgcacacaaagctgaaggtggtccctccaccagcaatttgtctatctttgctaattagaagctcatgcctccttctttgctttttcctgccccacagaggaatcttggccatgctgcctatagcttttggcaaggggcgagggcacgggaaagagaaaacacaaatggcatctggcagggc

SEQ ID NO: 442317 - DNA, 201 bp, Homo sapiens
tctccccttggcctgagcaccctccccactgccgggtgaaaggagccacagggcgtcacagttgcctcccctgttcaaagctggcgccgggacaggcagtggggctctgtttggaatatatgctcttcatcagacgactctgaaacaatcaccctttctggcccgagaggaggaaggcacctctgaggccagcgcttcccc

SEQ ID NO: 442318 - DNA, 201 bp, Homo sapiens
cgcacacacatggcatacacacatctcacacatacaccctctccacacacacgtgcacacacgcaacactccacacatacacaaatacacgcacacacacmcatgcacatatacacacaacattccacaaacatatacacacatacaaatacccatacaccacacatattcaaacatacacacacacacacaggcacacac

SEQ ID NO: 442319 - DNA, 201 bp, Homo sapiens; identical to SEQ ID NO: 117481

SEQ ID NO: 442320 - DNA, 201 bp, Homo sapiens; identical to SEQ ID NO: 117489

SEQ ID NO: 442321 - DNA, 201 bp, Homo sapiens
gaatggcgtgaacccgggaggtgaagcttgcagtgagccgagatcgcgccactgcactgtagcctgggcaacagagcaagactccttctcaaaaacaaaasaaaaccaaacaaaaaaaactgctgctgctgtagtgctatcactgggcaggaacacgggaggcttgcaggggacatgggctggattgggatggaaagcctc

SEQ ID NO: 442322 - DNA, 201 bp, Homo sapiens
ttaaagggaaccggagagccctggccaaggctaaggggcttttgtcctgggccaccagcttgacagggccatgtgagaagcaaggagcgaacccaggtagstttggtgggaccgctcgctaactgagtgcccgcaaggtgacggtgcccagagggtattggagatgcggcagcccacaagctggggttctggccccggggg

SEQ ID NO: 442323 - DNA, 201 bp, Homo sapiens
ctcctcaagagggtgctagggagggagtgtagctgtgagaaagcagatgggagaggctacaggcaggcaccgggtgaggcgaggatccatttgtgccagcrgccaatgagctcaatgcccagacgcgccaggtggtcggcgggcactcaatacacggaggcgattactttcaagcctcaacaagaaaaaagagctttgctg

SEQ ID NO: 442324 - DNA, 201 bp, Homo sapiens
tcgcttgaacctgggaggcggaggctgcagtaagccgagatcgcgccactgcactccagcttgggcaacagaccgagactctgtctcataacaaaaacaaacacacacacacacacacacacacacacacacacacacacactcaaaacaagacacatttaactggcttcaaagaagaggccaggccaggtgcagtggctc

SEQ ID NO: 442325 - DNA, 201 bp, Homo sapiens
ctaaaaacacaaaaactagccatgtgtggtggcaggcgcctgtaatcccagctacctgggaggctgaggcaggaggatacttgagcctgggaggtggaggktgcagtgagccaagatcacgtcactacactctagcctaggtgacagcacgagaccctgtctcaaaaaaaaaaaagaaagaaagaaagaaagaaaaccagt

SEQ ID NO: 442326 - DNA, 201 bp, Homo sapiens
cttgaacctgggaggcggaggctgcagtaagccgagatcgcgccactgcactccagcttgggcaacagaccgagactctgtctcataacaaaaacaaacacacacacacacacacacacacacacacacacacacacactcaaaacaagacacatttaactggcttcaaagaagaggccaggccaggtgcagtggctcacg

SEQ ID NO: 442327 - DNA, 201 bp, Homo sapiens
aaatagcaccttacatctctatctggcaccttagctggtgtccagagtaatgtgacttgattaaagacctcatgtgtgccagatactgggtcaactgctcagacatctccccactaatgacccatgccaggggtaccattatgatcccattttatagatgagaaaactgaggcccacagaagagaaataacttttcttaag

SEQ ID NO: 442328 - DNA, 201 bp, Homo sapiens
tgaacctgggaggcggaggctgcagtaagccgagatcgcgccactgcactccagcttgggcaacagaccgagactctgtctcataacaaaaacaaacacacacacacacacacacacacacacacacacacacacactcaaaacaagacacatttaactggcttcaaagaagaggccaggccaggtgcagtggctcacgcc

SEQ ID NO: 442329 - DNA, 201 bp, Homo sapiens
gtccgccaccacgcccagctaatttttttgtatttttcagtagagacggggtttcaccatgttagccaggatggtctcgatctcctgacctcgtgatccatttttttttaagtggcagaactctttttttacatgaaatctttgcccagagtcccttaaaacagaaggcaggtgacactcagcgggaggtgttgccttcag

SEQ ID NO: 442330 - DNA, 201 bp, Homo sapiens
gaacctgggaggcggaggctgcagtaagccgagatcgcgccactgcactccagcttgggcaacagaccgagactctgtctcataacaaaaacaaacacacacacacacacacacacacacacacacacacacacactcaaaacaagacacatttaactggcttcaaagaagaggccaggccaggtgcagtggctcacgcct

SEQ ID NO: 442331 - DNA, 201 bp, Homo sapiens
tccgccaccacgcccagctaatttttttgtatttttcagtagagacggggtttcaccatgttagccaggatggtctcgatctcctgacctcgtgatccatttttttttaagtggcagaactctttttttacatgaaatctttgcccagagtcccttaaaacagaaggcaggtgacactcagcgggaggtgttgccttcagg

SEQ ID NO: 442332 - DNA, 201 bp, Homo sapiens
aacctgggaggcggaggctgcagtaagccgagatcgcgccactgcactccagcttgggcaacagaccgagactctgtctcataacaaaaacaaacacacacacacacacacacacacacacacacacacacacactcaaaacaagacacatttaactggcttcaaagaagaggccaggccaggtgcagtggctcacgcctg

SEQ ID NO: 442333 - DNA, 201 bp, Homo sapiens
ccgccaccacgcccagctaatttttttgtatttttcagtagagacggggtttcaccatgttagccaggatggtctcgatctcctgacctcgtgatccatttttttttaagtggcagaactctttttttacatgaaatctttgcccagagtcccttaaaacagaaggcaggtgacactcagcgggaggtgttgccttcaggg

SEQ ID NO: 442334 - DNA, 201 bp, Homo sapiens
gtgcattcataaagagaatgactgtcctgtggtgggggaatggtcatggaaggtccagtggaggtggcactgaagatgaggcggagggaattaggaatgartgagtgaaggcaggagggaagcttagtcttgctcttagcaggaactgcgggcctcaggtggtagggaggaggctccagctgagaaaaggaaacaggacgc

SEQ ID NO: 442335 - DNA, 201 bp, Homo sapiens
cgccaccacgcccagctaatttttttgtatttttcagtagagacggggtttcaccatgttagccaggatggtctcgatctcctgacctcgtgatccatttttttttaagtggcagaactctttttttacatgaaatctttgcccagagtcccttaaaacagaaggcaggtgacactcagcgggaggtgttgccttcagggg

SEQ ID NO: 442336 - DNA, 201 bp, Homo sapiens
gatcctcccatctcagcttctcaaagtgctggggttacaggagtgagccaccgtgcccagcctctatttgggtctttttttttttttttttttttttttgkcttttttttggagacggagtctctctctgtcacccaagctggagtacggtggtgcaatcttggctcagagcgacctctgcctcccaggttcaagcaattc

SEQ ID NO: 442337 - DNA, 201 bp, Homo sapiens
aggagaggcaaattgctttctggagctgaagaagctgagctagatctggaactgtgtctcctgactcttagtccagtgttccctctgctgtctcccactgrccagcacagaaaggagaagaagcatctggggtcagatggcacaaccttggacctcgcaggccaggtctccggggcagcaagtggctttggagtgaaggct

SEQ ID NO: 442338 - DNA, 201 bp, Homo sapiens
gtactacaaaattcacgtgtctgatctcattcttgctagtagcttcatgcagctttttctgactagctccacttagagaaagaacgtacaacagctgtttaaaaaaaaaaaaaaaaagcattccagtgctataccatgagcagaagtgacaggaaagaagcacagggaagcatcatgagacacagcccacgagaaggttaa

SEQ ID NO: 442339 - DNA, 201 bp, Homo sapiens
atgccagcccagtctgctaaggacattcccagattcttggaggctgggatgggggcacgtgtcctgggccagcccagaagatggatgacaaggaagctacrtgggcgccgggacaggcggatgctaaggtgaggagacagctcagccagggctgcctcccactcagaggtcatcgccaggtccagatctgtgcagtcactt

SEQ ID NO: 442340 - DNA, 201 bp, Homo sapiens
gtgaaaccccgtctctactaaaagtacaaaaaattagctgggcatggtggcaggtgcctggagtcccagctactcaggaggctgaggcaggagaatggcakgaacccgggaggcagagcttagagtgagccgagatcacgcctctgcactccagcctgggagacagagcaagactccgtctcaaaaaacaaacaaacaaaa

SEQ ID NO: 442341 - DNA, 201 bp, Homo sapiens
cagctactctggaggctgagacaggagaactgcttgaacccgggagacggaggctgcagtgagccaagatcacaccactgaatgccagcctgggtgacaamaagagactccgtctcaaaaaaataaaaataaaaataaaaacaataaagcacataatgacaataatataaaaaatcatgcacataaccttagctaccatgt

SEQ ID NO: 442342 - DNA, 201 bp, Homo sapiens
ccatgaggtctgcccagtaaacagccactccacctctctggcctggtcagttcttggtgactttgcccatgatgggggtggcagtttgcccctcccaagcyctctgggtggcggtggttcagcaactgacctgttgatgaactcttcatagcaggagtagatggcagccaggcacacggccaccaggttgggcaggacccg

SEQ ID NO: 442343 - DNA, 201 bp, Homo sapiens
tgccagggactgaggccgggaggaagggggagtcagtgtgtaatggatgctgagtttcagtttcggaagataagaacgttctggagatgaacggtggtgayggttgtgttacaacatgaatgtcttcagtgtgactgaacggtgtgcttacagatgcacacttttatatgatgtgtattttactgccaaaaacaaaaaagc

SEQ ID NO: 442344 - DNA, 201 bp, Homo sapiens
tccacgacccccagaggatgcgccttctccaccccctctgtggctacaccaagggaggcagccacacaagtggaaatttctaaaaaacacaaaaaaactayagctgtccttggctcaaatcacagcaaacaaggatccagacaagcccgtctgcagaaggggtgaggccatcccccttcccccattgatactccaagggag

SEQ ID NO: 442345 - DNA, 201 bp, Homo sapiens
gccagagggtccctctccccctggagttgcaatgaaaaggcagaaagacaaaccgaaggacctcaacatcaagcctacggattctcccatcaaaggtgccstagaaggcaaggccctggtccctctggaccttggtctccatatctgcaaaatgggcctcttttctgtacagtttcttccagcttcaaaaaaaaaaaaaaa

SEQ ID NO: 442346 - DNA, 201 bp, Homo sapiens
cctccagaggagaaggagtatccttgcccgttctccaaggctgcctgcattccttggctggtggctccttcctccatcttaaagccgggaattgcaaggckgctctctgcctccgcacatctcctcctcagactcagactctcccacctccctctgtccctggtagggacccctgtgatgacactggcccccctggataat

SEQ ID NO: 442347 - DNA, 201 bp, Homo sapiens
gaaacacaaaaattagccaggcataatggcgggtgcctgtaaccccagctacttgggaggctgagacatgagaatcgcttcaacctgggagatggtggttrtggggagccgagattgtgccactgcactccagcctgggtggctgagcaagactccgtctcaagaaaaaataaacaaataaaataaaaataaaaaataaat

SEQ ID NO: 442348 - DNA, 201 bp, Homo sapiens
tggctcatgcctataatcccagcactttgggaggccaaggtgggaggatcacttgagcccaggagtttgagaccaacctgggcaacacagtgagaccccaktgttaataataataataataataataaagcccaaggagggatgtgaaggccaacagtcatgcggtcacctgaagcacatctgagaggggaaaaaaaatct

SEQ ID NO: 442349 - DNA, 201 bp, Homo sapiens
cttggaggccgtctggtttttcgctgaagaccttggaggccgtctggttttccactgatgaccttgaaggctgtctggcttttcagtgatgaccttgaaasctgcctgatttttcactgatgaccttggaggccgtctgggtttcactgatgaccttggaggccttctggtttttcactgaagaccttggaggccatctgg

SEQ ID NO: 442350 - DNA, 201 bp, Homo sapiens
ctcggcctcccaaagtgttaggattacaggcgtgagccactgtgcccggccgatgatctttctttagaggacattcaggaacaaggctttgagccatttctttttttttttttttttgagacggagtctcgctctgtcatccaggctggagtggagtggcgtgatctcagctcactgccacctccgcctcctgggttcaag

SEQ ID NO: 442351 - DNA, 201 bp, Homo sapiens
gtcatcgtcaccataaagaggacagccccttgagtcacacggtacacactatgtgccccactccaagtgctttatatttcgtacttcgtttaatcctcacaaagacttgaggaagtgggcgacattcccatctgcattttatggtccagacaacaggtaacgacaggtaacgacaggtaacgacaggtaacgcggagggtg

SEQ ID NO: 442352 - DNA, 201 bp, Homo sapiens
tcatcgtcaccataaagaggacagccccttgagtcacacggtacacactatgtgccccactccaagtgctttatatttcgtacttcgtttaatcctcacaaagacttgaggaagtgggcgacattcccatctgcattttatggtccagacaacaggtaacgacaggtaacgacaggtaacgacaggtaacgcggagggtga

SEQ ID NO: 442353 - DNA, 201 bp, Homo sapiens
gccaggacaaagcagacaatcaaactgaaaaatgaatgaataacaaaagaatgaacgaatagaatgaatgaaagcagaaagaatgggaagagactgaatgaaaaaaaaaatgaatgaaagaatgaagcatgaatgaaactcacaggaaggtctgaaaggccatctcttccagtgcctgccagagacaggaagcaaagtcca

SEQ ID NO: 442354 - DNA, 201 bp, Homo sapiens
ttctcaagaagtcacgctggggctcccaggtagagcagtgaggctcaggaggcaagggagggtggggagggggcaccccaaagtagcccccacaccccccscggttcactagaagcctcacccctgcagggcctgttctggttctcagggccccccatgaccagaggccaagcacagcccagcaggcgtccccttctgttt

SEQ ID NO: 442355 - DNA, 201 bp, Homo sapiens
ctggccctgggatactttctggggtgggggggaagggcagtggcagagatggctagcgtggcccatgccaacaccctattctggcctcctctcccttctcwataataaaaatcctgctgtggggtgggattcatggctcccacttacatttcccagatgctcttgcagccggggatgccacatgatggtctggccagtaag

SEQ ID NO: 442356 - DNA, 201 bp, Homo sapiens
ctgggattacaggcgtgagccactgtgcccggcccttgctagttttttcaagaatctgtaatagaatctctaaatatgtaatctcctgccattataaaagytctgatgtttgaaacacttattacgttgaagttttaagcagaaggagactctgactccacttacatgaggtacctggatagggaaattcagagacagaaa

SEQ ID NO: 442357 - DNA, 201 bp, Homo sapiens
tggagtggagtagcaacatcatagctcactgtagccttgaactaggcgatcctcccaccttggcctcctgagtagcggggaccacagatgtgcaccaccaygcctggctaattaaaaacattttttctgtagaaacgaggtctcactgtgttgcctagtcctcccatttttatttatttttattttatttttggatttgtt

SEQ ID NO: 442358 - DNA, 201 bp, Homo sapiens
aacaatccgtaccacctgccagaccatgaggataatggagactgtgcctgtctcatcaccgcatattcctaagagccccagacggcgcccagctatcaggyctcaacaatatttgttgaataaatcatgagtcccacagccatcaaaaatctcaaacgcaaataggagggacaaaccatgtgcagctgagggagacagccg

SEQ ID NO: 442359 - DNA, 201 bp, Homo sapiens; identical to SEQ ID NO: 117508

SEQ ID NO: 442360 - DNA, 201 bp, Homo sapiens
tgtgaaccgccgtcattctgcactcaaactgatttcacaaccagcctgagggaccttggcgccactgactctgggactgtgggccaccagggcaagcaggkccagcgatcaaggagcctggacttgaagtaagactcaacgggatttgagacccccgctcgaccatgtgcgggccgggcaccctggggaagtcgcttctca

SEQ ID NO: 442361 - DNA, 201 bp, Homo sapiens
ggtttgagaattaccctcccagcagctggccctgcctctctactctgagaagcagctgatgccacttttgttctcccagcgtcaaaggctgggtttgaatwaaggctcagttcccaggagaattctgagacgctgtcttcacaggtggcaaggaaagacttaagtttaagaaaaatggagacactcactggtccctgacat

SEQ ID NO: 442362 - DNA, 201 bp, Homo sapiens
tggacgctcagtcccctctgctatgagatgggggagggatgtggaccccacagaactgtttccggactcagaggagcacaggggcacatagtgctggacayaggggacactccgtggccagagccgggcagagacagtctcgagggcgggcttcccacccaccctagccctcccaggccatgagtcagccgggaccacctg

SEQ ID NO: 442363 - DNA, 201 bp, Homo sapiens
tctctggcccagtaaccacttctagaaatctgccctaaacaagtaactcaaataaagcgaaagctgagatacacgacggtcatggctgcgttatctataaytgaggaaagctgggaacgacccgaagggcaaccacagcagaggcctttggtaaatggccccagcctcttcacggacgattctgcagccattaggaagcct

SEQ ID NO: 442364 - DNA, 201 bp, Homo sapiens
gtcaggcatcaggacattttttaagctcctcaagtaattccaatgcgcagctcaagttggaaactgctgctctaaactcgcccaagaaagccttggacagaaaaaaaaagaggttttcaggggtaggaggaggaaggcaggaggggagggagggaaagaggcagggaagagggtatatctgagcagaccccactcctagga

SEQ ID NO: 442365 - DNA, 201 bp, Homo sapiens
ccagactggactgtgggcaaggctgctactccaggcagcaggcctcaatgggcccaatcaatccccacaaaacagtgggcagctgggggagggtcagggagagggagaggaagaggaagaggaagaggaagaggaagaggaagaggctgcgggagggagagaggcaagccaggaggcacttcggtcttcagagctgccact

SEQ ID NO: 442366 - DNA, 201 bp, Homo sapiens
cagactggactgtgggcaaggctgctactccaggcagcaggcctcaatgggcccaatcaatccccacaaaacagtgggcagctgggggagggtcagggagagggagaggaagaggaagaggaagaggaagaggaagaggaagaggctgcgggagggagagaggcaagccaggaggcacttcggtcttcagagctgccactt

SEQ ID NO: 442367 - DNA, 201 bp, Homo sapiens
gatgtttgcaggcccctgagcactggtggaaaggccagaagttaagacacctctctctccccagttccttccccagtggctgtcatgaagtaggtgctcamactcacggaatggctcagagccctgggcccatctaccacacagcttcctagagggcctcatgactgcacatgtggctcttcggcctgggggtcaacacgc

SEQ ID NO: 442368 - DNA, 201 bp, Homo sapiens
agactggactgtgggcaaggctgctactccaggcagcaggcctcaatgggcccaatcaatccccacaaaacagtgggcagctgggggagggtcagggagagggagaggaagaggaagaggaagaggaagaggaagaggaagaggctgcgggagggagagaggcaagccaggaggcacttcggtcttcagagctgccacttt

SEQ ID NO: 442369 - DNA, 201 bp, Homo sapiens
gactggactgtgggcaaggctgctactccaggcagcaggcctcaatgggcccaatcaatccccacaaaacagtgggcagctgggggagggtcagggagagggagaggaagaggaagaggaagaggaagaggaagaggaagaggctgcgggagggagagaggcaagccaggaggcacttcggtcttcagagctgccactttc

SEQ ID NO: 442370 - DNA, 201 bp, Homo sapiens
ggactgtgggcaaggctgctactccaggcagcaggcctcaatgggcccaatcaatccccacaaaacagtgggcagctgggggagggtcagggagagggagaggaagaggaagaggaagaggaagaggaagaggaagaggctgcgggagggagagaggcaagccaggaggcacttcggtcttcagagctgccactttcctga

SEQ ID NO: 442371 - DNA, 201 bp, Homo sapiens
tacaccatctgaccccactagtgactcacagagctcacctcctgccaccctcctcaaggcacattctgctccatccacatttacctccttgcattcctagaaaaaaaaccaggtaaattgctgccccagggcctttgcacatgctgtggatggctcctttacctcctttagccgctgccccgtggcctttgcacatgcaca

SEQ ID NO: 442372 - DNA, 201 bp, Homo sapiens
ctgcactccagcctgggtgacagagtgagaccccctctcaaaaaaaaaaaaaaaagagggaggcgggagggccagagccagaggagatgtgaagactgaakcagaggttggagtgatgctgccacgagggaaggaatgcgagcagcctctagataatggaaaaggcaacagacccttcccttaggcttccagaaagacaac

SEQ ID NO: 442373 - DNA, 201 bp, Homo sapiens
ctgggtgacagagtgagaccccctctcaaaaaaaaaaaaaaaagagggaggcgggagggccagagccagaggagatgtgaagactgaagcagaggttggastgatgctgccacgagggaaggaatgcgagcagcctctagataatggaaaaggcaacagacccttcccttaggcttccagaaagacaacacctcaacttta

SEQ ID NO: 442374 - DNA, 201 bp, Homo sapiens
gttaaaagtattttgtaaattatagatttccatatacatgtattaatcatttattatttttttattgcaatcctgtttctccctgatatgctctgagttgytcctgaaatgaagtttagtgacaaatgacctatttctgttctgcttcagcttcatctcagccacagctattaggagggcaaagggtgcaagttcctaacc

SEQ ID NO: 442375 - DNA, 201 bp, Homo sapiens
gcttttaggatacagtaaagatgagcttcagaagaaggtaagctgcttttcacatcagaaacatgtacttgttgaagagaagaagagaatgttgccagagkaaaccacctcagaatacctcttcctggccttattattgcatatgtgagcattttacatcctggagtttgtttttttctcagaaaaaaatagatcagggat

SEQ ID NO: 442376 - DNA, 201 bp, Homo sapiens
tataggtttcacaagctggtctgggggagctttggcagtgggcttctggaaagctccggggttattgttggcggcggggacaatggcatgcttattctatrcaatgtgacccacatcctgtcttcggggaaggagcctgtgattgctcagaaacagaagcacacgggggctgtcagagccctcgacttgaatcctttccag

SEQ ID NO: 442377 - DNA, 201 bp, Homo sapiens
aggaaaaagagatggcattggactgctgagggcacttctagtagtacaaagaactatattgggtatactggcacagatacccagcttgttgtaggaagagmgtcatttatgttcatttaatggaatcttttctgtgttctgtggtttcttaggtgaccttagagcaagactccagaatgaaattcctaaagcttttaggat

SEQ ID NO: 442378 - DNA, 201 bp, Homo sapiens
acagaggagtcctttctgccttgagcaggtattgtctgatctattgatgggtatacagggtagatactgacgtggaatcctgggagcagtgtgtgtttctyagggctcatgaggagccaagtgagggaagaaggagctttgccaagttggagaaaagttaattctgggcttattttgcaaaaggatttaaaaaacaaccac

SEQ ID NO: 442379 - DNA, 201 bp, Homo sapiens
aaattgcgtataagcagctgatcacttgaggtcaggagttcgagaccagcctggccaacacggtaaaactacgtctctactaaaaatacaaaaattagccrggcatggtggcacatgcctgttatcccagccactcgggaggctgaggcaggagaatcacttgaacccaggaggcaggggttgcagtgagctgagatcgtg

SEQ ID NO: 442380 - DNA, 201 bp, Homo sapiens
ctcatgaggagccaagtgagggaagaaggagctttgccaagttggagaaaagttaattctgggcttattttgcaaaaggatttaaaaaacaaccacccccsccctttccagtcagcagcaatagcagtgtcaggctgaatgcatgtgatagagatgcctcagacaagcctggacccacgtgtacctggtctgtctttgaac

SEQ ID NO: 442381 - DNA, 201 bp, Homo sapiens
gaggagcttggaagttgaagtctgaattcctaatgctatcactggcttcgtacctttggcaatataccaaagtgttgtgttgcttatttcaatgctatggrattgttttgaaggtcaaataaggaatatagttaaaagtattttgtaaattatagatttccatatacatgtattaatcatttattatttttttattgcaat

SEQ ID NO: 442382 - DNA, 201 bp, Homo sapiens
ctcagaaaaaaatagatcagggatcttagagagtacagttggtggggtatggagataggaaaagaggataatgcttatttgatcttacgcttgaaagagcrgttttcagaggtctctccctgcaggtggccacatggttgaagagtgacgtggggctaggtgagagtcctcagcccaagggaaatgacctcaacagtgaca

SEQ ID NO: 442383 - DNA, 201 bp, Homo sapiens
aggggacagtaagtacagctagctgtgctcccactgcctcctacacttccaccatcaccatggccaaaggaagcccagtgtcttttcttcccataggtgtyactgacctgggttccccacaaaatacgtgcatcttgcctggactgggccccagaacttaagtcttcccttatcccttccatgctgccagggtaggagctg

SEQ ID NO: 442384 - DNA, 201 bp, Homo sapiens
agttctgtggatctaaacttccaggtgttctgtgggtgaccacagaaagtgggggtcacagactcatggagagacaaaagtcgcacatgaaacaattagtmtgacagagtctgtggttggtgatgtataagcagaaagggtaaaaaagcaaaaggaagaggtagagatgtacaaaaatctaagacccagatgggtccagtt

SEQ ID NO: 442385 - DNA, 201 bp, Homo sapiens
tccagctaggggtggggctgcctgcataatggcagaagctgacagagatgcccatcctgtgcttactgacatgaacctaagtttgtactgatgccagttcytcctctttataggtttcacaagctggtctgggggagctttggcagtgggcttctggaaagctccggggttattgttggcggcggggacaatggcatgctt

SEQ ID NO: 442386 - DNA, 201 bp, Homo sapiens
gctaccaacacagagcagctggtgctttgatgtgcagtggtgccctcgggacccttcagtgttctctgctgcctccttcaacggctggatcagtttgtackctgtgatgggtaggagctgggaagtccagcatatgagacaggctgacaaggtttgaagggcttggtagagaatgctggagggaaggggctgtctctgttt

SEQ ID NO: 442387 - DNA, 201 bp, Homo sapiens
aaatctactgaattactgtcagaacaagagccagcaagctttactgcaaagtgaaaagatgctgtggcagttcctgaaggtgggaagcctgaaggctagcwgctcagaagtgtctccccaaagcctggaactccaacctctgtcaactgcaggagaagcacaagcacactgggacccagatcacagaggccttaactccca

SEQ ID NO: 442388 - DNA, 201 bp, Homo sapiens
gcttctctctcctgcctagcagttagagctgctctgccccaggccagagtcctgctttcagctgtcggacatgtggagtcagccgcttagcacatttcctrttgagagtgaaaacttagggaagctaaacagagctgatctggaagcttctgccattccttacttattcctggccatcactctctgatgcctgtggtgttc

SEQ ID NO: 442389 - DNA, 201 bp, Homo sapiens
acttttggcctccccagcacccctgcccatctggtgccacagccttgcccccgcctagtcttcatcagtcaagtcaccacagaatctgaattcctgatgcratcagctgagctgcaggaggccttgggatcaggaaatctactgaattactgtcagaacaagagccagcaagctttactgcaaagtgaaaagatgctgtgg

SEQ ID NO: 442390 - DNA, 201 bp, Homo sapiens
ggatggcgatgcaggtgtcttttccccccagatctcctcttccttcagcaaaggccagcctctcccaccactgcaggtgccagagcaagtggcacaagcaycactgatacctcccctgaaaaaaccccccaaatggattagaagaccaacaggtgtttcatttgctgtaagtgtagtggatgtataggtgtgtgtgtgttt

SEQ ID NO: 442391 - DNA, 201 bp, Homo sapiens
attacaggcgtgagccaccatgcccggcctaatatgctgtgattctttatggccctgtgtggtgttagacttaggggctggggttggaatccatttctttycctgcagaagacaaaaaggaagctggaagaggcagcccagcgtctggagtatctatatgagaagctctgtgaggggacagtaagtacagctagctgtgct

SEQ ID NO: 442392 - DNA, 201 bp, Homo sapiens
agtcatgctcccccaggagttccaggagaactcagcctgcaggtgacaaggacaatgtattcccctcccttgggaaaccttccagccctccttgggtgcasgtcatggtagatgggcctcattcctcaaggcatgtgctgagggagactgggggcaggtaccaggtgtccttactgcagagaaagggaggctgctcatctc

SEQ ID NO: 442393 - DNA, 201 bp, Homo sapiens
tccttctgtgatgataaagcccagttctggaattggagccatattaaggaatgattctcttccagcgctgctcctcaagggttgggggtccttctccctcrcagccaccacatgtctcagggctaccttctccgattggatttgcatttgtggcactgtctttgatgcagtgatgtacttaatggtgcaataaagctgctt

SEQ ID NO: 442394 - DNA, 201 bp, Homo sapiens
tgtggatgcaggaagctttgagcagggccttgcagtgcatgcccaggtggcgggctgtagcagcttcagcgaggtgtccagcttcatgcctatcctgaagkctgtcctcatcatcgctcataagctgctggtctaaaccaggcagcctctcttgctaggaggccacttctgctgttacataactcctccctgcagaagagg

SEQ ID NO: 442395 - DNA, 201 bp, Homo sapiens
gtacattgcatagtgcacaggctctgaggtttggtttgggttctgactctgcaactgttggaaagttacttaatttttcaaaacctcattttattcatttrtaagataatatcagaccatgcattttatagggcatggatggtctgatatgccctataaaatgtataaaagacatataaggcaccctactcatagtaggca

SEQ ID NO: 442396 - DNA, 201 bp, Homo sapiens
ctgtctctatcttgtacttaattgacgtccatgtggagctggggagagacttttgagtctggtctgaagtccagctccttggtggtaggacccagcagcaytgagacctaaaggcagcaggggtactggaaggagggtggagccaggagtgaggaagtctgccattcccctgctggctgtgtcggcttgagcaagtcactt

SEQ ID NO: 442397 - DNA, 201 bp, Homo sapiens
aggagcttggagcaactgcggggtcctcatggggtgagcccaggccctgccacaacctacagggtcactcagtatgccaacctcctggcagcccagggcarcctggccactgccatgagctttctacccagggactgtgctcaggtaagtggggccatgtggagagagcaaaccatttcattcagtcatctaacattgatt

SEQ ID NO: 442398 - DNA, 201 bp, Homo sapiens
cctcctctttataggtttcacaagctggtctgggggagctttggcagtgggcttctggaaagctccggggttattgttggcggcggggacaatggcatgcktattctatacaatgtgacccacatcctgtcttcggggaaggagcctgtgattgctcagaaacagaagcacacgggggctgtcagagccctcgacttgaat

SEQ ID NO: 442399 - DNA, 201 bp, Homo sapiens
caatgtgacccacatcctgtcttcggggaaggagcctgtgattgctcagaaacagaagcacacgggggctgtcagagccctcgacttgaatcctttccagktactacatttcagttagtcaaacatggccaagccagggagcaacagatctgagtggaagcattcatttgtggcctccagtctgtaactctgacccctttc

SEQ ID NO: 442400 - DNA, 201 bp, Homo sapiens
ggggctagagtatagagcgggggtgtccaagggtcagaatacagtcgtgggtgcttagtttctgtttctggttgggccagtaaagccccttcctcatccckgttttccacttatcactagagacaaaccaaaaaccatggcttcaggctgctaaaaacctaaaacaaaacaaaacagaacagaacaacaacaacaacaaaa

SEQ ID NO: 442401 - DNA, 201 bp, Homo sapiens
tattttcagaggggatcctttgttgtcctgttttaccttgtcttgtcacaccatgatgtgagaactttccccttctctgtacagcaaggtgagtctcagtkttgtcttaaactgcagctacttgtcccaggctcatggtcctctccctgtttccaaacaggagaaggagaggcacacagggcagctgtgccattaatgaaa

SEQ ID NO: 442402 - DNA, 201 bp, Homo sapiens
gggtgcaagttcctaacccggtgggattccctgggacatggcctcttcctggttcccctctacccatggcatgcccaggcatcatgcgacctggctctacmtccctgcctgagactcctagactgttccctctgcttcctctgagaccactaggtcccggccgcatggtctcccacaccccagcccctcctgcaagcttcc

SEQ ID NO: 442403 - DNA, 201 bp, Homo sapiens
attcaatataaatgtatacatgtactactataccgtttttgtttttgtttggaacagggtcttactctgtcgcccaggctggattgcagtggcacgatcasggctcactgcaacctccacctcctgggctcaagcaatcctcccgcctcagccccctgagtagctgggactgcaggcatatgccaccacaccgagctaatt

SEQ ID NO: 442404 - DNA, 201 bp, Homo sapiens
catgtattaatcatttattatttttttattgcaatcctgtttctccctgatatgctctgagttgctcctgaaatgaagtttagtgacaaatgacctatttytgttctgcttcagcttcatctcagccacagctattaggagggcaaagggtgcaagttcctaacccggtgggattccctgggacatggcctcttcctggtt

SEQ ID NO: 442405 - DNA, 201 bp, Homo sapiens
aactatggccctccccaaaccttacctggctatttttttagttttacccattaacggccaaatagtagagctctcagggctactaagccagctctctgtcygtcttgggttcatccctaagtagtcacctctgtccttcctcatacaggcctccaaacacaccacaaaggaagcctctgcttcctcagccttctttgatga

SEQ ID NO: 442406 - DNA, 201 bp, Homo sapiens
gtttgtactgatgccagttcctcctctttataggtttcacaagctggtctgggggagctttggcagtgggcttctggaaagctccggggttattgttggcrgcggggacaatggcatgcttattctatacaatgtgacccacatcctgtcttcggggaaggagcctgtgattgctcagaaacagaagcacacgggggctgt

SEQ ID NO: 442407 - DNA, 201 bp, Homo sapiens
cttagacacccagggtctaagacacccacttcattctgttccagtctaggttaggtcacatgctcaacagtcagtatcataaactattgacctagatgatyagggaagatagagggacactcgtcctttgctttctgtcttcctctctctttttttctgtgtcttctgcatgctgtggcataaggcacagttgtgtggggc

SEQ ID NO: 442408 - DNA, 201 bp, Homo sapiens
tgcatgggagtcccaccctcgctaccactcacttccccatcccctggaatatgggagtctgacctttctaggtcaaattgggtgtctcaaggattcctccyaaaatggagtttgtaggtggagttcctgactaaactgccactttaggatggcgatgcaggtgtcttttccccccagatctcctcttccttcagcaaaggc

SEQ ID NO: 442409 - DNA, 201 bp, Homo sapiens
agttccagttctcatttaatttcaagtttcctgtgacaccaggaggagtactatacctatcaaaggaaatgagcaagtgagagatctgaaggaagaaaggsaagtagctgactggtcagtcagtgggatgattgtgcaagtttttggaattgtttagaagaaagcaaaaaggattgggcctgtaccagggcatctgagagg

SEQ ID NO: 442410 - DNA, 201 bp, Homo sapiens
cccctgctggctgtgtcggcttgagcaagtcacttacccttcttgggccttcattccctcctctgtgaaatgaagccattctagctctaatatgctgtgattttttttttttttttttttgagatggagtctcgctttgtcgcccaggctggagtgcagtggcgcgatctcggctcactgcaagctctgcctcccgggttc

SEQ ID NO: 442411 - DNA, 201 bp, Homo sapiens
tgaaatgaagccattctagctctaatatgctgtgattttttttttttttttttttgagatggagtctcgctttgtcgcccaggctggagtgcagtggcgcratctcggctcactgcaagctctgcctcccgggttcaagccattctcccgcctcagcctcccgagtagctgggactacaggtgcccacctccatacccggc

SEQ ID NO: 442412 - DNA, 201 bp, Homo sapiens
tcccttatcccttccatgctgccagggtaggagctgggttgggctcactaacctaagggtcattccctccacagctctcacctcatgtcgtggctgggctscatgaggttgcccgatgtgtggatgcaggaagctttgagcagggccttgcagtgcatgcccaggtggcgggctgtagcagcttcagcgaggtgtccagct

SEQ ID NO: 442413 - DNA, 201 bp, Homo sapiens
actgcagctacttgtcccaggctcatggtcctctccctgtttccaaacaggagaaggagaggcacacagggcagctgtgccattaatgaaattaccctctstctgcagacatgctgggaactcgcatggaacaggagggcagcagggcactaacctccgaagccagactctgttatgtgtgctcagggagtgtggagcggc

SEQ ID NO: 442414 - DNA, 201 bp, Homo sapiens
agatacccagcttgttgtaggaagagcgtcatttatgttcatttaatggaatcttttctgtgttctgtggtttcttaggtgaccttagagcaagactccasaatgaaattcctaaagcttttaggatacagtaaagatgagcttcagaagaaggtaagctgcttttcacatcagaaacatgtacttgttgaagagaagaag

SEQ ID NO: 442415 - DNA, 201 bp, Homo sapiens
ccaatcacaagcatattgcctaggaacagctgacattttactctcaccagactaccagggtaacagagctaggaagtcaatgaaaggtcaaattctcatgygcaaagggcagggggctatgttaacactgctgatagcccatcagtaagtcagatccagggaggaaaaagagatggcattggactgctgagggcacttcta

SEQ ID NO: 442416 - DNA, 201 bp, Homo sapiens
aattctaaaagcatagcttccggagtccctgcaaggaatctgtccagttacaagagccactgcaaacagggaaatgcatagcatgttgttcacattaattmtttctaggttacatagttccagtccagatgcaagttaccaatcacaagcatattgcctaggaacagctgacattttactctcaccagactaccagggtaa

SEQ ID NO: 442417 - DNA, 201 bp, Homo sapiens
attttattcatttgtaagataatatcagaccatgcattttatagggcatggatggtctgatatgccctataaaatgtataaaagacatataaggcaccctrctcatagtaggcattcaacaaatgctagttcctcttcccttctctttttagggggatcttgtcagtgtcatggagccaggctgatgctgagctgctgctc

SEQ ID NO: 442418 - DNA, 201 bp, Homo sapiens
attgtgcaagtttttggaattgtttagaagaaagcaaaaaggattgggcctgtaccagggcatctgagagggacttgaaatttgagctttaggcatagtaragctttatgaaggtggacatcaggaagttagagaaagaggatttgagaaagatcttgactatacagtgaagccagagaatgatgtgggaagaaaagaata

SEQ ID NO: 442419 - DNA, 201 bp, Homo sapiens
aagtagctgactggtcagtcagtgggatgattgtgcaagtttttggaattgtttagaagaaagcaaaaaggattgggcctgtaccagggcatctgagaggracttgaaatttgagctttaggcatagtagagctttatgaaggtggacatcaggaagttagagaaagaggatttgagaaagatcttgactatacagtgaag

SEQ ID NO: 442420 - DNA, 201 bp, Homo sapiens
cccttgggaaaccttccagccctccttgggtgcaggtcatggtagatgggcctcattcctcaaggcatgtgctgagggagactgggggcaggtaccaggtrtccttactgcagagaaagggaggctgctcatctccccaactctgctgtaatgggaacagtgtgactgtgagtcactggggactagtccttagggaagcca

SEQ ID NO: 442421 - DNA, 201 bp, Homo sapiens
aattgaaaacagatgtataaaagcggaagttcttgttttcaaagccaacggttttactggggaggcaagactaacacattcaataggctgtgagcttaaaragaaaaagaagtagggaggtaaagaattctgaggtcaagaggcctgaattcttatcatagctctgtcatttattagctgggtaaccttgaacaattcatt

SEQ ID NO: 442422 - DNA, 201 bp, Homo sapiens
tgcagtggtgccctcgggacccttcagtgttctctgctgcctccttcaacggctggatcagtttgtactctgtgatgggtaggagctgggaagtccagcayatgagacaggctgacaaggtttgaagggcttggtagagaatgctggagggaaggggctgtctctgtttgtgggagagagacatatggcttgagaagcgga

SEQ ID NO: 442423 - DNA, 201 bp, Homo sapiens
ggacagccagatcttgtgccggaacctggggagcagtgaggtaggctggcccttctgtgggcatgctgggatgggagagagagggtagaagaatctcagcwgcagccatgtgttttgggtttcatggactgtccctaatggtgtgttccctcatattaggtggtatataagctaccaacacagagcagctggtgctttgat

SEQ ID NO: 442424 - DNA, 201 bp, Homo sapiens
ggcagatgaaagttggggagagcaaaagacaccacaagaagggatgggagtgctgtttatcacagtagagctttcgcagggttgggtagggcattgggccyagcaaagagggaggaagagtaggaccccagacataccattgtcctttttatggaggggggggtcagctttgttctccctgtatgtggctctgccatgcag

SEQ ID NO: 442425 - DNA, 201 bp, Homo sapiens
gggcctcgggggcctccactacgtctacccttgaattggatccggctctactgtccctgccgcacgggaacccccagccggatgagggtctccctgttcastgctgccttgcgccttcccatccgccttggtcctgacctggcccagccgaggccgtccggtgtcgctgcgtttgggctgggcgggaaggtctgtcattgc

SEQ ID NO: 442426 - DNA, 201 bp, Homo sapiens
cccttaagcacctcacaatctactgggggaagatcagatgttgatgacttatagtgccataacagaagcttatactgagcactgtgggagtccagggaagrgactgatttttgcctggagaagtcaaggaaggcttctcaatggttaaaacagctgagctggaccttcaaagagaagtagcttaccagcagatatagagca

SEQ ID NO: 442427 - DNA, 201 bp, Homo sapiens
gtttcacaagctggtctgggggagctttggcagtgggcttctggaaagctccggggttattgttggcggcggggacaatggcatgcttattctatacaatrtgacccacatcctgtcttcggggaaggagcctgtgattgctcagaaacagaagcacacgggggctgtcagagccctcgacttgaatcctttccaggtact

SEQ ID NO: 442428 - DNA, 201 bp, Homo sapiens
atcaaaagttaaaatggttttgtttagcactaatctgtggtgtagattttgtgctgcagaagtcacggtaaataagaattctgactgggagagttcattargaggtggatattgggaaaagaaatggtgaatagttagggagtaaagcaatagttatcaacgccaaataatctgtacaacaaacccccatgacacaagttt

SEQ ID NO: 442429 - DNA, 201 bp, Homo sapiens
ggcctcgggggcctccactacgtctacccttgaattggatccggctctactgtccctgccgcacgggaacccccagccggatgagggtctccctgttcacygctgccttgcgccttcccatccgccttggtcctgacctggcccagccgaggccgtccggtgtcgctgcgtttgggctgggcgggaaggtctgtcattgct

SEQ ID NO: 442430 - DNA, 201 bp, Homo sapiens
ggtgccctcatctgtacccatagtgggagatccctgaatgagctgcgtggacttagagagcaggatatgcctcattgaaggcttaccaccctcatccttgyccttacaggacctgatggagaaggtgatggttcttaacaggagcttggagcaactgcggggtcctcatggggtgagcccaggccctgccacaacctacag

SEQ ID NO: 442431 - DNA, 201 bp, Homo sapiens
tacagggtagatactgacgtggaatcctgggagcagtgtgtgtttcttagggctcatgaggagccaagtgagggaagaaggagctttgccaagttggagaraagttaattctgggcttattttgcaaaaggatttaaaaaacaaccaccccccccctttccagtcagcagcaatagcagtgtcaggctgaatgcatgtgat

SEQ ID NO: 442432 - DNA, 201 bp, Homo sapiens
taggagtccagtcagcctgacctatggtaacacaggaaacctgccttttgggcatctttcccttcctggcccttttctttgctgtctgtaagtgtttagcrtctgtagaagtcttcagactcctcactctcttagaaccagagtgagacacagagtccctaagcttttgggctgggagtggagagctgtgtcttaaccatg

SEQ ID NO: 442433 - DNA, 201 bp, Homo sapiens
aagcctctgcttcctcagccttctttgatgagctggtccctcagaacatgactccttgggagatccccatcacaaaaggtaccctgaccctgagggagagrgagagtctctgcttaggactaggtgggcacggaggttttggacttgagacattcccttcttgtcccctgcctcgtgccttcctcccaccgtctcaaatgc

SEQ ID NO: 442434 - DNA, 201 bp, Homo sapiens
tgcttattctatacaatgtgacccacatcctgtcttcggggaaggagcctgtgattgctcagaaacagaagcacacgggggctgtcagagccctcgacttkaatcctttccaggtactacatttcagttagtcaaacatggccaagccagggagcaacagatctgagtggaagcattcatttgtggcctccagtctgtaac

SEQ ID NO: 442435 - DNA, 201 bp, Homo sapiens
cctaagtttgtactgatgccagttcctcctctttataggtttcacaagctggtctgggggagctttggcagtgggcttctggaaagctccggggttattgytggcggcggggacaatggcatgcttattctatacaatgtgacccacatcctgtcttcggggaaggagcctgtgattgctcagaaacagaagcacacgggg

SEQ ID NO: 442436 - DNA, 201 bp, Homo sapiens
cagatctcctcttccttcagcaaaggccagcctctcccaccactgcaggtgccagagcaagtggcacaagcaccactgatacctcccctgaaaaaaccccmcaaatggattagaagaccaacaggtgtttcatttgctgtaagtgtagtggatgtataggtgtgtgtgtgtttgtgtgtgtgtgtgtgtgtgtgtgtgttt

SEQ ID NO: 442437 - DNA, 201 bp, Homo sapiens
attgttggtctagggagcctgcttctaatagttacagaagagtttgaatctttctctcaataggagacagtattttatgatgttaagagctcaggctctgsaataagatgggcctgactttgaaccttgaccctgctacttcctagcatttatcctaaaatggggataaaattactacctctgtgtatagaaattttataa

SEQ ID NO: 442438 - DNA, 201 bp, Homo sapiens
aatcatcttagacacccagggtctaagacacccacttcattctgttccagtctaggttaggtcacatgctcaacagtcagtatcataaactattgacctakatgattagggaagatagagggacactcgtcctttgctttctgtcttcctctctctttttttctgtgtcttctgcatgctgtggcataaggcacagttgtg

SEQ ID NO: 442439 - DNA, 201 bp, Homo sapiens
tacctgtttgctagcctgttgggatgggaccttgaatatacattggaattagatcagaaaccacagagttaaaatggatgtccacattcgagcttttaccrtatgccagacattcgtttggaaactagttacaacatggtgaacaaaagccgacacagtgtcagctctcatggagcttgcatattagtggaagagactgac

SEQ ID NO: 442440 - DNA, 201 bp, Homo sapiens
gagctttctacccagggactgtgctcaggtaagtggggccatgtggagagagcaaaccatttcattcagtcatctaacattgattgagcacttccatattmcaggcactatgctaatgctgaagctcctaggatagataagatggaatcccttaagcacctcacaatctactgggggaagatcagatgttgatgacttata

SEQ ID NO: 442441 - DNA, 201 bp, Homo sapiens
ttagatagccttctctgtgaatctgacttagtgttactttttgacttgaaggtataacctttacccttcttgcttttcctcaccagtttggagggaagctsgttacttttggcctccccagcacccctgcccatctggtgccacagccttgcccccgcctagtcttcatcagtcaagtcaccacagaatctgaattcctga

SEQ ID NO: 442442 - DNA, 201 bp, Homo sapiens
cagtattatttctaaagaaagagctgttattctttctgaatcaatctttctaccaatctttgtccctatcccccataaaacaagctagattacctttctcrcagtggcttcctgtgaatccagatggacagacacatttgttgggagccacacacgttccaccgtatctgcagccctcttcacagaaagctgttgcaagag

SEQ ID NO: 442443 - DNA, 201 bp, Homo sapiens
tgcacaatagtagcaaggccttcgctacttaattcttaagtggcatgctgtcagcttttatcaagtgttgagaaaagagatagcatcttgaaaaatgcttytatgccttctacaaaatcccagccaaagatattccagatgacatttaaaacctattaaatgtgtgagcaaatcactctgtaaactaaagagtattagaaa

SEQ ID NO: 442444 - DNA, 201 bp, Homo sapiens
cacatttttttccttatacaactatcttcttttccaaagcatttcttggctaccacaacacttagcagaatgactgctcttacctttatttcctgattacmaccttctggcattgcatcttcaatactttattatatttatttgtctatcttccctactagcttatgtgatctttgcgatgaagatcatacactattcacc

SEQ ID NO: 442445 - DNA, 201 bp, Homo sapiens
ctcaaaaaaaaaaaaaaaaaattctgaagtttttctattacaatgaaaaatgatcaaatgactctcctatcaatcatccttgggctctattagaaacctaytagggatataaaagacagcctcacatggcaacaaaaaagtttttttaaaacctttcctattgaaaaaaaaatccaaaagagaaaccctgcaaatacagtt

SEQ ID NO: 442446 - DNA, 201 bp, Homo sapiens
ttctcaaaaaaaaaaaaaaaaaattctgaagtttttctattacaatgaaaaatgatcaaatgactctcctatcaatcatccttgggctctattagaaaccwactagggatataaaagacagcctcacatggcaacaaaaaagtttttttaaaacctttcctattgaaaaaaaaatccaaaagagaaaccctgcaaatacag

SEQ ID NO: 442447 - DNA, 201 bp, Homo sapiens
tgttgacaaggatgtggaaaaatcgaaaccctcaaacgctgcttcggggaatgtaaaacagtgtagtcactttggacaagtctggcagttcctcaaacagytaaacagagtttccatctgatccagcaattccagtcctagtcatatacccaaggaaataaaaacatgtccacacaatagcttgtacataaatgttcatag

SEQ ID NO: 442448 - DNA, 201 bp, Homo sapiens
gtatcactccatacacattagaatgtctatcatcaaaaagaaagataataactagtgttgacaaggatgtggaaaaatcgaaaccctcaaacgctgcttcrgggaatgtaaaacagtgtagtcactttggacaagtctggcagttcctcaaacagttaaacagagtttccatctgatccagcaattccagtcctagtcata

SEQ ID NO: 442449 - DNA, 201 bp, Homo sapiens
acagtaaggtatcactccatacacattagaatgtctatcatcaaaaagaaagataataactagtgttgacaaggatgtggaaaaatcgaaaccctcaaacrctgcttcggggaatgtaaaacagtgtagtcactttggacaagtctggcagttcctcaaacagttaaacagagtttccatctgatccagcaattccagtcc

SEQ ID NO: 442450 - DNA, 201 bp, Homo sapiens
gaggtgattgacgtgataaagagtcatctgctagagggggtgccacctccctccagaagctcatgcacaaggccttccaaggaaatttccaatataaatgycatggccatttccttttagcaacaagtgtcagattatccagacacaaataacaggatttactcttgccaatactgtattctgtgaatgttgaaaaacaaa

SEQ ID NO: 442451 - DNA, 201 bp, Homo sapiens
gtcaataagcttatgaaaagatactcaacatcatttagccatcaagcaaatgcaactcaaaaccacagtaaggtatcactccatacacattagaatgtctrtcatcaaaaagaaagataataactagtgttgacaaggatgtggaaaaatcgaaaccctcaaacgctgcttcggggaatgtaaaacagtgtagtcactttg

SEQ ID NO: 442452 - DNA, 201 bp, Homo sapiens
gtgagagctaagcctataaaacttttagaagaaagtaactcaaaatatatctaagagataaatgtaagagctaaacctataaaacttttagaagaaaacayaggagtaactcttcattactttgaattaggcaaaaatatgacatcagaatcacaaaaaataaaaaataaaaaaaaattggacatcatcaaattttaaaac

SEQ ID NO: 442453 - DNA, 201 bp, Homo sapiens
agaagtgttcaaatgagatcagcaaacactgtgggagggggtttgagagcagggtgtcaacacccttcacagagaggagagaggtcttctcagagatcaakcctgcgtgtgacctgcttcatccccttaggaaacccttgtcacgttcatgctttttcttgcccagcaactgaatttcactgttttctttttctctcctca

SEQ ID NO: 442454 - DNA, 201 bp, Homo sapiens
cgggttcacaccatttcctgcctcagcctcccgagtagctgggaccacaggcacccgccaccatgcccagctaattttttgtatttttagtagagatgggktttcaccgtgttagccaggatggtctcgatctcctgacctcatgatccacccgcctcagcctcccaaagtgctgggattacaggtgtgagccaccgcgcc

SEQ ID NO: 442455 - DNA, 201 bp, Homo sapiens
taaaggtaattaagcaatttttaaagacagtataaatgcatattttccttttttctcttaacatgttttaaatggaattgcataatatgatgtgtatgcawttgtattgttaagcctataacatatgtaaatatctatacttaacaacatatgtaaatatttatacttgccacacaaagaaggtagttaggagcaaagcta

SEQ ID NO: 442456 - DNA, 201 bp, Homo sapiens
attgtgtatcctccattcttcctttttccaaaactatgtgtgtgtgtgtgtgtatgtgtgtgtgtttttaatagtatatttaaatattctggccttgttcygacaatgaatatttaatatgagaagcagataatttgcttttttccttcatgaatacctgaagcaagagaatcaaataaatacctagagaaagacacatca

SEQ ID NO: 442457 - DNA, 201 bp, Homo sapiens
ttccacatggtgtgagggaggagaagcacaagtaaaggtaattaagcaatttttaaagacagtataaatgcatattttccttttttctcttaacatgtttwaaatggaattgcataatatgatgtgtatgcatttgtattgttaagcctataacatatgtaaatatctatacttaacaacatatgtaaatatttatacttg

SEQ ID NO: 442458 - DNA, 201 bp, Homo sapiens
aagtcaactaaaatgaaagtcacagctaatatagtgaactccttgctctccagtgtggtaaggaaactgagctttctgatatatagggtactctggttaaygaggtttccttcacatcagcaaatagctgattgcctgcaatgtgtatgacactgtgctgtgctgtgctggctatggggatacatacaggcaaatttagaa

SEQ ID NO: 442459 - DNA, 201 bp, Homo sapiens
ctcattcccagaaaaactatctttcaaaaatgaagaaaaaaagagccattttcagaggaacaaaattgacagaatttgttgctagtaaaggcacttgcaayaactattaaaagaatttcttcagtctaaaaccaactgacccccaaatggaattctattccacatggtgtgagggaggagaagcacaagtaaaggtaatta

SEQ ID NO: 442460 - DNA, 201 bp, Homo sapiens
gcttccagaaaatgactgtgaaggccagtgaatggcagtatttctaaaacgtcatatttcttcatataaattattaaactggtgtctggtttatacattartctcctgatactaatgtgatctcatcactaaaagagtatggtgactaataatgaatttcagattttgcaagtctatgaagaacttaggtcatggtgaaac

SEQ ID NO: 442461 - DNA, 201 bp, Homo sapiens
tatttattaaatgcatgaattaatgaaggaaaaaacaatcaaagagattaacttcctatcctaccttatcttgcaaagcataatagctccgtgtgccttaraaatagttgaagaagcaaacatctgaggcccactatcaccagctaaagcagggtgacccagggcacatgtgtcaaagtggtgttctcatttcccatgtca

SEQ ID NO: 442462 - DNA, 201 bp, Homo sapiens
ttttgcaagtctatgaagaacttaggtcatggtgaaaccactctagtagttaaagggacacaactagcttaacatgggacttggcagggtctcaatgcagycagcctcaacatccatatttaataatcttttataaagtggtccagtggtccccaacattttgtgttgaacatttttagatacaaaaaaactattttttcc

SEQ ID NO: 442463 - DNA, 201 bp, Homo sapiens
ggatgctcagaagattctgggtgggatgaaacacagtgatctgtaaacgagaactatgtccatttcttgctttcctgagtcctcgctgaggactgagcaayggctgcggaatcattcctaggtgtgtccagaggtacggacagctcatcactcctccctgctgtgatggagctgactgcctcctgccagagggcgatgtat

SEQ ID NO: 442464 - DNA, 201 bp, Homo sapiens
aaagaaaaatatgcttagagaggttaaggaagatatgagggcaatatctcatcaaataaaaaataagaattatttttacaagaatctaatggaaattctgyagtaggaaactaatataactgaaatgaaaaatgtactagagggtctcaaaaactgatttgagtgggtagaagaatcagctaacctggagacagacgaata

SEQ ID NO: 442465 - DNA, 201 bp, Homo sapiens
agcttaacatgggacttggcagggtctcaatgcagtcagcctcaacatccatatttaataatcttttataaagtggtccagtggtccccaacattttgtgktgaacatttttagatacaaaaaaactattttttcctcatgaaatttatttcccacagaatttaagtgatcaagatagataatgaaactcagtaatgtcat

SEQ ID NO: 442466 - DNA, 201 bp, Homo sapiens
ggtcccaaatctttttattcgtgccctctttagaaatagtccctgcaaccacccactgatcacgagcttccacctcaccccgggcaagtacctctcagcaytggatgctcagaagattctgggtgggatgaaacacagtgatctgtaaacgagaactatgtccatttcttgctttcctgagtcctcgctgaggactgagca

SEQ ID NO: 442467 - DNA, 201 bp, Homo sapiens
gtctactcttgatcttaaagcattttctgattgttcagaattcatgtcacaggccaaaagagaatctctgtgtaaattatctgataaaaatcatgagcagyagcatgccaaacagaatcaggcacaaattagtaattccacatcagaacatatttcagtcatgtaaaaaatttgttttccaattaacacccgctgatttgc

SEQ ID NO: 442468 - DNA, 201 bp, Homo sapiens
tcctctgaggaacaacatcagaggctttacactgctttacactgccagtgtcactaaatttattcagccaagtcactaaacaaataagcatgcaaataaayaaaagataagaaaaagcagttttagggaaggggacactgctacattatattatctaaaatgcctactgttctaaaaaaaagggaaacatgcaaataaaca

SEQ ID NO: 442469 - DNA, 201 bp, Homo sapiens
ctctccaaacaccaccagatactttaaactagatctaagacagctcacctctctaattttacaaagtgctggaggtgggagccaacaatcacccagacaaragaacagattttcctcttttggcatattgctaatctagtctcaccactggatagagacaccataactcagaagacagaggagaggctcctggatccagtc

SEQ ID NO: 442470 - DNA, 201 bp, Homo sapiens
aacattgtactggaagttctggccagggcaatttggtataaaaatgaactaacaggcagcaggtaggacaggaagacataaaacaatctccatttggagakgacataatcttatatggaaaaattctaaggaattcactagaaactattagaactaatcaataagcttaccaaggttgcaggatgcaaagtaataggcaaa

SEQ ID NO: 442471 - DNA, 201 bp, Homo sapiens
aatagttctagaactaactgagccctagggtaaagtctatattagactgacacgaaccaaacttagaaggaagcctcaacatgccacaaggggaaagagckccaaagagctcctcaaaatcactgattttatttagaaaagagagtggggaagttcaagctttagggcattctcaaaaaccaggaagatttcaacaataag

SEQ ID NO: 442472 - DNA, 201 bp, Homo sapiens
aaaaggggctctagggttccccaattccagtccttggctctgggatgacatttccggacattccctgggccagaggggagcccactgctctgaagggtgartcccaggcatagcagtattcaccataagctgactgaagagcccttgggtcttaagtgagcatcagcagtactcagccaatactacttgtgggcctgtatt

SEQ ID NO: 442473 - DNA, 201 bp, Homo sapiens
gggcaatttggtataaaaatgaactaacaggcagcaggtaggacaggaagacataaaacaatctccatttggagatgacataatcttatatggaaaaattytaaggaattcactagaaactattagaactaatcaataagcttaccaaggttgcaggatgcaaagtaataggcaaaaattaatttcctttctatacagtag

SEQ ID NO: 442474 - DNA, 201 bp, Homo sapiens
tccaagaattaaagaacttgggttctcagcctcattctttcattaagaggttataggtatgtccttcccccagggcatcctgacctttaaataggagagaygatccctaaaggtcattctagctctaaaatgcctggttgtctacaaatgaggtgttttccaccatttcttgataacccttaaccacagagacatttgatt

SEQ ID NO: 442475 - DNA, 201 bp, Homo sapiens
gccaaggtgactggaattaagggggcagagtacctaacaggaggaaactgtacagagaacactttggaaatctccataggagcccccttggacctttgaaygcaaagcagtgcatccttagaataatacacagaaaagccagtcaaagaataaccaatggggcattatgacaagaacgtatggaagcttaataagtctggg

SEQ ID NO: 442476 - DNA, 201 bp, Homo sapiens
aataaagacagccaaagtttggaatggagaatcaaattgtgttctggagaatagccccagttctgtgttggtgtcagaaatgatcccagtagttgagatgyaggaggtaagattaaagaggtttaataataaaggagtttcaaacatttgcaaaaacacagcaggctctgtagaattgtgaactaaatataaataacacct

SEQ ID NO: 442477 - DNA, 201 bp, Homo sapiens
aagaattaagggagattttatagttaaagtctatagtacagaacttaactcatagtgagcacttaataaaaatcagctgctattgctaattctgaccgacsaacaatgggaggggaatttggagaccttctgttaatgtttcctaaagttttctacagcactctaatttcttaagggattaatattttttataggggagaa

SEQ ID NO: 442478 - DNA, 201 bp, Homo sapiens
cataaaacaatctccatttggagatgacataatcttatatggaaaaattctaaggaattcactagaaactattagaactaatcaataagcttaccaaggtkgcaggatgcaaagtaataggcaaaaattaatttcctttctatacagtagcaatgagcaaccaaaaattgaaattaagaaaattattccatgtatgatagc

SEQ ID NO: 442479 - DNA, 201 bp, Homo sapiens
tctgaaactttattttttctagcatatttctataatcaaatataaaaatagaagaaatataatctgcaatcaggaaatgcaataattaaattgtgttaggmaatggaaaggaagaggagacacaggctgattactgtagaaatgtatgacatgtaacttctttagcagtacatcttcatttccagctttcgagctatactg

SEQ ID NO: 442480 - DNA, 201 bp, Homo sapiens
cttgctgcaatcaggagacaatgattagagtttgaagaagccaaggtgactggaattaagggggcagagtacctaacaggaggaaactgtacagagaacastttggaaatctccataggagcccccttggacctttgaacgcaaagcagtgcatccttagaataatacacagaaaagccagtcaaagaataaccaatgggg

SEQ ID NO: 442481 - DNA, 201 bp, Homo sapiens
ataaagccttttatttgtctatgaggttagataagtgggcattcagcattaactgtgcatcagacaatgttctgaacataagaatataacctgcttcttcyccaagaaaatccttctctctatactccaatgtcataaagtccatggccattatccctgtgccctttgctgattgtagatctttagttcattggtctgcat

SEQ ID NO: 442482 - DNA, 201 bp, Homo sapiens
atatattccctagtggtaagagacctctatgcctcaccttctttggctaaaggcattcaacccctgtacacggttttcttctccccccgcctttttttttytttttttttttgagatggggttttgctcttgttgcccaggctggtgtgcgatggtgcaatcttggctcactgcaacctcagcctcctgagttcaagcgat

SEQ ID NO: 442483 - DNA, 201 bp, Homo sapiens
tatgtctgaaactttattttttctagcatatttctataatcaaatataaaaatagaagaaatataatctgcaatcaggaaatgcaataattaaattgtgtyaggaaatggaaaggaagaggagacacaggctgattactgtagaaatgtatgacatgtaacttctttagcagtacatcttcatttccagctttcgagctat

SEQ ID NO: 442484 - DNA, 201 bp, Homo sapiens
ggaaaatattgttagctaatacaacagacaaaaatcaaaattttgaatttttaaggagcttggtcaaataagaaaaacacaaagccacaaaaatcaaagamaggacttccacttcttcccatgaagatttagtttgtatgagactataccttctaccataagcaatcataattgtataaaatatataaaacaactgttttc

SEQ ID NO: 442485 - DNA, 201 bp, Homo sapiens
ccaagaaaatccttctctctatactccaatgtcataaagtccatggccattatccctgtgccctttgctgattgtagatctttagttcattggtctgcatrcaaagccctttcatcctttgaagttgaagtcatcccactttaccacctctcctctacctcacattttcatcatttagagattttctagatgaagaagatc

SEQ ID NO: 442486 - DNA, 201 bp, Homo sapiens
gtcttgaactcctgacctcaggtgatccgcccttcttggcctcccaaagtgccgggattacaggcatgagccacagtgcccagcctcttctccctttctcaaaaaaaaaaaaaaaaaattctgaagtttttctattacaatgaaaaatgatcaaatgactctcctatcaatcatccttgggctctattagaaacctactag

SEQ ID NO: 442487 - DNA, 201 bp, Homo sapiens
tcttgaactcctgacctcaggtgatccgcccttcttggcctcccaaagtgccgggattacaggcatgagccacagtgcccagcctcttctccctttctcaaaaaaaaaaaaaaaaaattctgaagtttttctattacaatgaaaaatgatcaaatgactctcctatcaatcatccttgggctctattagaaacctactagg

SEQ ID NO: 442488 - DNA, 201 bp, Homo sapiens
aatacttttaaatgcagataaatactttaattaactaactaaaataaaaatacctttaggttgctatgatgtaagtccacctttgagttatttgctctgaycctaagtcatcaaaaaaaaaaaacttacttttgtttacttactacaataaagacagaaagtaggctgatgtttaaaataacttagagcattgacccaatc

SEQ ID NO: 442489 - DNA, 201 bp, Homo sapiens
atacaaagccctttcatcctttgaagttgaagtcatcccactttaccacctctcctctacctcacattttcatcatttagagattttctagatgaagaagrtcttcattttcatctactaagcaatttgaaacatgcttcacagtcttcctctgcttctggtttctgtcatcataggaatgatttagtcattcattttttc

SEQ ID NO: 442490 - DNA, 201 bp, Homo sapiens
cagatgacatttaaaacctattaaatgtgtgagcaaatcactctgtaaactaaagagtattagaaaatgtttgttaatattatttttattatcattattatttttttttttttgagatgagggtctcactctgtcaccaggttgaagtgcagtggcatgatctcggctcactgcaacctccacctcccgggctcaagcgat

SEQ ID NO: 442491 - DNA, 201 bp, Homo sapiens
tttgctcactacccaaatcagaaaaataaacattaagagataaagcaacaaaacatacacaaaacacttcagaaaccaactagtgaaaggacagaagtaamttttcacctatcactaacaaccttgaatgcaaataatttaagttttccaactaaaagatatagactagctaaactgattttaaaaaaagacccaaatatg

SEQ ID NO: 442492 - DNA, 201 bp, Homo sapiens
agatgacatttaaaacctattaaatgtgtgagcaaatcactctgtaaactaaagagtattagaaaatgtttgttaatattatttttattatcattattatttttttttttttgagatgagggtctcactctgtcaccaggttgaagtgcagtggcatgatctcggctcactgcaacctccacctcccgggctcaagcgatc

SEQ ID NO: 442493 - DNA, 201 bp, Homo sapiens
atacatgcttaactttactcctgttgagaaacagctaacagcacaaggcacaacagagttgagcataaaaaaaagcgtagaagcaggttaagcaaaatggyaaaggcagaaaggagaaagagcaaaacagtcgtggccactcaaggaatgggatgaaccactggggccaacacaaacggagactacttccaactctgtgaa

SEQ ID NO: 442494 - DNA, 201 bp, Homo sapiens
ttagcacaaagcagaccaagaggcagaatccccaccagttcacagcgaagaatcagcaaatcaaggtgggaaaagcagcagcagccagaaacatataaacaaaaaatgcaccaaggcagcccgcctcagccttgactggtagagaatgcaggcaacatttcagtaattacactgtgaacctcaaaatatagcaaactcctg

SEQ ID NO: 442495 - DNA, 201 bp, Homo sapiens
ttgggatgccgaggcaggcggatcatggggtcaggagttcaagtcctgcctgaccaatagggtgaaaccccatctctactaaaaaatataaaaattagccrggcatagtggtgcacacctgtaatcccagctactcaggaggctgagcatgcctgtaatcccagctactcagaaggctgaggcaggagaatcacttgaacc

SEQ ID NO: 442496 - DNA, 201 bp, Homo sapiens
gtttcttttagtgtgtctttgatcataggcacaaacacactagccttgtctattcagcttcaggatcagctgcttgagagcacaaaccaagttagactcakcagtgaaacctgccatccctcacagagcacctcacacagagtattgtgcaaactatgtattcagaacattactgggaagttgcagtggcttttatttttc

SEQ ID NO: 442497 - DNA, 201 bp, Homo sapiens
agcacaaagcagaccaagaggcagaatccccaccagttcacagcgaagaatcagcaaatcaaggtgggaaaagcagcagcagccagaaacatataaacaamaaatgcaccaaggcagcccgcctcagccttgactggtagagaatgcaggcaacatttcagtaattacactgtgaacctcaaaatatagcaaactcctgat

SEQ ID NO: 442498 - DNA, 201 bp, Homo sapiens
aatcccagcactttgggatgccgaggcaggcggatcatggggtcaggagttcaagtcctgcctgaccaatagggtgaaaccccatctctactaaaaaatayaaaaattagccaggcatagtggtgcacacctgtaatcccagctactcaggaggctgagcatgcctgtaatcccagctactcagaaggctgaggcaggaga

SEQ ID NO: 442499 - DNA, 201 bp, Homo sapiens
gtaggaagaactaacacttctaccagcagatttaggctggttgttaggctttgcaatatcaaagtccctttaggcataaaaaagaaagggtggggccaggygtggtggctcacgcctgtaatcccagcactttgggatgccgaggcaggcggatcatggggtcaggagttcaagtcctgcctgaccaatagggtgaaaccc

SEQ ID NO: 442500 - DNA, 201 bp, Homo sapiens
agtataatgaggttaaataccttgtccaaggctagctagtcaaaagtggatctggccccaaagtctaacttcctaactaaaactttacagtggaacagctytctccttcttttttatctggtcaactcctgtgtacccttcaaagttctactgaaatatcacttcctcagtgaagtcttccctgatctctttgataaagcc

SEQ ID NO: 442501 - DNA, 201 bp, Homo sapiens
aaggcctttgcaaatgttaatgacagttcatgtttcttgagcacagcaccaaattgagcaatgtaagaaatacattttaatctaatccttatagcaaatcyctttttcagatgggtagacaaaagtataatgaggttaaataccttgtccaaggctagctagtcaaaagtggatctggccccaaagtctaacttcctaact

SEQ ID NO: 442502 - DNA, 201 bp, Homo sapiens
cacagcatacccaccaggacaacttgaatcaaaaagtgagataataacaagtataggtaaggatgtagagaaacttgaatactcatccattgctggtgggmgtgtaaaattatgcagccactgtgcaaaactgtttggtagtttcttagaaagttaaaaatagaattacggtatgatccatcaatcccactcctaagtata

SEQ ID NO: 442503 - DNA, 201 bp, Homo sapiens
agcttgtaggatcaatggtaattccagggggttagtgccagaactgaattgcagtataccaattgatgttggaatatagtccctcaaacactaaaggcaartgaaccaaagttcactccttctaccttttggtttataactagttcatgaaacagaaaagaaagtttagccaaaagctttctagttaatagatttattaat

SEQ ID NO: 442504 - DNA, 201 bp, Homo sapiens
gatttactcataatagtcaaaaagtagaaacaaccctaatgtctataaactgatgactgtttaaacaaatgtggtgtacctgtaaaatagaatattattcrgccataaaaaggaatcaggtactgatacatgctataacatgagtgaacctgaaaaacactacgctcagtgaaagatgtcagacacaaaaggccatagatt

SEQ ID NO: 442505 - DNA, 201 bp, Homo sapiens
tttaaacaaatgtggtgtacctgtaaaatagaatattattcggccataaaaaggaatcaggtactgatacatgctataacatgagtgaacctgaaaaacaytacgctcagtgaaagatgtcagacacaaaaggccatagattgtattgtttcattaatataaaatattcaaaataggcaaatccatgctgacagaaagtag

SEQ ID NO: 442506 - DNA, 201 bp, Homo sapiens
ctgaattctgtgatttgttcccatgaattatcaagcccagggaaggccataagaatccccagatttatagtcagttagtatgaaaggagggcagtcttgcygtggaatgtgccctttagcttgtaggatcaatggtaattccagggggttagtgccagaactgaattgcagtataccaattgatgttggaatatagtccct

SEQ ID NO: 442507 - DNA, 201 bp, Homo sapiens
ctcacatttgtaatcctagcacttcaggagtctgaggcagggggatcactggagctcaggagttcaagaccagcctggccaacatggtgaaacctcatctytcctaaaaatacatatacacatacacacacacacacattagctgggcttggtggcatacgtttgtaatcccagctacttggaaggctaagggatgagaat

SEQ ID NO: 442508 - DNA, 201 bp, Homo sapiens
gcagccctttggggagcacagacctgggctccccgagccagggctgtgactccctctttggggccttgcagttcctggtgtctccaagcttccaggtgccrccgtgttccccggtgctggtggaagctgcttgaggtgtacctggtccagccacaacctcacagagagttggtaaccctgccggtacctggagctgcccac

SEQ ID NO: 442509 - DNA, 201 bp, Homo sapiens
aactaaatggtcagtgattcaatcaaccatgcctgtgtaataaaactccaataaaacctctggacaccgaagctcagcagagcttcctggttggtgaacayctcagtgtgccaggaggttgatgcgccctgattccaggggaagaagccatggaagctctgtgctagggcctctcccagaactcaccttctgtgtctcatc

SEQ ID NO: 442510 - DNA, 201 bp, Homo sapiens
ttcttcaaagctatatcccagtacccagtactgtgcctagcacatagctgatgctcagtgaaagaaaaaatattttaatctattaaataaataaaaaaaamaatgaataaataaaccctgaccctaaacaggccatcctatctgcttgttggtttctccccatatgctatgcatgccatttcatcttttaaaattctgata

SEQ ID NO: 442511 - DNA, 201 bp, Homo sapiens
atacctacgatgcttacataattacaataggagccattaacctacttctctcagactgtcatggattgagcaatcaatcagttaatcaatacacatagaakttaaataacacaactcaaagttgctacatataaagtcatatgtctgtatttatctatacattttcaaaagcaatccattatttttaaatgtatcaaaaat

SEQ ID NO: 442512 - DNA, 201 bp, Homo sapiens
tgacccttaaacctatccaaggagactatgaaaaaatgataattacaatacctacgatgcttacataattacaataggagccattaacctacttctctcaractgtcatggattgagcaatcaatcagttaatcaatacacatagaagttaaataacacaactcaaagttgctacatataaagtcatatgtctgtatttat

SEQ ID NO: 442513 - DNA, 201 bp, Homo sapiens
attgctggtgggaatgcaaaaactggcacagctgctttgaaaaatggtttagcagttgcctgtgaatttaaacatacacttaatatacaacccagtaagcycacacctacacacttacctaagtgaaatcaaaaccgctgttcacacaaaaacctgtatgcaaatgtttatagtggttctattcataattgttccaaactg

SEQ ID NO: 442514 - DNA, 201 bp, Homo sapiens
ttaatctgtgggcatcctttgaggtctacatcaaaagtgactttctccaaagataatttgtattttcttcatcaggactcccaaggtacctaatccagggycactttaatatactttattgagcttcatgggtaaagtaaatctgggtgtcaagtctgcaacccttcaagtgctgtggtttactagttctctgggaagtat

SEQ ID NO: 442515 - DNA, 201 bp, Homo sapiens
ggaagaatgtgatccttttctgagcagttcaaaggaggacacatttctgtaatttttactaaaactccaccctggaagccaaatattagggaaagaaaaasatgttcacatttttagtcaatggaacaaacttataatgttctttgttaatagcctgcagtgataacaacatacaataattaatactcccagggattccac

SEQ ID NO: 442516 - DNA, 201 bp, Homo sapiens
ttaagtgcacaattcagtggcattaaatacattcacagtgttatgcaaccatcaccactattaatcaaacttttctattgcctcaacaaaaactctgtaascattaagcaataactcccatgactcccgccaccatcccctgttaaccattaatttactttctgtctcaataaatttgcctatttttgatatttcatataa

SEQ ID NO: 442517 - DNA, 201 bp, Homo sapiens
ccaataaaaaaagctgctatcaaatatgaaaaaaaaaataagtaactgttttagtgaataagaaaaaaaaaccttctttcaagaatatatctgttgaaatkgataataatgtggtcatgcctgagggaaaaatgcataggttttgtagtcaaacctactaattattcttccatctaaaacactgtcttccctttggcttaa

SEQ ID NO: 442518 - DNA, 201 bp, Homo sapiens
tcaatatttttaatattatttttctaaaattaagcattattatattttaatcaaacaaggataatggcaatcattcagaataataatcactgagatttgtrcatactgtcaacatgcatttgctctccaattcttcttgcactgtatgtcttccttccaggaagttttttaaatgaagatctattggttataaactgagag

SEQ ID NO: 442519 - DNA, 201 bp, Homo sapiens
tttaagtgcacaattcagtggcattaaatacattcacagtgttatgcaaccatcaccactattaatcaaacttttctattgcctcaacaaaaactctgtarccattaagcaataactcccatgactcccgccaccatcccctgttaaccattaatttactttctgtctcaataaatttgcctatttttgatatttcatata

SEQ ID NO: 442520 - DNA, 201 bp, Homo sapiens
cggctggagttactggaaatctgcctcccttggctgcagggagggggctcccctttcccgtgtggctctcagatgggccgtcgcaccgcactgttcctccytctctccatgagtcacgccagccttctagtcaattttgatgacagaacccggatattttggttgatggtgaaggattccattgtcaatatttttaatatt

SEQ ID NO: 442521 - DNA, 201 bp, Homo sapiens
ttttaagtgcacaattcagtggcattaaatacattcacagtgttatgcaaccatcaccactattaatcaaacttttctattgcctcaacaaaaactctgtraccattaagcaataactcccatgactcccgccaccatcccctgttaaccattaatttactttctgtctcaataaatttgcctatttttgatatttcatat

SEQ ID NO: 442522 - DNA, 201 bp, Homo sapiens
caagacaagaggctaagtctgctggtccacacagactgtggccacctctcccgctaggggctcaggcccagggaaatccgaattctgtccctgagtctccrgctggagttactggaaatctgcctcccttggctgcagggagggggctcccctttcccgtgtggctctcagatgggccgtcgcaccgcactgttcctcctt

SEQ ID NO: 442523 - DNA, 201 bp, Homo sapiens
attgatttatttataccacatcattttctacaagttgtttaaagaaatttagaataaaagacacacaaaaccatcttataacttataccaaaaataatctyagtagactgaatattaattataaaaagtgaagcccctcaaacacccatgaaagaaattctaggaaaatgtttgttctctagttggaagaaattattaaaa

SEQ ID NO: 442524 - DNA, 201 bp, Homo sapiens
ctggggggaaacctactcgtctagactgcccggattcttcagaattaccaagacaagaggctaagtctgctggtccacacagactgtggccacctctcccsctaggggctcaggcccagggaaatccgaattctgtccctgagtctccggctggagttactggaaatctgcctcccttggctgcagggagggggctcccct

SEQ ID NO: 442525 - DNA, 201 bp, Homo sapiens
catcctagtccttatgtcctcattttcatttttattggttttaagcaaattttaccttttaaaaggaagcacacagtattatctgtcttaatcttatatcwcccaagaatgaccttaagtccatggaacaaaattgatatacatgaattctaaaataatgaaaaatgacattcaaccactttcctgtgatatgcacttatt

SEQ ID NO: 442526 - DNA, 201 bp, Homo sapiens
tatagggtgcttgacaacccctgttggagggtctcactcagttgggtggcacagggagcaggacctgtttaatgaggcattttggccattggtggagcggktgtgctttgctggggggaaacctactcgtctagactgcccggattcttcagaattaccaagacaagaggctaagtctgctggtccacacagactgtggcc

SEQ ID NO: 442527 - DNA, 201 bp, Homo sapiens
agaattgttccattttgcctattggctcaaaaagcctaaaatattactgtctttctctttaccaaaatagttttagactcctggcctccaatatttaccayccataatatctgcacttctcctttgtagcattcattatacctatgttctttttatgctctaatgtttgtctattcttctacacacgttccttgaaggtag

SEQ ID NO: 442528 - DNA, 201 bp, Homo sapiens
atatgaaattctgggttgaaaattcttttctttaagaatgttgaatattggcccccaatctcttctggcttacagagtttctgctaagaggtccactgttrgtctgatgggcttccctttgtaggtgacttggtctttctctctggctgcccttaacagtttttttccttcatttcaaccttcgtgaagctgatgatcatg

SEQ ID NO: 442529 - DNA, 201 bp, Homo sapiens
cgtgaggccaaagaaaaatgccagtgctagtagatccaagagcagatctgccttccagatcttaattgttgccacttgatttgttttctacctggcttcasactcagatcagtagctcttcagttctgttaactacacagtgcagaaataaatccactaaatgtagcatttatgtgctcaagtcaagttgccccaatcttt

SEQ ID NO: 442530 - DNA, 201 bp, Homo sapiens
agtgagaaaaatagagagagagagaggaaatagttaaagtcaaattgattgcataaggatatttgtccttttctagctcttgatgtaactgcaaaaaatayttagaaatatctataggaaatatctcaggatagaattaaaatagaatgaataaaattcagaacacttttaagtgattcaggcatttaaaatgctatttta

SEQ ID NO: 442531 - DNA, 201 bp, Homo sapiens
agatttcctggagagtgattagtctttggccttggtctccatcacctgatcttcctattgtcatctcaattagtcttttacctcgccacttatcaaatgtyacctctgaccttctaactacaaagcccagcagattcttcttgtcattttccacacattacctttatgtatgtatcactgttaaatatttctagaaattct

SEQ ID NO: 442532 - DNA, 201 bp, Homo sapiens
caatccactacttattcatttccctctatttagaaaattttagacctccccagtgccagcaaggcttgcattgctggatgttccagtgatataaaaatgaractgattttcctccagtaaataacattaatgttgatcaagaatattggacataagaccaaacatattagcctttccttgaaaccaactgcactatgtcaa

SEQ ID NO: 442533 - DNA, 201 bp, Homo sapiens
actgtgttaaaaactaaatacatcaggatgctctaagccactgaagagccatgtttgccagtcacattatactgggcttctctggttatacaaagggacasctaatgaagatattctgttgatataaaagcagtctcatggacagtaatctttctatatccttaggcagccacaatactgcctgtcaaatataattaccag

SEQ ID NO: 442534 - DNA, 201 bp, Homo sapiens
cacaagtaataggaaagtgagaaaaatagagagagagagaggaaatagttaaagtcaaattgattgcataaggatatttgtccttttctagctcttgatgwaactgcaaaaaatatttagaaatatctataggaaatatctcaggatagaattaaaatagaatgaataaaattcagaacacttttaagtgattcaggcatt

SEQ ID NO: 442535 - DNA, 201 bp, Homo sapiens
gctatctctgcctgtgtttcagaaagaaatctagaagtaatgcatttacctcactgttcttaatgaacagtcaataaaatctcacaaaataatgtttaatmcctcacaaataattcttgcaaacttttcagtcctatctctaacaacacctcttatctccacaacactctgaattctttccatttaacttttcttctagat

SEQ ID NO: 442536 - DNA, 201 bp, Homo sapiens
tgcattgcttctatttttggttctttttaaataaattttttttatttaattagaaaaatgtcagtacaacaattccttcacttctaaataacagccttgtkgacttaagggttgtaaatttcaagactgtgagaatgagtaaagaaaagtgagagaaaaaagccatagggccctgaaagtctttacatgtccaagctggaa

SEQ ID NO: 442537 - DNA, 201 bp, Homo sapiens
agaaagtccagcatcaaaataacaggaaagctagaaaaagaaagagaagaccaaggaaaaaggagtaagagtacaggagaagtcaccaaagatatcatgtyagaacatttacagacttaaatgttatgaatatctagattgaaaaagtccactgagtgaccaacaggatgaagaaaatgtataccaatatcatcatgaaat

SEQ ID NO: 442538 - DNA, 201 bp, Homo sapiens
agctttatttgactgtcttcaggtagacaacttcccagatgccctgacagtggggatccatctgcttctgaaagatcccctgtgaagggaatgttttaatytccattggcagataacaaataaaaggcattggaaatttcacacccagatgaagggtgatgcttaatccaaagtgatttatggcttgagccacacgattat

SEQ ID NO: 442539 - DNA, 201 bp, Homo sapiens
cctgtgtttcagaaagaaatctagaagtaatgcatttacctcactgttcttaatgaacagtcaataaaatctcacaaaataatgtttaatccctcacaaawaattcttgcaaacttttcagtcctatctctaacaacacctcttatctccacaacactctgaattctttccatttaacttttcttctagattacaaagcac

SEQ ID NO: 442540 - DNA, 201 bp, Homo sapiens
cgatcaaaagagattctggtacccccataattttgctaattaggtactataaggcagatgagctcttcttaaaaacatttgacaatactagtaggaaaatyaatgcattccctgttgctaagaaattaaacatgtgtagccactcctctttaggctgcctctccacactgccacccaccagcaatcaagtccccttatccc

SEQ ID NO: 442541 - DNA, 201 bp, Homo sapiens
tatactttaaattttcctatatgtttgtaagtttgtgaatattattaaaaggaaaatgcttatagtgtcacaaagatttatactggaaagaattctaaaartattcaaaatgaagtgtcctaggttacacagccagacacttcagagcaggtaaatggaaactctgatgctaaaaccaagtttctctaatttgcacatctg

SEQ ID NO: 442542 - DNA, 201 bp, Homo sapiens
gctctctcatccattaagatgtacttggcatcatatacaaaacataatggcttgaccaaaattttacttgctaactgaatgttgtgtacaaatggatttgmgtttttagagggtggggaaaggacctaataatgtcataagctttatttgactgtcttcaggtagacaacttcccagatgccctgacagtggggatccatc

SEQ ID NO: 442543 - DNA, 201 bp, Homo sapiens
ttgttttgtagcaaattactacaaacttaatacaacacaaatctatcaccttacagtaggtcagaattctaaaatagattggcaggcctgtgatacttctyggggctctatagcacaattggtttccttgctttttccagctttgaaagcctgcctgcattccttggttcactaccctttctagcaaaggcatcactcaga

SEQ ID NO: 442544 - DNA, 201 bp, Homo sapiens
ttacctcactgttcttaatgaacagtcaataaaatctcacaaaataatgtttaatccctcacaaataattcttgcaaacttttcagtcctatctctaacarcacctcttatctccacaacactctgaattctttccatttaacttttcttctagattacaaagcacagaaacctgactcatgtctctacgacttttcattt

SEQ ID NO: 442545 - DNA, 201 bp, Homo sapiens
atcccagctctgccaagtacctgctgtaagaccttaggtagctgttttccttccttcatccttgagttgcctcatctgtaacactcaccttccagggttcrggaatgaatgaatgaatgaatgaatgaatgaatgaatgaaaagtgcctaatatttaggtaataggcaccttatgacatttctgagatgctttaaaaaaat

SEQ ID NO: 442546 - DNA, 201 bp, Homo sapiens
tggctctctcatccattaagatgtacttggcatcatatacaaaacataatggcttgaccaaaattttacttgctaactgaatgttgtgtacaaatggattygcgtttttagagggtggggaaaggacctaataatgtcataagctttatttgactgtcttcaggtagacaacttcccagatgccctgacagtggggatcca

SEQ ID NO: 442547 - DNA, 201 bp, Homo sapiens
gggaagaacattagcctccaaccattttcataactgattgatacctacctaggtatggaactgtatttttttttggctattcacagtaccttgaaattctrtatgaattttaggataggcttttctttctgcaacaaaagactttgggaatttgttgagtcattgggattgctttgaatctgtagattgggattttattga

SEQ ID NO: 442548 - DNA, 201 bp, Homo sapiens
tctactgaggaaatatttccattccatccaaaaaaaaatattttttcactaaacaaaaaaataataaaatccccaacaatttataaaataactgttttagrctatagaaaacagacagtgtatgatagtgatccctaagagatgagaaatgaggaagtacatcgtgcagttttgtacagcatactgcttatattctctgta

SEQ ID NO: 442549 - DNA, 201 bp, Homo sapiens
agtggagagtgagaagtaaagttggctttattggggtcccagaggtcagtggtgagggacatgactcagtacttggggagggggaccctctgcattgcagmagcctgcacttggggagatggagggggcttagtaagcttcaaatatgtaatttcttctctccagttgagcccaaggagagagccggggggaagctagagg

SEQ ID NO: 442550 - DNA, 201 bp, Homo sapiens
gggctgggctgaacatgcaaacagagatgatttataaaacatgttaaggccatcagtcaattggctctctcatccattaagatgtacttggcatcatatamaaaacataatggcttgaccaaaattttacttgctaactgaatgttgtgtacaaatggatttgcgtttttagagggtggggaaaggacctaataatgtcat

SEQ ID NO: 442551 - DNA, 201 bp, Homo sapiens
aaatgaagtctcagaaacatatagaataatatcaagcaatacaacatacaaataatttgagtcccaagcaaaagaagaaagagtaaaagggccaggcatcrcctgtaatcccagcactttgggaggctgaggcaggtggatcacctgaggccaggagttcgagaccagactagccaacatggcaaaaccctgtctgtataa

SEQ ID NO: 442552 - DNA, 201 bp, Homo sapiens
tcagcactctgtaaaaatgcaccaatcagcgctctatgtctagctaaagtattgtaaatgcaccaatcagcactctgtaaaaacgtcccaatcagtgctcygtgtctagctaaaggattgtaaacacaaccatcagcactctgtaaaatgaaccaatgagcaatctgtaaaatgaactaatcagcaggacgtgggtgggga

SEQ ID NO: 442553 - DNA, 201 bp, Homo sapiens
tttgtagacaaacccaagaagaaggatgtgagaactccattaacagaacacttcatcatcactatcccttgattactcaccatgattaatgtcctaagagkgaaaggacaccatgttcatgaaacagagtatgctatgagaaaacacaggaagagaaaaagcagtcttgaaacataaaagaggacaacagaaatgaaaagg

SEQ ID NO: 442554 - DNA, 201 bp, Homo sapiens
tataataaactaaggttgtatataaataatgttgaaaaattttatatgtattgaatagtgtaccttaattaatgctatataaatgtccattgttgatttcrcatgaaattaagactaaaacagatttgtagtaaactatgttaaggcctaatatttatacagaactaaagcaaactttgcttaagaatggcaggctttggt

SEQ ID NO: 442555 - DNA, 201 bp, Homo sapiens
ttttgtagagacatcttgctatgttgcttagtctggtgttgaacccctgacctcaagtgatcctcctgccttggcttcccaaagtgctgggattacaggcrtgagtcatccttcccagccctcattccaatttaaacagcagcccccagttctcattccttgattggagattttggtcaacaagatcaacaaatacctgac

SEQ ID NO: 442556 - DNA, 201 bp, Homo sapiens
tcctttttctctctcgtctgcttgtgggactcccacaatgtgaaagctggctctttaaatctcctggaagttgttttagtgggagaaggagtagcttacartaatgctgtggggtggggacgtgagggggtggtggagaagggcttacaacaatggcttcctgcctttgtatctctacctgcaaaatcagaagcagcgata

SEQ ID NO: 442557 - DNA, 201 bp, Homo sapiens
ctttagatctaatgcctgagacagacacatgcatggacacaccttataattcaatgcattaaattcaatgtttcctggaagcagaaagggaaaaaaaaaamaaaacagaattctgcctgccatagtcagagaaaactttccaaaggagacactacactgagttttgaatgaagaataaagtggagctgaaagagcagacat

SEQ ID NO: 442558 - DNA, 201 bp, Homo sapiens
ttactggttaaaagcatgagctgcagagccaaatgtctgccatgtgcaacctctgtagcctgtgcaaggttcctgatatcttttggagcttatattcaagwgggaacaaatagcagagagtaaaaataggtagatagatgattgatggacagacaagcaacacacaagtgaacattttaatgtcagggaaaaaaatactat

SEQ ID NO: 442559 - DNA, 201 bp, Homo sapiens
gctccatcatattagatgtatgattctgaagacccaattgctgttacatgtgttttttgcatgtgttttagcagtggttggaaatcctttaaaaatcaccmtattaacatcttccagattaaaagtaaagaggaagtagtgaaaatagagaatctatttatctgtcatctcaactttcttcaaagaattctagtcttgttt

SEQ ID NO: 442560 - DNA, 201 bp, Homo sapiens
gcaggagaatcgcttgaacccaggagacagaggttgcagtgagctgagatcgtgccactgtactccagcttgggtaacagccagattctgtctcaaaaaaaaaaaaacaaaaacaaaaacaaaaaaaaacaaaaacccacacaggtcttttttacatgaaatgctctcaagtttggcttgttgttgtacagctgaggtgtt

SEQ ID NO: 442561 - DNA, 201 bp, Homo sapiens
ttgaacccaggagacagaggttgcagtgagctgagatcgtgccactgtactccagcttgggtaacagccagattctgtctcaaaaaaaaaaaaacaaaaacaaaaacaaaaaaaaacaaaaacccacacaggtcttttttacatgaaatgctctcaagtttggcttgttgttgtacagctgaggtgttagaccccttggaa

SEQ ID NO: 442562 - DNA, 201 bp, Homo sapiens
ccaggagacagaggttgcagtgagctgagatcgtgccactgtactccagcttgggtaacagccagattctgtctcaaaaaaaaaaaaacaaaaacaaaaayaaaaaaaaacaaaaacccacacaggtcttttttacatgaaatgctctcaagtttggcttgttgttgtacagctgaggtgttagaccccttggaagaactt

SEQ ID NO: 442563 - DNA, 201 bp, Homo sapiens
gaggttgcagtgagctgagatcgtgccactgtactccagcttgggtaacagccagattctgtctcaaaaaaaaaaaaacaaaaacaaaaacaaaaaaaaacaaaaacccacacaggtcttttttacatgaaatgctctcaagtttggcttgttgttgtacagctgaggtgttagaccccttggaagaactttatattaacc

SEQ ID NO: 442564 - DNA, 201 bp, Homo sapiens
gagagacatttccagttaaaacagctgaaaattcaaatcaagagaagtccataccttttaaagttggaagactcaagcgaagttggggcttttttttttttgcaagggtaccaaaggttttatataatgaactttttagaaaacaaggtctggaagatacatatgaggggataggctactaattttgagggtgaattcaat

SEQ ID NO: 442565 - DNA, 201 bp, Homo sapiens
attagagctaaaactttaacaccataatgaagaaaacaacaacagaagctaccttaattgactgaagctgagagacatttccagttaaaacagctgaaaaytcaaatcaagagaagtccataccttttaaagttggaagactcaagcgaagttggggcttttttttttttgcaagggtaccaaaggttttatataatgaac

SEQ ID NO: 442566 - DNA, 201 bp, Homo sapiens
cctgctataggcataatatttaccaaagacggaatagtcagaatgtccaaatatctgcacagactttccttttacaaaaggaatgtaggtaactgttataatatattcttgctcagctttgatattcttctagtctaaagccttttatggcttcgatatgtagattctcctctgaaatgctagctgtagagatgctgaaat

SEQ ID NO: 442567 - DNA, 201 bp, Homo sapiens
  misc_feature (1)...(201): n = A,T,C or G
ttccctgctataggcataatatttaccaaagacggaatagtcagaatgtccaaatatctgcacagactttccttttacaaaaggaatgtaggtaactgttntaatatattcttgctcagctttgatattcttctagtctaaagccttttatggcttcgatatgtagattctcctctgaaatgctagctgtagagatgctga

SEQ ID NO: 442568 - DNA, 201 bp, Homo sapiens
tttgaatctacaaagtttagaggtactgaacttcaataatttatggataatgcaaaaggtaatctaaacttaaagtataataataataaaataaaaaaatwaaaaaaaggtaatctagcattagtgctcacagtttgtttcttggagtcagagaccctcagagaggaggaccttggatccaactcatcctgcagcttacca

SEQ ID NO: 442569 - DNA, 201 bp, Homo sapiens
acaaatggcaggaacacagttaatgatgcttatttatcattaacattgaatgtgaatggactaaactctttattcaaaagacatgaagtgtctggctgagktgtaaaaacaaaaacagaagcaaacaaaaaccaagacccaacaatctgttgcctacaagaaacacacttcacctataaagacacacatagactgaaaata

SEQ ID NO: 442570 - DNA, 201 bp, Homo sapiens
aaaataaataacaaatggcaggaacacagttaatgatgcttatttatcattaacattgaatgtgaatggactaaactctttattcaaaagacatgaagtgkctggctgagttgtaaaaacaaaaacagaagcaaacaaaaaccaagacccaacaatctgttgcctacaagaaacacacttcacctataaagacacacatag

SEQ ID NO: 442571 - DNA, 201 bp, Homo sapiens
aaggtacaaaactctctggtattagtaagtacacaaaaaaacacaggatattataatattggaattgtggtcagtaaactacttataatttaagtagaaaracaaaaacatgaaccaagcaaaactaataactataacaacttttcaaaacagaaacagtacaataagatataaataaaacaaagcaagataaaaagtgag

SEQ ID NO: 442572 - DNA, 201 bp, Homo sapiens
ttggcaatgctttaggaaacggataaaatacactgctgagtttggtgatactcttggacactgagggatgatggcatatggtttggccacttgcagatacsaaaatctgaaaatcttcaagtcctttatataaaatagtatagtttgcatataacgtatgcacatcctcctatacactttaagtcatctctagataactta

SEQ ID NO: 442573 - DNA, 201 bp, Homo sapiens
tgtcctataagaaatgctaaagggagttcttcaatctgataaaaaaaaaaaaaaaggacattaataagcagtaagtaatcactgaaggtacaaaactctckggtattagtaagtacacaaaaaaacacaggatattataatattggaattgtggtcagtaaactacttataatttaagtagaaagacaaaaacatgaacca

SEQ ID NO: 442574 - DNA, 201 bp, Homo sapiens
aaaatgaccgtcccacacacgtctagtgagagggcaatttaactgtatgtatccagggccttgaaaatgttcatctttggcccagtaattctggcctgaaraattctattttcaggaaatataaaatacaaaaatatacaaaaatgtgttttctatacaaaacatgttatttaagcgtgctttataatagtgaaaagtggg

SEQ ID NO: 442575 - DNA, 201 bp, Homo sapiens
gacttcataagcaccagaactgtcctataagaaatgctaaagggagttcttcaatctgataaaaaaaaaaaaaaaggacattaataagcagtaagtaatcmctgaaggtacaaaactctctggtattagtaagtacacaaaaaaacacaggatattataatattggaattgtggtcagtaaactacttataatttaagtag

SEQ ID NO: 442576 - DNA, 201 bp, Homo sapiens
tgcaagtgccacctagatctgtaaataaaactaggagacttccctagttttatttatagatttgtgaaagcaaatattatttacttgtgaaagcaaaaatrtggaatcaccctaagtgttcatcaatgaatgaatgaataaagaaaatgtgatatatacaaatggtaaacaaacatatgaaaaaatactcacatcactaat

SEQ ID NO: 442577 - DNA, 201 bp, Homo sapiens
aagtgttgaaggaaaaaatcttttattctggaatagtatatctggcaaacacaaacacaaacacacacacacacacacacacacacacaaatgcttcacasatgaaggagaaataatggctttcccagataaacactgagggacttcataagcaccagaactgtcctataagaaatgctaaagggagttcttcaatctgat

SEQ ID NO: 442578 - DNA, 201 bp, Homo sapiens
agccaaagacaaaatatgacaactttccttatctatctaggtgattaggctataggccttcaaatccagctggcagctgataagaaatcaaaacaccattytgaagaagaggaaaaagatatttcaattccaacagccaggagcaaggaagagccctgcaggttttcaggatggtgtaaatgatgcaaagtggtggctgtg

SEQ ID NO: 442579 - DNA, 201 bp, Homo sapiens
ctaacttccctatttggatgtttaactcattaaatatctaccttttccaatacaagcatttaaagataaatactgctaagaattgctttagctgcatctcrcaaattgtgatatttattatctttctgagttagttattaacttatactattattttcccccagactgattagttactttaaatgatactgtttatattgc

SEQ ID NO: 442580 - DNA, 201 bp, Homo sapiens
ttgcccttgattttccggtagtctgaagctctatcattgaagttgttccagaacttcatcttagtgtatgtaacataactactcacttacagaccatcttraagccaaaatctgcttggttcattgaatatttccaactccaaagtcttcttcatggtgatccattccatcgccttgaacctcctcatgtcattgccaaag

SEQ ID NO: 442581 - DNA, 201 bp, Homo sapiens
gttactactgttttaatttttgcagcatttattgttatatgctttttttatttctaatatatttatgccttctctcattttcttcttgctcaaacttcccrgtgtattttcaaatgatcaaattttggctttcttgatcttgcctattataccctactcattattttatgaatttctgttcttacgatttcatgcttacta

SEQ ID NO: 442582 - DNA, 201 bp, Homo sapiens
gccaatataatgaagcaaagtaatctagtgcaagttttaagcctaggcctcaaaaggccatgcacatttctgctctgactcttgaaactttattccatgawcatgtaaactagtttgggctagacttctggaaatcgagaggccacatgaagcagagatgagccataccagctaaggccattcaaggcctagtacaactag

SEQ ID NO: 442583 - DNA, 201 bp, Homo sapiens
cactttcccccatctcaccacactccagacataatggtctcctggttgttcattcttgtcttgtggcatttgtactggctatttcttcagcctgaaacacycttctccagatacctacatagctcactcactctatgcaggtctgtttttggctaccttctcagtgaggaacaccctactaaaaatcgtacgcttcccact

SEQ ID NO: 442584 - DNA, 201 bp, Homo sapiens
catcaaaaggtcaaatctatttccagtacacttgaatctaagctgggcttgtaacttgctttggccaatataatgaagcaaagtaatctagtgcaagtttyaagcctaggcctcaaaaggccatgcacatttctgctctgactcttgaaactttattccatgatcatgtaaactagtttgggctagacttctggaaatcga

SEQ ID NO: 442585 - DNA, 201 bp, Homo sapiens
gctttacatctagcactctttctgaactctcttgctaattctaataatttggtgatcattttttatatataggcaatatataagttaataactactttttwaattataatccttaagatttttacttattttgctggtaagaacctccagtacaatgttgaatagaaacactgataatagtcattcttgtgtggttcctga

SEQ ID NO: 442586 - DNA, 201 bp, Homo sapiens
aatttgacaatatcaaggcaaattaaagatgcacataacagaaggagacttatgccagtacattaattccaacattctttgtaattgtaaaaactagtcaycaggaaaaaggataagtaaattgtgaactattcatacaatggattactgtatcataattaaaatgaagagctacatatgtgagcagggataaatctcaat

SEQ ID NO: 442587 - DNA, 201 bp, Homo sapiens
gtatatattttatttgatttgttcctatttgattcaccttttgatattataaataaaatatttaattgcagtttttgttattgctgttgcagctgccactrtgctgcttttgctcagcaatgcaattgatcttatctttggctttacatctagcactctttctgaactctcttgctaattctaataatttggtgatcattt

SEQ ID NO: 442588 - DNA, 201 bp, Homo sapiens
agagctgacttttgagtgtcttctattcatatagtcaataaacatttattgagctcctacaaagtgctagacattattcaaggtacttgggaaatattagygaacaaaacaaattaacagatctaccttagtgaaatttacaagctgacagcaagagagaatcagtatacaataatgacaataaatagatgatatagaact

SEQ ID NO: 442589 - DNA, 201 bp, Homo sapiens
cgtttttattattttaagccttcttctccaagaacatagcgtacttctccccagttaggtcttcagtggtttttcataaaatttcataattttctttatargtgtcatgtatatattttatttgatttgttcctatttgattcaccttttgatattataaataaaatatttaattgcagtttttgttattgctgttgcagc

SEQ ID NO: 442590 - DNA, 201 bp, Homo sapiens
tgctctcaaaccaccctattacactgccaccttgcaatatgcccaacattacatacaaaatcttccctgctagggaggcagaaagcaccatctcagaactstatgacctctctcattgtctacttgaattggcaaggctgaataaactgaggcaacataatagataagagttaatgattgggctataatctctttctccag

SEQ ID NO: 442591 - DNA, 201 bp, Homo sapiens
tggctaaagtgtctcagctttccaatttacataaactagaaaaaagatgcttataagatttcaaaggatccttgttattcagaagatgctacaaattgtayatatattatacaatcatatagaaagagtctttagccaaaataaataaaacttaaaacatattcaaaatgtcaaaatataaaataaccaaaggggtgcaaa

SEQ ID NO: 442592 - DNA, 201 bp, Homo sapiens
ttattccagttgtacttctcagctgcagagtatctgtttggttcctttttataatttatatctcttcattgatattctcatttttttatacatcattttcstgacttatttctttatccatgttttcatctagctctttaagcacattagagacagttattttaaagtctgtacagtaagttcaacatctgtgcttcctca

SEQ ID NO: 442593 - DNA, 201 bp, Homo sapiens
aaatgaaaaggtctattatttaaagcctcaagtgttggctatgaatcatacactgcaatatggaggctcaaaaggaaagtggctatcaggccattactacmcacatacaaaatgccattagcaatgctaaatggatcctgcacacctcgatgtgataattcttagattatccatagattattacaaccaagaaagtcactt

SEQ ID NO: 442594 - DNA, 201 bp, Homo sapiens
ctttggagatttagcaagaattaaatggagcagtgtgtgtaaacatgtgacacagtcttgcgtgtaaacactccatatgtgtccattaatttctgtgtgtscctgtgtgcattcaatgaacacaaccctgttctttcatgaacattaatcttgttcttgcccttgattttccggtagtctgaagctctatcattgaagttg

SEQ ID NO: 442595 - DNA, 201 bp, Homo sapiens
aatgctaaatggatcctgcacacctcgatgtgataattcttagattatccatagattattacaaccaagaaagtcacttgatgttgctgcctttcacactwtccagaactcctaggtcacctaacaatacatgtgctttaatagctttagggctatattttatcatttgagaattagacacatttaattctctttcttcct

SEQ ID NO: 442596 - DNA, 201 bp, Homo sapiens
aagcgtggtggcatgaacacagcttactgcagcctcaacctcctaggctcaagcattcctcctacctcagcctcccaagtagcttggtccacaagcacatrccactatgcctggataattttttttaatgttttgtagagatgaggtctcattgtgttacccaggcttgtcttgaactcctgggctcaagcatccaccgac

SEQ ID NO: 442597 - DNA, 201 bp, Homo sapiens
ttggtggcatcaagtatctctgaaactatggggaacagtgaagctaaaataggaaaattaattggaagctagattaaaaagcagttagattcctcagagcygtttccttaccccagccaggctactgcctttcttttgccccagcaaacactagagatttagtctcagcagagggtaccacaaaggtcagaacatagttga

SEQ ID NO: 442598 - DNA, 201 bp, Homo sapiens
atgaaagaaaaattacacgaagtatttgagtatttcgtactcaaatctattatcattagaatgtacttgtttttcttattgtaaataatggctggctgtgrtctctctgtgtttcttcttataaattcattatttaaatgcttcatgctcgaatgaaatattttttcaataaaattccatggctaagcttgcattagaact

SEQ ID NO: 442599 - DNA, 201 bp, Homo sapiens
gcaatagcataagcccggggtctaggagggaaagctaaatggtctgtatttgggacgtggattaagaatcagacatgcatcaaggcagagggaaaaacacyatgaggggcaagaaggctccaggaattcacatgtgcacagaaagctactatttgatttagaatgagaacatcagaaacccagggaggattagaagcagct

SEQ ID NO: 442600 - DNA, 201 bp, Homo sapiens
tggtcgtattttaaaccattgaaagctcacgtccaaatcacttgaaattatatttcacataaaatttcatgtgaaatagctcttgcttaaaaaaaaaaaaattctgacttaactatctttagtggaatggcagtttatagtcccaatttcccataacatcctgcaaatttaaaagaataattcaaacatttaatatcttaa

SEQ ID NO: 442601 - DNA, 201 bp, Homo sapiens
catgcaggtggttattttaggcaaagagtagttttaatcagcaagtttgtataagcgtgggatgagggctcattaaaactctcacccaaccaaccttaaargcactgtaggctttcagtgggaggactatcattggcttttctaccctgcttcgccttccctgcagttccttctcaatctcatacctcactttccactaag

SEQ ID NO: 442602 - DNA, 201 bp, Homo sapiens
ctgtagtaccagctactcaggaggctgaggcaggaggatcacttgggcccaggagtttgaatccagcctaggcaacatagcaagatactgtctctacaaaraataaaattaagataaaatgaaaagaaaatgaaaataaaatattagaaaaagtagatttgaatttctttgttgcaaccaaggaggtactagaaaaagaat

SEQ ID NO: 442603 - DNA, 201 bp, Homo sapiens
tatagtctgattcgatttgtacaacatttaaaaacaggaaaactgacctggagtgttggaagccaggagagtggttcctcttggtgtgcttttctatatayatatcatagttttcaaaagtttgttaactttttgtgagttttccagacctgcttttccctctttctgtactcttagaattatttcaaggcttgagagcag

SEQ ID NO: 442604 - DNA, 201 bp, Homo sapiens
taatgttgatctttttttgtttttttgtttgttttatttttctaatcaataaattctcacacttggttgattttttttggattgatgttgcttttttgttrtttttttcaggctccatctttgagacacaatcgaggagtttttttcagagaggccaatgtaatttccactgatgtcaaaaagtagaattatgcttttaat

SEQ ID NO: 442605 - DNA, 201 bp, Homo sapiens
ataaagcaaaaccaaatgatgacagaattttattttcataagcattaagctcactttccaacaacttaatataaggaatggcccagcactgagaataacargacatcaatttctaagaggcctcatactatcattatcatttgttcaaaatgaaaatccacctgtctcagcactggatgcaagtctgttggccttgctttt

SEQ ID NO: 442606 - DNA, 201 bp, Homo sapiens
gaaaatgtaaatacaggcagacagcggctggattattgtctgctgggaacatttaaagagcaacaaagcacagcaggaaagcaagagacagtattcatttaatgttgagcatttggctcccaagatgcaacctgacaacgtggtgtgcatcctgcccatctgcaaatacagcacaaagaacatagtaacattgacggttca

SEQ ID NO: 442607 - DNA, 201 bp, Homo sapiens
ctttagcattctgtttaagtttcttctatgccctggtatagaatttaaacaaacctctacttcttaaaatttccataggaagcatgaatttgaaaaatctrtcactacaaaacatgccctttgactgtgcccaagagtcaactgaaaaataagatgatgaaaacaatatatctgttaatataacagtgcatattgccatat

SEQ ID NO: 442608 - DNA, 201 bp, Homo sapiens
tctattcatgcctgatgctcagtcttcacatgttatatattaatatgctaattatttaaagaacaataaatcattgatgtactttgcatggcaataaaaakttagcatagtctttacagctatatgattcctcgtgtgtcttataaaatgctacagccctggaaagaagagaactttttgtaaagaaagtgatacattaaa

SEQ ID NO: 442609 - DNA, 201 bp, Homo sapiens
ggctaagaggctactaagcaagtaatttatcttggttcccatgcacacaaagctcaagattaaatagtcccatcccaacagacatagacataccaggcaasagctacagtagagcaataacaaaggaaaataaataggcaagatcaataaaagaagaaataaagcacaaagagatcaaacagtttaatagacccattttgc

SEQ ID NO: 442610 - DNA, 201 bp, Homo sapiens
cagccatactcacttttcccctcttgctgcaaatcctccaggatcctgccagccccaaatgatctccaaatcctcagacctccaacagcactcaccacctgggagtcattcaggcacaccattaatgctcattatctttacacatatatctgtatttcctccccagctagactctgctggtagttaccttatcagaaaaac

SEQ ID NO: 442611 - DNA, 201 bp, Homo sapiens
gtttatcttgaaagtcagatccgattttctgatagtggttgccccagcctactgtattagaaaggacttgagaccaaactcaggttcactgaagagactcytttatgattataatttataaggtttgacattggacaccagaggcaaccatgacagccttcgtacaatgtattgcttattctcatatgggaataataataa

SEQ ID NO: 442612 - DNA, 201 bp, Homo sapiens
ataaaaatatactactttttaaattaattttttaaatgacaaaaatcaatggaacctttaagaggtaccaaaaaattatgaatctattcatgcctgatgcycagtcttcacatgttatatattaatatgctaattatttaaagaacaataaatcattgatgtactttgcatggcaataaaaagttagcatagtctttacag

SEQ ID NO: 442613 - DNA, 201 bp, Homo sapiens
ttaaggctcatttcagctctgtttcagcagactgggaatttatcaggagacttggctaagaggctactaagcaagtaatttatcttggttcccatgcacayaaagctcaagattaaatagtcccatcccaacagacatagacataccaggcaacagctacagtagagcaataacaaaggaaaataaataggcaagatcaat

SEQ ID NO: 442614 - DNA, 201 bp, Homo sapiens
gggtacaaatcaaagctgggggaatggaccaaccactgcttgcctctgtttcctctactatggtaggagtgcaccatagcaagatgagccaagcccaaggtgtggtatcaaagaggtctaggttcaagtaccgattctgccatttaacctctctgggtattggctttctcatgtgaaaaagaagactgctatgagaatgaa

SEQ ID NO: 442615 - DNA, 201 bp, Homo sapiens
aatggtatctccaaggtggccataggtgaaatcaggtaggtccttttaagccatctggattatattctaagtacggtaggaagccactggtggactttccrtcaacctctgtaagaattgcttagcactgtgcctggcatatcacagcacatgctcagcaagtggctgggctgtcacattattatggactagggccaaaac

SEQ ID NO: 442616 - DNA, 201 bp, Homo sapiens
gacagttaattcttttcatagaatgcaaacaacaacaacagactagaatgaattgataagaaaacaagcttttgaggagagtggggatggggtaggaaacrcatcagagaggatctaatattcatcttcaattctgagattctgggaaggattctgtgacacaaactatggttttgtgacggttgactttcttgaagagtg

SEQ ID NO: 442617 - DNA, 201 bp, Homo sapiens
ttctatatctaggaaaccctaaaaacactgccaaaaggatataagagctaataaactgtttcagcaagctttcatgacacaaaatcaatgttaaaaaaaawcagtagcatttttatataccaataatgttcaagctgagagccaattcaagaatgtaatcccacttataatagccataaaaaaaataaaatacctagcaat

SEQ ID NO: 442618 - DNA, 201 bp, Homo sapiens
ggccccaggctaagactaactttcatcccaatcatttctgcagtttctcactgcatgcctgatgtgcgtgtctgtctgtgtgtgtgtgtgtgtgtgtgtgtctgtgtgtgtgtacatacacatacacattggttgtgaatgccccaatcctatcaatgtcacatgttattatgtcttctgcagaggagagatcactaaaaa

SEQ ID NO: 442619 - DNA, 201 bp, Homo sapiens
tctgagaagcagaaattaaaaacactgagagtctgatccccttgggaccactgaggaaagcccccagggctgatattcaggagacctaggtacagatcctagcagtaatgctgagcttcagataaccagcttcaatttgttgtacaagtaaaacaaattttaatcccagttctggaccatattagttacatgttgagtgcc

SEQ ID NO: 442620 - DNA, 201 bp, Homo sapiens
catgattccagacaatctcatgaaaaaggtcttcttcactttgactttcctttccacagtaattcatccctgactttattataacatggaatactgttatrccataaatactggctatttatggtatccctttccctactcatctctaaaccccagaaaaactcaagaactaacactgctcaagtctttagtattactttg

SEQ ID NO: 442621 - DNA, 201 bp, Homo sapiens
tctatatctaggaaaccctaaaaacactgccaaaaggatataagagctaataaactgtttcagcaagctttcatgacacaaaatcaatgttaaaaaaaatcagtagcatttttatataccaataatgttcaagctgagagccaattcaagaatgtaatcccacttataatagccataaaaaaaataaaatacctagcaata

SEQ ID NO: 442622 - DNA, 201 bp, Homo sapiens
attatctcatttacactgcaagtcagttctgctctgtgtgggagatctgtccttattcctattctgcaaataatgaagctgaggttcataacttaaataayatgaccactgtcatagagctagtaagtggctgatctgagacccaaatctacagctagctcccagactctaattactaaaatatccagtagcagttagcaa

SEQ ID NO: 442623 - DNA, 201 bp, Homo sapiens
cggccccaggctaagactaactttcatcccaatcatttctgcagtttctcactgcatgcctgatgtgcgtgtctgtctgtgtgtgtgtgtgtgtgtgtgtgtctgtgtgtgtgtacatacacatacacattggttgtgaatgccccaatcctatcaatgtcacatgttattatgtcttctgcagaggagagatcactaaaa

SEQ ID NO: 442624 - DNA, 201 bp, Homo sapiens
tacaatgaactcaaacaaattttcaggtaattgcaatttttaatgatccagtatctatatgtctgtaagtagagcttctaggaaaactatagcaaaagaaytcaaagccctaaagcaattggcctccttttctttgtagtctgaagcagtgccctggcctaagaaaatggagaatcaggagacaggaagatctcagcaaaa

SEQ ID NO: 442625 - DNA, 201 bp, Homo sapiens
ttaatgaagaggaaaccaagcccagagaggcaaatgccttttccatgtagaaaactaataacaaaacagaaacttatccctaacctgaactttcataacartgattttccactgtgatgcaccttttgtatcgtgaggaggctaggggataggaaaaactaattttagataaagtgatatcagaagtattcttggggcaaa

SEQ ID NO: 442626 - DNA, 201 bp, Homo sapiens
tgatactggtacaaaaacagacacatagaccaagagaacagaatagagaacccagaaataaagccacaaatctacagccatctaattattaacaaagttgaaaaaaaaaaataagcaatgaagaaaggatttcctattcaataaatgatgatgagatagctgactagccacatgcagaatgaaatcagacacctacctttc

SEQ ID NO: 442627 - DNA, 201 bp, Homo sapiens
gcggccccaggctaagactaactttcatcccaatcatttctgcagtttctcactgcatgcctgatgtgcgtgtctgtctgtgtgtgtgtgtgtgtgtgtgtgtctgtgtgtgtgtacatacacatacacattggttgtgaatgccccaatcctatcaatgtcacatgttattatgtcttctgcagaggagagatcactaaa

SEQ ID NO: 442628 - DNA, 201 bp, Homo sapiens
gcaaagacttcatgtctaaaacaccaaaagcaatggcaacaaaagccaaaattgacaaatgggatctaattaaactaaagagcttctgcacagcaaaagaractaccatcagagtgaacaggcaacctacaaaatgggagaaaattttcgcaacctactcatctgacaaagggctaatatccagaatctacaatgaactca

SEQ ID NO: 442629 - DNA, 201 bp, Homo sapiens
aaaaaaaccttgctgatgcctgatatagactatgaaattagggttggtaatctagacgcacctattctactttctcacacacaaattgagctgtgatttcyaatctttttacaaagtattaattttgccttcaggtcacagcccacaaactggtctcttagtcctaacacctggggtagaaacacatttagcagtcatttt

SEQ ID NO: 442630 - DNA, 201 bp, Homo sapiens
aaggtctaagatccagaatctattaggaacttaaacaactgaacaggcaaaaaacaaataaccccattaaaaaacacataaaagacgtgaacaaacactcytcgaaaagatacatagaaacggccaacaaacatatgaaaaaatgctcagcatgactaatcattaaagaaatgcaaatcaaaaccacaataaaatagcatc

SEQ ID NO: 442631 - DNA, 201 bp, Homo sapiens
agcggccccaggctaagactaactttcatcccaatcatttctgcagtttctcactgcatgcctgatgtgcgtgtctgtctgtgtgtgtgtgtgtgtgtgtgtgtctgtgtgtgtgtacatacacatacacattggttgtgaatgccccaatcctatcaatgtcacatgttattatgtcttctgcagaggagagatcactaa

SEQ ID NO: 442632 - DNA, 201 bp, Homo sapiens
ggcatgggcaaagacttcatgtctaaaacaccaaaagcaatggcaacaaaagccaaaattgacaaatgggatctaattaaactaaagagcttctgcacagyaaaagaaactaccatcagagtgaacaggcaacctacaaaatgggagaaaattttcgcaacctactcatctgacaaagggctaatatccagaatctacaat

SEQ ID NO: 442633 - DNA, 201 bp, Homo sapiens
tataagatacataatttaaaaatactttcttcctttttttggttttgttttcacatccttaataatctcttttgatgaagaaattttttttttttttttttgagatggagtcacagaatccattgtaaaatgcaagcccatagatatttacctctactttttattctaagatttagtggttgtagctattatatttagaat

SEQ ID NO: 442634 - DNA, 201 bp, Homo sapiens
ccatcagatgccaggagcactccctccttcccctgtggttgaaacaggaaaaaatgtcttcagacattttcatatgtcccctgaaaggtaaaattgccccyagttgagaaccaataagatacacatagcccctaattcgacaagaatgcctcgcagagtgcagaatgactctactcttttctaccatcagagtataccata

SEQ ID NO: 442635 - DNA, 201 bp, Homo sapiens
aattttatttttactttaaattttatttttaaattttactttaagttccaggatacatgtgcagaatgtgcaggtttgttacataggtatacgtgtgccaygggggcttgatgtattattgacctgtcctctaaattccctcccctttcccccatcccgcaacaggccccagtgtgtgatgttcccctctctgtgcccatg

SEQ ID NO: 442636 - DNA, 201 bp, Homo sapiens
aaaaacccgcaaggcaacgtaggcaacaccattctggacataggaatgggcaaaggtttcataatgaagacaccaaaagcaactgcaataaaaacaaaaaytgacaaactgaatctaataaaactaaagtgctcaacatcactgatcattaaagaaatgcaaatcaaaaccacaatgagataccatctcatgtcagtcaaa

SEQ ID NO: 442637 - DNA, 201 bp, Homo sapiens
cccacttcaataaatggtgctggataactgggaagccatgggcagaagaatgaagctagatcccctccttacaccatatataaaaattaactcaagattarttaaagacttaaatgtaaaacccaaatctataaaaacccgcaaggcaacgtaggcaacaccattctggacataggaatgggcaaaggtttcataatgaag

SEQ ID NO: 442638 - DNA, 201 bp, Homo sapiens
ttcacaaacgtgacaaaaacaagcaatggaggaaggattcccacttcaataaatggtgctggataactgggaagccatgggcagaagaatgaagctagatyccctccttacaccatatataaaaattaactcaagattaattaaagacttaaatgtaaaacccaaatctataaaaacccgcaaggcaacgtaggcaacacc

SEQ ID NO: 442639 - DNA, 201 bp, Homo sapiens
gttaataatatagtcaggattgtttatatagaaatcatattttcctgaaaccatggagtacagtaaaattcctttcctgcttttgtgttatcttgtatgcrgcagcatgctttcagcaatgctaggaccccagtgtaagaggtatagaaagagtaacaaagggtcaagtaacttgccctgggccagccacacaactagaat

SEQ ID NO: 442640 - DNA, 201 bp, Homo sapiens
atccggcaatcccgctactgagtacatatacaaaggaaatgaaatcagtatgtcaaagagatatctgcactcccatatagcattattcacaatagccaagrtatggaatcagtataaatgtccatcaatgaataaatgtgtttaaaatatgtggtatatacacacaatggaatagtattcaaccataaaaaaagaataaaa

SEQ ID NO: 442641 - DNA, 201 bp, Homo sapiens
aatggctaacagatatatgaaaaaaaaaagagcttgacatcactaatcatcagggaaatacaaattaaaactacaatgagatacaatggatactctcaaawaattaaaagatagcaagtgctggcaaggatgtggagaaaaaggaatcctcacacactactggtgggaatgcaaattagtacagccatcatggaaaacagt

SEQ ID NO: 442642 - DNA, 201 bp, Homo sapiens
gaaaaccaaacactgcatgttctcacttataagtgggagccgaacattgggtacatatggacacaaagatgagaacaatagatagtggggactatttagascggtgggagggtggaggcaagggctgaaaaacttcctagtaggtactgtgctcagcacctgggtgacaggatcagttgtactccaaacctcagcatcaca

SEQ ID NO: 442643 - DNA, 201 bp, Homo sapiens
aatgaaagcaaaacctcaaactccacgtttgatcagagtatgagaagcttccattttagttccatttctgattaattcccaattataaattcattacagarggacttgatagcttttgactaaatttagcaagggatatcaaaatatatctgagctcattttgaggttcaaactgctatcctaaaaagtataacatgccat

SEQ ID NO: 442644 - DNA, 201 bp, Homo sapiens
tcttaatgcactaagcatggacatcatgattagaaaaacatgggttcaaatcttggttctgtcatttattaactgggtgattttgcataattcagtttctrtaagtttcagtttctttgcctataaaatgacaaatcctaggaagctcatctgagtattgaagcagatagggatgaaaactcttggttcactgcctggcat

SEQ ID NO: 442645 - DNA, 201 bp, Homo sapiens
tgacatgatattactcatttcttttgtaacacatattatggtgtgctgtaactgttgagtgatctgcctctcacaagggtacatctcaatctccccagctyctagcacagcacctagtttataataggtatttaataacattttagagaagaaaagagcagaatgggtgtaaaccggccacaggcctccagagcatacagg

SEQ ID NO: 442646 - DNA, 201 bp, Homo sapiens
gaattatagaatgatcacatgttctatcccaatttgtctaatatggaactggctgttttgccaatgaaaccagtaatagctcactcccaaaagtatcacargttggattaatatatatggttgcctttatgagcaatacattggaagaagaatatattccatattcagagaatctgcatttgaatctgagctctagtatgt

SEQ ID NO: 442647 - DNA, 201 bp, Homo sapiens
cacagccttggtaaggactttggattttattatgaattagtggagaagaaatttaagagtgctaaccaaaggagtgacatgatattactcatttcttttgkaacacatattatggtgtgctgtaactgttgagtgatctgcctctcacaagggtacatctcaatctccccagctcctagcacagcacctagtttataatag

SEQ ID NO: 442648 - DNA, 201 bp, Homo sapiens
gggtagacatttggcttcattccatcttttgtgtattttgaataaggctgcagtgaacactgacatacaagtgtctgtttgagtccctgttttcaattctyttacctataaacctaggagaggaattgctggattacatgtaattctgtgtttaaatttttgaggaaccaacaaactgttttccacagcagctgcgtgatt

SEQ ID NO: 442649 - DNA, 201 bp, Homo sapiens
aacacagccttggtaaggactttggattttattatgaattagtggagaagaaatttaagagtgctaaccaaaggagtgacatgatattactcatttctttkgtaacacatattatggtgtgctgtaactgttgagtgatctgcctctcacaagggtacatctcaatctccccagctcctagcacagcacctagtttataat

SEQ ID NO: 442650 - DNA, 201 bp, Homo sapiens
gaggtatgttcaggattcaaactcagatctccatcccttgaaaccaagattcttcttcccggccctggagttcttgttatgtttctgtctaaagcatgtcycagaaccagcagcatcaccatcacctggcagcttgttagaaatgaaaagatttgggtcccaacctaggtccactgaatcagactttggaaataggaccaa

SEQ ID NO: 442651 - DNA, 201 bp, Homo sapiens
gctctacaaaaggcttcctgtctccgaagaaaaaaaaagtttgtcgtattcattcaaccaaaatatactaggcatttatgctatatcaagccctgccaggraatgaaggtagaaaatttgatcatctgattgctaatggcttccatctgctataccatctatttgatttctttctgtgaggacttaatgtctattacccaa

SEQ ID NO: 442652 - DNA, 201 bp, Homo sapiens
ttggccaactccaccagccagctacaggcatatgagtaaatctagaggggatcaaccaagaccgatccttatcaacacaatttttgagcagacctgtgagsttactgacataagcccctgagttttgggggtttgttgtgcagcaatagctaaccgatatatgcagtaatggtgacggacctgcaaagagagggtgctcca

SEQ ID NO: 442653 - DNA, 201 bp, Homo sapiens
aaacacaataaatattctaaagcatcaaattattgaaaactatgaattatacaatactgaaccacataattttgagcacagttaggatctgtgaagatcaygtggggcaatagtttttaatttagggtatatatcagaattttggaagaggttgaaagaacagtcatgactattttgaaaactgtctgaggtcattttgat

SEQ ID NO: 442654 - DNA, 201 bp, Homo sapiens
ctgtctccagctaactgcacagacttaggcaataagttagccaccttctatgagccccagttgcttcatctggaaaagaagtgctagatgaaaaacctaamgatccacccagcactcatgttctaggtcaatgaaacaggcctccaaactgaaattgtcacattttagacatctatgctttcattacttttcaaataataa

SEQ ID NO: 442655 - DNA, 201 bp, Homo sapiens
attaaatacctacctcacaaaggcccattttacacaataatgttttgagaatagagctctctgtggctcctagatgatgtgtggctaaaaagagaaaaatracattctctgcaatgggaaagaatgagaaagcaaacgacgccctcgaagctggagaatgaagaaccacaatcacctgagacagagtggcatgtttcttgt

SEQ ID NO: 442656 - DNA, 201 bp, Homo sapiens
ggaggtttagaagatggattaaaaaatttgctgtttgcaactgcccacaattaaatacctacctcacaaaggcccattttacacaataatgttttgagaakagagctctctgtggctcctagatgatgtgtggctaaaaagagaaaaatgacattctctgcaatgggaaagaatgagaaagcaaacgacgccctcgaagct

SEQ ID NO: 442657 - DNA, 201 bp, Homo sapiens
tcctttacagaaaaagtttgccaatgcttattctagatgatcatagatttcaaattacacagcaaagatggaagtactcagttttcaaattgtaattctayatactgtttggaaggaacagacctaaaaatctgccaaagtgccaaagggaggtttagaagatggattaaaaaatttgctgtttgcaactgcccacaatta

SEQ ID NO: 442658 - DNA, 201 bp, Homo sapiens
aattcaagatggattaaagacttaaatgttagacctaaaaccataaaaaccctagaagaaaacctaggcaataccattcaggacataggcatgggcaaggrcttcatgactaaaataccaaaagcaatggcaacaaaagccaaaattgacaaatgggatctaattaaactacagagtttctgcacagcaaaagaaactacc

SEQ ID NO: 442659 - DNA, 201 bp, Homo sapiens
tacagcttgacatccctgtcagatgtggatacaaggtttccctatctttatttaggtatttgtaccctgcacacactccagccatcccttggtactcagcrgcctagaatgtcaaaatcagcacactgttttacactttaaaggagagtggcagatcagagagactgaacacccaaagatccttcctccctcagtgagcta

SEQ ID NO: 442660 - DNA, 201 bp, Homo sapiens
ggctgggtcaaatggtatttctagttctagatccctgaggaatcgccacactgacttccacaatggttgaactagtttgcagtcccaccaacagtgtaaawgtgttcctatttctccacatcctctccagcacctgttgtttcctgactttttaatgattgccattctaattggtgtgagatggtatctcattgtggtttt

SEQ ID NO: 442661 - DNA, 201 bp, Homo sapiens
aatcagacaggacttgctgagatgttttgtgtcagctaaagtggaaaccttaaaagctttatattctttaaggagaatggaaaggagacatgccagctacrtatataacaacaggttgaaaaatgtatcgtgtgcattggctcttttactatacaaataacaagaaatcatagtgttccaaaaatatcaagagatgaaaga

SEQ ID NO: 442662 - DNA, 201 bp, Homo sapiens
aaataccaaaagcaatggcaacaaaagccaaaattgacaaatgggatctaattaaactacagagtttctgcacagcaaaagaaactaccatcagagtgaayaggcaacctacagaatgggagaaaattttacaatctacccatctgacaaagggctaatatccagaatctacaatgaacgccaacaaatttacaagaaaaa

SEQ ID NO: 442663 - DNA, 201 bp, Homo sapiens
aacccaggagcctgacatatgtggaaagaaaccttcagttgattccatttcccagctttaaaagtgccctcagcacttgaagttttccccactgaggtccrgatatcaaagagatacaagccatccctgcggggctctatctgaattattgacccacagaatttatgagcacagtaaaatggcggttgtttgataccaata

SEQ ID NO: 442664 - DNA, 201 bp, Homo sapiens
actctgtcttttcttaaattactcccaagtctgagcaaagtagatcaattacagtcaagaggtgggtaggaaaacagacaacaatctttgctctcagcacmgaatcatcaagcacttgaaaacaccttatgtagcgttctattttctctctgaagaaagatatttccttcctagagtgttacagcagcagggcctccagga

SEQ ID NO: 442665 - DNA, 201 bp, Homo sapiens
taaatagaattattcagcaatggtctttgaagaaagagtgaattgaatttaatgctcaccttgttttaagtgttgtagtttctttaatgcaggctttttttcaataaagtcatgtgccacacaatgaaattttggtcactgacatactacacatacaaaaggtggtcttatataattttaatgaagctgaaaaattcctgt

SEQ ID NO: 442666 - DNA, 201 bp, Homo sapiens
caaagggctaatatccagaatctacaatgaacgccaacaaatttacaagaaaaaatcaaacaaccccatcaaaaagtgggcaaagtatatgaacagacacytctcaaaagaagacatttatgcagccaacagataaatgaaaaaatgctcatcatcactggcaatcacagaaatgcaaatcaaaaccacaatgagatacca

SEQ ID NO: 442667 - DNA, 201 bp, Homo sapiens
aagacaaatttctcctaaaccgtatgaattaatttctctatcatatttcaaatttatatacttgatatcttctatgtgtacttttacttgaatattgcacytttctcttcatcgaagtgacagctgatggcttttctctcaaatggttgggaaagattatattttgaagtcatattataaatagtgcattaagctaattgc

SEQ ID NO: 442668 - DNA, 201 bp, Homo sapiens
ttatcttgtgtcatgcattgtgcagaggcatttacatgcatgatcacatttaatcctgataatttgtggaatgcgaatgtatctctctatttctcaaatgwggtagctgagagagaactaaatagaattattcagcaatggtctttgaagaaagagtgaattgaatttaatgctcaccttgttttaagtgttgtagtttct

SEQ ID NO: 442669 - DNA, 201 bp, Homo sapiens
gggctaatatccagaatctacaatgaacgccaacaaatttacaagaaaaaatcaaacaaccccatcaaaaagtgggcaaagtatatgaacagacacttctsaaaagaagacatttatgcagccaacagataaatgaaaaaatgctcatcatcactggcaatcacagaaatgcaaatcaaaaccacaatgagataccatctc

SEQ ID NO: 442670 - DNA, 201 bp, Homo sapiens
aggtctagtggtactgaactctctttgtctctcttcttctctctctcttgcacgtgtacatacacgtgcgtgtgtacacacacacacacacacacacacatatgtgtaaatgtcttaatttcctcctcacttatgaaggttggttttttccagacagtgaattcttggttgacagttacttttttttcttttagcactttg

SEQ ID NO: 442671 - DNA, 201 bp, Homo sapiens
taatcctttcactgtcatagttgccttctctttcaatggttttaagtatatatcatcatcatcatcatcatcatcatcatcatcatcatattctaccatgyatttaatacttatcttgtgtcatgcattgtgcagaggcatttacatgcatgatcacatttaatcctgataatttgtggaatgcgaatgtatctctctatt

SEQ ID NO: 442672 - DNA, 201 bp, Homo sapiens
atctacaatgaacgccaacaaatttacaagaaaaaatcaaacaaccccatcaaaaagtgggcaaagtatatgaacagacacttctcaaaagaagacatttmtgcagccaacagataaatgaaaaaatgctcatcatcactggcaatcacagaaatgcaaatcaaaaccacaatgagataccatctcacaccagttaaaatg

SEQ ID NO: 442673 - DNA, 201 bp, Homo sapiens
gtaggtctagtggtactgaactctctttgtctctcttcttctctctctcttgcacgtgtacatacacgtgcgtgtgtacacacacacacacacacacacacatatgtgtaaatgtcttaatttcctcctcacttatgaaggttggttttttccagacagtgaattcttggttgacagttacttttttttcttttagcactt

SEQ ID NO: 442674 - DNA, 201 bp, Homo sapiens
gctgaatattttaaaaaaccaaagagtctcagggctgcaagttaccttaaagaacatataaccaagcctcctgacctacagttgaagtcatattcaactgytgaagtgcttgaggctctcagtcttggattcatcactatggagagaattcagtgtgcatctctgtacatgttataatgtaaaaaatcagacttctcatta

SEQ ID NO: 442675 - DNA, 201 bp, Homo sapiens
accccatcaaaaagtgggcaaagtatatgaacagacacttctcaaaagaagacatttatgcagccaacagataaatgaaaaaatgctcatcatcactggcmatcacagaaatgcaaatcaaaaccacaatgagataccatctcacaccagttaaaatggcgatcattaaaaagttaggaaacaacaggtgctggagaggat

SEQ ID NO: 442676 - DNA, 201 bp, Homo sapiens
acctcatgaaccgcccaccttggcctcccaaagtgctgggtttacaggcgtgagccactgcgcttgggcaccttttataaaatttttaaacttagagtctrttttttatattagtatagcaacccatgttcacttttttttactatgagcgtggaatatctttttccatattttcacttttaacctatctttggatctata

SEQ ID NO: 442677 - DNA, 201 bp, Homo sapiens
gctaataactaatttgctgaatattttaaaaaaccaaagagtctcagggctgcaagttaccttaaagaacatataaccaagcctcctgacctacagttgargtcatattcaactgttgaagtgcttgaggctctcagtcttggattcatcactatggagagaattcagtgtgcatctctgtacatgttataatgtaaaaaa

SEQ ID NO: 442678 - DNA, 201 bp, Homo sapiens
atcaaaaagtgggcaaagtatatgaacagacacttctcaaaagaagacatttatgcagccaacagataaatgaaaaaatgctcatcatcactggcaatcasagaaatgcaaatcaaaaccacaatgagataccatctcacaccagttaaaatggcgatcattaaaaagttaggaaacaacaggtgctggagaggatgtgga

SEQ ID NO: 442679 - DNA, 201 bp, Homo sapiens
ataaaaaagtagcctaaaaattgaactcaatatccatggaatgttcatccattaatgccacgatattatatttatattaactatttttattaacaattaaytatgttgtgttaactcaaagcgactacgcaaggtaaggcattaccttattgacgtggaagattagttttaaagcagtggagagacttgctgagagtcatg

SEQ ID NO: 442680 - DNA, 201 bp, Homo sapiens
atatagtcacaggtttgaggacatttggggaagaacattagcctccaaccattttcataactgattgatacctacctaggtatggaactgtatttttttttggctattcacagtaccttgaaattctatatgaattttaggataggcttttctttctgcaacaaaagactttgggaatttgttgagtcattgggattgctt

SEQ ID NO: 442681 - DNA, 201 bp, Homo sapiens
ctggattaagcaaatgtggcacatatacaccatggaatactatgcagccataaaaaaagatgagttcatgtcctttgcagggacatggatgaagctggaarccatcattctaagcaaactatcacaaggacagaaaaccaaacactgcatgttctcactcataggtgggaactgaacaatgagaacacttggacacagggc

SEQ ID NO: 442682 - DNA, 201 bp, Homo sapiens
tattaatagccattaggttcatctaatacatgcctaaagtcaatgtggtaaaatttgacaccaattattataaaattgtattataaaaaagtatttccatyaaattataaacaaaaaaacggggggatgcatactatcattttttcaaacatgagctaccatcagaaagttctggctgacaaacatatatagcaactgaaa

SEQ ID NO: 442683 - DNA, 201 bp, Homo sapiens
acaagactggaacagaaagtccaatgtgatggccatggctgaagtccactaagatggtaataggtgatatagacagaagtggatggacttaggacaagacrtaaagggtagcatcaacaagacagatgcatggattgaaattggaggggtgatcaagtgtaacccctggggagaggaaggagttatctctacatttttggc

SEQ ID NO: 442684 - DNA, 201 bp, Homo sapiens
tctattgtctcccttgtttggaaaatgaagatacttctttttaaattctctgctactagtatgtcccaacattatcacaaacaaactctaaataacgttcctcaaaaatatctttatctttgtattagttttctattgttttgtagcaaattactacaaacttaatacaacacaaatctatcaccttacagtaggtcagaa

SEQ ID NO: 442685 - DNA, 201 bp, Homo sapiens
aaaataaaagaaaaaaatattggtgattgtattaacataatattgagtgttttttttttaaagcaggaacaaagatttttctactgtggggttcaacttgygtaaagttcaatactatgcaaaactaatcgatgatagaagtcagattatggttatcttttccggtgctagtgactagggtgctggtatattgtatttctt

SEQ ID NO: 442686 - DNA, 201 bp, Homo sapiens
ccctgacttgaagcattcaccttctacgtgatgcgctggttacctagtttttggcacacttctctgaagaattagagatgctggggagcagtgtccattcrctcacatcctcagctgctgtacaccttttagactgcatgttagctggttcacgaaacaaaccaagtagaagtaacattaaactaattgtgagttatcatt

SEQ ID NO: 442687 - DNA, 201 bp, Homo sapiens
atcaagaggaaaaagacttccataaaagggcaatagctcatgcaaaggtcttaacaaacagaaacaagcttgttacatggagaaaaagacaaaggtcagcrtggccatgtcataatggacaaggaaagaaacggtaaaagacagaagggaaagaaggaaaactatatagggttatatattgaaataagaaacagggatttg

SEQ ID NO: 442688 - DNA, 201 bp, Homo sapiens
ccattactacccacatacaaaatgccattagcaatgctaaatggatcctgcacacctcgatgtgataattcttagattatccatagattattacaaccaaraaagtcacttgatgttgctgcctttcacactttccagaactcctaggtcacctaacaatacatgtgctttaatagctttagggctatattttatcatttg

SEQ ID NO: 442689 - DNA, 201 bp, Homo sapiens
tattatgcagtcataaaaaagaccaaaatcatgtcctttgcagcaacatggatgcagctggaggccactatcctacatgtattaacaaaggaacagaaaacaaaatactccatgttctcacaactgggagctaaacattgggaaacatggacataaagatggcaacaatagacactgaggactactagagtggggaaggag

SEQ ID NO: 442690 - DNA, 201 bp, Homo sapiens
aaaaaagctccagatctcttttcaccagaaagttgtttcaaacttcaaaactaccaatagctcctatattctattagtatcctgagttaaggaaaaaaaaatggatgtttcctaataagtcataactgggtctactctagggtgggtaaaagagtcagaaacagaacacagaaagtagtacccaactgtacaagaaatgcc

SEQ ID NO: 442691 - DNA, 201 bp, Homo sapiens
gagaactaaaatcaggtggtatgacagaaaacaacagagtggctatttatattgatcatggaaagcctctctgaggcttaggctaagaggtaaatgagaasagagctcaatacacaaatatcaagaggaaaaagacttccataaaagggcaatagctcatgcaaaggtcttaacaaacagaaacaagcttgttacatggag

SEQ ID NO: 442692 - DNA, 201 bp, Homo sapiens
aatccagccaggcaagggagaatgcaccataatatatttttctcctcaaaagtgatttccaaatcatctggcatttgaatttcaaagctgatgcagctcaraatgtgtgggtttggaacagcaaacttgcttgaaataccaagtcatatttttgtcatgcactgcattgaaggtggggtgtttacagccaagacaggattg

SEQ ID NO: 442693 - DNA, 201 bp, Homo sapiens
atatattattactatttgaaaaagaatgttggcaaatagtaactacactgttatcctaactttgtaaaaagaaaaatatttatattacagagaaagggtaagagagagagaaaaaaagagagggaaacacacaggcagaaattggaagagttcaaatcaaaatgttaactatggtttatctctaggtaataggattatgga

SEQ ID NO: 442694 - DNA, 201 bp, Homo sapiens
aatatattattactatttgaaaaagaatgttggcaaatagtaactacactgttatcctaactttgtaaaaagaaaaatatttatattacagagaaagggtaagagagagagaaaaaaagagagggaaacacacaggcagaaattggaagagttcaaatcaaaatgttaactatggtttatctctaggtaataggattatgg

SEQ ID NO: 442695 - DNA, 201 bp, Homo sapiens
atggcaagtttgttatcttttgtttttcaagccttcaaactttaaaactcataaaccccttttcttatcctttttctcctagaaatttcttcattttttttgtttttgctacccaaatatttttacagtggaaatcactgtcataatacaggctgtagctagaagccaaacatggttttcaatcatatttctgccacttac

SEQ ID NO: 442696 - DNA, 201 bp, Homo sapiens
aatcacttgaacctgggaggcgaaggttgcagtgagcggagatcatgccattgcactccagcctgggcaacaaagtgagactctgtctcaaaacaaaaacraaatcaaaaacaaaaacaaaggtggaggatgtccacaaacacaagtgctttcagagataatggagctagtcctagacaattcaagaattttcttcttttg

SEQ ID NO: 442697 - DNA, 201 bp, Homo sapiens
aatcccagctacttggaaggctaagggatgagaattgcttgaacccaggaggcagaggttgcagtgagctgagattgtgccaatgcaccccagtctgggcracagagtgagactctgtctaaaaaataaataaataaataaataaataaacaaacaaacaaaaaaggaaaactataatcataactgtagaacttgcctgaa

SEQ ID NO: 442698 - DNA, 201 bp, Homo sapiens
atctgcctccaaggtaatcagatcaaacagactcaacataatttccaggttttgagaggctctattccaagacatcttctaccaaattgacgagacacctrcaatgccagcaacagagaaaaaggagggaggtggtctaggagagggttcagggatcttgctattataaacgatggggaaatgaaggaagaaagagcaagc

SEQ ID NO: 442699 - DNA, 201 bp, Homo sapiens
gatatatgccattccgggcttcacatgatacccacagcaatgaagaagtaaacataacttttctaggggatgatttaaaacaaatatttcacttcattcawactaaacaataaaaaagggggaaaatgtttggggtatttattgtgtaggatgtgttgcaatgagctttaaacatgacttttagctagaatacccttaact

SEQ ID NO: 442700 - DNA, 201 bp, Homo sapiens
aaatgcctcattgtttacattcacaccacacatggagacacatccacccctcgaatccaccagtctcttataaaaattaaatgtccactgaactttatgtmctcacatagcagggtgctttggtgctggtgaatgagatcaacatattactgcacgcctcaaccatctgcaatttggcactagtgcagaatgtatgtatct

SEQ ID NO: 442701 - DNA, 201 bp, Homo sapiens
tgacaatgtcagaataaactcataaattcagaaaatggtagtcaaattgacaattctttaaaggatagtaatacaacccacattggatgctggccttttarcaatatcattattttaagataggatacttaaattgtgaaaatgcgtttttaacaaacacactagaatgattttttaaatcagttttcagcctgttttacc

SEQ ID NO: 442702 - DNA, 201 bp, Homo sapiens
aggaaactgaagccccaagtcacacagtgagaatatgtcaaaactgaatgaaggccattttattccagattctacttcaatattcttaaaagacagctccmactaaagagcacagagtcattatactgtattattttcttaagtgcctttgggaccaattaggccataaagtcataaacacatcattacaaccatgaatga

SEQ ID NO: 442703 - DNA, 201 bp, Homo sapiens
ataactattatatgtgctttgcacatgttatcttatttattcccaccataaaccacataaattgttggccccatgtcccattttcagatgaggaaactgargccccaagtcacacagtgagaatatgtcaaaactgaatgaaggccattttattccagattctacttcaatattcttaaaagacagctccaactaaagagc

SEQ ID NO: 442704 - DNA, 201 bp, Homo sapiens
aatccaatctcatcttctacagaagcatacacaggcagcagttctcaagctcactcattaaactgtggagttaataatgctgaccagcaggaagatggaaracagccgatgttttcctactggtcaacattattgaccaagccaaagctgttaaattagctgctgctttggcttaacagttctcaagatgcattttgtgtc

SEQ ID NO: 442705 - DNA, 201 bp, Homo sapiens
cccagaaggtctattgtctctctggctatggccctaaaaccatgatatttattcaaccaatactatcttctccatgctaggcaataaaggagagggtcatrtgctcagacacattagagtgggcctaatagctctctaggggttaagaacatagtggatttaggctggtaggtattttgagataataatagtaataataac

SEQ ID NO: 442706 - DNA, 201 bp, Homo sapiens
ggaaaggcccagaaggtctattgtctctctggctatggccctaaaaccatgatatttattcaaccaatactatcttctccatgctaggcaataaaggagasggtcatatgctcagacacattagagtgggcctaatagctctctaggggttaagaacatagtggatttaggctggtaggtattttgagataataatagtaa

SEQ ID NO: 442707 - DNA, 201 bp, Homo sapiens
gaaggaggcttgctcaaggcacagaaagaaaactttcatgttcagaccttggcaccagctagaaggaaaaaaaaatcttccttgaaaatccttaaagaatyctttcctgagacttcacctggcctttcctaggtgtagcagtctgattctgagcaatctggtttgaaaatacttaagtaaataatgtcaaataattttcac

SEQ ID NO: 442708 - DNA, 201 bp, Homo sapiens
tcttggcaatcaagggccatttttcattgtattttgcttgcatttctatcatagcacttaatacaatgtgcctaatattgtaattaatttttgagaatacytacatagcttatgaactgctgttgaaaaaaggttatcctaatcaacagctactcatgtcaaaataaaccatatttgttggcaatctgttagtatcactca

SEQ ID NO: 442709 - DNA, 201 bp, Homo sapiens
ttttaaagtgtggcacttcctcattctctttctctcctgccaacatgtaagacgtgccttgcttcccctttgccttctaccatgattgtaagtttcctgartcttccccagtcattcagaactgtgagtcaattaaacctttctttataaattacccagtgtcaggtagtatctttgtaacagtgtaagaatggactaata

SEQ ID NO: 442710 - DNA, 201 bp, Homo sapiens
catcatgttgtataacttatacacaacaaaatttatttttaaaaaaagaaagaaaatggattccagatgtatctaagactgaatggaaaagacaaagcttkggcagcagatagacctagatacaaatcccagcactgtcacttaggagaggtttggcaaactctttgtggtccagttggtgtgtgtgagtaaaatacagac

SEQ ID NO: 442711 - DNA, 201 bp, Homo sapiens
tagtagtatttatatacaccaataattaactaggtaaaagcataattttaaaaaattccatacaaaaatatacagctacaaaaattaaaataactaagaayaaatgtaaccaaggaagtaaaagacttctgcaataaaaactacaaaatgttgatgaaataaattgaagaggacacaaaaaaatggaataggacagttaat

SEQ ID NO: 442712 - DNA, 201 bp, Homo sapiens
tttaaagtgtggcacttcctcattctctttctctcctgccaacatgtaagacgtgccttgcttcccctttgccttctaccatgattgtaagtttcctgagwcttccccagtcattcagaactgtgagtcaattaaacctttctttataaattacccagtgtcaggtagtatctttgtaacagtgtaagaatggactaatac

SEQ ID NO: 442713 - DNA, 201 bp, Homo sapiens
  misc_feature (1)...(201): n = A,T,C or G
aggtaatcaaataaaattgtactgtatttgagattcctgctaaataaatagattttagctcttcttgccacaaaaacaaaacaaaaaaaagaatgggtaantatatgagatgatggacatgttaaatgcttcactattgtaacctttttatgatctatgtgtatcccataacatcatgttgtataacttatacacaacaaa

SEQ ID NO: 442714 - DNA, 201 bp, Homo sapiens
aaacaaaaaacaaaaaacgataaaagctaacatctcttcatggtaaaaaaaaaacaaaaaacaaaaaacaataaaagctaacatctcttcatggtaaaaaacaaacaaacaaacaaaaaactcaacaaagtgctactgaaggaatgtgcacaaacacaatacaatccatatatgacaaacccacaactagtatcatcctga

SEQ ID NO: 442715 - DNA, 201 bp, Homo sapiens
cagaactgtgagtcaattaaacctttctttataaattacccagtgtcaggtagtatctttgtaacagtgtaagaatggactaatacatataattggtaccrgcagagtggggtactgctataaagataaactgaaaatgtggaagggactttggaactgggtaatgggaagatgttagaacagtttagagggctcagaaga

SEQ ID NO: 442716 - DNA, 201 bp, Homo sapiens
ggaaatagcttcctcctttctagtaactctacagtagcaataaataaaacacaaagtagtaattcaatcaagtgcttttctatttggatatataaattatrtattaaatatgacatattatatataatatatatccatcatttatatataattgtgcataaatagaaaaagtctataaaatgcatgttaaaatattgacag

SEQ ID NO: 442717 - DNA, 201 bp, Homo sapiens
agctaacatctcttcatggtaaaaaaaaacaaaaaacaaaaaacaaaaaacgataaaagctaacatctcttcatggtaaaaaaaaaacaaaaaacaaaaamcaataaaagctaacatctcttcatggtaaaaaacaaacaaacaaacaaaaaactcaacaaagtgctactgaaggaatgtgcacaaacacaatacaatcca

SEQ ID NO: 442718 - DNA, 201 bp, Homo sapiens
acccattttctggggagaagttcaagctggctgcagaaatttgcataagtaacaaggagctgaatgttaactgccaagataatgggaaacatgtctccacrgcattgcagagatcttcaaggcaaccccttccatcacaggcccaaggcctaggagggaaaaatggcttcataggccaggcccagggcccagctgctctgt

SEQ ID NO: 442719 - DNA, 201 bp, Homo sapiens
aagcatacaataaaagctaacatctcttcatggtaaaaaaaaacaaaaaacaaaaaacaaaaaacgataaaagctaacatctcttcatggtaaaaaaaaaacaaaaaacaaaaaacaataaaagctaacatctcttcatggtaaaaaacaaacaaacaaacaaaaaactcaacaaagtgctactgaaggaatgtgcacaaa

SEQ ID NO: 442720 - DNA, 201 bp, Homo sapiens
aacatgtctccacagcattgcagagatcttcaaggcaaccccttccatcacaggcccaaggcctaggagggaaaaatggcttcataggccaggcccagggcccagctgctctgtgcagcctcaggacatggcacactgccttccagcttctcggtgcagcctcaggacatggcaccctgccttccagctgctccagctcca

SEQ ID NO: 442721 - DNA, 201 bp, Homo sapiens
tgcttaggattgccttggctatttggctgttttttggttccatataaattttaaaatagttttctctagctctgtgaaggatgtcgttggtagtttgatakgagtagcactgaatctataaactgctttgggcagtatgaccattttaatgatattaattcttctatttatgagcatgagatgtttttccatttgtttatg

SEQ ID NO: 442722 - DNA, 201 bp, Homo sapiens
aaagtgctgggattacaggcatgagcccaacagccaacctacttccattttaaaggaaataataaaaacaataaactcccatttccattttgaaaaaaaaataaaagcaaagacaaagtagcctcaattttatggatattatttttttttctcaccagaagctctttatctaaacatcctgcactcattcaataatataca

SEQ ID NO: 442723 - DNA, 201 bp, Homo sapiens
gtctccacagcattgcagagatcttcaaggcaaccccttccatcacaggcccaaggcctaggagggaaaaatggcttcataggccaggcccagggcccagctgctctgtgcagcctcaggacatggcacactgccttccagcttctcggtgcagcctcaggacatggcaccctgccttccagctgctccagctccagcagt

SEQ ID NO: 442724 - DNA, 201 bp, Homo sapiens
accagtgattgatgtctacatctgcgtttgcttgtggcatcagttgtcaaactaacgcttaattaacatatatatgtttcccaatttaacttttaaagcaytgaattcaggcctgcaataggccacaaattaatggcacgaattaattaacctgaagtcaggagttcgggaccagactgaccaatatggtgaaacaccgtc

SEQ ID NO: 442725 - DNA, 201 bp, Homo sapiens
tctcgtcttactgcaacctctgcctcctgggttcaagtaattctcctgtctcagcctcccgagtagctgggactacaggcacacataccaccacacccaaktggtcaggctgatctcgaactcctgacctcaggtgatccacctgcctcagcatcgcaaagtgctgggattacaggcatgagcccaacagccaacctactt

SEQ ID NO: 442726 - DNA, 201 bp, Homo sapiens
tctccacagcattgcagagatcttcaaggcaaccccttccatcacaggcccaaggcctaggagggaaaaatggcttcataggccaggcccagggcccagctgctctgtgcagcctcaggacatggcacactgccttccagcttctcggtgcagcctcaggacatggcaccctgccttccagctgctccagctccagcagtg

SEQ ID NO: 442727 - DNA, 201 bp, Homo sapiens
tatgtacgtattcactgatgaaaaacaacctaacctaaatcttcattaataggctgtacctgcatgtaggatggtctctaaaaacagttatgtgcccaaakcttgccatgtttatcacagaatcaataatttatatgaagatacctattttataatgatcagatctacaaatgatagataacatgttagtaaaaagaaaaa

SEQ ID NO: 442728 - DNA, 201 bp, Homo sapiens
ttatgaaatgccttcttatgtgttttgttttgccccatttttaaaatttacatgtttaccttttttcttattgatttgacaaagttcttaatatattaagsatacactcactcatatatatggcaagtttgttatcttttgtttttcaagccttcaaactttaaaactcataaaccccttttcttatcctttttctcctag

SEQ ID NO: 442729 - DNA, 201 bp, Homo sapiens
gaattatcctgaaacctttttaaaaaaaagttgctgtatggatgaactttgtggtatataaattatatctaagtaagtctgctttaaaaaaaaacacatgtgtaaattccacccaaggctaattaaatcagtatctctggaggactgaacctagcattataatttttttaaacatcacaaatgattctagagagcagttag

SEQ ID NO: 442730 - DNA, 201 bp, Homo sapiens
ttttcttttttttttagacggagtctatctctgtcgcccaggctggagtgcagcggcgcgatctcggcttactgcaagctcagcctgccgggttcacgccrttctcctgcctcagcctcctgagtagctgggactacaggcgcccaccatcacacccggcttttttgtatttttagtagagacggggtttcaccgtgttag

SEQ ID NO: 442731 - DNA, 201 bp, Homo sapiens
ccacagcattgcagagatcttcaaggcaaccccttccatcacaggcccaaggcctaggagggaaaaatggcttcataggccaggcccagggcccagctgctctgtgcagcctcaggacatggcacactgccttccagcttctcggtgcagcctcaggacatggcaccctgccttccagctgctccagctccagcagtggct

SEQ ID NO: 442732 - DNA, 201 bp, Homo sapiens
gtttcactatattgcctgggctggtctcaaactcctaggctcaagcagtcctccagcatcagcctcccaaagcgctgagattacaggtgtgagctacgatycccacccaaagaattttataattgaaaaagaaataaatttctcattatgactgttgtaaaactattaaataaacccctagcaaagtgtccttaagataat

SEQ ID NO: 442733 - DNA, 201 bp, Homo sapiens
acagtttctttaaaccatgtaagcatgtttggaaataattctagtattaattttttcctagcataaaactaatttatggtcattatagaaaagttaaaaawcacagataggcaaaattttaaaaactatccataatctatagtcagtttttatattttggggatacatttttaagtactggtataattttttaaaatagga

SEQ ID NO: 442734 - DNA, 201 bp, Homo sapiens
cacatcagaattatcctgaaacctttttaaaaaaaagttgctgtatggatgaactttgtggtatataaattatatctaagtaagtctgctttaaaaaaaaacacatgtgtaaattccacccaaggctaattaaatcagtatctctggaggactgaacctagcattataatttttttaaacatcacaaatgattctagagag

SEQ ID NO: 442735 - DNA, 201 bp, Homo sapiens
cttaacacaatgtgtggcacaaaacctctcctctgtccttgcctctcaatttctttttcctttttcttttttcttttttttttcttttttcttttttttttagacggagtctatctctgtcgcccaggctggagtgcagcggcgcgatctcggcttactgcaagctcagcctgccgggttcacgccattctcctgcctcag

SEQ ID NO: 442736 - DNA, 201 bp, Homo sapiens
acagcattgcagagatcttcaaggcaaccccttccatcacaggcccaaggcctaggagggaaaaatggcttcataggccaggcccagggcccagctgctctgtgcagcctcaggacatggcacactgccttccagcttctcggtgcagcctcaggacatggcaccctgccttccagctgctccagctccagcagtggctaa

SEQ ID NO: 442737 - DNA, 201 bp, Homo sapiens
tgaacctcctcatgtcattgccaaagtttacctggactatgatcattaattattgattcccttggaccctggatttgcccaccagaatgagcactgcctgstggtaacttcagcttccttacatcctgatcatttgtccctaaatattcctacctggtggatctagtgctgccctgtcccatgaaagtggtctgcacttgc

SEQ ID NO: 442738 - DNA, 201 bp, Homo sapiens
aatgaacttatgaatctgtatgcctaaaccagaaaccaaatttgtacagatttgtttcatatgccttccatggtcccatacccatacaattgtctttctayccatcagtctatcagttatatattatgagagctctgcccactggtgagtattaaaatctccttagccttgtacacagtgacattttttatatttctggaa

SEQ ID NO: 442739 - DNA, 201 bp, Homo sapiens
taaagcaaggtatacatgaggaccaccttgggcacatgtcctcaggacctcctgaagttgtgtcatgggtgcatccttaaccttggcaaaataaacttttytaaattgattgagacttgtttatcattagctagagacagatccagacacttttcgattaacactccaaaaccagtgctgggtcactacaatatgctgtag

SEQ ID NO: 442740 - DNA, 201 bp, Homo sapiens
taatgaagtgcttaacacaatgtgtggcacaaaacctctcctctgtccttgcctctcaatttctttttcctttttcttttttcttttttttttcttttttyttttttttttagacggagtctatctctgtcgcccaggctggagtgcagcggcgcgatctcggcttactgcaagctcagcctgccgggttcacgccattct

SEQ ID NO: 442741 - DNA, 201 bp, Homo sapiens
cagcattgcagagatcttcaaggcaaccccttccatcacaggcccaaggcctaggagggaaaaatggcttcataggccaggcccagggcccagctgctctgtgcagcctcaggacatggcacactgccttccagcttctcggtgcagcctcaggacatggcaccctgccttccagctgctccagctccagcagtggctaaa

SEQ ID NO: 442742 - DNA, 201 bp, Homo sapiens
ttggaggtgcagggggccatctggctaaaatccgccccttgctccacttgaaaagaacatgcctttggtgcacgtctagatcagcccagaggtgggcaccrtttgggctagtggcagccctggacagtgacatgtctaatggccagtaaagtgactatcagggtcattttatacatagactctttcctgtttgccttattc

SEQ ID NO: 442743 - DNA, 201 bp, Homo sapiens
caggatggaggattaagtctggaatagaatccttccttgctcaagagaacaggcctattcttgtgactgttctaatcataggaataaagcagggtcagccracatttgcttctagattgttatatataaatatatcaatatatcaccagctacccctccaacaggtagatatccatacaaagttaacttcgatctttattt

SEQ ID NO: 442744 - DNA, 201 bp, Homo sapiens
taaatgcacagtgtgaaacaagaaatgacattaagtgtgcttactaataacagcaaaggagaacaacgatttaatttaaacaagctaaaccaaacatttgyttcacttagagcttggaatatgtcatttcattaaatcatgttttcatttcaaaagatgactgtcagactcaaactattttattataattgaaggaggata

SEQ ID NO: 442745 - DNA, 201 bp, Homo sapiens
tgtaaatcttacatgtactgatggaggtattatgtctccctaagatgtataaagcaaggtatacatgaggaccaccttgggcacatgtcctcaggacctcytgaagttgtgtcatgggtgcatccttaaccttggcaaaataaacttttctaaattgattgagacttgtttatcattagctagagacagatccagacactt

SEQ ID NO: 442746 - DNA, 201 bp, Homo sapiens
ttgtgttagtttgctgagaattatggtttccagctttatgcatgtcctggcaaaggacatgaacccatctttttcatggctgcatagtattccatggtgtrtatgtgccacattttctttatccagtctatcactgatgcacagttgggttggctccaagtctttgctattgtggacagtgctgcaataaacacacatgtg

SEQ ID NO: 442747 - DNA, 201 bp, Homo sapiens
gtatgataatagaaaaatagagaataaagatctctttccataaattttggcattctgctataatttgcaactctagtaactagcaaaatatttttttttttcttttcagatcacaccagcattaaattccttagtcaaaacctaaggcgactcaaacaaaaaaattttcttaaaaagttccaggatatgaacataaaattt

SEQ ID NO: 442748 - DNA, 201 bp, Homo sapiens
gctacttgggaggctgaagcaggaggatcacttgctcccaggagttcaaggctgcagtgagtcatgaccatgccaacacactccagcttagatgacaggtraggccgtgtctctctctctctcattaaaaaaaaaaaaaaaagaataaaagaaaaaaaaaaggaaatagccaccagattaaaaaaagtcacattatgtaaa

SEQ ID NO: 442749 - DNA, 201 bp, Homo sapiens
caaagtaaagttgaagaattgatagtgaattgggggaggagggagagaagatgaaagtagaattttggaggaaggaaatttaaaaattgagatcctgatcrtcccttcaaaaacatctttctccctagaacagacagtaatcttggaaattaaaccataagctccatgataaaagaataagacacttattgattattcctt

SEQ ID NO: 442750 - DNA, 201 bp, Homo sapiens
ccagcctgcctatttccctctcctttgctttcagtgtttctggtcacttcttggttatattccagtgttctctcctaggaaatctatgtgaactgtgactrtctacttgcttttttgtttcctctccatggaagacatgtgtactaactgcatgtaaggagtcatatttctgaaatcatttaataccatcaaaacaaatca

SEQ ID NO: 442751 - DNA, 201 bp, Homo sapiens
agacaatggggagaatatctccagggcatgtcagaagtcttcacagcaaccccttccatcacaggcccagtggcctagaagaaaatggttttgtgggccargcccagggtcttcgtgctatgtgcagcctagggacttggtgacctgtgtcccagccttcttcagccaccgatgaaagaagccaacatagagttcaggcca

SEQ ID NO: 442752 - DNA, 201 bp, Homo sapiens
tgggttttagggcccctggtctatgggtattttgtgggcaatggcagaagtagtggtgaggcaacccaccggaaccccagtggtccacggtgatgttggcrgtggctgtgatgggctggtcagggcatccctgtggcctgcaagtggcttgtacaggtaggtactagctgtggcagtatcagcagttgggttggcataacc

SEQ ID NO: 442753 - DNA, 201 bp, Homo sapiens
gacctcatttgatctccttttttcagacatatgctttatttcatattattcattttggcagtgtttctcaaacttcaagttcctgagaatcaccttgagtrtctgcttaacattcagattcttgtgtcaacccaaaggatcctgtttcagtaggattggagtgggcccaggaatattcattttttaaacaaaacctcttcc

SEQ ID NO: 442754 - DNA, 201 bp, Homo sapiens
tacaaacaaattttagaattttaggatacacaaacacacacatacacgagaggcagacagagagagagagaagggtagagggtagcaaaggaattgggggrtatttattatcaaatgctgatctaaaaagttttactgggggaaaaacctggagtaaaaaaatgggccagagttcaatcaatgacagcttcttcttcctca

SEQ ID NO: 442755 - DNA, 201 bp, Homo sapiens
atatatatatatatatatatatatatatatatatatatatatcatctatgaggatttccacagatgaaaatgtgcctttcagcactacaacttctcccaarggagataagggataaaaagacaaaatttttattatttctcctcatttaactctaaatgtatctacatttaactgaaaaatgcaactctatctgggcctgt

SEQ ID NO: 442756 - DNA, 201 bp, Homo sapiens
aattggtcgtcctacattaggtaaaggaaacgagtttttggaaaaatacaattaaaatacacaaatataataataataataattttctgaaggttaaaaaatgctgagatcactccttttagatatatgttgatgtctaactcagagacatgcctgagagttacaaacaaattttagaattttaggatacacaaacacaca

SEQ ID NO: 442757 - DNA, 201 bp, Homo sapiens
tgcacaaaagttatgacctagaaaaaacaaataaaaacgtacatcagaaaaggaggaaataaagtaactccccaaaataaagtatgtaacattttttattrtatgtcactatgcaggaaaatacactttggcagtatgcacggataaactggataggaaagtggcagaatagatataggaaactttgggctgtccaaggcg

SEQ ID NO: 442758 - DNA, 201 bp, Homo sapiens
ccccttcatgaggacagtcaccagagcaggagggcccagaggggcagagacagtcaaaaccccctgccaggttgatgcaggcagaatcgttccaacaggtrtgagttcttaaggcacattcatcaatgtctgcaatataggaagcacagaagcttagaatctagccaagggaacttagagaacaaacaaccatcatttaca

SEQ ID NO: 442759 - DNA, 201 bp, Homo sapiens
acccatggaaaacaaaatctaaatttctctccataacctctaaggcccaatatgatctgtctcctgcttacctctctgacattaactcctgctactcccamttctcaccttctctactttagtcaccatgatcttctacattttcctcaaactcaccaagcttggagccttcatacttgctgtttcatctacccaggatgt

SEQ ID NO: 442760 - DNA, 201 bp, Homo sapiens
tcccaattctcaccttctctactttagtcaccatgatcttctacattttcctcaaactcaccaagcttggagccttcatacttgctgtttcatctacccargatgtccttctcctggagtaggaaatggcttcttccatcacctcaggtaggtctctgccctaatattaactccttcttgaggacttttctaagcatttca

SEQ ID NO: 442761 - DNA, 201 bp, Homo sapiens
tcctttattttacttcatagcacttgtcactaacagagtcttattatatatttatttgtctactggttaattgactgtctacgctagaatgcaaagtccaygagggcaaagactgtcccttttcttgttatagtcccatcacctaaaacaataactagtaaagagtagacactcaaaattttgttgattgaataaatgaac

SEQ ID NO: 442762 - DNA, 201 bp, Homo sapiens
gtccccatcctctcctctgctgattctacttcctatcctcatctgttcctgcttctcccagcctaagctcctaatctaggttctctttaggcatggtccakcttgagctcagactatgctctgaatttgcagttgtcctggagaacttcccaagcacttacaggttaatttctactactgatgaaccatcttgacctacat

SEQ ID NO: 442763 - DNA, 201 bp, Homo sapiens
cccatcctctcctctgctgattctacttcctatcctcatctgttcctgcttctcccagcctaagctcctaatctaggttctctttaggcatggtccagctygagctcagactatgctctgaatttgcagttgtcctggagaacttcccaagcacttacaggttaatttctactactgatgaaccatcttgacctacatcaa

SEQ ID NO: 442764 - DNA, 201 bp, Homo sapiens
aataagctccaaaaccgggtacttaaaactttgtacagctaagctctaacctaactttccaggattttctctctgtcttgccacatgaactcattactcaygtcaaactggcatctacactgtcccttgacagcatatcccctgctgcctcatatgccttcccccacttctcagcctttcccagccatactcacttttccc

SEQ ID NO: 442765 - DNA, 201 bp, Homo sapiens
tacagctaagctctaacctaactttccaggattttctctctgtcttgccacatgaactcattactcatgtcaaactggcatctacactgtcccttgacagyatatcccctgctgcctcatatgccttcccccacttctcagcctttcccagccatactcacttttcccctcttgctgcaaatcctccaggatcctgccagc

SEQ ID NO: 442766 - DNA, 201 bp, Homo sapiens
tattcttctagtctaaagccttttatggcttcgatatgtagattctcctctgaaatgctagctgtagagatgctgaaatggctgtgaaatatatggagagrcagtttgccattcccagtacccatagaggtacactgcttgaatctctcttcaagaaagaccttgctactcagttgtgaaaagtatagttagccaacagac

SEQ ID NO: 442767 - DNA, 201 bp, Homo sapiens
ggcatagagaatttcctatgggtcacatagctagtaaatgacaggtaaggattcaaagtagacattctagctgcaaagtctaaattcttaactattagcaratattgataacaagagatttccaaggaaactgaacagagaagaatctaacagtggttgatgtaagtgcagggcttattaggctagaaacctgaagcagaa

SEQ ID NO: 442768 - DNA, 201 bp, Homo sapiens
actaaaagtctggaaaaagtaacaagaaagacaaagagatgtttggacttaaaacatcctacatcggctgggtacagtggctcatgcctgtatccaagcaytttgagaggctggggcgggtgaatcacaagttcaggagtttgagaccagcctggccaacatggtgaaaccctgtctctactaaaaatacaaaaaattagc

SEQ ID NO: 442769 - DNA, 201 bp, Homo sapiens
ctagacctgcactatccagtaaggtgggtaaattcacatttttaattaattaaaattaaattaagttacaaaattggcttctcacattagccacatttcargagctcaataatcacatgtggctagtggctactattaatgaaccctgaagatataaaacattttcatcaccgtggaaatttctattaaacagtactggta

SEQ ID NO: 442770 - DNA, 201 bp, Homo sapiens
gaatgatgggtagactgaatatccttcaggcaatcccgggtttctgataagaattatgcaatagtagcatcaagcttttatctctccttagggttcagacwgcagatacactgcatcaccaatacagaattgagtcatatgcactgacaaataattaggaagaaggtagcaataaagtcctctcgtaggactgaagaagtt

SEQ ID NO: 442771 - DNA, 201 bp, Homo sapiens
agcattgcagagatcttcaaggcaaccccttccatcacaggcccaaggcctaggagggaaaaatggcttcataggccaggcccagggcccagctgctctgtgcagcctcaggacatggcacactgccttccagcttctcggtgcagcctcaggacatggcaccctgccttccagctgctccagctccagcagtggctaaaa

SEQ ID NO: 442772 - DNA, 201 bp, Homo sapiens
cttagtattccatcttttattccttctcacatttcttctggattatttaatctgcattaatgactttggcaacaacctgtggttgataaatctccaaactmtattttagtacaacttcttccataaaccgtagcaaattatgtaaaatgtccactggatttctctaagtggatattctcaggaattaaaggcctaaaaatt

SEQ ID NO: 442773 - DNA, 201 bp, Homo sapiens
gcattgcagagatcttcaaggcaaccccttccatcacaggcccaaggcctaggagggaaaaatggcttcataggccaggcccagggcccagctgctctgtgcagcctcaggacatggcacactgccttccagcttctcggtgcagcctcaggacatggcaccctgccttccagctgctccagctccagcagtggctaaaag

SEQ ID NO: 442774 - DNA, 201 bp, Homo sapiens
aataattttctcccagtgtctctcttcggataccatcttatccttcttctcttcacagccagatttcctggagagtgattagtctttggccttggtctccatcacctgatcttcctattgtcatctcaattagtcttttacctcgccacttatcaaatgtcacctctgaccttctaactacaaagcccagcagattcttct

SEQ ID NO: 442775 - DNA, 201 bp, Homo sapiens
tgcagagatcttcaaggcaaccccttccatcacaggcccaaggcctaggagggaaaaatggcttcataggccaggcccagggcccagctgctctgtgcagcctcaggacatggcacactgccttccagcttctcggtgcagcctcaggacatggcaccctgccttccagctgctccagctccagcagtggctaaaagggac

SEQ ID NO: 442776 - DNA, 201 bp, Homo sapiens
acaccatggagggctaagaattggagaaaatagccaaatttatccccagtttattcttaaaatcaatgctctcgcatttataaggagtactatttaagagyagttcccccacaccaagctgctttattatacccaattcatgtcagaaaagaaacctggcaccatagctacctcaagccaacgattctttggcaagtggca

SEQ ID NO: 442777 - DNA, 201 bp, Homo sapiens
gcagagatcttcaaggcaaccccttccatcacaggcccaaggcctaggagggaaaaatggcttcataggccaggcccagggcccagctgctctgtgcagcctcaggacatggcacactgccttccagcttctcggtgcagcctcaggacatggcaccctgccttccagctgctccagctccagcagtggctaaaagggacc

SEQ ID NO: 442778 - DNA, 201 bp, Homo sapiens
ctggggtcccaggcaagattttgtctggaaaaataaaagcttttgctattttttaaaaaaagttttaaaactattgctccagagtaggattcattgctcawctctttccactgagcacaatggaaatacctgtttgcacttcctaccatctgctcccaccttgtttctctctgggtgagcacactgctaatgccccagtca

SEQ ID NO: 442779 - DNA, 201 bp, Homo sapiens
cagagatcttcaaggcaaccccttccatcacaggcccaaggcctaggagggaaaaatggcttcataggccaggcccagggcccagctgctctgtgcagcctcaggacatggcacactgccttccagcttctcggtgcagcctcaggacatggcaccctgccttccagctgctccagctccagcagtggctaaaagggacca

SEQ ID NO: 442780 - DNA, 201 bp, Homo sapiens
ggttctactctgctagatgctggcaatatcaagatgactaaggcatggcttctgtccttgaggtgttcacagcttaatacaggagagaaacacatgaatgycagtgcaatgtggtaagctctggttgcagatatgcacagactaccaagtgaacatacagaagaggcaccatcagtggcttggagctatcagggaaatgtt

SEQ ID NO: 442781 - DNA, 201 bp, Homo sapiens
agagatcttcaaggcaaccccttccatcacaggcccaaggcctaggagggaaaaatggcttcataggccaggcccagggcccagctgctctgtgcagcctcaggacatggcacactgccttccagcttctcggtgcagcctcaggacatggcaccctgccttccagctgctccagctccagcagtggctaaaagggaccaa

SEQ ID NO: 442782 - DNA, 201 bp, Homo sapiens
ttttccagagactggaggtatttgctgaacagtgagccacagctgggtagagaagtttaaaacaaacaaacaaacaaacaaacaaaacaaaacagaaagcraatcttgtgtctttcttctgggagcttagacagctcaaaggtcaccaggaaaaagaaaaatgccattcttgctccatattgactctaatactaaagtccc

SEQ ID NO: 442783 - DNA, 201 bp, Homo sapiens
gagatcttcaaggcaaccccttccatcacaggcccaaggcctaggagggaaaaatggcttcataggccaggcccagggcccagctgctctgtgcagcctcaggacatggcacactgccttccagcttctcggtgcagcctcaggacatggcaccctgccttccagctgctccagctccagcagtggctaaaagggaccaag

SEQ ID NO: 442784 - DNA, 201 bp, Homo sapiens
tgtagtttccttcataaaactacaaaagggattttataatgcataaaactacaaaggagctcaatcagccttattcctctcaaaaaaaaaaaaaaatatatatatatatatatatatatatatatatatatatatatcatctatgaggatttccacagatgaaaatgtgcctttcagcactacaacttctcccaagggaga

SEQ ID NO: 442785 - DNA, 201 bp, Homo sapiens
aagaagaatgaatttaatttttccagagactggaggtatttgctgaacagtgagccacagctgggtagagaagtttaaaacaaacaaacaaacaaacaaamaaaacaaaacagaaagcgaatcttgtgtctttcttctgggagcttagacagctcaaaggtcaccaggaaaaagaaaaatgccattcttgctccatattga

SEQ ID NO: 442786 - DNA, 201 bp, Homo sapiens
atcttcaaggcaaccccttccatcacaggcccaaggcctaggagggaaaaatggcttcataggccaggcccagggcccagctgctctgtgcagcctcaggacatggcacactgccttccagcttctcggtgcagcctcaggacatggcaccctgccttccagctgctccagctccagcagtggctaaaagggaccaaggta

SEQ ID NO: 442787 - DNA, 201 bp, Homo sapiens
catgtagtttccttcataaaactacaaaagggattttataatgcataaaactacaaaggagctcaatcagccttattcctctcaaaaaaaaaaaaaaatatatatatatatatatatatatatatatatatatatatatcatctatgaggatttccacagatgaaaatgtgcctttcagcactacaacttctcccaaggga

SEQ ID NO: 442788 - DNA, 201 bp, Homo sapiens
attagaaaagaagaatgaatttaatttttccagagactggaggtatttgctgaacagtgagccacagctgggtagagaagtttaaaacaaacaaacaaacwaacaaacaaaacaaaacagaaagcgaatcttgtgtctttcttctgggagcttagacagctcaaaggtcaccaggaaaaagaaaaatgccattcttgctcc

SEQ ID NO: 442789 - DNA, 201 bp, Homo sapiens
cttcaaggcaaccccttccatcacaggcccaaggcctaggagggaaaaatggcttcataggccaggcccagggcccagctgctctgtgcagcctcaggacatggcacactgccttccagcttctcggtgcagcctcaggacatggcaccctgccttccagctgctccagctccagcagtggctaaaagggaccaaggtaca

SEQ ID NO: 442790 - DNA, 201 bp, Homo sapiens
agcatgtagtttccttcataaaactacaaaagggattttataatgcataaaactacaaaggagctcaatcagccttattcctctcaaaaaaaaaaaaaaatatatatatatatatatatatatatatatatatatatatatcatctatgaggatttccacagatgaaaatgtgcctttcagcactacaacttctcccaagg

SEQ ID NO: 442791 - DNA, 201 bp, Homo sapiens
ttcaaggcaaccccttccatcacaggcccaaggcctaggagggaaaaatggcttcataggccaggcccagggcccagctgctctgtgcagcctcaggacatggcacactgccttccagcttctcggtgcagcctcaggacatggcaccctgccttccagctgctccagctccagcagtggctaaaagggaccaaggtacag

SEQ ID NO: 442792 - DNA, 201 bp, Homo sapiens
aagcatgtagtttccttcataaaactacaaaagggattttataatgcataaaactacaaaggagctcaatcagccttattcctctcaaaaaaaaaaaaaaatatatatatatatatatatatatatatatatatatatatatcatctatgaggatttccacagatgaaaatgtgcctttcagcactacaacttctcccaag

SEQ ID NO: 442793 - DNA, 201 bp, Homo sapiens
acctgcatttgattttacaggctcccagggagaagggacttgccttgtctccaatgagactttgtacttaaactattgagttaatgctggaataagttaaractttgtgggactgttgagaaggcatgattggttttgaaatgtgaaaaggacatgagatttgggagagaccaggggcagaatgatatggtttggccttct

SEQ ID NO: 442794 - DNA, 201 bp, Homo sapiens
tgtcagatggatagtttgtaaatactttctccagttctgtgggttccctattcactttgttgactgtttcctttgctgtgcaaaagtccttttttttttttaacttggtgtgaccccatttctctaattttactttgattgtctgtgcttgtggggtattactcaagaaatctttgcccaggccaaagtcctggaaagctt

SEQ ID NO: 442795 - DNA, 201 bp, Homo sapiens
accttccccagaataagaatcagaaggtctggcattaaattgctatatggacaatttactgccaggacatttgctgataaaagaagcatttgctaagcatrtagtttccttcataaaactacaaaagggattttataatgcataaaactacaaaggagctcaatcagccttattcctctcaaaaaaaaaaaaaaatatata

SEQ ID NO: 442796 - DNA, 201 bp, Homo sapiens
actgacttctaaaaactgagtagcaaagctaaatgacataaaacagcaaaagaaaggaaaaaaatatgaccttgacatggttataaaaccagctgaacagygtcagcaggtactgattgatttgagaagagactagaatggtctttggaaataaggaatgtcaataatggaaatgctatatcaggatccggagtcaaataa

SEQ ID NO: 442797 - DNA, 201 bp, Homo sapiens
agtatgactactgacttctaaaaactgagtagcaaagctaaatgacataaaacagcaaaagaaaggaaaaaaatatgaccttgacatggttataaaaccarctgaacagcgtcagcaggtactgattgatttgagaagagactagaatggtctttggaaataaggaatgtcaataatggaaatgctatatcaggatccgga

SEQ ID NO: 442798 - DNA, 201 bp, Homo sapiens
gcttgaaacatgttttcaaagctgttaatatactctaacaattgtggatctacacatacatggaaacgcacacacacacacacacacacacacacacacacgcaggcacacacatcttccttgacaaagaaacccacattttgtttagatgtaagttatccaagtactacaaaagaagctgggatctgcccaagcctcagg

SEQ ID NO: 442799 - DNA, 201 bp, Homo sapiens
tagaagaaaagaatggaagtaaacagtagaagcaacttaagaagaaacttcttaggggaggaatagggaggagtgagcagtagactgctgtttttcatcayaagccatgtaacacatatcatattaatacatgaattatatgaattaaacaatgctctactaagagaaaaatgtttgtgtggtacagtctgagagagatgc

SEQ ID NO: 442800 - DNA, 201 bp, Homo sapiens
agcttgaaacatgttttcaaagctgttaatatactctaacaattgtggatctacacatacatggaaacgcacacacacacacacacacacacacacacacacgcaggcacacacatcttccttgacaaagaaacccacattttgtttagatgtaagttatccaagtactacaaaagaagctgggatctgcccaagcctcag

SEQ ID NO: 442801 - DNA, 201 bp, Homo sapiens
aaaatggagagtgaaatgataagtttcagaggaatccatttgtattatgccatttagataattttgtaaaccgcataaggcaacagttaacactcactgartgtttgctacatacccaatgatgttctaatacattatattaactaatttgcttaatccacagaacaatactatgaaatagacactctatttacaaatggt

SEQ ID NO: 442802 - DNA, 201 bp, Homo sapiens
tttataactgcaagctcattcctttcaaacctcacctgaagcttccagttgatcctagctctattgtattagaacttggaaagagaaggagacaggcaggsagggtggagcaaggggtagttagcaagctgaatcctcactataagagaaaggcaatagataataaataaaattgtataaaatatagcaatacaagcacat

SEQ ID NO: 442803 - DNA, 201 bp, Homo sapiens
ttttaatttgcatttctttttattaatcctaagcttgaaacatgttttcaaagctgttaatatactctaacaattgtggatctacacatacatggaaacgsacacacacacacacacacacacacacacacacgcaggcacacacatcttccttgacaaagaaacccacattttgtttagatgtaagttatccaagtacta

SEQ ID NO: 442804 - DNA, 201 bp, Homo sapiens
ttcaggcacaccattaatgctcattatctttacacatatatctgtatttcctccccagctagactctgctggtagttaccttatcagaaaaacaacagtargaccccaaactattagtgcagaacaaaaggacaaaaatccatgcagtaaaagaggcaactgaggccatgaaaagctgaagtgaggattaaagatggagct

SEQ ID NO: 442805 - DNA, 201 bp, Homo sapiens
catgctgccaggcagtttctgtgcccgatttttttaacagactgtaagcatgagactggagccagcctagcttatcactacatgtgctttatttcatacaytggctgcattcacagaaagttgtatttaagtaaaatatttgcatatcgaatctttttttcacttacattttaattttagagatgtgttcccacagaaaat

SEQ ID NO: 442806 - DNA, 201 bp, Homo sapiens
cagactgtaagcatgagactggagccagcctagcttatcactacatgtgctttatttcatacattggctgcattcacagaaagttgtatttaagtaaaatrtttgcatatcgaatctttttttcacttacattttaattttagagatgtgttcccacagaaaataatttagccccaatatgtaaagataaatcctaattag

SEQ ID NO: 442807 - DNA, 201 bp, Homo sapiens
aactgacaagacaaccatctgtcctggttaatttaaaatacctgtcaaaagacacattggcagatgtcctctggtgtctcttaagagaagctgtatttctrtcaggttgcacttatttattcctttccactttcgtgaagtaggggaaacatgcataaggtggagtgagtctaagccacaggctccacaggcatagtctcc

SEQ ID NO: 442808 - DNA, 201 bp, Homo sapiens
tgtggttttgtcctgcagaattactagtagttagaatctaaagaaggagactagaattttagatttggaaggagctgaggagacatataggccagatgagmtgttaatgaccctgtggcgttcaataggtagatccaaaaaataccctttgcggtgcagtttttaaaacgcccttcttggattttcacagtagctaaatgt

SEQ ID NO: 442809 - DNA, 201 bp, Homo sapiens
cccacaaagggaagcccatcagactaactgtggatctctctaaagaaaccctacaagctagaagagagtgggggccaatattcaacattcttagagaaacraattttcaacccagaagatcatctccagccaaactaagcttcataagcaaaggagaaataaaatactttacagacaggcaaatgctgacagattttgtca

SEQ ID NO: 442810 - DNA, 201 bp, Homo sapiens
tggattaatgtctgacttcccacccctgggaaattggtccaacttcagcataggatgcaatgaccaaaatcttattaattagcaaactgtcagaggctcartgagaaatgactttggtggcctcagcaatatttcaccccagaaactgcacagatttgacactcagggaccaacagggcagcattacctcagatggaggca

SEQ ID NO: 442811 - DNA, 201 bp, Homo sapiens
gcatttccatatatcctctgaaatctaggtggacgttcccaaacctcaattcttgacttctgtgcacctacaggcttaacactacatggaagctgtcaaakttaggggcttgcaccctcagaagtaatgggaaaagctgtaccctggcctcttttagccatagttggagcatcaggaacaaagtcctgaggctgtacacag

SEQ ID NO: 442812 - DNA, 201 bp, Homo sapiens
gaaacaagaaatgtgcacggcacagactaatgctgataacacaaactaagaaattgaattatcacattcctacacgtacccctatagaaggggagctatamatgccagccaaagtaaaatcagaatcttagcacaaaggctgctggtccctgagggacagtttgggtggactggatcatgtaaaaaggcaggtagggcaca

SEQ ID NO: 442813 - DNA, 201 bp, Homo sapiens
ataaaagcaactgactgaaggacagcaagaataaaatcactcagccagttcattttgagtgtgtgacctactgtgggtccagtaaaaggaaaatataagtrtaggcaaatgtggtaggaaaatgaatgtactgagatattgtttgcaatcttccttatatttccccctttacttcttccaaaaatagccaggctgtttcta

SEQ ID NO: 442814 - DNA, 201 bp, Homo sapiens
cagatgaagggatatacaaataatggatatcctcacactgacagtgagtcagggaggaaatgccttgcaattatttgaaacaggtgatggatacactttgyaaaagacaataaaaacatgtagaaaataattaaactccccttttaaagttattctggttgtgaataaggataaccattaggttgtttgaaaatcaaagga

SEQ ID NO: 442815 - DNA, 201 bp, Homo sapiens
caaataagaaaaatggaaaggtttgaaacagatgctctggtatgtatatagggtcagaaagcatttgggatatataagcaccaaaggaagataataagagwccagctaaagctggctaatagaaatttgaaaggctgtaagcagctgagtctcaccattcctactgagcatggatggtggaatttacccaaggtgggggat

SEQ ID NO: 442816 - DNA, 201 bp, Homo sapiens
aagaagaggaattgggggaattaagataaattcttagcattcatggatgctcctagaatagccaaagtttgctgaaaataattcactgcaagtgaaattgkcaggagacagagtgtgacaactgcaggtggaaataggattggcagaagaacaagtttaaggacactgtgcctcaccaaggtgacttataagaagaggaaa

SEQ ID NO: 442817 - DNA, 201 bp, Homo sapiens
ataacttatccatgtaaccaaaaaccacctgttccccaaaaactattgaaagaaattttaatatgaatgtctttttctcacaccatgaatttaagttatcyaaattaatccttaaaaatatcttctaccttggacattatcattattattcaatgtctgaagaggcaacacatttaagagatgaagcaatttgcccaaggt

SEQ ID NO: 442818 - DNA, 201 bp, Homo sapiens
ggagatcattgaaatctcatcccagaaacctcatcagggaaacagaagcagtattcgaattcccagtccactccaggaccacagatgaagtgttttctccrgcccgaatgacctgtaccacctcaattacttttctgaaatacatcactggtttcatcctacctgcccatgtgtgctaactagattatgcagaaaacaaaa

SEQ ID NO: 442819 - DNA, 201 bp, Homo sapiens
ttctcctacattatcttttataagctttgtcagtttaactttttgatctatagcccacttggaattgattttgcattatcagttgtgtgaaacagggtcargattagtgctttccccatggggatattcagttgacccagcacactgtagtgagtaggccatccatgcctgctattctgccaggctacaacatacagtttg

SEQ ID NO: 442820 - DNA, 201 bp, Homo sapiens
ttctatgtcagctctgctgtatgttgtcctatttattagaaaagttacaatgtatattttttaggcaaagtttattgcactaattaactcattaacgacckctagagagaagccaggcttctctgcaggctggtttgctgaatgttaatgaccaagataaagagaaaatcagtgtgccaagctctgggaaagccccaggac

SEQ ID NO: 442821 - DNA, 201 bp, Homo sapiens
tttgctgaaggtccactccagaccctgtttccctgggtatcaccagcagaggctgcagaacagcaaagactgttgcctgttccttcctctggaagctttgycccagaggggcacctgccatatgccagccagagctttcctgtatgaggtgtctctcaacccctcctgggatgtgtctcccagtcaggaggcacaggggtc

SEQ ID NO: 442822 - DNA, 201 bp, Homo sapiens
tctcaaggtacatatgattcattaaggctaaactcaagtagatgtccaattaatacaagacaaaatgtgaaataaagaagttcaaatttgagactagttcracaactttttaaatagtccttgagatggtataagcacagaataaactagatgaatgaagggaaccaacaaagggtacactatggggacagaagtggcagg

SEQ ID NO: 442823 - DNA, 201 bp, Homo sapiens
tacaatacttattatgctccattataattgcctgattattgttgattctctcagccctgtgggctccttgagagaaagcacaacaattttcagagctgcartctcagtgcttgcacagtttatggctcaaagcaagtattcaatggaagacaaagaacattgagagacaagtaaaggagtcaaagaatgaatggatgaggt

SEQ ID NO: 442824 - DNA, 201 bp, Homo sapiens
tcggtgttggtcttatagaaccacctcacctttcagagcctctatatctgtatctgctaaaaatgggctgattaaatctggtggtttactagttataaaaycctctgattctcacgggatgctcagttattcttcattcaaataatattctagtgttactaaagggcaggcaacatgctaactggtaatatagtgttgcaa

SEQ ID NO: 442825 - DNA, 201 bp, Homo sapiens
tcaaggcaaccccttccatcacaggcccaaggcctaggagggaaaaatggcttcataggccaggcccagggcccagctgctctgtgcagcctcaggacatggcacactgccttccagcttctcggtgcagcctcaggacatggcaccctgccttccagctgctccagctccagcagtggctaaaagggaccaaggtacagc

SEQ ID NO: 442826 - DNA, 201 bp, Homo sapiens
cctttttacatgcctgtttgctatttgtacatcttcttttgagaaatacttattcagatcttttggccatttttaaatcagattatcagttttttttttttcttatagggttgtttgagctcctatatattctatttatttatcctttgtcagatggatagtttgtaaatactttctccagttctgtgggttccctattca

SEQ ID NO: 442827 - DNA, 201 bp, Homo sapiens
caaggcaaccccttccatcacaggcccaaggcctaggagggaaaaatggcttcataggccaggcccagggcccagctgctctgtgcagcctcaggacatggcacactgccttccagcttctcggtgcagcctcaggacatggcaccctgccttccagctgctccagctccagcagtggctaaaagggaccaaggtacagct

SEQ ID NO: 442828 - DNA, 201 bp, Homo sapiens
taaaataggatacccaaataatgggatattgtttggttattggaatattgggtggttataaccacccaaataatggaatattttatatatatatatatatrtgtgtgtgtgtgtttgtatatgtatatatatactatatataatttcatttttcttttggatgggtataataaccacacaatattccattatttgggtatc

SEQ ID NO: 442829 - DNA, 201 bp, Homo sapiens
aggcaaccccttccatcacaggcccaaggcctaggagggaaaaatggcttcataggccaggcccagggcccagctgctctgtgcagcctcaggacatggcacactgccttccagcttctcggtgcagcctcaggacatggcaccctgccttccagctgctccagctccagcagtggctaaaagggaccaaggtacagcttg

SEQ ID NO: 442830 - DNA, 201 bp, Homo sapiens
gtggcaacagcagtgttgaacccagtggaggacacagtcctctaagggctgtgaacttggactggtgcaggattggaggcctgccactgaggaggatgggrgccactctcagtgggaggagaataggcagacagctatggggcctgtgatttcctcacatcttggtcccacaacagctcacagcagtgggagaggtgagat

SEQ ID NO: 442831 - DNA, 201 bp, Homo sapiens
aaccccttccatcacaggcccaaggcctaggagggaaaaatggcttcataggccaggcccagggcccagctgctctgtgcagcctcaggacatggcacactgccttccagcttctcggtgcagcctcaggacatggcaccctgccttccagctgctccagctccagcagtggctaaaagggaccaaggtacagcttgagct

SEQ ID NO: 442832 - DNA, 201 bp, Homo sapiens
agaggcggtagtatttgtacttggaatgtacgacattgcctagcttcccttctcccttcctggtctggcagtggcaacagcagtgttgaacccagtggaggacacagtcctctaagggctgtgaacttggactggtgcaggattggaggcctgccactgaggaggatgggggccactctcagtgggaggagaataggcaga

SEQ ID NO: 442833 - DNA, 201 bp, Homo sapiens
ccccttccatcacaggcccaaggcctaggagggaaaaatggcttcataggccaggcccagggcccagctgctctgtgcagcctcaggacatggcacactgccttccagcttctcggtgcagcctcaggacatggcaccctgccttccagctgctccagctccagcagtggctaaaagggaccaaggtacagcttgagctgt

SEQ ID NO: 442834 - DNA, 201 bp, Homo sapiens
ctgtctgtaataggcaggagtgggatggtccccagattattggcagaatgttcaggtgggtgcagtggtgactgtgctgcagactggcctccagggagggyggggccactctcagtgggagcagcttaagcaggcatttgtagaacttgtgattttctcccacctcggtcctacagcagctcgcaagcagaggcggtagta

SEQ ID NO: 442835 - DNA, 201 bp, Homo sapiens
ccttccatcacaggcccaaggcctaggagggaaaaatggcttcataggccaggcccagggcccagctgctctgtgcagcctcaggacatggcacactgccttccagcttctcggtgcagcctcaggacatggcaccctgccttccagctgctccagctccagcagtggctaaaagggaccaaggtacagcttgagctgtgg

SEQ ID NO: 442836 - DNA, 201 bp, Homo sapiens
ctagctgtggcagtatcagcagttgggttggcataacctcaaaccctgggaaaagtgtttaggtgccaacacatgtggattgggctgggcaatctgcaggygcctggatgtcatgcttaagtattgtgggggtgggaccaggacagcaggcttgtcctcaggccttctggtaggatgttctggcactgtctgtaataggca

SEQ ID NO: 442837 - DNA, 201 bp, Homo sapiens
ttccatcacaggcccaaggcctaggagggaaaaatggcttcataggccaggcccagggcccagctgctctgtgcagcctcaggacatggcacactgccttccagcttctcggtgcagcctcaggacatggcaccctgccttccagctgctccagctccagcagtggctaaaagggaccaaggtacagcttgagctgtggcc

SEQ ID NO: 442838 - DNA, 201 bp, Homo sapiens
gaggactaggataccaggtgggccagtcttcgggtccctgtggtggcagcagtcagctgagcatgcctgtctgtgagctccagagtggtgtatggtgagtytagtgttcgtaagtccaggcaggttgattcttgggcttccaggtagcttgcttggatgttggtagtatcaggaatggtccagaaatttgggtgggtttta

SEQ ID NO: 442839 - DNA, 201 bp, Homo sapiens
tccatcacaggcccaaggcctaggagggaaaaatggcttcataggccaggcccagggcccagctgctctgtgcagcctcaggacatggcacactgccttccagcttctcggtgcagcctcaggacatggcaccctgccttccagctgctccagctccagcagtggctaaaagggaccaaggtacagcttgagctgtggcct

SEQ ID NO: 442840 - DNA, 201 bp, Homo sapiens
gctagaaaatgtctgtaaatgtttgactgaggaaaccaggaacattgaaacccccaatcaaggtgatttgggagtaatttcaaggaaggagaagtgcagtrtgattgtaatttactaagcagaaggaagtctaatcaatggcattgtaccctgtttagagacagactgaacagaaagggggctgggcagcccaaggtagaa

SEQ ID NO: 442841 - DNA, 201 bp, Homo sapiens
ccatcacaggcccaaggcctaggagggaaaaatggcttcataggccaggcccagggcccagctgctctgtgcagcctcaggacatggcacactgccttccagcttctcggtgcagcctcaggacatggcaccctgccttccagctgctccagctccagcagtggctaaaagggaccaaggtacagcttgagctgtggcctc

SEQ ID NO: 442842 - DNA, 201 bp, Homo sapiens
ttagtctgatggtggttcctctataggtgactagatgcttttctcttgctgtttttagaactctctttttctttggctttagacagtttgactataatgtktcacagagaagacctttatggagttttgtcagtttggtgatctttgatcttcctatatctggatatctaaatcttttgcctgacttgtggtttccatcca

SEQ ID NO: 442843 - DNA, 201 bp, Homo sapiens
tcacaggcccaaggcctaggagggaaaaatggcttcataggccaggcccagggcccagctgctctgtgcagcctcaggacatggcacactgccttccagcttctcggtgcagcctcaggacatggcaccctgccttccagctgctccagctccagcagtggctaaaagggaccaaggtacagcttgagctgtggcctcaga

SEQ ID NO: 442844 - DNA, 201 bp, Homo sapiens
aaacccccattgctaaatagaagccaacaactgggccactgtcttttgttaagctgattgtgccataaataaatccttgtcatcataaaaaagagtggtaygagtggatagtatgggttaaagtaagatcagttagcgtggcattggaggtgcagggggccatctggctaaaatccgccccttgctccacttgaaaagaac

SEQ ID NO: 442845 - DNA, 201 bp, Homo sapiens
gtggaaccacttgagcccttcctctttctcatttgtgtgtatggtttacctgtcagtattacagttttatgagttttcatgttggtaaatgttgtttttttgcttccaggtgtagggctcccttaatcaattttagtagggctcatcttgtggtgataaattccctaagcatttgcttctctgggaaagactttatccctc

SEQ ID NO: 442846 - DNA, 201 bp, Homo sapiens
aaatgaaaaattttactatggtgtactaggtgtcactgcagcagtctggtccaagaattgcaatgggattctgaaaatgaccatctttaacagatagagamattttaactgaagtgtatcataaacccccattgctaaatagaagccaacaactgggccactgtcttttgttaagctgattgtgccataaataaatccttg

SEQ ID NO: 442847 - DNA, 201 bp, Homo sapiens
agtggaaccacttgagcccttcctctttctcatttgtgtgtatggtttacctgtcagtattacagttttatgagttttcatgttggtaaatgttgtttttttgcttccaggtgtagggctcccttaatcaattttagtagggctcatcttgtggtgataaattccctaagcatttgcttctctgggaaagactttatccct

SEQ ID NO: 442848 - DNA, 201 bp, Homo sapiens
aagagaaggagtaatttagagaaaaatcagacaacttgttgatgccattttttataacaccagaattgtaaacaaagcacagtaaactgataaaggctaaratgaaattatccaacaaatgcagtacagacattttctcaggaaagagaggcagcctgccaaccaactgttttactgacttgagggctttagtcttcttta

SEQ ID NO: 442849 - DNA, 201 bp, Homo sapiens
attaacaacattaaaacagttattagaactgtattcatatattcaaagagttaggtagagacatggaagattttttacacagtcaaactgaacttacagakttaaagctacaatatatgaggtaaaaaatacactaagtgatagtaatgacagataatacagaagtttcgtaaccttgaaggcataacaatggaaatgatc

SEQ ID NO: 442850 - DNA, 201 bp, Homo sapiens
taccttggagaaaacagttcatttaatcatgaggtttttcaacatctttttctgaagcttatcataaagtgacactgtacaccttcaacagaaattacatrttttataaatttaaaatatcaaaactagatgaagtaccataggtgtgctctagtaccagccttaagtagttaaacataacttcatttgaaattccttgtc

SEQ ID NO: 442851 - DNA, 201 bp, Homo sapiens
tcagcaatgaggcaccaccttggaggcagagatcaagctttctccagcaccttgatcctgggtttcccagcctcctaaactgtaagaaacatgtttctgtyttcttatagtttcaacctgagtgatggacgcttaggttgattccacaactttgctatcgtgaatagtgctgtgataaacatacaagtgcatgtatctttt

SEQ ID NO: 442852 - DNA, 201 bp, Homo sapiens
atgtagtgtacatatatatagaatctatactgtctagatatgtagtgtacatatatatagaatctatactgtctagatatgtagtatacactactagataygtagtttggtagcctctgttcattcacaacatcgccttgtagcatcagtcttttgacttgctatttatcatattctttttatgttttggaagcacacttt

SEQ ID NO: 442853 - DNA, 201 bp, Homo sapiens
cttatctatatgctgtcaaatgccgcaaggaagggtctgcgctgtcctgaggaacatataaaatatcctccttggcagccagaagagtgccttccacctaraatgcttagtgtgagtgccacagagagataaaatatgtaaggcagaaactctcaccaatccctggtggcagtgtgaattacacaaacctgaaaagtaaat

SEQ ID NO: 442854 - DNA, 201 bp, Homo sapiens
tctacagtaaatcagatataatcttattacagctgcatgaatactaccatcttttaaattttaattagtcaaagagctgtcgatgttgacagccatgacayctgcaagaggaaaacggtgtcccctgatgcagggtcaccaaggctcattacagcacagcaataatgcaggacaaaattaacagtgtctatttttagagca

SEQ ID NO: 442855 - DNA, 201 bp, Homo sapiens
actttctatgtccatacttatctatatgctgtcaaatgccgcaaggaagggtctgcgctgtcctgaggaacatataaaatatcctccttggcagccagaaragtgccttccacctagaatgcttagtgtgagtgccacagagagataaaatatgtaaggcagaaactctcaccaatccctggtggcagtgtgaattacaca

SEQ ID NO: 442856 - DNA, 201 bp, Homo sapiens
gttcctcacatgcatactattctctttctttctctttctctctctctctctctctctctctccctcttccttcctttcctatctctttcttttctttttcyttttcttttttttttttttttaaagacagtctctctctgtcatccaggctggagtgcagtggcatgatcatggctcactccagcctcgactacctgggct

SEQ ID NO: 442857 - DNA, 201 bp, Homo sapiens
tgtcctgtgatggaagacaatggatgaagaaagagttctaaaacaaatcctagaacctgtggaaattaatgtcaaagtcatgtgcaaatctactaaatttytagaatgtattgattgccccacatgtaacagcttcctccaggcacacatttgcatatggaaatgtgcaatgcttttcattcattctcatttctttcttaa

SEQ ID NO: 442858 - DNA, 201 bp, Homo sapiens
agcaatgtgcttgccgggatccccgctactaggtcattgctatggtttctgcttcctaacttctgggactctttggtctctatctagtatcaagcctggtmtggccttctgaggattctgtgagtcccccaatatcatttcaataacattgtcatttttacctacgttagccaggggaggttttggctacttgggaaaaca

SEQ ID NO: 442859 - DNA, 201 bp, Homo sapiens
cactcatcacagcagcaatgtgcttgccgggatccccgctactaggtcattgctatggtttctgcttcctaacttctgggactctttggtctctatctagyatcaagcctggtctggccttctgaggattctgtgagtcccccaatatcatttcaataacattgtcatttttacctacgttagccaggggaggttttggct

SEQ ID NO: 442860 - DNA, 201 bp, Homo sapiens
ctcagcggataagtcggccttcttctgtgttcatttttatcaagccagctcagtttacaaacagaaactcatttctccaacccagctctgtaaataataarggtgatatcatcacctttacatttgctttttggtttcattcctcaccttgttcagagcatatttatcaaacgcccctcaaacatttttggttgtcacaag

SEQ ID NO: 442861 - DNA, 201 bp, Homo sapiens
taaaatatgaaagagcacagaagtctttgtttctgatcattctttttacctggtaaattgacaatatacttcaggcaaactattactctctgtctacatayctgcaagtccgcggggcacagaaaagagagtagaataaatttttctgcaaaatttttcctttagaaaaggttcaaaaaatcacaagtaactaagaaaaat

SEQ ID NO: 442862 - DNA, 201 bp, Homo sapiens
tctcatttctctatttctggaattttcacagcccaaaacttcaaaggaggtaaacttctctgagactgatgtaaattttcttcctgatacttcatgttccrtagacacacttccctctaaacaaaaagtacaaatgttcaacatctaactctggtcttaatgcactaagcatggacatcatgattagaaaaacatgggttc

SEQ ID NO: 442863 - DNA, 201 bp, Homo sapiens
ataatctataaaagaataaaaatagctttatcaaaattaaaacttctgctcttcaaagaaactgttaaaaataaaaagacaagacacaaagctacaaaatmtgcagatattttcatatgtcaaatatcagaattttatcaaaatctataataacctctcaaaagtcaataaaaagaaaacaactccatttttataacaatg

SEQ ID NO: 442864 - DNA, 201 bp, Homo sapiens
agatacaacacaaaaacataatctataaaagaataaaaatagctttatcaaaattaaaacttctgctcttcaaagaaactgttaaaaataaaaagacaagmcacaaagctacaaaatatgcagatattttcatatgtcaaatatcagaattttatcaaaatctataataacctctcaaaagtcaataaaaagaaaacaact

SEQ ID NO: 442865 - DNA, 201 bp, Homo sapiens
gtaggttccatacacttttaaacaaccagatctcgcaagaacttactatcacaagaacagcacaaagtggatggtgctaaactgttcacaagatatccacygccatgatgcaatcacctctcaccaggcccctcctccaatactagggattacaattcaatatgagatttggaggggaatatatcaagggttaatgaagta

SEQ ID NO: 442866 - DNA, 201 bp, Homo sapiens
aggcccaaggcctaggagggaaaaatggcttcataggccaggcccagggcccagctgctctgtgcagcctcaggacatggcacactgccttccagcttctcggtgcagcctcaggacatggcaccctgccttccagctgctccagctccagcagtggctaaaagggaccaaggtacagcttgagctgtggcctcagagggt

SEQ ID NO: 442867 - DNA, 201 bp, Homo sapiens
ttctgtagtggaaccacttgagcccttcctctttctcatttgtgtgtatggtttacctgtcagtattacagttttatgagttttcatgttggtaaatgttgtttttttgcttccaggtgtagggctcccttaatcaattttagtagggctcatcttgtggtgataaattccctaagcatttgcttctctgggaaagacttt

SEQ ID NO: 442868 - DNA, 201 bp, Homo sapiens
ggcccaaggcctaggagggaaaaatggcttcataggccaggcccagggcccagctgctctgtgcagcctcaggacatggcacactgccttccagcttctcggtgcagcctcaggacatggcaccctgccttccagctgctccagctccagcagtggctaaaagggaccaaggtacagcttgagctgtggcctcagagggtg

SEQ ID NO: 442869 - DNA, 201 bp, Homo sapiens
cagtcaggtccacccatggactggttaagaaggatatggccaaagggtcttttatgagaactggatgcctttatgtactccacaatcaatacacataacamaggagaagcctgggctcttgaaagtgagaataatccttaagcttttgtggacagaaggtagggccatcaggacaggcctaatagagactgaactcccgac

SEQ ID NO: 442870 - DNA, 201 bp, Homo sapiens
attgctgctgagtcacttattaatctaatagtcattcctttacatgtggcaacccctttctctgtggatgcttttaagatcttttttatttgtgtgttagsttgggttttgttgttattttgagacagagtctcactctgttgcccaggttggagtgcggtggcacaatcgttgctctttgcagcctcggcctcatgggct

SEQ ID NO: 442871 - DNA, 201 bp, Homo sapiens
caagccccaagccctggcagtttccatgtggtgttgggcatgtgggtgtgcagaagtcaagagctgaggtttgggaacctccacctagatttcagaggatrtatggaaacacctggatgtacaggtagaattctactgcaggggcagagccctcacggaaaacctctgctaggccagtgtggaaggaaaatgtggggttgg

SEQ ID NO: 442872 - DNA, 201 bp, Homo sapiens
aattactttcaatatgttcactggttatttatgttttctactttggaaaaccatccttctatatcttttgtctgacttcctattgagttaaaaaaaaaaggtttcttattgatttgcagcatttcttcaatgaatactttttttttgctaattgttgtcaagatcttccttgatgtattgtcacactttttagaattttat

SEQ ID NO: 442873 - DNA, 201 bp, Homo sapiens
aatgtggggttggagcccccccccacagagtccccactggggcactgcctaatggagctatggaagagggccaccattctctagatgccagaatgatagawccagcaacaggttaccactgtgtgcttggaaaagccacaggcactcaacaccaacctatgaaagcagctctgggggctgtaccctccagagcttcacggg

SEQ ID NO: 442874 - DNA, 201 bp, Homo sapiens
tatttaaatgtaaaagaagttacctaaatattggataattagaagtgtaattaagtaaactagcccatttcctctacacaatctcttaattaagaatttgyaggatcttgtttctatagaagtgcatttacattagtctccatgtctagtaagtatctacccacttaggtattctgtgggctgcgttctgtttgaactctg

SEQ ID NO: 442875 - DNA, 201 bp, Homo sapiens
atgaagtcaaaggagattactctggagctttaagatttactgagggccctttaggattctggacttggaggaggcctgtggcccctgtgttttggccaatktctcccatttggaatgggaacatttacccaatgcctgcacccctactgtatgttgggagtaactaatttgttttttattttacaggctcatagggagaag

SEQ ID NO: 442876 - DNA, 201 bp, Homo sapiens
ctttaaaaagcagcccttgagcaatgctagtaaaatgaacttgacataagaaaacagtgtcagatacagaaaagcactgtcttccttccttccttccttcytttctttctttaagcaaatgtttgtgtgtctataatgtaccatgcactattttaggtgctagagatagtgaataaaataaaattgctgccctcatgcagt

SEQ ID NO: 442877 - DNA, 201 bp, Homo sapiens
ctaatttgttttttattttacaggctcatagggagaagggacttgccttatctcagatgatactttggacttagatttttgagttaatgctggactgagtyaagactttacagaacagttgggaaggcatgattgattttgaaatgtgaaaaggacatgagatttgggaggggccaggggcagaatgatatggtttggttc

SEQ ID NO: 442878 - DNA, 201 bp, Homo sapiens
tttatatatacaaagtacctgtcctctgcctgtttcacaggccataataacttcttctgcttttcgtactccaggcatgctgagtattctttcagatcctsaaatactggctgcataagggcagggaccatgtctaggtttgctcatcattttatatccagcatcctgtagagtacctaaaaatgctgctcttggtaataa

SEQ ID NO: 442879 - DNA, 201 bp, Homo sapiens
ttgctgcatttatcaacccatcgtctaggttttaagccctgcatgcattaggtatttgtcctaatgctctccctccccttgccccccaccccgctccccarcaggccccagtgtctgttgttcccctccctgtgctcatgtgttctcattgttcaactcccacttatgagtgagaacatgcggtgtttggttttctgttcc

SEQ ID NO: 442880 - DNA, 201 bp, Homo sapiens
caggctcatagggagaagggacttgccttatctcagatgatactttggacttagatttttgagttaatgctggactgagttaagactttacagaacagttrggaaggcatgattgattttgaaatgtgaaaaggacatgagatttgggaggggccaggggcagaatgatatggtttggttctgtattcccacccaaatctc

SEQ ID NO: 442881 - DNA, 201 bp, Homo sapiens
aggaggtggaggttgcagtgagctgatattgcgccactgcactccagcctgggcgtcagagtgagatttgtctcaaaaaaaaaaagccctcttgctgtatycactgcactttcttccagtccatccagccatcagccaataatctttccaaaggtaaatctaaaatgtcagctcaccttaaccacttcaatggcttcccat

SEQ ID NO: 442882 - DNA, 201 bp, Homo sapiens
cctggccaacacagcaaaatcacgtctctactaaaaatacaaaaattagctgggtgttgtggcacacacctgtaatcccagctacttgggaggctgaggcsggaggatcacttgaacctgggagatgcaggtgcagtgagttgagatccacaccactgcattccagcctgggtgatggagcaagactttgtctcaaaaaaa

SEQ ID NO: 442883 - DNA, 201 bp, Homo sapiens
atggtggtttgctgcatttatcaacccatcgtctaggttttaagccctgcatgcattaggtatttgtcctaatgctctccctccccttgccccccaccccrctccccagcaggccccagtgtctgttgttcccctccctgtgctcatgtgttctcattgttcaactcccacttatgagtgagaacatgcggtgtttggttt

SEQ ID NO: 442884 - DNA, 201 bp, Homo sapiens
gcactgaactgtgtccccccaaaaattcatatgttgaagtcctaatctccaattcctcagaatgttactttgtttagagatagggccttacagaggtaatgaagctaaaatgaggttggtagggtgagctctaacccagtatgactggtatccttataaaaagaagaaatttgaacatagagatccacttagagggaaaat

SEQ ID NO: 442885 - DNA, 201 bp, Homo sapiens
gttggttacataggtatacatatgccatggtggtttgctgcatttatcaacccatcgtctaggttttaagccctgcatgcattaggtatttgtcctaatgstctccctccccttgccccccaccccgctccccagcaggccccagtgtctgttgttcccctccctgtgctcatgtgttctcattgttcaactcccacttat

SEQ ID NO: 442886 - DNA, 201 bp, Homo sapiens
gaaagaaaaaattctgttttctaagccacctagtcaacagtactttgctagagcagcccttgcaaactaatacaagataagaacagaaaagaggctgggcrcagtggctcatgtctgtaatcccagcactttgggaggctgaggcaggcagatcacaaggtcaggagttcaagaccagcctggccagcatggtgaaaccct

SEQ ID NO: 442887 - DNA, 201 bp, Homo sapiens
taacaactgatgtccctgatttgctgctaccttctgtcccccactgaaaccagaaagatttttcagaaatacaaactggatcttatcacctcttttaaaaatctcatcaacatttcatttcctactgaatccaaatttcacaaggcctacaatgcctcccaattctttttctctctgcgctcaacactctcaatctcccac

SEQ ID NO: 442888 - DNA, 201 bp, Homo sapiens
tgccaaatttaggagaaaagcattcagtctttcaccacgaagtataatgttagccccaccttataccaccttgtcaatgctgggtggaggtagagctccarttccctgatgggctgcactaacaatggatttgggagaaagtgagggccaaatagccctgccttgcactgccttattgagtctccatgtttctgcatggaa

SEQ ID NO: 442889 - DNA, 201 bp, Homo sapiens
ctacctgacaaacatttctactgtggctacaaatgccccacgtttgggggtctgctggcttgtggctttattttgttcaaagtaaccttttacgtatcttwaaaaattgtaacaatgactggactaggacatgacaagcagattttatctatcagtaacattttatagatgaagaaattaggagttgaagcatgtaaggca

SEQ ID NO: 442890 - DNA, 201 bp, Homo sapiens
tgctaagttcctcacatgcatactattctctttctttctctttctctctctctctctctctctctctccctcttccttcctttcctatctctttcttttcyttttctttttcttttttttttttttttaaagacagtctctctctgtcatccaggctggagtgcagtggcatgatcatggctcactccagcctcgactacc

SEQ ID NO: 442891 - DNA, 201 bp, Homo sapiens
cacaatgctaagttcctcacatgcatactattctctttctttctctttctctctctctctctctctctctctccctcttccttcctttcctatctctttcytttctttttctttttcttttttttttttttttaaagacagtctctctctgtcatccaggctggagtgcagtggcatgatcatggctcactccagcctcga

SEQ ID NO: 442892 - DNA, 201 bp, Homo sapiens
ctttgatcctcctcctgacttcattctttccaaacctaatttatgctccctcttggatcttttttctcaccaagacaaaagtgtctactcccatggctccrgaaactttctataaagctggactcatgcacatttatgaatcacccaacagaagagctgacggagtgaatcacacaaggttttcagattgccagaatagga

SEQ ID NO: 442893 - DNA, 201 bp, Homo sapiens
tggatgtcatgcttaagtattgtgggggtgggaccaggacagcaggcttgtcctcaggccttctggtaggatgttctggcactgtctgtaataggcaggartgggatggtccccagattattggcagaatgttcaggtgggtgcagtggtgactgtgctgcagactggcctccagggagggtggggccactctcagtggga

SEQ ID NO: 442894 - DNA, 201 bp, Homo sapiens
acttggtctaaagtccaatttaaatccatgatttcattgtcaattttctgtctagagaatctgtctaatggtgagaataggcttttaaagtatttctgaaytgaagtcagtttctctctttagatctagtaatatttgctttatgaatctgggtgttccagtgttgtatgtatatatatttagaattgttatgttctattt

SEQ ID NO: 442895 - DNA, 201 bp, Homo sapiens
aaaattagattacaagaattgctcatcccctgtggaaatttcagtctaattctcataagactttggaaacacttcaggattcaaaacagaagaaatcaatwtacgttgcttggattattaatacagttaattaaagaagctctgggaaattttcaatgattagtaagttccctgcttcatcatggcttaaataaaacaaaa

SEQ ID NO: 442896 - DNA, 201 bp, Homo sapiens
ggtatcagagaaaagctgcagtggtgattaaggatgttctgggtggtgctgttgtgtgactgagaccatgagtcccacaaactacaaagtggcctctcccygccagtatccatcaccttgattccctttgcgtgtttcttccctaccaattctatagttcttctcctatgggtgtcccagctgctccaacagccctgtgga

SEQ ID NO: 442897 - DNA, 201 bp, Homo sapiens
atcactgaaagcaatgttcagaagttatgtataattgagcttatgtgagctctggcatgcccctggataacaggctttgtgaacccagtgatagacagcawatcttccttgctcttaatgaattctcagtttggatggagggaggaataaagcctcataaactagaaaccacaaaacatacagcacagcataagcctaaaa

SEQ ID NO: 442898 - DNA, 201 bp, Homo sapiens
ctttttgcatgaatttgaaaaataatatgaactgtgattaccattgcataagtgccaccaaatccatttaatccagctacataattaggcacaaacctttyatagctttattttcaaacctatctctagtaagaagtacctgataattaacattttaagtctttctgattatagtatgttattttatgacccctggagttc

SEQ ID NO: 442899 - DNA, 201 bp, Homo sapiens
agacatctactaggtccacttgatgcaaagcggagttcaagtcctgaatatccttgttaattttctgtctcgttgatctgtctaatattgacagtggggtrttaaagtctctcactattattatgtgggagtctaagtctctttgtaggtctctaagaacttgctttatgaatctgggtgctcctgtattgggtgcatata

SEQ ID NO: 442900 - DNA, 201 bp, Homo sapiens
agtaaaaaattgttgctaggataaagaaattctgcagaaaagcaataattgggcaaaattaataagactgctaggagagtttattcatgttgatttttttwaaaaaattatgttaattcctggaaacacttggtgaaaatatttgaaacaagagtttgttttttgactaattggtgttgctgaagctttaaaatgatccca

SEQ ID NO: 442901 - DNA, 201 bp, Homo sapiens
ttaagttagttaaggatggtttcaaagggggaataagaaataaaataggatcagtgtagagtaaaatctacccaagttaaaatggctttggcctttttcawtagaattaggcaatgtttcagccttatggggtttccttcttatctattaaaaaaagccattttgattattggctcccatatgccaggggtgtaccaggca

SEQ ID NO: 442902 - DNA, 201 bp, Homo sapiens
gtagggaataggatgaccaggtttgcagcgttaagtcattatgtatcaacctaatgtccatgaaaaattgccatccatgaaaattactcagaattcaatawtactcctgtgctctcttattagttcctgcaggctctagtacatatctaattaggtgccaataaaagaagcaataacgacaaatgccctcctaaatggggg

SEQ ID NO: 442903 - DNA, 201 bp, Homo sapiens
gtaaaaaattgttgctaggataaagaaattctgcagaaaagcaataattgggcaaaattaataagactgctaggagagtttattcatgttgatttttttawaaaaattatgttaattcctggaaacacttggtgaaaatatttgaaacaagagtttgttttttgactaattggtgttgctgaagctttaaaatgatcccag

SEQ ID NO: 442904 - DNA, 201 bp, Homo sapiens
tagggaataggatgaccaggtttgcagcgttaagtcattatgtatcaacctaatgtccatgaaaaattgccatccatgaaaattactcagaattcaatatkactcctgtgctctcttattagttcctgcaggctctagtacatatctaattaggtgccaataaaagaagcaataacgacaaatgccctcctaaatgggggt

SEQ ID NO: 442905 - DNA, 201 bp, Homo sapiens
gctcttccatggccttttataaatgctacctttatcaagggaatcaatgggccatagcctgaccaatctgatattctcagatagactgaaaaatgatcaawcaatccttctcaatctacccctctaaaattcagaattgagaattatttccaagtcagtctaacaataacaggagtggcagtagacaggctaagagaggag

SEQ ID NO: 442906 - DNA, 201 bp, Homo sapiens
ttgtaatgtctgttccattaaatcacaaattttttctagaagtaactattgtgtatcctccattcttcctttttccaaaactatgtgtgtgtgtgtgtgtrtgtgtgtgtgtttttaatagtatatttaaatattctggccttgttctgacaatgaatatttaatatgagaagcagataatttgcttttttccttcatgaa

SEQ ID NO: 442907 - DNA, 201 bp, Homo sapiens
ccactgcctctcacatttccactggggatcatcaaagcagcaccactgccactgggtaccacagcccatgctgaggtcacatagccgagctgggagcctcrgggctgaagaaccactcaccttctcctgccagctatgccaaatgtcatgccagatattaggttgcagcccatgctgaggttcgaggggagtgagtggatg

SEQ ID NO: 442908 - DNA, 201 bp, Homo sapiens
atcagaaaaacaaattcagagaaaatattatttctgtgaaagaaatctgcaaaagtctagaactggagaaaatggacaactaaccaaatgtatcctggggaaaaaaaaaaagataacaggaatcaattggagttatttttcctctggatcgtcttatagggccatgaattatttctgatgtcagacgggcctgagattaaa

SEQ ID NO: 442909 - DNA, 201 bp, Homo sapiens
cttgttttattcatgtgggcttaagaagggtaagaaaaaaaaaaggtgcccaaatgtctagaacagtgattctaaaagcatgttcctgacctcagaaataygggaaggatgctgtgtcttctgggaacttgttagaaatgccaaattatcaagccctacctgagacctaatgaatcagaaactctaagggtggggcccagg

SEQ ID NO: 442910 - DNA, 201 bp, Homo sapiens
gggtaatgactgccttcttcaaagctatatcccagtacccagtactgtgcctagcacatagctgatgctcagtgaaagaaaaaatattttaatctattaamtaaataaaaaaaaaaatgaataaataaaccctgaccctaaacaggccatcctatctgcttgttggtttctccccatatgctatgcatgccatttcatctt

SEQ ID NO: 442911 - DNA, 201 bp, Homo sapiens
ctcacaacaaactaaaaaggataatctggagagaaaagtcacctagatttggggtttgtgcaggaaaaagagtgcacagaaacattttccgtgcaagcctyttcatcctcacatcctaaccccaatataccacctaaaagaggaatagctgagcagatgcagctataaatctgttttcttgtgtccaacagctctggctgc

SEQ ID NO: 442912 - DNA, 201 bp, Homo sapiens
cgggcacctatagtcccagctacttcggaagctgaggcaggagaatcgcttgaacctgggaggtggagtttgcagtgagctgagagcatgcactgcactcyagcatgagtgacagagcaagactccatctgaaaagagaagaaaaaaggcccggatttttatcacctatggaaataatgttaatgaataacagtgaataac

SEQ ID NO: 442913 - DNA, 201 bp, Homo sapiens
acctcagaaatacgggaaggatgctgtgtcttctgggaacttgttagaaatgccaaattatcaagccctacctgagacctaatgaatcagaaactctaagkgtggggcccaggcacctgggtccaagtgattttgatgcacatggaaatttgtgaaccaccagcatctggtaaaactgatcctctggggccttgtgcaggt

SEQ ID NO: 442914 - DNA, 201 bp, Homo sapiens
tgactgccttcttcaaagctatatcccagtacccagtactgtgcctagcacatagctgatgctcagtgaaagaaaaaatattttaatctattaaataaataaaaaaaaaaatgaataaataaaccctgaccctaaacaggccatcctatctgcttgttggtttctccccatatgctatgcatgccatttcatcttttaaaa

SEQ ID NO: 442915 - DNA, 201 bp, Homo sapiens
cattgtcatcaacgttgggcctgatctcactgccagggcttgcactaggtatttcacatatactaatttatcactcaaaaaacctgagactggtattatcttttttaaaaaacttaaaaactgagattaaggattaaacatacccaaaccagacttaaacttagatctaaatttgacagtgtatgcactttctgccagttt

SEQ ID NO: 442916 - DNA, 201 bp, Homo sapiens
cccagcactttgggagaccaaggagggtggatcatgtgaggtcaggagttcgagaccagcctgaccaacatggtgaaaccccatctctactaaaaaaaaaataaacaaaaattagccaggcatggtggcgggcacctatagtcccagctacttcggaagctgaggcaggagaatcgcttgaacctgggaggtggagtttgc

SEQ ID NO: 442917 - DNA, 201 bp, Homo sapiens
aaccaccagcatctggtaaaactgatcctctggggccttgtgcaggtgctaaagatttcagttgccaagggtgcacaaggaaaaggtcaataagacaagcrtctccaaattggaggtgaaggtgacaatggccagctgaaaaatgcaatctttcttaacaacgcctttcactccacatctggaacatgggcagatctgtca

SEQ ID NO: 442918 - DNA, 201 bp, Homo sapiens
ataattgctatatggatggatgctgatgaaagacataaatatattgtcctgctctttattgacagccaacaatggaataaaaacataaatccagtcggccrattctgacatttaaagcttgagcgaccttaacaacatctcaaacacaaacctgtccaaccctggcttaagtccttccccaaaaggcaatccattaccttg

SEQ ID NO: 442919 - DNA, 201 bp, Homo sapiens
caatagtgaaggctagagcttgggtccccaggcacgtggccccatgcctgctctgctagcccatgctgccaggcagtttctgtgcccgatttttttaacagactgtaagcatgagactggagccagcctagcttatcactacatgtgctttatttcatacattggctgcattcacagaaagttgtatttaagtaaaatatt

SEQ ID NO: 442920 - DNA, 201 bp, Homo sapiens
gctacagttgttcatgctgaagctctttttttttttttttaaacggagtctcactctgttgcccaggctgtagtggcaccatcttggctcactgcaacctscacctcccatgttcaagccattcttctggctcagcctcctgagtagctgggattacaggcaccccaccaccatgcctggttaatttttgtatttttagta

SEQ ID NO: 442921 - DNA, 201 bp, Homo sapiens
catttagatgtgttaaagaacacaaaaaggaagccccagccgggtgcggtggttcatgcctgcaatcccagcactttgggagaccaaggagggtggatcaygtgaggtcaggagttcgagaccagcctgaccaacatggtgaaaccccatctctactaaaaaaaaaataaacaaaaattagccaggcatggtggcgggcac

SEQ ID NO: 442922 - DNA, 201 bp, Homo sapiens
ctgcaagctccacctcctgggttcacgccattctcctgcctcagggtcccgagtagctgggactacaggcgcccgccaccacgcccagctaattttttttktatttttagtagagacggggtttcaccatgttagccaggatggtctcgatctcctgacctcgtgatccgcccgccttggcctcccgaagtactgggatta

SEQ ID NO: 442923 - DNA, 201 bp, Homo sapiens
tatatatgtacagatataaacatatatatgtacagatataatgtgtgtatatatatacatgtgtgtacatgtgtatacataatacatatatgtacagataygtgtatatataaatgtaatgtatataatacatatatgtacagatatatgtatatataaatgtaatgtatataatacatatatgtacagatataatgtata

SEQ ID NO: 442924 - DNA, 201 bp, Homo sapiens
agactgaggtggaaggatcacctgagcctgggaggtcgaggctgcagtgagctggcaacatgccactgcactgcagcctgggttagagagtgagaccctgyctcaaaaaaaaaattaaaaataaaaaaacacatcagggccaggcatgatggttcacgcctgtaatcccagcacttagggaggctgaggcgggcaggtcac

SEQ ID NO: 442925 - DNA, 201 bp, Homo sapiens
gtggagactcacaccatgaacttttgcttgaagaaccaccacagaaacataccagaaaaaaacaaaagaatgcattgatcctttgaaagaagtggcacacraagcaaactctgggagacagacaaaaaactgagttcccgaagggtgagaggggaaaaaccggcctccaaacatacatgcaaactgaggaatctgaatatc

SEQ ID NO: 442926 - DNA, 201 bp, Homo sapiens
actacacgtcatgggcattcattgtctatactgaaatttattacaaattatgttcaaaagtcaaagtaaaaaatcaacctgaacattacatgtatatatayacacacacatatctgtacatatatatgtacagatataaacatatatatgtacagatataatgtgtgtatatatatacatgtgtgtacatgtgtatacata

SEQ ID NO: 442927 - DNA, 201 bp, Homo sapiens
gcaaggcctgaaagccatgttttctttctcagtgggaactttatgacctgggcaagatctgaacagggggcactgcaggagcaagaccagcctcaccaacygcgtgggtgttgggtgagacctttcactaccagctatcccccacttccctggtgaactatatgacacagaagaggcagccataatcccctctgaaacata

SEQ ID NO: 442928 - DNA, 201 bp, Homo sapiens
gataaggcaaaaccataatctaggccatcaacacatatttcctgtatgtcagtgcactcaaatttgagccttcaaactgaataaatcaaaaccaataagamggttgtgaaaaaaatgtgtcagttcttagaccctactgttcagattctcaatgaggaggtctaagtgtacacaataatttgatttttaaagtcttctaat

SEQ ID NO: 442929 - DNA, 201 bp, Homo sapiens
gaaagtttcaacaatagactagaacaagtagaagaaagatcttcagagctcaaagacaaggcttttgaattaacccaatcagataaaaacaaagaaaaaakaatttttaaaaaattaacaaagcctccaaaatatatgggaatatgttatatgaccaaatctaagaataattggtgctcctgaggagaaagaaaaatctaa

SEQ ID NO: 442930 - DNA, 201 bp, Homo sapiens
acatcagaatcccagggccttggactccctgggttacccagtggtcagactatggggtagggcattagcaaagcaaagagagacagagagaggagatagayagaattttagagataaattgatatgcaatattgtcaagttactatcttaaaaaattcagaactgtatagaacttatttaggcttatttctacattttatt

SEQ ID NO: 442931 - DNA, 201 bp, Homo sapiens
gacaagaagctcaaagaacacttgggaaattcattgcaaaatgatcttcacctacgcacacagtcatcaggttatctaaagtcaagatgaagtaaagaatyttaagagctgtgagacaaaagcatcaagtaacctataaaggaaaacctatcagattaacagctgatttcttagcagaaacttttcaagccaaaaggggtt

SEQ ID NO: 442932 - DNA, 201 bp, Homo sapiens
catacagctgtcacagtttagctgtgataacaaacaatcccaacatttcagtagtttaaaacaacaaagtccatttaactcatgttatatgactattacakgtcagcaagtgggctcagattactgaaagcctcaggaacctaggctgacaaaacagtccttttctcagattgctggctggaaggaattttggaggtattg

SEQ ID NO: 442933 - DNA, 201 bp, Homo sapiens
cttcaagatgatggtagcagttgaaccaatctgcctgtgaataaaatcaacaaaagtcagaaggagaaagagagagaaagagagagagagagagagagagagaaagagagagagccctggtgacattgtttgagccttggtgacattgtttgagccctgaatccagctttgcctgaaggctactcctgaaatttcagttac

SEQ ID NO: 442934 - DNA, 201 bp, Homo sapiens
ctcagcagaggccatatttttctttataattctttgaacctcagaaaaagagggtgaatactttttgtttcccattttcatttcaagactacttccctttyctccagcaaagcccctttctcctttgaagctcattttgccacatcccccaacctgtgcctctccactacgacctctcatttattaaagtgtctcttctct

SEQ ID NO: 442935 - DNA, 201 bp, Homo sapiens
cacttgaaggaaaggaatattaaaggctaggacaagactacgtcaaggtgcaccttgttaagccaaaagaacgcaatccatatattgtatcttgtgccacraaagtccctttgccttgccccaatcttgttaatgtactattgctgggttcaagactgaaaatacagcttctgtgtctacttgcagtcctttatcaaactg

SEQ ID NO: 442936 - DNA, 201 bp, Homo sapiens
taggtgctgctttcataatggtccctaaaaacctctcgtgtttgaccttttattcttttcccatcttctgacggagtggtaaggattctgaaaaccaagargttagagacacaagatagaaagtgactgtattcctgaatcactgtgacacacaaccactctcaccattagctgttaatgagaaataaataatattgtgtt

SEQ ID NO: 442937 - DNA, 201 bp, Homo sapiens
taaatgtgttcctaattttgtatatgggcttaggttttgtaaccaataaaaaaagctgctatcaaatatgaaaaaaaaaataagtaactgttttagtgaawaagaaaaaaaaaccttctttcaagaatatatctgttgaaattgataataatgtggtcatgcctgagggaaaaatgcataggttttgtagtcaaacctact

SEQ ID NO: 442938 - DNA, 201 bp, Homo sapiens
ggtaccttgcagttagtgagccattagtcctctttgattatttgtttcaacggggaagctgtgtctaaggtcctatatgattaagcgaagccaagtgtcckccttggaaattcatcttctctctacatttcgaagctacagccaatccactggagctcaagccagagatggaacagctgctttccctttcccttggcccag

SEQ ID NO: 442939 - DNA, 201 bp, Homo sapiens
ctcactgatgcttctccatggactgttaagatctctaagatacaacaggtgtctcttagacaagcacaatactgttagctgctaatttaacagtataataytaataatcttttacatatttgcttattttccaactatactttcatatcttaaaggacaggaatccaacttggatctgcctgtaattcacagttcctacat

SEQ ID NO: 442940 - DNA, 201 bp, Homo sapiens
gggtctcactcagttgggtggcacagggagcaggacctgtttaatgaggcattttggccattggtggagcgggtgtgctttgctggggggaaacctactcrtctagactgcccggattcttcagaattaccaagacaagaggctaagtctgctggtccacacagactgtggccacctctcccgctaggggctcaggcccag

SEQ ID NO: 442941 - DNA, 201 bp, Homo sapiens
gtaaaggctggcttctaaattccctagagaaccaggaaaaatacatgaaacttcaggcaagttaagatagaaaaataaaattagtggcagaatacactttaaaaaaaaaataagctaatttagcaggacaaggggagaggaatcatttggttttgattgtcaaggcctgcaaataaagtcaaataaaaacatttattaagc

SEQ ID NO: 442942 - DNA, 201 bp, Homo sapiens
aatatcatcagtaataagatatatcaatataaggaatcctttcacgtgatgcacagagaaaaagcaacatcatttctatggtatccttgccaaaaaaaaayaataataacttaatcatgaggaaatgtcagaaactcaaactaagggccattctacaaaataactggccatactcttcaaaagtgtcaaagtcatgaagat

SEQ ID NO: 442943 - DNA, 201 bp, Homo sapiens
atgtgtttctcacatttcaaaacacaaatatgccttcccaacagttccccaaagtcttaacttatttcagcatttgcccaaaagtccaagtccatattctyatctgagataatgtaagttccttccacctatgagcctgtacaatgaaaagcaagttagttacttcctagatacaatggaggtacaggtattggcttaata

SEQ ID NO: 442944 - DNA, 201 bp, Homo sapiens
tgacagactgcacacatctttgggaatatgatgcaaaaatagaccctttccccagtaaaatgcatacacacacaaaatttacatgcaatttcaggcagttyacaggctcactgatgcttctccatggactgttaagatctctaagatacaacaggtgtctcttagacaagcacaatactgttagctgctaatttaacagta

SEQ ID NO: 442945 - DNA, 201 bp, Homo sapiens
tgggctggcattgagtatctgcaacttttccaggttcatggcacaagatgtcggtagatctaccattctggggtctggaggacagttgccctcttctcacrtctctactaggcagtgacccagtggggattgtgtgtggaggctctgactctacatttcctttctgtactgccctagcagaggttctctatgagagttttg

SEQ ID NO: 442946 - DNA, 201 bp, Homo sapiens
attatttcatttaggtccaactatccctattttacaatcgaacaaattgagacttagaaaggttaaataacctgtttaagtttacccagctggaaaataayaaagcgagggtttgaatccactagaatgtaagttctgtaaatgtagagactagcctttgtgttccccactgtatcaccagaacctggaatggtacctggc

SEQ ID NO: 442947 - DNA, 201 bp, Homo sapiens
attttccatattgtcttagtgattaacattcggctgcttgttacttatgcaaatgtctgcagctggtttgaatttctccccaaaatggattttttctatckcattgtcagtctacaaactttccaaacttttatgttctgcttcctcttgaattctttgctgcttagaaatttcttctgccagatatcctaaattatctct

SEQ ID NO: 442948 - DNA, 201 bp, Homo sapiens
cagagccaccttgatgtacccctgttccaaattttgtaatcagttctacccagggagctctggttatttttaaaggagaataacaataacaaactgggggscaggattcacaccaggctatcagactccagagcctatgtgagctctagaatgaggagaaataataaaaataagagcaggtaagtaaaaaataaataaata

SEQ ID NO: 442949 - DNA, 201 bp, Homo sapiens
cacacagtcatcaggttatctaaagtcaagatgaagtaaagaattttaagagctgtgagacaaaagcatcaagtaacctataaaggaaaacctatcagatkaacagctgatttcttagcagaaacttttcaagccaaaaggggttggggtcctatctttagtctcctgaaaaaaaataattatcagccaagaattttccag

SEQ ID NO: 442950 - DNA, 201 bp, Homo sapiens
tatctctttcaaattcaaagtttcacagatctctagggcagaggcaaaataccaacagtctatttgctaaagcataacaagagtcatatttgctccatttyccaacaagttcctcatctctgtttgagaccatcccagcctcaacttcattgtccatattactatcagcattttgggcaaagccattcaacaattctctag

SEQ ID NO: 442951 - DNA, 201 bp, Homo sapiens
gcttcaagatgatggtagcagttgaaccaatctgcctgtgaataaaatcaacaaaagtcagaaggagaaagagagagaaagagagagagagagagagagagagaaagagagagagccctggtgacattgtttgagccttggtgacattgtttgagccctgaatccagctttgcctgaaggctactcctgaaatttcagtta

SEQ ID NO: 442952 - DNA, 201 bp, Homo sapiens
cccacaacagtccccagtgtgtgatgttccccttcctgtgtccatgtgttctcattgttcaatccccacctctgagtaaaaacatgcggtgtttggttttytgtccttgtgatagtttgctgagaatgatggtttccagcttcatccatgtccctacaaaggacatgaactcatcattttttatggctgcatagtattcca

SEQ ID NO: 442953 - DNA, 201 bp, Homo sapiens
ggcaaaataccaacagtctatttgctaaagcataacaagagtcatatttgctccattttccaacaagttcctcatctctgtttgagaccatcccagcctcracttcattgtccatattactatcagcattttgggcaaagccattcaacaattctctaggaagttctaaactttcccacatcttcctgtcttctgggccct

SEQ ID NO: 442954 - DNA, 201 bp, Homo sapiens
agcttcaagatgatggtagcagttgaaccaatctgcctgtgaataaaatcaacaaaagtcagaaggagaaagagagagaaagagagagagagagagagagagagaaagagagagagccctggtgacattgtttgagccttggtgacattgtttgagccctgaatccagctttgcctgaaggctactcctgaaatttcagtt

SEQ ID NO: 442955 - DNA, 201 bp, Homo sapiens
atagtttgctgagaatgatggtttccagcttcatccatgtccctacaaaggacatgaactcatcattttttatggctgcatagtattccatggtgtatatrtgccacattttcttatatccagtctatcattcttgaacattagggttggttccaactctttgctattgtgaatagtgccacaataaacatatgtgtgcat

SEQ ID NO: 442956 - DNA, 201 bp, Homo sapiens
gtcatatttgctccattttccaacaagttcctcatctctgtttgagaccatcccagcctcaacttcattgtccatattactatcagcattttgggcaaagccattcaacaattctctaggaagttctaaactttcccacatcttcctgtcttctgggccctccaagtgtctaggaagttccaaactttaccacattttcct

SEQ ID NO: 442957 - DNA, 201 bp, Homo sapiens
aaaagcctaactagctgcctatttctacttgcatgaagaattctttccatttcaacaatttacagaaaagttctttcttacaacatcatctgttcaaatgrtcacatattgtttaactgagcataatatttgctgagatttcacatgcaaaattggtctcaaattcaacccaggtatctctttatttaagcattattctct

SEQ ID NO: 442958 - DNA, 201 bp, Homo sapiens
aagcttcaagatgatggtagcagttgaaccaatctgcctgtgaataaaatcaacaaaagtcagaaggagaaagagagagaaagagagagagagagagagagagagaaagagagagagccctggtgacattgtttgagccttggtgacattgtttgagccctgaatccagctttgcctgaaggctactcctgaaatttcagt

SEQ ID NO: 442959 - DNA, 201 bp, Homo sapiens
gaatagtgccacaataaacatatgtgtgcatgtgtctttatagcagcatgatttatagtcctttgggtatataacccagtaatgggatggctgggtcaaayggtatttctagttctagatccttgaggaatcgccacactgtcttccacaatggttgaactagtttacagccccaccaacagtgtaaaagtgttcctattt

SEQ ID NO: 442960 - DNA, 201 bp, Homo sapiens
caaactttaccacattttcctatcttcttctgagccctccaaactgttccaacccctgcctgttactcagtttcaaagttgcttccacattttcaggtatycttatggcagcaacccactcctggcaccaatttactgtagtagtctgttctcacactgctaatgaagacatacttgagactgtgtaatttataaagggaa

SEQ ID NO: 442961 - DNA, 201 bp, Homo sapiens
caagcttcaagatgatggtagcagttgaaccaatctgcctgtgaataaaatcaacaaaagtcagaaggagaaagagagagaaagagagagagagagagagagagagaaagagagagagccctggtgacattgtttgagccttggtgacattgtttgagccctgaatccagctttgcctgaaggctactcctgaaatttcag

SEQ ID NO: 442962 - DNA, 201 bp, Homo sapiens
taacccagtaatgggatggctgggtcaaacggtatttctagttctagatccttgaggaatcgccacactgtcttccacaatggttgaactagtttacagcyccaccaacagtgtaaaagtgttcctatttctccacatcctctgcagcacctgttgtttcttgactttttaataatcgccattctaactggtgtgagacgg

SEQ ID NO: 442963 - DNA, 201 bp, Homo sapiens
gactttttaataatcgccattctaactggtgtgagacggtatctcattgtggttttcatttgcatttctctgatggccagtcatgatgagcattttttcaygtgtcttttggctgcataaatgtcttcttatgagaagtgtctgttcatatactttgcccactttttgatggggttgtttgattttttcttgtaaatttgt

SEQ ID NO: 442964 - DNA, 201 bp, Homo sapiens
aaggagtaggggaagaatgctgcaggaagagggactagaagatatgttactgagggatggctaatgtgaatggagacaaagagggagcatggtgcaaaatragatcagaaggcagagagatcctgaaggttcctgtggtctgtgataaggatccatcttgttccttacagcaatgagaaactgtgcaccaaggccacgagg

SEQ ID NO: 442965 - DNA, 201 bp, Homo sapiens
ccagctttgttcttttggcttaggattgacttggcaatgtgggctcttttttggttccatatgaactttaaagtagttttttccatttctgtgaagaaagycattggtagcttgatggggatgtcattcaatctgtaaatcaccttgggcagtatggccattttcacgatattgattcttcctacccgtgagcatggaatg

SEQ ID NO: 442966 - DNA, 201 bp, Homo sapiens
atgatcctaggagaatgcatattggaaattacactggaactgggcagggaagttaactgagaaggtggtaactaacctgagatctgaaaaaaaagatagaygataactaagtgaagctagtaaggagtaggggaagaatgctgcaggaagagggactagaagatatgttactgagggatggctaatgtgaatggagacaaa

SEQ ID NO: 442967 - DNA, 201 bp, Homo sapiens
tcgtaagtgaaggagaaataaaatcctttacagacaagtaaatgctgagagattttgtcaccaccaggcctgacttacaagagctcctgaaggaagcactraacatggaaaggaacaactggtaccagccactgcaaaaacatgccaaactctaaagaccatcaaggctaggaagaaactgcatcaactaacaagcaaaat

SEQ ID NO: 442968 - DNA, 201 bp, Homo sapiens
atagattccacagaaacctagattctctgcttctgagcaatacaaatctctttgtctaaagtgaaaggaaatgtgtggaggataacccttaaatctcccargcagacctcatcatgattgtgtttgcctggcctttacagccaggatatacaattatttcaatgttacagttgccaaaggaactagagaatgaactgatgt

SEQ ID NO: 442969 - DNA, 201 bp, Homo sapiens
tttgaaaatataaaggaatattagaatcatatttgtcatcaaatattattgaggatgcataaaatggtaatgcctgattcgtactgattttttttttttttggcaacaaagacaatgcagtcagctctctgtatccatgggtcccccatcccccgatccatggattcaaccaactgcaggtcaaaaatattggggaaaaaa

SEQ ID NO: 442970 - DNA, 201 bp, Homo sapiens
cataatgacaggatcaaattcacacatactaatattgaccttaaatctaaatgggctaaatgctccaattaaaagacacagactggcaaattggataaagrgtcaagacccatcagtgtgctgtgttcaggagacccatctcaccagcagagacacacataggctcaaaataaaaggatggaggaagatctgccaagcaaa

SEQ ID NO: 442971 - DNA, 201 bp, Homo sapiens
attcttctcagcaccacatcacacttattccaaaattgaccacatagttggaagtaaagcaatcctcagcaaatgtaaaagaatagaaattataacacackgtctctcagaccacagtgcaatcaaactagaactcaggatttagaaactcactcaaaaccactcaactacatggaaactgaacaacctgctcctgaatga

SEQ ID NO: 442972 - DNA, 201 bp, Homo sapiens
tcaggtggaaactttggcaattatctgtggttaaaaaaacaaaacaaacaaaaaaaccaaactaccgattcctatccttaatcacgttggatggtcatttygtccattcttctgcgttgagtccactgtaaatacttcaattattttgaagacactcaaaatccacagaacaacagactcttccattctgtacatcaaaga

SEQ ID NO: 442973 - DNA, 201 bp, Homo sapiens
gtgactccagtgccatgtgttcaaaaggctgtttctccattgaattgtgttaataactttgtcaaaaccaatttgttatatttgtatttgtctgtttctgkggtctctattctgttctattgatctttgtgtctattcccctgccaatactacgctgtcttgaatatagtatctataaagaaatccttaatattcaattca

SEQ ID NO: 442974 - DNA, 201 bp, Homo sapiens
tattctcaaaaagattccctccagccttcccatctcctgctggcaaatgttctcccttcattccagatacaacatggcctccactgggcaccatattcaasgcttgtgcaggatgacactttatctccatctgcaaaatgcaactacaagacagctgttattctaatcacttcatagataaggaaagtgagatgccaaaaa

SEQ ID NO: 442975 - DNA, 201 bp, Homo sapiens
tgaatatctccctcccctacaaggttaaataagtaaaaaaaaaaaaaaaaaaaatacaagaaaataacataagaaaataaatcaaagatgaaaataaaacrtctctgaaattgaattatatgaggcaatggcctggttagttctcattgtcactgggtcctaatcaaataagttaactggcctccaatatgtaactgaaaa

SEQ ID NO: 442976 - DNA, 201 bp, Homo sapiens
caaataagttttagaacatcttttttgcaaaagcattgccaactttgaatatctccctcccctacaaggttaaataagtaaaaaaaaaaaaaaaaaaaatmcaagaaaataacataagaaaataaatcaaagatgaaaataaaacgtctctgaaattgaattatatgaggcaatggcctggttagttctcattgtcactgg

SEQ ID NO: 442977 - DNA, 201 bp, Homo sapiens
tgctttccaggcatacttttatctcagtgtcctattgcccaggccatgaacggcattaaccaaccagtgcggcaaaagtaacagtcagggctcacccaccyccactgccttcacattaccagtccctcatgcccttcttatggctcttagcaattgaagaggattaatgagaacttggccaagggacactctgcatggtgg

SEQ ID NO: 442978 - DNA, 201 bp, Homo sapiens
agctcaagccagagatggaacagctgctttccctttcccttggcccagactaacacagtcattccatctatcagacatcctgagtgcatccaatttcctcyccattggctcagctccacagacagcttgccttcccaaccgccacagcagaagagagcataaagtcaggcaaaagaagtgactcacagttattctctccta

SEQ ID NO: 442979 - DNA, 201 bp, Homo sapiens
tcttgggtagtctaatcccattttcacatctcttttcatcttgtccattaaatgggaagagagaaataaaacatgagtttttgccacacatgggctctttmacgctgcccagtgtatggttcttaattttagtggattttaaaaacctcaattaatcaatggctgtctccaggggttgggaataggattcctcatgggtaa

SEQ ID NO: 442980 - DNA, 201 bp, Homo sapiens
attgcaaacctccgacactccccccagttgacaggccctatttttgccaatttcctacatctcaccccacctcacctcaccccagtctccccgcatctacyactagctctttgaagaaggcggctgcaagccagtctccgaaccccaggggacttttgggcaagggagccggtggaagcagaaggaagaagatgcgctgag

SEQ ID NO: 442981 - DNA, 201 bp, Homo sapiens
atccctaggccttctaggtcccaaagcctcccaactacttcccatcagcaagttctctagctctcaggtctccacataatattaaccatagataagtagaytttgatgtagattcagcttctgtaccttgctatgtaataacattgcacacattcattttgtctgtttccttttctacaaatggctattttgtagaaatac

SEQ ID NO: 442982 - DNA, 201 bp, Homo sapiens
cggtctttagagtgttcaacaagcataaggcataatcacaaccctgcccttcagggaacacattttgttgttgagttctcatctgtgaaggcccttgggtytaatttaaagtagaaaaaatacagcaaattagcaaccacattgaagaaggggcaatgccctgccccttccccaggaaaaaacttttattttctgtcaaat

SEQ ID NO: 442983 - DNA, 201 bp, Homo sapiens
agaaaacaagacttgtataccagactccaagctgactcttctctgctctgatcccgccagaccacctagaagagaattgtctgttcacctagatttctgckttcatctgcatctagattctcctttacatgctatcatcctagagctatccctaggccttctaggtcccaaagcctcccaactacttcccatcagcaagtt

SEQ ID NO: 442984 - DNA, 201 bp, Homo sapiens
atctggttttgctaatgtttcctctgcctgaaatgccttctttcctataccactcactttctatgtccatacttatctatatgctgtcaaatgccgcaagraagggtctgcgctgtcctgaggaacatataaaatatcctccttggcagccagaagagtgccttccacctagaatgcttagtgtgagtgccacagagagat

SEQ ID NO: 442985 - DNA, 201 bp, Homo sapiens
ctccctggtcctcaattccactggaatcataaaaaaggtacagatggcccctttcctcccagcccttatccatgcccaagtgacttagaagggcctctcaygctgggtttgctagtaaaatccatatatgacatgtatattcgctccccaactccctgcccgcaactcaaaagtgaaggagcttctctggctttaagataa

SEQ ID NO: 442986 - DNA, 201 bp, Homo sapiens
caagaaatacacttttatagaataagctactgagattgggtgatttaccattagaacaacatagtttttctatcctgattaatacaaggacatatcaaatstgatggatggaattatgtggacttttgttcctacattatttttcatcatagaagaaaaaacaaaaagaacccagtttattatgatagtaaattatataga

SEQ ID NO: 442987 - DNA, 201 bp, Homo sapiens
catgttgtgggagagacccagtgggagatcattgaatcatggcgacagtttcccccatactgttctagtggtggtaaatataagtctcacgagatctgatrgttttatcaggagtttctgcttttgcatcttcctcattctctctgcctgctaccattcatgtaagatgcagctcgatcctccttgccttccaccataatg

SEQ ID NO: 442988 - DNA, 201 bp, Homo sapiens
taagagctcctgtatgctgtctagccttcttttctgttgttgcagtgatcttggaagacatattttccatttggcatagctataaaatggaagagcaagayccaaagcatatcagattttatgtgagcaagaaatacacttttatagaataagctactgagattgggtgatttaccattagaacaacatagtttttctatc

SEQ ID NO: 442989 - DNA, 201 bp, Homo sapiens
cactggcagaactgttctcttcagctttccaagccaagctcttaggtgtaccaccagagctcatgctccccactgcaaactacacttactttagacctctktactccccactgcatcattcattcattcagtctatcttactacaagaccaaggtctttaagcaaagctgagcacataagacttccaatgatcttaccacc

SEQ ID NO: 442990 - DNA, 201 bp, Homo sapiens
atgtaagagctcctgtatgctgtctagccttcttttctgttgttgcagtgatcttggaagacatattttccatttggcatagctataaaatggaagagcawgatccaaagcatatcagattttatgtgagcaagaaatacacttttatagaataagctactgagattgggtgatttaccattagaacaacatagtttttct

SEQ ID NO: 442991 - DNA, 201 bp, Homo sapiens
catggacgtagctgaaggacgttatcctaagtgaattaacacaagaatagaaaaccaaacactgcatgttctcacttataagtgggagccgaacattgggwacatatggacacaaagatgagaacaatagatagtggggactatttagagcggtgggagggtggaggcaagggctgaaaaacttcctagtaggtactgtgc

SEQ ID NO: 442992 - DNA, 201 bp, Homo sapiens
ggtcaggagatcgagaccatcctggctaacacggtgaaaccccatctctactaaaaatgcaaaaattagccgggcatggtggcgggcgcctgtagtcccarctactcgggaggctgaggcaggagaatggcgtgaacccgggaggtggagcttgcagtgagccgagatcgcaccactgcactccagcctgggtggcagagc

SEQ ID NO: 442993 - DNA, 201 bp, Homo sapiens
agctagttccatctctttcctctgctatttcttttttttttttttttttttttttttttgagacggagtctcgctgtcgcccaggctggagtgcagtggckcaatcccggctcactgcaggctccgccccctggggttcacgccattctcctgcctcagcctcccgagtagctgggactacaggcgcccgccacctcgccc

SEQ ID NO: 442994 - DNA, 201 bp, Homo sapiens
aagtgctggcaaggatgtggagaaaaaggaatcctcacacactactggtgggaatgcaaattagtacagccatcatggaaaacagtatggaggttcctcawaaaactaaaaatataactaccatatgatccggcaatcccgctactgagtacatatacaaaggaaatgaaatcagtatgtcaaagagatatctgcactccc

SEQ ID NO: 442995 - DNA, 201 bp, Homo sapiens
gtggagaaaaaggaatcctcacacactactggtgggaatgcaaattagtacagccatcatggaaaacagtatggaggttcctcaaaaaactaaaaatatarctaccatatgatccggcaatcccgctactgagtacatatacaaaggaaatgaaatcagtatgtcaaagagatatctgcactcccatatagcattattcac

SEQ ID NO: 442996 - DNA, 201 bp, Homo sapiens
atcatggaaaacagtatggaggttcctcaaaaaactaaaaatataactaccatatgatccggcaatcccgctactgagtacatatacaaaggaaatgaaakcagtatgtcaaagagatatctgcactcccatatagcattattcacaatagccaagatatggaatcagtataaatgtccatcaatgaataaatgtgtttaa

SEQ ID NO: 442997 - DNA, 201 bp, Homo sapiens
aactaccatatgatccggcaatcccgctactgagtacatatacaaaggaaatgaaatcagtatgtcaaagagatatctgcactcccatatagcattattcrcaatagccaagatatggaatcagtataaatgtccatcaatgaataaatgtgtttaaaatatgtggtatatacacacaatggaatagtattcaaccataaa

SEQ ID NO: 442998 - DNA, 201 bp, Homo sapiens
aaaaaggattttgtcttacagcttaggtaccagcttggccacagtgggatagagcaccaagcaggctattggggtccccaattccaggctgtggctcttaratggcatttctggaactaagctgggccagagagaagcccattgccctgaaggatgagtcccaggccaagcagcatttaccacaagctgactgaagagact

SEQ ID NO: 442999 - DNA, 201 bp, Homo sapiens
catagtattgcaaaccacctatgcatatcctcccatatactttaaatcatctctagattactaataatacctaatagggtaaaaatgaaatatttatattwttaatttaaatttgcattatctttgttttttaaatacttttgatctggggttggttgaatccaagaatgtggaaccaacaaatacagagggcggactatg

SEQ ID NO: 443000 - DNA, 201 bp, Homo sapiens
ttttttctcttcacccaggtagtgcaggtgctccaagacgccaggtagccttgaactgtgactgcttgtatccactagaacaagtcttaagcccaagtgamtggctactgtattgaggctatagttcctgagggggtgagtttagtcacattgtctaacctaatgtcatgttatgttaaactgcaccttaccattgacact

SEQ ID NO: 443001 - DNA, 201 bp, Homo sapiens
attaaagtgtctcttctctggtcatccttctcagtgatttcagcatcagtcctaacatcattcttcaatatatgactgcatttaatattttattgagaaawtagaagttatcatattataatatctcatctttgcaccatcaaatccacagcctccaaaattctacatctacttttttttagggcaatattccatggagag

SEQ ID NO: 443002 - DNA, 201 bp, Homo sapiens
ttactgtgcagatgcacactggtaactatttctgaagactgcaactccacattttttttctcttcacccaggtagtgcaggtgctccaagacgccaggtasccttgaactgtgactgcttgtatccactagaacaagtcttaagcccaagtgaatggctactgtattgaggctatagttcctgagggggtgagtttagtca

SEQ ID NO: 443003 - DNA, 201 bp, Homo sapiens
atcggggagatttaaaaattcttcaaaaatgtcaaaataataactattttatcttttttatgccctaattatgatttgaagctttgcttttcttatttcawccaggcacaccacaactcatgaataaaatatgacaagtttgatagcagccattggagagggttcatccgtaaccgcagacgtgctcagtgtacaaagagc

SEQ ID NO: 443004 - DNA, 201 bp, Homo sapiens
cagaccccatgttctctaaaaaagacaaaaatgtaaaaaacaggaaagcaatattttgatcaaccacagaataataatgtgagcgtgagaaatgcaaagawgcctgtcaacgtttctatttatgtgtaacgatggctgtagccctctccttaattacgctcttattcaccatacgcatggagtctgtcactgtgggtatgg

SEQ ID NO: 443005 - DNA, 201 bp, Homo sapiens
aacccatcacttatttctgtatctatttaataaacatttattgaatacctactatgtgttgaaagttgggaaggctaagatatattacaagcattctgctmtggagtttgcacactagtgaagaagataaataaatgtttaattgataaactggttatattaaaaaatagaggtattatgagggtgaggtccttcctgaaa

SEQ ID NO: 443006 - DNA, 201 bp, Homo sapiens
aaaggtaaattcatatatttccaaatttataattgacactcttatcttcacaacatccaaatatacatctctacactcagtgcctcagagtttcagacacrtccatttacccaatccttagacatttccattagggtttctaaagtttggacccaatctgtccaaactgaacaaatgacttgtaccactcccatgaccaga

SEQ ID NO: 443007 - DNA, 201 bp, Homo sapiens
ttttcctacctcttaactacttctcagtttccttggctacatacttttccttaaacactgatttacctagagttctattctctcttctcttcaaaggtaawttcatatatttccaaatttataattgacactcttatcttcacaacatccaaatatacatctctacactcagtgcctcagagtttcagacacatccattta

SEQ ID NO: 443008 - DNA, 201 bp, Homo sapiens
cattcaccatttaatataaagccctctgacttctgtcccctctccccagcattttcttggcaagggtcacaatgcactcctaaataccaaaccaagggggrttttacaacactgttacttgatctctcagttctgttctctccctgtctctgaaaacttgtctccttcatttcaagaaaataatgtttctgttgtttttcc

SEQ ID NO: 443009 - DNA, 201 bp, Homo sapiens
ctcttcctccatctaatctctttcctattggatttgcaatttgacaatttataaaaccaataaaggttttctcaaagcttattttcaaagaggtactttcrtatttcatactaatagttaaagcttgcactgaagtagtggctcaggttgtggatagattatacctttcctaagagtttttagggtgatattgagtcatga

SEQ ID NO: 443010 - DNA, 201 bp, Homo sapiens
tgtgtggattttaatcatacaatcttttacctccattatttataatactatcaagagagtggcacctgtaggaaatgagtcaaccataaatcttcagaggycactaggatttgccttctaagccttcagcaaattctgttcctgacaatacatatgagcaaggacagaggatttcaaagctatggtaactacttgccaaag

SEQ ID NO: 443011 - DNA, 201 bp, Homo sapiens
ggcctagaagaaaatggttttgtgggccaggcccagggtcttcgtgctatgtgcagcctagggacttggtgacctgtgtcccagccttcttcagccaccgwtgaaagaagccaacatagagttcaggccatggtttcagagggtgaaagctccaagccttgacagcttccacatggtgttaagcttgctagaattgaggtt

SEQ ID NO: 443012 - DNA, 201 bp, Homo sapiens
cagaggtcatatttgcccttctgaactgtaacgtagttgaggctgagatctttaccttattcatctaggtcttccacaacatgtagctcaaagcctagaakgcaaacaggtgctaaattcctgaatcttcccctggaagcagctacattagcctttgttctatcttgttacataaaacaagctacttgaaagatactatct

SEQ ID NO: 443013 - DNA, 201 bp, Homo sapiens
aaatacctggaaagccttcacaaaagcataggtacaatcaagcccagactgtgaagactacaataaataccttcaatgcccaggaactgaggaataatcacaagcatcaggaccatccatgaaaacatgaccccaacaaaaaaaaaaaaaactaaataatgcaccaaggatcaaacccagagtgatagagatatgtgacct

SEQ ID NO: 443014 - DNA, 201 bp, Homo sapiens
aagcccagactgtgaagactacaataaataccttcaatgcccaggaactgaggaataatcacaagcatcaggaccatccatgaaaacatgaccccaacaamaaaaaaaaaaactaaataatgcaccaaggatcaaacccagagtgatagagatatgtgaccttgcagacagaattcgaaatagttgttttaaggaaagtca

SEQ ID NO: 443015 - DNA, 201 bp, Homo sapiens
cttcaatctgataaaaaaaaaaaaaaaggacattaataagcagtaagtaatcactgaaggtacaaaactctctggtattagtaagtacacaaaaaaacacrggatattataatattggaattgtggtcagtaaactacttataatttaagtagaaagacaaaaacatgaaccaagcaaaactaataactataacaactttt

SEQ ID NO: 443016 - DNA, 201 bp, Homo sapiens
tggactaaactctttattcaaaagacatgaagtgtctggctgagttgtaaaaacaaaaacagaagcaaacaaaaaccaagacccaacaatctgttgcctasaagaaacacacttcacctataaagacacacatagactgaaaataaaggaatggaaaaagatattccatgccaatggaaaccagaaaagaacaggagcagc

SEQ ID NO: 443017 - DNA, 201 bp, Homo sapiens
ccaccccactgactctaatgttaatctcctttggcaacaccctcatagacacacccaggatcaatactttgaatctttcaatccaatcaagttgacactcrgtattaaccatcaaaaccaacatcaaaagaaaaaaatagaaaaatttcaaataaacaacttaatgatgcatcttaaagaactagaaaagcaagaccaaac

SEQ ID NO: 443018 - DNA, 201 bp, Homo sapiens
agataacaaataaaatcagagacgaaataggagacattacaactgatactacagaaattcaaaggatcattagaggctgctatatgccaataaatttgaamacctagaagaaatggataaattcctagacagatacaacctcccaagattgaaccatgaagaaacccaaaatatgaacagaccaatgatatgtaatgagat

SEQ ID NO: 443019 - DNA, 201 bp, Homo sapiens
caaagtcattcatatctccatatccctcagcatcatgcagtataacagtgtaacaactctgtgcatgtactccctgaatctaaaaataatagtaataatacatacatacatacatacatacatacacacatacatacttctggctgtctccagatgaactgataatgcttcaaatggtgaactaccaattcactcctacca

SEQ ID NO: 443020 - DNA, 201 bp, Homo sapiens
tctgtcttcagccttaatctcctggctcatcataatctcctggctcatcagtgactatacccttcttatactctttttgttcctgatattttgagctcatsattcacttcatatttctaacacaacatatattcttacacttcctcatctttgttcttacagttccctcttgtttgggattcaccttcccctacatctcta

SEQ ID NO: 443021 - DNA, 201 bp, Homo sapiens
gtcattcatatctccatatccctcagcatcatgcagtataacagtgtaacaactctgtgcatgtactccctgaatctaaaaataatagtaataatacatacatacatacatacatacatacacacatacatacttctggctgtctccagatgaactgataatgcttcaaatggtgaactaccaattcactcctaccaaagt

SEQ ID NO: 443022 - DNA, 201 bp, Homo sapiens
cttttttagattgaggacaaacgtcctatcttcataaagccctctccagcttctcttctctactgacctatccctcatccctctgttttattttcttccatgacgtttatcattaggtttaattttgtccgtatttatcatctgactcaccccactagaataaaagctccctgaggacaggccccttacacaccttcgctg

SEQ ID NO: 443023 - DNA, 201 bp, Homo sapiens
ttttttagattgaggacaaacgtcctatcttcataaagccctctccagcttctcttctctactgacctatccctcatccctctgttttattttcttccatgacgtttatcattaggtttaattttgtccgtatttatcatctgactcaccccactagaataaaagctccctgaggacaggccccttacacaccttcgctgc

SEQ ID NO: 443024 - DNA, 201 bp, Homo sapiens
tttattgaagttgaggccgattcagcaggcctagaggtgtgtgattccagctaatcctgctcctagacaagaatgtttctttctccaatatcagcataacragagacatccatcacttcatacccagactcacccttgtcatgataaactgggtgttatctcattattttacactacatttttctggcatcagaaaggggc

SEQ ID NO: 443025 - DNA, 201 bp, Homo sapiens
cctcatgaaatatttattgaagttgaggccgattcagcaggcctagaggtgtgtgattccagctaatcctgctcctagacaagaatgtttctttctccaayatcagcataacaagagacatccatcacttcatacccagactcacccttgtcatgataaactgggtgttatctcattattttacactacatttttctggca

SEQ ID NO: 443026 - DNA, 201 bp, Homo sapiens
gataataagacccaaatgccactcagcatcctccaatttcactttttccatggacacagcttccttctccccacaatggatataggaaacctgtccttgcyttgtacctagcagatatttactagcactaataatgccagacaactctgcctttgcttaacgaataaatacaaggcatgctcatgctccacacccgtgcct

SEQ ID NO: 443027 - DNA, 201 bp, Homo sapiens
tgcaagtttcattttcctcttctgtcaatagttttcattttcaggcaccattccccactccctacagctgcattcattcaatgcaaatcccggaaatgctrtctctgtcaccatgcccacttgtcactttgacaagttcccaattggccagacagtgattttctggcaggaattttgacgggacgctgagcaattcagttt

SEQ ID NO: 443028 - DNA, 201 bp, Homo sapiens
tagagaagaaatataggagaaagaggagaggggagatgagaaggaagaagaaaaaagatccatggttaaaaatgtcatgtccaaagaatccagactgcaaktttcattttcctcttctgtcaatagttttcattttcaggcaccattccccactccctacagctgcattcattcaatgcaaatcccggaaatgctgtctct

SEQ ID NO: 443029 - DNA, 201 bp, Homo sapiens
atttattgcattaaggaaacactatttccttaaatgatatgaaatttcaactaccaaatagcagattgaagataccacaacatatttaagttctgaagtaraagttgtaagtgtagcatgactcagaacgctgagcacagggatggtttagttgttgtaaacacaggaaaatcccaatgttttttgtgttagttttctttt

SEQ ID NO: 443030 - DNA, 201 bp, Homo sapiens
aaggagtagagaagaaatataggagaaagaggagaggggagatgagaaggaagaagaaaaaagatccatggttaaaaatgtcatgtccaaagaatccagaytgcaagtttcattttcctcttctgtcaatagttttcattttcaggcaccattccccactccctacagctgcattcattcaatgcaaatcccggaaatgct

SEQ ID NO: 443031 - DNA, 201 bp, Homo sapiens
tcaagaagaaaagcaggaggaaacaggagaggagaagaggaaggagaaggagtagagaagaaatataggagaaagaggagaggggagatgagaaggaagargaaaaaagatccatggttaaaaatgtcatgtccaaagaatccagactgcaagtttcattttcctcttctgtcaatagttttcattttcaggcaccattcc

SEQ ID NO: 443032 - DNA, 201 bp, Homo sapiens
gctttcttacctgtgctccagttctcgaatggacagtatcactcctgaagtggatggcttctgctgtacagtggccaaaatggtgaattcactcttgttcyggaacagctgaattaatttctcactcacatgaggagctgcatggatctctctttctatgtctaggaatcaagaagaaaagcaggaggaaacaggagagga

SEQ ID NO: 443033 - DNA, 201 bp, Homo sapiens
cattttgtataacccattaactctaaggagattttcaaaagcagaaagagctttcttacctgtgctccagttctcgaatggacagtatcactcctgaagtrgatggcttctgctgtacagtggccaaaatggtgaattcactcttgttccggaacagctgaattaatttctcactcacatgaggagctgcatggatctctc

SEQ ID NO: 443034 - DNA, 201 bp, Homo sapiens
ccaccatgcccggctaattttttgtatttttagtagagacggggtttcaccgtgttagccaggatggtctcgatctcctgaccttgtgatatgcccacctyggcctcccaaagtgctgggattacaggtgtaaaccaccgcgcctggcctctaaagctttttaataaactttcactcctgctttaaaacttgcctcggtct

SEQ ID NO: 443035 - DNA, 201 bp, Homo sapiens
gcctccgcctcctgggttacagcgattctcatgcctcagcctcccaagtagctgagattacaggtgcctgccaccacatctggctaattttttttttttttgtatttttagtagaggcggggttccaccatgttgtccaggctagtctcaaactccttgcctcaagtgatccacttgcctcagcctctcaaagtgctgggg

SEQ ID NO: 443036 - DNA, 201 bp, Homo sapiens
atatatacacatatttttgagtcagactctcgctctgttgcccaggctaaaattgcagtggcacaatctcagctcactgcagcctccgcctcctgggttamagcgattctcatgcctcagcctcccaagtagctgagattacaggtgcctgccaccacatctggctaattttttttttttttgtatttttagtagaggcgg

SEQ ID NO: 443037 - DNA, 201 bp, Homo sapiens
ataatcagattgagtgagtcagcaaggacaagcataatatcattctaaggcaaatatttaaaaatacatggggatgtttcatttctttaatttggtgtgtrtatatatatatgtacacacacacacacacacacatatatatatatatacatacacattcatatatatgtacgtgtatatatatacacatatttttgagtc

SEQ ID NO: 443038 - DNA, 201 bp, Homo sapiens
atctgaaaagagaagaaaaaaggcccggatttttatcacctatggaaataatgttaatgaataacagtgaataacctttcactaaaaatgagttgcaattkgtcgaagttgatttaggaaaaaaatccacttcctggaagtagattgaggcatcaggttgtagaaagtattaaaaccatttatcttttttaaatttaagca

SEQ ID NO: 443039 - DNA, 201 bp, Homo sapiens
attcctaaagatgaatgagaaagtctcctctgcgtcctaaaatcgcaccctatagaatgattgccaatcagagactgcctcaatctttcctcttttaattstataaaacttactctcctttctgatatctttgcagcttgcagaaacaaataacggcagatggattaccttgccacaagtttacgaataaacagcctttgt

SEQ ID NO: 443040 - DNA, 201 bp, Homo sapiens
aaataccagggccccagtgatcctcccgcttcagtctcttgagttcctaggaccacaggcatgtgctgccatgccaagctatttttttttttaatttttttgtagagatagggtctcactatactgcccaggctgatctcaaactcctcacatcaagtgatcctcccacctaggccttccaaaatgctgaaattccaggca

SEQ ID NO: 443041 - DNA, 201 bp, Homo sapiens
tatctacaaacatgcattcatatgttttagataaccagctggtagcatattttctcctagacactaagcaccttgagggaacggcccatgtcttacactgktatttatttgtttctatttatctatctatatatgtatgtatgtgtatagatagacagaagatagatatagatatagatatagatatagatatagatatag

SEQ ID NO: 443042 - DNA, 201 bp, Homo sapiens
ttttcccactgcaatcctttccccactgcatcacttctgtgtcacacagtggtagagacaatagacttcggagtcaaagggaccagggttcaagccctgtytctgactcctgagaaagtaacaattcctaagactttgttatctaggtaatgaagataattacagtacatatacaaaggcatctacagagataaaaggaaa

SEQ ID NO: 443043 - DNA, 201 bp, Homo sapiens
gatatgtagtgtacatatatatagaatctatactgtctagatatgtagtatacactactagatacgtagtttggtagcctctgttcattcacaacatcgcyttgtagcatcagtcttttgacttgctatttatcatattctttttatgttttggaagcacacttttgaaaaacacactgctgcatttcacttgctagaatg

SEQ ID NO: 443044 - DNA, 201 bp, Homo sapiens
cataaatttacttttatcttatcaatacacatgtacaaaaacatacacacacacacacaaacacacacacatccagggttagctgcaaatggattaaattrttggactatttcatctacagtaaatcagatataatcttattacagctgcatgaatactaccatcttttaaattttaattagtcaaagagctgtcgatgtt

SEQ ID NO: 443045 - DNA, 201 bp, Homo sapiens
aaataaatgtaaaacttaaatgaaagcatatgctaaatgtctaaaatgatgtctggctcaaataagtgtttcccaaaaatgataactacttgggtttagcygaaagttaacaccacccaggaactttgcttttttttcaaggcattttagagccttcttgctcctaaactcttttccttttgataaaattcctataatgta

SEQ ID NO: 443046 - DNA, 201 bp, Homo sapiens
tttttagattgaggacaaacgtcctatcttcataaagccctctccagcttctcttctctactgacctatccctcatccctctgttttattttcttccatgacgtttatcattaggtttaattttgtccgtatttatcatctgactcaccccactagaataaaagctccctgaggacaggccccttacacaccttcgctgct

SEQ ID NO: 443047 - DNA, 201 bp, Homo sapiens
tttagattgaggacaaacgtcctatcttcataaagccctctccagcttctcttctctactgacctatccctcatccctctgttttattttcttccatgacgtttatcattaggtttaattttgtccgtatttatcatctgactcaccccactagaataaaagctccctgaggacaggccccttacacaccttcgctgctaa

SEQ ID NO: 443048 - DNA, 201 bp, Homo sapiens
tatatgtttttcaaaacagttatagattaagcctttatttaactaaatatgatgcttgatataggtgtttggtagaagtcctatatctaacatttttttttctttaacatagttgatttttttggaaatatttttctatttgagatgattcttcatattttgttcttatatcattaaacataaggaattacactggtacat

SEQ ID NO: 443049 - DNA, 201 bp, Homo sapiens
ttagattgaggacaaacgtcctatcttcataaagccctctccagcttctcttctctactgacctatccctcatccctctgttttattttcttccatgacgtttatcattaggtttaattttgtccgtatttatcatctgactcaccccactagaataaaagctccctgaggacaggccccttacacaccttcgctgctaaa

SEQ ID NO: 443050 - DNA, 201 bp, Homo sapiens
agggaccttatctttctcatccaacatcatgtctccataacactccagattgccgttggtgagaatggcaggcttagtggagggcgcttctctggagcatkacttaccccttgctgaggcaaataaaataagccaaatagtaactctttcttgaggaaaagtacaaataagaaagttgtaggaaactaggatgggttagag

SEQ ID NO: 443051 - DNA, 201 bp, Homo sapiens
tagattgaggacaaacgtcctatcttcataaagccctctccagcttctcttctctactgacctatccctcatccctctgttttattttcttccatgacgtttatcattaggtttaattttgtccgtatttatcatctgactcaccccactagaataaaagctccctgaggacaggccccttacacaccttcgctgctaaag

SEQ ID NO: 443052 - DNA, 201 bp, Homo sapiens
agattgaggacaaacgtcctatcttcataaagccctctccagcttctcttctctactgacctatccctcatccctctgttttattttcttccatgacgtttatcattaggtttaattttgtccgtatttatcatctgactcaccccactagaataaaagctccctgaggacaggccccttacacaccttcgctgctaaaga

SEQ ID NO: 443053 - DNA, 201 bp, Homo sapiens
actgagtgaaaaaccaatggtagaaaagtacatgattacttatttataaaatttaaatacaaacaaaaattatatgtgtgtctgtatatatatatatatatgtatatatatatataatatgtttatggatgtgtagcaaaataattaaaacatgggtgaaatggaggcatgtcaatttttataattatttatgtaattatc

SEQ ID NO: 443054 - DNA, 201 bp, Homo sapiens
gattgaggacaaacgtcctatcttcataaagccctctccagcttctcttctctactgacctatccctcatccctctgttttattttcttccatgacgtttatcattaggtttaattttgtccgtatttatcatctgactcaccccactagaataaaagctccctgaggacaggccccttacacaccttcgctgctaaagaa

SEQ ID NO: 443055 - DNA, 201 bp, Homo sapiens
cttcataaagccctctccagcttctcttctctactgacctatccctcatccctctgttttattttcttccatgacgtttatcattaggtttaattttgtccgtatttatcatctgactcaccccactagaataaaagctccctgaggacaggccccttacacaccttcgctgctaaagaatccaccaatgttcctagccca

SEQ ID NO: 443056 - DNA, 201 bp, Homo sapiens
cataaagccctctccagcttctcttctctactgacctatccctcatccctctgttttattttcttccatgacgtttatcattaggtttaattttgtccgtatttatcatctgactcaccccactagaataaaagctccctgaggacaggccccttacacaccttcgctgctaaagaatccaccaatgttcctagcccacag

SEQ ID NO: 443057 - DNA, 201 bp, Homo sapiens
attataactccaatctctgccttcatctttatgtgactttcctctaggtgctctgtgtcgaattgccctctcattttccttattactgatatcatttatascaatccaattataccagtaattggatttaggacccatgctaaatccaagatgataccatcttaagatctttaacttaactacaccggtaaaggtcctatt

SEQ ID NO: 443058 - DNA, 201 bp, Homo sapiens
agtcccagacctccagtctagcttaaagacctgtattagcttcccagagtcgccatatccaaattaccacagacttggtgacttaaaccaacaaaaaaaatattcactcagtttgaaatcaaggtgtcggctggataggttcacattggaggatctgaaggaaaatctgttccatgtgctctgtcctagcttctggtggct

SEQ ID NO: 443059 - DNA, 201 bp, Homo sapiens
aattgatcaaacctgttattaaagccacaccaattaagggccatccccaatttatttgtgtgtatttttcgtgagaagaaatgaggaattaatatcagacmccactgcagcctttgtaatctgttttaagtaatattgcacttaaaatttattgagtttttcctaataaagcatggacccagaaattctcatcaaacattt

SEQ ID NO: 443060 - DNA, 201 bp, Homo sapiens
ttggctgccttcaaagtcaaaacccagggtcctcttaagcgagcgtgtctgattaatagctgctttcatgctgcacacagccgctggcactggagcccagygatctgcctttctagatgtttagctatatctcatctacaacatgggctgcccttgttcttgtgctaaagttatttttgaaaggtttaagctcaaatccct

SEQ ID NO: 443061 - DNA, 201 bp, Homo sapiens
aaaaggtaatttgtaattatatctgcattctggagttggggaagctgaaaggagaaaagttagatagctagcccggagaaagttaattatgaggctgagamtaaattccaggtgctgggattctagtcacacccaggattcagcagaacatcaggtgcctgagaagcaatgccagtttcacccaatgagagaaacctggtt

SEQ ID NO: 443062 - DNA, 201 bp, Homo sapiens
gaacagatagtgggtggtgtgtttgacttttgtgtttcaaccggtcagccactacacattctcactttttgacatttatctcaagatttgttagcagtatrgccccactttgcagtgtagattccaaagagaacaaatatttcctctccctacacccagatagctagaacatggatatgtgacttcagcacacaaaatcag

SEQ ID NO: 443063 - DNA, 201 bp, Homo sapiens
acactcactctaagctcttctatctttctcattgaatttgatgctttttaagagaagagatcatgcctcattcacctttataaatcctaaatgacagctgrcaagggatctgtctcatgatttttattattttattattttattttattttattttattttgagacggggagtgcagtggcatgatcttggctcattgcaa

SEQ ID NO: 443064 - DNA, 201 bp, Homo sapiens
aactgagtgaaaaaccaatggtagaaaagtacatgattacttatttataaaatttaaatacaaacaaaaattatatgtgtgtctgtatatatatatatatatgtatatatatatataatatgtttatggatgtgtagcaaaataattaaaacatgggtgaaatggaggcatgtcaatttttataattatttatgtaattat

SEQ ID NO: 443065 - DNA, 201 bp, Homo sapiens
aaccaaccctggagctacatattgccagaattcatgtcatgagagagaattaaagactttattattaagtcacaattacttgagatttctattacttccarccaaaataaattcaaccaatggaatatttttatctctattttacagctaaaggaaacaagtctgaaagatattaaataatttccataaggcaacatatct

SEQ ID NO: 443066 - DNA, 201 bp, Homo sapiens
tacattccccatccttcatcctgggggcaggcaccatacagattttgtctttctgctctaccctgagtgatacaccttccacctcccacacattcactttyaattagaagaaccttgacttgcttgcataaagagtattgccctcttaatctaaaaaaaaaaaacaaaaaacaaaacaaaacaaacaaacaaacaaaagga

SEQ ID NO: 443067 - DNA, 201 bp, Homo sapiens
cggctgtacattccccatccttcatcctgggggcaggcaccatacagattttgtctttctgctctaccctgagtgatacaccttccacctcccacacattyactttcaattagaagaaccttgacttgcttgcataaagagtattgccctcttaatctaaaaaaaaaaaacaaaaaacaaaacaaaacaaacaaacaaaca

SEQ ID NO: 443068 - DNA, 201 bp, Homo sapiens
attaaattagaaggcagggcctgggtaaccgatagaagcgatgcaaagaattctcttaataaaatgatatgatctactcagacttcttccataaacatttmctagaaaaagaacccagggagggatatacttaggaggggaaaaggcattccccactccctgtgtacatttaaaaaggaaagaagatcaacagctcttgag

SEQ ID NO: 443069 - DNA, 201 bp, Homo sapiens
gaaacttgaatactcatccattgctggtgggcgtgtaaaattatgcagccactgtgcaaaactgtttggtagtttcttagaaagttaaaaatagaattacsgtatgatccatcaatcccactcctaagtatacacacccaagagaattacaaatatatattcaaacaaatactggtacataatattagtagtggatttact

SEQ ID NO: 443070 - DNA, 201 bp, Homo sapiens
tcacctgttgatgcacagttaggttgattccctattgtcattattgcgaatagtacttaaattaaaagatgattgcaggtttgtttgttttttttttttttgagacggagtctctctctgtcacccaggctggagtgcagtggcaccatcttggctcactgcaagctccgcctcccgggttcatgccattctcctgcctca

SEQ ID NO: 443071 - DNA, 201 bp, Homo sapiens
aggcagagcttgcatgaagtgagccaagatcgagccactgcactccagcctgggtgacagagcgagactccgtctcaaaaaaaaaaaaaaaaaaaaaaaargaaaagaaaaaaataggattcaagataaagaaaatgtgcaaagataaaaaaggtatttcataaaaagaatgaattggccaagaagatataacactcaaat

SEQ ID NO: 443072 - DNA, 201 bp, Homo sapiens
cctctttgtacctcgggttcttcattaggcaaatggcaattttaaaaatacaaattttgtctgcctcacaaacaagttccaataaggtatgaacaatctcygcaaagtcaactgattgtctcataaaatatctggtgatgtcattattgctgtttcttctttgtaagtccttattagtaactagtttttgtgtattaatct

SEQ ID NO: 443073 - DNA, 201 bp, Homo sapiens
ttttgctcatgatcctagtgactgaaaagtccaagattaggtagctgcatttggtggtggtctcagcctgcttcaagtcattgtggaaaaaaaaaaagggaggggggggtgggtatgtgcaaagagatcacatggcaagagaggaaacaagagagagaaactgatgaaccagactccatgggagctaatcgattcctgcca

SEQ ID NO: 443074 - DNA, 201 bp, Homo sapiens
ctaaaattacaaagactgactgtaccccaggttgacatagataaggaggaaatggaactcatacactgctggtgggaatgcaaaatagtgtaatcaatttsgaaaacagtttggaagctcctttaaaagttaaatattcacctgccatatacatgatgtagccatttcactactgggtacccaagagagggaataaaagca

SEQ ID NO: 443075 - DNA, 201 bp, Homo sapiens
tttgtgttgtgttcaatgcaaaaatggatgaaatatgactccaaaaatccaggagctcataatcaaagggaagaactatatacgtatatgtgtgtgtgtgtttgtgttttgtatttcatactaatagttaaagtttcaaacaaccaccaatatcaccaactccctcccctagtaactcagtatctgtacacacatctattt

SEQ ID NO: 443076 - DNA, 201 bp, Homo sapiens
ttttgtgttgtgttcaatgcaaaaatggatgaaatatgactccaaaaatccaggagctcataatcaaagggaagaactatatacgtatatgtgtgtgtgtgtttgtgttttgtatttcatactaatagttaaagtttcaaacaaccaccaatatcaccaactccctcccctagtaactcagtatctgtacacacatctatt

SEQ ID NO: 443077 - DNA, 201 bp, Homo sapiens
tacttggcaatctggttatggagtgatgatgaatggccattttataaaaacatctggctactcaagcaatggctgacacagcataaatttgtgaaactgcytgaaatttcaccattggaaaaccagcatttcatgccaaaattgtcatctctaaatttcctctgtaaaacgcaaatattatgggtgggtctcttgctttaa

SEQ ID NO: 443078 - DNA, 201 bp, Homo sapiens
tgaggaaaagggtgtactcaaagtatagaaagagatcaaagtagaatcattctagagtgtaattgtcaaacttcatctggataaaaattgtaaaatgggtkgacgccaggaaagttagatgcgaaaccaggagttacaatggctgcttcttgacaactgcaaggacggactagaaggcaagttgaattacctaagtgtgca

SEQ ID NO: 443079 - DNA, 201 bp, Homo sapiens
taaaaattgtaaaatgggttgacgccaggaaagttagatgcgaaaccaggagttacaatggctgcttcttgacaactgcaaggacggactagaaggcaagytgaattacctaagtgtgcatctgttccttgagactccagctataaatatttcatgctgatatccagatttgaagacttttctaagatttaaatgaaagcg

SEQ ID NO: 443080 - DNA, 201 bp, Homo sapiens
ctggtcatatctggaacaagataaatgaacacatacactataccactctaagacaaacaaactgaccagtaaaatccattttgcagggatgtatcttcaartacgttaatctagttaactaatacagtagatttcctgacctcttgtttctcccacttatactgagaggcactcaatcccaatccttgctccacttagctg

SEQ ID NO: 443081 - DNA, 201 bp, Homo sapiens
agaaagataatacatttattcaattctgtaaatatctgttgagctaaaaatatgtgcaaggattatttttgtgttgtgttcaatgcaaaaatggatgaaayatgactccaaaaatccaggagctcataatcaaagggaagaactatatacgtatatgtgtgtgtgtgtttgtgttttgtatttcatactaatagttaaagt

SEQ ID NO: 443082 - DNA, 201 bp, Homo sapiens
tgacatacatgcattgaatgccttctctttgactatattatcttaggggctgcgagtacagtagtaaaaggcaaacaaggtctctgccctcaaacaaacaacttgtttgaggcaagagaatattacacacatgtgcatgtgaatacaaatgctaaaaagatataaaagtattataacaaagtgagtagggaaggattattt

SEQ ID NO: 443083 - DNA, 201 bp, Homo sapiens
ttgacatacatgcattgaatgccttctctttgactatattatcttaggggctgcgagtacagtagtaaaaggcaaacaaggtctctgccctcaaacaaacaacttgtttgaggcaagagaatattacacacatgtgcatgtgaatacaaatgctaaaaagatataaaagtattataacaaagtgagtagggaaggattatt

SEQ ID NO: 443084 - DNA, 201 bp, Homo sapiens
aggcttccctaccccttagcatcatcattagctgtaatgtagataagaacaggagaagcctgttcaggaactacagtcaacagcaagagggagagagctgrggaggtagaaaagtgagggaagaagagaaagaacagtttcaatttctgctgcaccacatcagcctcaccttgcaggagcagacagaacacctgtcttctt

SEQ ID NO: 443085 - DNA, 201 bp, Homo sapiens
tttgacatacatgcattgaatgccttctctttgactatattatcttaggggctgcgagtacagtagtaaaaggcaaacaaggtctctgccctcaaacaaacaacttgtttgaggcaagagaatattacacacatgtgcatgtgaatacaaatgctaaaaagatataaaagtattataacaaagtgagtagggaaggattat

SEQ ID NO: 443086 - DNA, 201 bp, Homo sapiens
atttgacatacatgcattgaatgccttctctttgactatattatcttaggggctgcgagtacagtagtaaaaggcaaacaaggtctctgccctcaaacaaacaacttgtttgaggcaagagaatattacacacatgtgcatgtgaatacaaatgctaaaaagatataaaagtattataacaaagtgagtagggaaggatta

SEQ ID NO: 443087 - DNA, 201 bp, Homo sapiens
gttattgttttcatgtgacaggtgagggaactgaggtgaagggaggttaaatgttgactatcatataatacttgtcaggaaatttgcatataaaaacacayattagaaaaagttccattgtaagtattatcttaatgcacactaagaaaactaaggctttgaaaggttaaatatctttctaaatgctgctcagctagaaag

SEQ ID NO: 443088 - DNA, 201 bp, Homo sapiens
agattcatttctcacctgatttatcatctgccactgtgtgtccactgtaaggtcctttctgggggacccagaagagctttcttttctattagatgttgcaraatgttcttaacctctccattctgcaccctgataatactgatctttttccatatccattccatactgaggtggtgtctgggtcttggtctctctgtccat

SEQ ID NO: 443089 - DNA, 201 bp, Homo sapiens
aaaacctaggtattaccattcaggacataggcacgggcaaggacttcatgtctaaaacaccaaaagcaatggcaacaaaagccaaaattgacaaacgggayctaattaaaataaagagcttctgcacagcaaaagaaactaccatcagagtgaacaggcaacctacaaaatgggagaaaatttttgcaacctactcatctg

SEQ ID NO: 443090 - DNA, 201 bp, Homo sapiens
agatggattaaagacttaaacattagacctaaaagcataaaaaccctagaagaaaacctaggtattaccattcaggacataggcacgggcaaggacttcakgtctaaaacaccaaaagcaatggcaacaaaagccaaaattgacaaacgggatctaattaaaataaagagcttctgcacagcaaaagaaactaccatcaga

SEQ ID NO: 443091 - DNA, 201 bp, Homo sapiens
agagaataaaatacctaggaatccaacttacaagggatgtgaaggacctgttcaaggagaactacaaaccactgctccatgaaataaaagaggatacaaacaaatggaagaacattccatgctcatgggtaggaagaatcaacatcgtgaaaatggccatactgcccaaggtaatttatagattcaatgccatccccatca

SEQ ID NO: 443092 - DNA, 201 bp, Homo sapiens
aaggttgatgctcccaatacttgccaaatagactcaggcaggtgtttgtgaattacatttccctgcaactatatagaccatggataggctaactattgtcwtacatgttaatgcttttccagcttccataaaataatatcactgatgagtggcacatttcaactcctacagctgtctaaggcatcacacatataccagttg

SEQ ID NO: 443093 - DNA, 201 bp, Homo sapiens
tgtgccttgtctctttctcctgttagtgctaccaggattttgtttatattataaatattttcaaagaaataacttctgcaggccagttgtggtagctcacrcctgtaatcccagcactttgggaggctgaggcaggcaggtggatcacgaggtcaggagttcaagaccagcctgggcaatatggtgaaaccctcatctcta

SEQ ID NO: 443094 - DNA, 201 bp, Homo sapiens
taataatgataatttgtgccttgtctctttctcctgttagtgctaccaggattttgtttatattataaatattttcaaagaaataacttctgcaggccagktgtggtagctcacacctgtaatcccagcactttgggaggctgaggcaggcaggtggatcacgaggtcaggagttcaagaccagcctgggcaatatggtga

SEQ ID NO: 443095 - DNA, 201 bp, Homo sapiens
taacacagtgggggaaaaagaacaaggtataaaggcaccaactagcatgatgaatagaacagtacctcacatctcaatattagcgttgaatgtaaatggcrtaaatgccccacttaaaaagatgcagaatggcagaatggatagaagtccaccaaacaagtatctgctgtcttcaagagactcacctaacacataaagact

SEQ ID NO: 443096 - DNA, 201 bp, Homo sapiens
acaaagcttctagaaggtggtcaaaaatgccacttttgcactttgggaggccaaggcgggcggatcacgaggtcaagagattgagaccatcctggccaacrtggtgaaaccccgtctctacttaaaaatacaaaattagccaggtgtggtggcgcatgcctgtaatcccagctactcaggaggctgaggcaggagaatggt

SEQ ID NO: 443097 - DNA, 201 bp, Homo sapiens
aggtgtggtggcgcatgcctgtaatcccagctactcaggaggctgaggcaggagaatggtttgaacccaggaggtggaggttgcagtgagccaagatcgcrccattgcactccagcctcggtaacaggagagaaactctgtttcaaaaaaaaaaaaaaaaaaaaaatgccacttttgcctagggaagtagcagtcattcca

SEQ ID NO: 443098 - DNA, 201 bp, Homo sapiens
tcaacagatgcaaaaaagacacttgacaaaatgcaccattcttaaggattttatgtatttatttatttatttagagatggagtttcactcttgttgctgakgctggagtgcaatggtgcgatcctggctcaccgcaacctccacctcctgggttcaagtgattctcctgcctcagcctcccaagtagctgggattacaggc

SEQ ID NO: 443099 - DNA, 201 bp, Homo sapiens
tctccatgttggtcaggctggtctcgaactcccaacctcaggtgatccgcctgcctcggcctcccaaactgctgggattataggtgtgagccaccacaccyggccaaggattttattttttaaatctctcagcaaagtaggaatacatgacaactcattctgatacagggcatctacaaaaaaatctacaggtaacatcag

SEQ ID NO: 443100 - DNA, 201 bp, Homo sapiens
attccaatccaatggcaacagccctggacattggttagaagacaaagtttatgctccaggcagtaccaattactcttcacctgaccttgacccattcaagrccagagaagggaaaagactctcccaaggctacagacttataaatgacaaaaaactatgaacagaactagaacccaccttcttaacttctctggatctcct

SEQ ID NO: 443101 - DNA, 201 bp, Homo sapiens
gtatataccagctgtgatttaagtctttctgcatttcatgtttcaattaaattgttgtattgaattatttaaaacatataattacacaaagagtgtatacygaacaaattcataaactagtgattgttgtccatagtatgcaaaaggtggcaaatacataaacagtctccggctctgtttattctctgtatgagacaccac

SEQ ID NO: 443102 - DNA, 201 bp, Homo sapiens
caggcagtaccaattactcttcacctgaccttgacccattcaaggccagagaagggaaaagactctcccaaggctacagacttataaatgacaaaaaactrtgaacagaactagaacccaccttcttaacttctctggatctcctttcctaatctacaaaacgagcaggtttgaaataatttccaaaggtccctacaggct

SEQ ID NO: 443103 - DNA, 201 bp, Homo sapiens
ttacttgaaattaccctaacattccccatgtgaacttgtgtttgaatgaccagtgtttccaaatttctcaagcacctgctctttgttcaaaactcaggcakcggtgtcattaacttagtaaagtctcacagtctcatagacaggtttaatccctcctttctcagtgcaatcatttaaaattataccaatttttattattat

SEQ ID NO: 443104 - DNA, 201 bp, Homo sapiens
aaactgtcagctcattagcatatcattagctgtcctgctgtttccaaagtcttaatgcacagaaatattaatcttcaaatgtgtaagattccccagttctrtgactttgactttctgcatgaaaggaaaaataagaattaaagatgggaggcatccaatatagcttctttttcaatgtgcctataaacatatgtttaccat

SEQ ID NO: 443105 - DNA, 201 bp, Homo sapiens
aaaaagtaaaatggcaggcataaatccaatccaactatttaaataacattaaatgcaaatagattaaccatccaatcataagacagagatattcagtctgsattttttttcaaagccagaagacaaagaatgacatgttttaagtcttaagaaaaaaaagtagtctataattctataatcagtgaaaatatttaaaaatgt

SEQ ID NO: 443106 - DNA, 201 bp, Homo sapiens
ttgccccagaaattgttcttacttatgtattaagcagcctgtatctctgaattaataaccttgcatgtaaatatctttgtcttcctaaaaacattattgasttaaatacaaatattttcaactttttttttttttttttttgcatgctacactggctttgaaagaaccaaagaaggagaggggttgttatgccctttctgt

SEQ ID NO: 443107 - DNA, 201 bp, Homo sapiens
ccaatgactcagaaggctgaggcaggaggattgcttgaggccaggagctcaaaaccagcctgagcaacacagcaagacttcatctctaaaaagagttttgtttttttttttttaacttagccaggcatggtggcatgtgtctgtagtcccagctactaagaaggctggagtgggagcatcacttgagcccaggagttcaag

SEQ ID NO: 443108 - DNA, 201 bp, Homo sapiens
tcaagcttcctaccaagtcaagagggtgcagagaaaacaatgaaaaaacccatatataaaaacaatgcacagtttacatctatttgaaatcagctactgtratagtctgccagagctgccaaaccaaacaccacagacttaaacaacagaaacttatattcccacagttctggaggctagacatttaagatcaaggtgcgc

SEQ ID NO: 443109 - DNA, 201 bp, Homo sapiens
tatctctgaattaataaccttgcatgtaaatatctttgtcttcctaaaaacattattgagttaaatacaaatattttcaactttttttttttttttttttrcatgctacactggctttgaaagaaccaaagaaggagaggggttgttatgccctttctgtacaatacctgtcaccttgggaatgtgattctcctcaagtac

SEQ ID NO: 443110 - DNA, 201 bp, Homo sapiens
gtgaagggaggacaatattaatatctccatcttacagattagaagtctgaggttggagtggttaagttacttgcctaagattactgacctagtaagtgggragaaggatttgaacccaaatctgtctgactccaaatcacatctttccactcatccatgtcaccttagagttcttgaaaaacttggagatttttgtgtaat

SEQ ID NO: 443111 - DNA, 201 bp, Homo sapiens
tcaaagagaataaaatacctaggaatccaacttacaagggatgtgaaggacctgttcaaggagaactacaaaccactgctccatgaaataaaagaggatacaaacaaatggaagaacattccatgctcatgggtaggaagaatcaacatcgtgaaaatggccatactgcccaaggtaatttatagattcaatgccatcccc

SEQ ID NO: 443112 - DNA, 201 bp, Homo sapiens
ggaggcggaagttgtggtgagcctagatcatgccattgcactccagcctgggcaacaagaacaaaattccatctcaaaaaagtaaatacataaataaaaawtttttaaaaaataaaaaagataggaaattattattctataaactttatgtacagtaattagctttccatggatctgcctgaggatgaaaaccattcacaa

SEQ ID NO: 443113 - DNA, 201 bp, Homo sapiens
ccttaagaaattttaaaaaccaagtttcccaaagcctattataggtaaattgtggtaagcatcaagttaattaagacaaaattacaaaggcaccctgtgartttattcaattatgtacaaaaaaaggagtcagatcataggaaaagctgtgtgagtagaggggagtaaatagatcttgtaatcaaaagacttaagttccaa

SEQ ID NO: 443114 - DNA, 201 bp, Homo sapiens
agcatgccttcgaattctctgcttcgagctagtgaatggatgagtttaaaataaatacactgaaatcaaatatagagtagtatacattctccctggaagcsacaggaaaagcaggaaaattaccaaatgtatgtaatcaggagcaagataggaatgaagaccttaagaaattttaaaaaccaagtttcccaaagcctatta

SEQ ID NO: 443115 - DNA, 201 bp, Homo sapiens
ctttttgactcatttttgataaattatatttttctagttatttgtctatttccttaaattttcaaaatttaacatacattatttattttattttcagaaayatttgttgtatctgtactttagtcccccttgttactactaataatgataatttgtgccttgtctctttctcctgttagtgctaccaggattttgtttata

SEQ ID NO: 443116 - DNA, 201 bp, Homo sapiens
gagcatgccttcgaattctctgcttcgagctagtgaatggatgagtttaaaataaatacactgaaatcaaatatagagtagtatacattctccctggaagycacaggaaaagcaggaaaattaccaaatgtatgtaatcaggagcaagataggaatgaagaccttaagaaattttaaaaaccaagtttcccaaagcctatt

SEQ ID NO: 443117 - DNA, 201 bp, Homo sapiens
tttcgtagctgtttatattaactacattaagtgaaattgagaaatatgtcccctttttattttctgcaatgttttgtaaatatcaatatacatttcctcaktgtttcactgaccttgctcatacttatctgcgcatcagttttgaatagctatgtgtaggtgagtactgatttttaactacctgaaaaatttaattgttgt

SEQ ID NO: 443118 - DNA, 201 bp, Homo sapiens
cctggggaagagacaagactgaaaatctgagcatgccttcgaattctctgcttcgagctagtgaatggatgagtttaaaataaatacactgaaatcaaatwtagagtagtatacattctccctggaagccacaggaaaagcaggaaaattaccaaatgtatgtaatcaggagcaagataggaatgaagaccttaagaaatt

SEQ ID NO: 443119 - DNA, 201 bp, Homo sapiens
tctatttgagatgattcttcatattttgttcttatatcattaaacataaggaattacactggtacattagctactcttaagacattctaggaattccttarataaaagcaacatgttcacaatatttttttaaataatcattttaggttgttttgctaatatttgttcagataagtttttaaataacatatattgaactgt

SEQ ID NO: 443120 - DNA, 201 bp, Homo sapiens
tttttttttctttaacatagttgatttttttggaaatatttttctatttgagatgattcttcatattttgttcttatatcattaaacataaggaattacaytggtacattagctactcttaagacattctaggaattccttagataaaagcaacatgttcacaatatttttttaaataatcattttaggttgttttgctaa

SEQ ID NO: 443121 - DNA, 201 bp, Homo sapiens
tttgtttattgttgtctgtgtcacctgctggaatgtaaggttcaagaacaggaatgtttgatattcactaatatatctgaagtgtctagaaaaatgcggcrcaataaacattagttaaatggtgaattcgtctttttgctcttctcacactgcacttttcagtctgttgtgttacaaagaatttgtctggtctttgtttca

SEQ ID NO: 443122 - DNA, 201 bp, Homo sapiens
atctagtgacagcctggggaagagacaagactgaaaatctgagcatgccttcgaattctctgcttcgagctagtgaatggatgagtttaaaataaatacaytgaaatcaaatatagagtagtatacattctccctggaagccacaggaaaagcaggaaaattaccaaatgtatgtaatcaggagcaagataggaatgaaga

SEQ ID NO: 443123 - DNA, 201 bp, Homo sapiens
ggagaagaggggttagagtggcagcaaggatctagtgacagcctggggaagagacaagactgaaaatctgagcatgccttcgaattctctgcttcgagctrgtgaatggatgagtttaaaataaatacactgaaatcaaatatagagtagtatacattctccctggaagccacaggaaaagcaggaaaattaccaaatgta

SEQ ID NO: 443124 - DNA, 201 bp, Homo sapiens
aagaggtcttgccattcaactcaagtgccgaagatgttaattaggccttagcccccaggtatttcagtgagcttttcagttcgtgggttatcaccatgtayatgcacctactgcctctcctaacagataaaactcaaggattaaaaatataaatggtaatagttggaatcctctgcagtttgggattaattttaatcatca

SEQ ID NO: 443125 - DNA, 201 bp, Homo sapiens
gggaaaatgtttggggtatttattgtgtaggatgtgttgcaatgagctttaaacatgacttttagctagaatacccttaactctgaatccaccatattgayataatcacaggaagagataccaagggtgatatccatagagtgcaggagaagaggggttagagtggcagcaaggatctagtgacagcctggggaagagaca

SEQ ID NO: 443126 - DNA, 201 bp, Homo sapiens
ataaacatgatttctaaaagccatccattatggattatgatctatacttggaaacaagatgtggctggccaatcgtgcattcaccaacattacagaatcaygtaaagtcctccccgcctaccctacagtcctgaagaggtcttgccattcaactcaagtgccgaagatgttaattaggccttagcccccaggtatttcagt

SEQ ID NO: 443127 - DNA, 201 bp, Homo sapiens
ctaaacagatattttgggttttggtgtatgcacccaggagaaaactcagaattccaacttccattcattcatcaatcatttagtgagaggctcctataaayaaaaactgggcacagaagatatatgaagaaaaagcatgggcctacaactgagactctgtagtctactggagaaaatgtagacaaataattacaacaatat

SEQ ID NO: 443128 - DNA, 201 bp, Homo sapiens
aggatgcaacacagtgattactggcaaccttggcactcaaaagaagaaagcctttactaaacctgtgaaaatgaccttgtgcacacttgctattcctttcycagagagtcatgacaaaactgaattggattaaatcctctctccctaagggcagaagaattcttatctttatagtagagttgaccaatacagagagccttc

SEQ ID NO: 443129 - DNA, 201 bp, Homo sapiens
aaaaatttgcccagttctgctttaagaaaatgctctacaaattccacagagcacttctaaattgcatttggattctgtgctcccctccagcatgattattyatgatgtttgttgaatacagccactattctctgcctctatgcacattcataaacatgatttctaaaagccatccattatggattatgatctatacttgga

SEQ ID NO: 443130 - DNA, 201 bp, Homo sapiens
aagcagtgaacagaaataaaaatttgcccagttctgctttaagaaaatgctctacaaattccacagagcacttctaaattgcatttggattctgtgctccmctccagcatgattattcatgatgtttgttgaatacagccactattctctgcctctatgcacattcataaacatgatttctaaaagccatccattatggat

SEQ ID NO: 443131 - DNA, 201 bp, Homo sapiens
agataatcaccaagaacttaggagtgaggagtatttaatcctaaccttgtggtcaatcatggacacattttccaaaacaactcaagtacctgagtacttcytccatacagcctttggcttagtaaaagcatgattctagaaacagatctatcttctagtcctggtttcacttcttatttgctgactgattttgccaaattg

SEQ ID NO: 443132 - DNA, 201 bp, Homo sapiens
ggaagatttgggtaggagcaaagacattaccatttgttcccccacattgtatctaggttcagctctcaacaaatgtttatttttcagcccaaccggagaaygcatgagagaggaaagactgataccaggaaaaaggactagactgaactttccttcatgcttccacagaattcaagcagtgaacagaaataaaaatttgcc

SEQ ID NO: 443133 - DNA, 201 bp, Homo sapiens
aaaaactctttgcagtctgcctctcactaactggtgcacacatcagtgtcagactttgagagcttgttgggcactggaatcaacagcaaggaaaatgatgkgacattaagacaaaaaggtatgaagaggaatagaataaaagatgatgttcacattttaacatgcaaaattcaagaaattaattcaggactccctaggaca

SEQ ID NO: 443134 - DNA, 201 bp, Homo sapiens
taaccttgcatgtaaatatctttgtcttcctaaaaacattattgagttaaatacaaatattttcaactttttttttttttttttttgcatgctacactggctttgaaagaaccaaagaaggagaggggttgttatgccctttctgtacaatacctgtcaccttgggaatgtgattctcctcaagtacaacacttctgggag

SEQ ID NO: 443135 - DNA, 201 bp, Homo sapiens
ccaccttagaaatctcagtggcagtaaaacagtggacttctacaactctgcccagtccctgatctgctggaacaaagacaatgcattacaacaaaaatctyagtctccagaaatgttggtgtcagaggcaggaataatgagacagggaaatgcagtccagggcatgtgttcccttagtaggcaagactttgctccccttgt

SEQ ID NO: 443136 - DNA, 201 bp, Homo sapiens
gaaaataaagaagatactggtgaagaatatttattaaaaatgttatcatctagagaaaaagcaggcaattaaatgtaggtatttacatttaattactacayctcccatgaagtggcttcataaaggaaacagagtcaaagtctttaaaatgaggcacaaatcagaggatttttgttctccttcaatcttcttgacaagaat

SEQ ID NO: 443137 - DNA, 201 bp, Homo sapiens
agtaaatcctcactgtgccatttacagtggcctgagagcaggctccagagtctaggaaactgcttcacccaactaagtgctataaagcagataacaatggraggccaacaggtattcagtcccgtaagaatagctgtatgtcatcttggagtgtgtctccagcaacaacatgggctttcttgtgaatgaaacattttatat

SEQ ID NO: 443138 - DNA, 201 bp, Homo sapiens
tccaaggaatggacaaattccaggccatagacctcagcagtttctaaggaagaacagaaaaccataggacataccataggcagtcaaagtgaagatcactrtagagaagtgtcagcttcctctgcgaatggcaccatgaggtcatgagctgggaaatactgtaaaactttctggattcaacctttcaagattaataacaat

SEQ ID NO: 443139 - DNA, 201 bp, Homo sapiens
ctgagaagtaaatcctcactgtgccatttacagtggcctgagagcaggctccagagtctaggaaactgcttcacccaactaagtgctataaagcagataayaatgggaggccaacaggtattcagtcccgtaagaatagctgtatgtcatcttggagtgtgtctccagcaacaacatgggctttcttgtgaatgaaacatt

SEQ ID NO: 443140 - DNA, 201 bp, Homo sapiens
ggggtgggattgcagaatcatatagtaactctgtttttagtttttttgaggaacctccaaactgagaacagagagatttgagggcaagtcaagagttcatwtattgaaaaggtaactccggaatgctcatttgatattcaggcagaattgtcaagttgcctcttagattcagaaggttggatcctaagggggagttgaaga

SEQ ID NO: 443141 - DNA, 201 bp, Homo sapiens
tgagagcttgttgggcactggaatcaacagcaaggaaaatgatgggacattaagacaaaaaggtatgaagaggaatagaataaaagatgatgttcacattytaacatgcaaaattcaagaaattaattcaggactccctaggacactaaagcaacatcaaattatatctttgcagtaaaacctctgaaagcagttcaaaat

SEQ ID NO: 443142 - DNA, 201 bp, Homo sapiens
ctgccaggctggatcataacattttggaagatttgggtaggagcaaagacattaccatttgttcccccacattgtatctaggttcagctctcaacaaatgyttatttttcagcccaaccggagaatgcatgagagaggaaagactgataccaggaaaaaggactagactgaactttccttcatgcttccacagaattcaag

SEQ ID NO: 443143 - DNA, 201 bp, Homo sapiens
ctccctaggacactaaagcaacatcaaattatatctttgcagtaaaacctctgaaagcagttcaaaatttggcattcaacatttacaggagcactaggaartgggagcctgaaagggctatctgtgaaaagcagttgaagagaaagccccaggtaagaaggtcagaaggtttcctattacactgctatatcagagccaacg

SEQ ID NO: 443144 - DNA, 201 bp, Homo sapiens
tgctacaggaattcatatcacagtgcaaacatatactgccaggctggatcataacattttggaagatttgggtaggagcaaagacattaccatttgttccsccacattgtatctaggttcagctctcaacaaatgtttatttttcagcccaaccggagaatgcatgagagaggaaagactgataccaggaaaaaggactag

SEQ ID NO: 443145 - DNA, 201 bp, Homo sapiens
cagtggtggataaggaactcttaatagagttcaaaacctcaatctgggaaaaaagggacctcagtcacaggtataccttttcatgctacaggaattcataycacagtgcaaacatatactgccaggctggatcataacattttggaagatttgggtaggagcaaagacattaccatttgttcccccacattgtatctaggt

SEQ ID NO: 443146 - DNA, 201 bp, Homo sapiens
gagtggtccaaaggacagtaaatatagagtagatgtcagtggtggataaggaactcttaatagagttcaaaacctcaatctgggaaaaaagggacctcagycacaggtataccttttcatgctacaggaattcatatcacagtgcaaacatatactgccaggctggatcataacattttggaagatttgggtaggagcaaa

SEQ ID NO: 443147 - DNA, 201 bp, Homo sapiens
aatgggagcctgaaagggctatctgtgaaaagcagttgaagagaaagccccaggtaagaaggtcagaaggtttcctattacactgctatatcagagccaaygcttatattagccctggaggtcacagtctagagacttttaaagagataaattccagcaaactctcccaggtaaaagcattctgcaactttatataactgc

SEQ ID NO: 443148 - DNA, 201 bp, Homo sapiens
gccgttggtgagaatggcaggcttagtggagggcgcttctctggagcatgacttaccccttgctgaggcaaataaaataagccaaatagtaactctttctygaggaaaagtacaaataagaaagttgtaggaaactaggatgggttagaggaagtaaacatgagattattacaggaagtaaagagagattattacaaatgt

SEQ ID NO: 443149 - DNA, 201 bp, Homo sapiens
tccagctaagacaggaacaagaggtgttctcaacatgccattgaggcttgaggaccatcgccaccaggtggcaccaaataggcagcaagaatggggtggawctgggccctggatctgactcaagtaggcaggctcattccaattatgtcctctttgttatgatgtcagcttgcatcttacacaatacagtattttagtccc

SEQ ID NO: 443150 - DNA, 201 bp, Homo sapiens
ccattaaccccactctttaaatccaaaatggtcaaatgtatttttcatttttaacccatcaaatatctgctgagcattagctacctgccaggaaacatgtwcaagcattggcggtaataggttcggttaggtggaatgtcaacaggcttcgttggtttatatctgttgcatatttctttttttttttctagtcatgtagct

SEQ ID NO: 443151 - DNA, 201 bp, Homo sapiens
gacttatgccaaagactgagattttcagaaagaagtagaagcacaacagtcagagaagtctacagattgtttctattgaggaccacatgaaggtctgtacygtaaaaatcatgcacatgtttacatataattaaaagcaaatagtaaaagggaattattaagtcctttgtgtcaacacaaaagtgccaagaaataggaaag

SEQ ID NO: 443152 - DNA, 201 bp, Homo sapiens
atgccaccatgcctgctaatttgtttataatgtgtagaaatgtggtcttgctatgttgcccaggctggtctcgaactcctggcctcaagtgaccccccccsccacttaagcctctcaaagcactgggattacaggcacaagccaccatgcccagcagtatttaagtctttctattgctataaacagataagtaaatgctat

SEQ ID NO: 443153 - DNA, 201 bp, Homo sapiens
cttctgcctctgagctctatgttctttataacataatatgctaggtattcaggtactgggggatggagaagaaagttagtggcaggtagcaagaggaaggycccccacagagaattagttaaacatgttgcagtgggatttgattctagttgatgatatctgcttcctcttcatctgctgaacttttacttttcctatgtc

SEQ ID NO: 443154 - DNA, 201 bp, Homo sapiens
gccaccatgcctgctaatttgtttataatgtgtagaaatgtggtcttgctatgttgcccaggctggtctcgaactcctggcctcaagtgaccccccccccmacttaagcctctcaaagcactgggattacaggcacaagccaccatgcccagcagtatttaagtctttctattgctataaacagataagtaaatgctattg

SEQ ID NO: 443155 - DNA, 201 bp, Homo sapiens
gaggcccaaagagaaaatggctcaaagtggagaagtccagatggggtcttctgcctctgagctctatgttctttataacataatatgctaggtattcaggyactgggggatggagaagaaagttagtggcaggtagcaagaggaaggccccccacagagaattagttaaacatgttgcagtgggatttgattctagttgat

SEQ ID NO: 443156 - DNA, 201 bp, Homo sapiens
ccagtaaacacctccacaaagtgttccctaattaatcagtcacaatcacctgtgttaaggaggaaaaaagtggaaaaggaccctgtccctgttgaagaagsgtggcagagggactggccaggaaggagaatccctggaataatggatatatatttccatccaaggggattcctggatggaaagccagataccctgataact

SEQ ID NO: 443157 - DNA, 201 bp, Homo sapiens
tcaagtcttgccatgaaatgagttcaactcaggataggttttgctgtcagatgagttatgaagaaactgggtttccaagctttatagaggtggtgactgcsgatacaagattgtggccctgatccacctgcctcagagactgatgcagtagcaaaatctgacccaccaccaccagtaaacacctccacaaagtgttcccta

SEQ ID NO: 443158 - DNA, 201 bp, Homo sapiens
acagagtcggggagtggcagggaatacaaggaagccaatgatgagtgcttggagagtctttgtctatggagggaaaagaaaagcaaatctttgctcccttmccccgctaatactgtagtttctttgttccttcccccaaccccacccccaattatggattgataatttcttatccaaaactcctggggttaaatatagttc

SEQ ID NO: 443159 - DNA, 201 bp, Homo sapiens
aggtataggtgtaagtacaggcaaagatattgataacagctagagaaatgtcctgtaacaataatatagatggtcaatggctttcaagtatgttataaatycatcccactttagatcctcaccaaaatcaaggaaatatttcactgccaaaccaaatattttaccaccatgatctctaatgcctccctcctgccctcagaa

SEQ ID NO: 443160 - DNA, 201 bp, Homo sapiens
gttgttgctatgatggattaagactcagatcaagaaaggtatggactctcaacagtgactggccagatatagcacaatgcaaaaacaaagtaattcagtcwacccttttaaccatgcccagcttacatacttcaccaattcattagtaaggagtaagtgaaaattagtatgtccatagtcttgttacatataattacataa

SEQ ID NO: 443161 - DNA, 201 bp, Homo sapiens
aggacttgataattcagagagttctcagcctatccagattgcaaaacacaataaaaggagacacactatcaggaaagcctgctctagagccacgttgtggytaaacaactttttgagagtgccttggaaggatcaaaagatcaaaatattcaatcacctagaggcctctttgtagagatcagtatgtgaatcatggattcc

SEQ ID NO: 443162 - DNA, 201 bp, Homo sapiens
atgttaatagtaaggaagactgcaagctctgtacacatcttcacaatttttctgtgactctgaaactgttctaaaataagaagctcattaaaaaagagagraagaggggaaatacatccttagcagataacgtaggacccatttattcctcagcagtccatttaggcagctgccataggcaggtgatatcttctggctggt

SEQ ID NO: 443163 - DNA, 201 bp, Homo sapiens
cctgtaatatagtttgcagtcagtgtgatgcctccagctttgtcctttttgcttaggattgccttggctatttggctgttttttggttccatataaatttyaaaatagttttctctagctctgtgaaggatgtcgttggtagtttgataggagtagcactgaatctataaactgctttgggcagtatgaccattttaatga

SEQ ID NO: 443164 - DNA, 201 bp, Homo sapiens
tgttcatatttatgcccaacaatgcttagccattctatgatagaataatgggccccaaaagatattcatattttaatccccagaacctgttaatatgtcawcttatatggcaaaaaaagattttgcagatgtgattaaattatgaatcttgagatgagaatacttagattacctgggtggttccaacataatcacaagatt

SEQ ID NO: 443165 - DNA, 201 bp, Homo sapiens
cagattttgtaagcaaaagattttgcaagcccttagccttggacctcagccaagtgtgttgttccaacaaactgccttcgctcccagaaaagtctgctcawcctgcaaatatcggaaaacagcagtgatattccctcttctgtttcaagccaagcttccctggctccttcctttatactcccatctccatctaaactatga

SEQ ID NO: 443166 - DNA, 201 bp, Homo sapiens
gtcttgccagctggaacaataaagggcagcaagcatggagggaagccatggcataacaggacaatgccaacagaggaaaatgagagaagccagcggaggcrtggacattccatgtgcatggaagggaagggagggaagtgagagcctaagaatcgtaaggtagttggtaaacagtgctaagcatgcttatggctgtctccc

SEQ ID NO: 443167 - DNA, 201 bp, Homo sapiens
aacctgtttaattttttaatctaataattgtctgtacagaataatttgatgaatctacgtttttaactttaaattttatgaaatcaacatacatatcaatyactacaaattaaaaatttagcatgcaaatcggaatgtgttttaagtgtaaaataccaattaattttgaaggccttgttttttaaaaaaagtaaaatatct

SEQ ID NO: 443168 - DNA, 201 bp, Homo sapiens
gtggcgttcaataggtagatccaaaaaataccctttgcggtgcagtttttaaaacgcccttcttggattttcacagtagctaaatgttagagacaaatttkaaacacaattgtttgggcctttgaaaaccagataatcataagtacatttcatcaggttcaaagaaagttcagaaacatgaaaatgtaatttcaattgcaa

SEQ ID NO: 443169 - DNA, 201 bp, Homo sapiens
agaccaatggaacagaatagagaacccagaaattaaagccaaatacttacagccaactaatcttcaacaaagcaaacaaaaatacaaagtagggaaagaayaccctattaaacaaatggtgctgggataattggcaagccccaggtcgaataatgaaactggatcctcgtctctctccttatacaaaaatcaactcaagat

SEQ ID NO: 443170 - DNA, 201 bp, Homo sapiens
tttaggctctctgtcactcctttcacactctcatgctccagattgctatactcaccctctgtgttttcccaaacaactaggatgtctacatctttgtgccrggtctccacgtttggcaaattttttaaatgaatgacactggcatagagatctagggtggtatgcaacatgttgttgaaggatttgtatgatggtggcagg

SEQ ID NO: 443171 - DNA, 201 bp, Homo sapiens
tagaattttagatttggaaggagctgaggagacatataggccagatgagatgttaatgaccctgtggcgttcaataggtagatccaaaaaataccctttgyggtgcagtttttaaaacgcccttcttggattttcacagtagctaaatgttagagacaaatttgaaacacaattgtttgggcctttgaaaaccagataatc

SEQ ID NO: 443172 - DNA, 201 bp, Homo sapiens
atagaccaatggaacagaatagagaacccagaaattaaagccaaatacttacagccaactaatcttcaacaaagcaaacaaaaatacaaagtagggaaagrataccctattaaacaaatggtgctgggataattggcaagccccaggtcgaataatgaaactggatcctcgtctctctccttatacaaaaatcaactcaag

SEQ ID NO: 443173 - DNA, 201 bp, Homo sapiens
aatggtttcccacagctagataaacttcaaagtaaagttgaagaattgatagtgaattgggggaggagggagagaagatgaaagtagaattttggaggaakgaaatttaaaaattgagatcctgatcgtcccttcaaaaacatctttctccctagaacagacagtaatcttggaaattaaaccataagctccatgataaaa

SEQ ID NO: 443174 - DNA, 201 bp, Homo sapiens
ctttaataagaccagttctccagaccactccagctccctggtcctcaattccactggaatcataaaaaaggtacagatggcccctttcctcccagcccttmtccatgcccaagtgacttagaagggcctctcacgctgggtttgctagtaaaatccatatatgacatgtatattcgctccccaactccctgcccgcaactc

SEQ ID NO: 443175 - DNA, 201 bp, Homo sapiens
gcagccccccaccctctagcaatgcccccacttcaatcacctctgagggatctcagagttaatcagaattctgcatgaaaatcactcccctgggccatgayctttccctcttcctggcaggattactgctgagggtgagatggattgctgatgctgggtaggaaatgaaggcccacaatgagcacctgtcagcaccaagca

SEQ ID NO: 443176 - DNA, 201 bp, Homo sapiens
ttaagaaaagcattcatttatcaagcctcagtttcctcatccataaaataggaacgttaatacctgcctccctgaagggattgctgaagcagagacttcaraactctagttctccatatcagcgataacacgggtggcttcatatcttctgctgtaggaaatttcatgttttgggttaccgtgtgtaaaaagatactggta

SEQ ID NO: 443177 - DNA, 201 bp, Homo sapiens
atgatccaaactttgctaatcatatatcctttctccaaactttaaatcttgtataagtgactccaggacagtagaaatgattgaaagtcactcatcacagsagcaatgtgcttgccgggatccccgctactaggtcattgctatggtttctgcttcctaacttctgggactctttggtctctatctagtatcaagcctggt

SEQ ID NO: 443178 - DNA, 201 bp, Homo sapiens
ataaaggctgtgtctatctacacataccatctcaatagtgcaattttgactgtgctgttggaaatgttttaatcagcaacagctgtcaactctcatctgayggtaatgcagtcactgagacaagatttggagggcttgtacccactgcgtgaatgttcaccgggacatcataagctatcaccacctcacctgtcctcccac

SEQ ID NO: 443179 - DNA, 201 bp, Homo sapiens
tagggatgccggcatattacaaaaagtgctggccaaaggctgggtgaattaaaagccatccatctcttagctgctgaggagctcagctccactgtcacttyaggaccaagatgctgggagttcactgtttccagttctttccactgttcagctgccattgcgagttatcaaatcagcctgcttacagggctcctgtctgca

SEQ ID NO: 443180 - DNA, 201 bp, Homo sapiens
cttttaataacaaaaggccatgtttttacatttagtgagtggtcaactagcattttatttgtttcttcatctgtacatttattatttgttttagattgtcrcatgctcttttttcctttcattttctttcatttgatcaaaagtttcggccttagcctctacatggattatggtactatttatagaaataggaaatactag

SEQ ID NO: 443181 - DNA, 201 bp, Homo sapiens
aaagacaaaatgcatcttctatgaggaatgaaatgaatatatcaggaaactcagcgtctattgtgcctgaatcccaaaagtcatgccaaagaacaaatacrtatttcttgctcatctttcacagatctttccaaagtaaacagtgaagggcaagcagagagtcaagaccagcctctgacccacctcatttgcaccagtaca

SEQ ID NO: 443182 - DNA, 201 bp, Homo sapiens
ggtattacatgtgaacaaaaaaatagatctaagcttcctaagagtcaaatgaaaatgagaaacatggttaccagatacacaacattataaaataagaacaygctgttctttctagcaagttccagcttttctttattttatactgaaacatgggaaatacttctcccttaggtctttagaataaaacaggagagtaccctg

SEQ ID NO: 443183 - DNA, 201 bp, Homo sapiens
gcttaacccctagatttggaagggcctgctgcttctattctaatccactgagctggctaaccccacaagccaaagggtatttaatctaaaagacaaaatgyatcttctatgaggaatgaaatgaatatatcaggaaactcagcgtctattgtgcctgaatcccaaaagtcatgccaaagaacaaatacatatttcttgctc

SEQ ID NO: 443184 - DNA, 201 bp, Homo sapiens
tatgcactttctgccagtttgttgcccatcccagaggcatgatgacaaagtggtgaggatagcctcaccaggcactaactccaacaactcattcatatggkcaactccagagcgattagcctagacaggtaactaggcttaacccctagatttggaagggcctgctgcttctattctaatccactgagctggctaacccca

SEQ ID NO: 443185 - DNA, 201 bp, Homo sapiens
catcccaaagcccaccactggaaaggaacaaagagttgtttgggcttaaaatgcagactgttactagcattcagaggttacagagtcggggagtggcaggsaatacaaggaagccaatgatgagtgcttggagagtctttgtctatggagggaaaagaaaagcaaatctttgctcccttaccccgctaatactgtagtttc

SEQ ID NO: 443186 - DNA, 201 bp, Homo sapiens
acttcacagcctccagaattgtgagaaacaccatgcttctaagaaccacaccatgttttctctataaatgcttgctgaatgatttaatgaattgtggtccygcttatagtgggcagaactgagtaagctctacctcaaggagaatgcagccataagttttcctctgttcttatggcctatccactagatgaaagatgtaaa

SEQ ID NO: 443187 - DNA, 201 bp, Homo sapiens
cattaggtacatatggagtaaggaaggggtttgcctaaacatactaagagaaagaatatgggaaagaatgcatgcaaaataaagctccaattagcatagcycatcatagaatagaaaatcacaaatcaaatcttatattttaatgttgaaaggaaaatatgggtaggagaatagtcaagccaacagtaacatcagcaacag

SEQ ID NO: 443188 - DNA, 201 bp, Homo sapiens
ggtgcaagcacttgcatcgggctcagcaggctgattctgtcccactctccgggtgcccggcaggagggactccaccgccacctcaatgcctaggagtcagmctggtcacatgactacttctgtgccaaaagatgaccaaggaattatgatttacagtcccattaggtacatatggagtaaggaaggggtttgcctaaacat

SEQ ID NO: 443189 - DNA, 201 bp, Homo sapiens
acctccaaatgaaacaaggaggcttcagccctgaatgagaactgaagaatttaagtaagtcaatcctttagagagcttcaccatatttctgtcatcatctrattacacccagagaaaaattctttcatgttgtgtaaagggcagacaagtaaccatcataatgaaaaagttattttggaaaaaaaaagcttttgtcaaatt

SEQ ID NO: 443190 - DNA, 201 bp, Homo sapiens
agcatgcccagcaattctattcctagatatataggtatatagaaatacatacatatggtcacccaaggacatatacaagaatagttattgcagcaaaatascccaaactggaaacaacccatatgtccaacaatgaaatggattaatacattttgggatatccacaaaataaaatactattccacagtgagaaataacaaa

SEQ ID NO: 443191 - DNA, 201 bp, Homo sapiens
ccagtctgaccctcagtcagtacttacgtcggcagaccttacagcactggccagcaatgtgcactgggagggagtctggggagcaattgagagggggacargacatccttcggcattccacggcaccactctgaggaaggaaggacatggaacataatctcagaagtatcctttgatagctcctgttgtggagatcattga

SEQ ID NO: 443192 - DNA, 201 bp, Homo sapiens
tgggaccatggacctttttctatatgaggtctgatagtatcctttttctactggggctacatcttaagatgatactttcccagaaaaaaaaaatacatttwtaacagcataaagaggcaagttgggaagcttccactgatgcttgaagctgagccagggtttgatgggaccaagtaggctcctagttttaacatgtttaat

SEQ ID NO: 443193 - DNA, 201 bp, Homo sapiens
ggttcaatccacagaaagagtacttttttatattaaaatataaaatattctcagcatgtaaaataaaatgtgggtattaaggggaacaaaatgagaaggtrggtttgcagatgccaggtttgtggatgtccagtaccatcaccatgtactcaattcaacaaaagcagttctacactaataaaaagtaatagcccttcactt

SEQ ID NO: 443194 - DNA, 201 bp, Homo sapiens
atccttgtttacagatgatataatcttatatttggaaaaacctaaaggatccacaaaaagattagaactgataaacaaattcagtaaacttgtaggatacaaaaaaaaaaacagcatttctgtacaccaacaatgaacgatctgaaaaagaaatcaagaaagtaatttcatttacatcagatacaaaaagaaaatacttag

SEQ ID NO: 443195 - DNA, 201 bp, Homo sapiens
aactgacatctcaccagaaacagtggaggccagaatatagtgagatgacatgcatattcaaagtgctgaaagaataaaactaacaaatttctcattcccagaaaaactatctttcaaaaatgaagaaaaaaagagccattttcagaggaacaaaattgacagaatttgttgctagtaaaggcacttgcaataactattaaa

SEQ ID NO: 443196 - DNA, 201 bp, Homo sapiens
tctcttgtagacagtgcatagctggatcatgttttgtttaaaaaacccattctgcccatctctatctcttgattggagagattaatctagttacattcaaygtaattactgctaagaagggacttatttctttcattctcttatttgtttcctatatgactttaattttttttgtccctgatattctatattactgtgttt

SEQ ID NO: 443197 - DNA, 201 bp, Homo sapiens
ctttttactttgtacagtatttcaaatacaacctgaatatctttaggaagagaacatgacccttagccacaggccccacagagctccctgtatagtattaygaaaaactgggaactaggtcccacagacaactgaatttgtaacctctttcagagtaaaggctcaacaccttataaaggaagccaacataccagacaccga

SEQ ID NO: 443198 - DNA, 201 bp, Homo sapiens
gaatatctgtgtcccaccaaaattcatattaaaacttaatccctagtgcattaagaggtggggcctttagacagtgattaaattatgaagtctttgccctygtgaatggattagtgtctttagaaaggaaactagctagttatttttctgcctttccatcccttccaccatttgaggacacagcattccacaggacacagt

SEQ ID NO: 443199 - DNA, 201 bp, Homo sapiens
atatccaggctgccttactatggtatctggtcagttcatttccctgtttaaacctctacaaaggccccacttctctgagagtaaagcacaaagctgttaastggcctatgggcaagagtaatacttaaaacaggtaacaaaaagtacatggcatcccacctatcaaaatggacactgaccataaatcatcagtacacccaa

SEQ ID NO: 443200 - DNA, 201 bp, Homo sapiens
aatgcaatccaaatcaaaataccagcaaaattttttaaagaaattgacaacttattttaaaatgtaaattaaaatgaaaagaacctagaagagaaaagcartcataaaaaaaaaaaagttggaattcttctactgcctgatttcagtatttaccataaaactgcagtaatagcaaagtgtggtattagcataaggataagc

SEQ ID NO: 443201 - DNA, 201 bp, Homo sapiens
cctttggaacagaaatatctataactggtatcttatgcctgtcccgccattgtattttggaagcagattacctgttttccagtttcataagaccacaataragagaaatttttcccccaaaatggattatacccactgtctcacccatatctgatttagattacttaatgagatgtagaatttttcagctgagattaaggg

SEQ ID NO: 443202 - DNA, 201 bp, Homo sapiens
aaaggcaacagtatccagcatacacgagggccagaaatagtacctatttccaccagtcaaactggaaaatcccatgacttatcagtcactgggtagagtaygctgaaggatcttgcctcagtgatggtaaataattagttctaccctaactactagcactagcacttctctgggcccatctaacaaacctttaaagtagga

SEQ ID NO: 443203 - DNA, 201 bp, Homo sapiens
tcacatatactaatttatcactcaaaaaacctgagactggtattatcttttttaaaaaacttaaaaactgagattaaggattaaacatacccaaaccagayttaaacttagatctaaatttgacagtgtatgcactttctgccagtttgttgcccatcccagaggcatgatgacaaagtggtgaggatagcctcaccaggc

SEQ ID NO: 443204 - DNA, 201 bp, Homo sapiens
ccttatcagtgagtaaatggaagtactttgagatggagagcttaagtagcttgatagttgctatcatacattaaccttaaagtacaggatttttgaagtcygcctatattaacagagctgtggtgaaacagtaaaatttctgagcatctccagatctgtactgtctaatatggtaacccctagccacaaaaagcaattgag

SEQ ID NO: 443205 - DNA, 201 bp, Homo sapiens
gcacacaacagggctagtactttcacaggtgccaaaactattttgtttcctatgcctctcttctgaaatgtgtcattgtcatcaacgttgggcctgatctsactgccagggcttgcactaggtatttcacatatactaatttatcactcaaaaaacctgagactggtattatcttttttaaaaaacttaaaaactgagatt

SEQ ID NO: 443206 - DNA, 201 bp, Homo sapiens
atccacaaaaagattagaactgataaacaaattcagtaaacttgtaggatacaaaaaaaaaaacagcatttctgtacaccaacaatgaacgatctgaaaamgaaatcaagaaagtaatttcatttacatcagatacaaaaagaaaatacttaggaattaaccaaaaaagtgaaagatctctatacagaaaacttgaaaaca

SEQ ID NO: 443207 - DNA, 201 bp, Homo sapiens
tgctgattttaatcttctgcccttccccagtcttctgctttttccactatcctaatctacttctgggttaaaatctgacatcaataatgcataaggcagaygatacacatgagggaaaaaaagccaaagctataccctattactttaaaatgtatagactcaagtttaacgagagctcaccaccaagtactgttcgagcac

SEQ ID NO: 443208 - DNA, 201 bp, Homo sapiens
gttgaagctagtcacataggaattagtatttcaaattatcagagaatgaaatatgcaattaagttttttcttttccaggattatgatcctgtttttcaaasccataagaaattcttagccttaccactgtggtctgcacttcagtcataaaatgctacaagcaactttgggacactcctcaggcacacaacagggctagta

SEQ ID NO: 443209 - DNA, 201 bp, Homo sapiens
ttaaaacaaaaaatgctgattttaatcttctgcccttccccagtcttctgctttttccactatcctaatctacttctgggttaaaatctgacatcaataaygcataaggcagatgatacacatgagggaaaaaaagccaaagctataccctattactttaaaatgtatagactcaagtttaacgagagctcaccaccaagt

SEQ ID NO: 443210 - DNA, 201 bp, Homo sapiens
ggaacaaatagaaaaaaaaatagcaaaatggtagatataaagccaaaaagaattagtgtaagagtgttcatttaagctttactcaaaatagccaaaaacamaaacaaaaaaaaaaaaaaaactaggattaacacaaatatccgtggtggataaacaaattgtgggtctattcatataattaaatactactcagcaataaaa

SEQ ID NO: 443211 - DNA, 201 bp, Homo sapiens
tctcttgcacgtgtacatacacgtgcgtgtgtacacacacacacacacacacacacatatgtgtaaatgtcttaatttcctcctcacttatgaaggttggytttttccagacagtgaattcttggttgacagttacttttttttcttttagcactttgaatatatcaggcccctacacaatggcctccaaagttttggtga

SEQ ID NO: 443212 - DNA, 201 bp, Homo sapiens
tagtgggagaaggagtagcttacagtaatgctgtggggtggggacgtgagggggtggtggagaagggcttacaacaatggcttcctgcctttgtatctctmcctgcaaaatcagaagcagcgatagtaatctgaacacaaatctctgatatctggaggacaggatctttattgcccagcatggctcctgcaagcttcatcc

SEQ ID NO: 443213 - DNA, 201 bp, Homo sapiens
gaagggcttacaacaatggcttcctgcctttgtatctctacctgcaaaatcagaagcagcgatagtaatctgaacacaaatctctgatatctggaggacasgatctttattgcccagcatggctcctgcaagcttcatccaatatgctccaggaacacatgcatgtgccacagagttgaggtgggtaggggatgggttgct

SEQ ID NO: 443214 - DNA, 201 bp, Homo sapiens
ttttgaggattcatttagccagtgtatgtaaagaatttgcatagtgcttgggacatggtgagcctctaaattaatggtgattaaaaagaagaaaagtcccyaggtgcagatactgttgagctggatgggatttggagaagatagacttgttttgttttgtttcattttgtgtttttcaaagaaaacaccatgggtaaagga

SEQ ID NO: 443215 - DNA, 201 bp, Homo sapiens
tatgagtgagaacatgtggtgtttggttttctccttctgtgttagtttgctgaagatgatggcttccagcttcatccatgtccctgcaaagaacatgatcrtgtccctttttatggctgtgtagtactccctggtgtatatgtaccacattttctttatcaaatagtctatcattgttgagaatttgggttagttccatgt

SEQ ID NO: 443216 - DNA, 201 bp, Homo sapiens
gttcccaaggccaagagaagtccgtgaacactcagtgagtgagcagacaacacaatctgcttttacatattggctcattttgcctttgtcatagccctacctttacctggtgtccctagaatactaccccacctaaagtcagagagaagcttgggaatttttctttaaattcacatataagaaatttacttcaggcagctc

SEQ ID NO: 443217 - DNA, 201 bp, Homo sapiens
aggattttaatgtgcaaataggtatattaaatatgccttgaatagtgcagacacccaacaagtgtttgaggaatgaaactccctcactattttcggtaccrccatggatgcttagataaatttcttccctatttccaaacagacgccctcatctgtaagtgctgcagttcccaaggccaagagaagtccgtgaacactcag

SEQ ID NO: 443218 - DNA, 201 bp, Homo sapiens
cacttcccatgtctgaattgatcaataattagattaaatggtcacattttccttcattaggaagcttgactcaacggcacatgtgcatcctttatcacacrtattccttgtctgtgtttcttttctctttctttccagtagactttaactgtccttttctttccacatgcatctgacagcctggaacaaagcccttcaaac

SEQ ID NO: 443219 - DNA, 201 bp, Homo sapiens
aaggccacatccaaaatagttaccggttgggtgaggagacttcagcagtaagaggctacagaggcacgctattaagaaaaggatctaaaaaggaggagtgrttagatatgaggccaggccagaatgaatctccctgttagggacacgtgcaaagggatggtcatacaggacctgccacagaccttactgacccatgaaagg

SEQ ID NO: 443220 - DNA, 201 bp, Homo sapiens
aggactcttaagttggaaattacgaaactagggttttgtggcctctttctgtcctgtggcttagaagaacaagcagggctcttcctctgcaatcccatttrgacagcatgtgggtggtaggtcacagtgggtcataggagtgttgcctgacaggccactttaattctagagaattgaagggggcaatgagctcttgaaagt

SEQ ID NO: 443221 - DNA, 201 bp, Homo sapiens
tggctagccccaaaataaatgctaccaggctttgcaattggtactgtagaaatgttcccagttaagtgaggtttctatttaaatgtatcgatattattaayaggctagcactgaaatgaaggttttcattctctgaacacacaattcacagctggacatcagatggtgaaatattaggagaaataaaaataaatgaaggaa

SEQ ID NO: 443222 - DNA, 201 bp, Homo sapiens
aaggacatacagagtatgaaagtttgaaggcagggtcaaagagctgccattgatatgcagagtaaataacaacaaccaccacaaatgtagactgagcactraaggccaagcaccacctaagaactgctccagagagaagaatgtcaggaaacagagtaaaactcttagaaggaagaaacaaaaaactgcatagcaagaaaa

SEQ ID NO: 443223 - DNA, 201 bp, Homo sapiens
taatgacagagtcacttcaatgcctagagttttggtcagcttctctacttggagagggcactgaaaggggagaattgttaaattaagtttagcctaaagcytcctccttgtaaattccacctgaaagtttctccatacatagtaaactgtaacctaactgggtggtgtaaacagactgtaacctactcatattgatcaccg

SEQ ID NO: 443224 - DNA, 201 bp, Homo sapiens
tttcctacatgaaaatcaaaatttacttttcttatgaccagtctttgggtccattttttctcctgacctacctgaaaaatgtatttgtgtttagagtctaygaatcattaactagcagcaacttcataagttttccctccaagatcttacataaaggacatgttatgccacaagccaaagtatgaaaaatattaagaaaac

SEQ ID NO: 443225 - DNA, 201 bp, Homo sapiens
tgtatgtgtgtgtgtataattatatatagtacacaagttccacagtaaactcattttttgagataagaaaaaatatctaaaacaatggggctaaaatgggyaccctttgttaggagttctacaggaactgatatcaaagtttagtgaaatcattatgtcagcagatgagaaaatgtagaaaacatgatgtttcagaatatt

SEQ ID NO: 443226 - DNA, 201 bp, Homo sapiens
gaaaagcatctagaaacaatgccaaggaaggcagaatcaaaggacacatagggtgtccctcctgcatgtcacttctgagctactgactcatcccaggcacrgctttatctaaacttctaaagtaaacattatatatccttatagtttcagccactgttattagcaaccaggagtgtcctatttgatctaaatgcactgtca

SEQ ID NO: 443227 - DNA, 201 bp, Homo sapiens
attcatgtcaaaatattttttaaaaaactgaattagagggaattcttccaaactcattctatgaggccagcattacactgacaaagccagaaaaggatacwcatatacaaaataacaaaagcaaaaacaataacataaactacagacccatatccctgatgaatatagacacaaaaattctcaacaaaatactgtcaaaga

SEQ ID NO: 443228 - DNA, 201 bp, Homo sapiens
aagctgaatatcttcatgtatgtttaattgttatattcccttagagtgaaatagttctgaggttttcatgattgaagtttagagggagatagcaatatccmaagttttcaaagttgaagttcgctgtaaaaaatctggattattgttcagcaaatatacaacaaagactttcccctttccctgttagaagtgcatctgtcc

SEQ ID NO: 443229 - DNA, 201 bp, Homo sapiens
tgagatgtttcaagttccgtatagaaattgtctttgttatttaatcttcaccacaaccctctaagatatttagaggctattcttataccattttacatagrgacaccaaaggattaaagtagataagtgctagggtcctttcctgcctttaaagagctgatgtccctctgaggttttagtgttcctggcaaaaaaatgctc

SEQ ID NO: 443230 - DNA, 201 bp, Homo sapiens
gttgttccctttgactagaacactcacctccaagttgttcacatagctcatagcatcacttcattctcttctccactcaaatgtcaactcctcggaaatgscttgcatgacctaggatttcttaaacaacaccactgccactctgtgcctttaccctgctttgtcttccctcacagcacttgtctctccatgatgttcaag

SEQ ID NO: 443231 - DNA, 201 bp, Homo sapiens
tctctccatgatgttcaagtgtcagcaacagcagcagcagcattgttaagtttatagagcacataacttttgccaaagattgtcttaagcactttatatgratcaggcatataatctcctaaactagcttaacagttggttattattattgtatgccacgttataataagaggctatagaggttctgtaagttaccccaag

SEQ ID NO: 443232 - DNA, 201 bp, Homo sapiens
tgatattgaagaaactgctctggaacatgaaaaactcatttgggaaaagacatcttctatctttaggaagatgatttattttacagcagtcagcgaagtcrtgctactgcagaggttatgcagcattaatattgcatgttatagtagacaaggcatagtccaatagcatgaaacataatgtcttgggatgatactaggacc

SEQ ID NO: 443233 - DNA, 201 bp, Homo sapiens
gatttcagtttatttccttctaagaagggattggacttaatggtgttcagtgttccttcaaactataacattatttcagtcattccctaaatcttcctttkcagaagaggcaaatagcccaaattaacaaagtgactaattggaatttttccagaaggctaaaccaagctacttctgggctcaatcacaggtaaatcccac

SEQ ID NO: 443234 - DNA, 201 bp, Homo sapiens
tattgcaagagacaaaaccaaaagctgttagacttaggaggcagttgaatagtccaagcgacaggtctctggggcctaggctgtggttgtggtgagctttscattcaacagtattaaaagaagaacaacaaagaggaagatgtgcttcctggaggaatttccttataaatgatgctaaccaaaaacacagtcaacatttct

SEQ ID NO: 443235 - DNA, 201 bp, Homo sapiens
ttacaaagaggcttactttgcaagtgcagttcctgcaatggtcaccatctacccaagagtcttgatctcgatagagcagtccactcacttgacaagtcttstcacaatgacagttttccaattgactaagtcttgtctctgcataatttagctgcaaacaagagttactgaatgtaatttctgtaattcaattgcatcatc

SEQ ID NO: 443236 - DNA, 201 bp, Homo sapiens
gggtgtgatggtgtatgcctgtgaagtcccagctacttgggaggcttaggcaggaggattgcttgggcccaggagttcaaggttacagtgagctatgatcrtaccactgctctccagcctgagtgacagagcgagactctaactctaaactaataataataataaataaaaatttaaataaagaataaattttgggatgaa

SEQ ID NO: 443237 - DNA, 201 bp, Homo sapiens
atcaactgcatgatcacggagaaggagcatgctatcaacggaaattcagccctgcaaagtcacatttcactagaccttgggcctggctggttaaatgtggstttaaacccaaccaacccacaggctgatacacgaagccagaaatcatagagaaaaccactctgtgctaacaagcttgagctaaaacgtagcaattccttg

SEQ ID NO: 443238 - DNA, 201 bp, Homo sapiens
aatgaggagatttttttcattaaataactggaaaagctggcaagatcaaaaagccactcaccaaaacagatttttctttcctcctgggaacacagctagaygaaatttaccaacccctcttgcagttagatagagccaccatctgagttctggccagtgaaatgtgaacagccctggcccataaaaacctcccactggtaa

SEQ ID NO: 443239 - DNA, 201 bp, Homo sapiens
ttcattaaataactggaaaagctggcaagatcaaaaagccactcaccaaaacagatttttctttcctcctgggaacacagctagacgaaatttaccaaccyctcttgcagttagatagagccaccatctgagttctggccagtgaaatgtgaacagccctggcccataaaaacctcccactggtaaccttccattcttttc

SEQ ID NO: 443240 - DNA, 201 bp, Homo sapiens
tgggctaatccatgtaaggcacttgaaacagttccttatacctgttaaagaggtcagtcaatggtggccactaataatgatgatgatattttcaacaatcrtgactaaagttcaaaataacttaatgctgttatcctcaacttcaagataaaaagtacaaattcacaaatctctaggtagttagtggaaatgccagggttc

SEQ ID NO: 443241 - DNA, 201 bp, Homo sapiens
tgcctactttctaagtagtaagacatgcaggaagttgttttctaggtagggagtattcccccaccagtctattaaatttgcagtttcatacactaaaaaawaaatttagcagcattgaatagtttctgatttgaaaaataataaatatgcacattagaatatttagaaaatataagtaaacacacacacacaaattaaaat

SEQ ID NO: 443242 - DNA, 201 bp, Homo sapiens
tgggaaacaaaaataatttgtgtgactcatttattgcaatattcgcttaatggccatagtctggaaccgaacccacaatatctccagggtatgcctatacyatggatggacatttgagctatttgcgggttttcactgagaaacaaagctgctaaaaaaccttcttaaacatgcttcctggggcatattctctagccacat

SEQ ID NO: 443243 - DNA, 201 bp, Homo sapiens
aaatttagcagcattgaatagtttctgatttgaaaaataataaatatgcacattagaatatttagaaaatataagtaaacacacacacacaaattaaaatsaaagtcatattgccgctacccagtgataaccccttagattcacataattttgaatcaaaatataagtcatttggagagataatagagctgtggctggctg

SEQ ID NO: 443244 - DNA, 201 bp, Homo sapiens
ttggatttcatactttgtttattgacatctcaaacccagcatgacccaagaagccttcaggtctccttttaaatatttttccagcaaggtagggggcagastttgttttcaggagaaaaattcacaacaggctctgcacccaaaacaatatttaggtcaaaacaaaccatgtgttcactttttattttcttgttgacgtgt

SEQ ID NO: 443245 - DNA, 201 bp, Homo sapiens
ataaacttagctgacaaagcaggaggatcagcaccaattttgaaagacattccagtgagtaaaatgccatcggactgtacttttaaacacattgggaaacmaaaataatttgtgtgactcatttattgcaatattcgcttaatggccatagtctggaaccgaacccacaatatctccagggtatgcctataccatggatgg

SEQ ID NO: 443246 - DNA, 201 bp, Homo sapiens
aagctctaactctactacttaacttcctaggtaagcttagggtgagtctcaattctctcttacaaagatgagaaatagcattgcagaatcagagctctaaytccactacttaactagctagatgacctcaggcaagtctctcaactttccttagtctcagtttcctcacatgtagaatgagaataacaatattttactgga

SEQ ID NO: 443247 - DNA, 201 bp, Homo sapiens
ggtgagaggttgagaaaaactctaagagtaacagggatcaaaaaataagaatcacaaagtagtaatggatagctgaaattcactctctgtgagggtggctragactaaaagtgatagaaccagcatcttgatatatgggacagagcttctgctactgtaaagttggcaagttctggctgggaagaaacttgtgaagaaggt

SEQ ID NO: 443248 - DNA, 201 bp, Homo sapiens
gaatattatataaacttagctgacaaagcaggaggatcagcaccaattttgaaagacattccagtgagtaaaatgccatcggactgtacttttaaacacaytgggaaacaaaaataatttgtgtgactcatttattgcaatattcgcttaatggccatagtctggaaccgaacccacaatatctccagggtatgcctatac

SEQ ID NO: 443249 - DNA, 201 bp, Homo sapiens
ggttttggagatagtttcagactcaaagtttgggttatatgcttattatattatgtgattgacacctagttatttatcttgagcttttctatttccaaatmtgcaaaatgcatctagtaaaactgtccccatatggttatcctaaggaatactattactagaacattacctggcctatagtagaggctcaataaatgtata

SEQ ID NO: 443250 - DNA, 201 bp, Homo sapiens
acttgtatattagttatctaatagcagtatctctcactttcagcagtgactcagtttggatgaaaaatatatgaccactctacacagtggtgaaggttacrtctcttggattaaaatattggctccagttcctcttggccagataaccctggacatgttccttaacctctcaaaccttcagtttccttgtctgcaaagcag

SEQ ID NO: 443251 - DNA, 201 bp, Homo sapiens
cagtacccagtcttaccttggactactcaacccctcagttttcaatttcggaggaaatcctatcggctctagcttcaaaacatatccaaaacctgaccgaytgtcaccccctcctctcttaacaccctgttctgaactactatcatctcgctcctggaaaatgacaactgcctcaaaactagtattccttctattcttgtt

SEQ ID NO: 443252 - DNA, 201 bp, Homo sapiens
cgcggtgactatcatagagtacatgctgaggaaatactggctgtcgacaacagcagcaacattgtcatcttttgtcaaccacgactgaatcagaacaagasaaatgagatggtttgttacagaaacaactggattcagtataaaaagatacaagtttaagtatgtgtgagcctcaattccctcttacaaagatgaaaacta

SEQ ID NO: 443253 - DNA, 201 bp, Homo sapiens
cactcacaacaaactaaaaaggataatctggagagaaaagtcacctagatttggggtttgtgcaggaaaaagagtgcacagaaacattttccgtgcaagcytcttcatcctcacatcctaaccccaatataccacctaaaagaggaatagctgagcagatgcagctataaatctgttttcttgtgtccaacagctctggct

SEQ ID NO: 443254 - DNA, 201 bp, Homo sapiens
ttagtaagcagggagagtttggtaatgttgccatacatcccagtttgcctgggacagaatcagttacttgtatattagttatctaatagcagtatctctcrctttcagcagtgactcagtttggatgaaaaatatatgaccactctacacagtggtgaaggttacatctcttggattaaaatattggctccagttcctctt

SEQ ID NO: 443255 - DNA, 201 bp, Homo sapiens
cttgggtaaatcgttaattctcttggatctttggttttatgggaataatagtaatacctagcttcgcggtgactatcatagagtacatgctgaggaaataytggctgtcgacaacagcagcaacattgtcatcttttgtcaaccacgactgaatcagaacaagacaaatgagatggtttgttacagaaacaactggattca

SEQ ID NO: 443256 - DNA, 201 bp, Homo sapiens
aatgcatcatgtgaattatgacacaaaaatgactaagaatagtgggtctaaagcagtctcaaaccaggatgaattatcacttcttcctcctccttccctcmttcacaatgtcccatactcccacatgtccttccataactgtagcagtttttcttttttccaccatcctcattgtctgtccctcacttctactgttcaaga

SEQ ID NO: 443257 - DNA, 201 bp, Homo sapiens
tctgatatttggtctttgttgtgtgtgtgtgctttttttttcatgaagacaaatataatattggattaggattgaaggcatgtcatttatttattaacagyataaacttgggtaaatcgttaattctcttggatctttggttttatgggaataatagtaatacctagcttcgcggtgactatcatagagtacatgctgagg

SEQ ID NO: 443258 - DNA, 201 bp, Homo sapiens
tagaagcctaatgcatcggaatctctcagtgccatgatgtgagaagtgatactttactcttcttttgagaaggagtctggctctgtcacccacgctggagygcagtggtgcaatcttggctcactgcaacctctgcctcctgggttcaagcaattctcctgtctcagcctcccaagtggctgggactacagtcacacgcca

SEQ ID NO: 443259 - DNA, 201 bp, Homo sapiens
gaaaaccctcaggtgtgggtccaggcacattagctggctggctctgcaactctacaacccttgctggcagaaacactcacaacaaactaaaaaggataatytggagagaaaagtcacctagatttggggtttgtgcaggaaaaagagtgcacagaaacattttccgtgcaagcctcttcatcctcacatcctaaccccaat

SEQ ID NO: 443260 - DNA, 201 bp, Homo sapiens
tgttgaaaggaaaatatgggtaggagaatagtcaagccaacagtaacatcagcaacagaaatgtataccctggagttctgcataggtattacatgtgaacmaaaaaatagatctaagcttcctaagagtcaaatgaaaatgagaaacatggttaccagatacacaacattataaaataagaacatgctgttctttctagca

SEQ ID NO: 443261 - DNA, 201 bp, Homo sapiens
agacagagtagctagacaggtgttacatttatttgcaataccaatagcttaatatctttggccttccatgtacttgcttatggattcacattatttgctgstaaacacaaaggaagactaatatctgtggaaatgaatgaaagaggtgaacatataacaagtatctgagatgtttcaagttccgtatagaaattgtctttg

SEQ ID NO: 443262 - DNA, 201 bp, Homo sapiens
ctaggtgtcccaaagaagccagctgatggccacaacttgaagcctgttagttcaaatgtgtgaaatttgctgtcagaaaagtgacaccctcagactaatasactctaatgagtagggatgcgacatggcattcctgagggagagttagagacaccattacacaagccctttaaagagaagagaaattatttccactctaat

SEQ ID NO: 443263 - DNA, 201 bp, Homo sapiens
atgttgaaaggaaaatatgggtaggagaatagtcaagccaacagtaacatcagcaacagaaatgtataccctggagttctgcataggtattacatgtgaayaaaaaaatagatctaagcttcctaagagtcaaatgaaaatgagaaacatggttaccagatacacaacattataaaataagaacatgctgttctttctagc

SEQ ID NO: 443264 - DNA, 201 bp, Homo sapiens
actgcctccttcttagcacacgaattcttcagcttccaagacatctcaccagtgaattaataaatgttttcatacccattttttccagacactaacaacgytccttcagtaggtagtacatcttcactatgatgttatattaatgccttggctaaactgattgataagcctgcactaaatttattttgacattgtttcttt

SEQ ID NO: 443265 - DNA, 201 bp, Homo sapiens
tctaggtgtcccaaagaagccagctgatggccacaacttgaagcctgttagttcaaatgtgtgaaatttgctgtcagaaaagtgacaccctcagactaatmgactctaatgagtagggatgcgacatggcattcctgagggagagttagagacaccattacacaagccctttaaagagaagagaaattatttccactctaa

SEQ ID NO: 443266 - DNA, 201 bp, Homo sapiens
ttaagtcttctctcatttaatgtactattaagtgagtagtgcaatattgcaaatataccttcatttgtagaagactatgaggcttaatgacttgttatgcracaaagttgagataagcttaataactacattttcaatagcatgcatttcattgatttattcaacatgcacttgaatggaccaagtgtgcaatatgttttt

SEQ ID NO: 443267 - DNA, 201 bp, Homo sapiens
tcaaatttgcatacaaatggctaacagatatatgaaaaaaaaaagagcttgacatcactaatcatcagggaaatacaaattaaaactacaatgagatacartggatactctcaaaaaattaaaagatagcaagtgctggcaaggatgtggagaaaaaggaatcctcacacactactggtgggaatgcaaattagtacagcc

SEQ ID NO: 443268 - DNA, 201 bp, Homo sapiens
ccctgatgcagctgggagaatggatgcttgcagttcgcttataagccaggtatgttaaaccctaactataaacacataaacagcattcagttgccaatacmtagtatcatgtttcatctatttttttcctgaatttaatggcccatgaaaggaacatttttacattcctgttctgttatttaacaaccaacaaacatctct

SEQ ID NO: 443269 - DNA, 201 bp, Homo sapiens
ctccagagtggttgtgagcatcatgaaaggtgataaggtaatatatactaaccacccaacctatagctggtgagaaataaaactcagttacctttcacgtsactctctgactttttgctataaaaaagtagcctaaaaattgaactcaatatccatggaatgttcatccattaatgccacgatattatatttatattaact

SEQ ID NO: 443270 - DNA, 201 bp, Homo sapiens
tggagccagtcttttgtaataaaaaatgacatcaatgagaaatgaatcaaagaatcccaaacagcattagcaccagcagttttgtctcatattctgctggktctcaatagagaagtggggtcaggaatggtggctatgctgatttcaacaaacaactaaaaggtctgccagtggcgtaatcaggattcacattgtttttga

SEQ ID NO: 443271 - DNA, 201 bp, Homo sapiens
ggcttctctgtcatctgaggccccagcttttggctgggtgatgtaggtgatgtgctgtttggactagcaccataattgactctttcaatggatactgctcyacagcaatactgtgctccgtaatacctgtgaatattcattttcttagccccttgtcctgttgcctctcaaaccttatcttccctgtgggctgctgctcat

SEQ ID NO: 443272 - DNA, 201 bp, Homo sapiens
tcaatagtttgttttgtagttctggaggcttatggtgtaactctccctttcctgaactctatcacaatgtagatgtcaaacctgcaacattctgcctttgytgatttctagtggtcttacgaattagattagtcttgctgaacactgtaggcgttttcaagaagaggacatatcatatttctttttatcagtcagtgctca

SEQ ID NO: 443273 - DNA, 201 bp, Homo sapiens
gtgtatgatattacattgttctttatgcttctaagtaactttttatcacagaaagaaaaagtttatgagactctatctaggtagactccaaattcaagaaytaagatcatgagtagggcccctattgctatactttcctcagacactactcctaatgcatcagaaactacttaagaccaacctgttgaaaatgtcattaaa

SEQ ID NO: 443274 - DNA, 201 bp, Homo sapiens
ttccacacctgacagatggcatgatgtgtatgatattacattgttctttatgcttctaagtaactttttatcacagaaagaaaaagtttatgagactctayctaggtagactccaaattcaagaactaagatcatgagtagggcccctattgctatactttcctcagacactactcctaatgcatcagaaactacttaaga

SEQ ID NO: 443275 - DNA, 201 bp, Homo sapiens
tgtcatcttcattctgggatgtcagctaaaggagaagccctgacctggaacattgccagtttttgtttcagagagaaaagagaacgatgtggaattctgcraaagctccttgaggttctactctgaaactacatgtcacgtccactcacatttcattagccaaaactgatgtcggcaaaatcgggagggcaaccaacattt

SEQ ID NO: 443276 - DNA, 201 bp, Homo sapiens
gagcacgttggaaatggatgggctcagatattatggtactatacatacagaccaggtcgaactaactcccactcctctggcatgttaaggtaatagatatrtgcaatgctcaccactagcaggttgcagtactaagcctgaaaaaacggtgctctcttaagacggaggagttgctttctctagagcagaaatgtgggtcat

SEQ ID NO: 443277 - DNA, 201 bp, Homo sapiens
aacacccgctgatttgcacaccaaaaggaagcatcaactgtaatctcagctttgaaagcaaccgcagagtttgttcttcttccagacgataagatataaayaaaagattatgtaatacaggttaatttaattatataagaacagcaaaatgacattgcctaatgtatatttatactaggttgtctcctaaataatttgtct

SEQ ID NO: 443278 - DNA, 201 bp, Homo sapiens
catgagcacgttggaaatggatgggctcagatattatggtactatacatacagaccaggtcgaactaactcccactcctctggcatgttaaggtaatagakatatgcaatgctcaccactagcaggttgcagtactaagcctgaaaaaacggtgctctcttaagacggaggagttgctttctctagagcagaaatgtgggt

SEQ ID NO: 443279 - DNA, 201 bp, Homo sapiens
ccacttagaggaaagtgaccaggaatttgcagcattcattgaagacaactacccaaatcatcatggtgcaaggtattattaatgaagacagcaggaataaktggaatcagaacaaacagaaaaatagcccagccatcactttgcttattaaagcttttgcaaactgatggaagggagccatgagcacgttggaaatggatg

SEQ ID NO: 443280 - DNA, 201 bp, Homo sapiens
ctaattccttatctatgctgacctaaaattgtaaaataagagttgcccaaatgtcttctatctaagatacacaaattatgttccctcaggacccataaagmgagtaaatataaacaggcaaaatccctcatttagactctgatatttggtctttgttgtgtgtgtgtgctttttttttcatgaagacaaatataatattgg

SEQ ID NO: 443281 - DNA, 201 bp, Homo sapiens
agccagaccacttagaggaaagtgaccaggaatttgcagcattcattgaagacaactacccaaatcatcatggtgcaaggtattattaatgaagacagcargaataattggaatcagaacaaacagaaaaatagcccagccatcactttgcttattaaagcttttgcaaactgatggaagggagccatgagcacgttggaa

SEQ ID NO: 443282 - DNA, 201 bp, Homo sapiens
cccaaagtaggctctgcagaatccactctataggaaaagatggctctcccatataggcaggttttgcatcccatgaattctgtatttttgacttgtgtctkgttgaaaaaaaatccatgtataagtcagcatgcaaagtttaaacccgtgttgttcgagggtcaactatgagatagagaatagaaagaatttaccattact

SEQ ID NO: 443283 - DNA, 201 bp, Homo sapiens
agcttccacaaccaattggtaaagtaaggcctttattttggccttgttgaaaagtcctgtttagatcatgaaagaaaccaaaacacacaagaattgggtgwctctccaatgttacccggctgctaaatgatagagtcaggatccatcaaaatcttcttgtccctatttcaatgttttttgctttgttctttactacatcac

SEQ ID NO: 443284 - DNA, 201 bp, Homo sapiens
agagggttcctacaaggtactggtctctagtagtaataagatatatcctcttgataactagaggtctttagtcaaagccaaaaagttaagcagggattaayaatatatagtcattcctgggtatatgcagggaattggttctaggcccctgtgtatacccaaatctacacacactcaaatcccaaagtaggctctgcagaa

SEQ ID NO: 443285 - DNA, 201 bp, Homo sapiens
acttcttcattgcgaagacagaaactggtcaatgaggtgaagtccattagtaaagcctcacaagacagtgacagcagtagcctagctctgaatccaaaagmctccttcttcccaggaaatgtcataatttttgtgcatggataatgtgaatcttgcaactaaccaaggttcttcttctgctccataaaaaaagtacagcac

SEQ ID NO: 443286 - DNA, 201 bp, Homo sapiens
atgacaagccaactaccaaagggaatgccaccctggaaatataaaactatgtacttactgagattgcaagagtcttaaaagaatctgtttttgctgcctcraacatctgatgagttttcctgggaatgtgtattaaaaataaagcccctggagcttaggaagttattaggttttcccagccacatgtcctggagggtactc

SEQ ID NO: 443287 - DNA, 201 bp, Homo sapiens
ttcctcaaaatagtagattttctctaccattttgttctcaccacaaagaagggatacgtatgcgagatgatagatatgttaattagcctgatttgatcatyccataatgtatacatgtattgagacatcattgtaatccacaaatatacacaattattttttgtaaattaaaaataaaaattaaaaaaactgaagaactcg

SEQ ID NO: 443288 - DNA, 201 bp, Homo sapiens
cttcattgcgaagacagaaactggtcaatgaggtgaagtccattagtaaagcctcacaagacagtgacagcagtagcctagctctgaatccaaaagactcyttcttcccaggaaatgtcataatttttgtgcatggataatgtgaatcttgcaactaaccaaggttcttcttctgctccataaaaaaagtacagcacaatt

SEQ ID NO: 443289 - DNA, 201 bp, Homo sapiens
ggcattctaggtgtcccaaagaagccagctgatggccacaacttgaagcctgttagttcaaatgtgtgaaatttgctgtcagaaaagtgacaccctcagaytaatagactctaatgagtagggatgcgacatggcattcctgagggagagttagagacaccattacacaagccctttaaagagaagagaaattatttccac

SEQ ID NO: 443290 - DNA, 201 bp, Homo sapiens
caaactcatagatgtagggagtaaaacggtggttaccaggggctgaaagatggcagggggtagatagaaaaaggggagatattggtcaaaatgtacaaagyttcagttagacaaaaaaatcagttctggtcatctattgcatagcatggcgactatagttcataataatgtgtatttctaaattcctcaaaatagtagatt

SEQ ID NO: 443291 - DNA, 201 bp, Homo sapiens
atccaaaagactccttcttcccaggaaatgtcataatttttgtgcatggataatgtgaatcttgcaactaaccaaggttcttcttctgctccataaaaaawgtacagcacaatttcactaattatataagacttgtggccaagaaattcagataaaaattctcccctgctttgacttttggccagtttatctaaactagca

SEQ ID NO: 443292 - DNA, 201 bp, Homo sapiens
aacagcatcagacctggaaagcagatattagcaaaagtacatggaaggattagtcagtcaactgctttgctgaggatataccaggactaatcacagcctasggctgtttacctccaatgataataaaattccattctgggtaatacaggcattctaggtgtcccaaagaagccagctgatggccacaacttgaagcctgtt

SEQ ID NO: 443293 - DNA, 201 bp, Homo sapiens
ggcaacaaaagccaaagttgacaaatgggatctaattaaactaaattgcttctgcacagcaaaagaaactatcatcagggtgaacaggcaacctacagaaygggagaaaatttttgcaatctacccatttgatgaggggctaatatctagaatctataaagaacttcaacaaatttacaagaaaaaaaatcaaaaagtgag

SEQ ID NO: 443294 - DNA, 201 bp, Homo sapiens
attatgtcaaagacatgtctacacttgcatgtgcatttcagtattattcactgtttattatttccaagctatggaaacaaccagggtgcccatcaacagaygactagataaagaaaatgtggtacatatacacaatagaatactcttcggccttaaacaagtaagaaatgttgtcatttgtgacaacatggatgaagctag

SEQ ID NO: 443295 - DNA, 201 bp, Homo sapiens
aataaaaaagttagctgggcatggtggtgtgtgcctgtagcccaagctactggggaggctgaaacaggaagatcccttgagcctggggggtcgaggctgcrgtgagctgtgactgcaccgatggactgcctgggcaacagagtgagaccctgtctcaaaaaaaaaaaaaaaaagtcaaatattcaaccagtgggttacaca

SEQ ID NO: 443296 - DNA, 201 bp, Homo sapiens
tacaagaaatttgaatcagcatttccccagcctctttcttgcttgtacttcagccaaaaacagcatcagacctggaaagcagatattagcaaaagtacatkgaaggattagtcagtcaactgctttgctgaggatataccaggactaatcacagcctagggctgtttacctccaatgataataaaattccattctgggtaa

SEQ ID NO: 443297 - DNA, 201 bp, Homo sapiens
taaaatacagtagatatgtttctgatctcctaatgtatctcagcagcatttgacagaattaactcctccttcttaaaatcccttcctgctgctgctttctygctaaaggcaccttctatcaccctgggcacaatgtatccatcctctttgttggcttctccatctgcaccctaactctaaacttcaagcatcctcaggatt

SEQ ID NO: 443298 - DNA, 201 bp, Homo sapiens
actaccattattattattgccatctttactatttattgagaggccaatatgtgccagacatgttgccaactgcttaagatgcattatccattaattttctyttgtaatatttactgagtgtatgctatgggcactggagttactgcaatgtttaaaccagaggtgatcccttctccaaagagagtatgcaattctggctta

SEQ ID NO: 443299 - DNA, 201 bp, Homo sapiens
agagtgttctgggatattctacagttaatttcatctgttcaattagattacaaattccttgaagatgaggatcaagtctcattaaatatttagtgattagyagcctcaggtgaggccaagaaaacagaaacattgtggaaaaagcaaagaaatccctattagaaaaacagggccataaaaatctagtagtacttcttttac

SEQ ID NO: 443300 - DNA, 201 bp, Homo sapiens
tatttaaatgtgagacctaaattaataaaactactagaagaaaacatagggaaaatgctttaggacattgatatgggcagagattttagggtaagacttcraaagtacaggcaacaaaactaaaaataggtgagtggaattatattaaactaaagtgcttctgcacagggaaagaaacaacagagtatagagacaacctac

SEQ ID NO: 443301 - DNA, 201 bp, Homo sapiens
cacttgctgcaaagattcttctgattgattgagtccgaccctaagccacctctaatctacctgttttctgactttataaatcaatcctatgtggggtacastctcaaatcctttcttaaactgttatgaaattgctctataaccagaggagcactcttagaaatatgcttacaatcctcccgtttttcaatatgaatgtgt

SEQ ID NO: 443302 - DNA, 201 bp, Homo sapiens
gaaacacaaacacataactctctttttaaacaaggagaaagaaatgcatttctcagtgaagagtcagtgttttcaagaccttactctataacatcagttckctttcctcttccttctgggcctcacctattctctcttccctcttctgttacttgtggaatgaagagagaacaatcatattttgagtgatctctgttctct

SEQ ID NO: 443303 - DNA, 201 bp, Homo sapiens
gtctataatgtaccatgcactattttaggtgctagagatagtgaataaaataaaattgctgccctcatgcagtttatattccaaagggtcagataataaamctttaaacagaaaaacacacataagaaaacaacacaatttcaaagaataagtgctacaaagaaaatacattaaatcaaattcaaatggtatagggggtaa

SEQ ID NO: 443304 - DNA, 201 bp, Homo sapiens
tttaccattttacaaatgagaaaattgattctcagagagtttaaatcctttgtccagaggacatggcagtaaatgctagtgcaggacctgagctctagaaytgagttccaaactgctgcacagtgcatcctatgaatcaggaacttgcagcaaatatgtcctgaggttctactctgctagatgctggcaatatcaagatga

SEQ ID NO: 443305 - DNA, 201 bp, Homo sapiens
atcccctgcccacaaggaacccattgtggtgaatgatgtgtcactcagcaatcatgacatcatgattatgttaggtggaattataatgagtagatgatatmaaatgaaacttagtagagaaaatctaagtctgcctggggagtcaaggaaaatttcaaggagatagcttctaaatcgagccatgaatatcatgtaagagtt

SEQ ID NO: 443306 - DNA, 201 bp, Homo sapiens
gtaactgaattggggatctggaaggaactctaaagagaagagcttaaaaatgaaatacaaccaggtaaagacatgttgatatccccatttatttatcacastgattttgtgggtggagaaaataataccgaggcttcagaggctttctttgaagcaaggcatttcttttgcaaaaaattgttgaagacacacagtaagaga

SEQ ID NO: 443307 - DNA, 201 bp, Homo sapiens
tcccctgctttgacttttggccagtttatctaaactagcatgggtttattcttcagataaaggaaaagactctaatcttcttctaatcttcttccccccayttcccaaaatacaggaaactgaaaaattagagattcaaaagggcccaacattctctgagagatgccctcagtccctcatctgtgggttcttatggcacca

SEQ ID NO: 443308 - DNA, 201 bp, Homo sapiens
aatactctttatgatactgtaatggtggattcaggttattatatatttgtccaaacccaaaaaatatacaacaccacgagtgaaccctaaatgtatattayggactttgtgtaattataacatgtcagtgaaggtccatcaattgtaacaaatgttccactcaggtgagggatattgataacggataacagcaggaggtat

SEQ ID NO: 443309 - DNA, 201 bp, Homo sapiens
ttgcagagatcatgagctataaaaacacagtggtgttggctaactggttggtatattagaacaatcactactttccctttgtgtcatactgatttttttttaattgggcctattatctctgatttgaacttataaaaatccagtgaggttttagggcagtgaaaatactctttatgatactgtaatggtggattcaggtta

SEQ ID NO: 443310 - DNA, 201 bp, Homo sapiens
ttttcccacgtatacattcagggagttggaccagaaaccctttagccaaccatcacttctaaagttcttgacacattcaggtattttgtccacatcatacmagcctgcttctggagcagcttctcttgggccaccccctctttttgcaagaggagcttgcagatgttccagatgcctttcccaagatacaggtccaggaaa

SEQ ID NO: 443311 - DNA, 201 bp, Homo sapiens
aggaggacacgaggtttcttataaagatgtgcaagctgtaactggaacacatttcaaggtggctttttccaacttaaaattggaaagaaattaacaagatmtatctatgagatgccaaatgtcagtgggaagaatccatagagcactaaagtttatccatggaatcacattcttctaccttcatttattcatcagttcatt

SEQ ID NO: 443312 - DNA, 201 bp, Homo sapiens
taccaaatatgctttgttttttcatttctaaaaaaaagtcacagatttattatgttcagctccttactaaatgagctgaagggagatttataaagcaaatraatggaaagatttacagtttcttcctcacagcagctaaaaattatggaaaagctcattgacctttcaagagaagaacttggttcagtcgaccaaaaacta

SEQ ID NO: 443313 - DNA, 201 bp, Homo sapiens
aaatctaagattaagctgagactacaaaatatttctgacattcctcaagaaaatgaaccctggtattctcaagaaaagcagaatgcaaaaagcttgaagcrtatgttgtattttcataagtttactgtgcagatgcacactggtaactatttctgaagactgcaactccacattttttttctcttcacccaggtagtgcag

SEQ ID NO: 443314 - DNA, 201 bp, Homo sapiens
ctgatacaatcaacaagttatataatatatcacaatgctttaagttgctacttactgtgatttagatttggacactgtgttatatatccattcggcataamgatgatcttcccatcttggatgatccccttgataatagaagagacaggtggcaatcaagattacagtcaccagctcaaatgtcccctatgcaatcacata

SEQ ID NO: 443315 - DNA, 201 bp, Homo sapiens
ctcgggtgatgagtgcaccaaaaatctcacaaatcaccactaaagaatttatctatgtaacaaaaaaccacctgtgccccaaaaactagtgaaattttttwaaaaatataaaaaataaacaccaaatcatagaatttaaaaaaaagaaaatgtggcctatatacacaatgaaatactattcagccaaaaaaagaaaatgaa

SEQ ID NO: 443316 - DNA, 201 bp, Homo sapiens
aagaaaagtttaatttatagttttttaaggttttagcagttcaggtttccttttatgatagcatggttaccaaatatgctttgttttttcatttctaaaaraaagtcacagatttattatgttcagctccttactaaatgagctgaagggagatttataaagcaaataaatggaaagatttacagtttcttcctcacagca

SEQ ID NO: 443317 - DNA, 201 bp, Homo sapiens
tcccatctataagatgcaatcacatccatctcacagagctataaagatcaagtgaatgtatcaatcatctctagagaaacataagacactaacctcaactyactaatgattaagcaaaaattctacattttccttagcgtggtgttatgcttctgaggctaaaatgtcaaagaatacaagaaatttgaatcagcatttccc

SEQ ID NO: 443318 - DNA, 201 bp, Homo sapiens
caaaactccacctcaaataaataaataaataaataaataaataaataaataaataaaaaggatagaggaggagggtatacaatggtaataccactgttctytgcgttcctaagtgcttgaagtttgccctgtgctttaagctactgctgtttccttaatcacctccttttatcattcctcttggatttataaggctcatat

SEQ ID NO: 443319 - DNA, 201 bp, Homo sapiens
aatcccagcactttgggaggctgagacaggaggatagcttggagtttgagaccagagtgaggaagatggtgatgtgccatatctaccaaaaaaaaaaaaaatctgggtatggtggcatacaactgtggtcataacttcacaggaggatcacttgagcccaggaggtcaaggttgcagggaaccatgttcatgccactgcac

SEQ ID NO: 443320 - DNA, 201 bp, Homo sapiens
tgctggtaagaacctccagtacaatgttgaatagaaacactgataatagtcattcttgtgtggttcctgattttaacaggaattctcttaatatttaaacygtaagtatgatatttgatgtatgtttacttcatgtacttttatcaatttaatgaagtttccttctatttctagtttgctaagaatttttaatgagtcagt

SEQ ID NO: 443321 - DNA, 201 bp, Homo sapiens
ctctcccttatacggccaacagcttccctctctccctctggatgcatgctgtatgcacagcatcagcagggcagttataccttttacaaacaataatagcratgagccttcccatgttatggctgtgattatataacaagtggagttatgcacctgtactccaaactcactgagtcactctggcccagatgtctgcctcag

SEQ ID NO: 443322 - DNA, 201 bp, Homo sapiens
aatgggtgcacactgttggtaggaatgtaaattagtacagccattataaaaagacagtatggaggtccctccaaaaactaagaataaaattaccatgtgaytcagcaatctcactactgagcatatacccaaaggaattgaaatcattatgtcaaagacatgtctacacttgcatgtgcatttcagtattattcactgttt

SEQ ID NO: 443323 - DNA, 201 bp, Homo sapiens
gaaggaacaattaactgaatatcaaagactaaaagttttccagtgagattctttcttttaatattctatttcttttgcacttgagatctcaaatttgattktcaagatcacttagtttaatcaagcaagatttctttctgcaaatacattatgtgtgcaatggatgtgcatatgggtacaagctggaataaaattgagtct

SEQ ID NO: 443324 - DNA, 201 bp, Homo sapiens
taaaatatttaattgcagtttttgttattgctgttgcagctgccactgtgctgcttttgctcagcaatgcaattgatcttatctttggctttacatctagyactctttctgaactctcttgctaattctaataatttggtgatcattttttatatataggcaatatataagttaataactacttttttaattataatcctt

SEQ ID NO: 443325 - DNA, 201 bp, Homo sapiens
tattttctttaaggacttgtgcatttttttatcttgtctaagaacttctctatcctgactgagatcgtgaagatatgttcttatgttgtcttctaaacctwtcaacattgagctttcagttaggtatttaattcaattgtacttgtaagtgatttttatgtatggggtccaggtatatatttgaagcttttccttatactg

SEQ ID NO: 443326 - DNA, 201 bp, Homo sapiens
ttctatttggaaatttggtttaaggtcaatcccagctttgtggtgctgggactggaactgtaaacaccacatctttattttgccagccgttccctctcaggctctgcccatatgggtgaaagaggagaactgcaaagcttcagaatgaagacaggacttcatccttcttgtttgttcccttttagcttcttcttgtaagta

SEQ ID NO: 443327 - DNA, 201 bp, Homo sapiens
cagtggatttctattacttgcaaccaaaggaatcctaactaatgcatatgctttacacatagctctgtattttgggtaattcttttcaagcctctttcacrcgagataataccattttgtaaatgttccgttgggttggaagaatttgttaaaatctttccccaacactaaatggtgaaatccctggggacttgtcttatt

SEQ ID NO: 443328 - DNA, 201 bp, Homo sapiens
ccagcctgggtgacagagcgagactctgtctcaaaaaaaaaaaaaaaaaatagatttaatttgcctgaatcttggacatgtcactttacctctctgggccmtagtttcctcaactataaaataccctaaggaaaaaaaatccctaaattatgagagtttataggatactaaggaaacaatatatattaaagcacttcataa

SEQ ID NO: 443329 - DNA, 201 bp, Homo sapiens
accgcatattctcactcataggtgggaatcgaacaatgagaacacatggacacaggaaggggaacatcgcacactggggcctgctgtggggttgggggagkggggagggatagcatttggagatatacctaatgttaaataacaagttactgggtgcagcacaccaacatggcacatgtatacatatgtaactagcctgca

SEQ ID NO: 443330 - DNA, 201 bp, Homo sapiens
cctaatgttaaataacaagttactgggtgcagcacaccaacatggcacatgtatacatatgtaactagcctgcacgttgtgcacatgtactctaaaacttraagtataattaaaaaaaagaaagaaagaaagaaagaaacattgtactttgctatactgtctctatctggaataatacctaacttggaagaacaatatata

SEQ ID NO: 443331 - DNA, 201 bp, Homo sapiens
tccagtgataaaaaagctttgaaaatagcgatgattgttgcacaacattgtgaatgtaattaatgccactgaactgtacacttaaaatggctaaaatggasgccgagcatggtggatgatgcctgtaatcctagcactttgggaagcctaggcgggaggattgcctgagctcaggatttagacaccagcctgggcaacgtg

SEQ ID NO: 443332 - DNA, 201 bp, Homo sapiens
aagcgtttttgtcattcatgacatatttgtagtaattagaacagatgggataaaccagtttaaatcccaataatgcacatattattgcccacagttgattrtacatttctttgtccagttcattgttgatgactcaaataatgaggtctcctgctactttgactcactgcataggacatgcagatgagatggaataacagt

SEQ ID NO: 443333 - DNA, 201 bp, Homo sapiens
actccacatttgaagaaatggctgaatggctcatttgcagtcagtcgtgatgtaagattatgtccctggccattacacatcagcatcgagacccacacaargcatacaaatcttacaaggacaatgggccgtatctctgtagtgttgaagtcatgaacctatcaatacttcaaattccaggaaagagggagtctttgaatc

SEQ ID NO: 443334 - DNA, 201 bp, Homo sapiens
agtctgaggcatgagaatcagttgaacccgggaagtggaggttgcagtgagccaagactgtgacattgtactccagcctgggcaacaaagcaatactctgygtctcaaaaaaaaaaagggctaaaatggcaaattttatgttctatacattttagcacaatttgtaaaatactgtaatatactgaaatcccattgatttgt

SEQ ID NO: 443335 - DNA, 201 bp, Homo sapiens
tgcacatattattgcccacagttgattgtacatttctttgtccagttcattgttgatgactcaaataatgaggtctcctgctactttgactcactgcatargacatgcagatgagatggaataacagttgtcacaatgttctccccatcaataccaagaaaaaacatgctaatgtgaaatcttaaacacagtatccaagga

SEQ ID NO: 443336 - DNA, 201 bp, Homo sapiens
ttaagatattattatgtgataatattcacagacagtaagtactacaaaacacactctctaccaccatcaggatagtcactggcaatggtagccccctacamtcagtaaaatacctaaatactctggatatcagaacacagcataggggaaaaaacaattctgaaataaaagttggaaaatatgagtttgagtcttacactt

SEQ ID NO: 443337 - DNA, 201 bp, Homo sapiens
tacggttattttatctcaacattttaaaaatgtcattccatgttttctggcttctattattgctgctgagtcacttattaatctaatagtcattcctttayatgtggcaacccctttctctgtggatgcttttaagatcttttttatttgtgtgttagcttgggttttgttgttattttgagacagagtctcactctgttg

SEQ ID NO: 443338 - DNA, 201 bp, Homo sapiens
agaactcaggttctgactgctgggatggacgtttcccctctcgctagagctgcaccaagtgttccctccatgaacaccagctgtgttctgcctagtgttgyctgctgctgtgacagggcagcactgtgttttagtgcaaagtcccacaatcattgtgctctcccttccccaagtacattcaaattctctctttgcactatg

SEQ ID NO: 443339 - DNA, 201 bp, Homo sapiens
atgagggacgggtggcattagcaattcaagactgtctttcctacactcttcctctttcagtgcctttttcagtaatatgaagttaaaactaggtactgtgwtcactcacagtgatttttggttcttatgaaggttcctccttttgttcaatttgctattcttgcagggatgattattggtggaggcttctattcggctatc

SEQ ID NO: 443340 - DNA, 201 bp, Homo sapiens
ttttccttttcatctttctggtaatgaagagaatatctcagttctctaacacttcttaataatccttgttaagaaagacaatgagaaaggcccatattaakaggaataaatcaggcacagctaaaattaataagtttattttctatagtatatatatttttacagaataaccttctgtttaatgcaaatgatattggtttt

SEQ ID NO: 443341 - DNA, 201 bp, Homo sapiens
atttgaataaatttcataaatacttgagtaatagaagtactaagaaagtaaagcaaagaatcataaaatctcaaagttgaagatccataagaggtcactgratcctggcttctatccagtatgaaattctggattctacccaaaatcataccaaacagctacaagccacagcttagacatttccacttacaaaaagctgtc

SEQ ID NO: 443342 - DNA, 201 bp, Homo sapiens
aaaaaaaattttgacagggatttccttgaatgtcagcaaccaaaaacaagaaagagagagagactcctccaacctttgcagattttctccgtgctgggacmctccttcaacacttagccaggcttacactgatcctagggatcagccaaagatgaaagctttgggtgttctcaagtcttttctgaccttacctcttgccct

SEQ ID NO: 443343 - DNA, 201 bp, Homo sapiens
aggtcagtagtaatgaccctactttaaatatgacaacccattgccttctggtctccatggtttctgatgataaatttactgctaatctcatgaagaagtcyttgtatttgacagtcatgtcttgctttctgctctcaagattctctttgcgtttatcttttgatggttttatcataacgtgtctcagtgtggatacctttg

SEQ ID NO: 443344 - DNA, 201 bp, Homo sapiens
cagtgaggcgatatggcaccactgcactccagcctgggtgacagagcgagactctgtctcaaaaaaaaaaaaaaaaaatagatttaatttgcctgaatctyggacatgtcactttacctctctgggccctagtttcctcaactataaaataccctaaggaaaaaaaatccctaaattatgagagtttataggatactaagg

SEQ ID NO: 443345 - DNA, 201 bp, Homo sapiens
tttcatataattattcatagtcttctattttaatccttttaatttctgtaaggtcagtagtaatgaccctactttaaatatgacaacccattgccttctgktctccatggtttctgatgataaatttactgctaatctcatgaagaagtccttgtatttgacagtcatgtcttgctttctgctctcaagattctctttgcg

SEQ ID NO: 443346 - DNA, 201 bp, Homo sapiens
tgtgtctgtgtccttgatttccttggcatgaggcaacaaaccttgggtatttaccccagacaatgatgctgcttcagtaagacaatctagggagatgcctrgataactgctatgaactgaactgtgtcccccccaaattcatatgtggaagccctacctcacaatatgttggtatttagagatggtgcccttaggagataa

SEQ ID NO: 443347 - DNA, 201 bp, Homo sapiens
atttgttttcatataattattcatagtcttctattttaatccttttaatttctgtaaggtcagtagtaatgaccctactttaaatatgacaacccattgcyttctggtctccatggtttctgatgataaatttactgctaatctcatgaagaagtccttgtatttgacagtcatgtcttgctttctgctctcaagattctc

SEQ ID NO: 443348 - DNA, 201 bp, Homo sapiens
caaacgactacctgacaaacatttctactgtggctacaaatgccccacgtttgggggtctgctggcttgtggctttattttgttcaaagtaaccttttacrtatcttaaaaaattgtaacaatgactggactaggacatgacaagcagattttatctatcagtaacattttatagatgaagaaattaggagttgaagcatg

SEQ ID NO: 443349 - DNA, 201 bp, Homo sapiens
atccagtcctggttggttatgtgtttctaggaatttgtccatttcatctaggttatctaatttgttttcatataattattcatagtcttctattttaatcyttttaatttctgtaaggtcagtagtaatgaccctactttaaatatgacaacccattgccttctggtctccatggtttctgatgataaatttactgctaat

SEQ ID NO: 443350 - DNA, 201 bp, Homo sapiens
ggtagggcacacacatgcatctgattgttgatttaatagttgaattttccaaataaaatttttatttaggccttaagaccaacccaaactgtcagcaagaratgtgcacaggttagcaaacggtgagaaaagaagataagatttctgaggacacacttcaagtctgtgcttaagtcatctccggcacactccagaaacagt

SEQ ID NO: 443351 - DNA, 201 bp, Homo sapiens
atactttcttcctttttttggttttgttttcacatccttaataatctcttttgatgaagaaattttttttttttttttttgagatggagtcacagaatccrttgtaaaatgcaagcccatagatatttacctctactttttattctaagatttagtggttgtagctattatatttagaatgttagttgattttgagatcat

SEQ ID NO: 443352 - DNA, 201 bp, Homo sapiens
acttactgtgtgttggacattgtgtccacacatttcaactatttaaagcttaaagaagctcagagaggttacatggctttcccaaacaggatcacacagayagcaagtggtgaaattgacaggggagcctggcctcctgcctgcaaaatccatatttttctagtctacaccaccggcccttaatcagtgattcccacccta

SEQ ID NO: 443353 - DNA, 201 bp, Homo sapiens
catcaatcttgtctttacgcttatgatttatggtcaaatcatctaatagttctaaagaaattcgaaagtcaaatttcttatatagtaacatcacctggtcsagttatttcaatatgacccttaagagaagcttaaacactaccaaagatatacctccccgctccatcagtctctataggtgggaaattttaactggctcta

SEQ ID NO: 443354 - DNA, 201 bp, Homo sapiens
aatgtcctaggccttcacattcactcaaccactcactcactgactcacccagggcaacttccagtcctgcaagctccagtcatggtaagtgccctatatargtgtaccactctttatcttttataccacatttttactgtgtttagatattgatatggtttggctgtgtccccacccaaatctcattttgaattgtagcta

SEQ ID NO: 443355 - DNA, 201 bp, Homo sapiens
aggcaaaatccctcatttagactctgatatttggtctttgttgtgtgtgtgtgctttttttttcatgaagacaaatataatattggattaggattgaaggyatgtcatttatttattaacagtataaacttgggtaaatcgttaattctcttggatctttggttttatgggaataatagtaatacctagcttcgcggtgac

SEQ ID NO: 443356 - DNA, 201 bp, Homo sapiens
ttattaactccatggtcttgggcaaattagttaagccttttatgtttatttctaaaatggagagaatgttgtgatgattaaatgaggtaatatatgtaaamggtataaaactgaacataccacatgatatgcactccagaaatgttagccatcatttatatcaatagggccccttcttgcacaaagacctccattcatcca

SEQ ID NO: 443357 - DNA, 201 bp, Homo sapiens
ttatttgtgtgttagcttgggttttgttgttattttgagacagagtctcactctgttgcccaggttggagtgcggtggcacaatcgttgctctttgcagcytcggcctcatgggctaaagtgatcctcccacctcggcaactgagtagctgggactagaggtgcgtgccaccaggcccagctaattttttttttggagaga

SEQ ID NO: 443358 - DNA, 201 bp, Homo sapiens
atgttccctcaggacccataaagagagtaaatataaacaggcaaaatccctcatttagactctgatatttggtctttgttgtgtgtgtgtgctttttttttcatgaagacaaatataatattggattaggattgaaggcatgtcatttatttattaacagtataaacttgggtaaatcgttaattctcttggatctttggt

SEQ ID NO: 443359 - DNA, 201 bp, Homo sapiens
attaaggattgtgacctttatcctaaagcttatcagaggctattaaacaagcgtaattgtgtgttggagtgggtagggaataggatgaccaggtttgcagygttaagtcattatgtatcaacctaatgtccatgaaaaattgccatccatgaaaattactcagaattcaatattactcctgtgctctcttattagttcctg

SEQ ID NO: 443360 - DNA, 201 bp, Homo sapiens
caaactcagatctccatcccttgaaaccaagattcttcttcccggccctggagttcttgttatgtttctgtctaaagcatgtcccagaaccagcagcatcrccatcacctggcagcttgttagaaatgaaaagatttgggtcccaacctaggtccactgaatcagactttggaaataggaccaagctacctgttttgtttt

SEQ ID NO: 443361 - DNA, 201 bp, Homo sapiens
accagagactcgaaattgcactcagggcaaacgtcaactccactgtacttgcttatttcaatggaatcaccctctttctatattctggtctccagttgttytttttctcccccttactgccatctccaccaaatgttccagaaagttgtttctatattaggcagcattttagatgaactagaaggaataggtaacatctac

SEQ ID NO: 443362 - DNA, 201 bp, Homo sapiens
atcgttgctctttgcagcctcggcctcatgggctaaagtgatcctcccacctcggcaactgagtagctgggactagaggtgcgtgccaccaggcccagctrattttttttttggagagatgaagtctcactatgttgcccaggcttgtctcaaactcctaggctcaagcgatttccccacctcggcctcccaaagtcctga

SEQ ID NO: 443363 - DNA, 201 bp, Homo sapiens
cttattttggttcacctcggctcatttttttatttttcaccctctgaaattgtaacagcataatcagctcagaatgcatcaaagggaaattgagtgggtartcaaccatcctgataatgaaaatctatgacaatcagaagattcagataagcctatcactactggccagcttttctcaaatggatgctgttttgaagtgaa

SEQ ID NO: 443364 - DNA, 201 bp, Homo sapiens
ctgggttatggtttatctcgcatctccatcatccctcagaattctggatgactcagcagggctgaacatctgtcacatcgtgatactgatactgagaaccrtggcagtgagccacagaaaaggtatcaggtgccttctgaattggcaatcaagggttttttgttgttgttgtttaataaagtttctcatatgttttgctac

SEQ ID NO: 443365 - DNA, 201 bp, Homo sapiens
acctcggcctcccaaagtcctgagattacaggcatgagccaccacacccagccttgttggggtttgtttgttttgtatttttcagttttaatctaagataygtaggtataaatgtatttttatttaggatttggggagattcttgaatctgaaagatgatgaaatctttcatcattttggaaaattcttagatattctctc

SEQ ID NO: 443366 - DNA, 201 bp, Homo sapiens
tcagcaacaatcatttattatgcacctcctatgtgccttgcactaagctggcccttgaaaaaggcttaagtcagaactggtttgagagagtccataatttrttgggagagacagatcatgttcataaaaaacgtataagattatattatactgaggtaataaaattctccaatagcacattattttttcataaatcttgaa

SEQ ID NO: 443367 - DNA, 201 bp, Homo sapiens
gctcttgcaatcttgactgatgcgagtggcacccttctgcagaaatacattgccttgctgagagaattaaacttttgcctgagtgctggttttacttcacsgcaccaagcatttattcctggagcattttatatccaacaatgtcattttgaaagcaggatgaagggtaaatctgacagtcagcagagcatcggtgactac

SEQ ID NO: 443368 - DNA, 201 bp, Homo sapiens
aaataaatttgcaccaggtacattgtatattatggatttttaatgtttagggaactaatgcccattatttctattattcctagaacgtttctcattttgcrttaagaaatatagaaagatgcaattaaaaaattagaaaattatccaattaggtccctcttgtgtatggaataactaagattaagcaagctcttctaaaca

SEQ ID NO: 443369 - DNA, 201 bp, Homo sapiens
acaagtgaacattttaatgtcagggaaaaaaatactatgaaacaaatataaaacctactgccttcacagaggttacattctaagccgagttaaaaaaaaaatacctaaatggaatgcgaactgccagttcatgctaaatggttccagagtgacctcactgggttgtggaagtgcatagatgaactgactgcgtatctggac

SEQ ID NO: 443370 - DNA, 201 bp, Homo sapiens
ttctcatactagccccaggatgtctcctgtctgcttacacagtgtccactagaagccatattttaaaccaccagagactcgaaattgcactcagggcaaaygtcaactccactgtacttgcttatttcaatggaatcaccctctttctatattctggtctccagttgttttttttctcccccttactgccatctccaccaa

SEQ ID NO: 443371 - DNA, 201 bp, Homo sapiens
gcccttctcctgaataatattctcattcgcaagctttatttgttcagctgaccctatgaatagatgttctgaaacctgtaaaagtaattttaaaagaaaayctacatttaaatgtttctaatatcacttcagcaacaatcatttattatgcacctcctatgtgccttgcactaagctggcccttgaaaaaggcttaagtca

SEQ ID NO: 443372 - DNA, 201 bp, Homo sapiens
aaaccatttatacttaattataccatatagttaatattttattattttatatttgacattctatattgtaggctgccctgttatcttttaaaaatctatawgttttattaagaggactacgattagtttgcttgtacctgatgtggtgatttggaaaactaatctatctttaattctactagaatttacttttaagatttt

SEQ ID NO: 443373 - DNA, 201 bp, Homo sapiens
tagaaaatgctttcttacatattatgtaagtgaagattataaaattgacgtaggggagcgacctggtgataactgcattccctaattttcttaaagagtgytatattttcccatcattgtagttgaaagcatgtacaatgatacaaatattgacagtcacttgttttattcatgtgggcttaagaagggtaagaaaaaaaa

SEQ ID NO: 443374 - DNA, 201 bp, Homo sapiens
tccaatcacctgattccaatcacattattaaaataaagtaatatctgttgggtcggcatggttcccactagttatattcattatcctttgacaggtaacaygggggatcaaaatgctgccatccaactgggaaacatccttgaaatacgagtgaaaatctcaacctgcgttttataggccagagctctgctgatggaatgc

SEQ ID NO: 443375 - DNA, 201 bp, Homo sapiens
tatagttaatattttattattttatatttgacattctatattgtaggctgccctgttatcttttaaaaatctatatgttttattaagaggactacgattartttgcttgtacctgatgtggtgatttggaaaactaatctatctttaattctactagaatttacttttaagattttcaacacctaaatcttatctgcctcc

SEQ ID NO: 443376 - DNA, 201 bp, Homo sapiens
ttttgattattggctcccatatgccaggggtgtaccaggcaaaattgcattagatattctgaagtttttagttttcttctgaaataattctttaaaatatwtaattcttcaacccagttaaataataacaaatattatgactgttgaaatttatttacatagaaaatgctttcttacatattatgtaagtgaagattataa

SEQ ID NO: 443377 - DNA, 201 bp, Homo sapiens
ctcccgagtagctgggattacaggcacgtgccaccacgccagggtaatttttgtatttttagtagagacagggtttcaccatgttggccaggctggtctcraactcctgacctcaagtgatccacctgcctcgccctcccaaagtgctgtgattacaggcgtgagccaccattcctggccctaattctgctcttgaatttt

SEQ ID NO: 443378 - DNA, 201 bp, Homo sapiens
tcatggcaggaggggaaggggattcagcgtgtacagagatcacacagtgagagagaaagaagcaagcagagagagagaaagatggggaggtgccaggctcwttctaacaaccagctctcatggaaactaataaagcaagaattcactcattaccaagaggacagcaccaaggcattcatgcgctatctgccccctttaccc

SEQ ID NO: 443379 - DNA, 201 bp, Homo sapiens
aggccaggtctggtggctcacgcctgtaatcccagcactttaggaggatcacttgagcataggtgtttgagacaagcctaagcaaacataatggaaccccrtgtctctgcaagaaaacaattaaaaattatccaggctgaggtgggagaatcacttgagcccaggagttcaaggcagtagtgagacattattgtaccattg

SEQ ID NO: 443380 - DNA, 201 bp, Homo sapiens
atgcaggatataaggctgatgaaaatatcagaaagagtatggagactcactatagggatttatgtgacattgaaaggatccctttccactctgggtctctytctaagatgccttccagttctgatacgcattgaactaagataagcgatgcaacaaaagctttgtcaaataactaggaagagagagacagacagaaagaca

SEQ ID NO: 443381 - DNA, 201 bp, Homo sapiens
tagcctccagcaccatgagaaaataaatttccattctttgtaaattacccagcctcaggtgttctgttacagcggcatgaacgaactaaagcaatgctttsctgtctaaagtagagctttaggagactgaagcccacacttgagaagaaactgggctatgtagatcatgatgttcacacattttataaaatgcaaaatatt

SEQ ID NO: 443382 - DNA, 201 bp, Homo sapiens
atcctgaatctaatcgtcaatagcaaacaatctgcattatcggtggactggcctttttgctcagcagccccgcccactggctgcacccatttatctctgcrtacaaatgtgttttcaagtattatgtgtgttttcagtgtgtatgtgtgtgttgaagggcaaagagaagtgagaagagagtaagaatcagactaatatagc

SEQ ID NO: 443383 - DNA, 201 bp, Homo sapiens
tcagaaagagtatggagactcactatagggatttatgtgacattgaaaggatccctttccactctgggtctctttctaagatgccttccagttctgatacrcattgaactaagataagcgatgcaacaaaagctttgtcaaataactaggaagagagagacagacagaaagacagagaaccattgctagtattatttatac

SEQ ID NO: 443384 - DNA, 201 bp, Homo sapiens
tacctagaaaaccctgaagactatgccaaaaggttcctggaactcataaacgacttcagtaaactttcaggagagaaaatcaatgtataaaaatcagtaayatttttatataacagtaacgttcaagctgagagccaagtcaaggacacagtcccatttataatatacgcacaaaaaaataaaatacctagaaacacacct

SEQ ID NO: 443385 - DNA, 201 bp, Homo sapiens
aattacagagtatcagaatcaggtggaatctttgtggtcctagagtctaacctccttactatacagatgagaaaactaagtcccagagagtttaggaggcwgaggtgaccctggtatttcttcatcctagttaaagaagaagacagacattaacagagaaaacatttttaaaaatcatttatctttagaagtagttcttac

SEQ ID NO: 443386 - DNA, 201 bp, Homo sapiens
ggttggtaatttatggctttctctaaaaaatatctacattgacaactaatgcccagctatattatgcttttaaaatatttggttattttgcatttacaaarttgcaaatatattggtagtgattttctctcataaattaagaaggctgagcataaagataaacatacctattgtgcacaataaaagcagggcgcaaaacca

SEQ ID NO: 443387 - DNA, 201 bp, Homo sapiens
gtgtgagttcttaaggcacattcatcaatgtctgcaatataggaagcacagaagcttagaatctagccaagggaacttagagaacaaacaaccatcatttrcagtagcattaactaacatcatcgaccatttaccttgtgctaggtactgccaagctgttcacatgtattatctcatttacactgcaagtcagttctgctc

SEQ ID NO: 443388 - DNA, 201 bp, Homo sapiens
aggccccacagagctccctgtatagtattatgaaaaactgggaactaggtcccacagacaactgaatttgtaacctctttcagagtaaaggctcaacaccytataaaggaagccaacataccagacaccgacactgctgacagctatgggtccaattgtctccacttcgatacagcttgtgaccattttggtctaaacatt

SEQ ID NO: 443389 - DNA, 201 bp, Homo sapiens
taataaggcagcattgacatgggctgtcttgaaccttatgtagtgtgagtgtggtctcataaaaaaaaaaaaatgtattgtttctgcttcttgtccaagcrtggagctcctgccctttcctaggaaactcaattaaagttctctactttggacataacggctctacaaatggctaaaattgggaattacaattaagcaaga

SEQ ID NO: 443390 - DNA, 201 bp, Homo sapiens
gcagaaaaatggattttttttccttttgtttaatccacctgttgccaccctgtacctcctgctgtcagctcaccatgcactgaaaaataaatttgcaccasgtacattgtatattatggatttttaatgtttagggaactaatgcccattatttctattattcctagaacgtttctcattttgcattaagaaatatagaaa

SEQ ID NO: 443391 - DNA, 201 bp, Homo sapiens
catccccccgccccccgtaatcttatttacactattaatttgctaaacaatccattttcttattgttagtgtaatgatgaacctcagctgatctgaggccytaaataaatccctaaggtgcagagcccaaaattaataagcttactatttagtacggatggacggcagaaaaatggattttttttccttttgtttaatcca

SEQ ID NO: 443392 - DNA, 201 bp, Homo sapiens
ttgctgactaaaatgtacacatatggctaatggcacatattctgaataatcaacagaaaaagaaatgttttgcttctaagacaacaaaattagggcatgtyattccttactgatactgcctgaggcagccaagtctcattatagctttgaagcatacgttcttcacttctttttcagttcctctttactgatttctctggc

SEQ ID NO: 443393 - DNA, 201 bp, Homo sapiens
tattattcaccatgataggtcattcaattctgattcagatgatgaacttctacccagaagaagggctcttagtatatgaagtacagtccatccctatgtgrtaaaatagcagaaaaggcaaaggggaatttattgcattaaggaaacactatttccttaaatgatatgaaatttcaactaccaaatagcagattgaagata

SEQ ID NO: 443394 - DNA, 201 bp, Homo sapiens
cacttttcgattaacactccaaaaccagtgctgggtcactacaatatgctgtaggtaaaaatatataatttaagggatccccttaacatgaaccaacaacwtgttgctacaaagaggtcttgttatcaaaatgagattttatcttgattgccttaatagatagataccaatcaaacatgcaaaactatttgtattagataa

SEQ ID NO: 443395 - DNA, 201 bp, Homo sapiens
ttcactaatatatctgaagtgtctagaaaaatgcggcacaataaacattagttaaatggtgaattcgtctttttgctcttctcacactgcacttttcagtstgttgtgttacaaagaatttgtctggtctttgtttcaggctcctggcacagagcttctaaaatccttgaaatttctcaagtaatataagtgtgtctttgt

SEQ ID NO: 443396 - DNA, 201 bp, Homo sapiens
tacaacttaaccacctatctttagtctgtcatgtcttatttctcctatccctataaagaattgttactgtgctatattcctcatagaaaatgccaagaacwtgcagcatgaagaatgctcttatacaatgaactattgatgtttaaaatgaaaatggaattcaagactgagttctgcagctggggagaaaaaataacttat

SEQ ID NO: 443397 - DNA, 201 bp, Homo sapiens
cagggcaaaacagagtatagagaaggagacagggtcccagctctttcatttacaggccccatgactatgggcaagacatttttttctcttcaagcttttgyctctgtaccacaaaataaagagtttgcactagatgacctctaatacttctgcaagcctaaacttttcaggatgtccaaagcacaagatttatgtgaccta

SEQ ID NO: 443398 - DNA, 201 bp, Homo sapiens
catggggatgtggcaaataatgtaaaacatcacaaaccaccatatacaccaaacttggactctatgagtcttttttgcaaacctgaacttagccaaatgtrtgatagaactctcatttaattttgtccaagttgcatttgctgcttttcaagtaatggtagaagtcacccttcgtctgattcctattgaaaatgtatattt

SEQ ID NO: 443399 - DNA, 201 bp, Homo sapiens
tttaaggacatagctccaacctctgactcagcaaaagcctattctacttaattccagtagcagcaaaggaagatgcagtagcgaaaggcaaacctgtttaytcatccccatgctctgttattcctggggtcctatagggcatagaagagatgactactgtcctacagagtaggggaattaagtcatattacgttaatcact

SEQ ID NO: 443400 - DNA, 201 bp, Homo sapiens
aatgtggcaaacaaagaagcaaaggaactaaacagaaggttgtggtatctcttttacgtacagaattctgccatgacagggtttctgagagtcttacaggyttggaaccttaaccccagcatttgatatccatcattgacttagcatggggatgtggcaaataatgtaaaacatcacaaaccaccatatacaccaaacttg

SEQ ID NO: 443401 - DNA, 201 bp, Homo sapiens
gctctgttattcctggggtcctatagggcatagaagagatgactactgtcctacagagtaggggaattaagtcatattacgttaatcactttcagaccctrgtgtatatccgaaagtaaaaagctcttaatttctccaaattggtaaaataccaatttttctatggcttggtgaaataaaatattataccagggtaattaa

SEQ ID NO: 443402 - DNA, 201 bp, Homo sapiens
gaagtggaacttttaagaggtgattaggacatgatggctctgccctcatataaaaaggccagttctgccccctcttgcccacttcttgctcttctgccttycacctgtgatgatgaatcaaaagggccctcaccagatgctggcaccttcattttggacttcttagcctccagcaccatgagaaaataaatttccattctt

SEQ ID NO: 443403 - DNA, 201 bp, Homo sapiens
gtctgtatttatctatacattttcaaaagcaatccattatttttaaatgtatcaaaaatattgagcatgtgaaagatcaccaggaaaaaaaattctgcaactcaaaaatctaaaaatctgacgcacatattttatgccctcaattaacaataaaaccagaaatcacccattaagcatttttaatttaatcactttggaata

SEQ ID NO: 443404 - DNA, 201 bp, Homo sapiens
ataaatggttacacacttttttgaggacaaattaggtttatcagctgaggtttaagaagaaccttaaaatgatagaatccattttctttagccattccaartactgtaagaaaaataataaatatactcacaaaaatatatatacaagataatcacaacactgtgtttaaacaatattaaacattagataactatagtaca

SEQ ID NO: 443405 - DNA, 201 bp, Homo sapiens
ataacataatttatgcataatgtctttcaaggagatatgctaaagtcctaaaatattattaagtgagccaaaaaaatgtctcagcatgattttttaaggtraaggtacatcactaaaaaataatgtaaggccatacacataggcttggcttctgggcaccatccagccacaagcagagcaagatagattcacctggaaaaa

SEQ ID NO: 443406 - DNA, 201 bp, Homo sapiens
taagaagaaatttaatcatctagtcttagcgaccaaagcgagttaatgtaccttcaaaataagccaattactcccttctctctgcaaatgacccatcatcrtaaatgttggtcattaaggtgccatatgattctgcagagaccaccaagaggacacaggatggtgatgactcatcactaatgaactgaacagcatccagta

SEQ ID NO: 443407 - DNA, 201 bp, Homo sapiens
atcagaacccagacattctttactactgataacgctttcaaccaatagccgatcagaaaaattttaaatctacctatgacctggaagctgccacccttctkgttgtcctacccttccagatcaaaccaatgtaaatcttacatgtactgatggaggtattatgtctccctaagatgtataaagcaaggtatacatgaggac

SEQ ID NO: 443408 - DNA, 201 bp, Homo sapiens
atacaagataatcacaacactgtgtttaaacaatattaaacattagataactatagtacataaaagatagaatgcaagaaatcattaaaaattatggtttsaatatttaaggttgaagaatatattattactatttgaaaaagaatgttggcaaatagtaactacactgttatcctaactttgtaaaaagaaaaatattta

SEQ ID NO: 443409 - DNA, 201 bp, Homo sapiens
ttaggaggctgaggtgaccctggtatttcttcatcctagttaaagaagaagacagacattaacagagaaaacatttttaaaaatcatttatctttagaagyagttcttactgaccctgaaccaagccttgtaggctgatccaggatatgggtctgaatatttatgtgtcatagaagatttagaaataatttctcttctccg

SEQ ID NO: 443410 - DNA, 201 bp, Homo sapiens
caacaaagacaatgcagtcagctctctgtatccatgggtcccccatcccccgatccatggattcaaccaactgcaggtcaaaaatattggggaaaaaaatkgatgtttgtgtctgtattgaatatgtacagacatttttcttgtcattattcctgaaacaatgcagtataataactatttacaaagtatttacattttatt

SEQ ID NO: 443411 - DNA, 201 bp, Homo sapiens
gtgaatggggcccttcttttaacatgtccagtaaaataatggagaagtcacatgacctaagatcagccatcatgtgacctaagctcagtgaatcagacttytcctttcattcaattttgactcttgagagacagagaaataagaagccagaggatatggtggttagatgtatccagctaaccattccttctatgagatctt

SEQ ID NO: 443412 - DNA, 201 bp, Homo sapiens
gagatcgcaccactgcactccagcctgagtgacagagcgagactccatctcaaaaaaaaagaaaaagaaaaagaaaatgtggtgtatacatatatataccwtggaatactactcagccataaagaggaaagaaataatggcattcacagcaacatggatggagttggagaccgttattcttttttgtttgttttgtttttt

SEQ ID NO: 443413 - DNA, 201 bp, Homo sapiens
atacaatggactttgcggacttggggagacgagtgagagggggtgagggataaaagacagcaaatatggtgcagtgtatactgctcaggtaatgggtgcaycaaaatctcacaaatcaccactaaagaacttactcatgtaaccaaataccacctgtaccccaataacttatggaaaaataaaaataaataaaataaatga

SEQ ID NO: 443414 - DNA, 201 bp, Homo sapiens
aagcactataaataacataatttatgcataatgtctttcaaggagatatgctaaagtcctaaaatattattaagtgagccaaaaaaatgtctcagcatgaytttttaaggtgaaggtacatcactaaaaaataatgtaaggccatacacataggcttggcttctgggcaccatccagccacaagcagagcaagatagattc

SEQ ID NO: 443415 - DNA, 201 bp, Homo sapiens
aaagcagggacgtttttcccttctgtttttttcttcttctcttccttctttttgctacataaaaatgctaagcactataaataacataatttatgcataaygtctttcaaggagatatgctaaagtcctaaaatattattaagtgagccaaaaaaatgtctcagcatgattttttaaggtgaaggtacatcactaaaaaat

SEQ ID NO: 443416 - DNA, 201 bp, Homo sapiens
gggtcttattagggttgtcatatactgattacatttccagggctgtccctgagcatcctgtatttagttgtcagaatatctgatcacttatgcctgcagcracacttaagaatgggaactgagcatactctcctgcaacatgctaggaaattctcaaggattttaagatgaaggagcatagacactgcagcttccttgggc

SEQ ID NO: 443417 - DNA, 201 bp, Homo sapiens
acaaaaatggatatcttaaaacaatctccataggaggaaagtgctgttataatccttattttacaaaatgagaaaactgaagcatcaagacataaatatcrctattttagtttcctattgctgctgtaacaaattaccaaaaatagtgccttatagcaacatgaattcattgtcttccacttttggaggtctgaagtccaa

SEQ ID NO: 443418 - DNA, 201 bp, Homo sapiens
caacccaaaggatcctgtttcagtaggattggagtgggcccaggaatattcattttttaaacaaaacctcttccagatgattctgatgaatggtaaaaggmcctcactttgaaaaattctgctttattgtcaaccatttgcttcttttggagcaagagcatttactcattaaaagttcacaatggttaaaattattgcatc

SEQ ID NO: 443419 - DNA, 201 bp, Homo sapiens
tacagcacacagcagttttccttttccttttcaagtgatcttactcattttagtgacattatgatttacaaatcacctgctctcacacctttcctctatgkgcatctctccttacttccctgtctttccacttttaatctgtggtacctgcgtgtgtatgttacatagatcattaggtgaaggtcaatgatgttgacttga

SEQ ID NO: 443420 - DNA, 201 bp, Homo sapiens
ttggttgacattgctttgaaatttgagtgaaatcacagaggatttcaggtctggatcttttcctactttaataagcaaaaagaaaggaacaggaaaaaggyattgttaactaaaaagaaaggcaacatgacattttaaagttaaaattaaactctcatttttatagggaggtaacttaaaaaatgtgaagtatcatagaag

SEQ ID NO: 443421 - DNA, 201 bp, Homo sapiens
ctaaaacttggacttgtccctgaaaagcagggacgtttttcccttctgtttttttcttcttctcttccttctttttgctacataaaaatgctaagcactayaaataacataatttatgcataatgtctttcaaggagatatgctaaagtcctaaaatattattaagtgagccaaaaaaatgtctcagcatgattttttaag

SEQ ID NO: 443422 - DNA, 201 bp, Homo sapiens
tgagagaagccagcggaggcgtggacattccatgtgcatggaagggaagggagggaagtgagagcctaagaatcgtaaggtagttggtaaacagtgctaarcatgcttatggctgtctccctgtggtttgcatagcccccggaaagcaagaatcatctttgtttacaacaagaaaaggtcaagcctaagtcacaggtgcca

SEQ ID NO: 443423 - DNA, 201 bp, Homo sapiens
attaggaatgcaaatgaggatttcacagaagacccaaaggtatgaaaaacactttcacttttttaaatgaatatgaaaattctgaggaaacagataacttyctaggaaacatgaccatagattgacccagaagtataaaacgtgagtagatcaaaaagtgtacaataaatgggaaaagacatctagcaattattttcaaaa

SEQ ID NO: 443424 - DNA, 201 bp, Homo sapiens
tttgcttttcacatcaactttataagaaaggcaggaagttactcgtgtcctcattttgtctgaaaccataatccaagtttcctaacttcttgttcaaatayctaaatgtctcgtccaaagattgagtcttaccaagagtaggccaaatgctctgcacaaaaatggatatcttaaaacaatctccataggaggaaagtgctg

SEQ ID NO: 443425 - DNA, 201 bp, Homo sapiens
gatcaaaaagtgtacaataaatgggaaaagacatctagcaattattttcaaaaaaagctccagatctcttttcaccagaaagttgtttcaaacttcaaaaytaccaatagctcctatattctattagtatcctgagttaaggaaaaaaaaatggatgtttcctaataagtcataactgggtctactctagggtgggtaaaa

SEQ ID NO: 443426 - DNA, 201 bp, Homo sapiens
tttggaatgtgtaagctaaattataacaagaagttatatttgaataatgctttagttaaaatataaaagttaaaacataatttcatttgcttttcacatcractttataagaaaggcaggaagttactcgtgtcctcattttgtctgaaaccataatccaagtttcctaacttcttgttcaaatatctaaatgtctcgtcc

SEQ ID NO: 443427 - DNA, 201 bp, Homo sapiens
agtttacattaagcagattccctttgactgtctataccccagaccaatagagatactgaagccttcagtgtaagagaaatcacccagtctgctatagattyccagaagagcagcccagaagggagagctaactaaagatttttgacaatcctgagaaatgctattcatcatagcttatgagaagttgtgaaaggatgctct

SEQ ID NO: 443428 - DNA, 201 bp, Homo sapiens
cttagtctcagtttcctcacatgtagaatgagaataacaatattttactggagtataatagcaaaaaccatgtaaggtacttagaatataaacatagaagwtgtactgataaatattagcagcaacaacaactaggatttatttattcacttatgcactcaacaattatttaccaagtagctgctatgtgccaggcaaggc

SEQ ID NO: 443429 - DNA, 201 bp, Homo sapiens
gaaaactaggattgtagaatcaaagctctaactctactacttaacttcctaggtaagcttagggtgagtctcaattctctcttacaaagatgagaaatagyattgcagaatcagagctctaactccactacttaactagctagatgacctcaggcaagtctctcaactttccttagtctcagtttcctcacatgtagaatg

SEQ ID NO: 443430 - DNA, 201 bp, Homo sapiens
atataaatatacagagatttttaggaattcccagatttgtaaatattactaaagcttataattatgtagtaaaagccattaaggagcatttttgaaaataygatccacagaattctggttttatggaatgatattaagtttcatgtgtgaattacaataattccatgtacaagtaagttaaacagatgctatgttaaacac

SEQ ID NO: 443431 - DNA, 201 bp, Homo sapiens
gaaccaagccaagttttcatcaatagcaaatgaatgaatacattgtggtattatgcagtagttcaaactaatgaactagatctaaatgtgttcaaaagaawaatggagagtgaaatgataagtttcagaggaatccatttgtattatgccatttagataattttgtaaaccgcataaggcaacagttaacactcactgagt

SEQ ID NO: 443432 - DNA, 201 bp, Homo sapiens
agtttcagaggaatccatttgtattatgccatttagataattttgtaaaccgcataaggcaacagttaacactcactgagtgtttgctacatacccaatgmtgttctaatacattatattaactaatttgcttaatccacagaacaatactatgaaatagacactctatttacaaatggtaaaaatgaagtgaagaagtta

SEQ ID NO: 443433 - DNA, 201 bp, Homo sapiens
ggcatacagtactctcctataatcctctttatttctattaaattggtagtaatgtccccacttccaattctgattttagtaatttgattactctatctttytcttagtcaatttactaaatgtttgtcaattttgttgatctttctgaaaaatcaacttttgatttcattgattttttctattgcttttctattctttatt

SEQ ID NO: 443434 - DNA, 201 bp, Homo sapiens
cataagtgtgacattcttataatggtaaatttgaggtgagtctaattaattaaaaatttaaaattttcagaaatccttataacaattcttatgagtgagtmgttttgacacgtgctataactgatcgtgatcctgtaatgtgtcatgccactaagatcaagaggactaggctaggaagaggactgtagagaaagcacagaa

SEQ ID NO: 443435 - DNA, 201 bp, Homo sapiens
tgtccatccagatttgacatcctgggttatggtttatctcgcatctccatcatccctcagaattctggatgactcagcagggctgaacatctgtcacatcrtgatactgatactgagaaccgtggcagtgagccacagaaaaggtatcaggtgccttctgaattggcaatcaagggttttttgttgttgttgtttaataaa

SEQ ID NO: 443436 - DNA, 201 bp, Homo sapiens
ggtgcctgacaccacatctggctaattcttgtatttttagtggagatggggtttcaccatgttggccaggctggtcttgaactcctgacctcaagtgatcygccggcctcagcctcccaaagtgctggtattacaagcgtgagacaccgtgcctggcccgctggcatacagtactctcctataatcctctttatttctatt

SEQ ID NO: 443437 - DNA, 201 bp, Homo sapiens
tttcaggtttccctaccctggtcctggttcccacataagtttcagtttggagtttttcttccttaagttctttgtttctgcctgtctgtctttccagtttkgggggcagcagttttccctgtgacctaacttcactaaattttctaactaaaagacaaaggatggctaaatagattaaaaacaagacctaactatatgctg

SEQ ID NO: 443438 - DNA, 201 bp, Homo sapiens
cactaaatatttttactcctccagcctttcattagagtgtattatttattattattgccattattgttattgatagacacacattaatatagaggtgtgaycacttaagccattgcatgaaaacaaacactcctccaggttgtagtttcaacacaggatttccagagaactgtacaacaaagtaaaacccacaggcatgtt

SEQ ID NO: 443439 - DNA, 201 bp, Homo sapiens
tttatatctttcacatattatctaataagtccatttggaatgtgtaagctaaattataacaagaagttatatttgaataatgctttagttaaaatataaargttaaaacataatttcatttgcttttcacatcaactttataagaaaggcaggaagttactcgtgtcctcattttgtctgaaaccataatccaagtttcct

SEQ ID NO: 443440 - DNA, 201 bp, Homo sapiens
cagtcatcttggccaaaagctcttgtaaatccattattccttgcaccaggcttaagaaatcactgcaggttgggcaagctcaataaagaaaatataaaacrtatatatttatattgtgctaatataagaaataaaattttaaaacagtagatacgtgactatgtagaagagtttttggggtttttttggttgacattgctt

SEQ ID NO: 443441 - DNA, 201 bp, Homo sapiens
tctagggtgggtaaaagagtcagaaacagaacacagaaagtagtacccaactgtacaagaaatgccttatagggcaattcagtgtggaactgccatcagcrtaagggtgtaaaggcaaaagacctcagctctgggcctccctgacttgaagcattcaccttctacgtgatgcgctggttacctagtttttggcacacttct

SEQ ID NO: 443442 - DNA, 201 bp, Homo sapiens
aagcaattggcctccttttctttgtagtctgaagcagtgccctggcctaagaaaatggagaatcaggagacaggaagatctcagcaaaaactctggaactstctctacagctgtaatggaagagttatgctgagtcccaggcaaggtatctggtaggaagagtgggagtagttagaagctcctatgagatgggagctacta

SEQ ID NO: 443443 - DNA, 201 bp, Homo sapiens
aagtgccaaagggaggtttagaagatggattaaaaaatttgctgtttgcaactgcccacaattaaatacctacctcacaaaggcccattttacacaataaygttttgagaatagagctctctgtggctcctagatgatgtgtggctaaaaagagaaaaatgacattctctgcaatgggaaagaatgagaaagcaaacgacg

SEQ ID NO: 443444 - DNA, 201 bp, Homo sapiens
ggcacacttctctgaagaattagagatgctggggagcagtgtccattcgctcacatcctcagctgctgtacaccttttagactgcatgttagctggttcaygaaacaaaccaagtagaagtaacattaaactaattgtgagttatcattcttgaacctaaactagccctctgaagtctggctaaacatttcctggcccatt

SEQ ID NO: 443445 - DNA, 201 bp, Homo sapiens
tttggagagatactagataaggtattgacggctggtataaaaacatattactggtcttggtaggtaatagagagacattgaataattataaggagtagagktaagtaactagagttgggctgtggaataaacttggtaaataattcatatactaaatttgaaggagttgtgtttacaggcaatagggagactggccaaatg

SEQ ID NO: 443446 - DNA, 201 bp, Homo sapiens
gctagaaggaaaaaaaaatcttccttgaaaatccttaaagaatcctttcctgagacttcacctggcctttcctaggtgtagcagtctgattctgagcaatmtggtttgaaaatacttaagtaaataatgtcaaataattttcactatttccaaggaaaacaagcagctcatagccaaaagcgtgcattaagagacactgtt

SEQ ID NO: 443447 - DNA, 201 bp, Homo sapiens
gtgataattttaggctggtgagattaggaggaaatatatttttatttatattttatctgtattttccaccatgttcaaaataatcatgttacttttgtatyggtaaaaaagttacattatacaatttctacaaagttattaagatttattgcatccattgcaacaaaattgagctccttcaaaagagggctttgtaacacc

SEQ ID NO: 443448 - DNA, 201 bp, Homo sapiens
ccacataagtaggaaatataagtgctataaaaatagaatatcttaaaagaaagaacttactactcagtaccagtcattggaattaatattatctattaccycaacactatttttctacaatcagctgatgactcaagtgttgaatttttatatctttcacatattatctaataagtccatttggaatgtgtaagctaaatt

SEQ ID NO: 443449 - DNA, 201 bp, Homo sapiens
ggaaaatggatgagcacattttgtggtaagtttgccccagtggggagttgaaacatctcaaatgcttggtccagtgtgacctctattgactagactaattktatgcccagaaaaaagtggccacattccttcctttagcattctgtttaagtttcttctatgccctggtatagaatttaaacaaacctctacttcttaaaa

SEQ ID NO: 443450 - DNA, 201 bp, Homo sapiens
ctggtgagattaggaggaaatatatttttatttatattttatctgtattttccaccatgttcaaaataatcatgttacttttgtatcggtaaaaaagttamattatacaatttctacaaagttattaagatttattgcatccattgcaacaaaattgagctccttcaaaagagggctttgtaacaccaaaagccaagaaag

SEQ ID NO: 443451 - DNA, 201 bp, Homo sapiens
gaggaccactgagcaacccggtcctcctttctagctgttccaaaagataaaattgggaaaaaacaaccaagcccattccagtcagaagccaagccttgatygattcattgtggataagcaccaactttagggctgtgttagaacccggaggtgaagaggtagatgtcagcatgggtgctagagagtctggaggctacaggg

SEQ ID NO: 443452 - DNA, 201 bp, Homo sapiens
atttcaggagctcaataatcacatgtggctagtggctactattaatgaaccctgaagatataaaacattttcatcaccgtggaaatttctattaaacagtrctggtacttgcaggtacatccttaatccaggcttcacaggatccctatgataattgctgctgaaaataagttcacaatccaaaattactactagatgaat

SEQ ID NO: 443453 - DNA, 201 bp, Homo sapiens
tccttattctcattagtttcaaagaactttttaacttttgccttaatttcattatttacccaaaagctattcaggagcatattattaaatttccatgtaaytgtatggttttgagtaaatttcatagtattgatttctaatttgattgcactgtagtccaagagattgtttgttatgatttcaggtctttcgcatttgctc

SEQ ID NO: 443454 - DNA, 201 bp, Homo sapiens
tcttataggattgcataggaccacagccaagtgatagttttcactctttaaccacatctaccaggcatacacttctcagtcaacctctcacaagtgacttyattaaatagcttacttaccttcacagtaggcagagtctccctggacagagatgtaaccactcttgcactcacaagtagcttttgtattccagtttttgca

SEQ ID NO: 443455 - DNA, 201 bp, Homo sapiens
tagggccaaggcaaatgttttaggcttaactgcacttgtcaaagatctaatgatttttgcaaactattcacaaaattgagaaacagcccccagtatggctytgctctgctcagaagattaggagtgcatagtgggcactgttaataatcatagttaaagtaggaactttacatcacttcatatcctaccactgtcctatat

SEQ ID NO: 443456 - DNA, 201 bp, Homo sapiens
tgctcagttcaggtcctgaacagacacacagaccaatggaacagaatacagaacccagaaataaggccacgtacctataactatctgatctttcacaaacstgacaaaaacaagcaatggaggaaggattcccacttcaataaatggtgctggataactgggaagccatgggcagaagaatgaagctagatcccctcctta

SEQ ID NO: 443457 - DNA, 201 bp, Homo sapiens
tgataaggatccatcttgttccttacagcaatgagaaactgtgcaccaaggccacgagggcaaaatgttcagttttgcattgtgaaagattactctgtgtrcaacatccaaaaccaattaaagagagctagaatgaaggaagtgaagaggccaccaccaacgttgagatgagaaacatgaaacgctgggtctaaaggatgt

SEQ ID NO: 443458 - DNA, 201 bp, Homo sapiens
actaagtgaagctagtaaggagtaggggaagaatgctgcaggaagagggactagaagatatgttactgagggatggctaatgtgaatggagacaaagaggsagcatggtgcaaaatgagatcagaaggcagagagatcctgaaggttcctgtggtctgtgataaggatccatcttgttccttacagcaatgagaaactgtg

SEQ ID NO: 443459 - DNA, 201 bp, Homo sapiens
caccatatggtggaaaaagtctgggtctataaatgacttcatggagcagagatacctttcctcacgcagattaacattgaactgggaagtaaacaaaaatmaacttttactgataataaccagtgaaatttagagattactagtctaccttgagtcagtaaagagaggtacagaaacatgaaaccgaagaaaggcaaaaag

SEQ ID NO: 443460 - DNA, 201 bp, Homo sapiens
tccagtggagaattctgaggccttattgggtggtggcaccatatggtggaaaaagtctgggtctataaatgacttcatggagcagagatacctttcctcaygcagattaacattgaactgggaagtaaacaaaaataaacttttactgataataaccagtgaaatttagagattactagtctaccttgagtcagtaaagag

SEQ ID NO: 443461 - DNA, 201 bp, Homo sapiens
actaatttgcttaatccacagaacaatactatgaaatagacactctatttacaaatggtaaaaatgaagtgaagaagttaaggaaattgcccaagattacmcagctagtaagagtcatagctaggatttgaatgtaggcagtctgtccccaaaggcttcacattttgccactagacataagccctctctactatctatctt

SEQ ID NO: 443462 - DNA, 201 bp, Homo sapiens
cctattaaattgtggccccatggttaattcagatgttcttgcagattctctttaagcagacaaaaagactaccagatactcaactctaggtattcagcagsctcctctgagtgaaaggatcatcaaaattccattaaatggaattcaccaactgacaagacaaccatctgtcctggttaatttaaaatacctgtcaaaaga

SEQ ID NO: 443463 - DNA, 201 bp, Homo sapiens
aagagagctcttatctaccctgacctctgtcacctgaatgtgagtgcaggctgctcccatgatcaagcaagggcacagtcacttgccagcatgcctaaccmtaaaaggagaaaaggatcaatgagctctcctacacagacccctgggctgatctggtatctacatctgtttggttctgactttgactaccaattcctctct

SEQ ID NO: 443464 - DNA, 201 bp, Homo sapiens
actatactacttcatagagagtacaagaaccttatgataacaaaagaagcctaattctctctcccatcactgtatcattgctgtcattcatttcacttttrtataagagtatataatcgaatacattgttgctatgattttgaacaaactgttatctgttagatcaattaatgataagggaaaagttttaattttaatttt

SEQ ID NO: 443465 - DNA, 201 bp, Homo sapiens
tgcaaattttgaaaaattttatcttatttttatttagtttaaaatatttttaatttcttttgagatttctgttttgacccataggttacttaaaagtgtgytgtttaatccccaataattttggagttctccagctgttattgatttccattttaattctattgtggcatgaatgcagatattgtatgataatttctgttc

SEQ ID NO: 443466 - DNA, 201 bp, Homo sapiens
tttttgtcttagcctgactggaggttcatcaattttgttgatcttttcaaagaactaggttttatttttgttaattttctctattgatttcctgttttcartttcattgattttggcactaatttttattatatgttttctcctgcttattttggatctaatttttttctagtttcctaaggtggaagcttggatcattac

SEQ ID NO: 443467 - DNA, 201 bp, Homo sapiens
ctaaataatttttaaagtccagctcaggtctaaattcctagaattcttatgctaatttgcatctgattggtcaattcgtttcattctattcctgatattaygtcagcattcaggctcctgactccttatcagcctggaggagagaggaaggagaggtaagtgtagcagatgtagccaatatctataccccgccttctccct

SEQ ID NO: 443468 - DNA, 201 bp, Homo sapiens
actatttatcagttgcctcacactgcctttactcagtagtcttcagttatcacttaatatagaccctaaaataaatcccaagaaggggcaattttgcagtrttcaaaatatattttcatcaacatcaactcagtaattgccctgggaacttcaatgcatctgttgatagcactgtcaaaagctgtcaccaaattctacatc

SEQ ID NO: 443469 - DNA, 201 bp, Homo sapiens
tcactgcactaaggtgataaatctatgaacattgctccagtgaaacatgggatggaaatgcaggacagagcaaataaccccgtttataaacaaaatgtgtwcactatgggccaatgttgcttttcaaaggaaaattaagcttcctgacagcagtctgacgcacctgtctctctctaccagtgattgagctcgtgatgttca

SEQ ID NO: 443470 - DNA, 201 bp, Homo sapiens
gtatagaaatgcaccacgagcttatatttgagatcctaccaggattcacacatcatgagaaatctctcaattactttactttgaccaataagcaattactkggggaagggacatgaccttgaaagggcttcaatcaatgacaattagaaatactcacagaagtcacctgctggaatcattaaagagggaggcaaatacatt

SEQ ID NO: 443471 - DNA, 201 bp, Homo sapiens
atgaagtaggagggctaaaaacaaggttagcacttaaaatgcttagcgtctttacaatgggagatgtgtttgtcagtttttaagtaagcatgataagtagkgctccctgttgtcagaataagggagagaaaaagtatttttctgatattttcgatctggcaagagggatagttgacctggctaaggtcactcatacttaaa

SEQ ID NO: 443472 - DNA, 201 bp, Homo sapiens
ggggtttaaaatatatatcccatgtctgaaggtgctttgtgaactagtgaagaaggaagtaaaatatgtccctccccacggcccccccaaaaaaagggtgraaaatggcctaaaaggaacaaatgaggaggcaagaaaagtcatttaatgaatgattgtcatgtgccaggaatatggcaagtgctttcatagacatcatct

SEQ ID NO: 443473 - DNA, 201 bp, Homo sapiens
ctaccattattattattgccatctttactatttattgagaggccaatatgtgccagacatgttgccaactgcttaagatgcattatccattaattttcttwtgtaatatttactgagtgtatgctatgggcactggagttactgcaatgtttaaaccagaggtgatcccttctccaaagagagtatgcaattctggcttat

SEQ ID NO: 443474 - DNA, 201 bp, Homo sapiens
tattttaagggaattctccagtttcttctaagttgttagaacactgaagaatcaaacaatcggagaacttagaggtcaagaagatgttacagactattggmcattcattaattcattcaatatgtctttactgaacacataatgaaaaactaaaaaggggtttaaaatatatatcccatgtctgaaggtgctttgtgaact

SEQ ID NO: 443475 - DNA, 201 bp, Homo sapiens
agactgcacaaaaggaaatgctttaacaaagaagacatttattttaagggaattctccagtttcttctaagttgttagaacactgaagaatcaaacaatcrgagaacttagaggtcaagaagatgttacagactattggccattcattaattcattcaatatgtctttactgaacacataatgaaaaactaaaaaggggtt

SEQ ID NO: 443476 - DNA, 201 bp, Homo sapiens
ttcacccacccacacctgcaggccctgggcatacctgccccaagaatgactcttgctctacaaaaggcttcctgtctccgaagaaaaaaaaagtttgtcgyattcattcaaccaaaatatactaggcatttatgctatatcaagccctgccagggaatgaaggtagaaaatttgatcatctgattgctaatggcttccatc

SEQ ID NO: 443477 - DNA, 201 bp, Homo sapiens
tcattcattcattcagtctatcttactacaagaccaaggtctttaagcaaagctgagcacataagacttccaatgatcttaccacctccaatcttccagckttctctccaacctttacctccccatcctgcactggtaaccactgttcctggtgactggaatgtttttctactcctggacacctggcaaatcatacccact

SEQ ID NO: 443478 - DNA, 201 bp, Homo sapiens
gtcactggcagaactgttctcttcagctttccaagccaagctcttaggtgtaccaccagagctcatgctccccactgcaaactacacttactttagacctmtttactccccactgcatcattcattcattcagtctatcttactacaagaccaaggtctttaagcaaagctgagcacataagacttccaatgatcttacca

SEQ ID NO: 443479 - DNA, 201 bp, Homo sapiens
ccagaccaaattcccaagcactcagattcaggagattttataacaatttccgaattttatatttaaaagctctccaagcaattaaaatattcagccatgtmttctgtgccttctgaagtccaaggggatttggctgcatgtgtggaaaaagactcaatgtttccatgtgaccctccctgcagtcctactgctgctgcccct

SEQ ID NO: 443480 - DNA, 201 bp, Homo sapiens
ctctttgtttcccaatgggagtatataagagcctcctgctagtctttctccaggggttctcaggcttgactgcacatcagaattatcctgaaacctttttwaaaaaaagttgctgtatggatgaactttgtggtatataaattatatctaagtaagtctgctttaaaaaaaaacacatgtgtaaattccacccaaggctaa

SEQ ID NO: 443481 - DNA, 201 bp, Homo sapiens
ctaaataataataacatttgacaattattgagtgcctatgtgccagacattgtcttaaatccttaaagtatgcccattgggcagatatgattatacctagkttacagatgaagaagctgaagttcaaagatataaagtcatccaagaaaatacaaccagtaagtggtagatccaagatagaaacccaagtttatataatac

SEQ ID NO: 443482 - DNA, 201 bp, Homo sapiens
aatatctcatttaaatcatgccctttaaacttaggacagaaagcgtgggatctaaataataataacatttgacaattattgagtgcctatgtgccagacaytgtcttaaatccttaaagtatgcccattgggcagatatgattatacctagtttacagatgaagaagctgaagttcaaagatataaagtcatccaagaaaa

SEQ ID NO: 443483 - DNA, 201 bp, Homo sapiens
agagatatacaagacttgctgtatcatttttgcaacttcctaaaattaatgtaaaagaaaaagttaaaaaaataaatcactgtcttctctcctaagaggcytagccaaggaagccaaaccagtgatcgacatcccaatggaaaaatgtattttatcttttggacttgcaaaaaaggaaagactggatcctctggactttct

SEQ ID NO: 443484 - DNA, 201 bp, Homo sapiens
ggataaaaaatataaaaatagtacctgtataggaaggctgacagaaggattaaattataaattttaggtatttgaaatcattcttttaaaaaaaaaaaacmaaaacccagctcaaatggcagtcatccatcctcactaggaattaagcgcaatatataattttttttttctcactctgtccccaggctggcatgcaatggc

SEQ ID NO: 443485 - DNA, 201 bp, Homo sapiens
gggaattccctgaccccttgcgcttcctgggtgaggcgatgccttgccctgcttcggctcatgctcggtgcactgcacccactgtcctgcacccactttcygacactccccagtgagatgaacccagtacctcagttggaaatgcagaaatcacccatcttctgcatcgctcatgctgggaactgtggactggagctgttc

SEQ ID NO: 443486 - DNA, 201 bp, Homo sapiens
atgttctttatcaagttgaggaagttcgcttctattattccttgtttactgagggtttttatcaatgataggtgttggattttgtcaaatgctttttctcyctttttttttattatacttcaagttttagggtacatgtgcacaacgtgcaggttagttacatatgcatacatgtgccatgttggtgtgctgcacccagca

SEQ ID NO: 443487 - DNA, 201 bp, Homo sapiens
gttcatttctttttggcatagaacaatattccattgtctagatgtaacaaagtttatcctttcaactcctggaagacatttttattgcttccaagtttggrtggttatgaataaagctgctctaaacaatctgtttgcaggttttggtgaggacagagtttacaactcatttggaaaaataccaagaagcacaattgctgt

SEQ ID NO: 443488 - DNA, 201 bp, Homo sapiens
gcccgctttgctgaggcttgcagtaactcaagttctgactgttgggatggtgattctcctctggctagggctggtttaaatactccctccgtgggctggtrttactaaagttcagcccagttttgtcttctgctgtgacaaggcagaattgagttcaatgcaatatctcagaatcactatgctctccccctcccacaaatg

SEQ ID NO: 443489 - DNA, 201 bp, Homo sapiens
ctagacagatgatgtaatgtgttatatagtagaaaatacaactattttggatctagataataattcactagacaaattcagtgtgtgaaactctgtatcayatgcttttaaaaacacagactttatttttagagcagtgttagggtcacagcgaaattgagtggagggtacaaacatgtcctgttttctcttggtccaaaa

SEQ ID NO: 443490 - DNA, 201 bp, Homo sapiens
taggacagaaaaagaaatgaaacatcacaaatgaaatttagatacctacttttgcagtcatcttggccaaaagctcttgtaaatccattattccttgcacsaggcttaagaaatcactgcaggttgggcaagctcaataaagaaaatataaaacatatatatttatattgtgctaatataagaaataaaattttaaaacag

SEQ ID NO: 443491 - DNA, 201 bp, Homo sapiens
aggcaagagaaagaaataaaaggtattcaaataggaagagaggaagtcaaatagtctcggtttacagatgacatgactgtatatttagaaaaccccaacawctctgcccaaaacctccttaagctgataaacaacttctgcaaagtctcagaatataaaatcaatgtgcaaaaatcacaagcattactatacgccaataat

SEQ ID NO: 443492 - DNA, 201 bp, Homo sapiens
ggttcaacatacacaaatcaataaacgtaatccatcacataaagagaaccaatgacaaaaaccacgtgattatctcaatagattcagaaaaggccttcgayaaaattcaataccccttcatgctaaaaactctcaataaactaggtattgacagactgtatctcaaaataataagagctatttatgacaaacctacagcca

SEQ ID NO: 443493 - DNA, 201 bp, Homo sapiens
tgcctcattcttttcaatctttaaaacacattcctgtcttttttccaagaggtgtgttgaaaagaaaatgaaacaatgtaagtaagagcacttgcgaggayggtcttttctgagacacagtgatttctgtcaccttctcaggagatgcctcacaaagccagctgtgctttgttgtggggttctgacttttctgtgatgcac

SEQ ID NO: 443494 - DNA, 201 bp, Homo sapiens
gcaccagagcatggagaaaagccccagctagtaataacaatgctccttcgctggtttcttgtcctctaaccctttgttgctcaaagtatggtccatagacytgcagcatcagtgtcttctgggaacttgttagaaatgcagaatgcctaatctcctgaatcagaatccatgtgttatcaagatccccgaaaggttcatata

SEQ ID NO: 443495 - DNA, 201 bp, Homo sapiens
aagactatttttctcagaagtactttaagaggttcatcataatgaaataaccacaacaagggcagggagactataactttgcttgaatattaatttcatcrtatatgttgattataagatttcaagttaattaaattggataaacaaactaattacattccccatccaatattcttcgtttattcaatcaacattattggg

SEQ ID NO: 443496 - DNA, 201 bp, Homo sapiens
cgtgtcaaaagacagttaccttaagaaaaagagaattgacatgacaagaaaagatccagagatctaaaaaaatgaacaaagttcaagtcagtgaacaagtrtgttcagtgataagtgaaaatcaagaaaaagaaaatatctgataaatacaatggggaagttcagctgacgaaaacaagagccaaaatcaagactattttt

SEQ ID NO: 443497 - DNA, 201 bp, Homo sapiens
tcttgtattagtatctccttgagtgcttctgcaaagtctctaaatgcctcattcttttcaatctttaaaacacattcctgtcttttttccaagaggtgtgwtgaaaagaaaatgaaacaatgtaagtaagagcacttgcgaggatggtcttttctgagacacagtgatttctgtcaccttctcaggagatgcctcacaaag

SEQ ID NO: 443498 - DNA, 201 bp, Homo sapiens
ccgtcctataatttcaaatatatgcttcttgagagaaaacaaagcagaaatattttcctgatttaaatgcacgaattttcttaacttatataaggtgaacrtactctacacttacttatttgccttttgtctttgatttcttcactgttatatccctcatgctttaaaaagtgcctagcacatggtaggaaattgctaggt

SEQ ID NO: 443499 - DNA, 201 bp, Homo sapiens
tttcttgggaaatgactgtggctgtcacatttgcccaggtgtctggctgcaacagcttctggagaatggtggctcctcctttcctgcctcccaacatttgygccagtgcccgtcattggctatctctaacacgaaatcatatagggaaagaaatgctgggaaagtgttcctgtttctctgcaatatgatgcagaagggacc

SEQ ID NO: 443500 - DNA, 201 bp, Homo sapiens
tatattttctaataaatactcttaataataacattaattaatatttaattttctttttctcattagccaggtgtggtggcacatgcctgtgggtcctagcyactcaggagactgaggtggaaggatcacctgagcctgggaggtcgaggctgcagtgagctggcaacatgccactgcactgcagcctgggttagagagtga

SEQ ID NO: 443501 - DNA, 201 bp, Homo sapiens
tctcgttcattcttcagcccttgccttcttcatgaaacttccatctagttcagtgcccagtgacctaacttttctctgaattcctccctaacttaaattcygtagcattccagtgagccagattagctctaaggaggtgatttacagaagatagagatcatgtcttactcttttttgatatcccacactgcccagcatgaa

SEQ ID NO: 443502 - DNA, 201 bp, Homo sapiens
gtgtactcctttgaaagttataaggcctatgttagtattaaagtgtttgatcattcattcattgaacatgtattattgaaacctattctatcctagtttcygggctagaaatgccaagagaaataagaaaggattctcttcccaaacatcctgcataattaaagaaaatacaaatacacaaatatgtaattgaatatgtca

SEQ ID NO: 443503 - DNA, 201 bp, Homo sapiens
cggccacagtttctcagagagagaaaggtagagtttatataaattaacaagaataggacaatattaagtttctcaaaagttgtactaaaaaatgtgacaayacacttaatcctacaatattctgatgaaaaatgttttatataacctagaattctatacccgttcaaactatcaattaagtagaaaggaagaataaaaaca

SEQ ID NO: 443504 - DNA, 201 bp, Homo sapiens
tttcctgaggatgaaaaaacggccacagtttctcagagagagaaaggtagagtttatataaattaacaagaataggacaatattaagtttctcaaaagttstactaaaaaatgtgacaacacacttaatcctacaatattctgatgaaaaatgttttatataacctagaattctatacccgttcaaactatcaattaagta

SEQ ID NO: 443505 - DNA, 201 bp, Homo sapiens
atctgtgctttaggctgaaagacatgttatttataatacaacacagttcttgagttcaaacagcatttttctaagtcaaaataaatataaatctaaacccrttatgtgccagaatcgataactaaatctcattcattattggactcctttgtgcccagtaggatcccactacagttctgggggtattagacaaaagttttg

SEQ ID NO: 443506 - DNA, 201 bp, Homo sapiens
tgccatatttccttaattgaataaaaccatttatttgatagtaatatgggggtaagaagtaattatgtattttatatatatatatataatatatacatatrtaccatttattttatagttaatgtggggttaagaagtaattatgtataacacatatctaggaacaagatggttcctagaatgtaaaatctgaaaatctgt

SEQ ID NO: 443507 - DNA, 201 bp, Homo sapiens
agctgtgctctttctctggctttgaactagcttccttgggtggaattctggacccatgattcttgcttgggtcataattctctctccttccttgtgttctrtttcacagacattctactttgtgagagagatagctagacagatgatgtaatgtgttatatagtagaaaatacaactattttggatctagataataattca

SEQ ID NO: 443508 - DNA, 201 bp, Homo sapiens
tttaatcatttttctatttcttaatggttttctgtacacttttcataggtaatttgtccatgctagctattaacaaatagaactgtgaaatttactttcaktctctcaaatccatttaatatcccttgtatatacctctccaagatatcctcatcaatctaaacaatcacatactatctgagtcccactacaattggtagc

SEQ ID NO: 443509 - DNA, 201 bp, Homo sapiens
aaagttatacttagacaaaatattcttccaagaatgggagttagaaatggtagttattttgataaaaatcccaggtatatgccatatttccttaattgaawaaaaccatttatttgatagtaatatgggggtaagaagtaattatgtattttatatatatatatataatatatacatatataccatttattttatagttaa

SEQ ID NO: 443510 - DNA, 201 bp, Homo sapiens
cggtttcaatgaactgccatgatggcattatgaatttcctcttcatgtgaggcagaggtggaggtcactgacattccctcaaagtccacaggcacacacasatgtctgaacataatcttgacaggcagcataagttcagtcccagtgccatctccaggaatcatagtcactgtgtgctgcccaccacacttcgctgatgga

SEQ ID NO: 443511 - DNA, 201 bp, Homo sapiens
aagagaccatctcccagtttcgtgatgttgaccttgtgcacagccatcacttttttgcatcccatcttctgggccagctggaaggcatattcagcaatgcrcaaagacttggccttagtcatgatctttaggctctctgtcactcctttcacactctcatgctccagattgctatactcaccctctgtgttttcccaaaca

SEQ ID NO: 443512 - DNA, 201 bp, Homo sapiens
gaagttccattgccaggtatatagaagtgaaaactgcctcagccagaagttgcaaccacttgctactggaattgaagaaggtattgacattttaagtctgyatgaattgacttggtctctctaggttacatgtcatcccagctaatgttgatctttttttgtttttttgtttgttttatttttctaatcaataaattctca

SEQ ID NO: 443513 - DNA, 201 bp, Homo sapiens
agaatccatgtgttatcaagatccccgaaaggttcatatacacattaaagtttaagaagcatgactccatcatatatttcccttaggactttgcaggaagkggtggctaactgagcacagaattacgtattcatcagttcccctgacaaatactccatctaatctctgtggaaacacggtcccagaattctgaaaattgag

SEQ ID NO: 443514 - DNA, 201 bp, Homo sapiens
gttcacagggtatggtttactcaattattgatgctttgatgacaaggcattggggcaaaaattcatttatttgatgaaggaagttccattgccaggtatayagaagtgaaaactgcctcagccagaagttgcaaccacttgctactggaattgaagaaggtattgacattttaagtctgcatgaattgacttggtctctct

SEQ ID NO: 443515 - DNA, 201 bp, Homo sapiens
ggcatagcataggaaggcagaactcaggcaatctccttgagttgaggagagaaagctgaagtctggggagaccaaggcacctagatttcacaggacagtayacacaagagaagatagcagcacaaagacggaaacacagatctacccaaaatcagtattcagctgagtactgacctgtgcatacatgttagaaaattaccc

SEQ ID NO: 443516 - DNA, 201 bp, Homo sapiens
gttggaaccaaaagactctagtgtatttaatttttcagaaattagtcacttttctcctttgcttcttttctaaacagcaataataatttgaatttttcatragtaacatttattatgctcatactatatgagccagatactgttgaagtgcattatatcatccatatcaattaagtattattgtcatccctattttctaaa

SEQ ID NO: 443517 - DNA, 201 bp, Homo sapiens
tcttgctgagataaaacctgtgtctgctcttgtgtctagcattctgaaaccatttgttattcactaaattaaccatagattcttttatattttttgccacragtttcctgagcttcaacatattattttatatgtgaatgaattaagaaatcatataaatgtgggtgaattcagttgctggcactggaaaattagaaaatg

SEQ ID NO: 443518 - DNA, 201 bp, Homo sapiens
agtctgcctatattaacagagctgtggtgaaacagtaaaatttctgagcatctccagatctgtactgtctaatatggtaacccctagccacaaaaagcaaytgagcacatgaaatatggctagtgtggctgaggaaatgaattttcaattttgcataattttaattaattttaatttagatttatagtgaatatttgatga

SEQ ID NO: 443519 - DNA, 201 bp, Homo sapiens
acataaataattgtgactgattgttttcttaggataagttactataaataaacatttctaggcctttggctataaaccgtcaagttagcctcaagaaaggytgtatcaatttacattctcatcagtgatatatgaaagtgctgaattcctgaaccttctccagaaaagagtgattgacatatatgtctatctatatatgtg

SEQ ID NO: 443520 - DNA, 201 bp, Homo sapiens
ttaaatgttaagcatacagatcctataaatgttttgttagacttttaactagatatttcattttcttaggcatttcattttactttggagcaattatataygatagtaggtgcttaattctagtttctacacatcagttactagtatataggaataaaattaattttctgtattgatcttgtaacttgagactttgatgaa

SEQ ID NO: 443521 - DNA, 201 bp, Homo sapiens
ccttcctttatcaatcttctgtcttgctgagataaaacctgtgtctgctcttgtgtctagcattctgaaaccatttgttattcactaaattaaccatagaytcttttatattttttgccacgagtttcctgagcttcaacatattattttatatgtgaatgaattaagaaatcatataaatgtgggtgaattcagttgctg

SEQ ID NO: 443522 - DNA, 201 bp, Homo sapiens
tcctcttcttcctcttcctcctcttcctcttcttcttctcggatcatagctcactgaatccttgaactactaggctcaagcaatcctcttcctcagcttcmtgagtagctgggactacaggcccatgtcataatgcctggctaattacacctggctaattttttaaatttttttcttttgtagagacagattgctgctatg

SEQ ID NO: 443523 - DNA, 201 bp, Homo sapiens
agaagtacagggtgaaggaggggggaatagccccttatgaaaccatcagatctcgtgggaactcactcactatcacaagagcagcatggaggtaactaccytcatgactaaattacttcccactgggtccctcctacaacacataggcattatggaaactacaattcagggtgagatttgggtgggaaaacagccaaacca

SEQ ID NO: 443524 - DNA, 201 bp, Homo sapiens
caaggcctgccccaccaatcaaacctgtgcagacactgttgataacattgccataaagactgagcattaccatgacatcaaactgttggggctgggatackcactgcattgtggcattctccacaatcatgtcttctaaggtgagctgaggatagcgggatgccacctcccccacagcactggaggaagagaccatctccc

SEQ ID NO: 443525 - DNA, 201 bp, Homo sapiens
caaaaaaggaacaagtaagtacatatcattgtagcaagcactgtggatgaagagatgaaaggccatgaatcttggcttcaaagacgtcagcacttaatggkacttctaaaagtccatttataatccaaaaatctcctgctgcagatgatgactgaggcctaaagagttaaaatgacttgcctgaggctatgtagtatgtta

SEQ ID NO: 443526 - DNA, 201 bp, Homo sapiens
aagaatgtcctcaattcatttagataaaattgtcctcaatttaaacaaaaaatttttatggcatttcaatttaatgggaaaaaaatcagttttggttcacrcaggcccccaccctgccctgcttgtgaattaaaggataagctggtttcttgtggagtctgcagtagctaagctggctagggtttttaaagcagaaagagt

SEQ ID NO: 443527 - DNA, 201 bp, Homo sapiens
ttggccacagtgtaggtaattttttacttaaaaaaattacagattcacaggaagttgcaaaagaagaaagaagactcctatgtacccttcacccagcttcmcccaatgtacctttcactcagcttcccacaatgtacctttcccctagcttcccccaatgtaccctttgcctacctttccccaatgtattatctcgttctc

SEQ ID NO: 443528 - DNA, 201 bp, Homo sapiens
gaatactgccatgcaatttttatgcccatttttgtttttcgtttataatacattgtgttaagaggttatattttaagtattgttagcaaatgagaaaaaamgtaaaagtagacttgattcataaatgatgtattcaagctaaatgaaggcaagatggtatttacagcatgcttctcaaaagaagacttagcgatggttcaa

SEQ ID NO: 443529 - DNA, 201 bp, Homo sapiens
aaggaataaaaatctatatattgaagagatatttgcacccccatatttactgcagcattattcacaatagccaacatacggaatcaacctaagtgtccatmaatacaagaatggattcaaaatgtgtcatgtatacacaatggaatactacaaagtaataaaaagaataaaatcctgccattagtggcaacatcgatgagc

SEQ ID NO: 443530 - DNA, 201 bp, Homo sapiens
gattatttttctacagataaacatatgcatgtaccatgtgcacagataggtacaagtttattcactgaaatgttctttttggaagtaaacctggaaaaaamctaaaagattcaccaatagtgatctgtttaaataaatcatgccacagccacactaagaatacaatataggcatagaaagatataatatgattctatatgt

SEQ ID NO: 443531 - DNA, 201 bp, Homo sapiens
ttccactggaagtcaagtctcccattttctaatcctataacagttgatctgtgcctttgcttcttttggggccctgagtatttaatgtcttggagttgtgrgtttatgtccattgccccaaagttgtggaaagatattagacgttagatgtgagctccttaaagacccagaattctgtcttgtgcccaacatagccagcta

SEQ ID NO: 443532 - DNA, 201 bp, Homo sapiens
tctatgcctctgaatgaatgcataaactaatatacaattatttaagtttttaagctaggaaatgacatgataactcatgcagttttaacacattgtaagayaaaataaatctttctgagtttctcttcaaaggatttagcctgttaacttccttatcctttgttctcaaactcaactttcttattcttccttgcccctagt

SEQ ID NO: 443533 - DNA, 201 bp, Homo sapiens
atctgctctgtaaaagtactttgtaaagtctaaaatgcttttcacaaacagaacattattaatgtttttaggtgagatcaatgcctttatcttcacagaawaatctaaaagacattttagtttgaaatattttcagacaaaataccaaaaacctcattgaagccacttggctcaactggttagaacatagtatctagtgtt

SEQ ID NO: 443534 - DNA, 201 bp, Homo sapiens
gcactcccacctaacatcaaattcaaaccctttcagacacccgtggaaggatagaaaacatttcctctccaccagttagtaataaatgtcctttctcccastaccaatgctctttcccatagcatttaatgcctgtaactcacaatttagaactcagttatatgcctgataaaattattctacttaaatgtaaattttatg

SEQ ID NO: 443535 - DNA, 201 bp, Homo sapiens
atgagatgttaatgaccctgtggcgttcaataggtagatccaaaaaataccctttgcggtgcagtttttaaaacgcccttcttggattttcacagtagctraatgttagagacaaatttgaaacacaattgtttgggcctttgaaaaccagataatcataagtacatttcatcaggttcaaagaaagttcagaaacatgaa

SEQ ID NO: 443536 - DNA, 201 bp, Homo sapiens
tggagatggcgagatcaccatgttggccaggctgatctcgaactcctgaccttaagtgatacacctgcctaggcctcccaaagtgctgggattacaggtgygagctcccgtgcccacccagagtcactggatttaatagtttctacaagccctttgagctttctagagtctttgaatacagattggttagaagctacatta

SEQ ID NO: 443537 - DNA, 201 bp, Homo sapiens
gaggaattacatcagtcactccagtcctctgacagaacatgcaagtactatcttgagcataagggaaagaggaggtctccaaaagctgtgaggaagctttmaactttgaataagctgaatacttagcttacctaaatgagctgagtccatccaaacaacagttttaagttaagtgagatccaaggacctataatcacacag

SEQ ID NO: 443538 - DNA, 201 bp, Homo sapiens
gttttagtcagaaaagtttcagagtcactggatttttttttttaagacagagtctcactctatcacacaggctagagtacagtggcacgatcttggctcaytgcagccaccaccccccgggttcaaggattgtcccacctcagtctcccaagtagctaggattacaggtgtgcgccatcacacctggctaatctttgtatt

SEQ ID NO: 443539 - DNA, 201 bp, Homo sapiens
gcagagcatcggtgactacgttaagaacagtacaagtagaatgaacgtagaaatctggctgcagcgagttgatgagtggagtgagagtgtgcaaaaacttkgggctgaaagattctacctggaggttagtctgaatttatgattttaggagtagagtagttaagcaatggcaaggtcaagagcattaggaaggccaggggt

SEQ ID NO: 443540 - DNA, 201 bp, Homo sapiens
ttaatactcccagggattccactaaaaacgataatgccacaaattaaattaatgagacccctggaatataaggtaaatttccctttctatatcctaaaagyctcaaattcaacagttttgaagtatcttctatggagcagaaggattctaacagcaatgcactgataaaagtctaacaatcgactcttggtccggtggggc

SEQ ID NO: 443541 - DNA, 201 bp, Homo sapiens
tttggaacacatatttgagggaataattgaggaaaacctcactggccttactaaagatctagacagctagacaagaagctcaaagaactaaagatctagayatctagatctaggcatcttactaaagatctagaaatttagacaagaagctcaaagaacacttgggaaattcattgcaaaatgatcttcacctacgcacac

SEQ ID NO: 443542 - DNA, 201 bp, Homo sapiens
ttaataattatttatgtgcctctcttatctcccctaatgctcctaatatgcacttgttttaaattatctttgtacttggcaagtactcagaaaccattgaygtgacaaacgaatacatgtgggttctgcaattcataaatggccctgtggccagatcttgtatttccttagtccttcctttatcaatcttctgtcttgctg

SEQ ID NO: 443543 - DNA, 201 bp, Homo sapiens
caaccattctgagtactgtcactaactgccactgaataactggattacctgggaattgttagtttcaattagttctatgaaaatcattgactggctttaarttcacttaaaagtgtaaagaactggaagcaaagagaaatagggaaatggccacatgaggcaggaatggaatagaaataaccttttaaatcaggaagatat

SEQ ID NO: 443544 - DNA, 201 bp, Homo sapiens
agagaaaatcagtgtgccaagctctgggaaagccccaggactccacaaacagctctgatttattcagtatataatatcgtagagaagggagaattgtggaytaaaatagataagaatgtcctcaattcatttagataaaattgtcctcaatttaaacaaaaaatttttatggcatttcaatttaatgggaaaaaaatcagt

SEQ ID NO: 443545 - DNA, 201 bp, Homo sapiens
atgattccctaacttgacaggtgaagaagctaagaaccaaacatgttatgaaagttgcttaatgatacacattaatgttgaaataacaattcaaaggtgtkcctgtgtctggtcctaaatcttatgcatttcttggctacttaatttaagctaacacattgcaatacctaaatagcaactgaagcgattgtcaaccaccga

SEQ ID NO: 443546 - DNA, 201 bp, Homo sapiens
aatttttcttcctaagtatctctcaaactcatttgcacatttccacttccattgccattccgcttatccaagttatcaacatctctcacttgggctattgmtatagcttcccaatgcatctcctcacattccccattgcccacctgcaatttatttttcatactgcacttacagcaatcttttaggaattcaagtcttatc

SEQ ID NO: 443547 - DNA, 201 bp, Homo sapiens
tatatcaccaagatatatatttttcttcccaaggaacttaggctgaagaacttataccataattcaataaaaaaaatcttatgttttcatagaaaagacaytttgtatgttctattaagattgttttatagcacgtggtatttcagctttaacagccaacattacagaaagggttgtataatttaaagtagcaagaaagga

SEQ ID NO: 443548 - DNA, 201 bp, Homo sapiens
atcaaacaaaattgcaatgctccaaatgattatagatgtatatttaagcctccctcccccaaaacaaaaaaacaaaaaaggaacaagtaagtacatatcaytgtagcaagcactgtggatgaagagatgaaaggccatgaatcttggcttcaaagacgtcagcacttaatggtacttctaaaagtccatttataatccaaa

SEQ ID NO: 443549 - DNA, 201 bp, Homo sapiens
tcatttaagaatttagagaaaaatgccatttcatatttctcaaagtaacaaataaagtcttcccaattgctccttttaattatctgtttcttacattgtasctggatagctttatggtttccaggagacttatatcaccaagatatatatttttcttcccaaggaacttaggctgaagaacttataccataattcaataaa

SEQ ID NO: 443550 - DNA, 201 bp, Homo sapiens
agcatagtcaatgccagaggggtgatatttgccaacaagtgttcaaaagcgtgtatgaaactcagcatgacaagaacttcaaaggggagaccagctgtccrtcctgtacctgtgtctccagttttccctcagaaatctcctgatgtgcaaaggaaggttctttgatcacttgtgtgacaattccaagtcacaagtcaatag

SEQ ID NO: 443551 - DNA, 201 bp, Homo sapiens
ttcacagttctcacgtgggctttagtttgtcaagtaagcgattttcatttaagaatttagagaaaaatgccatttcatatttctcaaagtaacaaataaaktcttcccaattgctccttttaattatctgtttcttacattgtacctggatagctttatggtttccaggagacttatatcaccaagatatatatttttctt

SEQ ID NO: 443552 - DNA, 201 bp, Homo sapiens
atgctgtcataaaagctataaatagattgctcttatgatctacatgttcccaacaaccaaggaactctgtgagtttaagagaaagcagtaaatatcacaaygataaaggtgatagcgtgcttttccccacttttaagcaatactgtgattccatgttcaacattaagtgaaaaacaaaaataacagaaattataataatag

SEQ ID NO: 443553 - DNA, 201 bp, Homo sapiens
cccaagagttttaaatacattttcatggtggtagagcatgtttccaaaaatggtcacatcaatagtgctcctcacctatgtgcccctttgtaatgtgaccytgtcattctctcatcaagagtcagaatttgttcccccattcttaaatctggtctaccctattattgcctaatttgatcaacagaatatagtagaaagggc

SEQ ID NO: 443554 - DNA, 201 bp, Homo sapiens
cctcatttaaaaaataaggatattactgttaactgtatggattgtcatgaggattaaacaaaatacattacatgcccttggcacttagtctgtgctgacaytgtgtaagtctcatgggtacctaagaatgtggagctgcacaggtcatgtgacccagtccagcctacttgctgtagctctcaccaaatggacccactgaga

SEQ ID NO: 443555 - DNA, 201 bp, Homo sapiens
cacttccctagcagagattctccatgaggcctctgcctctgcagcagacttctgcctggacaaccaagcatttccatatatcctctgaaatctaggtggasgttcccaaacctcaattcttgacttctgtgcacctacaggcttaacactacatggaagctgtcaaagttaggggcttgcaccctcagaagtaatgggaaa

SEQ ID NO: 443556 - DNA, 201 bp, Homo sapiens
agggtaagacttcgaaagtacaggcaacaaaactaaaaataggtgagtggaattatattaaactaaagtgcttctgcacagggaaagaaacaacagagtawagagacaacctacgaaatggggcaataggttttcaagctatcatgtgacaagggattaatatccagaatatacaaggaactcaaataatttaacagcaca

SEQ ID NO: 443557 - DNA, 201 bp, Homo sapiens
tgcttttaatcactttagttcagaactataatctgtgtcataaaagatgaaagacattatccctaccaggtcataaatatatatttttttaatttactgasgtaacatttaggagacttcggggggaaaaaaactcaatgtcacctttgtctagcattttctgctttctaatattttaataacacttttctcataataata

SEQ ID NO: 443558 - DNA, 201 bp, Homo sapiens
ggttcacttggtcacaagcccaagctatttctttctttctaacaatggctattgcttgctgaacacatcgcattagcattttatttatttatttatttatwatctcaataggtttttggacaacagtaggtgcttgcttacgtgaataggttcttcagtggtgatttctgagattttggtctgaatgcacccgatcttgtc

SEQ ID NO: 443559 - DNA, 201 bp, Homo sapiens
aaagcacagaaacctgactcatgtctctacgacttttcattttgttttcccataatattccatcaacaccacacatttcaccaacccacccagccaagaastattaaatttttagaatcagaaacatgaacaatattctaatcaagatttcctgcttgctcaggtagaactggccattctttctgctgtgcttgaaattca

SEQ ID NO: 443560 - DNA, 201 bp, Homo sapiens
gggatgacctgcctgcagaaaggatctacctacttcgggtctcctgagagctgttctgtcactcaataaagctcctcttcaccttgctcaccctccagttktctgcatacttcattcatcctggatgcgggacaagaaattgggacccatcaaatggcaggactgaaagagcagcaacgcaaacagggtttaaacatgcac

SEQ ID NO: 443561 - DNA, 201 bp, Homo sapiens
tggctgcataaatgtcttcttttaagaagtgtctatccatatactttgcccacttgttgatggggttgtttgtttttttcttgtaaatttgtttgagttcwttgtagattctggatattagccctttgtcagatgagtagattgcaaaaattttctcccattctgtaggtttcctgttcactctgatggtagtttcttttg

SEQ ID NO: 443562 - DNA, 201 bp, Homo sapiens
ttgttatatgttttagttgctgattctatatgctataattccattaagcattttatatttcttagctcacatatccctcatattatgtcatgataaaggarcagctattgttatcattcctgtttttcaaataaggaaacaggctcagatgggttaaagtgacttgctgtaagtcacatgagttgtagaactaagacacaa

SEQ ID NO: 443563 - DNA, 201 bp, Homo sapiens
tttcctcatttaaaaaataaggatattactgttaactgtatggattgtcatgaggattaaacaaaatacattacatgcccttggcacttagtctgtgctgmcattgtgtaagtctcatgggtacctaagaatgtggagctgcacaggtcatgtgacccagtccagcctacttgctgtagctctcaccaaatggacccactg

SEQ ID NO: 443564 - DNA, 201 bp, Homo sapiens
aaaaaataaaaagatatcttttcttttctttttttttttttttttttttttttttttgagacggagtttcactcttgttgcccaggctggggtgcaatggygccatctcagctcaccacaacctccacctcccgggttcaagcaattctcctgcctcagcctcctgagtagctgggattacaggcatgcaccaccacaccc

SEQ ID NO: 443565 - DNA, 201 bp, Homo sapiens
ctcaaacccagatttagctgcacaaataatgccatcaggttctctccaccctcagaaaacacctttgccaaacaaagtgctgagaatgtgagagagcaatraagtgtacactacatttcaaaggtccctccagggagaaaccttacgtttctatttacatagggtagcgctggttttcgtggtttctgaaagatggagaaa

SEQ ID NO: 443566 - DNA, 201 bp, Homo sapiens
cactcctccctgctgtgatggagctgactgcctcctgccagagggcgatgtattcctccggtggttctcacaaggaaagtgcagaagaactgaaagactgyccacttgtgtcaaggaaagtgagtgatggtgagcctgctgcagttgggagctgtcgcgctgcagtcttatatcttagctgcacagtccattactctacta

SEQ ID NO: 443567 - DNA, 201 bp, Homo sapiens
atttaaagttaagattgggcaatgtcaagataaccatttcagaatggttttgaatataacatgtgaccactgaactttctagattgcagttcaaatggagyttttgtgtgtctcagcatctggcatctgtggcttcattgagctgcccacaataaaactatttcactatgcatcctcttcctctgctatcatgaattataa

SEQ ID NO: 443568 - DNA, 201 bp, Homo sapiens
aaagcaactacttttctaagatatctaaaaaataaaaagatatcttttcttttctttttttttttttttttttttttttttttgagacggagtttcactcytgttgcccaggctggggtgcaatggcgccatctcagctcaccacaacctccacctcccgggttcaagcaattctcctgcctcagcctcctgagtagctgg

SEQ ID NO: 443569 - DNA, 201 bp, Homo sapiens
gaaactatcattcttcctaattaaaattcagagattcctgacttgattgttatttgaacaatcaagttatttgattaaaataactttaattttaaaaattraaaatgtttttaaattgctgtcactgataaatcacacctattcacagttggatttcatactttgtttattgacatctcaaacccagcatgacccaagaag

SEQ ID NO: 443570 - DNA, 201 bp, Homo sapiens
tcatacatatatgtacatatgtaatgtacatatgtatatataacacatatatatgtatatatggatatgtatgcatatcatctactatacacaaatatacmtatccatatatgtatacatacataaacacaagcctacatatatattcttatgagtgtgcatttgtaaatttatatattaggtggttacatggggagttgg

SEQ ID NO: 443571 - DNA, 201 bp, Homo sapiens
agatgcagacaggatagtttctggattgcctccttctgctagatagtggactggctttaccttaaaaatttccattccaacactcagtcacgcatgggatstaagtaatttctcccatcccacacagacggttgaaatttaaagctctaactgaaattttcatagattgctggtgggaatgcaaaaactggcacagctgct

SEQ ID NO: 443572 - DNA, 201 bp, Homo sapiens
agactattgcctgcgtagcttaactttccattagggtacctctgctaatgccaaactaatccaaagcaactacttttctaagatatctaaaaaataaaaakatatcttttcttttctttttttttttttttttttttttttttttgagacggagtttcactcttgttgcccaggctggggtgcaatggcgccatctcagct

SEQ ID NO: 443573 - DNA, 201 bp, Homo sapiens
aatatcattctaaggcaaatatttaaaaatacatggggatgtttcatttctttaatttggtgtgtgtatatatatatgtacacacacacacacacacacayatatatatatatacatacacattcatatatatgtacgtgtatatatatacacatatttttgagtcagactctcgctctgttgcccaggctaaaattgcag

SEQ ID NO: 443574 - DNA, 201 bp, Homo sapiens
gaaaactttagttcagctcaataaaatgatcaaacattcatttctcttttcctttcttttttatttgctctttcttggtaatatctccatcctcctgccastggatggtgagggttagaaagagtaatattactccctatttatagcttttatctctcttcttaaccctttcttgtcaaaccatgaactttctcagccatg

SEQ ID NO: 443575 - DNA, 201 bp, Homo sapiens
tttagtttatcttaaatatttctaaatgaatttttaaaatgttactaatactaataaatgtgtgtgtgtgtgtgtgtgtgtgtgtgtgtgtgtgtgtgtgkataaaggctagcaagaggttaaaaccatagttaaggtaacaagtccataagaactctacatgtttaaattaagtaagttatttaaaatcagaatgttagg

SEQ ID NO: 443576 - DNA, 201 bp, Homo sapiens
ctttttgttgatgttgatgctactcctttctgttagttttccttgtaacagtcaggcccctctgcagcaggtctgctggagtttgctgaaggtccactccwgaccctgtttccctgggtatcaccagcagaggctgcagaacagcaaagactgttgcctgttccttcctctggaagctttgtcccagaggggcacctgcca

SEQ ID NO: 443577 - DNA, 201 bp, Homo sapiens
tttcctcatcttcatggatttatctacctttggttttttatgttggtgatcttcggatggggtttctgtgtggatgtcctttttgttgatgttgatgctaytcctttctgttagttttccttgtaacagtcaggcccctctgcagcaggtctgctggagtttgctgaaggtccactccagaccctgtttccctgggtatca

SEQ ID NO: 443578 - DNA, 201 bp, Homo sapiens
ctggagaggagctgtgatgctttgggggagaagaggcattcttgtttttggaattttcagcctttttgcactggtttttcctcatcttcatggatttatcyacctttggttttttatgttggtgatcttcggatggggtttctgtgtggatgtcctttttgttgatgttgatgctactcctttctgttagttttccttgta

SEQ ID NO: 443579 - DNA, 201 bp, Homo sapiens
atattcaattcaaaattattcaattcaaatttcaattcaaaattcaattcaattgattcaattgattcaattcaattcaattcaattcaattgattcagtygattcaattcaattgattcaattgattacagtatctataaaaaaatccttaatattcaattcaaaattattcaattcaaaattattttagctattctagt

SEQ ID NO: 443580 - DNA, 201 bp, Homo sapiens
atgcatccagcactggaggacccaaattcataaagcaaatgttactacatctgaagagagaaagagaaagagagagagagagagaagagattccaatacartaatgatagggggcttgaacaacccactctcagcattagatagatcatctagacagaacatcaacaaaaaaagattggatttgaactggactttaggcca

SEQ ID NO: 443581 - DNA, 201 bp, Homo sapiens
ctgtcgctgaaacctagtccactttcacataaatgtgtgaaaattcacaatgtacaaacactcatgaccatttaaatacttgggttttagagccaaacccyttgacttttaaaggtggcctcaactcctgttagttgtgtgacctcaggtaaatttcttaacacctttgtccctcagttttctcaaccataaaatcaggat

SEQ ID NO: 443582 - DNA, 201 bp, Homo sapiens
tataaacctcaaatattaatggttttgatttcccagttaaaatatatggacgggctgaatggattttttgtaagacccaactacctgaagttcataagaarctaatattgcctgtaaaaacacacaccatctaaaagtaaagggataaaaaatatattccacacaaatagatatcaaaagtgagcagaagtagctatgttt

SEQ ID NO: 443583 - DNA, 201 bp, Homo sapiens
agccacagactgtaaaaagcatctgccaatctgtataaaaactataaccatggtcaagtaatgctagtaacttcagttgcccacttctggagtgctctagrcaaatacaaaatagcctcacaggagagagaagatggagagcagataatcttttttcgggggaaaggtgatttcttgggaaaagatgaggaaagtatcagg

SEQ ID NO: 443584 - DNA, 201 bp, Homo sapiens
aaaaataaacacacacacacacacacacacacacacacacacacacacacacatataagacaataaaatgttgaaatttcccaggacccagacacaggcartatctaatcaggactactttttcccatgaaaagtcaattaagcacaagtttctggctgggtgattgaaggtgttccaggttctttactctcctccaaatg

SEQ ID NO: 443585 - DNA, 201 bp, Homo sapiens
tagttctctgggaagtattattttttctcatctggagatgagatgcagacaggatagtttctggattgcctccttctgctagatagtggactggctttacyttaaaaatttccattccaacactcagtcacgcatgggatctaagtaatttctcccatcccacacagacggttgaaatttaaagctctaactgaaattttc

SEQ ID NO: 443586 - DNA, 201 bp, Homo sapiens
ttttagtttatcttaaatatttctaaatgaatttttaaaatgttactaatactaataaatgtgtgtgtgtgtgtgtgtgtgtgtgtgtgtgtgtgtgtgtgtataaaggctagcaagaggttaaaaccatagttaaggtaacaagtccataagaactctacatgtttaaattaagtaagttatttaaaatcagaatgttag

SEQ ID NO: 443587 - DNA, 201 bp, Homo sapiens
ctgtggtttactagttctctgggaagtattattttttctcatctggagatgagatgcagacaggatagtttctggattgcctccttctgctagatagtggrctggctttaccttaaaaatttccattccaacactcagtcacgcatgggatctaagtaatttctcccatcccacacagacggttgaaatttaaagctctaa

SEQ ID NO: 443588 - DNA, 201 bp, Homo sapiens
gtatccatcatgacaagcatttattctttgtgtttcaaacaatccaattacgctgttttagtcatttttaacttttaaaatttagtcattttaaattaatwtgtaaatgtgattaatttttaaaagtgatttttaaatgtaaatgtaaattattttttactgtagtcactctgttgtgtaagcaaatactacatcttattt

SEQ ID NO: 443589 - DNA, 201 bp, Homo sapiens
tagcaatatattaaaaatcagaatctaaacaattttaattcccatttctcttttttatgatatgacctaaacaaaaaatatataattggataaattttacmatgtcagaccttagaagataaaacaaattgccttagagttaattcattgcagactttcagaactgtgaccaaagcctcatccaaagctagtgatggtcaa

SEQ ID NO: 443590 - DNA, 201 bp, Homo sapiens
ttcaacttcaagtttgcctgacatttccagactccatctccttccacctgccaaaaaagtgagttacattttcgcctccaccaagacggcagactacatamcctgaaggacttcaccaactgaaccaactaaactgctgtattcaatatataaataaaaacttttgaaaattgtcacagagctaatacaaaaggaagaaac

SEQ ID NO: 443591 - DNA, 201 bp, Homo sapiens
agctgacaccatgcctctgccgtgatttaagcccgcaaaatggaaacctctgtcccatcctatttttatatataactcagttccttgtcaaagctaccaasaatttatctatttagaagaccctaagtcatacttgggacccagatagcaagggaatttgagaaatgtggatctagtcatcccagactctgtagaacaaca

SEQ ID NO: 443592 - DNA, 201 bp, Homo sapiens
tcccaaggtacctaatccagggtcactttaatatactttattgagcttcatgggtaaagtaaatctgggtgtcaagtctgcaacccttcaagtgctgtggkttactagttctctgggaagtattattttttctcatctggagatgagatgcagacaggatagtttctggattgcctccttctgctagatagtggactggct

SEQ ID NO: 443593 - DNA, 201 bp, Homo sapiens
cacttgttttataaaaacaattgtacatatactttatatagagtgacagatatatatatatataatacagtatatatataaactacagtatatatataatmcagtatatatatatactggaaagacacatttgtatgtttacatggatggatagacagctactgacactcattcaacaaagtatttgtaaggaagcttaca

SEQ ID NO: 443594 - DNA, 201 bp, Homo sapiens
gccacataaaagatagggtgctcctgctaacaaaacctttatctcctgtctcttcctctctctctctattacggacaaatttgaaaacctaaagctttacwtgcattgttttgtaagagcttattcatccaggtttagcctccaacacaaaaacagatgcagggatgtaaacatgcatgcatatttcacatacctcaaatt

SEQ ID NO: 443595 - DNA, 201 bp, Homo sapiens
catgaaatgcagtcatatatagataaatgtaaattttttcacttgttttataaaaacaattgtacatatactttatatagagtgacagatatatatatatwtaatacagtatatatataaactacagtatatatataatacagtatatatatatactggaaagacacatttgtatgtttacatggatggatagacagctac

SEQ ID NO: 443596 - DNA, 201 bp, Homo sapiens
atagcaagccaagaaaatggagtcaagtgccatgaaatgcagtcatatatagataaatgtaaattttttcacttgttttataaaaacaattgtacatataytttatatagagtgacagatatatatatatataatacagtatatatataaactacagtatatatataatacagtatatatatatactggaaagacacattt

SEQ ID NO: 443597 - DNA, 201 bp, Homo sapiens
gcatttgcttaatgcatttttgtcgaatgattattgaatgagatctatgatcttatacatcttatttcaagtaatgcatgggaggggcaggcaggaggaaraggcatttttaacagtatatcagccctctgggagtagagttagtattatcataactagcattacagactgattcccctaataccaactcaaaaccctttc

SEQ ID NO: 443598 - DNA, 201 bp, Homo sapiens
aatgtgaaagtgcttggtaaatctgatagccctgtgcattcctaattataagcaaagcagagaactaggagttagattgatattgccagaaaatgtgccaragtctataatttgcctcttccctcactggcctctacagtcaagcttgaaatttaccccctttgcctcctaccgtcacgtaactcttttaaatgaggatgc

SEQ ID NO: 443599 - DNA, 201 bp, Homo sapiens
ctatcatttcattcagtacctagtttgctctcaaataactgttgaactaaactgaaggcaagaaagaaggctatcactgcctttccctggagtagtgaggraagtcttcatgaaaaaggtgggtattaaagtttaagagtgttctgataggaaagaaaaagtatcattctccctgtggcaaagtacataagctgttaaatt

SEQ ID NO: 443600 - DNA, 201 bp, Homo sapiens
aggtaccaactcacaagggtatttctggaacagctgccatgttccagctaagacaggaacaagaggtgttctcaacatgccattgaggcttgaggaccatygccaccaggtggcaccaaataggcagcaagaatggggtggatctgggccctggatctgactcaagtaggcaggctcattccaattatgtcctctttgtta

SEQ ID NO: 443601 - DNA, 201 bp, Homo sapiens
gacttaatctgtgggcatcctttgaggtctacatcaaaagtgactttctccaaagataatttgtattttcttcatcaggactcccaaggtacctaatccarggtcactttaatatactttattgagcttcatgggtaaagtaaatctgggtgtcaagtctgcaacccttcaagtgctgtggtttactagttctctgggaag

SEQ ID NO: 443602 - DNA, 201 bp, Homo sapiens
atttgatcatcccataatgtatacatgtattgagacatcattgtaatccacaaatatacacaattattttttgtaaattaaaaataaaaattaaaaaaacwgaagaactcgacttgaccaaataacatgttatcactccttaaatcaggagtgcattaacatcccttaacatcagtttggggtgcaataacaaaatacaaa

SEQ ID NO: 443603 - DNA, 201 bp, Homo sapiens
acatctatgtggaatctaaaaaagtcaaactcatagatgtagggagtaaaacggtggttaccaggggctgaaagatggcagggggtagatagaaaaagggkagatattggtcaaaatgtacaaagcttcagttagacaaaaaaatcagttctggtcatctattgcatagcatggcgactatagttcataataatgtgtatt

SEQ ID NO: 443604 - DNA, 201 bp, Homo sapiens
cacacagtattggcatgacagtaatgcatcttagctgcacactcatcaatatctgaaggaaaaaaaataagtaagatcatggttagcaaaataatggaacracagtgtaatcattttgcagataaattaaaaaagataaatgtccatagaagccaagagaaaaagtaacatgcattaaacacaaaagcttaggtgaaaatt

SEQ ID NO: 443605 - DNA, 201 bp, Homo sapiens
tgtcttctttcaaggtccacacctggccattgtgcttcagccccccttcatgaggacagtcaccagagcaggagggcccagaggggcagagacagtcaaarccccctgccaggttgatgcaggcagaatcgttccaacaggtgtgagttcttaaggcacattcatcaatgtctgcaatataggaagcacagaagcttagaa

SEQ ID NO: 443606 - DNA, 201 bp, Homo sapiens
cttcaaattttgttttgcattgtggctctgccattttctatctgtatgactttggacaaactactcaatttctctgaatagcagtttcctgattccgaagmcaaaaaaaaaaaaaaaaagcaggggttgcttctcttatatgggatgaaacagacttcaaaccaaccacattaaaaaaggacaaagaaagacgttacatat

SEQ ID NO: 443607 - DNA, 201 bp, Homo sapiens
aaatgtttatacatagccattcataaaatgtcaaatagtctgtcttctactgaaactacaaaaactcaataaacaaaaatacatagtcataaagacaccayatgacatatgacatactgagaccaaaaattcaaaataataacaaaaatagcactgaagtccttagttttggtcacactcatctacattaatatctgacca

SEQ ID NO: 443608 - DNA, 201 bp, Homo sapiens
ttgacccaggagctaggtcaagtttataatcatacactcaatattacttcacagtatgtaccacaattgtcctattatgtgaaatgatacatcttctgacwagattaccaatattaggaggaccgaaaccatgtttgtttttgctttacattgccaaccatgatgcttgacacatagcagccactcagtgaatatttgctg

SEQ ID NO: 443609 - DNA, 201 bp, Homo sapiens
cctccttctaatcaatgttattaaattatttttctggatagttagttaatttggaaagcaatgtgttaacttaaagttggacaaagtaatcattccaaaartaaagaaaaaactatcatacaaaaaaaaaaaatcctttctaaaagagccatcatacactggaatagagctcttccgggtagttgctaagagtagggactc

SEQ ID NO: 443610 - DNA, 201 bp, Homo sapiens
gctcttttgaagaaactcagtcagacaaaaataagaagacattttaaaagaataaattaagcctaaaaggacatatgggccaccattaagtaaacaaataygtgaattttggaagttctaagaagaaaagatgggaaatggcatagaaaacctatttttaaaaaatagccataggctgggcatggtggcacatacctataa

SEQ ID NO: 443611 - DNA, 201 bp, Homo sapiens
agttagcctatcactaattctaggggccatttctggctatcaacacactaaattttcctaagaattttaccaaagcccagagctctcatgaccaaacacaraaagcctaagctgaaaacatgcaatggtgaaacatacaacattttcatacaccagaaggtgctaagggaggggtcaacagttacaggctgccacctgttt

SEQ ID NO: 443612 - DNA, 201 bp, Homo sapiens
gcccctagaaatgattttctgggaagaggtaaactattctgtgtccttcaaacacacaacttctggaaattactggccatggccccatcctaaatcactgyttccctgacctcaaagggcagatggtgtctactggattaagaacatgaattacatactgtcctatctctgcacaccaatgtcaggtttgacttgatttat

SEQ ID NO: 443613 - DNA, 201 bp, Homo sapiens
tgccacataaaagatagggtgctcctgctaacaaaacctttatctcctgtctcttcctctctctctctattacggacaaatttgaaaacctaaagctttayatgcattgttttgtaagagcttattcatccaggtttagcctccaacacaaaaacagatgcagggatgtaaacatgcatgcatatttcacatacctcaaat

SEQ ID NO: 443614 - DNA, 201 bp, Homo sapiens
ggctttagagctcctattttatggacttaatctgtgggcatcctttgaggtctacatcaaaagtgactttctccaaagataatttgtattttcttcatcasgactcccaaggtacctaatccagggtcactttaatatactttattgagcttcatgggtaaagtaaatctgggtgtcaagtctgcaacccttcaagtgctg

SEQ ID NO: 443615 - DNA, 201 bp, Homo sapiens
agactcttagggagggtttaattgaaggacataaaatctttaacagtacaaataatctcaactaatttccgtccaggccagatgacaaggcaagtgagcckgaattaaaattacagataaacgcatttggaacagatgtcggaaagaactttttcccaacactagaagtcataaacatgcagcaaaatcctccaacgtcat

SEQ ID NO: 443616 - DNA, 201 bp, Homo sapiens
tagccatttactatggttagtcacacagctcggaagaactagagtcgggattttaactcaccccatctgactctagggcaagtactcttaacgattttgayttactcctagcagaaataaagcaaagtaggaacacaacagaaagaaaaaatgtcttattaggaaaattaacccatcacttatttctgtatctatttaata

SEQ ID NO: 443617 - DNA, 201 bp, Homo sapiens
ctgagagggaaaacacactgagtcctttgcactcccctggatccaggatgctgaagcacaataccattttaagagcagagctgccaccagaatgtatccaytcataggatccagtagtccctgcatgtccatattcctggggtcctgctgccatcccaccacatacacccagaaggttgcagcatcgtgacatgagatgga

SEQ ID NO: 443618 - DNA, 201 bp, Homo sapiens
ataccctgccactcaaactactgttcatgcttagcattctattcatgcctgttattcagtgtcttctacctgcagtaactactaccttcatttcctatcaygctcttgagacagtcacgctaaaagcagcagactctagtgcaaaaatatctacttgtcttcattcctaggaacatttccctggggataaggccccagtga

SEQ ID NO: 443619 - DNA, 201 bp, Homo sapiens
tttatcttgatttgtataataggttgctgatgtggccaaaaaaaattcttccctccttgcatccatatccttgcaatgtgatatcatggagcagcccttcragagatgaagtctatttatttacattttgactctggagttggccatatgacttgctttgggcaataaaacattagcaaatgtgatcaagcaaacaaagcc

SEQ ID NO: 443620 - DNA, 201 bp, Homo sapiens
tactgggattcagtagagaagttatgaagaccttttagggtacagaaacttaaaaaggcattacagagagaaaagcaaagcacccggtatcaatttgtttyaagccaagaggaactcccattgtgggaaaaaagaaagtgggagattgccagcagccatattctcaccatggacaccaacaattctaggtacagaagagcc

SEQ ID NO: 443621 - DNA, 201 bp, Homo sapiens
gctaagtgaaataagccaggcacctaaaggcaaatactgcatgatctcacatctatgtggaatctaaaaaagtcaaactcatagatgtagggagtaaaacrgtggttaccaggggctgaaagatggcagggggtagatagaaaaaggggagatattggtcaaaatgtacaaagcttcagttagacaaaaaaatcagttctg

SEQ ID NO: 443622 - DNA, 201 bp, Homo sapiens
aacacatatagctatatagcactgactatgtacctggcatttttccaagcgctttacatgtgccaactcatttaatcatcacaacaaccctatgtggtagyattgttatttttaagttttgtgactgaggaaactgaggtgcaaagaggttaaaatgatttgccccaaggtacatgccaatatgtgatgattcccatcaga

SEQ ID NO: 443623 - DNA, 201 bp, Homo sapiens
tttgtgtgttagcttgggttttgttgttattttgagacagagtctcactctgttgcccaggttggagtgcggtggcacaatcgttgctctttgcagcctcrgcctcatgggctaaagtgatcctcccacctcggcaactgagtagctgggactagaggtgcgtgccaccaggcccagctaattttttttttggagagatga

SEQ ID NO: 443624 - DNA, 201 bp, Homo sapiens
caaaggacatgaactcatccttttttatggctgcatggtattccacggtgtatatgtgccacgttttcttaatccagtctatcattgttggacatttgggktggttccaagtctttgctattgtgaatagtgctgcgataaacatatgtgtgcatgtgcctttataatagcatgatttataatcctttgggtatataccca

SEQ ID NO: 443625 - DNA, 201 bp, Homo sapiens
agaaaagagaacgatgtggaattctgcaaaagctccttgaggttctactctgaaactacatgtcacgtccactcacatttcattagccaaaactgatgtcrgcaaaatcgggagggcaaccaacattttgaacactagcacagtattggaacagtgtgggtagtggaagaagagggagcatttaagtcaggcagaaagctc

SEQ ID NO: 443626 - DNA, 201 bp, Homo sapiens
aaaatgtcagtacaacaattccttcacttctaaataacagccttgtggacttaagggttgtaaatttcaagactgtgagaatgagtaaagaaaagtgagagaaaaaagccatagggccctgaaagtctttacatgtccaagctggaaggaatcatttcactgatattgccaacacataaacctgctatgggagccaaacac

SEQ ID NO: 443627 - DNA, 201 bp, Homo sapiens
tttaaattaaaatccaagcacaaatcttaattccaccaagaagtcctctttcttttctctgaattcctatagtgtttaacagttctaccaccccatttaaytctgacatacattctattttagaatattctacgattcttacagtttctctattaaataggaagaatttttgaacttccatatattaataatttactacgt

SEQ ID NO: 443628 - DNA, 201 bp, Homo sapiens
caggagaattgcttgaacctgggaggtggatgttgcagtgagccaagatggcaccactacactccagcttgggcaacagagtgagaaaaaaaaaaaaaaargaaaagaaaagaaagaaaaagaattaaataacaccatgggtatttgaagttattcaaatatttgtgatgtacctcttaagtgcctgtgctattctaagtc

SEQ ID NO: 443629 - DNA, 201 bp, Homo sapiens
aagcacaaacaatttgacctcactttgactatcaatttgcctttatttctcaaaattcttcatcataaaacctttgcactctctcgagtggttgctttacrtacccacctattccatattccattgaatttgaggcttcccgccctgcaagtgattgtttttaaattaaaatccaagcacaaatcttaattccaccaagaa

SEQ ID NO: 443630 - DNA, 201 bp, Homo sapiens
attcataccaattcaggtcatttttttccaaaatatttccttgaatacaattccacttgtgtttttccaaggaaggaatgagttcacctatacattattasgcttagtgccccactgctaacaatatgcacctggaagaattgatgaaccctagtccttccatctaaatgtattctcccctgctacctgccaatttggtct

SEQ ID NO: 443631 - DNA, 201 bp, Homo sapiens
ggccaagacgagcagatgacccaaggtcaggagtttgagaccagcccagccaacatggcgaaaccctgtctccactacaaatacaaaaaaaaaaaaaaaaagccgggtgtggtagcgggtaccaccagctactctggaggctgagacatgagaatctcttgaacctgggaggcagaggttgcagcaggccaagatcatgcc

SEQ ID NO: 443632 - DNA, 201 bp, Homo sapiens
tcaaacttctcactttgagcttttgtatctgctgatccccctactgagaatggccttcctgcatacctcttcttgcagaacatcttattcttaagaactcsgttcaaatgtcacttcctctgggcagcctgtgctgactcctattggcagaatgtattgctctcaccattgtattcctacaacactatttaaatcctagga

SEQ ID NO: 443633 - DNA, 201 bp, Homo sapiens
tgagtgaactaccattcacaattgctagaaagagaataaaatacctaggaatacaacttacaagagatgtgaaggacctcttcaaggagaactacaaaccrctactcaaggaaatacgagaggacataaactaatggaaaacatttcatggtcatgaatgggaaaactcaatattgtgaaaatggccacactgcccatagt

SEQ ID NO: 443634 - DNA, 201 bp, Homo sapiens
aggtttataaaccaattctaccacttataagttggataaattatttaacctaagtcttaatttctccatttgtaaaatgggaataataatacctactcacwgaattgttatgacaattaaattagatattctatacgaaacactgccttgtgtgcttggcacacaagaaatgataatagtagtaataataataaacaacac

SEQ ID NO: 443635 - DNA, 201 bp, Homo sapiens
cacaaaaaaaaaaatttagacttcttagcacattcaaaatgcttttccccatccaactatcaaccatatctttactctcatctcctaccaaaatcctttgstccagccatgtcaaacttctcactttgagcttttgtatctgctgatccccctactgagaatggccttcctgcatacctcttcttgcagaacatcttattc

SEQ ID NO: 443636 - DNA, 201 bp, Homo sapiens
cgcaaattgaaagccaaaaaaaaaaaaaaaaaagcaagggttgcaattctagacggataacaaagatcaaaagagacacagaagggcattacataatggtwatgggatcaatgcaacaagaagagctaactttcctaaatatatatgcactcaatacaggagcacccagattcaaaaagcaagttctctgagacctacaaa

SEQ ID NO: 443637 - DNA, 201 bp, Homo sapiens
gtatatactggcccacaaaaaaaaaaatttagacttcttagcacattcaaaatgcttttccccatccaactatcaaccatatctttactctcatctcctaycaaaatcctttggtccagccatgtcaaacttctcactttgagcttttgtatctgctgatccccctactgagaatggccttcctgcatacctcttcttgca

SEQ ID NO: 443638 - DNA, 201 bp, Homo sapiens
gacagaactgttgactccactagaaagggggctgaagccagggagccaagtgctcagtggatcccaccctcacagagcccagcaagctaagggcaactggsttgaaattctcgctgccagcacggcggtctgaagtccacctgggatgctcaagcttggtggggggaatgccgtctgccattactgaggctttggtaggtg

SEQ ID NO: 443639 - DNA, 201 bp, Homo sapiens
gattaggaacttttgggaactggattaaaggtcacttttgctacacaaagagactggcagcatttttgcccctgccctagagatctgtggaactttgaacwtgagagagatgatttagggtatctggtggaagaaatttctaagcagcaaagtattcaagaggaagcagagcataaaagtttgaaaaatttgcagcctaat

SEQ ID NO: 443640 - DNA, 201 bp, Homo sapiens
catgtatgtattatgtatgtgtatagttctatgcaatattatctcatgtaaaattcacaaaaccaccaacacaatctctttttatttgcacccactcaacmtttcccacccacccgccctaatactgtcaaccactaacctgttctccatatctatagtttctcatttaaagaatgtacaagtattttgtgaacatacatt

SEQ ID NO: 443641 - DNA, 201 bp, Homo sapiens
agtgatatttatcgttctgtaacttataatccccacattccaagacagtccaaatctccaggcttcagttccttctgtgtaaaatgaaaggactgtgcatytatggcctctattagtgtgatggttcatattgagtgtcaatttgattggactgaaggatgcaaagtattgttcctgggtgtgtctgtgagggtgttgcca

SEQ ID NO: 443642 - DNA, 201 bp, Homo sapiens
atgactaaattacttcccactgggtccctcctacaacacataggcattatggaaactacaattcagggtgagatttgggtgggaaaacagccaaaccatawcattctgctcctgacttctcccaaatctcatgccttctcatttcaaaatacaatcatgccttgccaacagtcccccaaagtcctaactcattctagcact

SEQ ID NO: 443643 - DNA, 201 bp, Homo sapiens
atgataacataactgtcttagtccattctgtgttgctataacagaatacctgagattgagtaatttatgaagaaaaaagatttattttgctcatgatcctrgtgactgaaaagtccaagattaggtagctgcatttggtggtggtctcagcctgcttcaagtcattgtggaaaaaaaaaaagggaggggggggtgggtatg

SEQ ID NO: 443644 - DNA, 201 bp, Homo sapiens
taagtaaaataagtagcgaatctgaagtctgatgtaacttgcaaaataaaaggctaatgaaattttaacctgcacaataaatttcaaatccaggctaagcrgtggcagccatgctctatcatgtgctggccataccacacttggatattgtgttccctttagcacacagactatgaagaatgaggttgacacagttagaac

SEQ ID NO: 443645 - DNA, 201 bp, Homo sapiens
caggtgccacctcccccaaagaccatttcccaggtcatccagtaagaaatttctttcttgaacactcttaagactttatccacacttgacggcaagccagytctcttttattctgaattagggtgccagaggtcatatttgcccttctgaactgtaacgtagttgaggctgagatctttaccttattcatctaggtcttcc

SEQ ID NO: 443646 - DNA, 201 bp, Homo sapiens
agtatagtttcaaactctcagatctcctctgagtaccactcaaagcaaagcagaggtgttccaaaatgatttttgaaaatctaatgctggtgtttagaatrgttttcaacttaaatatctgtgccagccttacccatagacactcattcttttcccggcaccatcgctaatttgttgctaaatttggtctaaagttgcctc

SEQ ID NO: 443647 - DNA, 201 bp, Homo sapiens
gctgctgctactattactactactactactaattctactaatattgctgcgacaattacttgtgggcagacttaatcataggatggtggttacaactgaawtgagacagatgttatcaagatgattaaatagaggtgtccagcactcacctccctgacaaaggaccacaacaaccagtagataaccacaaatcaaacagag

SEQ ID NO: 443648 - DNA, 201 bp, Homo sapiens
ttttcatgaagacaaatataatattggattaggattgaaggcatgtcatttatttattaacagtataaacttgggtaaatcgttaattctcttggatcttkggttttatgggaataatagtaatacctagcttcgcggtgactatcatagagtacatgctgaggaaatactggctgtcgacaacagcagcaacattgtcat

SEQ ID NO: 443649 - DNA, 201 bp, Homo sapiens
tagacaacagtactttatataactttcctaagatcatagaactggtaagtagagaaactcagattgtgaatgtagacattagatgaacaaacatgtcactrctgagcagttgcaagttaatttggatgtggctgaaactaaaccatgaaatgtggaaatgatatcataatgccaacaacgaactgtcttcctgtatttttg

SEQ ID NO: 443650 - DNA, 201 bp, Homo sapiens
gaaaaaaattaagaatttgataaataaagttgtcaaaatacatatgcctttccttctgtctggcatccttttttctccctatttgtctggcaaaatacttyaaaattcagttttaagtgccttgcatggtggattccacatacagctgtcacagtttagctgtgataacaaacaatcccaacatttcagtagtttaaaaca

SEQ ID NO: 443651 - DNA, 201 bp, Homo sapiens
tgggaactcactcactatcacaagagcagcatggaggtaactaccctcatgactaaattacttcccactgggtccctcctacaacacataggcattatggraactacaattcagggtgagatttgggtgggaaaacagccaaaccatatcattctgctcctgacttctcccaaatctcatgccttctcatttcaaaataca

SEQ ID NO: 443652 - DNA, 201 bp, Homo sapiens
accatttggttatagtcatacattgtatttattagtagacaaattttgtgaaatacactttgatgtgtttttcctcttaatcatctagttgttacagtgtygtttttttcttcccttatagcttctctcatctttaggataaagtttttttgcaaaagcaaaatggacgatatgctcatggggtagggaaaaagaagaaat

SEQ ID NO: 443653 - DNA, 201 bp, Homo sapiens
aattatattaaactaaagtgcttctgcacagggaaagaaacaacagagtatagagacaacctacgaaatggggcaataggttttcaagctatcatgtgacragggattaatatccagaatatacaaggaactcaaataatttaacagcacaaaagcaaataacccaaaataaaaattggcaaataatctgaacactcactt

SEQ ID NO: 443654 - DNA, 201 bp, Homo sapiens
tagaagttgatgtgaaacaacatagggatggatcaatgccgaggagaatgctcaatcaggtgaattaatgttccaggaattatgctggaggcagccgtgartcagagatgagcatccttgggtcccatgaaaagtggctgtcatgattccaacagtaaattgcagcacaacagtttcacacataccaaataaacacaggtc

SEQ ID NO: 443655 - DNA, 201 bp, Homo sapiens
aaaatcatatcaagtttcttcacagaccacaatggaacaaaactagaaatcaataccaagaggaactttgaaaattatataaaaacatggaatataaacawgtttcaggaacccagtggttcctgaatgaccactgggtcaatgaagaaattaagatggaaatcataaaaattcttgaaacaaaggaaaacagaaacacaa

SEQ ID NO: 443656 - DNA, 201 bp, Homo sapiens
ccaaagttctgcttatgaggtcaaaaagagggccacgatgaaattgcctttgcaaaaaattagaacagtgataaaattgtgacagtaaaagagatctgacytaactgactcaatcttgcctttaacctccaagctgccctttgttcattcttgggcttaggccaaagtaacttgggcagaaatttaatttataagttaact

SEQ ID NO: 443657 - DNA, 201 bp, Homo sapiens
cagtgaaatagcatcttagtcctgcaagaatggtcataatttaaaaaaaaaaaaaatagatgttgacgtggatgtggtgaaaagagaacacttttttttttattatactttaagttttagggtacatgtgcacaatgtgcaggtttgttacatatatatatatgtgccatgttggtgtgctgtacccagtaactcatcatt

SEQ ID NO: 443658 - DNA, 201 bp, Homo sapiens
ccctctcaaccatctccaagcagctctaatcttcctggagcactatttcctataccctgtggccagaatgagggcctgactcaagtgtccattccaacacrgggcataagccagcaggtcccagcgggtggccaaagttctgcttatgaggtcaaaaagagggccacgatgaaattgcctttgcaaaaaattagaacagtg

SEQ ID NO: 443659 - DNA, 201 bp, Homo sapiens
cagtttaaaacaccaaatataaattccgttagtgattctatgcaataatactgttagataaatagggaaagtaatactaatcaatttttttttttttttttgagatggagtgttgctctgtcccccaggctggagtgcagtagcatgatctcggctcactgcaacctctgcctcccaggttcgagcaattcgcctgcctca

SEQ ID NO: 443660 - DNA, 201 bp, Homo sapiens
tcccattttcaaggtttagcaacccaatttagtagctgtgtaacctgacctttggtaaattacttgaacttctgagcctaatttccttttatgcaattacraagttttgagcatctcccccaaaactagagtacctatacaatttaccattagaatcagtagagtttgaaagtgaaacagggttctgttaataattttggt

SEQ ID NO: 443661 - DNA, 201 bp, Homo sapiens
tctttagtttgtatagcattttacagtttaaaacaccaaatataaattccgttagtgattctatgcaataatactgttagataaatagggaaagtaatackaatcaatttttttttttttttttgagatggagtgttgctctgtcccccaggctggagtgcagtagcatgatctcggctcactgcaacctctgcctcccag

SEQ ID NO: 443662 - DNA, 201 bp, Homo sapiens
atcagtaaaatatcagtctaggctgaaatcagatgtaaacatgggcatcacttctacatagatgctatctaaaaccacagaacaagatcagatcacgaagsgagtgagtataaacagaaagaaaagtccatgaagagagtcctgggacattttaatgtttagaactcaggcaagtgaggagaaaccagcaaagagagaatt

SEQ ID NO: 443663 - DNA, 201 bp, Homo sapiens
ttctgctgagagcagtgcctcatgcctggaatcccagccgtttgggaggctgaagcaggcaaatcacttgaggtcaggagttggaaaccagcctggccaaygtggtgaaaccccatctctattaaaaatacaaaaattagctgggcatggtggggcacatctgcaaccccagcttctcagtagctgaggcaggataatcgc

SEQ ID NO: 443664 - DNA, 201 bp, Homo sapiens
gcagcatcagaggcttagataaaaagcaactgtctttaatttgattgaagccagagaaaagtggtgatgacacggttggaagggatgagtttgctcaaacagagagttatttaaactctggatattcacagtaatttttacgtgtaggcctacaagagatctttacagtgtatcaggcagaatccatttcagaaatacatg

SEQ ID NO: 443665 - DNA, 201 bp, Homo sapiens
ggcagcatcagaggcttagataaaaagcaactgtctttaatttgattgaagccagagaaaagtggtgatgacacggttggaagggatgagtttgctcaaacagagagttatttaaactctggatattcacagtaatttttacgtgtaggcctacaagagatctttacagtgtatcaggcagaatccatttcagaaatacat

SEQ ID NO: 443666 - DNA, 201 bp, Homo sapiens
tggcagcatcagaggcttagataaaaagcaactgtctttaatttgattgaagccagagaaaagtggtgatgacacggttggaagggatgagtttgctcaaacagagagttatttaaactctggatattcacagtaatttttacgtgtaggcctacaagagatctttacagtgtatcaggcagaatccatttcagaaataca

SEQ ID NO: 443667 - DNA, 201 bp, Homo sapiens
attgtgacagtgtcagatgacaaaaaataaatggtaagatgtagaccaaaaaaattgagtagtatttttattacttcataatcaggcacaaacaaaacatwagtccactccttacaacctataataggttaaaaaatgaaaaacattaccaaaggctttccctcttctagatagacatcatttattaggtcccttttggca

SEQ ID NO: 443668 - DNA, 201 bp, Homo sapiens
aaaggcctaccttaaaaagttagaaagatctcacatcaatgatctaacatcacacccagagtaacaagacaaaaatgaccccaaacctagtgtttttcacwcctagaaaaagaaaaaactaaccccaaagctagcagaagaaaataaataactaaaataagagcagaactgaaagaaattaagactcaaaagtccacccaa

SEQ ID NO: 443669 - DNA, 201 bp, Homo sapiens
taacttgttttggccattgggatgttagtaacattattcaggcagcgacttgaatatgcttgtgcagtggggtttgttctcgtctacttccacatcatgakaagaacatgtcccggctggtccactggtccaaggagacctagacatgtggagcgggcagcctacctgagtttgaaaccaagcccagccaaatgcagccta

SEQ ID NO: 443670 - DNA, 201 bp, Homo sapiens
ccaatatccgcaatccaagcttccctcacaaactcatgccaacaggcaaagctgaacagagccatcaagttatgtaactgtgtccctgacccatacctatrcctttttctttcaactccaaagctaaacctgaagcatttttctttttccctgacgcacagtacccttgccagttgataaaccaggagcaggaaccctggc

SEQ ID NO: 443671 - DNA, 201 bp, Homo sapiens
attttgaatagagctttcttggtgcaaagagcagtatctattgcaagagacaaaaccaaaagctgttagacttaggaggcagttgaatagtccaagcgacmggtctctggggcctaggctgtggttgtggtgagctttccattcaacagtattaaaagaagaacaacaaagaggaagatgtgcttcctggaggaatttcct

SEQ ID NO: 443672 - DNA, 201 bp, Homo sapiens
ttcttctcagcaccacatcacacttattccaaaattgaccacatagttggaagtaaagcaatcctcagcaaatgtaaaagaatagaaattataacacactktctctcagaccacagtgcaatcaaactagaactcaggatttagaaactcactcaaaaccactcaactacatggaaactgaacaacctgctcctgaatgac

SEQ ID NO: 443673 - DNA, 201 bp, Homo sapiens
cacattcaacagctagcagaaggcaagaaataactaagatcagagcaaaactgaaggagatagagacacaaaagaaaaccttcaaaaaaaccaatgaatcygggagctggttttttgaaaagatcaacaaaattcatagactgctagcaagattaataaagaagaaaagagagaagaatcaaatagacgcaataaaaaatg

SEQ ID NO: 443674 - DNA, 201 bp, Homo sapiens
ggctggagtgcagtggtgcgatctcggctcactgcaagctctgcctcccgggttcatgccattcttctgcctcagcctcctgagtagctgggactacaggmgcccgccaccacgcccagctaattttcttttaaatatttttagtagagacagggtttcaccgtgttagccaggatggtctccatctcctgacctcgtgtt

SEQ ID NO: 443675 - DNA, 201 bp, Homo sapiens
aaccaatgaatccgggagctggttttttgaaaagatcaacaaaattcatagactgctagcaagattaataaagaagaaaagagagaagaatcaaatagacrcaataaaaaatgataaaggggatatcaccaccgatcccacagaaatacaaactaccatcagagaatactataaacacctctacataaatgaactagaaaa

SEQ ID NO: 443676 - DNA, 201 bp, Homo sapiens
catctagaaactgcggtaagacttatcttctttttgacaaaataaaatgttaaaacagcaccttctttatatagttgttgtgaggaataatgtaaccacasgtccagcgttaagtttcagctgcttcaaaggtactaattattgttgacatcattggtttattagacacatacatgtggggaaagccatcttgggaaaaat

SEQ ID NO: 443677 - DNA, 201 bp, Homo sapiens
aatgaatctccctgttagggacacgtgcaaagggatggtcatacaggacctgccacagaccttactgacccatgaaagggcaaatatttgcaggcccaaggcaaggcaaaactgaaaaaccaaactgtactccccccatattgcaagccctcaggccaaagcttggacagtgctaaaaggaggaaaaagaaagagctttaa

SEQ ID NO: 443678 - DNA, 201 bp, Homo sapiens
gataaaggggatatcaccaccgatcccacagaaatacaaactaccatcagagaatactataaacacctctacataaatgaactagaaaatctagaagaaayggataaattcctcgacacatacaccctcccaacactaaaccaggaagttcaatccctgaatagaccagtaacaggctctgaaattgaggcaataagtaat

SEQ ID NO: 443679 - DNA, 201 bp, Homo sapiens
agatagagtctaaatgtattttgcagggagtcaacaggatttactaatgaattgaaattgcaatggaagaaacagaaattaagaatgactccagaggtttyagcctaagcaactggaataattgcctttaattgatgggaaagactaaagaagatgcaggtttggggagggcaagttgttggggaataactggagctcatt

SEQ ID NO: 443680 - DNA, 201 bp, Homo sapiens
gccaaaaaaagtccagcaccagacagattcacagctgaattctaacagaggtacaagcaagagctggtaccattccttctgaaactatttcaatcaatagmaaaaagagggaatcctccctaactcactttataaggccagcatcatccaaagcctggcagagacacaacaaaaaaagagaattttagaccactatgcctg

SEQ ID NO: 443681 - DNA, 201 bp, Homo sapiens
atttaacaggaccatattaggagtggtttgcaaaagagattgggcagaaacagagagaagagttaagagactaatgcaataacagaggtgaaagtttatgrgggcttaaacaagatgatgacaataaaaatgcgaagatgtgaccagatagagtctaaatgtattttgcagggagtcaacaggatttactaatgaattgaa

SEQ ID NO: 443682 - DNA, 201 bp, Homo sapiens
atcaatagaaaaaagagggaatcctccctaactcactttataaggccagcatcatccaaagcctggcagagacacaacaaaaaaagagaattttagaccamtatgcctgatgaacatcaatgcaaaaatcctcaataaaatgctggcaaaccaaatccagcagcacctcaaaaagcttatccaccatgatgaagtgggctt

SEQ ID NO: 443683 - DNA, 201 bp, Homo sapiens
ctgaatgccctcataagccagaaggaggaattttatttttattctaaatgctaagggaagccagggcgctggcctctgaattgataaactgctcccagacrctgagcaaggctaaaactgtaagtttcctacccaagcagatacctcaagtgtggacagaaacagtgtccacttgcccttggggaaaatctcacaggaaag

SEQ ID NO: 443684 - DNA, 201 bp, Homo sapiens
tgttcactgaagcattatttataagaatggaaattgaaaatgatctaaatatgtaacagcagggaagtgcacagaacggtctatctgtacagtgcaatgtkacctagtcattataattaattttctaaaagaatatgaaatagctgagaagtatgctaatgatagaatattaagaaagaatattatattgaaagtataata

SEQ ID NO: 443685 - DNA, 201 bp, Homo sapiens
agggtattcagttaggaaaagaggaagtcaaattgtccctgtttgcagatgacatgattgtatatttagaaaaccccattgtctcagcccaaaatctcctyaagctgataagcaacttcagcaaagtctcaggatacaaaatcaatgtgcaaaaatcacaagcattcttatacaccaataacagacaaacagagagccaaa

SEQ ID NO: 443686 - DNA, 201 bp, Homo sapiens
ctggcagcatcagaggcttagataaaaagcaactgtctttaatttgattgaagccagagaaaagtggtgatgacacggttggaagggatgagtttgctcaaacagagagttatttaaactctggatattcacagtaatttttacgtgtaggcctacaagagatctttacagtgtatcaggcagaatccatttcagaaatac

SEQ ID NO: 443687 - DNA, 201 bp, Homo sapiens
tatactacaaggctacagtaaccaaaacagcatggtactggtaccaaaacagagatatagaccaatggaacagaacagagccctcagaaataataccgcamatctacaaccatctgatctttgacaaacctgacaaaaacaagcaatggggaaaggattccccatttaataaatggtgctgggaaaactggctagccatat

SEQ ID NO: 443688 - DNA, 201 bp, Homo sapiens
gtaccactctttatcttttataccacatttttactgtgtttagatattgatatggtttggctgtgtccccacccaaatctcattttgaattgtagctaccmtaattcccacatgttgtgggagggacccagtaggagataattgaatcatgggggcggttcccccatactgttcttgtgatagtgaataaatctcgcaaga

SEQ ID NO: 443689 - DNA, 201 bp, Homo sapiens
aaggattccccatttaataaatggtgctgggaaaactggctagccatatgtagaaagctgaaactggatcccttccttacaccttatacaaaaatgaattyaagatggattaaagacttaaatgttagacctaaaaccataaaaaccctagaagaaaacctatgcatcaccattcaggacataggcatgggcaaggacttc

SEQ ID NO: 443690 - DNA, 201 bp, Homo sapiens
gtcagcctcctgagtagctgggaccacaaggtgcgtgccaccacatccagctaattttttgtattttggtagagatggagttttgtcatgttgctcaggtkggtcttgaactcctgagctcaagccatccaccagccctggcctgccaaaaggctggaattacaggcgtgagccactgcacccggcctcctgctctttttt

SEQ ID NO: 443691 - DNA, 201 bp, Homo sapiens
aaaaaccctagaagaaaacctatgcatcaccattcaggacataggcatgggcaaggacttcatgtctaaaacaccaaaagcaatggcaacaaaagccaaarttgacaaatgggatctaattaaactaaagagcttctgcacagcaaaagaaactaccatcagagtgaacaggcaacctacagaatgggagaaaattttaca

SEQ ID NO: 443692 - DNA, 201 bp, Homo sapiens
tcctcccatgtcagcctcctgagtagctgggaccacaaggtgcgtgccaccacatccagctaattttttgtattttggtagagatggagttttgtcatgtkgctcaggttggtcttgaactcctgagctcaagccatccaccagccctggcctgccaaaaggctggaattacaggcgtgagccactgcacccggcctcctg

SEQ ID NO: 443693 - DNA, 201 bp, Homo sapiens
gcttcgacatcctgggctcaagcaatcctcccatgtcagcctcctgagtagctgggaccacaaggtgcgtgccaccacatccagctaattttttgtatttkggtagagatggagttttgtcatgttgctcaggttggtcttgaactcctgagctcaagccatccaccagccctggcctgccaaaaggctggaattacaggc

SEQ ID NO: 443694 - DNA, 201 bp, Homo sapiens
tagtgtgtgtatcaacattttaataaaattgagttattttctgaaataattttaaaaacctaaaactatcaaacaaattagcacaaagaaaaatgaccgtyccacacacgtctagtgagagggcaatttaactgtatgtatccagggccttgaaaatgttcatctttggcccagtaattctggcctgaagaattctatttt

SEQ ID NO: 443695 - DNA, 201 bp, Homo sapiens
gatgatgatgaagatgataacagtaacaatgacagtctttttaaattgctccaaaccacaggggactgttcctacttttaacttcttttgcacttagagayagtaatacagtgtagcaaattatttgcaaatgactcagtttgtaatagatttgtctcctcacttaaatattaagtaccttatggacagagtcatttcctg

SEQ ID NO: 443696 - DNA, 201 bp, Homo sapiens
tactgtgatgattcctatttcctctcatgttttaaagtgcaaactaacattcaagtgaacattagcatcaagtaatgcagacatttgtatgcatttccttkattcaatttgtgaccttaccagttttgaattggaattgcaccatttcgtagataaaggaaactaagtatattgctgcacttttaagttttcaaaatagtg

SEQ ID NO: 443697 - DNA, 201 bp, Homo sapiens
tctccccttattactccaacctcattacccacccccctcacaacaggcatggctgccttctgtcttttcctcacacataccaagctcagtccttctttggsaacatagcatttggtattccctctgaatgaaatgttctcacagaacttttcagggctcatactatccccttattcagattttcactcaaataggctactg

SEQ ID NO: 443698 - DNA, 201 bp, Homo sapiens
ggaaataaggccacttctctaaagccttccctgaccccctaattatagcaaaccactcccattatgctttataataatggctcccttaaagcacaatagarttgtacagttatcaaacgtttctccatctagattataacatcctcaagggtggagatggtgtctcattcatgctgagtctccaaaatctagtacagtatt

SEQ ID NO: 443699 - DNA, 201 bp, Homo sapiens
ttactccaacctcattacccacccccctcacaacaggcatggctgccttctgtcttttcctcacacataccaagctcagtccttctttggcaacatagcayttggtattccctctgaatgaaatgttctcacagaacttttcagggctcatactatccccttattcagattttcactcaaataggctactgcctcactaga

SEQ ID NO: 443700 - DNA, 201 bp, Homo sapiens
cccacctgatttggtcctgcctaccattccaacttcatcttttatctccacctcccactccctcgactcacccacagacactggactccttgtttcttcaracaggccaagcttgtacctgtcttggggcctttgcatccgtatcccctctgaagtggattgctctactgcaaggtttgatgtgggggcttctcctcactc

SEQ ID NO: 443701 - DNA, 201 bp, Homo sapiens
tttaatcctggctctttcattaatagctatttgaccttgggcaaattctttaatcgctctctgcctctgtttcctcttgtgtaaatgcaggtaggtaatartatcttcctcacagagttttgtgagggctaaatatatgcaatttgaacagtgcctagctcaacatgaagtttatgatcataattagtcgtacaaatggaa

SEQ ID NO: 443702 - DNA, 201 bp, Homo sapiens
atacaccgcctggttatggtgtatttttttaaataactgtcggagtcaattcactaatattttgttgagaatttttgcatctatgttcatgagaaataccrggctatagttttcttttcttgtgatgtttttgtctggttttagtattagagtaatgttggcctcacaaagaatttggaagtattcccaatgcttctgtat

SEQ ID NO: 443703 - DNA, 201 bp, Homo sapiens
cagacacattttattaaaattattggtttacatgtactttacttttattccagcttacaaaagagaaagagccctaaaatcctcatttctgtatctccccyagagctcagcacagggtccggtacacataagtaagtgaataccacatgttcagtgactaactaaaaggatgtcaaattcaaagaacattctttgttctaa

SEQ ID NO: 443704 - DNA, 201 bp, Homo sapiens
acacattttttttttcctggagaagcagaataattaaggtgctcataaaacaacaactatcattgcagagcattttcacagccaaaaattgctttgaagtycactgaaacactaataaggcaggcaggtataatccccattgtaaagatagaaaaaccgatgcgttggctatcacttgattcacagccaaaacacagagtt

SEQ ID NO: 443705 - DNA, 201 bp, Homo sapiens
catcgaccaccacggaaacccatctgagagaattcacaccaattagtattgtttcagaaactgatgtcttatgtaatgcttataaaaaggcatgttaactrtttacttctaaccagatttagtcaagtctatgaacaataccatgtctgcctagaaaagcttttctatatttaacacttaaaaagacttagttctgctgag

SEQ ID NO: 443706 - DNA, 201 bp, Homo sapiens
attcaaaagaaaatagattaagagaaaaaaaattgtatgtttttccattattctgtagcccactccttcagtctatgtccatttaagcatgacattaaggytctgcatactcttgacaaactaattcttaccattgtatgttaaaaatttgtatccctgtgttaagagcactttgtgataactccttaaacttaattaaaa

SEQ ID NO: 443707 - DNA, 201 bp, Homo sapiens
tctcaattgatttcttctccaaaaaaaatgtattattacatataaagatttctttaaaggaactctaaaagctctaaggctctaaatttcaagtgaagttytcttgctctttctttgaaaccagtatagattatacacaagttaagaaagtgagttttaagacttggttcctcatttagcatagtgtgatgtgtgaataag

SEQ ID NO: 443708 - DNA, 201 bp, Homo sapiens
acattctgcctttgctgatttctagtggtcttacgaattagattagtcttgctgaacactgtaggcgttttcaagaagaggacatatcatatttctttttwtcagtcagtgctcaacccaggtctaactacacacttatttttaaataggaataaaggctatattagcttatatttccagggaaacagagctgaggacaat

SEQ ID NO: 443709 - DNA, 201 bp, Homo sapiens
acaaacttacaagaaaaaatcaaacaaccccatcaaaaagtgggcaaagtatatgaacagacacttctcaaaagaagacatttatgcagccaaaagacacrtgaaaaaatgctcatcatgactgagcatcagagaaatgcaaatcaaaaccacaatgagataccatctcacaccagttagaatggcaattattaaaaagac

SEQ ID NO: 443710 - DNA, 201 bp, Homo sapiens
tgtattcccttaaagtttgcctcacggagcatttactgccctgcaactccagttgatgttagccagcccctgtggagcttttggggaagctggggcctctwtaggtctagtcaggttggacttggacatggaaactgctgcagcttctgccagagctagcatgatgaaggtggccctaaagcctggcacttgagcccagaa

SEQ ID NO: 443711 - DNA, 201 bp, Homo sapiens
ccatctcacaccagttagaatggcaattattaaaaagacaagaaacaacaggtgctgcagaggatgtggagaaataggaacacttttacactgttggtggrgctgtaaactagttcaaccattgtggaagacagtgtggcgattcctcaaggatctagaactagaaataccatttgacccagccatcccattactgagtac

SEQ ID NO: 443712 - DNA, 201 bp, Homo sapiens
aagaaaagcacctagggcacacagtttaggatgcattcacccttagggtcatgcaagtattctataggatagatgtataatttgttaaatagtggctaaaygcaaaagaaatacaaaaaggtgaagaaagaccagcactgaaagaaagaaagaaagaaagaaagaaagaaagaaagaaagaaagaaagaaagaaagaaaga

SEQ ID NO: 443713 - DNA, 201 bp, Homo sapiens
ttagaatggcaattattaaaaagacaagaaacaacaggtgctgcagaggatgtggagaaataggaacacttttacactgttggtggggctgtaaactagtycaaccattgtggaagacagtgtggcgattcctcaaggatctagaactagaaataccatttgacccagccatcccattactgagtacatacccaaaggact

SEQ ID NO: 443714 - DNA, 201 bp, Homo sapiens
tgtggacttttgttcctacattatttttcatcatagaagaaaaaacaaaaagaacccagtttattatgatagtaaattatatagactgactagtacacccyaggcccctccattttggttccattttcaggaaatactgcactctgtactctcaagctaagtaccttgaaaactgtcatttcattaagaaaagcctaacta

SEQ ID NO: 443715 - DNA, 201 bp, Homo sapiens
gacaagaaacaacaggtgctgcagaggatgtggagaaataggaacacttttacactgttggtggggctgtaaactagttcaaccattgtggaagacagtgwggcgattcctcaaggatctagaactagaaataccatttgacccagccatcccattactgagtacatacccaaaggactataaatcatgctgctataaaga

SEQ ID NO: 443716 - DNA, 201 bp, Homo sapiens
atcatcaccattagagttttgccaatcaggggcttaagtgtcactctgcaagcaagataaaatgctacaaagtctcccaccccatttccataatacatctmaatgcacagtgtgaaacaagaaatgacattaagtgtgcttactaataacagcaaaggagaacaacgatttaatttaaacaagctaaaccaaacatttgtt

SEQ ID NO: 443717 - DNA, 201 bp, Homo sapiens
acactgttggtggggctgtaaactagttcaaccattgtggaagacagtgtggcgattcctcaaggatctagaactagaaataccatttgacccagccatcscattactgagtacatacccaaaggactataaatcatgctgctataaagacacatgcacacgtatgtttattgtggcactattcacaatagcaaagacttg

SEQ ID NO: 443718 - DNA, 201 bp, Homo sapiens
gtaaactagttcaaccattgtggaagacagtgtggcgattcctcaaggatctagaactagaaataccatttgacccagccatcccattactgagtacatamccaaaggactataaatcatgctgctataaagacacatgcacacgtatgtttattgtggcactattcacaatagcaaagacttggaactgacccaaatgtc

SEQ ID NO: 443719 - DNA, 201 bp, Homo sapiens
tgttcttactcagaggtgggaattgaacaatgagagcacttggacacagggtggggaacatcagaaactggggcctgttgtggggtgggggaaggggggasagatagcattaggatatatacctaatgtaaatgacgagttaatgggtgccgcacaccaacatggcacatgtatacacatgtaacaaacctgcatgttgtg

SEQ ID NO: 443720 - DNA, 201 bp, Homo sapiens
ttgccctgcttcggctcatgctcggtgcactgcacccactgtcctgcacccactttccgacactccccagtgagatgaacccagtacctcagttggaaatgcagaaatcacccatcttctgcatcgctcatgctgggaactgtggactggagctgttcctattcagccatcttggctccacactgtcaaatgctttttctg

SEQ ID NO: 443721 - DNA, 201 bp, Homo sapiens
tactgtctggctccaccagaatataaactccatgtgaactcaggctttatctgtcttgtttactgttgtatccccaggatttaaatctgtggttaatgcayagtaggaagaactaacacttctaccagcagatttaggctggttgttaggctttgcaatatcaaagtccctttaggcataaaaaagaaagggtggggccag

SEQ ID NO: 443722 - DNA, 201 bp, Homo sapiens
cacaccaacatggcacatgtatacacatgtaacaaacctgcatgttgtgcacatgtatcctagaagtataataaaaaaaattttattgaaatatatatatwtttttttctttgtcttttttgagatggagtctcactctgttgctcaggctggaatgcagtggcactaccttggatcactgcaacctctgcttcccaggtt

SEQ ID NO: 443723 - DNA, 201 bp, Homo sapiens
ttggaataagtgcaatgtggtgttgagacgaatgtatattctgttgatttggggtggaaagttctgtagatgtctattaggtccgcttggtgcagagctgmgttcaattcgtggatatcgttgttaattttctgtcttgttgatctgtctaatgttgacagtggggtgttaaagtctcccattgttattgtgtgggagtct

SEQ ID NO: 443724 - DNA, 201 bp, Homo sapiens
ggttgatttagtgttttatcatgacttgaaatcattttacacacacacatacactccttacttatgtgtttgcctactgtctggctccaccagaatataarctccatgtgaactcaggctttatctgtcttgtttactgttgtatccccaggatttaaatctgtggttaatgcacagtaggaagaactaacacttctacca

SEQ ID NO: 443725 - DNA, 201 bp, Homo sapiens
gtaagaatgtaaaccagtacaaccactatggaaaacagtatggagattccttaaagaactaaagtagaactaccatttgatccagcaattccactattggktatctacccagaggaaaagtcattatataaaaaagaaacttgcacatgcatgtttatagcagcgcaatcagcaattgcaaaaatatggagccagcctaaa

SEQ ID NO: 443726 - DNA, 201 bp, Homo sapiens
ttattgagagtttctaggatgaagcgttgttgaattttgtcaaaggccttttctgcatctactgagataatcatatggtttttgtcattggttctgtttayatgctggattacatttattgatttgcgtatgttgaaccagccttgcatcccagagatgaagcccacttgatcatattgaataagcttcttgatgtgctgc

SEQ ID NO: 443727 - DNA, 201 bp, Homo sapiens
gttaatagatttattaataactggattgacaactgtggcttagatctaagggagaatggaagcttctagtcttctcatacttctagatcagcactactcaraagaaatataagcctcaaatctgaaccacctatgtaattttaagtttttcagtaatcaccgttaacaaattcaaaagggtaaagctaatgttcattatat

SEQ ID NO: 443728 - DNA, 201 bp, Homo sapiens
atttgatccagcaattccactattgggtatctacccagaggaaaagtcattatataaaaaagaaacttgcacatgcatgtttatagcagcgcaatcagcarttgcaaaaatatggagccagcctaaatgcccatctaccaatgagtagataaagaaaatgtgtggccaggcacagtggctcacgcctgtaatcccagcact

SEQ ID NO: 443729 - DNA, 201 bp, Homo sapiens
ttgagatatgtccaatcaatacataatttattgagagtttctaggatgaagcgttgttgaattttgtcaaaggccttttctgcatctactgagataatcayatggtttttgtcattggttctgtttacatgctggattacatttattgatttgcgtatgttgaaccagccttgcatcccagagatgaagcccacttgatca

SEQ ID NO: 443730 - DNA, 201 bp, Homo sapiens
atgttgaataggagtggtgagagacggcatccctgtcttgtgccagttttcaaagggaatgcttccagtttttgcctattcagtatgatattggctgtggrtttgtcatagatagctcttattattttgagatatgtccaatcaatacataatttattgagagtttctaggatgaagcgttgttgaattttgtcaaaggcc

SEQ ID NO: 443731 - DNA, 201 bp, Homo sapiens
catgctgttttggttactgtagccttgtagtatagtttgaagtcaggtagtgtgatgcctccagctttgttcttttggcttaggattgacttggcaatgcrggctcttttttggttccatatgaactttaaagtagttttttccaattctgtgaagaaagtcattggtagcttgatggtgatggcactgaatctataaatt

SEQ ID NO: 443732 - DNA, 201 bp, Homo sapiens
tatgttctttatcaagttgaggaagttcgcttctattattccttgtttactgagggtttttatcaatgataggtgttggattttgtcaaatgctttttctytctttttttttattatacttcaagttttagggtacatgtgcacaacgtgcaggttagttacatatgcatacatgtgccatgttggtgtgctgcacccagc

SEQ ID NO: 443733 - DNA, 201 bp, Homo sapiens
caggaaagagggaagtgagcccacaggtgtcactatccatctagtcggtcaaatgaaactgacataatcctagactattgaattagttctctacccatgcmaaattaatttttaaaatctgttaattcaacctcagagaattctctgaatttctctctacatcttagcctcacacatccgtacagacttcattcattgaca

SEQ ID NO: 443734 - DNA, 201 bp, Homo sapiens
tttggctcgtggttctgcaggctatacagaagcataggttggcatctgcaactggtgaggatctcagactgctcccactcatggcaggaggggaaggggaktcagcgtgtacagagatcacacagtgagagagaaagaagcaagcagagagagagaaagatggggaggtgccaggctctttctaacaaccagctctcatgg

SEQ ID NO: 443735 - DNA, 201 bp, Homo sapiens
tcagatcttttgctcatttttaattagattgttagatttttttttcctatagagttgtttgagatccttatatattctggttattaatctcttgtcagatrgatagttggcaaaatattttctcccatctgtaggttgtctttcactttgtggactatttcctttgctgtgaagaagctttttaacttaatgtgatcccat

SEQ ID NO: 443736 - DNA, 201 bp, Homo sapiens
ccctgctggagtgcatggtatgatgtcagctcactacaacctccacctctcaagctcaagcgattcccgtgcctcagcctaaacgctgtttctattaaaamcacaaaaattagccaggtgtggtggtatataagtcattttaactggcctgagattatatcttattgtagttttgatttgcatttctctgatgatcagtga

SEQ ID NO: 443737 - DNA, 201 bp, Homo sapiens
aaagtgatctgtctaaaggtataaaccacttctcatcactcttcagcttattaaaaaacccatgtcctagcccagaaatgtgaataaacctaaagcccttyttctggcctccaggtcctacctcacttgtccctaccttcctttttcatttcattaccttcctccttctcctctgtaatattctctcaagccagaaaagta

SEQ ID NO: 443738 - DNA, 201 bp, Homo sapiens
ggaatttttttctgagtattgttggtccatggttggttgaatccacagatgtggaacctcaatagaaagaaagtaacaacttatcacttatctttacttcrtttccatagccccagtagttcctacacaaggcagtaacagatatatgaccttggattgaacaacagagttgaaccagatctgcattcctcctaaaagggt

SEQ ID NO: 443739 - DNA, 201 bp, Homo sapiens
ggaatctaaccttttttgtatcttagaatgaacgattttagacgaaactatttgtcaaaactgccttaacacaggagcatgatacacacttcctttaaaaktttttctcctaacattagtggaaaaactagacacaaggcaaatttacaacttaagagatatgcataagttatagatcagcttgaaagaatttactacagt

SEQ ID NO: 443740 - DNA, 201 bp, Homo sapiens
tgtggctccgcgggcaaaaagacagttgtggcacacagaagcagaaagacacactcttctgaataagcttgtattaagcctgacagaaaacagcaccagayagatttttccccagcttcaaaatagagctggcatcccctctctatgatacgcaaacagctctaagagtatctttagaacttagaggtatcttggggtatc

SEQ ID NO: 443741 - DNA, 201 bp, Homo sapiens
catgatccacctgccttggcttcccaaagtgctgggattacagacatgagacactgcacccagcctattgaaatacatattatccatttaacatatatttkgttttttaagctctgttttgtttttgtttttgttttttctaaaaacagttctgtaatgaagcttgctttgtcaaggactatgttgactgataatgaaagc

SEQ ID NO: 443742 - DNA, 201 bp, Homo sapiens
aaaataattatcagccaagaattttccagcaaaactaagcttcataaatgaagaagagataaagtctttttcagacaaaaaaaaaattgcttagagaattkgccagtaccaagccagcactacaagaaatgctaaaaggagttctaaatcttgaaataaaacctcaaaatacaccaaaatagaacctccgtgaaacataaa

SEQ ID NO: 443743 - DNA, 201 bp, Homo sapiens
agtctcctgaaaaaaaataattatcagccaagaattttccagcaaaactaagcttcataaatgaagaagagataaagtctttttcagacaaaaaaaaaatkgcttagagaatttgccagtaccaagccagcactacaagaaatgctaaaaggagttctaaatcttgaaataaaacctcaaaatacaccaaaatagaacctc

SEQ ID NO: 443744 - DNA, 201 bp, Homo sapiens
cagtaaaactaaaaaaagaagagttcaaatacaaagcatttcattctgatttctgtttaatgtgtgtgtgtgtgtgtgtgtgtatatatatatatatatayacacacacatatgaagcagtaagtgtcatgccaagagcaacatgttagaagaaaaagacctgaattctagtgtagcctttgtctgttcaattaactttat

SEQ ID NO: 443745 - DNA, 201 bp, Homo sapiens
ttagaaataggggaaaacagagagacagagacaggtctcttacacagtcctttaggagaatagtgaccacagaaattctttaggtgggggtattatcttarcatactctattatgaatataatgtttgtctaatcagacaaactgtagcctgtggcctgttttcgtaagggctttgtgacttaattttttttagatataaa

SEQ ID NO: 443746 - DNA, 201 bp, Homo sapiens
gtaattaagcaatttttaaagacagtataaatgcatattttccttttttctcttaacatgttttaaatggaattgcataatatgatgtgtatgcatttgtwttgttaagcctataacatatgtaaatatctatacttaacaacatatgtaaatatttatacttgccacacaaagaaggtagttaggagcaaagctatattg

SEQ ID NO: 443747 - DNA, 201 bp, Homo sapiens
aatatttaactatatgagatgatgaatatgttaatttgcttcactataatcaccttttcacatctatagtgttttagtccattctcacactgctaataaargcatactcaagactgggtaatttatagtggaaagaagtttaattgactcacagttcagcatgattagggaggtctcatgaaacttacaaccatggtggaa

SEQ ID NO: 443748 - DNA, 201 bp, Homo sapiens
atatatcagtaaagatcagcctgtagatgttttacagatttgaaggatgtgaaatggccaatctgcagtccctaagtcatgtagtaaaactttgtttacaytagcctttcttcaaatggcaaactataggcaaaagtatgtttcttccaggtggctggcaggccttcttttatttcttaacgtgtgtttagtaacttgtca

SEQ ID NO: 443749 - DNA, 201 bp, Homo sapiens
ttacagaacaaaggaaagattgatgattttaaatgcttcagagaggtttagttccattcagactatagtctgatcattggactacctttgtctttttccarttagataaccagagcctagcatagtgcctggcccatcataagtacacaatcaatatttgttcaataacttctatgatgactgccttgatttataaattca

SEQ ID NO: 443750 - DNA, 201 bp, Homo sapiens
aaaatgttgagccagtacagcatttactgactataaagaagaatccatcaaataatcagaggaggtacctgagacagaaggaaacccaggagaatataagsatctctgaaataaaatgtttacagaacaaaggaaagattgatgattttaaatgcttcagagaggtttagttccattcagactatagtctgatcattggac

SEQ ID NO: 443751 - DNA, 201 bp, Homo sapiens
ggaaaagtcattatataaaaaagaaacttgcacatgcatgtttatagcagcgcaatcagcaattgcaaaaatatggagccagcctaaatgcccatctaccratgagtagataaagaaaatgtgtggccaggcacagtggctcacgcctgtaatcccagcactttgggaggccaaggtgggcagatcatgaggtcaggagtt

SEQ ID NO: 443752 - DNA, 201 bp, Homo sapiens
agccagcctaaatgcccatctaccaatgagtagataaagaaaatgtgtggccaggcacagtggctcacgcctgtaatcccagcactttgggaggccaaggygggcagatcatgaggtcaggagtttgagatcagcctggccaatatggtgaaactccatctctactaaaatacacaaattagttgggcatggtggcgtgca

SEQ ID NO: 443753 - DNA, 201 bp, Homo sapiens
atcttgttacataaaacaagctacttgaaagatactatctattcttcctttagaaactcttttgaagcagaactcctgaaaggtagcactttcctggcagaaaaaaaaaaaaaaagcaacatattaaagaatttgcactcatgcatattctaattcacttttataaatgaaccaccgatgacacatcctcccaactactta

SEQ ID NO: 443754 - DNA, 201 bp, Homo sapiens
acctagaaaaccctgaagactatgccaaaaggttcctggaactcataaacgacttcagtaaactttcaggagagaaaatcaatgtataaaaatcagtaacrtttttatataacagtaacgttcaagctgagagccaagtcaaggacacagtcccatttataatatacgcacaaaaaaataaaatacctagaaacacaccta

SEQ ID NO: 443755 - DNA, 201 bp, Homo sapiens
tttgacattctatattgtaggctgccctgttatcttttaaaaatctatatgttttattaagaggactacgattagtttgcttgtacctgatgtggtgattkggaaaactaatctatctttaattctactagaatttacttttaagattttcaacacctaaatcttatctgcctccccaccttctctcatatattgcaggta

SEQ ID NO: 443756 - DNA, 201 bp, Homo sapiens
aaaccctgaagactatgccaaaaggttcctggaactcataaacgacttcagtaaactttcaggagagaaaatcaatgtataaaaatcagtaacatttttayataacagtaacgttcaagctgagagccaagtcaaggacacagtcccatttataatatacgcacaaaaaaataaaatacctagaaacacacctaacaatgg

SEQ ID NO: 443757 - DNA, 201 bp, Homo sapiens
acttcctggatttgggctgtattttagaaaaatgaatttaacagtatagagaggatggattggagagaaagaactagcagtgcttgtttttatgcagatcktcatgggaaaattgtcatataatgacacggtctctctctgcatctttgattactatgattaactgataagagactagtaggtattctgcagttgctgaga

SEQ ID NO: 443758 - DNA, 201 bp, Homo sapiens
atggattagaagaatcactatcattaaaatgaccatataatccaaagcaatctatggattcaacacaactcctataaaactaccaatgtcatttttcatakaattaaaaaaaaacctacactaaaatgtatgtggatccaaaaaagagctgacataaccaaaacaatcttaagcagaaagagcattaccccacagaaacat

SEQ ID NO: 443759 - DNA, 201 bp, Homo sapiens
agactctgccgcttttatctagactgaaagtccatcatggcctcgaatcaatgctgtacatgcagcattttccagtgtttgttagcacgctaggtcaaatraatggcattaaaaataccaccaaagcactgcatgataaaagtaagtttgggaaatgctgggtaagtaagtttaaagagccagtaaaatatactgtttaag

SEQ ID NO: 443760 - DNA, 201 bp, Homo sapiens
atgtctaatactcttatactggctgtgtcctgtctctgtgctgtgatattgactagcctctcttaaaattcacatagatgctatcttcaaatgataaatcrtagcaggctacccatataattgatctcaaattccccatgaccccaacaacctttagctgtggcattttgaaggacttcgtacctctttgaaaaattaaat

SEQ ID NO: 443761 - DNA, 201 bp, Homo sapiens
gaaagagcattaccccacagaaacatcacattaccccacttctatattttctattaccaaactatactataaggctacagtaacctacagtaaacagcatrgtattagtacaaaaacaagcacatagaccaatagaacagaatagagaatccagaaataaaaccacacgcctacaaccatctgatctttactaaatggaca

SEQ ID NO: 443762 - DNA, 201 bp, Homo sapiens
ttcaggggtccaagactctgccgcttttatctagactgaaagtccatcatggcctcgaatcaatgctgtacatgcagcattttccagtgtttgttagcacrctaggtcaaataaatggcattaaaaataccaccaaagcactgcatgataaaagtaagtttgggaaatgctgggtaagtaagtttaaagagccagtaaaat

SEQ ID NO: 443763 - DNA, 201 bp, Homo sapiens
tgaaacaataggtgctggagaggatgtggagaaataggaatgcttttacactgttggtgggactgtaaactagttcaaccattgtggaagacagtgtggcrattcctcaaggatctaaaactagaaataccatttgacccagccatcccattactgggtatatacccaaaggattataaatcatgctgctataaagacaca

SEQ ID NO: 443764 - DNA, 201 bp, Homo sapiens
aaaatgagacaaattaatgtaattaaaccaatttccacttggctactacatgattcacttttgtaagccattacatctgattcctctattggctcaggatrgacactgaattattatactgaaaaataagtaattcttgtcttagccttgctttactctaagcaattatgctaaaatagcactcagcatttttatctatgt

SEQ ID NO: 443765 - DNA, 201 bp, Homo sapiens
aaactttgaaaaaaatttagacgaatgtataactagaataaccaatacagagaagtgcttaaaggagctgatggagctgaaagccaaggcttgagaactaygtgaagaatgcagagcctcaggagcccatgcaatcaactggaagagagggtatcagtgatggaagatgaaacgaatgaaatgaagcgagaagggaagttt

SEQ ID NO: 443766 - DNA, 201 bp, Homo sapiens
cagagctttggcacaagaataaaaacataagtttactttgacactggtcactcaggctcttccaatcatagtataagggggtccatggaattggaaattaracattaatgttcgtgtcttggcaggcactattagaatccccatcttaacacatgaaaatatttcgactcagataaaccaagccatggttctttccgcact

SEQ ID NO: 443767 - DNA, 201 bp, Homo sapiens
aactttgctatcgtgaatagtgctgtgataaacatacaagtgcatgtatctttttggtatattgatttcttttcctttgagtaactacgcagaagtgagaytgctgaatagaatggtagttctagttttagatctttgagaaatctccacgctgttttctatagaggttgtactaatttacattcccactaacagtgcata

SEQ ID NO: 443768 - DNA, 201 bp, Homo sapiens
ggagctgaaagccaaggcttgagaactatgtgaagaatgcagagcctcaggagcccatgcaatcaactggaagagagggtatcagtgatggaagatgaaaygaatgaaatgaagcgagaagggaagtttagagaaaaaagaataaaaagaaacgaacaaagcctccaagaaatatgggactatgtgaaaagaccaaatctg

SEQ ID NO: 443769 - DNA, 201 bp, Homo sapiens
tccctcattcttcaattttcattaaacctggctccagtgacagacaagggagacaacatttccatcccaccccaacccaaaacctcctgtgaaaccccctrgtcccaccatcccctgacaagctggaaggctcattcctctggagaaaatacctggcatcaattccaaaaggctcagagaacagcctctttaagaagcctc

SEQ ID NO: 443770 - DNA, 201 bp, Homo sapiens
tagaataaagaaagaagaaattgccctttttttcttttttttctgttacataaatttacttttatcttatcaatacacatgtacaaaaacatacacacacrcacacaaacacacacacatccagggttagctgcaaatggattaaattattggactatttcatctacagtaaatcagatataatcttattacagctgcatg

SEQ ID NO: 443771 - DNA, 201 bp, Homo sapiens
caactccaagacacataattgtcagattcaccaaagttgaaatgaaggaaaaaatgttaagggcagccagagagaaaggtcgggttaccctcaaagggaarcccatcagactaacagcggatctctcggcagaaactctacaagccagaaaagagtgggggccaatattcaacgttcttaaagaaaagaattttcaaccca

SEQ ID NO: 443772 - DNA, 201 bp, Homo sapiens
aaaattatttttaatataaataaaatcttaatgaaacaatatcctaaattaaaaaaatttaaactcatttttgtattgtttctctttcttcctgtctttcmttaattatttcttgcattctttcattttttgttttctcatcgtcatgcatatgtttgtgtgtgagagagtggcaaacaatatagtattccaaatgtcaag

SEQ ID NO: 443773 - DNA, 201 bp, Homo sapiens
atcattctaagaaatgatagaaagtttattcatattcaggaaatatatatatatatatatatatatacatatatatatatatacatatatatatatatatwcatatatatatttagagtgggtttttttaataggctttaagaggcatacatagagtaataaaaccagctttggagtttgacctgaatcaaactgcttgtt

SEQ ID NO: 443774 - DNA, 201 bp, Homo sapiens
attgtgaaaattatttttaatataaataaaatcttaatgaaacaatatcctaaattaaaaaaatttaaactcatttttgtattgtttctctttcttcctgyctttccttaattatttcttgcattctttcattttttgttttctcatcgtcatgcatatgtttgtgtgtgagagagtggcaaacaatatagtattccaaat

SEQ ID NO: 443775 - DNA, 201 bp, Homo sapiens
cgtctttcctgcactgttctcatgatagtgaatgagtctcacaagatctgatggtttcaaaactgggactttccctgtacaagctctctctttgcctgacrccatccatataagacgtgacttactcctccttgccttctgccgtgattgtgaggcctccccagccatgtggaactgtaactccattaagcctcttttcct

SEQ ID NO: 443776 - DNA, 201 bp, Homo sapiens
actctaattatcaaacctctccccttaaaactgtttttactgtatttatttacaaagaggcttactttgcaagtgcagttcctgcaatggtcaccatctayccaagagtcttgatctcgatagagcagtccactcacttgacaagtcttctcacaatgacagttttccaattgactaagtcttgtctctgcataatttagc

SEQ ID NO: 443777 - DNA, 201 bp, Homo sapiens
agggtctcactcatctcactgtagtttcagtgcaactgcagacctcaaataactttttcacacaaacacccactaaatatttttactcctccagcctttcrttagagtgtattatttattattattgccattattgttattgatagacacacattaatatagaggtgtgaccacttaagccattgcatgaaaacaaacact

SEQ ID NO: 443778 - DNA, 201 bp, Homo sapiens
tctgctcctggggaggcctcagggagctattaatcatggtggaggtaaagccagaataggcacttcacatggcaaaagcaggagcaagtgggggtcgcggrggggggggggggggcagagtgtaggttccatacacttttaaacaaccagatctcgcaagaacttactatcacaagaacagcacaaagtggatggtgctaa

SEQ ID NO: 443779 - DNA, 201 bp, Homo sapiens
agggtgtgttggcaagggaaagcagattttaatttccaagtattcatataagacatgacactcttccagcattgcttcacaattgctcgtatggctagtgrgtgctaggtaaaaacctaacaattctcagagttaatattatttattaaagaaccaggttacactctaattatcaaacctctccccttaaaactgttttta

SEQ ID NO: 443780 - DNA, 201 bp, Homo sapiens
caaactctgtcatcacaaatttatgtctcctactatggcctggggtgaacagaactcacacacaaaaatctaggataccatgtattattgacaaagcaacrggatgagaaaggtcatcagtacaaacctccaaatcattcagcaaggtctatcaaactgcttttcagtaaaaatctcacagccaacacttaaagtcctaac

SEQ ID NO: 443781 - DNA, 201 bp, Homo sapiens
tctttcaaagcagccacacttttttttcaaaattatttctagaaccatgaaagtgaagcatctaagatggataatggggtagatgctgaagcccacatttmctatatctcccccccacccccagcacccttgagtgtcatttttccacgatgcagttgcaaaactaccataagaggaggtccagattgtccatccagattt

SEQ ID NO: 443782 - DNA, 201 bp, Homo sapiens
acaaaaattatctgggtgtggtggtggactcctgtaatcccagctatttgggaggctgaggcagaagaatcatttgaacccaggaggtggaggttgcagtragctgatattgcgccactgcactccagcctgggcgtcagagtgagatttgtctcaaaaaaaaaaagccctcttgctgtatccactgcactttcttccagt

SEQ ID NO: 443783 - DNA, 201 bp, Homo sapiens
gggggttccccttacccaaagcaactgacattaggagatttgattatcaaatgcccattgcacatagccgcattccccttccctaaaatgtacttagaaasccaaatgatgcagtgaaaatcataatcagaagaaaacattatattttataattatgaacaatctgaagatttctttttattaaaacaagaagaacttaag

SEQ ID NO: 443784 - DNA, 201 bp, Homo sapiens
ctgcactccagcctgggtgacatagcaagactctgtctcaaaaacacaaaataaaataatatgtatacatacatatacacacacacacacacacacacacmtattgctgagatgtcactcttagtagttaaacgaggctctacttagaatattctaatttgaggaatcatatttacatgcatataagtaataatgaagaaa

SEQ ID NO: 443785 - DNA, 201 bp, Homo sapiens
attatcaacacgctcacatttaactgtcttatttctgagacactgttaaaggccctactgaaatcaaagtcaacttgtctgtgagatagcaatagataacytagtccagaacctggaggtacttgaatttatttttcctgcttgtcatgtactccctcttttttggtagctacacagtgattttcctctggagatccacca

SEQ ID NO: 443786 - DNA, 201 bp, Homo sapiens
ggtagaaataaaagggagaggagaagaggtagacaaacaagagcaagaacaagaagcagcagcaaacactcggataacacagaatacattctaggtcctgygctaagtcctttatacatgtccacacatttaatagtatatattatactgtttaggtgcatgaagttgtagccatgctgccttggtttgtgtccccactga

SEQ ID NO: 443787 - DNA, 201 bp, Homo sapiens
tagaaaaaaaaatagcaaaatggtagatataaagccaaaaagaattagtgtaagagtgttcatttaagctttactcaaaatagccaaaaacaaaaacaaamaaaaaaaaaaaactaggattaacacaaatatccgtggtggataaacaaattgtgggtctattcatataattaaatactactcagcaataaaatgggataa

SEQ ID NO: 443788 - DNA, 201 bp, Homo sapiens
gtggaacaaatagaaaaaaaaatagcaaaatggtagatataaagccaaaaagaattagtgtaagagtgttcatttaagctttactcaaaatagccaaaaamaaaaacaaaaaaaaaaaaaaaactaggattaacacaaatatccgtggtggataaacaaattgtgggtctattcatataattaaatactactcagcaataa

SEQ ID NO: 443789 - DNA, 201 bp, Homo sapiens
taaagcaattggcctccttttctttgtagtctgaagcagtgccctggcctaagaaaatggagaatcaggagacaggaagatctcagcaaaaactctggaamtctctctacagctgtaatggaagagttatgctgagtcccaggcaaggtatctggtaggaagagtgggagtagttagaagctcctatgagatgggagctac

SEQ ID NO: 443790 - DNA, 201 bp, Homo sapiens
gggagggggcaaggcctgaaagccatgttttctttctcagtgggaactttatgacctgggcaagatctgaacagggggcactgcaggagcaagaccagcckcaccaactgcgtgggtgttgggtgagacctttcactaccagctatcccccacttccctggtgaactatatgacacagaagaggcagccataatcccctct

SEQ ID NO: 443791 - DNA, 201 bp, Homo sapiens
tggtaactccaatcacttgggagtggcttccttgacttcatgttaagtgaggaagcattctgggcaagtacctggggtctcaagaaagagagctatgatcractcatgctgctctccatgagcacaataatcatatacacaccaagcacttgccacccctctatgtgcaactgacaaatctccatatcacaataaaagaaa

SEQ ID NO: 443792 - DNA, 201 bp, Homo sapiens
aaaaaagctattcaatatagcttaaaaatcagctaaaactcaaaagaaagatatcaaaatcatattaaaacatgaaaagaaagcaagctgcagaccaatayctcacttatggatatagatacaaaagtcctcaacaatatactatcaaatcgaatccataaaatagaaaaaggattatggaacatagccaagtggaattta

SEQ ID NO: 443793 - DNA, 201 bp, Homo sapiens
ggtatgcaatcagcaaatgttagcttaaaaaagctattcaatatagcttaaaaatcagctaaaactcaaaagaaagatatcaaaatcatattaaaacatgraaagaaagcaagctgcagaccaatatctcacttatggatatagatacaaaagtcctcaacaatatactatcaaatcgaatccataaaatagaaaaaggat

SEQ ID NO: 443794 - DNA, 201 bp, Homo sapiens
aagagcacatgccacacttgggtgggtagatgtatatggcagtatcttggatcataaagtttgaattattgatttttattttttccaacaaatagtgagaygatccatccctgttataggtatgatgggaaatatagtaatgtatacaacatatgttaaaaaggcaatgagtgcattaaataaggacacaaaatgactatc

SEQ ID NO: 443795 - DNA, 201 bp, Homo sapiens
ggaaaacaatcttattctgattgcttgagagaaagtcaatgtttggtagcctgttttaaaataaaactgactgatatatgtatacggctttgctaatcttrtgggtcatttcagatgtgacaattatggttaacaaacatctatgtaactcagcaaagtgcaacctggaaatgcactcaaaagaatcagcacttgtctaag

SEQ ID NO: 443796 - DNA, 201 bp, Homo sapiens
gactggtttattctcacaggacaaggtgtaacacacatgtccttggaagtaaacgtctagctgtaaatgacacaattaggcaaaaaaaaaaaaaaaaataraaacagacatcgaattcagtcgaaccagaagatggctgtgttttaaagatgaaacacagctgaatgaactctactataagcatatctaactttattgcag

SEQ ID NO: 443797 - DNA, 201 bp, Homo sapiens
atgccaaaatgtaaagaccatcgagactaggaagaaactgcatcaactaacaagcaaaataaccagctaacatcataatgacaggatcaaattcacatacracaatattagctttaaatgtaaatggactaaatgctccagttaaaagacacagactggcaagttggataaagagtcaagacccatcagtgtgctgtattc

SEQ ID NO: 443798 - DNA, 201 bp, Homo sapiens
aatgctccagttaaaagacacagactggcaagttggataaagagtcaagacccatcagtgtgctgtattcaggaaacccatctcacgtgcagagacacacrtaggctcaaaataaaaggatggaggaagatctaccaagcaaatggaaaacaaaaaaaggcaggggttgcaatcctagtctctgataaaacagactttaaa

SEQ ID NO: 443799 - DNA, 201 bp, Homo sapiens
catggatattcattgacaaagcagagccttgagtccaggtcttctgactcctggcccagaatcactgtcattgcaccaccctcaccaatgttctgacagcytgaggtgcctttcacccagaaatcagcaagtcaggagttaaatctatctttcatcagcaacaacattctgtccacatttctcaccacagaaccaaatgaa

SEQ ID NO: 443800 - DNA, 201 bp, Homo sapiens
aggggttgcaatcctagtctctgataaaacagactttaaaccaacaaagatcaaaagagacaaagaaggccattatataatggtaaagggatcaattcaamaagaagagctaactatcctaaatatatatgcacccaatacaggagcacccagattcataaagcaagtcctgaatgacccacaaagagacttagactccca

SEQ ID NO: 443801 - DNA, 201 bp, Homo sapiens
ataaagcaagtcctgaatgacccacaaagagacttagactcccacgcattaataatgggagactttaacaccccactgtcaacattagacagatcaacgasacagaaagttaacaagtatacccgggaattgaactcagctctgcactaagcggacctaatagacatctacagaactttccaccccaaatcaacaaaatat

SEQ ID NO: 443802 - DNA, 201 bp, Homo sapiens
cacacttattccaaaattgaccacatagttggaagtaaagcactcctcagcaaatgtaaaagaacagaaactataacaaactgtctctcagaccacagtgyaatcaaactagaactcaggattaagaaactcactcaaaaccactcaactacatggaaactgaacaacctgctcctgaatgactactgggtacataaggaa

SEQ ID NO: 443803 - DNA, 201 bp, Homo sapiens
ctcctcagcaaatgtaaaagaacagaaactataacaaactgtctctcagaccacagtgcaatcaaactagaactcaggattaagaaactcactcaaaaccrctcaactacatggaaactgaacaacctgctcctgaatgactactgggtacataaggaaatgaaggcagaaataaagatgttctttgaaaccaacgagaac

SEQ ID NO: 443804 - DNA, 201 bp, Homo sapiens
gtgcaatcaaactagaactcaggattaagaaactcactcaaaaccactcaactacatggaaactgaacaacctgctcctgaatgactactgggtacataasgaaatgaaggcagaaataaagatgttctttgaaaccaacgagaacaaagacacaacataccagaatctctgggacacattcaaagcagtgtggagaggga

SEQ ID NO: 443805 - DNA, 201 bp, Homo sapiens
ccctcctggatgctttcatgagctggtgttgagtgtctgcagtttttccaggggtatggtgcaagctgttggtggatataccattctggagtcaggagaayggtggccctcttctcacagctccaccaggcagtgccccagtgggaactctgtgtggaggctccaaccttacatttctcttccacactgccataggagagg

SEQ ID NO: 443806 - DNA, 201 bp, Homo sapiens
catggccgaattctaccagaggtacaaggaggaactggtaccattccttctgaaactattccaatcaatagaaaaagagggaatcctccctaactcgtttkatgaggccagcatcatcctgataccaaagccggtcagagacacaaccaaaaaagagaattttagaccaatatccttgatggacattgatgcaaaaatcct

SEQ ID NO: 443807 - DNA, 201 bp, Homo sapiens
atttcagcattagcccaaaagtccaagtccatagtcttatctgatacaaggcaagtctcttctgcctatgagcctgtaaaatcaaaagtaagatagttacytcctagatataatagaggtatgggcattgggtaaatacacccattaaaaatgggagaaattggccaaaacaaaggggctacaggcctcatgcaagtttga

SEQ ID NO: 443808 - DNA, 201 bp, Homo sapiens
aatcctccctaactcgttttatgaggccagcatcatcctgataccaaagccggtcagagacacaaccaaaaaagagaattttagaccaatatccttgatgracattgatgcaaaaatcctcaataaaatactggcaaaccaaatccagcagcacatcaaaaagcttatccaccatgatcaagttggcttcatccctgggat

SEQ ID NO: 443809 - DNA, 201 bp, Homo sapiens
gtggagattatggaaactacaagatgagatttgggtaaggatacagatgaaccatatcattctgcttctggaccctcccaaatctcaagttctcatgtttygtaacataatcatgcctttcccaatagttctccaaagtcttaactcatttcagcattagcccaaaagtccaagtccatagtcttatctgatacaaggcaa

SEQ ID NO: 443810 - DNA, 201 bp, Homo sapiens
tgattgcttaatgagtacggagtttctttggtgggtgatgaaatgttttaaaattagctattggcaatggttgcaaagatctttgaaaaactgatttactyatatgttttacatgggttaaatgtatgatatttgaaatatatctcaataaagctattcatgagagtttttaaacagaagaataccaagagaaaaaccata

SEQ ID NO: 443811 - DNA, 201 bp, Homo sapiens
tgggatgcaaggctggttcaatatatgcaaatcaataaatgtaatccagcatacaaacagaaccaaagacaaaaaccacacgattatctcaataaatgcaraaaaggccttcgacaaaattcaacaacccttcatgctaaaaacgctcaataaattaggtattgatgggacgtatctcaaaataataagagctatctatga

SEQ ID NO: 443812 - DNA, 201 bp, Homo sapiens
gggaggtctcatgaaacttacaaccatggtggaaggggaaacaagcaatccttcttcacatggcagcagcaaggagaaatactgagcaaaagggggaaaarccccttataaaaccatcctgtgagaactcactaactgtcatgagaacagcatgagggtaactgccctcatgattaaattacctcccactgggtccctctt

SEQ ID NO: 443813 - DNA, 201 bp, Homo sapiens
cagttataaaaattactgttgatacatgtcatcctcatgtctcttggttcatatatatatgaatatcttttgagtatacatttaggagtagaataagttgmtgagtcacgcacatatatatttcccaaaatatatagtataataccatgttcataaagctcaaaaaatagtaaaatgtattataacatatttgttgaaata

SEQ ID NO: 443814 - DNA, 201 bp, Homo sapiens
attagggaggtctcatgaaacttacaaccatggtggaaggggaaacaagcaatccttcttcacatggcagcagcaaggagaaatactgagcaaaagggggraaagccccttataaaaccatcctgtgagaactcactaactgtcatgagaacagcatgagggtaactgccctcatgattaaattacctcccactgggtccc

SEQ ID NO: 443815 - DNA, 201 bp, Homo sapiens
aaaattactgttgatacatgtcatcctcatgtctcttggttcatatatatatgaatatcttttgagtatacatttaggagtagaataagttgatgagtcaygcacatatatatttcccaaaatatatagtataataccatgttcataaagctcaaaaaatagtaaaatgtattataacatatttgttgaaatacacacatg

SEQ ID NO: 443816 - DNA, 201 bp, Homo sapiens
atatcacaataaaagaaagggaagctctattagaaacatataagaagcatattataggggttccaaggagaaagagatgccattcagctggaagaatcagsaaatactttatggagtatgagagtatttgaaatggaccatagagagttgataggatctcagttggcaaagaaaaggaaaattttttttagataaaggata

SEQ ID NO: 443817 - DNA, 201 bp, Homo sapiens
tgaacccaagaggcgaaggttgcaatgagctgagaccatgccactgcactccagcctgggtgacagagtgagactcctctcaagaaaaaaaaaaaaaaaamcaagagaagaataaaaatatgtttaaattgtacctattgaaaaaagaaactcctataagaataattaagaaatgcaaaggaggagcaaaaatctgttaaa

SEQ ID NO: 443818 - DNA, 201 bp, Homo sapiens
cgtggaagctaaaaacattgatttcataaaagtagttttcagaggctaggaaggataggagggtgaagagaggttggttaatgaatataaacatacagttrggtagaaggaataagttctggtgtttcacagcacagtagagtgactatagttaacaataatttactgtatatttcaaaataactagaagattttgaaata

SEQ ID NO: 443819 - DNA, 201 bp, Homo sapiens
tttccccagccaaatgcttcaatgctttagtgaatctctttacaaagtccaggagctgaatatagacgacaacccatggtgacagtaaatggaaagagatktatcgatgggaaccatgtgatgaaactaaatacacacatatgtgtatacatacatatggaagaaagtttgaaagcacataatccacattatgctatttaa

SEQ ID NO: 443820 - DNA, 201 bp, Homo sapiens
gtgtatatgtgccacattttcttaatccagtctatcattgttggacatttgggttggttccaagtctttgctattgtgaatagtgccgcaataaacatacrtgtgcatgtgtccttatagcagcatgatttatagtcctttgggtatatacccagtaaatgggatggctgggtcaaatggtatttctagttctagatccct

SEQ ID NO: 443821 - DNA, 201 bp, Homo sapiens
agcagctatgctgaagtgggagtggaggacctagaataggtaatctgtcctagtatctcaccctaagtgaatagtaaggggacttctctgagaagcagaawttaaaaacactgagagtctgatccccttgggaccactgaggaaagcccccagggctgatattcaggagacctaggtacagatcctagcagtaatgctgag

SEQ ID NO: 443822 - DNA, 201 bp, Homo sapiens
actaaaaaaagaagagttcaaatacaaagcatttcattctgatttctgtttaatgtgtgtgtgtgtgtgtgtgtgtatatatatatatatatatacacacwcatatgaagcagtaagtgtcatgccaagagcaacatgttagaagaaaaagacctgaattctagtgtagcctttgtctgttcaattaactttatgatcttg

SEQ ID NO: 443823 - DNA, 201 bp, Homo sapiens
ccaaaaaaatcccaatatcaatgaaatataggattcttaaaaacataaattgatcccaagaagagctcaaaagtaattagatagaaaccataccacaaaakaagtggaaaatgaacatttcaataataaaatattttccagcttccccaagaccaaattatcagcctaaatattttttgtacttttcagcccaaatatttt

SEQ ID NO: 443824 - DNA, 201 bp, Homo sapiens
gaggacctagaataggtaatctgtcctagtatctcaccctaagtgaatagtaaggggacttctctgagaagcagaaattaaaaacactgagagtctgatcyccttgggaccactgaggaaagcccccagggctgatattcaggagacctaggtacagatcctagcagtaatgctgagcttcagataaccagcttcaatttg

SEQ ID NO: 443825 - DNA, 201 bp, Homo sapiens
aaaactaaaaaaagaagagttcaaatacaaagcatttcattctgatttctgtttaatgtgtgtgtgtgtgtgtgtgtgtatatatatatatatatatacayacacatatgaagcagtaagtgtcatgccaagagcaacatgttagaagaaaaagacctgaattctagtgtagcctttgtctgttcaattaactttatgatc

SEQ ID NO: 443826 - DNA, 201 bp, Homo sapiens
tagcatgtgaagaaattcaacacccttcataacagaaacactaaccaaactaggaatagaaagagacttctccaatatgataaagaacacctacaaatagaaaaaaaaaaaaaaaaacctccagactggtgaagagtacctgtgaaaatccacacagctgacatacttcaaggtgaaaactgaaagctttccctttaaaat

SEQ ID NO: 443827 - DNA, 201 bp, Homo sapiens
tagtctgcccctaaattccatataaaagcaactgactgaaggacagcaagaataaaatcactcagccagttcattttgagtgtgtgacctactgtgggtcmagtaaaaggaaaatataagtataggcaaatgtggtaggaaaatgaatgtactgagatattgtttgcaatcttccttatatttccccctttacttcttcca

SEQ ID NO: 443828 - DNA, 201 bp, Homo sapiens
cagcagtgaaaaacagacagtaaaactaaaaaaagaagagttcaaatacaaagcatttcattctgatttctgtttaatgtgtgtgtgtgtgtgtgtgtgtrtatatatatatatatatacacacacatatgaagcagtaagtgtcatgccaagagcaacatgttagaagaaaaagacctgaattctagtgtagcctttgtc

SEQ ID NO: 443829 - DNA, 201 bp, Homo sapiens
acagcagtgaaaaacagacagtaaaactaaaaaaagaagagttcaaatacaaagcatttcattctgatttctgtttaatgtgtgtgtgtgtgtgtgtgtgkatatatatatatatatatacacacacatatgaagcagtaagtgtcatgccaagagcaacatgttagaagaaaaagacctgaattctagtgtagcctttgt

SEQ ID NO: 443830 - DNA, 201 bp, Homo sapiens
agatgtacttttgcattcattctccccccagatgcccttgccacagtcctgtgataactggagaggaaatagaataaatattgtattctctgttatgggargggaataagtattcaccttcttaaaaattcttaaaatctcccccagtaacagggatgggtaaagcagttaccaatagatggatgctgatagggatctctc

SEQ ID NO: 443831 - DNA, 201 bp, Homo sapiens
gaatttataataaaattctaccatgcaaaaatgccctggaccagatggattcacagtcaaattctactagacatacaaagagctgaccaattctactaaawctattccaaaaaatcaaaaaaagggactcttccctaactcattctacaaagacagcatcaccctaatagcaaaacctgacaaaggtacaatgataaaaga

SEQ ID NO: 443832 - DNA, 201 bp, Homo sapiens
ccaatatctcttcatgatgaaaactctcaacagactagccattgtaggaacacacctcaaaataataggagccatctatgacaaatccacagccaacatcwtactgaatgggcaaaaactggaagcattccccttgagaactggaacaagacaaagatattcactctcaccactcctattcaacatagtattggaggtgct

SEQ ID NO: 443833 - DNA, 201 bp, Homo sapiens
aggcaacctattaggaaaagaagaagtcaaactgtctctctccatgcacaatacaatcctatatctagaaagtcctaaagactaccaaaaggcttctggarttgataaatgacttcagtaaagtttcaggatagaaaatcaatgtataaaaattagtatcatttctatacaccaataacgttcaaactgacagccaaatca

SEQ ID NO: 443834 - DNA, 201 bp, Homo sapiens
ataaatggatatctataatgtattatatccaaacaatgtaacattattctgcaataaaaagaagtgaactactgacataagctacaatatgaatgaacctygaaagcattattctaagttagagaagccagtcaaaaagggatacacagtgtatgatttcacttatatgaaataaccaaaataggcaaatctacagagaca

SEQ ID NO: 443835 - DNA, 201 bp, Homo sapiens
aaagacatggactaaacctaggtgcccatcagtggtaaattagataaggaaagtgtggtatatatgtgccatggaatattatgcagtcataaaaaagaccraaatcatgtcctttgcagcaacatggatgcagctggaggccactatcctacatgtattaacaaaggaacagaaaacaaaatactccatgttctcacaact

SEQ ID NO: 443836 - DNA, 201 bp, Homo sapiens
acaatactgttagctgctaatttaacagtataatattaataatcttttacatatttgcttattttccaactatactttcatatcttaaaggacaggaatcmaacttggatctgcctgtaattcacagttcctacatggtaccttgcagttagtgagccattagtcctctttgattatttgtttcaacggggaagctgtgtc

SEQ ID NO: 443837 - DNA, 201 bp, Homo sapiens
tcagggcccttatatctagtatggaagaataacattaaacaaatccacgtataaacataaactataattcctgatcgttccaactctgagcattgcacagygcctaggtaatagtagttctcagtaaatttgattttttctccactttaaatttttgtacttggaatatttatcatagtatcttgtagaatattctttgga

SEQ ID NO: 443838 - DNA, 201 bp, Homo sapiens
agtggggatggggtaggaaacgcatcagagaggatctaatattcatcttcaattctgagattctgggaaggattctgtgacacaaactatggttttgtgayggttgactttcttgaagagtgaaaattaagggaaaaacagaattaaaagttattttaaagtggtatacaatcatagagtagttcaccaataatgcatagt

SEQ ID NO: 443839 - DNA, 201 bp, Homo sapiens
ttaaagatctgcactaatataaaatattactattatagcaatcccttacaaggaagagtgtattaacctaagaatgatgaagaaagtctctcagaatatcratgtggtgtagatggtatatagggttactatagtaacacactcagaattcagagttcaattgagaaaaaacacagaagatatgagctcttgcagttgtca

SEQ ID NO: 443840 - DNA, 201 bp, Homo sapiens
gcaaatgcaactcaaaaccacagtaaggtatcactccatacacattagaatgtctatcatcaaaaagaaagataataactagtgttgacaaggatgtggaraaatcgaaaccctcaaacgctgcttcggggaatgtaaaacagtgtagtcactttggacaagtctggcagttcctcaaacagttaaacagagtttccatct

SEQ ID NO: 443841 - DNA, 201 bp, Homo sapiens
ttttcagtaaatgtttcacacagttcctatgtgctaggtactaccctggtctccggaaatataatggcaaagacagaacccctgcccttctggagtttatwttctggctgggcagtgaagccatacgaaaagtactattgtgtcagagagtgataaaggctccgaagaacaataacacagcaatgggaaggaggaaatgta

SEQ ID NO: 443842 - DNA, 201 bp, Homo sapiens
aacttaaagtataataataaataaataaatgtaaaaaaaaaagaaaatcaagaagacaattatggccagaaaaaggggataaaaagtgagggagagcacastgaatggtgaggacaaacaaatttaataggcaggtgggcccagagtaactagggccttataggccattgtaataattttgacttttacgcagtgaaaatg

SEQ ID NO: 443843 - DNA, 201 bp, Homo sapiens
taaaaaaaaaagaaaatcaagaagacaattatggccagaaaaaggggataaaaagtgagggagagcacagtgaatggtgaggacaaacaaatttaataggyaggtgggcccagagtaactagggccttataggccattgtaataattttgacttttacgcagtgaaaatggggagctataaagaatgtgaagcagaggaat

SEQ ID NO: 443844 - DNA, 201 bp, Homo sapiens
taaaactggcagcatcagaggcttagataaaaagcaactgtctttaatttgattgaagccagagaaaagtggtgatgacacggttggaagggatgagtttrctcaaacagagagttatttaaactctggatattcacagtaatttttacgtgtaggcctacaagagatctttacagtgtatcaggcagaatccatttcaga

SEQ ID NO: 443845 - DNA, 201 bp, Homo sapiens
aggtgcataacagtggaaggaggatgagttagaggttttatgccatcatctagattagagatgatgatgttgtcatgtaaaagggtgatagcagtggagaycatatgaagttgggatttaagatatattttaaaagttaagccaaagaatttgaatgtgcagtgcaaaataaagaaatcacagatgatttcaagacctcag

SEQ ID NO: 443846 - DNA, 201 bp, Homo sapiens
accataataaatgcatagaccttgctgtttgattaatcaattcatcatactttgtatctaagtgaatattttcaggaactactttttctgatcattcagtsagtcctactaggagcaaatgatgcaaatcataagagttacattccttctgagttaggctattggcttcaattagcctttttccacatgatttacagtgca

SEQ ID NO: 443847 - DNA, 201 bp, Homo sapiens
cataatcaattcctcctggtctgctactgatcacaggccctggtctaaggtaatgtttccctccagttatttctaatgtaaaaaaataagaatgttacagyagttgctatggttaaatatcctgaggtgcttggtgaaaatgcagattcgtgaaaccaccccctgatattccatctagtttggagaggtggcccaagaata

SEQ ID NO: 443848 - DNA, 201 bp, Homo sapiens
aactgttttagtgaataagaaaaaaaaaccttctttcaagaatatatctgttgaaattgataataatgtggtcatgcctgagggaaaaatgcataggtttkgtagtcaaacctactaattattcttccatctaaaacactgtcttccctttggcttaataataagaaccttgatcaccagatttgcataatctctacacca

SEQ ID NO: 443849 - DNA, 201 bp, Homo sapiens
agagaataaaatacttaggaatccaacttaaaagggacgtgaaggacctcttcaaggagaactacaaaccactgctcaatgaaacaaaagaggacacaaayaaatggaagaacattccatgctcatgggtaggaagaatcaatatcgtgaaaatggccatactgcccaaggtaatttacagattcaatgccatccccatca

SEQ ID NO: 443850 - DNA, 201 bp, Homo sapiens
ccaaaggatagtgtgtaccttagaattcaaacatcatctcctgtttctagcatcttagaacacttcgcctatgcaaaaaaaaaaaaaaaaaaatagtacckaccatggtaagttcatcacagaaaacgaaatatataaaatacacatgtagagatggaggtaaaatctcttgtcccaaaaattataccttgtgggctgtgg

SEQ ID NO: 443851 - DNA, 201 bp, Homo sapiens
atgcaaatccaaaccacaaagagataccatctcacacctgtcagaatggctattactaaagagtcaaaatacaatggatgttcaaaagagtcaaaatacamcagatgttcgtgaggctgcagagaaaaggaaacacttatacactgttggtgggaatgtgaatgagtgcagccagtctggaaagcagtttggagatttctc

SEQ ID NO: 443852 - DNA, 201 bp, Homo sapiens
ttctaccaaaaaacacatgtactcgtatgtttgttgcagcactattcacaatagcaaagacatgcaatcaatctaggtggccattaatggtggattggatraagaaaatgtggtatatatgtatataccaaggaatatcacacagccataaaaagaaacaatgaaatcatgttctttgcagcaacatggatgcagctggag

SEQ ID NO: 443853 - DNA, 201 bp, Homo sapiens
ttatagggattcaattatacgagattaataaaacagactacttagttaaaacaaatagtctgtctaacttattctttgacctatttaattttagttagagwaggccaggcatggtggctcatgcctgtaatcccagaactttgggaggccgaagtggacagatcagttgaggtcaggagttcgagaccagcctggccaaca

SEQ ID NO: 443854 - DNA, 201 bp, Homo sapiens
aattttagttagagaaggccaggcatggtggctcatgcctgtaatcccagaactttgggaggccgaagtggacagatcagttgaggtcaggagttcgagascagcctggccaacatggtgaaaccctgtctctactaaaaatacaaaaaattagctgggtgtggtagtgagcacctgtaatcccagctactcaggaggctg

SEQ ID NO: 443855 - DNA, 201 bp, Homo sapiens
tttagacaaaactcatatactagtccccaagagaccagatcagatcaaaccaaaatgaagtcactcatactaaatataacataatcaaactaaaaatttgaaaaaaaaaaaaagagagagagagagatcccaaaacagaccagatgtttttttctctcctgaaaacaggagattccagcataaaagggacccctctactct

SEQ ID NO: 443856 - DNA, 201 bp, Homo sapiens
acataatcaaactaaaaatttgaaaaaaaaaaaaagagagagagagagatcccaaaacagaccagatgtttttttctctcctgaaaacaggagattccagmataaaagggacccctctactctaacctctattaaaaaaaaaaaaaaactgaagcccctatacacacatgttctactatttcccagtgatatttgagacca

SEQ ID NO: 443857 - DNA, 201 bp, Homo sapiens
agtggctaaatgcaaaagaaatacaaaaaggtgaagaaagaccagcactgaaagaaagaaagaaagaaagaaagaaagaaagaaagaaagaaagaaagaaagaaagaaagaaaagaaagaaagaaagaaagaaggaaagcaagaaagaaagaaggaaagaaagaaagaaagaaagaaagaaagaaagaaagaaagaaagaa

SEQ ID NO: 443858 - DNA, 201 bp, Homo sapiens
atacctggccttagtaaatattttaaataaatataatatcaattagttatggaacacctttaagcagtcaaatatatacatgtaattgtagtcactacagaaaaaaaaaaaaaagaacgaacagaaaaaatatttgaagacataatggccaaatttttcccaagttcagtagatctcatatgcaagaaacatgacaaaaac

SEQ ID NO: 443859 - DNA, 201 bp, Homo sapiens
tcatttacttccatgctttataaacattttgctcaagttttatgagcctttccaagtcctgctgcagggatagctcccttcagacattgaacaaaaaaaaaggaaatgtttgtttcctccgtgcaagacaattcatgccagtagtttcaagggatgaatgatgttggctattttatgaggattcagagtgtctctgttcct

SEQ ID NO: 443860 - DNA, 201 bp, Homo sapiens
aggaggatcacctgcacccaggaagcagatcctgcagcaccactgcactccagcctgggtgccagagtgaaactctgtatcaaaaaaaaagaaaagaaaakaaaaaagaagagaggccaaagtgggagagagagaagggccagatcatataagccctgtgacccaaaaggagcttggatgttattctaattctgagatata

SEQ ID NO: 443861 - DNA, 201 bp, Homo sapiens
cttatttccaagtaaagtcccattctgatacacattgggttacgagttcaacacataaatttaattcaactcataaaagtaggtaaagctggctgggcgcrgtggctcacgcctgtaatcccagcactttgggaggccaaggcaggcgaatcacaaggtcaggagatcgagaccatcttggctaacactgtgaaacaccat

SEQ ID NO: 443862 - DNA, 201 bp, Homo sapiens
atagcattttgcatactgcctagggaatcagaaaacctattaataaggcagcattgacatgggctgtcttgaaccttatgtagtgtgagtgtggtctcataaaaaaaaaaaaatgtattgtttctgcttcttgtccaagcatggagctcctgccctttcctaggaaactcaattaaagttctctactttggacataacggc

SEQ ID NO: 443863 - DNA, 201 bp, Homo sapiens
agtagctcagcatttgtttggcaccagacacaatgctaagttcctcacatgcatactattctctttctttctctttctctctctctctctctctctctctccctcttccttcctttcctatctctttcttttctttttctttttcttttttttttttttttaaagacagtctctctctgtcatccaggctggagtgcagtg

SEQ ID NO: 443864 - DNA, 201 bp, Homo sapiens
cagtagctcagcatttgtttggcaccagacacaatgctaagttcctcacatgcatactattctctttctttctctttctctctctctctctctctctctctccctcttccttcctttcctatctctttcttttctttttctttttcttttttttttttttttaaagacagtctctctctgtcatccaggctggagtgcagt

SEQ ID NO: 443865 - DNA, 201 bp, Homo sapiens
ccagtagctcagcatttgtttggcaccagacacaatgctaagttcctcacatgcatactattctctttctttctctttctctctctctctctctctctctctccctcttccttcctttcctatctctttcttttctttttctttttcttttttttttttttttaaagacagtctctctctgtcatccaggctggagtgcag

SEQ ID NO: 443866 - DNA, 201 bp, Homo sapiens
tgcaatcacccacttactcagcagagaaaaggacaaaggacaaatcaagaaggcatgagacaccataatcaattcctcctggtctgctactgatcacaggmcctggtctaaggtaatgtttccctccagttatttctaatgtaaaaaaataagaatgttacagtagttgctatggttaaatatcctgaggtgcttggtgaa

SEQ ID NO: 443867 - DNA, 201 bp, Homo sapiens
accagtagctcagcatttgtttggcaccagacacaatgctaagttcctcacatgcatactattctctttctttctctttctctctctctctctctctctctctccctcttccttcctttcctatctctttcttttctttttctttttcttttttttttttttttaaagacagtctctctctgtcatccaggctggagtgca

SEQ ID NO: 443868 - DNA, 201 bp, Homo sapiens
aataaaccaatattagaataaaatctcaagcacaccaataaacctgctgctggaattatttaatgtggttttacgcaaggagcatgtgctgctaatttagmttccgttgacacagcagattgttataattctaataactgtgtgtgatgctacccagtagatgataagtgaggcaggtcagttcatcaggctttatctcta

SEQ ID NO: 443869 - DNA, 201 bp, Homo sapiens
catatatatcaaatatcatacattatatattatatttatcatatatattattatatcaaataccacatattattatatatcatatataataaattatatayaatttatttaatattttaaatttaataattgaattatattgatataatttatttcaggaatccctcttaccctttctctccatttatatggcttgggtac

SEQ ID NO: 443870 - DNA, 201 bp, Homo sapiens
acttggtgagtcgagaccatgaatgtttaaacatcctacaatgcacaggacagccctatatgacaaagaatgatctggcccaaaatgtcaatagtggtgakgttgagaaattctgccccaactttacacaattaagttgatgaagtgtcttcaggagcaaaattgtattattttaatcctgttttccattcctcccccctc

SEQ ID NO: 443871 - DNA, 201 bp, Homo sapiens
ggatgtgatgatcactggatataaaagtttgaagcctcccaagcatgactgctgaggtgtcctatcatctatcagatttttaaaaattattggctatgttkgacagcaagtaaaaggtctaagtcttaattattttaagaggtgcacagttaattgaaatgattacaatatagtagattgtgaaacatttaataaaaggcc

SEQ ID NO: 443872 - DNA, 201 bp, Homo sapiens
caacctctcccccaaaatagtttaaaatatcgaggaaagataagagtaaaaatcagtaacatggccagttgaatataaaaacaaacatccagaagtctacratacttgcttttcatattatcattctcttctaaagcacagagtatattacaaaatttaattatttacttcaaaaatcacttttgacactatcagttacta

SEQ ID NO: 443873 - DNA, 201 bp, Homo sapiens
cccaccccttcaaatacttaacacatgcagagacttggtctttcagacaatgggctcctggatgtggggagcctcgcacaaatctcacatatgccattttctagctatgtgacattgggctcatctagaaactgcggtaagacttatcttctttttgacaaaataaaatgttaaaacagcaccttctttatatagttgttg

SEQ ID NO: 443874 - DNA, 201 bp, Homo sapiens
acttgagccccaggaagccatcccttcactatatctcacaggggacctcggggcaggcaaccagtggaattgggaaagggtcttggggcaaaggaagctcycacctgaaattggcagtggttttgactgggtacaaattttcttgagtgaagtctgggggatgtgggagcatctgtagataggagctttctcagaagagta

SEQ ID NO: 443875 - DNA, 201 bp, Homo sapiens
ggtggccaagatcccctctggaacataaccccattgacctgaggaccattcccccattctccactgtggctgcagcaagccccacccaaggagagtctgarccgagacttgcgtaagcctcccccacctgataatatttatctacccaccctggtagcctaacacaaaagacaatctcttgggagttttatggcccatccc

SEQ ID NO: 443876 - DNA, 201 bp, Homo sapiens
gagccacacaggtggaataaagtctagccctaagcttttaggaatgcaagattttctcctctagacctccatctagagtcaagactgacaggcaagtctcyttgggcagagtggatttttcctagttcacccatggagggattcaccctttaaggttcttgatttatgtttctcatactagccccaggatgtctcctgtct

SEQ ID NO: 443877 - DNA, 201 bp, Homo sapiens
ggccaagatcccctctggaacataaccccattgacctgaggaccattcccccattctccactgtggctgcagcaagccccacccaaggagagtctgagccragacttgcgtaagcctcccccacctgataatatttatctacccaccctggtagcctaacacaaaagacaatctcttgggagttttatggcccatcccttt

SEQ ID NO: 443878 - DNA, 201 bp, Homo sapiens
ctgaagactagcaatacattttgccaggagctcatagcttaccttgaagaaatgttttaggtttgacacctaaaagaggaagacccttgagagcaagggtmatgactgccttcttcaaagctatatcccagtacccagtactgtgcctagcacatagctgatgctcagtgaaagaaaaaatattttaatctattaaataaa

SEQ ID NO: 443879 - DNA, 201 bp, Homo sapiens
gctagcatttgagatgggcctggaagaatgaatgggctttttgccaggtgaagtacaggaaaagagacatttcaggtcaaagttttgtcctgaggaaaggyacttaatagaagaaaatgaaaaggtgtttataactcacactgaggtgagaggctgaatatttaaaaagaatgcagtaagccattcagagaagcaggagca

SEQ ID NO: 443880 - DNA, 201 bp, Homo sapiens
tctagcctgctttaaaagtttggtgggctgatctaattataattcattcccttttgtgcacggtcctaattctcaggcatgaaagagacatttttaaatgytgtattggccctgaccttgccacatctactcagattcaatagtaaacagtagggcatcatgttcaactgccaagctctgtaatttatgattattcattat

SEQ ID NO: 443881 - DNA, 201 bp, Homo sapiens
tttctttctctttttcaccacatgtccctctgcaaacctctgactttgtttatctgtctcatatctgcatcccctcagtagtcaacttaaaaataacttcytcaaaccttcctagtccttcaaatttaaactaagaggttgaggttcctcctttctccattggagtatatccacactacattgtttaattgccttgatttg

SEQ ID NO: 443882 - DNA, 201 bp, Homo sapiens
gatctcagctccctcgggcatgtgtatgttaactctcctgctgtccaatttcaaatctcctttctgacccatccccttttctccatgaagtctttttttcrtataaattgagcaaatgttaccttaacattaacctttctcatgatacttaatttatgcctttgtttgctgggcattgaattttttaagccacctattaat

SEQ ID NO: 443883 - DNA, 201 bp, Homo sapiens
aaggcaattcaatgagtgtttgaaggctgtggggcttgctcagctgctctcaaatgtctctgaactccatgcaaccacactgtatcccctcagtggccatmtcggcacagctgggctttttcagaaatggctgtgaaatgtactgtgaaaagaagagagagcaaaactctacttaatagcaaatagaaagctcaccaacta

SEQ ID NO: 443884 - DNA, 201 bp, Homo sapiens
aggcagaagaatcacttaaacccaggaggcagaggttgtggtgagccgagatcatgtcgctgcactccagcctgggcaacaagagcaaaactccatctcaaaaaaaaaaaaaaaaaattctctcctttccagcaggtggcagcaaaagacattcacttggtcagtaggggctttgcaggtgtaggtactcccttcaccctc

SEQ ID NO: 443885 - DNA, 201 bp, Homo sapiens
gaagcgctccctctgcgggtgcgactcccgcagctaccccttcccagcctggcgggggtcggcgagagtggtttccacagcaccttacaagttcgggaacwcggggcacgcgggcccgccctgctgcgggtttcgactccctgggacggaaagccggttactagcagcaagagggtgcgcccactcggccgcgcccctcac

SEQ ID NO: 443886 - DNA, 201 bp, Homo sapiens
cagaaggggtaacaaacaaaattcagctatggctaaaacaaaatgaaaaaaagcttatgttatctaaactaaatgcagaatatcctgcactctgagggaarattaatctatcaggagtgttagaaaatcaacatttttctctctcttttgtaatatctgcatggctatttactaaatagctatttattgaaaacagggcta

SEQ ID NO: 443887 - DNA, 201 bp, Homo sapiens
caacccatacaaaatatatcagggactagcagttatggtaaggaacacaggaattattttgctccctctccatgaagtctttgtacagcatagactacacmcacacacacacacacacacacacacacacacacacacacacctcaaacactggcatctccacattcaagcagggattagtattctttgactttctgactc

SEQ ID NO: 443888 - DNA, 201 bp, Homo sapiens
taaaatattctaaaaatctcaggagatggaaaatgttaacaattttaagaagattgtaacaagaaatataatagtttgcattttgcttgttgcttgtgggyttgtccataggtacaaagaatttaattttttatttttattcattttttgtttgtttgtttgtttagagatagggtcttggtctatcacccaggctggaat

SEQ ID NO: 443889 - DNA, 201 bp, Homo sapiens
aaaaatctcaggagatggaaaatgttaacaattttaagaagattgtaacaagaaatataatagtttgcattttgcttgttgcttgtgggcttgtccatagktacaaagaatttaattttttatttttattcattttttgtttgtttgtttgtttagagatagggtcttggtctatcacccaggctggaatgcaatggtgtg

SEQ ID NO: 443890 - DNA, 201 bp, Homo sapiens
gctcgtatggctagtgagtgctaggtaaaaacctaacaattctcagagttaatattatttattaaagaaccaggttacactctaattatcaaacctctccycttaaaactgtttttactgtatttatttacaaagaggcttactttgcaagtgcagttcctgcaatggtcaccatctacccaagagtcttgatctcgatag

SEQ ID NO: 443891 - DNA, 201 bp, Homo sapiens
tttttattttttccagctatcagtcctgtcagactttagaagttcacaatcatggaagaagagcaaagcaatttagataaaatttcctgttctgaaggaaracttttgttattaaatgtgaggcattcaatagtaactgccagctgtttaatcaaaaagttattgttcattgtggaagaaaaattgaagtttggaaaacaa

SEQ ID NO: 443892 - DNA, 201 bp, Homo sapiens
aaattattcacatgcactcacacatgcacacacacactacctgtgcaagagaataatctgtctgccccaacttctttctaaattattaaaaaaaaaaaaaacagtaaaagatgaacccaagtgtgtagagcaactgcaatgtgccagtaatagtagtaagtgatatttaaataagctggcattcaaatccatgcccatatc

SEQ ID NO: 443893 - DNA, 201 bp, Homo sapiens
catggactcaacctatttagctgaaattgctgccacccatagataacttcaaggtctctcttaaactggaaaatgctttaaaaccacgttagcccaaaaaaccgaatactgcttatcgtttcagacactaccataataaatgcatagaccttgctgtttgattaatcaattcatcatactttgtatctaagtgaatatttt

SEQ ID NO: 443894 - DNA, 201 bp, Homo sapiens
tttaaattgtactttcaaagttgttaagatttctaagacatgattccatcatttctaattttcatccagattgcaattagtatcatcatatggcgtatcarttatacaacgttatacctcagcagcataaatcacaactctagctgcagctataaatatcagtcttcaaactgtgtgtacattttcaaaatacactacagc

SEQ ID NO: 443895 - DNA, 201 bp, Homo sapiens
aatagttattgcagcaaaatagcccaaactggaaacaacccatatgtccaacaatgaaatggattaatacattttgggatatccacaaaataaaatactaytccacagtgagaaataacaaattacaaccaattcacagcatgaataaatcttacaaatttaatgttgaacaaaaggatctggacacaaacaggccttata

SEQ ID NO: 443896 - DNA, 201 bp, Homo sapiens
agggatagcactgggagatatacctaatgctagatgacgagttagtgggtgcagcgcaccagcatggcacatgtatacctatgtaactaacctgcacattktgcacatgtaccctaaaacttaaagtataataataaataaataaatgtaaaaaaaaaagaaaatcaagaagacaattatggccagaaaaaggggataaaa

SEQ ID NO: 443897 - DNA, 201 bp, Homo sapiens
acataagcaatttctttaacctcttagcctcaattttctcatctgtaaaatcaggatgatgacagtaatataatcctcattaaattgttatgagattttttaaaaagataatatagtgcctggaaaaatgcactagacactttaaagatctgcactaatataaaatattactattatagcaatcccttacaaggaagagtg

SEQ ID NO: 443898 - DNA, 201 bp, Homo sapiens
tcaatataaaacctccatattaatgatttggcccaagaaaaatgaacacctctgtagaaggaaggctgaaggcagtatggcataccagaaaaaaaaaaaaacatagaattttaaacaccagacaagaatttaagttccagctgtccccttgttcttagctttacaaacataagcaatttctttaacctcttagcctcaatt

SEQ ID NO: 443899 - DNA, 201 bp, Homo sapiens
catagagtctacttcacttccctgtcacatctaacagagtaggtgctggtatccatggctggaagatttgaagaccgattacatcacaggacttttgcagmccccctctaccaccagcctggagcatggtagctctgctgggtggctagaaccaaaagagccataacaattactgcagtccagctctcaggaagtcccatc

SEQ ID NO: 443900 - DNA, 201 bp, Homo sapiens
ttaattctataaaacttactctcctttctgatatctttgcagcttgcagaaacaaataacggcagatggattaccttgccacaagtttacgaataaacagsctttgttaattttgtcttggtctttgatttgtttccgacaaaatttatatagttagccgtacaaatatgcatcctactgaggggggtttgtttcattata

SEQ ID NO: 443901 - DNA, 201 bp, Homo sapiens
ttcaatataaaacctccatattaatgatttggcccaagaaaaatgaacacctctgtagaaggaaggctgaaggcagtatggcataccagaaaaaaaaaaaaacatagaattttaaacaccagacaagaatttaagttccagctgtccccttgttcttagctttacaaacataagcaatttctttaacctcttagcctcaat

SEQ ID NO: 443902 - DNA, 201 bp, Homo sapiens
cttaaagaaattaaaaaacagtataggatatgggtgaaaaattcctcagataaatagatatcataaaggaaaaacaatcacaacttctagaaatgaaaggmatacttagagaaatacaaaattcagtggaaacattcaacaatagactagaacaagtagaagaaggagcttcagagctaaaaggcaaggctttcaaattaa

SEQ ID NO: 443903 - DNA, 201 bp, Homo sapiens
acggcagatggattaccttgccacaagtttacgaataaacagcctttgttaattttgtcttggtctttgatttgtttccgacaaaatttatatagttagcygtacaaatatgcatcctactgaggggggtttgtttcattatatatagcccaccattgctgtccataagaaaccattcaaagagagaagacatgcaccaca

SEQ ID NO: 443904 - DNA, 201 bp, Homo sapiens
ctcatcttccatggtgggaagtcaataggtaacatctaaaactgaaaaaactctagaaatagtaatgtaaatatattatttattattattattattattatcattgttattatagagatgggaaagaaaatgtttgactctggaatagaataggagcaaggagctatagccaatcttatagaactatttgactttttaaaa

SEQ ID NO: 443905 - DNA, 201 bp, Homo sapiens
tctgtcaatatcagtttacttctatcacgattattattttgcccaaactgctgctatgtatcttttgaagcacattctctatgtcccggagggtatggtcrtggtcatctataaactcctatggccaggtacataaaatctagaacaatagcctttattgaagctacaaaatttattcagtgatacacacacacacacaca

SEQ ID NO: 443906 - DNA, 201 bp, Homo sapiens
cctcatcttccatggtgggaagtcaataggtaacatctaaaactgaaaaaactctagaaatagtaatgtaaatatattatttattattattattattattatcattgttattatagagatgggaaagaaaatgtttgactctggaatagaataggagcaaggagctatagccaatcttatagaactatttgactttttaaa

SEQ ID NO: 443907 - DNA, 201 bp, Homo sapiens
ctttattgaagctacaaaatttattcagtgatacacacacacacacacacacacacacacacacacacacacacacacagagctactgggactcacagaamacaagctgtcatcatagaagactgatagacaatttgctttggggaattagggatggcaaactttaaaatctgcactatgacagggattagcagttttctt

SEQ ID NO: 443908 - DNA, 201 bp, Homo sapiens
tcctcatcttccatggtgggaagtcaataggtaacatctaaaactgaaaaaactctagaaatagtaatgtaaatatattatttattattattattattattatcattgttattatagagatgggaaagaaaatgtttgactctggaatagaataggagcaaggagctatagccaatcttatagaactatttgactttttaa

SEQ ID NO: 443909 - DNA, 201 bp, Homo sapiens
ttgcttacatatacataataaggtaaacactgaatactgatctaatatacagaatagagaaatgggaagtgtttgggtgcgtgcgcacgtgtgtgtgtgtrtgtgtgtgtgtgtgttcatccacacacactgtggatgagcggtcgaaaaaagaactcctcatcttccatggtgggaagtcaataggtaacatctaaaact

SEQ ID NO: 443910 - DNA, 201 bp, Homo sapiens
accaaactcaagttctggctctgttccttaattggctatggaaccatgtattttatatttcagtctcagtttcttcatcactaaaataagagaaataatcrctatatctccatgatacttaaattagataatgcctggaagttgattattggtttcagatttcagagtccatgctcaatacttgacaacttttattatcct

SEQ ID NO: 443911 - DNA, 201 bp, Homo sapiens
acacaggttatcaacaatcttaagaaagctgagatgtcagattcagaagttcagcttctgtggacagacaagataaatgtcaacctcagcttaacctccgkgggggaagatgttgtcacccgaatagttcttttaagaccactccacccagggttaaggatattctcacttggctccattaaaggcctcaggacagggcat

SEQ ID NO: 443912 - DNA, 201 bp, Homo sapiens
tcatgagatccatgaagtcaataaagatgagtgaaatgtaataacccttttcaagtgttctcctccaccatcaataccttttgagatttatacaagaagcmccaaagaaagaacaagataaactcctctcactgtctctcacccggaaaagagatagagatagaaaatttgaatctatcaggcagacaactcactaacaga

SEQ ID NO: 443913 - DNA, 201 bp, Homo sapiens
aagcattctttgtcaaagacaaaatttaccttaggtttatagtcttcttgtcttagggacgttctatttttgctggtctgactactggcctacatttgacyctgtgactatactgttcctggttctctatttcctaagcttggatccaactcttgcttctctaaacaattccattagtaataattatggctaccattttct

SEQ ID NO: 443914 - DNA, 201 bp, Homo sapiens
accagtgtgagcatgtcacttttgtgttttagatggatttaggtccaaaattcttagtagggcattcaaggcttcctggctaccgaccccagtctgtctaytgcagcactcttcttggaactcttttcatctgctgtccactcacattgcaactcagcaccatcacatgatatcctgttctccaaaaggctgaaaaattgt

SEQ ID NO: 443915 - DNA, 201 bp, Homo sapiens
ggtcagtaggataggaagaacttagaatcaggagcgtgatgtagtggaagatgagaaaagtggtttggagccagattcatggaagttctcaaatgtcatgmtaaggagtttggatttattaggccacaggacacattctgaatcaggcgacaccatgatgggtctcgtgggaggacaatgcctgccacagcttagagtatg

SEQ ID NO: 443916 - DNA, 201 bp, Homo sapiens
ttttatgtccaagacttgaacatccgtggactttggtgtccttgagggggtcctgaaaccaatcccccacagacactgagggatgaatgtacattttactrtattcattaagactctgttcactgaccaagctaatggacactagcccaaatcactccatggccatcatgtctaattaagaagtgatgggatgcttccaac

SEQ ID NO: 443917 - DNA, 201 bp, Homo sapiens
gcatacataaactatctttgacactaacattgatgcacatatgtccaggacctcagtgttcaggagaagctcaggacatagcatcactattatctgcaackgcaatcgtggacaaacaagggaaacaaagcatctcttacttacaatatttcaatgtcatctgcctgaaaatcaccataataacaatataaacctgcagta

SEQ ID NO: 443918 - DNA, 201 bp, Homo sapiens
tgtgttttcaaacctggcattcaaatcctaactaataatggcttaaaagctaatataaggccctgaacctgtttatgctatagaaatgcacaaaagtaaawtagatttcttaaaagttgtcctaattagctagaacattattttgtaagctagatagggattacatgattaccacagtttatctttgcatttctatctttg

SEQ ID NO: 443919 - DNA, 201 bp, Homo sapiens
ggcttgtcttgaactcctgggctcaagcatccaccgaccttgacctcccaaagtgctgggattacagacgtgagacacagtacacaacctataccttaatwtttaaaagagaaaaaatatgaaaacattgaacttttttgctcttttacaaaacgtgctagtaatttctcgcccgccatagtcccagctgttcactatact

SEQ ID NO: 443920 - DNA, 201 bp, Homo sapiens
agtggtctagagaaactccgacttagtattttgcatcttcttttttttctctgtaaaacaccagtgtgagcatgtcacttttgtgttttagatggatttargtccaaaattcttagtagggcattcaaggcttcctggctaccgaccccagtctgtctattgcagcactcttcttggaactcttttcatctgctgtccact

SEQ ID NO: 443921 - DNA, 201 bp, Homo sapiens
acagaataaaaaagaaaaaggtctatggactatagtggtctagagaaactccgacttagtattttgcatcttcttttttttctctgtaaaacaccagtgtragcatgtcacttttgtgttttagatggatttaggtccaaaattcttagtagggcattcaaggcttcctggctaccgaccccagtctgtctattgcagcac

SEQ ID NO: 443922 - DNA, 201 bp, Homo sapiens
cagtgttcataaacagatttttcctttgaggcagtactgcataaaggttaaaaattagcagattgcttgggtttaatcctggctctttcattaatagctayttgaccttgggcaaattctttaatcgctctctgcctctgtttcctcttgtgtaaatgcaggtaggtaatagtatcttcctcacagagttttgtgagggct

SEQ ID NO: 443923 - DNA, 201 bp, Homo sapiens
atcaaactatatgaatcatggaagaaagcctaggaaacaccattctcgacattgaccttgaaaagtaagaatttatgactaagtcctaaaatgcaattacmacaaaaacaaaaattgacaagtagaagctaattaaactaaagagcttctgcacagcaaaagaaactatcaacagagtaaacagacaatttacagaacagg

SEQ ID NO: 443924 - DNA, 201 bp, Homo sapiens
gcacattacatctcccacagagagattcaaaatgttccttagctagcaaaggctctgagaaaactctcagcaaataaatctgtttaattttgttcagctcytcatttccccattaatttaagcatgagaactgtttttcaaataacagctattaaatcccccacggaactactatcactctcactaaaaggggttctaagg

SEQ ID NO: 443925 - DNA, 201 bp, Homo sapiens
tctttcttatttttcttaacacagaaagccagctatctctctctctctctttcttttcctctttctcattttcctactccaagaacaatggaatggatctsttttataagagaaaaaacacgatgcaaggccaatggtaataaaaagtgacacttaaccccagtggcagaaaaacaataggaagagtgtggactgtagaaa

SEQ ID NO: 443926 - DNA, 201 bp, Homo sapiens
aagttttgttgtgaggaaaagcagaaaaatagggaagcaggttgaaagaaatctgggatcaaaggaaggctttttaaagaaaaaaaaacctcacctatttkgtgacctatgaaaatccacagtcctcatcaagatttctgaaattcctgagaggaggcagtgatgataatgatgtgtgtgtatattagtaagtgtatgttg

SEQ ID NO: 443927 - DNA, 201 bp, Homo sapiens
tgaattgtactcccatatttcccacatgttgtgggagagacccagtgggagatcattgaatcatggcgacagtttcccccatactgttctagtggtggtaratataagtctcacgagatctgatggttttatcaggagtttctgcttttgcatcttcctcattctctctgcctgctaccattcatgtaagatgcagctcga

SEQ ID NO: 443928 - DNA, 201 bp, Homo sapiens
catcctgctgcacacagtttagccaaaactgttcatgaattccagtgagttacagcaaagtagtctttgcctcttgcctttcatggtaaacacaaacacamaaaggcaactagtaaaggtgtaaaatgggagtttggcctggagactcacgtgcatacagtcactccttaaatccttacccagatgcacttctccctacat

SEQ ID NO: 443929 - DNA, 201 bp, Homo sapiens
ataaattagatgattcttaatgacaagaggaacgaagagctatgcaagaaagaaaatcaagtatattccatgattagattatcaatagcacacgcacaatygtaataacataaacgatactaacctaacgagaagatatgtggagaggtgtgtaaaaaaatgaaaacttaaaaatatcacaaagtagcaaagaaatgtgct

SEQ ID NO: 443930 - DNA, 201 bp, Homo sapiens
tttccactccttggttttacattttccaacttaaaaaaactttttattcattagcaatttatttgttgttctttcttgtttttaattgtggatgtcaaagyatagcttttagctgattgactttctgctctttgaatcatagtaaacaatacatcagattataaaaattggcatgctattgtgagccagtagaagcactga

SEQ ID NO: 443931 - DNA, 201 bp, Homo sapiens
atttgagggaggcttctaacataaaagacaaaagccacagcaaatttgtagacaaacccaagaagaaggatgtgagaactccattaacagaacacttcatyatcactatcccttgattactcaccatgattaatgtcctaagagtgaaaggacaccatgttcatgaaacagagtatgctatgagaaaacacaggaagagaa

SEQ ID NO: 443932 - DNA, 201 bp, Homo sapiens
gggccaggtggagataaaataatcatggagtcagttttaccatattgttcttgtggtagtgaataagtctcatgagatctgatggtttttataaatgggarttcccctgcacaagctctcttctctccaccatgtgagacttgacttttcttctcattcaccttctgccatgattgtgaggcctccccagccatgtggaac

SEQ ID NO: 443933 - DNA, 201 bp, Homo sapiens
ccagcctagaaaaagatgggagatttattttctgcactatggaacaccacacgcaactgaatgcagattccatattgaatactgggaaatcagtgaaagtktatatggcaatcagaatgctgaaagatggcttttattgcctgggcaggaattttgaagaatattttctaaggaaacaaacaaactaaaaatacttaaatt

SEQ ID NO: 443934 - DNA, 201 bp, Homo sapiens
cataatttgaggtcttagatttaagccctcaatccatgttgattttattacctgcatttgattttacaggctcccagggagaagggacttgccttgtctcyaatgagactttgtacttaaactattgagttaatgctggaataagttaagactttgtgggactgttgagaaggcatgattggttttgaaatgtgaaaagga

SEQ ID NO: 443935 - DNA, 201 bp, Homo sapiens
ttttgaatacacagtttattataatataattatacctcaataaacctgtttaattttttaatctaataattgtctgtacagaataatttgatgaatctacrtttttaactttaaattttatgaaatcaacatacatatcaattactacaaattaaaaatttagcatgcaaatcggaatgtgttttaagtgtaaaataccaa

SEQ ID NO: 443936 - DNA, 201 bp, Homo sapiens
atagacactgaggactacttccagcgggagagtgggagggagtttgtgggctgaaacactacctatagggaattatgctcactacctgggtgatgggatcrtttgtataccaaacctcagcaacacataatttacccatataacaaatctggacaggtaccccctgaacctaaaacaaaagttggggaaaaaaagaaacta

SEQ ID NO: 443937 - DNA, 201 bp, Homo sapiens
ggattgtttatatagaaatcatattttcctgaaaccatggagtacagtaaaattcctttcctgcttttgtgttatcttgtatgcagcagcatgctttcagmaatgctaggaccccagtgtaagaggtatagaaagagtaacaaagggtcaagtaacttgccctgggccagccacacaactagaattcttttgtcaggacac

SEQ ID NO: 443938 - DNA, 201 bp, Homo sapiens
cagatctgaaaaagctgaattcaaacactcagtgagaaaagccaagaaacagtttgttttgcaccatgggatttaagaggctcaggaattaacaccaccakatacttctgacaatggcagctaaatataggatgaaagtctccttaaaaactaggtatacacctggttcctcttcccattctgcccagttagatgactgcc

SEQ ID NO: 443939 - DNA, 201 bp, Homo sapiens
caaaaacaaaaattgacaagtagaagctaattaaactaaagagcttctgcacagcaaaagaaactatcaacagagtaaacagacaatttacagaacaggaracaatattcacaacctatgcatccaacaaaggtctaagatccagaatctattaggaacttaaacaactgaacaggcaaaaaacaaataaccccattaaaa

SEQ ID NO: 443940 - DNA, 201 bp, Homo sapiens
aaatcactcatgtgatggtgcccacctggaaagatatttaaggcactcacaaggttctctcccgagaagtttccttttcttagcaaaggctaccaggtccyttcaaagttcagactctcgtatgtctttcaaagaaataaatgtgaaaaggaaaaggaaataatgtgtggctctgcaaaaccatcaacatttatcaaatgg

SEQ ID NO: 443941 - DNA, 201 bp, Homo sapiens
actcctcgaaaagatacatagaaacggccaacaaacatatgaaaaaatgctcagcatgactaatcattaaagaaatgcaaatcaaaaccacaataaaatascatctcataccagttagaataactattattaaacagccaaaaaacaacaaatgctagttaggctgtggagaaaaatggaacacttatacactgttggtgg

SEQ ID NO: 443942 - DNA, 201 bp, Homo sapiens
tagatgactgcctctccaccagcctagaaaaagatgggagatttattttctgcactatggaacaccacacgcaactgaatgcagattccatattgaatacygggaaatcagtgaaagtttatatggcaatcagaatgctgaaagatggcttttattgcctgggcaggaattttgaagaatattttctaaggaaacaaacaa

SEQ ID NO: 443943 - DNA, 201 bp, Homo sapiens
cacctggttcctcttcccattctgcccagttagatgactgcctctccaccagcctagaaaaagatgggagatttattttctgcactatggaacaccacacrcaactgaatgcagattccatattgaatactgggaaatcagtgaaagtttatatggcaatcagaatgctgaaagatggcttttattgcctgggcaggaatt

SEQ ID NO: 443944 - DNA, 201 bp, Homo sapiens
ggtaggtccaaaaggcaacctccaaacaccgtcctcaggtggaaactttggcaattatctgtggttaaaaaaacaaaacaaacaaaaaaaccaaactaccrattcctatccttaatcacgttggatggtcatttcgtccattcttctgcgttgagtccactgtaaatacttcaattattttgaagacactcaaaatccaca

SEQ ID NO: 443945 - DNA, 201 bp, Homo sapiens
caaaattttgaaaacttagaagcagatgaaggagtgatgactgctttctcagatctgaaaaagctgaattcaaacactcagtgagaaaagccaagaaacartttgttttgcaccatgggatttaagaggctcaggaattaacaccaccagatacttctgacaatggcagctaaatataggatgaaagtctccttaaaaact

SEQ ID NO: 443946 - DNA, 201 bp, Homo sapiens
gacatcactgatattcctgtcatcatcatgacaacattaagaaaagttatttaaggctaaagaaatcaaatgctgcaacttgggacaccagcatcagcagsaatctgttaaggggactctccattgaggatcaaggagggaaggattcctagatctaagggactccagggccaggggcaaccatggaagttgcagtgccct

SEQ ID NO: 443947 - DNA, 201 bp, Homo sapiens
acaaataaccatgtcaggtacagggaagcggattctacctcagaaggataacaacctaaccaacaataaaagatacataaaaatttcaaaaaacattatayagaccatggtccccaagacaagctctttgaggacagtgacattttctgtatggtttatacaatatctttagggagtgggacatggcacagagctggcttg

SEQ ID NO: 443948 - DNA, 201 bp, Homo sapiens
ggcttgcaagtgtttcatgaatgaatgaatcagattgagatgaagaaacactttcagtttgtagcagaaagagattactgggagttgaaacggacagaggrcatttcattcacaagacaggaagaaaagttttaggtaattctttttcatgcaatgaaccataatgtacataaataggaaaggtggaagaatagtctgaat

SEQ ID NO: 443949 - DNA, 201 bp, Homo sapiens
agtctaatagtacgtaccttataaaggaaaactaggaacagcccctggcaattggtaaatacccaaaaaatagatgctgttttttaggtatcagacactaygctagatactttatatggagcatctcatccttccatttatcttgactcctcgtggtaggtatctccatgccacgaaactgaggctcggaggttatcaggt

SEQ ID NO: 443950 - DNA, 201 bp, Homo sapiens
cttaaaacaattcctagggtataacagcccctcagtaaatatatgtcaaaatatggatggatggatggatggatggatggatggatggatggatggatggrtggctgggtggatggatggatggatggatggatggatgatagaatatgctccaatacgcaattgcaaagacatggaaccaacctaagtgcccatcaactg

SEQ ID NO: 443951 - DNA, 201 bp, Homo sapiens
ataaattgcttgtcgcttttgaaatattagagctcattttctggtggtcttttgaggtaataaaaatacatgatttacatccctccccaggatggtgaaayagtttgtttttgttttaaaaggtgtacttatggactgtaaaatgaaacttgatgtggcataatgattcttcatgtatcaccaggttccatctgcataaga

SEQ ID NO: 443952 - DNA, 201 bp, Homo sapiens
aattcctagggtataacagcccctcagtaaatatatgtcaaaatatggatggatggatggatggatggatggatggatggatggatggatgggtggctggstggatggatggatggatggatggatggatgatagaatatgctccaatacgcaattgcaaagacatggaaccaacctaagtgcccatcaactgatgagtgg

SEQ ID NO: 443953 - DNA, 201 bp, Homo sapiens
tccagctgctaaccgcgagtgatccgccagcttccgcctcccgaggtgccgggattgcagacggagtctcgttcactcagtgctcaatgttgcccaggctsgagtgcagtggcgtgatctcggctagctatggcctccacctcccagccgcctgccttggcctcccagagtgcggagattacagcctctgcccggtcacca

SEQ ID NO: 443954 - DNA, 201 bp, Homo sapiens
aagcccggggtctaggagggaaagctaaatggtctgtatttgggacgtggattaagaatcagacatgcatcaaggcagagggaaaaacaccatgaggggcragaaggctccaggaattcacatgtgcacagaaagctactatttgatttagaatgagaacatcagaaacccagggaggattagaagcagcttaaaaattgg

SEQ ID NO: 443955 - DNA, 201 bp, Homo sapiens
tcctaagcctgtgctctttttccctatatcatgctgcttttcttctcctgtgcttttatatgtctctaggtgctacattccccctcccacccctattcctraggagggaaggatgagacagacagacacacaaacacacacacacacacacacacacaccccattgtagactttcagacatctaacagagaagctggtaat

SEQ ID NO: 443956 - DNA, 201 bp, Homo sapiens
aatattacaaagtagatataattgtacaaactatacatatctgaaaatattctcaaaaagattccctccagccttcccatctcctgctggcaaatgttctyccttcattccagatacaacatggcctccactgggcaccatattcaaggcttgtgcaggatgacactttatctccatctgcaaaatgcaactacaagacag

SEQ ID NO: 443957 - DNA, 201 bp, Homo sapiens
ccccaaaagtctctatttcaattagctccaaattcatagtctgctataaggtacactccacatttgttaaaccactgtgacccaattcctatagtaaggtyattataataactaaaagatctagaaattagtgggggctttcagaagccagatattttagccaagtagtttagccctggtcaatattacaaagtagatata

SEQ ID NO: 443958 - DNA, 201 bp, Homo sapiens
cctagaaatagtcttaattgtgccataccgtgcgtctgtttcatagggcctatgtatccattaggattaggttcagcaacacaaaatagtgatccttttasttatctcatgattcaagatggctgctgggctttgatcattgtgtccttttgcagatgagaagacggaggcaacagaggaaggatgacaaagagactccag

SEQ ID NO: 443959 - DNA, 201 bp, Homo sapiens
agagcagaaagaggattcaagaatttaaagatttcaacaacaaagggggaatttaagagttccaagattttctcctcagatactcaaaaattccaattagscagaatacgccattctctgagtacatcattaatcagtttgaacgtgttttccattatttccaactttacagtgctggtttaaagcaggtattatttcaga

SEQ ID NO: 443960 - DNA, 201 bp, Homo sapiens
attttctattgtctcccttgtttggaaaatgaagatacttctttttaaattctctgctactagtatgtcccaacattatcacaaacaaactctaaataackttcctcaaaaatatctttatctttgtattagttttctattgttttgtagcaaattactacaaacttaatacaacacaaatctatcaccttacagtaggtc

SEQ ID NO: 443961 - DNA, 201 bp, Homo sapiens
tgacacagacttcttttacctggttaataaagcaggtcttttatctttcaagtctcatcttctgctctaagttgaaacattgatgggtattcatcttgccrggactttataatggagaatctgtctacagggagcttcttggaaagaaaaataaccaatggtcaccatgagatttcctgacttactactgcacaaccatag

SEQ ID NO: 443962 - DNA, 201 bp, Homo sapiens
gaggctcagaagcaatacctactgttagcctggtggccccatgagtattcctagtcaccaagaagaaattcaacaatgaacacggcctatcactctaagascagaaagaggattcaagaatttaaagatttcaacaacaaagggggaatttaagagttccaagattttctcctcagatactcaaaaattccaattaggcag

SEQ ID NO: 443963 - DNA, 201 bp, Homo sapiens
aatactgaattacttatgggctctcccaaaagtttgagatacaccacaaacctttcagtggttcaggtctctaaagattcaactctgactctaggtccagragaggtcttagagaagagtgaatttttgcagaattcatcaggaaactgcagctcaccacattcaagaaccacagggacaaaagaataggtataatgggcc

SEQ ID NO: 443964 - DNA, 201 bp, Homo sapiens
tcaacacacgcacgcacacacacacacactccacaactgttgtcaccagctcaggcaaccatacactgagttttccccaaaagtctctatttcaattagcyccaaattcatagtctgctataaggtacactccacatttgttaaaccactgtgacccaattcctatagtaaggtcattataataactaaaagatctagaaa

SEQ ID NO: 443965 - DNA, 201 bp, Homo sapiens
cagtatggctctgctctgctcagaagattaggagtgcatagtgggcactgttaataatcatagttaaagtaggaactttacatcacttcatatcctaccaytgtcctatatgtaatttatgttctagatatagtcaacttttcaaatgtattttgccatcatatcatctcctgctcagtctagaaactcttttctgtcata

SEQ ID NO: 443966 - DNA, 201 bp, Homo sapiens
caagtaggtacacactattgaaaaataaatgcataagtgtgacattcttataatggtaaatttgaggtgagtctaattaattaaaaatttaaaattttcasaaatccttataacaattcttatgagtgagtagttttgacacgtgctataactgatcgtgatcctgtaatgtgtcatgccactaagatcaagaggactagg

SEQ ID NO: 443967 - DNA, 201 bp, Homo sapiens
catgttgaatttgattttctaccatttgcatatcaaagaatcctgatcagcacaattggcccttttatataccaacacgagttccttattttaatgaatcyaccacacatctacactttcttagcttattgatataagagaaatcagaaggtgacaaatagaaatagggccaaggcaaatgttttaggcttaactgcactt

SEQ ID NO: 443968 - DNA, 201 bp, Homo sapiens
cctcacagccactattaccataagcctcttcagtcagcaggtgaagggtctttctaagactgggtccttaccttcatggcagcaggttcccttctggctcrgggggtgtccagaaatgatgttcaggagctggggcatggcaagggggccttatgactctgactgtgactggtgcctatcctactgtgactgagctggtat

SEQ ID NO: 443969 - DNA, 201 bp, Homo sapiens
taaccgcgagtgatccgccagcttccgcctcccgaggtgccgggattgcagacggagtctcgttcactcagtgctcaatgttgcccaggctcgagtgcagyggcgtgatctcggctagctatggcctccacctcccagccgcctgccttggcctcccagagtgcggagattacagcctctgcccggtcaccaccccgtctg

SEQ ID NO: 443970 - DNA, 201 bp, Homo sapiens
gctcgagtgcagtggcgtgatctcggctagctatggcctccacctcccagccgcctgccttggcctcccagagtgcggagattacagcctctgcccggtcrccaccccgtctgggaagtgaggagcgtctctgcctggctgcccatcgtctgggaagtgaggagcacctctgcccggctgcccagtctgggaggtgaggac

SEQ ID NO: 443971 - DNA, 201 bp, Homo sapiens
tgccttggcctcccagagtgcggagattacagcctctgcccggtcaccaccccgtctgggaagtgaggagcgtctctgcctggctgcccatcgtctgggawgtgaggagcacctctgcccggctgcccagtctgggaggtgaggaccgcctcttcccggccgccatcccgtctgagaagtgaggagcgtctctgcccggct

SEQ ID NO: 443972 - DNA, 201 bp, Homo sapiens
gcacctctgcccggctgcccagtctgggaggtgaggaccgcctcttcccggccgccatcccgtctgagaagtgaggagcgtctctgcccggctgcccatcrtctgggatgtgaggagcacctctgcccggccgcgaccccgtctgggaggtgaggagcgtctctgcccggccgccccgtctgagaagtgaggagcccctcc

SEQ ID NO: 443973 - DNA, 201 bp, Homo sapiens
gggaggtgaggagcgtctctgcccggccgccccgtctgagaagtgaggagcccctccgcccagcagccaccccttctgggaagtgaggagcgtctccgccyggcagccaccccgtccaggagggaggtggggggcagcccccgcccggccagccgccccgtccgggagggaggtgggggacagcccctgcctggccagctg

SEQ ID NO: 443974 - DNA, 201 bp, Homo sapiens
ttgcagctaaacgtcaagagaagtgtttggagatacagtgggttacatctgctgagctcgtctaatattttttttttctttcttcagaagagacatggctrttcttaccaccaaaagacaaatctgaatattgtaacaaccattctgagtactgtcactaactgccactgaataactggattacctgggaattgttagttt

SEQ ID NO: 443975 - DNA, 201 bp, Homo sapiens
agatgatcttcccatcttggatgatccccttgataatagaagagacaggtggcaatcaagattacagtcaccagctcaaatgtcccctatgcaatcacatrctcttggcaggtcagattatttttcaacaaaattgattcattcaaagggtgagctggccttagtatatactgaactactctaaagcatcctactttagga

SEQ ID NO: 443976 - DNA, 201 bp, Homo sapiens
caccatgcctggttaatttttgtatttttagtagagacagggtttcaccattttggccaggctggtctcgaactcctgacctcaagtgatccgcccacctsggcctcccaaactgctgggattagaggcatgagccaccgcacccagcccatgctgaagctcctgtctctttcctggtcctaagtccactgtttggctaat

SEQ ID NO: 443977 - DNA, 201 bp, Homo sapiens
caggcacgtgccaccacgccagggtaatttttgtatttttagtagagacagggtttcaccatgttggccaggctggtctcgaactcctgacctcaagtgayccacctgcctcgccctcccaaagtgctgtgattacaggcgtgagccaccattcctggccctaattctgctcttgaattttcaatattcttgtggtggttt

SEQ ID NO: 443978 - DNA, 201 bp, Homo sapiens
agcctccaacacaaaaacagatgcagggatgtaaacatgcatgcatatttcacatacctcaaattagttgactcaatcagaatgcaactgtccttagatayaaatgtgtaagaaaaacagtggtttacttctaacttccactcagcaggagcttgtcctaaggtgttccatagcatcatcccctcagcccatcacttggcc

SEQ ID NO: 443979 - DNA, 201 bp, Homo sapiens
gtaactactaccttcatttcctatcacgctcttgagacagtcacgctaaaagcagcagactctagtgcaaaaatatctacttgtcttcattcctaggaacrtttccctggggataaggccccagtgacagagtagaaaggaaaaactgccacataaaagatagggtgctcctgctaacaaaacctttatctcctgtctctt

SEQ ID NO: 443980 - DNA, 201 bp, Homo sapiens
tcagtgtcttctacctgcagtaactactaccttcatttcctatcacgctcttgagacagtcacgctaaaagcagcagactctagtgcaaaaatatctactygtcttcattcctaggaacatttccctggggataaggccccagtgacagagtagaaaggaaaaactgccacataaaagatagggtgctcctgctaacaaaa

SEQ ID NO: 443981 - DNA, 201 bp, Homo sapiens
ctattggtttttcctacccataaactatcccctcacttctaatacaacaccctcagtttcatttgagcaggcatctctaccctactctcagtcacatggtytgagtgaacgtgaattctcatcctcactttccaggcatgggactgtgtttcaggactggctactcactatgttacagattcttggatacctgagttgttt

SEQ ID NO: 443982 - DNA, 201 bp, Homo sapiens
ctggcactcaaatcataagacacagtccctccaacccttccctcccgtttccacaggcagaggagcctcacctcacagccactattaccataagcctcttyagtcagcaggtgaagggtctttctaagactgggtccttaccttcatggcagcaggttcccttctggctcagggggtgtccagaaatgatgttcaggagct

SEQ ID NO: 443983 - DNA, 201 bp, Homo sapiens
ttttgatcacatagccagatagcagcaaatagggacctaaattgggtctcctaaatctcagttcagtgtttgctccacataatcattctcaatcatatcawcattttacaggtccctcatctgcaaaactgaaagacgtcagagtaaaagatagctattggtttttcctacccataaactatcccctcacttctaatacaa

SEQ ID NO: 443984 - DNA, 201 bp, Homo sapiens
ctggagtcagaaaccttagaagtctacctggtattctattgtattgcaattgaactggcactcaaatcataagacacagtccctccaacccttccctcccrtttccacaggcagaggagcctcacctcacagccactattaccataagcctcttcagtcagcaggtgaagggtctttctaagactgggtccttaccttcat

SEQ ID NO: 443985 - DNA, 201 bp, Homo sapiens
tatctgaaaaatatttaccaaaacaaaggtaaatttgttggaggttttccacaaagatcccaaatcattaaccatagaaatcattcaagtagtaagctctrcgcttttaagattctttaacaaaaattccctatacaaacaactttttagaaactgtaaatcacattggcataattcttaaactctcccagggcactttta

SEQ ID NO: 443986 - DNA, 201 bp, Homo sapiens
cggcatattacaaaaagtgctggccaaaggctgggtgaattaaaagccatccatctcttagctgctgaggagctcagctccactgtcacttcaggaccaaratgctgggagttcactgtttccagttctttccactgttcagctgccattgcgagttatcaaatcagcctgcttacagggctcctgtctgcatccaggctt

SEQ ID NO: 443987 - DNA, 201 bp, Homo sapiens
gctgggtcagtccttaagccatcaaagcactgggccttgtccaaggtctgctgtaaccactaactggctaccccctaagttcactcaaggccctgggtctrcaatctgtggatagtgaagccagccaggcttgcatccttctcttcagggaagcaagttcctccaggccctggttgggtacagaggtgccatccaggagcc

SEQ ID NO: 443988 - DNA, 201 bp, Homo sapiens
tctgaaggtctctttccactgtattatgctgaaaacaatgaaaatcagatcttaaaataacgtaataaatagatctgaccacactctaataaaagagatayctgaaaaatatttaccaaaacaaaggtaaatttgttggaggttttccacaaagatcccaaatcattaaccatagaaatcattcaagtagtaagctctacg

SEQ ID NO: 443989 - DNA, 201 bp, Homo sapiens
gggatgccggcatattacaaaaagtgctggccaaaggctgggtgaattaaaagccatccatctcttagctgctgaggagctcagctccactgtcacttcasgaccaagatgctgggagttcactgtttccagttctttccactgttcagctgccattgcgagttatcaaatcagcctgcttacagggctcctgtctgcatc

SEQ ID NO: 443990 - DNA, 201 bp, Homo sapiens
gacctggctcctaatgtggtgcttctaacctctacaccatgcagtctcaactagagtgacattacctctaagggggtgaaaaactgggtctagaggtggtrgtaatggtggtgatattagatattataaaggtctgtggttccccaaagggccatgctcatgaacagatagtgtatctctggtaataaaatttcatgggac

SEQ ID NO: 443991 - DNA, 201 bp, Homo sapiens
gaaggtgcaaatggagtgtgaattaagtttagaatgctattgaggatactgatacagaactataaacagcgaatacttgcaggtccccagaggctcaatarcttgccacagtcacaaaacttaacaggagccaaaccaagattggaacccaagtcttactgatctgaaggtctctttccactgtattatgctgaaaacaat

SEQ ID NO: 443992 - DNA, 201 bp, Homo sapiens
ccggaagaattatctggattaccatgcagagactcttcttctctttccttactttctcccaaacaaatggagtctctctctctctctggatctgggggtgsagtgacacaagtacccctgtggctaccaccactggaactatgctgggtcagtccttaagccatcaaagcactgggccttgtccaaggtctgctgtaacca

SEQ ID NO: 443993 - DNA, 201 bp, Homo sapiens
tggtggcagggtgtcgtcagttttaacgctactcttcaaagccacacggtttcaatgaactgccatgatggcattatgaatttcctcttcatgtgaggcaraggtggaggtcactgacattccctcaaagtccacaggcacacacagatgtctgaacataatcttgacaggcagcataagttcagtcccagtgccatctcc

SEQ ID NO: 443994 - DNA, 201 bp, Homo sapiens
ataatctgagatggcaataaacaccatgaagaaaatagagtaatgggatagaaagcaacttggatgggggggtcctactttagaaaggggggttgaaaagkttctttcaagctgaaacttgaatgactagaaaaggcaagatgggaggaagctttccacatgcagagaagggtgcatgcaaacgaggaacaaactgggagt

SEQ ID NO: 443995 - DNA, 201 bp, Homo sapiens
atgaattgacttggtctctctaggttacatgtcatcccagctaatgttgatctttttttgtttttttgtttgttttatttttctaatcaataaattctcamacttggttgattttttttggattgatgttgcttttttgttatttttttcaggctccatctttgagacacaatcgaggagtttttttcagagaggccaatg

SEQ ID NO: 443996 - DNA, 201 bp, Homo sapiens
cagtatatataggtaccacattttctttatccattcatctgttgatggacatttaggttgcttccaaatctcggctattgtgaatagtgtacaataaacayaggagtgtagatatctctttgatggacagatttccttccttttgagtatatacccagaagtgggattgctagacaatatggtagctcaatttttactttt

SEQ ID NO: 443997 - DNA, 201 bp, Homo sapiens
taaaggttcactgattccaaagctaatagtaaaagcatcaggaaaacttctcattatacttaaacagagagtcaatcattagacatttcctgtattccaawgtctcctatgatgtcctagttaaatttgagagacacgaaaataatagagaattttatatgagaagttttcagatcaattatattgttccaatataaattc

SEQ ID NO: 443998 - DNA, 201 bp, Homo sapiens
ttagttttcactagccaaagaggtctgaaagctattttagcttaaagcagaaattactgcctaggatttttttggtcagataagtgtgacaatttagcatrtccgtggccgacactgtgaagctgaatgaacagcctaatagcttcacttctgaaaggatctgccaggttgtgagacagtcaggttcttttcagacaggga

SEQ ID NO: 443999 - DNA, 201 bp, Homo sapiens
gttaacacagggtagggatgccggcatattacaaaaagtgctggccaaaggctgggtgaattaaaagccatccatctcttagctgctgaggagctcagctycactgtcacttcaggaccaagatgctgggagttcactgtttccagttctttccactgttcagctgccattgcgagttatcaaatcagcctgcttacaggg

SEQ ID NO: 444000 - DNA, 201 bp, Homo sapiens
ggtttcttttaagtcacctagtccaataggaatacccacaactagaataaaagaaagaagtgaagctgtttgttttaacttgggttttatgtaatggtcaygtaggcatccccacagtgtcctttttgctgaggccctttgtctctctactgtgaagagagtggcttgtgattcttttggtttcacagatacctagaggag

SEQ ID NO: 444001 - DNA, 201 bp, Homo sapiens
ttatttgactctttcattgtaaatcatacaattggataatcaagagatagcagcagcagcaccatcagtctatgtatcctaaatccaaaggttaattgtgrtatttcctttctacatctgatatctggttaatttaaacaataccaacccacatctttctatctcaattatttgaatcagctctttccttctaccacatac

SEQ ID NO: 444002 - DNA, 201 bp, Homo sapiens
ttgcccagggtaataccaatttctttcagttcaagttttcagtcaagagaatttttgagctaaaaagccagactttcaaagtagagaggcaaatagtacayattttgctcatccatgtgggctttaggacatccagaaaattagagcaaatgagttccctcatttgtaaagtcaaaactttacatcctttcataaaagcca

SEQ ID NO: 444003 - DNA, 201 bp, Homo sapiens
aacagagggcaggtttcactataaaggttaaggacgggcccccagaacccagtcatctttttcttgggcatgtcttactaaaaatgtctaagacatgtggmagagatcaagcttatttgactctttcattgtaaatcatacaattggataatcaagagatagcagcagcagcaccatcagtctatgtatcctaaatccaaa

SEQ ID NO: 444004 - DNA, 201 bp, Homo sapiens
aacttgaagcctgttagttcaaatgtgtgaaatttgctgtcagaaaagtgacaccctcagactaatagactctaatgagtagggatgcgacatggcattcytgagggagagttagagacaccattacacaagccctttaaagagaagagaaattatttccactctaattgccaatgaaaaccctcaggtgtgggtccaggc

SEQ ID NO: 444005 - DNA, 201 bp, Homo sapiens
ctaatatacagaatagagaaatgggaagtgtttgggtgcgtgcgcacgtgtgtgtgtgtgtgtgtgtgtgtgtgttcatccacacacactgtggatgagcrgtcgaaaaaagaactcctcatcttccatggtgggaagtcaataggtaacatctaaaactgaaaaaactctagaaatagtaatgtaaatatattatttatt

SEQ ID NO: 444006 - DNA, 201 bp, Homo sapiens
atgactgagtattacaggggtactaaggctgggccattttgcccaacatgggactctaacagacactcttcattcaaatggccccttagcctgctgcctasggctgtttccatcagctctcactcttcagattggcaagtggtgagtcagatagtgaacagtcttcccctagctccaggaaatgtgcaatttctccagagc

SEQ ID NO: 444007 - DNA, 201 bp, Homo sapiens
ggaaatgtgcaatttctccagagcatccttgaggctgttctcgctaggcttaagaggaagacagaatccacctctcccccttccaatgtgggagctccccrttgattgcccaagactttgtaagattcacatttggtctgaggctctcttattttctctattttgcttctttctttcctcttcatttttcataggcattcc

SEQ ID NO: 444008 - DNA, 201 bp, Homo sapiens
cctagggctgtttacctccaatgataataaaattccattctgggtaatacaggcattctaggtgtcccaaagaagccagctgatggccacaacttgaagcytgttagttcaaatgtgtgaaatttgctgtcagaaaagtgacaccctcagactaatagactctaatgagtagggatgcgacatggcattcctgagggagag

SEQ ID NO: 444009 - DNA, 201 bp, Homo sapiens
cctctagctcggtctcagcatccgcttcccagagaacccaaataacacaccagggatatctggaatgtaactccagtgggggtgcagatcctttccattcrtgccccttagcctgctgcccagggctgcttccatcagctgtcactcttcaggttggcaagtggtgagtcagacatcagtgaacggtcttcccctagctct

SEQ ID NO: 444010 - DNA, 201 bp, Homo sapiens
ctggtctcgaactcctgacctcagatgatcccccccaccttggcctgcaaaagtgctgggattacaggcatgagtcaccgcacccggccaaagtgatactyatctagatgataaaagtgagttgcattttcttcccgttctgtttactgtttggttatgggaactggtggttctccatttatttgccatccacccacctca

SEQ ID NO: 444011 - DNA, 201 bp, Homo sapiens
aaagtgacttaaagctggctttgtctttcctaggttttccttttgcttttttaaaagtgcattatgtcatgtcctaactgctagattgggaatctgatttygtcagaggattctgggtaaagatcaacagacaacaatagctctgggaaattttaactctgggttccgaaaagattatttgaatgacaaagttcataaagg

SEQ ID NO: 444012 - DNA, 201 bp, Homo sapiens
tagtttcaagggatgaatgatgttggctattttatgaggattcagagtgtctctgttcctataagtctggggtaaatcctcatgaaacaaaagagtagtcrccatctgtacccaccctggaaaccctggaaactctggggtcaataaccttttcaggaacatttatagatctgggccttctctagaatagaaaatctcaca

SEQ ID NO: 444013 - DNA, 201 bp, Homo sapiens
gctaattttgtatttttagtagagatggatgggttttctccatattggtcaggctggtctcgaactcctgacctcaggtgatccacccacctcggcctccsaaaatgctgggattacaggcgggagccaccatgcccagcctatatctcatacaaaggtatttaccactaaatgcagagccacttatgacagcagagggtt

SEQ ID NO: 444014 - DNA, 201 bp, Homo sapiens
gtcagctaagtagaaaagttttccaaggccagatccacatctttcactgtgatttagtcaatcattgccaacaccttttgttcaactccatttatttaccyttggtggatctgaggaacatcatctattagtgctctgagacatccccatccaaagacacacacacacacacaaccttcatatgacctttcaactaatcaa

SEQ ID NO: 444015 - DNA, 201 bp, Homo sapiens
agagagaaggccacgcctctaaagaaggaaataaggatggtaaaggggggagaataaagggaaagggaatgaccacacagattctggggtgcagcgcgtamggaggatggctgggtaggattgcaaacctccgacactccccccagttgacaggccctatttttgccaatttcctacatctcaccccacctcacctcaccc

SEQ ID NO: 444016 - DNA, 201 bp, Homo sapiens
ttttcattctctcctgaatgtgtgcaagcttccgtgggaccctcttctcgaaggctaaatcttgaagtctctcataaccactagtttgcaaaatcatcacscttgcttaaaaagtattataacaaatattgttattgattatttcagtctaagagctctctctgtgacccttctggaatataatattgccctcttcatcct

SEQ ID NO: 444017 - DNA, 201 bp, Homo sapiens
ggttcggtaaaatagctctggggctgccccctaatttgaaaggaagattctctgaaaagatctgtaaggcttttctggggacaagggaaaaggaagcacaragtaggagacttgagtccactgctctagactttggaggatcaaattctctttattttaaatttgtcttttttttctgtgtttcttaccctaagggaggta

SEQ ID NO: 444018 - DNA, 201 bp, Homo sapiens
acctccagactggtgaagagtacctgtgaaaatccacacagctgacatacttcaaggtgaaaactgaaagctttccctttaaaatcagaaacaatacaaaratatctgctcaccatttctattcaacattgtactggaagttctggccagggcaatttggtataaaaatgaactaacaggcagcaggtaggacaggaagac

SEQ ID NO: 444019 - DNA, 201 bp, Homo sapiens
tttctgtgactctgaaactgttctaaaataagaagctcattaaaaaagagagaaagaggggaaatacatccttagcagataacgtaggacccatttattcytcagcagtccatttaggcagctgccataggcaggtgatatcttctggctggttacttccttggatgccttgtccatagcccagtgctgcagctctccatt

SEQ ID NO: 444020 - DNA, 201 bp, Homo sapiens
gaattgacacatatcatttctgagcagtagctttaaatgccagtagatgcttcacctttcttattttcccacaatttgccacagcaacagcaagcctcctwatagcagttgcatgaatcccagggggtgaaaaatgtgaaggagaaaggtaggcaattcatgatgaacatgtattacaagcaagaaataaactcttgatat

SEQ ID NO: 444021 - DNA, 201 bp, Homo sapiens
acagtggcctgagagcaggctccagagtctaggaaactgcttcacccaactaagtgctataaagcagataacaatgggaggccaacaggtattcagtcccrtaagaatagctgtatgtcatcttggagtgtgtctccagcaacaacatgggctttcttgtgaatgaaacattttatatgataggtaaaaataacacaacca

SEQ ID NO: 444022 - DNA, 201 bp, Homo sapiens
ggctgtggtctaattattcctcacctaagtcaaacccatatagggtttgtggatgaagcacgtgcttcatctacactggaaatctcaccatccttggaacrcaattagattcctttcatgaccacatctataatcaggctgctgtcacgtcctggaacagatcctttaatgagtagttcgcctggaaaaaatccttctcat

SEQ ID NO: 444023 - DNA, 201 bp, Homo sapiens
tactatatttcaaaaacacttggatactgtgagaggttcaaagcttatgagagtttatttaataatagttacagtaaatgaacctatttctgaacaaatgyggaggagaaagtcaaggtctgctatttttatagcatcagcatattttttccaattattttatactagactgtgttctagcctacaacttgggtagttgtg

SEQ ID NO: 444024 - DNA, 201 bp, Homo sapiens
ttgctaactatagtcaccctatctgctgtcaaatattggggcatatttcttctacgtaactatatgtttgtattcactaatcaacctttcttaatctgctycccatcccacccatagacacttcacatcctctagtatctatcattctatactctatctccagaagatcaattttttttttttagctcctacacataagtg

SEQ ID NO: 444025 - DNA, 201 bp, Homo sapiens
ctactccacatttgaagaaatggctgaatggctcatttgcagtcagtcgtgatgtaagattatgtccctggccattacacatcagcatcgagacccacacmaggcatacaaatcttacaaggacaatgggccgtatctctgtagtgttgaagtcatgaacctatcaatacttcaaattccaggaaagagggagtctttgaa

SEQ ID NO: 444026 - DNA, 201 bp, Homo sapiens
taatactatatgtaaatggctttggtaaaaatcaatatcacacacctgaaaatatattgcttagctacagaaacactggttatgaaaaatatatgtacaayaatgattattggggtgttgtttgtgctgagaaaaaaataaaaagtgaatgcctattaataagggaaaggagtaaattgtgatagatccacaccacggcat

SEQ ID NO: 444027 - DNA, 201 bp, Homo sapiens
ctacctactaaaaattattaaatacatttttgttaatactatatgtaaatggctttggtaaaaatcaatatcacacacctgaaaatatattgcttagctayagaaacactggttatgaaaaatatatgtacaataatgattattggggtgttgtttgtgctgagaaaaaaataaaaagtgaatgcctattaataagggaaa

SEQ ID NO: 444028 - DNA, 201 bp, Homo sapiens
ttcttttattttgaaattggatgacttgttagtgagtgttcatttttatgtctcctaatatgtgtttatgcgttacaagtgctcttttgaaagaataatayattaaacagtttataaaacaatagatgtttacgaaacacttgataaaatttgttaattcttccaaacaaaaattttttgtaaaatagaaacattagatca

SEQ ID NO: 444029 - DNA, 201 bp, Homo sapiens
ccaagctgctgagaggcctctgcctcatctagatttgaaggagttacttggctataacaagcttattttgagtcaagccagccaagctatttctttgtttmataagattccaaggccctgaataaaaatattttcaaaaatcaaacaagggatggttagaaaaccccagtgagaattttttacatggatttaatccaaccc

SEQ ID NO: 444030 - DNA, 201 bp, Homo sapiens
ttacagatgaatcagtgtgaaaggtgtgcaggggggttgtttcctctaattaactttcagtgggtgaaaagtacactaatagcccacagggagaagttgakcccacgctgttcatcagcaactcaaggaactgattgaagtaaggctcataaaccctgttaagtgatatccaccaaaagcagaggcagcttgacttcaaaa

SEQ ID NO: 444031 - DNA, 201 bp, Homo sapiens
gaactatgtccatttcttgctttcctgagtcctcgctgaggactgagcaacggctgcggaatcattcctaggtgtgtccagaggtacggacagctcatcastcctccctgctgtgatggagctgactgcctcctgccagagggcgatgtattcctccggtggttctcacaaggaaagtgcagaagaactgaaagactgtcc

SEQ ID NO: 444032 - DNA, 201 bp, Homo sapiens
cacagtggcccatgcctgtaatcccagcattttgggaggccaaggtgaggggatcaattgaggtcgggagttcgagaccagagtgaccaacatggagaaascccatctctactaaaaatacaaaattagccaggtgtggtggtgcaggcctgtaattccagctactcaagaggctgaggcaggagaatcacttgaacccag

SEQ ID NO: 444033 - DNA, 201 bp, Homo sapiens
aaatttcccaattcctataagagatatagacattcagatacagaaagctcaacaatccccaagtagtttcaaaacaaaaagttctctctgagtcacagttyggtcaaactgtaacattcaaagagaaaaaagtagcaacgaaggccatcaagtcacatagaaaacaatacctatcagactaacaatgtatttttcagcaga

SEQ ID NO: 444034 - DNA, 201 bp, Homo sapiens
ttggccctgcattttccttgttctctgggtacagtctagattaaaatctgtcttgtccttctctgtgctttataacatccaagatttggattctatctgtrtaactgaagactggaagtttggttagcatcttactacctgtgtaaatattcactgactttctgtttctgtgtcctagtatttctctgactcttaggtcta

SEQ ID NO: 444035 - DNA, 201 bp, Homo sapiens
catatgcagaatttatgttccaggaccacaatgtggcccctaaggtaatgtaatataacgaattatgttatcactgggcctatcatgcatacaaattttaraaagaaaacctttctgctacaactcagaaactcaaggtcttctattttggcaatttctcggcagaaagaaaatatctcaagtaaaattctccctggtccc

SEQ ID NO: 444036 - DNA, 201 bp, Homo sapiens
acccaatagataaacaaagtatcaatgagcccttagttttccatatgcagaatttatgttccaggaccacaatgtggcccctaaggtaatgtaatataackaattatgttatcactgggcctatcatgcatacaaattttaaaaagaaaacctttctgctacaactcagaaactcaaggtcttctattttggcaatttctc

SEQ ID NO: 444037 - DNA, 201 bp, Homo sapiens
ggagataaatgaatcatgtggggcaggggaggggattcccccatactcttccatggtagtgaataagtctcacgacatctgatggtttcataaatgggagyttcccttcacaagcactctcttgcctgctaccatgtaaaatgtgactttgctcctcctttgccttccaccatgattgtgaggcctccccagccacatgga

SEQ ID NO: 444038 - DNA, 201 bp, Homo sapiens
tggtgataaattccctaagcatttgcttctctgggaaagactttatccctcacttatgaagggtaattttactggatatattatccttctctgtcagtttwttctttcagcacattgaatatgtcatctcattctctcctgcattgtgctgagaaatccccagttagtctgatggtggttcctctataggtgactagatgc

SEQ ID NO: 444039 - DNA, 201 bp, Homo sapiens
atataatcccattaaaaaatgggcaaatgatttgagtaaacatgtttcaaaataagacatacaaatggcctgctgggcgtggtggctcacaactgtaatcycagcactttgggaggccgaggcgggcaggtcacctgaggccgggagttcgagaccagcctgatcaacatggagaaaccccatctctactaaaagttcaaa

SEQ ID NO: 444040 - DNA, 201 bp, Homo sapiens
  misc_feature (1)...(201): n = A,T,C or G
tgtctagatgtaacaaagtttatcctttcaactcctggaagacatttttattgcttccaagtttgggtggttatgaataaagctgctctaaacaatctgtntgcaggttttggtgaggacagagtttacaactcatttggaaaaataccaagaagcacaattgctgtatcgcatggtaagaacatgcttagctttgtgaga

SEQ ID NO: 444041 - DNA, 201 bp, Homo sapiens
atagcattttgtgataggataggggaatgaagtcttttttttttttttttttttttttttttgagacagagtcttgctgtgtctcccaggctggaatgccrtggtgtgatctcggctcactgcaacctctgtctcatgggttcatgccattctactgcctcggcctcccgagtagctaggattataggcacccgccaccac

SEQ ID NO: 444042 - DNA, 201 bp, Homo sapiens
ccccagcaatgaggaactgagtcaattaaacctctttcttttataagttacccattttctggtagtatctttatagcagtgtgaaaatggactaatacagrtgcatttttctatatgtcaattacatttttcaactccagaatttctgcttgattctttttattataatttcttataatttttataattttatttattata

SEQ ID NO: 444043 - DNA, 201 bp, Homo sapiens
tacagaacaaatgagtttgatttgggaaaatagatgaaaaaagaatctcaagaggtttaagggttgctggcctagagatccagaggcttgtagaggaaatraaggaaatgacagaaacacaagatttctcatctttatttgcctctgcattcttctacctggaatgttgccctcacccctccaacactcctatctttttaa

SEQ ID NO: 444044 - DNA, 201 bp, Homo sapiens
atgcataaaatggtaatgcctgattcgtactgattttttttttttttggcaacaaagacaatgcagtcagctctctgtatccatgggtcccccatcccccsatccatggattcaaccaactgcaggtcaaaaatattggggaaaaaaattgatgtttgtgtctgtattgaatatgtacagacatttttcttgtcattattc

SEQ ID NO: 444045 - DNA, 201 bp, Homo sapiens
ataaacaggttgctaataatattttgtttaaattttttaatctaatctgttcaaaagtaaattggcttaagcaattcccttctcatacggtccttatctastctgcaaatcaaggtgacctatgctcataaaattagatgagtggtattctcatttattctcctctctggaagagtttatttaagattggaattatttcct

SEQ ID NO: 444046 - DNA, 201 bp, Homo sapiens
aactctccaagccttactttcttcatttctttaatggaaatagaagtggcactacttcatcactgaattgttataattactaaatggggtaagaaatttamagtgcttatcacagtaaacaaacaataaatgttagcttttataattatattgttatataattcacttaatctttgaaactattttcagttatttaaagtc

SEQ ID NO: 444047 - DNA, 201 bp, Homo sapiens
gaggataaatattatatattcaccactttggggacatatgtaatttacattttccctacaaatttccactccttggttttacattttccaacttaaaaaaactttttattcattagcaatttatttgttgttctttcttgtttttaattgtggatgtcaaagtatagcttttagctgattgactttctgctctttgaatca

SEQ ID NO: 444048 - DNA, 201 bp, Homo sapiens
tgctaataaacaggttgctaataatattttgtttaaattttttaatctaatctgttcaaaagtaaattggcttaagcaattcccttctcatacggtccttrtctagtctgcaaatcaaggtgacctatgctcataaaattagatgagtggtattctcatttattctcctctctggaagagtttatttaagattggaattat

SEQ ID NO: 444049 - DNA, 201 bp, Homo sapiens
ttatttttattcattttttgtttgtttgtttgtttagagatagggtcttggtctatcacccaggctggaatgcaatggtgtgatcatggctcactgaaatytagaactcctgggctcaagtgattctcctgcttcagcctgctgagcagctaagactacaggcacaccatcacacccagctaatttgttaatttcttgtag

SEQ ID NO: 444050 - DNA, 201 bp, Homo sapiens
actctccaagccttactttcttcatttctttaatggaaatagaagtggcactacttcatcactgaattgttataattactaaatggggtaagaaatttaawgtgcttatcacagtaaacaaacaataaatgttagcttttataattatattgttatataattcacttaatctttgaaactattttcagttatttaaagtct

SEQ ID NO: 444051 - DNA, 201 bp, Homo sapiens
aaaagaaaaagaataaatccaacagaaaatgtgcaacatctctacactaaaaactacaaaacaatgctgagagatattaaagaaacctaaattgatggaawgatagacaatgttgatggattgagtcatggaaaactcaatattgtattagtattaaaaatatttttaagatgtgcattatccaaaattgatgcatagatt

SEQ ID NO: 444052 - DNA, 201 bp, Homo sapiens
aagtgcacaattcagtggcattaaatacattcacagtgttatgcaaccatcaccactattaatcaaacttttctattgcctcaacaaaaactctgtaaccrttaagcaataactcccatgactcccgccaccatcccctgttaaccattaatttactttctgtctcaataaatttgcctatttttgatatttcatataagt

SEQ ID NO: 444053 - DNA, 201 bp, Homo sapiens
gttgatggattgagtcatggaaaactcaatattgtattagtattaaaaatatttttaagatgtgcattatccaaaattgatgcatagatttaatgcaatcsaaatcaaaataccagcaaaattttttaaagaaattgacaacttattttaaaatgtaaattaaaatgaaaagaacctagaagagaaaagcagtcataaaaa

SEQ ID NO: 444054 - DNA, 201 bp, Homo sapiens
tttaaaaaagtaatacacaagtagacatatattggaaggatatccttacaccaaagttaagatagtagaaacattctgatagttatagagcaagtagtgtwtgcaatcattttttgccacagaacggaaaaaaaaaacctcatctgaaacagctcattattcaatgatactgagcaaataaggttttctataaattcctag

SEQ ID NO: 444055 - DNA, 201 bp, Homo sapiens
gctatacctcaataaaccactagaacgtcactcaataatcaacagttgttttgagtaattcacatttttagtgaccacattttaaaaaagtaatacacaartagacatatattggaaggatatccttacaccaaagttaagatagtagaaacattctgatagttatagagcaagtagtgtttgcaatcattttttgccaca

SEQ ID NO: 444056 - DNA, 201 bp, Homo sapiens
aaatctcaccatccttggaacacaattagattcctttcatgaccacatctataatcaggctgctgtcacgtcctggaacagatcctttaatgagtagttcrcctggaaaaaatccttctcattcaatagacctggtgcaaatatattttctgtgaaagattaccatatacattgccatccccaaatatccccactccatga

SEQ ID NO: 444057 - DNA, 201 bp, Homo sapiens
atacaaagtagggaaagaataccctattaaacaaatggtgctgggataattggcaagccccaggtcgaataatgaaactggatcctcgtctctctccttakacaaaaatcaactcaagatgggtcagacttaaatctaagaccggaaaccataaaaattctagaagataacatcagaaaaactcttcgagacaaggggtcc

SEQ ID NO: 444058 - DNA, 201 bp, Homo sapiens
tttatacaatgaaaattgtaccagttggcaataacaatattgaagatgtttaccagaaaccttggtacgcatcttccccagaatactgaattttgctccawctagaaaatcaatgagcagtggtaactttttctttaggggtcatatataaaacttttctgtgacagagtaaacataaactttaaaaagaaaaattcctgg

SEQ ID NO: 444059 - DNA, 201 bp, Homo sapiens
ggtttgtggatgaagcacgtgcttcatctacactggaaatctcaccatccttggaacacaattagattcctttcatgaccacatctataatcaggctgctrtcacgtcctggaacagatcctttaatgagtagttcgcctggaaaaaatccttctcattcaatagacctggtgcaaatatattttctgtgaaagattacca

SEQ ID NO: 444060 - DNA, 201 bp, Homo sapiens
attcatcgcctctgaaagcttttaagatgcagcattagccatcaccagtgattgatgtctacatctgcgtttgcttgtggcatcagttgtcaaactaacgyttaattaacatatatatgtttcccaatttaacttttaaagcattgaattcaggcctgcaataggccacaaattaatggcacgaattaattaacctgaagt

SEQ ID NO: 444061 - DNA, 201 bp, Homo sapiens
ctcagcttagaacacactacccttcacaatctggtctccacctctattgaaaggctgtggtctaattattcctcacctaagtcaaacccatatagggtttrtggatgaagcacgtgcttcatctacactggaaatctcaccatccttggaacacaattagattcctttcatgaccacatctataatcaggctgctgtcacg

SEQ ID NO: 444062 - DNA, 201 bp, Homo sapiens
aataatactgctgacaaaggcagataattatatcttatattttttattcatcgcctctgaaagcttttaagatgcagcattagccatcaccagtgattgaygtctacatctgcgtttgcttgtggcatcagttgtcaaactaacgcttaattaacatatatatgtttcccaatttaacttttaaagcattgaattcaggcc

SEQ ID NO: 444063 - DNA, 201 bp, Homo sapiens
atgcctttaggcctgtcaatttctcccaacaaataatcatctggcaatgaaacatttgaaaagacattttatagtggcagatatctatcatacacctcatytattacacaggcaaatgaccactaagggaaggaagtcttctttgcctataaaaaatggcagaggttatgggtggggacataatatatcttggagagtaca

SEQ ID NO: 444064 - DNA, 201 bp, Homo sapiens
agccttctaggcactcccaatctccagctgaaatccagggaagccatcccttattataattataggcatccttaaagaaggcaatgagtagaactggggasgggtcacaaggtgaaccaagcttccaaatgaaatctgtaataatttcaactggacacaaattttcttgagtaaaatctggggggtggccaggaactgctg

SEQ ID NO: 444065 - DNA, 201 bp, Homo sapiens
agttccttgtactacttcaagtgacccataaagcagtttctcaattttccttaaaactggcagcatcagaggcttagataaaaagcaactgtctttaattygattgaagccagagaaaagtggtgatgacacggttggaagggatgagtttgctcaaacagagagttatttaaactctggatattcacagtaatttttacg

SEQ ID NO: 444066 - DNA, 201 bp, Homo sapiens
aggggaaacatgcataaggtggagtgagtctaagccacaggctccacaggcatagtctcctgagttcaaatcctatgtctgccataacagctaatgtgtgmtcacaaatgagttaccggaacctcctgggtctcaatttcctcatctggataaaaaatataaaaatagtacctgtataggaaggctgacagaaggattaaa

SEQ ID NO: 444067 - DNA, 201 bp, Homo sapiens
catgtggctacttaaatttaaatttaaaatccagcttctcagttgcactagtcacattttaactactcaatagccacgtgtggcttgtgactataggattkggtagtgtagctatagatcttttccatcatcacagaaagttctattggataatgctgctctggaataaccaatttcatttttagaagcagaaagtgacct

SEQ ID NO: 444068 - DNA, 201 bp, Homo sapiens
aacaagagtctcagcctggcaatccagagaattctccagatctcatccaaaaccaccaaggtggtacctctatgagtctgcaagaactaaagcattactgkgtttagggtgcctcctaatgcagattcagctacagtgaacaaaaacatagatcacaacacccaagtcccttcaaatacctggaaagccttcacaaaagca

SEQ ID NO: 444069 - DNA, 201 bp, Homo sapiens
aaagacacactcttctgaataagcttgtattaagcctgacagaaaacagcaccagatagatttttccccagcttcaaaatagagctggcatcccctctctrtgatacgcaaacagctctaagagtatctttagaacttagaggtatcttggggtatcttaatcatatgacttttctatcaggaatctaggcttccccgtca

SEQ ID NO: 444070 - DNA, 201 bp, Homo sapiens
acatagctcactcactctatgcaggtctgtttttggctaccttctcagtgaggaacaccctactaaaaatcgtacgcttcccactaccagcatttcccgtytccctgactctgctgtatttttctcatccacacttgtcatcttctaacatactatacaatgtacttatctattatgtttattttctatttactcttgcta

SEQ ID NO: 444071 - DNA, 201 bp, Homo sapiens
gtattggcatgacagtaatgcatcttagctgcacactcatcaatatctgaaggaaaaaaaataagtaagatcatggttagcaaaataatggaacaacagtstaatcattttgcagataaattaaaaaagataaatgtccatagaagccaagagaaaaagtaacatgcattaaacacaaaagcttaggtgaaaattcagctt

SEQ ID NO: 444072 - DNA, 201 bp, Homo sapiens
taagtgcacaattcagtggcattaaatacattcacagtgttatgcaaccatcaccactattaatcaaacttttctattgcctcaacaaaaactctgtaacsattaagcaataactcccatgactcccgccaccatcccctgttaaccattaatttactttctgtctcaataaatttgcctatttttgatatttcatataag

SEQ ID NO: 444073 - DNA, 201 bp, Homo sapiens
aaactccagcctaggtcaagtgcagtgactcacacctataatcccagcactttgggaggccaagacgagcagatgacccaaggtcaggagtttgagaccarcccagccaacatggcgaaaccctgtctccactacaaatacaaaaaaaaaaaaaaaaagccgggtgtggtagcgggtaccaccagctactctggaggctga

SEQ ID NO: 444074 - DNA, 201 bp, Homo sapiens
agtgcttctgcaaagtctctaaatgcctcattcttttcaatctttaaaacacattcctgtcttttttccaagaggtgtgttgaaaagaaaatgaaacaatrtaagtaagagcacttgcgaggatggtcttttctgagacacagtgatttctgtcaccttctcaggagatgcctcacaaagccagctgtgctttgttgtggg

SEQ ID NO: 444075 - DNA, 201 bp, Homo sapiens
atcacattgtaaatcatccaaacatttatgctctgcttcctcttgaacactttcctgcttagaaatttcttccccagataccctaaatcatctctcccgarttcaaagttccacagatctccagggcagatgcaaaatgccaccagtctctttgcatagcaagagtaacctttactccagttcccaacaagttcctcatct

SEQ ID NO: 444076 - DNA, 201 bp, Homo sapiens
atatggtttggctgtgtcctcactcaaatctcatcttgaattgtagctcccataattcccacatgtcatgggagggacccagtaggaggtcattgaatcaygggggtgggtctttcccatgctgttcttgtgatagtgaataagtctcatgagatctgatggttttacaaagaggagttctcctgcacacgctctcttgcc

SEQ ID NO: 444077 - DNA, 201 bp, Homo sapiens
ggtcattgctatggtttctgcttcctaacttctgggactctttggtctctatctagtatcaagcctggtctggccttctgaggattctgtgagtcccccartatcatttcaataacattgtcatttttacctacgttagccaggggaggttttggctacttgggaaaacagaaactggtattccctgcaactctaccagga

SEQ ID NO: 444078 - DNA, 201 bp, Homo sapiens
cgtgcccacccagagtcactggatttaatagtttctacaagccctttgagctttctagagtctttgaatacagattggttagaagctacattagctcagtrtagattacctgatgtatatatctattgaaaatgtgcacacagaaacattctaggtgaaagaatagaatataaaggaagagctcttccctcccctacctgc

SEQ ID NO: 444079 - DNA, 201 bp, Homo sapiens
caggtaactggctccttacacagaggataaaggggtcgaattcttccctatcctgaacaatcagagcttggacatatgatccaaactttgctaatcatatrtcctttctccaaactttaaatcttgtataagtgactccaggacagtagaaatgattgaaagtcactcatcacagcagcaatgtgcttgccgggatccccg

SEQ ID NO: 444080 - DNA, 201 bp, Homo sapiens
aatgttctagaagaggtgattaatgttggagctaagtttgcaaagagcaggggaacatgtacatatcaggcatttaaaatgatgaagacaaaaatgttttsaaaaagtatattgggaaacatgtttgaatggtgaaatacaaatttaaggtaagagaaggcaagaaatgatattggataagaggtaaggaccagatcatag

SEQ ID NO: 444081 - DNA, 201 bp, Homo sapiens
ctgtatactcacagctcaagttggggcaagtgagtggccagcaatctacctctccttcctgtagaggaaaagcaaaaaatgtctcattattgttcctatgmataattttattcccaaagtcatagaaggggaaagagagcacagtaattctcatcactgaatatttctagttgacaccattgaggataaagtacacttcct

SEQ ID NO: 444082 - DNA, 201 bp, Homo sapiens
caagccgatattccttctgcctcatcaacatttggcccctcgttctcctcatcgtactggggctgagttctagagccttaagttctagaatccagactaaygaagattacagatatgaaaaacactatgcacagaaatccagtctgaagactagcaatacattttgccaggagctcatagcttaccttgaagaaatgtttt

SEQ ID NO: 444083 - DNA, 201 bp, Homo sapiens
ccttggtactagctacagtgcaatccagcctatatggaatgatacaaccataaattccctcctctttgaaagatccaagccgatattccttctgcctcatmaacatttggcccctcgttctcctcatcgtactggggctgagttctagagccttaagttctagaatccagactaacgaagattacagatatgaaaaacact

SEQ ID NO: 444084 - DNA, 201 bp, Homo sapiens
tacctgggtttgactctgagatccatcactttactagctgggtgactcttggcaaagcagccaacaatctgtgcttcagtttcctcatctgtgatgcgagrgtaataataccttactgttttgtacagattaaatgccaccacacatttgaagtacctagcacagggactaatactttatgacatgatttgaagagctctc

SEQ ID NO: 444085 - DNA, 201 bp, Homo sapiens
ctgttttctaagccacctagtcaacagtactttgctagagcagcccttgcaaactaatacaagataagaacagaaaagaggctgggcgcagtggctcatgyctgtaatcccagcactttgggaggctgaggcaggcagatcacaaggtcaggagttcaagaccagcctggccagcatggtgaaaccctgtctctactaaaa

SEQ ID NO: 444086 - DNA, 201 bp, Homo sapiens
ttagtggagaagaaatttaagagtgctaaccaaaggagtgacatgatattactcatttcttttgtaacacatattatggtgtgctgtaactgttgagtgayctgcctctcacaagggtacatctcaatctccccagctcctagcacagcacctagtttataataggtatttaataacattttagagaagaaaagagcagaa

SEQ ID NO: 444087 - DNA, 201 bp, Homo sapiens
ggcttccacattggctcctggacctttggaatatgccactccatgggggctgttttgtagtttccaggtctttactttccatttggtattcactgaaccayactagctgattaaaccctagaatagttagcattgtgactacagaaactggctgtggagccagactgcctgtctttacagcatcttccactgcttcttagc

SEQ ID NO: 444088 - DNA, 201 bp, Homo sapiens
gtattgttagcaaatgagaaaaaaagtaaaagtagacttgattcataaatgatgtattcaagctaaatgaaggcaagatggtatttacagcatgcttctcmaaagaagacttagcgatggttcaaatatagcaagaagagaaacatgaatcaccatgccacatgtggcggtgcacacaccagccccaaagaacctgtacct

SEQ ID NO: 444089 - DNA, 201 bp, Homo sapiens
ctaattatatctgatccgcaaagccctaggattcctcaaaaggctcttagagtgtatggcagagggaaaagatgaggcctataaccttttttaaccagagyaacttcactgccatctattacataaattggagtttcctgtaagatttcctctggctaaaagagatccacctccaaaaatagttttaaactattgaactaa

SEQ ID NO: 444090 - DNA, 201 bp, Homo sapiens
tgtaattaatttgaattgtattcgactgtagttttgtttacagttacctagtaactttctttgtagttgtgtaagacccataattattagcactatacacstgattttgtttgtacatatttaaggactattagaataaacataactaaatcaaggtctaggttttcttgtccattttccacttttaaaactttgtgaata

SEQ ID NO: 444091 - DNA, 201 bp, Homo sapiens
aaactacccatctgacaaaggatgaataaccagaatatgtaaggagctcaaacaactctatggggaaaaaatctaataatttgatttaaaaatgggcaaamggtctgaaagggcaaaatcttcagatggggctttgcattctggctctgccattttgtatctgtataaccttgagagggagtcaaaatcttcagtggctac

SEQ ID NO: 444092 - DNA, 201 bp, Homo sapiens
gggtaagttagtcaataaatgaggagtcactaagccctgcatccacagagaaagccatggaacaacagttgggcttttttgtctttccagtaaggttggcrtatctttttttaaagtgtttcggcttacttttaaaaattcatgatgtaaaccaacaggacgagtgtctttcttcaaccccgtgctgctgtcccacaacat

SEQ ID NO: 444093 - DNA, 201 bp, Homo sapiens
atggtacatatacactatggaatactatgcagccataaaaaaagaatgatatcatgtccttggcaaagacatggatgcagctggaggccactatccttagmaaactaataaagaaacagaaaatcaaataccacatgttttcatttataagtgaaagctaaatgatgagaacaaatggacacatagagggtaactacagac

SEQ ID NO: 444094 - DNA, 201 bp, Homo sapiens
ctaaaactataagccaacatccctaccctaatgaacatagacacaaaattcttcaacaaaatacgagcaaacagaatccagtagcacatcaaaaagttaaytcatcatgatcaagtagggatgtaatcaacatacacaaatcaataaatgtgattcaccacataaagaaaactaaaacagaaaccatatgatcatccaaat

SEQ ID NO: 444095 - DNA, 201 bp, Homo sapiens
ttcaacaaaatacgagcaaacagaatccagtagcacatcaaaaagttaattcatcatgatcaagtagggatgtaatcaacatacacaaatcaataaatgtsattcaccacataaagaaaactaaaacagaaaccatatgatcatccaaataggcacagaaaaagcttttgataaaatccaacgtctctttatgataaaaac

SEQ ID NO: 444096 - DNA, 201 bp, Homo sapiens
caggagagaaaatcaatgtataaaaatcagtaacatttttatataacagtaacgttcaagctgagagccaagtcaaggacacagtcccatttataatataygcacaaaaaaataaaatacctagaaacacacctaacaatggaggtgaaagctctctacaaggagaactataaaacactgctaaaggaaactatagatgac

SEQ ID NO: 444097 - DNA, 201 bp, Homo sapiens
cctagaaacacacctaacaatggaggtgaaagctctctacaaggagaactataaaacactgctaaaggaaactatagatgacacaagtaaatgaagaaacsttccatgttcatggattagaagaatcactatcattaaaatgaccatataatccaaagcaatctatggattcaacacaactcctataaaactaccaatgtc

SEQ ID NO: 444098 - DNA, 201 bp, Homo sapiens
tgagaaaataaatttccattctttgtaaattacccagcctcaggtgttctgttacagcggcatgaacgaactaaagcaatgctttgctgtctaaagtagakctttaggagactgaagcccacacttgagaagaaactgggctatgtagatcatgatgttcacacattttataaaatgcaaaatatttaaatgtaaaagaag

SEQ ID NO: 444099 - DNA, 201 bp, Homo sapiens
agtggaacgaactcaacaacaatacatcaccgttaactgtgatcacagctccatggaattccagccagtgcctggagcacactgaggtgcacttactattycccaatctgcaatcaaccttttgtacatttgctcctaatcacgggatacagtttcatcttaatgaactgttttcttatcatattacagttggtcatttca

SEQ ID NO: 444100 - DNA, 201 bp, Homo sapiens
tcctctctcaggagttacgtgtttaacttgtctacctccagagagagtgagctcattgagggcagacactaaattttatttttctttctcttcccagtgcygagtataacagaatactatatggatattcgatgtatttattccatttaactttcttaggaaatccacagactgagactattataatgcctactttgccaa

SEQ ID NO: 444101 - DNA, 201 bp, Homo sapiens
atatgtattcatacatattttttattatttgaagtgaaaaataaaatacatacttgcttaaatcatgttagatgatgagacttttccattgacacataatrttcttttaaacattattttaatatgcattatgttccactatatggatttattgtcatttatttaatcgaatttccatgagtttatatttacgctgcttcc

SEQ ID NO: 444102 - DNA, 201 bp, Homo sapiens
ttgagtgagatgatttagggtacctggtggaagaaatttctaaccagcgaagcatttaagaggtgacctgtcttattctgaaagcattcagttatatatgytcacgaagagatggtctgaaattggaacttaggcttaaaagggaagcagactatataagtttggaaaatttgcagcctgaccatgtggtagaaaagaaaa

SEQ ID NO: 444103 - DNA, 201 bp, Homo sapiens
aggtggtctcggatggagatgaagaacttgctgtgaactggaataaaggtcactcatgctatgctttagcaaagagactggtggcattttcccctgccctrggaatctatgggactttcagcttgagtgagatgatttagggtacctggtggaagaaatttctaaccagcgaagcatttaagaggtgacctgtcttattct

SEQ ID NO: 444104 - DNA, 201 bp, Homo sapiens
gccaagtactcaaatcctaaagaaagttaaaaaaacaattaggtgccagacaccatctccaagtgttgctatctaaatcattacaactccatcccctcgcytatgcatagaagcaaaaatgacagctcagggagaaaggataatgtggtatgagtcactagctcagaaggaatgctttgaccttctaagagattggaggtg

SEQ ID NO: 444105 - DNA, 201 bp, Homo sapiens
tcagaaaacatcaaaactaattcctagtacgacctggattctaatttttattctgcaattaacaagctgtataactctaaataaaactttttccaaattarcacctatttcctcacatataaagtgagaaaatggggcttaaaaggtaagtatgtttatataaaaccccagattcatgcattttctttgctttcaagccag

SEQ ID NO: 444106 - DNA, 201 bp, Homo sapiens
agccagagaagccagtgcaattggatgttgagcaggacttctccccagagccagaattagtatcaaagctgaggatgaaatgaagccaagtactcaaatcytaaagaaagttaaaaaaacaattaggtgccagacaccatctccaagtgttgctatctaaatcattacaactccatcccctcgcctatgcatagaagcaaa

SEQ ID NO: 444107 - DNA, 201 bp, Homo sapiens
ttggaaaaataaacaaaaactagcaacctagagatcagaaaacatcaaaactaattcctagtacgacctggattctaatttttattctgcaattaacaagstgtataactctaaataaaactttttccaaattagcacctatttcctcacatataaagtgagaaaatggggcttaaaaggtaagtatgtttatataaaacc

SEQ ID NO: 444108 - DNA, 201 bp, Homo sapiens
atggcacatggctctaggctctcatcagatcatggtgtctgaatacttccttaggataatccccatcctaggaatcagaggccatctgaaaatgctggacytgttgggcaaacaccagagttggttttcaagatcaggactgggtcaggagaatagtgagctgtggaatccaggagtggaaaccaccagaagatacccaca

SEQ ID NO: 444109 - DNA, 201 bp, Homo sapiens
gataaggaaagtgtggtatatatgtgccatggaatattatgcagtcataaaaaagaccaaaatcatgtcctttgcagcaacatggatgcagctggaggccrctatcctacatgtattaacaaaggaacagaaaacaaaatactccatgttctcacaactgggagctaaacattgggaaacatggacataaagatggcaaca

SEQ ID NO: 444110 - DNA, 201 bp, Homo sapiens
tctattctttgacaagagaaataggtacaaagggcttggggcagggtaagaggaagctggacatgcctgtgaacaacagggaggccactgtggctgagctsagtgacaatgtagtaggggcaggagatgaagtcagaagggcaggaaagagccagatctcacagaaacacagccttggtaaggactttggattttattatg

SEQ ID NO: 444111 - DNA, 201 bp, Homo sapiens
atgatgagttgatgggtgcagcaaaccaacatggcacatgtatacctatgtaacaaacctgcacattgtgcacatgtaccctagaacttaaagtataattwaaaaaataaaagaaaaaaatattggtgattgtattaacataatattgagtgttttttttttaaagcaggaacaaagatttttctactgtggggttcaact

SEQ ID NO: 444112 - DNA, 201 bp, Homo sapiens
agatgttttacaatccctctgccagcatgtgaaatccctgtgtacttcatataaggagctggttatgagctgataatgtcactgcagaagaatgaatacayccacaccttcctcaacctcatcataatcatacttaagctcaatcaggcacttgacacatcttactgtagtgtaggagcctgagagcaagctgctcagtgg

SEQ ID NO: 444113 - DNA, 201 bp, Homo sapiens
acatctgtaggtgcaggtatacttttaagtttttcctgccactattccctcaagtccccccataccaggcataccaaatgatccagaccccatgttctctaaaaaagacaaaaatgtaaaaaacaggaaagcaatattttgatcaaccacagaataataatgtgagcgtgagaaatgcaaagatgcctgtcaacgtttcta

SEQ ID NO: 444114 - DNA, 201 bp, Homo sapiens
gaacatcacacatggaggcctgtcatggggtggggggatgggggagggacagcattaggagaaatacctaatgtaaatgatgagttgatgggtgcagcaarccaacatggcacatgtatacctatgtaacaaacctgcacattgtgcacatgtaccctagaacttaaagtataatttaaaaaataaaagaaaaaaatattg

SEQ ID NO: 444115 - DNA, 201 bp, Homo sapiens
agaatttaaaacaaaactaccatttgaggttccgggaaaactggctagccatatgtagaaagctgaaactggatcccttccttacaccttatacaaaaatkaattcaagatggattaaagacttaaatgttagacctaaaaccataaaaaccctagaagaaaacctaggcaataccattcaggacataggcatgggcaagg

SEQ ID NO: 444116 - DNA, 201 bp, Homo sapiens
aacccaactatataaataattttattaaatgcaaatagcctaaccattccaattaaaaggcctagattgtgagatggaataaaagaaaaaaaaacaagacytaattacatgccatttaagtaagccatgtaaatacaaagacacgaagtttaaagatatggagacataaaatgtatactaaaaatagcagagaggctagat

SEQ ID NO: 444117 - DNA, 201 bp, Homo sapiens
gtttcacccacccacacctgcaggccctgggcatacctgccccaagaatgactcttgctctacaaaaggcttcctgtctccgaagaaaaaaaaagtttgtygtattcattcaaccaaaatatactaggcatttatgctatatcaagccctgccagggaatgaaggtagaaaatttgatcatctgattgctaatggcttcca

SEQ ID NO: 444118 - DNA, 201 bp, Homo sapiens
accagctcagcctcagtaggatagggcattgggcagagttgtgtaggccctattccaggtggacccagtcctggcattattcatcacctgctgatttaagagcccatggccctgaataatcagcagaagtaaccaggtagtacatgctatgggccttgagtgagattctgagacatgctggcttcaggtatgactcagcac

SEQ ID NO: 444119 - DNA, 201 bp, Homo sapiens
taaacatgtttgggttcgtatcgcagttccgcagtctactaaatgcatgactttaatcaagtaatttaatttctctgtatttcaatttcctcatttaaaamataaggatattactgttaactgtatggattgtcatgaggattaaacaaaatacattacatgcccttggcacttagtctgtgctgacattgtgtaagtctc

SEQ ID NO: 444120 - DNA, 201 bp, Homo sapiens
catctctggaccaagctgggacatggtagaactcatcaccctgaaaggaaggaacaagactggctggcctcacaatgtgctgattgtggagccccaaggcyttgaaccaacataggtggtagcccagtagtggttacagtgagccttgggcaagacccagtgctgtgctggcttcaggtatgacccagtgaagtcccagtg

SEQ ID NO: 444121 - DNA, 201 bp, Homo sapiens
gtcataacttcctcacacaaaattattgaggcatagaaaaaaacagaaatcccagaactgtaaaattcaatgtctgaaaataaaaatacaattgacagccytaccagtagtctaaaacaagcagaagaaagaaattctgaacttgagccagggattttaaaataacccagacaaaaaataactatataaagaaatgaagaa

SEQ ID NO: 444122 - DNA, 201 bp, Homo sapiens
taactgtctattttataaaagttgaaagatttcaaataacctagcaatgcacctcaaggaaccagaaaagcaagaacaaatctgacccaaaataggtagargaaaaataatgaatatcagagcagaaataaactaaatagatacttaaaatatatttaaaaataaacaaaatgaaaatttgtgtttttgaaaagataaatt

SEQ ID NO: 444123 - DNA, 201 bp, Homo sapiens
ggatattaatcacagtgatagtcaatgttagtattatttattaggattgatgtaaaagaaagcacacatgtttcagggccaggtagatctggtttcaaatmtgagttctgccacatactagttctacataggcttaacaagtaaatagttattttgaacctcattcttcttatctattattttaaattaaatagctgtttt

SEQ ID NO: 444124 - DNA, 201 bp, Homo sapiens
acagacacatagaccaagagaacagaatagagaacccagaaataaagccacaaatctacagccatctaattattaacaaagttgaaaaaaaaaaataagcwatgaagaaaggatttcctattcaataaatgatgatgagatagctgactagccacatgcagaatgaaatcagacacctacctttcactatttacaaaaatt

SEQ ID NO: 444125 - DNA, 201 bp, Homo sapiens
catagtcaaagcaatcctaagcaaaaagaacaaagccagaaacatcacattacctcacttcaaactatgagactacagtaaccaaaacagcatgatactgrtacaaaaacagacacatagaccaagagaacagaatagagaacccagaaataaagccacaaatctacagccatctaattattaacaaagttgaaaaaaaaa

SEQ ID NO: 444126 - DNA, 201 bp, Homo sapiens
caatattaattttaagtggcttaaatgagaagtagaagtaaacctcactttaaaccatattgtggaaaatcatcatatcgatgtttttaaccactcatgtyggtaaatataataatgaaacacaagttgataagaatgacatgcctacagagttattattctgaatatgagctctcccttttcagggctatagctaaaaca

SEQ ID NO: 444127 - DNA, 201 bp, Homo sapiens
ttattttgtgctttgcattctaaggtattcaccatgttaaaggttgctagagatgatgtttatttcactctaagaccaaagaatttcctttggcccagccygcccgcttccctgtggggttgtcagagacaacagtcttgtaaagggtaataccaagtggaaagtattgtatcacagtggtcaaaactccaacgccaagct

SEQ ID NO: 444128 - DNA, 201 bp, Homo sapiens
tttgattcattcctagctttaggtgatggctaaagaagatatacaactaattacaaaagaaaataaagaaaagaccaggaaaagtaaacagtaatctcatygttacaacaactcatgtctagaaagtagggttgggtttggcagataagcgatgagtcttgttccctgcacaaataggttttagtcagaaaagtttcagag

SEQ ID NO: 444129 - DNA, 201 bp, Homo sapiens
tgtgtccccacccaaatctcaccttgaattgtactcccatatttcccacatgttgtgggagagacccagtgggagatcattgaatcatggcgacagtttcscccatactgttctagtggtggtaaatataagtctcacgagatctgatggttttatcaggagtttctgcttttgcatcttcctcattctctctgcctgcta

SEQ ID NO: 444130 - DNA, 201 bp, Homo sapiens
gccctgagtatgtgctgccccatcattctgggctccagaaggaccacctatggagcagatttgagcttaaactactataaagagccaagccggacaacttraagctgaactcccagtcaagctcagcctagattagctgattccgtcaacttgcagtcctataaaagagagaataaatgcttaccaatgtatgctcctgag

SEQ ID NO: 444131 - DNA, 201 bp, Homo sapiens
aactatctcttcactgacaatacaattctatatctaggaaaccctaaaaacactgccaaaaggatataagagctaataaactgtttcagcaagctttcatracacaaaatcaatgttaaaaaaaatcagtagcatttttatataccaataatgttcaagctgagagccaattcaagaatgtaatcccacttataatagcca

SEQ ID NO: 444132 - DNA, 201 bp, Homo sapiens
atttaaagcccctgttttgtaaatgttttcttagctctgaatgggtcagattttctctggccaaagtgcattaagcctgcaagaggtaattattctcttcmcacccagcccagaggtggcttaaagcagaggttctcaatcctggctgcatgttagaatcaccgggagagcattaaaataaaatgctgatgtgctattttc

SEQ ID NO: 444133 - DNA, 201 bp, Homo sapiens
aagcccctgttttgtaaatgttttcttagctctgaatgggtcagattttctctggccaaagtgcattaagcctgcaagaggtaattattctcttcccaccsagcccagaggtggcttaaagcagaggttctcaatcctggctgcatgttagaatcaccgggagagcattaaaataaaatgctgatgtgctattttctctgg

SEQ ID NO: 444134 - DNA, 201 bp, Homo sapiens
tttcctctggagatccaccactcacccactttcagcccatatgatgcaggtgttcactccaccctgcaactctatgggtaggcatggggttcaggtctggkccatcaacaccgtccatcctcttgaccacatatttggcttaaggatgtgtatatgccccatgacaaaccaatgagacacagttccagaagttttgttctg

SEQ ID NO: 444135 - DNA, 201 bp, Homo sapiens
tctccccttctttcattcagccacaggcatcagccaagtaaacccaacataataatttcctatgtggtcttaatttgtgcaacagaacctcagcaggtaayttccaaagtgctttaagcccactaaagccttgcagcttgtcaaggtgtcaagacattcacagagtatctgaagccctgggtgccccatataagtgcagac

SEQ ID NO: 444136 - DNA, 201 bp, Homo sapiens
ttactatgcacacataatcccaacagcctcatactcaggcacatccccacactcatgcccatgcagacacatgggtattgagcatctgcacatttacactyacagagccataggcatgcactcacacacacaattccacctttaatgcacacactcacagtgacgccccctctaacctaagctacctaacctagctccagt

SEQ ID NO: 444137 - DNA, 201 bp, Homo sapiens
gcttgtgaattgtaagtctggaattcaaacccacgtcttaattactatgcacacataatcccaacagcctcatactcaggcacatccccacactcatgccmatgcagacacatgggtattgagcatctgcacatttacacttacagagccataggcatgcactcacacacacaattccacctttaatgcacacactcacag

SEQ ID NO: 444138 - DNA, 201 bp, Homo sapiens
aggtggacgtaggtcagattatttctgtaaaacagtaatataaactttgggttggaaaactgatgcccacggtacaaattcaacctgatgcctgtttttgyaaatgaagtgttattggaacacaagttcccttgttcatttacattttgtctgtgggtctttttcacactgcaatggcagaattgagtatttgggacagaa

SEQ ID NO: 444139 - DNA, 201 bp, Homo sapiens
tttttttctgccatagagttttgaaacttttaaatcaagaaggtggacgtaggtcagattatttctgtaaaacagtaatataaactttgggttggaaaackgatgcccacggtacaaattcaacctgatgcctgtttttgcaaatgaagtgttattggaacacaagttcccttgttcatttacattttgtctgtgggtctt

SEQ ID NO: 444140 - DNA, 201 bp, Homo sapiens
acctgacttcaaagtatattacaaagctgtagtaaacaaaacagtgcagtattattataaaaatagaaaaatagatcaatgaaacagaataaagaacccakaaataaatccatgtattaacaatcatctgattttagacaaagacaccaagaatatatattgggtaaagggcaccctgttcaataaatgcagctaggaaaa

SEQ ID NO: 444141 - DNA, 201 bp, Homo sapiens
caatccataccccaaaactttcttatcaaagtacctactattatcaaaaatgtacaatatccctttttgcaggaagtaataaactcaactttatttgactrtaagtgtatcctggggtcctttagctagtgagcattaacatttgttaggatttcagtcaaattttgtgaggtttagggtggagaatcaataaattaatgg

SEQ ID NO: 444142 - DNA, 201 bp, Homo sapiens
cctaaacatttgacaaatacaactgtgacgtgttcgtgcaagttgctgatgagaaatgtcagcccagaaattatatatacaaaccacatagcatggccctwgggttcatccttcaggtcaacatcaattcatgaatcaacattcttaggatatgtttgttcagtaaactataaatctgcctaactatattatcaacacgct

SEQ ID NO: 444143 - DNA, 201 bp, Homo sapiens
aagaaagttatctctgccccagaccccacagagaaacctctggacttcacctgcccctcattcttgcctgggatacatgtgaggatgggtataggtctccyaaaaagctaacctttccctataattatctctcccacaccacacttctgtccatagcttttctccttattagttctttatacacatttttcattacttacc

SEQ ID NO: 444144 - DNA, 201 bp, Homo sapiens
cagcagagctatatggacctgaacttttcactaagtctaaaagacaatcaaatccacaggctaacattaaggctccagtctatgatctccaaatgacaaaycttcagagagaaaattacagaaatgagattcactgtaattttgaaaattgaattcttatgttacgattgtttgtgttatatccattacattattttattt

SEQ ID NO: 444145 - DNA, 201 bp, Homo sapiens
gctagttttctgcctgcttcagtcaaaatgagctgggtttttacctgagcactcaggtgagagcagccctctaagtaacagcgccccctatcatacttccygcacatcttactgccgggtaccacagcttcttccctcccctgcagggaaaaggagggagcagaaacggctgatgatgagtcaggccagatatgtacatgt

SEQ ID NO: 444146 - DNA, 201 bp, Homo sapiens
catactcacttttcccctcttgctgcaaatcctccaggatcctgccagccccaaatgatctccaaatcctcagacctccaacagcactcaccacctgggagtcattcaggcacaccattaatgctcattatctttacacatatatctgtatttcctccccagctagactctgctggtagttaccttatcagaaaaacaaca

SEQ ID NO: 444147 - DNA, 201 bp, Homo sapiens
aaaagatacataaaaatttcaaaaaacattatacagaccatggtccccaagacaagctctttgaggacagtgacattttctgtatggtttatacaatatcyttagggagtgggacatggcacagagctggcttgcaagtgtttcatgaatgaatgaatcagattgagatgaagaaacactttcagtttgtagcagaaagag

SEQ ID NO: 444148 - DNA, 201 bp, Homo sapiens
tatggtatcacaattttaaaattatatttaaaaaaaaaaaactaagtgtaaaggaaaatgaagccagagaaaagagaaaggggaagaaagaaaggagttayagagaaaaaaagttgggagagaaagaagaaagagaaggaaggatggaggtaaagctgggatatccttccccaacatctatctctatcaccaccaccagag

SEQ ID NO: 444149 - DNA, 201 bp, Homo sapiens
ttgaatatctccctcccctacaaggttaaataagtaaaaaaaaaaaaaaaaaaaatacaagaaaataacataagaaaataaatcaaagatgaaaataaaaygtctctgaaattgaattatatgaggcaatggcctggttagttctcattgtcactgggtcctaatcaaataagttaactggcctccaatatgtaactgaaa

SEQ ID NO: 444150 - DNA, 201 bp, Homo sapiens
ctattgtcagttggttctaactcaaaatgcctctccttagcttagcatacactaagggtcagtaggataggaagaacttagaatcaggagcgtgatgtagkggaagatgagaaaagtggtttggagccagattcatggaagttctcaaatgtcatgctaaggagtttggatttattaggccacaggacacattctgaatca

SEQ ID NO: 444151 - DNA, 201 bp, Homo sapiens
aatatcaatagtaattatagctacgatggaggggttcaaattattggtgatttttgtctttattctctaaatgaacacattgctactgtaatctaaatttwaaaaaattaacaaataagttttagaacatcttttttgcaaaagcattgccaactttgaatatctccctcccctacaaggttaaataagtaaaaaaaaaaa

SEQ ID NO: 444152 - DNA, 201 bp, Homo sapiens
ctagcctttgtgttccccactgtatcaccagaacctggaatggtacctggcatttcaataaatgacttacaaaagaattaatgaatgaactcaggtctaartgatacaaaagcccatgcctccccgccgacaataagctccaaaaccgggtacttaaaactttgtacagctaagctctaacctaactttccaggattttct

SEQ ID NO: 444153 - DNA, 201 bp, Homo sapiens
gaatagtttctgatttgaaaaataataaatatgcacattagaatatttagaaaatataagtaaacacacacacacaaattaaaatgaaagtcatattgccrctacccagtgataaccccttagattcacataattttgaatcaaaatataagtcatttggagagataatagagctgtggctggctgtattgtttctgttgg

SEQ ID NO: 444154 - DNA, 201 bp, Homo sapiens
gctggatcctcgccatcatgtaatccaacccatcgcagagagttccacccctcggggccctatccaggccaatatgccccactgaagaacctcatctaaakcccacacatctatctattcattttccagaagtgatggggaccataaaattaacacttactcggcattcccgacagctcttggttaaaatccgctggcctt

SEQ ID NO: 444155 - DNA, 201 bp, Homo sapiens
cttttactgataataaccagtgaaatttagagattactagtctaccttgagtcagtaaagagaggtacagaaacatgaaaccgaagaaaggcaaaaagaaraagtgctgaaaagtaacaatgggcacaagttattgctagtctataagtaaaaagaaatggcagcaggcatgaacactgtcatctcctgtcctgtgtatca

SEQ ID NO: 444156 - DNA, 201 bp, Homo sapiens
tatagtagcatgagaatggactaataaaatcctcatctttcccaagccattggacaatttttagtcctcatctccgtcaaccctcagcagcatttgacccractgctcaccaccttaaactcttagcatccattgcaaaacactttctgagtttttctttgaagttccaaattggttcttcttagtaacctttgctggctc

SEQ ID NO: 444157 - DNA, 201 bp, Homo sapiens
gatgattcttgaacttaaagattatcctaaaccatgatgacaggggccagctttgacgctgggctaaatgcctaactttttaccccagtgagggcagcgtrggcatctatgcttgcctcacttgtgcactgacaggttgctctgctcggccaggggcttcctgtggctgctggggcaagaggagtagcccatataggagaa

SEQ ID NO: 444158 - DNA, 201 bp, Homo sapiens
accacaaacctgtaagatattttacttgttttaacaaatatttctatagtagtgactatgggccaggcactagtctgcaaatatttactcatgtaatcctsgtaacaaccttaaaaattaccaactattatcatccctattttataaaagatgaaaccaaagtacagaaagattaaataacttgcccaactttgtatgggt

SEQ ID NO: 444159 - DNA, 201 bp, Homo sapiens
ggcctgagaaattccacagaccaagcagaccaccatcttctctgaatgagaaactccaagatgattcttgaacttaaagattatcctaaaccatgatgacaggggccagctttgacgctgggctaaatgcctaactttttaccccagtgagggcagcgtaggcatctatgcttgcctcacttgtgcactgacaggttgctc

SEQ ID NO: 444160 - DNA, 201 bp, Homo sapiens
tcctcaaacagttaaacagagtttccatctgatccagcaattccagtcctagtcatatacccaaggaaataaaaacatgtccacacaatagcttgtacatraatgttcatagcagcattattcataatagccaagagtggaaacaattcaaatgtccaccaactgataaatggatatctataatgtattatatccaaacaa

SEQ ID NO: 444161 - DNA, 201 bp, Homo sapiens
ataaaatcactcagccagttcattttgagtgtgtgacctactgtgggtccagtaaaaggaaaatataagtataggcaaatgtggtaggaaaatgaatgtaytgagatattgtttgcaatcttccttatatttccccctttacttcttccaaaaatagccaggctgtttctaaagtgcaggcctgagacacaaagttgcttg

SEQ ID NO: 444162 - DNA, 201 bp, Homo sapiens
tggccgttaggtaaattgattttagaatcatttattttgggcaaacttgaaacacctaagcccaatctgcagcagttcaaaaaagtagatgagatggctckgtgtcatagggctttctctcactgtcaataaaaccctagaaagctaatatatccagggtcccccccaccttccaaaacaactagtgggcttcaaaattaa

SEQ ID NO: 444163 - DNA, 201 bp, Homo sapiens
gtgttccatcgtagaattaaccttgatgggtttgggtgactcatctacattttctttgaagtacccagtaccactagcaatccctctttaaggaaggaagytctaatctctgaaaagttcttaggattattcacagagatgaaaagaaacaccgtgatgttcttggtggcttgacagggaagattctaaaatgtctctgcc

SEQ ID NO: 444164 - DNA, 201 bp, Homo sapiens
ctttgaagtacccagtaccactagcaatccctctttaaggaaggaagttctaatctctgaaaagttcttaggattattcacagagatgaaaagaaacaccrtgatgttcttggtggcttgacagggaagattctaaaatgtctctgccctttttatcctaatcaggaatattaaataagtcctgattatgcttgtaggctt

SEQ ID NO: 444165 - DNA, 201 bp, Homo sapiens
catcagatggtgaaatattaggagaaataaaaataaatgaaggaaagaataatgaactgttttttttttacactttgcacttttgaagtgctttcccataygtagtcattgaattcttatcagtctttttattcgtcccatttccagacaaggaaactgaggcttgaatacattaagagacgtatccactgtcacccttaa

SEQ ID NO: 444166 - DNA, 201 bp, Homo sapiens
ccttctgccaggtgacacagtatgacactttcttaagttgagataggagaaaagacaaatggcaatagcataagcccggggtctaggagggaaagctaaawggtctgtatttgggacgtggattaagaatcagacatgcatcaaggcagagggaaaaacaccatgaggggcaagaaggctccaggaattcacatgtgcaca

SEQ ID NO: 444167 - DNA, 201 bp, Homo sapiens
aaatgtgttcaccactaacagttctcactaaagaaacttctcacagatgcaacagttatatcaaaggaaagcaagccaggaagaaagattgagattaggaragaatgatgagcaaagcctacatggataaatcacatcaacatgactgtgcagtataataatataaataacaattgatttcggtagtaacaaaacaaatta

SEQ ID NO: 444168 - DNA, 201 bp, Homo sapiens
gtttatttgaatcttctctcttttcttctttattagtctagctagcagtctattttcctgagttttttcaaagaatgagtttctggattcattgatctttyaaatttttttgtgtctcaatctccttcagttcagctctgatcttggttatttcttgtcgtctgctagctttgggatttgtttgaccttggttctctggtt

SEQ ID NO: 444169 - DNA, 201 bp, Homo sapiens
tcatgaagtcaaaggagattactctggagctttaagatttactgagggccctttaggattctggacttggaggaggcctgtggcccctgtgttttggccartttctcccatttggaatgggaacatttacccaatgcctgcacccctactgtatgttgggagtaactaatttgttttttattttacaggctcatagggaga

SEQ ID NO: 444170 - DNA, 201 bp, Homo sapiens
ttatcttccctgtgggctgctgctcatgagcatagtagtatggcccatagcactatggcccactgccctgaaaatggttccacaggacattaataatacayagatgtttccaggatctatgaatcccatacaacaatatattttgacaatagccttaacattttcatttaagcatattctggattgttttgatgaattctt

SEQ ID NO: 444171 - DNA, 201 bp, Homo sapiens
gcatattctgtatcatacagctactgccatggtaataagccaaatacggtaaaatacagtttcaaacagagctggaacacacagcttggaatttatgttgraaacagctccctgacctcccatttacctcagatgttttcaaacgtcatcacctgcaagtcctcaggtcagtatggcaaagtactggctctcaccaccaag

SEQ ID NO: 444172 - DNA, 201 bp, Homo sapiens
ctgtaaagcactgcatctctgctcagaatgcctcctgccagcctctcaacctgatgaaaatccccccacccaccagggcttggagtatcctcttctgggaygcttacctggaaaacacacgtgcacagctgtgcacacgcacacaccctctagctctcagcagaaatattggctgtgatcttacaatcttctatgctacat

SEQ ID NO: 444173 - DNA, 201 bp, Homo sapiens
ccatcatctgcactccctgtgccccagcaagccagcaaacccagtgacctgacagcacctcaatgcctgttccattcatccactcagtccctcagcactgwgcactcctgtgtgccaggctctctgtaaagcactgcatctctgctcagaatgcctcctgccagcctctcaacctgatgaaaatccccccacccaccaggg

SEQ ID NO: 444174 - DNA, 201 bp, Homo sapiens
acagtagctcaaaccagtctctcccaggaccctgcatctaagctgaagtgctcctgcttaaaaccatcagtgattccccatcatctgcactccctgtgccmcagcaagccagcaaacccagtgacctgacagcacctcaatgcctgttccattcatccactcagtccctcagcactgtgcactcctgtgtgccaggctctc

SEQ ID NO: 444175 - DNA, 201 bp, Homo sapiens
aacaaaaatgggctctcgcttgtttacctaccaaattaacaaagtcaaaaactataatattagtgaagacaatccggtagggctaatagcacttatctatrctgtggaatataaatggttacacacttttttgaggacaaattaggtttatcagctgaggtttaagaagaaccttaaaatgatagaatccattttctttag

SEQ ID NO: 444176 - DNA, 201 bp, Homo sapiens
atcaaattttctaacgtgaacacaaacagcaaagtgacccagattttgatccacagtagctcaaaccagtctctcccaggaccctgcatctaagctgaagygctcctgcttaaaaccatcagtgattccccatcatctgcactccctgtgccccagcaagccagcaaacccagtgacctgacagcacctcaatgcctgttc

SEQ ID NO: 444177 - DNA, 201 bp, Homo sapiens
ttagaagaactgaatgtcagtagttctctacattggccaaattgtctctctaataatcacttgtagtctttttttaaatgacttcatgaaataagccagtkatatggtttggatttgtgtctccacccaaagctcatgtcaaattgtaatctccagtgttggaggaggggcctggtaggatgtgattcaatcatgggagta

SEQ ID NO: 444178 - DNA, 201 bp, Homo sapiens
aatgcatatgtttctattaagcatgtaccatgtcaaatcatgatgcccggagttgagtaaattgtatttcaaggacagtgaagggccggtgagacaaactsaccttcaggtcaaatccactttgattatgcctaaccattcttctcaaaaatgtgttttttaaattaatggaggcctttattcaagcaatattcattccat

SEQ ID NO: 444179 - DNA, 201 bp, Homo sapiens
agatatttcctcctacactttacatgtggggacatgatccaaggtcaagaagctagtcctgcctaagctgggacttgaatccaggtccaagtccagaaccygggctattattcaattccatcagaaaagaatgaagaaaagaaagaaaaagtctttttgaaaacatcaaattttctaacgtgaacacaaacagcaaagtga

SEQ ID NO: 444180 - DNA, 201 bp, Homo sapiens
aaggatatatactagctattcagagaaatatatcacacccaaagagctccagagttagtgcagtacctgcttacattccaacaatgatttttctgtggccmtgaacaaaccattgcttcctaggagtctgggtggggaggtcaaagcaaaatggatttgggaaacaagaagataccctttcccagcgtgtacccctagcag

SEQ ID NO: 444181 - DNA, 201 bp, Homo sapiens
cactccactagataaagtcaagttaattcctttcagtgataacattctagaattatttttgaaataaaattttaaaccaacaatatttggagaatttattytgaaagataataatattgttattaaataataatgataagtttcatgcacttataatatgcctggcatgctaggtgttttaaatgggaataataatatata

SEQ ID NO: 444182 - DNA, 201 bp, Homo sapiens
gattctgtggattctgggcaaagcagggatagagtccaggaaacaaagtgtggtgtaattggagtaagagtccttctggacccaggaacactctgctcccmcagagggctggattctggtcaaagtggggaggacacctctgtctccaacagtatctctaaagacctgcatctctggaggccaatcaggcgcagcaccctg

SEQ ID NO: 444183 - DNA, 201 bp, Homo sapiens
tttatatttatataatatataaaatatattatattttatatatagaacagaagggctagatatattcaaaatgttaaagtgattattgctggatgaattakgtggcttctgtgtacaagagtgaaaacagtaaaagttaattttagatagcatccagcactaaatcacaagtaaaggtaaaacatttcttagaaaaggtct

SEQ ID NO: 444184 - DNA, 201 bp, Homo sapiens
gagtctcaccaggccatttaaacctgccagaagagtcactcaggtgttttcacctaatgttggccttttataaatgctttggcttctattttgttcttcarcagaatggaatgcacaggatgaaattataaacatatgcattgggcaatgaagtttttttccttttggattcttaactatatggacaatggtatttgttaa

SEQ ID NO: 444185 - DNA, 201 bp, Homo sapiens
aatcaacagctactcatgtcaaaataaaccatatttgttggcaatctgttagtatcactcactatataggcatgggtaccatttgccaaatgtttctggtyctctaccattccaggcatgaggtaggacagtattttctcatccctttgtggatggatggaactagtgattagttctagtcaatgagttataagtagatgt

SEQ ID NO: 444186 - DNA, 201 bp, Homo sapiens
gcctttgcttaagtgcaaggtagaccctacccagaatcaacatgcataattcctcaaaggtccacccttgggtatcaggtacaatcagtattatcatgaamtgaagtcgattttcatgagactatctgaattccttagtagatctggaaataaattcaggaacaataattctaaaaatataggtagataaagatcaatcaa

SEQ ID NO: 444187 - DNA, 201 bp, Homo sapiens
taacaccccaagaccttgaacacaaaatgttatgaaggcaaatcttttccaacctgtatttacttagctgaattctgtaagcccaggcctttgcttaagtrcaaggtagaccctacccagaatcaacatgcataattcctcaaaggtccacccttgggtatcaggtacaatcagtattatcatgaactgaagtcgattttc

SEQ ID NO: 444188 - DNA, 201 bp, Homo sapiens
tacagatggcccctttcctcccagcccttatccatgcccaagtgacttagaagggcctctcacgctgggtttgctagtaaaatccatatatgacatgtatrttcgctccccaactccctgcccgcaactcaaaagtgaaggagcttctctggctttaagataagtgtattgcttttattatgaaaacacctcataaaaaca

SEQ ID NO: 444189 - DNA, 201 bp, Homo sapiens
agatataatttggctctgtgtccccacccaaatctcatctcaaattataatccccacatgttgagggaggtgattggattatgtgggcagtttagtgagtkcttatgagagctgatggttttaaagtgtggcacttcctcattctctttctctcctgccaacatgtaagacgtgccttgcttcccctttgccttctaccat

SEQ ID NO: 444190 - DNA, 201 bp, Homo sapiens
aggggagaggtaatgatataggagttaggaagaaattatttaggcagatagtgagggtaaggaagtccttggtaagattttccttttaatgaaaagcagcmccaaaatcaatttcttttctaacaaagagcaacccataaaatcgagctgcagacacagataagcaagctggaagcttgcacgggcaaatgctggcagctg

SEQ ID NO: 444191 - DNA, 201 bp, Homo sapiens
cgtgtctggcctgagccactgcgcccggccgcatgtgtcttcacagtagaatgatttatattcctttgtgtatacactcagtaatggaactgctgggtcaratggtgtttccggtcatagatccttaaggaatcaccatactatcgtccacaatggttgaactaatttgcattcccaccaacagtgtaaaaggattcctat

SEQ ID NO: 444192 - DNA, 201 bp, Homo sapiens
atctgcaaaacaggcaacaatcccagtcttcataaggcttacattctggcacttgtaaagagaatgctcatttccattccttcctcccgagcctaaacaartaaacttattcctttttcagtcaaatgcaacacatgacttcacacaatgctggaagcatcaacacgtgaactataatctatctgacaaaccaagtttctt

SEQ ID NO: 444193 - DNA, 201 bp, Homo sapiens
tgtgacaagccttggtttatttattgaccaattacagacaggactgagcaagatgacaggtattaagacctgattagcacaatgcctgacacaaatgttasttttccttttttagcaagaaaaacttatcaaacacctcggagtgtcccacctcataccaccagctgttcatttattcaacgaatacttactgagcaccca

SEQ ID NO: 444194 - DNA, 201 bp, Homo sapiens
gaagacatcacactacctgacttcaaaatatactacaaagctatggtaaccaaaacagcatgatactggcataaaaacagatacccaggccgattgaacakaatagagaacccaataataaattcatgtatttacagctgatatggcttggatttgtgtccctgcccaaacctcatgtcgaattgtaaacctcagtgttgg

SEQ ID NO: 444195 - DNA, 201 bp, Homo sapiens
atgtgccatatctaccaaaaaaaaaaaaaatctgggtatggtggcatacaactgtggtcataacttcacaggaggatcacttgagcccaggaggtcaaggytgcagggaaccatgttcatgccactgcactccagcttgggcgatagacagagaccttgcctcaaaaaataataataataaaataaaaatattagctaaaa

SEQ ID NO: 444196 - DNA, 201 bp, Homo sapiens
cctacctcccaacccacaccatatagccgctatatgttctgagacctttgtttggcatctggggagaggaaagggagtgtttctcttttttcattatgatrgtagcctgtagggagagaatgaagtatctctctctcctccccaggcctttgggcagggttggagccactatgtttagaggtataagaacacacaggagac

SEQ ID NO: 444197 - DNA, 201 bp, Homo sapiens
ctggctggacacactccatgtgccttcttccatccatgcccttgaggacagagaaactacaacagtcattagattcacttttcccagaaaaagtctagggrctcatggtctggaacataaaactattagtaatctgcatttgtgccagtaccagtgtgtacccaaatgtctcttgggctctcctttcacaactctaaagct

SEQ ID NO: 444198 - DNA, 201 bp, Homo sapiens
gtagagttagtattatcataactagcattacagactgattcccctaataccaactcaaaaccctttcgcagggccacccaccagcctccctaactaataayagctgttagttctttctcctctcacatccttgccttaatagcttcttccaaggctacctgatccacagctgaccacaagctaaccacataaatggcctgg

SEQ ID NO: 444199 - DNA, 201 bp, Homo sapiens
gattaagttacagcacacttttaagctctagataattattctcaatgttgaactcttggagctttattatcccatatatataatcctttttttttttttttcaatttttagcaagaaaaatgttgggtaagagctaaagtttcctgttctgtgtaatgcattgcctttctcctccatcatgcttagcatccactgtctcag

SEQ ID NO: 444200 - DNA, 201 bp, Homo sapiens
aaagagctaatttttatacccgcgggacagcacacaatagcggcttttggcactctgagaagctgcgcatttagagatgttgggccgagttttccttccaycagacccgattttccaaaggggccaagtgagacctgggaatctggcagtggcatttaaatctttaacagacacagtcaaatgggattaggcaccatactt

SEQ ID NO: 444201 - DNA, 201 bp, Homo sapiens
gccttaatagcttcttccaaggctacctgatccacagctgaccacaagctaaccacataaatggcctggctggatcctcgccatcatgtaatccaacccaycgcagagagttccacccctcggggccctatccaggccaatatgccccactgaagaacctcatctaaagcccacacatctatctattcattttccagaagt

SEQ ID NO: 444202 - DNA, 201 bp, Homo sapiens
ggaaggagggttacagagccaattatctatttatatgaaaggaagaaaaaaagagagaaattccagccatacaaatgaaaacaacagataaataactatcmtcagaccttctaggttggttttgaaatatgcaaaagtagtagcacatgctttattttgacttttcttgttcaatatatcaataaatagtttctggttatc

SEQ ID NO: 444203 - DNA, 201 bp, Homo sapiens
accacataaatggcctggctggatcctcgccatcatgtaatccaacccatcgcagagagttccacccctcggggccctatccaggccaatatgccccactsaagaacctcatctaaagcccacacatctatctattcattttccagaagtgatggggaccataaaattaacacttactcggcattcccgacagctcttggt

SEQ ID NO: 444204 - DNA, 201 bp, Homo sapiens
cagtggctcacatttgtaatcctagcacttcaggagtctgaggcagggggatcactggagctcaggagttcaagaccagcctggccaacatggtgaaaccycatctctcctaaaaatacatatacacatacacacacacacacattagctgggcttggtggcatacgtttgtaatcccagctacttggaaggctaagggat

SEQ ID NO: 444205 - DNA, 201 bp, Homo sapiens
ttacttttaaaaattcatgatgtaaaccaacaggacgagtgtctttcttcaaccccgtgctgctgtcccacaacatctgtaggtgcaggtatacttttaartttttcctgccactattccctcaagtccccccataccaggcataccaaatgatccagaccccatgttctctaaaaaagacaaaaatgtaaaaaacaggaa

SEQ ID NO: 444206 - DNA, 201 bp, Homo sapiens
agagagttccacccctcggggccctatccaggccaatatgccccactgaagaacctcatctaaagcccacacatctatctattcattttccagaagtgatrgggaccataaaattaacacttactcggcattcccgacagctcttggttaaaatccgctggccttctgcaagaacttttcctccatagatacattttgctg

SEQ ID NO: 444207 - DNA, 201 bp, Homo sapiens
aaatgacctcagaggtaccttctaactccaatagattccacagaaacctagattctctgcttctgagcaatacaaatctctttgtctaaagtgaaaggaawtgtgtggaggataacccttaaatctcccaggcagacctcatcatgattgtgtttgcctggcctttacagccaggatatacaattatttcaatgttacagt

SEQ ID NO: 444208 - DNA, 201 bp, Homo sapiens
atctgggtgatatttaatactccaacactaatatctgggtggtcatttaatccctctgaatcttggtgtctccttcataaagtggtgactaatgagaatawttctatcccagaatccacacaacaaatattaacacatgtgatcatgcacatgaccagttttgaaaatgtcgctctcactttcctccatgcctgagtgcca

SEQ ID NO: 444209 - DNA, 201 bp, Homo sapiens
gcttgaacccggaaggtggaggttgcagtgagccgagatcgcaccattgcactctagcctgggcatcaagagcgaaatctgtctcaaaaaaaaaaaaaaaatcatctgtgaggaacaggccctcaccagacacctaatctgcaggcaccttgatcttgaaattcttagcttccagaactgtgagaaagaaattcctattgt

SEQ ID NO: 444210 - DNA, 201 bp, Homo sapiens
agcacttttggcataaaaacagtcccttctctttccttccgtgtaatgtacaaatacagccattttccttatgtgtcatgatatgaaaaaggtcacagaaygtggtccagtgttgaagtagaattggggatcagaagatctgggatgcaccatcagtcctgccacttagtatctgggtgatatttaatactccaacactaa

SEQ ID NO: 444211 - DNA, 201 bp, Homo sapiens
acaatggctattgcttgctgaacacatcgcattagcattttatttatttatttatttattatctcaataggtttttggacaacagtaggtgcttgcttacktgaataggttcttcagtggtgatttctgagattttggtctgaatgcacccgatcttgtctgcattcgcattttaaagacattttcaaaagagctctgatg

SEQ ID NO: 444212 - DNA, 201 bp, Homo sapiens
taggctcgccagcctcaccctggtgcttctcagctggcctgccagggcctgagttacaggtgtcactgtagtatgagtccctcagccctcgctgtggctcrgcagagcacttttggcataaaaacagtcccttctctttccttccgtgtaatgtacaaatacagccattttccttatgtgtcatgatatgaaaaaggtcac

SEQ ID NO: 444213 - DNA, 201 bp, Homo sapiens
aaattagatgacctggcaacgcagagcccatattcccacaggcaacagtgcagtgaatgcagagttgaagaaatgcagctcatggcacaatgttgccagtkggctgcattaccttgccagtgcacatcactcagctgttacctggctggccccctatgcacctgggattgaagaccctccccagcacatctctaacttatg

SEQ ID NO: 444214 - DNA, 201 bp, Homo sapiens
catttgggaagctccccaagctagacaatgataagtgccctaagtcaggctagaattacatcaatctcaacatatccaactcagcaaaactgtaattactmccatgaagtaatactaaaggtaagagatgagaaatgatatttaaagataactcaccagttcaaatattaaatgtcttcccaatctgatttcaaaatcttc

SEQ ID NO: 444215 - DNA, 201 bp, Homo sapiens
tctatttaggttgaaaatcaattatatgatgtcataaaatatcctcagataatctcgtcttctgaaaaaagctgcacagcccactaatgcccaccagtcthttacctgttgctcagcagcccaattagggaccgtgacaagatgacaccattaggtctgtgcatttcatacatgcagtcctcactctccttctagctacag

SEQ ID NO: 444216 - DNA, 201 bp, Homo sapiens
ccttgacagatgtgggatccaagccagtagtataagctaagcacagcctgctgggccaagaggatggaacgagcccaatgggcctgagcaatacttagacrggaggctccgtcagccacagaggtttccagctggtgaggcaacaccccaaggatcccgtgacaatcccacattaccctccccattgccctgtgtgtgtgc

SEQ ID NO: 444217 - DNA, 201 bp, Homo sapiens
tgtgactaaattgcttactgcagaccattttttacaatagtcttgtactctaaaaaaaagtggacaccaacccaaatgatgatgatgatgatgaagatgayaacagtaacaatgacagtctttttaaattgctccaaaccacaggggactgttcctacttttaacttcttttgcacttagagatagtaatacagtgtagca

SEQ ID NO: 444218 - DNA, 201 bp, Homo sapiens
ctgcatgacctggatgtgagacatggagtccaaggagatcactttggaattttaagatttgactgccctgatgaatttcagacttccatggggcctgtagyccctttgctttggccaatttcttccatttggagtggctgtatttacccaatcccgtacccccattgaatctaggaagtaactaacctgcttttgatttta

SEQ ID NO: 444219 - DNA, 201 bp, Homo sapiens
ctttgcagccttccccatgttggtcaccatgcgctaggcatggtcaaatgaatcaattttccacttaaatacagcatccaggaataaaggcacttgtacaratgtggtctaatgcaaagtacagtgacactatcacctgctttgctctgagctgtgcacaactacgcctacactgactttcccatcaactaacaccccaag

SEQ ID NO: 444220 - DNA, 201 bp, Homo sapiens
taaccagaatatgtaaggagctcaaacaactctatggggaaaaaatctaataatttgatttaaaaatgggcaaaaggtctgaaagggcaaaatcttcagayggggctttgcattctggctctgccattttgtatctgtataaccttgagagggagtcaaaatcttcagtggctacaggggccaggcagcatcttacatgac

SEQ ID NO: 444221 - DNA, 201 bp, Homo sapiens
ttctaagaagaaaagatgggaaatggcatagaaaacctatttttaaaaaatagccataggctgggcatggtggcacatacctataatcccagcactttggraggctgagacaggaggatagcttggagtttgagaccagagtgaggaagatggtgatgtgccatatctaccaaaaaaaaaaaaaatctgggtatggtggca

SEQ ID NO: 444222 - DNA, 201 bp, Homo sapiens
ccagagtgacttttataatatgctaatataatcaggccactcagcttatactcttcagcagctttccattgcacacaggataaaatctgaactttttaccrtagcctagaagacatccagtacccagtcttaccttggactactcaacccctcagttttcaatttcggaggaaatcctatcggctctagcttcaaaacata

SEQ ID NO: 444223 - DNA, 201 bp, Homo sapiens
gtttaatagagacagccaaagaaaataccattttcttctataaatatcacattcctttccagttgccaaggatgctgcaaaagatatgacaagtgattgcraaagacggactggcatagaggttaagagtatgaactccaaagtcaccggcctagtttagaagatcctggtttgccaattgcaaggtatgtctacttaagt

SEQ ID NO: 444224 - DNA, 201 bp, Homo sapiens
gtgagaaaagaagataagatttctgaggacacacttcaagtctgtgcttaagtcatctccggcacactccagaaacagtatacccttgtgcatgtccactygaatttacaaacctatcaagtacctagtatttgcaggtgcaatagcagacaaggttagaaacataaaaaagtctaaggattcagacttatactccaagag

SEQ ID NO: 444225 - DNA, 201 bp, Homo sapiens
tttctattgtctcccttgtttggaaaatgaagatacttctttttaaattctctgctactagtatgtcccaacattatcacaaacaaactctaaataacgtycctcaaaaatatctttatctttgtattagttttctattgttttgtagcaaattactacaaacttaatacaacacaaatctatcaccttacagtaggtcag

SEQ ID NO: 444226 - DNA, 201 bp, Homo sapiens
aaagtagcatactgaccagcctcaggccagatgcagcctcagcatgttggtgtagctcccagtgttactcacccaacccaccatatttcaccaagtccacrgtgccatagattataaaatacaccatcatttgacataccctaagaaataaacaaaaagctgttgattataagagacaccataattgtaacacatatgtaa

SEQ ID NO: 444227 - DNA, 201 bp, Homo sapiens
atagattcccaaaattgtcagaccacaatggacccaaaattggtgtatacctgtatttttccttcttccattcagcaaactgacccaagccatcctggaaygtgtaccctctgattttttctttaaaatctccaggcactgagactctagatggatcccaagtaatctactcaaagatgacccatgatggttaccaaagat

SEQ ID NO: 444228 - DNA, 201 bp, Homo sapiens
acctaaagatgggaaaggcttcctgatgaaattagcactgtttatctcatccttcttttttatatccttaatcccacttatgcctctgtaagtggccctttatcattggtcatttttttttttaactattcaggaataaaatgttttttttcttctgtcagattctgattggtagagcagagaatggcactgatactagtg

SEQ ID NO: 444229 - DNA, 201 bp, Homo sapiens
ctctttgaggcactatctggttgcactccctgctttcaccctgcctgcagtttagagtagaaatgacatgacttcacatgaaaatagttgctcctctcacygctataaagtgctgcactattactgccatccagcccagtgtttgggctttgacagggggcccagggaagggtcattctcgacatcaatcctgaagtatgg

SEQ ID NO: 444230 - DNA, 201 bp, Homo sapiens
tctttggctcaacactaagccattacacaaggactcaacttgaaaatcaactcattcgttagataagttgtacttgctgacgtccatatatatccaaccayagattcccaaaattgtcagaccacaatggacccaaaattggtgtatacctgtatttttccttcttccattcagcaaactgacccaagccatcctggaacg

SEQ ID NO: 444231 - DNA, 201 bp, Homo sapiens
tggccattggccatctttgctagaatataggcttcatgtagacagggactgtcttttctctgctgcatccttaacactcagaacagtgcctgtcacatgaygtgcaataaatatttgttgagtgcatgaatgaatgaatgaatgaatgaatgaatatgatatattgctggttccctcttcactgtacctaggccaatagcc

SEQ ID NO: 444232 - DNA, 201 bp, Homo sapiens
gtggctcataatacctatctcctttgcacaattgttataaggattaaatgagctcatgaatataaagaatttagaatagtacctagcatatgaagtgttcrtcattaataatgtgagtgattattaataataatattatctttgcatggctggctccttcatttaggcttcagctcaaacgtcacctctgcggggaagcct

SEQ ID NO: 444233 - DNA, 201 bp, Homo sapiens
ggcaataaggtgactagtttgcatgtttccagtctttatgtatttacataaatatgtatatagatatttataaatattaacttagatatttgatgatactrtattgttctgaacttgaatttattttattttttctcaaaaatatgtagggtatctttcaatgtgatgtgtacatgtatgtatgtgtttgtgtgtgcgtgc

SEQ ID NO: 444234 - DNA, 201 bp, Homo sapiens
tgtcaacaagcatataccttgcttcccctatgccaggcactgtggttggcactggggaaataaaagtaaaaacacagtttctgccctagaggatagacacrtaagcaagacagtttccttatgacaatagttgcagaatagggcagtgcacaaaaaaacagaggaggcccatagagattggggataacatcatggaggata

SEQ ID NO: 444235 - DNA, 201 bp, Homo sapiens
actgggaagggtgtgcaggttggggaatgagtgttaaagagaggttggtcaatgggttcaaacatacagttagatagaaggagtaagttacaatgtttgakagcagagtagggtgattataattaacaacaatgtactatatatttcaaaatagctggaaaacaggactcgtatttttcccaacacatagaaatgataaat

SEQ ID NO: 444236 - DNA, 201 bp, Homo sapiens
aaaaccaggagataaatgggtccttctcaaatgctcatggccatgaaaatttattgtaatgatgtttggtgctaaataaaccccacttctttgcaggacasccccacttaacagtctgatctagtcctaccaaacttctgctcactcaatcctccaagaaaatgaaacatttcttatgttgacttttcttatttcttttta

SEQ ID NO: 444237 - DNA, 201 bp, Homo sapiens
gtgacaagtctttggaaggcatcaaagaatacttcatggggacttggtgaaacgtgagctaaatttaggaaaatgaaattcatatgtgaatcatcatgttkcatcccagccagagggacaacgtatataaaggcagagaagtgtgcagtcccatggcaggtccaaacagttataaaattggtttaactatattgaatacac

SEQ ID NO: 444238 - DNA, 201 bp, Homo sapiens
atttgactgccaacatctggtccaaaagtccatacttttagtaactatactgcatgcctctcaacaataatgtcaagactatgggggataattcatgccaygtggccattgttctgtaattcatctttgctttacatcaacatcagtggagaagttgaaaaaacactgactatatctcagcagcagcctttagaaaaaaaa

SEQ ID NO: 444239 - DNA, 201 bp, Homo sapiens
taacagaatttctccaagtaattatttcttagaatgtagctactgctgcctgggaatcttctttgacttgtcttggaaatatctgaaatatgggactcatrtgaatataaatttaattaacattggaatctaacccataatgaacaaaatgtactttgcaatttcttttaacagggcctataagaagcatcagttcagggg

SEQ ID NO: 444240 - DNA, 201 bp, Homo sapiens
ccactaattcattcctttttattgctgagtagtattccatcatctatatcacagtttctttatccactctgattgatgggcatttgggttggttccatgtytttgcaattgtgaattgtgctgctatcaacatgcacgtgcaagtgtctttttcgtataatgagttcttttcctctaggtagatacccagtagtgggaatg

SEQ ID NO: 444241 - DNA, 201 bp, Homo sapiens
ccattagtgaggcaggctaatgagaaaacagaaaagaaagataccccaaggtattcttatctcaagcattctgaatatctggaaataaatgggagcaggarctaagaattaaggttttgctgacaatgaccaatcagaagaggcttttgatctctactatggtttgaatgtttgtcccctccaaaattcatgttgaaattt

SEQ ID NO: 444242 - DNA, 201 bp, Homo sapiens
ttgttcctctgtcacagtttctatataaaaattctagcaccccactttgcatgatccctggcctaatccctgaattgtagagggagaaaatttgaaaactratgcatttaaccaatgaatggtcatattttaacactgggagctgaacagagtaccaaagcaagccacacctcctgcaaaggtccaagcagttggagggca

SEQ ID NO: 444243 - DNA, 201 bp, Homo sapiens
gtgatctcttagaaccttcccaccttagccttctataattttttgaattgctgcttcaattttataacacagaaaagaacagcacagtctttcccatctgyaagtatctagggtatgaatcgcagaaagcaatgtttgtcctccaccatggagacacccaacccaggcagaccagtctaccagtataaaacctacctgcac

SEQ ID NO: 444244 - DNA, 201 bp, Homo sapiens
tcctgaggccaccccagccaagcaaaactgtgagtcaaataaacctcctttctttataaattacccagtctcaggtagtatctttatagcagtgtgagaayagactgatacagagactgagtaatcaacttgccaggcaactatggcttgcttggtaatgaactctcttgtatttgttctccctccttctctgctttattt

SEQ ID NO: 444245 - DNA, 201 bp, Homo sapiens
ctaggtgatctcttagaaccttcccaccttagccttctataattttttgaattgctgcttcaattttataacacagaaaagaacagcacagtctttcccayctgcaagtatctagggtatgaatcgcagaaagcaatgtttgtcctccaccatggagacacccaacccaggcagaccagtctaccagtataaaacctacct

SEQ ID NO: 444246 - DNA, 201 bp, Homo sapiens
aaacctcctttctttataaattacccagtctcaggtagtatctttatagcagtgtgagaacagactgatacagagactgagtaatcaacttgccaggcaamtatggcttgcttggtaatgaactctcttgtatttgttctccctccttctctgctttatttctctgactctggcttcttcggcttgcacttcttaataagg

SEQ ID NO: 444247 - DNA, 201 bp, Homo sapiens
actaggtgatctcttagaaccttcccaccttagccttctataattttttgaattgctgcttcaattttataacacagaaaagaacagcacagtctttcccrtctgcaagtatctagggtatgaatcgcagaaagcaatgtttgtcctccaccatggagacacccaacccaggcagaccagtctaccagtataaaacctacc

SEQ ID NO: 444248 - DNA, 201 bp, Homo sapiens
aaaatcatagcaacctctttctgaaatgttattcttccatcccttactccttcgcattcagcatgtagaatactcacatttttttccttatacaactatcwtcttttccaaagcatttcttggctaccacaacacttagcagaatgactgctcttacctttatttcctgattacaaccttctggcattgcatcttcaatac

SEQ ID NO: 444249 - DNA, 201 bp, Homo sapiens
tgatactgactttgcttctgaggactaagttaacagagggcaggtttcactataaaggttaaggacgggcccccagaacccagtcatctttttcttgggcrtgtcttactaaaaatgtctaagacatgtggaagagatcaagcttatttgactctttcattgtaaatcatacaattggataatcaagagatagcagcagca

SEQ ID NO: 444250 - DNA, 201 bp, Homo sapiens
tattaatttgaattcaatgattgagtgatctttcttaaacttaaaacccattgcctaggggacttcagtacaagtttttaacatggcattgaagctttgcratgatctggcttctacctacctctataataccagccccatcgcccaccccaaactctcatcccttccccatacacacttttatgttccaacgacttacct

SEQ ID NO: 444251 - DNA, 201 bp, Homo sapiens
cataaaagaagtagagaagaaacagaagtagacccctgaggttgtgaaagaaaattccttcacccttgacatttaatgttggaatacaaaaattaacacaygtgctactcctggtacttctggcccacgaccctgatactgactttgcttctgaggactaagttaacagagggcaggtttcactataaaggttaaggacgg

SEQ ID NO: 444252 - DNA, 201 bp, Homo sapiens
tacatgcttagaagattttgttcctttgatttctccacaaaacctcgcatggcacctagaacagagtaggtgcttcataaatattttcagtggactaatayagaggaacccagtattaaaaaataaaattgtttaggttacctaatgattattaatttgaattcaatgattgagtgatctttcttaaacttaaaacccatt

SEQ ID NO: 444253 - DNA, 201 bp, Homo sapiens
ccatacatgcttagaagattttgttcctttgatttctccacaaaacctcgcatggcacctagaacagagtaggtgcttcataaatattttcagtggactartacagaggaacccagtattaaaaaataaaattgtttaggttacctaatgattattaatttgaattcaatgattgagtgatctttcttaaacttaaaaccc

SEQ ID NO: 444254 - DNA, 201 bp, Homo sapiens
tcccacgcccaatcatggtgcactggtcagggagtgagaaaccccaaagttggtgggccacatgaatataccaagtggcaagatgggcctgaagctcctayagggttaacattcaccccaaaaatatccccaagcctaaagaagcaacattaaatagcaactacaaaactccacgacaggagaagagagagatcatgggaa

SEQ ID NO: 444255 - DNA, 201 bp, Homo sapiens
aactggggagggggaggttgcagtgagccgagatcgttccactgcactgcagcctgggcgacagagtgagactccgtctcaaaaaaaaaaaaaaaaaaaaagatccattaagactcaacagtctacttgttattcattctttttctcttctattcaaggttttttctatctgcctttcaaatcagaagctctttatctgaa

SEQ ID NO: 444256 - DNA, 201 bp, Homo sapiens
aatataatagcaactgtttcacatgcttctcacctgctgtgggaagctctcctctgcattcattgagaagtatctcaagatctacctcctactttgggcayttgtataaccctcataccaaagaagcattcacacccaaccccacaaggccaatagggcaaggtagggttgtgaagctgagacttgccttgacactcaatc

SEQ ID NO: 444257 - DNA, 201 bp, Homo sapiens
cacattacatctcccacagagagattcaaaatgttccttagctagcaaaggctctgagaaaactctcagcaaataaatctgtttaattttgttcagctcckcatttccccattaatttaagcatgagaactgtttttcaaataacagctattaaatcccccacggaactactatcactctcactaaaaggggttctaagga

SEQ ID NO: 444258 - DNA, 201 bp, Homo sapiens
ttgtggaaaagggatacttgaaaataaatctagaaccatgttttagagtccttttgtaaagagccttgaatatcttggaatgttgatcatcccaaagagayttaatcagaaaattaaatgcccggggtactatacagaactaagtaacaagaagaattacagaaaatgtatgttgtttctttctaccttgataacattatt

SEQ ID NO: 444259 - DNA, 201 bp, Homo sapiens
ttcccattcttctgactgaaataccagtctctcccagtatccaccctccccccggcgacctctcatgatctattaaaatcactgcagggccaggtgaggtwgtgcaatttctgagaagccttcttcattcatatgcacaaccacaaccaaatattgaatatgccttggttctataatgggttttggcatttgatcaagagc

SEQ ID NO: 444260 - DNA, 201 bp, Homo sapiens
aagcatatggttaccttattagaaattaaaattcattttcatataaatctcagcaggatattacactaaaataactagagtaactccaggggacaacaaakaattctagtttagctcttctaaggcctggcacttgtaatataaaatgtaagtacaatggcatatttggaaaatgtaagcaatctatctactgcaagcatg

SEQ ID NO: 444261 - DNA, 201 bp, Homo sapiens
acacgtgggcattctaacaagagaaaaaaagatcgaattataaaactaaagagaagaggcacatgtaagaaagaaagactcattcagttttgtggaaaagsgatacttgaaaataaatctagaaccatgttttagagtccttttgtaaagagccttgaatatcttggaatgttgatcatcccaaagagacttaatcagaaa

SEQ ID NO: 444262 - DNA, 201 bp, Homo sapiens
tctgttttgtttccgtcatagtgtttgtcattcactggtactttttaaattattatggttattattcctacctgaaattgccatacgtgcagtaaacaagmaaacctgtttactttctcttttcactacctagaatataagctccatgagaacggaaattctgtgcatcccatttatttacgcctattgggccagtgacag

SEQ ID NO: 444263 - DNA, 201 bp, Homo sapiens
ctctgcagcaattaggagtaaaaaaaaaaccagaaaattaagtctgttagatatctgcctccttttgaagcttgcaattctaaaacaaaataacatcatgyaggtgaggagtagaaagagaaaaaaagtttccaccagggtatctctcctgttgccacttgaagactgcaaggtgagggtggtggaaatatgaaaatggct

SEQ ID NO: 444264 - DNA, 201 bp, Homo sapiens
gataaccagagcctagcatagtgcctggcccatcataagtacacaatcaatatttgttcaataacttctatgatgactgccttgatttataaattcattcyggcaagtaaaaaatatttaatgatattacacgtgggcattctaacaagagaaaaaaagatcgaattataaaactaaagagaagaggcacatgtaagaaag

SEQ ID NO: 444265 - DNA, 201 bp, Homo sapiens
cccagtgacagcagaggtgggagcatagtggttaagatagaaaggcttcctggcagcactcatcatgcatggaaacccatgctaggctacagcaagaacaragactatcacccaaagactgggtaagaggaattacatcagtcactccagtcctctgacagaacatgcaagtactatcttgagcataagggaaagaggagg

SEQ ID NO: 444266 - DNA, 201 bp, Homo sapiens
gaaactccacctagatttcataagatgtatggaaatgcctggatgctcatgcagaagtttgctgcaggggcaggacactcatggagagcctctgctagggyggtgtggaagggaaatatggggctggagcccccacacagagaccctactggggtactgcctagtggggctgtgagaagagcgccacaccatcctccagac

SEQ ID NO: 444267 - DNA, 201 bp, Homo sapiens
aagaataaatggatagcctccagggttagtgcaaaataaagcaatttcatatctcatcaattatgtgaaaatgccaaataggcccctcttagcttctaacrtgtttcagaacaatggcaatgttcactttgcctttgaattacagggtaactgtcaagaaaatcatttttaataatgaaaatgtcacaggtgactccatta

SEQ ID NO: 444268 - DNA, 201 bp, Homo sapiens
ggattgacagatacctgggtactggaagatctctccattagtgaggcaggctaatgagaaaacagaaaagaaagataccccaaggtattcttatctcaagsattctgaatatctggaaataaatgggagcaggaactaagaattaaggttttgctgacaatgaccaatcagaagaggcttttgatctctactatggtttga

SEQ ID NO: 444269 - DNA, 201 bp, Homo sapiens
agacagtagcatcacattaaagcttaatggagtcccaaatcttagataggagccaagaatgatgggcaatgtggcaaacaaagaagcaaaggaactaaacwgaaggttgtggtatctcttttacgtacagaattctgccatgacagggtttctgagagtcttacaggcttggaaccttaaccccagcatttgatatccatc

SEQ ID NO: 444270 - DNA, 201 bp, Homo sapiens
ggcagaatatcttgccatcctgtttagaaatgaagttaaggaggtttcatcatttaggacatgatggacagctacactaagagaaatgaacttcttggatktttggtcaccccctggccacctctcattctgttcaaaactgaagcacacatgtgtgttcacacaaacacaccctttctttccctgattttgcttgcagag

SEQ ID NO: 444271 - DNA, 201 bp, Homo sapiens
tataaaaatgtttattataatgtataatattagctaaactagactgactctaattaattagtttttattaaccacttcaattactgcattttgaacatctwctacatgccagtacacataataagcattagggacataaagatgaatacagctattccccgccactcaaactcacagcacagccagggagagtcacagaaa

SEQ ID NO: 444272 - DNA, 201 bp, Homo sapiens
cactgagctatagcagagaaaatacttgaccttgctaaaattaaatcgttggagggaaggcgaatgaagctctattttcagagagtgggaggcttttaagmaaggtacccactttgggagagctccatccaccgtcacaacacaatgtatcaagtcaacccacagtattatttctaaagaaagagctgttattctttctga

SEQ ID NO: 444273 - DNA, 201 bp, Homo sapiens
atttttgtattttaagtggagacggggtttcaccatgtcggtcagctggtcttgaactcctgacctcaggtgatccgcccttcttggcctcccaaagtgcygggattacaggcatgagccacagtgcccagcctcttctccctttctcaaaaaaaaaaaaaaaaaattctgaagtttttctattacaatgaaaaatgatca

SEQ ID NO: 444274 - DNA, 201 bp, Homo sapiens
tatttaaacacatttggtccaagagaagaaaaacttggaatcttctaccacccttatccaatttactgttcatgtctgtatgtacatgattgaaaatataytggaaagccaaaccaaatgccccataaaaccagcgctactccaacagagtcagtgaccactgtagtgctaagggatatagaaagaggtgggacacagaca

SEQ ID NO: 444275 - DNA, 201 bp, Homo sapiens
cctcctgagttcaagcgattctcctgcctcagcctcccgagtagctgggattacaggcatgcactaccacacccagctaatttttgtattttaagtggagwcggggtttcaccatgtcggtcagctggtcttgaactcctgacctcaggtgatccgcccttcttggcctcccaaagtgccgggattacaggcatgagccac

SEQ ID NO: 444276 - DNA, 201 bp, Homo sapiens
attacccagtctcaggtagtatctttatagcagtgtgagaacagactgatacagagactgagtaatcaacttgccaggcaactatggcttgcttggtaatraactctcttgtatttgttctccctccttctctgctttatttctctgactctggcttcttcggcttgcacttcttaataagggttagtgtagaaaatgatt

SEQ ID NO: 444277 - DNA, 201 bp, Homo sapiens
tcgacaagtgccagctcttgccttcctttctcagtgaggaaatccgagcaaagtcaagcattctggtagaatttcaacaaggtcttccacacagcagggcyttaattaatgtttattaagttgcataatatggtgctcttgggctaggaggatattcactgccttcttctaatcttagggttaaaagacgttaagagccac

SEQ ID NO: 444278 - DNA, 201 bp, Homo sapiens
ctggtgtgcgatggtgcaatcttggctcactgcaacctcagcctcctgagttcaagcgattctcctgcctcagcctcccgagtagctgggattacaggcakgcactaccacacccagctaatttttgtattttaagtggagacggggtttcaccatgtcggtcagctggtcttgaactcctgacctcaggtgatccgccct

SEQ ID NO: 444279 - DNA, 201 bp, Homo sapiens
agtaatcaacttgccaggcaactatggcttgcttggtaatgaactctcttgtatttgttctccctccttctctgctttatttctctgactctggcttcttmggcttgcacttcttaataagggttagtgtagaaaatgattgtctcatatttattgtgttctcactgtgagcctgccactgtgctaaaagctttacatgta

SEQ ID NO: 444280 - DNA, 201 bp, Homo sapiens
taaatcactaaatcctgtaataaccctacaaaatgtgtactagtattatctcaatgtgacagatgaggaaactgaagtatacataaccaagttgcccaatkccatacaactactgtgtaaagagatattactcaaaatattactgtgaggtggatgacactgctgttccctttgagaggtgaggaatggagactcagggcc

SEQ ID NO: 444281 - DNA, 201 bp, Homo sapiens
catgtaacttggataccctccactgccaacacactttggtgtcttgtgactcagataatttctactgctaatatactttggtgctgtgtgactcagatatrttccctagtggtaagagacctctatgcctcaccttctttggctaaaggcattcaacccctgtacacggttttcttctccccccgcctttttttttctttt

SEQ ID NO: 444282 - DNA, 201 bp, Homo sapiens
taatgagcatttctaaaattgattgtggtgatgaatgcacaattctgtgattatactaaaagctactgaattataaaaataaaaaattatctaggaatctmataatgcccatcacatcccaattgtttcaaatacttatttaacttatcttcatcactagtaatacaatcagaatcacataagggagaatcacaaaaagaa

SEQ ID NO: 444283 - DNA, 201 bp, Homo sapiens
agagttggtaaccctgccggtacctggagctgcccaccccgtggcagcagccggtgtatctgaatgtgcaggggccagaccccttgctcactcacacaccmcttgctgctccatgcctgactcccatctcccttggaggcatgacacctaggccagtaccatgagctgagtgcagcctgccaggccgagtgggtagaacga

SEQ ID NO: 444284 - DNA, 201 bp, Homo sapiens
ggtgaggctgaagtcagctcagcatttgcctgcaggtatcccttggcacctgcagtctgggcaccatgaatgtcagcaggaggtagacagttcctgggtgkaagtggctggctccccagtgaggcttcgccttcaggccagggagggcctgatggctgccagtgccacagacaggaatgggaacttgtagtgccttttcga

SEQ ID NO: 444285 - DNA, 201 bp, Homo sapiens
tttccagcttccccaagaccaaattatcagcctaaatattttttgtacttttcagcccaaatattttctatacaaaatattttctgtccttttctaattaygtttacatgtaattatttacatctaattacatttgcatctattttcaggctcattctatcagaaacacttgtagaaaagatacaatgtatattttttaaa

SEQ ID NO: 444286 - DNA, 201 bp, Homo sapiens
ctctggagaaatcagggaagaggttgggactgaagatataaatttagtagtcattagcatatagatggtatttaaagctgttatatttggacacaattacstaggcaaagaaaaagagagagaaaatgttgagccagtacagcatttactgactataaagaagaatccatcaaataatcagaggaggtacctgagacagaa

SEQ ID NO: 444287 - DNA, 201 bp, Homo sapiens
gcccctctgcccccctgccagtctgtgaagcccttttcttagcagcactttgagtaatatacggtggatgctttacaactgtgcaaccatagatagaagamagcaaggcaagaccagatcttgactgtgcagacccacatgtgctgaccacaagctttcctcctttcagttcaaggaactcctgtgacatctctgtagcct

SEQ ID NO: 444288 - DNA, 201 bp, Homo sapiens
tctactatgtgaagaaggaatcaaggatcctgtttggttgtgctaggtttgagatacctgtaagggatccaagtggacatttcaagtacgtgattgattayataactctggagaaatcagggaagaggttgggactgaagatataaatttagtagtcattagcatatagatggtatttaaagctgttatatttggacacaa

SEQ ID NO: 444289 - DNA, 201 bp, Homo sapiens
atacacttcaaatttacacacgtcaccacgcgcaccatcaacacgcagcatgcacacacaaatacacacatcattcataccacacacactccatacatacwtgcacacacctatttgtaagttgcgatcagaagtccctgggatgccaccttcatgctgctttatgaagggtaagtctttgtaatttggtaaaggatcctg

SEQ ID NO: 444290 - DNA, 201 bp, Homo sapiens
tgccagagaccatggctccagcaaggcacaagccattccttttcttggacctcccacactcatatgtgatccccaaaacttcccatttctacattatcagyagagcaaatatctcaataggtctctgcatcacctgttccaccttctcctacaactgagaagtgagaagatgccagccctgcagtggggtctgatggtccc

SEQ ID NO: 444291 - DNA, 201 bp, Homo sapiens
tacacgcccccataaaagaaatcttagtttactcccagccacactgatgtcatctcacatacacaaatacacactcacacatgcacgcacatacacaccaytaactcagacacaaggccccaaactgagcttctcatttctgaaagcctgtctgcccacctcagataggcttaatgaatggtccatctggttaaatcaaaa

SEQ ID NO: 444292 - DNA, 201 bp, Homo sapiens
aggagaatagtcaagccaacagtaacatcagcaacagaaatgtataccctggagttctgcataggtattacatgtgaacaaaaaaatagatctaagcttcmtaagagtcaaatgaaaatgagaaacatggttaccagatacacaacattataaaataagaacatgctgttctttctagcaagttccagcttttctttattt

SEQ ID NO: 444293 - DNA, 201 bp, Homo sapiens
cctagctctattgtattagaacttggaaagagaaggagacaggcagggagggtggagcaaggggtagttagcaagctgaatcctcactataagagaaaggsaatagataataaataaaattgtataaaatatagcaatacaagcacattattagaagaaaagaatggaagtaaacagtagaagcaacttaagaagaaactt

SEQ ID NO: 444294 - DNA, 201 bp, Homo sapiens
cacctattgaaagggagaaagtgaatgaattaagccaaagctgatttgtcatttaaaacaaagcatgttattacactcaccttgccctgaatgatcctgtyggtcctaacacacaagagaggaagaaaggtaaggcttcggatatattcgttatctgctatccatccattagtgtccaataatgccgataagcaccacaat

SEQ ID NO: 444295 - DNA, 201 bp, Homo sapiens
atccgaaaatagagaaaatccatatggtattaaaatgctaataacatagaaacactcgcagtttgttaagtgaaacagcaatttacaaaagggtctatcayagtttcgttaaaaaatatacagacatgtttattttgtgcatagacaaggataaaagtatatgtaccaaaatgttaacaattattatttcttgtcgtgaga

SEQ ID NO: 444296 - DNA, 201 bp, Homo sapiens
gtttctttaggaagcaggtatttgtatcagcatcacagtatctgaagaaaatgtagaacaaatattagaagaaaatgtaaaatctcttgaggaaaatcaayagtactccttttatgagaatcaagatagaatctgctaactttattttcaatttttatccattaatttttgaaacacttaataagataattctccatgaaa

SEQ ID NO: 444297 - DNA, 201 bp, Homo sapiens
aagggcctgtggacctatgagcaggtagttaatgaacacaacctcggttcattaaaaacattttgtcctctaccacctgtatgatgaatgatgatcagctraatgtactcaagaagactagttacgttactttttcatgtatttcgccatgtagagagtccttagatgaaataagcttctttaactgaaatcaaccttatt

SEQ ID NO: 444298 - DNA, 201 bp, Homo sapiens
gaatactttattttcattacaataaaaacatcttactaagaaaagatcagtgcaaatgaaataataacaaagaattaagggcaactgatttaatttggttmaaaaatgggagaagagactaagggagaagcattagaaacccaaattcacaccctgcagccccagaagagcactgtagtattgaatttaatatagggaatt

SEQ ID NO: 444299 - DNA, 201 bp, Homo sapiens
atattagaagaaaatgtaaaatctcttgaggaaaatcaatagtactccttttatgagaatcaagatagaatctgctaactttattttcaatttttatccawtaatttttgaaacacttaataagataattctccatgaaagtcccaaagagatgcaaatataagggaaaataaaatagagtcaaaagctcttttgtccgaa

SEQ ID NO: 444300 - DNA, 201 bp, Homo sapiens
gtactccttttatgagaatcaagatagaatctgctaactttattttcaatttttatccattaatttttgaaacacttaataagataattctccatgaaagkcccaaagagatgcaaatataagggaaaataaaatagagtcaaaagctcttttgtccgaatcccagctctgccatttactagctaaatgaattgggaaaaa

SEQ ID NO: 444301 - DNA, 201 bp, Homo sapiens
tagtaccagtgaatcttttcagttggacgagataaagaaaagtgactaacagtctggtttttccattaaatcctgataggtttgtggtactcaaaattaaytgtgagtatggttcctggtacataccatggctgattggaattaaatagatgataaaaatcaccaagtttcactcttatttcatagccaaacagtcacact

SEQ ID NO: 444302 - DNA, 201 bp, Homo sapiens
gttgcagtgaggaaaaaataaaacaatgctagcaaagtatccagcaccatgactggcacatgggtagtttattacactcctaaattaatgaaatgttaatmcttccccttaggagcttactatttggcaaaagatgtcaacatttacataagaaatggccatccaaagcaggaagtgaggtaagagcaagttgcttgagaa

SEQ ID NO: 444303 - DNA, 201 bp, Homo sapiens
aagtcaaggaaatagatgtcccacccattgttaaagcatctgaacaaattaaggtagtaccagtgaatcttttcagttggacgagataaagaaaagtgactaacagtctggtttttccattaaatcctgataggtttgtggtactcaaaattaattgtgagtatggttcctggtacataccatggctgattggaattaaat

SEQ ID NO: 444304 - DNA, 201 bp, Homo sapiens
aacatttacataagaaatggccatccaaagcaggaagtgaggtaagagcaagttgcttgagaatgaaagaaaggagagattatttttagcttggagttagkgggtggacagtaaacacctaatatcattcaacatatttttgctcaaccctgattctgtgagggagcgttatgccttctggggtacagtagggggcagata

SEQ ID NO: 444305 - DNA, 201 bp, Homo sapiens
acttgggtgacagagcaaaactgtcacggaaaaaaaaaaaaatttagtttagttcataaagaccttaaccaaaaaacatactccatattcttaacattatyttcctaatattcataataccaatctccctggcatactacattctcccaaaaattgtaaatgtttatacatagccattcataaaatgtcaaatagtctgtc

SEQ ID NO: 444306 - DNA, 201 bp, Homo sapiens
gttcagtgaagtgtttcagaaaaggctttttttgaggtgacattttagttaagagctagatgaagagggcagccatcttggagacatgtcagaggtaaaayggaaggtgttatcagaagtaaataaccctggttaaagtggaaaacccaatagatataaatattttactacatttataggttttcctaggtcactaagaaa

SEQ ID NO: 444307 - DNA, 201 bp, Homo sapiens
cagcatatcaaaaagatatcacaccatgttctagtgggtttcataccagggatggagggatggtttaacatacgcaagtcaacaaatgtgctacatcacayagacaattagaaacaaatatatgatcatctgaatacatgcagaaaaagcatttgacaaaatctagcatcactttatgattaaaaacctcagcgaaactgg

SEQ ID NO: 444308 - DNA, 201 bp, Homo sapiens
aagatcagagtagaactaaaacaaattgaaacaaaaaaatacaaaaaaaataaataaaacaaaaagctgattctttgaaaagataaacacaataaagaaaycattagtaaggttaaccaagaaaagaagagagaagatccaaataagctcaattagaaatgaaacaggagatattacaactgacaccatagaaattcaaaa

SEQ ID NO: 444309 - DNA, 201 bp, Homo sapiens
caggtgtctgcagaactgtgtttctcaaggtgaacagcaatgttaagtagtgtaggtgtcaaatgccccttttggagctgcagctgaaatcatagaatccygactcatacataccgattaactctccactggcttctggacaccaggaaaataaagtgcatttagaatcacagaaaagaacaatgaccaaagaaaatcttc

SEQ ID NO: 444310 - DNA, 201 bp, Homo sapiens
aagccagcactacaagaaatgctaaaaggagttctaaatcttgaaataaaacctcaaaatacaccaaaatagaacctccgtgaaacataaatctcacaggrcctataaaacaataacacaatgagaaaaaaatacaaggtacttaggcaacaacatgatgaatagaacagtacctcacatctcaaaactaacattgaattg

SEQ ID NO: 444311 - DNA, 201 bp, Homo sapiens
cttctggacaccaggaaaataaagtgcatttagaatcacagaaaagaacaatgaccaaagaaaatcttcagagatctatgtatccttcccctaatctcagwcaaaattattcaagacatatccagatctggctgctttgaaaatgtaatccctccctcagtagccactttgaagttaggaagttcttccttgggtataaac

SEQ ID NO: 444312 - DNA, 201 bp, Homo sapiens
aaaaagggtgatggaaaagataaaatagggtaatgtggtagagagaaggcttcttcagccaaggcaaaggtcctcaaagatgtctctaaggaggtaacacrtaagtcataaactaaataatgagtggcagacttgtgaagatctgggcaactgtattccaggcagagggaacagtaaggaaaagagcttctgaggcaggaa

SEQ ID NO: 444313 - DNA, 201 bp, Homo sapiens
taagagctatagaaaagtacagaaaataaaaacactatatagcaatatcagtgggctgtattcaaagcaatattcacaaggaaacataaaaccatcagtgrttttaccagtaaacagaaaatactgaagacaaatgaactaaacatggaagaagctagtaaaaataccaacaagataatccaacataaggtaagaagtagg

SEQ ID NO: 444314 - DNA, 201 bp, Homo sapiens
atcacagtagaaagttatttccaccatgagagctcagaaaactgaagagtatcttttgaaaaacaaaaattttgtttaaaaaaaaaaggagatgccttctyaggaagccaaaaatgtcttcttcatctcctcagaaaaggattccatgggaagctttttcttagaaccctagctttcaacttcccatctaattgtgcttca

SEQ ID NO: 444315 - DNA, 201 bp, Homo sapiens
aatttacacagctactaagtggcagagctgcaacttgaagtcctggaatacaaagcctgcaccaactatccgccctccccctctgccaagaactcttcaarccctcacatgttaacctgttaagcatctgataaaggatagattcttctggtgttaactacagttagatctctgtgccaaagccaaagtccttctctttac

SEQ ID NO: 444316 - DNA, 201 bp, Homo sapiens
cagaaatgcaagtgtttcacaactaattccaaaggatgtcaaagaagagtttttttaaattctctaggagaattccattgagcttaaatgattttatgcawaaatattaatgaaattgtgaatttatactaaaaaagtaaaggttaatggctacattagctgttttttcatttctcaaacactaggcaatccaaaatctaa

SEQ ID NO: 444317 - DNA, 201 bp, Homo sapiens
gaactcttcaagccctcacatgttaacctgttaagcatctgataaaggatagattcttctggtgttaactacagttagatctctgtgccaaagccaaagtycttctctttaccctttgccctagtcttcccactcacctagtgtcaagtcattaaactctgtctactatctccccgaacttttctaaaaacattaaaatat

SEQ ID NO: 444318 - DNA, 201 bp, Homo sapiens
acaataagatataaataaaacaaagcaagataaaaagtgagaggatgaagttaaagtgcagtttttattacttttcatttgcttgtttgtttatgtactcrgtgttaagttgtgatcagcttaaaataatgcgttggccaggcacggtggctcacgcctgtaatcccagcactttgggaggccaaggcaggtggatcacga

SEQ ID NO: 444319 - DNA, 201 bp, Homo sapiens
aattgtggtcagtaaactacttataatttaagtagaaagacaaaaacatgaaccaagcaaaactaataactataacaacttttcaaaacagaaacagtacrataagatataaataaaacaaagcaagataaaaagtgagaggatgaagttaaagtgcagtttttattacttttcatttgcttgtttgtttatgtactcggt

SEQ ID NO: 444320 - DNA, 201 bp, Homo sapiens
taatcctcacaacagcctttgatgataaatattattatcaccattttaccaacgagtaggatgaaacttacaggcatgaaatagcttccttcacttatatkgtccaagggaggcagaagcagattcagtctgagggcacacagtctctcaaccaatacgtcttgcaaacctactttgttctaggccctgggctaaaccctg

SEQ ID NO: 444321 - DNA, 201 bp, Homo sapiens
ccaatatgaagaaactccatctctactaaaaatacaaaattagctaggcgtggtggtgcatgcctgtaatcccagctactcggcgtgggggctgaggcagragaatcacttaaacccaggaggcagaggttgtggtgagccgagatcatgtcgctgcactccagcctgggcaacaagagcaaaactccatctcaaaaaaaa

SEQ ID NO: 444322 - DNA, 201 bp, Homo sapiens
tgctcatcacgtccttctttcacattttgtgtactaacaacatagaattctacatatttttcccaaattaatttttaaaggcccacatgataaattccatyttcactgcttgggatacccatctcatgattgcctggtttatttgctgtcatcctacataatccagcttaatatctcctccttccaggaaggcttgctttg

SEQ ID NO: 444323 - DNA, 201 bp, Homo sapiens
tgaatcaagataaactcaagacactgaatatataatactcagaaagagataaattattccatattcccaaagctgagagctgagtacccagaatcaaatcrgagcagaactaaaagagacaaatgagccagcaatggttttttttatcacgtcctcttcaaactcatcatgtatatctactaactatttctacagggccaa

SEQ ID NO: 444324 - DNA, 201 bp, Homo sapiens
gatgggcctgaactcaagaagcaactattctaagctagactgagccttggcgtctccgcagcctgggaagctcggatagaggtaaggaacggaatgggagrtttcttttgtcccttgagaaatccatattcaacattcttaaccagacgaaagccgctgcctgctcagtcctggggaagtgggaagggccctctgaaagct

SEQ ID NO: 444325 - DNA, 201 bp, Homo sapiens
gtgcaaattcaccctgaaagctgataccacttaagggtacacagaccaacagctccagtttttagctcaagattcatctgtgaacaatgctggagtaaaarggcacaaaatgaattcattttctctttttaacaaatacataatcatgttttgaatgctggaaatagctaaggagcattcccacctcttgttggtttgaat

SEQ ID NO: 444326 - DNA, 201 bp, Homo sapiens
taccagctgttgaatactgtgaatattttgcaaataactgctacccaaaacagatcataatccagtagatagcctacatattgacaatgaaatatttcagyaatgtttcctaaagtctcctggtccattgagaattgttactaaggaaaggaaaacaatcttattctgattgcttgagagaaagtcaatgtttggtagcct

SEQ ID NO: 444327 - DNA, 201 bp, Homo sapiens
gtggtgatgacacggttggaagggatgagtttgctcaaacagagagttatttaaactctggatattcacagtaatttttacgtgtaggcctacaagagatytttacagtgtatcaggcagaatccatttcagaaatacatgaggtttattttctacaaacaataatgcagctaattttattcatgtagcattttatttaca

SEQ ID NO: 444328 - DNA, 201 bp, Homo sapiens
tttatttgctgtcatcctacataatccagcttaatatctcctccttccaggaaggcttgctttgttccttcttcctttctacattaatctctcctccttcrtgactatttaagaaacttgtctatttttatatttttgtccttatcaccttaaaagagaatctataatttaacatgtatacatcacccattggacttctgc

SEQ ID NO: 444329 - DNA, 201 bp, Homo sapiens
ttgagggcaagtcaagagttcatttattgaaaaggtaactccggaatgctcatttgatattcaggcagaattgtcaagttgcctcttagattcagaaggtkggatcctaagggggagttgaagactagatacaaaaattctgaagtcatcagcatgtagagtatttaaaatttgggcctacctgagatgactagggtatag

SEQ ID NO: 444330 - DNA, 201 bp, Homo sapiens
attatttcattcaacaaatgtttattgagcactgctttgtgccaggtaatgttctaagtagtcaaggtatagtagagaacaaaaggaaaaaggcccctgcyctcaagagtttacattctagtggaaagagacagataaaagaatcatttatacataagaaaattccagataataatatgtattactcagagaactaaaatc

SEQ ID NO: 444331 - DNA, 201 bp, Homo sapiens
ccaaactgagaacagagagatttgagggcaagtcaagagttcatttattgaaaaggtaactccggaatgctcatttgatattcaggcagaattgtcaagtkgcctcttagattcagaaggttggatcctaagggggagttgaagactagatacaaaaattctgaagtcatcagcatgtagagtatttaaaatttgggccta

SEQ ID NO: 444332 - DNA, 201 bp, Homo sapiens
ggaaacgcacacacacacacacacacacacacacacacacgcaggcacacacatcttccttgacaaagaaacccacattttgtttagatgtaagttatccragtactacaaaagaagctgggatctgcccaagcctcaggggataaatcttgattctatttatctttctaaggtatattttatgaataggtaggtcaaact

SEQ ID NO: 444333 - DNA, 201 bp, Homo sapiens
agtctgaggaataaatatgtatatttttgttaatcttctaaagcaagcaggaggcaaacatggcttgaccttgagaaactcttcctggaagtctggtttcrtggaaccaggctcagctagtgggttattaaatgtatatgaaatcaatttattggatcacagtcaacacttgcacaaaaatgaaacatagtagactagacc

SEQ ID NO: 444334 - DNA, 201 bp, Homo sapiens
tttaatttgcatttctttttattaatcctaagcttgaaacatgttttcaaagctgttaatatactctaacaattgtggatctacacatacatggaaacgcrcacacacacacacacacacacacacacacacgcaggcacacacatcttccttgacaaagaaacccacattttgtttagatgtaagttatccaagtactac

SEQ ID NO: 444335 - DNA, 201 bp, Homo sapiens
tattttttattattattggttatagtcaacaaaattaaaatctactcttgtaggagataccacatcttgaagaggacaaatgggtgtatgccctccaatcycagggcatacaccaactaaactcataaactcagaatcacagagcatctgatttagaaggaaccatagatgccatttaattttgtctcacagatggggaaa

SEQ ID NO: 444336 - DNA, 201 bp, Homo sapiens
aggtcctcaaagatgtctctaaggaggtaacacataagtcataaactaaataatgagtggcagacttgtgaagatctgggcaactgtattccaggcagagrgaacagtaaggaaaagagcttctgaggcaggaacaagcttggagtatcatggtctggactgtcattcagcaaatatattccctccctactcccactgtgg

SEQ ID NO: 444337 - DNA, 201 bp, Homo sapiens
aaagagtctgccctgagtatgtgctgccccatcattctgggctccagaaggaccacctatggagcagatttgagcttaaactactataaagagccaagccsgacaacttgaagctgaactcccagtcaagctcagcctagattagctgattccgtcaacttgcagtcctataaaagagagaataaatgcttaccaatgtat

SEQ ID NO: 444338 - DNA, 201 bp, Homo sapiens
aagagtctgccctgagtatgtgctgccccatcattctgggctccagaaggaccacctatggagcagatttgagcttaaactactataaagagccaagccgracaacttgaagctgaactcccagtcaagctcagcctagattagctgattccgtcaacttgcagtcctataaaagagagaataaatgcttaccaatgtatg

SEQ ID NO: 444339 - DNA, 201 bp, Homo sapiens
agacttagattcctgagatgacgcacaaaacacgagaggttatgcttggacagaatgatgcaagaatagatgttttatggttattagcaatactgtagttycattggtattcacgggtttgtgaatcctggtgacactgagtctcacaacaaaccattagcagcattaagtagaagtgtacagcatttcaatgtgatcttc

SEQ ID NO: 444340 - DNA, 201 bp, Homo sapiens
tggtgatttagagaggattctatcagccctggcaatgacaaacctcctccagcagcttcttgaactggccagagttgagaagagagaacaacctgcccagwggtggatgaagctgtcggactgagtggtgagatgccctagaaggaaccccagaaagacttagattcctgagatgacgcacaaaacacgagaggttatgct

SEQ ID NO: 444341 - DNA, 201 bp, Homo sapiens
gtggtgtaattggagtaagagtccttctggacccaggaacactctgctcccccagagggctggattctggtcaaagtggggaggacacctctgtctccaamagtatctctaaagacctgcatctctggaggccaatcaggcgcagcaccctggacagaggtggtgatttagagaggattctatcagccctggcaatgacaa

SEQ ID NO: 444342 - DNA, 201 bp, Homo sapiens
acacaggagacaggatagttccttaagagattctgtggattctgggcaaagcagggatagagtccaggaaacaaagtgtggtgtaattggagtaagagtcyttctggacccaggaacactctgctcccccagagggctggattctggtcaaagtggggaggacacctctgtctccaacagtatctctaaagacctgcatct

SEQ ID NO: 444343 - DNA, 201 bp, Homo sapiens
ttggagagggttcatccgtaaccgcagacgtgctcagtgtacaaagagcttttgtattccaacagcctttgtttctgggacaggcttttatctaaaagaargaccacgtgtgttctctcatctctcctgtctccctcgcaataccccacaatccctgccttcagcacaacacctgaaccgtgtttactttgtcttttaatg

SEQ ID NO: 444344 - DNA, 201 bp, Homo sapiens
aatctcagctctgctacttaatgactgtgaacttactcatgtttttatgtgttatctgtcatactgtttctcctttagttaaaaaaaaaaaaagactggcwtaagaattaaataagaccggttgggtgaggtggctgacgcctgtaatcccagcactttgggaggctgaggcaggcggatcacaaggtcaggagtttgaga

SEQ ID NO: 444345 - DNA, 201 bp, Homo sapiens
tttgggaggccgaggcgggcggatcacgaggtcaggagatcgagaccatcctggctaacacggtgaaaccccatctctactaaaaatgcaaaaattagccrggcatggtggcgggcgcctgtagtcccaactactcgggaggctgaggcaggagaatggcgtgaacccgggaggtggagcttgcagtgagccgagatcgca

SEQ ID NO: 444346 - DNA, 201 bp, Homo sapiens
caaccagaaaacaattaacaaaataagaggagtaagtactcatctatcaatataaacctcaaatattaatggttttgatttcccagttaaaatatatggaygggctgaatggattttttgtaagacccaactacctgaagttcataagaagctaatattgcctgtaaaaacacacaccatctaaaagtaaagggataaaaa

SEQ ID NO: 444347 - DNA, 201 bp, Homo sapiens
agcactttgggaggctgaggcgggtggatcacctgaggtcaggagtttgaggccagcctgaccaacatcaaatctgtctctactaaaactacaaaaccctrtctctactaaaaatacaaaaattagccaggtgtggtggcaggcacctgtaatcccagctacttgggaggctgaggcaggagaatcacttgaacccgggag

SEQ ID NO: 444348 - DNA, 201 bp, Homo sapiens
tcaaacttacaatcagatactgcacttcctctctcctgctttgttttgtcttgttatgttgtttcttttcttttcttttcttttttttttttgacaggctstcactgtcactcaggctggagtgcagtggcatgatctcggatcactgcagcttcgacatcctgggctcaagcaatcctcccatgtcagcctcctgagtag

SEQ ID NO: 444349 - DNA, 201 bp, Homo sapiens
ccatactccctctggaagctctaggggagactgtttccttgcctttttcagcttcccttgggtcgtgtcttcttcctccatctccaacacaagcagcataraatcttatgatctctctctgcttccatcttcacatcacttttctatccgatcctcatgtctttctcttatgagaacccttgtgattacacaggccccacc

SEQ ID NO: 444350 - DNA, 201 bp, Homo sapiens
gcttgtaatcccagcactttgggaggctgaggcgggtggatcacctgaggtcaggagtttgaggccagcctgaccaacatcaaatctgtctctactaaaamtacaaaaccctgtctctactaaaaatacaaaaattagccaggtgtggtggcaggcacctgtaatcccagctacttgggaggctgaggcaggagaatcact

SEQ ID NO: 444351 - DNA, 201 bp, Homo sapiens
aacagacccttccctcacagccctcagaaggaaccaactccaccaataccttgattttggactcctagcatccaaaaatggaaagaaaaaattctgttttytaagccacctagtcaacagtactttgctagagcagcccttgcaaactaatacaagataagaacagaaaagaggctgggcgcagtggctcatgtctgtaat

SEQ ID NO: 444352 - DNA, 201 bp, Homo sapiens
atatactagtccccaagagaccagatcagatcaaaccaaaatgaagtcactcatactaaatataacataatcaaactaaaaatttgaaaaaaaaaaaaagrgagagagagagatcccaaaacagaccagatgtttttttctctcctgaaaacaggagattccagcataaaagggacccctctactctaacctctattaaaa

SEQ ID NO: 444353 - DNA, 201 bp, Homo sapiens
ctcaaggaatcaagcggatcatctctttgtcccttaggcaccatacaactacagttaatagtgctttatgtccccagagtcctctgaaagatgaaaaatgwaactatttttaacccctggagttgctgtacttaccatatttcaaatcctttgcaaaaaagtgggtaaagatattgacaaattctcatggctttcttcaag

SEQ ID NO: 444354 - DNA, 201 bp, Homo sapiens
cctcacagccctcagaaggaaccaactccaccaataccttgattttggactcctagcatccaaaaatggaaagaaaaaattctgttttctaagccacctastcaacagtactttgctagagcagcccttgcaaactaatacaagataagaacagaaaagaggctgggcgcagtggctcatgtctgtaatcccagcactttg

SEQ ID NO: 444355 - DNA, 201 bp, Homo sapiens
ttctaggtaagaatttttttttctcctgaatttcttcaagaatttttatctttggttttctgcagttcgaataggatatgcctctgtgtgtgtgtgtgtgwgagagagagagagagagagagagagggatttggcaatttggcatttatcctgcttggttttctctgagcttcctgaatacatggtttgttgtctgacatt

SEQ ID NO: 444356 - DNA, 201 bp, Homo sapiens
tcccatgatctaccatcaatttacttaattaattattcactttctgtatacacgtatagtggttttaatatcattaaccaataccctcaggtaaacaactktatcaactcaagtgaagtgtctatatacagttccttccgcctttagtcctacatacgccattaatttccaaagttccggaagtcagctcctatttcccca

SEQ ID NO: 444357 - DNA, 201 bp, Homo sapiens
accctcataggcaactagtgttggcgtcccatgtatttgtacaaagttttttatgataaactcttttacaatagttttatatttgcagaaaattacaaaartagagtttccacatagcccacacccagtctgccctattaagaaccaatattaatagattattaaccaagtctatattttatttagattttcttagttttc

SEQ ID NO: 444358 - DNA, 201 bp, Homo sapiens
atcttaagactaaggtataactttggatctccaggaactcaaaattaagatgtttatgaatagcaagatttaggaaataggcactaaatatatagtggtgkttgtagttgtagtggtaatggtaattgtactaatgaccaaaacatatgtagcactttctatacttgtttctaaattttatctaaaatgcttaaagaagaa

SEQ ID NO: 444359 - DNA, 201 bp, Homo sapiens
aacacactgtaacttttcattaatgtaaccctctctctttttttctcctgaaccatggcaggttacttcatttatagcacatggttttgtgaactggtggmcctacaagtaagtaatgttaataagaccctcagtaccattaaaccaactctttcatcctgtttctggtcaagtcccctcaatgtccccacagtgactacc

SEQ ID NO: 444360 - DNA, 201 bp, Homo sapiens
aggaacctccaaactgagaacagagagatttgagggcaagtcaagagttcatttattgaaaaggtaactccggaatgctcatttgatattcaggcagaatkgtcaagttgcctcttagattcagaaggttggatcctaagggggagttgaagactagatacaaaaattctgaagtcatcagcatgtagagtatttaaaatt

SEQ ID NO: 444361 - DNA, 201 bp, Homo sapiens
tatagggaatttccattctggaccctaagaaatatcttacagtaataaagtaggtttcttgaggacaaagtacaacagcatctatatcctaattcagaaaygcaaaggagcccaagcttcagtggctttagattataagacaaaagttagaataagaaaactagttgtctgagagttgtaagcagcttatataaatatccg

SEQ ID NO: 444362 - DNA, 201 bp, Homo sapiens
ctttgcaagcaaacaaaagctaagaaaattagtcatcaacacacttaaagaacactgaaagtttatggaagttcttcacacagaataaatttggatctacracaaaaagattaaagagttctagaaatagtaaatatgtgagtaaatacaaaacacactgttatggactaaatatctgtgttctcccaaattcatgtgttg

SEQ ID NO: 444363 - DNA, 201 bp, Homo sapiens
caggacctgagctctagaattgagttccaaactgctgcacagtgcatcctatgaatcaggaacttgcagcaaatatgtcctgaggttctactctgctagaygctggcaatatcaagatgactaaggcatggcttctgtccttgaggtgttcacagcttaatacaggagagaaacacatgaatgtcagtgcaatgtggtaag

SEQ ID NO: 444364 - DNA, 201 bp, Homo sapiens
caaccaaacttgggtaattaagtaacttttaagaataattttatttcatagggaagaaaagcagtctctgaagcctccattggttccaaacattttagcayttgtcaggttaaatcaaaatatgtgtcactctctttcagtctacatttaatcattatattacattaatcagtctacatttaataaatataatttaaaatg

SEQ ID NO: 444365 - DNA, 201 bp, Homo sapiens
taaatgaggatgcctggagcagtgtgtgtctcataccaaagacctgttctgtacatatatttctgagaagttgtaggtaaatcaaatttttgcaagtccarttgaaattgaaatgcatagggagagctagctatttagggatatcccatagtgagatctattgtaaagtgaattcaatatattaatagagcaactcaaact

SEQ ID NO: 444366 - DNA, 201 bp, Homo sapiens
ctagggctcatacaaaatccaccagagaagcaaaacaaaacaaaaaagtccctcaaaactagaatggtcttgtgattgcaagggatttggtctttcagtcrtcctactctacttagatgttatgttagtcctgaaaaacaaatgcatgtgttttcatagaaagtaggcaggcccctgaaattttcatatttttaaaaataa

SEQ ID NO: 444367 - DNA, 201 bp, Homo sapiens
aaattatgaaattaattatttgaatgcagcctcagaagaaaagcctccttgtaatctggctccaggtattttataatactccatatatttggataattgtytccaggaaaaaacccaggttttggaattgtaaagttctgagactaaatctaacacttaatagttttctgaattgctgaaccaatcccagtctcaggtcca

SEQ ID NO: 444368 - DNA, 201 bp, Homo sapiens
attttaatattctacctacaagaagtataccttagattcgttcattattcctaataaaaatctaaaataaattataaactgttaatagatatgaatacttrattttttgccatatccctgcctagtatctttcagaatataccacattaaaaatggcatcatcctcaaatgagtagggtgatagaaaaacacagcctgagg

SEQ ID NO: 444369 - DNA, 201 bp, Homo sapiens
caaaaggctgtttctccattgaattgtgttaataactttgtcaaaaccaatttgttatatttgtatttgtctgtttctggggtctctattctgttctattsatctttgtgtctattcccctgccaatactacgctgtcttgaatatagtatctataaagaaatccttaatattcaattcaaaattattcaattcaaatttc

SEQ ID NO: 444370 - DNA, 201 bp, Homo sapiens
cccatctgagtaaattatttaacttctttaagggctatagtagttcctgtctcataagatcatttgaaaaataaatgagataaccttcataagtccctgamcacacagttagtattcacatgatttaatttatactttttacgaagatcactctggctgcattagattggatgagtagaaggagagatatggagagcagaa

SEQ ID NO: 444371 - DNA, 201 bp, Homo sapiens
agatcttgtcaaagactgatcttaggccaggtctggtggctcacgcctgtaatcccagcactttaggaggatcacttgagcataggtgtttgagacaagcytaagcaaacataatggaaccccatgtctctgcaagaaaacaattaaaaattatccaggctgaggtgggagaatcacttgagcccaggagttcaaggcagt

SEQ ID NO: 444372 - DNA, 201 bp, Homo sapiens
gttttctctctctatcccatgtagcaatcagaaaatcaggaagatccttttcaaacttaaatcacattacctcaatcccttacttaaagtcctcaaagagytgctttattagtttcttatggctgttgtgacaaattactgcaaccctagaggcttaaggcaacacaattttattatattacagttctggaggtcagatgt

SEQ ID NO: 444373 - DNA, 201 bp, Homo sapiens
gatgttattctgactgtattaaacattaatgtccccccttaaaatgaatcactggaaatgccacttgctccttgagctcacggcctgttgctatctggctrcaggatctttctcaaccaatttcccacctcaaacccttccaaatgagagccataactgagggctaaaatgataatcctcatttactgaagcttttttaaa

SEQ ID NO: 444374 - DNA, 201 bp, Homo sapiens
ctggaaagacccctctgtccagtgcagatctggctacaatgtgtgccaaataaataatacaggagcctctcaccttgctatcagaaggaggggaaaaattmttttccacagcagccaggagtcatgaagcaatgtcagtccctgatgaaccagcaggaactaagtgatgaatagctaccctcatgctcaccaccaccccac

SEQ ID NO: 444375 - DNA, 201 bp, Homo sapiens
aaagagagagagagagatcccaaaacagaccagatgtttttttctctcctgaaaacaggagattccagcataaaagggacccctctactctaacctctatwaaaaaaaaaaaaaaactgaagcccctatacacacatgttctactatttcccagtgatatttgagaccaactaaatatatttacaataatgacagagtcac

SEQ ID NO: 444376 - DNA, 201 bp, Homo sapiens
catgactcagtacttggggagggggaccctctgcattgcagaagcctgcacttggggagatggagggggcttagtaagcttcaaatatgtaatttcttctstccagttgagcccaaggagagagccggggggaagctagaggggtctttccagaaacaactgtgcaggttgtttctggaaagacccctctgtccagtgcag

SEQ ID NO: 444377 - DNA, 201 bp, Homo sapiens
tattggggtcccagaggtcagtggtgagggacatgactcagtacttggggagggggaccctctgcattgcagaagcctgcacttggggagatggagggggyttagtaagcttcaaatatgtaatttcttctctccagttgagcccaaggagagagccggggggaagctagaggggtctttccagaaacaactgtgcaggtt

SEQ ID NO: 444378 - DNA, 201 bp, Homo sapiens
ctaagtaaattaggatatatacaccccatggaaaattatatattgtaatataatgatatgaaaggcattgaaataacataggaaatgtccagccaatactmtgaaacaggtatacaatagtacatacagcatcataccaagtctatggtaacataaaatttattttgtgatgcatagcagatagataggcatggccttcaa

SEQ ID NO: 444379 - DNA, 201 bp, Homo sapiens
attaaacatcagcaaaaaaaaaaaaaaaaaaaaaaaagtgctgggtgaagggaggagattggagaaggaaagaaattaaatgaggtaaacacacactcttytctgcctcaaatagaagcaacttcatttccctcttccctgatgtatagagtgaggatggtggtgaatttcattgtcaacaagcatataccttgcttcccc

SEQ ID NO: 444380 - DNA, 201 bp, Homo sapiens
caggataagacggctctacctagtcatttttaaagaaagactaaaaatgctaatatgatgattaaacatcagcaaaaaaaaaaaaaaaaaaaaaaaagtgytgggtgaagggaggagattggagaaggaaagaaattaaatgaggtaaacacacactcttctctgcctcaaatagaagcaacttcatttccctcttccctg

SEQ ID NO: 444381 - DNA, 201 bp, Homo sapiens
tcactctggaaagaaatgctacagttgttcatgctgaagctctttttttttttttttaaacggagtctcactctgttgcccaggctgtagtggcaccatcytggctcactgcaacctccacctcccatgttcaagccattcttctggctcagcctcctgagtagctgggattacaggcaccccaccaccatgcctggttaa

SEQ ID NO: 444382 - DNA, 201 bp, Homo sapiens
aatgaataacacaggaactgggtgggctggtgcttcccactgctcacactcaatcctacatgtgttaacctactccatctctttcccctgtttcctcctaratattttaaacatgattcaagtatttgaatttagtctgtccgtgaggctttccattttgtaaccctgggggtgtacttggaggctaccattgcataaagg

SEQ ID NO: 444383 - DNA, 201 bp, Homo sapiens
tccctccccacggcccccccaaaaaaagggtgaaaaatggcctaaaaggaacaaatgaggaggcaagaaaagtcatttaatgaatgattgtcatgtgccargaatatggcaagtgctttcatagacatcatctttttaatttctttaaggtagatttcattatccctattttatagatgatcaaagatattaagtatcttg

SEQ ID NO: 444384 - DNA, 201 bp, Homo sapiens
tgagatcactttgagttttgcagatgactagctgtgtgactttggataaagtaccttacctctctgaacctcacactctacatctgaaaattaagaccacwaaattccatgatctccaagttctttcctagtcttgacatttcatttcagttaatcacttgatcctgctcatagctgcatagcaaaagagagcactgagag

SEQ ID NO: 444385 - DNA, 201 bp, Homo sapiens
caccactgcactcactccagcctgggtgacagagcaagactccatctcaaaagaaaaaaaaaaaaaaacaggaatgaactggccaccttataaatgaaaaygaaaggaaatagagtccagaaattccagagcttgtagtatcaaaagcaacaacgttttctcatctccagcaataaaagataaacctgaaaaaggctttgg

SEQ ID NO: 444386 - DNA, 201 bp, Homo sapiens
agaagatgttacagactattggccattcattaattcattcaatatgtctttactgaacacataatgaaaaactaaaaaggggtttaaaatatatatcccaygtctgaaggtgctttgtgaactagtgaagaaggaagtaaaatatgtccctccccacggcccccccaaaaaaagggtgaaaaatggcctaaaaggaacaaa

SEQ ID NO: 444387 - DNA, 201 bp, Homo sapiens
tctatgaggaatgaaatgaatatatcaggaaactcagcgtctattgtgcctgaatcccaaaagtcatgccaaagaacaaatacatatttcttgctcatctktcacagatctttccaaagtaaacagtgaagggcaagcagagagtcaagaccagcctctgacccacctcatttgcaccagtacaaagaatcatgcccaagg

SEQ ID NO: 444388 - DNA, 201 bp, Homo sapiens
acagtctggtttttccattaaatcctgataggtttgtggtactcaaaattaattgtgagtatggttcctggtacataccatggctgattggaattaaatasatgataaaaatcaccaagtttcactcttatttcatagccaaacagtcacactatcttagactaaaagagtcaatgattgtttaggaaataaaataatcct

SEQ ID NO: 444389 - DNA, 201 bp, Homo sapiens
aatgggaatgcaataattttaaagtctttttattgccaacttattggctcaaaataatactattaaaaatgagaatcattacataacgttaggcagaaaamaatcgcacaagaaacaaaactgatattaatataactaaggatgcataattaagaatagaaaataacagtaattaaaagccataagcaacttaaaacactt

SEQ ID NO: 444390 - DNA, 201 bp, Homo sapiens
tgcaataattttaaagtctttttattgccaacttattggctcaaaataatactattaaaaatgagaatcattacataacgttaggcagaaaaaaatcgcasaagaaacaaaactgatattaatataactaaggatgcataattaagaatagaaaataacagtaattaaaagccataagcaacttaaaacacttttaatgtt

SEQ ID NO: 444391 - DNA, 201 bp, Homo sapiens
acatgcacttatttaagcaaagtattcattttatggaattttaatattctacctacaagaagtataccttagattcgttcattattcctaataaaaatctwaaataaattataaactgttaatagatatgaatacttgattttttgccatatccctgcctagtatctttcagaatataccacattaaaaatggcatcatcc

SEQ ID NO: 444392 - DNA, 201 bp, Homo sapiens
aaaatgagaatcattacataacgttaggcagaaaaaaatcgcacaagaaacaaaactgatattaatataactaaggatgcataattaagaatagaaaatamcagtaattaaaagccataagcaacttaaaacacttttaatgtttgggtaacaaagcatcctttccccaaattctaagaataaattctaagaattttgtct

SEQ ID NO: 444393 - DNA, 201 bp, Homo sapiens
gtttgcccactagaccccaaagattgtttcctagctttaagcagtctaggaggctgagtcaaaatcattttctacctcatctagttacatgtgcaaaaacrgcctatgcttcagaaagatatgaaaaattcctcatctacacatgcacttatttaagcaaagtattcattttatggaattttaatattctacctacaagaa

SEQ ID NO: 444394 - DNA, 201 bp, Homo sapiens
aaaaatcgcacaagaaacaaaactgatattaatataactaaggatgcataattaagaatagaaaataacagtaattaaaagccataagcaacttaaaacasttttaatgtttgggtaacaaagcatcctttccccaaattctaagaataaattctaagaattttgtctgtgtcagttgagtttttcaacatggccagacca

SEQ ID NO: 444395 - DNA, 201 bp, Homo sapiens
taaaagccataagcaacttaaaacacttttaatgtttgggtaacaaagcatcctttccccaaattctaagaataaattctaagaattttgtctgtgtcagytgagtttttcaacatggccagaccattgatggtagcaaaatatcctgtggaataataaactgaatcttcaataaacttgaagagaattggtgaattttat

SEQ ID NO: 444396 - DNA, 201 bp, Homo sapiens
ccagagcaactatgctttcatcacccacaaattcaggagttccaagggattctcattcacctattgcagcggttcaccatctaatcacaccccatgctccytgttacgagcactttgtaataccttctttagcaccctgaaacaacattttaatataaacttcctatatacataatcttgaaaaatcatcataaaccttaa

SEQ ID NO: 444397 - DNA, 201 bp, Homo sapiens
gccatgcagaaaggcccagacaccaaacaaacaagaagatcccatctattggtgttaatgcggttactggctcacaaacccactcagaatgcagaattgaygggaaacagctaagaaaataggatatttcttttggaaatgaaagaaggtcagaattacgctgctactaattttagacagcaattcagtaaatttaagtct

SEQ ID NO: 444398 - DNA, 201 bp, Homo sapiens
tgcaactgcaggacaataaatatataattgtattagagccacaaataacacaagtagcactgtcagcagtgtataattttcctaggtaaaacattattgaytcattgagttcccataaaattttgagataggtactattgctatctccaatttacagctgaggaaactgagacacagagtggctgagtaccttgtcttaag

SEQ ID NO: 444399 - DNA, 201 bp, Homo sapiens
tcactattctgatgcccaaagacacatccaaacagagactgaatctaaagtgcctgtgcattgagcaggatccttatttattgactcttaattttcttagyacagcttaaaaccttccccttcataacataaatacctaaaggtaagtctaagagaaaggtattttgtaattactgagttcctactatgtgccaagcagtc

SEQ ID NO: 444400 - DNA, 201 bp, Homo sapiens
tgattaagtatgctttgccagaaatcccttctcatattacttagtatcaagatataacatatgtgcattcacaataaaatcaagctctaacattgactctygagttagaaaaaaagagagagagcaaacatgaaattgaagaatggttagaattgaaaattcagccatgcagaaaggcccagacaccaaacaaacaagaag

SEQ ID NO: 444401 - DNA, 201 bp, Homo sapiens
tctgtcacaagaaagagttggagtgacagactgctggcttagccagagaactctgctccttgtgctggtagctgtttccttgtcctgactgatgcccactsgacctgtatgtccctctagacctatcccttatgaatccagctagtagggtgccatgtctagtcgccagacctcactagtcctccgcaatgctgaaagact

SEQ ID NO: 444402 - DNA, 201 bp, Homo sapiens
ttccttttaaattgttttgttgtctgttttccgctgtttaagactttgcagaaaatttattgaaaatcccccacacatatttccagagtgattacaatgamattataataaaaaagagaatgacacagatggctcagttctttctgagttttgctatcagattaaaagagtttatttggaaggatgaattttattttgtaa

SEQ ID NO: 444403 - DNA, 201 bp, Homo sapiens
aaactggtatgatttaaatgagatacatgctgtaaagttcttagcccagtgcctgacatatagacgctcaatatatattagctgttattactgtcatatgrgtgggcttgcaggtatatggtcatactttactatatctgtattatttcaacattctttgagtcaaaaaaaaacaatttgtattaaatggaataatttgaa

SEQ ID NO: 444404 - DNA, 201 bp, Homo sapiens
aggctatgtttcaggattctaagagcgctttgcatctctggctctcttcatgtcttggatccctacagttgactgcagttagaaaggtagtgtgtatagcktcaaggcaaggtcaattgcacagccagctgaagacgcataagaaatacttctctggtgctacggcttagatttttttaatgttcaagtaagttaccaggg

SEQ ID NO: 444405 - DNA, 201 bp, Homo sapiens
aactttataatattagacatatggatggcaaataagcatatggaagaatgtcaaacattattggccattagaaaagtgtagatttcagccacaaacaaaaratgagatcttactaggtatctcttagaacagctaaaattacaaagactgactgtaccccaggttgacatagataaggaggaaatggaactcatacactgc

SEQ ID NO: 444406 - DNA, 201 bp, Homo sapiens
tcattttaaacaaaaaacctcaaaaggttaaaaaaaaattaaaaatagacaaaagcttatagaataaggctataaagaaattagtttacagagatgtacartgtgttttttaagctaagtgttattgcaaaccagtcaaaaagattttaaaatataaaggtttataaagtaaaaaaggtataataagctaaagttaattta

SEQ ID NO: 444407 - DNA, 201 bp, Homo sapiens
tttgttttccaattaacacccgctgatttgcacaccaaaaggaagcatcaactgtaatctcagctttgaaagcaaccgcagagtttgttcttcttccagaygataagatataaataaaagattatgtaatacaggttaatttaattatataagaacagcaaaatgacattgcctaatgtatatttatactaggttgtctcc

SEQ ID NO: 444408 - DNA, 201 bp, Homo sapiens
ttaaaaattaattttattaatgagaaactcttaagatataattttaacgtagttagcaagttgaaaatatacagaatcactgggtagaacaaaatgtgaakaaaacacaaagaaaatatgaggaaaagcaatcagcagtagcataaaaaaattttaatatcagtaagatatcaggagagggttgcagtaagatggctgaat

SEQ ID NO: 444409 - DNA, 201 bp, Homo sapiens
attcctttcccaatttaaatattattaagagtctaatatctgaaatagataaaaggagagcaactctagggcccctgcttcttcctgcccactgctttctrtgatggcccctatatcacctcctcaagaatcttaaggatatttgaataccatcagattacatcctccctaaggtctctttccaaggtattccttcgtgta

SEQ ID NO: 444410 - DNA, 201 bp, Homo sapiens
agtttaaaatgtgaaatacaggcaaaacggaactgaataaagctggaccgatacactcatgaggaaatggcttaagagaaactacacaaaattaaaacttaaaaaaaaaaaaattctcacacatcagccacttggaggaactggccaaagggtggcctatttctctctgtaaggcaaccaggatgaaacatttcagcccca

SEQ ID NO: 444411 - DNA, 201 bp, Homo sapiens
tgagcctccgttatctcaagcttataatatgaataatagtacttaggccatattcatccctttatacaacaggactatattgtcctcacagggctggagaratcatttaaataaggcatgtggagcacttagtacagtgcccagaacaaaacatactcaataaatgttactattatcatcaccgttcttattaaatttgag

SEQ ID NO: 444412 - DNA, 201 bp, Homo sapiens
acacacagctcccagcacatggcagccctaactgccgctctgcttttcctggaaacccgggccacatgtggcaaccagccagtggtgtgaagggacagagycaccagcccaccaagagcgagccccaacgcaccactggtagacttcccagagggccaggttctgtactcgctcaatcttctgaacaaagtaaaaaggcag

SEQ ID NO: 444413 - DNA, 201 bp, Homo sapiens
aatgcattaccatcaacgtgcagaatataaatcagtcccttcccaaagcttcttgtaaacactagaaccgcagaagcacaaaagcccagagagcagtgacmacattctcctgtggtttctccaggcacaggagacaatcggtcctcatgaaatgtcattgataggttcttggaaactgcaattttaagtaaaacaacaaac

SEQ ID NO: 444414 - DNA, 201 bp, Homo sapiens
ataattttttcataatatgcattttccacaaactttctgaagaccccttttgtgtgtgtgtgtgtgtgtgtgtgtgtgtgtgtgtgtgtgtaaagctgttwtataaaaaataggcaaaagatttgagtagatacttcacagaaaatatacagatgccccaaaagtacatgtaaataaaagttaaacatcattaatcatcag

SEQ ID NO: 444415 - DNA, 201 bp, Homo sapiens
agacacaacagtacataccacacggttctatttatatgaggttcaagaacaggcaagacagagatctatggtgacagaggtcagaacggtggtgaacgatrggagtaggcactgactggaaggagatggggtgaggaaaatgatccgtatctcaatcagaatgctggctacacaagtgtatgtatttgtcaaaactcactg

SEQ ID NO: 444416 - DNA, 201 bp, Homo sapiens
acccattccactcccagtcattacatttcccaagacacaggaatgtccccagggagctgtggaacccagacttcccctggcactcacttctggcaaaagcmaggggtcgttctgaaacaagagttggcatagctcattatagctcaggtggtcaacgccatgagttctcagcacactcaggttgtgttcggttgtcaagct

SEQ ID NO: 444417 - DNA, 201 bp, Homo sapiens; identical to SEQ ID NO: 100388

SEQ ID NO: 444418 - DNA, 201 bp, Homo sapiens
acggtctcggctcaccgcaacctccacctcccgggttcaagtgactttcctgcctcatcctcccaagtagctgtgattacaggtatgtgccaccacacccrgctaatttttgtatttttagtagagacagggtttcaccatgttggccaggcgggtctcaaactcctgacctcaagtgatccacctgcctcggcctctcaa

SEQ ID NO: 444419 - DNA, 201 bp, Homo sapiens
aaattagatagatttgaaagcttatccaaatgtgtaaaacccagaatcagtctgttaaaaatagggccattttacacatttcaaatattcataaagaaaayaggtatccttaggagactgggtttaatgaatagaggaatgattagtaattgacatatcaattatacatgagtgcttttaaattgttccttccaatcttgt

SEQ ID NO: 444420 - DNA, 201 bp, Homo sapiens
tggacaccactattaaaatacctgtacactataaaggaaataaacatgaaagactggaaggatatatcttcagtataaatcatatacaaaacacaactcawtaagagatcaaataacccaataaaaatgggtataactgtcactaaagaccaatactgtatgattccatttatatgaaatattcaagcaaatctatagaga

SEQ ID NO: 444421 - DNA, 201 bp, Homo sapiens
aatataccataggtggtctctgctagccaatatcaccagtcttgcgtctcagcacatcatatttcaagagcaggtagaaggcaaggaagaatgttagcacratattcacaacatgagagcacttttatctttgcctatgtagccaaactccaaacagtcctgagagatctatttctcgcctgtgtcccaactaccacacaa

SEQ ID NO: 444422 - DNA, 201 bp, Homo sapiens
tgttccctccctgaaaggcattagaggaaatgatcagggatgagagcagaaggccaccccagggcatcccagtagtcaaatgctatacctacaaaccccargcacaggtgtactatggacagcctgagacaggatctccctgcaaacaggcacatcctggggaaggtgcactccttagggccctccaggctgatgcttcct

SEQ ID NO: 444423 - DNA, 201 bp, Homo sapiens
atggtgagtaagaaacaaaatggtaattgtgtaagcttaaacaaatactgactgcctaaaacaatacgaatttctaacctctaggattaaaaatattatakcagcaatacatacagtgcatctttttcttttttttttttttaatagagacaagatctagctctgtcacccagactggagtgtagtgacacaatcatagct

SEQ ID NO: 444424 - DNA, 201 bp, Homo sapiens
aattggcacccacaccactaccttagacttcctaaaacgcaaacctgatggttgctctctcctgccattttacccgccccatcacctccagggtgaggccyaaattctttagcataaacctcagcaatcccttccacacatcccactggccacatgctatgcacagaacatggacgctaagtgctggggagacagctggag

SEQ ID NO: 444425 - DNA, 201 bp, Homo sapiens
ttgatgcagttcttcctccactgcacagggccagtgtcatctgtctccaggtctaccttggacctggtaccttgcttttctttcctgtacccacccaggcyctcagtatgtgcacacggctcctccagggttaaggtgtagggacagagccaacacaggcaggctctgctgggcgagggcagggcacaggatacctttgaa

SEQ ID NO: 444426 - DNA, 201 bp, Homo sapiens
gctacatgcatgctgaccctgcttgtcctccacacttggggctcctgcccctcctggggtccattctcctcacatccttgatgcagttcttcctccactgyacagggccagtgtcatctgtctccaggtctaccttggacctggtaccttgcttttctttcctgtacccacccaggccctcagtatgtgcacacggctcct

SEQ ID NO: 444427 - DNA, 201 bp, Homo sapiens
agggcttaaagcatcttagagaaggccaaataccaccctttcatttctcaatggagcacactgagaggctcagagaagttaaagaatcagccctagtcgcmcagctatccatggcatctgtgtgatgtttgtggaactgggttgttggcaaagctggcccttgaacttcactgctccttctgctccacattccaaatttct

SEQ ID NO: 444428 - DNA, 201 bp, Homo sapiens
caaatttcttgcttccccaccctcaagaatcccatactcatcctgaggatttggggttgggggaactggcccctcaagttgaaaaatgacaaatacctagmagtgtttgttctgtccttgcctgccaggaaaaccctctcaagtcttacattttttttaagagatggggtcttttgctttgttgctcaagtggaccttgaa

SEQ ID NO: 444429 - DNA, 201 bp, Homo sapiens
tacatacatacatacatgcatacatacatacgtacatacatattcagacaaaccaaaaacagttttccaacaaatcttcatcgaaggcagccttgtccaasctgcagcccgcaggctgcatgtaacccaggacagctttgaatgtgacccaacacaaatctgtaaactttcttaaaacattatgagattttcttgtggttt

SEQ ID NO: 444430 - DNA, 201 bp, Homo sapiens
cgctggcaaactgaaagctgataaaatcagtcttcatgacaatttttcagaaacacttcctgacagtatttacaagcaccagagaaaaaccagcatgtagsctgggtatggtggctcacgcctataatcccaggactctaggaggccagggtggatggatcacttgaggtcgggagttcgagactagcctggccaacatga

SEQ ID NO: 444431 - DNA, 201 bp, Homo sapiens
gccatctacaagccaaggagaggggcctcagaagaaatcaaccctgccaccttgatctcagacttctagcctccagaactgtgacaaaatcgatttctgtygtttaagcctcctagtctatggtactttgttatggcagcgctggcaaactgaaagctgataaaatcagtcttcatgacaatttttcagaaacacttcctg

SEQ ID NO: 444432 - DNA, 201 bp, Homo sapiens; identical to SEQ ID NO: 100424

SEQ ID NO: 444433 - DNA, 201 bp, Homo sapiens
gcacggtggctcatgcctgtaatcccagcactttgggaggccgaggcaggaggatcacgaggtcaggagattgagaccatcctggctaacacagtgaaacyccgtctctactaaaaatataaaaaattagcggggcgtggtggtgagcgcatgtagtcccagctactctggaggctgaggcagaagaatggcatgaacccg

SEQ ID NO: 444434 - DNA, 201 bp, Homo sapiens
ctggtgccaataagcagcaaagtcaacaaagagtaaaaactaaaacttcaacacattattaaaaagcaaaactggactcaactacaatcacttctggttartccactagtgaacccaaaagtgacttaaaagtaaaaatcattattagcaagagattaagaacataacttcattgagaggtcaatgttaagagaacagttc

SEQ ID NO: 444435 - DNA, 201 bp, Homo sapiens
caaaatttctatgttggagtcctaactcccacgacctcaggatatggctctatttggaaagaaggtctctaaagaggtaattaagttaaaaagaggtccayagggtgggccccaaacccacaagactactgtccttataagaagagatttggctaagcacggtggctcatgcctgtaatcccagcactttgggaggccgag

SEQ ID NO: 444436 - DNA, 201 bp, Homo sapiens
tagaagacccttcagagcaaaggaccctctcacacgctgagagcaatgcgagttgttagagccctttgaggaggtaatccaggaatagctattaaaattgraaacacgtgtgacctttgacccagcaatctttcctctcggaatcttccagaagtaaaaggaacagtaaataagttatgtgtgaaagtgttactgggggaa

SEQ ID NO: 444437 - DNA, 201 bp, Homo sapiens
ctgtgactattcctacagttcttcctgcaaagaagcagagctggtgttatatgtcgaattgagtctcctcaaaatttctatgttggagtcctaactcccasgacctcaggatatggctctatttggaaagaaggtctctaaagaggtaattaagttaaaaagaggtccatagggtgggccccaaacccacaagactactgt

SEQ ID NO: 444438 - DNA, 201 bp, Homo sapiens
aaaggggcttcacaagctgtgattccatcatccacacagaacacagctattacatccctcactctagatgacggctgctaacaaatgcccttggctaaaakgggaacgaaatggaaaggagactgcacagaatcagcccctccactgggaaaatccaagaacttcaaagtgactagagctgctcctttcacatgagacaat

SEQ ID NO: 444439 - DNA, 201 bp, Homo sapiens
caacaaatgtcagagtacctactgtgggccaggcactgtctaggtgctggagatgagcagggaacaaagcaaatttacaatggctcaaaaactctacttaytgatgtcaggaatacagccaatgccataattaaggtatgcttctttcactcattttgtaaaatcagaatacaacacaaggaatgctccccagagctgtgc

SEQ ID NO: 444440 - DNA, 201 bp, Homo sapiens; identical to SEQ ID NO: 100564

SEQ ID NO: 444441 - DNA, 201 bp, Homo sapiens; identical to SEQ ID NO: 100566

SEQ ID NO: 444442 - DNA, 201 bp, Homo sapiens
ctctactttttagtgacaggctggcagcctgacgccacatggctgcttgccagatccaggactccatgaaggggactcctttctcaactctcgctgtccaytcaattcactaggagacccatttaaaaacacaagtgcctgattctgccctagactgacttcactccagactgactgaatcagaacctccaggggtgggac

SEQ ID NO: 444443 - DNA, 201 bp, Homo sapiens; identical to SEQ ID NO: 100568

SEQ ID NO: 444444 - DNA, 201 bp, Homo sapiens
tacttatcaaaactcagtatacatttaaaatggtacactttagcttgtgtaaactatagctcagtaatattgctttcagaatacacatatatatgtgtgtrtatatatatatagctcatattccttgacctatcattccattccccagaatctatctatggaaatactcacatatatgtacttcaatgctcaatggaacat

SEQ ID NO: 444445 - DNA, 201 bp, Homo sapiens
tatgtacttcaatgctcaatggaacatcattataatcaactactacacacttgtttttaaaatgaggtggactttcacatactgacatggaaaaaaaatcyccaagatacaatgttaagatgcagattgaataataacattatcacatgctcctatctgtttaaaaacatataaaacaaatatcacaaccacacgggaagt

SEQ ID NO: 444446 - DNA, 201 bp, Homo sapiens
ttaaagaggattcattcagttctctgcacaaaagtgggcaacgcaagctcacaaagccctatcgtgtttggggtgaaagtgctcctacacaggtggatccwctactttttagtgacaggctggcagcctgacgccacatggctgcttgccagatccaggactccatgaaggggactcctttctcaactctcgctgtccact

SEQ ID NO: 444447 - DNA, 201 bp, Homo sapiens
atgatcagaacctaagtgaagctctaggagaggagagacaagacagtggaggcgattttcaaagagaactgatgagatgcacctatccgcagcttaagaascccaaagaatctcaaccatgataaataaaagcacatacttagatacactttagtgaggatgcctacctccaagacaaacagaagctcttaaaagtagcca

SEQ ID NO: 444448 - DNA, 201 bp, Homo sapiens
gaaggcaaggaagaatgttagcacgatattcacaacatgagagcacttttatctttgcctatgtagccaaactccaaacagtcctgagagatctatttctygcctgtgtcccaactaccacacaaaagggataaaagggatggagtacatggttaaaggagcacacacacagccataaacctttatccacaattctgaaat

SEQ ID NO: 444449 - DNA, 201 bp, Homo sapiens
ccactggtcagagcccctcaacaagctgccaaattgactgtccattctcctgtctgctagtcgtgaatgccttccctcctgacagtaaccccattccaaaygtccatcggactcaggtcctccccaggctgcttctccttttctcgcttaataaaattggtatttattggttaagcccagcccataaactcatttctgccc

SEQ ID NO: 444450 - DNA, 201 bp, Homo sapiens
gccttccctccgttctgcttctgcatctgtcctttttgcctagaatcacagaagaatgtgtgctgggggcagagtgtgccggccaccaaatacagccggcytgatgcaaaacaacacatttttccaaaattccaaaagtgtcctgggaccaagagacgcaggtcacaggctaccctgactaggcctgtaaggctccagcca

SEQ ID NO: 444451 - DNA, 201 bp, Homo sapiens
tgtacacgtatacagtctcgatgaaaggatattcaaagaatggataattatggctgtttcttggaggggacttgagttctggagaaaactggtgtgagggsgacttatttcttactgagtgtcctttgtacatttttaatttgtatttcaaaataataatgaaactagctaatttgatacttgaaaaaaattaaaattttc

SEQ ID NO: 444452 - DNA, 201 bp, Homo sapiens
acggccttccctccgttctgcttctgcatctgtcctttttgcctagaatcacagaagaatgtgtgctgggggcagagtgtgccggccaccaaatacagccrgcctgatgcaaaacaacacatttttccaaaattccaaaagtgtcctgggaccaagagacgcaggtcacaggctaccctgactaggcctgtaaggctccag

SEQ ID NO: 444453 - DNA, 201 bp, Homo sapiens
gctgtagtggtgggaatatgcagcatctcgggcaaagtagctccctgaaatgacacacgagggctcagctggtggaggggcctgcagccaggaagggtcascacactgcgaatagcgtcctggtgatgtgcaacgccagggcctctactcttccaccccgcatctccctccctccctctgtgccatgtctccactctccct

SEQ ID NO: 444454 - DNA, 201 bp, Homo sapiens
gtcaccactgcagagcacaccccagctgattacatcctaagtaccaagccccccactgcaacctaccaggtttgcatggtcgtcacatcctggggagacaygtatttgggtctgcggcaaacctttttagttgtgccatagaccaggtttttctgaacgaaggctgaaaaaaaacataaccagtgaaaaaatatacatata

SEQ ID NO: 444455 - DNA, 201 bp, Homo sapiens
agagaacagttcattaaaagtttctgtttaaaaagaaaaggaaaggcccaaatagccatttcaaggcagagcaggtgaaaggcctggaacactcctgtgcrctcactgtcggctgctgaacagggagcccaaggccagcaggatggagggtgtgaccgagggcttggaggaggtggtgtactggatgacatactctgggta

SEQ ID NO: 444456 - DNA, 201 bp, Homo sapiens
ggccattttacacatttcaaatattcataaagaaaataggtatccttaggagactgggtttaatgaatagaggaatgattagtaattgacatatcaattayacatgagtgcttttaaattgttccttccaatcttgtttaaaccattattttgcttggcaatttttcccagcttggatataaaaaagcctcagcccagcct

SEQ ID NO: 444457 - DNA, 201 bp, Homo sapiens
actgtgaaaccaatctaaaggacagacacgtgatgcttaagccaccatcgagggtatcccctggatgtccctgccttttttttttcttgtcccacacaggycaaagacacaggttggactacatggtccaaggaccacagagtcgtctagacaaacatgttgaacccctttaggtccttagcacttcttgcctgcactgtt

SEQ ID NO: 444458 - DNA, 201 bp, Homo sapiens
agttaatcattcagtcctcaaccagcctgtgagggtagtaatatcattaactccactttgcagatgagggaactgagacctggaggtaaagtcacttgccygaagccatcagctagcaaggagcagagcccaggttgaaacaaggtgggctggatcttgggactgtgccctagaccaccaggctcaatgcctcctgagtag

SEQ ID NO: 444459 - DNA, 201 bp, Homo sapiens
cccctgctaagtaacgattgaacaaatattttagaagacccttcagagcaaaggaccctctcacacgctgagagcaatgcgagttgttagagccctttgargaggtaatccaggaatagctattaaaattggaaacacgtgtgacctttgacccagcaatctttcctctcggaatcttccagaagtaaaaggaacagtaaa

SEQ ID NO: 444460 - DNA, 201 bp, Homo sapiens
tgcgcgactgcactccagcctgggcgacagagcgagactccgtctcaaaaaataaaataaaataaaataaaatccgttactcccagcccctgctaagtaaygattgaacaaatattttagaagacccttcagagcaaaggaccctctcacacgctgagagcaatgcgagttgttagagccctttgaggaggtaatccagga

SEQ ID NO: 444461 - DNA, 201 bp, Homo sapiens
ttggaaagctctaatctagatacttccagacagctgcttcctagaggcatttcccagtcaccctgcatctagacagggtcacgagacagcttctggtcaakgggatgtgggtgaaaggaaatccaccacttctagacctggcccacaaaaacctcccatgcatccctcttttcgatcagccccctcgaacttgataaccta

SEQ ID NO: 444462 - DNA, 201 bp, Homo sapiens
agaataaaaaatgacttccagaaataggagggtcataatcaaccaaaactctaaatccagaatcagtaagacactgatacatttaactaaaataataagaratatatatttatggtaaaatacttcacaggcaaagtcaaaaggcaaacaacaaactaagagaaaatatttgccatttatataacaaaacgagggccaacc

SEQ ID NO: 444463 - DNA, 201 bp, Homo sapiens
ggtgtccagtgtgcttaggaaatgtgggtttgcgcaatcacaggccaagcctgggggtcctcggggaagctactcctccaggtcacctgccaggtggatgyacttccttgggcaatgggtgaccctcccaggacaaggggaaccagcagggactcgatggcaccacacagcagccacctgttctgacaatgtgacacagac

SEQ ID NO: 444464 - DNA, 201 bp, Homo sapiens
tattgctacaaaaatgtaaacaaaaacacgtagacattttattcttacacaaagcaaatataccataggtggtctctgctagccaatatcaccagtcttgmgtctcagcacatcatatttcaagagcaggtagaaggcaaggaagaatgttagcacgatattcacaacatgagagcacttttatctttgcctatgtagcca

SEQ ID NO: 444465 - DNA, 201 bp, Homo sapiens
tcgaagggtgtccagtgtgcttaggaaatgtgggtttgcgcaatcacaggccaagcctgggggtcctcggggaagctactcctccaggtcacctgccaggkggatgcacttccttgggcaatgggtgaccctcccaggacaaggggaaccagcagggactcgatggcaccacacagcagccacctgttctgacaatgtgac

SEQ ID NO: 444466 - DNA, 201 bp, Homo sapiens
ttgggattgcaatatgcctcttcaataagttccatgttgtccaaatcctcccatttgcctctatccaagaattgccatcgatacggcaaatggaaatgaaytctatggcacttatctgaaataaaaacataaaggagtaagatagctgggcaatacacagcatgccctagccttgtggttgtcaacaggtgtggtgctgcc

SEQ ID NO: 444467 - DNA, 201 bp, Homo sapiens
attcagtcctcaaccagcctgtgagggtagtaatatcattaactccactttgcagatgagggaactgagacctggaggtaaagtcacttgcccgaagccaycagctagcaaggagcagagcccaggttgaaacaaggtgggctggatcttgggactgtgccctagaccaccaggctcaatgcctcctgagtagaggactaa

SEQ ID NO: 444468 - DNA, 201 bp, Homo sapiens
ggacagagtcaccagcccaccaagagcgagccccaacgcaccactggtagacttcccagagggccaggttctgtactcgctcaatcttctgaacaaagtaraaaggcagcgtgcggttaaagaggttccagaccttctgatactcttccgaggaagaactaagggtgatcttctgcaaggggcaaatgtttttaatgcatt

SEQ ID NO: 444469 - DNA, 201 bp, Homo sapiens
agtttgctttgagacttgctttatacttagaagtgaagttgtgggggaagaagccaattcatctcaagcttcttttatggatactggtatctaccaaaagraggaggaggaagaggaggaggagggggaagaggaagaggaggaggaagaggaagaggaggaggacgaggaggaggacaaggaggaggacaaggaggagga

SEQ ID NO: 444470 - DNA, 201 bp, Homo sapiens
gaggtaattaagttaaaaagaggtccatagggtgggccccaaacccacaagactactgtccttataagaagagatttggctaagcacggtggctcatgccygtaatcccagcactttgggaggccgaggcaggaggatcacgaggtcaggagattgagaccatcctggctaacacagtgaaaccccgtctctactaaaaat

SEQ ID NO: 444471 - DNA, 201 bp, Homo sapiens
gcacagcagtcagtcggtaagcagttagccacaggctgaatcaatgagcatggcatcttatcattataggttacatatgtgcatgcgtgcaggcgtgtatacacacacacacacacacacacacagagccctgaacctagctcttttttttttttttgctctcttcctccattctttccatccacaagcgtctgataagca

SEQ ID NO: 444472 - DNA, 201 bp, Homo sapiens
cacagcagtcagtcggtaagcagttagccacaggctgaatcaatgagcatggcatcttatcattataggttacatatgtgcatgcgtgcaggcgtgtatacacacacacacacacacacacacagagccctgaacctagctcttttttttttttttgctctcttcctccattctttccatccacaagcgtctgataagcac

SEQ ID NO: 444473 - DNA, 201 bp, Homo sapiens
caatgagcatggcatcttatcattataggttacatatgtgcatgcgtgcaggcgtgtatacacacacacacacacacacacacagagccctgaacctagctcttttttttttttttgctctcttcctccattctttccatccacaagcgtctgataagcaccagggtgagccagacattggcaccatgccctgagaaccca

SEQ ID NO: 444474 - DNA, 201 bp, Homo sapiens
cctttctattttacctttactagcaccatgccaatgagtctttacctatgacatttaccctcacccagctaaccccaatgagcacataaaattaatttgcmatccctatttagtgtcacctgtcgttattcatcttcccttttctttttataagcccctgagatacttcactcaaaatctaggtctatgggaccccgaagg

SEQ ID NO: 444475 - DNA, 201 bp, Homo sapiens
atatgaacatgaaacagatctaccagttacccccatgagtggctctatccagccaccatttgctgtgtgccttcctcctcgtgggctgttgttccctgctstcccctggactgcctcatccctgaaggctgatttccccagagttccaccctcagcctcttttcaggcctcagacgctacctcagatctgatccactcctg

SEQ ID NO: 444476 - DNA, 201 bp, Homo sapiens
atgaacatgaaacagatctaccagttacccccatgagtggctctatccagccaccatttgctgtgtgccttcctcctcgtgggctgttgttccctgctctyccctggactgcctcatccctgaaggctgatttccccagagttccaccctcagcctcttttcaggcctcagacgctacctcagatctgatccactcctggg

SEQ ID NO: 444477 - DNA, 201 bp, Homo sapiens
aacgctcgctttagtgaatgacggtgcgaggtcagggcagagccaccgaattgtctgctcaaacttcaagtaggacccccaagcgggctggaagtgcgtgrgggcgcgcaggacctccgcccgccgtcgctcccggcgcggcgccttacccggctctcaggaacttgcaggcgccgtagaccatgaacctgcagaggtgga

SEQ ID NO: 444478 - DNA, 201 bp, Homo sapiens; identical to SEQ ID NO: 100471

SEQ ID NO: 444479 - DNA, 201 bp, Homo sapiens
ctctccggatggggtagaggtttggtagggggtgacttcagagcacagctctgggaatgacaagcagttacccctcccacaagtggaatgaaggagcctcytccaacttaccttgaaagctacaacttttccggatatggtacaaacagatctgatcaccctcctcctggctaagagtgtttggggacacagaacctgaac

SEQ ID NO: 444480 - DNA, 201 bp, Homo sapiens
aatgagcatggcatcttatcattataggttacatatgtgcatgcgtgcaggcgtgtatacacacacacacacacacacacacagagccctgaacctagctcttttttttttttttgctctcttcctccattctttccatccacaagcgtctgataagcaccagggtgagccagacattggcaccatgccctgagaacccaa

SEQ ID NO: 444481 - DNA, 201 bp, Homo sapiens
atgagcatggcatcttatcattataggttacatatgtgcatgcgtgcaggcgtgtatacacacacacacacacacacacacagagccctgaacctagctcttttttttttttttgctctcttcctccattctttccatccacaagcgtctgataagcaccagggtgagccagacattggcaccatgccctgagaacccaaa

SEQ ID NO: 444482 - DNA, 201 bp, Homo sapiens
cataaaaattaaaaccaatccataaaattgtatctagaaactctgtccctggtgccaataagcagcaaagtcaacaaagagtaaaaactaaaacttcaacrcattattaaaaagcaaaactggactcaactacaatcacttctggttagtccactagtgaacccaaaagtgacttaaaagtaaaaatcattattagcaaga

SEQ ID NO: 444483 - DNA, 201 bp, Homo sapiens
tgagcatggcatcttatcattataggttacatatgtgcatgcgtgcaggcgtgtatacacacacacacacacacacacacagagccctgaacctagctcttttttttttttttgctctcttcctccattctttccatccacaagcgtctgataagcaccagggtgagccagacattggcaccatgccctgagaacccaaag

SEQ ID NO: 444484 - DNA, 201 bp, Homo sapiens
tttagtgaatgacggtgcgaggtcagggcagagccaccgaattgtctgctcaaacttcaagtaggacccccaagcgggctggaagtgcgtgagggcgcgcrggacctccgcccgccgtcgctcccggcgcggcgccttacccggctctcaggaacttgcaggcgccgtagaccatgaacctgcagaggtggagctgcgcgc

SEQ ID NO: 444485 - DNA, 201 bp, Homo sapiens
cctgacagaccacattattcatctgccccacaagaggtactcaagaaatgcttattaaataaaaatctctgttcaaaatctgcctgtcactaaacctgacrgtcttttttaaaaaataagtatcctagcacactcattcattcaacaaatgtcagagtacctactgtgggccaggcactgtctaggtgctggagatgagca

SEQ ID NO: 444486 - DNA, 201 bp, Homo sapiens
cacagctccagacagcagcggttccctggactccaaaagcagagcagcccttggaaaatgggtaccatttcccccaaccccacccccaccttgctcctgcrtggagctgagccctgggatgctgtaggaattttcaggctgctggtcagtgggtgcccatccttctcccctctcccattcccagacttcatcactgtgcac

SEQ ID NO: 444487 - DNA, 201 bp, Homo sapiens
accgatctcttaagaatgcctgttcccctcccgcaaataatcattaaacagaattcagcataagttcagcattttcaagtcactcagggacacaggtaccygggaatgttccctctgcccctggactgtttgtgttggattccagcctggctcctcctgtcccccgactgcaggactgtttcccacatggaatcacgattc

SEQ ID NO: 444488 - DNA, 201 bp, Homo sapiens
aatattcagcaggcaaaccctgtgtttgtgaaatataccgaatctgcaagaaaagataagaatgaggtcagggcttttcctgtcactatacatatggtatrctaatggctctgctggctttgagaaaaatgaaaatgacaatttttgtagggaaagaagttaacaaaaaagagaaaaaagaaaaagggaaaagagaaagga

SEQ ID NO: 444489 - DNA, 201 bp, Homo sapiens
cacaaaatggtaaaccaaggatgatctcaggggccctgaaaaggaagaatggaagaaaccattagcaagttggaaatgcaggaagctgtttctatatgaayactatctttcaaacctggggtgccattactgactcctcctctgaagggcctgtggctctcaggagaggcgctgtgctacaacaatccttccattctttgg

SEQ ID NO: 444490 - DNA, 201 bp, Homo sapiens
ccaaggaagaccccagcgtgcctcccctctcctggctccccttattttttgccctgtaacttcctcctgatctctcaagccccctttctcagttcccaggractctgcccctatgggaggcaccacccacatgttgtcattgcccacaggatgtggcttttctctctgcaggaaaggcagagaggggctgtgccccaggaa

SEQ ID NO: 444491 - DNA, 201 bp, Homo sapiens
ccctcaaaggaaataaccttggatgcaaatactttgtttagttgttgaacatgacagcaggaattttgcctcctgactaggtatgatggaaaatacaagtyctgaggctcacactgtgcagccccgcctctccttcccttctgtttcccacttacctggttgtggacagtggtcagctggttgttaaaggtcatggtcagg

SEQ ID NO: 444492 - DNA, 201 bp, Homo sapiens
atggaaaatacaagtcctgaggctcacactgtgcagccccgcctctccttcccttctgtttcccacttacctggttgtggacagtggtcagctggttgttraaggtcatggtcaggttggtggacgtgctgggggccacgtgcgtgatgaaaggggttttgctctggttcaccgtgtcatacatattcacccgacgcttgc

SEQ ID NO: 444493 - DNA, 201 bp, Homo sapiens
cacactgtgcagccccgcctctccttcccttctgtttcccacttacctggttgtggacagtggtcagctggttgttaaaggtcatggtcaggttggtggaygtgctgggggccacgtgcgtgatgaaaggggttttgctctggttcaccgtgtcatacatattcacccgacgcttgcagatctccatgttctggaaacatg

SEQ ID NO: 444494 - DNA, 201 bp, Homo sapiens
ccctcaccagtcctttctgggacctgtcaatggggccagaagtcaacacaaaatgtgcctgggtccctcaaaggaaataaccttggatgcaaatactttgwttagttgttgaacatgacagcaggaattttgcctcctgactaggtatgatggaaaatacaagtcctgaggctcacactgtgcagccccgcctctccttcc

SEQ ID NO: 444495 - DNA, 201 bp, Homo sapiens
tttctgggacctgtcaatggggccagaagtcaacacaaaatgtgcctgggtccctcaaaggaaataaccttggatgcaaatactttgtttagttgttgaayatgacagcaggaattttgcctcctgactaggtatgatggaaaatacaagtcctgaggctcacactgtgcagccccgcctctccttcccttctgtttccca

SEQ ID NO: 444496 - DNA, 201 bp, Homo sapiens
ccattagtggagggcccacttggaaggttggctgagatgaaggataagtctgtgtgtttagaacacacctacagagaaccacgtctactgacttcattacyttcacacgccaatcagatgagctaacaaccattttagagatattctgaagttatcttttgtagctgaaagtctgggaaactaatcttcagagaatgcctg

SEQ ID NO: 444497 - DNA, 201 bp, Homo sapiens
gtcttgaacttctgaactcaaacaatccttctgcctcagcctcctgagtagctgggtctataggaatgcacaaccacacctaactcgaggtattctatctycaggaagatgtaaaacaagctgtccccttcccaaaataacgggattaagtccaatatctgtttatgccaattatcctttcttaagaatttacatcacact

SEQ ID NO: 444498 - DNA, 201 bp, Homo sapiens
agatctccataagtactttaaaaacaacatgcattgggtgatctttctgttcggatactgactctcagggaagacggcctcacttccagcatgggggggawgcacatcctggtcagtttaactcagccagggctcatcttcttcctgttgtcaatgacttgacttaggcactggcacacaccatcagcctggtcaacgagg

SEQ ID NO: 444499 - DNA, 201 bp, Homo sapiens
ggcacagggtgaacatcttttacctgaaatgcttggtccagaagtgtttcggatttttgttttcagattttggaatatttgcatatacataatgagatatmttggggatgaaacccaagtctaaacacaaaattcttttgtttcatatacaccttatacacatagcctgaggtcattttatacattattttataataattt

SEQ ID NO: 444500 - DNA, 201 bp, Homo sapiens
caccacggcacagagatctccataagtactttaaaaacaacatgcattgggtgatctttctgttcggatactgactctcagggaagacggcctcacttccrgcatgggggggatgcacatcctggtcagtttaactcagccagggctcatcttcttcctgttgtcaatgacttgacttaggcactggcacacaccatcagc

SEQ ID NO: 444501 - DNA, 201 bp, Homo sapiens
agctggggtaactccaaagtcagggaaaaagagcttcgccgcaaatgtcggaaagggtgatgctgccttgggttaggaagtaggtggcggggagcgcaagsctgtggctgtcaccatctcccctttaggcagagcctctcagcaaaaggggccccatcccaggcaatgccatgagctcttgggagagcgtgccagggctct

SEQ ID NO: 444502 - DNA, 201 bp, Homo sapiens
tagctggggtaactccaaagtcagggaaaaagagcttcgccgcaaatgtcggaaagggtgatgctgccttgggttaggaagtaggtggcggggagcgcaascctgtggctgtcaccatctcccctttaggcagagcctctcagcaaaaggggccccatcccaggcaatgccatgagctcttgggagagcgtgccagggctc

SEQ ID NO: 444503 - DNA, 201 bp, Homo sapiens
ttgggagtggcttattaataacacaaaaactaggtttccagttttgattctgtgtgtgtctgaggcagaacctaagtaggccccaaaagccacctcaagartggctggcagtgggcggccaagttcaggccacccctcttcatgcccctcagcatcgaggaggagccccggcttggttcttcctcgtgtgccctctctcac

SEQ ID NO: 444504 - DNA, 201 bp, Homo sapiens
agaggtgggacggagccctgagtgtacagcagcccagaatcatggggcttactcctctcagcatcactctcccgattcccttaggcctgtgatcatctccyaaacaggcgatctgcacccaagcccttgctcttggggaaattcgagacagttgcttctgtaacagcaccatctcaatctgtcccggaacaagggccacaa

SEQ ID NO: 444505 - DNA, 201 bp, Homo sapiens
acggagccctgagtgtacagcagcccagaatcatggggcttactcctctcagcatcactctcccgattcccttaggcctgtgatcatctcctaaacaggcratctgcacccaagcccttgctcttggggaaattcgagacagttgcttctgtaacagcaccatctcaatctgtcccggaacaagggccacaagcccaatac

SEQ ID NO: 444506 - DNA, 201 bp, Homo sapiens
cacctgctgtcacttttcagctttctgggaccactcttcttttctctgcactggcaagggatttggaatttcaattcctgtggatcaactgcagatgtggygtcttcactttattcagcctggtgatgttacccacttatagtgatcatgagatgtgaggctggggaaaaggctggtctcttccacactaacacattaatt

SEQ ID NO: 444507 - DNA, 201 bp, Homo sapiens
tggacagtctcttaaaggatgcaggcttccttgattcaactggccattccctgtataatgttagaatcagattggcggttttttctattcatattggcagwgaacatcttggctctgaatatgtactaaatacacacacacacacacacacacacacacattttcacactgatccttcgttcttagtcctgctccaactct

SEQ ID NO: 444508 - DNA, 201 bp, Homo sapiens
ttgtggaaccaagtggttccagggtgccacttgccaccattaggtgccagcaacacagctgagactcagaaacagaattccaatatcaggacataggtcaycatttttttttgtaaacattacttgtgacagaaatggattcttcctcagttctccctgggttgctttctactgaaactcaggaggctctgctgtcacgta

SEQ ID NO: 444509 - DNA, 201 bp, Homo sapiens
gtttcgccatgttggccaggctggtctcgaactcctgacctcaggtgatccacccgcttcagcctcccaaagtgctgggattacaggcatgagccaccgckcctggccacaagtaacatttttattcacttctggtgattaattagaatcactgaaccagaatcatagtttatttaatcatcacaggttgtcttctacatg

SEQ ID NO: 444510 - DNA, 201 bp, Homo sapiens
agccaaacaccgtggaccccaagatctctgtgcactctgcagcagggtacttttgcctggttataagctgaagaaattaaggtggagagctgctgcaaggsaacagggttccaactccaaaaggagagctggggggacagacacgacacccaaacttctgggtggttgcagcttgatgtaatacacgtagaaccactgttg

SEQ ID NO: 444511 - DNA, 201 bp, Homo sapiens
gttactcaatttctctgagtttttatttcaccatctataaaatgtgattattaatctcactttttctcttgtctctacggcagcttatgaagataaattayggttggcagaattataaaacagtttaaactccttggaagcaagacactctattagtccatggtattttataatcactggtattataaggtgtactcgaac

SEQ ID NO: 444512 - DNA, 201 bp, Homo sapiens
atcacctgaggtcaggagctcgagaccagcctggccaacatggggaaaccctgtctctattaaaaatacaaaaattagtcgggtgtggtgcgtgtgcctgyagttccagctactcgggaggctgaggcaggagaatcgcttgaacctgggaggtggaagctgcagtgacgcagtgagcaaagatcgtactgctgcactcca

SEQ ID NO: 444513 - DNA, 201 bp, Homo sapiens
tctcgtatggtaaaactctgacccatggacctcgggaaggaggcctctgcctcctgttagagacatgccattgagaggcacaggtgataagtgagcaaagraaatcagcttccactgcctcaagaagcacagcctgggattacctgacctggtgtgatgaaaatcgccaagttttatgttgcattagtgaagattttccac

SEQ ID NO: 444514 - DNA, 201 bp, Homo sapiens
gccaggcacggtggctcacgcctgtaatcccagcactttgggaggccgaggcgggcagatcacctgaggtcaggagctcgagaccagcctggccaacatgrggaaaccctgtctctattaaaaatacaaaaattagtcgggtgtggtgcgtgtgcctgcagttccagctactcgggaggctgaggcaggagaatcgcttga

SEQ ID NO: 444515 - DNA, 201 bp, Homo sapiens
ggagagcggatcacgaggtcaggagatccagaccatcctggctaacacagtgaaaccccatctctactaaaaatacaaaaaattagctgggcgtggtagcrggcacctgtagtcccagctacttgggaggctaaggcaggagaatggcatgaacctgggaggtggagcttgaagaagtgagccgagatggcgccactgcac

SEQ ID NO: 444516 - DNA, 201 bp, Homo sapiens
ttggttttaaccttttccaatccactctggatccctctcccacccctaagggtgcagccttttctctgcactcatgagacatgtttcagatacagcctgcycccctccctgcccgcttccattcttccttattcaaacagacactgcccactgtctctgtgctggctctaccaggtgacaagcatacaaagatcaatgaca

SEQ ID NO: 444517 - DNA, 201 bp, Homo sapiens
ctctttcaaggaagcaaaaggtaaagttctcccctgctacgattaaaggactgaaacaaattctgactgctgagtctactggttccaccaaactgaacaaygaagaatccctattttggctaataagaaatgctaattattatttctttcagagatggctcctggcttactagggttaagtgtgcaaacataaaaaagatc

SEQ ID NO: 444518 - DNA, 201 bp, Homo sapiens
aagaaggggagagagaacagctgggacctttggggaaggttcccttatttgatgaatgatttggagggagggagggagggagggagggagggatggatggwtggatggttggatggatagatggatggatggatggatggatggatggatggatggatggacaaacatatttctgctgggccaaccatgcacacaaaccat

SEQ ID NO: 444519 - DNA, 201 bp, Homo sapiens
tggctcagctccttccttctaggctatcccttcactgttcagagtccagtcggccaaggtgacgtgggccaggggagaggcaggctgtagcctgacatagygtgtctctgcctcacacccctcgcttgtctcggggttagagatattataagacttggtgaaccatttgtttctttctgaaatcagaatgataactaagta

SEQ ID NO: 444520 - DNA, 201 bp, Homo sapiens
agatattataagacttggtgaaccatttgtttctttctgaaatcagaatgataactaagtagagctagaaaaagaggcaatttttaaattataccacgcaytgagccaaagccgctggtgatacaatgacaacactcatttgtccagggctggccaaatcagtcacagggaccccttttcggtgtgaaactgcaccaaata

SEQ ID NO: 444521 - DNA, 201 bp, Homo sapiens
tttcttcaagtatcttaatctaccccatctctatcgagcactaaaccagtcgaagatactttgggatcagagaaggaacggcagacaaagcctcacattamgcatctctttagtaaagcatccagaaaattctgcctgtgttacttcacttttactcccacctaggcccctgtggctgaggacaagaccacacacaagggc

SEQ ID NO: 444522 - DNA, 201 bp, Homo sapiens
aggccacacagccaggccaggctcttcccatgatggatctccaccaccctagaggcagcagggaagtgggcaaattccagagcccacagcagccaggcagsagggacagaagcagagcctgtctgctgagctacagaaggctgggggatctggggggtgcagtccccaggaggcgctggccctgctccccaacgcccagcg

SEQ ID NO: 444523 - DNA, 201 bp, Homo sapiens
ggattacaggcgtgagccactgtgcccagccatggtactgattcttagtctaagaaccagactgaggaagactttgcccaggaaaaagggagcgcattttwagagagaaaggtaatgagtaacctcctttccgccatcctttgttgatttgagcacttcatgtgttgtatcttgtactcagttatttttcttcattaagtt

SEQ ID NO: 444524 - DNA, 201 bp, Homo sapiens
aattgcctaggcaactggtcagtttccagctaattggatgagagaagcagctggtatttacagagcctcatagagtcacagccacctcccgggtatcttgyttgaggccacacagccaggccaggctcttcccatgatggatctccaccaccctagaggcagcagggaagtgggcaaattccagagcccacagcagccagg

SEQ ID NO: 444525 - DNA, 201 bp, Homo sapiens
ctatttttatatattgatcatttatttttaagaaataaaaattgcctaggcaactggtcagtttccagctaattggatgagagaagcagctggtatttacrgagcctcatagagtcacagccacctcccgggtatcttgtttgaggccacacagccaggccaggctcttcccatgatggatctccaccaccctagaggcag

SEQ ID NO: 444526 - DNA, 201 bp, Homo sapiens
gaaatggccttggaagaacatcacttctgaataaagaacaaagctgtcagagttcacaattgcattatgttgtcatggcaatagataattttcatcatttyaaaatgatgaaaataaataaggagctaaaaagtaaagaaatccctaaaggagaaagcactggcagaagatcagatataacctgtgaccccttccctgtag

SEQ ID NO: 444527 - DNA, 201 bp, Homo sapiens
tgggacgcagggttcagggtatagtcccttgctcaccccaaacactttggtcaagtctgagaccagagtcaatgtcttgctcatttacatagttcactgayaaaacaagggcagggttcactgccactccgaacttgggtaataaatctgcagcgctaatcggagcgcacaggcggagctgtgcatttctggaaaaatgtt

SEQ ID NO: 444528 - DNA, 201 bp, Homo sapiens
gcaacaagggctgggacgcagggttcagggtatagtcccttgctcaccccaaacactttggtcaagtctgagaccagagtcaatgtcttgctcatttacayagttcactgacaaaacaagggcagggttcactgccactccgaacttgggtaataaatctgcagcgctaatcggagcgcacaggcggagctgtgcatttct

SEQ ID NO: 444529 - DNA, 201 bp, Homo sapiens
cgtctactgacttcattaccttcacacgccaatcagatgagctaacaaccattttagagatattctgaagttatcttttgtagctgaaagtctgggaaacyaatcttcagagaatgcctggtttttacaaaggagttctgaaacgcaggtcttctattttcttctgtctatctagagatgggaactcactatgttgcctag

SEQ ID NO: 444530 - DNA, 201 bp, Homo sapiens
tgctgtttaaatggtccccaagcacagtgctaaagtgctgcttagtgctcctaagcacaagaagactgtgatgtgccttatgagaaacgcatgtgttagawaagctcgttcaggcatgagttatagtgctgttgggcatgagtttgatgttaatcaaaactatatgctaagatatatgtttaaacagaaacacacataaaa

SEQ ID NO: 444531 - DNA, 201 bp, Homo sapiens
gcttcacgataaacagtctgtcgtcattattcctggattccacatttgcaaattcacctactcactaaaaggtgtttgtaaccccaaagtcaatactcagrgcacttttggtcatgcctgcgcatgcgcagagcagcaaaaaagttgcgctggtcaacacacacattcccagctgagctccacaatggtgacactctgcct

SEQ ID NO: 444532 - DNA, 201 bp, Homo sapiens
gggtgtccttcttgtctcctgtaaattcccactagtgtgactgcggactgtggatggcacatccctctctctccaccacctgtctggatcctacccatccrggaggacggaactcttctgctctgcaccccaggtcccagggagcccttccaacgctgaacacctgtgccacggatcttacctggctccgttctaatgtga

SEQ ID NO: 444533 - DNA, 201 bp, Homo sapiens
ctctgtgagtgccactgggcattcagcagctcctgtctccttgtggacggtcttacctgtaatatctggactgcaagtaggtggagcacacagccttggasacgtggctggctgaaccaaagtcgatgaccttgactctgtatggttgtctagatggatccaccagcatgatgttttctggtttgaggtcagcgtggataa

SEQ ID NO: 444534 - DNA, 201 bp, Homo sapiens
tgatgttttctggtttgaggtcagcgtggataagacctaggcttttgagtttcatcagggctgtggctacctgctggagaactgggcgaatgtatttgagrggcaaggggctaaacttgttttgcttcagaaagtcatagaggttctgctccaacatctcgaagaccaagcacgtgtggttcttgtgctggaagcattcgt

SEQ ID NO: 444535 - DNA, 201 bp, Homo sapiens
tctctcaatctactgaggagcaactgtagtcactttggtataaaagagaattggagccaggttcagtggctcacacctgtaattccaatgctttgggaggccgcgatgggtggactgcttgagcccagaagttcaagaccaacctgggcaacatggtgaaatcctgtctctacaaaaaacaaaaaaaattagccaggtgtg

SEQ ID NO: 444536 - DNA, 201 bp, Homo sapiens
cgcctgcagtcactgggcactttctattgtactagctcccatacagcaacatttctagcagcagaaaagcaggaaaaccactctccagggagaggttcctkccctgtcctggccccaaattacctggcaccaggctatcacactccaccaatacttcgctggcctgggttttcaggggtggcacgatgatggttcgggggt

SEQ ID NO: 444537 - DNA, 201 bp, Homo sapiens
gctattgttggtgtcattattgaactctgtctcctggttaaagctgaggctcaaaaaaaggtgtcttggccgggcatggtggcttatgcctgtaatcccakcactttgggaggctgaggcgggtggattgcctgaactcaggagttcgagaccagcctggctaacgcggtgaaaccccatctctaccgaaatacaaaaagt

SEQ ID NO: 444538 - DNA, 201 bp, Homo sapiens
ggtgacactgaaaagcgtaaggaagccctaggagaggaaagatgaaataactgagtatgggaaagagctttggccagggaatccagtcattcgccaaaatrcggtgctattgttccacagagccccaactctaaagcagtccacatttgaggaaggtgcccaaagtaggggtgttcaaaggacgaatcaggtaaaatgttt

SEQ ID NO: 444539 - DNA, 201 bp, Homo sapiens
ttaagaggggtgctgaaatgcctcctcaagcaaactttacctccacttcctcatgtgaaaatgttaccagcaaagttccaaagctctaggggaaaagtgakaccagcaggattgaatgcagcactcaagtcccagggagaaaacttcacaccagatatacctgttcgcagagtgtctgtctcagaatcaccctttgacaat

SEQ ID NO: 444540 - DNA, 201 bp, Homo sapiens
tgggactacaggcgtgagccaccgcacccggccaggacactctctttgagcagcagttgctttcttactcactgtaaaatcttgttctcaaaattattggmtctcacaacatctctacaaaaaattttgaaaattagctgggtgtggtggctcatgcctgtagtctcagctactcgggaggctaaggtggaggattacttg

SEQ ID NO: 444541 - DNA, 201 bp, Homo sapiens
ctcactgtagccttgaactcctggcctagaatgatccccccgccttgggctcccgagaagctgggactacaggcgtgagccaccgcacccggccaggacamtctctttgagcagcagttgctttcttactcactgtaaaatcttgttctcaaaattattggctctcacaacatctctacaaaaaattttgaaaattagctg

SEQ ID NO: 444542 - DNA, 201 bp, Homo sapiens
gagcaatgcagctgtaacccaagggatgcccagcattgttgggagccatcagaagccgagagaaggcaagaaggggatttacctggagtcttcgagggaaygtggccctgccaactcctccaaaactgtgagagaagacatttctgttgttttaggccacctattaatagtttgtgttaatttgttacagtcaccctatga

SEQ ID NO: 444543 - DNA, 201 bp, Homo sapiens
attatggtggcttaggctagctacagggatccaaactacagactggacaccaaattcaaacccaagtctgcttttaggagtaagattttgccggaacacgcccccccccccacacgcccctcccaccacgtgactcgtgtatgtattgtctgtgcagctttcactctacaacttcagtaacggcggcagagaccagatggc

SEQ ID NO: 444544 - DNA, 201 bp, Homo sapiens
tgtcaggatttataaaatcagctcctatggcgacgacacaaacacagctctcaaagatactctcattctacctggcatctctaacaatgctaggtcccacrtacaaataaaccaaaaagggcctgaatctcagttcctggtaaaaatctcatcccattcctacttagcctaaaggtttttttttttctgtttaaaaaataa

SEQ ID NO: 444545 - DNA, 201 bp, Homo sapiens
gaaaaagtactaaaagtgaaatatagtttattaatattcatactgtctcccactgccagcagccataagtgttccatcattagaggagcaggctgcttgcrggccgattcccagggagccgtggtcctcgtcatcaaagtgaccatcacagtgggcggctcagaacggagggttaggcctcaccggaactgcacgactact

SEQ ID NO: 444546 - DNA, 201 bp, Homo sapiens
ttaggctagctacagggatccaaactacagactggacaccaaattcaaacccaagtctgcttttaggagtaagattttgccggaacacgcccccccccccmcacgcccctcccaccacgtgactcgtgtatgtattgtctgtgcagctttcactctacaacttcagtaacggcggcagagaccagatggcctgcaaagcct

SEQ ID NO: 444547 - DNA, 201 bp, Homo sapiens
ctctggctgcgaggttcgccattttgtcaagaaaacaaaacgcctgtctgtagctcagtgcacggacttcactcacaaacaccatctccatgaaaaagtamtaaaagtgaaatatagtttattaatattcatactgtctcccactgccagcagccataagtgttccatcattagaggagcaggctgcttgcaggccgattc

SEQ ID NO: 444548 - DNA, 201 bp, Homo sapiens
aatgcttgctgcaaactgaacacatgaaaggagtgataatccaactctaaaaacaagccacttccacatgcataaagagtgcagtctttccttgaagtgaytgattctaaaccgagaagaaacttggaactgcaaaagcagaaatatactttttttcctattcaataaatcatcaagaaaggttaagtctgaagggtctgc

SEQ ID NO: 444549 - DNA, 201 bp, Homo sapiens
cagactggtctcaactcatcactacaagcaattcttctgcttcagcctcccaagtagctgggattaaaggtgcaagcctagctctagcattttaaaattarctctagtattttaaaattaagtatgtgcaattttttagacatgatatagcatacaaatgaggtaagtacaaatgattgcacacaaagactacactacagt

SEQ ID NO: 444550 - DNA, 201 bp, Homo sapiens
ctgatcagtcagcaacgattgacatcgaggtaagaccctccaaccagcaaaaagattatgactcactgaaggcccagaagatcactagcatttttagcaaygaagtattttattcattcattcattcatttatttatttaaaaatgatgtcttgctatgttggccagactggtctcaactcatcactacaagcaattcttc

SEQ ID NO: 444551 - DNA, 201 bp, Homo sapiens
aggagataaagctgagaactcgatacatttacatgttgattccaactaccttgttagctccagctctactaaccttcctgggtccttaacttgaatgaagytggtctattcgctgtttctagaatgtctcttatacttcctatcttcacactcttacactattcctttacctggcatgcctttgctgcttttctcaactta

SEQ ID NO: 444552 - DNA, 201 bp, Homo sapiens
caactaccttgttagctccagctctactaaccttcctgggtccttaacttgaatgaagctggtctattcgctgtttctagaatgtctcttatacttcctaycttcacactcttacactattcctttacctggcatgcctttgctgcttttctcaacttatccaaagaccagccagcttagattccttctctttccagacca

SEQ ID NO: 444553 - DNA, 201 bp, Homo sapiens
tgacagtaataagcccgttttttcttttgtagactgagagagaaagatcttaaaaagttgtcttcttgaattcagcctttcaagactcattggtgaatgasaaaatgagacatctggttctccaaaatgtatctgttgagcatggttcttacacggatggtatctggcaaatagagatgagcatgagaccacataaatgcc

SEQ ID NO: 444554 - DNA, 201 bp, Homo sapiens
ctaacatccagcacctgattggagccccacctccaccctgggcccatggatctgctggagggtgttcccttcttgcttcaatcctgagctccgacctccayctacgcactgtgactgcacgtctgtaggaatcctcgtgcctgacaagactattctggcttgcttattcagaatccgtacttcacccgtttcttcccactg

SEQ ID NO: 444555 - DNA, 201 bp, Homo sapiens
actagtcaaggctacttcccgcctcatttgtcaatatccttttcaggaaaaacagaggcttaatgcacattgtcagtttgatccaatggcaaaatctcaastgctttttaagttatctctgcacttcctagttggctcttgaaagagaaggcggattttactccttctaggtgagagaccagggggactactggacttggg

SEQ ID NO: 444556 - DNA, 201 bp, Homo sapiens
gcagaggtgggcggatcacctgaggtctagagttcgagaccagcctggccaatatggtgaaaccccgtctctactaaaatacaaaaaaattagccgggcayggtggcacgtgccttgtctgtagtcccagctattcggtgggctgaggcacaagaatcacttgaacctgggaggtagaggttgcagtgagctgagatcacg

SEQ ID NO: 444557 - DNA, 201 bp, Homo sapiens
agtttgatccaatggcaaaatctcaactgctttttaagttatctctgcacttcctagttggctcttgaaagagaaggcggattttactccttctaggtgasagaccagggggactactggacttgggagggcaagtttcgagcccatggggagcagtaagaggaacccaggaggtcacggtaggataaatctgccataacc

SEQ ID NO: 444558 - DNA, 201 bp, Homo sapiens
gttcctccaagttcatcaaaccgccttcttttacagggatgttctctgggtgatgtggcaaaaacaaatgaagaaagtccctcctgacccagactccttarcatactgctggacggtcactgtcatcatacaaatcactgccaagctcatcagacgtgattgtcatgaacagaaagctatccaccagcacagtggacccag

SEQ ID NO: 444559 - DNA, 201 bp, Homo sapiens
gatatgtcatacctaaataaagagagatgatgttacaaagataattgacactaatcttagtgaagtctagaagtaagtcataggtttttcactgtcgaggkgggaagggaatatttgattctagatatcccatgcaggttctttaagagaagtatcccatgagcagagaatgttttcatgatttataaatacatttagaag

SEQ ID NO: 444560 - DNA, 201 bp, Homo sapiens
gtaaaacaaggtgaattacaaataatcaaatagaacttaattaaaataattaccatagtaaacacagccaaatttagagaatagtatagttaaaaaacacwacaatcagagtgaaacatttaaaaaaaaatgaacatgttgaagcagacactgtaagttgccttcctaatagccattccctctttctcttctggagagaca

SEQ ID NO: 444561 - DNA, 201 bp, Homo sapiens
acaaaccagccttgaagggtatttgagggccagttatggaaatcggaatagaaacaaggtattaaacgagatgaactttattgaaatacaaagttggagastgtcatccaaaaaaatcagataataaaacagtaatacatcattttggttaaaaaaatgtgcacacatctatgcatacaaaaagacctaagagatgtaaca

SEQ ID NO: 444562 - DNA, 201 bp, Homo sapiens
cagttcgtggtcacaatgacctggggctggataaggctgccctctgcacgtgtgtgtcaccagatgcagaccttagtcattaccagctcactgaccacctrcctggccctggaggcacttgagttcgtgactcctaggagagaggcgagctggagggggacaaatgaaacacttacatgaaatcactgcttttagctctat

SEQ ID NO: 444563 - DNA, 201 bp, Homo sapiens
catgcgtgaacacgccagttaaaaaaaagtaatagtcttgaaggttgtctgataggcacgtagactggcagttctgctgagtgttttgggtctttgtgttscatcaaaccagtagaaggataagaagaagtactcagacctgttattttggccttccagggaataacatttgctgagttgcattttcatgttaggccttga

SEQ ID NO: 444564 - DNA, 201 bp, Homo sapiens
agagtaggaagtaggcacccttggggaaaatggcaaagcctatagggtttcaaatagaacacagtaggcaactaagaaaagtaaaaacaaccaattttttkttgttgttgttgttgtttttaattagagcctcaaccaaactcaaatacaatttgcatgaccacagctgaattcgcctatcatgtataccacaggacattt

SEQ ID NO: 444565 - DNA, 201 bp, Homo sapiens
taaaggaaagagtaggaagtaggcacccttggggaaaatggcaaagcctatagggtttcaaatagaacacagtaggcaactaagaaaagtaaaaacaaccmattttttgttgttgttgttgttgtttttaattagagcctcaaccaaactcaaatacaatttgcatgaccacagctgaattcgcctatcatgtataccaca

SEQ ID NO: 444566 - DNA, 201 bp, Homo sapiens
actggagaatgaattagggtcaagaaggctcagggtggggaggcaagtcaggaggcctatatgataattggatgatcatttaaccatggatgaggagactygtgccagggaagctggaaaggctgcactcacacatcaccaccaagctgcttttgggactcaggggccttcccttggttctcatcctcagccttgcctctc

SEQ ID NO: 444567 - DNA, 201 bp, Homo sapiens
ctgtgaactttctcagggaaacacaaggaaccactgagggcactgtggccttgctttccttgggacagagggaaacactccctgcaggaggggctcagtgyagcactgtgggctgcaaggggaccacgagaaccagaactcaggagcttccgtatgcctctggggaaaaaggaagtggctctgacagcctggtaggaacca

SEQ ID NO: 444568 - DNA, 201 bp, Homo sapiens
ttagagatcttatgggacaaatcacacctcccacaccgccatctcgtatggtaaaactctgacccatggacctcgggaaggaggcctctgcctcctgttasagacatgccattgagaggcacaggtgataagtgagcaaaggaaatcagcttccactgcctcaagaagcacagcctgggattacctgacctggtgtgatga

SEQ ID NO: 444569 - DNA, 201 bp, Homo sapiens
agtgagtgaaaggaggaacaggagagaaattgtgtgtgttatggggatggcagtgggttagaaagctaaatcttcatcttccataataggaagtcaatggrtaatacctaaaatggaaaaaaaaatccataaaaagcagtctaagcatattatttagaaacacagagttaaagaacagattaaacagttaagttaaaaatt

SEQ ID NO: 444570 - DNA, 201 bp, Homo sapiens
ttacataactatctcccccaaagcctttccctcctcccagagtcttttaatattatttcaggtttttcacattaattgattattaaaatacacttgctaaractacattattctcaccaactgttatatgtttagcttggcttctgacctctactgagatcttctttattcttccaaagggtgttacccacaaacgtgcta

SEQ ID NO: 444571 - DNA, 201 bp, Homo sapiens
tcagaagagagggatccttatgtttgatgatggaagatggtcagatctgcacacaatgcaaaccctcccggctccttcctggaaggctaaggtggcactgyctcacctggtgggggcgtgtttctgttcctcctcctcgtccgtgtcactgctgatggtgatgacgctgaccgtggggctgggagtgtcgggaatgacaat

SEQ ID NO: 444572 - DNA, 201 bp, Homo sapiens
tctatagagaagcccacattcaatagtctctcccctaccctccaggtttccaattagttttttagtgctttagtcttaaataggaatgaatagctaatgawcaccagacagtaaaggaagcctctaacctgaaagagaataaaataagcaaacaaaagaaagaggaaacaaaaacagtgtgggaatcagaagaaaattttc

SEQ ID NO: 444573 - DNA, 201 bp, Homo sapiens
cagaatgagagatagcccaatagggccatgaggagttggggacaacttggagggttgccatctggctctgcactggtgaaggggccattgtggtggtgttygggggaaggtacaagggtatctagccataaaaataacagaggagcgcatctgtgaggaaatcatgagttgggcagggtagagttctggaaacagatgcag

SEQ ID NO: 444574 - DNA, 201 bp, Homo sapiens
ctgactgggggcttatatcaccacctttcttcttttctcggagagatcttaattcacaatagccttgtaggtcagaataagaactgtgggaggttccctgkgtgatatggaggctgtcagggggttgaggggagtgacctgtcctgatattcgtgcagaatgagagatagcccaatagggccatgaggagttggggacaac

SEQ ID NO: 444575 - DNA, 201 bp, Homo sapiens
ttgttcagagatatttaagttagtgtggttactttgggaactacttctgtttgtcttcaaactcagtgagaggctgctggcatgatggatgtgaaatttattgtttattgtgtgcttatttaagactttaaaatgaatgtgcatctatttttatatattgatcatttatttttaagaaataaaaattgcctaggcaactgg

SEQ ID NO: 444576 - DNA, 201 bp, Homo sapiens
tcaccaacaagggagagacttctggtctttcagactgttttgctaaggcattggtcttaaaaataagcaaatacatacctttcactataattatatcgatyttgaaatgtactggcaatgaggcttcatgaagtcagctgggtggtgagtaaacaaaaaggagggacttgctaaacaggttgggaggctaagggttcttac

SEQ ID NO: 444577 - DNA, 201 bp, Homo sapiens
ggatgaacaggaaaaaagaagtagatgaacacttttgtagggattttgatagcgccttttgggcatttacatggactttagaaactcatattatggcttctttttttttttttttttttttgagatggagtctcagtctgttgcccaggctggagtgcagtggtgcgatctcggctcactgcaacctctgcctcctgggtt

SEQ ID NO: 444578 - DNA, 201 bp, Homo sapiens
aaagcaaaaatgagagagaggcggaagtcactgcttgaacctaatttttctaagaaatctaaaatgaacgtttgtgattcttccttgatagattcactggkgtgtgtgtgtgtgtgtgtgtgtgtgtatgttgtgttttaagctcttttaatccatgatcactattctgcttgtctttggtcattagatgattcagactga

SEQ ID NO: 444579 - DNA, 201 bp, Homo sapiens
cctggtaaactggtttctgcttttaccactccactgaatggctgccactgcgttactgacaacttgtgagttgttaaaccgaatggacatttttttccagactcatttgacttgtgtggcagcagacagatctttgctcaacacagatctaaccagctattcccttgctgaagaatcatttaatgagttcccattgctttt

SEQ ID NO: 444580 - DNA, 201 bp, Homo sapiens
tgggtgacagagtaagaccttgtcttaaaaaaaaaaaaaaaaaaaaggaaagaaagaaaagaaagttttcagatgaggataccactgctccatcttctcawtaaccagttttcttatcctaacaatggggcctctttgtagtccaagaacagggactctcctacagtgcctttggaacggagcaacattcagcaaaagaga

SEQ ID NO: 444581 - DNA, 201 bp, Homo sapiens
ctggtaaactggtttctgcttttaccactccactgaatggctgccactgcgttactgacaacttgtgagttgttaaaccgaatggacatttttttccagactcatttgacttgtgtggcagcagacagatctttgctcaacacagatctaaccagctattcccttgctgaagaatcatttaatgagttcccattgcttttt

SEQ ID NO: 444582 - DNA, 201 bp, Homo sapiens
gtaaactggtttctgcttttaccactccactgaatggctgccactgcgttactgacaacttgtgagttgttaaaccgaatggacatttttttccagactcatttgacttgtgtggcagcagacagatctttgctcaacacagatctaaccagctattcccttgctgaagaatcatttaatgagttcccattgctttttgga

SEQ ID NO: 444583 - DNA, 201 bp, Homo sapiens
gatggatagattgcaaaatttttctcccattctgtaggttgcctgctcactgtgatgatagtttcttttgctgtgcagaagctctttagtttaattagatyccatttgtcaattttggcttttgttgccattgcttttggtgttttagtcatgaagtctttgccatgcctatgtcctgaatggtattgcctaggttttctt

SEQ ID NO: 444584 - DNA, 201 bp, Homo sapiens
tctgatgtgaactactgggtgacagaaggtgccatttatggaaataaagaattccagaacagcagtatatttcagggggttgaccaagatgtttcctttgratgtgttaaggatgagatatccaaagagagaggtccagtagcttgatggctttatgactctggagctgaaaaaagaagtctaggtaaagatacaacttta

SEQ ID NO: 444585 - DNA, 201 bp, Homo sapiens
tagggggagtcgtggactgtgacacagctgatgacgttttttctttgcttggagacagtgctgaaaatgcaaagggagaagtcagaggtgggagaaggccrtgaggtgagacacccaactagcacttcatgccctggggcaggggagggaggcagaggggagagggcaggaacagggcttttgccctccctaacccccata

SEQ ID NO: 444586 - DNA, 201 bp, Homo sapiens
acacagcccagggaccacatgtcaattgcctcacaaaatggtaaaccaaggatgatctcaggggccctgaaaaggaagaatggaagaaaccattagcaagytggaaatgcaggaagctgtttctatatgaatactatctttcaaacctggggtgccattactgactcctcctctgaagggcctgtggctctcaggagaggc

SEQ ID NO: 444587 - DNA, 201 bp, Homo sapiens
ctgtatgcctttcaaatgtcaagatattctgaaaataatcaaataaccatgaaagaattcacgtggaaggatcactttaacctgtgccttatataatgtastcaatttacagaaaagccaattccacgttcttatccaaaacaataaaatcaatgatgcagccttaaaatctctttctctggattaatccctttacctaac

SEQ ID NO: 444588 - DNA, 201 bp, Homo sapiens
aataacacagcccagggaccacatgtcaattgcctcacaaaatggtaaaccaaggatgatctcaggggccctgaaaaggaagaatggaagaaaccattagyaagttggaaatgcaggaagctgtttctatatgaatactatctttcaaacctggggtgccattactgactcctcctctgaagggcctgtggctctcaggag

SEQ ID NO: 444589 - DNA, 201 bp, Homo sapiens
tgctgaggcaggacaacagctgctctttgatttcttcagagagcaactacagacaaagagacatttgtctgtaaacatgagtaactggaaaatgcagtgcygaggactatcaactgttacagaatgggtggtgggatttagagatcttatgggacaaatcacacctcccacaccgccatctcgtatggtaaaactctgacc

SEQ ID NO: 444590 - DNA, 201 bp, Homo sapiens
aaaaaggtttagcaaacagctgccccagaagggacttcttagaacttacaaggaatgtaaaatgattattccactttacattacacagtgtgaactttaakaggagagatccgatgttatgtttctgcaatgtttgtttatggaggtcttcgttatataagacctccgtggagaggaactgcaatgctggagtctcacttt

SEQ ID NO: 444591 - DNA, 201 bp, Homo sapiens
ggaaaggctgatgaagggaatacggcacacagtccccagccttgttactttatccccccgggatagcatcaatagcttacatgggagtgagcatcattcckgcttgcaccttcacgtccggttaaaacgattctattctgcaagccagagcttaggttccatcacttcctaccgagcaacgccccccacccttctcatcag

SEQ ID NO: 444592 - DNA, 201 bp, Homo sapiens
tagttcttctctgataataaggatttcaatggtgaaatgtgaatagaaacctataaagctccactttttaataggagaagcttgacatagggagtttgtawctatctatcatctatctatatctatctatctagatatctatatatatgctgaggaatagtgggtgaaaagcaggtgataaaggagatactatttacctac

SEQ ID NO: 444593 - DNA, 201 bp, Homo sapiens
cacaggtactaggcgcttggagtctggggccccagacttgcttccatatttaaatgtcagcactcactttgctgccagtgactctcatcttatttctcacrtgcggactcgacacagcatgaggggcaggcaggtggggaggtggcagcaaaacaagaatgcatggttctgacctcaagaagcctgagagttactgtggag

SEQ ID NO: 444594 - DNA, 201 bp, Homo sapiens
aatcagctcctagactggaagcatcccgaggccatggcctgtgcatgactgatctctgtacacctcacagcacccagcgtacagccttgtctactggggtragagggtcggtgtctgcagacattgggtgtcattgttcacactcatgagctggaagaagctgtggtttcattatcttctttcctaccgccaagcactgtg

SEQ ID NO: 444595 - DNA, 201 bp, Homo sapiens
aacaagaccagaggacagcatatgaaaaacagtgagcaaggccacaggtactaggcgcttggagtctggggccccagacttgcttccatatttaaatgtcrgcactcactttgctgccagtgactctcatcttatttctcacgtgcggactcgacacagcatgaggggcaggcaggtggggaggtggcagcaaaacaagaa

SEQ ID NO: 444596 - DNA, 201 bp, Homo sapiens
gagagtatgttttcttcttacagcacatcctgctcagtgactgtgtcatcaccaaacatttaaaaagagtccgttatgttaaaaatattatgctaaccacygagaacacaaagaggtgtggacacagtcactgaccttcagggtactgacaggttgtgcaacaggtcactttacaaacaagaccagaggacagcatatgaa

SEQ ID NO: 444597 - DNA, 201 bp, Homo sapiens
ccttacctgctctagcactccctgctgactgaggctccctcctgtgctctattcctacaacgctaactatgtctctactgccaattcagctctttcactcrtccttgcactgatagtttttttttttttttttaaataagaatcatctataatcagctcctagactggaagcatcccgaggccatggcctgtgcatgactg

SEQ ID NO: 444598 - DNA, 201 bp, Homo sapiens
tgatatattctgactaattcacagaatgagggagagtatgttttcttcttacagcacatcctgctcagtgactgtgtcatcaccaaacatttaaaaagagyccgttatgttaaaaatattatgctaaccactgagaacacaaagaggtgtggacacagtcactgaccttcagggtactgacaggttgtgcaacaggtcact

SEQ ID NO: 444599 - DNA, 201 bp, Homo sapiens
acaagcagggaaactaaactttaggtctaagtttcttggattgcttgtgcaaagcctgtgcatttgcaacaggcacggttattcagatgaattttctccartgccctactaccctttctccatataggttctatatatcacaacaaaactgactgctcacactgcattctcacatcaggtccacctgcagcatcactgctc

SEQ ID NO: 444600 - DNA, 201 bp, Homo sapiens
tgcagcctcatttctcagttctgtaattaccacccctcccacagactggacaccacagcggcctatgaattatgcatttcatttccacctccccacacccygactcggtgaccactgctgcggcgggtggctgcggggggcgggccgatgcagcaccccttcccccaggtacacgcgcaaatgttacagggccccagagcc

SEQ ID NO: 444601 - DNA, 201 bp, Homo sapiens
atggggacaggtagtttggggttagggagttaagaccaggtgcctcatgagggctggtgggagaaacaaatgtcttcaaggaggtaatgaacaaaaccatsctgatttttgtcaagaagctcacaggtctggctatggatgctttagccttagggctgggcaaggttagttttcggactcccaacagctctttcaccctaa

SEQ ID NO: 444602 - DNA, 201 bp, Homo sapiens
taaactggtttctgcttttaccactccactgaatggctgccactgcgttactgacaacttgtgagttgttaaaccgaatggacatttttttccagactcatttgacttgtgtggcagcagacagatctttgctcaacacagatctaaccagctattcccttgctgaagaatcatttaatgagttcccattgctttttggat

SEQ ID NO: 444603 - DNA, 201 bp, Homo sapiens
ataccactgctccatcttctcattaaccagttttcttatcctaacaatggggcctctttgtagtccaagaacagggactctcctacagtgcctttggaacrgagcaacattcagcaaaagagatgagaatgctcattttgttctcgtgagccccaaacactactccagccaactgagctaaccagcttatggaatcaggga

SEQ ID NO: 444604 - DNA, 201 bp, Homo sapiens
ctactcctacttcaccccagtcccaagccagatctggatggtctcagtgccgtggagaagacgggtgttcttatttgacaactgccttttgatgagcaacmcttttagttttgcagagtctttgcgacaccctttggagtggatatgctggctgtcatatcaccagcaagatggcggtggccccccaccccgcgtctggtc

SEQ ID NO: 444605 - DNA, 201 bp, Homo sapiens
aaactggtttctgcttttaccactccactgaatggctgccactgcgttactgacaacttgtgagttgttaaaccgaatggacatttttttccagactcatttgacttgtgtggcagcagacagatctttgctcaacacagatctaaccagctattcccttgctgaagaatcatttaatgagttcccattgctttttggatc

SEQ ID NO: 444606 - DNA, 201 bp, Homo sapiens
gaaagcatgccttagtgcttaaggctaggtgtgtcctgagtaatttttttttcctgatgtattcaaaagtagggagtagtagaatccaatgcaagagaacrgaaatcctgttcttggaccctttgcttttgtgggatgtcattttcccttacccacgactctggcccaagcatcacactaagttaccagctactcctactt

SEQ ID NO: 444607 - DNA, 201 bp, Homo sapiens
aacaaaggctaagatgataaattttatgctatgtgtgtgtttgccacaatttttaaaaaagagtcacggccaagcagtacaaataagatacaaaaaagtcdatgtatgtatgtatgtatgtatgtatgtatgtatgtatgcatgtatttaacctttagagggaagtggaagggcctgagtgtgcccgtcctccacctacag

SEQ ID NO: 444608 - DNA, 201 bp, Homo sapiens
tatcagtggagggaaagcatgccttagtgcttaaggctaggtgtgtcctgagtaatttttttttcctgatgtattcaaaagtagggagtagtagaatccartgcaagagaacagaaatcctgttcttggaccctttgcttttgtgggatgtcattttcccttacccacgactctggcccaagcatcacactaagttaccag

SEQ ID NO: 444609 - DNA, 201 bp, Homo sapiens
ttttgtgactactggatatatattatctttaaaccatattaggatttggctgcagattccattaaaaaaacaaatccaaaacaacaacaaaacaaacaccyacccaccctgctgcaaaaaaagaaatacctaaaatgaaacatatttaagactttattattttctttttaccaggaaaatactttgattttaattgctagg

SEQ ID NO: 444610 - DNA, 201 bp, Homo sapiens
aagggcgcagggcggtgcacagcacaaagtcaatatggcctaagtcacagtgatcaccgtgaccctcaagcatctgggtttcttttataggaaaaataaasatctgcctatactgtaggtttttcttttcttttttcccccaaaagagaatagctatatgaaatggaactcttgcgagtttgggcctttcaagttcacatc

SEQ ID NO: 444611 - DNA, 201 bp, Homo sapiens
agcaaaaatgacagggaggaggaacaggagggctagaagtggcacctggctcatgcagggttaggacttgggacctcagggatttagcccaaacctcttattttatggccattgtcattacgccctctagagcctccaccttagctcttatgttgaagactttatcctgcgcagtcccactgcagcatgcgaaatcacatg

SEQ ID NO: 444612 - DNA, 201 bp, Homo sapiens
aaaatgacagggaggaggaacaggagggctagaagtggcacctggctcatgcagggttaggacttgggacctcagggatttagcccaaacctcttattttatggccattgtcattacgccctctagagcctccaccttagctcttatgttgaagactttatcctgcgcagtcccactgcagcatgcgaaatcacatgctct

SEQ ID NO: 444613 - DNA, 201 bp, Homo sapiens
aagggtgcagccttttctctgcactcatgagacatgtttcagatacagcctgctcccctccctgcccgcttccattcttccttattcaaacagacactgcycactgtctctgtgctggctctaccaggtgacaagcatacaaagatcaatgacatactcagaccagattggtccaataaatactaactgagcacccactgg

SEQ ID NO: 444614 - DNA, 201 bp, Homo sapiens
ataaagtttatttctcacagttctggtggctgggaagttcaagatcaaggtgccggcatttggtgtctggggagggccttcttgctgagccctcacacagyggaaggcagaaggtcaagagagcaagctaagctaacagctacatgaagccacttttctattattttttttaaattatactttaagttctgggatacatgt

SEQ ID NO: 444615 - DNA, 201 bp, Homo sapiens
tttgtcatgtaatcaatgaaatgctaatccaggctattttccagatgaagaatgaggtcttgtgaatatctgtgtcatctggacccacctgatcatactcygaagctcctggatataacggccaacccaggaacaattctgcaataacacagcccagggaccacatgtcaattgcctcacaaaatggtaaaccaaggatga

SEQ ID NO: 444616 - DNA, 201 bp, Homo sapiens
atgagggaatgaagcaagggaaagcggaaaagaatcaggagaggcaaggtgggctggtggcctaaggccaggcccagtgccgttcctctgggaggtgttaytttcagcatctggaaaatgggtaggagagatctgctataatttgaatgtgttccccaaagttcttgtgttagaaacttagtccccagtgcaagtgtttag

SEQ ID NO: 444617 - DNA, 201 bp, Homo sapiens
ccagctgctgggtgcctgccatggtctcgggaatcacggtggcatgctgcactgatgtgtgggtggccactccagtcagttgctgccatgctgggggaagyaggatctgctgggtcccacttggccaagcctgctgtagaacacaggacatgtgcaatgaccatgtttgctaatcacataattgatttgcatgaacccaca

SEQ ID NO: 444618 - DNA, 201 bp, Homo sapiens
tagagctcctctataagatcaagcttcctccccaattaaacgctgactgcagttggttatctcactagctgtgcagctgctgaagggatgagcctggccaygtgtgctcaacgggtgggtttcttctactcataaggagtaggtgaaacataactggctgtgagtgagaaagaggactttcaagtgggaagaatgccaagt

SEQ ID NO: 444619 - DNA, 201 bp, Homo sapiens
ggagcacgcagagaagctctggatttgtgtttccaacaagccttaggtcagcaccccctgatacccaacacatcactaggtcctccatccagcccctgccytgccctgatgggaaccaatgaagcactttctaaaaaggtaggaggcacaaggaaaacacagcctgaggaggacttccaagcacccaaatgcaggcaagac

SEQ ID NO: 444620 - DNA, 201 bp, Homo sapiens
ttctaaaagtagagctcctctataagatcaagcttcctccccaattaaacgctgactgcagttggttatctcactagctgtgcagctgctgaagggatgarcctggccatgtgtgctcaacgggtgggtttcttctactcataaggagtaggtgaaacataactggctgtgagtgagaaagaggactttcaagtgggaaga

SEQ ID NO: 444621 - DNA, 201 bp, Homo sapiens
ttaaatactgaatgggcttggaatttggggaggggcatatatatagagagacatacctcattatattgcccctagcttgactgagctttgcagataccatggtttttttttttttacacaaattgaaggtttgtggcaaccgtgcatcgagccggtctatcagtaccatttttccaaaagcatgtgctcacttcatgtctc

SEQ ID NO: 444622 - DNA, 201 bp, Homo sapiens
agggctgtgctgctggaagggtcacatgaccggtcaatagtgcaggctgctgcatgatgggattataatggcttccgtgagcatgcgtatttctgaaaggsaaccgggacaacaaggtgccttagaggtgttctaaaagtagagctcctctataagatcaagcttcctccccaattaaacgctgactgcagttggttatct

SEQ ID NO: 444623 - DNA, 201 bp, Homo sapiens
aaatactgaatgggcttggaatttggggaggggcatatatatagagagacatacctcattatattgcccctagcttgactgagctttgcagataccatggwttttttttttttacacaaattgaaggtttgtggcaaccgtgcatcgagccggtctatcagtaccatttttccaaaagcatgtgctcacttcatgtctctg

SEQ ID NO: 444624 - DNA, 201 bp, Homo sapiens
gcttactcttccgggaggaggtggtgctggttggctgctgccgcatcacgtgggccacacccacatttaagggctgtgctgctggaagggtcacatgaccsgtcaatagtgcaggctgctgcatgatgggattataatggcttccgtgagcatgcgtatttctgaaaggcaaccgggacaacaaggtgccttagaggtgtt

SEQ ID NO: 444625 - DNA, 201 bp, Homo sapiens
aatctactttgcctgtgctttataaatggaactgcaaagcctagatgacaggacatctgtttaaagcctggtttactgaatattttaagcccattgttgaracctacttctcagaacaaaaacatttctttcaagatatgactgctcattgacaatgtacctagtcacccaggatctctgatggagatgtacaagattaat

SEQ ID NO: 444626 - DNA, 201 bp, Homo sapiens
tgcaactgtcccatgttcagagtgggtgctgatactccctaaactacatttctttagcactcacatcccctgggatttctcttccctagggtggctctcaycacctacctcacagatgactggtgctgcttactcttccgggaggaggtggtgctggttggctgctgccgcatcacgtgggccacacccacatttaagggc

SEQ ID NO: 444627 - DNA, 201 bp, Homo sapiens
taaatggaactgcaaagcctagatgacaggacatctgtttaaagcctggtttactgaatattttaagcccattgttgagacctacttctcagaacaaaaasatttctttcaagatatgactgctcattgacaatgtacctagtcacccaggatctctgatggagatgtacaagattaatgtgatttcatgcctgctaacac

SEQ ID NO: 444628 - DNA, 201 bp, Homo sapiens
taaaatgaaagaagcaactctaccaacgctattaactacagttaattgtatttcaggtttacttaactcacagaaagcggaaacataatttaattgattamaacagttgcaaattccaaatattaaataaataacaatttcgtttgcagtaaggtttctactgacttagccaattggaactcatttcagagctcatgaaaa

SEQ ID NO: 444629 - DNA, 201 bp, Homo sapiens
atggctccagatgagctccctgaagagtgaccgctggtggaggtcacgttgctggaggacttggacttgtaggaggacgagtggtgactggtgttgactgyggcgggaggagaaagaggtcagatcagtggcagggtcccagctgcccagaagatgctaccccaccagagaacagtggtcttccaggaagaaacatgtgcc

SEQ ID NO: 444630 - DNA, 201 bp, Homo sapiens
aggggagggcagagggccaagaagagtagggacatacagcaggctgtggacagatgctggcttccctatgctacagttttgatgtttgtccccctccaatcttatgttgaaatgtgatctccagtgttggaggtgggaactaatgggaggtatttgggtcatggggacagatccctcatgaacggcttagtgttgtcctcg

SEQ ID NO: 444631 - DNA, 201 bp, Homo sapiens
ggagggcagagggccaagaagagtagggacatacagcaggctgtggacagatgctggcttccctatgctacagttttgatgtttgtccccctccaatcttatgttgaaatgtgatctccagtgttggaggtgggaactaatgggaggtatttgggtcatggggacagatccctcatgaacggcttagtgttgtcctcgcag

SEQ ID NO: 444632 - DNA, 201 bp, Homo sapiens
tttaacctgtgccttatataatgtagtcaatttacagaaaagccaattccacgttcttatccaaaacaataaaatcaatgatgcagccttaaaatctcttyctctggattaatccctttacctaacaactacattctaaaaactgaggacttatcattctggatagggagtgaccttttgggaagaatcacagagtcctct

SEQ ID NO: 444633 - DNA, 201 bp, Homo sapiens
acttcctggctttaagtgatcctcccaccctgaactcccaaagtgctggggttataggcatgagccactgtgcctggccagttctagaattctttaccagkcacatatcaggcataaaaggatcatagcacccccttccccctattcccacatcaggacagaggaaagcagtaaggggaaccatctcagaaagaatggccc

SEQ ID NO: 444634 - DNA, 201 bp, Homo sapiens
tgcttattaaaatgccagtgccattcattccccttcgtcctctactctatatcagaaggtatgggatgctatgatgtcttcctgttaaatttttgtccagaaaaaaaaaaaaacattttaagtatggtgttgaaatgggtaagttttagtcacttgggaaatgtatacacacatgatatctttattctccaataatgtgtg

SEQ ID NO: 444635 - DNA, 201 bp, Homo sapiens
acttacttatgctgctgtgtatgtatattttaagagtccagactctgaagccagattgctggctgcaaagcctaagcccacctctcatgaacgagcaaggrccttgggtaagagaattaatcactcggtgcctcagtttcctcctctaaaatggaaatgataataataaaacctatctcacaacgttgctgggaggattaa

SEQ ID NO: 444636 - DNA, 201 bp, Homo sapiens
tagaattccacggaaatgttagagaagttgctgatccacatgataaacaaggaatagctgagagaagacttattattcaacatgttaccaactgggtaacytgaaagttttagaaagtagaggaagtcagctgccttgagacttaacgggttatgaattattgacccagcttccttgagacctaaaagattgtagattcat

SEQ ID NO: 444637 - DNA, 201 bp, Homo sapiens
ggggctcaggactatgggcagtactgtttacagatgtccttagatggctgcaaagcttagagaagtacaggagatgtatgcagagagggagagggacatgytgagcctggggctttgtgtctgcatcccatgcattcatgttggtatgcagtgacaaagcctggcagatagaaaagatgctggtgtgtccagataactgaa

SEQ ID NO: 444638 - DNA, 201 bp, Homo sapiens
gcacaggcggagctgtgcatttctggaaaaatgttactcaatttctctgagtttttatttcaccatctataaaatgtgattattaatctcactttttctcttgtctctacggcagcttatgaagataaattatggttggcagaattataaaacagtttaaactccttggaagcaagacactctattagtccatggtatttt

SEQ ID NO: 444639 - DNA, 201 bp, Homo sapiens
cacaggcggagctgtgcatttctggaaaaatgttactcaatttctctgagtttttatttcaccatctataaaatgtgattattaatctcactttttctcttgtctctacggcagcttatgaagataaattatggttggcagaattataaaacagtttaaactccttggaagcaagacactctattagtccatggtatttta

SEQ ID NO: 444640 - DNA, 201 bp, Homo sapiens
ccagccaactgagctaaccagcttatggaatcagggagctgtcacacatcagctggggctttgggtggagaagggaagaaaggaaggcaggaggaagggagggagggactcttgagggaagtcagagaagaaagagtgaggggcggtgaggcagcacctgagactcttggtggtcccagactctccctgagcacacccagg

SEQ ID NO: 444641 - DNA, 201 bp, Homo sapiens
actccctgctgactgaggctccctcctgtgctctattcctacaacgctaactatgtctctactgccaattcagctctttcactcatccttgcactgatagtttttttttttttttttaaataagaatcatctataatcagctcctagactggaagcatcccgaggccatggcctgtgcatgactgatctctgtacacctca

SEQ ID NO: 444642 - DNA, 201 bp, Homo sapiens
ctccctgctgactgaggctccctcctgtgctctattcctacaacgctaactatgtctctactgccaattcagctctttcactcatccttgcactgatagtttttttttttttttttaaataagaatcatctataatcagctcctagactggaagcatcccgaggccatggcctgtgcatgactgatctctgtacacctcac

SEQ ID NO: 444643 - DNA, 201 bp, Homo sapiens
tgaggcacaagaatggcttgcacctgggaggctgaggttgcagtgagccgagatcacgccactgcactccagcctgggtgacagagcaagactctgtctcaaaaaaaaaaaaaaaaaaaaactgttcaggagaacaaggaagtgacacaagggctagggcagtaggagcaaggggcaagtgataccagagcagaaacagcg

SEQ ID NO: 444644 - DNA, 201 bp, Homo sapiens
gttgagtttaccactcgggccatataccaggggtgtacaagcctgtccctagctgtctctcctgtgtacgactgccaggcgaagtttcctaaaacaccacttttttttttttttttttttgagacggagtctcgctctgtcacccaggctggagcacagtggcgtgatctcggctcactgcaacctccacctcctgggttc

SEQ ID NO: 444645 - DNA, 201 bp, Homo sapiens
ttgagtttaccactcgggccatataccaggggtgtacaagcctgtccctagctgtctctcctgtgtacgactgccaggcgaagtttcctaaaacaccacttttttttttttttttttttgagacggagtctcgctctgtcacccaggctggagcacagtggcgtgatctcggctcactgcaacctccacctcctgggttca

SEQ ID NO: 444646 - DNA, 201 bp, Homo sapiens
tgagtttaccactcgggccatataccaggggtgtacaagcctgtccctagctgtctctcctgtgtacgactgccaggcgaagtttcctaaaacaccacttttttttttttttttttttgagacggagtctcgctctgtcacccaggctggagcacagtggcgtgatctcggctcactgcaacctccacctcctgggttcaa

SEQ ID NO: 444647 - DNA, 201 bp, Homo sapiens
gagtttaccactcgggccatataccaggggtgtacaagcctgtccctagctgtctctcctgtgtacgactgccaggcgaagtttcctaaaacaccacttttttttttttttttttttgagacggagtctcgctctgtcacccaggctggagcacagtggcgtgatctcggctcactgcaacctccacctcctgggttcaag

SEQ ID NO: 444648 - DNA, 201 bp, Homo sapiens
ttcaagacttcagtggtgtaagtcactgtaaatgaggtagaaataggaagagaaccagaaagagaagtggagctgaagatgtgactgaattgctgcactcycatgatcaaacttaaatggatgaggagttgcttcttatgaacgagcaaaaaaagtagtttcttgagatggaatctatttctggtgaagatgctgtgaata

SEQ ID NO: 444649 - DNA, 201 bp, Homo sapiens
gtggttagtgtaaaaggagagaatctggtcattcttggggcagaggtgctaaatattaatgagccatgcatggaaacgaccaggcccttgattgaattcgrttggatcaattctattacaaatcccagggcgatgaaatcaaagtcaaagaggagacgcctgaggctggagccagcaagaaagaatgctgattaattgttg

SEQ ID NO: 444650 - DNA, 201 bp, Homo sapiens
ctgaactgtttcattcgcaaaaacactgtcacagccagtgggcgggtgggggggacacattaagtgatgaaataaaacgtactaaagcacagaatgtcagmtacttcacacacacacaaaaactacaattacgctaggctacatcaattatcatggaataaaaagattacaaacattacaaatgtgtgagtgtggtttttt

SEQ ID NO: 444651 - DNA, 201 bp, Homo sapiens
agcgcaaaactccatctcaaaaaaaaaaaaaaaaaagcaagcaagcaagcagttacctgcatatgatatgcaactaaaatcaacggtatcttatgcaatartagataacctcagtgttaactaagtaagtataattaatgtgaaatgctattttaaaaaggtatgatttactggccgagtgcagtggctcacacctgtaat

SEQ ID NO: 444652 - DNA, 201 bp, Homo sapiens
tctagaggtctcagcctctcaagaaggtcaaaggaaaaccggaaacctggggacagaagtttctggtgctcactacaggtggaagggggccttcctgaccycaaaactcagagccccctgccctaagtgaagggtgagctgccgcagtggggatgggggcagtgggtgctattcagaggccgcaaatccaaccgtgcattt

SEQ ID NO: 444653 - DNA, 201 bp, Homo sapiens
aactgtttcattcgcaaaaacactgtcacagccagtgggcgggtgggggggacacattaagtgatgaaataaaacgtactaaagcacagaatgtcagatayttcacacacacacaaaaactacaattacgctaggctacatcaattatcatggaataaaaagattacaaacattacaaatgtgtgagtgtggtttttttag

SEQ ID NO: 444654 - DNA, 201 bp, Homo sapiens
cagcattgtgggaggctgaagagggaggatcatttgaggccaagagttcaagaccagccagggcatcataacgagagcctatctctacaaaaaatcagttaaaaaaaaaaaattagctgggcatgatggcacacacctgtagtcccagctactccaggaggattgcttgagcctaggagactgaggttgcagtgagccatg

SEQ ID NO: 444655 - DNA, 201 bp, Homo sapiens
tggaacaatcaaaacaaatattttaacagcaatagatttgtggaggacagaaagtcctagtggctagaacagtggtgattagaaaagcagtggttagaactttttttttttttttttaatgaaaaagatgggagggaagatggccactaaattgtatttgaaaccaaaagaagtgacccatctgctctggggcccgtggag

SEQ ID NO: 444656 - DNA, 201 bp, Homo sapiens
ggaacaatcaaaacaaatattttaacagcaatagatttgtggaggacagaaagtcctagtggctagaacagtggtgattagaaaagcagtggttagaactttttttttttttttttaatgaaaaagatgggagggaagatggccactaaattgtatttgaaaccaaaagaagtgacccatctgctctggggcccgtggaga

SEQ ID NO: 444657 - DNA, 201 bp, Homo sapiens
gtggggaaggcctctcatcagctcagatttgacacacctaatgtggagtgaggtgggtgtttggtttttcaatcttttaattcttttccattattccacayataaagcaataagaaaaattaaatgctaagccgtatggtattgattaggtaaaacggtgacttaaaggagagctcggtagtgtcagaagagcgcaaatcc

SEQ ID NO: 444658 - DNA, 201 bp, Homo sapiens
catggtgctagcccaaagcagcaaacctggcatggaccaaattctggctcctttccacgaaaggaagaaaaatgaacacagtaatctattaatcaattagycttctgttttcgacttcaattcccagagctaattaatcacttcattaagtaggagattctctcttggtttaggtcattaatgaatattactaagtaaaac

SEQ ID NO: 444659 - DNA, 201 bp, Homo sapiens
gccttctgttttcgacttcaattcccagagctaattaatcacttcattaagtaggagattctctcttggtttaggtcattaatgaatattactaagtaaarcctggtttatatttctaaaacttttgcatttcaaactcctggtagggcttacgatgaagatgtaaaagaggtgccacacatggactggaggttccatccc

SEQ ID NO: 444660 - DNA, 201 bp, Homo sapiens
ttaagtaggagattctctcttggtttaggtcattaatgaatattactaagtaaaacctggtttatatttctaaaacttttgcatttcaaactcctggtagsgcttacgatgaagatgtaaaagaggtgccacacatggactggaggttccatcccagctgccgcttcctgccatccaccctagctcttctctggaacagcc

SEQ ID NO: 444661 - DNA, 201 bp, Homo sapiens
taatgaatattactaagtaaaacctggtttatatttctaaaacttttgcatttcaaactcctggtagggcttacgatgaagatgtaaaagaggtgccacayatggactggaggttccatcccagctgccgcttcctgccatccaccctagctcttctctggaacagccatctccggacctgtcctggaagttcgcacactt

SEQ ID NO: 444662 - DNA, 201 bp, Homo sapiens
tgaagcggaaggatgaggggatgggggccctgcctggcctggggcgccagctgtggggcttacctggctgagattgagtggctgctgctgctggaagtggrggcccggccgctgctgccggtaggtgatggctccagatgagctccctgaagagtgaccgctggtggaggtcacgttgctggaggacttggacttgtagga

SEQ ID NO: 444663 - DNA, 201 bp, Homo sapiens
ttaaactttcctctgtagttccatattggtaataatataaatattggtatttcgaaactacattctttacatttataggttaaagaaaaaataaagatttktccataccagaaaaagggagttaaaataattactaaggaaagtgaaagcataaggattttaaaactaaactggacatgtccacctgaactcttaaatttt

SEQ ID NO: 444664 - DNA, 201 bp, Homo sapiens
gacaacagattccatgggtgatgttctagggaaacaggcactttcacatactgcttgcatgagtagaatacggtataaaccctacaggaagaatttgtcartaacttttaaaaatgacagatgtatctgtcccttgactatataatcccatttctaggatttcatttcacagatgcacctacaaaagtattaaatgacatg

SEQ ID NO: 444665 - DNA, 201 bp, Homo sapiens
actacgtgcttctagagtaccagtcacacttgccggtctgggcagcagaaggagtgaccgctgggggctggagtgagttgccttgttgctatttaatgaamcttccgttgtccccatcgcctgctgctgggcgtcttcagctgccagtgttctgcttggcacttcaccccctttggcctttgtctcctttggtccccacat

SEQ ID NO: 444666 - DNA, 201 bp, Homo sapiens
atacatatggtatactaatggctctgctggctttgagaaaaatgaaaatgacaatttttgtagggaaagaagttaacaaaaaagagaaaaaagaaaaaggraaaagagaaaggaataaagaaaaaatagcaaggttaagggaagcaaggtttgggagacaacgtgacattccacagtcccgcccatttgtcatgtaatcaa

SEQ ID NO: 444667 - DNA, 201 bp, Homo sapiens
tcggattaaatcctgggagttcagcaatcataaggttggactctcacaggcggcgataggccaagggaaagaggggcttctgagcattcagattcagccayaccatgtattaacaacagcacccccagtgccctcattttgctgactgaatcaaaagctccccactaatgggtctacggccctcttccctaagcgctgggc

SEQ ID NO: 444668 - DNA, 201 bp, Homo sapiens
cggattaaatcctgggagttcagcaatcataaggttggactctcacaggcggcgataggccaagggaaagaggggcttctgagcattcagattcagccatrccatgtattaacaacagcacccccagtgccctcattttgctgactgaatcaaaagctccccactaatgggtctacggccctcttccctaagcgctgggcc

SEQ ID NO: 444669 - DNA, 201 bp, Homo sapiens
aacagttgaaaatgtactttcttgcttcttttgacttaatccctgtctctgcttcatggtcatctggtgtctgtcaagagaggcaaaagccaattggtagygtgacttagctcctcatcactgggactcaagccttggaactcctgtgtctcacagagggtctctttcccacatttcggaagagattttgattcttcaatg

SEQ ID NO: 444670 - DNA, 201 bp, Homo sapiens
tctcagctgactgcaacctccgcctcctgggttcaagcaattctcctgcctcagcctcccaagtagctgggattacaggcaccaccaccacgcccagctatttttttttttttttgtatttttagtagagatggggtttcgccatgttagccaggttggtctcgaactcctgatccacccgcctcagccttccaaagtgct

SEQ ID NO: 444671 - DNA, 201 bp, Homo sapiens
caggtagacggcctgaggtcaggagttctagaccagcctggccaaaatggcgaaacccgtctctgctgctatacaaaaattagctgggtgtagtggcaggmtcctgtaatcccagctactcaggaggctgaggcagaagaatcgcttgaaccttgttggggggcagaggttgcagtgagccgagattgcgccactgcactc

SEQ ID NO: 444672 - DNA, 201 bp, Homo sapiens; identical to SEQ ID NO: 100764

SEQ ID NO: 444673 - DNA, 201 bp, Homo sapiens
actgatgaatcttttcctgatggtacaggtcacacttaatgaataatagtaatgacactgtgctggagctgcagaggtgagtggttcaggggaaaaggccraaagcacgtgtgcattctctcttggtgctccttctccctgtcacgagttcccctgacacttactatcctccagaagtccctgctatccgctcagattctg

SEQ ID NO: 444674 - DNA, 201 bp, Homo sapiens
catttcaaactcctggtagggcttacgatgaagatgtaaaagaggtgccacacatggactggaggttccatcccagctgccgcttcctgccatccaccctrgctcttctctggaacagccatctccggacctgtcctggaagttcgcacacttctgcatttgcctttgtcattgtaaggctaatgctgggaaacgtgctca

SEQ ID NO: 444675 - DNA, 201 bp, Homo sapiens
agcttctaatcttagaaatttcaactcctccagaggtttaataaatatccacttccatttccttcaagcttttgtaaaaagctttgtaaaaaagtggaacrtttgtctttatctgctaaaacgcaagctgcttcagggcaggaattttatctgttttgctcaatgctgtacacttggcacctaggagagtccccagaacac

SEQ ID NO: 444676 - DNA, 201 bp, Homo sapiens
cagcttctaatcttagaaatttcaactcctccagaggtttaataaatatccacttccatttccttcaagcttttgtaaaaagctttgtaaaaaagtggaaygtttgtctttatctgctaaaacgcaagctgcttcagggcaggaattttatctgttttgctcaatgctgtacacttggcacctaggagagtccccagaaca

SEQ ID NO: 444677 - DNA, 201 bp, Homo sapiens
caaatcatgcccacctcccttctgaactgctggaaaccaaaatcttcctgaaagcaccccaagctaacttatggggttaggatcaccacacccaggattcyctcagtcctcctatctttagacttcttttctttttgaggacacgattctccaaagttaacttctataaagcaaatcctatttctcactgacccatatttt

SEQ ID NO: 444678 - DNA, 201 bp, Homo sapiens
gatgagacattatggtggcttaggctagctacagggatccaaactacagactggacaccaaattcaaacccaagtctgcttttaggagtaagattttgccrgaacacgcccccccccccacacgcccctcccaccacgtgactcgtgtatgtattgtctgtgcagctttcactctacaacttcagtaacggcggcagagac

SEQ ID NO: 444679 - DNA, 201 bp, Homo sapiens
atttgttttctaccatcctactctctctgaagagaaacaaggtctcctgagctgacggggaaaatccccacctaactctttttccctgcttcttccttttytctccctcaatggaactgtaaacacgctcagaactaccagcctctctgagaagaagccttaaagatgctctggtcccacatccatgttctgttggatgcc

SEQ ID NO: 444680 - DNA, 201 bp, Homo sapiens
aagtactttaaaaacaacatgcattgggtgatctttctgttcggatactgactctcagggaagacggcctcacttccagcatgggggggatgcacatcctsgtcagtttaactcagccagggctcatcttcttcctgttgtcaatgacttgacttaggcactggcacacaccatcagcctggtcaacgaggtgtgaaggga

SEQ ID NO: 444681 - DNA, 201 bp, Homo sapiens
gggtgactatctgactgttttggtgcagacggctaagaggacctctgtagagggcacccctatcctcagtctcctatccgtagctgtttctcagtcatccmattttacccgtgatatcaaaagactgaaatcatgggagccctatccagtaaattgccaagtctgcttttcttcttcttgtggtacagatggacagctctg

SEQ ID NO: 444682 - DNA, 201 bp, Homo sapiens
catccacaccaacccatccctcctccttcctatgcacacgtgtcaggggctggctccgggtcaggtatggagcagtcttgctccataccacaggctgatcraggtatgccacatcctcgatcagcttacagccttctctgagtctaaggaataaggcaagattccattgtggaaaagcaaagggctttcccatgcattttc

SEQ ID NO: 444683 - DNA, 201 bp, Homo sapiens
taagtggtggggtgacaccatccacttggctccgtagaaggtcattctgggcagctctgcagacatggcgagtctgtcaggacatccctgacaggctgctstagggctgcagcagcaccttctttcctcggggctcacttgattcttcacaccctgggcacatggtctcagggtgccatactggggggactcagacagccg

SEQ ID NO: 444684 - DNA, 201 bp, Homo sapiens
cctggagatggttaggaacgatactgctccctgactgctaccccaggtgctctggtttaattggtcatgggcatgacctgggcaccaggacttctaaaagytctcccctccactttcagtgtgtctcggagtttgggaatcgctgttgtagttaaaagttactgagagtccaggcatctaaaggtgaattagctgtcaccc

SEQ ID NO: 444685 - DNA, 201 bp, Homo sapiens
taattgaaaaagttacactttctggtgtattgtaaatgttgacattttaaatacacaaaactgttaatattacttaaaaaaaacgtattccatgaacaatraatactgtagcagttttatgtacagcatcattggctttaaaatatagctgctttattggaaattttgcagagtcccttaattcatattctcatttcctac

SEQ ID NO: 444686 - DNA, 201 bp, Homo sapiens
ttcttctgtccttgccacacaacatcattgaactcgatgttagagcctacgttcctgcactgcaggtaggcgttgtcttgaacagagccatctcttcatcrctgttgtgagtcccagagcacatagaaacaccatcctcttgccctggcagtcccagcaggcgtttcctcacaggcgtgcccgggtcagggtctgcttctg

SEQ ID NO: 444687 - DNA, 201 bp, Homo sapiens
tgtatcttttaatacaagtcatggttcattccctgaagtctttacaacatatattagtctacttgctgacacaaagctggatctacatttaaaggtaaacwgtgaaatatttatttttttggattacattctcttctgttttcgtattttttatttgtgatgttttttattttttattatggaaaatttcaaacgtgttca

SEQ ID NO: 444688 - DNA, 201 bp, Homo sapiens
gattgtatataccattatgatcagccgggaaaatcatgttcttttcttctagaattttgaacagaaaatgctgaaaaaaggagggtcatggattcaagaartaaatgttgctgaaaaaaattggtacccccgacagaaaatatgttacgctaagagaaagttagcaggtgccaatccagcagtcattacttggtaagattt

SEQ ID NO: 444689 - DNA, 201 bp, Homo sapiens
taggcaccaccatgcctggctccttttatattttgcagagatggagtctcgctgtgttgcccaggctggtattgaactcctcccatcaagtgaccctcccmcctcagtctccaaagcattgggattataggcatgacctgccacgcctggccaatgaaattcttttctttttttgaaaggacaaatataactttttatcct

SEQ ID NO: 444690 - DNA, 201 bp, Homo sapiens
gttgaaatatatacaatttcagcttgaatccaggcttcacatatcaggctctttttagacctgtgtcattttccaatttcaaagttatcagttgcccaagkgtctttctgtgccatgcaaagatgtgccccagttatggtacttctcctttctttttcccagtgtgagcgccttgtgagtcttctcctgaacccagcggtg

SEQ ID NO: 444691 - DNA, 201 bp, Homo sapiens
atttacatgttattttcaaatagtttagcaaattaatattaacaaattattagcataagacttaggttttctctaccaaggtcttattttacagtcgaatmctttttgctgaaaataaaccaaaatggaaccaaacaaaaacaacatgtgaagacttcccttcacaaaaatgttaatttttacaaaattattcctgtaaat

SEQ ID NO: 444692 - DNA, 201 bp, Homo sapiens
accacttgagcctgaactaaaaaaggaaactaatacaaccatggtagtagtattacttaattttatactgcaaatggcatttaaatggaaccctttacagygtaacatttctttaacatgaagggaattaactttaatggtattgtttcttcaggtgacaaggcaactgtatgagccactagttatgcagctgattcactg

SEQ ID NO: 444693 - DNA, 201 bp, Homo sapiens
gaggactggtaggaaaaacgcctctgcatgctgcactcccctaataatagaaatacatatgtcacttgcaggtgtctctagaaactgtggaatttgggtartaaggttttagctggacaagtattgtatgatttgcatgagccaactttctaaaagattattttctcaatagttaaaaaaaaaaagaacggaatagaacaa

SEQ ID NO: 444694 - DNA, 201 bp, Homo sapiens
ttttgtatttgtattttagaattcctttgtttctggttgctccttggttttgtaggcttctgggagaaaggttctagtcatgttgttggtttcttgggaasgtaacacacctagagcattcttcccctgatgttcttccaccatacccatctcaacctctaattcccagataagctgggtggatgtgaatcctgtgagacc

SEQ ID NO: 444695 - DNA, 201 bp, Homo sapiens
caggtaactataacttattgtttttacatttattttagctttagtatgataattagtgtatttatttatattatttcttaaaagtcctttatgtattgagyatgctgaaatgggaattatagaaatacttgctcaagacatgtagatattatgtatctgtatatctatgatatatcaatataaatatgaaagcaaatgtaa

SEQ ID NO: 444696 - DNA, 201 bp, Homo sapiens
cagaggaacaatgagcttttgttgcatatttttctttgctggactcttcatcatggaatttaactggaaaaggaaactaatggggctggggatggtggctyatacctgtaatccctgcacgttgggaggctgaggcaggaggatcacttgaggccaggagttcaaggccaacctaggcaacatagtggaaccctgtctcta

SEQ ID NO: 444697 - DNA, 201 bp, Homo sapiens
tgacagctctctttcaccctgtgggtgacaggtgagctctaaagactgctctttgcttcctcagagagccttaattcaaaacctgtttttggttttttttktttttttttttcagacttatgtgtatccttggtctcttagtcccttctctaggaaaaatgtatcacatagccttatttaagacacttttctgaacctgat

SEQ ID NO: 444698 - DNA, 201 bp, Homo sapiens
tttttgtatttttagtagagacggggttttactgtgttggtcacactggtctcgaactcctgacctcgtaatccgcctgcttgggcctcccaaagtgctakgattacaggcgtgagccactgtctggcgggaatcagttgatacgttgcagttaagtggttgttggggtcactgtgacctgtttctgttttttttgtattt

SEQ ID NO: 444699 - DNA, 201 bp, Homo sapiens
tgttttcttttttttttttttttttttttttttgagacggagtctcgctctgtcgcccaggctggagtgcagtggcgggatctcggctcactgcaagctcygcctcccgggttcacgccattctcctgcctcagcctcccaagtagctgggactacaggcgcccgccactacgcccggctaattttttgtatttttagtag

SEQ ID NO: 444700 - DNA, 201 bp, Homo sapiens
ctgccccgcagtctgctggctgggtcaataaaccaaatggagtgctggctgctaaccagtagttgcagatattttaccgtaatacaaaatatttattaackttgggtggggggaagaaaaattgttgaaggaaataaataataataaaattatcagataacatgtagtaaaacattttctgtgggctaggtactgttctca

SEQ ID NO: 444701 - DNA, 201 bp, Homo sapiens
cgcagccctgctgagcctcgacccagcggctgttagcgctggttgcctggccagcctacagcagcccgtgggcatccgcctgctagaggaggctctgctcygcctgctgcctgctgagctgcctgccaagcgagtccgtgggaaggcccgcctccctcctgatgtcctcagatgggtggagcttgctaagtaagtgtgagg

SEQ ID NO: 444702 - DNA, 201 bp, Homo sapiens
acagaggtgggtacttgggtcacaatcggggacatgttgtcctggaatttcaggccctagtatgttgccgtgctcctgcagctgctcctgcttcctcaggraaggcttatatcagtgggatgtttgctgccagtgacctcaatagttgtttagaaaacacatttaactagtgccttccctgtaccaaacttaagcaaactt

SEQ ID NO: 444703 - DNA, 201 bp, Homo sapiens
accattaaatatccgtctcttcttagccaagcttgttattaatacagaagaggtaagtaattgattatttctttattctttgaatagattctgtaagtctktttattcaattctatgaatgaatcaattgcaattctatgaatatacttaaaaacacacacaaaaaaggaaaatataaaggggcagagcatgacatttttg

SEQ ID NO: 444704 - DNA, 201 bp, Homo sapiens
tcttacggctgccaacgttctttccttatagtaggaaaaaaaaaagcggggggtggagcgggggagaaaatattcctgttaactctatatgaaaaacagckgactcttaggcaattgctgagttcgtgaggtaggagcatcttggagtccattttggaaaggcctttgagctagacgtggtgaagtgcagtgagagtttgc

SEQ ID NO: 444705 - DNA, 201 bp, Homo sapiens
aataagtttatgtctcctgcacagccctggttatgctgctggcagtgtactctgagtgtgatctttcttagtcatgttacgggtaggggagagtgactgarcattcgttagggtggtgacataattaaacctgtagtttaattccctgcagtgtctaccagtgaatcctacctataataaatacagttagctaaagttaat

SEQ ID NO: 444706 - DNA, 201 bp, Homo sapiens
aaggtaggctgctctgttaatttgaggtcagtttttggtactggaaaactacttcaaaggtttctgttagaaggggttttggcttttaataaaaatttatyattattattattattattattattattatatttcatcctctcaacccagcttttcctgacttcaggaagaaccaggaagagaaggctaggttttggcttt

SEQ ID NO: 444707 - DNA, 201 bp, Homo sapiens
aagaatttctgagtatatccaattttctcctatactcagattcaataactaaagggccctggaaacagcagttcaccttttacacagaactctcctgacayggagaagcattgtcttagaatttggtcgccagctcactgagggcagaggcagtgaggccagctaaattgtagtttttttttgatgcttattttactataa

SEQ ID NO: 444708 - DNA, 201 bp, Homo sapiens
acatatttaaatgtatataaattggccgggggtcaggagtttgagaccagcccggccaacatggtgaaaccctgttgctactaaaaatacaaaaattagcygggcgtggtggtggacgcctgtaatcccagctacttgggaggctgagacaggagaatcacttgaacccgggagtcagaggtcgcagtgagcccagatttc

SEQ ID NO: 444709 - DNA, 201 bp, Homo sapiens
gaattaattttatttttgaacttaaaagaataatctgaaggagtaattgcttgagcctaataagcaagacacattttgaaagggttgcacgctggagggartcttgtgtagtagatgttgaaaagtggccttatggagtataagaggctgaaccagcgcacagatggctcagtgggagagctaggtgctgggaaatggccc

SEQ ID NO: 444710 - DNA, 201 bp, Homo sapiens
tgaatcaggtattactttgatggttgcaaaatggtgattttctacccccatcatttctttcatcctagttgatgttctactgcaagaaacaattttccccrttatttatttatctgtattagtaagatttgtggattcttattttttcagtgggtctaatcttttgccatcatgattggttttgaagcccacattgtccca

SEQ ID NO: 444711 - DNA, 201 bp, Homo sapiens
acccttctgaagaaagaaaaaagaaaaatcaggctgggtgctgtggctcacacctgtaatccaagaaaaatgaaaaatcaggctgggtgcagtggctcacrcctgtaatcccagcacttagggaggccgaggtaggcagatcacgtgaagtcatgagttcgagaccaacctggccaacatggcaaaaccctggctctacta

SEQ ID NO: 444712 - DNA, 201 bp, Homo sapiens
tagcactctaaaaagctagcagcattttttgccctgatgctcaaacacctggctaattatgtaagattaacaaggcctctcaaagtatggtcccaggaccrgcagccttgagcattgctttctgcatcacaaaccttgggggcaggtctctgctgccctgctaagcaccaccaggtgattctggcacccagtgaagtttga

SEQ ID NO: 444713 - DNA, 201 bp, Homo sapiens
actcattttcatatgaattaattttgcaatctacaaggttgcccctcatcagtggtttctacaaattgctttctattacagtaagaaatgccaagaaaatraaatatttcgaggtgagtctttcttgcaggatgttgaatcttgcgtttttttaggtcatgagtatatataaatgtatcataaaatatgtgattgtggcct

SEQ ID NO: 444714 - DNA, 201 bp, Homo sapiens
ttacctcctctaactcacggtttgctgattatttccggtaggttcctgaggtgtatactccagttctggagcacctcgtggtgatgcagatagacagtttmccacagtacagtccaaaaatgcagctggtgtgttgcagagccatagtgaaggtgttcctagctttggcagcaaaagggccagttctcaggaattgcatta

SEQ ID NO: 444715 - DNA, 201 bp, Homo sapiens
gtctgttgcaagcgtcttgctgtaccttgacacagtaagtgaactaaactgagcacaattttaagtatttaatcttcatttcttcaaataatttgatggartcatacaatacatttagtgtaggcactgttgggaacaacatgacagttttagttagtactttgtggcaatagaattattgtcatgaaactcgattttttg

SEQ ID NO: 444716 - DNA, 201 bp, Homo sapiens
cattgttacagaatgtctggtgtaggcaaatccatagagacaggaagggaatttattgttgccaatggctgggtagtgactctgaacagacagtgaatttytttttggggtagtgaaaatgttctggaattaggggtggtggttgtacagctttgtaaatatactaaaaaatactgaattgtacccaccctgccacacccc

SEQ ID NO: 444717 - DNA, 201 bp, Homo sapiens
gcaggcaacaaaggacaatgacacatgctttgtgttttctgtgtttgttttttttccagtgatgagctactcctgggtcatgagaaggcccctgccttcaragactatgtggctgtggcacgaggaagcaaagatcacaacattcgtgcccaagaaccagagagtgggctttcagaagagactcaagtgaagtgcctgatg

SEQ ID NO: 444718 - DNA, 201 bp, Homo sapiens
aatctgatgaaagctctaaagatgtccccatacaaagatatcctagagacccatctgagagagaaaataacagcacagaggtgggtacttgggtcacaatyggggacatgttgtcctggaatttcaggccctagtatgttgccgtgctcctgcagctgctcctgcttcctcagggaaggcttatatcagtgggatgtttgc

SEQ ID NO: 444719 - DNA, 201 bp, Homo sapiens
agcttttcccagccagctgtgaattctgctacattctgaggacataggtaatttaaagctgcaaaaacgagttttcgcatttacccattttcctctgtggrtgttgataaaaacactgtgtctgaacaaggatccagagagatggagacggggtgtgtgggatggtaacgggatcttgtgtgggaaacttgttgcccctgc

SEQ ID NO: 444720 - DNA, 201 bp, Homo sapiens
tcaattatatacctaaaaatggttaaaagagtacatttcatgttatgtatattacaccacagttttaaaaaacgttatgagaagtaatgttagcttattarccggaataactatagggaaaacaaacacaagtagaataaagtgcatgttcgtgttatatttaatactgatagataaaatacatttatttaaaccaaaata

SEQ ID NO: 444721 - DNA, 201 bp, Homo sapiens
cttctgccacttactggctttgggacttagacccttggtgactctgaactgcacttggaggtcgatgtgagagttaaacctgtgtgccttgaaaggctgcrgtataccacagccacagagacagctgcttgctttcctcctaattacctggactgaactctccagcggtgtcgggcatccagtaataaaaaggagtattaa

SEQ ID NO: 444722 - DNA, 201 bp, Homo sapiens
ctggtgatatcactacccacatgggtaccttttatgtttagtaaagtatgttactccttgtgaagacatggtccaagtaccacaagctaaacagctggttktatgtgtggtttcacaggacattagctgtcagcacgcagccctgctgagcctcgacccagcggctgttagcgctggttgcctggccagcctacagcagcc

SEQ ID NO: 444723 - DNA, 201 bp, Homo sapiens
ggtgtgagccactatgcccgggctttttttttttttttcttttttttttttgagacaagagtctcattctgtcagccaggctggagtgcagtggcccattytcagctcgttgcaacctccacaccctgggttcgggcgattctccatgtctcagcctccctagtagctgggatacaggtgtgcgccaccatgcctggctaa

SEQ ID NO: 444724 - DNA, 201 bp, Homo sapiens
ttttcagattaattattcgaaatttctggagccatgaaactaggttaccttcaaataccttggaccggttgctggcactaaattccttatattctcctaaratagaagtgcactttttaagtttagcaacaaattttctgctcgaaatgaccagcatgagcccagattatccaaaccccatgttcgagcatcctctgtcag

SEQ ID NO: 444725 - DNA, 201 bp, Homo sapiens
gttcttgctctgtcacctgggctggagtgcagtggtgtaatcatagcacactgcagccttgcactcctgggctcaagccatcctcccaccttagcctcccragtagctgggactacaggcatatgccaccatgcttggctaatttttgtattttttgtagaaacaaggtttcgccatgttgcccaagcagggtggtgggtt

SEQ ID NO: 444726 - DNA, 201 bp, Homo sapiens
aggatggtatagctcatgctaagctgttcttcctaacaggtccagcctgaggatggatatatatgtatttgtacgtatgtatgtatgtgtacgtttatatwtgtgtgcatatttagttatgtatgcacataagtatatgtgcatgtacttacatgtacacagacataaaagatatagtgtctatatatgcatattacacat

SEQ ID NO: 444727 - DNA, 201 bp, Homo sapiens
cgacagaaaatatgttacgctaagagaaagttagcaggtgccaatccagcagtcattacttggtaagatttttatatgtggaaaaaactaacggactaccracatgctactgtttctcgaggagccaacatatatacaaagtgctgagctcttgacactctgttagcatgacttctctgctttcattgaggaggaaagcag

SEQ ID NO: 444728 - DNA, 201 bp, Homo sapiens
tcctctgtctgctactgttgaataattattttcaagtctttaatactatatccaggaaatagttgaataaagatgcgttaaaaacatgcttactgggaatmcaataatagaaaattagcattatagtatataatatttgctattctgtaattaagtaaaatgctgttgtttacttcttgagaaacatttatgatatgtttt

SEQ ID NO: 444729 - DNA, 201 bp, Homo sapiens
aggagaagcactctttgtacactgatcccaagagcagaagatcatcctagttggatgtggtggcacgcacccatagtcccagctactggggagtctgaggygggaggatggcttgagatcaggagttcgaggctgcagtgagccatgattgtgcctgtgtgagtagccactgtattctggcctgggcagtgtagtgagacc

SEQ ID NO: 444730 - DNA, 201 bp, Homo sapiens
agaaattcgttgctggcctgggcgctctgctctttggcactgtcttcagagggcggccccacggaggaatgctcacagccactctggcttttccctctgartttgacacgtggctagcctgtgccctgagatgacattctgatttttgaaggtgacagtcatggcgtctctgcgaaggcccaagcgcatcatcatccgtgg

SEQ ID NO: 444731 - DNA, 201 bp, Homo sapiens
cagaaattcgttgctggcctgggcgctctgctctttggcactgtcttcagagggcggccccacggaggaatgctcacagccactctggcttttccctctgmgtttgacacgtggctagcctgtgccctgagatgacattctgatttttgaaggtgacagtcatggcgtctctgcgaaggcccaagcgcatcatcatccgtg

SEQ ID NO: 444732 - DNA, 201 bp, Homo sapiens
ataaggaggaaagaagtgctgacaggtgctgcaacatgcatgaacctagaaaacatcatgctaagtaaaagatgcgagacacaaaatcaccacttattttytgataccattgttacagaatgtctggtgtaggcaaatccatagagacaggaagggaatttattgttgccaatggctgggtagtgactctgaacagacagt

SEQ ID NO: 444733 - DNA, 201 bp, Homo sapiens
tcccagatttggcccgagtgtgatgcgtgggagccactcctgctccatgagatgattcatgctcttctcgaccctggagtcagacacttcccaaggagccrtgttccttttggcagacagtgatgtttaaaagcaaccaccatttatattttttgttttagaaacttaatttttttaaatcataatttaggattttaatgt

SEQ ID NO: 444734 - DNA, 201 bp, Homo sapiens
cacccatgtaccagctctataagcggacgtttcctgtgctgcttcgacttgcgtgtgatgttgatcaggtaagggctttgaatctgaaatagttgtaaaawttctaaaagtttggtttgtctaattcagtggtcagcagagcagtggaattacctggagatggttaggaacgatactgctccctgactgctaccccaggtg

SEQ ID NO: 444735 - DNA, 201 bp, Homo sapiens
gcccctccagatctctgcagggtatctggggacatctgttatccatgctagtgaccgccactctggagaagcacagtcccatgtggactggattattaatrttttctcagttgttttaaaagttgattcttccagattctactattaacttacgatatcagtttagttcattggttctaactttagcatacattagaattg

SEQ ID NO: 444736 - DNA, 201 bp, Homo sapiens
tttccatgtttgtatagattccattgctattaaatatttccaaaaaaataaatattatgtatttgcaggtttctaatatggtggcgaaaaatgcagaaatrcataaaaataaactgcagtactttatggagcagttttatggaatcatcagaaatgtggattcgaacaacaaggagttatctattgctatccgtggatatg

SEQ ID NO: 444737 - DNA, 201 bp, Homo sapiens
taactataacagtacattagtagcatctaaacagttctagtttttccatgtttgtatagattccattgctattaaatatttccaaaaaaataaatattatktatttgcaggtttctaatatggtggcgaaaaatgcagaaatgcataaaaataaactgcagtactttatggagcagttttatggaatcatcagaaatgtgg

SEQ ID NO: 444738 - DNA, 201 bp, Homo sapiens
tgtttaatgtgatagaatgtctgcctgaatcttgcagccaggtcatcctctgtgtgaagcactgacactcccttgtgcttccacccagcatgggagcatgrcctgtttctgggagtggtcagtgctttacttggagttagttaaactctgcatggacagagcctggtgttccttgcttcctctccagcatctaccccagca

SEQ ID NO: 444739 - DNA, 201 bp, Homo sapiens
gcgccccgcagccccgcctccgcgcgtaggggcatttccgggtccgggccgagcgggcgcacgcgcgggagcgggactcggcggcatggcgggctccggakccggtgtgcgttgctccctgctgcggctgcaggagaccttgtccgctgcggaccgctgcggtgctgccctggccggtcatcaactgatccgcggcctggg

SEQ ID NO: 444740 - DNA, 201 bp, Homo sapiens
acctgatagagactaagcaaaatggaagcaaagggtctttatgattaaaagcaattgcgtgtaactataacagtacattagtagcatctaaacagttctartttttccatgtttgtatagattccattgctattaaatatttccaaaaaaataaatattatgtatttgcaggtttctaatatggtggcgaaaaatgcagaa

SEQ ID NO: 444741 - DNA, 201 bp, Homo sapiens
cgggcggatcactgggtcaggagttcgagaccagtctggccaacatggtgaaacccatctttactaaaaatacaaaaattagccaggcacggtggtgtgcmcctgtagtcccagctactcaggagggtgaggcaagagaatcacttgaacccaggaggcagaggttgcagtgagccgagatcgcaccaccgcactctagcc

SEQ ID NO: 444742 - DNA, 201 bp, Homo sapiens
cgtaaacctgggaggcggagcttgcagtgagccgagatcacaccactgcactccagcctgggtgacaatgagactctgtctcaagaaaaaaaaaaaaaaaagagttggccaggcacggtggctcacgcctatagtcccagcactttgggaggccgatgtgggcaggtcacgaggtcaagagattgagaccatcctggccaa

SEQ ID NO: 444743 - DNA, 201 bp, Homo sapiens
catctcaaaagaaaaaaaaaaaaaaaaaggccgggtgcggtggctcacgcctgtaatcccagccctttgggaggtcgaggtgggccgatcacgaggtcacragattgagaccatcctggcttacatggtgaaaccccatctctactaaaaatacaaaaaattagccaggcgtggtggcaggcgcctgtagtcccagctact

SEQ ID NO: 444744 - DNA, 201 bp, Homo sapiens
ttgaacccaggaggtggaggttgcagtgagccgaggtggcgccactgcactctagcctagacgacagagcaagactctgtctcaaaaaaaacaacaacaacaaaaaaaaaaatgaagaaaaacgtttgcaacacatataagaaacaaaaagctgacttcggcaatctacaaaataaatggtcacaatagaccagtagaaaa

SEQ ID NO: 444745 - DNA, 201 bp, Homo sapiens
tatagtaacatcaaagattaggtgaggtttatagaaagatagatatccaggcttaccaaagtattaagtcaagaatataatatgtgatcagctttcaaagsatttacaagtgctgcaagttagtgaaacagctgtctccgtaaatggaggaaatgtggggaagccttggaatgcccttctggttctggcacattggaaagc

SEQ ID NO: 444746 - DNA, 201 bp, Homo sapiens
atatgggcttttttgaggggaagaggaggagtttgctgatgttaatattagtatccatatacccatataataataattacacagagtatggttgtagttcrtaacagccttgcatgataagcagggccagtagttgtgatcctgtatgtgagataactttggcagagaactgtcacatcatgggcaaggagggcatgtggt

SEQ ID NO: 444747 - DNA, 201 bp, Homo sapiens
ccatcctggctaatgcggtgaaaccccatctctactaaaaatacaaaaaattagccgggcatggtggcaggtgcctatagtcccagctacttgggaggctraggcaggagaatggcgtgaacccgggaggcggagcttgcagtgagccgagatcaagccactgcactccagcctgggtgacagagcaaaactctgtctcaa

SEQ ID NO: 444748 - DNA, 201 bp, Homo sapiens
taattatatgggcttttttgaggggaagaggaggagtttgctgatgttaatattagtatccatatacccatataataataattacacagagtatggttgtrgttcataacagccttgcatgataagcagggccagtagttgtgatcctgtatgtgagataactttggcagagaactgtcacatcatgggcaaggagggcat

SEQ ID NO: 444749 - DNA, 201 bp, Homo sapiens
aaaaaaaaaaaaaaatggtcaaaagacttgaactgacatttctttaatgaaaatatacaaatggccaataagcggcatgcaaaaatgctcaacgtcactaktcatcagggaaatccaagtgagatactacctcacacctgctaggatggctattaattaattaatttatttatttatttatttatttatttttgagacaaa

SEQ ID NO: 444750 - DNA, 201 bp, Homo sapiens
ataaaacacttagaaataggagtaaatcagctgggcgtggtggctcacgcctcaacactttgggaggccaaggctagtggatcacttgaggtcaggagttygagaccaccctggccatcaaggtgaaaccccatctctactaaaaatacaaaaattagctgggcatggtggtgcgcacctgtaatcccagctgctagggag

SEQ ID NO: 444751 - DNA, 201 bp, Homo sapiens
ttcaagcagttctctgcctcagcctcccaagtagctgggactacaggcatgcgccaccatgcccagctaattttttgtatttttagtagagacggggtttyaccatgttggccaggctgatctgaactcctgacctcaggtgagccgccacgcccgtcccagattccactttaaatgcacatctgaataatttctggctta

SEQ ID NO: 444752 - DNA, 201 bp, Homo sapiens
attgtggcctatgcagttttaaagtctactaattttattctatgtgtttaaaaaaattgatatgtgaatggcagttggatagcactctaaaaagctagcarcattttttgccctgatgctcaaacacctggctaattatgtaagattaacaaggcctctcaaagtatggtcccaggaccggcagccttgagcattgctttc

SEQ ID NO: 444753 - DNA, 201 bp, Homo sapiens
aaatggtccattaagcaaataacaccacagcagcaggagaagagtccagtaaacaccaaatcgcttttcaagcgactttatagccttgcgcttcaccccartgctttcaagaggctgggagcatcacttgcctttaataatatctacagggaattcaggtttgtaagctacacaacagagaagagaaacttgtggttttga

SEQ ID NO: 444754 - DNA, 201 bp, Homo sapiens
cagatgccagaagggggacagggagccccacccatgtaccagctctataagcggacgtttcctgtgctgcttcgacttgcgtgtgatgttgatcaggtaasggctttgaatctgaaatagttgtaaaatttctaaaagtttggtttgtctaattcagtggtcagcagagcagtggaattacctggagatggttaggaacga

SEQ ID NO: 444755 - DNA, 201 bp, Homo sapiens
accacttattttctgataccattgttacagaatgtctggtgtaggcaaatccatagagacaggaagggaatttattgttgccaatggctgggtagtgactytgaacagacagtgaatttctttttggggtagtgaaaatgttctggaattaggggtggtggttgtacagctttgtaaatatactaaaaaatactgaattgt

SEQ ID NO: 444756 - DNA, 201 bp, Homo sapiens
tgtttgaacaacagttctatttaagatatcataaactcaaagagtaagctgtgtgtgagtatccactataaaatatgtgtagcattagcttactactgtaraaagtttgcatgttggctgttgctgcttgctaaagatatccacattcataagcaagtatttataatcaggaatacaacatttctgcgggcacagcagtca

SEQ ID NO: 444757 - DNA, 201 bp, Homo sapiens
cattgaacattggagaaatgggacctctagagtgaagagcgggaggaagtggaggccatttgtagaaaacatgctagacaaatcttgtaatggaagagagyaaagaaatgggctgtggctgatgggagatgtgggggtaagagaggggtttttttttgaggcagagtcttgttggagtgcagtggcacgatcttggctcac

SEQ ID NO: 444758 - DNA, 201 bp, Homo sapiens
ctggagtgcaatggcacgatatggactcactgcaacccccacctcctgggttcaagcgatcctcctgtccgagcctcctgagtagctggaattataggttsatgctaccacgcctggtaatttttgtatttttagtagaaatggggtttcgccatgttggccaggctggtcttgaactcctgacctcaggcgagccaccac

SEQ ID NO: 444759 - DNA, 201 bp, Homo sapiens
tgttgctgcttgctaaagatatccacattcataagcaagtatttataatcaggaatacaacatttctgcgggcacagcagtcaggcacaagcaggtagcaraaattcgttgctggcctgggcgctctgctctttggcactgtcttcagagggcggccccacggaggaatgctcacagccactctggcttttccctctgagt

SEQ ID NO: 444760 - DNA, 201 bp, Homo sapiens
cttcaggggaagtcagaactggcaaatggaaggtgcccacatacaaagactacgtggatctcttcagacatctcctgagctctgaccagatgatggtaacrtttaccattgaaagccataaatgtaccttacttcctttattagtctccatagtttagacataagacttatttcagaattatattttactaactttcaaaa

SEQ ID NO: 444761 - DNA, 201 bp, Homo sapiens
ctctaaagggctgtgcaccttggagtaataaactacagttagactggagagaggtgagggtgggtctgtctttcattaagcaggagagtcctgatgaacarcctgagatgggaaaggagaacaagctccagggtgttttcagacaaacgagttttatgacaaagcccgtttgaggattgatctgaaagttgattccataag

SEQ ID NO: 444762 - DNA, 201 bp, Homo sapiens
aatttatttgtatttgtaattgtcataatatcttggcatgtactatgtttttttttctgttttttttttttttttaatttttttcttacatgtactaggtrttgaataaatgcctgggtgtattggggagaatggtatgtttggccatgagtaagttactttatttaatcctccagactatcctaaaaggtatatacggtc

SEQ ID NO: 444763 - DNA, 201 bp, Homo sapiens
acacatattttacaatcaatttgtacggtagtggtcctgaggtgatgtacattctcagcttacgaagataacaggattaagagattaaagacaggcataaraaattataagagtattgattggggaagtgatgaatgtccatgaaatcttcacaatttatgttcagagactgcagtaaagagaggtgtaagaaattataaa

SEQ ID NO: 444764 - DNA, 201 bp, Homo sapiens
tcttttttcatatattattctcatatatttcatatattagtattgaccacttggaaaatatgtctataaacatcttattcataacagcatcaaaaaaaaaatgtctaggaataaacttcaatgtgccaggcaaacatattttatgactatagaagatgaatagcttatgtacctgaggtagaagtcattattgaaaaaaac

SEQ ID NO: 444765 - DNA, 201 bp, Homo sapiens
aaatgaaaaatcaggctgggtgcagtggctcacgcctgtaatcccagcacttagggaggccgaggtaggcagatcacgtgaagtcatgagttcgagaccarcctggccaacatggcaaaaccctggctctactaaaaatacaaaaattatctgggtgtggtggcacacacctgtaatcccggctactcgggaggctgaggc

SEQ ID NO: 444766 - DNA, 201 bp, Homo sapiens
ccattttgattgaccgagggatgaggatcacttaaggccaggagttcgagaccagtctgggcaacataaggagaccttatctttacaatttttttttttttgagacgaaatatcgctctgttacccaggctggagtgcagttgcgtgatcttggctcactgcaacctccgcctcccgggttcaagcagttctcctgcctca

SEQ ID NO: 444767 - DNA, 201 bp, Homo sapiens
tgatccgcggcctggggcaggaatgcgtcctgagcagcagccccgcggtgctgggtgggtaccggcccgagctgggccgcgggtgggtcctggcttcccgrgtcgttctggagccgggcagcccggcgcttctctgtgtttagatgacggtattttgaagtacagcaattagattcttgggggaatttctgtgtatgtgta

SEQ ID NO: 444768 - DNA, 201 bp, Homo sapiens
tggattaatactggagaaccttatgtaatgacacatcttatacactgtgaacctttgatattttcagattccaccttttttttttttttttttttttttttgaggcggagtcttgctgttgcccaggctggagtgcagtagggtgattggttcactgcaacctccacctcctgggttcaagcagttctctgcctcagcctc

SEQ ID NO: 444769 - DNA, 201 bp, Homo sapiens
gtcagtataaatttctttatacattagctccgttttttattggtttctaatttacgtgtgtgtgtgtgtgtgtgtgtgtgtgtgtgtgtgtgtgtgtgtgtgatcttcatattttgataggtgcttttcttgctttaaattgatccctggaatggaagcgtaaaattaaaaggtcatttcctcctttgagcaaattgaata

SEQ ID NO: 444770 - DNA, 201 bp, Homo sapiens
tgtcagtataaatttctttatacattagctccgttttttattggtttctaatttacgtgtgtgtgtgtgtgtgtgtgtgtgtgtgtgtgtgtgtgtgtgtgtgatcttcatattttgataggtgcttttcttgctttaaattgatccctggaatggaagcgtaaaattaaaaggtcatttcctcctttgagcaaattgaat

SEQ ID NO: 444771 - DNA, 201 bp, Homo sapiens
gttggagaccagcctggccaacatggtaaaaccctgtctctactaaaaatacagaaattagctgggcgtggtaacgcacacctgtaatcccagctccttgsgaggctgaggcaggagaatggcttgaaaccaggaggcagaggttgcagtgagccgagatcacgccactgcactccagcctgggtgacaagagtgaaactc

SEQ ID NO: 444772 - DNA, 201 bp, Homo sapiens
ttctctgtggatgctctcgggatcttctcttttaaaccagtgttctgacattgcgcacaagtgtccttgggcgtagatccgtttcagtctgtttttctgggcatatggcgggagcttccaggccgctgactctcaccttccagttctggagcatcatcacaggtgattttgttgagttcttcatctcagtttgctgttttc

SEQ ID NO: 444773 - DNA, 201 bp, Homo sapiens
agtagaaatcttgtttaatagacttaattttttcagcaccacaggcacaatcacgatgtgtgtttcttctgactctgtttccaagaagaatattccttgartggagaacagcagtttacaactgggccctgcagagctcccatgaagtaatccgggctagttgtgttagtggattttttatcttattgcagcagcagaatt

SEQ ID NO: 444774 - DNA, 201 bp, Homo sapiens
cttatagggaattatacttagaaggaatagatctctttttttgcaatagggaaagataaaataatggatggaacacagctaagtttacagatttcattgcrggaagcaatgattttgtttttactctgtgaagtaggaggtataggagatgacctcattggctgaaagtggcaatggagttggtgtaggtgactttaggag

SEQ ID NO: 444775 - DNA, 201 bp, Homo sapiens
acttttcacaattacaagcaacatttaaatgaatatttttataaatgattctttagtcattctaagtccttgctgtttgaaaagtatgctccacagaccastagcatcgccaccatttagggacttgttagaaatggagcgtctttgattctgctgaaagagcacattaaaaaaaaagagagagaaagaaagaaatgggga

SEQ ID NO: 444776 - DNA, 201 bp, Homo sapiens
ctggcaaatttttgcatttttagtagagacagggtttcaccatgttggtcaggctagtctccaactcctgacctcaggtaatctacccactctgtcccccsaaagtgctggggttacaggcatgagccaccatgcccggcctttcttctttctttttttttttttaagagacagggtcttgctctgtcacccaggctagag

SEQ ID NO: 444777 - DNA, 201 bp, Homo sapiens
tctatccatagtagttaaaataaaatatttgtatgcttaagggagtaaacttagctattgagacatatttatcccctgactgaataattgtgttattactrattaaatatcaatgtttgcccttaagaatctaggatccaattagggttagaaaccttaagtacataaaacatttaaataatggtacataatagaatgtgt

SEQ ID NO: 444778 - DNA, 201 bp, Homo sapiens
ttcaaaattggacttttgaaaattacatttcagttgtatttctttagccttattctaaactgtttttggtggtggtcataaatttagaaattggaatcctytagcttctatttttagaatttttaaaaatgaaacttgttagatcacttgttgtcttttctttatgtgtttttactacaataaaaagagcaaggaaaactt

SEQ ID NO: 444779 - DNA, 201 bp, Homo sapiens
gcatctcaaacaattccaaatataatatgttcattagaaatctttattttccctttctaatctgtttttctcccagtctttcccatctcagtaatggtacygctatctaccagttgcatgagacaaaacctgagaagcattcgtgagccctccatttcctttatccttttataattaatgagcaaatcctatcaagtctct

SEQ ID NO: 444780 - DNA, 201 bp, Homo sapiens
tttttttttgctcctttcttctgcctgtacataaagacatgaaacaaaagaatattcttctttacagactggtcacattctcagtttgtagtaatatgaayaaattgatttaatacttagctatatactaagttcttagtgaatgggatttttttttttttttttttttttttttttggaggcaggattttgctctgtcac

SEQ ID NO: 444781 - DNA, 201 bp, Homo sapiens; identical to SEQ ID NO: 200928

SEQ ID NO: 444782 - DNA, 201 bp, Homo sapiens
gctacaaacattcaaagatgagaaataaccaaatatgacattctctattgctgaagaactcatatacgttttttgggagtctaaaaattggaattgtattygtttcatttctttagtttaggagggatagaacacccaacccaaagtgactaaaaggaacttgtggctgtgttactaaaagcgtaaggatgatgtagcttt

SEQ ID NO: 444783 - DNA, 201 bp, Homo sapiens
ccaatgcctgttcttttggtgtcaactagtaaattcaatcccccaaccaactactattccatctacatggcttctttcctattgtttccccaattgctatyctaagggagagaatcaccttgaatctaagaaaactacagtttgtcttgtaaaccataaataactaaaatgttttggcatataaagtcgaccagagtttct

SEQ ID NO: 444784 - DNA, 201 bp, Homo sapiens
gaataataatttctctgtagttactaataatagcttctgagtgaaaagtaattgttttaccaagaaaattactatggtcttaatgtgtgtgtaaaattacrtttattccttttatattgtaaaataatactatgtaaaaggatgtaaatgctatgtcagagttttttacataataaaaagacattcaataaagagatatat

SEQ ID NO: 444785 - DNA, 201 bp, Homo sapiens
tgaggtgggaggatcactggagcccagaagttcaaggctgcagtgagctataatcatgccatagccctctatcctggaccacagagtgagactctgtctcaaaaaaaaaaaaaggaatgaagccacctgtttgatatttcagctgaccattttatctaatgaaataaagctgactcttggacccagctaccgtgacatttc

SEQ ID NO: 444786 - DNA, 201 bp, Homo sapiens
taaccaaatataatatagacatctatagcacctggcacattggtgcttggtatttgttgtttccctttccttttcatttagaaatgtgtttgatatttccycccaaaaatataggcatcacattactagaaagaatattaacttttataggtgaagaagaaaatgttggaaaacattttaggtctatgaattctacctgag

SEQ ID NO: 444787 - DNA, 201 bp, Homo sapiens
atttgaatttagttttatccatcattctccagtttaattaggaatttgggattcactgcaaatccctaaatatttattttaaaagtttaatgtaattaattttatttatttatttatttatttatttatttattattttaagggacggggtcttgctatgtcacctgagctggagtgcagtggctattcacaggcataatc

SEQ ID NO: 444788 - DNA, 201 bp, Homo sapiens
tttgaatttagttttatccatcattctccagtttaattaggaatttgggattcactgcaaatccctaaatatttattttaaaagtttaatgtaattaattttatttatttatttatttatttatttatttattattttaagggacggggtcttgctatgtcacctgagctggagtgcagtggctattcacaggcataatca

SEQ ID NO: 444789 - DNA, 201 bp, Homo sapiens
ttgaatttagttttatccatcattctccagtttaattaggaatttgggattcactgcaaatccctaaatatttattttaaaagtttaatgtaattaattttatttatttatttatttatttatttatttattattttaagggacggggtcttgctatgtcacctgagctggagtgcagtggctattcacaggcataatcat

SEQ ID NO: 444790 - DNA, 201 bp, Homo sapiens
aatggatactgaccaattgaaactctatgaagagccattatcaaagctgataaagacactatttccctttgaagcagaagcttatagaaatattgaacctrtctatttaaatatgctgctggaaaaactctgtgtcatgtttgaagacggtgtgctcatgcggcttaagtctgatttgctaaaagcagctttgtgccattt

SEQ ID NO: 444791 - DNA, 201 bp, Homo sapiens
tgaatttagttttatccatcattctccagtttaattaggaatttgggattcactgcaaatccctaaatatttattttaaaagtttaatgtaattaattttatttatttatttatttatttatttatttattattttaagggacggggtcttgctatgtcacctgagctggagtgcagtggctattcacaggcataatcata

SEQ ID NO: 444792 - DNA, 201 bp, Homo sapiens
tgcggattgcagcaactccctcctgtcatttgttacacaagaaaatctgtgaagtcatctgttcattattatttctttttaaaagcaagagtcctgctatytttggggtactcacaaaagaattattacaactttttgaagacttggtttacctccatagaagaaatgtgatgggtcatgctgtggaatggccagtggtca

SEQ ID NO: 444793 - DNA, 201 bp, Homo sapiens
gggaatcacgactcgctgaactgtacgtggaaagggcaaagtggctctggtccaaggtaatggccagggaaatgtcatcagatatatatatatatatatakatatatatgtatatatatataatgtcgggaattatgtacttccttaaaaggccaactgagagaacataactaatccaaattaagaaccttccttttctat

SEQ ID NO: 444794 - DNA, 201 bp, Homo sapiens
gactcgctgaactgtacgtggaaagggcaaagtggctctggtccaaggtaatggccagggaaatgtcatcagatatatatatatatatatatatatatatrtatatatatataatgtcgggaattatgtacttccttaaaaggccaactgagagaacataactaatccaaattaagaaccttccttttctatcacttttct

SEQ ID NO: 444795 - DNA, 201 bp, Homo sapiens
atgttttacactcttgttagtgaagtttattctttaaaagtcaatcgtcaaggatttagcaaatgaattagcacttcggatatacttgtttatttaatatyttttttgtttatttcaaagaattcagtaattggatcataacgagacttctgcggattgcagcaactccctcctgtcatttgttacacaagaaaatctgtg

SEQ ID NO: 444796 - DNA, 201 bp, Homo sapiens
tcctagctttcacaagctttctttttttaaattaaaaaaattatttttctcttattcattgaagtagagatatctcagtacatggcaccatattcacttakttctccaaactggaaatctagaagtcattcttaactattttcacatgtgctttcagtctatgtccttggccctcttttaatctgtgctgtcttcccaagt

SEQ ID NO: 444797 - DNA, 201 bp, Homo sapiens
ccaaagtccagagggagatgaggcagcagggggctggtgtgtcagtgccgtcctgagcacatgcacacgcggcctggtcctgacaacacctgggctccccmacaactttgctccgaaattggtgtgggtgccgggagcggggagaggccaggcagcgggagcaggcatttccaagtctgtgagggcagggggccttcccgg

SEQ ID NO: 444798 - DNA, 201 bp, Homo sapiens
aagaacccatctctaccaaaaaaaatacaaaaattatccaggcatggtggtgcacgcctgtggtcccagctacaagggaagctaagccaagaggattgctygagcccaggaggtggagattgcggagagctatgatcatgccactgcactcctgcctgggtgacagagaaagactctatctcaaaaaaaaaataaataaat

SEQ ID NO: 444799 - DNA, 201 bp, Homo sapiens
gattgcttgagcccatgagttcaaaaccagccagagcaacatggtaagaacccatctctaccaaaaaaaatacaaaaattatccaggcatggtggtgcacrcctgtggtcccagctacaagggaagctaagccaagaggattgctcgagcccaggaggtggagattgcggagagctatgatcatgccactgcactcctgcc

SEQ ID NO: 444800 - DNA, 201 bp, Homo sapiens
tttttaagtcaattagatgaacacatgggatatttacaatcagctcctttgcagttgatgagtatgcaaaatttagaatttattgaagtcactttattaayggttcttactcgtattattgcaattgtgttttttagaaggcaagaactcttactttggcagataggttgtgttctgctagagtatggtagtccaaaaatt

SEQ ID NO: 444801 - DNA, 201 bp, Homo sapiens
aaatatagttactttgcatgtttttatatgcttatctaatttaactttttaatatgtgaaaaatctttgagactgtgcatctattagcaatttttaaaacrttaaccaactattttttataaagtggctaagttgccatatttcagttacttctgaacattgttttaattgttttaaatcttagtataaatttcaggctgg

SEQ ID NO: 444802 - DNA, 201 bp, Homo sapiens
gttgttgagtgctgtgctggatataattctggtcaccaaagtctggttccccacccccaccccactttttgtttttttttttttaattttaagagacagartcttgctttgttccaggctggagtgcaatagtgtgatcgtagctcactactgccttgaacttctgggctcaagggaatcctccagcctcagccccctgag

SEQ ID NO: 444803 - DNA, 201 bp, Homo sapiens
aaagacttagtaccagaaaaaagaatgtaaaagatctcatgaataatttttatatcgattacacattcacctaatatttcagatatattgttaggatcaaytgtttttttcctgtttcttttcttaatgtggctaccagaaaataacaaaattatggcttacgttatatttctattggccagcgctgatttaaataagata

SEQ ID NO: 444804 - DNA, 201 bp, Homo sapiens
atgaaataaactagaaaatatcataggctgggcacgatgtctcacgcctgtaatcccagcactttgggagttcgagaccagcctaggcaacatggcaaaaycctgtctctaccaaaaccaaaccaaaccaaaccaaaacaaaacagaaaaacattagctgaacatggtggcacatgcctgtggtacaagctacttggaagg

SEQ ID NO: 444805 - DNA, 201 bp, Homo sapiens
ctgtaatcccagcactttgggagttcgagaccagcctaggcaacatggcaaaaccctgtctctaccaaaaccaaaccaaaccaaaccaaaacaaaacagaraaacattagctgaacatggtggcacatgcctgtggtacaagctacttggaaggctgaggcacactaattgctttagcctgggaggcagagattgcagtga

SEQ ID NO: 444806 - DNA, 201 bp, Homo sapiens
acgcagaagatgggtgatttctgcatttccaactgaggtaccgggttcatctcactggggagtgtcagacagtgggtgcaggacagtgggtgcagcccacygagcatgagccgaagcagggcacttctcaaaagaagacatttatgcagccaaaaaacacatgaaaaaatgctcatcctcactggccatcagagaaatgca

SEQ ID NO: 444807 - DNA, 201 bp, Homo sapiens
actcgctgaactgtacgtggaaagggcaaagtggctctggtccaaggtaatggccagggaaatgtcatcagatatatatatatatatatatatatatatgkatatatatataatgtcgggaattatgtacttccttaaaaggccaactgagagaacataactaatccaaattaagaaccttccttttctatcacttttctt

SEQ ID NO: 444808 - DNA, 201 bp, Homo sapiens
acgagttaatgggtgcagcacaccaacatggcacatgtatacatatgtaacaaacctgcacgttgtgtacaagtaccctaaaacttaaagtataataataaaaataaaataaaataaaataaaataaaactgctagagactttcaggttgtcttaggataatggtggatgcctacatctgaatttctgtgtagcccctgaa

SEQ ID NO: 444809 - DNA, 201 bp, Homo sapiens
aaaaacagaaatctggacatcatcttaaattccttctgcaacctcacttttcacatccagctggagactaaatctttgttcttcaaccttagaaatatctyttgaatcctctccctcttatttatttccactgctttaacttatgactttattatttacttcctctaacaatattaacaaccattttaggatctcaccatt

SEQ ID NO: 444810 - DNA, 201 bp, Homo sapiens
cgagttaatgggtgcagcacaccaacatggcacatgtatacatatgtaacaaacctgcacgttgtgtacaagtaccctaaaacttaaagtataataataaaaataaaataaaataaaataaaataaaactgctagagactttcaggttgtcttaggataatggtggatgcctacatctgaatttctgtgtagcccctgaaa

SEQ ID NO: 444811 - DNA, 201 bp, Homo sapiens
tgtgagccagcacaaccagcctgttagtttttatttctgcatgtcaaaatggtactgtaaaaccaaacactctattatcaccattttcagtgacagtagcttttttttttttttttttttctgagacagtctcactctatagcccaagctggagtgcagtggcatgatcttggctcactgcaacctccacctcccaggctt

SEQ ID NO: 444812 - DNA, 201 bp, Homo sapiens
gagttaatgggtgcagcacaccaacatggcacatgtatacatatgtaacaaacctgcacgttgtgtacaagtaccctaaaacttaaagtataataataaaaataaaataaaataaaataaaataaaactgctagagactttcaggttgtcttaggataatggtggatgcctacatctgaatttctgtgtagcccctgaaat

SEQ ID NO: 444813 - DNA, 201 bp, Homo sapiens
agttaatgggtgcagcacaccaacatggcacatgtatacatatgtaacaaacctgcacgttgtgtacaagtaccctaaaacttaaagtataataataaaaataaaataaaataaaataaaataaaactgctagagactttcaggttgtcttaggataatggtggatgcctacatctgaatttctgtgtagcccctgaaata

SEQ ID NO: 444814 - DNA, 201 bp, Homo sapiens
ggcacgagctcggctcactgcaacctccacctcccaggctcaagggatcctcacacctcagcctcccgagcagctgggaccacaggcgctgctaccacacytggctaattttttgtattttttgtagagacggggttttccatgttgcctgggctggcctcctgacctcaagtgatctgcctgccttggcctctcaaagtg

SEQ ID NO: 444815 - DNA, 201 bp, Homo sapiens
cgtgatcatgccactgcactccagcctgggtgacagagcaagaccctatatcaaaaaaaaaaagtgacatttattaaatataaagtaattttaatttatargtatccattttaatttcctaaaattctgtgtgctatacatacttaaatatgaaacattgacattataagagaacttaggattcttcatggcatattattt

SEQ ID NO: 444816 - DNA, 201 bp, Homo sapiens
gttaatgggtgcagcacaccaacatggcacatgtatacatatgtaacaaacctgcacgttgtgtacaagtaccctaaaacttaaagtataataataaaaataaaataaaataaaataaaataaaactgctagagactttcaggttgtcttaggataatggtggatgcctacatctgaatttctgtgtagcccctgaaatat

SEQ ID NO: 444817 - DNA, 201 bp, Homo sapiens
cattgcagcatcttcacaacagccaagctatggaatcaaactaagtgtccatcaacatgggaatgaataaagaaaatgtggcatatgtatgtatacttatmacacacacacacacacacacacacacacacacacaatggaatactattcaggcttaaaaaagaaggaatcctgttatttgtgcgaagatggatgaacctg

SEQ ID NO: 444818 - DNA, 201 bp, Homo sapiens
ataagcagttttaggatgggtgcggtggctcacgcctgtaatcccagcactttgggcggctgaggcgggcggatcatgaggtcaggagatcgagaccatcmtggctaacacagtgaaaccccgtctctactaaaaatacaaaaaattagctgggcgtggtggcacgcgcctgtagtcccaactactcgggaggctgaggca

SEQ ID NO: 444819 - DNA, 201 bp, Homo sapiens
atgtatttttttggagatggtgtctcgctctgtcgctcaggctggagtgcagttgcgcgatcttggctcattgcaagctccgcctcccaggttcaggccartctcctgcctccgcctcccgagtagctgggactacaggcgcctgccaccgcccggctaattgttttttttttttttttttttttgtatttttagtagaga

SEQ ID NO: 444820 - DNA, 201 bp, Homo sapiens
cggggcttccacctgtcttgcacctcagaagggggcggggcttctgcccactagcgccctggagagagcagccctagcaccaccttcctcaccgctccaamtgggctgccactgccatcaatagcacatttcaatttgtactaatcacatttcaagttctccctagttacttgtagctagtggccaccatattgagaagtt

SEQ ID NO: 444821 - DNA, 201 bp, Homo sapiens
tggctcattgcaagctccgcctcccaggttcaggccaatctcctgcctccgcctcccgagtagctgggactacaggcgcctgccaccgcccggctaattgttttttttttttttttttttttgtatttttagtagagaccaggtttcaccgtgttagccaggatggtctcaatctcctgacctcgtgatccgcccacctgg

SEQ ID NO: 444822 - DNA, 201 bp, Homo sapiens
agagagagattctgtttcctgaggcctaaagtgccctgacattaaaacgaggagttaggagccagtaactgtgaactaaaaccaatatatgtattataatwccacagcctggatttttaaaaaaattcaacagcaccaaattaagtatccttctcattccagaccctcatcccctgagtccccaaccatagaattccagaa

SEQ ID NO: 444823 - DNA, 201 bp, Homo sapiens
aggccaaaggcagttgtattggtaagtgctgttattcatgcattcacttgccatctgttctataaaatcctccttttactgctcttctgaaatattacatrtacaggattatacttttttgggtcagctttgctataaattgaaggagcaaaatggtaatggttatttttccttcacatatccttattgttttctttttag

SEQ ID NO: 444824 - DNA, 201 bp, Homo sapiens
ctttcatagataatctacatcatctttgtaagcatcttgattttagagaagatgaaacagatgtaaaagcagttcttggaactttattaaatttaatggargatccagacaaagatgttagagtggcttttagtggaaatatcaagcacatattggaatccttggactctgaagatggatttataaaggaggttgataatt

SEQ ID NO: 444825 - DNA, 201 bp, Homo sapiens
caacagcaccaaattaagtatccttctcattccagaccctcatcccctgagtccccaaccatagaattccagaagacccttaatgtcatatttcgtggttwtatatatatatattttattttattttatttcattttattttattttatttattttaagacagagtcttgctctgtcgcccaggctggagtgcaatggcac

SEQ ID NO: 444826 - DNA, 201 bp, Homo sapiens
gtggttatatatatatatattttattttattttatttcattttattttattttatttattttaagacagagtcttgctctgtcgcccaggctggagtgcartggcacgatctcagctcactgcaacctctgcttccaggttcaagcgactctggctcacccttctgagtagctggtattacaggcgtgtgccaccacaccc

SEQ ID NO: 444827 - DNA, 201 bp, Homo sapiens
ttctgtgtgctatacatacttaaatatgaaacattgacattataagagaacttaggattcttcatggcatattatttgttgacaatatttttacagtacarccttgacatttaatatgttaaattaggtattgtatactcttgtccttcagctttcatagataatctacatcatctttgtaagcatcttgattttagagaa

SEQ ID NO: 444828 - DNA, 201 bp, Homo sapiens
tgcccgaccagtatcagttcttttatggcatttattagctgtaaatgctattgatcctatatgtaatcaattaggattggactttgtggtttgaataatcaaaaaaaaaaaaaaaaaaaaaaaaaaaagtcaggccgggcgtggtggctcacgccgataatcccagcactttgggagaccgaggcggatggatcatgaggt

SEQ ID NO: 444829 - DNA, 201 bp, Homo sapiens
atagacaaaaggtactctgtgttccaagaaaatgtttacagtatatttaaaatttacaatttttgtttttaatttacctttcttttttttttttttttttktgacggagtcttgctcttgccacccagccggagtgcagtggtgcgatctcggctcactgtaagtctccgcctaccgggttcaagtgattctcccgcctca

SEQ ID NO: 444830 - DNA, 201 bp, Homo sapiens
taaactcaaaatgttcaaaatgcaatttattacctaatactcaatatctgtttctcctctcatgtttcctacttctctgaacaagactttattccatcctyccatcaaaaacagaaatctggacatcatcttaaattccttctgcaacctcacttttcacatccagctggagactaaatctttgttcttcaaccttagaaa

SEQ ID NO: 444831 - DNA, 201 bp, Homo sapiens
aagaaagcaatgggaggagtgccacactctcaaataaccagttatcacttgaactaatggagtccagctcacacctgaactaatagagaaagaactcacttattatcacagggatggcaccaagccattcatgagggatccacccatgtgacccaaacacctgccaccagatctcacctccaacactgggggtcacatttc

SEQ ID NO: 444832 - DNA, 201 bp, Homo sapiens
acaacaaaatctaaaacttgacaatgtaaaaatatatccagcatccattaaaaaattactctgtgaatgaagaagcaggaatatttgagccatagataggraaaaaaataaatcagtagaaatagttctagaaatgacaggatttaaaaacagctattgtatataggctccataagtttaagaacataaacaaaaataaga

SEQ ID NO: 444833 - DNA, 201 bp, Homo sapiens
tcagattttcttttcaatttttaaacagaagaatactgtgaatatcaacattgacactgaacacatttgatgagttctactttagagaaattttttttgcwaatgaaactgagtcactttaaggattaaaagcttttaatttgtattttagtgccacaccagaggaatataatacagttgtacagaagccaagacaaattc

SEQ ID NO: 444834 - DNA, 201 bp, Homo sapiens
ggcttcccggcttcccccgggtcctatgcagaaaagacgctgggcctggcaagcggggccagtagcggcttccgggaggagttttggcctccacacggctscgtcgggcgccgcgctcttccggcagcggtagctttggagacgccgggaacccgcgttggcgtggttgactagtgcctcgcagcctcagcatgggggaac

SEQ ID NO: 444835 - DNA, 201 bp, Homo sapiens
ctgcgggagctgggcaggtagggctaggcccagcctgggtcctgcatcctcctccgctgattccggcttgggtttcacgtgctctcccctcccctgctgckctatggctgggatcccctaagcccccgctgcggcccttgtggagatgctccgtggctgatttgggcgcttctccctcagagtgcccgttgatagcacatg

SEQ ID NO: 444836 - DNA, 201 bp, Homo sapiens
ttgtttgtttttcttccttttgcagcttaattataaaattgaagaaatcatatttttggtcattttctggctgctagccatttgtttaaattttaagttgrtatttttattttgaaaaggctgatttaaatcacgtggtcacatgcacaagatcatgaacacgagatcacgtttattttcttatagcattatcacaacttt

SEQ ID NO: 444837 - DNA, 201 bp, Homo sapiens
tagcttttgatttaaagtgagagatgtgcgattcctcctttcatatgtatacttagaggccactgtagggtcattaattggcctaatttcaatattcttakgtctttggaaatatgaagtcccaaagagagtgagggggatggaacggctggtcagaacacacaccacatttatcgattaggttcactgtcttatatgggc

SEQ ID NO: 444838 - DNA, 201 bp, Homo sapiens
ctggtcctttaaaaaaagtttgctgaccgctattctatatattgaagcttttctctaggcttattctttattgcacctactacttttgtcccttcattggkgtcttcataaagagatgcaaaataaacattttttttgtataatggataaagtattttaaaattttttgttcaaactttaactcaactttgatagcatgtc

SEQ ID NO: 444839 - DNA, 201 bp, Homo sapiens
actatagtacaaattgcctgaacttacagaacaacaggtctgagctttaatatcatgataccagtatgtcacaagctatgttaacaaatgcagcaattcayttcttacttagttgaagctgcaaagtttgcagatagttttgttgttgttgttgtggtggtggtggtggttgttgtttttgagacagagtctcgctctgtc

SEQ ID NO: 444840 - DNA, 201 bp, Homo sapiens
cacagctagcagataacagagctaggtttcagattcaagctttcaaggccttttcttccaaaatgtttcctcttaattgactatggcaattagactactgaaaaaaaaagagatattagtgttctaatttatgggctgctcttcctcagtccctcagataaattttgtcctattgtttttttgctattagcagtctgctct

SEQ ID NO: 444841 - DNA, 201 bp, Homo sapiens
catgagccactagaggagatttgatggtgtaaagaagctagtcacgtgaatctgggatggaataggaagtacaaaggcccataagtgggaatgagcctgctttttttttttttttgagacggagtctcgccctctccagtggcgtgatctctgctcactgcaacctctgcctcccgggttcaagcgattttcctgtctcag

SEQ ID NO: 444842 - DNA, 201 bp, Homo sapiens
gttgtggggtgaggggctgggggagggatagcattaggagatatacctaatgttaaatgacgagttaatggatgcagcacaccaacatggcacatgtatacatatctaaaaacctgcacgttgtgcacatgtactctataacttaaagtataattaaaaacatatatatataaaacataacatgtatataagttgtaaagc

SEQ ID NO: 444843 - DNA, 201 bp, Homo sapiens
aaaaatgaatagatcaagttgtcaaagtgaagtagaaaataagtatatgttttcatacataatttgtatggtatttgccataacaaattactgcaaactargcgagtttaaacaatagaaatttatcatctcacggttctggaggctaaagatacaatatcaagttgtcattaggaccatgatctctctgaaggctaatgt

SEQ ID NO: 444844 - DNA, 201 bp, Homo sapiens
cattagtcacagcaccattttttgaaaagaatattttgcccctcgtttaattatcttggcttttttgttgaaatggtcaattgattttcagcaatattctrttgatctatatgcctaaccttatgctaacaacacagtgttttgattgttgtacctttgtagtaaattttgaaatcataaagtgtgagtgttccaactttg

SEQ ID NO: 444845 - DNA, 201 bp, Homo sapiens
aggagattcaatgccaaactcaacaggaaaacctcagcagtaatagtgatggaatatcacccaaaaggcgtcgtctcagctcgtctctaaacccttctaaragagcaccaaaacagactgaggagtatgatgaccttcattcagtttgtatttagccattaaataaaactttgttcacttttaaaaatcagctttagttaa

SEQ ID NO: 444846 - DNA, 201 bp, Homo sapiens
gtagagagaaggatttgtttaaaccttctaagactatagaaccatagtctatatatagacttaaataatatagatcaatttagatgtttattttgctttaygagactctaaaagtagtttcactagaaaacacctaacatctaatacattcttgctgcctatgaataatataaatatattttctaaggaatatttctggaa

SEQ ID NO: 444847 - DNA, 201 bp, Homo sapiens
cgcaccgagcatgagccgaagcagggcaaggcattgcctcacctgggaagtgcaaggggtcagggaattccttttcatagccaagcaaagctgtgacagayggcacctggaaaatcaggtcactcccaccctaatactgcgcttttccaatggtcttagcaaacagcacaccaggagattatatcccgtgcatggctctga

SEQ ID NO: 444848 - DNA, 201 bp, Homo sapiens
aataatatagatcaatttagatgtttattttgctttatgagactctaaaagtagtttcactagaaaacacctaacatctaatacattcttgctgcctatgmataatataaatatattttctaaggaatatttctggaaattattttttattttctcagtacttgttgggcccactttatgcagctttgaaaatggaaagta

SEQ ID NO: 444849 - DNA, 201 bp, Homo sapiens
gctgaaggttggaatggctgtggcaatttcttaaaaaaatcagacaacgaagtttgccacatcagttgcctttcatgaaaggtttctctgtagcctgtgaygctgtttgataccattttccccacagtagaacttctttcaaaatttgaatgagtcctctcaaaccttgccactgcttaatcaactaagtttatgtaatgt

SEQ ID NO: 444850 - DNA, 201 bp, Homo sapiens
gaaaaattacaggaagttacatgctttatagattcagtgctcagtattgattagttataaatgggataactggtattagatcgcatcacaaaactggtagragaggtgattttgggatttttcgaatactcttgtgatttgacagcctaaatggggcatacctgatggttgtttcaatattgtaagattcaatattagatt

SEQ ID NO: 444851 - DNA, 201 bp, Homo sapiens
gctggccgactccaccagggccctgagtgtcacctgtcttatgagtcagctgtgccacacgccagctcagccagtctcctcagaatcccccggagagctcsctcagttctaagcggtcctgtcatgtttcttgcagactccaggccctgaggcaggtgtcccagcctgaccctcgaggctgcagctgtagaggcatgcagg

SEQ ID NO: 444852 - DNA, 201 bp, Homo sapiens
tgggcttccaactcggaagagttattggctacttttcccaaatgggattgcccttccaaagaactgtgggcatctgtttgacaacaagttataaatttgtrttccaagttctctgaagaaagcatgaatcttcgacaatggcactgtggcactgtatttcaggcaggcgtgcagagctgtcaaaagtcaataaagtactca

SEQ ID NO: 444853 - DNA, 201 bp, Homo sapiens
aataaagtcagtgctagtggattaaatattttaaaactcagtttcctataataagcatacagtgaataaacagaattttctataacaaacaggtaaacaarcaagatggtcttaaggttaaaggttatataacagctaaccattgcgctgaaagtaacattgcccaggagaggatatgataaacaagctccttgatttatg

SEQ ID NO: 444854 - DNA, 201 bp, Homo sapiens
gggcttggtgtgggcagctcatctctgctccacttggtatcatgtggggcagctcaaaggctagaaatggaagcatctgcaggtctgttcgctcagcatcygatgagtgattctggctgtctgctgggaccctggctgtgctgtttgctggagtattacatgtggcctctccatgtggtctgggcttcctcatcccatggc

SEQ ID NO: 444855 - DNA, 201 bp, Homo sapiens
ctcgtttgtctcagggaacaggagacttgagagagagtccagggctggacccaggtgaagccatgctgtgagcgaccctggctgtttgcatctttctgtcycactgtcctggatgttgctggcctttgtctatgctatgctttcctcatctcagtcttcctttcttacctctggctggatgagtctttttatttctgtctg

SEQ ID NO: 444856 - DNA, 201 bp, Homo sapiens
ttgtaagcacattttttttttatcgttctatagggatttttcatatatcattttggatcctgtttttaaagctcagtatccctgtttttacagccttcagratagtcatcttctatcatgtggttgtaccacaatttgctagttgtatccctgttgctgaacattgagctttttattccagcaggttttttattgttgttt

SEQ ID NO: 444857 - DNA, 201 bp, Homo sapiens
tagtttgctagcagagtactgtctcaaagcccacacagttcatgacagtgcctctggttgccaagcacgattggcacagctggtgtcctccctgctctgcygctgtccttcttttcttctgcatctctgtcagtgcactgccacctgaatctttactgagcacctagtaggtgtcaggtccaggggcagcagatagagtgg

SEQ ID NO: 444858 - DNA, 201 bp, Homo sapiens
agatagctttctatcattaatttctagtttaatcctgttgtagtcagaaaacatactttgtatttcagttcttctaaatttgccaaggttagctttatggyccagaatatagcctgcagtgttgaatgttccatatgctccgtgcattttgctgttgttgggtggagtgttgtataaatggcaatttggtcaattggttga

SEQ ID NO: 444859 - DNA, 201 bp, Homo sapiens
ctctggcacagctagtgttcatgttcaagatatttcactgatgaatattttccagactttacccatatctctttaacaaatgtaaagggcagcccagggcrttgtattttcaaagcctcatgagaaaagctgaaaaagcattaatctgtggaggttattgctatttaaaaacctgtatcccagccgggcgccgtggctcac

SEQ ID NO: 444860 - DNA, 201 bp, Homo sapiens
cgaacagctgatttgctctggcctgtcttttcaaggatgtttgaatagcaagcagccttggagagtagagacagcatctctatctggaacagatttatttwtattccaggataacaaagacaatgtctcccttaggagcagaggttgggcaggtttaccagcagctgcttatataagattggggcatcctaatgtcaggac

SEQ ID NO: 444861 - DNA, 201 bp, Homo sapiens
caaagtcatatggttggtagctgtttttatgtgtaatcttttgagaaactgctagactgttttccaaagtggttgcaccattttatattcccaccaacaaygtgtgagggttctgatttttccatatcctcaccagcacttgttcttacttgtcttttatattatacgtatcctagtgggtacaaagtggtctcgtttgat

SEQ ID NO: 444862 - DNA, 201 bp, Homo sapiens
gccgaggtgggtggatcacaaggtcaggagattgagaccatcctggctaacacggtgaaaccccatctctactaaaaatacaaaaaaattagctgggtgtkgtagcaggcacctgtagtcccagctactagggaggctgaggcaggagaatggcgtgaatctgggagacagagcttgcagtgagccggatagcaccactgc

SEQ ID NO: 444863 - DNA, 201 bp, Homo sapiens
tctacatgtatatgtgtttaggtatttgtctctaacctttcagttgtgtttttaatcttcttgttgggaaaatgggtaatgtctctgtggtttgccttatrtttgggatattagcaaaggggagagtgttttgagatggggttgatgccacaggcaggccagatcacgaaaggccctggtaggacacaataagccttaagg

SEQ ID NO: 444864 - DNA, 201 bp, Homo sapiens
ctcaagcgatcctcctaccttagcctcctgagtagctgggactacaggtgtgcaccaccacgcctggctaatttttgtatttttggtagcaatggagtctygtcatgttgcccaggctggtgtggaactcctgagctcaagcaatccgcccgcctcagcctcccaaagtactgggattataggtgtgagccaccctgcctg

SEQ ID NO: 444865 - DNA, 201 bp, Homo sapiens
ttcattctcatcttacttaggttaggaagtctgccaaagctagcaatttgaaaagaaagaaaataaacaaaatgaaaggaaaggaagatatcttgcagaarcactcactataaaaatataataagtcaatgggtattatcccacttgtaagagagtcaactcctttcattcgttatttttagaaagcttactgtcacgatg

SEQ ID NO: 444866 - DNA, 201 bp, Homo sapiens
cagttttctggccctggttcctgtggaaatttctgctccaatgcattgtgattgtttattcacctatctatgtctccagttttgggggcagtggtttgccytacgatctcacttcttttgtggatctgagaagagttttccagtttgttcagctttttacttgctaggacagagttttgatttataagctccttacctgcc

SEQ ID NO: 444867 - DNA, 201 bp, Homo sapiens
tttagtatatgaatcagttaggaatattggcattttaactttaatgccattgtcacaagctatgtcaccatgcagaggacccccccccacccatcccaggmagctgatcgagggtctttaaagggctctcttttgagggaaggggacacctcagagcacctggcacttgaaaagatgaaaagtaagagccccatcattgct

SEQ ID NO: 444868 - DNA, 201 bp, Homo sapiens
ttatcccacttgtaagagagtcaactcctttcattcgttatttttagaaagcttactgtcacgatgcctgaatcttccaaaaatgtagcatgctgaaagakaccttgcaaataactccatcaagttcactagcctacaaaaaatccatcttctcacctttcttccccttttaaaaaatgttgatgtaatttcaggcttacg

SEQ ID NO: 444869 - DNA, 201 bp, Homo sapiens
ctcttccttcagatgcccacagcctgcagctctgctgtccccagcttttggctggctcctcctgccctgggtgtcccagtgtcttttggtgggagtcatgktgtgtggaagtgagcagccaactgggactgggctcataaatgaccatttctccttgctttccaagaggtgtcttcttgtctctcccttgttttcaatcta

SEQ ID NO: 444870 - DNA, 201 bp, Homo sapiens
gtaatgtttattttattctgattattaaaataatgtatgctcattgtagaaaatacataaatgcattaaataggaaataaaatgcatgaattatttttccrttacagtgttattaggaatgttttgcctgtgcaaaggagatgtggagcgctagacttattttatttgaggtgcttgtcgagataactgagatcagtgggt

SEQ ID NO: 444871 - DNA, 201 bp, Homo sapiens
acccagtttctccaaatgttaacatcattttataacccattccacatatataagcatgcatatatacatattttttggtaccatataagagtaagactgayagtcctttactcccaaatatttcagtgtgtgtttcctaaaacaagaaattctcttatatagtcacagtgtaatcatcaacatcaggaaaataacattgaa

SEQ ID NO: 444872 - DNA, 201 bp, Homo sapiens
atatagggtgctttgcagaatgcctggcgtgtggtaggtcctcagcaaggaactcctctcctcctccgtcatggcccatgaggcccttgttcctgctaagytgtccagatggcccttgttggcaggccatttccccacatggggccacttttcgatcatcatccagaggcccctgctggtcccctcagtgagcttacagat

SEQ ID NO: 444873 - DNA, 201 bp, Homo sapiens
ttcctgtgcatgggccggctctcctgatgtgcgctggctcctctgagccatctgtgcagtgccacctgggtctacctcccagatcctggaggcagcacgcrtgagagggcacatagacagggtacaggtgttggctcttctgcctccccgaaccaggcctcttcacctgtttctaccacaccacctggtgctggggctgtt

SEQ ID NO: 444874 - DNA, 201 bp, Homo sapiens
cggagggccagcaccattttatctcattaatttatagttctgacaggttgttggcttatagaacaaccatgaatcaacacttaaataaaacttgctcacarttatttttggtgctcttgtttcagtctgtaatcttcctaacaaaacgtctgtggcacgttaggctgaggtggcctcagggaacgctggccgactccacca

SEQ ID NO: 444875 - DNA, 201 bp, Homo sapiens
ttgaggctgagaggaaacatttgaacccgtgaaaatggaaggaaattggcggtcagagggagctgaagcctcactggtgctgatggaaattttgctacttygaaggtagcagtttgtcctcccgggagccctgcagccactgaggggcatgcctgcgagtgcatccgtgccacttagttgtgggtcagggaggctgctgca

SEQ ID NO: 444876 - DNA, 201 bp, Homo sapiens
gtgggctctgcaggccctgtggctttcgtcccgctttgacttgtcttgtcctttctcttcgctgagtctgatctccctttctactggatctgcctttttcygcccttggtgatttggctttttcatttcaatctaattagggctccctgccaggagaaggcagtgcagggcgttctcaccgcagcgctttgggaattagtc

SEQ ID NO: 444877 - DNA, 201 bp, Homo sapiens
gggggtggggtggggcagggaaggcagtgcagggggtggtttgcgtcttacaggaagggagtctcctctccagacaggtcttacctctggagctctccagrcagatgctggaagtggcagtgcccagagtgtgtgggtcttggagtgccagagtgtgggaacacagaggggcagcaggggagggtggaagacacacaggag

SEQ ID NO: 444878 - DNA, 201 bp, Homo sapiens
gcaccacctaccaccccgtgctgccctccgtcctcgccacctgctcctggggaggggacatgaagatctggcactgagctttttgtcactgaaccttcccratgccagctgggctcttggactcccctcttcctcaagggtagatgagaggaacgagcacagaggttggctgtgggtcctgggtaccaccttctgagcctc

SEQ ID NO: 444879 - DNA, 201 bp, Homo sapiens
gaaaaaatttggggaaatgatcctcccaacttaccaatcccaagcctttacatttctgcaatgaaaagtttaacatctagatatagatttgatggtaaaayaatgagaatctaattccaccgagacctttttctttctacagtggggtcgagctgagccctggagatcaggcccttgttgtgacacctggtgctgtctgtg

SEQ ID NO: 444880 - DNA, 201 bp, Homo sapiens
aacgccactcccgaggaaacccacctggatgtttttctctgtaactggccatttggagacagggccaggctgtgcataggcttttgagtttctcaggtgcytacatggggctcaaaatgatgatgcaatcaatccgtttcttgacttttgggcctgggtccagctcagaatggaggtgtgctccatgggcttgccttcgga

SEQ ID NO: 444881 - DNA, 201 bp, Homo sapiens
accaaagcacatatggccaaatgttgggagagtgaattggaggcaaaagcctttggaattattgggatcgttgggactcctgggaaggaactgggcagatytgtgtttgagccatggctctttctaccctaggtctggggaaggtcctctgcttctcccccactgtttcttgtaaagtggtgctggcatgcttagcccgca

SEQ ID NO: 444882 - DNA, 201 bp, Homo sapiens
gctccagaggaagtcattaagcagagaaattactaacacctcgtgaccaccgtggagcagagccaggggcacgaaataaaatgccatagggatgagacccrtgcagccagccagcacttagggagatctgctaggaggacacccttaggttgtcctcctgagggtccagccctctctgaggggttgacagctgagcttcat

SEQ ID NO: 444883 - DNA, 201 bp, Homo sapiens
acagtagtcactaatggatgataatctaggagtgtttttgttattgtttttattttagaagaaaggtttgaaattagcatagtaaatctctgtgggatctktgcaaataaaagaatgttcacgttaaaaacaattttcaagaaagatgtatggtaatgaataaaacatcagtgagtgaaaataagcgtgtttaattattca

SEQ ID NO: 444884 - DNA, 201 bp, Homo sapiens
gttttaaaatcctttaagtgaaaatttcagtggattttgagctgggtggttacaaatatgataatgcaattattaacctgattagttgcaggagccattayttgacattagggaaatggggctttactagcaaaatgttcacaaaatcctttgcttccatggtggataaaagtggaaaatgtccgggcagcccagctttgc

SEQ ID NO: 444885 - DNA, 201 bp, Homo sapiens
agacaatggtcatttacccaggccacatggattgaaggggcagaacagagttaggattcaggggtgtctgaccctgaagtcccccatggaactgggcctcygtgttcttgctgtcaccccatatccccaccaggcaccctctcactcactctgttcacatctcccagcaacctcagagttttaccctatgagttctcagac

SEQ ID NO: 444886 - DNA, 201 bp, Homo sapiens
ggtttctcattccttttttcttttttttttcttccttttttcctccttctggatttaacccagccagccttttgggctaatgttgacattagctagaattygaatttagactgcttaccacattgatgtttttacacaaccttcctgtggtttatcggataattgagtgtgtcttgaggcagtaactgagttgaaatgtgt

SEQ ID NO: 444887 - DNA, 201 bp, Homo sapiens
accttcccgatgccagctgggctcttggactcccctcttcctcaagggtagatgagaggaacgagcacagaggttggctgtgggtcctgggtaccaccttytgagcctcagtttcctcatctgtaaagtggggagaaaagtctgtttgcctcaggagtgtgaggactacactagtgaaagcgcctggcgggcagccggcga

SEQ ID NO: 444888 - DNA, 201 bp, Homo sapiens
atgataatgcaattattaacctgattagttgcaggagccattacttgacattagggaaatggggctttactagcaaaatgttcacaaaatcctttgcttcsatggtggataaaagtggaaaatgtccgggcagcccagctttgcaaaggctctcgtggctctgcaggcacctggcatgcaccctccccattgccaggatac

SEQ ID NO: 444889 - DNA, 201 bp, Homo sapiens
tcccactgtagctgtttacaaccccctaagcccttgggatgtgcttggcaagataaggccttatggctagaaggctcggagagcatcctttactgggcttytggatggaatttttggagcaaagggttagtactcatttttatgcaaattgagaaatcttgatgaaaacgatcacttccatcccagccccatcagggaggg

SEQ ID NO: 444890 - DNA, 201 bp, Homo sapiens
tttaattatttctctgcttgtctccagcaatgctgttgtcaaggaaaccaaaacctttggaaagcttttcagcttctcggtcggaagaggatacttgtacrgtgcgtatattgtcggtggaaatggacctgtcgttctgtaacaaaatctgtttcttttaaaagggcttacttccttcacttcttacaaatggactctttt

SEQ ID NO: 444891 - DNA, 201 bp, Homo sapiens
ggttccttctgccccaacccttccctgatgctgccttgctcaggttaccagaggatactgtttcttatccctctcggaggccgtgagggaggaggtgagartgattagtgggagaagaaaagcaggcccaggaccaagccctggggactggggacatcctcggtgaccctgtggagcattgagccatgccagctctgtgcc

SEQ ID NO: 444892 - DNA, 201 bp, Homo sapiens
agagctcagggagtcttatttcggtgttcagtcccagcccctgtgctttctgtgtggcttagggtaagttacttaactctctggaccttagtttccccatygtaagtcaaggacaataacagcatccacctcagtcttctgaggattaaacaagagaacccacggcagactctcaggagagtaccaggcgtatggcaggca

SEQ ID NO: 444893 - DNA, 201 bp, Homo sapiens
agagtgacaagctcactcacacacaccgtcggattactcaaatcaaattcatttgatggcattgatgggttcatagtggcccttaagcattattctctcartcaacagaagttaaacaaatgcatgcaattgtatgtgtgggtgggtgtgagtgggtgtgtcttgacagggggttctgaaatttttagacattcaaagagg

SEQ ID NO: 444894 - DNA, 201 bp, Homo sapiens
ctgatatggttctgatacggttccggtacctgggtgtcctgctgtgttgctgttagcccgggggcggaggattggtggctgtcatcaggtgctggcagggmtgctgtgggaggggaacgaggtgtattcgggtttgctcccagggcagaagtaggacagatggtggaaggtgtgtctgtggggggaagaggtcagcacatg

SEQ ID NO: 444895 - DNA, 201 bp, Homo sapiens
tacagcatcttatttaggccccactcaccctttgagacaggcgccatcagaatcagctgtacacacactggccaggggcacaaaccagcaagtgacagagycaggatgcacgcaggtctgctaggccccaaagcctgctgcctgactgttacactctgttgtctgcatgtcccataagatatgcttgataggcgagacaga

SEQ ID NO: 444896 - DNA, 201 bp, Homo sapiens
gtcaagagacttgtccgtggtcacacagctagtaaatgatagaggcaagcagggaagcttcagactcagagcctgagcagaaagagctaccaccactcacrctgccctcctgcctctgagaataagggatggaaaagcgcatccccttcacccaggtggtgtccaagctctatcccagcttccaaattttgtggttctgtt

SEQ ID NO: 444897 - DNA, 201 bp, Homo sapiens
tgattctcttaaccccttgcagagtggccagactcagggagtttgatgccacttgatgatggtgatgactgggctgatgatggcagcacttactactgagmactgtgtgctgggcattcttccacagcctctatacagcatcttatttaggccccactcaccctttgagacaggcgccatcagaatcagctgtacacacac

SEQ ID NO: 444898 - DNA, 201 bp, Homo sapiens
gttcttgagataaatacttttagaatctaaagagtttgaggattgtctgtgccaagccattcatgcactcccttttcatgtactgaacacttggcaggtcygtgttggagagctggttccctgtccccaaagtggtcacatttaaagcatggatgagaggatggagagcgctagccattgctgagtgcttaccatgtacta

SEQ ID NO: 444899 - DNA, 201 bp, Homo sapiens
ggccagcatcttgcctgcctagccccgcagtggtggtggctctgggccctgcctctcctagggtctggcaagaaggagatgataacttgctggtccaaccsctgccactcatgcccagcagcccccaggagacgcagagggaaaatggagaaggtggtttgtttccaccttgagtgtgggcggccttgcagctccttgcat

SEQ ID NO: 444900 - DNA, 201 bp, Homo sapiens
gccagacttcacaccagtccctggggctccccttgaaccctcaggccagcatcttgcctgcctagccccgcagtggtggtggctctgggccctgcctctcytagggtctggcaagaaggagatgataacttgctggtccaacccctgccactcatgcccagcagcccccaggagacgcagagggaaaatggagaaggtggt

SEQ ID NO: 444901 - DNA, 201 bp, Homo sapiens
acaggtgcgtttcttgtgtcacctccctgaggtgagctggcagctctctccctggggaaggttctctggtgggcacgcagccacaagctgtatacgcttgygtggcagagggagaggggcctcagggtgggctcgtgctcggtgagagggcttccagactgcttgcccattggaactgcgactccccacagaggatgggcc

SEQ ID NO: 444902 - DNA, 201 bp, Homo sapiens
gttgcctgggctggtcttgaactcctgagctcaaatagtctgcccaccttggcctcccaaagtgctgggactacagatgtgagctgccatacccgtccagratgcagttttcttaaccccagaaaaaatttggggaaatgatcctcccaacttaccaatcccaagcctttacatttctgcaatgaaaagtttaacatctag

SEQ ID NO: 444903 - DNA, 201 bp, Homo sapiens
atgtagagaaaaggtttcaccatgttgcctgggctggtcttgaactcctgagctcaaatagtctgcccaccttggcctcccaaagtgctgggactacagawgtgagctgccatacccgtccagaatgcagttttcttaaccccagaaaaaatttggggaaatgatcctcccaacttaccaatcccaagcctttacatttct

SEQ ID NO: 444904 - DNA, 201 bp, Homo sapiens
tgcaggcgagcctgggataagatgccagggacgcaggtgagcctgggatagggttgtgaatgctgagggtgcaggactcccacccggctgcagggatgaarcaggtgtgaagggctgggtaggtgaccggcagacacaggaatgcgttttcttttttcttttattttgagacagtctcgctgtgtcacccaggttggaggg

SEQ ID NO: 444905 - DNA, 201 bp, Homo sapiens
cttctgacatgcaatttgtgctgaaatagatttaactttatcattgtgtcctttggttggaatcaggttagaattcctgtcaattcattatcgttgaaagkctgtgagaaatgattccagctcataaggaaagtcttcaaacgagttctgctttaatgcccacactgaaaaggcacttgggtaggatggattcgtgccggg

SEQ ID NO: 444906 - DNA, 201 bp, Homo sapiens
gttgtgtcctgtagagccagtgagacccccaatggcccacaccaccctgtccaatctgtgcttgggccaccatgatggccactctcatttatcgcccagcrtctcaggccaccccacctgccatgctccatagcaaaccattcatccattattataaagtggctgattctgaaaagtatcaccttagaacaatcctgtttt

SEQ ID NO: 444907 - DNA, 201 bp, Homo sapiens
ccttaaaacagagaaaaatgatggaggagaagaaggacagatactcagagaactgtggacaatatcagaaaatctattatacaagtaattgagctccagargagaggagggagagaatggggaagaaaaaaatattttcaataaataatatcaggaaatgccccatatttggtgagtttcttttttaaaagaaaaaaaaaa

SEQ ID NO: 444908 - DNA, 201 bp, Homo sapiens
tctggtacactggatgtgcccaaagcaggggcacagcccacaaagcatggctcctgtgaagacccagggggctatcgccttccattggctcagcttgggasaagcgatcggggatcttgccccagccagaggctacagtggcccgggaaggagcctcaagtcaccttccccatcaaagagccttcttgttcttctctgtgg

SEQ ID NO: 444909 - DNA, 201 bp, Homo sapiens
tatagaaaatctgtagtgttactggcttgaagaaccagaggacagagtttggggtaaccacagcagctggaaagtggctataaactctacccaaatctttkaatgcagactctaagcagctcaactaaggcaaagagaactgaatagaaatttctgctgctgcacaccgcaagggaaacagagtttgaaatttgagtagag

SEQ ID NO: 444910 - DNA, 201 bp, Homo sapiens
ttttccttctatgtttctttttgctttaatgagtagtttcttattccgctctttttcttcataaaaagtagaatattctgaatcctctttcacagtttgcygtttctcatttaactgtgcgcctgagcaggctacattagtcctgaggggtccctgatccttccttctgctcctgaggggtctgttgtggtctccattttg

SEQ ID NO: 444911 - DNA, 201 bp, Homo sapiens
tctctgtggacgagccatgttccagccagccacatgcccctggcagctgcccgctttaagcaagtaaaactctccaggaactttcccaagtcatctttccrtgctcaaagtgagtctgaaaccgtaggtaaaaatggcagctcttttcagaagaaaaaatgtgaggactgtgtggtaccctatactcccagaagactaaga

SEQ ID NO: 444912 - DNA, 201 bp, Homo sapiens
catgcaggaagttttaatgctaccggccagcagaaagacacttctggtgtggccagaccacctgggcaggattttgcatctggtacactggatgtgcccaragcaggggcacagcccacaaagcatggctcctgtgaagacccagggggctatcgccttccattggctcagcttgggagaagcgatcggggatcttgcccc

SEQ ID NO: 444913 - DNA, 201 bp, Homo sapiens
accattaacaggaagtcttctgcttctttttatgaccaaataatattccattgtatggatatacacattttgtttctccattctctaggtgatggacgtttgcattgtttccatttttggacatttgtttgtaagtctttgtgtggatatatgttttcatttctcatggttcttcctagaagtagaattgcaaagtcatat

SEQ ID NO: 444914 - DNA, 201 bp, Homo sapiens
aagttggttctttgagaccaatgaaaggtatatttagcccgactcatgggagataacagagaaaaattgcaaattactaatattaggaatgagagaagtgwcctaattatagatactgcagacatttgaaagacactaaggtaatgttatgaccacctttatgccaatgaattctacaacttagatgatatggaagagttc

SEQ ID NO: 444915 - DNA, 201 bp, Homo sapiens
aagagcagaaataactgaaatagcaaatagaaaaatagtagaggaaaatcagtgaaacaaaaagttggttctttgagaccaatgaaaggtatatttagccygactcatgggagataacagagaaaaattgcaaattactaatattaggaatgagagaagtgtcctaattatagatactgcagacatttgaaagacactaag

SEQ ID NO: 444916 - DNA, 201 bp, Homo sapiens
tccccagcttgatcacagtcagcagggtgcagtaggcactttgaaacatttgcaaagtgacacacggtgccttggaggaaggtgccatctctgtgaggcargagtcctggtgccgagtaggtgcgggccttggaggccaccagtgtgctaatggcaggtgtccaggcaggagccgggggtgacgtgtgggtgaaggatgtg

SEQ ID NO: 444917 - DNA, 201 bp, Homo sapiens
acatttatggaacactccatgtaacaacagcagaatatacattcttttcaattgcctatggaatgtccaccaagagagaccatataaaacaagtctcagtrtatctaaaaagattggaatcattcaaagtatattctctgactactatgggattaaattaaaaatcagtaacaaaagtatctggacaatttctaaatattt

SEQ ID NO: 444918 - DNA, 201 bp, Homo sapiens
tttataagactggaacaacactgtcacccaatttggcttaattgacatttatggaacactccatgtaacaacagcagaatatacattcttttcaattgccyatggaatgtccaccaagagagaccatataaaacaagtctcagtgtatctaaaaagattggaatcattcaaagtatattctctgactactatgggattaaa

SEQ ID NO: 444919 - DNA, 201 bp, Homo sapiens
gctgaggaagcatgtttctgattcccctgtacctgtcttgattagttataaaacaaagtgtagaaaagacaaatcacccagaatcctccaacttactgtarctcttgttttttgtgaatcttttcattgtctctatgcacacgtttttaaagcgtttcaatctcagtgttcttgagataaatacttttagaatctaaagag

SEQ ID NO: 444920 - DNA, 201 bp, Homo sapiens
gcacagaccaatggcaactacctggcccttttctccactgtgtggccctaccggatgagcagacggcggcgctatgaagggcacaaggtacttctgtcctygtcccccaggcgaatgctgagccccagccccaagcctcctggcagtcctggacatgggccctggggtgcatggagcctctgtctgggtggatcctgcttt

SEQ ID NO: 444921 - DNA, 201 bp, Homo sapiens
ctgcccaatcttctgtaacatgtaaggggaatttttctaccttattaaaaacttttccccaaatatatttttataactgtctcaagtttcatactttgctycatcatttccatgttgtttcctataatttcctgcttttgtttaaaaaataatcagtattacagtgaatatggctatacataaatattgtctttttttgct

SEQ ID NO: 444922 - DNA, 201 bp, Homo sapiens
ctggtcgggggccctacattcctatctgtttacataattgggcttattgcatagtatgtgcagttttgaattcttcctctgctgcccaatcttctgtaacrtgtaaggggaatttttctaccttattaaaaacttttccccaaatatatttttataactgtctcaagtttcatactttgcttcatcatttccatgttgttt

SEQ ID NO: 444923 - DNA, 201 bp, Homo sapiens
gacttttatccttgcatcatcctttaaagagttctatttttggtttttaaaaaatgtttataatatgttggtacagaggcacattattcaacttaacacaratatctatatattggtggtatgtgccttaggtttttcatggatggggcgtactgtcaaactataatagcttggagaccatggatctaggcagattgggtc

SEQ ID NO: 444924 - DNA, 201 bp, Homo sapiens
taaagaacatggagtgccagttccttcatatccttaaaacgtagcttcggaattcatacatttcaactggacacattacagtggaaagatacttattttartatgttctaaatgttctgtgagctgtaaaatatgcttttattagttttgaaaaatttacagctagagaaattaagtaaaataaaacaatgactcataatt

SEQ ID NO: 444925 - DNA, 201 bp, Homo sapiens
tgagccttcatttgagtatctataaagtggagagaattaaacatgcctcgctgggtttttgtgaaaagtaaacgatattagttgtgaatcaccaagtgcartgcctggcacatagcaggcacttagtgtgtgctcgagttcctgcttttccccaagaatttcctcctttccttgacttgtgctcatgtcttattttacgta

SEQ ID NO: 444926 - DNA, 201 bp, Homo sapiens
ttgttcaggccaaaaacatcagaattagccctgtctctgctctttgcatcacattcccatacccaaaccattagcaaattctccaaaacttggacattttyccccacatcagctgttgtagctctgctattgtctctcgctgggatggttgcaggagtttcccatctgatctctcactttcccccttgccccttgcaggct

SEQ ID NO: 444927 - DNA, 201 bp, Homo sapiens
tttatttcctttcccagctgggtgccctaaagaagacagaaacgtcaaagtgctattttttggcttatgatgtcaatttttcaggattgaagtggcgagcrtcccacagagtttattgcaaactattatgaaggtcttggagttactgttggtatgactcatttatgaaaaaaatatgatttcagtaactgcaggctgtat

SEQ ID NO: 444928 - DNA, 201 bp, Homo sapiens
cacaggcaggagtcctggctggctgcagcccagtccctggaggagaggaaatggtgggtgcagcatggaatgagctcaaagaggcgggtgcagcagtacasccttcccagggtgctttccccctgccttttggttaaaatctgccagtgtcttctgggcccctgctggatcaggaaggagggaagagcttgggggctgggt

SEQ ID NO: 444929 - DNA, 201 bp, Homo sapiens
attttcccccacatcagctgttgtagctctgctattgtctctcgctgggatggttgcaggagtttcccatctgatctctcactttcccccttgccccttgsaggctgttctcaacacagccgctagactggtctgttacagtgtgactcagacatgtcactcctctcatcagaatcctccaggctctgatcttacagtaaa

SEQ ID NO: 444930 - DNA, 201 bp, Homo sapiens
cgggcagcgccgatggccgggtcctgatgtacagcttccgcacagccagccgagcatgcacactgcaggggcacacacaggcctgtgtcggcaccacctaycaccccgtgctgccctccgtcctcgccacctgctcctggggaggggacatgaagatctggcactgagctttttgtcactgaaccttcccgatgccagctg

SEQ ID NO: 444931 - DNA, 201 bp, Homo sapiens
gtagcacattcctttttggatctctgtcttacagcagaacccatgaaaatagcctggacttgggcagtgtccatggcaggacagatgccagggatgcaggygagcctgggataagatgccagggatgcaggcgagcctgggataagatgccagggatgcaggcgagcctgggataagatgccagggacgcaggtgagcctg

SEQ ID NO: 444932 - DNA, 201 bp, Homo sapiens
cccttctggggacttctggttttacatggaaactcttttttgcattgtcttatttattttacaggctactgaagtgatagtaatgtagtcccccagtatgsaggtacagtgtgataggtcgttgtgcccacctgggacctgtctccagcccttcgagctgtgcactgcatccctcctctctctcctcgcagctagcaaagc

SEQ ID NO: 444933 - DNA, 201 bp, Homo sapiens
cggggtggcgctcttcttattcccacttcagggaggagaggactgaggcccagagaggcaaagccactcagccaaggcccgaggcctgccagcagccgtaycaggtgggaggcactccgttctgactcccacacgctggctgcaagtgctcctctgcttctcgggttcagcctctgagccacctgggtggtaggtgagagc

SEQ ID NO: 444934 - DNA, 201 bp, Homo sapiens
agacaggcaagggtaaagacgtggagccacaggggccccctgcagggcgtgccccagcccctctctacgtgggcccgggagtgtctgagtttattcagccrtatttgaatagccattataaagaaaccacagttccccggaaagtgcttttccacctgagaggccacaggggccctgtcaacaccattcagtggtgtccag

SEQ ID NO: 444935 - DNA, 201 bp, Homo sapiens
gcagaataatacacagcataaaattgaccatcttcaccgctattaagcatacaggtcagtggcattaagcacattcacagtgttgtgcagtctgcaccccrtctgtctgcagaactctttatcttggaaaactgaaactctgtccccattaaacaactccccattccccctcccccagccctggccaccaccattctactt

SEQ ID NO: 444936 - DNA, 201 bp, Homo sapiens
acccgatctgctctcctctaccccatctcaagtcccctactccatctcctctcccctaccccatctcatctcccctgccttatctactctcccctacatgytccaccctctctttggaagagctgctgcttagtgttcatagcttttccctctagccctgcccctttccctcccttcctaggagtgatggccctcctcatg

SEQ ID NO: 444937 - DNA, 201 bp, Homo sapiens
gcacaatttctgctcactgcaacctccgcctcccaggttcaagcgatctcctgcctcagcctcccgagtagctgggactacaggtgcctgccaccctgccycgctactttttgtatttttagtagagacggggtttcaccatgttggccaggctggtctcgaactcctgatctcaggttatccacccacctcggcctcctg

SEQ ID NO: 444938 - DNA, 201 bp, Homo sapiens
gctaaagatgtatgctgtaaaccttaaagcaactagtaataaaacagatttatggttataagtctaacaatgggagataaaataacaaaagatattcaatrcaaaagaaggcaaaaaaattaggaaagagggaacaaggaacagatgggataaaaacaaataacaagatttaaacccaaaccatatcaattatggatgaaa

SEQ ID NO: 444939 - DNA, 201 bp, Homo sapiens
ttacttgcaagtagtctgtgataagctaaagatgtatgctgtaaaccttaaagcaactagtaataaaacagatttatggttataagtctaacaatgggagrtaaaataacaaaagatattcaatgcaaaagaaggcaaaaaaattaggaaagagggaacaaggaacagatgggataaaaacaaataacaagatttaaaccc

SEQ ID NO: 444940 - DNA, 201 bp, Homo sapiens
cttccagatgatataaaatgaatctgctgggttactcaagggaataatgtgcgggtacagatgactttggtacagagaattggtgtgtgtgtgtgtgtgtkcgtgtgtgtgtgtgcgcacttgtttgcatgcttgcgagaggaagggagggggtaagtgcttttagcttgctgtgggaagacttcttagaggaatcacttt

SEQ ID NO: 444941 - DNA, 201 bp, Homo sapiens
attggaatatgtagtgtaggtgctcttcagttgtgagctggtgggacgtctgtaacagctgatcagcatgtgaagatactggtacttgatagcctcttaargacaatttgcttccaaattttgacctggaaagtcactggaataactttcaaaaataattacaatacatggctttttagatttttgttacatgtgttaaga

SEQ ID NO: 444942 - DNA, 201 bp, Homo sapiens
aattgtgtggactctgtaaatctttggttgtggtagtcctgttttcctaataactttgttactgtgctgtgaaagattacagattggaatatgtagtgtargtgctcttcagttgtgagctggtgggacgtctgtaacagctgatcagcatgtgaagatactggtacttgatagcctcttaaggacaatttgcttccaaat

SEQ ID NO: 444943 - DNA, 201 bp, Homo sapiens
tcactcattcactcattcactcagttcttagtgtgtttgcagggttatgcagccacagcagtcggttgagaacattttcctcaccccaaaaagaaaccacrttttttagcagccatgcctatccccccagtgccccagcccctggcaaccataaatctactctgtctgtatagatttgtctgttatgaacattttatataa

SEQ ID NO: 444944 - DNA, 201 bp, Homo sapiens
taaaggatctgaggctggccatcctggtagatgaaaagagggttcaacccaggatgaccccaagcctttgggttaactgctgagtttggtgtttgccccasatattataccccctgactgtttcagtgctgtgctccaccttcctcctggcgtggtggggaagggtagccatgaagctcagttggagtatagaggaggagc

SEQ ID NO: 444945 - DNA, 201 bp, Homo sapiens
ccaattgtagcttaaaaggtggggtttgtcatgctctgtagaaggctttatgtaccaccttgagttccaggaaaggaaaagaagagtacatttttttttttaggaataccagatttccaattagatcaattcaccaagaagcagttttttggtttacttgagagagtcgtttgtctgctgatctaatgagagggacatagc

SEQ ID NO: 444946 - DNA, 201 bp, Homo sapiens
tccttgtggggagaaagagtttggcagtcctgggccttctcggtggtgtggggactgcagtggtatccgtgtcctccttttctgtctaggggttgtgatgktggtccctgcctgcagtctccagatgacccccagccgcttggctgaagcgagtgtcctggggcctctgtgctgccacattgctgctctgagtccctggca

SEQ ID NO: 444947 - DNA, 201 bp, Homo sapiens
taaatggaaatacttaaaagacagattttcaatctctttagggggttgaggaaaaaataacattcagattttttgtttgtttgttttagcagaaaaagttygatcatcgtcttttagcaattcagctttcacattttctctcatctttcttccccattgttggcaagactgtatcactgcacttttgaaaaaaacatatgg

SEQ ID NO: 444948 - DNA, 201 bp, Homo sapiens
gacgaccttacatttgtaagagtgtgagacagagcagtgcaaggtcctgcccaaggcccctccactggaagtgacagagctgggatgggatctgggtctgygtggctctgaactcctcagctataccatctcctgcttccaacattgtgccagataatgatggctatggccctaatttctgaaacaaagtcttatttgaga

SEQ ID NO: 444949 - DNA, 201 bp, Homo sapiens
ttaaggggaaaaaaacttaaaagtaaccagaagggggaacaaggcacattacatacagaggagcaaagacgagagtgacctgaacttctcattggaaataytgccagaagacagtggaacaccgtttgaaagcactgaaaggaaaagccaaaaccaaaaccactgtcaaccccaaatttaatatccagtgaaatatctttt

SEQ ID NO: 444950 - DNA, 201 bp, Homo sapiens
gccaggacactctgcctccacccagactgggccttcagaaggaattaagttggaggccattaaaactaaatcaggtgatgcttccaggagcccccactcastaactgctgagagcatccctgagtccctgcacgtgcatgaagcagacagagtgattttaacgcagctccttgtcctggcttaggtgacgcctcccctcac

SEQ ID NO: 444951 - DNA, 201 bp, Homo sapiens
gtctattgcctgagcgttctgtgctgttccaccgcgccctctgctgtcctaggagtgcctagcacccttctttttctctggattgtgcttggtgctaacarcacagaagtaaaaaattaccaaagcacttctttctgggaactaattgataaccatgtattgtgtatgatggttcagaatttcagaaagattttttttttt

SEQ ID NO: 444952 - DNA, 201 bp, Homo sapiens
gagcttggcgtgtttgattaaggttgggtgcactgggttttcttggaagtcggtctattgcctgagcgttctgtgctgttccaccgcgccctctgctgtcytaggagtgcctagcacccttctttttctctggattgtgcttggtgctaacagcacagaagtaaaaaattaccaaagcacttctttctgggaactaattga

SEQ ID NO: 444953 - DNA, 201 bp, Homo sapiens
cactgcacacggctaaattttttttttttttgtatttttagtagagacggggtttcaccatgttggccaggctggtcttgaacccccgacctcaggtaatmcgcccttctcggcctcctacagtgctaggattacaggcgtgagccaccgcgcccggtcgttttatttaaactctggctttgcgtgtggaagttgttacct

SEQ ID NO: 444954 - DNA, 201 bp, Homo sapiens
gccggtctgcctccgggagaaccgagcgcttccggtgcgtgtggtgagcggcgggccccgggctggaggggccgggactgggcagcgcctaaagcgccccrtgccgcttaacgcggtctctcatagccgctcgccttcctttcacttcctgttccttcagaaagcgctgtgccttggaccaaccttacttcttactattga

SEQ ID NO: 444955 - DNA, 201 bp, Homo sapiens
agggaagggctggagcacagggaaagggtgcaggggaaagtggcaggcctttcccaccatggatcctggacgtcttttgatttcagtattttcagacctamcctcgttcatgatgatgagcatatgttctcacttgttgctaataagcagtgcggcaggttttctttatacatttatcttcatggatttatacatctagca

SEQ ID NO: 444956 - DNA, 201 bp, Homo sapiens
tgtagaagggactgctgaaaacatctgtttctctcaatattcagtggatccatcagcttcactggctgccttcacaattggctggggagtccctgtgtgtyccctgggttgtctaaagtcttaggcagaagtgggcaattggttcccagaatctggaacctcagagacctgccctgcaacccagtcctcctcttcagcctc

SEQ ID NO: 444957 - DNA, 201 bp, Homo sapiens
tcctaggtatttgtgtttttttttttttttatggctgttgcaaatggtattgcaaatgggattgtattcttgatttgttctcagcttgaatgttattggtrtatagaaatgctacagatttttacacattgaatttttatcttgaaactttactgaagtcatttattagttccaggagccctttggcatagtctttagggt

SEQ ID NO: 444958 - DNA, 201 bp, Homo sapiens
caatgcctggctaatagcaggtcctcaggaaatctttgttgaatgaatgaataaatgaatgagtttcagaggaaacatttgggcatgttttcttcggagagcattttccatctctccctctcctcatctcccacaccccatcgcatcaacccagtgcatttcatctcccccaccccatctcatctcccctacctcatctcc

SEQ ID NO: 444959 - DNA, 201 bp, Homo sapiens
gccaggctgctcttgagctcctgaccttgtgattccccccgccttggcctcccaaagtgctgggattacaggcatgaaccactgcacccagcgcttttttyttttcttttctctttttgagatggagtctccctctggcacccaggctggagtgcagtggtgcaatctcaggtcattgcaacctccacctcctgggttcaa

SEQ ID NO: 444960 - DNA, 201 bp, Homo sapiens
acaatgcctggctaatagcaggtcctcaggaaatctttgttgaatgaatgaataaatgaatgagtttcagaggaaacatttgggcatgttttcttcggagagcattttccatctctccctctcctcatctcccacaccccatcgcatcaacccagtgcatttcatctcccccaccccatctcatctcccctacctcatctc

SEQ ID NO: 444961 - DNA, 201 bp, Homo sapiens
gctattccatagtttcaatttcaaaaattttatcttctaactaattgggcctgatatgtagaaaagccttttttgtttttgtatttattctttttctttctttttttttttgagtcagagtctcgctcttgttgaccaggctggagtgcagtggcacaatttctgctcactgcaacctccgcctcccaggttcaagcgatc

SEQ ID NO: 444962 - DNA, 201 bp, Homo sapiens
cccctgagcctctagtgccgttggcctgagctgcaggagacctgggctcacgtcctccctctgctacttgcttggctgggtgatttcggccacattccttragcaaaagcctctctgattcacaatttttaaattggtatcgtaaagtggcaggccaagccacacctccaaagtagcgtttctcaaactcacctgtgtagg

SEQ ID NO: 444963 - DNA, 201 bp, Homo sapiens
cttgtcaggtgttttcttttgtctattctcccagatgaacacagctctcatgcggacccctcatatactggggggagtggagcaagccgggggacagaagccctgaggggcagtcagaaggtacatgtgagtgagaccaactgtgtcagcccaggatagctggaagcctgccttcacctggcctcccctctggcaggcttc

SEQ ID NO: 444964 - DNA, 201 bp, Homo sapiens
tcctcctgagggtccagccctctctgaggggttgacagctgagcttcattacgttcttgaccctgtctcgctgacctcagggcttctgtattagcagtgtccaacaaatggttgttggggtgaattaaattttctcttatggatagtgtcctatcctttctaccaagtaagcttcctctcggggaagagaccattcttctt

SEQ ID NO: 444965 - DNA, 201 bp, Homo sapiens
aaggtggcagctggcagccaaaccaggagcctaagtcttgggcaaagcttcaacaaggatgctgagctcaggggcctaggaatcctctctctgccccatctttttttttttgagatggagttttgctcttgttacccaggctggagtgcaatggtatgatctcagctcaccgcagcctctgcctcccgggttcaaaggatt

SEQ ID NO: 444966 - DNA, 201 bp, Homo sapiens
caatgaatgtttgttatatttgaatctgaaaggttccagaaagatgagatggacttggccccagaggctctaggcaaatcttgcagaccaagggggcctggtgtgtgtgtgtgtgtgtgtgtgtgtgtgtgtgttcccgggaaggcacatcctaagcttggcctgctggctctggctggtatgttgggtatagactggaga

SEQ ID NO: 444967 - DNA, 201 bp, Homo sapiens
agcgatcggggatcttgccccagccagaggctacagtggcccgggaaggagcctcaagtcaccttccccatcaaagagccttcttgttcttctctgtggaygagccatgttccagccagccacatgcccctggcagctgcccgctttaagcaagtaaaactctccaggaactttcccaagtcatctttccgtgctcaaagt

SEQ ID NO: 444968 - DNA, 201 bp, Homo sapiens
actgtctcttcaagtccctgaaccacatctggtcctcaccccaggccccacgtactgggcaggaagcagtagttggctcacacagacaggtctcagaagtsgggggcaggaacaggacaaaatggtcatgggtgtcatttctgcatccttccctttcctcactgaggccaagccttgctggggtggaaggggctgggtgct

SEQ ID NO: 444969 - DNA, 201 bp, Homo sapiens
aatgaatgtttgttatatttgaatctgaaaggttccagaaagatgagatggacttggccccagaggctctaggcaaatcttgcagaccaagggggcctggtgtgtgtgtgtgtgtgtgtgtgtgtgtgtgtgttcccgggaaggcacatcctaagcttggcctgctggctctggctggtatgttgggtatagactggagat

SEQ ID NO: 444970 - DNA, 201 bp, Homo sapiens
atgaatgtttgttatatttgaatctgaaaggttccagaaagatgagatggacttggccccagaggctctaggcaaatcttgcagaccaagggggcctggtktgtgtgtgtgtgtgtgtgtgtgtgtgtgtgttcccgggaaggcacatcctaagcttggcctgctggctctggctggtatgttgggtatagactggagatg

SEQ ID NO: 444971 - DNA, 201 bp, Homo sapiens
atatagatttgatggtaaaataatgagaatctaattccaccgagacctttttctttctacagtggggtcgagctgagccctggagatcaggcccttgttgwgacacctggtgctgtctgtgtttgcctgcaggtatggaacgccgtggactccgggcactgcctgcagacctactccctgcacacagaggcagtgcgggcc

SEQ ID NO: 444972 - DNA, 201 bp, Homo sapiens
gagcctcagtttcctcatctgtaaagtggggagaaaagtctgtttgcctcaggagtgtgaggactacactagtgaaagcgcctggcgggcagccggcgatscccaataaatgtgtgttttgctgtttgttaagtgatttcagcaacaagtgtgcattagcagcttcttctcgccctccctcctcccaagcctgctggacct

SEQ ID NO: 444973 - DNA, 201 bp, Homo sapiens
atttttatcatttgataagagaaatctcttcacgctagctgctgtctccatattctttgaacatgacttgactttttggcacagcaagatattctgggctyacttattcttttcctgccccagtcctagaatcagccatctccaaggagctctggttccttttagtggagaaaggcatttagaaaccaagattttggccag

SEQ ID NO: 444974 - DNA, 201 bp, Homo sapiens
atttgaaaggtatgaactccaattaaaaagtcaaggtggctcattttgagctggcggggcccagggactgaactgtttatgctgcagccacatggtggcgscccaggaactggtaaagggaccggccggcccctgcgaccaacttgagaccttgctgcgcttccatggctgcgcgtgggtgcccagcatgttatttccata

SEQ ID NO: 444975 - DNA, 201 bp, Homo sapiens
aaggtggtaataaaattttgcctcagagccttagctttgttggtctttttctataatttactccacaacttccaaaaaatattttaaactagtttatcataaaaactcacaccaagggtttcaaaacatccttttgtaaaggtgaaaagaagactgagaagctgcataggctgcaggctgggagtggagaaggaaagacct

SEQ ID NO: 444976 - DNA, 201 bp, Homo sapiens
cctggtatcaaaccaagaaaaggacatcataagagaagaaagcaagagaccaatatctctcatgaacatagatacaaaatttttttttttttttttgagayggagtctcgctctgtcgcccaggctggagtgcagtggcgcgatctcggcttactgcaagctccacctcctgggttcatgccattctcctgcctcagcctc

SEQ ID NO: 444977 - DNA, 201 bp, Homo sapiens
ccaaagtttagcttccacttataagtgaaaacatggagtatttttgttttctgttcctgcattaatttgcttaggaaaatggtctccaacttcatccgtgktgctgcaaaggacatgatttcatccttttttatggctgcatagtattccatggtgtatatttgccacattttctgtattcaatctactgttgatgggcac

SEQ ID NO: 444978 - DNA, 201 bp, Homo sapiens
agaccaatatctctcatgaacatagatacaaaatttttttttttttttttgagatggagtctcgctctgtcgcccaggctggagtgcagtggcgcgatctyggcttactgcaagctccacctcctgggttcatgccattctcctgcctcagcctcctgagtaactgggactacaggcgcccgccaccacgccctgctaatt

SEQ ID NO: 444979 - DNA, 201 bp, Homo sapiens
acaacgtcaaagcagctcaggctttagacctcgggttccagctgtgcgggtccacaagagagtgctgagaaattacagagaatgggagggagctgggagaytagaggtgcccaagtggaaaacccattttccaagagtgaaaaaaggtagttttggaagccccatgtaccatagtgactgagtcggggagggacgcttata

SEQ ID NO: 444980 - DNA, 201 bp, Homo sapiens
aggggccaggggtccaaatggggttctgtcattttccagctgagccctcggcaggccaggcaatttctgggtgttggtttcctctcttggcaaacatagargctcaactgtgttctctgaggcccttttaagctgagtagttttgtgatctccaaactaactgtagctaaatgaggtaatgagagaattacaggtgtcccc

SEQ ID NO: 444981 - DNA, 201 bp, Homo sapiens
gaataaatgaatgagtttcagaggaaacatttgggcatgttttcttcggagagcattttccatctctccctctcctcatctcccacaccccatcgcatcamcccagtgcatttcatctcccccaccccatctcatctcccctacctcatctcccctccccatctcatcctcccctaccccatctcatctcccctactccat

SEQ ID NO: 444982 - DNA, 201 bp, Homo sapiens
actggatgtgcccaaagcaggggcacagcccacaaagcatggctcctgtgaagacccagggggctatcgccttccattggctcagcttgggagaagcgatyggggatcttgccccagccagaggctacagtggcccgggaaggagcctcaagtcaccttccccatcaaagagccttcttgttcttctctgtggacgagcca

SEQ ID NO: 444983 - DNA, 201 bp, Homo sapiens
tcagaagtcattgagtgtaacagggttttctctcatgagcctcataccctcatgaaaggccagcatgggaaggagggaaagcaccttctctcctccaacaraaggacagctgcccctacggcagatatttgtactttgactggttgtaaatacgagtgtagcacattcctttttggatctctgtcttacagcagaacccat

SEQ ID NO: 444984 - DNA, 201 bp, Homo sapiens
tttcaaaggatacataggagttttctaggcagcaagtcaaggtagggtattttaggcataaggaatgtataaaggcacgtaggcactaaagggcacaacayatgagggaatggtgagggttttttgttgctggagaacacgcagtgtgtgtctgtgagtgtgtgtgtctgtatgtgtgtcggtgcatgtgtgtgtgtccat

SEQ ID NO: 444985 - DNA, 201 bp, Homo sapiens
gtgccaggttgggggtgtcttctctgacccatttgtggctctgctgttctcaggagaggttcacctgccccagcctcgccttgcacccgagagagcccgtrttcctggcacagaccaatggcaactacctggcccttttctccactgtgtggccctaccggatgagcagacggcggcgctatgaagggcacaaggtacttc

SEQ ID NO: 444986 - DNA, 201 bp, Homo sapiens
catcctctctgtgcaccaaggaggagggccagcctgactggatggggcggctccctcctagtgcattgtgtgtgcccctggtgtggacactggaggggccygagagtggggtggcttgctcactcttacttctctcctgctgcggttctgggtggttcaggacctgcgggggctgcggggaaggccctgccctaattcagt

SEQ ID NO: 444987 - DNA, 201 bp, Homo sapiens
ccccctgtgacttgggtgcaagcagggtgtaggggtagaggcaaaaaagggccttggagacctggagacccaagtgctgcccatgacttcagaatggaggktgaggtggttgttctctagatgttcgttttgattagaaaaggaatacatggtctttgttggctacttgggaaatggaaaaatataaagaagataacccat

SEQ ID NO: 444988 - DNA, 201 bp, Homo sapiens
gtttcaggagtgtgttgatggctgtgtgattttaagcacacggatgttccatgtaccctgtcagtgggcaggctttcctggcagccacagccttttctcayacccctgagggaagactgcttggtgcttctctgcaaatctggcgcggaggctgcggagggagatggatgtgctgagaggagactgagggccacgttccgt

SEQ ID NO: 444989 - DNA, 201 bp, Homo sapiens
ccgccactgtcattgtgatagaggcctgcaggagcacccacctgcccacaacctcaggggcagtggccaccctgggatcgacatagagggcatggcccctmtgacaaatgggatatgaaggctagctggaattcagctgtagtgagtcattccagaagtgtggacagaggcaggaggacttgggagaccctgtgtcagatg

SEQ ID NO: 444990 - DNA, 201 bp, Homo sapiens
gctgttccatttgtccttaggtgacttttttagaagtgattagacttggggattgtttctcagaaatggactggagacccataaatctacaacgattttawttttggacaccaacctggagcccacaaagacaacttcccacgagttagcagcagtgctgggcagtaggggggcacgtgtgctgaggcgtgggcgtgccag

SEQ ID NO: 444991 - DNA, 201 bp, Homo sapiens
tggcattgatgggttcatagtggcccttaagcattattctctcagtcaacagaagttaaacaaatgcatgcaattgtatgtgtgggtgggtgtgagtgggtgtgtcttgacagggggttctgaaatttttagacattcaaagagggtcctcctgtctgatgagtcagggactgccatagcagctggcgggcagaggccatt

SEQ ID NO: 444992 - DNA, 201 bp, Homo sapiens
tccccagacacccttcacccagtttctccaaatgttaacatcattttataacccattccacatatataagcatgcatatatacatattttttggtaccatrtaagagtaagactgatagtcctttactcccaaatatttcagtgtgtgtttcctaaaacaagaaattctcttatatagtcacagtgtaatcatcaacatca

SEQ ID NO: 444993 - DNA, 201 bp, Homo sapiens
gcctgcgtgcgcccagcccacatttgtcaagtgttctccgcgtattttgcgcaggattggaaggcggattagagccgagttctccagagctcttcactctrccccttccctgagccccacagctatcctagaatgggatctgttggagcctctggagcaagtttcctggtcccagagtccggctatccatctttcccatgg

SEQ ID NO: 444994 - DNA, 201 bp, Homo sapiens
atcccgtgtaaacaaacatcagcacctgttatcctaattaaacctcagaccttgtttgcatgttaagagttagcaggacaatcctttgctactggggaccygccactgaccccagggctttcttgtatcaagaggaacaaaatggcatgagattgggacctgggagcaggccccacaccaggtgtgacatgcctgtgctca

SEQ ID NO: 444995 - DNA, 201 bp, Homo sapiens
caaggaagacctgtagactacatgcaccctggcgctctgggtatgttgtttctgcaggtttgggaggcagctgtcctccaaagcatacaattactaagaasagggaccatagtttcacacttcagtgcctaaacaggccctgacacccagtttggctaggttgagtctgggtgccagagattagagctgggattggagatg

SEQ ID NO: 444996 - DNA, 201 bp, Homo sapiens
acaaacctttggagacaaaaaagggaaaagtttctatttgtggttgtttgagtatacatcatgactgcattcaaaattaaaccagcaaaataatataaaayagatgtggaagttagatcccatagtaataatcccttaaattctgatttgtatattggagttcatctgttttattttattttgttttgttttattttattt

SEQ ID NO: 444997 - DNA, 201 bp, Homo sapiens
gccctggaaagtgatggttttgagaatcatgcttaaaggcaaagccttgcttctaaaggcttaggctaggggtctgtacagaggactttctccctaggccygagcagctctgcatgaccatactctcctgagagtgttcttccagcaattaggctaactttcaccattcccagtgcaaaatgtcaagatttccccattctg

SEQ ID NO: 444998 - DNA, 201 bp, Homo sapiens
cgtgcatgtgtgtgtgtgtgtataagcttactgcagctgtattacaggtgtgagggctccagatccttaccagcaagccagatactggtgttgggggtttsaggtgggaatatggaattagttatcaggagttggaactctttaagtctgactctatccctgatttgtgacctaggtttagtcacttaattactcagagcc

SEQ ID NO: 444999 - DNA, 201 bp, Homo sapiens
aagcctgaaatccagatgtttttaaaagttgccaagttgttaaaatactggtaactgtttaaacaccatatatgcagaaaataacatctgcaagacaattycgagtctgcatcatggtttataatctcagagaccaaactttagattcatcgaagggatatccatgaattcttttttgttttctaaatccaattttttttt

SEQ ID NO: 445000 - DNA, 201 bp, Homo sapiens
tctgatattaacaaagcagtgctgcctttaggttgtgggatacagccatgtaatgatgaatgacaagctgatggtatgtgcagcggtgttctgtaaacagmcagttacagagggacagacgttttgctctattggagcttaatttacaaattaatagcctctatgatatatcttattgtggtacaaacacaatgattcagg

SEQ ID NO: 445001 - DNA, 201 bp, Homo sapiens
ttataaaagtttttaaaaaagcctttctaatcctagaatacactccttgcatctaaggtgctttatgcttctttagatccacgaagtgctaaagccttgcygtaaaattctaagaattggacctggtagaatgtagcagtttatttaaactatagagtactcaacgttttttaccagccaagtttagtttttctcattggt

SEQ ID NO: 445002 - DNA, 201 bp, Homo sapiens
cgccatcttgactccctgcagcctctgcctcccgggttcaagcgattctcctgcctcagcctcccgagtagctgggattacaggtgtatgccaccatgccyggctaatttttgtatttttagtagagatggggtttcaccatgttggccaggctggtctcaaactcctgacctcaggtgacctgcctgcctcggcctccca

SEQ ID NO: 445003 - DNA, 201 bp, Homo sapiens
tgcagagctcacctggctttcagttactggtttctaagtgcagtcatctatatttaagtgacagagggcatcagtgcttcctcaaaatcttgatttaaaawtttttttttttcacagatagcaacagacatgtataaccacacacgcagtattctaatctggtgaacacagcaaggagtaagggacaattcatttctgagt

SEQ ID NO: 445004 - DNA, 201 bp, Homo sapiens
gatacgtataaagtagaaaattagtcattccgttcccatcctacttttaaacttttcctgtgcatttacatatgtattatatatatatatatatatatatwcacacacacacatttttaaagaagtttaattataccataatactctcaaagtttacttttttccaggtgactatttaaaaaacttgtttatttttgaaaa

SEQ ID NO: 445005 - DNA, 201 bp, Homo sapiens
tagaaagtcattctagcaatatagatacgtataaagtagaaaattagtcattccgttcccatcctacttttaaacttttcctgtgcatttacatatgtattatatatatatatatatatatatacacacacacacatttttaaagaagtttaattataccataatactctcaaagtttacttttttccaggtgactattta

SEQ ID NO: 445006 - DNA, 201 bp, Homo sapiens
gcttttcagacttctttatcattcagagtctgattcatctgttttattccacatatatttattgagagtttactctggtgaaaggcatgatactaggcccrtggaggatgcagagaatgaaaatcttggcagtgttacttccatgtgactggttatgacctacaaggcattcaagctcattagcactgatacctttagcaa

SEQ ID NO: 445007 - DNA, 201 bp, Homo sapiens
gaaattggagttgaagtaggatggctccagagtcctgctttttactgctacgttgtatactgctctcagcatgctaagttaataataggacatctgagctstgctgtgtgatctccttcagatttttcatttgtgtgcctcagttgccctttatatataaaacatttcttacaccatcagtttcatattaccaataatgta

SEQ ID NO: 445008 - DNA, 201 bp, Homo sapiens
tcagtcagtccttatataacgatcaacgttttagagtgttagataagtgtcctttcaagaaatattacaaaagctgtgcatctaagttagaaagtcattcyagcaatatagatacgtataaagtagaaaattagtcattccgttcccatcctacttttaaacttttcctgtgcatttacatatgtattatatatatatata

SEQ ID NO: 445009 - DNA, 201 bp, Homo sapiens
gccaccagtttgaaaacttgatacatctagaaacaagtctcttctgcaatgttactacgtcacttacctcagaaaacccttcattttctcactcatgcccrcctccccattgaactcatacataccttaccctctagacttttcagatacttgttatgctgtgtcgtttcttcaacctgggatgtttttacctgtcttctt

SEQ ID NO: 445010 - DNA, 201 bp, Homo sapiens
taaacaagtcttaagcattactagcccactggacatgacccagtaaaaactgttctgctcttagtttccttaggcacaaaatgaacttggggaaaaaaacytctcaattgtagtttttatataaaccaaaacagattaatgtcaataatattttttgtgtgctaacattttaattttttcggcacttactataaccatctt

SEQ ID NO: 445011 - DNA, 201 bp, Homo sapiens
agcatgggaggctgaggctgcagtgagccatgattgcgccactgcactccggcctgggtgacagaacaagaccctgtctcaaaaaaaaaaaaaaaaaaaaaggaaagaaagatgatgatgatgatagcttggaagaagcagagatggagaaaagtgatcacgtctgcatatattttgaagagccatcaggattgaatatag

SEQ ID NO: 445012 - DNA, 201 bp, Homo sapiens
tatggtgtagttcttaacagtatacacattggtacatttgtgtgtatattataaatataaatgtactggtgtgttgtcatgggaatgaaaaattttaattatgagcttttgtgttttaaaaattttattttactaactatacaaattttatttttatgtgttaatatacaaacttacataaatatatatatttgtgtttgg

SEQ ID NO: 445013 - DNA, 201 bp, Homo sapiens
tattatggaataacatgtagctgttaaaaaataatgaggtgcttaactgaatggaaagatgaatagaaagttaaaaaagcaaattgtaaaacagacatacrgtataattcagtattagtttaaaatgcaaaatactaaaaaactgtgtttgtatttatgcattcatggtcatttatacttgaaaatgcatgggaaaaagtc

SEQ ID NO: 445014 - DNA, 201 bp, Homo sapiens
ttattaaaccaatgagttttaaaaaaccaagttgttttcatgaaatccataatttaatgctttggaaatgataaaaaaaattactaaaaatttgctgcttwgttatatttgggtaagagatctataacagaatgggataaattattaatgtccagaaggattctacattcagattgcttcaaagtatcttaagttctcgcc

SEQ ID NO: 445015 - DNA, 201 bp, Homo sapiens
gagcatgggaggctgaggctgcagtgagccatgattgcgccactgcactccggcctgggtgacagaacaagaccctgtctcaaaaaaaaaaaaaaaaaaaaaggaaagaaagatgatgatgatgatagcttggaagaagcagagatggagaaaagtgatcacgtctgcatatattttgaagagccatcaggattgaatata

SEQ ID NO: 445016 - DNA, 201 bp, Homo sapiens
aggatggaagcaggaagaccagttaggaggcttttgcagttgtccaggcaagagatgatgatgggcaggcacggtggctcacgcctgtaaatcccaacackttgggaggctgaggtgggtggattgcttgagcccaggagttcaagaccagcctggacaacatggcaagacccctgtctctacaaaacattaaaaaattag

SEQ ID NO: 445017 - DNA, 201 bp, Homo sapiens
aattgctcagttcagcagctcagcaacactatcaggacccatattcattctggtcatctttcagcactgccatgctcagcatgtcggcaaccactgctgtwgtcatgggatggctgctgtggtgccaggctttacatcttcacacatcaacatcctggggcaaaaaaggaccatttcttattaaatatctctttttatgat

SEQ ID NO: 445018 - DNA, 201 bp, Homo sapiens
tgttatctaatgatagcatcctttaatgattcttgcttgcatttattatttttaagatgtatgcaaaatcaacttggattttaaaaaggatcactgtgtckaaaatatgcagaagaaaagggcctatagggaaaataggatggaagcaggaagaccagttaggaggcttttgcagttgtccaggcaagagatgatgatggg

SEQ ID NO: 445019 - DNA, 201 bp, Homo sapiens
aggctgaggctggagaatcgcttgaacccaggaggcagaggttgcagtgagccgagattgtgccactgtattgcagcctgggtgacagagtgagactccgyctcaaaaaaaaaaaaaaaaaatttattccacaagagaggacattttttttcacttaattattttatgagcttgatctaaactggcaaagatgatttgggt

SEQ ID NO: 445020 - DNA, 201 bp, Homo sapiens
caatggtgaaactctgtctctactaaaaatacaaaaattagctggatgcagtggcgcgtgcctatagtcccaggtactcgggaggctgaggctggagaatmgcttgaacccaggaggcagaggttgcagtgagccgagattgtgccactgtattgcagcctgggtgacagagtgagactccgtctcaaaaaaaaaaaaaaa

SEQ ID NO: 445021 - DNA, 201 bp, Homo sapiens
ctttaaaatgtcactgtaaactactttcccactggtgttttgttttatggaggaaatgtgtcctttttgattaaaaagtgtgtgtgtgtgtgtgtgtgtgktggagagagaaagacttgagtgattctcgcttagatcatactcttcacccagaagcccaatcaactctttactatacacccgctctgcatgaagtaccat

SEQ ID NO: 445022 - DNA, 201 bp, Homo sapiens
gcagtgaatgtcctctggttttgtttatctgggaatgtcttaatttctccatttttgaagaatagttttgcagcatatagaattcttggttgataggggtktttttgctcagcactttaaatatattaacccatttccttctggtctgcaacttagttctggctgatagtccttcacaagtttacagtcaaactagttggc

SEQ ID NO: 445023 - DNA, 201 bp, Homo sapiens
ccagggtggagaaatgtgttaagtttaaagaaccaaaggaggtttgctgtggctgagcacagagggccatgtggctcatgcaggctagagttagttagagytgaggttggagaagtccactagggccagagctggtggaaccttgtaggctatgcaagaacctgggccttatcctaggagcagcaggcattcattaaagca

SEQ ID NO: 445024 - DNA, 201 bp, Homo sapiens
cgttgatcctcctccttggtgcttatggtttacacccagaactcccattagtgttaataggaggcacttccttaaatccctgtacaccaaaataagctcaractcttttataatgccttatagatacctgagttgtttttttgttgttaatgacaagagttttagtcctgaggttaactgattattaagatagagtttgag

SEQ ID NO: 445025 - DNA, 201 bp, Homo sapiens
tcgaagattcaccttttggttttgttgagtctgttgttcttctctatttcatttatcttcatcctagactttattttcttttttcttttttttttttttttttgctttgaatttagttctttttctgtttcttaaggtgtaaagttaggttattgatttgagctctttcttcttttttaatatagactgttagcagctata

SEQ ID NO: 445026 - DNA, 201 bp, Homo sapiens
ttagacactacaaccactggtcaagtaatagataatcagtgtttactacacccatctgtgaattgtggatttttattacttccatttatttatgtacagtytaaatctttgtagattttagctagtcatctggacttcttggacctctgttcctccatgaaatgaaggtatggatctgccctctgaggtgtccattctagt

SEQ ID NO: 445027 - DNA, 201 bp, Homo sapiens
tcttcatatcgcaagggtttcagatattttacaaaaggtatttaaataattattaattgctttagatttatttataatatttaaaatattataaccatatkagaaatctggatgatttgtttctttaccagctctaattagagcagttacctgtgaagttctggagaggtgaacaatcttccgtttgcaaaaaattgtatg

SEQ ID NO: 445028 - DNA, 201 bp, Homo sapiens
aatttactcagttttccttttgttggatgtggttgggataatctagtagacgtgcctgatttttgtaaagaaagttaggaaatagaagaatgtgtatattyagacagcctggaccccaggaagcagaggtagaaactgtatattgggctgagcactgatgatggtagggaggggtccaggacactacacagacttgtgaag

SEQ ID NO: 445029 - DNA, 201 bp, Homo sapiens
agcagcaaccactacagcaactacaacaacagcagcagtaccaccaccaccacgcccagcagtcagctgcagcctctcccaacctgactgcttcacaggtraatgtgtggatggaacattgcaggctgcagattgtagactgatttgttgttggtcatatagaactgggtcctgtctcagactatactaagctcagctaga

SEQ ID NO: 445030 - DNA, 201 bp, Homo sapiens
tccagaggcccgtcatgctgaccaagttcacccccacaacccttcccacatcccagaattccatccaccccgtccgtgtcgtcaatgggcagactgcaacyatagccaaaacgttccccatggcccagctcaccagcattgtgatagctactccagggaccagactcgctggacctcaaactgtacagcttagcaagccaa

SEQ ID NO: 445031 - DNA, 201 bp, Homo sapiens
ccagcttctttccaggccttgtttgggactctagacattgacaacatttgaaagggatgcttggcttttggagcatccagcttgcttaaattcctttcggagccactgtcacccgtctctgtccagatttaaaaatcaggcactttttcatttcaaatataaagtggtggtttgatttttttattaaaggaagtgtctcct

SEQ ID NO: 445032 - DNA, 201 bp, Homo sapiens
tagttgtaaaataaaagaaaactgctaacctaagatgtgaacaaacttgttaggtttcagtgtttttaaagtgttgggttaatggtaagtatataattcargtgagtttgaggctttagtcagtattttgtagaatcatcagtttagagttattcaaaatattgatgatttacttgaaacaaaagtacattgacttctctt

SEQ ID NO: 445033 - DNA, 201 bp, Homo sapiens
actttctgaacttcacttcgtgttaattttcacctaccagttggtgggtagaacaacattaaacacattttactttagtacccttctgttcttatctggakcatggtaatcccaagtacagacagaaaaagaagaagcagatatgcgattaaaaatgaaaataacataacaacacggattattgtgatagatcctgtacct

SEQ ID NO: 445034 - DNA, 201 bp, Homo sapiens
gatagatgatcacacatggatgattagaaggttagggtaaagatggcatgaacttcaggcagagcctttggcctggttgaaggattctttccggtagtaaygaacagctcaggactagggattatgaaggtaaaaaggaaaaggggtctagtgtgagggagaacatagtagaagtggtttatcatgggtcccaggatggac

SEQ ID NO: 445035 - DNA, 201 bp, Homo sapiens
ctaggtatatgtatttccaggtatagatcctaaagaaatgaaagcatacgttcaaacaaaaaaaaaattattttttttttgagatggagtcttgctctgtygcccaagctggagtgcagtggcgccatcttgactccctgcagcctctgcctcccgggttcaagcgattctcctgcctcagcctcccgagtagctgggatt

SEQ ID NO: 445036 - DNA, 201 bp, Homo sapiens
aagtggagaaggtagaggatggagttgcagactctacaggaggctcttaaagtggaaattcaggttcaccaggtaagttgtattattggcttctcccacaytgttgttaagtaatggctaagattagtaaacaagtccatctctggtgtttagtatagtttttaataatctttaagacaattttgtccaagagtcatgtcg

SEQ ID NO: 445037 - DNA, 201 bp, Homo sapiens
gaaatattctttgtttaggtctggaagtagaggatctcactctgcacgtccacattgtgttgtttttaaaatgatgtctctgggagtatggatttctagamtttcaaatctgagtgaaggtccgggcatgtgtgggcctcatcacctggccttgacagtgaactttgtggctgtgtttcagatttcaaagatttgccccat

SEQ ID NO: 445038 - DNA, 201 bp, Homo sapiens
aaaaatagataagcaaaaagtacctcagcccactgtttgtgcttgtaaataatgtaattgttttatggaactgagtcctgggggaggaggacagcatgagkattgttgactaaaagtgtcagggttttcaggaagcacaaggattctatagctaatcttaaagtttccctctctaagggtcttttaagcagcagcaaatgt

SEQ ID NO: 445039 - DNA, 201 bp, Homo sapiens
ttcgaagattcaccttttggttttgttgagtctgttgttcttctctatttcatttatcttcatcctagactttattttcttttttcttttttttttttttttttgctttgaatttagttctttttctgtttcttaaggtgtaaagttaggttattgatttgagctctttcttcttttttaatatagactgttagcagctat

SEQ ID NO: 445040 - DNA, 201 bp, Homo sapiens
catgcctggctaatatatatgtgtgtgtgtgtgtgtgtgtgtgtgtatatatatatatatatatatatatatatatatattttttttttttttttttttttttttttgagaccaggttttgtcatgttgctcaggctggtcttgaacccctgagctcaagctatctgcctgccttggcctctcaaagtgagccaccacgcc

SEQ ID NO: 445041 - DNA, 201 bp, Homo sapiens
tatctctcgaggccccagaaggagtctggacactggaaatgaaggcctagtaaactcttttgtgcccaagatggtatgagaatggaggtgggaggtaatgstaaatgctctggttttcattccggctgtcacaagaataaaaatgacctaactgtattttgggcccccaggcagcactgaaatgacatgccacctgctgac

SEQ ID NO: 445042 - DNA, 201 bp, Homo sapiens
gagctcatcacatggttgttggcagacctcacttcttcactggctgttggctggaggttccgttcctcacacctgggcctctccatagtgctgctcacaaygtggcagctggcttcccccagagcaagagatccacgaaggaaagacaccctccaccaccaccaatgttttgattgttttatttgtatttttgtttttgga

SEQ ID NO: 445043 - DNA, 201 bp, Homo sapiens
ggatagtataaggattctggcccttggtacagagcactgtttagaattattttatttggaaggggaattagtcttgtgttgatgagtgggatgttgagcaygtattttaaaaaattatttgtaattgttataaacaaaagtagttggtatgatttagggctttaagccttgttatcatccctataatattaatacaaatag

SEQ ID NO: 445044 - DNA, 201 bp, Homo sapiens
tgatcctcccgcctcagcttcccaagtagctgggactacagttgcgcaccaccatgcctggctaatatatatgtgtgtgtgtgtgtgtgtgtgtgtgtatrtatatatatatatatatatatatatatatattttttttttttttttttttttttttttgagaccaggttttgtcatgttgctcaggctggtcttgaaccc

SEQ ID NO: 445045 - DNA, 201 bp, Homo sapiens
ctggcacagaaacttgccttcatggtgtctctagggttggtaacacatgaccatctagaaggtaagagaagatattcttggcactgcctttttttctggcycacagctttgttcctgaaaatgatgtttgattgaattcctggaatagaaaattggaacacaaatagagtatgattcagccaatgtggactttatttcctt

SEQ ID NO: 445046 - DNA, 201 bp, Homo sapiens
agtgatcctcccgcctcagcttcccaagtagctgggactacagttgcgcaccaccatgcctggctaatatatatgtgtgtgtgtgtgtgtgtgtgtgtgtrtatatatatatatatatatatatatatatatattttttttttttttttttttttttttttgagaccaggttttgtcatgttgctcaggctggtcttgaac

SEQ ID NO: 445047 - DNA, 201 bp, Homo sapiens
acgtggtttacttactacaagtcccagtatgcattgcagtttttgcttaacttcagattagagcactgcatgctgggacctgtagttgatttaaacagtayggaaaacccttccttcttgtctgctccattttattatacacagcttcccagccctctaagaactttctgctaagtagtttgattactaatattatgatta

SEQ ID NO: 445048 - DNA, 201 bp, Homo sapiens
aagtgatcctcccgcctcagcttcccaagtagctgggactacagttgcgcaccaccatgcctggctaatatatatgtgtgtgtgtgtgtgtgtgtgtgtgtatatatatatatatatatatatatatatatatattttttttttttttttttttttttttttgagaccaggttttgtcatgttgctcaggctggtcttgaa

SEQ ID NO: 445049 - DNA, 201 bp, Homo sapiens
ggaaggagaggcattgcagatattaataactaatagactgtgatatgggctttacttgccattctgtttgcttttctagatatagaaggtagtatgttaaycagaaaggattaatttgaggaaaaccttgtattgataaaggtgatgatgtgggtaaacagaagtaacctgtgtcttcagatgcatggtgtttctgaacaa

SEQ ID NO: 445050 - DNA, 201 bp, Homo sapiens
caagtgatcctcccgcctcagcttcccaagtagctgggactacagttgcgcaccaccatgcctggctaatatatatgtgtgtgtgtgtgtgtgtgtgtgtgtatatatatatatatatatatatatatatatatattttttttttttttttttttttttttttgagaccaggttttgtcatgttgctcaggctggtcttga

SEQ ID NO: 445051 - DNA, 201 bp, Homo sapiens
ggctgcttctaggatcttctggtttaccgtcaaattctagctcccagtttaaaatggccaaatacctgtccagcaatcttaaagtttggttcaagtattcrtaaaaatatggaatatgccttattgaggaatatgttttgtcatgtggctttcccacaggccccaagatgtgcttgctttttataaaaaatatttattata

SEQ ID NO: 445052 - DNA, 201 bp, Homo sapiens
taagttttcactatagatttgagtaggtcagctgaccctcaaatttctaattacttcttttaccttgcatgaattttctttttttttcctgctcatttaakgtacatttggtttaataatgtattctcaataaagccaaaaggtacctctagctgtactataggacagcttttgaatagtagtttgatttattttccagtt

SEQ ID NO: 445053 - DNA, 201 bp, Homo sapiens
tcaagtgatcctcccgcctcagcttcccaagtagctgggactacagttgcgcaccaccatgcctggctaatatatatgtgtgtgtgtgtgtgtgtgtgtgtgtatatatatatatatatatatatatatatatatattttttttttttttttttttttttttttgagaccaggttttgtcatgttgctcaggctggtcttg

SEQ ID NO: 445054 - DNA, 201 bp, Homo sapiens
ttataaaaaatatttattatattaagttgcctggcaccctaaaaaataaccaggataatattgaactggtgcttctggggaattatttattcaacttcctrtagacaatggttgtgttccagaaaatgttttgtgaatctcaaatcatattaagtatagtaggaaaattgccatttttaacacttaaacagacatacagga

SEQ ID NO: 445055 - DNA, 201 bp, Homo sapiens
ctcaagtgatcctcccgcctcagcttcccaagtagctgggactacagttgcgcaccaccatgcctggctaatatatatgtgtgtgtgtgtgtgtgtgtgtgtgtatatatatatatatatatatatatatatatatattttttttttttttttttttttttttttgagaccaggttttgtcatgttgctcaggctggtctt

SEQ ID NO: 445056 - DNA, 201 bp, Homo sapiens
agcatgcttagccacctcgccatgtgataccctgtgctgccttgggactttgcagagagtcctcatgagcaaaaaagctctcaccagatatggcccctccrccttggacttctcagcctccatacctgtaagaaataaattccttttctttataaattacctagtttcaggtattatatcataaacaacagtaaactaata

SEQ ID NO: 445057 - DNA, 201 bp, Homo sapiens
tcttgctctgtcacccaggctggagtacagtggcatgatttcggctcaagtgatcctcccgcctcagcttcccaagtagctgggactacagttgcgcaccmccatgcctggctaatatatatgtgtgtgtgtgtgtgtgtgtgtgtgtatatatatatatatatatatatatatatatatatttttttttttttttttttt

SEQ ID NO: 445058 - DNA, 201 bp, Homo sapiens
aaacttttatcataattttacccccaggagttaattactattaacagtttagattatattcttacagatttttttttcttttcttttttttttttttttttgacacagagttttactcttgtcacccaggctggagtgcaatggtgggatctcagctcactgcaacctccacctcccggattcaaacaattctcctgcctc

SEQ ID NO: 445059 - DNA, 201 bp, Homo sapiens
ccggtcatatgttgaaatattctttgtttaggtctggaagtagaggatctcactctgcacgtccacattgtgttgtttttaaaatgatgtctctgggagtmtggatttctagaatttcaaatctgagtgaaggtccgggcatgtgtgggcctcatcacctggccttgacagtgaactttgtggctgtgtttcagatttcaa

SEQ ID NO: 445060 - DNA, 201 bp, Homo sapiens
cgggtgcctgtaatcccaggtactagggaggctgaggcaggagaattgcttgaacccaggaggcagaggttgcagtgaactgagatcatgccattgcactscagcctgggcaacgagagcaaaactccatctcaaaacaacaacaacaacaaaaaatagcaggcttgcttctgggcaactatccccacattctaaaatacg

SEQ ID NO: 445061 - DNA, 201 bp, Homo sapiens
ttttcagaagaggtcagtggatgagagaagtgggcttgtagttggaatactgtttttctaagtgttctttgtagaagcgtgtgtgtgtggggatgtgtgcrtgtgtgtgtgtgtgtgtagggaattagaggtgaggaatggagggcataaatattgagtaaggacttgacaaaagcagaacttcagtgttttttgtttgtt

SEQ ID NO: 445062 - DNA, 201 bp, Homo sapiens
gtagatgctcgagctgggaaagttagagagggaagaacatttatatataaataatggatagttgaatattagaatcagattaatttgggctgatgaaagtttttttttttttaaagcagttgtgcactctgggaaggaagtcttttcacaggttcacttgatagggattctttaaggcgaggggctggaattatctccttt

SEQ ID NO: 445063 - DNA, 201 bp, Homo sapiens
gaactactaggttaaatcctgccagaccctcacctcatgggtcctgtgtactatctttgggttcctgttgccaggctccagctcccattaccttcccttcmtactctgggcccctccaacagtaatagtctgtgattctttgttgttgtttatccaaggaagtgacataatcaatctgagctacattttcttgctattaat

SEQ ID NO: 445064 - DNA, 201 bp, Homo sapiens
ccgagcccgatcagcagagactctctttagactagattgcattctcaggattctcttacttcgtatctttcaactatccttgttttctatttatatttcakttccagtatcacatttatagccagtaagagatctcatagatcatagagctaaaggtaaaacaatgtaatgtatgtagccatggaagaacctgttcacacc

SEQ ID NO: 445065 - DNA, 201 bp, Homo sapiens
ctccactttaccaattcaggcagtgcctgccaccaggtggagtgtggcaattgatagagctataagtaaatgtttatggtaatcccacaaagcatttgttwtcttgtttcttccccaccactctccctctggttagaaagagtggttttctgtcttggagtaggtgaatatattaatcaaaagaataaggtgatttgcagt

SEQ ID NO: 445066 - DNA, 201 bp, Homo sapiens
ccataataggcacaaagggatgcaaaaacaagaggtgcataaaacaattcccactcttacatagcgtttagtataaagggggaaatacgagagaacaccastgggggaaaattacaaagccgcatttgtgccccagagcactggttgccacagtattgataaggcagatgcttacgctttctttatgtaatcatataaaag

SEQ ID NO: 445067 - DNA, 201 bp, Homo sapiens
tctcaattcctggggaacctattcaaaccccaggaagtgctttgagaaacattcagaaataaattattattattattattattattattattattattattattattattattttgagatggagtttcactcttgttgcccaggctggagtgcaatggcacgatctcagctcactgcaacctccgcctcccaggttcaagt

SEQ ID NO: 445068 - DNA, 201 bp, Homo sapiens
ctatctggaatattttgtatgagttattgaataagatgagaaacaaacaaaaattaatgttcagcctgtatgaaacactgattaaggttagaaccccatgmtgagccatggggttctttttaccagtcatggtatacatataattatatatataatgaagaaaaactaattgatgtcaaagatgttgataacatcttaaaa

SEQ ID NO: 445069 - DNA, 201 bp, Homo sapiens
cctacaagactaagttcctgcctgccctttttagtcagctgttagaaggtgagtttcctttgaactgcccttcaaaatatcctttcaaagtcttaatcagrtttcgttttaccaacaatgtgacacagttaagcctagtgtaaaaaggaaacatctataatgtttcctctgttggacaccattcatttttttctaagtaaa

SEQ ID NO: 445070 - DNA, 201 bp, Homo sapiens
aaactactattgttattcatttaattgttaaatttaaaaataatttaaaataaaatcaccataaaatacttaaatatagatggtacttaacttttaagaaytatttcatttctaatagcaattatttttaatacattgatcttcaggttataagggtttagaaaaattcattctattttaatatagctattatttcatctt

SEQ ID NO: 445071 - DNA, 201 bp, Homo sapiens
atctcaattcctggggaacctattcaaaccccaggaagtgctttgagaaacattcagaaataaattattattattattattattattattattattattattattattattattttgagatggagtttcactcttgttgcccaggctggagtgcaatggcacgatctcagctcactgcaacctccgcctcccaggttcaag

SEQ ID NO: 445072 - DNA, 201 bp, Homo sapiens
catctcaattcctggggaacctattcaaaccccaggaagtgctttgagaaacattcagaaataaattattattattattattattattattattattattattattattattattttgagatggagtttcactcttgttgcccaggctggagtgcaatggcacgatctcagctcactgcaacctccgcctcccaggttcaa

SEQ ID NO: 445073 - DNA, 201 bp, Homo sapiens
atcgacctctccaaacctgtagactctgaggccactgtgggggccatctccaatggcccggactgcaccccccctgccaatgccgccacctccacgccggscccttccccctcctcccagagctgcacagcgaactgtaaccagggggaagagactaaataacagagcccctctaggagaagccacgggatcccggcggca

SEQ ID NO: 445074 - DNA, 201 bp, Homo sapiens
aactacctcagaggcgacatgctaatccttatgtgagtttcccttccttctctccagggtgaccccataaaaaaaaaaaaaaaaaaaaaaaaaaaaaaaaagaaagaaagaaaaagacactgtccttttaccccagcctttgtgtctcaggaagcagatatccagaactgtatggtggctttcttcatattggtgagcttg

SEQ ID NO: 445075 - DNA, 201 bp, Homo sapiens
cacctcagttcatcttctgatctctcaggcttttaaaactcagatgtttgttttcaccttgtcatgtttcattgcatctttgatcacttctgcagcagttytccagagaaaagattataggtagtaactcataatatccctttagtatcaagaactggtatttactatatactcattggctaacatgtttcattatctgga

SEQ ID NO: 445076 - DNA, 201 bp, Homo sapiens
agcactagagatatagatttacttacctctactatgttctaggcactgtgctaggtactttatattgatatatgttacctcatttaatcttcacagccctytgaggtagctacttttatctccatttaagaggtgaataaacagagactgtcgtgagttaacttgcgtaagaccaaatagctagtgatgagggccagaatt

SEQ ID NO: 445077 - DNA, 201 bp, Homo sapiens
cctggctttcagttactggtttctaagtgcagtcatctatatttaagtgacagagggcatcagtgcttcctcaaaatcttgatttaaaattttttttttttcacagatagcaacagacatgtataaccacacacgcagtattctaatctggtgaacacagcaaggagtaagggacaattcatttctgagtggcagtttgac

SEQ ID NO: 445078 - DNA, 201 bp, Homo sapiens
tgtgctagtcactgacaggctttgtgtccattgaatttctctgagctggtttcctcaactgtaatatagatgttataattgtatcagtacagatgcttttrgctgtagtttagttgtagttagaaagtccaactaaaagtggctaagatagtaagtgaatttattgattcaaataaggagaatttgctagaattgctcagt

SEQ ID NO: 445079 - DNA, 201 bp, Homo sapiens
catccttttaataaaaaacgaattctgaatttttatttaatttttctctcctagacagttaaatctcacacagaaacagatgagaaacaaacagagagccrcaccatcaccccacctgctgcacccaaaccaaaacgggaggagaaccctcaggtaggcctatgtttccaaaggcaggtctcagtctatggtgtatggttt

SEQ ID NO: 445080 - DNA, 201 bp, Homo sapiens
cccagctaattttttgtatttttagtagagacggagtttcaccatatttgccaggctggtctcgaactcctgaccttgtgattcgcccacctcggcctccsaaagtgccaggattacaggtgtgagccaccacgcctggcctcaggtgcttttttatggtaacaaacagctaaattgtgcagattataaatggttcttagg

SEQ ID NO: 445081 - DNA, 201 bp, Homo sapiens
ggcattttgcctttgtgaaatttcctctcatttggtgcctgatgttttcttatggtagttgttattttctttctatatttaattgtcataagctacctatrttgagcctagaaactgagcctgagaacaagttgattatgagaaaaggtacaatgatctcctcagatttgaggagttttggggtaaataattgagttaata

SEQ ID NO: 445082 - DNA, 201 bp, Homo sapiens
attggagcttaatttacaaattaatagcctctatgatatatcttattgtggtacaaacacaatgattcaggtgcttttttttttttttttttttttttttttgagacggggtcttgctctgtcacccaggctggagtacagtggcgtgatcttggctcactgcaacttctgcctcctgggttaaagcaattctcctgcctc

SEQ ID NO: 445083 - DNA, 201 bp, Homo sapiens
tttttgttttttaaatactgctgtggttaccaaaaatgtctttgttatagttttgaagctgcttttgaaaaaatgctgcctagtcagtttctcataatttaaaaaaaaaaaaaagatcattttcccttttgaagatcctgtgaattgtatgtcccctattacagtttttcttcatttctccattgatgtgatgtgatagta

SEQ ID NO: 445084 - DNA, 201 bp, Homo sapiens
ctgggtgtggtggcgggcacctgtagtaccagctgctcaggaggctgaggcaggagaattgcttgaaccctggaggcagaggctgcagggagccaagatgktgccactgcactccagcctgggcaacacagtgagactcgtctcaaaaaaaaaaaaattatagtcaccatttcttacagatcttttcaatataatattaga

SEQ ID NO: 445085 - DNA, 201 bp, Homo sapiens
agaaagagatgcttgattgagtaacttatactttaataacgtgccacattattatagggcattttacctgagtatggcagaggaaatcaagtcagttggtkacttgtaccagatgcatcagtttgctgagttaaggcagagcaatcctcttgtaagtttatcctaataacgtatttttggtgctggcaaatggaatgactt

SEQ ID NO: 445086 - DNA, 201 bp, Homo sapiens
ttgaatatgttaaatgacaggccaaatcatatattccttcacttctttttttccccaacagattagggtataagaaccagacaggaaaaagaagtttactstttaactagtatctttttatggtagctggttagatgggaggctgtcctgcaaaattatgttttcagaagatatgtttcccaaagttgatttactcccaag

SEQ ID NO: 445087 - DNA, 201 bp, Homo sapiens
ttatcctacctccattttacaaatgaggaagtagaggtttccctcggatcacataggtaacaaatgatacaacctggattcaagcccaggtttgattcctragcccttgctcttaaatgtccaaaatgctatactaaactatgtaattcccatagatacctagaaatgaattactaaagaagttttcaatttactgaaatg

SEQ ID NO: 445088 - DNA, 201 bp, Homo sapiens
cccagaaagattttgagtaagatttgatacctttctgcatttgtgaaaagttacaagtctctatcagcctctggtataaagagtgaaggttgtatttttarattgcatgttgattcatggaaggaataaaaggatgcatctttaaggcaatactgtgtaagaagatgtcttgagtgggtgtggccctctaataattgatac

SEQ ID NO: 445089 - DNA, 201 bp, Homo sapiens
tcttgacatgtgtttacgtgtgtgtttatggtgtagttcttaacagtatacacattggtacatttgtgtgtatattataaatataaatgtactggtgtgtkgtcatgggaatgaaaaattttaattatgagcttttgtgttttaaaaattttattttactaactatacaaattttatttttatgtgttaatatacaaactt

SEQ ID NO: 445090 - DNA, 201 bp, Homo sapiens
atagcttctgccaccagtattcctccctgtcttcctctgttagaattctatcctgtgtcttgcctggactatcccctccaataactccagtgcagattctsttattgaattttacttgcattaaggagggagtttatcttgagtttctcttctgtgtgtttgtccataaaatggcattctgtgtttttgttcataaaatgg

SEQ ID NO: 445091 - DNA, 201 bp, Homo sapiens
ttgtggcacattctgaagactgccctgtctccttcctgcatcctcagcgttgatgaatattggtgtgacttatcaatgcagtggctgagttttagttagayggtagaaagtcttttttttcctctttgagtaagttctgatctcatcaacaaataaacatttctccaggttagtttttccatacgcgtaaaatttagtatc

SEQ ID NO: 445092 - DNA, 201 bp, Homo sapiens
catcgacctctccaaacctgtagactctgaggccactgtgggggccatctccaatggcccggactgcaccccccctgccaatgccgccacctccacgccgrccccttccccctcctcccagagctgcacagcgaactgtaaccagggggaagagactaaataacagagcccctctaggagaagccacgggatcccggcggc

SEQ ID NO: 445093 - DNA, 201 bp, Homo sapiens
ctctgaagttaccagtaaatgacatttctatgttctcaagtggcttgctgaagaagtttattttcaaataggctgaacctatcacttcaggccaaagtagsataatatcgaggataagatgtcaggacttttaaagatcaaattgtggtataaataactctacaggagtatgtcttttacaattgaagatgttctttattc

SEQ ID NO: 445094 - DNA, 201 bp, Homo sapiens
tatccaatgtattatcttcaaatttctgttttccctgttagtcaaccagagctgatgcctccccttaccccattttaatactggtgcaatagtagagaaamtagttccaagtgaccaaaccatggattttgctttgccttcaatcccaatctatttaaccttgactaacgaaattatttggacatttatttgcacctgcct

SEQ ID NO: 445095 - DNA, 201 bp, Homo sapiens
tttaattattgttgccatatgaaaggagcattacttccacattttttctaattttgaaaaagtaaattaggtttgtgtttatagtttgatattttctgttktaaaattatttcagtatttacggagagcttcataaaatgagttagacattggtcatggtaagaataggaatgcaagcccagtctaccagtatgctagcta

SEQ ID NO: 445096 - DNA, 201 bp, Homo sapiens
ggagaacagtttggcagagctcgtctttatcacttcaggggccaaagcttcactaggccagtggaaggagaggcattgcagatattaataactaatagacygtgatatgggctttacttgccattctgtttgcttttctagatatagaaggtagtatgttaatcagaaaggattaatttgaggaaaaccttgtattgataa

SEQ ID NO: 445097 - DNA, 201 bp, Homo sapiens
ccactgcactccagcctgggcgacagagcaagactccatctcaaaaaaataaaatagttttattttagaacagtttcctaatgctatatgccttccccccycccgccaaaagagccacttatcctctggcagaacctaaccaattttccttccactttaataactaaaatctgaattaccttatccgtatgactgatattt

SEQ ID NO: 445098 - DNA, 201 bp, Homo sapiens
cgtgggttcgaagaggagatgtaagtgagtgaaacaggctaggagtaaacaactggactttttatttatttttccactttcagtgggaacatgagtataasagatatcccgcttttattcttaattcccctttaaaataataagtaagacaagcatgataataattgacaatagaaaatggaagaaactgtggcaaactgc

SEQ ID NO: 445099 - DNA, 201 bp, Homo sapiens
tcaagggaatctaaggctccttgttacatgctgggtttatggagcagttcttgacagatggattgaagtgggcggtactagcagttctggaggcctggcaygttggcttattgtttatagaaatatattaagaagaaaagatgataagttattaattttttctccctctctcccttccgtctttgttctttccagctttct

SEQ ID NO: 445100 - DNA, 201 bp, Homo sapiens
agatgtaataagttttagatgaagctatttatagaaaagatgtcagagcatatttctgtgcagctgatagagcagtattctaatatcttttatttcttttygtcttcatttggtagaaaagagtagttgaacagctacggaagaacctgatagtaaagcaagaacaaccggacaagttccaaatacagccattgccacaat

SEQ ID NO: 445101 - DNA, 201 bp, Homo sapiens
agctctgcctcctgggttcacgccattctcctgcctcagcctcccgagtagctgggactacaggcgcccgccaccatgcctggctaattttttttttttttgtatttttagtatagacggggtttcaccatgttagccaggatggtcttgatctcctgacctcatgatctgcccgcctcagcctcccaaagtgctaggatt

SEQ ID NO: 445102 - DNA, 201 bp, Homo sapiens
caaaagaataaggtgatttgcagttgatatttcatgccagtgacattttattgaggatttttgactaaatagttctcaataactgatttttatgttgttayttaatgttatttagtgaaataataacaatgagaataattcatttctggagattttttattgtgtttctattgtgttttcatttaactgaggggagaaata

SEQ ID NO: 445103 - DNA, 201 bp, Homo sapiens
gagggaggagaattgcttgaacccaagagtcagaggccgcagtgagctgagatcacaccactgcactccagcctgggcaacagagtgagactgtctcaaamaaaaacaaaaacaaaaaaaggccgggtgtggtggctcatgcctgtaatcccagcatcccagcactttgggaagccgaggtaggtggatgacttgaggtcc

SEQ ID NO: 445104 - DNA, 201 bp, Homo sapiens
ttatcctcattttgtaacagtattaacaccgaagagagtctgagtgatgactagacacatagatggtgtgaaaagaaaacttggcatttttttttttttttgaatgttagcctttaacccaagctctttcctccatacactatatgcacaaagtttttaggactttttttagtggcactctcatatacagattttcttttc

SEQ ID NO: 445105 - DNA, 201 bp, Homo sapiens
agaatcacttgaacttgggaggtggaggttgcagcgagccaagatcacgccattgcaccccagcctggacaagagtgaaactccatctcgaaaaaaaaaaraagaagaagaagaaaaaaggtagatggaagtatcttctgtaaagtgccacagattcctggcttcagcgctacctggattccttgaaaagacagggggccc

SEQ ID NO: 445106 - DNA, 201 bp, Homo sapiens
gcttctggaagcattggaaaacaaatgaaaattgggagtacacattttttaaagcatgaagtttataacatttaattttaaaatcatttggctcttatttrtaggaactatgtcaacagtgatctacttgtcagttaatctggttctttaatcgtaaatgtaaaataacagtgaacatcctaattctttaattctctcttg

SEQ ID NO: 445107 - DNA, 201 bp, Homo sapiens
caacctgactgcttcacaggtaaatgtgtggatggaacattgcaggctgcagattgtagactgatttgttgttggtcatatagaactgggtcctgtctcasactatactaagctcagctagaactaaacaaaagttattttgattgcttttttacagtataacccagataagtatcacttgtaatcattggcagaaggaaa

SEQ ID NO: 445108 - DNA, 201 bp, Homo sapiens
ttgcactgtcgctcaggctggagtgcagtggcaccatctccgctcactgctgcaacctccacctactgggctcaggcgattctcctgcctcagcctcctargtacctgggattacaggcatgcaccaccacacccagctaatttttgtatttttagtagagacagggttttaccatgttgggcagattggccttgaactcc

SEQ ID NO: 445109 - DNA, 201 bp, Homo sapiens
attaaaaaaatttaagatgtagagaaattttgaggacagagtaattttgactagagggatcagaaagtacttgtcaaggagggttgcatctgagcagggcsctgtcagatgaatgggattttagtgatagagcaaaggggaaagagcttcacaagtatagagagtagtatgaacaaaaggatggcgtcaaaatagtaaatg

SEQ ID NO: 445110 - DNA, 201 bp, Homo sapiens
tataattataatgtttttcaaagaaattaaaattagcgtagcctaagtatacggtattataaagtctagagtagtgtatagtaatgtgttaggctttcacrtttactaaccactcattcactgactcacccagtacaactaccagtcctgcaagctggtttaccgtttttcatctttcgtagtgtatttttactgtagttt

SEQ ID NO: 445111 - DNA, 201 bp, Homo sapiens
caaatcaaaagcacagtgataccactttacaccagtcagaataactattttttatttttttatttttttttatttttttatttttatttttttttttttttgagacggagtctcgctctgtcgcccaggctggagtgcagtggcgggatctcggctcactgcaagctccgcctcccgggttcacgccattctcctgcctca

SEQ ID NO: 445112 - DNA, 201 bp, Homo sapiens
tccaccttggacttctcagcctccatacctgtaagaaataaattccttttctttataaattacctagtttcaggtattatatcataaacaacagtaaactrataaagataatcacacaactgactcctttacctccttcaagaacctagaatagtatgtagcacatggaggtgctcaataaatagttattgaaagaatgaa

SEQ ID NO: 445113 - DNA, 201 bp, Homo sapiens
cgcttgagcccaagagttcaaggcagtgagctatgatcatgccactgcactccagactggatgacagggtgagaccctgtctctgaacacacacacacacatgcacacacacatgcacgcacacacatgtgcaataagggtctctttgattgctttctgtggcacccttggtgatgcttgggcccaggatgaatactgttt

SEQ ID NO: 445114 - DNA, 201 bp, Homo sapiens
atggaatgtttgcttcttgacttgtctgcctgatttaaatattcatacttcaccagaaggaaaaagctgctgacttctaaaagtgggtcagttttttttttaatggcccttttggcactttgtaacgtgttaatactgccttagagatggagaacagtttggcagagctcgtctttatcacttcaggggccaaagcttcac

SEQ ID NO: 445115 - DNA, 201 bp, Homo sapiens
tataccttcttcctcctattagggcaggagagtcagagcccaaatatggccccaaatagttattatatgctttatgagccatttgttggtctttggtcccmccactttacacatcaggtaaagagaacaaggacatttactgagcaatatagttttttttttttttttttttttttttgagacagggtttcactctgtcac

SEQ ID NO: 445116 - DNA, 201 bp, Homo sapiens
accttcttcctcctattagggcaggagagtcagagcccaaatatggccccaaatagttattatatgctttatgagccatttgttggtctttggtcccaccmctttacacatcaggtaaagagaacaaggacatttactgagcaatatagttttttttttttttttttttttttttgagacagggtttcactctgtcaccca

SEQ ID NO: 445117 - DNA, 201 bp, Homo sapiens
tgcaggaccctgtccagccggtggtgctcctgtgtagagatgccgccggtgattgcccagactccctgtgttgcctttcctctcctgcttctctgcttacyctcttgatggtctctttccgtcccctgcctgttattcatccttcccttcaagccaccactgttttatttctatttctcttaaaaacaaaacaccgttgta

SEQ ID NO: 445118 - DNA, 201 bp, Homo sapiens
actgtgttctgtttgtctcagccaacatttataagatatctagttcactcagctaatgtgtatttatattatcaattgcagttgttaagtgtgcgtttttsttacaaccattgtattacattagaaccccaaaccccaaatgaatcagtagctcagaagtaatccattgaagcataaaagtagggatgaaaatagtaacat

SEQ ID NO: 445119 - DNA, 201 bp, Homo sapiens
tatggggaatgtttgcttctgagaattttcttcaagaaaaattatttataaaatacatcttgaataattgttaaaaagcaacctgttaaaacaattaaactttttttttttttttttttgagaatgaatctcacactgtcaccaggctggagtgcagtggtgcgatattagctcactgcagcctccacctcccaggttcaa

SEQ ID NO: 445120 - DNA, 201 bp, Homo sapiens
tggagaaaccccgtctctactaaaaatacaaaattagctgggcatggtggcgcatacctgtaatcccagctactcgggaggctgaggcaggagaatcactygaacctgggaggtggaggttgcgccgagccaagatcacgcaattgcactccagcctgggcaacaagagcaaaactctgtttaaaaaaaaaaaagaaaaag

SEQ ID NO: 445121 - DNA, 201 bp, Homo sapiens
catggagaaaccccgtctctactaaaaatacaaaattagctgggcatggtggcgcatacctgtaatcccagctactcgggaggctgaggcaggagaatcayttgaacctgggaggtggaggttgcgccgagccaagatcacgcaattgcactccagcctgggcaacaagagcaaaactctgtttaaaaaaaaaaaagaaaa

SEQ ID NO: 445122 - DNA, 201 bp, Homo sapiens
tataggcctaagaattctttaacgttttgatcacattaattttctcaggtgtatgtttttgctgctttgcgattttttaaaaaagagataatatgttaacrttgcattgaatttattgtagataattatttcttaaatagcttatgttttctactttgtatgtttgtgtgtatatgtggccatactattttgtaggctttc

SEQ ID NO: 445123 - DNA, 201 bp, Homo sapiens
gtgagaaaaacacttaactgtttagataaaaatgaaacctctcagggtgttattaactttttcatcctacagacagtgaatagtaaagctttctgtgaagwcatactgaagttaagcttatattaatgtgcttttaaattttgtatccttagtattttattgctgaaggcttttgtatttaattactattcaaacagagaa

SEQ ID NO: 445124 - DNA, 201 bp, Homo sapiens
agagccttatcaaatgcagccagttggtgctgctggtatgaaagcacaggggagctctcatgtggaaggttaatggagtgtaattataaagaaaaatgaactgctcaaccactctatctcactctacctgcaccaagagtgacaagtgctctgatcttttataaacccgggagtagaggtttaaccatctaaaattatgac

SEQ ID NO: 445125 - DNA, 201 bp, Homo sapiens
caccctaccactagccaggctaaaaagtgaagttacaaattaaaacggttaattctttccctcaaggagttcacgatctagtggcaagatcaaagagtccrgtaactcctttaagaagttttgtgataaaggggaaagggaactataattaagcagatgcctgttttctgttgatcacttttttgagaggggtgtgtgtgt

SEQ ID NO: 445126 - DNA, 201 bp, Homo sapiens
ggtgctgctggtatgaaagcacaggggagctctcatgtggaaggttaatggagtgtaattataaagaaaaatgaactgctcaaccactctatctcactctrcctgcaccaagagtgacaagtgctctgatcttttataaacccgggagtagaggtttaaccatctaaaattatgacagtataactgtcacacaaacatgct

SEQ ID NO: 445127 - DNA, 201 bp, Homo sapiens
tagacccccctctgaaaacaattcccaagggcatgtggatctgtcccagatgtcaggaccaggtactgtgggtgggtccaacaggggaggggccgaggagracaaagacacggccatcaggaggaattcctttcccggggaaatggcagtctcttctctctcccagtccgtctccgggctgcatcttccctgtttatgaca

SEQ ID NO: 445128 - DNA, 201 bp, Homo sapiens
agtatatgtgcagagtggcttaggttaatttaactgtggaaacttgactttgaaatttgggactcgtgtttatttgcattcttaaaattaatattggattrgttagcttcatgtctgatagtacatttttagcatgtgttgttttatataattcttcaaaaggaaaaagagagaaaaagagagagaaatgtaattgtgggg

SEQ ID NO: 445129 - DNA, 201 bp, Homo sapiens
acctactttcaaaattgcctttcattttatctgctcaagcatgtacacctagcctttgctcagggtagaaaaagcactaatctacctttgtgcatatggaragtagcattcctggcactgcattaaaaactccaggagaatgcattattaatggaatacgtttctctctctctctctgtctctcaaaaagggaaatcattt

SEQ ID NO: 445130 - DNA, 201 bp, Homo sapiens
aatatgaccagaaagggacatctctccctgttggcccagctccccatactagtgtactctgcattcagtcagtctgcttggatgccacccaacctcctgtsagccccagaaaagttggctcagaaaaatgagctccagctttttgttagtgaacagagcttcattcaaactagttttccagagggcagggattccatattc

SEQ ID NO: 445131 - DNA, 201 bp, Homo sapiens
tctgccccaagcctgccaggccatccatgaatagcacagtgaacagaaccccatgtaaaaggaagcatttgagagtcattaagcagaacagagcactgccrttgccaaggtgttcctaatagcgtcttggttgtcctgctgccggcaaggccagagtgtgacgctgagtttcttggagctgcagactttccaggaaggaaa

SEQ ID NO: 445132 - DNA, 201 bp, Homo sapiens
tgacaaaaccattgcagatagtcactatttcttgcggtagacactagttcttattcactgttgccacttcaatctttgatacttactcagtttctcccttraaactatgtaatcgtatgctccatttgggaaaatacagcctttagtgagcatccttcatgactaaaactcagtgaatttcactgaattcttggttggaag

SEQ ID NO: 445133 - DNA, 201 bp, Homo sapiens
gaaagaaagacgttttggcgctctaacctgtagatccatataaacagaaagcctggtcctgtattacaagattagcaaatgaaggttcatttaaactaaamtaaaatgcttaggtatgcttatcaaatgatttcctgctttgtatgactttttttccttatctgatcaactgctggtcctagtcgttactggttaaaagag

SEQ ID NO: 445134 - DNA, 201 bp, Homo sapiens
tgctttcattttgctttcttgtagaggcaatcttaacattccgaagtttgttgcttgttactgtggtgcttcagggttaagccatcgtggttgcagcttcrgtttccccagcctgaacagtttgctgccctatctccctttacctggtggcctcctggtgaggtttcatgtcatagcttaaatgtcacttcctcagaggag

SEQ ID NO: 445135 - DNA, 201 bp, Homo sapiens
atgattcatttgacatgatacttaattttgatgtgactttatttggaactcagatcccaagctaatcaaaaagtaccattaaaagcgacattcttttcccmtatcttctagaaagaattaaaaagcagtttcttcttttcctctttagagaagataaagcgaaaaaccaataactgagaaattaacagccacaaaagtttg

SEQ ID NO: 445136 - DNA, 201 bp, Homo sapiens
agtttttcatgtttgttggtcattcttatttcttctgtaaattgttttttcatagatttttgttatcaatttttgagggccctaaatatataaactgtatyagccctttgttatgtataatgttaagttctttgtgttttaacctgccgttcatttccagagtttatgtgaattgaattgaactatggttttatgttactg

SEQ ID NO: 445137 - DNA, 201 bp, Homo sapiens
cttagttatatttctgtgtcttaaaagatggaagtttttcatgtttgttggtcattcttatttcttctgtaaattgttttttcatagatttttgttatcartttttgagggccctaaatatataaactgtatcagccctttgttatgtataatgttaagttctttgtgttttaacctgccgttcatttccagagtttatgt

SEQ ID NO: 445138 - DNA, 201 bp, Homo sapiens
tcgcttgagcccaagagttcaaggcagtgagctatgatcatgccactgcactccagactggatgacagggtgagaccctgtctctgaacacacacacacacatgcacacacacatgcacgcacacacatgtgcaataagggtctctttgattgctttctgtggcacccttggtgatgcttgggcccaggatgaatactgtt

SEQ ID NO: 445139 - DNA, 201 bp, Homo sapiens
ttgcttgagcccaggagtttgaggctgcagttagccatgatcatgccactgcaacctagcctaggtgacaaagggagaccctgtctttttgtttctttttctttttttttaagagacagggtctcactttgttgcccaggctggagtgcagtgatgggatcacagctcactgcagcctcaatctcctgggctaaagtgatc

SEQ ID NO: 445140 - DNA, 201 bp, Homo sapiens
caacttgggaggcggaggttgcagtgagccgagatcatgccactgcactccagcctgggcgacagaacgagactctgtctcaaaaaaaaaaaaaaaaaaaaggcaagcttttaaagtataaagtaatattttagcatgtaaacttaaaagtgagaattacaacagaatcaggaagtcttagagtttcaggagggaaaaact

SEQ ID NO: 445141 - DNA, 201 bp, Homo sapiens
gcccatcttattttttggcgtggtgtacatgcttaccaatgaaagttagcttctggattagttctcaagtgaaaaaaattaagatgattcatttgacatgrtacttaattttgatgtgactttatttggaactcagatcccaagctaatcaaaaagtaccattaaaagcgacattcttttcccctatcttctagaaagaat

SEQ ID NO: 445142 - DNA, 201 bp, Homo sapiens
catataatcttagttatatttctgtgtcttaaaagatggaagtttttcatgtttgttggtcattcttatttcttctgtaaattgttttttcatagattttkgttatcaatttttgagggccctaaatatataaactgtatcagccctttgttatgtataatgttaagttctttgtgttttaacctgccgttcatttccaga

SEQ ID NO: 445143 - DNA, 201 bp, Homo sapiens
caatttctctggtcagtctcctccacttcccccaaaaagtagaaattgctactggaaacacacacacacacacacacacacacacacacacacacacacacgcacacacacgcacacacacacactatgtggtttagaagaaatgatcgtcaccttcttaaagttacaaattaaaaaaaaactgaagtaaatatagttgaa

SEQ ID NO: 445144 - DNA, 201 bp, Homo sapiens
gcaatttctctggtcagtctcctccacttcccccaaaaagtagaaattgctactggaaacacacacacacacacacacacacacacacacacacacacacacgcacacacacgcacacacacacactatgtggtttagaagaaatgatcgtcaccttcttaaagttacaaattaaaaaaaaactgaagtaaatatagttga

SEQ ID NO: 445145 - DNA, 201 bp, Homo sapiens
tgttagggaccttactgaatagaaaattgcaactatctatgttaagacatttcatcaagtggcaagctctaattgttctctgaactaagtttgcatttcaraaactggaattttaaaaaatgtctaacatcaggaaaactttaggtatacaaagtaagtaaaactagagttagaaactgaaatccagtcctgcaattttta

SEQ ID NO: 445146 - DNA, 201 bp, Homo sapiens
aaagaatttcaaatgaatcttctaatccttcatatgtttttctacaactagtcctaacttttttaacccttttagttttattttgaaataaaatgagtaaytggcatttagagtccttgctgaataaaacttcatgcctttgtgtatctctgagaagcagacaacaatccgatggagaaagtaaaagccatcggctcctca

SEQ ID NO: 445147 - DNA, 201 bp, Homo sapiens
cttttaaaaataaataaataaaaaaaattgagattggtattgtacttattattttagaaatacttattttgtctatatcttgagcatttctttacattctyaattattcttcaggaataatagtttttagtggcttgatagtatcctatcatttgggtagggtattatatcatacagggtttatttaatcaattcactatt

SEQ ID NO: 445148 - DNA, 201 bp, Homo sapiens
ttgcagtgagccgagattgagccactgcactccagcctgggcaacagagtgagactctgtctcaaataaataaatactaaaatggaggccaggtacaatgscttatgcctgtcatcctagcactttgggaggctgaggcagaaggatcctttgaggccagtttgagaccaacctaggcaccatggcaacatcccacctcta

SEQ ID NO: 445149 - DNA, 201 bp, Homo sapiens
agagaaaaccagccaataactaatataaggaaatgtcccacaaccgaagggcatataattccagattaatagaatccactgagtgcctaaaactgtgaatkaaaaaaaccccacaccctcataccaaggcacaacgtggtgaaactttagcaaaacaagaataaaagatcctaaaagcttccttagaggaaaaaaaaaaac

SEQ ID NO: 445150 - DNA, 201 bp, Homo sapiens
tttgcatctcattgaccacagttctgtcatatgccaatgcctagttcctggcaagaaggaggagtccaagactgatttgtgtcctggagctggagattttytccttgagcatttggaagctagatacctaaacaaaactgttttttgttatcagggaagagaaagggtggagaagaatggatattcaagaaagttaacaat

SEQ ID NO: 445151 - DNA, 201 bp, Homo sapiens
atgccagagcttctgggttttttaacagtcatagggaagtctaaggcaaggacaaatgggaggttatatatggcatatattaaatacatatatttaatgtrtgagggcaaggacgaatgggaggttatatatggcatatattaaatacacaacttcagaaagaattaaatattaagtagcaatcggggggccagggggaga

SEQ ID NO: 445152 - DNA, 201 bp, Homo sapiens
tggagtgaggatagaagtagacagatattagaagtatttagagagtagagggtggggtaggaatcatcaagagtgattccaaaatttgtcaagaaaagggyacttactgaggcaattatcggaggaagagaagattggaagaagaaattgatgagtcttagacatgttgattttgaacttttgagatattcaagtattgta

SEQ ID NO: 445153 - DNA, 201 bp, Homo sapiens
tagatggtaattgaagccatgagatgggcaaaagctcctaggaataatgagaacattgggaagaaaaggggtgccagggaaaaaaatcctaagaaatactyacatttaggatgaggcagaggaagagtaagcccacaaaggagactgagaggaggagtggccaagaacagggagttagagggccagaaatgggggtgcact

SEQ ID NO: 445154 - DNA, 201 bp, Homo sapiens
aaatattttttcagctgggtgcagtggctcacacctgtaatcccacactttgggaggctgaaggtggatgggtcactttagcccaggagctcaagaccagmctaggcaacatggcgaaaccctgtcactacaaaaaaatacaaaaattagccaggtatggtggggcacacctgtagtcacagctactcaagatgctaaggc

SEQ ID NO: 445155 - DNA, 201 bp, Homo sapiens
agccatgaagatatttggaggaaaagagtgttccagagccccaagaagggaacttgcctggagggtctgaagtacggaaaagaggccagtgttgctggaamggattgagcgatagggagatgggacggcttcgagtggcagaggcccaaatcactcagtgcctgtgggccattgaaaggaacttcatcttttctcggagta

SEQ ID NO: 445156 - DNA, 201 bp, Homo sapiens
gacagggggcccttttctcatctcttagaacctcactatcactttgcatgtttttgaacacatggtaggtatgcagtgagctagtgttgatagatgtctcrtcacgttatggttggttggagggaagaaagatcactttttaagttagtcactctatatttaagtgtttttgtaatgggaaatcacctgtaaaacgagctt

SEQ ID NO: 445157 - DNA, 201 bp, Homo sapiens
gtaatgaaaatttattgtttacaatgtttgcactgttagaatatccaaactagttgattaaggaaaataagatgctgcaaaatgccccttttgttacagtrtatgtaaccttggaaaaattctgttgtgtttagaagcatgtaccaatctatcactgtagttcacagtgttacaggattgatgtattggaggccagtaaac

SEQ ID NO: 445158 - DNA, 201 bp, Homo sapiens
gctgttgtcaatttgtttatttgtactatataaattccatgacaacttgagaactataaaataattatgtccccaaatctcaaaaccaggaaagagacctwcttttgtagacattgtgtccagttcactgtgtaagatgaggttgtagatgctgtttctgtcaaacaggtggtattttaaaaggatatgtactttttaaaa

SEQ ID NO: 445159 - DNA, 201 bp, Homo sapiens
tgtttagaagcatgtaccaatctatcactgtagttcacagtgttacaggattgatgtattggaggccagtaaacagccccagaaagaaagtgtagtttcaraaaatcttaattctttacattaattttctcttttaggacactgacttcttttaggctcttgaacttgtatttttatttgcatggctggttccttttggct

SEQ ID NO: 445160 - DNA, 201 bp, Homo sapiens
aattttctatgtacttactacaaataaagtaaaatattggcttaagtatttttccagtgtgaattatatgctgaaaacaggataaaaagaagatataaatyattgtttaacaggtatcccctgaatactgattcctgggacagtagcttttccatatgggaacaataggcgtcttctcatagctctgtgtgttagtcttca

SEQ ID NO: 445161 - DNA, 201 bp, Homo sapiens
ttttttttccctcctctcaaggactgatgtaagtttgcaagtattttgatcatgtccccccaccagcccccaccccaagcttccacggctttgtttcaggycctgggggaggagcagttgtgaatgcagtgtgactcacttgactcccacgctcctgattctggttctgattggtcgtcaccttgctctagccatatggct

SEQ ID NO: 445162 - DNA, 201 bp, Homo sapiens
tctttgattgctttctgtggcacccttggtgatgcttgggcccaggatgaatactgtttctagattgacaatactgatggaggtatggtgtatacttgttmatagtttaaaatgtggtgaggttattttaaaagtctgtctaatggccaggcacagtggcttatccctgtaatcccagcactttggaaggccaaggcagga

SEQ ID NO: 445163 - DNA, 201 bp, Homo sapiens
tcccaagtagctgggactacaggcgcccgccactacgcccggctaattttttgtatttttagtagagacggggtttcaccgttttagccgggatggtctcratctcctgacctcgtgatccgcccgcctcggcctcccaaagtgctgggattacaggcgtgagccaccgcgcccggcctaggacacattttttaaccccta

SEQ ID NO: 445164 - DNA, 201 bp, Homo sapiens
ctgcactccagcctgggcgacagagcaagactccatctcaaaaaaataaaatagttttattttagaacagtttcctaatgctatatgccttccccccccccgccaaaagagccacttatcctctggcagaacctaaccaattttccttccactttaataactaaaatctgaattaccttatccgtatgactgatattttaa

SEQ ID NO: 445165 - DNA, 201 bp, Homo sapiens
ggcctcccaaagtgctgggattacaggcgtgatgtaatgctgaagtgtggaagcaactattaatttatttaacaggattcactctcattctcactccccayaccctgattttttgataggcatatgtgatcttttatggagatattctgatatggagccaaagcacttagttgctctagttctctgctttcattttgcttt

SEQ ID NO: 445166 - DNA, 201 bp, Homo sapiens
ttttagttttattttgaaataaaatgagtaattggcatttagagtccttgctgaataaaacttcatgcctttgtgtatctctgagaagcagacaacaatcygatggagaaagtaaaagccatcggctcctcattaacttgagttgcaggcttattattgtgcgaggcactctttgacatttacagtcttcaagttaaaccc

SEQ ID NO: 445167 - DNA, 201 bp, Homo sapiens
ttttgtaaactataaatacatgtctataatttgtttctttccgcacagaccagtctcttaaaattactatccagaaagagatctttctgaagaaaagaaaaagaatttcaaatgaatcttctaatccttcatatgtttttctacaactagtcctaacttttttaacccttttagttttattttgaaataaaatgagtaatt

SEQ ID NO: 445168 - DNA, 201 bp, Homo sapiens
tttttgtaaactataaatacatgtctataatttgtttctttccgcacagaccagtctcttaaaattactatccagaaagagatctttctgaagaaaagaaaaagaatttcaaatgaatcttctaatccttcatatgtttttctacaactagtcctaacttttttaacccttttagttttattttgaaataaaatgagtaat

SEQ ID NO: 445169 - DNA, 201 bp, Homo sapiens
gtttttgtaaactataaatacatgtctataatttgtttctttccgcacagaccagtctcttaaaattactatccagaaagagatctttctgaagaaaagaaaaagaatttcaaatgaatcttctaatccttcatatgtttttctacaactagtcctaacttttttaacccttttagttttattttgaaataaaatgagtaa

SEQ ID NO: 445170 - DNA, 201 bp, Homo sapiens
ataggaaagtcagagaagataataatttaatggaaggtagatttatgcctggatcaggttgtgatgggaaggaggagaaagaaagaggaccagcaactcarttagcccaacatataaaatcattaagctgggagatatccccagacaccaccttgccctttccttgctttcataaccaattgcaactaatccagtatttcc

SEQ ID NO: 445171 - DNA, 201 bp, Homo sapiens
tgtttttgtaaactataaatacatgtctataatttgtttctttccgcacagaccagtctcttaaaattactatccagaaagagatctttctgaagaaaagaaaaagaatttcaaatgaatcttctaatccttcatatgtttttctacaactagtcctaacttttttaacccttttagttttattttgaaataaaatgagta

SEQ ID NO: 445172 - DNA, 201 bp, Homo sapiens
ttgtttttgtaaactataaatacatgtctataatttgtttctttccgcacagaccagtctcttaaaattactatccagaaagagatctttctgaagaaaagaaaaagaatttcaaatgaatcttctaatccttcatatgtttttctacaactagtcctaacttttttaacccttttagttttattttgaaataaaatgagt

SEQ ID NO: 445173 - DNA, 201 bp, Homo sapiens
ggcaacatatgagaccccttctctacaagaaaaaataaaattaaacaaacaagattcaacatgtacctgccttgtttttgtaaactataaatacatgtctrtaatttgtttctttccgcacagaccagtctcttaaaattactatccagaaagagatctttctgaagaaaagaaaaagaatttcaaatgaatcttctaatc

SEQ ID NO: 445174 - DNA, 201 bp, Homo sapiens
ttttatataattcttcaaaaggaaaaagagagaaaaagagagagaaatgtaattgtggggcatacaggcaaacattttttcctaatatctactttgagagrtttttttaatggctcttcatcattcttaaacatttctttgaatgcacagggcaatctagtgactagccatcaaacaaatattaactttattaggagagtg

SEQ ID NO: 445175 - DNA, 201 bp, Homo sapiens
ctaattttttttttgtatttttagtagagacttctacgaaataattattattcaccatgttggccaggacggtctcgatctcctgacctcgtgatccaccyactttggcctcccagagtgcaggcatgagccactgtgcacggccaggatttcatgttttaagatggcttatgtgatttttctttaaaactttatgtgcag

SEQ ID NO: 445176 - DNA, 201 bp, Homo sapiens
agattttagcttttcttactcctgcttttagaagttctgagattattagttttgagcttgtgttcttaggagttgcattttattttatgtacactttcctrtctgtgatggttgtatggaccaccatttcttagcataagcaggacaatatataagtcagcttaaagttgcaggtcacaagtcttgttccgcacttccttc

SEQ ID NO: 445177 - DNA, 201 bp, Homo sapiens
caggacctttaataagttccctctacaccaaagatatatattttaaaaattatacttaagaagactttgtggtattccccagaagagttcgcctatagcarcaaaacctttctaaaataaaacttattcttttaaccggtattcatttaagtgggtttctctctacttggtttccatggaaatagcaaatagctaacgtta

SEQ ID NO: 445178 - DNA, 201 bp, Homo sapiens
cagtttgctattcgtgactctaatgggtgtgtaattccctttcttgtatgcaattggcatttcagtatagtttacaatatggaacgtggaggggacccccygagtaggacagcggctgctctttgtcacttgcagctgtgtttgcaagggagcatgctggcaaccagcaaggagagtgctgtgacaggtgggaagagcaaa

SEQ ID NO: 445179 - DNA, 201 bp, Homo sapiens
tggggaaaaaaattgccacgttaccataaatatttttcataggaatctgcacagtatcttctaaagagaagtacttacaagataataatattatccaatgyattatcttcaaatttctgttttccctgttagtcaaccagagctgatgcctccccttaccccattttaatactggtgcaatagtagagaaactagttccaa

SEQ ID NO: 445180 - DNA, 201 bp, Homo sapiens
gacttctgatgttcctttatccttcatattcttctgtctatggttattgttaactttgggcagcgatgtctttagaagttgggttaggtcaaaagacattyatttttcttcctttcctttcctttcttttcctttcctttcctctttcctttcctttcctttcctctttcctttcctttcctttccatttgtttgggcttc

SEQ ID NO: 445181 - DNA, 201 bp, Homo sapiens
aacatatcttttagaactggtatactagcagtgaatgtcctctggttttgtttatctgggaatgtcttaatttctccatttttgaagaatagttttgcagsatatagaattcttggttgataggggtttttttgctcagcactttaaatatattaacccatttccttctggtctgcaacttagttctggctgatagtcctt

SEQ ID NO: 445182 - DNA, 201 bp, Homo sapiens
taaaaagtaccttatgttactttctaacagaaaaattaacagagaatgttaacttttctttaaattctcataggcatttttcacttaggcattttattctstatttctgaagagatgttttcctaaaaacttaccttgtcttctgataattatatttattattgggcattgtctcttttgtaaccattagatactaggtca

SEQ ID NO: 445183 - DNA, 201 bp, Homo sapiens
accaccatacccagctaattttttttttgtatttttagtagagacttctacgaaataattattattcaccatgttggccaggacggtctcgatctcctgayctcgtgatccacctactttggcctcccagagtgcaggcatgagccactgtgcacggccaggatttcatgttttaagatggcttatgtgatttttctttaa

SEQ ID NO: 445184 - DNA, 201 bp, Homo sapiens
ctagaatgtgcatgttaacattaaaattttaccttttttgtcctttttcttacctttcctctcaactttatagggtgatattcatgaggatttttgcagcrtttgcagaaaaagtggccagttactgatgtgcgacacatgttcccgtgtatatcatttggactgcttagacccccctctgaaaacaattcccaagggcat

SEQ ID NO: 445185 - DNA, 201 bp, Homo sapiens
gactataggtgtgtactaccatgaccagttaactttagtattttttggtggagacaggtttcgccatgtcacccaggctggtctcaaactcctgggctcargtgattcacctgccttggcctcccaaagtcctaggagtacaggcatgagccatcatgcctggactgtagcacttcttgggggaagaaaatgagatgtggt

SEQ ID NO: 445186 - DNA, 201 bp, Homo sapiens
aaaaaaaaatcaaaggaagcatttccaaaatataatagcttttcctttccctggtagtctgtgttgctttgggatggtgaatggtaagaggcccagggctrcctccaaaacagtgttgtatagcacctctccatccagtagcccacctgacatatttaattgattttgccaaccttttttaaatattgttttatttaatgc

SEQ ID NO: 445187 - DNA, 201 bp, Homo sapiens
gccccaagaagggaacttgcctggagggtctgaagtacggaaaagaggccagtgttgctggaacggattgagcgatagggagatgggacggcttcgagtggcagaggcccaaatcactcagtgcctgtgggccattgaaaggaacttcatcttttctcggagtatgatgggaagccactggagggttttgagcagaggagt

SEQ ID NO: 445188 - DNA, 201 bp, Homo sapiens
agccgggggtttctgaccagcctgggcaattcagtgagacctcatctctacagaaaacttaaaaattggctggatttggtggtgtatgcctgtagctctasctacttgggagactgaggtgggaggatcacttgagccggggagtttgaggttataatgagctatgatcacaccactgcactccagcctgggtgacagtgg

SEQ ID NO: 445189 - DNA, 201 bp, Homo sapiens
aagccccttcaagtgaaagagtatcattccctttgtgtttgtgtttgtgtttagggtgtgtgtgtgtgtgtgtgtgtgtgtgtgtgtgtgtgtgtgtgtgtctaatttttctatagcctgaaaggcacctgctcattttccagcctagtgagtacagcagtgctatattgagaagtgaggcaggatggaacacaataaggt

SEQ ID NO: 445190 - DNA, 201 bp, Homo sapiens
taagccccttcaagtgaaagagtatcattccctttgtgtttgtgtttgtgtttagggtgtgtgtgtgtgtgtgtgtgtgtgtgtgtgtgtgtgtgtgtgtgtctaatttttctatagcctgaaaggcacctgctcattttccagcctagtgagtacagcagtgctatattgagaagtgaggcaggatggaacacaataagg

SEQ ID NO: 445191 - DNA, 201 bp, Homo sapiens
tctgactccagtatttgaatctcagtataaccacttaaagtttaatgtgtgaccttggactaattatttaagctcactccaataaagatgtatcacatacrtgctgcataccactgtgctggtcactgggacttcagtttcttcatctgtgatacagagatggtaataccagcctcctagggttcatgtgacaataaaatg

SEQ ID NO: 445192 - DNA, 201 bp, Homo sapiens
ggcccagctccccatactagtgtactctgcattcagtcagtctgcttggatgccacccaacctcctgtgagccccagaaaagttggctcagaaaaatgagytccagctttttgttagtgaacagagcttcattcaaactagttttccagagggcagggattccatattctagtcccagttttactatcacagaactgtgta

SEQ ID NO: 445193 - DNA, 201 bp, Homo sapiens
ttaagccccttcaagtgaaagagtatcattccctttgtgtttgtgtttgtgtttagggtgtgtgtgtgtgtgtgtgtgtgtgtgtgtgtgtgtgtgtgtgtgtctaatttttctatagcctgaaaggcacctgctcattttccagcctagtgagtacagcagtgctatattgagaagtgaggcaggatggaacacaataag

SEQ ID NO: 445194 - DNA, 201 bp, Homo sapiens
agttgattatgagaaaaggtacaatgatctcctcagatttgaggagttttggggtaaataattgagttaatatatccattagaatgtatatatgtatctgkcttacgaatgtctctatcttataagtgaaaccagtaaatgaggtaaggggaaagatcattaagtgtaaaatataattaactttgttcattcactactgat

SEQ ID NO: 445195 - DNA, 201 bp, Homo sapiens
tttaagccccttcaagtgaaagagtatcattccctttgtgtttgtgtttgtgtttagggtgtgtgtgtgtgtgtgtgtgtgtgtgtgtgtgtgtgtgtgtgtgtctaatttttctatagcctgaaaggcacctgctcattttccagcctagtgagtacagcagtgctatattgagaagtgaggcaggatggaacacaataa

SEQ ID NO: 445196 - DNA, 201 bp, Homo sapiens
accatgttagccaggatggtcttgatctcctgacctcatgatctgcccgcctcagcctcccaaagtgctaggattacaagcatgagccaccatgccgggcygaaaaattttctaagtaatgtctaattccactttcctagtagttacagttcagtgagtgtaattaccgtctgagggttgaaaactggtggcccatgggct

SEQ ID NO: 445197 - DNA, 201 bp, Homo sapiens
tactctgagttttctaggcctgcagcaaagccttgcattttttaagccccttcaagtgaaagagtatcattccctttgtgtttgtgtttgtgtttagggtgtgtgtgtgtgtgtgtgtgtgtgtgtgtgtgtgtgtgtgtgtgtctaatttttctatagcctgaaaggcacctgctcattttccagcctagtgagtacagc

SEQ ID NO: 445198 - DNA, 201 bp, Homo sapiens
aggcatgagccaccgcgtctggcccaccccagctaaatttttaaccaaatttgttttattcattaagagatcgttcatgcttttcttctacaatgctgaayctctctctttaataagatttgtagtactaatgatttaaaacaaacaaaagcaaatgtgttctgaaattctgaaagatgagttcaggtttcttgtgtctct

SEQ ID NO: 445199 - DNA, 201 bp, Homo sapiens
ctactctgagttttctaggcctgcagcaaagccttgcattttttaagccccttcaagtgaaagagtatcattccctttgtgtttgtgtttgtgtttagggtgtgtgtgtgtgtgtgtgtgtgtgtgtgtgtgtgtgtgtgtgtgtctaatttttctatagcctgaaaggcacctgctcattttccagcctagtgagtacag

SEQ ID NO: 445200 - DNA, 201 bp, Homo sapiens
cctactctgagttttctaggcctgcagcaaagccttgcattttttaagccccttcaagtgaaagagtatcattccctttgtgtttgtgtttgtgtttaggktgtgtgtgtgtgtgtgtgtgtgtgtgtgtgtgtgtgtgtgtgtgtctaatttttctatagcctgaaaggcacctgctcattttccagcctagtgagtaca

SEQ ID NO: 445201 - DNA, 201 bp, Homo sapiens
tatgcttctttagatccacgaagtgctaaagccttgccgtaaaattctaagaattggacctggtagaatgtagcagtttatttaaactatagagtactcarcgttttttaccagccaagtttagtttttctcattggtagcattcataaatatgcttttccttttgagtggctcagaccatgtcctacagagtattttatt

SEQ ID NO: 445202 - DNA, 201 bp, Homo sapiens
gctttatgcttctttagatccacgaagtgctaaagccttgccgtaaaattctaagaattggacctggtagaatgtagcagtttatttaaactatagagtastcaacgttttttaccagccaagtttagtttttctcattggtagcattcataaatatgcttttccttttgagtggctcagaccatgtcctacagagtattt

SEQ ID NO: 445203 - DNA, 201 bp, Homo sapiens
gagcttgacctataatataaaaacagtgggctgggcatggtggctcacgcctgtaatcccagcactttgggaggctgaggtgggtggatcacctgaggtcrggagttcaagaccagcctgaccaacatggtgaaaccccgtctctactactaatacaaaaattagctgggtgtggtagcgggtgcctgtaatcccaggtac

SEQ ID NO: 445204 - DNA, 201 bp, Homo sapiens
ccactgtgggggccatctccaatggcccggactgcaccccccctgccaatgccgccacctccacgccggccccttccccctcctcccagagctgcacagcraactgtaaccagggggaagagactaaataacagagcccctctaggagaagccacgggatcccggcggcaaggagaacagaacactgaagactctagaaaa

SEQ ID NO: 445205 - DNA, 201 bp, Homo sapiens
cagtgccgcgatctcggctcactgcactctccacctcccaggtttaagcaattctcctgcctcagcctcctgagtagctgggactacaggtgtgcaccacyatgcctggctaaactttgtattttttttttttagtagagatctggtttcaccatgttggccaggctggtctccaactcctgacctcaagtgatccacctg

SEQ ID NO: 445206 - DNA, 201 bp, Homo sapiens
gggggttgaattggtatggaaaatagggtctgaacactggaacccaaatttgataagactaaggaaatttatgcattttttcttttctttttatccctacwtttgtacatttctacttcttgcttccaactgggagaatcaattctatgaccacatgaaagtctcattaagcacaatatctcaggccactttggtagttca

SEQ ID NO: 445207 - DNA, 201 bp, Homo sapiens
gaacgtgaaaaggtaaggaacattttttgaacttattttcatcaggctgtgctctaatcttgatgcccaatccaagaaatttgagaaatgaaatttctaargaattccaacaggcagggacttgggattctaatcgggagtgttggtattatgcaatagaaaattcagaaaataccacatttttaaaatgttctctcctga

SEQ ID NO: 445208 - DNA, 201 bp, Homo sapiens
tgtgaaaaaatctcactgcatagaggtaaaagaggacagccattcaacgcaattcagaaaagtctcccaatcatactgaaatctattagtccaaatccttytcttccctaagccgaataatggcagtctttaggtgttctgtgtaaatgtcagtcataatgaatgcagctgcttttattagaggagagtttgatatagtgg

SEQ ID NO: 445209 - DNA, 201 bp, Homo sapiens
caagatgctgcatggtaaaggtgacggatgcccttttcaaggttaccaaatgtcctccatgtggctgaagagcatggtgaattctcattcctcctcgtacrtgatcatcagtgccattggacatactggatcacttctctagtcttgccatgttttctatacttgggattccaggtcccctacctgtctttgtcctttgct

SEQ ID NO: 445210 - DNA, 201 bp, Homo sapiens
gggtttcactatattggccaggctggtctcaaactcctgaccttgtgatccacccacctaggcctcccaaagtgctgggattacaggcatgagccaccacwcccagcctcagacatcttttaatggggcgtggttgcctcaagaaagggaagattgccagtggtgaagagatgtcatagagggaatggggagaagctgcaa

SEQ ID NO: 445211 - DNA, 201 bp, Homo sapiens
gtccagcaccctcagataatttgacatcaactatttaaaaacgtatcttataaaatatggataaatgtaattattaagaatcagcaaaataagcaattctaaaaaggtggccctctgtgtcaatagtggctgggttgctggtcaaggccatcttgaccaaagtctaccctagagacatcattccatgtgcactcctctgaa

SEQ ID NO: 445212 - DNA, 201 bp, Homo sapiens
ttttaagggtaagcagccaaattatctatggagatattaaaccttcatgttattattctattttatctgcatgatattgttgtttctctagctgttctgcrtggatagaaaataggcccaggtaatcctcaattcccagtgtagttaaacttttgtaggcatcttcccttgtttttattttttattttttttaaataagag

SEQ ID NO: 445213 - DNA, 201 bp, Homo sapiens
atagggactgtcaccagggaatgtagatctctggcatattgctttcaccatactgctcccccgaggtgttgggaaacttaacctgtccatgacatactttratctatttggatggaaagtagcttttaaaacatgaccattaacactgctaataatttataatggtaattgtattctggaaaaaaaatgaatatctgacat

SEQ ID NO: 445214 - DNA, 201 bp, Homo sapiens
taaaactgtcccagcttatatttgtgatacaaatgtagaatcataaaagcaggaaacctatgtctgtttggcatactttggtcctaggttatatgttgccrtgcattttcttccaaatatttcatgtgtgttcatcttctcccttcagggatgcagactccattagttgatgcggattgctcagggagcatgtttgtctga

SEQ ID NO: 445215 - DNA, 201 bp, Homo sapiens
aaccctgagccttggagtgaaatctttcagagaagctccctgtttccagcactagctgaataagattccaataaacatattgctgaaatgtttgtttccgrgtgtcattttagactgcaagtagctaaaacagatctggcttctatatatagattccgcatttggttgtgttctaggaggcttttattactacgctccctg

SEQ ID NO: 445216 - DNA, 201 bp, Homo sapiens
cttctaggttgtctttttctcattctcatagaactttcgttttgtgcacattattcccgtgggcgggaggaagaggagtttatatgcctagagaaaggtaratcttgctacctgaagacgaagccactgggggccaagaaactctgcttccgttccaagtctctccagcgtttgcaccttctccggccctttgaaaatctg

SEQ ID NO: 445217 - DNA, 201 bp, Homo sapiens
taaataaacagttcaggagaaaatcctacttctctggactcaaagcaggaaatatgactttgaatagctggttaaaggaagcagaaacatcttagttagakaatttttttggattattggcctggctcaatattgctgtttaattgtgttttaccattcaaaaccttattaccagatgctcaggtctgggaaacccaattg

SEQ ID NO: 445218 - DNA, 201 bp, Homo sapiens
tacaatcatatgaataagggcatatgggagcacagggaataaagcaaataacttatcctaattccatggagaaagttttatagaggggtaattatttgaartagatttgaagcataaataggcatgaaaggcaaagatgtgaaaggaaatggcatgaagctgtcatcaagtctttctgtaataaagctgcataacaaaata

SEQ ID NO: 445219 - DNA, 201 bp, Homo sapiens
agtgttaaatgctgccaaaagttggccagcacaagaagtgagatggcagtaacttgagtggaaaacagttcatggaaagacttttgagatgaagagactgraacatgtttattggctttgagtaataatctgattgagagcatgaagactaaagataaagagaagatataagggattacagatactgctgcctctcagtca

SEQ ID NO: 445220 - DNA, 201 bp, Homo sapiens
gtaaaacattaaaagcacaaccaaccgtccaaattgtaaaacctcatctagattaacaacattcgtgagagtttatgcttgtctaaaattcctctggagcygtgctgtgacttcctggtaggctctctgacaggctgcatttttgcttcttttgtcctcttggccttctgggtgggccactttctcactctgttaattttc

SEQ ID NO: 445221 - DNA, 201 bp, Homo sapiens
ttgtattgtttttacacatttagtagttgataccaacaatggttccatcactaattcaatccatctgttacactattccttggattctttcttctctgttktcttggacctctctctgcctcccttttattatttatattccagatggtagccctgttagctgtgtctgggacacgtgcttattgatcactcatgggcact

SEQ ID NO: 445222 - DNA, 201 bp, Homo sapiens
agaaaactcagtctaagataggatggatatgagagtcaggacatgataaaggatgcacaagtacctactgtgtgaatatttgataaacataattgagtatrtgataaaggttagtcaaattgcatttatcagtaatgctgaatcacttctgttactcaaagcacaaggatacttctccccactattaattctcatagaaca

SEQ ID NO: 445223 - DNA, 201 bp, Homo sapiens
tttctgtgaagttgcatagtggaagtaaagtagggacaatacagatggagaagtagaaaataaaaaccctgtcatgagtggaatcaaaaggccttgtaacytcagtgaaagtggcatggtggcagaaacaaaggcttaacacagctccatctctaattagctatttccttgggcaagtcagttaacttttctgaatttaag

SEQ ID NO: 445224 - DNA, 201 bp, Homo sapiens
tgcgggattcatttcatcttttactcaggaggaggtggctgcaggaaatcaaagggcccacagaaaaggatgactgccacagagccatttctcaaagaaarcctttttgttttcccaaaaagcttatgttaagttgaatttttatgattatccttaatcatgatgtcaagagagtgttttactgtatctcatgactttaaa

SEQ ID NO: 445225 - DNA, 201 bp, Homo sapiens
cgggagtgttggtattatgcaatagaaaattcagaaaataccacatttttaaaatgttctctcctgagttcagaacttcctctgaggtaagaagaatccartgggtagagtaccaggtatattccaaaaagaatgctgggatcctgatttagcaatgtgatctcctctcatggatggccactgacataagttggctacaaa

SEQ ID NO: 445226 - DNA, 201 bp, Homo sapiens
ttgtataaagtttaaaaccaggcaaaactcctctatgctgatgaaagtcagaagtgtctggtgttgcaaagtagtatgctgtgagggtggggggattttarctgggaaggaatgcaagggggaattcttaggggctagacatgttctgtatcttgatctgactggtggttacccagctgcattcacaggtaaaacttcctc

SEQ ID NO: 445227 - DNA, 201 bp, Homo sapiens
ctcacatcagaactctgtcccacccggccttctgataacacggcctcctcattcgtcactctctctgcacacactgggagctgggccttaacccaaaacayaaattagaagcatcatctaatacagaaatctaagccggatgcaaatttaatgtagatgtggcacaagcaacctgagtggggaaccatctaactgtaaatt

SEQ ID NO: 445228 - DNA, 201 bp, Homo sapiens
gcgatggtgcagtatcccaggtgaagggactcagtcatcacccctaggcctgaaaggtttaccttaggagtgcagaatcacaggaaggagcagaaactgtktagagcaggcttccagaagatgcagccaatctgcagcgacccttgggagagagtggggagaatcagcaccctggcctccctcttctcctctccctctcca

SEQ ID NO: 445229 - DNA, 201 bp, Homo sapiens
tttcagttccttctagtgccatcactgctctgcacatccctttaattgtctaggcctcttttaaaacatagtactcagaattgaacacagtggtggagagwtggaatcacagactcccattattcttttcaactctaaagttaccgttttttcttttttttctttttcttttcagagtccgataaaccttaaatgttgagt

SEQ ID NO: 445230 - DNA, 201 bp, Homo sapiens
tgtttcttacctagcacttagttgaaagcctgttgatatgtattcttctaagattttgtttttgaactaacaaaatcctagccatggtattaccagtggtkccagggcatacaacctttgcttgtaagctaggatggtctaaagggacagaaaaaaatatcaggaaactatctgactcacatttaccctttctctagttga

SEQ ID NO: 445231 - DNA, 201 bp, Homo sapiens
aggtgtggtggcgggcgcctgtagtcccagctactccagaggctgaggcaggagaatcacctgaacccaggatttggaagttgcagtgagccgagatcgcrccattgcactccagcctgggcgacagagcgagactcttacctccaaaaaaaaaaaaaaagaagaagaaatctgaagctacaggtggctggcttccatgct

SEQ ID NO: 445232 - DNA, 201 bp, Homo sapiens
ttttctctcccttcattcttatttctttttactttttttctaatattaatttaccttgcttttctctaactggcaactaagtgagaaaatcctacctagcrtattgggtgacgcagaggtgctatgactgcaggaaaagaacaaatagttacctggctgaatgagaaactcttcccctaatagagttgatcatgaattttc

SEQ ID NO: 445233 - DNA, 201 bp, Homo sapiens
aatttttagagtgtcatgtgacgcatcattgtttgagaggataccgttgacatctctgctaactatctcttgttgattcaatccattagtgtattacttayttttaccataggcaagatgttggccttgatacaaatgaatgtggagaagtacaaggcaggttttgccagctgtcaacttataatacagttgaagatatag

SEQ ID NO: 445234 - DNA, 201 bp, Homo sapiens
aataacacttgtaatttaggcctatttatttcaaatctttttgaacagtaacatgaattcagaaaatttctagctaagattagaggtacattctgcagtcrtgcaataagtcaaatacaaccagttcctactggcattaacttttgataatgattcaataccaatttcccctaacctatgtatgtgataacataaatctaa

SEQ ID NO: 445235 - DNA, 201 bp, Homo sapiens
aggcctatttatttcaaatctttttgaacagtaacatgaattcagaaaatttctagctaagattagaggtacattctgcagtcgtgcaataagtcaaatayaaccagttcctactggcattaacttttgataatgattcaataccaatttcccctaacctatgtatgtgataacataaatctaaaccatggttactgttga

SEQ ID NO: 445236 - DNA, 201 bp, Homo sapiens
gtgcctgtagagtccatgtcgtaggtttttcttccagttaataaaaccggttcatgtcctgagtatgatgcacccagtaatctgtatagttaaacactggrgaataaacattgtattacttgactattgctgctgaaataaattgctgcaaatttcgtggtttaaaatgacacaaatatattaccttgtaattctgcaggt

SEQ ID NO: 445237 - DNA, 201 bp, Homo sapiens
aatacaggatagcttccctattttaagatcagctgatcagtaatcttaatcccatttacaatcttaattctcatgtaacataatttctttccataatttgmcatgtaacacaacatatttacagattccagtgattaggaagtagacatctttgggtggccattcttctgtctcccacattaacacagaaaaattttaaga

SEQ ID NO: 445238 - DNA, 201 bp, Homo sapiens
ctcatgtaacataatttctttccataatttgccatgtaacacaacatatttacagattccagtgattaggaagtagacatctttgggtggccattcttctktctcccacattaacacagaaaaattttaagagatggttaattagaatcataaaaaaatttaaaacatagccatagaggtaggtgtgaaatttcctgattc

SEQ ID NO: 445239 - DNA, 201 bp, Homo sapiens
ctggctggctcccagctgagcttttccttcaagggatcagattttggaaccagaaagtcaaagaggatcagtgaccacattaaggggcatctctctttctstctgtcttgctctcgctctctctctcgttctctctctgctaatgctgtatactgcaggtggatgccagcgtggactggctcctctctttgtgcaaagact

SEQ ID NO: 445240 - DNA, 201 bp, Homo sapiens
gtgtgtgtttgtgagtgtgtatttgagagacttggctcatgcctgtgggtcttctcttctagtatcagtgaggggagggattactgaagaagaaggggggraaaaaaaagaaagaaatctgagctttctgggaggaaattcaaaggaaccaagagaaattaacttcgttctgcaaggactaaaatacagcaagaggagaga

SEQ ID NO: 445241 - DNA, 201 bp, Homo sapiens
gggagaagaacatagcaggaaacaagtagtacaaataagcattaagctctgttttatttcttctacaagtgtatcatgaaataaacatctctacagaagtsggatgaaaaaactcagcatcaatgtcaggacataaggaagtcacttgaaagttttatttcatgtacattttttcattaggttaatctctggaaactatga

SEQ ID NO: 445242 - DNA, 201 bp, Homo sapiens
ctgaagaagaaggggggaaaaaaaaagaaagaaatctgagctttctgggaggaaattcaaaggaaccaagagaaattaacttcgttctgcaaggactaaartacagcaagaggagagaggtcaagcgagaagcgtgcgggaagcacatgccctggggaggcatagaagccacactggcagagcggccagcacaggtagcca

SEQ ID NO: 445243 - DNA, 201 bp, Homo sapiens
gcaatctattcacttcatgacttcaaggagtcgtttggttcctgatgcataggccatacacaaaggatcattgtgaataaaaccagttttttcattaacgrttttaaaggtgtcaaaggtcactcctcaacatcaccaaactagaagcaatgcagaggcactggggatcagtccatccattgctgtgtctcagtcagtttg

SEQ ID NO: 445244 - DNA, 201 bp, Homo sapiens
tgcaatctattcacttcatgacttcaaggagtcgtttggttcctgatgcataggccatacacaaaggatcattgtgaataaaaccagttttttcattaacrattttaaaggtgtcaaaggtcactcctcaacatcaccaaactagaagcaatgcagaggcactggggatcagtccatccattgctgtgtctcagtcagttt

SEQ ID NO: 445245 - DNA, 201 bp, Homo sapiens
agactgctttaacccacacagttactcaatgggacaggaacagtgaggaacacaagcaagggccaagccaattagaaatcgattaattaattaaaaagaaraaaacaactccagaagtcagcatcccatcctctagagatcctggcttactttgtgcctagagaacacttggtaactattgtccatttttaggtcttgtta

SEQ ID NO: 445246 - DNA, 201 bp, Homo sapiens
aaaaccaatacacaaaataattcagggtatgcatcctatgaaaggaaaaaagatgctttgattaaaaaagaaaaagttagaggggcaaaataaggatgctyttgggtggtaagaattatgcttagataggaagaaagaaaaggagccagtcaggagaagataaaaaaaagaaaagcatcatgactcgagagaatggcacca

SEQ ID NO: 445247 - DNA, 201 bp, Homo sapiens
agtcatgtgaggtaagatagcctccccttccccaactcagactagagaactcaggtggatttaacttatggagcttgaatccttctaatttaggacctggyccctctcctattcctctgtcctttgtttaacttcttaaattaagttggttccacgatcttaaatttacagaaattaggagttctgatttttgttttgttt

SEQ ID NO: 445248 - DNA, 201 bp, Homo sapiens
tctgagctgctgggagatgatgacgcttatctcggcaatcaaagatccaaggagtctctaggtgaggccgggattcagaaaggctcagccatggctgccastactaccaccgccattttcacaaccctgaacgaacccaaaccagagacccaaaggaggggctgggccaagtccaggcagcgtcgccaagtgtggaagagg

SEQ ID NO: 445249 - DNA, 201 bp, Homo sapiens
atagtcctgctgatgctatttcttatcctgtagaaagggctagaataggacatcaggagacctggtattagagagtgcacaataactatgatgggctgtaracttaccatgtctgaagtctgcttgctccctatttaggatattggcttgggaaaccaggcctgcaatttgttagaggaaaactggcatggggtttggaag

SEQ ID NO: 445250 - DNA, 201 bp, Homo sapiens
gttgaatgaatgtataaatggacaagtaattgaatggttaaagaaagaggttcctattaaatgttttcatgtttcaagtccagttcacccctgaattttgrtgtaatttccagtttctcaaccatgcactgatgagaattgatatttggactttgtgaaataatgctaatagctattgtatacatttgtgtttaaatcaca

SEQ ID NO: 445251 - DNA, 201 bp, Homo sapiens
aagacagggtcaagtaaaaaaaaacagttcaggtatcagtctcagaaaaagataggatgttcagcatctgaaaattatcttctttccatttgatcttgttrtttgatacaaccttgaatacctttctgtgtctactccatatttttagcatttataaaaaaaatggaagctcttactttataaatagtgagctctctaaga

SEQ ID NO: 445252 - DNA, 201 bp, Homo sapiens
tctgcctggcatatcctcctctgctcctctacctggtgaacccactcaaaggcttcctttactgttattcttcatgtctgcaggcagtgttggcagctctstcaggtcagtattccaaccctattataatatttctatttgtttttacaaccgcaagacctaatataataaataggcatattctcggtgctcaataaatat

SEQ ID NO: 445253 - DNA, 201 bp, Homo sapiens
gcactgttccctctgcctggcatatcctcctctgctcctctacctggtgaacccactcaaaggcttcctttactgttattcttcatgtctgcaggcagtgwtggcagctctgtcaggtcagtattccaaccctattataatatttctatttgtttttacaaccgcaagacctaatataataaataggcatattctcggtgc

SEQ ID NO: 445254 - DNA, 201 bp, Homo sapiens
tgtgagtcagactgatcaggaacagaaatataacaatacctggaggaattcttgtgctgaaaactttgtgaagatgcaaaagttcttacaaatgagatcagcctgccccctgaagttgagtgtatacagtgtgttgctcttttctgccagaattttgttccagtggacttccctcaggctcttcccctgccctgactctcc

SEQ ID NO: 445255 - DNA, 201 bp, Homo sapiens
tggcttagggactacaaaaagagaaggtaattcctagggaaggaagaagagaaagaaatgaaaattagagaataagattattttgaatgacttcaggtagygaggagtgtgtgtttgtgagtgtgtatttgagagacttggctcatgcctgtgggtcttctcttctagtatcagtgaggggagggattactgaagaagaag

SEQ ID NO: 445256 - DNA, 201 bp, Homo sapiens
ggctgttggccaaggctgtagttactcaaacctcaagcagagctggagaattcacttccaagctcactcctgtggctactatcaggcctcagaagatccayatccaagctcactcataagtgctggcagtgagcatgctcacatagaagtgctcaattccttgccaagcaggcctctccgcagctatctgagtgtctttgt

SEQ ID NO: 445257 - DNA, 201 bp, Homo sapiens
tccccaatgttttctcctagtagtttcatagtcttaggtcttaggtttaagtctttcatccatttaaaaaatttttatttttaatttttgtgggtacatartaggtgtatatatttatgaggtacatgagatattttgattcaggcatacaatgcataataatcacatcagggttaatggggtatccatcacctcaagcat

SEQ ID NO: 445258 - DNA, 201 bp, Homo sapiens
tctttcatccatttaaaaaatttttatttttaatttttgtgggtacatagtaggtgtatatatttatgaggtacatgagatattttgattcaggcatacartgcataataatcacatcagggttaatggggtatccatcacctcaagcatttatcctttctttgcattacaaacatctagttatactcttttagttatttt

SEQ ID NO: 445259 - DNA, 201 bp, Homo sapiens
cttatttcacttaacataatgaaatctggttccatccatgttgttgcaaatgataggatctcattctttttatggctgaatagtactccattgcatctacrtatcacattttcttcatccatctatctgttgatgtacacttaggttgcttccaaatcttggctattgtgaatagtgctgtgataaacatgggagtgcaga

SEQ ID NO: 445260 - DNA, 201 bp, Homo sapiens
actgatctttctgtctccagtcttttctccttcaacatattcaccactttgcagcaaaaatggccttcaaaaaactcaaatccaattatgttatttccccrcatgaaaatgaatgaccagcctacctgccactctatttaaggggaaaagttgaatattaagatagtttcagtgtctgcacaatctagcagggcttcgctt

SEQ ID NO: 445261 - DNA, 201 bp, Homo sapiens
aatcttggctattgtgaatagtgctgtgataaacatgggagtgcagatatctctttgatatactgatttcttttctgttgaatatatacctagcagtgagrttgctggatcacatgatagctctattattagttttttgaggggactctaaactgttcttgatagtgattgtactaatttatattcttacctactgtatat

SEQ ID NO: 445262 - DNA, 201 bp, Homo sapiens
atctgacccatagtgagtgagtgaggtatttatatgtttggtctgaattgaataactgactgattagggtggggaactgggggtccatagtgaataccctyctatgagaaggaataaagttctcatacatttacctttcaaagaacaaattgtattttgccattgctactatctgggaccccaaagtagtacaaaccattg

SEQ ID NO: 445263 - DNA, 201 bp, Homo sapiens
tggaagatactcagattttaagcagttagactggagaattcttgttaagaacttggggcatcttggattaatttgtgtatatagtgaaagataagcacccmatttcattcttctgtgtgtggctagccagttatcccagcaccatttattgaataaggagtcccttctccattgcttgtttttgtcagccttgtcaaaaat

SEQ ID NO: 445264 - DNA, 201 bp, Homo sapiens
ttagccattcacatacacacctgggtgcaggccagatcttgactgcgggctacaaggggcctggtgactggcatccatgctctcacttcaaactcagcccytgttgaattcataaatttccctattaacttcaacctcaaactagagagcatcatattgtaaaactttctgttttatattgactgctaatatctattaatc

SEQ ID NO: 445265 - DNA, 201 bp, Homo sapiens
cagctttctctgctctaaccctgtatctagtttctgtgcatgagttggctgtacctgtgggaatatttgtgttacagcactggtgtcctcaacccgagcaycactgcgggctggacagacaccatctgagtcttcatagcacccaaggactactcaggtctctaagtgtcagtcttcagtgcaccaggagaggggtggagg

SEQ ID NO: 445266 - DNA, 201 bp, Homo sapiens
gggaagtggaatttttagagtgtcatgtgacgcatcattgtttgagaggataccgttgacatctctgctaactatctcttgttgattcaatccattagtgwattacttatttttaccataggcaagatgttggccttgatacaaatgaatgtggagaagtacaaggcaggttttgccagctgtcaacttataatacagttg

SEQ ID NO: 445267 - DNA, 201 bp, Homo sapiens
ttctgctacatctttactaagactaaatttgcaaaaaaaaaaaaaaaaaaaaagaccacattaagtgttggcaaaaatgtggagcaactggaactttcatrcactgttggtgggaatgtgaaatggtacaccagtttggaaaaaagtttggcagtttcattaagtggcaaattatgatatatccatgaaatggaacaccac

SEQ ID NO: 445268 - DNA, 201 bp, Homo sapiens
aggattacatgaaggaccagaacttataccatcagctctcttgcttccaaggccttcagacttgaactggaactgcaaaatcagctctcctgggcctggasttaacttagcctccataattgtgtaagccattctttattatacatttctgtctatcatcatcatcatcatcatcatcatcatcatcatcaccatctatat

SEQ ID NO: 445269 - DNA, 201 bp, Homo sapiens
gtaataggattgctgaattataggatagttctatttatagttttatgaagaacctccatgctgttctccattgtggctgtactagtttacattcccactarcagtatataagagttcctttttctcttcatcattgccagcatttttttttgtctttttagtaataaccatcccaactggggtaaaatgatatcttattgt

SEQ ID NO: 445270 - DNA, 201 bp, Homo sapiens
ttctataaacttcgttctctttccagatgactctttaagagcagaaaagaaggagcttttagaaataattcccaggctatagcaaaggaagtccagtgggrcctggaggtcacttagatcattattgctcttttcaacatatgttctctaatgttcttgagattagaagcgacccttgttgaagactttagaaagaaaaat

SEQ ID NO: 445271 - DNA, 201 bp, Homo sapiens
gtcttttggtccaggttctagaactggagaatactaccacttaatcagaccacttttttcaactctcaataaagttaacaaaacaataattaagatgtttrcttttgatattctagcttcccatcctctgcactaaagagggcctgtggacccaggagtttaagttgtgtgagaatctgcaaggagaatgcccaccacccc

SEQ ID NO: 445272 - DNA, 201 bp, Homo sapiens
tacctgatatctagctaaagtttttcttccttgcaagagacatgcttaaattaattttacattgtgcatgtaatatatgaaagtaaactctttgttaaaaygaatagtaaaatgttagatatagctaataattcttttgactttccagcactttgattttttcttatggggcatcaatgatgcacatctcagatctgagta

SEQ ID NO: 445273 - DNA, 201 bp, Homo sapiens
cagaagaaaacaacaatccagtaaccaaaagcattttaaaacctcagagaagattcttttcaagtttgtggtagagtttcaggatctgctatccagtgagygccacaaaggatgacctggaagttgaaatgcttggcttgggagcatattgagtgtgtctgtgcccagcaggcagattgaagggggatttcttaagcccaa

SEQ ID NO: 445274 - DNA, 201 bp, Homo sapiens
ttgatgcaggcatacaatgtgtggtgatcagttatttctttgtgttaagaacattgtattcttttagttatttaaaaatatccaataaattattagctataaaaaataaagattcacttctctttctagctccagttattattattattttttaatcgtctccatttctttctctccctttgcctaccagtccacctacac

SEQ ID NO: 445275 - DNA, 201 bp, Homo sapiens
ggcaggggctcaaacatcagaagaaagtaaaaacaggctccaaccacacctacccattttgacccacatcctcaatcatggagacaaccatggcagctcaktgccttatatccccccttcatccattagatttggatttcaggtaagatcccttgaaactttgattattaaactcttcctcgacaaaatttcagaagtcca

SEQ ID NO: 445276 - DNA, 201 bp, Homo sapiens
atcctcaggtgatctgtatgcatattaaggtttgaggagcactgcttcagaagactgttaccttagcatttagtaagataattgatgttcaaaatgatttwaaattgtctccaattcattaagtgaaaattcagttaagtacagcagagatacccaaccctcaggctatggagcagtactggtccgtagcctgttaggaac

SEQ ID NO: 445277 - DNA, 201 bp, Homo sapiens
aaaaaaaccaatgttctatttcaactttatcacttgtgcattgtgtgatagttgtttaacttcttttgtttcctctttatttatatgttgtcatataaatwatagccaacaattaaacttctctttgccacacttcagctgtttacaaatcagatataataatcattccttccctgtttctcagaaggcacatcttcaggg

SEQ ID NO: 445278 - DNA, 201 bp, Homo sapiens
aatggattcaaagaaggcaggaaaagaggaactaagaaatgaataattgttggaaacaacagaaaataaataccaagatggtagacttaaacccacctatrtcattaattacattatttaaattatctaaaaactccatgcaaaaggcagaaattgtcatataaaaagaaccagttacaaaactgtttatgaaaaacacac

SEQ ID NO: 445279 - DNA, 201 bp, Homo sapiens
tcaacgaaattatatttatgaactcggaagtttgaatttcatataattttcatattattcatgtttaaagtttttttaaccattcaaaaatgcaaaaactmttcttagctcacaggctgtacaaaaacaggcagtgggtcagatttggcttgtggacaatagtgtgctaatatctattctatatcatgtttccagtaaata

SEQ ID NO: 445280 - DNA, 201 bp, Homo sapiens
ttagtcttgaaaatatcttcccaaaaatctttcattgactaaaatcttacttgcccaaaaaaaattctatcattttagtctacatttactgaaataatacycttagtttttcttttcttctaatcttgagccaatagagcaaaagtgtaagaattttcttaaatataataaaatgtagagtcttttttattatttacataa

SEQ ID NO: 445281 - DNA, 201 bp, Homo sapiens
tttatataaaagccactcctatgataactgaactactcccatgataatggcattaatctgttcatgacagcagagtcctcatgacccaattgcctttgaarggctctgtctcttgcacagtgcaagcaaaattccaagacatgaacttttgtggactacatttaagctatagcatacccagttcatactaaaactcatcca

SEQ ID NO: 445282 - DNA, 201 bp, Homo sapiens
catagttctggagactaagaagtctaagagcatggtgctggcatctgctcaacatcgggtgaaagccttcttgctgcatcaaaacatggtaccagggtagyagggcaaaagagagcatgtgagacagagctcacttttatataaaagccactcctatgataactgaactactcccatgataatggcattaatctgttcatg

SEQ ID NO: 445283 - DNA, 201 bp, Homo sapiens
tccagggcccttcatgtgtggtttcctagggtgcatattgcttcctgccttatttgttatgtgcatgtctcatttctatccactggtaattcctccagagscaaatgcatgtctgattaacttttgtgattccaaaatatctagcacagtattagggactctcagttatgtttgtagaatagacaaaatagaaatttagac

SEQ ID NO: 445284 - DNA, 201 bp, Homo sapiens
gaacatttaaggcttccaaactgcctgagtcccatctgtgatcatgccacatctgaaagtttgtgtccattcctgctgccaacttattaatgatctagctrtttatgggtgttctatcctttgtttattccactagatttaatagcctgtaaatgcctgtaaatgccctgggcctgccctgagcaaggcaggtagtgtatg

SEQ ID NO: 445285 - DNA, 201 bp, Homo sapiens
cttgttttccccatgagtgtcatccttttaatgttcagtagagaaaaatcaccttccagagggtaagagatggctgtcatttgcaaaaagtatgactactstcatggcttctgaggaaatggaaaaagctaggatcagtgaggaaaggcatggacttaaagccagtcatgagcatgaagcacattcgtgatggagtgctag

SEQ ID NO: 445286 - DNA, 201 bp, Homo sapiens
gaatggcaacttagttaatggaaaacttttgaagtcaaacgaccctagattccaatcctgggtcagctgagtagtgtgagcctctgtattgggaactgggkcaacaaagctattttaaggagttgttaagagggatgcatgtgatagcatacataacgcattgagtgtcatgcctggcccgtaagagattcttactggtgt

SEQ ID NO: 445287 - DNA, 201 bp, Homo sapiens
ttcagcagtttcgtaaagtttcgtgttacatctcgccactagtctcctttaggtgactgggatctttcactgttgccccattaaattccattctttgtgcrgcatccagaaggatctttttaaaaaggtaagttggatcctgtcatttctcgtcttaagattttttcctccactgcactcagaataaaatctgaaccccct

SEQ ID NO: 445288 - DNA, 201 bp, Homo sapiens
tttttttgaagaagtcattccttcctgctggaatactgtttttatcctctatttgatacacttattaagattcatcttaagtattccttccacttctatcyccatcccagtcctacctctgtgctttcatatcatatttatttacattgttgtaatgattttaggatgtttgggagcaaagtctactgggactattcagga

SEQ ID NO: 445289 - DNA, 201 bp, Homo sapiens
tacagggttctttctattgtgtctcttctgctaaaaatatctcaggaactccccattgttttcacatttaagccagactcctttgcaggtagtaaataagyctttgtctttcagccttctgtctcttcaaatctctttgtgcacactctactccaggcataaaaagccttttccaacatagttttctaaaaaatgcttggg

SEQ ID NO: 445290 - DNA, 201 bp, Homo sapiens
ctcagttaaaggcagacagctgaagcgagcatgctgtccgaggagtcatgactgtaaccactttcttcaaagagcatcatccatccacatgcaccacaaarggctctcatacatgccatctcaacatgaatgagggatggaggcttattaccacaattttatggatgactatttcagagagacaacaagatactccctgtg

SEQ ID NO: 445291 - DNA, 201 bp, Homo sapiens
actatctcttgttgattcaatccattagtgtattacttatttttaccataggcaagatgttggccttgatacaaatgaatgtggagaagtacaaggcaggwtttgccagctgtcaacttataatacagttgaagatataggcctatatatgttaaaatgataataatattagccaggaataataatatggaatatttatta

SEQ ID NO: 445292 - DNA, 201 bp, Homo sapiens
gttccattgaacagatcaagcttttttctgccctcagggcttttatgtgctgttccatcttcttggaatcctcctttccttaatattcccatggtgggctstctcttgtcattcaaatacctacttagatgttaccacctgggaggcctttcctaatccctcaaattaaatctatcaattactgttacatcaactaattta

SEQ ID NO: 445293 - DNA, 201 bp, Homo sapiens
gccaagtcgacatgcccggcttgttttgccttttgtatctgaggagcttcctttatttcttcctattttcttaataattcaggcctgtacatccagacctrtgctactggtactaaaagaaagactggctctgttcttgaggcatctagctaccaagaaggtgcattttcctgttaattactcaagtgattttagctatac

SEQ ID NO: 445294 - DNA, 201 bp, Homo sapiens
tcaggcattttcctccattccatcaagattattcttattcagtgtttacatctctatcgagctcctagtgtatattaagcattgaggaagagatcacagtraatacgttggcctctggagtccaaataccttgctgctaatcttgctttgttagttgtatattaatgggcaagatattcacaatattcactagactagttt

SEQ ID NO: 445295 - DNA, 201 bp, Homo sapiens
cccatggtgggctctctcttgtcattcaaatacctacttagatgttaccacctgggaggcctttcctaatccctcaaattaaatctatcaattactgttayatcaactaatttaaatttcctgtttaacacttagtacttcagataatttgtctttcacgttcatgtgtttgtctgtttttcccctatttggaatatcagc

SEQ ID NO: 445296 - DNA, 201 bp, Homo sapiens
actagacctaggtctcttagttcctggtcgaaagctcttatccactgcctccaagttttcatttaatttatctggtgtctataactgaattttattttaaygctattcttttaaaaagagtcttaaaaaaggtgttattttcattatttaaaaaatacatttttgcattgtaatttatccttccctataagaaaaactcaa

SEQ ID NO: 445297 - DNA, 201 bp, Homo sapiens
agtccaaataccttgctgctaatcttgctttgttagttgtatattaatgggcaagatattcacaatattcactagactagttttaacatcagtaaaactgrgagaattaaaatatatacctcctaagagtaatgagagtgccaataaaacactgagtgcaatatttggcacttggaaagtcttcaataactgttagcaaat

SEQ ID NO: 445298 - DNA, 201 bp, Homo sapiens
cctttcctaatccctcaaattaaatctatcaattactgttacatcaactaatttaaatttcctgtttaacacttagtacttcagataatttgtctttcacrttcatgtgtttgtctgtttttcccctatttggaatatcagctacatgagataggggcccttgtctattctgttaaccactatattcccaaggcctagaat

SEQ ID NO: 445299 - DNA, 201 bp, Homo sapiens
cataagctacatgggtgcagacagttcacagaaaggttgatttagctaggtttgggattttgccaagggagtacaatgaaatagagaaagcaagggcaggagggttcagaatgtatgcaagggagtgatctgatgatgaaaaattattatgtctgtgtctcagaaatccttgtgtcctgtagacccatttgccaaattcag

SEQ ID NO: 445300 - DNA, 201 bp, Homo sapiens
gtgcttatcagctttgtcccagccttttccaagtggcgtctcttctaatcgtggctggggctgatttctaatctggggaccactgctttgggtcagtggattttttttttaaaagttttaggttgaaagagagcaaaagctggccccatgctttagttccaagtccccagtggcttctcgggtcaaatagcacatcctcag

SEQ ID NO: 445301 - DNA, 201 bp, Homo sapiens
tgatttcctttgctttgcataaatgcccagtaataggattgctgaattataggatagttctatttatagttttatgaagaacctccatgctgttctccatwgtggctgtactagtttacattcccactaacagtatataagagttcctttttctcttcatcattgccagcatttttttttgtctttttagtaataaccatc

SEQ ID NO: 445302 - DNA, 201 bp, Homo sapiens
tatccccagtacacaactggtgcctttgttcaaattatgaaaaggcttacctgacctagggtacagggctggtgggaggtggcagaacaggatctcagctyccacccaatgtcttgatggctacttttgtattggacaccatttgtacaagtagttcatggtatccctgtgtgtggggagtcctcttgatatgagttaaca

SEQ ID NO: 445303 - DNA, 201 bp, Homo sapiens
atgtgataggtgtgacaacagaatacataggttatattttagaagcacttgggtgaatcattcaaaccagactaggaagaaggggagagaaggctttctgraaaatgtaagatgtaagggtgtagtggcgggcatctgtaatcccagctactctggaggctggggcaggagaatcgcttgaacccaggagacagaggttgc

SEQ ID NO: 445304 - DNA, 201 bp, Homo sapiens
ggtaacatggaggaaaatgaggaagatggtaaaagtcacacagagtatggtaaatatccttgcagttcaattcaatatggcctcaataccttccatgtgcyagacatgacattagaatctaattttgcaaaatagagtaagacataatcctgctctttatcagccaactcttctcacaagtcacatgaacaggtaacttca

SEQ ID NO: 445305 - DNA, 201 bp, Homo sapiens
catgtggtatcaaaaatcgagaatacaatttggaatcaagggacatggttaaattttggagtccttgctacttaactaggtttgcaagttacgcaagtcaygttcggaaactcagaagtcttgtctgtaaactagggatgattgcagtaataccttgcattatcagtattttcagattattttgtgaatcaaatgaaataa

SEQ ID NO: 445306 - DNA, 201 bp, Homo sapiens
ggagagaaggctttctgaaaaatgtaagatgtaagggtgtagtggcgggcatctgtaatcccagctactctggaggctggggcaggagaatcgcttgaacmcaggagacagaggttgcagtgagccgagatcacaccattgcactccagcctgggggacaagagtgagacttcatctcaacaaacaaacaaacaaatcatt

SEQ ID NO: 445307 - DNA, 201 bp, Homo sapiens
aagtgcagtagtagtagtgtgcacagggaataaatgagcacagaagagctacactcggccctccctgtagggctgcgggagactcctggagactacagagwctgagaatgagttgaataggtgaggaggtggggctggtggaagtgaaggaggcagggaggggagagagcatgacctttagacctaacagcaataccaaag

SEQ ID NO: 445308 - DNA, 201 bp, Homo sapiens
gattgctgaattataggatagttctatttatagttttatgaagaacctccatgctgttctccattgtggctgtactagtttacattcccactaacagtatrtaagagttcctttttctcttcatcattgccagcatttttttttgtctttttagtaataaccatcccaactggggtaaaatgatatcttattgtgattttg

SEQ ID NO: 445309 - DNA, 201 bp, Homo sapiens
atagcattaggagaaacacctaatgtagatgatgggtcgatgggcgcagcaaaccaccatggcacgtgtgtacctatgtaacaaacctgcacgttctgcayatgtatcccagaacttaaagtataatttaaaaaaaaagaagaaaagaaaattgtgtttggatttggtttttagattttggtaaccttaagcagaagctaa

SEQ ID NO: 445310 - DNA, 201 bp, Homo sapiens
cagatgacagcgggtaagagtgaatggaaagtgaaaatgtggagatgaactctttcaagaactttggctgagaaaggaataagggaactgaaagctaaggrtaaaggcagtatttctttaaaaatgggggagaccacagaacattttcatatggaaagagccaggagaatataaaagttttgagattcaagagtaagggag

SEQ ID NO: 445311 - DNA, 201 bp, Homo sapiens
gtagtactaccaccaatatgattactaagggttacatttttaaattttctgtctgcatttgtctctactttttgtgatttttgtttcaaaaatttcaaatraactttattttctagaggtattttacattaatagcaaaattgagcacaaggcacagagatttcctgtatactccctttccccacttatgtgccaattctc

SEQ ID NO: 445312 - DNA, 201 bp, Homo sapiens
caatttgtttaatcagggacagtccttggggcaaagtcttagaagttggctcaggtcagaattttggctgcacagagaggggacaagaagaaggtcatccytttgtagcattaccagttttgtcttactctagacaaggaacaaagtgggaataagaaaagttacatttctattcttcctccttgtccaactctgcctctt

SEQ ID NO: 445313 - DNA, 201 bp, Homo sapiens
actaatttgtagaatatatttatgaaaatgttcccctcctctgagctgttctaacactaaataaaactcttcttcttcacccttaaaaaaatgttttttayactcctatagagctctctcttctagttaattctattcttttcttccagtcttggccagttgtctttaggtctgctgcacagttgtcatcctgggacttct

SEQ ID NO: 445314 - DNA, 201 bp, Homo sapiens
gagtgtaagcaaaaggagaaaggatagaggatgatggagatgtttgtagcctagaagtagcaagttaagggaagtgttgtcatgtagcttctgttttctcrttaagctaggaagcaaatctgttaaggttgagtggaatttggcttggtagatggtttaggaagacagtgaagattttcactcgtgaaggaaatggagaaa

SEQ ID NO: 445315 - DNA, 201 bp, Homo sapiens
cagctatctgcttattatgctcaacgctttacccttcatcctaagcagcttgtctaggtatgttagtccataaagacagttgtcccccaagagacaattaygatgtcagttgttatagtaataaaatcagtcttccactctctgccctactcaaatcactgcagtttcctgcaagggtgcccagtgctgttctctctctct

SEQ ID NO: 445316 - DNA, 201 bp, Homo sapiens
aggagaatgaacatttttttgtgtggtacatagtttcattatataataatttaattatatgacaaatgaggttgcaaaactgatcctattcatggcacctygcacagtgctgccaaatgccctgagttaacctgacattgtcaagaatgaatcctggaaacccagaacccacagatcctggaatgccaaatgaagtttgtc

SEQ ID NO: 445317 - DNA, 201 bp, Homo sapiens
ttgttcttggtgagctattgagtaggctgatgagttctagcatctttttgtgaagtctgcacatgtctgaggtataactgctgctatatctgataccagcmttttcccactttccctacctccactttctcctcccaatttcccaagaagtctgttctctaatctggcatggaaagaactattcccttggatggtagctaa

SEQ ID NO: 445318 - DNA, 201 bp, Homo sapiens
agcatttatctgtgaagtttaaagtgcctatactcacaattggtgcatttgcttgtgtagttcatcacttcagaaggtgtgatacattaggatataatgtratacattaggatacattaggatataattacaaagaagttaaacaggaatgtcaaaaagatgttcaggatttctttcagtaccttaggatagtggctccta

SEQ ID NO: 445319 - DNA, 201 bp, Homo sapiens
acaatgtaccaggaactgtgttaggtgctgaaaatgcagattaaatcaagacactctctgtacagtggatttgataaatagatgaagaatagcatttgtgwgcagaaacctaagaggggctggctggggagagtaagaggcagtaaagggtgtgagatcaagggtgaccattataaagtggacaaaatgcaatagacaggg

SEQ ID NO: 445320 - DNA, 201 bp, Homo sapiens
cattcaacaagtaagtgctcattgagcctaataagttaactcagccatgaacaagacacaaatttatccctgccttggtggacttgatgggttaaaatctycatctcttgtgccaccttttttgtctccacagatgataactgcactgacaacttcactcctaaccaagtggcccgaatgcattgctatttggacctagtc

SEQ ID NO: 445321 - DNA, 201 bp, Homo sapiens
tccctaatatttaccctctccagtgctctttaatcctttctacatttctatgcttccactatttttgtttagcttgaggaaattcacttttattatttctyttaatgtgggcctgctggcaatgagttctttcagtttttgtgtggctaaaatattttcatttggcattcattttcaaatgatatctttggtacaaaattc

SEQ ID NO: 445322 - DNA, 201 bp, Homo sapiens
agaatgcttttcctgcatttattgctctctgcatttttaaagtaaaatgaatttaaattccctaatatttaccctctccagtgctctttaatcctttctayatttctatgcttccactatttttgtttagcttgaggaaattcacttttattatttctcttaatgtgggcctgctggcaatgagttctttcagtttttgtg

SEQ ID NO: 445323 - DNA, 201 bp, Homo sapiens
tataaattaatactctcacaattttataatgaataagataccttagaatgcttttcctgcatttattgctctctgcatttttaaagtaaaatgaatttaarttccctaatatttaccctctccagtgctctttaatcctttctacatttctatgcttccactatttttgtttagcttgaggaaattcacttttattatttc

SEQ ID NO: 445324 - DNA, 201 bp, Homo sapiens
gcagtggcacagtctcagctcactgcaacctccatttcccgggttcaagcaattctcctgcctcagcctcccaagtagctgggactacatatgcctgccaycacacctggctaatttttgtgtttttagtagagatggggcttcaccaggttggccaggctggtctcaaactcctgacctcaggtgatctgcccacctcag

SEQ ID NO: 445325 - DNA, 201 bp, Homo sapiens
tagcctggtagtgtgaaaccacaaaataactatgcaagttgaaacctgcaaccttaataatcaatgggaaaaattacaattgcttcgtgatatctaaaagrttttttttttttgcaacattaaatgctctcttatttttagttataagtatgtagaaaatggaaaaaactagtgaaactaatatttagttcactggaattt

SEQ ID NO: 445326 - DNA, 201 bp, Homo sapiens
cctctgcctctcgggttcaagcgattctcctgcctcagcctcccaagtagctggaattacaggtgcccgccattatgcccggctaatttttgtatttttartagagatggggtttcaccacattagtcaggctggtctcaaactcctgacctcaggtgatcctcctgcctcagcctcccaaagtgctgggataacaggcat

SEQ ID NO: 445327 - DNA, 201 bp, Homo sapiens
cgttgattctggcaggaattggggcagtaataagactagcagacccctgggatggcttggcctaccatgagttagccctaaaatgcttgactcaaaccctrcaatcattagccaccaacacagattaggcattaaagggaattcaaaaattcctagactcttgggcaaatataatacttgataacaaactagtgctggatt

SEQ ID NO: 445328 - DNA, 201 bp, Homo sapiens
gtcagacggagtcttgctctgtcgcccaggctggggtgcagtggcacagtctcagctcactgcaacctccatttcccgggttcaagcaattctcctgcctyagcctcccaagtagctgggactacatatgcctgccaccacacctggctaatttttgtgtttttagtagagatggggcttcaccaggttggccaggctggt

SEQ ID NO: 445329 - DNA, 201 bp, Homo sapiens
ccttacccctgtggggatcactgtctataaccccttaagacccaggaataccagaaataaatgagcaataacgttgattctggcaggaattggggcagtawtaagactagcagacccctgggatggcttggcctaccatgagttagccctaaaatgcttgactcaaaccctacaatcattagccaccaacacagattaggc

SEQ ID NO: 445330 - DNA, 201 bp, Homo sapiens
aaggtgaaatgggtgaacatacattggccacccttacccctgtggggatcactgtctataaccccttaagacccaggaataccagaaataaatgagcaatracgttgattctggcaggaattggggcagtaataagactagcagacccctgggatggcttggcctaccatgagttagccctaaaatgcttgactcaaaccc

SEQ ID NO: 445331 - DNA, 201 bp, Homo sapiens
atgacacaaaaacaaaagtttcccttcaatgctctaatctaactctagttgccaagttcccaaggtcgcagcaaggtaaatgggattccacttgtgttcgraaaatctgtttataggccttctcctgaatcaaaacacacaggggaaaagcaactgcctaactggggaaggtggaagcacagcccccttctaaagaacaag

SEQ ID NO: 445332 - DNA, 201 bp, Homo sapiens
ttacacttatttccaggtattttattgcttctgtagctattctaaatgaaattcctttcttgatttcttttttagattgatcgctgttagcatataaaaawgttactgattttggtatgttgattttgtatcctgcacctttactgaatttatcagttataagagtttttttttaaatttttgtttattttttgggggggt

SEQ ID NO: 445333 - DNA, 201 bp, Homo sapiens
actcttcttcttcacccttaaaaaaatgttttttacactcctatagagctctctcttctagttaattctattcttttcttccagtcttggccagttgtctktaggtctgctgcacagttgtcatcctgggacttctcttcaatgcgtttttttgggggggttagagctactgtgtcctgaattacatgaatatctcttaat

SEQ ID NO: 445334 - DNA, 201 bp, Homo sapiens
actgaacttactctttttctcttttctctcctacgttctctttgttagtttgttctacttttttttttttttttgagatttctttgagtctatctttcaaygcttttatttacttttatattttagcaatcatactttaaaaaccttcttattctttgattatttttaatataatcttaaaaaattttaagataagcattt

SEQ ID NO: 445335 - DNA, 201 bp, Homo sapiens
cagattcatcagatttttgaaaaaattctggtgcttgaactctacaaaaatgtatttttaaacaaatttcagaggtgattgtgatccttgaaaaacattgkacatctctggtctaataagtaacacatttctggcacataaagacctaggtttattcatttataaaataaataattattgagtgttgtttttaagaaccta

SEQ ID NO: 445336 - DNA, 201 bp, Homo sapiens
cagctctcttatacttattttgtgtgtaggtcttttctgccttccctatcctattttttgtgttgaatctttattattaaaaatattaattttttatgackcttggcaaaagcaatattttgaaaaatcattatttatcaagcttctatgatgtgtcaggcatggtaaggtaagcagagggacacacgtaaagactatgga

SEQ ID NO: 445337 - DNA, 201 bp, Homo sapiens
ttgcttttcttattctatgttttgcatgggtactattggtagacaacactggctcttgattcaattgtttgtggcctttctgtattacgaacatgttgatyttctcttctctctgcctactcttttgcttcttttcttatttcatgttctaatctcacctttttgtaaaactcatttttcctttttttcccctgactgcca

SEQ ID NO: 445338 - DNA, 201 bp, Homo sapiens
agacttgcccaaaggcccacagctaaataatagaactaccatttgaatacaggtgtgtctggcccaaatgttggtttctttcccttaggaggcatagtggycccaaacactgaatgagaagtaatttgtccattcaagtggacttttagatatgcaatcattcacaattctgtcttttgttgtttcatctgattgatttga

SEQ ID NO: 445339 - DNA, 201 bp, Homo sapiens
ggaggagatatgaattacagatacattacccagccagttgaacagacttaccaagataaaggaacttggaactaggcagggctacataagccagatgtctrtttctacatagtagctgccctgagagatgatctgcgagagttaagggaaggaagggtgttgagtgtccacttcagtaaaatcacaaatgtcattgactat

SEQ ID NO: 445340 - DNA, 201 bp, Homo sapiens
ccctggtttcagccctaacctatcttctctcaggtctacagtccatgatttcttccacataccttttccttctccaagcaaggctacttcatgcttccccyaccatgtgtgtctactttgccatgccttctccctggaatgccctttcctccaacctaccttatcaagacgctgccatccttcaaatcctcgtgaagcctt

SEQ ID NO: 445341 - DNA, 201 bp, Homo sapiens
atatttcattggttgatttaagcgctgagattttaaagcacacacacacacacacacacacacacacacacacacacacacacacagacaaagcacctttytggcaacagggccatcgtgctgtcctcctatgccggggccttcgacatggctctggagtgatgccgtgtggcagctttgagacggaatagtctgtctacc

SEQ ID NO: 445342 - DNA, 201 bp, Homo sapiens
aatttctgaagcctgtgatgggctaacatctctatgtgttggcaactcattgtctcttctttgcctcattccctgaggtttcactggggagttcgagggcrgaggactcttatacatagcaaggcttgcccatggcacactcccctctaaagaagtcctcaagagggtggctgggaattgtcctgagggatatggcagaga

SEQ ID NO: 445343 - DNA, 201 bp, Homo sapiens
ttcatgttcccagaattttcttttcattttaagtcccagtgaaagataacattctagttctctagctagtgcccaagccacccttccttctataggaatgkctctgaaaggtatggataagtattttgccttaaagagtacataaatgaggaaggcatgattattagttgtctatgacttattttaatttaaataacaata

SEQ ID NO: 445344 - DNA, 201 bp, Homo sapiens
cttagttactctctaggtccttactaaccatcaacccctgccctccccacacaaaggtctttctaattttcttatcccaactcatctgatggactctcctmatctcccatctccatccctttatctccccagggcctcaggcagcttgtgtggcgcttgcactgaagatgggacctttcgtcagtatgtgcacacagcttc

SEQ ID NO: 445345 - DNA, 201 bp, Homo sapiens
ctacagtccatgatttcttccacataccttttccttctccaagcaaggctacttcatgcttcccccaccatgtgtgtctactttgccatgccttctccctrgaatgccctttcctccaacctaccttatcaagacgctgccatccttcaaatcctcgtgaagccttccttgatccttcccttttatgattccctgcagtta

SEQ ID NO: 445346 - DNA, 201 bp, Homo sapiens
gtgttggcaactcattgtctcttctttgcctcattccctgaggtttcactggggagttcgagggcggaggactcttatacatagcaaggcttgcccatggyacactcccctctaaagaagtcctcaagagggtggctgggaattgtcctgagggatatggcagagagtggagtctgcaggtatacaatagaaagggtgtat

SEQ ID NO: 445347 - DNA, 201 bp, Homo sapiens
aagacctcactgaatccaaaattaacaataacaaggaacagctaccacttattctacccatcttataagtaggcatatgctaagtgctttatatagcatgscattttatcttcacatcaaccaggagagttaattattactttatgctacagatgagaaaattgaggtgcaaaggggttaaataatgtgtccagggtcaca

SEQ ID NO: 445348 - DNA, 201 bp, Homo sapiens
agagaacacttggtaactattgtccatttttaggtcttgttaaatcaaaaataaagcaatccatcttcagtaagtttgtagaaatatattcatctcatgcaaaaaaaaaaaatctgtagaactcttcttttccccttaaattatgtggtagaaagaagctgagactaagaaacagcaacatccaccaaatagctctgtggt

SEQ ID NO: 445349 - DNA, 201 bp, Homo sapiens
ctgagggatatggcagagagtggagtctgcaggtatacaatagaaagggtgtatcttgggacaggaaggtagaggcacatggcatcaaagggaacaggtgragaagttgatgctgcacagacctggatgctttggattagctgtgctttgctcacccacactcggaggctgttgagccaaaggcatggtcaggctgggccc

SEQ ID NO: 445350 - DNA, 201 bp, Homo sapiens
gtaggcatatgctaagtgctttatatagcatgccattttatcttcacatcaaccaggagagttaattattactttatgctacagatgagaaaattgaggtrcaaaggggttaaataatgtgtccagggtcacatagctagtaaaaaatggcagagctggactgtaaattcatgtctgtctgaattcagaccaatgctctaa

SEQ ID NO: 445351 - DNA, 201 bp, Homo sapiens
tttaacatttaactcttatgaaaaagtatctcccttgcttgacatatacagttcttttggctctcaaatgagataatgtttgtgagggcatttgtagacamtaaaatgctacacacatatgggattatcatcattgtcatccccgtgtgagaagtcttctgaagcaagccaaggctgagccgaggcatagccatactgcag

SEQ ID NO: 445352 - DNA, 201 bp, Homo sapiens
ataagtttacctacaaatagaaatgtctcctgtttattttcctataagccagtttctccacagttccaataggcaccgtattatggagcaaatgaaatccmcagtttctctgttcacctggcttgtggactttcctcctcaggtgagtggggggctggggagtggtgactgtttttctccttttcatagtttatttctagc

SEQ ID NO: 445353 - DNA, 201 bp, Homo sapiens
cttgtcatttacattaggtatgtctcctaatgctatccctcccacatccccccaccccatgacaggccccagtgtgtgatgttccccatcatgtgtccaastgttctcattgttcaattcccacctttgagtgagaacatgcggtgtttggttttctgtatgtcttttaattgtagaattgagttgtttatattcagttat

SEQ ID NO: 445354 - DNA, 201 bp, Homo sapiens
tcccaataagcccaaggcagtaaatccaccagctcagtatcctcagcccatattgcccttcatgttacttcagcacttttgtttgcatcatattctcttgrcataaggatttgctttcaattatccactattctgtgctgcttatgttttctgaggtgccactaagactttctttaaaaactcttatctaaataattccat

SEQ ID NO: 445355 - DNA, 201 bp, Homo sapiens
aatcttaggccccactctggacttctgaatcagaaactgtgggggtgaggtccagcaatcagttttaccaggcctttcagaggactctgatgtacttgcaggtgcaggattcgctggtctagagtgtggggaaaatagtagcagaagaatgacagttttgagggacttgaagaatacatcaacactaaggttgcttctctg

SEQ ID NO: 445356 - DNA, 201 bp, Homo sapiens
ggagggaatcatcttacttaggactgctaactacaagaaagccaatatcaacatgagctgtggctagtctgaatggagtatatgagaggtgtgtgcttgagagaagcaatgcggtttatctctgagagtagcaagagttccagattcagagcagctttctcatgggtatccatttctaatggagactcctaaaactttgtg

SEQ ID NO: 445357 - DNA, 201 bp, Homo sapiens
ccagtttctccacagttccaataggcaccgtattatggagcaaatgaaatccccagtttctctgttcacctggcttgtggactttcctcctcaggtgagtsgggggctggggagtggtgactgtttttctccttttcatagtttatttctagccaaatagacagacttgtgagtgagccatgtagtctgtctgggttaaaa

SEQ ID NO: 445358 - DNA, 201 bp, Homo sapiens
tgaatccaaccattcagccagacctactatatttctctctctttctctctctccctctctctctcctttgagaccctgaaaagctttaaggaagactctcrcctcaactctgcttattcaccttctcaatatagtaatccagagtgttacaaaccttgttttgacctcatgatttctcaccttctcttcctaccatttcat

SEQ ID NO: 445359 - DNA, 201 bp, Homo sapiens
ttacttcagtgactggatataaatgaaatcttgttggtaggtcttcccctaaccaggccctctttcccttgatgtcagagttgtagagtgggtagtgggcrggacatgtagttagggtggccgtcaggggtttttctgaggttccatcagagcaccagcctctggaggaagctcctgatctattattaatttcaactccaa

SEQ ID NO: 445360 - DNA, 201 bp, Homo sapiens
gttttgtttcatattggatatgtttgcttagagattctttaaaatgtatctattaatctgttgcttttctttattttccactaggttgctgcctccttttmaacactaaatggcaccttaagtccagatttaccttggttctagtaaacaatcagagtgtgccctgtaccatattggagaggtcctaaaggggatatacca

SEQ ID NO: 445361 - DNA, 201 bp, Homo sapiens
tcaactctgcttattcaccttctcaatatagtaatccagagtgttacaaaccttgttttgacctcatgatttctcaccttctcttcctaccatttcattcygttcatacacactctcaagtgtcaggattacctcttccaaatctcccctttctcctttcccattcacttccccaacagttgggatggaccccaggaccat

SEQ ID NO: 445362 - DNA, 201 bp, Homo sapiens
tgcagtcaggaagcctcagcatgcaaggtaaaatacactaacttgatttgtaacattgactgtccttgttgtattccccacatttatagcacatcaatctkaaagcatagaaagttagaaaagaattatattcacaagcttggatttgaagttttagcctgtagaagagaaatacacagggaagtgtccgaggataagagc

SEQ ID NO: 445363 - DNA, 201 bp, Homo sapiens
ttatatttgttcttggttttctctctggagaggagtgggagtgaagccagcttgcttctacaccaccattttaaatgaagatgtcacttcttagtcacttwgtctgttactttaagcaggagttacaactggatttgggaaaaggtgagcatggaagtatatgtttagaacaccatccaaccaatcctcctatgtctccct

SEQ ID NO: 445364 - DNA, 201 bp, Homo sapiens
ccaggctctagaaccacatcagaatcatgccaaggtctgtgccttgatccactcttccaattcagatttcttcctgaagtcaaaccaagttagattttcckctgaacaaggtctcatgattgcttttagagaggagggggagaaatggaacgtataacctttctccgtttcttttttgtttctctcagttttcttcagtct

SEQ ID NO: 445365 - DNA, 201 bp, Homo sapiens
cgcctcctctgaaccacattcatggagctccttattgtggagatgggaaggtgtcagagtgagtattttgtgtgtgtgtgtgtgtgtgtgtgtgtgtgtgwgagagagagagagagagagagagagggagggagagagagcagggacactgttctctaaacagaagtttcaggagtttgacttgttttggaaatgtaggga

SEQ ID NO: 445366 - DNA, 201 bp, Homo sapiens
gagtgaaacggagattcaagtttaataggtgctaagtaaagtcttttatttcccttctggataatcccctcaccaaaccctttcatccagttcaaatgccygggtgctggtgcagttaggcagacgagaatcattctgacagcagagcttaaatgactcaggagtcgctccaatttcctcatctggctgccaggatttgta

SEQ ID NO: 445367 - DNA, 201 bp, Homo sapiens
agtgccaggcagcctatttgggataaaccttgacccacagctgagaaaaacaggagtgaagttgtgggctgggtgtggtggctcacgcctgtaatcccagmactttgggaggctgagacgggtggaacacctgaggtcaggagttcgagaccagcctgaccaacatggtgaaaccccgtctctactagaaatacaaaaaat

SEQ ID NO: 445368 - DNA, 201 bp, Homo sapiens
gacaccatgttggcactattaatcctgtttgctctctcaattaacctaatccaatgtgggtggaagtaaaactttataataaatatttcaaaaattatagygtcagggaatcatctttgtgattactaaatttgtcatcaacatttccagaatagcaaattccaccttctggcctatccagaaaaatctcatggccatctc

SEQ ID NO: 445369 - DNA, 201 bp, Homo sapiens
agaaaaaaggtgatgagttaaatatcagttttggagaaaattgttctctctggtttaggagccctcccagatggagctgcaaagtcattgctcctccttaytggttctcaaccagtcctaagatggttctatttctcttatcccagctgtatccatcggccctgtgggaagcaggacagctgtccgtcattgctgcttgat

SEQ ID NO: 445370 - DNA, 201 bp, Homo sapiens
ctaagcttaagaccctctcccagaaacatcatcaggaccctcatggatctcctagatgtttctgagccatgagctacttaacttcaggaattcccacaacycactggacatgccaaccaccaatcattgcttaaattgtatctactttatatatccatatgtttgtttctattttctgtaaaagcattcttctagctccta

SEQ ID NO: 445371 - DNA, 201 bp, Homo sapiens
gactttgctctctataacatgaacaatcgtaacttagcaaatttttattgtgtcaactacagcaagtcatgcgttgaatataaagtgggtaagagtcagtyttcctcttcagagtgtccataatctagttggaacattgagcatttaagagacactcagatactaattaccttgtgaataaaaggataaataagttaattc

SEQ ID NO: 445372 - DNA, 201 bp, Homo sapiens
tattttgaatattttgggttaggtaaaatatattattaaaactaattttaccagtttctttttactttttaaatgactactagaaaaattaaaaatgtggytttcattacagttctgttgggccgcatggcacaagatgatacatagcatgcttatattgattgtttagattatcttcaaaatgaaaatataaagttgccg

SEQ ID NO: 445373 - DNA, 201 bp, Homo sapiens
tagccatgaatttataatcagtaacacatgatttaattgtttttttctctttagctgtattcaaagtttcttcagaaaaggggatatgttttatgcttttsatctaccttgtggcttctttttgataatttgagtttaatatagtaaaacataatgatgaagcagtggggccaatgtctccttctggagtcagtcttggcc

SEQ ID NO: 445374 - DNA, 201 bp, Homo sapiens
agtgtatttattataaggtattattattttttcatgtctttgaagaacttgaagaaatactgacatattaaggtactttgttcactgaattctcctctacyagatattttaaaatatacttctatcctcgatagtaaaaaaggcacagagccaaaagccctcttgtgatccccttgacttctagaatgtggttattcttat

SEQ ID NO: 445375 - DNA, 201 bp, Homo sapiens
aaattagccggacatggtggcgcatgcctctaatcccagctactcgggaggctgaggcagcagaatcgcttgaacccgggaggtggaggttgcagtgagcsaagatcatgccactgcactccagcctggcaacaagtgaaactctgtttcaaaaaaaaaaaaaaagaaaagaaaaaaagaaaagaaacttaacagctagag

SEQ ID NO: 445376 - DNA, 201 bp, Homo sapiens
aataccaagtcccaggaaatcctggacagttgatcaccctacatcaacctaactttaatgctcatctatttgttacttatataaagctgctgggatgaggmggctggaagccagacactgtgatttgtcttagattttgcatcctaataagatgggttatttttattttcccagaccaggtgaaaatatatcgtatattga

SEQ ID NO: 445377 - DNA, 201 bp, Homo sapiens
cgtgtgagtttggtagcatgactatggggcttcctgaggctctgggggtgggttttgttacttttcccccactttttaatattcagccatgcccttagtcrgaggaatgtttagactttcagaggggattttaccgtaaagtggcatatctgaggtaaagaaaagcacttcccagaaaggggcaagcaggtgtctgattgc

SEQ ID NO: 445378 - DNA, 201 bp, Homo sapiens
taattttaaaaaaatggcatcttcctggccctcggaaaaacttgtcatctggtctttcttgccttaattcagcttctgtattattcttcgctgtctctcaygccttccttgtttcttgtgaaaagtaatagtgactggtttcctataatggactcaaagttatccctaaaattaaagacttatttgatgacctagtacaat

SEQ ID NO: 445379 - DNA, 201 bp, Homo sapiens
tgtgtattcatgtgcgtttgtgtatagaaagagatagactgttgttcaaaaaccatttaagtgactcaatggaacaggcataatttttcagctgaggaaactgagactcaagggcacaaatttactttatttgggattagcaaaagtaagactggaatccaagtaacttgtttctgggaaggaaagcttctattatataaa

SEQ ID NO: 445380 - DNA, 201 bp, Homo sapiens
gtgtagtgtgtgtgtttgcatgtgtgtattcatgtgcgtttgtgtatagaaagagatagactgttgttcaaaaaccatttaagtgactcaatggaacaggmataatttttcagctgaggaaactgagactcaagggcacaaatttactttatttgggattagcaaaagtaagactggaatccaagtaacttgtttctggga

SEQ ID NO: 445381 - DNA, 201 bp, Homo sapiens
caaagctttcagattttgccatgtccaactactccaagattttattccaaaagtttatcccatgatcctcaaacctctaggattctttaggactcagtagsattttacctttaggacatatatctcccaatatataacggcttttgccactggttccacaccccaccctacctcactaagacctctatacttcctaacctg

SEQ ID NO: 445382 - DNA, 201 bp, Homo sapiens
tttcccagtctacctggttgagaatgtggtgtcaaccttttatgcaattgtgcttctttcatttttcccttgtattccaaacagtttttgatttatataawttgatattagatagttaagtatataattttttgtgagccttttatctttattaggatcatacatcttgccaatccttttacccctttaaatgcctgtggc

SEQ ID NO: 445383 - DNA, 201 bp, Homo sapiens
gataaatgagataaatgagttattataggcagtgagctcagtctaatgtcttgtacataattgtgcattataaatcttatctatttcattatccatcacaraagtattgttgttgccacatgttacttcactccctgtatcttcatgcatgttgaaacccattcccgggactcatcctgtgacttatttctctaagccagt

SEQ ID NO: 445384 - DNA, 201 bp, Homo sapiens
aaacttctgcctatgttttcttctctgtgtaactagcacttccatccaatgggaaggtatgcaactccaaatctggcttagccaaatgcaccacattacaygtaaaacaagaagaatccataccaatcatttgatcacttggataacacttgtcaataggactaccaaaacaagcacgatgcagggccctgaaattataaa

SEQ ID NO: 445385 - DNA, 201 bp, Homo sapiens
ctgtcttttatgttgtctgggatcttgcctacatcatacatctaggttttggcatcatacacctattaagaggataaaatgaatacaagatatggaaacayggtactaacaatggctgaaaatatgattcatctccgtttatcttcaggaacctatggactgtcatgccagcataatccactgattatcaatgtgacccat

SEQ ID NO: 445386 - DNA, 201 bp, Homo sapiens
ggtgtcaaatgtagataagctgattataatcagccttctctttcaggctctgcagaggtacacatttgcctttttagagggtctgctgggttacacaggcygtggtttgaggtcctacacagaagatgtactaccacacatggaccagtgatgcatgagaggccacacaagtagacgcgcagtcggcattcctctgatcat

SEQ ID NO: 445387 - DNA, 201 bp, Homo sapiens
aatttatcacaaacatgctattttgtttattttgcttaatattcattttctccactagaaagtaaattctacgagggaaggggtttttatacgtttgggcractctcatactataacacctacaacagcaaaaggaacagactaagtattcaataaataattgttaaaaaaaggaatgttcttattctagtacagtggttg

SEQ ID NO: 445388 - DNA, 201 bp, Homo sapiens
cccaagtaggagagaatcataggcaaaagtttctttaaagtggcagttgattaacatggaaggggaaatatgatagatatataaggaccctcctccctcayttatattctattaaatcctatcctcaactcttgccctgctctccgctccaccccctgccaactactcagtcccacccaacttgtaaaccaataccaaaat

SEQ ID NO: 445389 - DNA, 201 bp, Homo sapiens
ctgcagaaactggatttattgtaaaattacatatgggctgaaagtggagctagagagttgcagagactgtggcattcaggaactccatctctctcaaaggktacatatttctctaaatcttagttcattctcaccattcatgtctgttagcaatctgctagattactcatagtttctgctcccttatagctttagtttaaa

SEQ ID NO: 445390 - DNA, 201 bp, Homo sapiens
gatggataattttctgttcttttcttacttgaattgccaggaacatttagaatgatcttctcccttggctttggagatgccaattctgctggatttcttcrtacctcttcattactgtttctcagacctctttggcagtttttttcttctgcctatttttttaaaaatttactattcctgttcactctgccgattatttct

SEQ ID NO: 445391 - DNA, 201 bp, Homo sapiens
gctccatgaacagaactgaacaagaaaaaaaaaaagtagaagttacagcctttctagacatgaggaacaagaattccccttacaatcatagctgtgaagtytcaacaaagaagttgattaattgtaattactgccgctagttcttcacttcttctcatgtggcactgtgggaaaaacaagtttcatatgcatgcatgcaaa

SEQ ID NO: 445392 - DNA, 201 bp, Homo sapiens
aagagttttccctaggttttcttgtagtattcttatagtttcaaatcttacattgaagtcgttaatccatcctgagttgatttttgtatatgatgatagayaggggtccaatttcattcttctgcatatggcaatccaactttctaagcaacatttatttaaaagattatcatgtccccggtgtatgttcttgttggtttt

SEQ ID NO: 445393 - DNA, 201 bp, Homo sapiens
caaagtgctgggataacaggcatgagccactgcgcccagccttaatcgaacctcttaagaaagtttgtgtcttctagattacaacaattccttccttcttttttttttttttttttttgttttttgagatggagtcttgctctgtcacccaggctggagtgcagtggcacaatcttggctcactggaaactccgcttccca

SEQ ID NO: 445394 - DNA, 201 bp, Homo sapiens
aaccacctcttcttgaaaagccttttaaaagatgggctgcagttcgagtggaaatcacatcaaagggaatttttcaaggatgaggagaatttgtgattatmtttgtttgtggcaggttggatttggattctctaggaaatacatattctgagatggaatttggtatacaggccatttactaaggagtggtctagggatcac

SEQ ID NO: 445395 - DNA, 201 bp, Homo sapiens
tatctggctctgatgacaggatgcatggctagtgcttagtacagaaatgtaggagttgttccataaatgccagttgttatattaacacttgatttggaaayactgatggcctatcttagagtcagctctgatctagaattccaggtgttagctcaggttctaaatgctgagtggtactctgtgtcattcctcaaatacttt

SEQ ID NO: 445396 - DNA, 201 bp, Homo sapiens
aacctccacctcccaggttcaagtgattcttctgcctcagcctcccgagtggctgggactacagatgtgcggcaccatgcctggctaatttttgtattttyagtagagatggggtttcaccatattgaccaggctggtcttgaaattctgaccttgtgatctgcctgccttagcctcccaaagtgctgggattacagtcat

SEQ ID NO: 445397 - DNA, 201 bp, Homo sapiens
tgtttgcatcatctacaattttatacatcagtatttcatagtcttctgtgtacagacctttcacttatgtggctaagtgtatttctaggcttttattttcrtagctattgtcattgggattgccttcttaatttgtttttcagtttgatcattattgatgtatagaaacactactgatttgggtatgataattttgtatcc

SEQ ID NO: 445398 - DNA, 201 bp, Homo sapiens
gtctgttttaacagatatatatgttttatttttatttttattatttttatatttatttttattgatacctaacattttatgtattgattgggtgcatgtgrtattttgttacatgtatagaacgtgtaatgattaagtcagggttttcgaggtatccatcactttgagtatttatcattgctatgtgttgagaacaattca

SEQ ID NO: 445399 - DNA, 201 bp, Homo sapiens
gtctatgcctagtttgctcatggtttttatcatgaagtgatgttgacttttttcaaatgctttttctgcatccattgtgatatcgaacagacaacctgcasaatgagagaaaatatttgttaactattcatctgacagggaactaacatccagactctataagaaattcaaacaactcaaaaataaaagaaaccccaaata

SEQ ID NO: 445400 - DNA, 201 bp, Homo sapiens
ttcttgttttcattgtgatttctttttttactcctgagttatttataagtgtgctgtttaacttgaaaacatatgtggatttggggtaacttttttttttwaaaaaaaaaaacatagctagagtcttctgtggtcaaaagtatattctatatttcaattctttgaaatttgttgagccttgaattatggatcagtctatgg

SEQ ID NO: 445401 - DNA, 201 bp, Homo sapiens
tcctaagtgcaagaaaaaggccactttatgtcctcaatgtcgttttctagaagggttaaaataattttattccagcacaattttacagaagaggaatcaasagagtagcgcttttctggaggtcggggaggaagggagtcagaatccaagcactagtggcagacacaaactgaagaaaggacacatctttctctgagaccg

SEQ ID NO: 445402 - DNA, 201 bp, Homo sapiens
ctttttctgcatccattgtgatatcgaacagacaacctgcagaatgagagaaaatatttgttaactattcatctgacagggaactaacatccagactctayaagaaattcaaacaactcaaaaataaaagaaaccccaaataatcacattaaaatgggcaaaggaaataaataggcatttttcagaagatatataaatggc

SEQ ID NO: 445403 - DNA, 201 bp, Homo sapiens
aataaaataaaattgcacatttatatgtgaatttacacatgaaacatttgtcctgggaaaattggactcagtagcaataattattgcaaaagagaatgcaygacagttgaagctgtaattgatgtctcatgtgaacaaaagctaagaattggtttggatgaaaattgattttagtgaaataaacatacaaatagaaaataa

SEQ ID NO: 445404 - DNA, 201 bp, Homo sapiens
agagagtagcgcttttctggaggtcggggaggaagggagtcagaatccaagcactagtggcagacacaaactgaagaaaggacacatctttctctgagacyggaaggaaggagtggagggtggatgcagatttatgagttgttggcatgcaggcagagattagaaaaagtttttcctggtagccttgatcttcttgatgaa

SEQ ID NO: 445405 - DNA, 201 bp, Homo sapiens
tatcgaacagacaacctgcagaatgagagaaaatatttgttaactattcatctgacagggaactaacatccagactctataagaaattcaaacaactcaamaataaaagaaaccccaaataatcacattaaaatgggcaaaggaaataaataggcatttttcagaagatatataaatggccaacaagcggattaaaaaatg

SEQ ID NO: 445406 - DNA, 201 bp, Homo sapiens
ctctgcttacccctcctcttgcagtagcaacataaagaccggggatcaattccctggctgaaaaaaaatgagagaaagatccaataggagtctatgtgggwggctctaaggggctgctgctttgggttactagaggccaaacctggggaaacttgacccctgtcctgtccctcctgtgtcctgtctgatgctctgcacaga

SEQ ID NO: 445407 - DNA, 201 bp, Homo sapiens
atgtactcattatttttgttatgaagttgccttttgaagagattccaggtacaaaggcaatcctaattgaagtataaaccctgcagagcctttgtttgtckgatgagcggggaagaacccagcatcactgttaagctctcccccagccaaagggctccacgagctagttccaagcctcaaaatcttacagaaaacacttac

SEQ ID NO: 445408 - DNA, 201 bp, Homo sapiens
aggtcctatctcaagttccacttccaatagcattaggcaccccagttttattgaatgcaacagttgtttatatgactattggaatctttgaagcgcagccrcattttaggatgatacttctccaaatacaaaagttgcttgcttttaaaagctccactccgcttttgtcctatgaattgtactgcatcttcatgtttcatt

SEQ ID NO: 445409 - DNA, 201 bp, Homo sapiens
atgctggagatgaactctaaatggaaaacaaggcagataatacttcattgcttccctctcctaggtttgctgatattgctctgctgtagaatccccttaawctacagagtctagttatatctgaaacagccaaactccaaagagcagtttataggacctgctgccactggtaggcagcaaaaaacaaaactacacccaaag

SEQ ID NO: 445410 - DNA, 201 bp, Homo sapiens
ggaatgtagatctctggcatattgctttcaccatactgctcccccgaggtgttgggaaacttaacctgtccatgacatactttgatctatttggatggaawgtagcttttaaaacatgaccattaacactgctaataatttataatggtaattgtattctggaaaaaaaatgaatatctgacatacggagcaccaaacagt

SEQ ID NO: 445411 - DNA, 201 bp, Homo sapiens
gctgtgaatgccattatttcattcttttatatggctgagtggtattccatggcgcatatatatatatatatatcacattttctttatccactcattggctkatgaacatttaggctggttccatatttttgcaattgcaaattgtgctgctataaacatgtgtgtgcaagtgtatttttcatataatgacttgtctttttt

SEQ ID NO: 445412 - DNA, 201 bp, Homo sapiens
gaaaatcaaatattgaaaacacagttggaataatgtctctgaatcagtcaagacatagttgcaaaaaacagaaaccactgtagctattttaaccaaaaggrgattaaatacaggaattgagttgcctccaaaatctttgtaagggctagagtagtagaattgaggttgaacatctagaactatctctcagaataagattat

SEQ ID NO: 445413 - DNA, 201 bp, Homo sapiens
ggaagagggtgaaatccagatttgcatttccttctgagtgttatgtgattctgagttatagaacacatatgaccaacatatatgccctgggcatttttgcygggatgtggaacctgggaggccagtgttcgatactgccttcccatccaattgacaaatggctggcaaaccagccagacaggtgaagacagtgcgtagcca

SEQ ID NO: 445414 - DNA, 201 bp, Homo sapiens
tatggtcatcaagtaacacattcatgatactacaatactactgcaggaaattgagtaaagggaccagtagtgacttaaagtaactcagtaaactcataataaaacaattcattgattttggtgccttatcttagggaagggagtatggtgtattgaagaaaccactggattgggaggtagatgtctgagtccatttaggct

SEQ ID NO: 445415 - DNA, 201 bp, Homo sapiens
tctgaagacccacattgctcatggctggatgcgggaacactattgcccagacattgcaggcagagtaagtgaaggcagtgagaaggaaggcggtcatctcmcagtcaccttttaactctaacatgaagaacacaactgatcgtagactgtaaatctcatccaaatccctgggtgcaaaggagctggagaaatgtaaaattt

SEQ ID NO: 445416 - DNA, 201 bp, Homo sapiens
cattgtggcattgcctccattctgttgctccttttaagcaaagtatacctgctccttagacataagccatgattagccccctgccaagtctgaaagatcayacttgctttcctacattatgacttttgaactttgtttctggctaagtagagatttgaagccataggtattgttattcataataaaatttattgaatgttt

SEQ ID NO: 445417 - DNA, 201 bp, Homo sapiens
cccaaaggatacttggatcaatgggctacccgggcttactcctctcatgaagacaagaagaagtgtcctgtttccttggtaactggagaacctcattcccyagtaagttaagccagatgaatagagtcgagcctgcgcaaaattgtaaagtgactccccctatgcttacacttggggtctatgtttggataattaaaagaa

SEQ ID NO: 445418 - DNA, 201 bp, Homo sapiens
ccaaatagtaaatactttagcctttgccggtctgcaagctacctatgatctctcttgcattttcttcttctgtttttttttttttaaatgctttaaaaatktaaaaaccattctttgttcacaggccatataaaactaaccataggctgaatttggcttataccatcatagtttgcagattcctggtctagagtataccag

SEQ ID NO: 445419 - DNA, 201 bp, Homo sapiens
gcttaatgaggtcctatatgggaatgaattattgcaaagaaaatgaaattcctgtaattggaaaaattgctgcaaaggccaaatgaacatcggccaagctrctgtggaaggattcttgtgctaggcaagaggttggactgagtgagtaatgtccaatcatttttgattctctttctataattctaatgataaaatttcaag

SEQ ID NO: 445420 - DNA, 201 bp, Homo sapiens
ttcatgccttgtaagtcttctcagatctccatactcatcatctcattcagcactcttagaggatcatccccattccacttcattcagaacacagcaaaaamtaaaggaacattccctcactgtaatgacaccaaccctcaaaactctgcattctttcttccatttcatcctccccctttattgcattagcgtgtattcctc

SEQ ID NO: 445421 - DNA, 201 bp, Homo sapiens
atgttgcatttgttggaaacagagaatagcacttgccttgtgggaggtcagcttcagcttccccatctgaactttgagaagctgctttcacattaggaagrctctatgtaacaaggatgggttctggggcaaggaagagagtcttgtcacctcagctgtttgttgaatcaggggcagtggatgcctcatttattcagttga

SEQ ID NO: 445422 - DNA, 201 bp, Homo sapiens
tattgctctgtgcaacagtctccaagaagtctctatgcctccccagctcctggggcacccgaaagggcagcgctggataagtctcagtaacacagagcagycctggggagagggccgctccatggcttttgggcaggctgacctggaatgagctggcaggcctgattccagtcctgagggacaggtacccacatcaggaaa

SEQ ID NO: 445423 - DNA, 201 bp, Homo sapiens
tcttttgcttaaatatatcttccctgacctttctaccatgagaatgaaaatcaaatattgaaaacacagttggaataatgtctctgaatcagtcaagacakagttgcaaaaaacagaaaccactgtagctattttaaccaaaaggggattaaatacaggaattgagttgcctccaaaatctttgtaagggctagagtagta

SEQ ID NO: 445424 - DNA, 201 bp, Homo sapiens
tttctttttactttttttctaatattaatttaccttgcttttctctaactggcaactaagtgagaaaatcctacctagcatattgggtgacgcagaggtgmtatgactgcaggaaaagaacaaatagttacctggctgaatgagaaactcttcccctaatagagttgatcatgaattttctatgatttctagtctattcca

SEQ ID NO: 445425 - DNA, 201 bp, Homo sapiens
caaaaaataaataaacaatctttgggatcgccctttctcaggtgctttttgccagcacatcctacacttggatgaaatagatggcatcaacaatcaggagkcagagcaagctagaggggaagggtcatgctgtcctaacatgagcttctagggtggtagatttcaatgtctgcagcttgtctactagaatagcatcaacaa

SEQ ID NO: 445426 - DNA, 201 bp, Homo sapiens
tgtctgcagcttgtctactagaatagcatcaacaaagcataatcagtaaaggaaatttccaacctatgttgccaggctgtctgcccagctgacgctgtgawaggaacattcctatctctggaatggcagaccacggccactgtggggagcatctagtaagtctaagggaccattgagctctggtttggttgttccttctta

SEQ ID NO: 445427 - DNA, 201 bp, Homo sapiens
gcatgcacggtttttattttctggaaaaaaaatgcatttaaagaatagagccatactaaaagaggagagggaaacaggttattctttcttcattccctggktcctttaacttggttctgtctcagtcttgtttctcactctgttatgatgactacccagtttatgaccctttgagcttattctactgatcatgaacccttt

SEQ ID NO: 445428 - DNA, 201 bp, Homo sapiens
aacactgtaagaaaatatctccaacttgatgcacactcccatcaccaagaataacctttctggtgtatgtctgtggaggtcctgatagcaaggtttacccwgcagtggcttccatgaggcccaggtctatcaataggaactgaatctatttggttaaaagaccttaaaaattatcttcctggccattatggagacaaatca

SEQ ID NO: 445429 - DNA, 201 bp, Homo sapiens
gtctgaacttaatcaaccccttgatttgtattaattgatatgaacttgtgatttttctcctttgattcataattatgttaaatagccttggtagatttttytttttagttgtcaaatcatttttgccttcgtgaagcaagactacatacttattgtatattttaaacgtattgttggattttattgggtaatcttttattt

SEQ ID NO: 445430 - DNA, 201 bp, Homo sapiens
ttaaaaccagccaattttagatttgaaattttagaacaagccttaagtcattttttctgcctcttgaaaaacatacttgtacatatggtctgaacttaatyaaccccttgatttgtattaattgatatgaacttgtgatttttctcctttgattcataattatgttaaatagccttggtagatttttttttttagttgtca

SEQ ID NO: 445431 - DNA, 201 bp, Homo sapiens
gttgcagtgagccgagattgcgccactgcactccagcctgggtgacagagtgagactccatctcaaaaaataaataaataaaaaacattaaaaaataaataaaataaaataaaataaaatatgctggcctagacatacaaaattacttttatgacccactaaaggggctcaacccattatttgaaaaacattgctataagg

SEQ ID NO: 445432 - DNA, 201 bp, Homo sapiens
gtgagataattaggctggattggttcaccaagaattcattgtcttgactctaataagcatttattgagtgtgactattacaagggcctggtctaggaccttgtaggggtagaggttgaggccaaagacaaataaaatgtgattcctgttccccaaaagggtttagagtcaagtaggggtcagatatgtgtaaataacacaa

SEQ ID NO: 445433 - DNA, 201 bp, Homo sapiens
tgagataattaggctggattggttcaccaagaattcattgtcttgactctaataagcatttattgagtgtgactattacaagggcctggtctaggaccttgtaggggtagaggttgaggccaaagacaaataaaatgtgattcctgttccccaaaagggtttagagtcaagtaggggtcagatatgtgtaaataacacaag

SEQ ID NO: 445434 - DNA, 201 bp, Homo sapiens
gtggctgagtaaaaaacaacaacatgtctcagaggagagctttctaatggttttcctgtggtccattgcccctggggtgcttccatcacagcgagtcaccrtggtgatgccacagtttgagccttcctctgaaccttttgcaatagtgacactgatatcatttataaaattaatgcaccctggttcagtggcatagttgct

SEQ ID NO: 445435 - DNA, 201 bp, Homo sapiens
gctgagttgcagagatagagactggagttcacacaattagaaaaaattagattggaggttacacaattagaaaaaactattctaaaattcatatggaacarcaacaacaacaacaaaaagcctgaatagcctttttacagggacagagtgagactctgtctcaaaaaaaaccaaaaaaacaaaaacaaaacaccaaggtga

SEQ ID NO: 445436 - DNA, 201 bp, Homo sapiens
acaaacctgcacatgtaccaacatatctaaagtaaaagttgaaatttaaaaaaaattatataaaaagcagaaaagctaccagaataaaaaagtaaaaatcrgaagaaaaacaaactaaaaacccctaaaaaccttggggcatttggtcaagacctcagagaagtcatgccttcatagtggggctaaactatccttatagta

SEQ ID NO: 445437 - DNA, 201 bp, Homo sapiens
caaatcatacattgttgaatgtctacccctagttcgggtgggattatagtggttcccccttcatttcaaaaaattatgagttgatctcacccttctgaaacacacacacacacacacacacacacacacaaactcatgatgtgtttgtagcctttcttatactatgaaggaataactcaggaaatcagctgggttttagcc

SEQ ID NO: 445438 - DNA, 201 bp, Homo sapiens
atgatcataagtgtcctgaggcttcctcagccatgtggaactgtgaatcaattagaccttttttttaaaaataaattactcagtctcaggtagttctttayagcagtgtgaaaacggactaatacaatggcttttggaaaaatttcaagcagtctgacatatatatatgttagatgaaatataatatgtataattagagtt

SEQ ID NO: 445439 - DNA, 201 bp, Homo sapiens
atctgcaaaaaaggaaaattgatttctgagtttcctttttcaaattaatagtctagacatttcaaatcacatttcttctataattatatactttcttaatmaagaactaatagtaaataatttaggctttgcagaccttacaatttctgtcacaactacttcatattattgttgtagtatgaaagcagtcacaaacaatat

SEQ ID NO: 445440 - DNA, 201 bp, Homo sapiens
caataagcatgtacaaatatgttcaataaaattattcatcgggaaaagcaattaaaaccacaatgagattctgctacatctttactaagactaaatttgcaaaaaaaaaaaaaaaaaaaaagaccacattaagtgttggcaaaaatgtggagcaactggaactttcatacactgttggtgggaatgtgaaatggtacacca

SEQ ID NO: 445441 - DNA, 201 bp, Homo sapiens
cagttgatggcaacaattttttttttttggcataagcaactactgtgaggaacctgctctgtcagtgaggagttgatcaggttcaatggcctgtctgttayagtaactgcctctagtgaacacaccacccacaaatgccaggaaacattgctctttctttaaaaagtaataataaagaacacttcatatgaattatagagt

SEQ ID NO: 445442 - DNA, 201 bp, Homo sapiens
tgacatattcccagcttccagggactaggacacggacatccttgagggcattatactgactaccttaaaatattatgacactagactttaagtcctttcartctctgattatttcttttatttcaacctcaagttcttacaacacaaatatttctagagaaaattccattttgcttctagtaatattcatttccacatgaa

SEQ ID NO: 445443 - DNA, 201 bp, Homo sapiens
tagttcagtttagtgttgaataatttcataaatcatattcatgtactggtccctctgttctttccaagaatgtggctttgatgaataaacaacagttatarcatgtttgtttctatctcatgtacatccaaaattataaaatctcaatgttgcacaaactcaagagtttcaccaagtatattgtattggcttggacttcat

SEQ ID NO: 445444 - DNA, 201 bp, Homo sapiens
actgtgaggaacctgctctgtcagtgaggagttgatcaggttcaatggcctgtctgttatagtaactgcctctagtgaacacaccacccacaaatgccagraaacattgctctttctttaaaaagtaataataaagaacacttcatatgaattatagagtgtctttggccagagtttttattaatatttattattatttga

SEQ ID NO: 445445 - DNA, 201 bp, Homo sapiens
ggcttcttgtatggtgtggactcctgagaaaaatcccaggaaattcaaaaggtggggcttgcctgctcaccggggaaaagagtggataccttaacacaaartgcaactactgaacacttaagaaagacaatcctattcacaatagcaaagacttggaatcaacccaaatgtccaacaatgatagactggattaagaaagtg

SEQ ID NO: 445446 - DNA, 201 bp, Homo sapiens
tgaggatccgagcattagagtatatgcttgtgtagaacttgggaggcaggccaacctggcaacagattccatctctgacgcttatcagggctgtggtcttyagcgatccattgagcttttctatgccttcatttcctcaaatggaaaaaggagaaaaatatatgtatacaaaatatcattccatttaaataaaaatgaaaa

SEQ ID NO: 445447 - DNA, 201 bp, Homo sapiens
agaattagacctgaattgggagttgttgcttgcagagatcatgaaatatcagctatctgtagtttgtctccatttcatagtgcttctgagacactggggtkatttcaggcaacatttacactgagtttcctgaggaaagagaagtgtaccagtttatctttgtactgccagaaatgaaagaaatgatatgagtcctgattt

SEQ ID NO: 445448 - DNA, 201 bp, Homo sapiens
tgtgtttcattctagccttcctggtagcaatgggtggactagaaagtcatattcctgttcctgtagtccatttaatagtgagtatgggtgttttgagttaygctaatcaaaagcaacagtagcagaggggatatataacactgtaagaaaatatctccaacttgatgcacactcccatcaccaagaataacctttctggtg

SEQ ID NO: 445449 - DNA, 201 bp, Homo sapiens
gaggatccgagcattagagtatatgcttgtgtagaacttgggaggcaggccaacctggcaacagattccatctctgacgcttatcagggctgtggtcttcrgcgatccattgagcttttctatgccttcatttcctcaaatggaaaaaggagaaaaatatatgtatacaaaatatcattccatttaaataaaaatgaaaaa

SEQ ID NO: 445450 - DNA, 201 bp, Homo sapiens
attctagagataaagaacaaactagtgatttccagggtttaagaatgaggaagcactacatggttggaggttgagaaaagtatagatgtatgtgtgacatraaggatagcaggtgggacatgttaatagtgatagaacagttcagtatcttgactgtggtggtgattacacaaatgtatatatgtgataaattgcatacaa

SEQ ID NO: 445451 - DNA, 201 bp, Homo sapiens
cttttgtggctggcttctttcacttgaggcttatccatgttgcagcatgtattggcacttcattcctttttattgttaagtaatatcccatgcatatactrcattttgtgtatccagtcttcaattactggatattttggttgtttccactttttggctgttatgaacattgtgcacaagtggatatttttctatttcttt

SEQ ID NO: 445452 - DNA, 201 bp, Homo sapiens
cttctcgggtcaaatagcacatcctcagaatgtgaaggagccattgattctgggacccagggtttgtcttctctagcttttacagatagtaggtgatagcytgtgatatgcctctttgagtgggattcatgccttaaatcaagaagaacacaggaagggaagtgtttgttacttggtacaacaagaacccatatgggagaa

SEQ ID NO: 445453 - DNA, 201 bp, Homo sapiens
gcctgggaaatatgacgaaaccccatctctacaaaacatacaaaaattagccgggtgtagtggcatgcacctgcggtcccagctactcaggaggctgaggyggggggatcacctgagcctggtgaggtcgagtctgcagtgagccatgactgtgccgctgcactccagcctgggggacagaatgagaacctgtctcaataa

SEQ ID NO: 445454 - DNA, 201 bp, Homo sapiens
aatgaaggtatagttgagtaaatgtatcaaatttaaatggtttcaagaaatgcttaaattgtctcatgaatcactgacttataatggaattgcaaaagaarcaagggatatttatattttattcttaatcctttgagaaataactgtactaccctacaacatgattattaatgtgcttttcagaagtaaaaaactagactg

SEQ ID NO: 445455 - DNA, 201 bp, Homo sapiens
gtttaaagcctttttaaaaaaattataaaataaaacacaaatatagaaaaccaaacaaaacaagtgtagagcttaatggattgttataaggcaagcactckgttaaccatcaaccagataaacaaacagaacttggtcagcagaatcagaagccctccatgtattttgtcccagttgcaatttctgcctccctccccatga

SEQ ID NO: 445456 - DNA, 201 bp, Homo sapiens
tggtgaggtcgagtctgcagtgagccatgactgtgccgctgcactccagcctgggggacagaatgagaacctgtctcaataaaataaaatgggcttctgcracatcactggtgagtatggtttggccactgttagcatctgagaatacttcagtggtcttggagaaatctgccattgttgcacaatgaggagagacatctg

SEQ ID NO: 445457 - DNA, 201 bp, Homo sapiens
ccatagccattcctaggaatatctatgtctcctagttgtggtcagtacgagtaggtactcagaattgcctgctgaattaatgctgcaaagttgtgtgtggkgggggggagtaggatttataggaatgaacttagagtttaggatataaaaaatgtgtaaaccaagctggtggagacctatgtttgcagcattcagtgggaa

SEQ ID NO: 445458 - DNA, 201 bp, Homo sapiens
ttcagtcacaaaatagttaagagactgtgttcacctattggtctgaaaatgcattgccttttctgggtgtcagttttttttctatatgagcataaaaaacrtataagacctcactgaatccaaaattaacaataacaaggaacagctaccacttattctacccatcttataagtaggcatatgctaagtgctttatatagc

SEQ ID NO: 445459 - DNA, 201 bp, Homo sapiens
ggacctgggcttttgtttcctcatatgtaaaatggggataataagcatgaggaagaatgtccggcatacagcaagagttcaataaatatgagcttttgtascagtagtagaagctccaaatatggtgtatctgtggttgcccttcctggttgtgccttcagcctcacaccacatctccaatatataaaatttttcagtgcc

SEQ ID NO: 445460 - DNA, 201 bp, Homo sapiens
atgcttgattcttttattcaattgttttcaaggtattgaatgtttcctgttaccctccaaagattaatttttatctaattattatgaactcgtgtatccaygtgttcctatatgtattcaacatatttggtgggtttcaagccattgtaatcattatctttatatagctcaatttgtcccatctttggccaatgagagctt

SEQ ID NO: 445461 - DNA, 201 bp, Homo sapiens
ataaaatgggcttctgcgacatcactggtgagtatggtttggccactgttagcatctgagaatacttcagtggtcttggagaaatctgccattgttgcacaatgaggagagacatctgggctctgatgctgacgcctctgaaatagcagggagtccttcctagttgaagtgggttctctcaccaagctccctcttctggct

SEQ ID NO: 445462 - DNA, 201 bp, Homo sapiens
tacagcaagagttcaataaatatgagcttttgtaccagtagtagaagctccaaatatggtgtatctgtggttgcccttcctggttgtgccttcagcctcayaccacatctccaatatataaaatttttcagtgccctggaaagatcttggctcttttaaaagggaaagaaatgtgtttttaggaatgcatctgcttgcaat

SEQ ID NO: 445463 - DNA, 201 bp, Homo sapiens
ttcttgaaggtatcctcagatgggccttttcttccctgaaccttcacctttggcctgaagtgtattacttgctattacctgcaacctggctgaaccctcartgataggcatacaggaaacactcaggtgcttagaagtcacaatgcatcagattctgatgcagcagcaccttcagaaagaaaaagagaagagaaaccgagg

SEQ ID NO: 445464 - DNA, 201 bp, Homo sapiens
atttctgtgcaacttgttttattgtaatgggacagtgtcagggatggagtctgagtgggccaggtcagtagcaggagagtataaagaatctgtctggcackcctgcctagactcaagaactctggcccactaatacaattgctctagattgccaaaatgcaaagctagcactttggaccttcacttcaagaagccttttca

SEQ ID NO: 445465 - DNA, 201 bp, Homo sapiens
atcttttctatttatttgcttcttctaggttgtctttttctcattctcatagaactttcgttttgtgcacattattcccgtgggcgggaggaagaggagtktatatgcctagagaaaggtaaatcttgctacctgaagacgaagccactgggggccaagaaactctgcttccgttccaagtctctccagcgtttgcacctt

SEQ ID NO: 445466 - DNA, 201 bp, Homo sapiens
ggtcaggccccaccttccttttttttttttgtaatgaatgaaggttaggtgggagccaatgaaggttacaggcaaatgaacgtgtactgccagactgcacrtagaataataatattgacaagtggtctaatatatattttgagtttctttgttctgggaaataagctaaatgcttatttatttgccttactactttaatct

SEQ ID NO: 445467 - DNA, 201 bp, Homo sapiens
ccattaaaatctaccaccccacttcctctcaggatcatagtctcattgcatatcctttcttgtgaccttgctgcatgctcatactttcctttgaaggctcmagaattgggggatatgaggcttaaattgtaaaaccaggactttcaaacagttactcatgatcaacaataaaacatgcattttttattgtgatccattatt

SEQ ID NO: 445468 - DNA, 201 bp, Homo sapiens
cttgttgcatgtatatcaatgtgatataacttagcatgaaattatttgtagtgagattttgattccacagattccacataaccactattctcaactaactmtaatattttagttattctgcttcttaggagatagagttatgtgattacaagataaattcaaaagaagaatccagtagaaacaaaacctgcccattaactt

SEQ ID NO: 445469 - DNA, 201 bp, Homo sapiens
taaaacatgcattttttattgtgatccattattacacacatgcacacctaaaataagtttcatgcaacactacttactctaaatacatgtgatatactccrttctctaaactatactatttagtttaattaaaagttatggttgggtgcagtggctcacgcctgtaatcccagcactttgggaggccgaggtgggcagatc

SEQ ID NO: 445470 - DNA, 201 bp, Homo sapiens
gagattttgattccacagattccacataaccactattctcaactaactataatattttagttattctgcttcttaggagatagagttatgtgattacaagwtaaattcaaaagaagaatccagtagaaacaaaacctgcccattaacttatgggttcagcccaatcctttttaccttctctggccacatactcagggtatg

SEQ ID NO: 445471 - DNA, 201 bp, Homo sapiens
gcatattctcatggtgattgtgacattctcaattttgtggtagttcagttgaacctatcttttgtctgactagttgttgagagtagggattattaaatcaraagcagtctacacagctgtcatttcctttaatgtgccaaacactgaaaaacaaacaaacaaattttagtgttatcatccccactttacagacaacaaaac

SEQ ID NO: 445472 - DNA, 201 bp, Homo sapiens
tgaactgaaagggaaatttcaatgtatggttttaaagttcgtctaaccatcagttgaaaggattgccagggtgggatcttagggaatgaaagaagttttgkgaaaagccctacaaagattgcagtgacagagtgaaatcactggtcttcagaagcattaatttatcataagttatgaatggactaatcacatgtaattctc

SEQ ID NO: 445473 - DNA, 201 bp, Homo sapiens
agtctccaagaagtctctatgcctccccagctcctggggcacccgaaagggcagcgctggataagtctcagtaacacagagcagccctggggagagggccrctccatggcttttgggcaggctgacctggaatgagctggcaggcctgattccagtcctgagggacaggtacccacatcaggaaaccaccatcctaactgg

SEQ ID NO: 445474 - DNA, 201 bp, Homo sapiens
ctcagcaagcaactgctggacagtgattcagggaaggaatttatgcagaagaaggttactcatcaaatgatgctgaaagaggatctcttttgaacaaatgrcctattctgctaacgaggtgtgtgatctgaggaaattcagtatagctttcggatcttcagtttctcatgcaacccttagtagaactgataacaatataat

SEQ ID NO: 445475 - DNA, 201 bp, Homo sapiens
taaacactaaaatgttcccagccctcgataatatgtggaagccattgaggtcacctcaaccttgctcacgtgctgtcccttgctacctaactcagcctgcmaccttccctccttcacttcaaatcagatttctcccttggatgcttcacattgcagaggacaagtccacttgacactgttgttgttttctctgttttggtt

SEQ ID NO: 445476 - DNA, 201 bp, Homo sapiens
ttcatcctagtgaggcatactttaaacaatagattagagctatttatgatgttctgggtctgaaaacactttaacattccaaatcctttatctactgagtwaaaatatatgtccattttgagcatgaaaaaagtcaaggagaaaaaaatggtagtcctcatccattttgcaatagccaaatattggttctttcataggagc

SEQ ID NO: 445477 - DNA, 201 bp, Homo sapiens
caacacttttccaattctgattaaagctaccatcaacaggtttcttagatgcagattattttccattgtcatctgcatagattgcaatgatttggtagagsataaccacacattgaagtttttaaaatagcagtgcatttaaaaatattttaatgtcatgaaatcttaagataaagtcgaatgtgattacaattatgtata

SEQ ID NO: 445478 - DNA, 201 bp, Homo sapiens
tgaagaatgaaccttgaaacagaccattctgtttacaaatggccttatctgttgtaaaatttttccccttttttccagttcgaaaactgaggctcagaacrttttaatgactcatccaaggacatacaatgaaatctttgcagagccagccctagaactcagctttcctcatgcttaatcaagtgcgttttccctgctatg

SEQ ID NO: 445479 - DNA, 201 bp, Homo sapiens
cataaacaaaaattttaagtccgtgcttaaaaaaatagagacaagaagtaagaagagtagttactgggttataagaagaaaaacaaaacaaaactatacgyacatgtagagagagagagagagagagagagagagaatcatcatgggaaagtcattccaaaagcacatacattggctttggagagtgctttgagtaggttt

SEQ ID NO: 445480 - DNA, 201 bp, Homo sapiens
tggggagccacgtgttctttcaggcatagctttccctaatttatcaaaaaggtgaaatgggtgaacatacattggccacccttacccctgtggggatcacygtctataaccccttaagacccaggaataccagaaataaatgagcaataacgttgattctggcaggaattggggcagtaataagactagcagacccctggg

SEQ ID NO: 445481 - DNA, 201 bp, Homo sapiens
tcggcaatcaaagatccaaggagtctctaggtgaggccgggattcagaaaggctcagccatggctgccactactaccaccgccattttcacaaccctgaaygaacccaaaccagagacccaaaggaggggctgggccaagtccaggcagcgtcgccaagtgtggaagaggcgggcggaagatgggcagggagactccggta

SEQ ID NO: 445482 - DNA, 201 bp, Homo sapiens
aggccctgcagctgaacagtactcacttcctcaacatctactttgccagctcagtgcgggaagaccttgcaggtgctgccacctggccttgggacaaggaygctgtcactcacctgggtaagtgaaatgaagaccaaacatagtaggaaaaaaacaaagaaggctgaaggaagcttgcgaaagtaagtttggggaaaaaag

SEQ ID NO: 445483 - DNA, 201 bp, Homo sapiens
aataagcatgtacaaatatgttcaataaaattattcatcgggaaaagcaattaaaaccacaatgagattctgctacatctttactaagactaaatttgcaaaaaaaaaaaaaaaaaaaaagaccacattaagtgttggcaaaaatgtggagcaactggaactttcatacactgttggtgggaatgtgaaatggtacaccag

SEQ ID NO: 445484 - DNA, 201 bp, Homo sapiens
ttcagacttgaactggaactgcaaaatcagctctcctgggcctggacttaacttagcctccataattgtgtaagccattctttattatacatttctgtctatcatcatcatcatcatcatcatcatcatcatcatcaccatctatatcttctactgattcagtttctctggagaaccctaactaatacagatgttccttca

SEQ ID NO: 445485 - DNA, 201 bp, Homo sapiens
tcagacttgaactggaactgcaaaatcagctctcctgggcctggacttaacttagcctccataattgtgtaagccattctttattatacatttctgtctatcatcatcatcatcatcatcatcatcatcatcatcaccatctatatcttctactgattcagtttctctggagaaccctaactaatacagatgttccttcac

SEQ ID NO: 445486 - DNA, 201 bp, Homo sapiens
cagcccctaactctcttaggttccacttcttcaccctaataattgggatgataagattatctactttatatagggttcagatgcgaaacatccagcacaayggaaggcccatagcaaacagcgagcactttgtaaatactatcatttgttctactcctttgtgaatgaaacatggttgttcatgggcttgagagaagttca

SEQ ID NO: 445487 - DNA, 201 bp, Homo sapiens
cagacttgaactggaactgcaaaatcagctctcctgggcctggacttaacttagcctccataattgtgtaagccattctttattatacatttctgtctatcatcatcatcatcatcatcatcatcatcatcatcaccatctatatcttctactgattcagtttctctggagaaccctaactaatacagatgttccttcact

SEQ ID NO: 445488 - DNA, 201 bp, Homo sapiens
agacttgaactggaactgcaaaatcagctctcctgggcctggacttaacttagcctccataattgtgtaagccattctttattatacatttctgtctatchtcatcatcatcatcatcatcatcatcatcatcaccatctatatcttctactgattcagtttctctggagaaccctaactaatacagatgttccttcactt

SEQ ID NO: 445489 - DNA, 201 bp, Homo sapiens
atgcgaagagttgataaagtccattctgataaactggaatgtccagaaggacttcagtgcctttatggagttacctgtaattgtggaaagcttgacaggtaaaaaaaaaaaaaaaaacaaacaaacttaccagaagacaccctgaaactttcaggcctttaagtttgacttggtgggtttgaaaggaagctaaacagaaaa

SEQ ID NO: 445490 - DNA, 201 bp, Homo sapiens
tgcgaagagttgataaagtccattctgataaactggaatgtccagaaggacttcagtgcctttatggagttacctgtaattgtggaaagcttgacaggtaaaaaaaaaaaaaaaaacaaacaaacttaccagaagacaccctgaaactttcaggcctttaagtttgacttggtgggtttgaaaggaagctaaacagaaaat

SEQ ID NO: 445491 - DNA, 201 bp, Homo sapiens
agtccattctgataaactggaatgtccagaaggacttcagtgcctttatggagttacctgtaattgtggaaagcttgacaggtaaaaaaaaaaaaaaaaacaaacaaacttaccagaagacaccctgaaactttcaggcctttaagtttgacttggtgggtttgaaaggaagctaaacagaaaataatgcctttaagtgca

SEQ ID NO: 445492 - DNA, 201 bp, Homo sapiens
tcttgggggtggcactatacagaagtgcagttatgatgaagaggcagctaggctttggggagtccatgtgtggccacctattcttccatatgtgtgtcaayggaaagtgctgctgtcctgtccatgctgtccccagccctggaaccagcccactctcacctccattgctttgtacacaagcactagactctgtttaaggaa

SEQ ID NO: 445493 - DNA, 201 bp, Homo sapiens
cattctgataaactggaatgtccagaaggacttcagtgcctttatggagttacctgtaattgtggaaagcttgacaggtaaaaaaaaaaaaaaaaacaaacaaacttaccagaagacaccctgaaactttcaggcctttaagtttgacttggtgggtttgaaaggaagctaaacagaaaataatgcctttaagtgcagtta

SEQ ID NO: 445494 - DNA, 201 bp, Homo sapiens
ttctagcacctacctgaggaaatagtgtggatgactgaagtagtactacgggggttcagatttccttgaaaactaagccttataaatcatgagagtgacgraacactaattcccaaatagcagaatgcattacattgtttcaggtcagcgatagcatcattgttttagtgatcagaatacattaaatgcatgccgattttg

SEQ ID NO: 445495 - DNA, 201 bp, Homo sapiens
ctgcatgctgactgatctttccctttcctccttataatcttcctttgtggctgagattctggtttatgcccaataccttttcttccttataccccactccstctcctactcactgcaatctgattctgtctctattgctcttttggaattgcatttgtcaaagttatcaaccttctgcttctttctacttctgatggataa

SEQ ID NO: 445496 - DNA, 201 bp, Homo sapiens
tcagcatctgaaaattatcttctttccatttgatcttgttgtttgatacaaccttgaatacctttctgtgtctactccatatttttagcatttataaaaawaatggaagctcttactttataaatagtgagctctctaagaagaataaaaattgtatagcacatgtcttgatagctcaatggaaataatgacttatacata

SEQ ID NO: 445497 - DNA, 201 bp, Homo sapiens
taccttctctggccacatactcagggtatgggatagtgagaagtggttagaaggctgatgatcttaaagcccttcgagataaacctcgagatgaagattcygggcacggaccgtcagagcatcacaggccaggtgacaacccagcccatctctgcttcacagatggggcagtgagacccagagagggaaagttactttcct

SEQ ID NO: 445498 - DNA, 201 bp, Homo sapiens
ccaccaggtctctgtgtctcttccaggacgacaggtgctggtcactaagctatcttatcaaggttaaggaatgtggcccacttcacaccccctaaggtgtrtgacttcttggcttttgcatgagctatcctctgcatttggggatgtagatcctgttgtgctactggaattccaagcacatgaattcctatttttgtttag

SEQ ID NO: 445499 - DNA, 201 bp, Homo sapiens
agcctggtagtgtgaaaccacaaaataactatgcaagttgaaacctgcaaccttaataatcaatgggaaaaattacaattgcttcgtgatatctaaaaggttttttttttttgcaacattaaatgctctcttatttttagttataagtatgtagaaaatggaaaaaactagtgaaactaatatttagttcactggaatttg

SEQ ID NO: 445500 - DNA, 201 bp, Homo sapiens
cagaaatggaaatggtcagtgggcaaatatttatctacgtttgtcctcacattgtcattattattataattttttaatataatcattataatttttaacamataaatctgattagatcaccatctgccatgtcttacctctgaaatccttcagtggctcctgatttgtcacccagagtgtaaagtcaaatctggttcactc

SEQ ID NO: 445501 - DNA, 201 bp, Homo sapiens
gcatgctgactgatctttccctttcctccttataatcttcctttgtggctgagattctggtttatgcccaataccttttcttccttataccccactccgtstcctactcactgcaatctgattctgtctctattgctcttttggaattgcatttgtcaaagttatcaaccttctgcttctttctacttctgatggataatt

SEQ ID NO: 445502 - DNA, 201 bp, Homo sapiens
cattcctaatgactaataataataactgtaagagtagctaatatttattgatactgtgccaggaaccacgccaactaccttctatgggcatcatatgcagkccacctcttcaactcctttagattcttatcccccatctcaccattctatgttttcctgttctctcaggcaatcacaagagcaagccccatgctctccctg

SEQ ID NO: 445503 - DNA, 201 bp, Homo sapiens
ggaagacttcatagacaggatgaaacttaaggtaagttttgaaaggcatatccatataagggaggcatttcagacagagagagatacgtattgataacatrtatcaggcctatataacctctcagaaaggggcactttttgcttttccatttatgtaaacactctgaaataagttggcacaatgttcctgaaatacctggc

SEQ ID NO: 445504 - DNA, 201 bp, Homo sapiens
aggttccataggggagaggggagctttctagtaaagaaagggtgagcaatcagagcatttgagaggcagaagcagttcctagctgggctatctcacttttytttttgttacattcccgtcaaatacagatttctactgtgccaggtacataccaaatggggaacaggaaaaaggaggaagtggggattgaagccgcttgtt

SEQ ID NO: 445505 - DNA, 201 bp, Homo sapiens
atccgcccatctcggcctcccaaagtgctgggattacaggtgtgagccactgcgcccggccacaacaattccatataaaaatgttagcagcacaaggcttycaacccatcccctcttctgactcaaaaaatgaaaacaccctccctttaggccccttaggccagctgtccaaagatttttattcccccagtgctaggcaga

SEQ ID NO: 445506 - DNA, 201 bp, Homo sapiens
acaacttttactttcattcatctctcgttttgttctcgtttttgttttttgttttttttttgtatttcgttgatttctactcttatcttcattatttcctkgctttttgtttgtctggatttacactgatgttctttttctaggttttggtgttgaaatgtttggctaatttgttttaggtgttccataattttcccctct

SEQ ID NO: 445507 - DNA, 201 bp, Homo sapiens
ttaaacctcattgtttatcagatagtcaaattcaagtgcccatactgtgttttggtttgttttggctaaatctggcaaaatagtttataatttaaaaaatrtaattagtcagatgctaatcacttattcagagatgacttcaaccacccaggaaactgtccagatttcataatttagcaaaaaaagaaaaagcccatgtac

SEQ ID NO: 445508 - DNA, 201 bp, Homo sapiens
aagcttcagggcagctgtaggcagaataacaggactttgcctgtttgctaggaactactgagctccccgaatatggacctgtattggaagctatgccaatrtccctgcgatagcctcaaaaagtggacaactaaaagaggtgcctggtttggcattctctgggggacagttcatggaaagtttattgatggggctggccac

SEQ ID NO: 445509 - DNA, 201 bp, Homo sapiens
gatttgcctattctgtgttatttcataaaaatggaatgtatcatacaatgtatgatcttttgtggctggcttctttcacttgaggcttatccatgttgcarcatgtattggcacttcattcctttttattgttaagtaatatcccatgcatatactacattttgtgtatccagtcttcaattactggatattttggttgtt

SEQ ID NO: 445510 - DNA, 201 bp, Homo sapiens
agaagggacccaggacttgctccaaagatgctgccatccaaactggccaggtctggctcatgttcctcagtcccaaggccttctttacccattctagtccrtgcaaactctcctcctgaatgcttgttgcatgtatatcaatgtgatataacttagcatgaaattatttgtagtgagattttgattccacagattccacat

SEQ ID NO: 445511 - DNA, 201 bp, Homo sapiens
agctattaagtttggtttatctagtaattgagctagttgatctagctggtggctctagccccaccatttgattttttacctaggatattgtttaccatttwaaaaaaaattttcaattgactgctgggcagctccctttggctatttgtgggtctagatcaaggcttagagagtttgggaagttgagaatggggcagactt

SEQ ID NO: 445512 - DNA, 201 bp, Homo sapiens
atttttgagttactgtagttaggctttatgtgtattaatgtatttaatcttcaaatgaggtagatatatcattagttttattctagagatgagcagactcrgataagtggtttattgtagaagtttaaaaaatacttttcctgtaaatctgtacttaggaaattaacacctatttattattttataccatttgggtcagag

SEQ ID NO: 445513 - DNA, 201 bp, Homo sapiens
gagtgaacagccagaaggtagcctgaagaaagaggatgaggtttggctcaaagtaagtggcccaaatgtttcttttgtgcatgtgaaaggtgtaagcatatgtgtgtgtgtgtgtgtgtgtgtgtgtgtaaatggtgcatttggatgacttgtcagaaaattttcttttgttatctcaaagtgttaatattttgagtttat

SEQ ID NO: 445514 - DNA, 201 bp, Homo sapiens
tccttaacaatgattcctagaagtgaaattacagggctggagcatgaggctgtttttggcaaatggttgctaaatggttttctggaatggtttactaactytctctcactccagcagtgcatgagtgtgcccttttccccagtgttgccaaatctagagactgttattgttcttactctttgccaacttaatggacaagag

SEQ ID NO: 445515 - DNA, 201 bp, Homo sapiens
agtgaacagccagaaggtagcctgaagaaagaggatgaggtttggctcaaagtaagtggcccaaatgtttcttttgtgcatgtgaaaggtgtaagcatatgtgtgtgtgtgtgtgtgtgtgtgtgtgtaaatggtgcatttggatgacttgtcagaaaattttcttttgttatctcaaagtgttaatattttgagtttatt

SEQ ID NO: 445516 - DNA, 201 bp, Homo sapiens
tctgtttttttgaatagagcttcaccttcctggaagctgatggggcttcttggagaagcaggactctcactcctaactttaatcctcccagaggtacagarcagaactctgccatgggggtttcctggaagtgagattccatggatgtgtctgtgccaagagcagcatttctgcctggaccttatcttcatcttctgccac

SEQ ID NO: 445517 - DNA, 201 bp, Homo sapiens
gaagatatatatgatcttatttttcattaattcctttatgtttgcattaacttgttctttttctagtaacttgaggtgatgcataggtaattgctttttgyctctgtttttaaattttatacattaaggccataaatttccttttaaacatgactttagctacatttcataagttttcacatcttatttctgttaccattc

SEQ ID NO: 445518 - DNA, 201 bp, Homo sapiens
tgggtctgaggacaaaatagtatagatgtatattttcctatacaatagttagcacttaagtgctctatgtgttattgtttttctgttgttgttattattcytgagggagtacccactggagacatcaggtccccttggtcagcaaagacatgataattctctgggactcaacaaatcatacttttattttcacaaatggaa

SEQ ID NO: 445519 - DNA, 201 bp, Homo sapiens
gaaatgctccttttctgagtcaagactctcatgactccatttgacttcaggagcagagtgggaacaaggaaatacaacccatcctttcttgttcctgtggyaaattcatagatgtctaagataggctcttgtcatcaagggactctcagatttcttcacaaatagcagcagttcaacaaggctcagcaacctgcaacaaga

SEQ ID NO: 445520 - DNA, 201 bp, Homo sapiens
agatatatatgatcttatttttcattaattcctttatgtttgcattaacttgttctttttctagtaacttgaggtgatgcataggtaattgctttttgtctctgtttttaaattttatacattaaggccataaatttccttttaaacatgactttagctacatttcataagttttcacatcttatttctgttaccattcaa

SEQ ID NO: 445521 - DNA, 201 bp, Homo sapiens
caaatagcagcagttcaacaaggctcagcaacctgcaacaagatcacttttactaaggtagtcaaggaagacttcatagacaggatgaaacttaaggtaarttttgaaaggcatatccatataagggaggcatttcagacagagagagatacgtattgataacatgtatcaggcctatataacctctcagaaaggggcact

SEQ ID NO: 445522 - DNA, 201 bp, Homo sapiens
cttttgatattctagcttcccatcctctgcactaaagagggcctgtggacccaggagtttaagttgtgtgagaatctgcaaggagaatgcccaccaccccsctcagagctgaattctgtggagtacaaatgtgaacaaggatatgggattggtaaggataggagtgaatcttaaagtcaatttctatgtcattcttttatt

SEQ ID NO: 445523 - DNA, 201 bp, Homo sapiens
gattttttttttttggacatttggtaagatttgggaaagatcactttaattcaataagtaattaagatagcttgtgctttgtgagcctttatacatttccttttttttttttttttttttagttttttctttcttctaaggcctggctcttcaggggtctcaactaaaagcttggattaggacctccacattgacagtctt

SEQ ID NO: 445524 - DNA, 201 bp, Homo sapiens
agcagttcaacaaggctcagcaacctgcaacaagatcacttttactaaggtagtcaaggaagacttcatagacaggatgaaacttaaggtaagttttgaarggcatatccatataagggaggcatttcagacagagagagatacgtattgataacatgtatcaggcctatataacctctcagaaaggggcactttttgctt

SEQ ID NO: 445525 - DNA, 201 bp, Homo sapiens
taatatctatctcttatatctcttatctatctcttatatctcactgattttccttaagattattattttgaattgttttcagtactttgtatatttccttrtaattgaattttgttactttagaattgttttgttcctttggaggtgtaatgtttccttgattttctatgtttgatgtgttcttacactgatttctgtgca

SEQ ID NO: 445526 - DNA, 201 bp, Homo sapiens
aaaatctttcattgactaaaatcttacttgcccaaaaaaaattctatcattttagtctacatttactgaaataatactcttagtttttcttttcttctaaycttgagccaatagagcaaaagtgtaagaattttcttaaatataataaaatgtagagtcttttttattatttacataataagcacattttatagccattta

SEQ ID NO: 445527 - DNA, 201 bp, Homo sapiens
tttctcattctaaaaatgattatcttaaaattcagagatgttaagcactggctagtagagctacagataggattaaaattgaaatccagtttatggaaaarctcatggtcctttctctctacaccagggttttggaaacattttctataaagaaagcagattaaaaaactactttagggtttatgggccattcagtctgtg

SEQ ID NO: 445528 - DNA, 201 bp, Homo sapiens
ggagctgtgtgccagtacctgggacaaagaccaaatatagtcgccttctctctgtataactgtgttcctcatccatggattcaaccaacctcagaaaaaawaaataaataaataaataaataaataaataaataaataaataatacacctgaactgaaactgtgcatgatttttttcttgccattataccataatcaatat

SEQ ID NO: 445529 - DNA, 201 bp, Homo sapiens
gatcaacaatcagagtttctaccttaaataagtagaaaaagatcaaattaaaatcaattaaaataaaaaggaaaatcacaaagagcagaaattagtaaaatagaaaaacttcaatatcattactattattttactttctctggaaatagaagccagtgcagttagacttttgattttatactttatgagatataaaagaag

SEQ ID NO: 445530 - DNA, 201 bp, Homo sapiens
acaaatcatacattgttgaatgtctacccctagttcgggtgggattatagtggttcccccttcatttcaaaaaattatgagttgatctcacccttctgaaacacacacacacacacacacacacacacacaaactcatgatgtgtttgtagcctttcttatactatgaaggaataactcaggaaatcagctgggttttagc

SEQ ID NO: 445531 - DNA, 201 bp, Homo sapiens
aagaaaaatacaagggatccctaaaaggttagtgtgggcttattaggcagtaggtagatctgttcacagtaagtgtgtgtgtgtgtgtgtgtgtgtgtgtgagagagagagagagagagagagggagaatacacacagagaagagtactccaaaacactattgattttttgctattgattgtgtaggctgcggctgctgaa

SEQ ID NO: 445532 - DNA, 201 bp, Homo sapiens
aaaatgtattctctctctatatatatgtatgtattcctcatttaaatatatttttaaggttgctctttccacagccaagtcacaaatgtatatgtaaaaawatatatttatatatattttatgtatgttaaaatgtatatttatatatttttaaatatatatcttataaaatatataaatatatttatatttaaattaaag

SEQ ID NO: 445533 - DNA, 201 bp, Homo sapiens
agaaaaatacaagggatccctaaaaggttagtgtgggcttattaggcagtaggtagatctgttcacagtaagtgtgtgtgtgtgtgtgtgtgtgtgtgtgagagagagagagagagagagagggagaatacacacagagaagagtactccaaaacactattgattttttgctattgattgtgtaggctgcggctgctgaaa

SEQ ID NO: 445534 - DNA, 201 bp, Homo sapiens
gaaaaatacaagggatccctaaaaggttagtgtgggcttattaggcagtaggtagatctgttcacagtaagtgtgtgtgtgtgtgtgtgtgtgtgtgtgagagagagagagagagagagagggagaatacacacagagaagagtactccaaaacactattgattttttgctattgattgtgtaggctgcggctgctgaaag

SEQ ID NO: 445535 - DNA, 201 bp, Homo sapiens
aaatacaagggatccctaaaaggttagtgtgggcttattaggcagtaggtagatctgttcacagtaagtgtgtgtgtgtgtgtgtgtgtgtgtgtgagagwgagagagagagagagagggagaatacacacagagaagagtactccaaaacactattgattttttgctattgattgtgtaggctgcggctgctgaaagaga

SEQ ID NO: 445536 - DNA, 201 bp, Homo sapiens
ttccagttcttagagaaaacgctttttgcttttccctgttcagtacgatattagcggtcacttatggcctttattgtgttaaggtactttctttctacctratttatgaaagtttttattattaaaggatgttgaattttattaaatgctttttccataatatattcgctgaaatgaataaataatttttgcaccattttt

SEQ ID NO: 445537 - DNA, 201 bp, Homo sapiens
agtctgggtgggggtggggggaccgcagagaaaactcatgtactggctgagcaagtctgggtgggggtggggagaccaggtgttccacactgactgttctygtctatgctattttatgagtctattaatcactggtactggttgtgctttggatatgatctgagctaggctccaggaaggggaaaatattttttgttatct

SEQ ID NO: 445538 - DNA, 201 bp, Homo sapiens
gttgatctgtccaatactgagaatgggtattggggtctagctctacctttagatctgataatatttgctttatatatctgggtgctcttgtattgggtgcwtatatacatacataattggtatatcctcttgccgaattgatcctgctgttattatataatgcatttttgtttttttttttagtttttgacttaaaatctg

SEQ ID NO: 445539 - DNA, 201 bp, Homo sapiens
tgtcttgctctgtcacccaggttggaatgcaggggtgccatctcggcgcagtgcaacctccgcctcccaggttgaagcaattctctgcctcaacctcctgrgtagctgggattacaggtgcccagcagcacgcctggctaatttttgtattttgtattttagtagagatgggttttcaccatcttggccaggctggtctta

SEQ ID NO: 445540 - DNA, 201 bp, Homo sapiens
gctaatctagtggtgatgaattccccaggtttctggttatctgagaaaaactttatttctccttcatttctaagaatagctttgctgggtatagtattctyggctgatggatttgtttgttttttttttcttttagtacttcgaatatttcattccattctttctggcctatacattttttgctgagacatctgcaattag

SEQ ID NO: 445541 - DNA, 201 bp, Homo sapiens
ccttggtaactggagaacctcattccctagtaagttaagccagatgaatagagtcgagcctgcgcaaaattgtaaagtgactccccctatgcttacacttrgggtctatgtttggataattaaaagaagaagtaaggagttagaagccctagggaacattactggatctgccagcattgctattacaattacatgatgttg

SEQ ID NO: 445542 - DNA, 201 bp, Homo sapiens
tgctctggctcctaatttatctcattgagtttttcccttcagatttatatcctattgacagttgccacagtttctcatagtaccttggttcaaattctgargacagtcagtgtcaactggcctaactcatctttacatgttagttcggaagtcataggtttctggccaaccttgggtttaagaaaccgtggccaaaagagc

SEQ ID NO: 445543 - DNA, 201 bp, Homo sapiens
tgcaaattgtgctgctataaacatgtgtgtgcaagtgtatttttcatataatgacttgtcttttttggggtaggtacccagtagtgggattgctggattargtccatttttgagtaaactgtggtgcatggagaaggttccaagtccaagtaaactccatgggaaattgaaaaggtgctccttcttagggaatcaggacat

SEQ ID NO: 445544 - DNA, 201 bp, Homo sapiens
aaattttcgcaacctactcatctgacaaagggctaatatccagaatctacaatgaactcaaacaaatttacaagaaaaaaacaaacaaccccatcaaaaartgggcgaaggacatgaacagacacttcccaaaagaagacatttatgcagccaaaaaacacatgaagaaatgctcatcatcactggccatcagagaaatgc

SEQ ID NO: 445545 - DNA, 201 bp, Homo sapiens
tgggccactttctcactctgttaattttctttatgacatctgttatccctttttcctcccactccaccctttttctgatttattctgggcttttttgttcttttttttttggggggagggttctttttctctttcactgtccttccctttttagcccagacttgcagataatttaaatattactcgcctgcagaattgcca

SEQ ID NO: 445546 - DNA, 201 bp, Homo sapiens
agtcatgtggccttggtctactactttcttcatcacattgtattgtttcttgaaaagtgtagtacagatgccagtttctcttaagcaaagctatacgctasataaaagttgtgatcagacttttatgaatgcctgggggagggtgggatactgactttagagaagtttatgagctgatgtcaccctgattttaagtctgag

SEQ ID NO: 445547 - DNA, 201 bp, Homo sapiens
aggcattcagaaagagagaacaactttgctttgagctggagagtttcattgtccttacttatatcttcacactccacacttcaaattgttggttgaaattrtatttcagatttgcacatcataccatccagatttacccaaccaccgtcccctaactggctggtttccctgtgttgccagtgaaaatgaaactcaggatga

SEQ ID NO: 445548 - DNA, 201 bp, Homo sapiens
ctgatgaaagctatgtccactccctagaaaaatgaacatgttcacatagttcacacaacgttcagagctgtattagtctgttctcaagctgctgataaagwcatacctgagactgggtaatttataaaggaaagagctttaatggactcacagttccacatggctggggaggcctcacaacaatggctgaaggtgaatgag

SEQ ID NO: 445549 - DNA, 201 bp, Homo sapiens
acactgtcttctacaatggctaaactaatttccactctcatcaacagtgtaaaagcattcctttttctcttcaacttcaccagcatctattgtttctttastttttaataatagccattctcactggcatgaaatgatatctcattgtggttttgatttgcatttctctaatgatcggtgatgttgatctttctttcatat

SEQ ID NO: 445550 - DNA, 201 bp, Homo sapiens
acgaagaattaagtagggtggagaaaatgagcagaatgttaacattccatactcatcacacacacacacacacacacacacacacacacacacacacacasagagagagagagagagagaggagtgtggctgagcagatcttctgatcatcagggatagctagtaatttctgctgcttattgatcatggtcatgtgctatt

SEQ ID NO: 445551 - DNA, 201 bp, Homo sapiens
ctttctttctccctctttctctttctgaccccctctctctctcccacgtccttccttcctccctccttcctttcttccttccctcccactcccttcctccctctattttcttttcttcctttcttttccccttgctttttagaaactttcaaattgtccaatcaggaggaaatttttaaactaattttctcttaaactttt

SEQ ID NO: 445552 - DNA, 201 bp, Homo sapiens
gcagagctgtgctaggtcaagtcagtaactgttctcgttgtggagagtgactggtgtatgtatgtgtgtgtgtgttgggtgggaaagggtaataaatggatttttttttttaattaggggaagtggaatttttagagtgtcatgtgacgcatcattgtttgagaggataccgttgacatctctgctaactatctcttgttg

SEQ ID NO: 445553 - DNA, 201 bp, Homo sapiens
tttctttctccctctttctctttctgaccccctctctctctcccacgtccttccttcctccctccttcctttcttccttccctcccactcccttcctccctctattttcttttcttcctttcttttccccttgctttttagaaactttcaaattgtccaatcaggaggaaatttttaaactaattttctcttaaacttttt

SEQ ID NO: 445554 - DNA, 201 bp, Homo sapiens
ctgatttcctttgctttgcataaatgcccagtaataggattgctgaattataggatagttctatttatagttttatgaagaacctccatgctgttctccaytgtggctgtactagtttacattcccactaacagtatataagagttcctttttctcttcatcattgccagcatttttttttgtctttttagtaataaccat

SEQ ID NO: 445555 - DNA, 201 bp, Homo sapiens
ttctttctccctctttctctttctgaccccctctctctctcccacgtccttccttcctccctccttcctttcttccttccctcccactcccttcctccctctattttcttttcttcctttcttttccccttgctttttagaaactttcaaattgtccaatcaggaggaaatttttaaactaattttctcttaaactttttt

SEQ ID NO: 445556 - DNA, 201 bp, Homo sapiens
ttttaatagggtgagaggtgggagtctaatttccttgttcagcatatgggtatccagttttctgagcaccatttattgaaaagattttcccttccgcaatyaatgtacttggtaccttagtcaaaaatcagttgttgtggatacatggattaatttctgggttctctattatgttccactggtctatttgcctatttttat

SEQ ID NO: 445557 - DNA, 201 bp, Homo sapiens
tctttctccctctttctctttctgaccccctctctctctcccacgtccttccttcctccctccttcctttcttccttccctcccactcccttcctccctctattttcttttcttcctttcttttccccttgctttttagaaactttcaaattgtccaatcaggaggaaatttttaaactaattttctcttaaacttttttt

SEQ ID NO: 445558 - DNA, 201 bp, Homo sapiens
gattgatcgctgttagcatataaaaatgttactgattttggtatgttgattttgtatcctgcacctttactgaatttatcagttataagagtttttttttwaatttttgtttattttttgggggggtggagtctttagatttttctttttttctttctttctttctttctttttttttttttttttttgagacggagtctc

SEQ ID NO: 445559 - DNA, 201 bp, Homo sapiens
tttatatataagctttgtttgttatagcaaatgactggaaataaccaaaatattcatcaacagggatctgattaaagattttgaactctttaagggccttractaggtttatggattttcagatccccttgctcactggaaaatctgacccatagtgagtgagtgaggtatttatatgtttggtctgaattgaataactga

SEQ ID NO: 445560 - DNA, 201 bp, Homo sapiens
aatcctagcactttgggaggcttaggtgggaggactgctcaagcccaagagtttgagaccagcctgggcaacatagtaagaccctatctccactaaaaatkaaaaaattaggtagatgtggtggcatacacctatagtcccagctacttgagaggatgaggtgggaggattgtttgcacccagggagttgaggctgtactg

SEQ ID NO: 445561 - DNA, 201 bp, Homo sapiens
tatatatctgggtgctcttgtattgggtgcatatatacatacataattggtatatcctcttgccgaattgatcctgctgttattatataatgcatttttgtttttttttttagtttttgacttaaaatctgttttattgtatgtaagtatagcttctcctgttcatttttgatttccatttgcatggaatattgtttttca

SEQ ID NO: 445562 - DNA, 201 bp, Homo sapiens
cctaccctgattttgcacattctctcacgagccttaaagcagcttcatctaaggcagcactgcttggctactgggtctcgcaaggttacttatcaaaatgytccttgaaacttctgcctatgttttcttctctgtgtaactagcacttccatccaatgggaaggtatgcaactccaaatctggcttagccaaatgcaccac

SEQ ID NO: 445563 - DNA, 201 bp, Homo sapiens
gtcaatctatattttttagttggggaatttagttcattttattgattgtttctcattgttttgtatattctttatttcttactttctctctttttgtttattttttatgtttggcatggttttctgcagtgataaggtttgtttctttttctttcttttttatttttttgagatggtgtcttgctctgtcacccaggttgg

SEQ ID NO: 445564 - DNA, 201 bp, Homo sapiens
gagaaaaactttatttctccttcatttctaagaatagctttgctgggtatagtattctcggctgatggatttgtttgttttttttttcttttagtacttcraatatttcattccattctttctggcctatacattttttgctgagacatctgcaattaggctaatgggtattcccttatatgtgacttggtattatatttt

SEQ ID NO: 445565 - DNA, 201 bp, Homo sapiens
ttggagattttgagtttattggatctgaatgtccaccccttttctaagacatgagaagtttttcactattatttcattaaataggtttccttcaccttttytcttttcttctctttctacagctcccataatgccaatatttgttcacttactgatgtttcatacatttttgtaggctttttattcattctttaaaatata

SEQ ID NO: 445566 - DNA, 201 bp, Homo sapiens
gatgtgttcttacactgatttctgtgcatccagtagaacagtcacctcttccaattttatgaaatagatttatagaaaaaggcttatttcttttttgtgtktgtttgtgtgttttgttttttacttttacatttgttttaatttacatctttgataaaaattattcaaatattttgcctcaaatacaattctatttttttg

SEQ ID NO: 445567 - DNA, 201 bp, Homo sapiens
gttcttcttgaagagatccttcatatcacttgttggctgtattcctaagtattttattctctttgtagtgattgtgaatgggagttcattcatgatttggytctccacttgtctgttgttggtgtaaaggaatgcttgtgatttttcacattgattttgtatcctgagactttgctgaagttgcttatcagttcaagaagt

SEQ ID NO: 445568 - DNA, 201 bp, Homo sapiens
atttactgcaagtgagaaacaatgatagtggcaaacattagtcttgaaaatatcttcccaaaaatctttcattgactaaaatcttacttgcccaaaaaaawttctatcattttagtctacatttactgaaataatactcttagtttttcttttcttctaatcttgagccaatagagcaaaagtgtaagaattttcttaaat

SEQ ID NO: 445569 - DNA, 201 bp, Homo sapiens
aaaatctcaatgttgcacaaactcaagagtttcaccaagtatattgtattggcttggacttcattggttttgtcagtctttactctgctagactgggaagwaaaagtctcctaaatgtgagattctgtaatttttcctttgaaacaaacttcatcttgcttttgcttaatgaggtcaagaaagtagggctgagggtccctc

SEQ ID NO: 445570 - DNA, 201 bp, Homo sapiens
gtttattttctgcactatattgaactctccatgatatcatataattatttgatcactatagaatctccagcaccaagtactgagattagcagatagtattrctttgtaaatatctaccaaacttgcacttgcatgggtgagctaacttagtctgtttctgtgcacttattcataacaggtcctcgtttatcctaactactt

SEQ ID NO: 445571 - DNA, 201 bp, Homo sapiens
ctccccagtactttctcttaaagatcagcaaatagctgatagattagtaactccacggtcctgatattcaatattgcagcccatgtgctcataggtcagayagataattaaagctacttactgcttattaaaataagtggaccaggagaaaatatgaatcagggaacttagtattaatctcactagatttgtttgcttttt

SEQ ID NO: 445572 - DNA, 201 bp, Homo sapiens
tagaattactgggttagggaggaaatatttttgctaaaaagtacttttattttataaaccatgagttattaatttgtgctgaagacagaaaagatattctrtcacttttggaaatatagccacttgtaaagcacttgcctgccgtcagaataggaagcctcatggcttataaatctagactgtctaaggagaattattgtt

SEQ ID NO: 445573 - DNA, 201 bp, Homo sapiens
ggtatctgatccaaagactagtatatttttccatcatttattaatcagtgcaagcaatatttattaagcatttcctatgtgatgtactgacttcatgtgayttattagtaaaagctattcctgagagactatgtactagaagaggtactgaggaggagatggtgggtaaactgaagatgggttactaggaacatttaaggc

SEQ ID NO: 445574 - DNA, 201 bp, Homo sapiens
gcctctgtattgggaactggggcaacaaagctattttaaggagttgttaagagggatgcatgtgatagcatacataacgcattgagtgtcatgcctggccygtaagagattcttactggtgtcatttatttaagctattagccacttcgtgaatgtttactgaatgagtaaagcagaatgcaggggcattgctgctggtgt

SEQ ID NO: 445575 - DNA, 201 bp, Homo sapiens
tttattgattgtttctcattgttttgtatattctttatttcttactttctctctttttgtttattttttatgtttggcatggttttctgcagtgataaggwttgtttctttttctttcttttttatttttttgagatggtgtcttgctctgtcacccaggttggaatgcaggggtgccatctcggcgcagtgcaacctccg

SEQ ID NO: 445576 - DNA, 201 bp, Homo sapiens
ttaaaggaggcacatttagcaaaggggagagttttcctatacagtgaaaataacatacagctatgttaatgactttgggttctatatgttgttaaaaggcaaaaaaaaaaaaaaaaaaacgggtgttttataaagatatttttgttttaccaagatggttaaaataaaaatttaaaaagtgacccttaccaggataagctt

SEQ ID NO: 445577 - DNA, 201 bp, Homo sapiens
caggccctggtgtgtgttgttcccctctctgtgtccatgtgttctcaatggtcagctcccacatatgagtgagaacatgcggtgtttggttttctgttccygtgttagttggctgaggatgatgacttcaagcttcatccatggctgtgtgaaggacatgatctctttcctttttatggctgcatagtattccatggtgta

SEQ ID NO: 445578 - DNA, 201 bp, Homo sapiens
ttcctggtaggctctctgacaggctgcatttttgcttcttttgtcctcttggccttctgggtgggccactttctcactctgttaattttctttatgacatctgttatccctttttcctcccactccaccctttttctgatttattctgggcttttttgttcttttttttttggggggagggttctttttctctttcactgt

SEQ ID NO: 445579 - DNA, 201 bp, Homo sapiens
gaacgcatacatctacctgtgtgtatgcatcaaatataaagtaacctccccagtactttctcttaaagatcagcaaatagctgatagattagtaactccayggtcctgatattcaatattgcagcccatgtgctcataggtcagacagataattaaagctacttactgcttattaaaataagtggaccaggagaaaatatg

SEQ ID NO: 445580 - DNA, 201 bp, Homo sapiens
tctcactctgttaattttctttatgacatctgttatccctttttcctcccactccaccctttttctgatttattctgggcttttttgttcttttttttttggggggagggttctttttctctttcactgtccttccctttttagcccagacttgcagataatttaaatattactcgcctgcagaattgccatcacagaaat

SEQ ID NO: 445581 - DNA, 201 bp, Homo sapiens
tctgttctctttgttacccctgatactcctggggatgaatctactgaacttactctttttctcttttctctcctacgttctctttgttagtttgttctacttttttttttttttttgagatttctttgagtctatctttcaatgcttttatttacttttatattttagcaatcatactttaaaaaccttcttattctttga

SEQ ID NO: 445582 - DNA, 201 bp, Homo sapiens
ctgttctctttgttacccctgatactcctggggatgaatctactgaacttactctttttctcttttctctcctacgttctctttgttagtttgttctacttttttttttttttttgagatttctttgagtctatctttcaatgcttttatttacttttatattttagcaatcatactttaaaaaccttcttattctttgat

SEQ ID NO: 445583 - DNA, 201 bp, Homo sapiens
tttctttctgctctggtttacagtttctttgtttttggcctttgggaaatgttctttttcttcttatgatgccagatgtgaaactgagagaatattgttakgttttatctaacattttagatggtttatagaggggtaattcttacatagtatattctactgccttgtcctactttctggctgaaacgtaagtatgataca

SEQ ID NO: 445584 - DNA, 201 bp, Homo sapiens
atgatttagatttcaaactcaaatatgctaggctatccaagtgaagtacctggttcatagtaaaattatatataatattttatatatatacacacacacayatatatataattataccaatgaaacaaagcattttgcatggattattttatttaatgctcaccatagctccaaaaagtaaatattttgattatatgtatt

SEQ ID NO: 445585 - DNA, 201 bp, Homo sapiens
atgtatggatgtgtaccatgttcttcacttagaagatgatctacatatatattatatacatacacatgacctacatatatatgtgtatatatatgtgtatrtgtgtctgtgtgtgtatatatatatatatatgatttatttcaactccagtgtctacagtatatgcatttatagtaagaaatagagtagatgcccataaaa

SEQ ID NO: 445586 - DNA, 201 bp, Homo sapiens
ttatctctaataaagcaaaaatagtctggactctatatatatataaaatgtatttcttttgtacaattccttgtattcctgtataaaatgtattctctctmtatatatatgtatgtattcctcatttaaatatatttttaaggttgctctttccacagccaagtcacaaatgtatatgtaaaaatatatatttatatatat

SEQ ID NO: 445587 - DNA, 201 bp, Homo sapiens
attgctgcacatctgggcagatgctctgcctgtttctagcacctacctgaggaaatagtgtggatgactgaagtagtactacgggggttcagatttccttraaaactaagccttataaatcatgagagtgacggaacactaattcccaaatagcagaatgcattacattgtttcaggtcagcgatagcatcattgttttag

SEQ ID NO: 445588 - DNA, 201 bp, Homo sapiens
agggcaggcaggagagtggatgtataagtgggtgggcaacagcaataagcagccaaggacactgtggccaaggggcactgagccttccggagatcctccayacagggatgatatctggggtctacattgtgggcgattattcagatcaaaggactgttgtctgtaggcagtccagctgtcagaaggagtttaaggccagtg

SEQ ID NO: 445589 - DNA, 201 bp, Homo sapiens
tagatagatagatagatagatagatagatagatacatagatacatagatacatagatagatacatagacacatagatagatagacacatagatacatgacagatagatgatgatgatgatgatagatgataggtagatagatagatagataaatagatagatagatagatagatagatagatagatagatagatagataga

SEQ ID NO: 445590 - DNA, 201 bp, Homo sapiens
ctctgagagtagcaagagttccagattcagagcagctttctcatgggtatccatttctaatggagactcctaaaactttgtgaatcatgtgcttcaactgsaagtatatagagatgtggctttgagggtatcttgaaagaagaatgaaggagaagaaggaaggttagcaaacagttggaatagagatgcttagctctggga

SEQ ID NO: 445591 - DNA, 201 bp, Homo sapiens
agatagatagatagatagatagatagatagatacatagatacatagatacatagatagatacatagacacatagatagatagacacatagatacatgacagatagatgatgatgatgatgatagatgataggtagatagatagatagataaatagatagatagatagatagatagatagatagatagatagatagatagat

SEQ ID NO: 445592 - DNA, 201 bp, Homo sapiens
tcctttgcctatttctttaaaattgatgtttctctgagttctcttttccaacttgtcaggcatgatgctcattcaccctgtagcctcagttaccatctgcrtgctgatgattcctaaattcatacctgccactatagtatcttcccttaagggccataaggcccataagaccaactgcctatggatattgctgcttggata

SEQ ID NO: 445593 - DNA, 201 bp, Homo sapiens
gatagatagatagatagatagatagatagatacatagatacatagatacatagatagatacatagacacatagatagatagacacatagatacatgacagatagatgatgatgatgatgatagatgataggtagatagatagatagataaatagatagatagatagatagatagatagatagatagatagatagatagata

SEQ ID NO: 445594 - DNA, 201 bp, Homo sapiens
aggtttgaaatttacacacgttaatacatgtaaaatgcttagaatagtgcctgccatataataagcactataaaagtgtcatctactattattttaatgcyttctatgataacatcactgctatatttttattatatgtaggtaggaaaagaagtaatgatttagttggtagcccttctttcatttgggtcaagaaagatt

SEQ ID NO: 445595 - DNA, 201 bp, Homo sapiens
atagatagatagatagatagatagatagatacatagatacatagatacatagatagatacatagacacatagatagatagacacatagatacatgacagatagatgatgatgatgatgatagatgataggtagatagatagatagataaatagatagatagatagatagatagatagatagatagatagatagatagatag

SEQ ID NO: 445596 - DNA, 201 bp, Homo sapiens
gggagcagagggccctgatctggaacatccaatctctctggcctaaaaataaacctgggttttaagaaactgtggtgtgtgtgtgtgcatgtgcatgtgcgtgtgtgtgtgtgtgtgtgtgtgtgtgtgtgtgtgtatgtgtttgtaggggaggcaagtggagaatgctaaaggtccaaaatacttggttaatagatcctg

SEQ ID NO: 445597 - DNA, 201 bp, Homo sapiens
tatttccgtggacacctgggcacactggttttctggtcgaccgccctgccacaaagccattttcagcacagttctcagcattcaagtggggaggaggaagygactgacttggtcctgacagcgagctttgagcctgtgaacacagagtgggttccctttagagatgagaagtacccacgacttgaggttctccagggcttt

SEQ ID NO: 445598 - DNA, 201 bp, Homo sapiens
catcagtgatttacaagagttgattttttttttttgtgccaattgattgcttaacaggttgggaacctgtgggagaattccacttgcttagagatgtcagkatttaaaggtatacactttggcttcagctggcttaggttctgcctagagagaaacagctttaatataccttgaggcaccaacttcttggtctgtgaagct

SEQ ID NO: 445599 - DNA, 201 bp, Homo sapiens
ggagcagagggccctgatctggaacatccaatctctctggcctaaaaataaacctgggttttaagaaactgtggtgtgtgtgtgtgcatgtgcatgtgcgtgtgtgtgtgtgtgtgtgtgtgtgtgtgtgtgtgtatgtgtttgtaggggaggcaagtggagaatgctaaaggtccaaaatacttggttaatagatcctgg

SEQ ID NO: 445600 - DNA, 201 bp, Homo sapiens
gagcagagggccctgatctggaacatccaatctctctggcctaaaaataaacctgggttttaagaaactgtggtgtgtgtgtgtgcatgtgcatgtgcgtgtgtgtgtgtgtgtgtgtgtgtgtgtgtgtgtgtatgtgtttgtaggggaggcaagtggagaatgctaaaggtccaaaatacttggttaatagatcctgga

SEQ ID NO: 445601 - DNA, 201 bp, Homo sapiens
agcagagggccctgatctggaacatccaatctctctggcctaaaaataaacctgggttttaagaaactgtggtgtgtgtgtgtgcatgtgcatgtgcgtgtgtgtgtgtgtgtgtgtgtgtgtgtgtgtgtgtatgtgtttgtaggggaggcaagtggagaatgctaaaggtccaaaatacttggttaatagatcctggag

SEQ ID NO: 445602 - DNA, 201 bp, Homo sapiens
ttgtaaaagtatgttttattgttttttaaatagacactgtttgaaacataataaaagtggccagtggcccattttctttttttctttttctttcttttttktttttgagatggagtttcgctcttgttgcccaggctggagtgcaatggcgagatcttggctcactgcaacctccgggaggaatgctgggttaaataattg

SEQ ID NO: 445603 - DNA, 201 bp, Homo sapiens
ttcaaggctgtaagggagggtggaagccagatggcaggggtctgagtcactgaatcaccactcatcagcagcaactcttgtactgggtctcagtgagcaasaaatagactctatcatttaagtttcttaggtttgggatttagtgttagatcagagggcatttccctagtgtgtccccagtttcctcacctctagatgctg

SEQ ID NO: 445604 - DNA, 201 bp, Homo sapiens
cttggcccactttttgatgggttgtttgttttttttttcttgtaaatatgcttaagctcctcataaattctggatattagacctttgtcagatggatagaytgcaaaaattttcaaccattttttaggttggctgctcactctgatgatagtttcttttgctgtgcagaagctctttagtttaattagatcccatttgttg

SEQ ID NO: 445605 - DNA, 201 bp, Homo sapiens
atcagaactacttgtataagaaaattctgtttggaacaatgagaacacatggacacagggaggggaacatcacataccggggtctgtcatgggctgggggkctaggggaaggatagcattaggagaaacacctaatgtagatgatgggtcgatgggcgcagcaaaccaccatggcacgtgtgtacctatgtaacaaacctg

SEQ ID NO: 445606 - DNA, 201 bp, Homo sapiens
ctaatcgggagtgttggtattatgcaatagaaaattcagaaaataccacatttttaaaatgttctctcctgagttcagaacttcctctgaggtaagaagamtccaatgggtagagtaccaggtatattccaaaaagaatgctgggatcctgatttagcaatgtgatctcctctcatggatggccactgacataagttggct

SEQ ID NO: 445607 - DNA, 201 bp, Homo sapiens
tgaaatggggaagtcgagaaagggagcctaagaagaaaggaaagtagggaatactattttagcaatattgaatttgagatgatggtaactcattcaagttrtttggagagtgaggcatgggacttgtccacggtcacattactcaagagtaacatgagtgaggacatgaatccaggacacttaaccatcaaaacctttata

SEQ ID NO: 445608 - DNA, 201 bp, Homo sapiens
tatttatttatttatttattattattatactttaagttttagggtacatgtgcacaatgtgcaggttagtcacatatgtatacgtgtgccatgctggtgcrctgcacccattaactcgtcatctagcattaggtatatctcccaatgctatccctcccccctccccccaccccacaacagtccccagagtgtgatgttccc

SEQ ID NO: 445609 - DNA, 201 bp, Homo sapiens
cttcctgtgtacatgtgttctcattgttcaattcccacctatgagtgagaatatgtggtgtttggtttttcgttcttgcgatagtttactgagaatgatgrtttccaatttcatccatgtccctacaaaggacatgaactcattttttatggctgcatagtattccatggtgtatatgtgccacattttcttaatccagtc

SEQ ID NO: 445610 - DNA, 201 bp, Homo sapiens
ttgaactagtttacagtcccaccaacagtgtaaaagtgttcctatttctccacatcctctccagcacctgttgtttcctgactttttaatgattgccattytaactggtgtgagatggtatctcattgtggttttgatttgcatttctctgatggtcagtgatggtgagcattttttcatgtgttttttggctgcataaat

SEQ ID NO: 445611 - DNA, 201 bp, Homo sapiens
ataaggctatactgagatgttgccttctaacctccctacagcccttccaagcagatggttggtgtgacactatcaacaaccgagcctactgccactatgaygggggagactgctgctcttccacactctcctccaagaaggtgagtgagagaacctggggatgggggaggcagtggcttcaggaataaaggcagggtcttc

SEQ ID NO: 445612 - DNA, 201 bp, Homo sapiens
ttcttatccattcatcctttgatgagcacttagtttgattccatattttagctattgtaaatactgctgcagtaaacatgggagtgtaaatatctcttcawtatattgatttcttttcttttggatatgtacccagtagtggaactgctggatcatatggtagttctagttttatctttttgaaggacattcgtatagttt

SEQ ID NO: 445613 - DNA, 201 bp, Homo sapiens
gtctttttgataaagccgttttagctggtgtaagatattatctcatgtggttttggtttgaatttccctaaggatttgtgatgttgagcatttttttcacrtgcctgttggccatttatatagcttcttttgagaaaggtttattccggttttttgcccgattttaaatcggattattattgttattttactattgaggtt

SEQ ID NO: 445614 - DNA, 201 bp, Homo sapiens
tgggggtgaggtccagcaatcagttttaccaggcctttcagaggactctgatgtacttgcaggtgcaggattcgctggtctagagtgtggggaaaatagtwgcagaagaatgacagttttgagggacttgaagaatacatcaacactaaggttgcttctctgatcccgaatctctttcctttctgttcccctcagcttcat

SEQ ID NO: 445615 - DNA, 201 bp, Homo sapiens
ctttacatctattaatgtatactttatataattgggagctccagtgtttggtgcatagatatttataatcattatattatctcgctcaattgtcccctttktcattatatggtaaccttctttgtctctttttacagtctttgatttgtagtatatttaatctgaaataaatgtagctactcctgcccatttttggtttct

SEQ ID NO: 445616 - DNA, 201 bp, Homo sapiens
gaccagatggaattgctactgctctttcaaaaagcatctcacttgagtatgtctctatgaattcttattataaagagaaaaatgaatcttatttgtgatawctgcataaaaaaaccaatgttctatttcaactttatcacttgtgcattgtgtgatagttgtttaacttcttttgtttcctctttatttatatgttgtcat

SEQ ID NO: 445617 - DNA, 201 bp, Homo sapiens
caccataagccattttattgaagctgagcccatagtgctggacaactgaaaggtcttcagctactgctgagatactaagataagtgttttgtttcttcagwccactccttctggatctatttgttattcaactgtagtgctatttaaattacttttctttgaccaactagctggaggcgtgaggatgttttgtacctcctc

SEQ ID NO: 445618 - DNA, 201 bp, Homo sapiens
gttttctgtatgtcttttaattgtagaattgagttgtttatattcagttattaataaatgaggacttgctactgccatttcttgcttgttttctggttgcktcatattttgttctttcttcttttattactgtcttcctttttagttatgtgattttctctggtagattgttttaatttgttgctttgtaattttcctaga

SEQ ID NO: 445619 - DNA, 201 bp, Homo sapiens
tccacatgtcagggggagggtcagcagcagggtagtgatcttcagaagccacttgaccatgatagagaaaggaaaattttgctgacttgagaagagtaaarttggcaagagatcctgaatgttatgagtcctttaaaagtcttttctattgacagttttgttgttgttgttgttgttaaattaagcctatggttagcatca

SEQ ID NO: 445620 - DNA, 201 bp, Homo sapiens
catagccttgtagtataattttaagtcaggtaatgtggtgcctccagctattttttttttcttaggactgctttggctgttcaagctgttttttccatatraattttaggatttttttctaattctttgaaaaaatgttgcattttgatagagattgcactgactctatagattgcttgggaagtatgattgtttgaatga

SEQ ID NO: 445621 - DNA, 201 bp, Homo sapiens
tcttaggactgctttggctgttcaagctgttttttccatatgaattttaggatttttttctaattctttgaaaaaatgttgcattttgatagagattgcaytgactctatagattgcttgggaagtatgattgtttgaatgacattacttcttccattccatgagcatgggatgtttttccatttgtttgcatcatctaca

SEQ ID NO: 445622 - DNA, 201 bp, Homo sapiens
ctctttcctcaattgctttagaacattttaaagattttcttcaaatcctgttttcaagcaaagcattctttctgtaatctccctctctctctctctctttmacacacacacacacacaccagaagtcagttatttttgacagcatacatgcactaaactgaactctagactttctgtttttttttgaaatagagaaagtaa

SEQ ID NO: 445623 - DNA, 201 bp, Homo sapiens
ttttggcctgcaagtaataacaattaacaatataatttctctttcaagtaactataggaaacattttatgaaatactttgctaccacataaatgaagaacrtaatttttccagcctcctgaaacatttattttgcttcctgcccctccattccagagccaatctcatacattttaggttttttgtttgtttgttatggtaa

SEQ ID NO: 445624 - DNA, 201 bp, Homo sapiens
gtttattattattataatcattctacagctgccccaagaacttccattttcattcccactctctggcctaatgtttttccctttctcattctgctctgaaygaagtctttttggtcagataagtcaatgtatctttaattcagagaggtgaaacattccatgtgtgtttctgataatttgctgttgccacatggctcattg

SEQ ID NO: 445625 - DNA, 201 bp, Homo sapiens
tccggtatctcttcacatttccaaccttggcccaagcattcccttaaacacagggtcaaaaagagtccaccggaggaaagcaaccaaaatggtggagaggrctcctaccgagaagcagagacctttaactcccaagtaggactgcccatcttatacttctctgggaggcgggagcggctgctgctgcgtccagaagtgctg

SEQ ID NO: 445626 - DNA, 201 bp, Homo sapiens
atgtctttaaaggagtcagtgaaagagaatcctgcaatgacccctgcaaggagacagtgccatccatggaaacgggagacctctgtgccgacaccgccccyactcccaagagtgagctgtgccgggaaccagagcccactagtgacacctgtggcttcactcgcttcccaggggctccgttcaccaactacatgagctaca

SEQ ID NO: 445627 - DNA, 201 bp, Homo sapiens
gaacactagttttgatgttgtacaggttggactagagtggatgtgatattagaggcagaaaaataagaatacattacagaatatcagaaataaacaatctrttccagatactatatattttttatattatactattgtggttgatgcagaattgaaactcatataaatatatttttaaatatctagaagtaagatctttat

SEQ ID NO: 445628 - DNA, 201 bp, Homo sapiens
atgcagcgtatgtttaacctttatgtttcccataatatttcccttcaacttctgtgaaccatcaacaaaggacccagggcatgcctcactttgtggctgtrgtggtcacaaaccctttggtttccacagggaggtcacacctggacagatgtatcagtaccaagttctagctgaagctggaggagaactgggagaagcttc

SEQ ID NO: 445629 - DNA, 201 bp, Homo sapiens
ccacagtaatatattgtctcacagttctggagctagaagtccaagatcagcagggttggttctttctgagggctgtgagggagattctgtcccaggctcckctcctagcttttagtagtctcaggcattccttggcttgtagctgatattcattctgtatctccacataatcttccctctatgtgaatctgtccctgtgtc

SEQ ID NO: 445630 - DNA, 201 bp, Homo sapiens
gttggttctttctgagggctgtgagggagattctgtcccaggctccgctcctagcttttagtagtctcaggcattccttggcttgtagctgatattcattytgtatctccacataatcttccctctatgtgaatctgtccctgtgtccaaatttccttttagaaggacatagtcatattagattagggcccactctaatga

SEQ ID NO: 445631 - DNA, 201 bp, Homo sapiens
ctggcttccttcttgaataattcctatcaatctacaataaggctatttaactgactaataaactacagcacaaagaatcacttttcctacacttttacttkgtttagttgggaaccaagcagtagttgaagtttgcgtgtacatttagatactgggatgtggctggagagccagctgtcggggcatggcagaagccagaga

SEQ ID NO: 445632 - DNA, 201 bp, Homo sapiens
cacttttcctacacttttactttgtttagttgggaaccaagcagtagttgaagtttgcgtgtacatttagatactgggatgtggctggagagccagctgtyggggcatggcagaagccagagagaatgcactaaggctgggaggcaatgaaacacggtagactggaaacctggcaatggctaatcccaaactagtaggtga

SEQ ID NO: 445633 - DNA, 201 bp, Homo sapiens
catttttgattctctttctataattctaatgataaaatttcaagcaccatcatctgattggctagggtccttccaattctaatttatgagtagttacctcyaggtacattcaggcctccctgggtcaagtaagttatcatattaaatattaatattagtatattatgtgagatgaaaagagattaagtttcaaatggtatg

SEQ ID NO: 445634 - DNA, 201 bp, Homo sapiens
gagttacttcacttagaataatgttctccagctccatctaggttgctgcaaatgccattattttattcctttttatggctgagtagtattctatggtatayacatatactgtattttctttttccactcattgattaatggacgtttggactggttccatattgctgcaattgtgaattgtgctgctataaacatgtgtgc

SEQ ID NO: 445635 - DNA, 201 bp, Homo sapiens
ggatagcaggtgggacatgttaatagtgatagaacagttcagtatcttgactgtggtggtgattacacaaatgtatatatgtgataaattgcatacaactacacacacacacacacacacacaactgcatgtaaaaactggtgaaatctgatagacatctatgatctctataaataagcaaggtattttgcatatagcagg

SEQ ID NO: 445636 - DNA, 201 bp, Homo sapiens
gatagcaggtgggacatgttaatagtgatagaacagttcagtatcttgactgtggtggtgattacacaaatgtatatatgtgataaattgcatacaactacacacacacacacacacacacaactgcatgtaaaaactggtgaaatctgatagacatctatgatctctataaataagcaaggtattttgcatatagcaggt

SEQ ID NO: 445637 - DNA, 201 bp, Homo sapiens
atagcaggtgggacatgttaatagtgatagaacagttcagtatcttgactgtggtggtgattacacaaatgtatatatgtgataaattgcatacaactacacacacacacacacacacacaactgcatgtaaaaactggtgaaatctgatagacatctatgatctctataaataagcaaggtattttgcatatagcaggtg

SEQ ID NO: 445638 - DNA, 201 bp, Homo sapiens
tagcaggtgggacatgttaatagtgatagaacagttcagtatcttgactgtggtggtgattacacaaatgtatatatgtgataaattgcatacaactacacacacacacacacacacacaactgcatgtaaaaactggtgaaatctgatagacatctatgatctctataaataagcaaggtattttgcatatagcaggtgc

SEQ ID NO: 445639 - DNA, 201 bp, Homo sapiens
tgatgagttaaatatcagttttggagaaaattgttctctctggtttaggagccctcccagatggagctgcaaagtcattgctcctccttactggttctcarccagtcctaagatggttctatttctcttatcccagctgtatccatcggccctgtgggaagcaggacagctgtccgtcattgctgcttgatcatgctgatg

SEQ ID NO: 445640 - DNA, 201 bp, Homo sapiens
agccatcttgatatctatctatttgaattttacatattccaagaagacttgcagacccacaaatgtgtcatcattgggaccctccatcccgaggaatgaasagtggaagagttgaacaacgacatttccttttttccgcacatgacagcaatgagcagcaaaacgtctggttttagcattctgagtcttggaaataagtgt

SEQ ID NO: 445641 - DNA, 201 bp, Homo sapiens
gcttagaccaatgcaatgtgtcactttcaaggcaaaagttgcaagggccatctcatggttttccatatctcttttcctctaccatagaactgtttatgtcycagatgggtactactccttcagatggatgatgaaatgaagataatacggaacagagctataatctacccataatgggtgggcagcataagtgagaataaa

SEQ ID NO: 445642 - DNA, 201 bp, Homo sapiens
acgacatttccttttttccgcacatgacagcaatgagcagcaaaacgtctggttttagcattctgagtcttggaaataagtgtttctgggctgtaggcatmtgttgatgtgattggagcatagtgttgcttcctcctggggatatcagcctccaggggaatacaccaagccccaagtctccgaaggagcaacagtgccagg

SEQ ID NO: 445643 - DNA, 201 bp, Homo sapiens
ccactgtggggtatgcctataggcatggatccagcaaaggacgatgagagggagaggcacaatgggactagattgtggttggtcttaaatgcgagcatgaraaaaagcacacttgaagttcaggaggtcttggagagcccgtgaggacttctgaagaaggaggctttgtaattagatagctcgatagtgtttacaggtgta

SEQ ID NO: 445644 - DNA, 201 bp, Homo sapiens
agtaaacctttctttaatatttcatatttaacctgaaagcaaattgtattggttctacatacagaatatacccagaattggaccacatccactactacctycctggtccaacccatctttatctctcacctagacactggcattgtctcctgactagatttcctgctttggcacttttgtctcaacactttaatttcaatc

SEQ ID NO: 445645 - DNA, 201 bp, Homo sapiens
tcacttctctggatattttcattatgcatatgttacactttttgtagttgtcctacagttctttgatagtctgttcaggttttattttcagccatttttckgtttgctttgcagttcagaaatttctattgatatttcatcaagctcggggattctttcctcagccatgtctagtctactgttaagcccttcaaaggcatt

SEQ ID NO: 445646 - DNA, 201 bp, Homo sapiens
caagctcggggattctttcctcagccatgtctagtctactgttaagcccttcaaaggcattcttcatttcccttagtgtttttgatttctagcatttcttyttggtcgtttcttaaaactttcatctctctacatctctacattacctgtctgttcttgcatgtcatctgttttatccattagaacctttagcttattaat

SEQ ID NO: 445647 - DNA, 201 bp, Homo sapiens
ccttagtgtttttgatttctagcatttcttcttggtcgtttcttaaaactttcatctctctacatctctacattacctgtctgttcttgcatgtcatctgktttatccattagaacctttagcttattaatcataattgtattaaattcccagtctggtaattccaactctgccatatctgagtgtggtttttattcctga

SEQ ID NO: 445648 - DNA, 201 bp, Homo sapiens
attaagaaagacttcacaaagaaagtggcatttgagtgaaatcttaattctctaggtggggagcaaactgagggctttcaaatggaggaaaatcacaagcrcaggcctagatgcaggaaagctcaggtactttttgaaaccaggtgagcagtccactgtggggtatgcctataggcatggatccagcaaaggacgatgaga

SEQ ID NO: 445649 - DNA, 201 bp, Homo sapiens
tttttttctaatattaatttaccttgcttttctctaactggcaactaagtgagaaaatcctacctagcatattgggtgacgcagaggtgctatgactgcargaaaagaacaaatagttacctggctgaatgagaaactcttcccctaatagagttgatcatgaattttctatgatttctagtctattccaattagttcagg

SEQ ID NO: 445650 - DNA, 201 bp, Homo sapiens
ttcgcctcctctgaaccacattcatggagctccttattgtggagatgggaaggtgtcagagtgagtattttgtgtgtgtgtgtgtgtgtgtgtgtgtgtgwgagagagagagagagagagagagagagggagggagagagagcagggacactgttctctaaacagaagtttcaggagtttgacttgttttggaaatgtagg

SEQ ID NO: 445651 - DNA, 201 bp, Homo sapiens
agatgatggtgctcgaggaaaaaaacagaaagatgtggtctcataaggaaagagtggacatacaactgttagctagacatcagtgatttacaagagttgattttttttttttgtgccaattgattgcttaacaggttgggaacctgtgggagaattccacttgcttagagatgtcagtatttaaaggtatacactttggct

SEQ ID NO: 445652 - DNA, 201 bp, Homo sapiens
aagagtttatgggtcaaggtggcccattgtactgtttttgaagttggtcaacaaggtggcttggttaatttaggctcagcatgttttactgtatgttactaaaaaaaaaaaaaaaaaaaatcagattctctttttccagcactagtcaagcacaaattcttagctgcctaccaccctttccccaccaaaaggtgacatcta

SEQ ID NO: 445653 - DNA, 201 bp, Homo sapiens
agagtttatgggtcaaggtggcccattgtactgtttttgaagttggtcaacaaggtggcttggttaatttaggctcagcatgttttactgtatgttactaaaaaaaaaaaaaaaaaaaatcagattctctttttccagcactagtcaagcacaaattcttagctgcctaccaccctttccccaccaaaaggtgacatctaa

SEQ ID NO: 445654 - DNA, 201 bp, Homo sapiens
ctaatttattaaagccccttttggcttcacagtgattgaatctctgccccaagacttagccattcacatacacacctgggtgcaggccagatcttgactgmgggctacaaggggcctggtgactggcatccatgctctcacttcaaactcagcccttgttgaattcataaatttccctattaacttcaacctcaaactaga

SEQ ID NO: 445655 - DNA, 201 bp, Homo sapiens
tgtatgttaccagaagttataaagtgactccttagaggctgaaatggaatatttgatgtttatcagaaaacataattaaggattggagagctattcattcygtgctctgaaaggcttttcaaaactttcattgcaggtggcattgtcctcagcccagcatattatgggatgcctggccacaccgacaccatgatccatgaa

SEQ ID NO: 445656 - DNA, 201 bp, Homo sapiens
aaattagccagttgtggtggctcaatgttgtaatcccagctgctcgggaggttgaagcaggagaatcgcttgaacctaagagacggaggttgcagtgagcygagatcatgccactgcactccagcctgggccacaaaagtgaaaattcatctcaaaaacaaaaaaagtgaagctatgggggtccagaggaattgagattat

SEQ ID NO: 445657 - DNA, 201 bp, Homo sapiens
aagggtgaatgaagaagaacaatcatgaaatggaagaaggaggaagagcatgaaggatcttataagaaatgcaagaggatattgataggtgtgaactagtycatcaagtagcccaagtaggagagaatcataggcaaaagtttctttaaagtggcagttgattaacatggaaggggaaatatgatagatatataaggaccc

SEQ ID NO: 445658 - DNA, 201 bp, Homo sapiens
gggtggggggaccgcagagaaaactcatgtactggctgagcaagtctgggtgggggtggggagaccaggtgttccacactgactgttctcgtctatgctattttatgagtctattaatcactggtactggttgtgctttggatatgatctgagctaggctccaggaaggggaaaatattttttgttatctttttttctgta

SEQ ID NO: 445659 - DNA, 201 bp, Homo sapiens
tactctgtgcaacgcacaggggatacagaaataaatatggtttcaaaccttctggtgctcgggaagactgtgccctgatctttgttttagacaatgcagcrtatgtttaacctttatgtttcccataatatttcccttcaacttctgtgaaccatcaacaaaggacccagggcatgcctcactttgtggctgtagtggtca

SEQ ID NO: 445660 - DNA, 201 bp, Homo sapiens
aggaaattgttaagagaataattaataactatatattgatggacagctggcaaattactggaatagccctgtggtattgctgtgaagaattgaacatgaaraaaaggaaatagtaacagtaaattttagtaatgctcttattgaatatatacctaggtgttgttattttgaatcttaatcttattttcatgtcctattttt

SEQ ID NO: 445661 - DNA, 201 bp, Homo sapiens
tggagagagcacagaaaataaaaggaaaccagtagtatttccaaggttctgtcattttgccagcctgccaaggaggcagatgctgtagacagatttgaccrtaagctctggttgaaatgactctcaggccgtgtctggttttgtgtgcaaccatagcactgcaggcagaggaagtctggagattgaagtggcagcaaaccc

SEQ ID NO: 445662 - DNA, 201 bp, Homo sapiens
tttgtgccttctttatttctttcatcagtgtgttgtagttttccttgtagagatcttttacatccttggttacacttatttccaggtattttattgcttcygtagctattctaaatgaaattcctttcttgatttcttttttagattgatcgctgttagcatataaaaatgttactgattttggtatgttgattttgtatc

SEQ ID NO: 445663 - DNA, 201 bp, Homo sapiens
gtctctttagactgtgctttttgagttttcacttctttcctgccccagcaccagtttctatggcggtttctgctctggcaagttatgagtctctatattcrcctatcagtctctccaatttaaggggcaatggtttgctctgtggctccacttctcttagaagtaaaaagagttgttgatttttcaagttgttccactttt

SEQ ID NO: 445664 - DNA, 201 bp, Homo sapiens
atgtaatcatgaaagcatccacgtcccaagccagaatagttcaacccaaatgcgaagagttgataaagtccattctgataaactggaatgtccagaaggamttcagtgcctttatggagttacctgtaattgtggaaagcttgacaggtaaaaaaaaaaaaaaaaacaaacaaacttaccagaagacaccctgaaactttc

SEQ ID NO: 445665 - DNA, 201 bp, Homo sapiens
tcagcttttctgtaggtcagtgagtcaggcatttaagaaagttgcattgacttttcacctcactttggaatcactcaccaccggaaacaaggcagtcaggygcctttcattggtactcctcacatgaagacagcatttaaaggtcgaagggtgactggccaccttcgacatggcagaaggaaaccataaaatgagaagagc

SEQ ID NO: 445666 - DNA, 201 bp, Homo sapiens
agggaaaacatacatggctagcatctcagctgatggaagaagctctctgctcctcactaattaagctaattaacaattcatcataacagcctgtgaggttyccctgtcacgggtatctctactcacaaaaaaataatagcatcattagcaacaacctgtcaggaaaacaaggcacaaagttctgaggaagcagtcacttac

SEQ ID NO: 445667 - DNA, 201 bp, Homo sapiens
ggggcatgttggatctgggggagcaagggtagtgggaacaagagctcttggggaatctctggaagatactctagcagtggcggaagtgggactttccctamctgctactgttggctgggctacatttcttggagacattggaccctcactcaatagagactttaggaaaagtcccaagaaagatctttccattactccaga

SEQ ID NO: 445668 - DNA, 201 bp, Homo sapiens
atgatgtgtgagtgggaaaactgcgtgttaatttccagtttgtgatattggcacataattctacagttcctctgggaccaagtgaggaaagtgaaagctcrtttaaaagtgtgaagctatcacagaaatgagctatttctacttccctttcattcccctaggtcattccatttgctgctgactgtgacctggatgagtgca

SEQ ID NO: 445669 - DNA, 201 bp, Homo sapiens
agcatttaaaggtcgaagggtgactggccaccttcgacatggcagaaggaaaccataaaatgagaagagctcagaattccagggcaataaagaaaggaaattttgaaagcaggtttcagtagttctagagttgccttgaaaatatccatggaagaggacctcaggaagaaccagaaagttaatgagaaggaaaggccagtc

SEQ ID NO: 445670 - DNA, 201 bp, Homo sapiens
gatagcttccctattttaagatcagctgatcagtaatcttaatcccatttacaatcttaattctcatgtaacataatttctttccataatttgccatgtarcacaacatatttacagattccagtgattaggaagtagacatctttgggtggccattcttctgtctcccacattaacacagaaaaattttaagagatggtt

SEQ ID NO: 445671 - DNA, 201 bp, Homo sapiens
aaaaaatttaaaacatagccatagaggtaggtgtgaaatttcctgattctcactataaaactcagaacttcttagttaatatgttcattattccagtgtgrcattgaccttgttcttgtgccatagctccaatattgtgaagtgaattctggagaaagcagtgtctgttctttgtaaggattaggcagaggattggctctt

SEQ ID NO: 445672 - DNA, 201 bp, Homo sapiens
taatactatgcatttgaaatccaatcaagggtccttattttgaaaagttgtttttgttttttaaggctaaactcaggaaccatctgcatttagcatattcstgaacatgagcccacatgtgtgtggaagtgtgcatgtaaagtgttggtgaaaacaaatcatatcttggtcccatcaggctgtgagactgcattcccagaa

SEQ ID NO: 445673 - DNA, 201 bp, Homo sapiens
tcaagtttaataggtgctaagtaaagtcttttatttcccttctggataatcccctcaccaaaccctttcatccagttcaaatgcccgggtgctggtgcagytaggcagacgagaatcattctgacagcagagcttaaatgactcaggagtcgctccaatttcctcatctggctgccaggatttgtatggaacgtagggtat

SEQ ID NO: 445674 - DNA, 201 bp, Homo sapiens
tagggactacaaaaagagaaggtaattcctagggaaggaagaagagaaagaaatgaaaattagagaataagattattttgaatgacttcaggtagcgaggmgtgtgtgtttgtgagtgtgtatttgagagacttggctcatgcctgtgggtcttctcttctagtatcagtgaggggagggattactgaagaagaagggggg

SEQ ID NO: 445675 - DNA, 201 bp, Homo sapiens
gcagcacgttaacctgcttgtctttggttctaacccactaacctatcatttttccttaggtggaatattcactttaatttcttaggaattcagtttgctarattgtaaaatgagaatgatggtaaacagactttttttacaacacagtctaatgtgttgtaaatgcagtagaatcagaggccccaaagggctcatttattt

SEQ ID NO: 445676 - DNA, 201 bp, Homo sapiens
aggcacatttagctcaggaaacaaacaaacaaaaaagacaactggggattgttcagtatattgaataacattattgagtgtttttagcattccacgtcacrctatgaggaattattaccattgctaccatccttgttttactgatgaggaaactgaggggctgagaatttaattaacttcccaaatctcctgagctagtaa

SEQ ID NO: 445677 - DNA, 201 bp, Homo sapiens
aaatagttaaattgataaatttaccaaataacttacgtgttttgctcatacttacttcacccaggcagacaatgccctgatgcacagagccggcttttccrattgtgttttataggtacctacctctactaggtaattttaggggtgttatgcatggtctcatttatcccccgagtagttgtcttccaaatgtggttcata

SEQ ID NO: 445678 - DNA, 201 bp, Homo sapiens
ctttctaatgtgaaaaatattaaacttggtgatgcatgtctgaaatgctgttagggtctgggaatggtctctggctttagaactgcttgtgaccctgatgrcactacagctaagactggagtgcctgcaggctgcccatcttgctcattggccagattgcctctgacctggttccatgtcctgtgggcccagcctgagcgc

SEQ ID NO: 445679 - DNA, 201 bp, Homo sapiens
tgttaccatctctcacctgaactaatgtaacagccccctcaccaaactgaggaagtgcaaagaaaggagaaaagagtctgaatacaaaattatgtctgcartaggatagtatttgtttgctgggtgtaatgatgagagaggagttaaagataaagtaaacaggattggaaagatggcagtggtggatgacagtaccgtggg

SEQ ID NO: 445680 - DNA, 201 bp, Homo sapiens
cttacattaagtctggtataactctctagagcagctattcatttcttccatcttattactctgtcctttcaaaatgtgatctccatggttgcctccttgargacagaggaggaatacaaagtgaggccggtaactcttgattcccttggactaaaagtaatgcatcatttctgttggtcctcccattcaccagatatggtc

SEQ ID NO: 445681 - DNA, 201 bp, Homo sapiens
agtgttgatccaatgagggcttataaatagaagaatatgaattaatcaaggtaggctgtggtcataaattaaccctaaaattgcagtgatttaccattacwtttctcacttacattaagtctggtataactctctagagcagctattcatttcttccatcttattactctgtcctttcaaaatgtgatctccatggttgcc

SEQ ID NO: 445682 - DNA, 201 bp, Homo sapiens
gccagtgcactccagcctgggcgacagagtgagactccatctcaaaataaataaataaatactccagcctgggcgacagagtgtgactccatctcaaaatmacatacatacatacatacatacatacatacatacatacatacatacatacatacgtagtaatcccagctactctggaggctgaggcaggagcattggtta

SEQ ID NO: 445683 - DNA, 201 bp, Homo sapiens
cttctttggagaaatccatattcaagtccattgcccgcccccccgcacccccccctttttttttagtctcacgctgttaaccaggctggagaacagtgacrcaagttaggaactgtagcctccgccccctgggttcaagcgattctcctgcctcagcctcccgagtacctgggactacaggcatgcgcctaatttttgtat

SEQ ID NO: 445684 - DNA, 201 bp, Homo sapiens
gtgcactccagcctgggcgacagagtgagactccatctcaaaataaataaataaatactccagcctgggcgacagagtgtgactccatctcaaaataacatacatacatacatacatacatacatacatacatacatacatacatacatacgtagtaatcccagctactctggaggctgaggcaggagcattggttaagcc

SEQ ID NO: 445685 - DNA, 201 bp, Homo sapiens
ctatctcggctcactgcaacctccgcctctcgggttcaagtgattctcctgcctcaagcctcccaggtagctgggattacaggcatgcgcccccacgcccrgctaattttgtatttttagtagagacagtttttccatgttggtcaggctggtctcgaattcccaacctcaggtgatccgcccacctcagcctccgaaagt

SEQ ID NO: 445686 - DNA, 201 bp, Homo sapiens
tacaggtatacttgtacttgcacaaaatatcttacatacaaatgtattcattagtgcattgcttttaatagcataagatttgacctaaaagtccattaatrtagtactggttttataaaatgatacctatgtgtactagatttctgtgtagtcaccaaaatgagtatgaagtagctctttgaacattaatgtgagacactc

SEQ ID NO: 445687 - DNA, 201 bp, Homo sapiens
ttttagacctgacaacagagcttttttgacacaaagttctaagcctgtgtctgggcagttgtttgcattaccttttattttttcttttattattttttgcytaccaactacctctaaagatttcattactttttaagccttttttttttttaatctttttaaaaattaaatagagacagggtctctctatgttgcccaggc

SEQ ID NO: 445688 - DNA, 201 bp, Homo sapiens
cttgaacctgggaggcggaggttgctgtgagccgagatcatgccatggcactccggcctgggtgacagtgagactctgtctcaaaaacaaaaaaaaaaaamcaaaaaaaaacaccacacattataggggataaccagtgaattggagattgagtatctgttaggatgggtactgttattactttgaggaaaaagttgatat

SEQ ID NO: 445689 - DNA, 201 bp, Homo sapiens
agtgcagtggcgctatctcggctcactgcaacctccgcctctcgggttcaagtgattctcctgcctcaagcctcccaggtagctgggattacaggcatgcrcccccacgcccagctaattttgtatttttagtagagacagtttttccatgttggtcaggctggtctcgaattcccaacctcaggtgatccgcccacctca

SEQ ID NO: 445690 - DNA, 201 bp, Homo sapiens
ggtttgccatgttgcccaggctggtctggaactcctggactaaggtgatctgcccacctcggcctccaaaagtgctgagatcacaggtgtgagccaccacrcccggcctggacagtattttaactatcacactctcatgctttctcattctaacattttgaagtatcaactatgatttcatcaacctttacattccgtggt

SEQ ID NO: 445691 - DNA, 201 bp, Homo sapiens
caagctgaaactgcttagtattttttatatttaggaccaggtttctgtaaagtaagtttcaaacttactattgtcaaagatagaaagatggcaacgaagartgttggcacgtacacctctgctaatttattaggtcctaaaccctgaagtacacaccttgggaagaaaaagaaaatagaaggtaacaaaaagaaagaataa

SEQ ID NO: 445692 - DNA, 201 bp, Homo sapiens
tttgctcttgttgcccaggctagagtgcagtggcgctatctcggctcactgcaacctccgcctctcgggttcaagtgattctcctgcctcaagcctcccargtagctgggattacaggcatgcgcccccacgcccagctaattttgtatttttagtagagacagtttttccatgttggtcaggctggtctcgaattcccaa

SEQ ID NO: 445693 - DNA, 201 bp, Homo sapiens
ttttgagaccctgcctggctaacacaaggaaaccctgtctctaccaaaaaatataaaaaatagctaagtgtggtggcacgcacctgtagtcccagctactygagaggctaaggcaggagaattgcttggacccaagaggtggaggttgcagtgagccgagatctcctcactgcactccagcctgggcaagtgagcaagact

SEQ ID NO: 445694 - DNA, 201 bp, Homo sapiens
attgcatagtaatattttcatgtagtattttctaagttatattttagtaattcatatgttttagattataggttttaacatacttgtgaaaatacttgatrtgttttaaagccttgggcagaaattctgtattgttgaggatttgttcttttatcccccttttaaagtcatccgtccttggctcaggatttggagagcttg

SEQ ID NO: 445695 - DNA, 201 bp, Homo sapiens
tgcaaccttgaaatcctgggctcaagtgatacttccacctcagcctcctgagcagctgggactataggcatgagccccaccatgcctggctaatttaaagaaaaaaaaaaaattttttttttaagagatggggtcttgcaatgttgcccaggttggtctggaactcctggcctcaagctgtcctcctacctcagtgtccca

SEQ ID NO: 445696 - DNA, 201 bp, Homo sapiens
cagctactcaggaggctgaggcgagatgatcgcttgaacccaggaggcacagattgcagtgagccgagatcacgtcactgcactccttcctgggcaacagmgccagaccctgtctcaaaaaaaaaaaaaaaaaattgcattcacttgaaaattacttgtcatggtcacttgtatatttcattttctttagaatagctgtta

SEQ ID NO: 445697 - DNA, 201 bp, Homo sapiens
atcctgggctcaagtgatacttccacctcagcctcctgagcagctgggactataggcatgagccccaccatgcctggctaatttaaagaaaaaaaaaaaawtttttttttaagagatggggtcttgcaatgttgcccaggttggtctggaactcctggcctcaagctgtcctcctacctcagtgtcccaaatctcagggat

SEQ ID NO: 445698 - DNA, 201 bp, Homo sapiens
tactcgggacgctgaggcacgagaactgggggaagtggaggctgcagtgagccgagattgtaccattgcactctagcctgtgtgacagagtgatgctctgyctcaaataaaaaaatcccagggattcagtattattctaggtaaagtttcttgtcatatgccacatagtaaattggtaaaaaccaagtataattctgtctt

SEQ ID NO: 445699 - DNA, 201 bp, Homo sapiens
ctcacacttgcctcttgtaccctgccacgctaggttatgacgacctgacccaggggacagcagcaggagactactccaaaggtggctatgctggatcatcrcaggcaccaaacaagtctgcaggttctgggcctggcaaaggtagtgtttacctctcctttccaggataaggcctggagtggtgggctcctgcctgatccc

SEQ ID NO: 445700 - DNA, 201 bp, Homo sapiens
ttatgaataagtaaatggaaactattgggccaattttaggatttctctgtaactaccctgcttgataatttttatatccacttatagtcaagaatgtagtwtctttttctttctcagccatttatatatatatatatggtagattagatttggtatcaccattaggggagaggtggagaagggaggttatataaattattt

SEQ ID NO: 445701 - DNA, 201 bp, Homo sapiens
tgcttgaacctgggaggcggaggttgctgtgagccgagatcatgccatggcactccggcctgggtgacagtgagactctgtctcaaaaacaaaaaaaaaamaacaaaaaaaaacaccacacattataggggataaccagtgaattggagattgagtatctgttaggatgggtactgttattactttgaggaaaaagttgat

SEQ ID NO: 445702 - DNA, 201 bp, Homo sapiens
gtgtttcactgtgttgtttaccattagtctcatcattttcctgatttgaagtcattcttgtaggcctttcaatctaaaattaccttcacttgcagccgggygccatggcttatacttgtaatcccaacactttgggaggtcaaggtgggtgcatcacttgaggccaggaattggagattatcctgggcaacatggcaaaac

SEQ ID NO: 445703 - DNA, 201 bp, Homo sapiens
gtttatgtattagaaatgacgctcgccgggtgcggtggctcacgcctgtaatcccagcactttgggaggccaaggcgggcagatcacgaggtcaggagatygagaccaccctggctaacacggtgaaaccctgtctctactaaaaaaaaaaaatacaaaaaaagattagctggtgtggtggcgggcgcctgtagtcccagc

SEQ ID NO: 445704 - DNA, 201 bp, Homo sapiens
ctcctgcctcggctgcccagagtgttgggctttcaggtgtgagccaccattcctggccaccttctcaacttctttttggcatttctgttagcattgttggygggtttattggtattctcattttgtgtaatgacaaatagagaagtgagtctgcggttgagccctggtttgagtgtttcactgtgttgtttaccattagtc

SEQ ID NO: 445705 - DNA, 201 bp, Homo sapiens
cactgcgactgctgcctcccaggttcaagcaattctcctgcctcagcctccctaatagctggcattacaggcatgcgccaccatgtctggctaatttttgwatatatatatacattttttttagtagagatgggatttcaccatgttggccaggctggtcttgaactgatgacctcaagtaatccacctgcctcagcctcc

SEQ ID NO: 445706 - DNA, 201 bp, Homo sapiens
tgtcagaaagcatgtgagtggttgcctggggatgcagacaagttgtgggattgagtgattccacagggacaggtggaaattgtgggggagtaaagaatatrttcaccgtcctaattgtggtgatggtttcatgggggcctatgtatgccagacttattcagttatttggtttgaatatttgcggtttattggatgtgttag

SEQ ID NO: 445707 - DNA, 201 bp, Homo sapiens
accatgttggccaggctggtcttgaactgatgacctcaagtaatccacctgcctcagcctcccaaagtgctaggattacagccacgagccactgctcccarcctaagaaagaaaatattctttacaaaatttacataccatacatttcatccatttagtgtacaattgaatggtttttagtatattcaccaagttgtgcaa

SEQ ID NO: 445708 - DNA, 201 bp, Homo sapiens
aatttatcctgaatgccctaaaagtgagttaaaacagtgtgcatatatcccaaaataattatgctgagtgaaagaagccaggaataaaggtttggatactkttatgatttcatttaaaattctagaaaatgcagcctaatctgtagtgtcagaaagcatgtgagtggttgcctggggatgcagacaagttgtgggattgag

SEQ ID NO: 445709 - DNA, 201 bp, Homo sapiens
agatgaggtttcaccgtgttagccaggatggtctcgatctcctgaccttgtgatccgtccgtctcggcctcccaaagtgctgggattacaggcatgagccrctgcacctggccccattttacgtttttaccagcagtgcacaatggtgtgctccacatctttgtcaacacttggttttttttttgttttttttttttaaag

SEQ ID NO: 445710 - DNA, 201 bp, Homo sapiens
aagaatgaaactccatctcaaaaaaaaaagggggtggggaaccattcagtgttttattatcatgtttagatatgtcaatgtttatagtagttctcatttaytttttctctttttcgtaaatcgatttaatttgtaagtttcaggcaaaaatggattcactgggaatattaaaatatactaccttggggcaggcacagtggc

SEQ ID NO: 445711 - DNA, 201 bp, Homo sapiens
attacaggcatgagccgctgcacctggccccattttacgtttttaccagcagtgcacaatggtgtgctccacatctttgtcaacacttggttttttttttkttttttttttttaaagatagagcctcactctgtcacccaggctggagtgcagtggcacgatctcagctcactgcaacctctgcctcccgggttccagcat

SEQ ID NO: 445712 - DNA, 201 bp, Homo sapiens
agcagtgcacaatggtgtgctccacatctttgtcaacacttggttttttttttgttttttttttttaaagatagagcctcactctgtcacccaggctggaktgcagtggcacgatctcagctcactgcaacctctgcctcccgggttccagcatttctcctgcctcagcctcccaggtagctgagactactggcgcgcgcc

SEQ ID NO: 445713 - DNA, 201 bp, Homo sapiens
ccgagtagttgggactacaggcatgtaccactatgccccattaatatttgtattttttgtagagacaaggttttgccatttgcccaagctggtcttgaacwcctgagctgaagcagtccaactgcctcggtgttccaaagtgctgggattccaggcatgagccaccgtgcctagccaatatgtgttttgttacagattttg

SEQ ID NO: 445714 - DNA, 201 bp, Homo sapiens
aggagaatcgcttgaacccaggaggtggaggttgcaatgagccgagatcgtgccattgcactccagcctgggcaacagagcgagacttcatctcaaacaaygacaacaaaaacgaaaaacagaaacataatttaacacaatgaattataacctagacttagaatatagctcaataaattatcaaggccaggtgcagtggtt

SEQ ID NO: 445715 - DNA, 201 bp, Homo sapiens
gccaaggcgggaggatcacttgagccagagtttgagacgagcctggttaacatagtaagacctcatctatactaagaaaacttaaaaaattagcatggcatggtggtgtgcacctgtggtcccagctgcttgggaggctgaagtggggagtgtcacttgagcctggcaggttgaggatgcagtgagctatgattttgccac

SEQ ID NO: 445716 - DNA, 201 bp, Homo sapiens
tttaatgttttcctttgtaggaaactttaggattttggaccctttgtttaaacagtaggtgatggccgggtgcggtggctcacgcctgtaatcccagcactttgggaggccgaggtgggtggatcacttgaggtcaggagtttgagactagcctggccaacattgtgaaaccctgcctctattaagaaaatacaaaaatta

SEQ ID NO: 445717 - DNA, 201 bp, Homo sapiens
ttttgtagagttagggggtctctgtgtttctatgttgctcaggctggagtctttgaaaccctggtttgttgaggaccactctctggtacatcttgtctctsatactgtttgcctcatctcttacctagttgccatctgcagcacctatggctaaacagctttgattatcttcccttgactgagatagagttaattggagta

SEQ ID NO: 445718 - DNA, 201 bp, Homo sapiens
cactcacagctgctgcaccaccaccttccgcaggatgcacaggtgagtacagtgatggaggcagccaccctactctgggccaggggttctgctccagcctygacagccttcccttctcctcttcctcagagtggctcgggtcagcgcagccagcccagctccctgcagcccaagtctcaagcctccaaacctgcctacggc

SEQ ID NO: 445719 - DNA, 201 bp, Homo sapiens
ttcatcattacttcaagcatagcaccatgttgaagatccttgagaaaatatgtctaggagtgtgttttgtgatagtagcagaattccacttgtaagacttyagggtgtcatataacttagtatgtacatggaatgatgttttttcttcttttttttgaggggggagacagggtctcgctctgtctcctgtgctagagtgca

SEQ ID NO: 445720 - DNA, 201 bp, Homo sapiens
tcccaaaggcatgagccaccatgccccgccaagattttattattttttgttcttctgctttctcttgagctgatttcccccactctaccaagggaaagaarattcaagtaagtcattggccagttaagatgaacaatagctttaggtcgtttggtcaaaggaatgggtcctttatgttacttaatttgatgcttatttttc

SEQ ID NO: 445721 - DNA, 201 bp, Homo sapiens
cctggagtttgtataatcacccacccacatggcctggaaaggccttttgaaaagtgctttaaaatgcaaaaaatgtcaacaactcccacttatcccacttyagtcaagattatttgaaatgagtgtatataaaaaactcagaataaaagctgtttattagttccttatggcttttcttcctctaagatctttttgtaaact

SEQ ID NO: 445722 - DNA, 201 bp, Homo sapiens
gtataatgtggaaatgccatcttttaaaaacccatctctccctttgcttttcccttttacttcatctagttgtcacgacagtggtgctcttggctgtggcrctgggacttattggttggttatgattcaggaaaatgattgtctgatttagggatagtgagagtatatgtaaggtccttacatttacagggaacaattgag

SEQ ID NO: 445723 - DNA, 201 bp, Homo sapiens
ctatatttttgactttaacagttcataacaagttgtcattactccaaacccaaatgtataatgtggaaatgccatcttttaaaaacccatctctccctttkcttttcccttttacttcatctagttgtcacgacagtggtgctcttggctgtggcactgggacttattggttggttatgattcaggaaaatgattgtctga

SEQ ID NO: 445724 - DNA, 201 bp, Homo sapiens
ccttataggctcagaaacccaactgttgacagtataataaccacaaatctattcctgatatgagggaccctcaaattaaccaaactagaaagacttgtgtrtactcagaaggctaatttataaattttctaaaaactggtacctgttgaacagattagaatactctctttgatgagtgagaagggagcttggtaaacatgg

SEQ ID NO: 445725 - DNA, 201 bp, Homo sapiens
ccctgtggttgtgggtatgtcacctgctgccttaggctctggcaggggtacctgaccagcctcagcttgcctcttcctacactaatacctcatctgcttgyccccccaggtccctccagcctcagccaagcaacatggggtgaacctcagcactcccacacctcccttccagcaggccagtggttatggccagcacggcta

SEQ ID NO: 445726 - DNA, 201 bp, Homo sapiens
atggatagcaaacaaatccgtgagtgtgctcatcattattagtcattggagaaatacaaagtaaagccacattgagttacccccattcacctattaaaatkgctttaaaggaaatgaaaaattccaagtgctggtgaggattgtggaataacaggtactcatatacatgcctggtgggaaagcatacctatcatacaatct

SEQ ID NO: 445727 - DNA, 201 bp, Homo sapiens
aaaacaatattgagagaaaataaagaagacaataaatagagggatataccactttaatatattttagtcccactgttgtgacatttagtttttactgactyagtctttgaatttattaattcacggtggtccgtctcatgtaaattttccccactgatttttaaaaaaaattagatttgttgatgtagtttttatatgtat

SEQ ID NO: 445728 - DNA, 201 bp, Homo sapiens
taagaaaaataatatgaataaaattgatcttttaaacaggcattagagcagggtttctagccttggcattattgagattgtgtattggataatacttccayggggtggtaggatctcctgtatattgtaggttgcttagcaacatctctcttctctgtactattaataaatgtcagtagcacttcgcctgaagttgtgaca

SEQ ID NO: 445729 - DNA, 201 bp, Homo sapiens
tccatggtgttagctctttctgattttaaaagatgcagactgttttataatacaacctccctgtgtttagctgtcaaataccacaaatataatacaaggakaatttaattcttttctagccttagaagtcactaactgggtataggtagttgtatcagcagggatcagttaattgggtgccctggattggaatgttggtgc

SEQ ID NO: 445730 - DNA, 201 bp, Homo sapiens
tacaggtgaggggtacttcccagacagagacacatggggttagacaggcttgcctggctcacacttgcctcttgtaccctgccacgctaggttatgacgayctgacccaggggacagcagcaggagactactccaaaggtggctatgctggatcatcgcaggcaccaaacaagtctgcaggttctgggcctggcaaaggta

SEQ ID NO: 445731 - DNA, 201 bp, Homo sapiens
tcctcctgaagcagctgaggactctcactctttgtggtgaccatttcactccatttgatttttccctctatacaggcaaagcacccccaaacttacctcarggggtgcctcccctgctgcacaaccagtacctcgtaggtcccggaggactgcttcctgcctacccggtgagtgtatggcggaactcctggcctgcccagc

SEQ ID NO: 445732 - DNA, 201 bp, Homo sapiens
tgtttttgagaaatggtctcactctgtcacactgactagagtacagtggtgcaatctcagctcactgcagcctcaacttcgcaggctgaagcaatccttcracttcagccttccgagtagttgggactacaggcatgtaccactatgccccattaatatttgtattttttgtagagacaaggttttgccatttgcccaagc

SEQ ID NO: 445733 - DNA, 201 bp, Homo sapiens
gcttgagcctgggaggcagctgtagtgagcactgattgtgccattgcactccagcctagccgacacaatgaaaccctagcttaaaaaaaagatgttaaggytgggcgggtggctcacacctgtaatcccagcactttgggaggccgaggtgggcggatcatgaggtcaggagttcgagaccagcctgaccaacattgtgaa

SEQ ID NO: 445734 - DNA, 201 bp, Homo sapiens
atatatatatatatatatatatatatatatgaagtaaataagcccatattatttttttggtcttgacataatttaggagttccaaagcaatataaaatttygtgtggctcaccgtttttatttactgtatttttatttatttatttttgagacaggttcttgcattgtcacccaggctggtgtgcagtggtgtgatcttgg

SEQ ID NO: 445735 - DNA, 201 bp, Homo sapiens
aggctgagacactagaattgcttcaacctgggaagtggaggttgcagtagccaagatcgcaccactgcactccagcctgggcaacaagagtgaaactctgyctcaaaaaaaaacaaaagaaagaaatctttctttggccgtgtgtggtggctcacgcctgtaatcccagcactttgggagggcaaggcaggagggtcattt

SEQ ID NO: 445736 - DNA, 201 bp, Homo sapiens
caaagcattgctcttgacaagtttgttgatattctaatttcattctcttctgtgtctcttgacatttctgcctagttgtccagtggatgtttgttcttttrgagtccagttcttcttctttttttttttttttctttttgagatgagtctcaccctgtctcccaggctggagtgcaatggtgcgatctcggctcactgcaa

SEQ ID NO: 445737 - DNA, 201 bp, Homo sapiens
attttgtatttgtatgtgtatttttgttttttgagacgagtctcactctgtcgccatgctggagtgcagtggcgcgatctcggctcactacaaccttcgcytcccaggttcaagcgattctcctgcctcagcctctggccctcttttaaaataattggtcactaggacggttcagcatatgcaactcaatgaacaggatac

SEQ ID NO: 445738 - DNA, 201 bp, Homo sapiens
ttaaaatttattttcataaatatgctagcactagtgttactatattgttattgttaaatgactattatgtgtattggctatgctttcagaagtagtctgtytatcccttttatgaataaaaaagatattactgaagagaaatacagtatttgtgtcatataatacttaagctgaaaaagctaagtctgaataaatcagtca

SEQ ID NO: 445739 - DNA, 201 bp, Homo sapiens
attcatttgaaaaatttcacattttccactgtgaaagcagcttagttcgtaataagccatatgaatggataagagatccagaggaagagctgtagtgatgstacttttcttggcaagatatttttcaacttgagatgtgacctagtgtatgtcactaatgtttattgcaggggagggtgcactgaccttgtttaacttaag

SEQ ID NO: 445740 - DNA, 201 bp, Homo sapiens
aagatctttttgtaaactgttaagctttttaaatatttgtgttgggagttagtatagacttggttagcgaggcaacttaaactattttggagtaattttakatttaatagaccgttgtacagagatgatacagattgttcctgtatattcctcacctaatttccctgttgtaataattacggtaccttcgttaaaactaag

SEQ ID NO: 445741 - DNA, 201 bp, Homo sapiens
tgcagactgttttataatacaacctccctgtgtttagctgtcaaataccacaaatataatacaaggataatttaattcttttctagccttagaagtcactmactgggtataggtagttgtatcagcagggatcagttaattgggtgccctggattggaatgttggtgctactaggaataatgataatattgtctgggtagt

SEQ ID NO: 445742 - DNA, 201 bp, Homo sapiens
ggggtttcaccggttacacttatttatttatttagagacagagtctcactctgtctccaggctggagtgcagtggtgcaatctcggctcactgcaacctcygcctccggggttcaagcaattctcctgcctcagcctcccatgtagctgggactacaggctcagctacttcttgtattttttagtagagacggggtttcac

SEQ ID NO: 445743 - DNA, 201 bp, Homo sapiens
ccttcaccattgtcttctttgccctgtagacttttgacaagcagggatttcatgcagggacgcctccacctttcagcctgccctcggtcttgggctccacygggcccctggcctcgggagcggcccctggctatgcacccccaccattcctacacatcttgccagcccaccagcagccccactcacagctgctgcaccacc

SEQ ID NO: 445744 - DNA, 201 bp, Homo sapiens
tagttcctctactttttctttctttctttcttttttttgagacgtagtcttgctctgttacctaggctggagtgcagtggcacaatctcggctcattgcamgctccccctcctgggttcacgccattctcctgcctcagcctcccgaatagttgggactataggcacccgccagcacatcgggctaattttttgtattttt

SEQ ID NO: 445745 - DNA, 201 bp, Homo sapiens
cacaatctcggctcattgcaagctccccctcctgggttcacgccattctcctgcctcagcctcccgaatagttgggactataggcacccgccagcacatckggctaattttttgtatttttagtagagatggggtttcactgtgttagccaggatggtcttgatctcctgatctcctgatctcgtgatccgcctgccttgg

SEQ ID NO: 445746 - DNA, 201 bp, Homo sapiens
cgccattctcctgcctcagcctcccgaatagttgggactataggcacccgccagcacatcgggctaattttttgtatttttagtagagatggggtttcacygtgttagccaggatggtcttgatctcctgatctcctgatctcgtgatccgcctgccttggcctcgtaaagtgctaggattacaggtgtgagccactgcac

SEQ ID NO: 445747 - DNA, 201 bp, Homo sapiens
ccggattataggtgtgagcccctgggcctgaccgtgaacctcaatttaaaaaaaaaaaaaatacattgtgagatttacggaaaagttgcaatgggaatatkaataattactgaatacccttttttcagattccccagattttaacatttctgtcacatctactttatcctgttctcttcctttccctacagtttattccca

SEQ ID NO: 445748 - DNA, 201 bp, Homo sapiens
taacattctacttaaaaattttttttttaaggtagagaaggggctcttgctctgttgcccagggtgatctcaaactactgtggctcaagtgatcctcccaycttgacctaccaaggtgctgggattacagacatgagccaccagacccagcttacgtttaaatttcgaatcctctgtagtaccttctttgggagtcttgct

SEQ ID NO: 445749 - DNA, 201 bp, Homo sapiens
aaattttttttttaaggtagagaaggggctcttgctctgttgcccagggtgatctcaaactactgtggctcaagtgatcctcccaccttgacctaccaagrtgctgggattacagacatgagccaccagacccagcttacgtttaaatttcgaatcctctgtagtaccttctttgggagtcttgctgagtccttgttccac

SEQ ID NO: 445750 - DNA, 201 bp, Homo sapiens
tatgctagataaattctgcagggggtatggtgttttatttgacctgttcttcctattcttactgggactgtatggtggctgttcatataattttctcatcrgtatatataccggtgaataggaacagaatgcaaacaatcaaaaacatagtccatttaaactatctgggcgacaaaatgggcacttaattttactgtcaaa

SEQ ID NO: 445751 - DNA, 201 bp, Homo sapiens
tggtttccttttctttgtataaatatctgctaatgggattgctggatcatacggtaattcaattttttgtttttgataaatctccatactgttttccaaartggctgtaccagtttatattcccaccaatagtgtatgagagttcccttttccctgtatcttcaccagcatctgtttaatttgcttaattagttaaatgca

SEQ ID NO: 445752 - DNA, 201 bp, Homo sapiens
tgtgtctggtttattttatttaacacaatgtcttccaagtccattcatgttgctccaaaggacgtgatttcattcttttatggctgagtagtattccaacstgtaaatatatcactttttaaaatccattcatctgttgatgaacacttaggttgattctctatatttgtgaatattgtgaatagtgcttcacttcaaaat

SEQ ID NO: 445753 - DNA, 201 bp, Homo sapiens
tcgggttcaagtgattctcctgccttagcctcccaaatagctgggattacaggctcacgccaccacacccagctaatttttgtagttttagtagagacagsgtttcgccatgtttgccaggctggtctggaactcctgaccgcaagtgatccacccgcctcagcctcccaaagtgctgagatgacaggcattagccaccgc

SEQ ID NO: 445754 - DNA, 201 bp, Homo sapiens
ttaccttgatttaatggattcacaattatcagaagttttttttttttggggagacagagtcttgttctgtcgccccgattggagtgtagtggcatgatctyggttcactgcaacctccgcctctcgggttcaagtgattctcctgccttagcctcccaaatagctgggattacaggctcacgccaccacacccagctaatt

SEQ ID NO: 445755 - DNA, 201 bp, Homo sapiens
aagaatattttggtaacttacgcttttaccttgatttaatggattcacaattatcagaagttttttttttttggggagacagagtcttgttctgtcgcccmgattggagtgtagtggcatgatctcggttcactgcaacctccgcctctcgggttcaagtgattctcctgccttagcctcccaaatagctgggattacagg

SEQ ID NO: 445756 - DNA, 201 bp, Homo sapiens
cggaaacaaaactttttaggcagttaaaacttttttccaaaactattcctttcatagagaatatctttgtagttttatcaggttggtttattcggccggasactttctttcctcattacatttagacaattttttcactttaatcgttaataggaagctttatattatattttgctgattttgtttctaaagaagttaaaa

SEQ ID NO: 445757 - DNA, 201 bp, Homo sapiens
ttttgtatgccttaaagttagatgaatttgtgcttatgtaagctttaacagaaatgttggtggttgttaagtcaaccattttcagttaagtctaaactgasatcacttgaaaatgcggctgtttcactgaggtatcttatcttcagaaaggtccttgaaaaaaacagcagttaagccgggcatggtagctcaggcctgtaa

SEQ ID NO: 445758 - DNA, 201 bp, Homo sapiens
tatgtgctttctgctagtattgtcattaccattggttttagattttgggaatgagtggacatatatagatgaaggacctgagacccatccttgccagtttragatagaccctgcaccactggtctcatgactcagtgaacagcatctctggacattcttgatgaagacttgcttctttaacataaattgtgtatcctgttt

SEQ ID NO: 445759 - DNA, 201 bp, Homo sapiens
attcttaatctgagctaattttgtcttctgcaggtatgaataaatgaatttcctctgcagagaaggttgagaatattgactgttttcttagtagaaaatgygggaacacagattagaaattaaacaaaaataatagtagtggtcacagaaatataccagtatagaacatatgggtatctgaaaggctgagaagctaggtga

SEQ ID NO: 445760 - DNA, 201 bp, Homo sapiens
atatcaccctgagactcttgctgtctcatatattccactgatatttattgagtatctactatgtagtggatacttttataggcatacagcaatgaataaartaagtaaaatctttgcctttctaaaacttttaatgaaggtcaaatgggatgtaacaataaagaaaataaaatattttatattaatatattttaatgatgt

SEQ ID NO: 445761 - DNA, 201 bp, Homo sapiens
gcctcccaaagtgctgggattgcaggcgtgagccaccccgcccggcatgaagcctttacttctaaaatgttagctttgaattgttgatttcccagtcctcttttttttttttttaaatgatgatttattgttaagatttcctttgttaataagacactttgtggggttggggggtgggggtggttaagtatattagcaagg

SEQ ID NO: 445762 - DNA, 201 bp, Homo sapiens
ctcggcctcccaaagtgctgggattacaggggtgagccacggcgcccagcctttttttacccgtttgtaaacaatgtttgataagtttccattttttgatmactaattttcatgctggacagcataattgaattggaatccagttaactatttggatttgaagtatgaaatagggctcacattaaggagtagagtaggtgt

SEQ ID NO: 445763 - DNA, 201 bp, Homo sapiens
ctgggactgctggctctcaggcatggagtctgtttcaggagtgtggcgtcaccacttccatgtgctggttctgctctcctgggagtcaagcagggccagtygctgatcaagcctccctggtctctcctaggactactatggaattccctttgctgcacccacagcgcttgccagccgagatgggagcctagctaataatcc

SEQ ID NO: 445764 - DNA, 201 bp, Homo sapiens
gccactacacctggctaatttttgtatttttagtagaaacagggtttcaccatgttagccaggatggtcttgatctcctgacctcctgatccgcccgcctstgcctcccaaagtgctgggattacaggcgtgagccactgtgcccagccagttgagtggttctttagacatataaggatgtggggtatttctcattagtgt

SEQ ID NO: 445765 - DNA, 201 bp, Homo sapiens
tgtgaaatacagtttatgtagttgttgcttacaagatagaacatgaagtttcaggagtgcttggaaggtaatttttctgagcctttgtttttgagagtaawccggatgtagagaacagttgagcgattcgtttttttttgtttgtttgttttttttgagattgagtctcgctgtttcccaggctggagtgcagtggcgtga

SEQ ID NO: 445766 - DNA, 201 bp, Homo sapiens
tttgacaattaggagaccagtggtgacctagggagtagcatttttcctactgttagagtgatagggtgatggaaaccagaatacagaaggttaaggagatrtttagtgaggaaatggaggcagtgaatgtattcattttgtgaaatacagtttatgtagttgttgcttacaagatagaacatgaagtttcaggagtgcttg

SEQ ID NO: 445767 - DNA, 201 bp, Homo sapiens
cgagtagctcggattataggtgcccgccaccacgcctggctaattttttgtatttttggtagagatggggtttcactgtgttggccaggctggtctcaaaytcctgacctcatgatccgcccacctgagctcccaaagtgctgggattacaggcatgagccaccaccccagcctactgttacttttttacaataattttac

SEQ ID NO: 445768 - DNA, 201 bp, Homo sapiens
cggagtcttgcactatcgcctgggctgaagtgtagtggcccgatctcagctcactgcaacctccacctcccaagttcaagcgaatctccagcctccatctyccgagtagctcggattataggtgcccgccaccacgcctggctaattttttgtatttttggtagagatggggtttcactgtgttggccaggctggtctcaa

SEQ ID NO: 445769 - DNA, 201 bp, Homo sapiens
ccgggtgtgttagagccccccaaccttgttttgactcctagatggacctgggcttcccagggtgtggtatgtggttcctaaaatacactttctggttctcrcacagatctatggctatgacgagctccagatgctgcagtcacggctgccagtggtgagtggggtatggactggtcggagcagagggttcagaatctttta

SEQ ID NO: 445770 - DNA, 201 bp, Homo sapiens
tttatatttttagtagagacaaggtttcaccatgttggccaggctggtctcaaactcttgaccttctggtgatccaccctcctcagcctcccaaagtgctgggattacaggtctgagccactacgcctggccctatgtacacatttttaggtgaacgtgttttcagttctcttgggtgcatacccaggagtaggattgctt

SEQ ID NO: 445771 - DNA, 201 bp, Homo sapiens
tgaacagagcacacttgttgtctctgacgtgatgtcctgggcttttgcattacgactgtagcttaggttttggccaggttgttccttaaaaccaccagatrtggaaaccttgcctgcttgtaccgcctctgctggcacagagcactgggtcccctgggagtagggtgaggccagcagctccctcctacctgtcttcaccct

SEQ ID NO: 445772 - DNA, 201 bp, Homo sapiens
acttcaaatacctatgtatcgcagtgtctcattttggaatagtaaccactgaagttcagttctttgacctgtatttgatcttgtgcgtgtgtgcgcgtgcrtgcgcgcacacacacatgagagacgagtctagctctgtcacccaggctggagtgcagtggtgcgatctcaccttactgcaacctccacttcctgggttca

SEQ ID NO: 445773 - DNA, 201 bp, Homo sapiens
gttgaacatgatacctaagctctcccgtatcctacattggtgtgttccccttttacctcaggaaagggaatgtattccactccctggagatgatagtttcyttcaatacactcacctgtggagccccttcgctagggttgtccttccattgctttgaaggcttctcttatcattaggcagaagtgattagtttcccaaact

SEQ ID NO: 445774 - DNA, 201 bp, Homo sapiens
aacatagctcaggatctgtcaaacaaaagttcttatggactcaaaggtatgaatacttaattttttaatttttaaaattaagaatcttataaattgcttgyaatatctttcattttttatcaaagctagctaataaaaatttatcagataaatgtttgtaaactatacctatttatttggtaatcagatttgcagtttgct

SEQ ID NO: 445775 - DNA, 201 bp, Homo sapiens
agtgcagtctatgtagtgatcaccaggagtgtctctcttagtattagcctgagtgacttttattgtatggggagaaatggtgtgatggtgtgagaacatgkagactaataggtttatttcaatatgtacttgtattgtgatgggaactggtcccggtatctaccctcttaagtataaaatatgtgtagaaagtacaaacct

SEQ ID NO: 445776 - DNA, 201 bp, Homo sapiens
acgccactgccctccagcctgggtgacaaagcgagactccttcctaaaaaaaaaaataaaataaataaaaaataaaaagtaggtaatgaagaatagtaagraaagaggtattgtacttgattcaggtacaattggatgttgttccatgagaactctttaatgctaaccttttccaggtacctcttagctattaggctgcca

SEQ ID NO: 445777 - DNA, 201 bp, Homo sapiens
gtttttgagaaactgttccgtttgtcatctgtcatggtctccttccaccaaatcttcatctgggaatagcagcggtatccctccacccaagtatggccacytgtttgtcttcatatagaacaggggcttctggtctggtcatgtccctagagacttactagagactggctgaccatgaaaaaaaaaaaaataatctgagtt

SEQ ID NO: 445778 - DNA, 201 bp, Homo sapiens
tgatgtcctgggcttttgcattacgactgtagcttaggttttggccaggttgttccttaaaaccaccagatatggaaaccttgcctgcttgtaccgcctcygctggcacagagcactgggtcccctgggagtagggtgaggccagcagctccctcctacctgtcttcaccctccagagggtgcctgagcctagcctctctg

SEQ ID NO: 445779 - DNA, 201 bp, Homo sapiens
tgttctgtgaaagtgctcccccttctgggctttctctgctcccgtcctcagttgtgcagctctgtgtgttcccagctctgcctcttccgggggttctaggctgctatgggtttccgggaggtttcctggagggtgtgagtgccattcccagccaggatggctcctttctgggatcgggcacagcccaagggctttgccttt

SEQ ID NO: 445780 - DNA, 201 bp, Homo sapiens
ctttgttaataagacactttgtggggttggggggtgggggtggttaagtatattagcaagggttaatgcctgctctaaagaagcagtctgcaggcatttayagattgtaaagttctctgcccttaagcacatctgtctttatttttccttgtgagaaacctgtatgtcagcaaatacccgttcattcttagttgttatttt

SEQ ID NO: 445781 - DNA, 201 bp, Homo sapiens
tttaccactacttggtaaatctgacagagcttcaatcattttctaattgatgtatccactgatgaatttgttagcagttgttgcagacatcatgttaaactttttttttttttttttctattttgagacgtagttttgctcttgttgcccaggctagagtgcagtggcgctatctcggctcactgcaacctccgcctctcg

SEQ ID NO: 445782 - DNA, 201 bp, Homo sapiens
ggattacaggggtgagccacggcgcccagcctttttttacccgtttgtaaacaatgtttgataagtttccattttttgatcactaattttcatgctggacwgcataattgaattggaatccagttaactatttggatttgaagtatgaaatagggctcacattaaggagtagagtaggtgttttatttaagactaggtaat

SEQ ID NO: 445783 - DNA, 201 bp, Homo sapiens
ttattttattttatttttatttatttatttatttattttttgagatggagtcttgctctgtcgcccaggctgtagtgcagtggcgtgatctctgctcactrcaagctccgcctcctgggttcatgccattctcctgcctcagtctcccgagtagctgggactacaagcgcctgccaaaactcccggctaatttttttgtat

SEQ ID NO: 445784 - DNA, 201 bp, Homo sapiens
ttgaggccacagtgagctatgattgtgccattgcactccagcttgggtgacagagtgagaccctatctccataaataataggatcatactttgcatacttrctgatttttattgaaaaatacagcatagtttgggtgtggtggctcatgcctgtaatcccagcactttgggaggccgaggcaggtgaatcacttgagccca

SEQ ID NO: 445785 - DNA, 201 bp, Homo sapiens
tgaacatctaacactttgtgtaaatgcatggacagaattttctgagctctcttagaagagggtggtgatagaacatagaatgtggaaaacattttaagactttttttttttttttttttttgagatggggtcttcctgtgctgcgtaggctgatctccacctcctggcctcaagcagtcttttaatctcagccttctgagt

SEQ ID NO: 445786 - DNA, 201 bp, Homo sapiens
ttttagtagagtcggggtttctccatgttcatcaggctggtcttgaactcccgacctcaggtgatcgcccgcctcggcctcccaaagtgctgggattacaracgtgagccaccgtgtgcggcttgtatttttttttttttttttttagtatttattgatcattcttgggtgtttctcgcagagggggatttggcagggtca

SEQ ID NO: 445787 - DNA, 201 bp, Homo sapiens
gaacatctaacactttgtgtaaatgcatggacagaattttctgagctctcttagaagagggtggtgatagaacatagaatgtggaaaacattttaagactttttttttttttttttttttgagatggggtcttcctgtgctgcgtaggctgatctccacctcctggcctcaagcagtcttttaatctcagccttctgagta

SEQ ID NO: 445788 - DNA, 201 bp, Homo sapiens
tggcctcaagcagtcttttaatctcagccttctgagtaactgggattatagatgtgcaccactgtatccagcctagacaatattttactctattattttatttttttttttttgagtcaggatcttgctctgttgcacaggctggagtacagtggcacagtaacgcgtcactgccatcttgacctcccaggctcagtccat

SEQ ID NO: 445789 - DNA, 201 bp, Homo sapiens
ggcctcaagcagtcttttaatctcagccttctgagtaactgggattatagatgtgcaccactgtatccagcctagacaatattttactctattattttatttttttttttttgagtcaggatcttgctctgttgcacaggctggagtacagtggcacagtaacgcgtcactgccatcttgacctcccaggctcagtccatc

SEQ ID NO: 445790 - DNA, 201 bp, Homo sapiens
gtgagccaagattacgccactgcactccagcctgggtgacagagcaaaactctgtctcaaaaaataaaaaaaccttgaacaatcattcaacagagatgtartagagtcccagggcttgaggaggaaaggtacagcatttaccctaatatggtttattcgctttgataatctttggaaacgttggacttggtttttgtgatt

SEQ ID NO: 445791 - DNA, 201 bp, Homo sapiens
acacatcttgccagcccaccagcagccccactcacagctgctgcaccaccaccttccgcaggatgcacaggtgagtacagtgatggaggcagccaccctaytctgggccaggggttctgctccagccttgacagccttcccttctcctcttcctcagagtggctcgggtcagcgcagccagcccagctccctgcagcccaa

SEQ ID NO: 445792 - DNA, 201 bp, Homo sapiens
ttttcaagcacatagcttattgattgcataataaggatatggccatttctgagtgaccagactagtattagagggaatgggtttgtgctgagagccacagrtccttatttcaagtacagatttgaagatctggctcagagaactgttgttcttgagggttttgctgtatcccatagttggaggatgcatggttccttgacc

SEQ ID NO: 445793 - DNA, 201 bp, Homo sapiens
ttgcccagactggcctcaaactctggagctcaatgaatctgcctgcatcagcctcccaaagtgctgggattacaggcatgagccaccggcctggctgactttgttgttgttgttgttttagttttttcacattccagaggcaaaacctgatatttgtttaagtttcctttttaaagatggtctcaaacacctggattcctt

SEQ ID NO: 445794 - DNA, 201 bp, Homo sapiens
tgacgtgatgtcctgggcttttgcattacgactgtagcttaggttttggccaggttgttccttaaaaccaccagatatggaaaccttgcctgcttgtacckcctctgctggcacagagcactgggtcccctgggagtagggtgaggccagcagctccctcctacctgtcttcaccctccagagggtgcctgagcctagcct

SEQ ID NO: 445795 - DNA, 201 bp, Homo sapiens
acataaaatcttgtacaaaaagattgatagcaacataattcatcattataaaaaagtagaaacaacccatacttcctgttgaacaggtctgtctggggggaaaaaacctcaaatgtttatcaatggatgaatgtataagcaaaatatagaatatacatagaatggaataatgttcagccataaaaaggaattaaggtacat

SEQ ID NO: 445796 - DNA, 201 bp, Homo sapiens
tgggatttgagcctgataatggcccttgattccaccaacatggagactttgtaccgcgtcccattagtgctcaaatgtcccaacctgaagctgaagaagcygaccaggctgcacatgccctcggccatgactatgtatgccctggtggtggtgtcttgcttcctcatcaccagaggaataatttatgatgttattgttgaa

SEQ ID NO: 445797 - DNA, 201 bp, Homo sapiens
ggatggcggccaggaagaggcgctcctcacttcccagtctgggcagcagggcagaggggctcctcacatcccagacgatgggcggccaggcagagatgctmctcacttcccagacggggtggcggccgggcagaggctacaatctcggcactttgggaggccaaggcaggcggctgggaggtggaggttgtagtgagccga

SEQ ID NO: 445798 - DNA, 201 bp, Homo sapiens
aaaccagtcaggtgtggcggcgcgcgcctgcaatcgcaggcacttggcaggccgaggcaggagaatcaggcagggaggttgcagtgagccgagatggcggyagtacagtccagctttggcttggcatcagagggagaccgtggggagaggggaggcttgtatttttaatagagacagagtttcactgtgttggccaggctg

SEQ ID NO: 445799 - DNA, 201 bp, Homo sapiens
cacactccctgattttttatttttttgagatggagtctcgcttcgtcagtcaggctggagcgcagtggcacgatctctgctcactgcaggctctgcctccygggttcacgccattctcctgcctcagcctccccaagtgcctgggactacaggcacccgccaccacacctggctaatttttttgtatttttagtagagacg

SEQ ID NO: 445800 - DNA, 201 bp, Homo sapiens
acagagtttcactgtgttggccaggctggtcttgaactcctgacctcatgatcttcccacctcagcctctcaaagtgctgggattacaggcaggagccacygcgcccgacctttttttttttttttccccaggctggagtgcagtggtgcaatcctagctcattgcagccttgaactccccgtgctcagatgatccacctt

SEQ ID NO: 445801 - DNA, 201 bp, Homo sapiens
tcttgttgcccaggctggagtgcaatggtgcgatctcggctcactgcaacctccacctcctgggtttaagcaattctcctgcctcagcctcccaagtagcygggatttacaggtgtgaggcaccactcctgactaattctttgtatttttagtagagatggggtttcaccatgttggccaggctgatctgaaactcctgac

SEQ ID NO: 445802 - DNA, 201 bp, Homo sapiens
gctgatctgaaactcctgacctcaggtgatccactcatctctgcctcccgaaatgctgcaattacaggcatgagccactgctccaggccctattttttaawtatttatttatttatttatttatttatttatttatttttgagatagagtcttgctctgttgcccaggctggagcagtggcatgatctcagctcactgcaa

SEQ ID NO: 445803 - DNA, 201 bp, Homo sapiens
tgcccagactggcctcaaactctggagctcaatgaatctgcctgcatcagcctcccaaagtgctgggattacaggcatgagccaccggcctggctgactttgttgttgttgttgttttagttttttcacattccagaggcaaaacctgatatttgtttaagtttcctttttaaagatggtctcaaacacctggattcctta

SEQ ID NO: 445804 - DNA, 201 bp, Homo sapiens
catgatctcagctcactgcaacctccgcctcctgggttcaaacgattctcctgcctcagcctcctcagtagctgggactacaggcacacgccaccacgccyggctaatttttgtagttttagtagagacggggtttcatcatattgaccaggctggtcttgaactcctgacctcgtgatccacccacctcggcctcccaaa

SEQ ID NO: 445805 - DNA, 201 bp, Homo sapiens
gcccagactggcctcaaactctggagctcaatgaatctgcctgcatcagcctcccaaagtgctgggattacaggcatgagccaccggcctggctgactttgttgttgttgttgttttagttttttcacattccagaggcaaaacctgatatttgtttaagtttcctttttaaagatggtctcaaacacctggattccttaa

SEQ ID NO: 445806 - DNA, 201 bp, Homo sapiens
gttaatttcttagtgtatttcctttaaaaccattatctatgggcatttttttcatacatgctgtaaacaatggccctctacttatataagatctgtaagtaagtattttttgagtagcaacacttttgaaagtacttagatgtgttatggatgagtattctgtaagaactgtttgagcgcatcctgtgtactgactccaga

SEQ ID NO: 445807 - DNA, 201 bp, Homo sapiens
gtattcttaaagatgtccccctatctctcagttaaattaggtgggtctcatttgggataataaattgatgcagtagttgcatctcgtgaagctgtttatgttttttttttttatgaagctatttaaagtaacaaaattatgttgaatatttttgactcttttcagtgagcctttgaatacatctttatcaatgaccagtgc

SEQ ID NO: 445808 - DNA, 201 bp, Homo sapiens
atcctagctcattgcagccttgaactccccgtgctcagatgatccaccttagcctcttgggtacctgggactacagatttgtgccaccgtgcctagctaattttttttttttttttttttgtagagacagggtttcatcatattgcacaggctggtcttcaacttctgggttcaagtgctcacctcagcctcccaaagtgt

SEQ ID NO: 445809 - DNA, 201 bp, Homo sapiens
cacctgaaatagggtccaagacagatttgccttaaaatgaaatttgttgttttgaagactatatcggaagaaatcaaaccattgttaaatgtctatatttktgctacatccatacttttcttactcatggcagaattgcttggatgtgacctatattgaagcaaaatccatttgaaacactgatttgaggttatgtagata

SEQ ID NO: 445810 - DNA, 201 bp, Homo sapiens
ccggctcactgcaacctctgcctcctgggttcacgtgattctcctgcctcagcctcctgactagctgggattacagccgcccaccaccacacctggctaatttttttttttttttttgtattttttaaatagagacggggtttcatcatgtttgccaggctggtcttgaactcctgacctcaggtgatcaacccaccacag

SEQ ID NO: 445811 - DNA, 201 bp, Homo sapiens
atggcgtgatcttggctcattgcaacctctgcctcccagattcaagcagttcttctgcctcagcctcccaaatagctgggattacagatgtgcgccaccaygcctggctaattttgtattttttttttagtagagacgatgtttcaccattttggtcagggtggtctcaaactcctgacctcaggtgatacacccgcctca

SEQ ID NO: 445812 - DNA, 201 bp, Homo sapiens
tgcagtctcactctgtcgcctaggctggagtgcaatggcgcaatctcagctcactgcaacctccacttcccgggttcaagcgatcctcctgcctcagtctyctgagtagctggggttacaggcgcataccaccatgcccggataatttttgtatttttagtagagacgggatttcactatgttggtcagactggtctcaaa

SEQ ID NO: 445813 - DNA, 201 bp, Homo sapiens
cagcctgggcagacagaatgagaccttgtctcaaaaaaaaaaaaaaaaaaaagagaaaaacttaaggtagtatattctctgttatttctgtgaatgctaartttacattactgcagattaggcctgaatgatggttctccctgcgcaaatggtatatgctactctataggtgttcacttgaacgaatatttattgctgcca

SEQ ID NO: 445814 - DNA, 201 bp, Homo sapiens
tctcaggcttgtcagctgaaccacagaacacagaaagttgagttactattttctcaaatctgtcaaggatggtacataatgaatttcattctaggtgtctkgaaaaagttcagcttatacacagagtggatgccctaagaattgggaattcattctcaaagactgagtggtttaagagttctacatccttgccaacatttt

SEQ ID NO: 445815 - DNA, 201 bp, Homo sapiens
gtttgagactagcctggccaacattgtgaaaccctgcctctattaagaaaatacaaaaattagctgggcgtggtggtgtgcgcctgtaatcctagcttctygggaggctaaggcaggagaatcgcttgaactcaggaggcagaggttgcagtgagcccagatcacgccactgccctccagcctgggtgacaaagcgagact

SEQ ID NO: 445816 - DNA, 201 bp, Homo sapiens
ttgtgcagctctgtgtgttcccagctctgcctcttccgggggttctaggctgctatgggtttccgggaggtttcctggagggtgtgagtgccattcccagmcaggatggctcctttctgggatcgggcacagcccaagggctttgcctttcctcaggggccaggtgtgtccaggagtgcgaggccctggatggtgagtgag

SEQ ID NO: 445817 - DNA, 201 bp, Homo sapiens
tttgttcacctctgctgcttgtgagcctagttcctgcctggagaattctcgtgttctgtgaaagtgctcccccttctgggctttctctgctcccgtcctcmgttgtgcagctctgtgtgttcccagctctgcctcttccgggggttctaggctgctatgggtttccgggaggtttcctggagggtgtgagtgccattccca

SEQ ID NO: 445818 - DNA, 201 bp, Homo sapiens
catgtgatgtttgtctttctgtttctgggttatttcacttaacataatgatctccggttctatccacgttgtttcaaatgacaggatctcattcttttttwtggctaagtagtactctgttgtgtataagtaccatgttttatctattcacctgttgatagacacttaggttacttccaaatcttagctattgtaaacagt

SEQ ID NO: 445819 - DNA, 201 bp, Homo sapiens
gtcttggctgccacactctctggcccttaggatcctctgcctgaggaacctctcagcaccactactgagaaagctgttttcatctggcggttgtgccaggygtgaccatagctttagcacagagtatccagtgctcatccctgggaaacatgaaggcctttgggacctggggccctggtaggccatgtcccctgttaaatg

SEQ ID NO: 445820 - DNA, 201 bp, Homo sapiens
ccggttctatccacgttgtttcaaatgacaggatctcattcttttttatggctaagtagtactctgttgtgtataagtaccatgttttatctattcacctrttgatagacacttaggttacttccaaatcttagctattgtaaacagtgctgcaacaaacaggaatgcagatatttcttcaatatactgatttcccttatt

SEQ ID NO: 445821 - DNA, 201 bp, Homo sapiens
gtagtgaggctataaagattaagtcatttttctgtaaatcaaaaaattaatgtacattgaatatgggttaagtatatttcttctgtacatgcagatttttmtcaccagatggcactcctgtatggagaaagtctcattttgttatttcacctagattattttctttctttttttttttttttgagacagtcttgctctgtt

SEQ ID NO: 445822 - DNA, 201 bp, Homo sapiens
ttttgccagcatgccagtgtggagagcgcctcttcccaccagtcctcagccaccttctccacggcagcgacctccgtctcaagttccgcatcctcaggcgycagcctgtccagtagcatgaacaccgcgaacagcctctgtctgggtgggacccccgcgagtgcatccagcagcagtagcagggccgcgcccttggtgacc

SEQ ID NO: 445823 - DNA, 201 bp, Homo sapiens
accccgtctctactaaaaatacaaaaatgagcctggtgtggtggcgcgtgcctgtagtcccagctgctccagaggctgaggcggtagaattgcttgaaccygggaggtggaggttgctgtgagccatgtgccattggacttcatccagcctggatggagcaagactccgtctcaaaaaaaaattttttttttaatttttat

SEQ ID NO: 445824 - DNA, 201 bp, Homo sapiens
tttttccaaacaataaagtaagccatgtagtttttatgtttcacaaagcaactattctggtttagccatgcaaccgggtcattatttataggctaattacrtattcattgtggaatattaagaattgatgattggaaggagatatagtcttaatgttgatactgtgaacatggaccagtaaaattttaatagtttgcgtta

SEQ ID NO: 445825 - DNA, 201 bp, Homo sapiens
ggaaccagctgctatgtgaggggccgcagtgagcactgagcacagagcctctcaccttaagggagcctgggtggttacatcattgcctgcctgctcagccktgagacttgggcccaagcgccaggccaggctctccccagcaccctcctcctctgcctccagatccatgtgtcctggcttttcttttgccagcatgccagt

SEQ ID NO: 445826 - DNA, 201 bp, Homo sapiens
tagccaggatggtcttgatctcctgacctcgtgtgtgatctgcccgcctcggcctcccaaagtgctgggattacaggcgtgagtcaccgcgcccggctaatttttttttttttttttttttttgaggtggagtttcattctgtcacccaggccagagtgcagtggtgtgatctctgttcactgcaatctccgcctactggg

SEQ ID NO: 445827 - DNA, 201 bp, Homo sapiens
tgtactgtgtgttgagtactgtcatggtttttctgttcttgaaaataagaagcaagagttaaacattgtggcttagagtatcaagaagcaaagatgttgatttttttttttttttttttgaagacagggtcttgctctgttgcccaggccagagtacagtggcggctcactgcaacctctgcctcctaggttcaagtgatt

SEQ ID NO: 445828 - DNA, 201 bp, Homo sapiens
agagatggggtttcaccttattagccaggatggcctcgatctcctgacctcgtgatccgcctgccttggcctccaaagtgctgggattacaggcgtgagcyactgcacccggcctgtatttgctatttttaagctagaagtctttgtagtaacaatttatgaatatataacccagagcagtaaaccttaattaagagaaaa

SEQ ID NO: 445829 - DNA, 201 bp, Homo sapiens
ggcgtgagccaccatgcccggctaacttttttgcatttttagtagagatgaagtttcaccatgttggccaggctggtctcaaactcctgacctcaagtgayctgtcccccccttgatctcccaaggtgttgggattacaggtgtgagccactgcacctggcccttttaaatttttttcttttaaacactagtatgcattag

SEQ ID NO: 445830 - DNA, 201 bp, Homo sapiens
cgaagttatcttgggatttctatgccctcattttggatgccaagcatgagcaacttgaaggatttttacagagagttgtggtcattaaagcttaatgttartagttttgatgttcagtttatgtattgtatcctgatggctggaaccagctgctatgtgaggggccgcagtgagcactgagcacagagcctctcaccttaa

SEQ ID NO: 445831 - DNA, 201 bp, Homo sapiens
agccaggatggtcttgatctcctgacctcgtgtgtgatctgcccgcctcggcctcccaaagtgctgggattacaggcgtgagtcaccgcgcccggctaatttttttttttttttttttttttgaggtggagtttcattctgtcacccaggccagagtgcagtggtgtgatctctgttcactgcaatctccgcctactgggt

SEQ ID NO: 445832 - DNA, 201 bp, Homo sapiens
ttctgtatttacatattgtcactgaagtatttttatagcctcttttcccatccagtcagggtttgtgtatttacatattgtgactgaagtacactactgartgataatccttttctcagatgattattttctcaattatttatcagatataattgccagtcaggtcatctgataagcaagaaataactactgctgttactt

SEQ ID NO: 445833 - DNA, 201 bp, Homo sapiens
accaggttttggagcaaaggcctctctcagcctcctgtttccagaccacagtggctgagaatcccaatagaagggaaatctccaaaagattgagacttacrctgggcttcctgtggcctgtgctcgcctcttctcagactgtttgctttgctctgaggtaggtacttgtcccatattcagatagtctgtgttcatttatga

SEQ ID NO: 445834 - DNA, 201 bp, Homo sapiens
cagggtggtcttgaactcctggactcaagtgatcctcctgcttggcctcccagagtcctgggattataggtatgagtcactctgcaggttctactgttccttttttttttttttttttgagacggagtcttgcactatcgcctgggctgaagtgtagtggcccgatctcagctcactgcaacctccacctcccaagttcaa

SEQ ID NO: 445835 - DNA, 201 bp, Homo sapiens
agttggtgggcaggccagtgcatcctttggcccgctcctggtggggctctctccggcctggtcctgcccatctgtgctgaaggaacaagacgccttggagycccaggaaaccatgtttttggctgtctttaccttggtgaatctgttctggatgttagctctgtaaagccagtgcccaggcgggtagtgacctgtgggcat

SEQ ID NO: 445836 - DNA, 201 bp, Homo sapiens
ttggctcactgcaacctctgcctcctgggttcaagcaattctcctgcctcagcctcccaagtagctgggattacaggcaggcaccaccatgcctggctaatttttttttttttttttgcatttttagtagagctgtgggttcactatgttgggcaggctggtctcgaactcctgacctccagcgatctgcccacctcggcc

SEQ ID NO: 445837 - DNA, 201 bp, Homo sapiens
tcaggtgatccacctgcctcggcctcccaaagtgctgggattacaggcgtgagccaccgtgcccggcctatgtgagctatttatattcttggttccttttkttgtcaggtctttggtctctatttctatattagggagcccttggtgatgggaagtacaggtatttttccctaagtttgctgtttatgatttttttttaca

SEQ ID NO: 445838 - DNA, 201 bp, Homo sapiens
tgggatgttctagatatatctttcatgaacgccacatagctggattttgctttgttaagttagcaacttgctaacttctttttaattaattagagtgtatygctatgttggctgggctggtcgtgaactcctgggctcaagtgatcttcccacctcacccgcacaaagtgctgggattgtaggagtgagccatcagctaac

SEQ ID NO: 445839 - DNA, 201 bp, Homo sapiens
ggcatttatgattttatacacatttgcagattgccccgcatagtgattcaaccctgtttacctcccactggcggtgaatgaaatatcctattacaccatgrcatcctcaaaatggtgttattaaacatttgtatttccttaatatgttagcagaaaaatggcccatcagtctagtttttaatgaggttgtacatccttttt

SEQ ID NO: 445840 - DNA, 201 bp, Homo sapiens
gatttggcagggtcataggacaatagtggagggaaggtcagcagataaacaagtgaacaagggtctctggttttcctaggcagaggtccctgcggccttcygcagtgtttgtgtccctgggtacttgagattagggagtggtgatgactcttaactgccttcaagcatctgtttaacaaagcacatcttgcaccgcccttt

SEQ ID NO: 445841 - DNA, 201 bp, Homo sapiens
tttttgtatttttcagtagagatggggtttcactgtgttagccgggatggtcttgatctcctgaccccgtgatccgcctgcctcccaaagtgctgggattrcaggcgtgagccaccccgcccggcatgaagcctttacttctaaaatgttagctttgaattgttgatttcccagtcctcttttttttttttttaaatgatg

SEQ ID NO: 445842 - DNA, 201 bp, Homo sapiens
tcctatgtctacttctttctacacaaacacagcaacaatctgatttctctatcttttccccacatttcccccttttctattcgacaaaaccgccatcgtcwtcatggcccgttctcaatgagcagttgggtacacctcccagatgaggtggcggccgggcagaggggctcctcacttcccagaaggggtggccgggcagag

SEQ ID NO: 445843 - DNA, 201 bp, Homo sapiens
ctgacagaagacaagttaatctgaatttatttaagcatgcattcttggatgtcctgaggcccttacaattatttttatttttcaaagaatgtatttgctatttttttttttttgagacagagttttgctgttgtttcccaggctggagtgcaatggcgcaattttggctcaccgcaacctcttcctcccgggttcaagcga

SEQ ID NO: 445844 - DNA, 201 bp, Homo sapiens
tggtcttgaactcctgacctcatgatcttcccacctcagcctctcaaagtgctgggattacaggcaggagccactgcgcccgacctttttttttttttttycccaggctggagtgcagtggtgcaatcctagctcattgcagccttgaactccccgtgctcagatgatccaccttagcctcttgggtacctgggactacag

SEQ ID NO: 445845 - DNA, 201 bp, Homo sapiens
gagaattgctggaaccctggaggggaggcagaggtcagtgaggtacctgagatcgcaccactgtgctccagcctgggcagacagaatgagaccttgtctcaaaaaaaaaaaaaaaaaaaagagaaaaacttaaggtagtatattctctgttatttctgtgaatgctaagtttacattactgcagattaggcctgaatgatg

SEQ ID NO: 445846 - DNA, 201 bp, Homo sapiens
ggattggttttagaaataaacagatctgcttcttacagctacttcatctgttccagctccaaagacaacaggccctccctctgccctcccgtctgtgagcwccctgcccagcaccacctcctgcactgcacttctgccgtccacatcccagcacactggcgacctgactagcagccctctctctcagcttagcaggtatgg

SEQ ID NO: 445847 - DNA, 201 bp, Homo sapiens
tacagatgaataatgtaggttcctgatcttcagttgcttacatgttggtgagcagacacacacagtttaaatgtgtgtataggattccagggtactgctgsctgtgacagagaaaagcattgttgaattgagcttgagtatttggcaaggattccttgagctggggaggctgagccttagttttcttagattcttcctata

SEQ ID NO: 445848 - DNA, 201 bp, Homo sapiens
ggtcggagcagagggttcagaatcttttacatgtcccccctcttatggtcttggctgccacactctctggcccttaggatcctctgcctgaggaacctctmagcaccactactgagaaagctgttttcatctggcggttgtgccaggcgtgaccatagctttagcacagagtatccagtgctcatccctgggaaacatgaa

SEQ ID NO: 445849 - DNA, 201 bp, Homo sapiens
ctcagcctcccgagtagctgggactacaggtgcccaccaccacacccggctaatttttttgtatttttagtagagatggggtttcaccatgttagccaggwtggtcttgatctcctgacttcgtgatctgcctgcctcggcctcccaaagtgttgggattacaggcgtgagccactgcgcccagccatcttttggattttg

SEQ ID NO: 445850 - DNA, 201 bp, Homo sapiens
gtggtgggcgcctataatcccagcttcttgggaggctgagtcaagagaatcacttgaacccgggaggtggaggttgcagcgagccgtgatcatgccattgyactccagcctgggcgacgagagaaactctatctcaaaaaaaaaaaaaaaaaaaaaaaaaaatcattggggaggccaggcatggcatggtggctcatccct

SEQ ID NO: 445851 - DNA, 201 bp, Homo sapiens
tggagagcgcctcttcccaccagtcctcagccaccttctccacggcagcgacctccgtctcaagttccgcatcctcaggcgtcagcctgtccagtagcatsaacaccgcgaacagcctctgtctgggtgggacccccgcgagtgcatccagcagcagtagcagggccgcgcccttggtgacctcaggtatttgctccagag

SEQ ID NO: 445852 - DNA, 201 bp, Homo sapiens
ccctgtttctactaaaaatacaaaaattagctcggtgtggtggcgcatgctggtgcgtgcctggaggcccagctactcaggaggctgaggcgagatgatcrcttgaacccaggaggcacagattgcagtgagccgagatcacgtcactgcactccttcctgggcaacagcgccagaccctgtctcaaaaaaaaaaaaaaaa

SEQ ID NO: 445853 - DNA, 201 bp, Homo sapiens
agacatttagagttgataagaattatgggaacattttgagtagcatttttatgttttccgtgttacctcattagatcaacattttccagcctttcaaagcygagtccccacattgaaaacataaaaagaatatgtatcttttattaatgtcagttgaggtttcaaaaaatttatcctgaatgccctaaaagtgagttaaaa

SEQ ID NO: 445854 - DNA, 201 bp, Homo sapiens
gactccagaacttaaagcagcagacttgatatgagcaagagtaatgttgaactttgctggagacctattaggaagccatgtagtagagctaatattttatwaaaaggatgcttctctaaatttgataattcagtaatccacctgaaatagggtccaagacagatttgccttaaaatgaaatttgttgttttgaagactata

SEQ ID NO: 445855 - DNA, 201 bp, Homo sapiens
aaagttcttatggactcaaaggtatgaatacttaattttttaatttttaaaattaagaatcttataaattgcttgcaatatctttcattttttatcaaagytagctaataaaaatttatcagataaatgtttgtaaactatacctatttatttggtaatcagatttgcagtttgctaatggaaatgttttattgattgact

SEQ ID NO: 445856 - DNA, 201 bp, Homo sapiens
tagacaatgaaaagtttttctgtctctcatctacttggctctacccttacattttctccatccttttaataaataaaagtcaaaacacgcagtgcatacaygtagtcatttccccattatcatccgctttttttttttttttttttttttgagatgcagtctcactctgtcgcctaggctggagtgcaatggcgcaatctc

SEQ ID NO: 445857 - DNA, 201 bp, Homo sapiens
gagctgtcctctgtgtccgtgccactgctgcctgggagcccagtgctcctgcactcatggggagctgcactctccatctcctcaaaaaaaaacctccagaycatgtattccagcctgccacagccagaatcgtctcatccagtgggtcccatactttgtcagcatgacagaactgtgacattgctaatacagttgtccctc

SEQ ID NO: 445858 - DNA, 201 bp, Homo sapiens
atgtcttgatggcatgatctggttcgagcttctgatttcctgggcaccatctggggacatcttgctttctaagtttgtagcgcctgggaagaatcattgcyccagaccttatctgtcattggcaggagtgtcaggtggtgaccttgctcccaggaatttgctgtttgatctttcctcgtgccttctttcctgactcagacg

SEQ ID NO: 445859 - DNA, 201 bp, Homo sapiens
tgggaggctgagacaggagaatcgcctgaacccgggagacggaggttgcagtgagctgagatcacatcactgcactccagcctgggtgatggagcgagccyccgtctcaaaaaaaaaaaaaaaaaatcaaatggattctttctcaaatacagatatgccttacatttgtttaaatgcatcacagttttaaaacagtgtgtt

SEQ ID NO: 445860 - DNA, 201 bp, Homo sapiens
agaattgctggaaccctggaggggaggcagaggtcagtgaggtacctgagatcgcaccactgtgctccagcctgggcagacagaatgagaccttgtctcaaaaaaaaaaaaaaaaaaaagagaaaaacttaaggtagtatattctctgttatttctgtgaatgctaagtttacattactgcagattaggcctgaatgatgg

SEQ ID NO: 445861 - DNA, 201 bp, Homo sapiens
cctcttcctccgccatgcttggggagcctggagcttagtcacatgcagctggggcttcagtctgatttttagtgtctgataatctagagttgcttggctgmaatgtcttgatggcatgatctggttcgagcttctgatttcctgggcaccatctggggacatcttgctttctaagtttgtagcgcctgggaagaatcattg

SEQ ID NO: 445862 - DNA, 201 bp, Homo sapiens
gaattgctggaaccctggaggggaggcagaggtcagtgaggtacctgagatcgcaccactgtgctccagcctgggcagacagaatgagaccttgtctcaaaaaaaaaaaaaaaaaaaagagaaaaacttaaggtagtatattctctgttatttctgtgaatgctaagtttacattactgcagattaggcctgaatgatggt

SEQ ID NO: 445863 - DNA, 201 bp, Homo sapiens
cagctaggactgagtgtctccacatcctttctgaagcctacgaagctcatttatgtgctctgagatacatctattcaagcacataccaaggaaatgctcaytgtgcatttggaagtaggtgttggacagttggactgcagatgttaggtgtctgtgtctctccacaacataggcatcaaccccaatctgccttacgttggc

SEQ ID NO: 445864 - DNA, 201 bp, Homo sapiens
aattgctggaaccctggaggggaggcagaggtcagtgaggtacctgagatcgcaccactgtgctccagcctgggcagacagaatgagaccttgtctcaaaaaaaaaaaaaaaaaaaagagaaaaacttaaggtagtatattctctgttatttctgtgaatgctaagtttacattactgcagattaggcctgaatgatggtt

SEQ ID NO: 445865 - DNA, 201 bp, Homo sapiens
ccccccccccccgccacttccaacagctcagtgattaccaaagatagtgcaggtaaatccgttaattgcttcttttctgtagttggccagcttgactgatkgtttatagtagttttctttctttattcaggaaggcaaatgggtggggaagccagaaagactctttaaataggatttcctgggagtgcggatattgaactt

SEQ ID NO: 445866 - DNA, 201 bp, Homo sapiens
aggggaggcagaggtcagtgaggtacctgagatcgcaccactgtgctccagcctgggcagacagaatgagaccttgtctcaaaaaaaaaaaaaaaaaaaagagaaaaacttaaggtagtatattctctgttatttctgtgaatgctaagtttacattactgcagattaggcctgaatgatggttctccctgcgcaaatggt

SEQ ID NO: 445867 - DNA, 201 bp, Homo sapiens
gtaagtatagcagcaagctactcttgtcatggctggtgccaaccaaacagaggaagaggatagctcacgtgatgtggaaaacaccagttggtcaatggctyattcgttaaaaagcagcccttttgcttttttgtttttggaccaggtgttggctgtggtgttattagaaatgtcttaaccacagcaagaaggaggtggtgg

SEQ ID NO: 445868 - DNA, 201 bp, Homo sapiens
caggagtgcttggaaggtaatttttctgagcctttgtttttgagagtaatccggatgtagagaacagttgagcgattcgtttttttttgtttgtttgtttkttttgagattgagtctcgctgtttcccaggctggagtgcagtggcgtgatcttgactcactgcaacctccgcctcccaggttgaagcaattctcctccct

SEQ ID NO: 445869 - DNA, 201 bp, Homo sapiens
tcagattttagttttcttttcttttcttttttttttttttgagatagggtcttgctctgttgtccaggctggagtgcagcagcatgcttggctcgctgcarcctctgcctcccaggctcaaatgatcctcctgcctcagactcctgagtatctgggattacaggcgtgcaccaccatgcccagctaatttttaaatatgtt

SEQ ID NO: 445870 - DNA, 201 bp, Homo sapiens
tgtttgctctttttgactatagtgaatgatgctgctatggacatttggtttcaagttttgcatgctttcagttctttgggatgtatatcccaggagtagarttgctgagtcatatggtaacttaaccattcaggaaactcccatactgtttccactgtggctgtagcatttgacattcctaccagtagtctatgagggatc

SEQ ID NO: 445871 - DNA, 201 bp, Homo sapiens
caagtagctgggactacaggtgcccgccaccacgcctggctaattttgtttttgtatttttagtagagatggggtatcaccgtgttagccagggtggtctygatctcctgaccccgtgatctgcccgcctcagcctcccaaagtgctgggattacaggcgtgagccaccgcgcccggctcacctggctgatttttaaactt

SEQ ID NO: 445872 - DNA, 201 bp, Homo sapiens
ggactttttagatagaaccatgctattcccatattctttataaaacctgtgtgtttggtgcatgcctataataccaagttcaaaaatgaatgcgcctaaaycagctctgccatttgtttttttttaaattaaattctgttgacactcagctagctgggcacagtggctcatgtaatcccagcacttggggaggcagaagga

SEQ ID NO: 445873 - DNA, 201 bp, Homo sapiens
gtggcgcaatctcagctcactgcaacctctgcctctcgggttcaagcagttctcttgcctcagcctcccgagtagctgggattacaggtgcccccaccacrgcggcctaatttttgtatttttagtagagatgggttttcaccatgttggccaggctgatctcgaactcctgatctcatgatccacctgccttggcctccc

SEQ ID NO: 445874 - DNA, 201 bp, Homo sapiens
tgagacaggagaatcgcctgaacccgggagacggaggttgcagtgagctgagatcacatcactgcactccagcctgggtgatggagcgagcctccgtctcaaaaaaaaaaaaaaaaaatcaaatggattctttctcaaatacagatatgccttacatttgtttaaatgcatcacagttttaaaacagtgtgttcgtatgca

SEQ ID NO: 445875 - DNA, 201 bp, Homo sapiens
gtcagagagttgcaggcagtttggacaccacctctgctggatacagtctttcctgttgctggaggaagaggctttctcccttgtgcagtgatgccttcttycccgtgggtgttgctcccttctctgctgcaccacaaagagctgacggagctgctcttgtttcagaagagtagccctttccactggctggccgtatttcca

SEQ ID NO: 445876 - DNA, 201 bp, Homo sapiens
acacagcccagcagcccttcgtgaatcctgcactgccacctggctatagctacactggtcttccctactacacaggcatgcccagtgccttccagtatggscccaccatgtttgtgagtatttcagagggtgtgactgtgtctcctggccttgggttgctggcaggtggaaacctgggacctatcttccagcagggaggga

SEQ ID NO: 445877 - DNA, 201 bp, Homo sapiens
gttccgtttgtcatctgtcatggtctccttccaccaaatcttcatctgggaatagcagcggtatccctccacccaagtatggccacctgtttgtcttcatrtagaacaggggcttctggtctggtcatgtccctagagacttactagagactggctgaccatgaaaaaaaaaaaaataatctgagttattcagccagtcag

SEQ ID NO: 445878 - DNA, 201 bp, Homo sapiens
taaataaataaataaataaataaataaatagggtttacagctgaattagcaggataggaataggacagatgtgtgcaaacagctatgggcaattaattccyttcgtggccttaggtaacctgaaagagaattgtgacgatatcaaataaattttgatgtcctatagtgtttgagttcaccagcactcatcctttccatggg

SEQ ID NO: 445879 - DNA, 201 bp, Homo sapiens
atgttctagaattagaggtgatgattgcacaaattgtgaatatactaaaaattattcaactgtctgttgtaaaaggatagatttcatgttatgtgtattgkatataaaaatatagaaattagtattatccatttaacaaaattaaggagaaaaatccgtatgattatttcagtaaggaaaagtgttcaatattcgttcatg

SEQ ID NO: 445880 - DNA, 201 bp, Homo sapiens
gggtacaagcagttgagctgcatggaattggatctcatagttgagtttcttggcaccctagataccttgttctctcctcgattacgggtgtagactttgtsttggtggctgttctgggcctcctaatttagttgagattcttttcttttctttttttttttttgagatggagtctcgctctgtcgcccagcctggagtgca

SEQ ID NO: 445881 - DNA, 201 bp, Homo sapiens
gccagcacggctacagtacaggtgaggggtacttcccagacagagacacatggggttagacaggcttgcctggctcacacttgcctcttgtaccctgccaygctaggttatgacgacctgacccaggggacagcagcaggagactactccaaaggtggctatgctggatcatcgcaggcaccaaacaagtctgcaggttct

SEQ ID NO: 445882 - DNA, 201 bp, Homo sapiens
ttctactctgtgtagccatatcatgtgttgggcttggggacttggtgtttttagtatcattggtatatgaggtggtgtcagtgcttgaagtagaacagccsaaggcttctctattttgagaaggcctaataaaaaccctgatttttaattgacgcaccagagtcttttcctcctccgcctttccctctgctactggtataa

SEQ ID NO: 445883 - DNA, 201 bp, Homo sapiens
tcattccctagaaatatggatttattaggaactctggttttaggtaataaatgggtaaaatattctaggtaaaatgaaccaaacttgagaaaattgtttarttttactttattgctccaggttttcaaatcagtttataatgtgttagtcattactttgaaaatttctcaatacaccttttgattctcttctctgcaaaac

SEQ ID NO: 445884 - DNA, 201 bp, Homo sapiens
ttaacagtatatttgttattatactgtgcatttattcctgaatattttaaagataaaattatatgggcgtgtgtgtgtgtgtgtgtgtgtgtgtgtgtgtrtatacacacacttaaatgtattatgggatagaatgtaaaaatttaagataaatatgaaacttggccaggtagggtggctcacgcctgtaattccagcact

SEQ ID NO: 445885 - DNA, 201 bp, Homo sapiens
gagacaggagaatcgcctgaacccgggagacggaggttgcagtgagctgagatcacatcactgcactccagcctgggtgatggagcgagcctccgtctcaaaaaaaaaaaaaaaaaatcaaatggattctttctcaaatacagatatgccttacatttgtttaaatgcatcacagttttaaaacagtgtgttcgtatgcat

SEQ ID NO: 445886 - DNA, 201 bp, Homo sapiens
ctgaacccgggagacggaggttgcagtgagctgagatcacatcactgcactccagcctgggtgatggagcgagcctccgtctcaaaaaaaaaaaaaaaaawtcaaatggattctttctcaaatacagatatgccttacatttgtttaaatgcatcacagttttaaaacagtgtgttcgtatgcatttattcatatctgaga

SEQ ID NO: 445887 - DNA, 201 bp, Homo sapiens
tttattttgagacggagtcttgctctgttgcccaggctggagcgcagtggcacgatctcagctcactgcaagctccacctcccgggttcacgccattctcytgcctcagcctcctgagtagctgggactacagtcgcccgccactacgcctggctaattttttgtatttttagtagagacggggtttcaccgtgttagcca

SEQ ID NO: 445888 - DNA, 201 bp, Homo sapiens
aacaagaaaaaaggttgaggtgttaggctgggcatagtgactcacaacagcactctgagaagctaaggtaggaggatcacttgaagccaggaatatgagamctgcctgagtaacaaagtgagacccctgtctctacaaaaaaaaaaataataaaaaaattacctgggtgtggggttgtgcatctgtagtctcagctactca

SEQ ID NO: 445889 - DNA, 201 bp, Homo sapiens
gctgtgtttagatccagcatgtgttgcactaatgaaaacacaggtcccctgtggttgtgggtatgtcacctgctgccttaggctctggcaggggtacctgrccagcctcagcttgcctcttcctacactaatacctcatctgcttgcccccccaggtccctccagcctcagccaagcaacatggggtgaacctcagcactc

SEQ ID NO: 445890 - DNA, 201 bp, Homo sapiens
ccatgttgcccagcctggtctccaacacctgagcccaagtgactgcccccttagccttcaaaggtgctgtgattataggcgtgagccaccgcacctgaccytttttttttttttttttttttttgagacagtctcgctctgtagcccagtctagagtgcagttactctatcttggctcattgtaacctccgcctctggggt

SEQ ID NO: 445891 - DNA, 201 bp, Homo sapiens
taacagctaatccagatcccattcccgggtgtgttagagccccccaaccttgttttgactcctagatggacctgggcttcccagggtgtggtatgtggttyctaaaatacactttctggttctcacacagatctatggctatgacgagctccagatgctgcagtcacggctgccagtggtgagtggggtatggactggtcg

SEQ ID NO: 445892 - DNA, 201 bp, Homo sapiens
catgttgcccagcctggtctccaacacctgagcccaagtgactgcccccttagccttcaaaggtgctgtgattataggcgtgagccaccgcacctgaccttttttttttttttttttttttttgagacagtctcgctctgtagcccagtctagagtgcagttactctatcttggctcattgtaacctccgcctctggggtt

SEQ ID NO: 445893 - DNA, 201 bp, Homo sapiens
cagcagacttgatatgagcaagagtaatgttgaactttgctggagacctattaggaagccatgtagtagagctaatattttattaaaaggatgcttctctmaatttgataattcagtaatccacctgaaatagggtccaagacagatttgccttaaaatgaaatttgttgttttgaagactatatcggaagaaatcaaacc

SEQ ID NO: 445894 - DNA, 201 bp, Homo sapiens
aacaccctctggagcccaccttttgagatatgttgctctttctatccctcgggttgtttgttcacctctgctgcttgtgagcctagttcctgcctggagawttctcgtgttctgtgaaagtgctcccccttctgggctttctctgctcccgtcctcagttgtgcagctctgtgtgttcccagctctgcctcttccgggggt

SEQ ID NO: 445895 - DNA, 201 bp, Homo sapiens
tgcagcaggtggtgagagttcttttgaatccgtataaaccaggatttttgtcctgggtctagcacttagtaattagatgagttacttaaatctcctttaacctcttttttttttttttttttttttgagctagagtctcactctgttgcccaggctgcagtgcagtggcttgatctcggctaacggcaactgtgcctcctg

SEQ ID NO: 445896 - DNA, 201 bp, Homo sapiens
atgggcatttttttcatacatgctgtaaacaatggccctctacttatataagatctgtaagtaagtattttttgagtagcaacacttttgaaagtacttasatgtgttatggatgagtattctgtaagaactgtttgagcgcatcctgtgtactgactccagaacttaaagcagcagacttgatatgagcaagagtaatgt

SEQ ID NO: 445897 - DNA, 201 bp, Homo sapiens
tgtcccctgttaaatgttggtccttatcttccctcctccatcttgttttctctctcttttttaaaaagaaaaaccatatgacacaagacatggaggttgcytacgtggccctggagttttatactgtcttcctcttcctcagagtaccatatagtgtctttggtctgagatggccagtgactgctcttctgcaatcagctg

SEQ ID NO: 445898 - DNA, 201 bp, Homo sapiens
gcagcaggtggtgagagttcttttgaatccgtataaaccaggatttttgtcctgggtctagcacttagtaattagatgagttacttaaatctcctttaacytcttttttttttttttttttttttgagctagagtctcactctgttgcccaggctgcagtgcagtggcttgatctcggctaacggcaactgtgcctcctgg

SEQ ID NO: 445899 - DNA, 201 bp, Homo sapiens
taacttactacattaactgtacatatagtggctgagctgtgcaattttaaaaattagaaaaaataatgtatattttaagctttagagtactttaatatttyttatgtaggtttttgtaatgtttcatcattgtttttctcctggaaattttcctttatatccctgtgtgtgtatgtttatcttcgccatcaagctttctct

SEQ ID NO: 445900 - DNA, 201 bp, Homo sapiens
cacccccgtctctgccccactgagccctggtggtcttcttccatctagactccgtgaaggcaggatctgttcccgtaacagctaatccagatcccattccygggtgtgttagagccccccaaccttgttttgactcctagatggacctgggcttcccagggtgtggtatgtggttcctaaaatacactttctggttctcac

SEQ ID NO: 445901 - DNA, 201 bp, Homo sapiens
cagcaggtggtgagagttcttttgaatccgtataaaccaggatttttgtcctgggtctagcacttagtaattagatgagttacttaaatctcctttaacctcttttttttttttttttttttttgagctagagtctcactctgttgcccaggctgcagtgcagtggcttgatctcggctaacggcaactgtgcctcctggg

SEQ ID NO: 445902 - DNA, 201 bp, Homo sapiens
gcctgtccctctcctggcactgcatggcttccttgccctctttggaggaggcagattctttttatatttctctttgctcagtgcagtgggaccttagggaytgggggaaaggggctgcttttgtctgggcccggaactctctgacgttgaaacaacctcagtgtggtggccgggctttctgtctccccttcactgctttgt

SEQ ID NO: 445903 - DNA, 201 bp, Homo sapiens
gcaggtggtgagagttcttttgaatccgtataaaccaggatttttgtcctgggtctagcacttagtaattagatgagttacttaaatctcctttaacctcttttttttttttttttttttttgagctagagtctcactctgttgcccaggctgcagtgcagtggcttgatctcggctaacggcaactgtgcctcctgggtt

SEQ ID NO: 445904 - DNA, 201 bp, Homo sapiens
tgagagttcttttgaatccgtataaaccaggatttttgtcctgggtctagcacttagtaattagatgagttacttaaatctcctttaacctcttttttttytttttttttttttgagctagagtctcactctgttgcccaggctgcagtgcagtggcttgatctcggctaacggcaactgtgcctcctgggttcaagtgat

SEQ ID NO: 445905 - DNA, 201 bp, Homo sapiens
acagattagaaattaaacaaaaataatagtagtggtcacagaaatataccagtatagaacatatgggtatctgaaaggctgagaagctaggtgagatctgrtctagaccagatctttgtcatcaggcacaagctttgcaggtgatgccaacaatagttatgctgttgtatagaagaagaagctgaattgggaactattatt

SEQ ID NO: 445906 - DNA, 201 bp, Homo sapiens
gtagtagctgagatactttgcacaagtgtgtcaacatcctggttttagaactatcttccaatcaatgctttgtgatgctgtcttaaatacatgcagtgtamgtatgtagtttgggatttaattaactgttcaaacttttattaaatgtctgttgaaatcttccctcttctcagtatgttgtcagcaagtgttctgtaactt

SEQ ID NO: 445907 - DNA, 201 bp, Homo sapiens
catacatttcatccatttagtgtacaattgaatggtttttagtatattcaccaagttgtgcaatcatcaccacaatcaattttagaacattttccacacckcagaagtataccttaccctttatcatttcaccaattctttcattcttccacctcaaccctgagcaccagtaatcgcctttctgtttctgtaggtttttgt

SEQ ID NO: 445908 - DNA, 201 bp, Homo sapiens
accattttcagttaagtctaaactgacatcacttgaaaatgcggctgtttcactgaggtatcttatcttcagaaaggtccttgaaaaaaacagcagttaarccgggcatggtagctcaggcctgtaatcctagttctttgggaggccaaggtgggaggatcacctgagcccaggagtttgagaccagcctaggcaaatatg

SEQ ID NO: 445909 - DNA, 201 bp, Homo sapiens
gcagcagttctttacctgtgttaaaatctatcacatctttaattcactttgaggtgagataaatacgggtttcaaaatttggttggatagattgaagtaarcctggtgcttcctgcccctcaagaacttgagataggtatgtttgagtttctactggattatttttagaatcttttgctcttgtctgtttctattctgaga

SEQ ID NO: 445910 - DNA, 201 bp, Homo sapiens
gcctgaggaacctctcagcaccactactgagaaagctgttttcatctggcggttgtgccaggcgtgaccatagctttagcacagagtatccagtgctcatycctgggaaacatgaaggcctttgggacctggggccctggtaggccatgtcccctgttaaatgttggtccttatcttccctcctccatcttgttttctctc

SEQ ID NO: 445911 - DNA, 201 bp, Homo sapiens
ttgtttggtggaagatcatgtatggttaatattttggcttaggtgtttgcttcttttgcctttattatttctttatttcaaaccccaggacatttaatccygcagactattcagattctacatctacagatgtgtgtgggacaaagctagtagtttgggaagctgctcagaatggtgcagatgagggaactggtaagtgtt

SEQ ID NO: 445912 - DNA, 201 bp, Homo sapiens
ggctaatttttgtatttttggtagagacggggtttcgccgtgttggccaggctggtttcaaacttctgacctcaggtgatccgcccaccttggcctcccaragtgctgggattaaaggcatgagttaccacgccctgccggtaagatgttaattactcaattttaaatgtccagtgttatgttagaggtgttctgagataa

SEQ ID NO: 445913 - DNA, 201 bp, Homo sapiens
aaaaaacaagaaatagttatttctgactacgtatatgcaagatttgtatgttaatattatgcaacatgttgggaaagatcaaagaagaccctcataaaagrgaacatattcagtgttcatgaattagaagactcaatatctttgaaatgtcatttctctccaaattgatcgatagcttcagcacaattccaatcaaaatct

SEQ ID NO: 445914 - DNA, 201 bp, Homo sapiens
cttgagtccctttcagcaagtcaggacctagttccctagtgagcatctcttagcgatggagaatgttcatttttccttccgagattaaaaggttgtatatrtccaagtacacttgcgagcactggtcagagctgctccagatttctgtggcagttggtggggagtctgcctccttagtgagaacctagttggtgggcaggc

SEQ ID NO: 445915 - DNA, 201 bp, Homo sapiens
tttgctgtttatgatttttttttacatagatctgtgtattttcttccattttcttgtagttatatctttaccactctccatcaatacataaaggaaatctyagcatcttctcctgcctttacttctctgggcctgtcctggggagttgactgcatagggcccattggatggactgagcgaagccttgaaaattagtgttga

SEQ ID NO: 445916 - DNA, 201 bp, Homo sapiens
tttacataattacagtacaattataaaaaatcagaacatctacagaccatacttatattttttcaatggtcctcataatgccttttttttttttttgagayagttttactttgatgcccaggctgtagtgcagtggtgcgatctcagctcactgcaacctccgcctcctgggttcaagtgattctcctgcctcagcctccc

SEQ ID NO: 445917 - DNA, 201 bp, Homo sapiens
atttaacaaaattaaggagaaaaatccgtatgattatttcagtaaggaaaagtgttcaatattcgttcatgattaaaacaaacagtgtttctgagtggcaygtgggatttgagcctgataatggcccttgattccaccaacatggagactttgtaccgcgtcccattagtgctcaaatgtcccaacctgaagctgaagaag

SEQ ID NO: 445918 - DNA, 201 bp, Homo sapiens
gtacatccttttttttatatatttgaaaaccatttgatttcctttatgtgagtttttaatttttattttatttatttatttcttattatttttctgagacrgagttttactcttgtggcctaggctggagtgcaatggcatgatctcagcttagtgcaacctccacctcccaggttcaagcagttctcctgcctcagcctc

SEQ ID NO: 445919 - DNA, 201 bp, Homo sapiens
tatttatctgaaatgtctaaggcaaatttatagggacagaaattagcttggtggttgcctagagatagaactatttgggaaaagtggtgagtgactacaartgagtatggagtttgtttttggagtgatgaaaatgttctagaattagaggtgatgattgcacaaattgtgaatatactaaaaattattcaactgtctgtt

SEQ ID NO: 445920 - DNA, 201 bp, Homo sapiens
acgctgaaaaatgtatgtgaaaaaattcaacatccctttgtggtaaagattatcaacaacctgagtgtggaaggaacatacctcaaaataataaaggctatttttttttttttttgagacagggtcacccaggctggaatataatgatgcgaacatggctcacggtagccttgacccccctaggctcaagagatccttctg

SEQ ID NO: 445921 - DNA, 201 bp, Homo sapiens
aaaaaacaagtcaaatcaactcctagatgcatacccaaaagaaaggaaaatataggttcacataaaatcttgtacaaaaagattgatagcaacataattcrtcattataaaaaagtagaaacaacccatacttcctgttgaacaggtctgtctggggggaaaaaacctcaaatgtttatcaatggatgaatgtataagcaa

SEQ ID NO: 445922 - DNA, 201 bp, Homo sapiens
catcactgggctctgtggggataaggaatgaggatgggtctgaagccggtcctgtgctagggactatgataagtttgaatctagctcactgacccacgtgsgtcttgttcatctggagtcacttgttcaggtggacatacggcgctctgttttgtcttctagttcgctctccagccaccagagcagcctctctgcacatgc

SEQ ID NO: 445923 - DNA, 201 bp, Homo sapiens
gttgtactctgtctacattgttcaggtactcattatatagtatatgcttctcctttggccatttagtaaataatatgttcagtagtcactgtcaatacttaagtcagtttctctagtcgttttgattgtctgaacccattgcttttgttgattcctctgaaaggaattatgagaacaatattccttgtgtttggtggtgtt

SEQ ID NO: 445924 - DNA, 201 bp, Homo sapiens
ttaatctccctagtacttactgctggaactatggcacacaccactgcactgggtgaattttaaagttttttgtagagataagattttgcattgttgtggargctggtcttaaactcctggcttcaaagatcctcccacccagccagtgctaggattattgacatgagccaccatgcccagcttagtttgtttaacttttaa

SEQ ID NO: 445925 - DNA, 201 bp, Homo sapiens
gtccaccaggaccccatcactgggctctgtggggataaggaatgaggatgggtctgaagccggtcctgtgctagggactatgataagtttgaatctagctmactgacccacgtgcgtcttgttcatctggagtcacttgttcaggtggacatacggcgctctgttttgtcttctagttcgctctccagccaccagagcagc

SEQ ID NO: 445926 - DNA, 201 bp, Homo sapiens
actgattatttagggattgatattctcaaggacggtgtattttcattgacatatttatgcattttttggtttgttttccagacatttttcttaaattttasttttaaggatctatactgtatttttattctttggaggcttattgtccatagctttaagttgggttgtcttttgcctatcttcagtgtttgacactttgct

SEQ ID NO: 445927 - DNA, 201 bp, Homo sapiens
cagaacacagaaagttgagttactattttctcaaatctgtcaaggatggtacataatgaatttcattctaggtgtctggaaaaagttcagcttatacacasagtggatgccctaagaattgggaattcattctcaaagactgagtggtttaagagttctacatccttgccaacattttatgttgcctttttagttttagcc

SEQ ID NO: 445928 - DNA, 201 bp, Homo sapiens
ttgtttgacagacaaagggctatctggcgatatgcttggcattttcctggggaatgtaactttatggacgtctcaactgaggctgacatgtcacaagataytgagcatattttcaggcacttaggattggttttagaaataaacagatctgcttcttacagctacttcatctgttccagctccaaagacaacaggccctcc

SEQ ID NO: 445929 - DNA, 201 bp, Homo sapiens
ctatgttgcccaggctggtctcctcctgactcagcctcccaaagtgctgggattataggcgtgagtcaccgtgcccagccttaaaatttactttttttttycctatttttttttttggagacagaatctcgctcttttgcccaggctggagtgcagtggcgctatctcggctcactgcaagctccgcctgccaggttcacg

SEQ ID NO: 445930 - DNA, 201 bp, Homo sapiens
taaggtaattggcataaatcagcacaaacccacactctgatcaaagtatgtcacagatatatagaatttctgaggagaagattttttactggaagtacttsccatttctaatggtggattctttggccagataatgtatgataatgtggtagatgatagatgggtttgtagcaacgttgcctctgcaggtttttctgtatc

SEQ ID NO: 445931 - DNA, 201 bp, Homo sapiens
attaatatgtgagcattcagtgtgagcaattctgtggattgtttgttttttgggggagtacaggttcttgctttgtcacccaggttagagtccagtggcgygatcacagcacactgcagccttgacctcccgggctcagtgagtcctcccaccctagcctcccaaagagctgggactacagacatgcattgccatgtctgg

SEQ ID NO: 445932 - DNA, 201 bp, Homo sapiens
cacgctcggctaattttttgtatttttttagtagagacggggtttcaccgtgttagccaggatggtctcgatctcctgacctcgtgatccacccgccttgrcctcccaaagtgctgggattataggcgtgagccactgcgcccagcctttttttttcctttttttgtgaccaggttgttctgtcacacaggctggagtgca

SEQ ID NO: 445933 - DNA, 201 bp, Homo sapiens
aaaacaggctactgtcctacctctgaaactattcttagttggttcttaccacccaaagtctgtcacatacaaatctcatgatgacaaggaatttgattttyccttctgcaagctaagaaagaggctatataaggtaattggcataaatcagcacaaacccacactctgatcaaagtatgtcacagatatatagaatttctg

SEQ ID NO: 445934 - DNA, 201 bp, Homo sapiens
aagttgcgctaattttttggtttcctagtgcatataaaagttacaatgtggatatcttaattaaagatactttattgataagaaatgctaaaaattaatakgtgagcattcagtgtgagcaattctgtggattgtttgttttttgggggagtacaggttcttgctttgtcacccaggttagagtccagtggcgtgatcaca

SEQ ID NO: 445935 - DNA, 201 bp, Homo sapiens
cccaagcatgagaattgtttgaacctaagaggcggaggttgcagcgagccgagagcacactactgcaaggcaacagagggagacttcgtctcaaaaaaagaaaaaaaaaaacaacgaaagaaaagaatggatctctggcagtgttttagtagtaataaaaatttgcagagtaagaaagatataggccgggcactgtggttt

SEQ ID NO: 445936 - DNA, 201 bp, Homo sapiens
ttacaaattgactaaccttttgagtagaatccttatagttcattgagtttgtttatagtgggcatctctagcacccatgctcttgagtgtgtggatagatstgcaggttcatacactttgtggagaaaaccaagcatgcgtgtagtatgagcactttggctgtagtactgggtacttctacattgtctgaaatatctctga

SEQ ID NO: 445937 - DNA, 201 bp, Homo sapiens
tgggaggattgcttgagcctgggaggcagctgtagtgagcactgattgtgccattgcactccagcctagccgacacaatgaaaccctagcttaaaaaaaakatgttaaggctgggcgggtggctcacacctgtaatcccagcactttgggaggccgaggtgggcggatcatgaggtcaggagttcgagaccagcctgacca

SEQ ID NO: 445938 - DNA, 201 bp, Homo sapiens
ctgaggcaagagaatcgcttgaacctgggagatggaggttgcagtgagccgatatcgcgccatgcactccagcctgggcgacagagcgagactctgtctcaaaaaaaaaaaaaaaaaagcacctatgcagtggattgtcatgtagcattaaacgtgatatagatattcataataaattgtgtctgtgagtgattccacatg

SEQ ID NO: 445939 - DNA, 201 bp, Homo sapiens
ctttggaaattgttttctttcctgtgtaattacttcatacctctgtttttgagaaactgttccgtttgtcatctgtcatggtctccttccaccaaatcttsatctgggaatagcagcggtatccctccacccaagtatggccacctgtttgtcttcatatagaacaggggcttctggtctggtcatgtccctagagactta

SEQ ID NO: 445940 - DNA, 201 bp, Homo sapiens
aatcctgggctcaagtgatacttccacctcagcctcctgagcagctgggactataggcatgagccccaccatgcctggctaatttaaagaaaaaaaaaaawttttttttttaagagatggggtcttgcaatgttgcccaggttggtctggaactcctggcctcaagctgtcctcctacctcagtgtcccaaatctcaggga

SEQ ID NO: 445941 - DNA, 201 bp, Homo sapiens
ctgggcatagtggctcatgtctgtaatctcaacactttgggaggctgaggcaaaagggttgcttgagcccaggaattaagagcaggctgggcaacatagtraggaccttgtctctacaaaaagtttaaaaagtagctgggcatgatggcttccatttgtagtcccaggtacttgggcggctgaggtgggaggatcacttat

SEQ ID NO: 445942 - DNA, 201 bp, Homo sapiens
aatggggtcactgagaataaacagtgagaaaaagatcagataatccaatcaacagaactggaaatctatgagtaaactactcacttcttaaaaaggttttrtggtaggaatactactcaacaagttagcttttgattagatgcttaattctgttttattcttttcttaaaatgtatttatttaaggagataggtggctggg

SEQ ID NO: 445943 - DNA, 201 bp, Homo sapiens
catccctactttcttgcagattttctattttgtacatacattattttgtatatactgtatatgatgacttcagtgagcagtgaccattgtcgaggtgctcrggaaaaaccacagatttcagcagcacaatcaacgcaaccacagaaacaagtggtacaggtaagtttttgtggaactctttttttttttttcctttttttt

SEQ ID NO: 445944 - DNA, 201 bp, Homo sapiens
ttctcatacaaagatgaagtctaaatgtgctgatggaaaagaatgaaaaacaggctactgtcctacctctgaaactattcttagttggttcttaccacccraagtctgtcacatacaaatctcatgatgacaaggaatttgattttcccttctgcaagctaagaaagaggctatataaggtaattggcataaatcagcaca

SEQ ID NO: 445945 - DNA, 201 bp, Homo sapiens
aagtgttctgtttttgccagagatgagttttaaatgtttgagctattaagagttgtatgttctcatacaaagatgaagtctaaatgtgctgatggaaaagratgaaaaacaggctactgtcctacctctgaaactattcttagttggttcttaccacccaaagtctgtcacatacaaatctcatgatgacaaggaatttga

SEQ ID NO: 445946 - DNA, 201 bp, Homo sapiens
cttggattctgacttgggaagaaaatacctgttgcctatttatgccttatttttcagcaggactctcataagagctcttattctgccttgaaagattataygtctccttgtctgctttaggatgcagaggaccgtgtttcaggaaaataaggctattataccagaatgtgtggaaggtccctaggcaacttctggttttca

SEQ ID NO: 445947 - DNA, 201 bp, Homo sapiens
gagcctttgaatacatctttatcaatgaccagtgcagtacagaactccacatatacaacttccgtcattacctcctgcagtctgacaagctcatcactgarttctgctagtccagtagcaatgtcttcctcttatgaccagagttctgtgcataacaggatcccataccaaagccctgtgagttcatcagagtcagctcca

SEQ ID NO: 445948 - DNA, 201 bp, Homo sapiens
gaagtcactaactgggtataggtagttgtatcagcagggatcagttaattgggtgccctggattggaatgttggtgctactaggaataatgataatattgyctgggtagtgagtataggatgaagaaggaagtgtaattgtgtaggacataagtattattttatactataattgtgtgtttttttaaaggatttggacgtg

SEQ ID NO: 445949 - DNA, 201 bp, Homo sapiens
agggattatattgcaggccagctgccacaatgacatgctgtaaccttaaatccagttttacctactagctgttgagatgaactcttgtgactctaagtctrgttttaccaaccgtgttcactcaccaatcagagcttaccagctcccaaaagctttagtagttccagtgagttttctttcaaaacaataggtcacatttct

SEQ ID NO: 445950 - DNA, 201 bp, Homo sapiens
acccagagttggaacttttatttatatcattagcggaggggcgccactggggataacgaacccagatttggttaaaggatagcgtcagggacatcatggayagggccaggactaaggccaatctggacccactttgctctcacttcttccttttccctccctgagttggacagttggattcacagactatggctgtgaatt

SEQ ID NO: 445951 - DNA, 201 bp, Homo sapiens
acgtggagccggaagcggaggttccgggctccgggatgaaaggagggaacgcaggtgagaaagcgagacaggcaggtagggaaatcgtgaggtgagcgtgrtcctagctccttgtggcagagcctagagagaaggcgaggacgctgaagaaccaggcgggtgagaggaggggagggggcgggcgttctgggttctacgcta

SEQ ID NO: 445952 - DNA, 201 bp, Homo sapiens
ctggaagattgccagctgtaacgggagcatctatgtcttccgggaccgatataaaaagggggatgccaacacctacaagcttgaccctgccacttcagccrtaactgtcacaagaggtattaaggtgctgcttaccaatttgcagtttgtgttggcctaaggctgtggggaggggaggagaactgctcactccttttccct

SEQ ID NO: 445953 - DNA, 201 bp, Homo sapiens
cagtgccccggcctgggggcggatggactcaagttctgggacgcagccatagggagtctttcgagcgagcggggaagtgtgggggaagcagctcagaagasagcaaatgtaagacccacggatatcccaggctaggcttcatatggagcgtcttaactccatgcgctgggaaggagaggacctggccactaggccggggcc

SEQ ID NO: 445954 - DNA, 201 bp, Homo sapiens
tctggaagattgccagctgtaacgggagcatctatgtcttccgggaccgatataaaaagggggatgccaacacctacaagcttgaccctgccacttcagcygtaactgtcacaagaggtattaaggtgctgcttaccaatttgcagtttgtgttggcctaaggctgtggggaggggaggagaactgctcactccttttccc

SEQ ID NO: 445955 - DNA, 201 bp, Homo sapiens
aggatcttaaggatatgtgtcttagctgagccttagcctagaatttaacagctgtcatataattttaattttgccaataggaaattggggagaatgtgcayatttacctgattgggaaagagtcatctcgtacccactcgttggctgtgtccttgcactgtgcagaagatgactccatcagtgtaagtggccaaaacagtt

SEQ ID NO: 445956 - DNA, 201 bp, Homo sapiens
acggtttccctggcgaccgtttccaagacgactcaaggtggagcggggacattgcacagggtgatgggcctcccagtgccccggcctgggggcggatggaytcaagttctgggacgcagccatagggagtctttcgagcgagcggggaagtgtgggggaagcagctcagaagagagcaaatgtaagacccacggatatccc

SEQ ID NO: 445957 - DNA, 201 bp, Homo sapiens
ttgagttttttattttatttggaatttgtcaggcctcttggatatgctgattaactttttatattatgtttagaaagtatgaggtcattatttcttccagytatctttgtgacctttcccctctgccctctccttctggagttcccattgtgcatgtgtttgtacaattgatggtgtctcccagtctctgaggctctgttc

SEQ ID NO: 445958 - DNA, 201 bp, Homo sapiens
gtccagagcagatgaatctggacttgcttgctggtgaaatataagcaggagttatattcttgtaaatatcagtctatgtgggtgatcaaaactggtgtctrctgcatgctcattttattttagtttttattctctattttcaaggctacacataaattttaaatcttttatcactttgctgtgaagggatttgtctgaagc

SEQ ID NO: 445959 - DNA, 201 bp, Homo sapiens
atgtcctgaaggaagagtagtggtaggctccatcctttgagctccagcatgccttgtgaaaggggtgctatgaacatgaattaaatatgaatgcagtgatwaaacattttattctttttaaggctctgaagagctatacttgtcagaatgatttctgcaccagggaatcatttagattggtcttcaaagagtgaaaatttg

SEQ ID NO: 445960 - DNA, 201 bp, Homo sapiens
cacatgctgccctgggtgacggaacggccctctccatccccacatggggtgccgtaacggccgccggccttgccctgtgctgtgtgctgagctagactgayacttggctttttcgcaggctcaccatcaatgctgagtgccagctgcagctgcacaacttccccatggacgaacactcctgcccgctgattttctccagct

SEQ ID NO: 445961 - DNA, 201 bp, Homo sapiens
ttggtctttctgggcagaggtaggaatttgatttctgcactaggcctctgctgatgccactctggcttggaggggtttggatttgacaccgtgccaggagygctcatggccatctggcaggtatggaagtcttgggtcctctcttgagcttctctcatgctgccctagtggaggagttgggggatcacattacaacagaac

SEQ ID NO: 445962 - DNA, 201 bp, Homo sapiens
caaagtccctagttggtcttctccacatttcaaagcgttatgattatttcatataaatatgtaggtttattagttttacttaacttagtggatagggtaargtatgtagacttcatcttctcagaagcaaatgtccaaaaaagaggtaattgtatgcttgggtatcataataaatcatatctaaaagggaagacgaggcca

SEQ ID NO: 445963 - DNA, 201 bp, Homo sapiens
gtgagtcttaatagtttgtgtttttcaggggatatgttcatttcacctaagctgtagaattattggcatagtgttatgcattcagcattgttcccttaccwtcccgtaatgttgccccactaccttcattcctgatattggtaatttgtgtcttatctctttctcttgctcggactgtctagaggtttatcagttgcaatg

SEQ ID NO: 445964 - DNA, 201 bp, Homo sapiens
aagttgatttgtccaagatgggcagcaatctaatctaagccaatacaatcttctacaccactggttttatttatctgattctgacctgtctgaaattgacygtgtcagaggctttctgagaatgtgaacatggaatcactgagagcaaataaatgcatgtcagtctctctctggtggtgggaactaccagatatggaactt

SEQ ID NO: 445965 - DNA, 201 bp, Homo sapiens
tgggttgataggtgcagcaaaccaccatggcacatgtttatgtaataaacatgcacattctgcacatgttccatagaacttaaaaaagtaaataaaataaaataatttttttctaaagagctttttccataaaactacatctgacataagtatagacttttccagtttacatagcgtttttacatgaaattttaccaccta

SEQ ID NO: 445966 - DNA, 201 bp, Homo sapiens
cttgtgatgctatgtatgagactttaggacttgaatgtgctctcctctgtctttctccggcacgaagtattaacatacatgtatttttctccacagtaaarccgaccgtaattgacgttgacatttatgttaacagcattggtcctgtgtcatcaataaacatggtaagaagctcctttattttctgatctaacggctgtt

SEQ ID NO: 445967 - DNA, 201 bp, Homo sapiens
aacacttttaggttttgcttggtagacagagaatatctaaatagtattgatttttccacagttatatgaaggaaagaatggtccaattatctaaacgttgygaaacatattaaatttttttaacttaaagattttttctacttcattgtctgatctaaaccatagatggagaaactgtaatgctactctcatttacctgag

SEQ ID NO: 445968 - DNA, 201 bp, Homo sapiens
ccactggccactgtgcagctttggtcctcttgggctagatggaatggtagtggcacctttttgacttggtaggtaggggccagatcgggtgcagtacctgscagtaatggatatcaatggtatccaatggagaaacacgccaaatggaaaagggagtacctagggttttctagaattggaatagggaaagaaaatgggcat

SEQ ID NO: 445969 - DNA, 201 bp, Homo sapiens
gatttttaggagaaaatggtaaatgacaagtacaatgcctgagatttattaaaacaaaaacatttcagagaatgtcatggggtggtttgaggtctgctcaktttcctgtgccttatacatctacggggctgcacgatcctagaagacgtgtctgagccccctggaaaggcctctgggctgtggagggcacctgtgatggag

SEQ ID NO: 445970 - DNA, 201 bp, Homo sapiens
gttcaaatagccctccaccaagctctcctcactggcttcttccaggatgaagacggccatggagagtggagaaaaacaaccaagcaaaggtctgctttagygttgtgacagaggcaaagagaaaaggcagcccatgtactccccttaggaccacctcaatccatcaacggagcaaatgtggctgatgcttgttgaggctta

SEQ ID NO: 445971 - DNA, 201 bp, Homo sapiens
gtggccaatctccttcttggattctactgtcagagccactattctaatgcttcaattacgttagcatgactgcttaaaagagcatctactggccgggcacrgtggctcatgcctgtattcccagcactttgggaggctggggtgggcagatcacctgaggtcaggagttcaagaccaacctggctaacatggtgaaacccc

SEQ ID NO: 445972 - DNA, 201 bp, Homo sapiens
caggagttcaagaccaacctggctaacatggtgaaaccccgtctctactaaaaatacaaaattagctgggcgtggtggcaggcgcctgtaatcccagctayttgggaggctgagtcaggagaatcgcttgaaccgggaggcagaggttgccgtgagctgagattgcgccattgcactccaccatgggagacaaagcaagac

SEQ ID NO: 445973 - DNA, 201 bp, Homo sapiens
caagtaagaatctctcatccttcgagaattttgaaaagaaaggcaggcagggcttgaattataattacaagagaagtcccaaagaaagccctgctcatgtktgtttccaccatgtccttgtgatgctatgtatgagactttaggacttgaatgtgctctcctctgtctttctccggcacgaagtattaacatacatgtatt

SEQ ID NO: 445974 - DNA, 201 bp, Homo sapiens
cccgctgattttctccagctgtgagtaccagtccaagcccggggtgtgcatgctgtgtgagggatgcctagcctggtactgcttctgtcaaacagtcatgygattgatcacagtgtccctgcacacacagagaaaactgatgatggtttcagtattgaccacctgggtgttttcactctagaccttgtcacataggagcca

SEQ ID NO: 445975 - DNA, 201 bp, Homo sapiens
ccatccccacatggggtgccgtaacggccgccggccttgccctgtgctgtgtgctgagctagactgacacttggctttttcgcaggctcaccatcaatgcygagtgccagctgcagctgcacaacttccccatggacgaacactcctgcccgctgattttctccagctgtgagtaccagtccaagcccggggtgtgcatgc

SEQ ID NO: 445976 - DNA, 201 bp, Homo sapiens
tatttcacacaacctatgtgctgcagatggctgtatattaaaatcaagttgtgagtgtaatattcccttttcctgatacatcattattcagttgactgctyagagtaaccctttcttatgtatgtttcttgttctggagttttattttcttgcatttgttccacaaccgtttattcaacacctttacgtctaacatgtgtt

SEQ ID NO: 445977 - DNA, 201 bp, Homo sapiens
atttgaatcactgtaggaatgagaccctattttcatctctaagtctattctctttcacgtgagacatactacagcatcctgagaaagtctgccctcatgcmacatgtgtaaaaataaaagcatacagatgatccacagagaatataagttcatttcttcagaatctatttctgctggaagtaggctgtgaaagttattctt

SEQ ID NO: 445978 - DNA, 201 bp, Homo sapiens
aagaatataagaaagactaaaacaatcaaagaatacaagatgagaagaagcacaatttagagatgcagacagggtttaaggatgtaaatttgtattggggrtttgaccgtaaaggtaaagcctggtaaaattatggcttcttgtccaaatagtcatttaacaatcaatgaaacagggaacaatgactatttcactttctcc

SEQ ID NO: 445979 - DNA, 201 bp, Homo sapiens
ccatagttttgctttttcctaagtgtcacatacttcaaattatacaatagtcaaccttgtaggatggctttttttccttcgttttaaaaagtactgatacyaattcatctgaggaaatctaagacttgtagcgagccactgtaatgtgactatagcgtgaccatgtgttaccagaaattgatgggatggctctgtggattg

SEQ ID NO: 445980 - DNA, 201 bp, Homo sapiens
ttgtgaactaccaaggagctaggaagacacatgaataaatcctactaaacatgaagggggcccccagttctcactcctgaattgggcaggggtgcttaccytgaggaaggaagccctggccctcccccttgcaactgctcctctttgctgagttgagtgtggaagccgactccaccggtgactcacaggcaactctttcaa

SEQ ID NO: 445981 - DNA, 201 bp, Homo sapiens
acattctggcatttcaagatattccacacttatattctgtttttttctccaatcctagaactagccatttctaagagccccggttcatttcagtagagaayggtattagaaatctggatgtggtctgggcgcagtggctcacgcctgtaatccgagcactttgggaggccaaggcgggcagatcacgaggtcaggagattg

SEQ ID NO: 445982 - DNA, 201 bp, Homo sapiens
gctactgcacaccgaaagcttagtctctgtgctttgtgcctgttgcctgggtgaatggttgaagggatgactgcagatagcccatgcccgaggtcccctgkgcctcctctgtcatgggccccctgattcttttcctctctttccacatctgctaaagtaagaagtacatttgtcttttgtcctttagagcacttggccatt

SEQ ID NO: 445983 - DNA, 201 bp, Homo sapiens
tttttctccaatcctagaactagccatttctaagagccccggttcatttcagtagagaatggtattagaaatctggatgtggtctgggcgcagtggctcaygcctgtaatccgagcactttgggaggccaaggcgggcagatcacgaggtcaggagattgagaccatcctggcaacacggtgaaaccccatctctactaaa

SEQ ID NO: 445984 - DNA, 201 bp, Homo sapiens
ccaatcctagaactagccatttctaagagccccggttcatttcagtagagaatggtattagaaatctggatgtggtctgggcgcagtggctcacgcctgtmatccgagcactttgggaggccaaggcgggcagatcacgaggtcaggagattgagaccatcctggcaacacggtgaaaccccatctctactaaaaatacaa

SEQ ID NO: 445985 - DNA, 201 bp, Homo sapiens
cctagaactagccatttctaagagccccggttcatttcagtagagaatggtattagaaatctggatgtggtctgggcgcagtggctcacgcctgtaatccsagcactttgggaggccaaggcgggcagatcacgaggtcaggagattgagaccatcctggcaacacggtgaaaccccatctctactaaaaatacaaaaaat

SEQ ID NO: 445986 - DNA, 201 bp, Homo sapiens
aaggctgacatcctagaaaatccctcatatcctggctgtggaattgaaaatagaggatttaacttactgtcattttcctttttatttattcatttgtttgmtattgtaacacttttaggttttgcttggtagacagagaatatctaaatagtattgatttttccacagttatatgaaggaaagaatggtccaattatctaa

SEQ ID NO: 445987 - DNA, 201 bp, Homo sapiens
tgtgtaatagagactccgtgtcccacaccagagcagcctgtgatagaggctccgcgtcccgcaccggagcagcctgtgatagagactctgtgtcccgcacyggagcagcttgctagcacgtcccgggctttcaccccgtaacatcttaagaaggatggaaagaccaatcagtacaaaaaaataacctgaacttgttacatc

SEQ ID NO: 445988 - DNA, 201 bp, Homo sapiens
actaactttattttagtagcttacagaaatattgcttcaaattttatccccttttatatttattattatcatataaattacatatttatgtatgataagtrtataagcacagtttaataacttttggtttattcagttgtattttgatccctatggaagtagaaaattgttattaaagtacattggcattgtcttttatat

SEQ ID NO: 445989 - DNA, 201 bp, Homo sapiens
ggggactctgagtggacccttggtggaatggttgtcagccacaaagcaagagcgtcaaacctgagagtgaaactgggcaaagtttgtaagttacagcccargggccaagacctgtttttttttttttttttaaatgacttgtcagctaataatagtctttacattcttaaaggattgtgaaaaacagcagcagcagcaaca

SEQ ID NO: 445990 - DNA, 201 bp, Homo sapiens
attcttctgtgacagccaggtcctgactttccttcaggtgtttgggggctaccctggggcctgctgcccaccacgctacggggctctgtgagcctcggacrcacagcctgttagaggaagtcagtactcggacactagagaaagatgcggctttgcaagctcagagattcccaggaagtgctgagctgcctttgggcaggg

SEQ ID NO: 445991 - DNA, 201 bp, Homo sapiens
cagtttaataacttttggtttattcagttgtattttgatccctatggaagtagaaaattgttattaaagtacattggcattgtcttttatatttacctatrtaattacatttaccagggttctttatttgttgtatggcttctgattactctgtctatccatttgttttttcattttagccaaaagactctagaatttctt

SEQ ID NO: 445992 - DNA, 201 bp, Homo sapiens
ttagccaaaagactctagaatttcttgtaaagcaggtgtgttaatgatgggtgctctcagtttttaaaacctgggaatgtcttaattttgccttcgttttkgaagggtaattttactaaatacaaaattcttggttgacaatctttttcttatgacagtgttaaatatatcatcccattgccttttgacttccattagttt

SEQ ID NO: 445993 - DNA, 201 bp, Homo sapiens
ctgtattctccacaaaaagagaataattttaaaatgttgacttgaaaaatagtcatgaaagtagctgagtgagcattaattaaacatcctgctgtgttttstgcatagttttagctcatgaatgaagacagtgatttaaaattgaaagcagaagacaaagttaactgactagataatgaaaggtgcagacttattaaaggc

SEQ ID NO: 445994 - DNA, 201 bp, Homo sapiens
ctaaaaccgcagaggctcactggatcaccacacccaatcagctcctccggatttggaatgacgggaaaatcctttacactttgaggtaagatgctgcatcratctttgattactcctggtttaaaatgggatccttaatttgaatcactgtaggaatgagaccctattttcatctctaagtctattctctttcacgtgaga

SEQ ID NO: 445995 - DNA, 201 bp, Homo sapiens
cttatgatcaaatctgtcttttagtagccctgtatcttcaggctgactaaattttggtcaagcagagaatctttttcagtgccttttatttctttcttttrccttcttacactggctagatcttctagtactgtgatgaatgagagttgagagtgggcatccctgaattgctactgagctcaaggggggaaatattcagta

SEQ ID NO: 445996 - DNA, 201 bp, Homo sapiens
ggtcattactggaggatgatctattgctttgtggaactcttttggagtcatctaagctcaggaaagtttaaaataagtgacagctgaagcaccgtggtgcycctgaccttgttttgtttttctttgcatttctcctgcgtaaagttcatagcagtttttgcatctgtagttcgataactttcagcagtgtttgaaaaagag

SEQ ID NO: 445997 - DNA, 201 bp, Homo sapiens
atgttttaaagctgtctattgagttcttgatttcagttattatgttttcagttcgaaaattttaatttgattctttctaacgtatgttagttctctggtgmgattctccatcttgcaatctgttttctggaacacattaaccatgaagtcccttctgccatctctggttccatttctaatgtctgttttcttgcttctttc

SEQ ID NO: 445998 - DNA, 201 bp, Homo sapiens
ttaggcttattacaatacctgtaagtagctggaagtaatttttaaaaactaaggctgcgtatatagagaatgatgaaaagctggttactgtgctcggtttrtgtgtatgtgattatcagggccatagacaataacacagggtggaggctgtggtctggctctgtagtggtgggggtaggagaggggaggagaacgggaggg

SEQ ID NO: 445999 - DNA, 201 bp, Homo sapiens
ggcaattttcattgtgtacaaagatttgtagaggcattgagtggtttttcccttgcctctctgtaggtctgagctggcatggggctgacctgcagtcttgyagaggctccactggactctggttcccctgcctttctgcatcgttccccagaggtcccaactgagggcctggaatgtgtcaacaccaaaaaatggctgaaa

SEQ ID NO: 446000 - DNA, 201 bp, Homo sapiens
tacgaattatgtatttcttttagcaatattagctttagatgaaaaaaagcatgtggcccttttcagttgtttaagaggatgatggtcttatatgtggtttkaatattattttataaaatgaacaatatttcattttccacttgaaaaatgaaaaaattttattgctgtcatagatttttttgtggttttatgcattaatat

SEQ ID NO: 446001 - DNA, 201 bp, Homo sapiens
aaaaaattttattgctgtcatagatttttttgtggttttatgcattaatatagtatatagtaaatgttcaaaaggattgtttgttgctattcttgctattrtattacaacctgtaaattttgtgacactttcagttttatgtcatccgtgaattctcccctcagtgttcatggcctttggacctgaggaattggcattact

SEQ ID NO: 446002 - DNA, 201 bp, Homo sapiens
tgtcttgcttgttctcagagcactgatgggacacagtatattctagatgcctagggactgcttaaaaccaagaaaacaggttggactaacacaaaggtccragaggctccgaaaatctctgcttgggctgattataagggtcttttgtatgagactagtctgtgaatattgggagaggtcgctgttttatctaatgtgcag

SEQ ID NO: 446003 - DNA, 201 bp, Homo sapiens
atacaactgctctggctttgtggatctcctgttgtcctctttctgcagagttagagaatagtccatcactgaagattcaggccacgcatgtaactcagggycagttctcttaatgctctcattttatgttggggcaaattaagaagtctgcccatggccacgtggtcagtgtgttatttatttgttttgttttatttaaaa

SEQ ID NO: 446004 - DNA, 201 bp, Homo sapiens
gaatagcctggaggagccacacaagctttgtgggaatgatctctgcaaattaaaaaaaaaatctccaagaacaaaaaagaagatgacacttaaaggctttygagcctgagatccatcgagtcttgtgtggcagatgcccatgagccctggaccaaggcccacatgtctttttggtcacttacttaccccaatcatccagtc

SEQ ID NO: 446005 - DNA, 201 bp, Homo sapiens
tctaagaattctgcatgaagccctagctcttgaaaattttctcctttgtgttcttctgaaagttttgtaatttcatcctttacattttaatttgttatgtyttgatttttatataaaataaatatgtaagatttagatctaatttcttttccccaccctccatggatgcccaattactccagcaccatttgttggagagac

SEQ ID NO: 446006 - DNA, 201 bp, Homo sapiens
ttaaaacagtaaaatgtgtgtgtgtgtgtgtgtgtgtgtgtgtgtgtgtgtgtgatttcttcctaatattaaaggaaattcaagaaaatagaaaaattttwaaaacacttattctataggaaatatcaaatatccatatctcaaacctacgtttttaggtacatacatacaagtgctacactggagctattgtatcaataa

SEQ ID NO: 446007 - DNA, 201 bp, Homo sapiens
gcaccatttgttggagagactatccttccttgactgaattgcttttatgaagttgtcaaaaatcagctggcttgactggtgtgggttatttctggttctcygtttcgctctgttttatctgtgtgtctgtcactctgtcaatacccacaatttttattaccatagctgtataataaatcttcaaattggatcaagtaattc

SEQ ID NO: 446008 - DNA, 201 bp, Homo sapiens
cgccacctccccgcccccctccacgtggaggcaggcaggtagcagaatcggagccggtgcttagggtggactgccaattgtttagtctgaagattttactyacaagggtgggctgccgattgtttagtctgacgattttacttataaagtcggagtaagtttacctgtagatcaagatttatgatgtttttcattcctgtc

SEQ ID NO: 446009 - DNA, 201 bp, Homo sapiens
atagtatacattgctgggtattgattgcatttggcagggcattaaaagaaaaagatgatcctaaaaatcaagtggtttcagcaattccacttctaagtgtrtacacaaaagagttaaaaacagggtcctgaacacatctgtgtataccagttttcctagcagcattgttcacagtaattaaaacttggatgcaacccaagg

SEQ ID NO: 446010 - DNA, 201 bp, Homo sapiens
tctactcaaaggtaatcataaaggagtaatgcaactagcgcaaagcagccagcctgctacacaagaaagggtatcctataatacatggtattgctacttawctcagatgtgtcgtgacttttttagcctttttgttttaatttcaggcttacaagaaacttgcaagactaggacaaagaatttttgtagacacatattcct

SEQ ID NO: 446011 - DNA, 201 bp, Homo sapiens
actcaaaagtcagcaataagaaaacaagcaacccaataaaaaaatggtaaaagagttaaacagatactttcccaaaaaaggtatataaatgtcagatatgygtatgaaaatatgctcaacataatcattagagaatggtgaattaaaactagattgcagtaccaatacgcacctattagaatgtcttttgaaaaattgcag

SEQ ID NO: 446012 - DNA, 201 bp, Homo sapiens
tacctctttacccctaaattctttagcatatatttcccaaagccagaaatttttatgtaatataaatacatttacaataatcagggaaatatactgatacwctactaagcattctatagaccttatttaaatttcaccatttgtcccaattacggcatttatagctaagacacacacagacacagacacacacacacacac

SEQ ID NO: 446013 - DNA, 201 bp, Homo sapiens
gtatgtataagtcttatagtcaggtaaagtaataaactactacttattcttctctttaaaaaatttttttagctactctgatttctttgcctttctatatraatttagaatacatttttatagctatgggatttgggtagatattatattaaactaacaggttagcgttatgattagagcagtgacatctgaaatattgaa

SEQ ID NO: 446014 - DNA, 201 bp, Homo sapiens
aggatgaatatgaagattcatcatcaaaccaaaagtgggtcttggctccaaaatcccaagacaccgacgtgactcttattctcaacaagttgctaagagartatgataaaaagctgaggccagatattggaagtgagtgttgttttttgttattctaatagaaaaatatgctgtagtgatatgaagtttttacttttgagt

SEQ ID NO: 446015 - DNA, 201 bp, Homo sapiens
catgggtctatttctggattctctactctgttttattgatcgatgtttctcttcttctgctagtaccacacggtcttgattactgtagttgtatgtataartcttatagtcaggtaaagtaataaactactacttattcttctctttaaaaaatttttttagctactctgatttctttgcctttctatataaatttagaat

SEQ ID NO: 446016 - DNA, 201 bp, Homo sapiens
ggagagaatctgctgggaaggttggtgatgagggcaggtccatgtataggctggcaacagagagacatcttgcaaacaacttcattttattttcctgatgraatccagaaaggcagttctttgagaaaggggcaaataaaatgaacattacagaagaggatttctatgagcggtcatgcaaaaagtgtgacagatggtcac

SEQ ID NO: 446017 - DNA, 201 bp, Homo sapiens
ggagacagatgtaatatggacctactgcttcatacacctcagggtgtttttattgcattttacaatggttgttgtgtcatttttgttgcttgcagaactaytccctcctggacatgaggccaccaccaactgcgatgatcactttaaacaattccgtttactggcaggaatttgaagatacctgtgtctatgagtgtctgg

SEQ ID NO: 446018 - DNA, 201 bp, Homo sapiens
tttggtcacttacttaccccaatcatccagtccagaggcccttgtaaatatgtgtcaagtgagtgaatggataacagtccttatctccctctgcctctcaygtgcatgcctgctagtctgtttttgtgtgtgaacacatcctgctctacatgcctgtacactactgtcttcagttcacaatttccttagttaataggcttc

SEQ ID NO: 446019 - DNA, 201 bp, Homo sapiens
ctgagatgtcggtaatcatgataagacaccggatctttgttagcagcgatctcatgcactgactccttcaaatgtgtgaatagcttcttattttcctttcrtcttgaacttttgcacttcgattggatatttcacaattgattttcctcattcttcacaatgtgagctacataatgtccctctgacaagagcaccgtcttt

SEQ ID NO: 446020 - DNA, 201 bp, Homo sapiens
gctgaagcaggtaatgggaacacagcagtgaacggaattaataaagctgtggtgttcatgaggcttcagtttatttgaggtaagacatcgaataaacaaayatgcacactgttatttcaaattgtggacagttttataaagaaattaaactcctgggtgtggccaccccgtgaaggtttcctttatagaatttgggccggg

SEQ ID NO: 446021 - DNA, 201 bp, Homo sapiens
gccctgcagaccagtgtgaggggcctgcgttttgttctgggctctggaagaagcctatgcaaggtagtaagcagggaaattgtgtaacgtgtttcactttyagatgccggccgggcgcggtggctcatgcctataatcccaggacttgggaagctgaggcgggcggatcatgaggtcaggagttggagaccagcctgacca

SEQ ID NO: 446022 - DNA, 201 bp, Homo sapiens
gcctgaccaacatggtgaaataccgtctctactagaaatacaaaaattagctgggctttgtggcatgcacctgtaatcccagctactcaggaggctgaggsaggagaatcgcttgaacctgggaggcagaggttgcagtgagctgagattgcaccattacgctgcaggctgggcgacagaacaagactccatctcaaaaat

SEQ ID NO: 446023 - DNA, 201 bp, Homo sapiens
caccagccctgctgacaccttgatctcggccttccaccttccagaacccggagagaaaacacatttgttgtgtgagccccgggcagtggtgctgcattacygtagcagcccagcactagcactaacacaggcctagcctacatttcgcaggtcctgtccatatataagagattctgtaagaattgaagaaacaggagagaa

SEQ ID NO: 446024 - DNA, 201 bp, Homo sapiens
gacttccaactccgggctctttcctgcatcatatggagaagatcctttggagtgggataaagacatattccctaaagctcttgggtgaaaataataaaagraaaaggaatcccattatctttgatttccatgactggtctaaacttcacagggcatcattctcatggattcttgtgtgttaggaacaggcctttgatcgcc

SEQ ID NO: 446025 - DNA, 201 bp, Homo sapiens
tgaaggaaaaggaaggtgcttattaagggccactgttttactggggcccattggatgagggcaaagtttggcagttacgcaagagactttcctcccacctscttctgtgcccgagctgtcttatctgtgttttactgtctgctctttctggctgctggtagttagaagagaagtgatttccttgaaatgaaggagtctaga

SEQ ID NO: 446026 - DNA, 201 bp, Homo sapiens
ctctctggctctatagcaagatgatttgaccattgcactatttgtagaaaactcaaggcaagcctattcaaaaatattcctcacaccccaacaatgcagcrcttgcaagaagatatattaaggtgctgccatgtgcaataggcaagcaaaattcacaattctagagatttttccactgtgtacacaaggaattgtgaattt

SEQ ID NO: 446027 - DNA, 201 bp, Homo sapiens
ccaacactttgggaggccaaggtgggcggatcatgaggtcaggagatcgagaccatcctggctgacactgtctctactaaaaatacaaaaaattaaccagrcgtggtagcgggcacctgtggtcccagctactcaggaggctgaggcaggagaatggcgtgaacccgggaggtggaggttgcagtgagctgagattgcacc

SEQ ID NO: 446028 - DNA, 201 bp, Homo sapiens
ggtgctggcaggtgcagcgtatggtgagggctgctctctgcttctgtggtactttctgtgtgtcgtcacatggtgcaggggacataaatgtgaaggacgaycttccttcatgtctgcatggtctctcagtcatgtcattctgtaccaaggtcttattactccccaaacccaggcattcttttgaggcatcaaattctgagg

SEQ ID NO: 446029 - DNA, 201 bp, Homo sapiens
tgctttaaaagagaacttcctataaacatctgaatcccttttcttttctcatgacttttttttttttcaaatctagccaatttcatttgctataaccatcrggccttctcatcccttatcaaggtgcagtgaacttatatgtacataatgtgctgtacatggatttactattagtttgtgggagaggccagctcattgctc

SEQ ID NO: 446030 - DNA, 201 bp, Homo sapiens
accagacgtggtagcgggcacctgtggtcccagctactcaggaggctgaggcaggagaatggcgtgaacccgggaggtggaggttgcagtgagctgagatygcaccactgcactccagcctgggcgacagagtgagactccgtctcaaaaaaaaaaaaaaaaaaaaaaaaaaaattatggtatcatactaagaaaaacctt

SEQ ID NO: 446031 - DNA, 201 bp, Homo sapiens
tcttccctggcaccacgctcttctcctggacaccaccggcttcccttccctgtgttagggttggcagagcctgaaaagctgggaaagtggcacagactgtrtcgatatctttcccactttgtgaatgacctcctcatattctccaggaccaaccaagctcttggggcctggggcacatgggaaccatgcagtgtggcctct

SEQ ID NO: 446032 - DNA, 201 bp, Homo sapiens
tttttttttcaaatctagccaatttcatttgctataaccatcaggccttctcatcccttatcaaggtgcagtgaacttatatgtacataatgtgctgtacrtggatttactattagtttgtgggagaggccagctcattgctcacttcctttacacccccgaccctggtacaccctgggagcccccgggaggctctccaca

SEQ ID NO: 446033 - DNA, 201 bp, Homo sapiens
cagacgtggtagcgggcacctgtggtcccagctactcaggaggctgaggcaggagaatggcgtgaacccgggaggtggaggttgcagtgagctgagattgyaccactgcactccagcctgggcgacagagtgagactccgtctcaaaaaaaaaaaaaaaaaaaaaaaaaaaattatggtatcatactaagaaaaacctttc

SEQ ID NO: 446034 - DNA, 201 bp, Homo sapiens
tcaggggtgcagggagccccgccccagaaaggcagagggtagggggcaagtgtgttggggagttggggatgtcagagtgacagcagaagagctggagctcrgccatgggaatgtcagcaaagaactgtcaggaagaaactgatctcctgagagagggaaaggtgtgccactctcccctcccgggtggagcctgaggagatg

SEQ ID NO: 446035 - DNA, 201 bp, Homo sapiens
aagaaggggactctccagatagcacttcggagtagataggggcactcccactttggtctaaattaacctgtttaatttgaaactcttgaaagttgcacttygcttctcagataaagaccaagtcccttaaaaatgacattaagatggaaggctgaggcaggaagattgcttgagcccaggagtttgagaccagtctgagca

SEQ ID NO: 446036 - DNA, 201 bp, Homo sapiens
agacgtggtagcgggcacctgtggtcccagctactcaggaggctgaggcaggagaatggcgtgaacccgggaggtggaggttgcagtgagctgagattgcrccactgcactccagcctgggcgacagagtgagactccgtctcaaaaaaaaaaaaaaaaaaaaaaaaaaaattatggtatcatactaagaaaaacctttca

SEQ ID NO: 446037 - DNA, 201 bp, Homo sapiens
cacttcggagtagataggggcactcccactttggtctaaattaacctgtttaatttgaaactcttgaaagttgcacttcgcttctcagataaagaccaagycccttaaaaatgacattaagatggaaggctgaggcaggaagattgcttgagcccaggagtttgagaccagtctgagcaacataagagaccttgtttctac

SEQ ID NO: 446038 - DNA, 201 bp, Homo sapiens
gaggtggaggttgcagtgagctgagattgcaccactgcactccagcctgggcgacagagtgagactccgtctcaaaaaaaaaaaaaaaaaaaaaaaaaaaattatggtatcatactaagaaaaacctttcagatgtgggcacggacccagatctccaccgtcctcttttctcaccttggggaggctgaggacagatgttcc

SEQ ID NO: 446039 - DNA, 201 bp, Homo sapiens
atgttggcatctcccaacatacgtggtccaactgcagcagggcgatccatcatcaggaaacaattgtgcatcactgttatttttaacaacaaatagatggratttaatagactcgttcgttcatgttgcgtggaagtaacaaatctgcatggaatcctctaattagttttcataatacaaattgtgatcattatgttttaa

SEQ ID NO: 446040 - DNA, 201 bp, Homo sapiens
gttccttctgccccttactcaccagcttcttatgtgaggccatcagttccaacgtggaagcgtagtaggttggatgctgattgcataccccttttagcacrctctaatcaattaaattttcagttcttgaaaaacaaagccattctttaaaatatgcctttaatggaattcagcagcaaatgcattgaaagcagcatgctt

SEQ ID NO: 446041 - DNA, 201 bp, Homo sapiens
attatggatatatctgttttagttcccttctttatccatccttttaagtaatgcttcagccctgtccttagctggttcagggtgatgtagggtgtcatttwtcttggaacagatcttgtcatgtgagctgggaaaggctggaggaggataaaccttttaagaaaaatcacgaaaaggaagagaaatggcctaagtaaattt

SEQ ID NO: 446042 - DNA, 201 bp, Homo sapiens
atcatctcaggtcctctgtttccacatctatcaaatgaagtatttgcctgggtgatcctgaagtatctttcagctttgacaaccatgaggtttgagctagrcatttagcagagtagaaagggaatctaaggaggatagcacaatggacaggttgccaggaaagaatcacatgccagatggccagctagccacttagcctgc

SEQ ID NO: 446043 - DNA, 201 bp, Homo sapiens
tggtcttttccccatcagttacatttcgataaaacaagcctgcaatgaattttagttttctggaaaataattaggaatgacacatgaagtgagcactctgrcacattcctctcttgctgtatttaacatagaaaatatctgggtttcccatgcatgcagatgcaatgagtgggttgtttttccagcagtggcaaaacacgg

SEQ ID NO: 446044 - DNA, 201 bp, Homo sapiens
aggggtgatctagttccctaaatctcagttctgtgcaaacaattataatgaattcatcatctcacatatattaatattttatataaacatattttagaaaacacaaaataacactaaatattcaaaagtatcatactatttaaaattagaacatagacgtgatgggcaacatacaatttgataatgttaattcatttagat

SEQ ID NO: 446045 - DNA, 201 bp, Homo sapiens
aaatacacctctcaccatgtctcatctctactcagtatcctcagagactcctactgccctctaaattaaatctaggctgggcaccgtggctcatgcctgtrgttccaacactttggaaaaccaaggagggaggatttcttgagggcaggacttgtgttcagcctgggcaacttagcctcagcctcccaagtagctaggact

SEQ ID NO: 446046 - DNA, 201 bp, Homo sapiens
gttctttacaaaataaggaagtgatattaatacaggtgggctcctctcagtggaaagtgatgtctctcgtatcaagcgatgttgcttcatgaagtgtttaraaagccagttccaaaagcagatcagtaatcaatcttggataagaacttttttcaaaccattcatataaatgttgtccaagacatttaggatggcaaaagt

SEQ ID NO: 446047 - DNA, 201 bp, Homo sapiens
aggagaatctgcctcttatttcatcttcccaggaagttcctccttgctgggacacttcttctcttttctgctccctccatcccacttaattcttggttctsctttccttaccttccccaagtctccattggcctgggccgctgcccttcagcccacaccttggcagttggtggtgcctcgcagcacgggatggcagagaag

SEQ ID NO: 446048 - DNA, 201 bp, Homo sapiens
accatgtcccgcacacatcaccacactcgctggtgcaattctgtgggagccgccccttgcttcatgctcccttggcttccaggctcaactcccaaactccyggtgcctgggtgtcagtctctccacatgcccttggggctatgccctgggtggtgctgctccctcccatgggaatgctcagccacctggatgactctcacc

SEQ ID NO: 446049 - DNA, 201 bp, Homo sapiens
ctgagctggtatcataggaagtcccctctgttttaacccaaaaaggagagtaactttgagatggctgatctgctgtttgtcccatgcttctgcttccttcmgcccttttctgcccgcagagccccctcctctgctcagctcgctggaacactcattctatctcatggaatgaggcattgcttgattctagaattgtcctaa

SEQ ID NO: 446050 - DNA, 201 bp, Homo sapiens
tcatgtgagctgggaaaggctggaggaggataaaccttttaagaaaaatcacgaaaaggaagagaaatggcctaagtaaatttcacttccttcagggtttyaagaaacttaaaccactctactgaaaacagatgattagagaatacagattccctccccagtatgtgggcaatcaatctgtgccaaatatggtcatgctgg

SEQ ID NO: 446051 - DNA, 201 bp, Homo sapiens
cgcagagccccctcctctgctcagctcgctggaacactcattctatctcatggaatgaggcattgcttgattctagaattgtcctaatttttgtcttttamcagtgtgagttagttacctattgctgtgtaacgaagtaccccaatgctttgtggcttcaaagaacacattttttacctcgcagtttatatggtcaggaat

SEQ ID NO: 446052 - DNA, 201 bp, Homo sapiens
ggataaaccttttaagaaaaatcacgaaaaggaagagaaatggcctaagtaaatttcacttccttcagggttttaagaaacttaaaccactctactgaaarcagatgattagagaatacagattccctccccagtatgtgggcaatcaatctgtgccaaatatggtcatgctgggaaaaatagaaggttacatattggctt

SEQ ID NO: 446053 - DNA, 201 bp, Homo sapiens
tgagcaaagggtgaatcatgaagggggcaggccctagaatcagaataggttcagaaagtctgttactacaaccaaaaagtagtcaaacaatgttaatggayagagaaaaggaaatgagggacagaaacagctccattggttgccactcagtgtggccttatttgaacctggtttaaccagttggccgcctgtgactggctg

SEQ ID NO: 446054 - DNA, 201 bp, Homo sapiens
ggggtgatctagttccctaaatctcagttctgtgcaaacaattataatgaattcatcatctcacatatattaatattttatataaacatattttagaaaacacaaaataacactaaatattcaaaagtatcatactatttaaaattagaacatagacgtgatgggcaacatacaatttgataatgttaattcatttagata

SEQ ID NO: 446055 - DNA, 201 bp, Homo sapiens
gattagagaatacagattccctccccagtatgtgggcaatcaatctgtgccaaatatggtcatgctgggaaaaatagaaggttacatattggcttttaaargtgaatagacactctgtggagtcctgggcaacgctgactgatgggttcactgaatccaggcaaaacatctgaatcaccttgtcttggccgtatcaatggc

SEQ ID NO: 446056 - DNA, 201 bp, Homo sapiens
aaggtcagttccttatgctctgtcattattagtttgcacacaaccgaatagtgtccctttatctgatttccctttccggtgtgcacccagcatctactgcragataaactatctagaatgaaggaattgatatatgctttggcaacaatcaatttaagcagctctcagctagagcacaaaaccgtaaatctgctgcgattg

SEQ ID NO: 446057 - DNA, 201 bp, Homo sapiens
tcttcatgtttcattattttgttatttattttctcatctcagaggagattccaaagttctttagttttttaagaattcttatgattttataaatgcaattytaattatctttgtcaaaaggagttcaatctgatgtatcctagaattttctttccttttcttttcttctttttttttttttttttttttttcagtgtgtca

SEQ ID NO: 446058 - DNA, 201 bp, Homo sapiens
aaggttacatattggcttttaaaggtgaatagacactctgtggagtcctgggcaacgctgactgatgggttcactgaatccaggcaaaacatctgaatcaycttgtcttggccgtatcaatggctagagggcttcttcaagtgtttgcatatctgaacttctgttccaggcttttctaaaatgtattttcccagttcagtt

SEQ ID NO: 446059 - DNA, 201 bp, Homo sapiens
ctgcgagataaactatctagaatgaaggaattgatatatgctttggcaacaatcaatttaagcagctctcagctagagcacaaaaccgtaaatctgctgcrattgctgggcatcaaggggcatcagcagttgctctgcctcactttatcagaagcaggtgcacactcatggaaggcgaaagagaaaggaattaggatccac

SEQ ID NO: 446060 - DNA, 201 bp, Homo sapiens
gagagttatgagttactgaaattgcctggagttcttccatttccttttaaacaactaatgtcaggcatatctagaataaaagctgaaatttaaaaaaattwaaaaaacccacaaattttctctcccttcacagctttccccaaatcactcaatttcctcctctgcttctcctgtgggctagagtaggcccagatatggagt

SEQ ID NO: 446061 - DNA, 201 bp, Homo sapiens
gatggttccaccattcagagaatatgtgaaaaaaaaaaaaccctgatttggacacattaaatgtgtgaattttatgtatgtgcattatgtctcaaataaargtgatttaaaaacaaagttaaaaaggaagaattgtagcatagagcaccttttgtaattatggggataggaagcaattgggacatggccaatggccaagga

SEQ ID NO: 446062 - DNA, 201 bp, Homo sapiens
tgacctcaggtgatccacctgcctcggtctcccaaagtgctgggattattggcgtgagccaccacgcttggccccttatatacttcttaaagttgtttccscttactcagtgtcccctggctcactcctgtattctccagctgcatgaagacagccacgggtcttcccttgcctgtgctgatcactgtgtggtcattctcc

SEQ ID NO: 446063 - DNA, 201 bp, Homo sapiens
tttggaagcagtgatttgccttgtgacctgaattctttgatggatctaagacgagtttttgatttttcaatgagaataagagtgaagactttcaagctccrtatatgccaggactggaaaccagaagtcctcctacttttttgtttcctgacactttcttatacgtaggatccaagctggtgatttcagctttttccctca

SEQ ID NO: 446064 - DNA, 201 bp, Homo sapiens
ttagcattttcaagttaagggagagcatgtatccctgctgtgttgacaataatttcaccgggcaacccacaatcagaaagcagggcatgcctgtgcctgtrctttattttagtctttcaatggtggagccaagccagcaatgtcaggcagagagggaaaaaaatgaagaaggcagattgcctctaagaattttgcaaactg

SEQ ID NO: 446065 - DNA, 201 bp, Homo sapiens
ttttttccttcagtttgagatctttctggttcttggtagaatgggctgagtgtttttcagttgaaaactgaacatttcagatattattttatgcaacagtytatcttatttaagctgtctgttttggcgttctgcaacagcactctggtggaaagggagttggagttcatcacttccaggttgctacagaagtccagtttc

SEQ ID NO: 446066 - DNA, 201 bp, Homo sapiens
tataccataaaattcatccaattatagtgtacagtccaatggctttcagtatattcacaatattgtgcagccataatttaggtttagaacatcttcatctstgcaaaaaggagaaagctactcactcaggggtagtcactccacattatccttgccactcttctttgagcccttggtaaccaatagtctaatttccatcac

SEQ ID NO: 446067 - DNA, 201 bp, Homo sapiens
tgagagatgggaggctgagatgaatttcagggttcataatttgtgttgagtggatggaagtatgattaatttataagcttttcacgtgtgtaaatctgccycttgcctctccatgccccaattacaagagtagcatgaggaacttgttatcttagaacataatttatcaaatgttaaatgtagttattattattgcttcca

SEQ ID NO: 446068 - DNA, 201 bp, Homo sapiens
gcagtggagtgcctggccattcgtgaagatctacagctggattaggtggcatttagccattcatttttcaagtttctgtgtcttggaggaaaattgagaghgcacatatggcctaaaagtttaactcctaactcctgtaattcattgatcagaattataattttcactttaatgatttataaatgtgtaccttcaagtgct

SEQ ID NO: 446069 - DNA, 201 bp, Homo sapiens
ctttttgtgtaggcagtttctaggttctctattctgttccattgatctatgtgtgtatccctctgacaatatcacacaatgttggttactgtagctatacrataggctgtaatatctggtagagtgattcttcctgcactcttctttttcagcattgttttaggtactttgcttttacctataagttttagaataattgta

SEQ ID NO: 446070 - DNA, 201 bp, Homo sapiens
catctctgcaaaaaggagaaagctactcactcaggggtagtcactccacattatccttgccactcttctttgagcccttggtaaccaatagtctaatttcyatcactatgaatttgcctgtaatgtacctttgatataaatggaaccgttagaataggtgactggtttcttgaatgttttcaaggtttatcaatgtgatag

SEQ ID NO: 446071 - DNA, 201 bp, Homo sapiens
aaaaacttctaacttccttgcatgttgatgccatattctaggttagataaaagttaaaagcaagcatgtaaaatatacagtctaccagatggagacaagakgtagggagaaaaatttacggaatatatattgagatgtcagtgaagggagatggctctttgaaatagggcagtgacagctaagttaattaagtgacaagag

SEQ ID NO: 446072 - DNA, 201 bp, Homo sapiens
agggaggactgctctagcatttaaatcccaaaggcctttcctggtgttctcaaaacaaaaggaaatgcaaagttaagctgaacccaactaactcaggggaytttgaaactgattgcaagcaaatactagctcagaaaagtggcaaatagaaggagacaacagatttgaggcaacagtctgaacaattcttgtgctaggtgt

SEQ ID NO: 446073 - DNA, 201 bp, Homo sapiens
atacaaatactgttgcaaagattctcaacaaaatactagcaatctgaatccagcaacatataatatgattatacaccagtgaccaagtagtatctaaaaamtgcaaggatggttcaacataaaaaaatcattctatgtaatactctatattcatagaataggcacaaaaataacagaatcatctctatgggcagaaaaaat

SEQ ID NO: 446074 - DNA, 201 bp, Homo sapiens
tactgataacattaaacaggcattttgattgtttttcaatagtggatattctaaataatgatgctatgaatatatgtatataagttttacatggataaatrttttgatttttcttagatatacatgtaagagtggaattgctggatgatttagtttttgaccgattttattcaacttttttattgttaacttttgtgggta

SEQ ID NO: 446075 - DNA, 201 bp, Homo sapiens
agaaggaagagatgatggtggtttgcactactgtgtttcagaagtggtggggtgtttttggattttggatacgttaagcatatagtggatgctatttgacragggactgagtatgtggtatgagcagagagaggagtcatagtatcaagttgttgtttacagagatgaggaccaccgtgggaggagttggtttcggtggaa

SEQ ID NO: 446076 - DNA, 201 bp, Homo sapiens
tagacgcacattacttaattagggaatgaaagaggagacactactactgacttcatggggtgggggaagaattacaaaagaatactttgattattagattrtaatctataatatttagattattacctaaattagttgcagtgaatttattaaacttaattagatgcaataaattcctagaaagacacaaactaccaaaac

SEQ ID NO: 446077 - DNA, 201 bp, Homo sapiens
agggactgagtatgtggtatgagcagagagaggagtcatagtatcaagttgttgtttacagagatgaggaccaccgtgggaggagttggtttcggtggaaygattagggaaacatctggagctttgcttggggaatagttgaagtgtttggcagacagcatcgggaaaatgttgagtgtgcttcgatatattaatcctaaa

SEQ ID NO: 446078 - DNA, 201 bp, Homo sapiens
aattcctccctcaatatttttatttgttttattttttctcctatcaaaattaaaaagcagctgcacaaagcaacaattatattctctgttgatggacatcrtaatataaaatggttgagttggtatgataatagcacaaaagtgaagagggatggaactatataagtgcaaaatttttgaatattgttaaaattaagttgg

SEQ ID NO: 446079 - DNA, 201 bp, Homo sapiens
agttggtttcggtggaatgattagggaaacatctggagctttgcttggggaatagttgaagtgtttggcagacagcatcgggaaaatgttgagtgtgcttsgatatattaatcctaaattcaatgcagaggtccaaatataaatttggaagtcataagcaaggaatagacttttacagccttgaactggatgaaatcacct

SEQ ID NO: 446080 - DNA, 201 bp, Homo sapiens
ctaccttaagaacattctacaaactaagaaaaccatgtataaagaactaaaaagaagtaagaaagacatctcaccaaatggagattgtaaaaaaaaaataragcatataaaaatgaatcaaaataaaattctagagttgaaacataccatatttgaagtgaaaaattcactaaaggtactcaacagcagatgtgaagtgtg

SEQ ID NO: 446081 - DNA, 201 bp, Homo sapiens
agctttattgagagagagagagacagacacagacagacagacagacatggaatgagaggtgaggtgcctggggtgctctgagacagaattgggaggtgcamccacagccggccctgataccccctgcaccagatgcctcccacggccactctgggctctgatccctctgctcaggcctttgcagtttgtccaggcccagcc

SEQ ID NO: 446082 - DNA, 201 bp, Homo sapiens
gtggataggtgatagatagatagatagacagacagacagacagacagagaggtatatgagaactggacagacagacagagagagaggtgtatgagaactgsttcacaggattatggaggctgaaaagtcccatgatgagctgcctgcaagctggaggactggggaggcccggagcatggctcagtccaagcctgaaggcct

SEQ ID NO: 446083 - DNA, 201 bp, Homo sapiens
aaaggctttttcttctgaccacgtaaatatggttcactcttgggctgtactataatatatagcccaagtgtaatataacatcctttctcatcaaactctgkttttccttggactaaaaaatgggcacttttttcccaatgttcttggaatgcatcactaaatcttccttcagcctccaaaagtttgtaaaatatgtctcca

SEQ ID NO: 446084 - DNA, 201 bp, Homo sapiens
ttgtcattaagactgtttggatgctgcatctaaaaattcactttccatttaaatgtttctctttcatgcactatttaatttctgacacacatcagccgctrttctagtgcatagttagtagtccacaaacatcctataattaaattgaacatctgtcttttccaaggtgaataattcaggtgagccagatttcttctcacg

SEQ ID NO: 446085 - DNA, 201 bp, Homo sapiens
cgtccctaccactgtctccaatgaaatacacatggcctagcacgtggtgggtgccaaatgaaggctcctggacaaacaaaggagcctttctctataagaayagagcttgaggaaactcgtgatagaattgtgaccaagagaagcagttgatgaaaaagtctccaaataaatgctggcaagattctctttccaaatgtgaaa

SEQ ID NO: 446086 - DNA, 201 bp, Homo sapiens
acagattcgtccctaccactgtctccaatgaaatacacatggcctagcacgtggtgggtgccaaatgaaggctcctggacaaacaaaggagcctttctctrtaagaacagagcttgaggaaactcgtgatagaattgtgaccaagagaagcagttgatgaaaaagtctccaaataaatgctggcaagattctctttccaaa

SEQ ID NO: 446087 - DNA, 201 bp, Homo sapiens
ctgtcatgcaaatttcacaaatcaaagtttacaaacattgactagtctgatagtgctgcattccgtgccattgtgtccagaattggttccttctggtgggwtcttggtctctctgacttcaagaatgaagcctcggaccctcgggtgagtgttacagcacttaaagatagtgcccacccaaagagtgaacagcagcaagag

SEQ ID NO: 446088 - DNA, 201 bp, Homo sapiens
tgatgtgtttaagtggatacagttgggagagacagtgttgtctgaccgtgggccctaacgcccaccggccagaggagcaaacttgcccagcagcctgcctygccccacgcccagcatccacggctgccttagctggagggagccgcgcgggggcgcagtgcgtcatcactgcagctatttcacattattagggaggccacc

SEQ ID NO: 446089 - DNA, 201 bp, Homo sapiens
ctaaaaaaatacaaaaacattagccaggcgtggtggtgggcgcctgtagtcccagctactcgggaggctgaggcaggagaatggcgtgaacctgggaggcrgagcttgcagtgagccaagatggcgccagtgcactccagcctgggagacagagtaagactccgtctcaaaaaaaaagaaaaaaaaaatgaaagccacatt

SEQ ID NO: 446090 - DNA, 201 bp, Homo sapiens
ttggctgttagatagaaaataatctgcagaaggacaaattaagcaacgattacaattattattatattgcaataatattatattgtattattattattacmataatcaagtgcgatgtcattggtgcattagagtagtaaatgtggttggaatctgagcatgtttaatgcatttttatggagtaaatatataatatgagga

SEQ ID NO: 446091 - DNA, 201 bp, Homo sapiens
atcttaaaaaataaaaataataaataaataaataaataaacaaataaatatgttaagcttcggtttgtggcccagaatatgttctattttgccgaacattytatatgtatttcagaagaatatgtattctgctgttttgttgcctggagtattatataattataaataatgtcaaactggttgatacgattgttcaagtct

SEQ ID NO: 446092 - DNA, 201 bp, Homo sapiens
ctcagctactcaggaggctgaggtaggagaatggcttgaacccagcaagcagaggctgcagtgagccaagatcctaccactgcactacagcttgggtgacwgagtgagacttcatcttaaaaaataaaaataataaataaataaataaataaacaaataaatatgttaagcttcggtttgtggcccagaatatgttctatt

SEQ ID NO: 446093 - DNA, 201 bp, Homo sapiens
catggagttggggtgcgccacctgcatccgcacatgggtgagttctcgttcccgttcctgccagcctccacatgttcggccatctggaagtgctcagaacyctgtcctttggggcctcttacagagactttattacataggcatggctggttaaaccgatggccattggtgatcaacttaactttcagctttctcctctcc

SEQ ID NO: 446094 - DNA, 201 bp, Homo sapiens
cttgatcacttggttaaagtgctgtctgccagatttccccactgtaaagttacaatattttctttgcaattttctacttgttagtactgagccactaagtytagcctgtaatcaattaaggagataatattagctgtagtatttctgtagatgttctttattggttaatgatgttcctttctattcccagtttgctagaag

SEQ ID NO: 446095 - DNA, 201 bp, Homo sapiens
tacgtagggcgaggtctggaagggtctcagggcaggagcttccctccccatggagttggggtgcgccacctgcatccgcacatgggtgagttctcgttccygttcctgccagcctccacatgttcggccatctggaagtgctcagaaccctgtcctttggggcctcttacagagactttattacataggcatggctggtta

SEQ ID NO: 446096 - DNA, 201 bp, Homo sapiens
taccaagaatgtgtactctgctgacattgggtagagtgttctataaatgcaaattagctcaagttgattgctagtgttgttcaaatcttttgtgttctcasttatttcctgtctgcatgttcaagcatttattgagagagaagtactgaaatcactaagcataattgtagattcatctatttctccttgcaattctgtcca

SEQ ID NO: 446097 - DNA, 201 bp, Homo sapiens
ctgtctgagaaaaataggaagtaacgtatgttttttttttttttttttgagacggagtctcactctgtccccaggctggagtgcagtggcgcgatctcggytcactgcaagctcctcctcccgggttcacaccattctcctgcctcagcctcccgagtagctgggactacaggcgcccgccaccacgcccagcaaattttt

SEQ ID NO: 446098 - DNA, 201 bp, Homo sapiens
atatcattccacccctagcccctccgaaatctcatatcttcacatttcaaaatcaatcatgccttcccaacagtccctgaaagtctcaactcatttcagcrttaactcaaaagtccacagttcaaagtctcatccaagacaaggcaagttccttctgcctatgagcctgtaaaatgaaaagcaagttagttacttcctaga

SEQ ID NO: 446099 - DNA, 201 bp, Homo sapiens
ttgcatgtgaaaaacttcagctaaaagtcaagggctgttccctttgtatcaactttgtttagtgaataagaaagggaatttttaatacttgagaaatattyggcaatgcacagtttaaagtttttcagatttataccttgcaagcctccttataaaacagttaattttcagtgtctgagactcatggtcaggtcgatttta

SEQ ID NO: 446100 - DNA, 201 bp, Homo sapiens
agaaaagcaaaattaacccctcccctttccctttaagtgttttttcacttttaagattacaaacatgttacacatccattgtaacaagcatacaatacaayggcctattaaagacaatgaatttgcctttccattccttgttctctctcaaggaatgaccaattcttgaggtcattctctcaaggtgaccgctcaaggtga

SEQ ID NO: 446101 - DNA, 201 bp, Homo sapiens
agagcttctgaccaacgggcttcaagttggggttctcacaaccccctctttgggtttgatcaattttctggaatggctcacagaactcagggaaatacttrtttcagattactaatttattacaaaggatatttaacaggatacaaataaccaggctgatgaagagatacgtagggcgaggtctggaagggtctcagggca

SEQ ID NO: 446102 - DNA, 201 bp, Homo sapiens
catatcccatatgacttgtgtaattttatttatcaaagccttgttatcaaaccacgttggggtaatttattggtctttcataccaaaagcctttgttttaycaatacaaaacaaaaagctctagaggtttggagtttatccagaattgcacggcattgtgattagcccatttgtcaggactaattatgctcaacttagaac

SEQ ID NO: 446103 - DNA, 201 bp, Homo sapiens
tccatagggcctgcaggcaggtggctggggctttgctcttccacccgtcccccatggtcttatgaagatcttaggtgtctgagaaaaacaggcaggtttcrgtcccctgaaactgccactggagctaatagcatcaaatcataacattaatcagctgcccacgggtgggcaggcattgtcaatttccttcaaaaagaaaga

SEQ ID NO: 446104 - DNA, 201 bp, Homo sapiens
ttaaaaccaccccacacttaagacaccagtcccaagtctaggtctccagagcttctgaccaacgggcttcaagttggggttctcacaaccccctctttggrtttgatcaattttctggaatggctcacagaactcagggaaatacttgtttcagattactaatttattacaaaggatatttaacaggatacaaataaccag

SEQ ID NO: 446105 - DNA, 201 bp, Homo sapiens
gggctatttaggcagtatgcatcgctctaaattttcttcttattaccccatatgcccaatgctactgttatttacagaattaattttttagtcatatcccwtatgacttgtgtaattttatttatcaaagccttgttatcaaaccacgttggggtaatttattggtctttcataccaaaagcctttgttttatcaatacaa

SEQ ID NO: 446106 - DNA, 201 bp, Homo sapiens
ggtggctggggctttgctcttccacccgtcccccatggtcttatgaagatcttaggtgtctgagaaaaacaggcaggtttcggtcccctgaaactgccacyggagctaatagcatcaaatcataacattaatcagctgcccacgggtgggcaggcattgtcaatttccttcaaaaagaaagatgtcttcaatgacgatttg

SEQ ID NO: 446107 - DNA, 201 bp, Homo sapiens
ttttgggtatatacccagcagtggaattgctggatcatatggcagctttgtttatagttttttgaaacacttccaaaatgttctctgtagtgatttattawtctacatttccaccaacagtgtacaagggttcccttttctccacatccttgccagcatttgttattgcttgacttttggataaaagccattttaactggg

SEQ ID NO: 446108 - DNA, 201 bp, Homo sapiens
ctactgtaatagcctcattttaacatcattacgtctttgaagacccaatctccaaatgcaatgacactctaaagtgctggggcctaggactttaacattcraattttggagggacacaattcagcccctaacatttatgtattcatgttgtaatatccagagcaaccacaaagaaaactgtacaagtaatatactaaaaac

SEQ ID NO: 446109 - DNA, 201 bp, Homo sapiens
gctggaaaaacacacactcaaagtgctttatcctattccctcactcaacagcaacaatcaatacagatttctgtgaccaaatgtgtggcttttttccccakatctgaagtgtgcaatcagttctgcaggggacaccagctgggtgtccacctattcaattctaacactctccacctggagatagcatcaaatcctaaaggt

SEQ ID NO: 446110 - DNA, 201 bp, Homo sapiens
ttgggaggctgaggtgggcgaatcacccggactcaggagtttgagaccagcctggccaacatggcaaaacctgtctctactaaaagtacaacaattagccrgatgtggtggcacgtgtctgtggtcccagctactcgggaggctgaggcaggaaaatcacttgaactcgggagagggaggttgtagtgagtggagatcgcg

SEQ ID NO: 446111 - DNA, 201 bp, Homo sapiens
aatttagttgtaagaaaaaatactgagatcccatgcatccttattcatttgccccagtggtaattgtagctggaaaaacacacactcaaagtgctttatcstattccctcactcaacagcaacaatcaatacagatttctgtgaccaaatgtgtggcttttttccccatatctgaagtgtgcaatcagttctgcaggggac

SEQ ID NO: 446112 - DNA, 201 bp, Homo sapiens
tttattattgttaaatatattacttgttataggcccaacaatgtaattatatatgtacttttttatgcaattgccttttaagttagttgagaagatttatrcaattatattatcttttatgacaatctatgtaattatctttattagggctttttgttttttttgtttaaatttggatttttgtttgtggtcactggcttt

SEQ ID NO: 446113 - DNA, 201 bp, Homo sapiens
tagccggatgtggtggcacgtgtctgtggtcccagctactcgggaggctgaggcaggaaaatcacttgaactcgggagagggaggttgtagtgagtggagrtcgcgccactgcactctagcctgggcgacagagcgagactgtgtctccagtaaataaataaataaaataaaatggttttcttaaaaacagcatttagctg

SEQ ID NO: 446114 - DNA, 201 bp, Homo sapiens
ccaatctatatgtcttctatttctttattttttcatgtgttattacattggctagaaccttcaatataaaagtttaacagatggagagcagatatccttayattgttcctgatcttagggggaaaacatctagtcttttactttttttttttttttttttgagacagagttttgctcttgtcgcccaggctggagtgcaat

SEQ ID NO: 446115 - DNA, 201 bp, Homo sapiens
gggacacaattcagcccctaacatttatgtattcatgttgtaatatccagagcaaccacaaagaaaactgtacaagtaatatactaaaaacattatgaataaaaaaaaatcccataaaatgttcaagaatccctggaaagataagagaagtagaagaatgagaaacaaaggggaggaaaacacaaaaaaccaccaatcatc

SEQ ID NO: 446116 - DNA, 201 bp, Homo sapiens
ttgagttgaatggattccatcacccatgaaaaatcctgaagccttaggacacacgatctgagcggatttatacaaaggaaaatatgcttatgaaacatctyagcctggctctcctcatcttctgcatccttcaggtatttatagctgagtccaagttctgtctcgtttggttgtgtgcaagcacctttgaacacttaggga

SEQ ID NO: 446117 - DNA, 201 bp, Homo sapiens
tgccccctgcaaatggatggaagttggattcttctgtgacagccaggtcctgactttccttcaggtgtttgggggctaccctggggcctgctgcccaccaygctacggggctctgtgagcctcggacgcacagcctgttagaggaagtcagtactcggacactagagaaagatgcggctttgcaagctcagagattcccag

SEQ ID NO: 446118 - DNA, 201 bp, Homo sapiens
ttaataaattaaaaatcattatagatcctcaaacgttacatcagaaaatatccacttaatccaaaagaagtaagtaaaggagcaaaagaataaaaacataygaatgatgtaaaaagcaaatggtagatgtatattgaaccctatgaataacaaatgtgaatgaattaaacaatccagtcaaaggcagagattatcagactg

SEQ ID NO: 446119 - DNA, 201 bp, Homo sapiens
cccatcattttttatgaagctaatattacctgataccaaaaccagataaagacagcataaaaaagaaaaacaacagagcagtttctttcatgaacttgcaygcaaaactcctcaacaaatattagcaaatagagtcctgcaaagtttaaaagaattatacatcatgaccaggtgggatttctttcaggtatagaaggttga

SEQ ID NO: 446120 - DNA, 201 bp, Homo sapiens
accattctcctgcctcagcctcccgagtagctgggactacaggcgcccgccaccacgcccagcaaattttttgtatttttagtagagacagggtttcaccrtgttaaccaggatggtctcgatctcctgacctcgtgatctgcccaccttggcctcccaaagtgctaggattacaggcgtgagccaccgtgcccggccaaa

SEQ ID NO: 446121 - DNA, 201 bp, Homo sapiens
ccctgcaaatggatggaagttggattcttctgtgacagccaggtcctgactttccttcaggtgtttgggggctaccctggggcctgctgcccaccacgctrcggggctctgtgagcctcggacgcacagcctgttagaggaagtcagtactcggacactagagaaagatgcggctttgcaagctcagagattcccaggaag

SEQ ID NO: 446122 - DNA, 201 bp, Homo sapiens
tgctgggccccacaaattatgtaggcagcccagctgctgatgtgtctttgccttcaggtagttcatgctttcgcgttacatgggtccacagactacagtcrcacaaatcagagcttcatttatttaaaccctcatatggtcttagaatttcactatcttcctggagcacctgctagctgtctgtgcttcacactgtttgta

SEQ ID NO: 446123 - DNA, 201 bp, Homo sapiens
gtcagcattatcttctgcttattgaccaatgtttgtccataagtcattttagacagttagatttttctctttatcaatggatatctgtgtgtctttgagtytgttatcacaatttaggaattttacattttgtcccatgttcagctagggactagtagcttggatttttcctccttctaattcctgatatattacagcctt

SEQ ID NO: 446124 - DNA, 201 bp, Homo sapiens
gacacacagcccgaggcagaaggggaggagaaccgccctgacttccctcctgctccacgctgtcagctacgtttcccaccgcgactccaccgcgacttccyttagccatgcactggggagctgcagaaacagccgcacctgtcaaccttcgaaaggtacagagtggtgcaagagagaggtgaggaatggatctgtgggcaa

SEQ ID NO: 446125 - DNA, 201 bp, Homo sapiens
ccttaccaatcactcccctgagctgaggaccgaccatagaaatgaaagccacacacccagcagggatgccagtgatcatggtcacggaataaggcaaaccygggctcaaatgctccctcccaagtactgaacatgacacttttcatttcccttatttgaagagcaggcacaataaaaacacctatcaaatatatttaagaa

SEQ ID NO: 446126 - DNA, 201 bp, Homo sapiens
tacatagcatttacattgtattaggtattataagtaatctagaaataatttatataatggatggtatgcataggttatattcagataccatgtcattttayatatgagacttaagaactcatggattttgatatagacagaatataggggttcaggaaccaatcccctgccaataccaaaggatggttatactttaaggac

SEQ ID NO: 446127 - DNA, 201 bp, Homo sapiens
aagtgttcttccttctggctgagtttgatgtcacaagcaattcttgcctttcctgtcacccctctgaggcccaggtgggccagtggagccactgagcaccrtccagccagtcctccaactgtctgtagacacattaggtgtgtccaacccagctgactcccgcacacaatgccactccacacaatcatcagttgttggcca

SEQ ID NO: 446128 - DNA, 201 bp, Homo sapiens
ttgtctccaaaacaaaacaaacaaaaaacaaagcaaaacaaaacaacaaaaaagagagagataagggagagaaagcacaaggttgtacccaaagcggatgstcagaaagctcagttcctcccttccctctaatgggagctgtgaagagctgacagcaccacgaggggtggcagggagtccacagctccttaatgtcctgaa

SEQ ID NO: 446129 - DNA, 201 bp, Homo sapiens
tttgtctccaaaacaaaacaaacaaaaaacaaagcaaaacaaaacaacaaaaaagagagagataagggagagaaagcacaaggttgtacccaaagcggatsctcagaaagctcagttcctcccttccctctaatgggagctgtgaagagctgacagcaccacgaggggtggcagggagtccacagctccttaatgtcctga

SEQ ID NO: 446130 - DNA, 201 bp, Homo sapiens
ctctctgacttcaagaatgaagcctcggaccctcgggtgagtgttacagcacttaaagatagtgcccacccaaagagtgaacagcagcaagagttattgcraagagaaacaacaaagcttacacagcatggaagaggactccaggaggttgccactgctggcatgggtggccagcttttattcccttatttggccccactc

SEQ ID NO: 446131 - DNA, 201 bp, Homo sapiens
ttgtctaaactatttaacattttccctcaatatttaaattgttaaatatcttattttattttatttatttatttatttttgagatggagtctctctctgtygccaggctggagtgcggtggtgcaatctcggctcactgcaacctccgcctcccgggttcaagcaattcttctgcctcagcctcccgagtagctgggacta

SEQ ID NO: 446132 - DNA, 201 bp, Homo sapiens
cacaggatttgtgcaagagacaaaacagcccttgtcctagacatgcttcagttccagccactccttgtcctcaccatattaaaagaacctcccccatctcyaattttctgtcagggcaatcccccaaacctcccttttttagaaacaccctcctgttcaagatgaccaccatggtgactctccgctctgttcaaagttagc

SEQ ID NO: 446133 - DNA, 201 bp, Homo sapiens
gtggagatgagcctggacagctgctctgtcctgtgagccagccacgtgggtgctggtgataaagcgtctcctcagtagataagagattacaaagtgagaarcaggaaatgtgacctgggtatggaaggcgataaaatggacacatctcatgacatataaagggaaacctttcatcctttaacatgtggtttgaggccaggg

SEQ ID NO: 446134 - DNA, 201 bp, Homo sapiens
ggtcattctgcttccttactttggtggagaatattctccaggaatcttctgaggaatgttgcatggaaggtaactttgtgaatgggtagaaaataatttcmcctgagagttgtgcaaacatagatccactgcttgtgggtgagttctgggccatctttccttaggtcagtctgattgtgagctgcttcttgccccaacccc

SEQ ID NO: 446135 - DNA, 201 bp, Homo sapiens
ggctgaggaacttcacatgtgcccaggaagcacggtgctctgggacactcacggggctgcgctatacacacacacaaaagaggagggagtcagggacccarctgggccaaagaggactttgggaatcgttaattaaaatctctatcttgggtacagtttgaaattttcatgacaaatgaaaaggaggcaagtaaagaagtt

SEQ ID NO: 446136 - DNA, 201 bp, Homo sapiens
cctgtccagaggaaatgagctgggagagccacttacctcctcattccctcggaggctgtggtcaggaggggcaggactgccaggaagcacagccagaagcyggtaggctgctgtgggcatcagtccagctgaatggcacccaggccccaggcacctcctcttgtccctggagtggaagagatgggggcttgggttctggag

SEQ ID NO: 446137 - DNA, 201 bp, Homo sapiens
tctactaataaacatttttagtgaaaaatgttaccatttattaaacattccttctgaaataagatgaaatagtcaggcccatggtggttaaatttgttccygtgatctcttctactacctgtccagaggaaatgagctgggagagccacttacctcctcattccctcggaggctgtggtcaggaggggcaggactgccagg

SEQ ID NO: 446138 - DNA, 201 bp, Homo sapiens
cactgctcagcaggggctgggggtggggtgaaagcctgggcatcaaatgtttctgctaaaatatagtctgtacacctagtaggactaataaaacatcaggyttgtagaatccaggcccctagttaagaaatgaattatagctttgaatatctgcatcaaatttttaatcatggaatcctttcactttatttcaccttgtct

SEQ ID NO: 446139 - DNA, 201 bp, Homo sapiens
tgaaaatatactgttgtaaatcacatagaccatgtaatgtgcacacaagatgttcttttgtaatagatactgataaatatatacatatatgtatatatacrtgtgtgtgcatacatatgtatatatattatgaaccctagagccaccattaaaaacaacactgtgaggtaaagcttaagagtcaataagggagataaagta

SEQ ID NO: 446140 - DNA, 201 bp, Homo sapiens
taccttgcaaaggtgtgaggctggggaagcaccgcccattggaggaactgattgaaggccagtgagtgaaaggaggggagggacgagaagcatgttggtasgtgggtctggaaaggtaggttagggatagatcatttgggcctggtgagtgccgaaagctatgggaaccatctgaggggaggccgtggtgatggggatgtg

SEQ ID NO: 446141 - DNA, 201 bp, Homo sapiens
ggacttatctgctgtagctcccgtgagaaaggcagggtggacattgtcatcccatgtagagaaagagcacccaaggtgcaaaaaccaaaattaaaaccaaratgtcctggctgggctcagcttagctgtgctcactgtctgcttcagcactgcctgcatgtggtgggtggctcagagtgaggctattgttcttagttaaca

SEQ ID NO: 446142 - DNA, 201 bp, Homo sapiens
gaagtgtattcttcttttctttgaacaaattttcttatggtatctcagctgattgcaaatagagtatcaccattaattccattttagtattgatttgctcytttaaaaaatcaatttaagaaatgccctaatgtggacaacatcttcttctttgggttttagagtggtttgttattttgtaggaagagtgaaaggtgtttc

SEQ ID NO: 446143 - DNA, 201 bp, Homo sapiens
gaatcaaagcttcacccttgacatttttacttgttgtgtctctccaggctcttttgatctagattggcaccctcctattcaatttgatgtatttgtcatgrcatttactttcctgaagattccagggcagttatctgttagacgggtaaaatgtcctgcattctgcaatatctgatagctctatgatgatgagatttacgt

SEQ ID NO: 446144 - DNA, 201 bp, Homo sapiens
tatgtgtgcactaaggcagtgcttttagtattcagcataactcatcaagatggtgcatacatttcttccagagccatgccatcagtgtctgtatgaatcamtgaaggctgagaatgccaatgctgtcacgtgttgccaatgacataaggcctagacctgttcttgagagtagggcatgccctgtgaggcagacagagctgc

SEQ ID NO: 446145 - DNA, 201 bp, Homo sapiens
gtaggtaggggccagatcgggtgcagtacctggcagtaatggatatcaatggtatccaatggagaaacacgccaaatggaaaagggagtacctagggtttkctagaattggaatagggaaagaaaatgggcatcacaggatgactggccagagactggactgggcctgctccttagcatgtgtgaagcatcttctgatgcc

SEQ ID NO: 446146 - DNA, 201 bp, Homo sapiens
attttctactaataaacatttttagtgaaaaatgttaccatttattaaacattccttctgaaataagatgaaatagtcaggcccatggtggttaaatttgytcccgtgatctcttctactacctgtccagaggaaatgagctgggagagccacttacctcctcattccctcggaggctgtggtcaggaggggcaggactgc

SEQ ID NO: 446147 - DNA, 201 bp, Homo sapiens
tgggtctgtacaaaaggataaagtgaatatctcctccctgtgccactggccactgtgcagctttggtcctcttgggctagatggaatggtagtggcacctktttgacttggtaggtaggggccagatcgggtgcagtacctggcagtaatggatatcaatggtatccaatggagaaacacgccaaatggaaaagggagtac

SEQ ID NO: 446148 - DNA, 201 bp, Homo sapiens
ctgttctcctgccagaccatgttctgagtgctgggactagaggcttttccctacaattctgcttttaatcattcagtcttgacttggggataggagacaasaaggcctggctgaaaaaggtgaggccgttattctccttttcttgatgaatatgtttggagccaaaatacattatgaattcaaataattttctactaataa

SEQ ID NO: 446149 - DNA, 201 bp, Homo sapiens
tatgggtctgtacaaaaggataaagtgaatatctcctccctgtgccactggccactgtgcagctttggtcctcttgggctagatggaatggtagtggcacytttttgacttggtaggtaggggccagatcgggtgcagtacctggcagtaatggatatcaatggtatccaatggagaaacacgccaaatggaaaagggagt

SEQ ID NO: 446150 - DNA, 201 bp, Homo sapiens
ccaagttccatgggggcagtgtgaaacagccaaccagtttgtgccacagcagaggaaccctgaacttaggaaacctccatcttttacaatgtctgcatacstttttaatgatgctttttgatgaagaaaagctcttaaagaagttaaatttgcttgccaatgttttttcttttatgtttagtgtttttgatgtcctattta

SEQ ID NO: 446151 - DNA, 201 bp, Homo sapiens
ggtgttagtaatgtttaaaagttaaaccctttgcagttggaggctcacatgaaacaccactccccaggcacagttaaagtaggagtgtctgaaccacagamccctgagtatccccacagcaggttcacccagggtccacagcaggtccatccagggtccacagcatgtccaactagggtggccagccttctggcaccagac

SEQ ID NO: 446152 - DNA, 201 bp, Homo sapiens
tataaaatcatgcttggtgacaactctgtgcttttggctcactgggtgagaggattttctattatggtcgtggggactgcatttgttacttaaagtctatktggtaagtgtatggaatctttggctgaagattattccttggtcacataactataaacaagttactttcttcactaggtgcttcaggaatacgatgctatg

SEQ ID NO: 446153 - DNA, 201 bp, Homo sapiens
agggcactaatcccacttgtggggggaaggggctgcatcctcatgactttgtcacctcccaaaggtaacacctccaaataccactgggaattcggatttgrgcacatgaattttggagggatgcaaacattcagtccatggcaaatgagagatgggtgttacagaggagatgaataaaaagtactgcacattcacttttgg

SEQ ID NO: 446154 - DNA, 201 bp, Homo sapiens
tgcagattctaaagtgagatttagtctctatattgggcatggactgagatagtctccacatgttctttgatgacacacaaagagattagccgtagggaaargacacaatattttacttcctgtatgaaggaaggcatttgctttgagctgtttcctccttcttctgtgctcatgcctgaaactctgtccctggggccccct

SEQ ID NO: 446155 - DNA, 201 bp, Homo sapiens
aatggcccttgccttttagtgtttcaagaagagaaaatttaatgaaatgtgaagtcacttaaaaatattagcttctgtttttaggatctttagctattctrcctcaaaacaatttcactaattttatttctatatcacgttttctcatttctgctcatggcaattggctgaatcagtggtacgagccaggacagatgaagt

SEQ ID NO: 446156 - DNA, 201 bp, Homo sapiens
ctggtgagggcccacttcctggtttgctaatggctgtcttcagagaaaggaaacaagctctttctgtctcttcttataataagggcactaatcccacttgkggggggaaggggctgcatcctcatgactttgtcacctcccaaaggtaacacctccaaataccactgggaattcggatttgagcacatgaattttggaggg

SEQ ID NO: 446157 - DNA, 201 bp, Homo sapiens
cacaatattttacttcctgtatgaaggaaggcatttgctttgagctgtttcctccttcttctgtgctcatgcctgaaactctgtccctggggccccctggygaccccaaactgcattctcccctgcttcccgagggtgggtgaaattactgtccctttctcgcaggcacagcagggctgttcaggtctccagccaactccc

SEQ ID NO: 446158 - DNA, 201 bp, Homo sapiens
tagacgtctggtgagggcccacttcctggtttgctaatggctgtcttcagagaaaggaaacaagctctttctgtctcttcttataataagggcactaatcycacttgtggggggaaggggctgcatcctcatgactttgtcacctcccaaaggtaacacctccaaataccactgggaattcggatttgagcacatgaattt

SEQ ID NO: 446159 - DNA, 201 bp, Homo sapiens
ttggtgggagaatgaaactggggtgtgtggagagcgtttgtgagaagcctccgccggaaggagctcagatcctgctgttggtgctccaagctcagactgartgggaagttcacaagaccccccacggtggcttccactgcaaacagaaaaccagtggacgtgaggatgggagaggtggtggatgagcgttttcattaaagt

SEQ ID NO: 446160 - DNA, 201 bp, Homo sapiens
aggcctttgtgctcactcccctctctttctggaccactcttcccttgaatatgcaggacctgtgccccacttttgtaggtctcttctggaagttttccttstcctaagggtcttccccatcaccctatataacagatcagtgtccttttatactattttatatagtcttttatattttatatataattatataaattatat

SEQ ID NO: 446161 - DNA, 201 bp, Homo sapiens
ttgcaactcgagaggatgtgtgcattggcctctgcaaccgggcttcttacaggacatgagtgcattctccatccactgggaggcggcttgtatactcactstcacagtgaatctgccgacagttctcaaagctgaggaagcatacaggctttgcccgtggttgggtggtgaggctgcatttcgtgctcatctgctccatct

SEQ ID NO: 446162 - DNA, 201 bp, Homo sapiens
ggttgtagtgagtggagatcgcgccactgcactctagcctgggcgacagagcgagactgtgtctccagtaaataaataaataaaataaaatggttttcttaaaaacagcatttagctgggtctggggtttttgtttctttgtttgtgtttatatccactttgtctatctctgtctattaattggtgtgtttaggctgttca

SEQ ID NO: 446163 - DNA, 201 bp, Homo sapiens
ccatccactgggaggcggcttgtatactcactctcacagtgaatctgccgacagttctcaaagctgaggaagcatacaggctttgcccgtggttgggtggygaggctgcatttcgtgctcatctgctccatctgcagagccagccttgaattttaaagtcctgtcttactggactcctgtgatgactcactatgataacgc

SEQ ID NO: 446164 - DNA, 201 bp, Homo sapiens
gctttgagtgcagcatttcatttttttctttagatattatttttatttttaagttaaaaagaaattgtgagaccttgaacaaacttttgagtcaattactrtataggaaacaaaatcatgttatcctcttttaccctttctcttattcgttgtgctcaagcctctgatctagaactggaagaagcttcagctctagccacg

SEQ ID NO: 446165 - DNA, 201 bp, Homo sapiens
gtgaaattggagcttggtgcagcgtttctgacccttctcttcgtccatgaatctcacccgttctcaggagccccagcccactggctcctcaggaaagggarcgctgggctttctggcctttgtctggcttggttgggtggtcttgttgaggggttagggctgaggtgggcagctgcctctttgtttgctgtcctctagccc

SEQ ID NO: 446166 - DNA, 201 bp, Homo sapiens
ctttagatattatttttatttttaagttaaaaagaaattgtgagaccttgaacaaacttttgagtcaattactatataggaaacaaaatcatgttatcctyttttaccctttctcttattcgttgtgctcaagcctctgatctagaactggaagaagcttcagctctagccacgttgctgcaaaggacagaatttcactct

SEQ ID NO: 446167 - DNA, 201 bp, Homo sapiens
ctgttcctgggttttaaatcacgtgcacacatgaaaacatagcacagccctgcccagcctccctgcggctgcacctttgccgtggagggagcattttgtcrtgtaatgttctcccgtccctccagtgggagcatctggggctggtgaagacttggcactccaggagccgagtggacctggggtcacccagataaaagccac

SEQ ID NO: 446168 - DNA, 201 bp, Homo sapiens
agcttggaggttaaaggcaaggtggagtcagttaggtcatatctgtttccctatcataattttcttgctgttataatttttgcaaatgtggtttcagaatktattctcatatgtgatataagaatggatccaaattgattttttctcatatggcttccactgatcataaacaccttcttcctcctactaatttaagtaacc

SEQ ID NO: 446169 - DNA, 201 bp, Homo sapiens
gcccagcctccctgcggctgcacctttgccgtggagggagcattttgtcgtgtaatgttctcccgtccctccagtgggagcatctggggctggtgaagacktggcactccaggagccgagtggacctggggtcacccagataaaagccaccaggcagggcttcagctctctgccttctcctggaagttcgtgtctgtgttt

SEQ ID NO: 446170 - DNA, 201 bp, Homo sapiens
cagaccacacagtgaggccaaaccatgggcagtcttagcatgacagtggctgggtgttcgtggaggagagagtttctagggagcaccctgcatgcccagcmtctctgggtatcactgtgttgcagcgcgtttgtggttatgtttcattagcagagcggttccaaccgtgcttgcctgtctctgtttcatacaggctttctt

SEQ ID NO: 446171 - DNA, 201 bp, Homo sapiens
gttcctgcattagttcacttaggataatggtctccaactctatgttgttgtaaaggacatgatctcgtttgttttttttttcttttttttgagacagggtsttgctctgttgcccaggccggagtgtggtggcacaattgggcttactgcagcctcgaactcctgggctcaagtaatcctcccagctcagcctcctgagtt

SEQ ID NO: 446172 - DNA, 201 bp, Homo sapiens
ccttcatttccttttcttcattccttcatttcctttttccttcattcctaaccacccaggtattcatcttagtccaagattctagaggacactcaaaatarcttcagataccacctctctcaggacatttcatctcacttcatatcagcctgtaggattcattttattagggtatgctaattgttgtgacagatagactcc

SEQ ID NO: 446173 - DNA, 201 bp, Homo sapiens
tgaagacattggtttctgagcattcaggtgacctgctccaacccgaggctgccctctgatgatccccaatagcctttgagtttggattctgtaacgctgcygaagtttcatgcttgacctatctgtcttcctctgcaattttcctgaacagaccacacagtgaggccaaaccatgggcagtcttagcatgacagtggctgg

SEQ ID NO: 446174 - DNA, 201 bp, Homo sapiens
tgggcttactgcagcctcgaactcctgggctcaagtaatcctcccagctcagcctcctgagttgctgggaccacatgcacacaccaccaatccagagttgwtgggtatttagtttgattccatatctttgctgttgtgaatagtgctgcaatgaacatacatgtgcatgtgtcttttttttttttgttttttgagacaggg

SEQ ID NO: 446175 - DNA, 201 bp, Homo sapiens
tggggcaaatgtttgctctgttttaagttctttgagaaatcaccatactactttccacagtggctgaactaatttacattcccatcagcagtggataagcrttcctttttctctacaacctcaccagcatctgttattttttggcttcctaataatagccattctgactggtgtgagatggtatctcattgtggttttgat

SEQ ID NO: 446176 - DNA, 201 bp, Homo sapiens
tgtatttgatctctcaggtatttaagatggaaaggttaagaagtaacagatttgattattttcacatccctgcaatgaaactttcttgcatgctgtgcatrtaggataacgttagtgtattccatctatcattctggcagtgctatttgtgagcttaatggagctcctctttcattcacaaggctaagcatttcatagcca

SEQ ID NO: 446177 - DNA, 201 bp, Homo sapiens
tgctttttttgcaattgcttttgatgtattcatcatgaaatctttgttcagtatatgttatctactgtccatcttctctttctggagcataatacaaactmttactaaacatactacagctagtgttacatatgacaggtaactggtattgaattgaaattagccttaagtgttcccagcatatgggccttttaaaattaa

SEQ ID NO: 446178 - DNA, 201 bp, Homo sapiens
ctttgagaacctaaataatgtctaatgctacctgaccctcacagctacccaggaagcaggtcctcacctgggcctgccctttctcccacctgcactggcartgctggctgatggggtagcctccagttgtctgtgttaaagcccagggtgatgtcatgcaaggcatcctctctgtgcctcagtttcctcacctgaatgcga

SEQ ID NO: 446179 - DNA, 201 bp, Homo sapiens
ggaatatattgaaaaaaataataatcaactgagtttagggatatcttcaaatgttgacacaaatattggagagggaaatgatccaacatttgtgtcactgragttccagaaaaagagaaatagaatggggctaaaaaaaatattcaaagaaacaatggataaaaaatactcaaatttgccaaaaggcataaatctagagat

SEQ ID NO: 446180 - DNA, 201 bp, Homo sapiens
aatctttttgcttttcttctcagttttgttctgatgtccccttactgagctggttatatagactggaaagtactagtcctaccaagatatttgcatttttrtcagaggacacatgacgattgaaaaaaccgttaggatccaatatatacatcctacatatttacatatttagataaacaaacaagcaaaagttctagccag

SEQ ID NO: 446181 - DNA, 201 bp, Homo sapiens
ctggcacacacagagggacgaaggaaagcaaaacattctactctcaacataggcacacatagtgtcaaaaagaggacttggctgtcctctcctggcaaggycacgtgtgggcacaccctgaggttagacacaggccaagtcgccacaggtgccttcttcccagcgggacggctgtcctgcctctccctgagctggttattg

SEQ ID NO: 446182 - DNA, 201 bp, Homo sapiens
gagggaatatattgaaaaaaataataatcaactgagtttagggatatcttcaaatgttgacacaaatattggagagggaaatgatccaacatttgtgtcaytggagttccagaaaaagagaaatagaatggggctaaaaaaaatattcaaagaaacaatggataaaaaatactcaaatttgccaaaaggcataaatctaga

SEQ ID NO: 446183 - DNA, 201 bp, Homo sapiens
tgtggacattgcagaccaaattcgggtgcagggccctctgcaaactcaggttgaaaatgcaaatcaggtaatggagtcagtgataaattgatgagcgaagrtgaagtatatctagcttttaaaaaataaaagggaggatctgccacaagtggtaacccttagagacagtgaacatgggaaagaggcagctagctcagccca

SEQ ID NO: 446184 - DNA, 201 bp, Homo sapiens
ttacctataattaggtgtgcaatttacaaataatctatactcgtgtctttttctgagctgtgcttgctggcccagaagaggtgaagggtggcttcagtccyatttatgtcacttaatgaatggaaggaattggctgggataaacctccatgctatcaaggagactctgcaaagatctctgcctcactgatgttctaatgga

SEQ ID NO: 446185 - DNA, 201 bp, Homo sapiens
atcttgaatgtcctcatcacacgagtgtgtcctggatcccacccaaggccctccaggagtggatctgcctctagatttcctgctcttatccactctgttgytagatcacagaagcagcgccatgatttattatttaataacctacaaaacattattatagaaatgaaacattcaacaggaactgtgaagccatttacaatg

SEQ ID NO: 446186 - DNA, 201 bp, Homo sapiens
tgcaggagccagcaagggggagtctggcaggcccttttgtcctttttaattcactgaagttttcctaccaaataaaataatgcctggtacatcataggagrtcaatgtttgttaagtgaatgaatgaatgagtgctgctgagagccagaaattaatcttgaggtcagtgggatgtcatatacggattctatgcaaagaaac

SEQ ID NO: 446187 - DNA, 201 bp, Homo sapiens
aagagatgcctgggtcagagacaaaggacattgttacactgtaggcattgatgtcacagcaggcattgtgagcttcatgtttgcctctgttctccttgccycccaagttccatgggggcagtgtgaaacagccaaccagtttgtgccacagcagaggaaccctgaacttaggaaacctccatcttttacaatgtctgcata

SEQ ID NO: 446188 - DNA, 201 bp, Homo sapiens
ctttgatgaagttgtttattggatctacgagtctttgggcagaaacgatggcattttctgggtatagaatcatatagtctgtgaaaatgatagttcaactwtttttcttcctatttgtgtgtcttttttttctatgccttttatttctttctcttgccttattgctctatctaggacttccagtactatgttgaatagcgg

SEQ ID NO: 446189 - DNA, 201 bp, Homo sapiens
ccaactcctgtggtccttcagagtttcccctgtcaaaacctatgatggtctgagatgttaccttacttgaaagctagtaagttggcctgccatagtgtcayggtttctggaagaagacaagagatgcctgggtcagagacaaaggacattgttacactgtaggcattgatgtcacagcaggcattgtgagcttcatgtttg

SEQ ID NO: 446190 - DNA, 201 bp, Homo sapiens
ctcaccttccaaaacaatcatgaaccaagatttggtcagatacacattccctgcttacaatgttacagtcatgtaattactgaactttgcagaatgtcctrgtgtgacctgcttaccttatggggaggaggtcgcatagattatgtttgtccagaaggcgattaagtccctttaaaagaaaataatgtctgacatccaagc

SEQ ID NO: 446191 - DNA, 201 bp, Homo sapiens
agccttcgtctcatagcctgaaaaattatggtaatactagaaggatgaagtttatcaagcccaggtagcatggtgagctactcttcacacatagaaaactracagcatttgtgagttatcatttgtgcaattatcaccatgggaatgctgcaagcccctgcgtacctccttctcaccttctcagaagagcaggatggaatt

SEQ ID NO: 446192 - DNA, 201 bp, Homo sapiens
caggattcaaatacaggaatcataagctgaagaaaagccagtaatcgtttgtcatttgacagcagtggattaaaaataatagacttgaatttctttaggcycttcccgtatttcatatgccccctgttgtctatacccctgcctttcacatattttgttatcaacctgaactttacaaagcatgtgagatacttacccttg

SEQ ID NO: 446193 - DNA, 201 bp, Homo sapiens
cccatgtgatagttttccccataatagttggtaatatatgaaatgtaagtttttcaggattcaaatacaggaatcataagctgaagaaaagccagtaatcrtttgtcatttgacagcagtggattaaaaataatagacttgaatttctttaggctcttcccgtatttcatatgccccctgttgtctatacccctgcctttc

SEQ ID NO: 446194 - DNA, 201 bp, Homo sapiens
gacacagtcagctgtgaccactcatagcaaagccctggcaaggggcaggccctcagtgcctgcggtccatcatggctgtggcgtttagctttcctggctgkatggggcacgagagagcagggtacttcttagtgacagtggaactgtgaagggagtgtgtctttgtggcactttgagctggaggatttagcagagcacttg

SEQ ID NO: 446195 - DNA, 201 bp, Homo sapiens
aaagcaaagaaagcccaagatactcgctaccatgtcatcccttgggtcctgatgccctaactggtttgccttttgtctaattctcagtcttattatgattsttttacatgtaatatccagggattttagttgcatttagcaagaaaagtagagacaagtatgtctcttccatcttaccaaaatgaaatggatttatatttt

SEQ ID NO: 446196 - DNA, 201 bp, Homo sapiens
gagcagggtacttcttagtgacagtggaactgtgaagggagtgtgtctttgtggcactttgagctggaggatttagcagagcacttggagttgtgaatgcrgtggccactggagcaaaccttctcaagtgacccaccataacacatttctgggtcttgggtgctgcggtctcttttccaaatggtatcttggaggcaggac

SEQ ID NO: 446197 - DNA, 201 bp, Homo sapiens
gactgtacaataaatcatatcataccagtgaagacatcaataggctctcccagctcttccaattctagtaaaaatacttttttaatatatgaaaatgatckacaagaagcagaataattttagattaattttttcaggaaaaatggaaacattgacttttattataatggagtaaaattcaattttattgtaggaaattgt

SEQ ID NO: 446198 - DNA, 201 bp, Homo sapiens
aaggaatagtattattttcctgggtaaacgtcccatgaaattgactttagcaaccaccagaggagtaagatggcatgcctttcatcccccttgagctcccytgccagagaagactggagacctcgcctgttggctcagagcccagggagaggtttcccaggaccaggcataagcacactaacatttaatgagggtgggtgg

SEQ ID NO: 446199 - DNA, 201 bp, Homo sapiens
gttatatgaaggaaagaatggtccaattatctaaacgttgtgaaacatattaaatttttttaacttaaagattttttctacttcattgtctgatctaaacmatagatggagaaactgtaatgctactctcatttacctgaggttcataagattttctcatacaaaaatccaattttcatccaagtaaataataaagctgac

SEQ ID NO: 446200 - DNA, 201 bp, Homo sapiens
tatcttttattattttttaaaatctttgccacataattttaacatctttgccttcttggtatagatgtcaactgattatcttttttccttcagtttgagawctttctggttcttggtagaatgggctgagtgtttttcagttgaaaactgaacatttcagatattattttatgcaacagtctatcttatttaagctgtctg

SEQ ID NO: 446201 - DNA, 201 bp, Homo sapiens
ctgttatgtttctgaatctggctgtcagctggagtcaggctaacagaacacgacgtgtcaattaagccacattacaagatttcccattaggtctgtaattycaacatttctgaaattattgtaatctgtgtctttaaatattaggatttatttagctgatgttcaatagtccctttaaagataatctgataaacctccttt

SEQ ID NO: 446202 - DNA, 201 bp, Homo sapiens
tagtccctttaaagataatctgataaacctcctttttattcacttttgagaaaagaccgaggtaaaaattaatatatacatgtatatcttgcccacacacrctcatgatgttttcctagttctggactcaatgtatttaatgatgataatgacacacgttaatcattcagaatgatttgttatttgttcgcatgaatttct

SEQ ID NO: 446203 - DNA, 201 bp, Homo sapiens
tggatgttctcccaagctattgaatgctttcaggagctcaaattggctcaattaaaatgtatgaaaagaatgttaaaagcacaggagcaaaggtagcaaartgacaccttctactatcatctgtctgttttgctcatgatcagaaataccaggaagctgatttcacttcagtgacagaattaggtgaccatgtagaatcca

SEQ ID NO: 446204 - DNA, 201 bp, Homo sapiens
atgcttcaacctgctctttaagttttaaaaaatttttgcaagatgataaaattaacatttctgataatatttcagatgacacgaaatattttttaaatttattattattattattattattattattattattattattatttgagatggagtctcgctctgttgcccaggctggagtgcagtgacactatctcggctcac

SEQ ID NO: 446205 - DNA, 201 bp, Homo sapiens
gttcaagcaattctcttgcctcagcctcctgaatagccaggactacaggcatgtgccaccatgccccgctaattttttttgtatttttagtagagacgggrtttcatcctgttggccaggctggtctggaactcctgacctcagatgacccacccgccttggcttcccaaagtgttgggattacaggcgtgaacaaccatg

SEQ ID NO: 446206 - DNA, 201 bp, Homo sapiens
gcaattctcttgcctcagcctcctgaatagccaggactacaggcatgtgccaccatgccccgctaattttttttgtatttttagtagagacgggatttcaycctgttggccaggctggtctggaactcctgacctcagatgacccacccgccttggcttcccaaagtgttgggattacaggcgtgaacaaccatgcccggc

SEQ ID NO: 446207 - DNA, 201 bp, Homo sapiens
tttgggggaggtggcttcaggttctgaaatatgtgccatgtttctgtttctctggcgccctctgtgatgctggctggacacacagacggggctttccttgygtgatgatcagtgttatatgtcagcttcactgggggccatggagtgccggatagttggtcaaatattattctggatgtgtttgtgagggtgtttttatat

SEQ ID NO: 446208 - DNA, 201 bp, Homo sapiens
tgccgtatactcattgtcaacatctctcatttatgtacatgttcatacaggtgtagactatctggccaacactctagtctacgttatggctagttaacacrctttaaaagactcatgtatatattacataaatatgcatgtgcatatatatgaagacctaaattaagtagaaaaaatgaatatgaaattttattttttaaa

SEQ ID NO: 446209 - DNA, 201 bp, Homo sapiens
ccttgtgatcacggcgcctctcattgtgttttaacacccatcctgtcgctctgtcttccccaacactgagaagagactagcccttcttgcacttcctcccygttctgccagtggaaccattcctagtgagtaactgaatttcttaagatccactgagtctcaatagaatctacattagcagccatgaaattcaagtgggta

SEQ ID NO: 446210 - DNA, 201 bp, Homo sapiens
ggaaacatatgccaggcaaagggtaccgaggctatgataggagaagcacatctctgtagatgtaacaccagctgtcactggtcaccgcccaggggctcctygtctttaaagaggggataataagagtgtcttcttgattcctttgttttcaggatgaaaggagaccatgcttgaagtgtctttcgcatgaggaccatatta

SEQ ID NO: 446211 - DNA, 201 bp, Homo sapiens
catcaattttgcttttatacttattatttcctttatttttcttgctttgggtttattttggttttcttctttttgaagtagaacttagattcttttggccrggtgcggtggctcatgcctgtagtcccagcactttgggaggctaaggcaggaggatcacgaggtcaggagatcaaggccatcctggctaacacggtgaaa

SEQ ID NO: 446212 - DNA, 201 bp, Homo sapiens
tgttcattgtttgaggagttcttggccacacagctatgtcttatcaatgtgtgggtgcagcagaggaggctggccccaaatggatgtcacagcacgcagtrtggatcactgacttactccatgggccaggagggaagggagctggagtaaacactgagtggcaggcaggaccgagtcccctcccatgccactatgatacca

SEQ ID NO: 446213 - DNA, 201 bp, Homo sapiens
ttattttggttttcttctttttgaagtagaacttagattcttttggccgggtgcggtggctcatgcctgtagtcccagcactttgggaggctaaggcaggmggatcacgaggtcaggagatcaaggccatcctggctaacacggtgaaatcccgtctctactaaaaaatacagaaaaattagccaggcgtggtggcgggcg

SEQ ID NO: 446214 - DNA, 201 bp, Homo sapiens
ttaccttgcttatgtgtaatattaaaatgcactaagcaacttaattacatggatgatttaaaggatttctgaattttagaaagcttcagaagtcactttayccagcatcagtagctttataccatagatgttcagagtgctagctagcagaaagttctagataatgcaagtgagttcagcaaaataacagaatggtgaaag

SEQ ID NO: 446215 - DNA, 201 bp, Homo sapiens
cttaaaccactctactgaaaacagatgattagagaatacagattccctccccagtatgtgggcaatcaatctgtgccaaatatggtcatgctgggaaaaayagaaggttacatattggcttttaaaggtgaatagacactctgtggagtcctgggcaacgctgactgatgggttcactgaatccaggcaaaacatctgaat

SEQ ID NO: 446216 - DNA, 201 bp, Homo sapiens
atgatcatggcttactgcaacctctgcctccagggctcaagtgatccttccacctcagcctcccaagtagctggagctacaggcacatactaccaagcccrgctaatttttgtagtttttgtagagccggtgttgcatacctaagctaaggtgttgcacacaaggctgatatgtcacatacctaggttgatagcttgggat

SEQ ID NO: 446217 - DNA, 201 bp, Homo sapiens
agttttaccttgcttatgtgtaatattaaaatgcactaagcaacttaattacatggatgatttaaaggatttctgaattttagaaagcttcagaagtcackttatccagcatcagtagctttataccatagatgttcagagtgctagctagcagaaagttctagataatgcaagtgagttcagcaaaataacagaatggtg

SEQ ID NO: 446218 - DNA, 201 bp, Homo sapiens
acaattctaattcacctctggaaaattgaggtgcatggctattctgtcagattcttgaagttctcacatatagactcttaacacattttcattgagttcartagtggtggataactaaatagcttactttttctgctgctctttgttccttcttgtagatccaagcttccatatgctataatttattaatagtgtaaagaa

SEQ ID NO: 446219 - DNA, 201 bp, Homo sapiens
aaaagtgtgtgcagggaagcctggtttggtgtctgggctggaggcacagtggagagactcagcctcaggcctcaccccacctgagaaccctgggtcccagyaggcaaacgtttcatctcatccaggccgtcttgcctcaaccactttgctcacgctccatcctccagctgaactgctcagataaactgatggaatgttgat

SEQ ID NO: 446220 - DNA, 201 bp, Homo sapiens
aaatggggaatccaggagtacagttgcaggtagaaaagcaggcatctggcaaatagccagctctggctcagggagccagggagccctggtgacagtgcccrcaggagcgggacagagcacctgcctgatgtcatgatctaggcagtcaccaacctgggtcccaggcagcagaaacaccaggcttacccttcctggaataat

SEQ ID NO: 446221 - DNA, 201 bp, Homo sapiens
agagactcagcctcaggcctcaccccacctgagaaccctgggtcccagcaggcaaacgtttcatctcatccaggccgtcttgcctcaaccactttgctcaygctccatcctccagctgaactgctcagataaactgatggaatgttgattctttcagttcagactcaaataccatcttgtccttgagccttttgggattat

SEQ ID NO: 446222 - DNA, 201 bp, Homo sapiens
ggtatatacgtctttccatccttttacttttaacctatgtttgtctttgtgtttaaaatgtgtttcttgtagatgacatataggtgaatcttgcctttaawaaaaaagcccaatctaacaatctctgcctttaaattggagtctttagaccatttatatttactgttgctattgatgcagtttgatttcagtttatgatct

SEQ ID NO: 446223 - DNA, 201 bp, Homo sapiens
cctaggagcaggaggaggaagggtcactggtggaagaaagaaccccccttcatctgtgagcagcctgctcctactggggacagagcaggtcagagttctgygcatttacaaaggcagcatgggttgtgggggaggtgcagttccagatccatgtctgtgtcactcgggcacgtctctgagcttagactgggaagtccaact

SEQ ID NO: 446224 - DNA, 201 bp, Homo sapiens
tgaatattattgctaatatggttagacttaatctgatgttttgcttttttttctctatgtgtctcaaatctttttgttcctctttttctcgtttaatatcttttttttttttgttaagtggatattttctagtagaagattttggtttaatgattaaaagctgttttggaatcagcaagagaagcctgtaacagtaggctt

SEQ ID NO: 446225 - DNA, 201 bp, Homo sapiens
tctctctctcagaatctgccacactgagcctccagcaagtccatcaatgatggttcagttttccctgccctggcactggttcccacagaggttttagcctstgggtttctgccccggtaaattgcggttcttcctatgtgccgatcagcctgtccatttcagggatggtggttttgccctgtgacctcacttctcttagga

SEQ ID NO: 446226 - DNA, 201 bp, Homo sapiens
tgtattataactttctgcccctcctttcctctcttgccgctcactttcttttgtgtttgatttttttttttttttttttgagatggaatctcgctctgtcrcccaggctggagtgcagtggcgcaatctcggctcactgcaagctccgcctcccgggttcacgccattctcctgcctgagcctcccgagtagctgggacta

SEQ ID NO: 446227 - DNA, 201 bp, Homo sapiens
ctttcagcattttgaatatattatccaacttcattctgtcctgcaaggtttctgctgagaaatgaggttataatctaatacaagctcccttgtacatgatragtcacttttctctttctgctttcaagattctcattgtctgtgacttttgacagttggattatgatgtgtctctttgtagatctctttatttttattcta

SEQ ID NO: 446228 - DNA, 201 bp, Homo sapiens
ttcaaaatggttccttttcttctccttctgccagagcatgaggggcctcctatctgatattcactgtaagaataaggtagagcttcggcaggtaaaactcrcaaaagtgagggggttttcgacggttgagtccccctggagtttctctctctcagaatctgccacactgagcctccagcaagtccatcaatgatggttcag

SEQ ID NO: 446229 - DNA, 201 bp, Homo sapiens
tcggctcactgcaagctccgcctcccgggttcacgccattctcctgcctgagcctcccgagtagctgggactacaggtgcccaccaccacacctggctaawttttttttgtatttttagtagagacggggtttcaccgtgttagccaggatggtctcgatctcctgacctcgtgatccacccgcctcagcctcccaaagtg

SEQ ID NO: 446230 - DNA, 201 bp, Homo sapiens
attatgtatgtccatttctttcctcagatttgggaagttttcagccattatttcttcaaatagtctctttccccctttcttccttttaaattcgcataatrcatatgttattctgctcaacactctaccgtaagtcccttaggctctctctgctttgcttcactcttttttttgtttttgcttgtcttgataatttaaaaa

SEQ ID NO: 446231 - DNA, 201 bp, Homo sapiens
aatttgaaggactactttcagtatttcttatatagcagctctagtcatgatgaactctctcagctttcctttccttcccttttctttctttctttctttctttttttttttttttgagagaaagtctcactctgtcacctaggctggagtgcagtggctctatgacttcagctttactttatctgagaatgtcttacattc

SEQ ID NO: 446232 - DNA, 201 bp, Homo sapiens
agagactctagagacctctaaagccttttctggggatgcgtactccccggacttgcacacttaatatattaggttggtacaaaagtaatttcgaagaaccrcaattacttttgcaccaagttaataatgggtgtgttgctttctactcaggggttcactctgatgcctgtttgtggtactgcagtttctttggtggtgtag

SEQ ID NO: 446233 - DNA, 201 bp, Homo sapiens
gagatgctgtggataggtttaatataatcctcagagacagggaatttgtgtttaaaaaattcttgaaagattatttgtcacgataatcatgatgatgatgrtaaaaaacagtactaatcccattgaagtatttgttccctagagtctttttttttttttttttttttttttttttgagatggagtcttgctctgtcacccc

SEQ ID NO: 446234 - DNA, 201 bp, Homo sapiens
ggaaggttggtgatggggtgtaggggatcctctgcctaatacatcattgtgttcagtgggactcttagtttagggaaaggaaagggacagatgagcccccrttccccacccttgtccccaaaagcaggaaagatggaagggaggttcccagttattggaagagcctcttatgcgttgggggcatgagagttaatgttattt

SEQ ID NO: 446235 - DNA, 201 bp, Homo sapiens
tccccctccacctttttgtccttgtcaacacctattggtcctgtagctcttctgttggaatctctgtttctgttgttttctatctctttgtttttgagacrgagtctcgctctttcgcccaggctggagtgcagtggcgctatctcggctcactgcaagctccgcctcctgggttcacgccattctcctgcctcagcctcc

SEQ ID NO: 446236 - DNA, 201 bp, Homo sapiens
aataagttacttcctgccagctgcacccacaacataaagctttgttagaatgtctggctgtgggaggcacctcttcccacccagcttgtgtccttgctcaytgggacttgggatgccacggcccattcaactgactttacagccaggcaggaagcaccaaatttatagggtctctatgaggattaagtggataatatgtgt

SEQ ID NO: 446237 - DNA, 201 bp, Homo sapiens
gtccacttctttttaactggcaaatttctgagtgtaatattctatatggtcaccaccattatccttttaatggctgcgagaggtgtagcaagatcctctgkttcactcctgatatttggcaatttgcgtcttatttttttttcctttgtcattcttgttagatgtttattgtttgcattgatttgaagaaccagcattttg

SEQ ID NO: 446238 - DNA, 201 bp, Homo sapiens
gacctgggtgatgtgggctgttgaagtgactggactcaggtgatgcggctgcgggaggtggtgagcgatgctggaagctgcgtcccggccacccagatacsctgggagtgcgtggcgctccggggaggctgctcctccgcgtggccaggaacaggccaaggaccaaaaccagatgacagctggcatgaaaccgcggggctg

SEQ ID NO: 446239 - DNA, 201 bp, Homo sapiens
ctggtccacttctttttaactggcaaatttctgagtgtaatattctatatggtcaccaccattatccttttaatggctgcgagaggtgtagcaagatcctstgtttcactcctgatatttggcaatttgcgtcttatttttttttcctttgtcattcttgttagatgtttattgtttgcattgatttgaagaaccagcatt

SEQ ID NO: 446240 - DNA, 201 bp, Homo sapiens
agctaatttttgtatttctagtagagacggggtttcaccatgttggccaggctagtcccgaactcctgacctcaagtgatccgcccaccttggcctcccaragtgctgggatcacaggcgtgagccaccgcgactagcctcaggaagcactactttagacagtgcccgtgacaagagttaaatatctcacacattttctta

SEQ ID NO: 446241 - DNA, 201 bp, Homo sapiens
caactgtgatgtgcatttcaatctcttgacaaaaactctgcaaggatgctgaaaagattagcttaaacaaatcctggaaagccatgcttggcatatcacargttctccaaacgtgataagtattattcactcatttaatacttgctcttggtaaatgaactgtacggggccaaggaagagctttctctttggctctccgaa

SEQ ID NO: 446242 - DNA, 201 bp, Homo sapiens
cgccgttctcctgcctcagcctcctgagtagctgggaccacaggcacccgccaccactcccggctaattttttgtatttttagtagagacggggtttcacmgagttagaccaggatggtctcgatctcctgaccttgtgatccgcccgcctcggcctcccaaagtgctgggattacaggcgtgagccacggcgcctggcct

SEQ ID NO: 446243 - DNA, 201 bp, Homo sapiens
aatcttgagatggaaacattaccctgaatttcttggttgacccaacgtatcacaaggatctttatcagggaaagagagtaaagggagagtcagaaaaataratgtgaaaaggaaagcagaggccagagtgattctgtgttagattaactcaacccaaatggaagaaggagaccctgactcaaggactgcaggaggcctctg

SEQ ID NO: 446244 - DNA, 201 bp, Homo sapiens
ttgtttgtaagttgcccagtccatattattctgtcatagcagaatgaaaggactgagaaaaccattctagccaagttcttgcagaggaattaagcccaggsctgaggagagagccgtgcagccatgacctaatgtgtttggcagtcaggtccttcttgctctttgttaatgagtctattagaatagatagctgagcacaca

SEQ ID NO: 446245 - DNA, 201 bp, Homo sapiens
tcccaagctattgaatgctttcaggagctcaaattggctcaattaaaatgtatgaaaagaatgttaaaagcacaggagcaaaggtagcaaagtgacacctyctactatcatctgtctgttttgctcatgatcagaaataccaggaagctgatttcacttcagtgacagaattaggtgaccatgtagaatccagatggtagg

SEQ ID NO: 446246 - DNA, 201 bp, Homo sapiens
ctagtctgcccgggctgctataactaagtaccacagacagtggggcttaaacaatggaaatgtattttctccattctggaggctgggaatccaggatcaakgtgtgggcagggctggtttcccctgaggcctctctccttggcttgcagatgctgcttgctgtgtcctcacatggccttttcttactcaggcagtccccat

SEQ ID NO: 446247 - DNA, 201 bp, Homo sapiens
aatccagcaacatataatatgattatacaccagtgaccaagtagtatctaaaaaatgcaaggatggttcaacataaaaaaatcattctatgtaatactctrtattcatagaataggcacaaaaataacagaatcatctctatgggcagaaaaaatcatttgacaaaattacgcattcttccatgatgtaaacatccaacat

SEQ ID NO: 446248 - DNA, 201 bp, Homo sapiens
tattctcatggcttctaaccgtctagggcttacctgtccacctgagattttagagccagatatcatttcttcaagggagcatctctccaaacaagggtgcmtcagaagttgttcatctgccaaacataatgcttcattcttcaagattcccagggatgagaaagtacataggtgaaaaatagcaattgtattgataagcaa

SEQ ID NO: 446249 - DNA, 201 bp, Homo sapiens
tccaagctcattctatgaggccaatattatcctgatctccaagccaaagacatcacaggaaatgaaaactacaaatcaacacctcatacaaatatacaaakactgttgcaaagattctcaacaaaatactagcaatctgaatccagcaacatataatatgattatacaccagtgaccaagtagtatctaaaaaatgcaagg

SEQ ID NO: 446250 - DNA, 201 bp, Homo sapiens
cagatatcatttcttcaagggagcatctctccaaacaagggtgcctcagaagttgttcatctgccaaacataatgcttcattcttcaagattcccagggaygagaaagtacataggtgaaaaatagcaattgtattgataagcaaccacttaggaaaagaataccatactgtaaattgatataaattatagaagtgtttgc

SEQ ID NO: 446251 - DNA, 201 bp, Homo sapiens
agacgcacattacttaattagggaatgaaagaggagacactactactgacttcatggggtgggggaagaattacaaaagaatactttgattattagattayaatctataatatttagattattacctaaattagttgcagtgaatttattaaacttaattagatgcaataaattcctagaaagacacaaactaccaaaact

SEQ ID NO: 446252 - DNA, 201 bp, Homo sapiens
ccagggatgagaaagtacataggtgaaaaatagcaattgtattgataagcaaccacttaggaaaagaataccatactgtaaattgatataaattatagaartgtttgcaataacttcaattttaagggcttagaaactggtacataattcattacaatttgtatcctcctgagtttgtgctctttctggcccccaaaagag

SEQ ID NO: 446253 - DNA, 201 bp, Homo sapiens
caaatgaaaaaagaatagaaagcaataaaaatttaacaaaaccaaaagttgtttttttgaaaagatcaacaaaattgacaaactcttagctacactgatcwagagaaaaagagtagacgcacattacttaattagggaatgaaagaggagacactactactgacttcatggggtgggggaagaattacaaaagaatacttt

SEQ ID NO: 446254 - DNA, 201 bp, Homo sapiens
ggccatatggagaggactgctggagattgccctcgggagtcacctgcttagggaagtgagggtgcaggattcagcagagggaaaaactgatccatagcacrcctgccaccaggagccatgacagcccttcaggggagaccaaaatcgaggcagtcaggcaagtctatatccatctccacctgggaggggcattttctcccc

SEQ ID NO: 446255 - DNA, 201 bp, Homo sapiens
ttgtaattctcctttattctctgggtgagtgggggacacaattgtgtattatgccattaaataagttttaagaaatttgaaataattgaaatcataccaastgtatttcccattcaaaatggaatgaaatgggaaatcaacaacagaaagaaatttggagaattcacaaatatatgaaaattaaccaatatacaccaaaat

SEQ ID NO: 446256 - DNA, 201 bp, Homo sapiens
cactaccgaaacacaaggtatcatggtatgtacatgtaattgtgcagtgacttcagtaaacgttttaaaaatcacagttttgttgttacatcaagcttgcwttatgaaaacctccttctggttttatatatttcaagacggaagtgaaacagacaaattgcttcaaatgaaaggcagcagtttttgtctctaacatttaat

SEQ ID NO: 446257 - DNA, 201 bp, Homo sapiens
cttcaaatgaaaggcagcagtttttgtctctaacatttaatttgtgcagcagtcacatggccacattatgcttacacactctgtgcctcactgggcattartaggaccccgcagggcagatgcgcctctacatgactccgggctggactctgggtaatgatgggcactcttatgttgcctgataacaaatggttcaatcac

SEQ ID NO: 446258 - DNA, 201 bp, Homo sapiens
caaaaactagtaaagatagctaaaaaggtaaatacaattcctccctcaatatttttatttgttttattttttctcctatcaaaattaaaaagcagctgcayaaagcaacaattatattctctgttgatggacatcataatataaaatggttgagttggtatgataatagcacaaaagtgaagagggatggaactatataag

SEQ ID NO: 446259 - DNA, 201 bp, Homo sapiens
cactgggcattaataggaccccgcagggcagatgcgcctctacatgactccgggctggactctgggtaatgatgggcactcttatgttgcctgataacaartggttcaatcacaggaggcaaaagtgtttcttctttgaggacaggatggcacgttgaaacattgagacaggaccgtaaatggagatactgttcagatatc

SEQ ID NO: 446260 - DNA, 201 bp, Homo sapiens
attaatattatgaatgatgtgtgtttgggcttaggatctagaaatgtctctgttgcaggagagaaaagccatgaagaggaggtgtgtagatgtctgataaytgatttttgtgtgtgtgccttatgtctttaaaatacgaacgttggtgttggtgtggagcttgaccgtgccagtttgtttagtagagtccctcaacagctg

SEQ ID NO: 446261 - DNA, 201 bp, Homo sapiens
agacttcagaacttagttctgcacttcattttcaggtagtaaaaataataataataataatatttaatgccgatgttagaatacctacttactaggaactrttctaacaccttccctgtattcgtgctaatatgcaactgaaagtacaggccctggctgccactgatcagatctgtgacctggggaacatgggggcctctg

SEQ ID NO: 446262 - DNA, 201 bp, Homo sapiens
tcgtacactgttgcccagggtctgtcttgcaaatctcttgtttcatttatcttgttcattttttgtagttatttcaggcaggagggtatatctaatccttmttccttcatcttggccagaagcatgaatcacatccttcacttctgccagtgtccagcaggcatgcctctcagctggactactgcatcgcctctccactgc

SEQ ID NO: 446263 - DNA, 201 bp, Homo sapiens
actagcagcttggatgagaatcatgtgctgaaatttggtgtgaaaaattaattctcagtcctggtacatacctttgctgtgacatataccactgtctttamattttttaaaaatgatctttgtattttagaatagtttctggtttatagaaacactgtgaagacagcacagcatttccacataccacatccccattatccc

SEQ ID NO: 446264 - DNA, 201 bp, Homo sapiens
tctggtttttgatacaactaatttgtcttctctttttcctgctcagtctggatatagatttgtcaattttattaatctcaaataaccagcttttagttcarttgattttctcaattttttttatttcattaatttttactctgatttttatatttcctttcttctattttttggaggcagatgtggtatcaatttgctttt

SEQ ID NO: 446265 - DNA, 201 bp, Homo sapiens
gaatattattgctaatatggttagacttaatctgatgttttgcttttttttctctatgtgtctcaaatctttttgttcctctttttctcgtttaatatcttttttttttttgttaagtggatattttctagtagaagattttggtttaatgattaaaagctgttttggaatcagcaagagaagcctgtaacagtaggcttg

SEQ ID NO: 446266 - DNA, 201 bp, Homo sapiens
ggcttatttatttatttatttatttatttattttattttaattttttttgagacagagtcttgctcagtcacccaggctggagtgcagtggctcaatctcygctcactgcaagctccgcctcctgggttcatgccattctcctgcctcagcctcccgagtagctgggactacaggcccctgccaccacgcccagctaatgt

SEQ ID NO: 446267 - DNA, 201 bp, Homo sapiens
attctcctgcctcagcctcccgagtagctgggactacaggcccctgccaccacgcccagctaatgtttttgtatttttttagtagagacggggtttcaccrtgttagccaggatggttgcaatctcctgaactcgtgatcagccctcctcggcctcccaaagtgctgggattacaggtgtgagccaccacgcccggcctat

SEQ ID NO: 446268 - DNA, 201 bp, Homo sapiens
gcaagctgttaaggctttatgtttgttggttctttttatttaatgatatacaaatctctggaagcccaaagtctaataagttgtatgaaacaaccagaaawctctctcactaaatgtaggtccttaaccaactgacttaacaccctttggtatagcataatcaaaggttctgcagtatttggagatggaacacttgttgaa

SEQ ID NO: 446269 - DNA, 201 bp, Homo sapiens
ttgattgtttcaagtgaaaaagtaaacccagttccagttacttcaccttgaatgtagagcagaagtgttcttccttctggctgagtttgatgtcacaagcrattcttgcctttcctgtcacccctctgaggcccaggtgggccagtggagccactgagcaccgtccagccagtcctccaactgtctgtagacacattaggt

SEQ ID NO: 446270 - DNA, 201 bp, Homo sapiens
acattctcattgtggatttctgtttgagatttatcatgccggtttaaaactcacactgacttcttaaatctgtaacacttattggaatattgaaaatggtaaaaaaaaaatgaagaaagatagcttgtgatggtagtagcatttccacttttagtttcttctttcaacatccaagagacctgtcttttatagtgtttctta

SEQ ID NO: 446271 - DNA, 201 bp, Homo sapiens
tgggaggccagggcagtaggattgcttaaggccaggagtttgagagcagcctgggaaacatagtgagaccgtgtctctcaaaaaaaaaaaaaaaaaaaaagaaaggaaggaaggaaggaaggaaagaaggaaagagagaaagagagaaagagagaaatagctagatctggtggtgtgtgcctgtggtcccagctacttggg

SEQ ID NO: 446272 - DNA, 201 bp, Homo sapiens
acattttccctcaatatttaaattgttaaatatcttattttattttatttatttatttatttttgagatggagtctctctctgtcgccaggctggagtgcrgtggtgcaatctcggctcactgcaacctccgcctcccgggttcaagcaattcttctgcctcagcctcccgagtagctgggactacaggagcaggccacca

SEQ ID NO: 446273 - DNA, 201 bp, Homo sapiens
acaagccctttacaaatggagtcttctgtgactggttccagaaggggaactcagagagttgaggcaccagaagaattggatatggtcttgctggcttaaawaagaacgctgccatatggaaaggaaagggggagctgagtgcaaccactggccaacagacagtggagaaacaagggactcaatcttgtagccacagggagc

SEQ ID NO: 446274 - DNA, 201 bp, Homo sapiens
aaagaattaaattaataaattttttgagcatttttaggtttacataaaaattgagcagaaagtagagttcccctatatattttcctctacacacacacagacacacacacacacacacacacacatacaacacataacacattattattaacatcttgcattagtgtattgtatttgttacaatgaatgaatgcaccttaa

SEQ ID NO: 446275 - DNA, 201 bp, Homo sapiens
tcatctggaccagtgtttgtggactttatctagacatatattttctcaaagcaaaatctggaaaaagtttcttcaataaaacttttttttacattcctagttttttttttgtcttccaactttttttgtttgtttgtttttgagacagggtctcgctttgtcgtctgggttggagtggagtggcgctatctaggctcattg

SEQ ID NO: 446276 - DNA, 201 bp, Homo sapiens
aagaattaaattaataaattttttgagcatttttaggtttacataaaaattgagcagaaagtagagttcccctatatattttcctctacacacacacagacacacacacacacacacacacacatacaacacataacacattattattaacatcttgcattagtgtattgtatttgttacaatgaatgaatgcaccttaat

SEQ ID NO: 446277 - DNA, 201 bp, Homo sapiens
gaagttggcaggcctgtgtggcctccataaataaaactaattaatctggctgttttcttaaattcccatattgcttgtctaaatatcaggtgctggcagcttttttttttataacattctccccccaccactccctaccatccccctgcaaaagggcacacacctcatttttttaagttggaaggaaagggaaggagagaa

SEQ ID NO: 446278 - DNA, 201 bp, Homo sapiens
ttatttttctctctgtaattgattattactaggaaggttgtgtgcaaaacattcctgtgaggacagaattattactcattaaaaaataaagaaccagagtrcaaagtcctatcttctgttggagatgaagccaagaatcaaattcatgtctcatgctgaagtttaagctgctttcactatactgtgaaagacagtagcatc

SEQ ID NO: 446279 - DNA, 201 bp, Homo sapiens
ttcagttgtttaagaggatgatggtcttatatgtggttttaatattattttataaaatgaacaatatttcattttccacttgaaaaatgaaaaaattttaytgctgtcatagatttttttgtggttttatgcattaatatagtatatagtaaatgttcaaaaggattgtttgttgctattcttgctattgtattacaacct

SEQ ID NO: 446280 - DNA, 201 bp, Homo sapiens
tttaagaggatgatggtcttatatgtggttttaatattattttataaaatgaacaatatttcattttccacttgaaaaatgaaaaaattttattgctgtcrtagatttttttgtggttttatgcattaatatagtatatagtaaatgttcaaaaggattgtttgttgctattcttgctattgtattacaacctgtaaattt

SEQ ID NO: 446281 - DNA, 201 bp, Homo sapiens
gtgagcaagaagaagtttatgttcacagaagggcttttgagaatactaatggcactctccatagcaacttaagcccccactctatttcctttaacggctatttttttttttttttatcatcagtaccatgtgaatgagagagccactgcatgagccctggaggcagcggccttcagggttgatgttcttagggttggggtg

SEQ ID NO: 446282 - DNA, 201 bp, Homo sapiens
agacatggtttctgaaattaaggtgatttctgttcttgccctaaacacggttttgatatttttaggcaaatcgaagctatcaataggtattgactaaaaaraaaatataaatagatgtcaaaatgcaaacttgttgatatccattgttgtcaaaatacttataattttcacattttgaaatcaaatgttgatattaaatat

SEQ ID NO: 446283 - DNA, 201 bp, Homo sapiens
cctgtcgtggaagagatctgcatgtgttctcactctatccgtgaatatgttcgttttgtgccctttacactgaccgattaaatgcctggtacagccatggwtactatgaaaattaagtttaagaaaacaagcattttgatccatttcctgatttgatattgttgtagttgtgcatttttatccaagtcattcacttaacaa

SEQ ID NO: 446284 - DNA, 201 bp, Homo sapiens
gatgttcattttgccgttgtctttcagctttttcttttggaggtagaatataatcaggcacatctgtggctctcaaacacttagaggaatttgatgttttcagacaaagtgatgttatcaaatgaagtgttattgccactgtacttctttcttgttttatcagttttattatttatttaaaatgtctcttgaatgactctg

SEQ ID NO: 446285 - DNA, 201 bp, Homo sapiens
atgttcattttgccgttgtctttcagctttttcttttggaggtagaatataatcaggcacatctgtggctctcaaacacttagaggaatttgatgttttcagacaaagtgatgttatcaaatgaagtgttattgccactgtacttctttcttgttttatcagttttattatttatttaaaatgtctcttgaatgactctgt

SEQ ID NO: 446286 - DNA, 201 bp, Homo sapiens
gggtaataaaggtcttgcagggaggccactgcctgcgcccctggcttggcccatgcatgaaggccgtgtgtggaatgatgcctttcagctcccatgactcrcagcccaccccctacaccagcaggcaccagccacacctatgatgttccagcttcccgcaaggaactgggattggggtggcaaagcaaacagctcctgctg

SEQ ID NO: 446287 - DNA, 201 bp, Homo sapiens
ggcttcacatcggagcgaagggaagcgccgaaagcattaggcagggagttacatgaacagacacaggtcttcaaggaccatgctggtcccaactaggaaayatgatttgagcgagcacttccattccagctaccagtcctttatcaagtatggacgttgcaaatactttctctcagtctgcagcttgccttttcattctct

SEQ ID NO: 446288 - DNA, 201 bp, Homo sapiens
ggttacagtgagcctacgattgtgccactgcactccagtgagaccctgtctcataaatacataagtcagtgcttctcagcatggtggccatatccacactycattttttatctctcactctcttttattctccagcctgagtgatttcaattttccaaacctcttgagtgtccccaaaacttttgtgaacttatctctcct

SEQ ID NO: 446289 - DNA, 201 bp, Homo sapiens
actgcatcagccagatcagccagttcagttcccccaaagactggactgaatttctgatggttcccagtgctcatcactcttcctctgtctgttttggcatrggagaaaatgtatcttcttgttaagaacagacaaatgatcagttgtcctcagtgtgtggccaggtttcgcattccttttcctatgacaaaaggaaactaa

SEQ ID NO: 446290 - DNA, 201 bp, Homo sapiens
aaacagccaaccagtttgtgccacagcagaggaaccctgaacttaggaaacctccatcttttacaatgtctgcatacctttttaatgatgctttttgatgragaaaagctcttaaagaagttaaatttgcttgccaatgttttttcttttatgtttagtgtttttgatgtcctatttacaagttatttgcttatttaaaag

SEQ ID NO: 446291 - DNA, 201 bp, Homo sapiens
aagccttaccatcgagtaaagtgtagacctaaatggctttgctggagaattttaccaaaccttttaacaaggcttaacactattctttgacaagcttttcytaaaaattgaagagaaaggaatgcttccaagctcattctatgaggccaatattatcctgatctccaagccaaagacatcacaggaaatgaaaactacaaa

SEQ ID NO: 446292 - DNA, 201 bp, Homo sapiens
ccttctccatgccctgcctctggaatagtctccattaatccgaacaaatgtagagttggggaaagaaatagagcagaatatttgtgtttagcccttgtctscttggataatggtgtctgctttgatttctcaagaagactttaaaaataaaccattctctgttgagcacctgttgagttctgggagtgtgctgagtcctca

SEQ ID NO: 446293 - DNA, 201 bp, Homo sapiens
agttttgataaaagtattttatttaggaattttgcctttttatctgtggaagacagaataatgggcccccagacatgtctacttctcaatctctggaaacwgtgaatatgttacatcagtggtcttcatggttttcatcttttttggcaccaggaacccattttgtggaagacagtttttccacagaccagggggcaaggg

SEQ ID NO: 446294 - DNA, 201 bp, Homo sapiens
aaaaggttccctgttatcttaatgctctgggcctttgcctgggcagccaccctgcttgccgtcctcaagatgcagttatcaataccccaggaagccttttytgagccctggccccacactcccacggttagtctttgagtactcctccatagcatctattgagagctctctttgcatctctctcctagtccatggactcta

SEQ ID NO: 446295 - DNA, 201 bp, Homo sapiens
ttatgtgcaatgatgggtatggtgatgtctcaataacattttactcacaaaagctggcctcggggtggactcgagcccaggtgtgctacccgtgggttacwgtcttcacttctgacagaagtccttatttaaggcctcgagattttcttcactacaaattttttactgaggctgcctgccctcctggctgctttgagctgt

SEQ ID NO: 446296 - DNA, 201 bp, Homo sapiens
gacctgttaactttaaatttagtttatgtgggggcaggcatggctgtcacactcaccctaaatcttctgtctattacagaggtggaattccatgagccatrttagaaacactaccttctcattcttcactcttaaaatatatgcttccttttgggagttttacatgaagtaaaatgagaacctcatctgtgtgtttcctgg

SEQ ID NO: 446297 - DNA, 201 bp, Homo sapiens
agctggttaattagaagagcctggcatctctcttgctccctctcgccagctgatgtgcctgctcccccttcctttccaccatgagtaaaagtttcccaagrcctcaccagaagccaagcagatgccagtgccttgtagaaccataaaccaaataaaccttttcttcgtattaattacctagtctcagatatttctttatag

SEQ ID NO: 446298 - DNA, 201 bp, Homo sapiens
gttccttactgcaacaaaacaacatttcccagaatatttctcaatgctaggattaacttgattcccgtttgatggagtatgagcgaaagagaatgtgttcyccactgggagggtgaggactctagcccaaactacatccactggtgtagtttggatatctgtcccttccaaatctcatgctgaatgtgatcgccaggggcc

SEQ ID NO: 446299 - DNA, 201 bp, Homo sapiens
tattccctttttccccaagtcatcaacttagcattcaaagcaataatcattctttaaaaaacaaaactcatacttcatctatattttaaataacaatacaygtgtttacaacaaaaatagcctttggccttggcagatttggacagcacacagtcggcagtaagaatagagaccccccactggtaggtgtggagggtggag

SEQ ID NO: 446300 - DNA, 201 bp, Homo sapiens
tgtcctcattctttcactggtcaatccaggttctagttcttgtcatgctttatccaccttaaaacccttcaaatatttgaagattgctcttacattctccraagatgttcttctccagtgttagcatcctgagctccttctgcctttcctcttcaatctcccaagtgcatcatttctgcttgctttctctttaacatgtgt

SEQ ID NO: 446301 - DNA, 201 bp, Homo sapiens
cagtttgtggattttgaagaactggtccacttctttttaactggcaaatttctgagtgtaatattctatatggtcaccaccattatccttttaatggctgygagaggtgtagcaagatcctctgtttcactcctgatatttggcaatttgcgtcttatttttttttcctttgtcattcttgttagatgtttattgtttgca

SEQ ID NO: 446302 - DNA, 201 bp, Homo sapiens
tagccacagataacaaagaatacagcctttacagaattagttcagaaaagctattaacaaacaaacaaacaaatacagcaacaagaaacaggaacaacaawctctgggagaaaaaggaatttgatatcacaagatttgccacattatgttacttgaaatgttctgtttccaaccaacattgtgagacaaaccaaggaaaaa

SEQ ID NO: 446303 - DNA, 201 bp, Homo sapiens
taatgtctaatttgtgaaatattattttacagatgactttttttttcaatttttttttccctatgaacaggcagcgaaataatcagccagaggttagtgtktgacaaacatgctttattttctttctaatatgtatctgatcatgttgttgtgtatctgaatacaatataaaaaagctatcttactctccctaggccacag

SEQ ID NO: 446304 - DNA, 201 bp, Homo sapiens
aatagtcttttcttcggagtacttgttgaaaactatttgtcacaacacctgcctgagatggcaatacaagttgggggagagaaagctcaccaaaaaattcraaggaaaagctaaggagtgagatgtgcataagaggcctttgaaaagatggaacatattcctggaaatccagaagttcacatatatggcatatgtgcaggg

SEQ ID NO: 446305 - DNA, 201 bp, Homo sapiens
ccattggatgtgctgtgcgctcgctgaatttgcaactgctgggaattgaaagggcttctgctcggggccaggctgtgtggaggctcaatgacctaatgaamaggatgtccatttggccgagatgagctgctgctggtgcaggccgctaatgggaaaccagtgtttacgggaaacctgcaaaatcatcctttgatagctgag

SEQ ID NO: 446306 - DNA, 201 bp, Homo sapiens
ttggccatttgtgttttttaaggaatatgtccatgtcacttcagataccaatttattgtcataaagttctttaaaatatcctcttattctcctcttaatawaagtagaatctatggtaatgtcacctcttctggtttttgatacaactaatttgtcttctctttttcctgctcagtctggatatagatttgtcaattttat

SEQ ID NO: 446307 - DNA, 201 bp, Homo sapiens
ctcaaactcctgggctcaagtgagctgcctgcctcagcctcccaaaatgctaagattacaagcatgagctgctgcagctgataagattatttggatttatktatgtatttatttatttattttacagtcagtgtctcactctgtctcactgcactgaagtgcagtagcataatcatagctcaccacagccttgatcttctg

SEQ ID NO: 446308 - DNA, 201 bp, Homo sapiens
tcctggtggaaggcgagggggaagcgggcttcttcgtcacgtggccaggagagagcgagcacctgaggaggtaaacaaccagagctcctgagaactcactrtggagagcagcatgggggaaaccgtccccaaaatccagtcacctcccaccaggcccctcacaattggaggtgagatttgggtggggacgcagagccaagc

SEQ ID NO: 446309 - DNA, 201 bp, Homo sapiens
ctaattcttgtatttttagtagagtcagggttttgccatgttggacattgacagctggactcgaactggctggtctcgaactcctgacctcaagtgatctkcccgcctcggcctcccaaagtgctgggattacaggtgtgagccactgttcccgggcaaacactgagattcttattcttactttaaattctaaccacagca

SEQ ID NO: 446310 - DNA, 201 bp, Homo sapiens
tttttatgggaagaatttttactgaaatttcaattttaacatagatataaagatactcagattatctatttcttcagtgcaatttggccatttgtgttttwtaaggaatatgtccatgtcacttcagataccaatttattgtcataaagttctttaaaatatcctcttattctcctcttaataaaagtagaatctatggta

SEQ ID NO: 446311 - DNA, 201 bp, Homo sapiens
tgtgcaccattcaggatacagtgaatgaagacccgactgaaaacctagcaataggactacagaggaattagtctgtttttctcttttggggacgtgttttygatgatgcactgcctttcctggacttgttggccgtttctgctgtgtgctcacccatctctcatctgtctttgccattgctttctgtcttcatgtatttta

SEQ ID NO: 446312 - DNA, 201 bp, Homo sapiens
cctgccattgttctgacacctgatgttggttttatgcatgcagatcacattgcacagtctttggcacatgggagatgcatatagttacccttagtggttgygagtatttgctccatacagcccacagacctgaattaagctggctgcttccacgagtcctgtcctgggttctgtgccaaggacccaggtgcttgccttttc

SEQ ID NO: 446313 - DNA, 201 bp, Homo sapiens
catggagtttttttatgggaagaatttttactgaaatttcaattttaacatagatataaagatactcagattatctatttcttcagtgcaatttggccatktgtgttttttaaggaatatgtccatgtcacttcagataccaatttattgtcataaagttctttaaaatatcctcttattctcctcttaataaaagtagaa

SEQ ID NO: 446314 - DNA, 201 bp, Homo sapiens
caggccttgccctgtgcatcactttatctggatattttgcaatatcctttataataaaccagtaaaggtaagtttcactgagttctgtgagatgttctagsacattaaccaaacacaaatagggggttgtgggactcctaacttgaagctggctgagggcctggacttgtgactggtggcaagtgcggggcagtcttggag

SEQ ID NO: 446315 - DNA, 201 bp, Homo sapiens
tctggaaacagtgacagggctgccctggagtttggggactgcagggctcatagcggaggaaataggcaggctgtactgggtgatgggacccaccgtctccygggtctcagatacttgtgggcctggaagagagcctgctccttaatccttgatcagggcccctccctaggaggcttgctgcccgtgccaggaggagcccaa

SEQ ID NO: 446316 - DNA, 201 bp, Homo sapiens
tgcaatgtcattttctggttttgatatcagggtaatcctggcctcatataatgagttgggatgtagtccctcctttgtagttttctggaaggtgtgtagasagtaggttttattttttactgatattgttagtacattcactagtgaagtcatcttgacatggagtttttttatgggaagaatttttactgaaatttcaat

SEQ ID NO: 446317 - DNA, 201 bp, Homo sapiens
tgtgttgttggattcaatatactatttttaaaaaaattgcttctatccccagtgaggtatattgctctgtagttttcttttcttgcaatgtcattttctgrttttgatatcagggtaatcctggcctcatataatgagttgggatgtagtccctcctttgtagttttctggaaggtgtgtagacagtaggttttatttttt

SEQ ID NO: 446318 - DNA, 201 bp, Homo sapiens
agtctggctagcggtctatctattttgtcaatcttttcaaaaatccagctcctaggtaataccattcaggacataggcatgggcaaagacttcatgactawaacaccaaaagcaatgacaacaaaagccaaaattgacaaatgggatctaattaaactaaagagcttctgcacagcaaaagaaactaccatcagagtgaac

SEQ ID NO: 446319 - DNA, 201 bp, Homo sapiens
gtcttgctctcttgcccaggctggagtgcagtggtgcaatcatagttcactgcagtctcaacttcccaggctcaagcaatcctcccacatcagcctcccargcagctgagactacagaggccaccaagtccagctaatcttaagaattttttgtaaagaggggttctcactatattgcccaagctgagctcaaggaattta

SEQ ID NO: 446320 - DNA, 201 bp, Homo sapiens
acaagaaacagtcaaacttcttcagattgaaggaaaattataccttggatggaaacgggagcctactgaaggagtggagagctcagacaaatgcagacatrtgggtaaattttttccattccttcatttctttaaaagatgtttggccatctaaagcaaaaatagttgagtttataacatgggtagaaatgacatatgtga

SEQ ID NO: 446321 - DNA, 201 bp, Homo sapiens
catagcaagggactacacagaggcatgaagcaacgagtggatgaatgtctggctgatcactgtcaaagcacacgtgtaggaaacctttattgcaattgttygttaataaaggcagatctttcaaccggaggttgtcaaaaggaggcagatcccttcaatgcagtggggtagaggaagggaactgctatgttttagcaaatg

SEQ ID NO: 446322 - DNA, 201 bp, Homo sapiens
ttctacatatgtcattctttttgtggccattgtgagtgagattgcattctttatttggctctcagcatgagtgttattggtgtgtagaaatgctactgatyttttgtacattgatttttgtatcctgaaactttgatgaagttgtttattggatctacgagtctttgggcagaaacgatggcattttctgggtatagaatc

SEQ ID NO: 446323 - DNA, 201 bp, Homo sapiens
aaatcattgtgactggaaaaaattctcagaacattaaaatctagtacaagcctaggaaatgagactcaggaattgcattaagtgaaatgattccagtcatyctatcacaaacccacctgcttgctgaaaaagtaagagagcattttaatagaaggacttttgaaaactactaagaacaaatgcaagtaaaaagtgaaatac

SEQ ID NO: 446324 - DNA, 201 bp, Homo sapiens
tatcatataacaacttttatttacaataatgacttttattcctttatacatatgtatactaattacaatttactaattaaatcgaatgtttcaagccccccataagccgcaggtggtttcctacttgctaatcaggacctcatatgcagtgccaggtggtttgctacttgttaatcgggacctcatatgcagcgcacttcc

SEQ ID NO: 446325 - DNA, 201 bp, Homo sapiens
atgaatcacatttattgatttgcatatgttgaagcaatgttgcatcccaggaataaagcatacttgattgtagaggattagctttttgatgtgctactggrtttggtttgctagtattttgttgaagatttttcatctatgttcatcaggtatattggcctaaagtgttctttttgttgttgttgctgtatctttgcctgg

SEQ ID NO: 446326 - DNA, 201 bp, Homo sapiens
tgttcattttgccgttgtctttcagctttttcttttggaggtagaatataatcaggcacatctgtggctctcaaacacttagaggaatttgatgttttcagacaaagtgatgttatcaaatgaagtgttattgccactgtacttctttcttgttttatcagttttattatttatttaaaatgtctcttgaatgactctgtt

SEQ ID NO: 446327 - DNA, 201 bp, Homo sapiens
ccttcaaccagggcctctcccactgaacctctcgagcaaaggtggtaggggcaccccagggtttcaccttcccctccttggctagtttgtcattgagatgrcaaagctgagccaggaacccatcattggggctgatctcacagttctgcctcatgatactcaggatggacttgatgtccaacttctgacaatcataaggta

SEQ ID NO: 446328 - DNA, 201 bp, Homo sapiens
catgtctgtaatcccagtgctttgagaggccaaagcaggaggatcactggaaaagagttcaggagaagcctgggcaacagagcaagatactatcgctgccaaaaaaaaaaaaaaaaaaaattaaacattagtgtggcatggtggcttgcacctgtagtaccatcgactcaggaggctgaggcaggagcatcagttgagccc

SEQ ID NO: 446329 - DNA, 201 bp, Homo sapiens
tttgggcagaggcgttgcatggtctttgccaaatagcactccaccagctccatcagcaatgccagacacctcatcccgaactttccctgcattcagtttgrtagtcacgcaggaaaatgagctctgcaaacttttcccattggcatttctttgactattgactattgtcactcgtttatttttgatttgcatttccatttt

SEQ ID NO: 446330 - DNA, 201 bp, Homo sapiens
gttcattttgccgttgtctttcagctttttcttttggaggtagaatataatcaggcacatctgtggctctcaaacacttagaggaatttgatgttttcagacaaagtgatgttatcaaatgaagtgttattgccactgtacttctttcttgttttatcagttttattatttatttaaaatgtctcttgaatgactctgttc

SEQ ID NO: 446331 - DNA, 201 bp, Homo sapiens
cagccaggccaaacgaagagtggttctgagcagcacgcagatgatggcccctttctgggcaatgggaagcagtgttcttaagcactgggaaatgctctttytttctttctttctttccttccttccttccttccttctttcttttcttttctttctttcttttcttttttttttgagatggactcttcttctgttgcccag

SEQ ID NO: 446332 - DNA, 201 bp, Homo sapiens
atcccattatctttgatttccatgactggtctaaacttcacagggcatcattctcatggattcttgtgtgttaggaacaggcctttgatcgccagtaattraaagtatccaatcccatgatctagcttagctccctgtctgcggggtaggtcttttgaggctctcctccaagcctcagccctgttctgctggctaacatgc

SEQ ID NO: 446333 - DNA, 201 bp, Homo sapiens
aaggttctccgggaggtaatgggggcgctgtttgagatgagtgtgtacttaaatgcagttgtattcctaaggatcgtacaaagcatgatacaaatacccarttcaacaagacttttcaaaaccagacagggattctgaagatgtgaatgtgactctaagacatctctggtgtcacctaccggtgacgtggcttggtttagt

SEQ ID NO: 446334 - DNA, 201 bp, Homo sapiens
agcaaggggtgctgcaggggggtgagtacaggggccccatacctgccagaggactgcaccccactgccctgggagcaggctgtgtgcctctcatgtgctcrtttactctgaagagggtgtggaggcccaggcttcctttccctcagaggtgccactgacatggtttgtgtgccagcccaccctctgatccagaacgtccag

SEQ ID NO: 446335 - DNA, 201 bp, Homo sapiens
atggagcatttgctcagttgcagcatgttgcccagagcagagagtagccgtcctgtagatggcaagaactaaggaggtggatcccaggctgcctttgtggrcattgcagaccaaattcgggtgcagggccctctgcaaactcaggttgaaaatgcaaatcaggtaatggagtcagtgataaattgatgagcgaagatgaag

SEQ ID NO: 446336 - DNA, 201 bp, Homo sapiens
atgcaccagaaaaggcttagagagtcagatcagctactttgctttaaaaaggcatagggcatcaagctgggattctggcctatgtaaacagtatgctgggaaaaaaaaaaaaaaagaaagaaaaaagaaaacaagccaaaaatgcattctatagctcacatttgaatgctaatgaaaattaaaccagttcctttttttaac

SEQ ID NO: 446337 - DNA, 201 bp, Homo sapiens
gttaggaacaggcctttgatcgccagtaattgaaagtatccaatcccatgatctagcttagctccctgtctgcggggtaggtcttttgaggctctcctccmagcctcagccctgttctgctggctaacatgcatctgtgaacatcctgggttaaggaacgaacccaagctgtgtcttcacgggggtgagaggagtcctggt

SEQ ID NO: 446338 - DNA, 201 bp, Homo sapiens
caggcatcaccacggtgctgaccatgaccaccctgagcaccatcgccaggaagtccttgccacgcgtgtcctacgtgaccgccatggacctttttgtgacygtgtgcttcctgtttgtcttcgccgcgctgatggagtatgccaccctcaactactattccagctgtagaaaaccaaccaccacgaagaagacaacatcgg

SEQ ID NO: 446339 - DNA, 201 bp, Homo sapiens
cgagaatgcagaggttcagcattccctcccctcccacggacaaaggaaggaggatgtcttcccaaggaacggccaatctggaaacagtgacagggctgccstggagtttggggactgcagggctcatagcggaggaaataggcaggctgtactgggtgatgggacccaccgtctcccgggtctcagatacttgtgggcctg

SEQ ID NO: 446340 - DNA, 201 bp, Homo sapiens
ctgaagagggtgtggaggcccaggcttcctttccctcagaggtgccactgacatggtttgtgtgccagcccaccctctgatccagaacgtccagacagaatctctgggcaaatgcaagctccaggtgccaggctcccggctgacctcacaagcagactagatatggatgtgttcggaaacagggagttcatctggccccgg

SEQ ID NO: 446341 - DNA, 201 bp, Homo sapiens
gatcttccaggctttaaacttgccattacttctgaccaattcatttctttttttttttttattttttatttatttatttatttatttatttattttttaatttttttttttattatactctaagttttagggtacatgtgcacattgtgcaggttagttacatatgtatacatgtgccatgctggtgcgctgcacccacta

SEQ ID NO: 446342 - DNA, 201 bp, Homo sapiens
cttgcatttttctgagctggtcttggtgttaatggaataacctcgccatgccccgccacaggttttgagagattatgttggaacgccctgtttaagtgaawtttggagtgtatgaagggccgtacaaagaaccagatgtatgattaagatactatgattgataatgaaggcatacaatagtccttcatcctgattgtttcc

SEQ ID NO: 446343 - DNA, 201 bp, Homo sapiens
attaaatatgtcaccatcatgtggcttctgtgccaggttgtggcaacctcatctcagagtccaaggcaccaggccctggttctcctaaccctgaccatctctgactgtatctccctctccttccttcctgccccctgcaaatggatggaagttggattcttctgtgacagccaggtcctgactttccttcaggtgtttggg

SEQ ID NO: 446344 - DNA, 201 bp, Homo sapiens
tggcatttaataaaaacataccatgttaatagcagtagcattcttcctatggaatcattcgtattttgtgtttctttctttttagaaaatattttcgggtwttcacgtgtgtggttgggctgtgggtactggggactttctacccatttcatggtacttggataggacaaacttaggctcttcctagagccattgctgcca

SEQ ID NO: 446345 - DNA, 201 bp, Homo sapiens
tgcacatgtacccctgaagttaaaataaaagttttttaaaaaaacaagcttggtttcatagagaactttcatcccaacaaggacatgatttttcaactgaraaacattcccaaattttactcttgaagagggagattaaccattgtgttttaggttttgaaatggaattgtttccaaattttggcttttgtgaataaaact

SEQ ID NO: 446346 - DNA, 201 bp, Homo sapiens
ttccatggtgtatatgtgccacattttcttaatccagtctatcattgttggacatttggacatttgggctataaagacacttgcacacgtatgtttattgsggcactattcacaatagcaaagacttggaaccaacccaaatgaccaattcatttcaattaaggaatttttgagtgtctcctatggccctttgtaatatga

SEQ ID NO: 446347 - DNA, 201 bp, Homo sapiens
ctccttggaagctcccacctcattctgttgctctgacaaagactagagttccttcttccttcctccagggtgtggtcatcacatttatttggtgattaatmatcaaatgatttgttcttcctaactgaagtatcttaattctgttgactgacttaaaataatcacaatgtagtacacaggcttttataattttaattgaaa

SEQ ID NO: 446348 - DNA, 201 bp, Homo sapiens
ttaaatatgtcaccatcatgtggcttctgtgccaggttgtggcaacctcatctcagagtccaaggcaccaggccctggttctcctaaccctgaccatctctgactgtatctccctctccttccttcctgccccctgcaaatggatggaagttggattcttctgtgacagccaggtcctgactttccttcaggtgtttgggg

SEQ ID NO: 446349 - DNA, 201 bp, Homo sapiens
agaaaatattttcgggttttcacgtgtgtggttgggctgtgggtactggggactttctacccatttcatggtacttggataggacaaacttaggctcttcstagagccattgctgccacttatatgtcgcatttttgtgctgtaactccaggtccagaaaggtggaagaggatgaatatgaagattcatcatcaaaccaaa

SEQ ID NO: 446350 - DNA, 201 bp, Homo sapiens
atgaggaaatgaacaaatggatgcaaatccccctggtctcctctctccctgatgaccctggccataccggggtctgggagggcaagcattctctccaccartctcccaatggaaccacgcgtgctctgacctggccttctcctctggctacagccccaagtcctagcttcttcccctgagactccagagtctttgatatgc

SEQ ID NO: 446351 - DNA, 201 bp, Homo sapiens
tttcatccaagtaaataataaagctgactgtacaataaatcatatcataccagtgaagacatcaataggctctcccagctcttccaattctagtaaaaatmcttttttaatatatgaaaatgatctacaagaagcagaataattttagattaattttttcaggaaaaatggaaacattgacttttattataatggagtaaa

SEQ ID NO: 446352 - DNA, 201 bp, Homo sapiens
ggtctccctcagaagacaattacatttctgtaaagttattgcatagcatgaataattataataagaacacaagaagagtaattctgtccaaggtgcatagttgggcatgtccctgtcctggtcattgttgtagttttctgcagcatttcacagaccctcacaacaccatgtaagttaggttccattattgttacctccggt

SEQ ID NO: 446353 - DNA, 201 bp, Homo sapiens
taaatatgtcaccatcatgtggcttctgtgccaggttgtggcaacctcatctcagagtccaaggcaccaggccctggttctcctaaccctgaccatctctgactgtatctccctctccttccttcctgccccctgcaaatggatggaagttggattcttctgtgacagccaggtcctgactttccttcaggtgtttggggg

SEQ ID NO: 446354 - DNA, 201 bp, Homo sapiens
ctgcaagtctgacctagatcaagtagagtctacccttggtggtagagtttgtggccaatttcaatttaccatgacagtttttccctaatttgtacctttgraagtggaactacttgtccaaaggatgcaaactttccataaaaattaacttgatatatatgttcaccagcagtgcatcagagtgaccatctcaaaatctta

SEQ ID NO: 446355 - DNA, 201 bp, Homo sapiens
ttaaaatcttatgagacgtttgagagagatcgacctgttcagagagacagaagcatgatgcttctcctttcttcagtgaccttttttgtagacatttgctrtgctccttgatggacagtgtgctgatctggtagagcaaggttttattctcttgccatctgcttgcaaaagagtgagaagaccagccagttccccatgcgt

SEQ ID NO: 446356 - DNA, 201 bp, Homo sapiens
tgcctgtgacttatgtgtagaatgacattattttctaaaagcagagttgcaggagatgaagactccctcccccagccccaagtccaacagagaaagaatcmtatttctgaagtggaagagaagaatatgttattggaaaaattatttgcacttgcaggtagagagtattgcactataaaaaatgaaacacagatgactcga

SEQ ID NO: 446357 - DNA, 201 bp, Homo sapiens
aaatatgtcaccatcatgtggcttctgtgccaggttgtggcaacctcatctcagagtccaaggcaccaggccctggttctcctaaccctgaccatctctgactgtatctccctctccttccttcctgccccctgcaaatggatggaagttggattcttctgtgacagccaggtcctgactttccttcaggtgtttgggggc

SEQ ID NO: 446358 - DNA, 201 bp, Homo sapiens
cagtaattaaaacttggatgcaacccaagggctcactgatgggatgaatagataaaatatgatagatatatagaatggaatatgattcagcccaaaaaagraaattcttacatgtgctataatatgcatgaaccttgaggacattatgctaagtaaaataagccagtcagaaagacaaattctgtatgattctacttttat

SEQ ID NO: 446359 - DNA, 201 bp, Homo sapiens
atgcaaccagatgatctttgataaaattgataaaaataagcaatagggaaaggactctctgttcagtaaatagtgctgggaaaacaggctagccacatgcrgaagaatgaaactggaccctacatatcaccatatacaaaaattaactcaaggcggattaaaggcttaaatgtaagacatcaaaataacaaaatcctagaa

SEQ ID NO: 446360 - DNA, 201 bp, Homo sapiens
ctgtccttagctggttcagggtgatgtagggtgtcatttatcttggaacagatcttgtcatgtgagctgggaaaggctggaggaggataaaccttttaagaaaaatcacgaaaaggaagagaaatggcctaagtaaatttcacttccttcagggttttaagaaacttaaaccactctactgaaaacagatgattagagaat

SEQ ID NO: 446361 - DNA, 201 bp, Homo sapiens
agaaaggcggaaatgcatccgtttattttgtggtgccgccctgactcccatacagaaaactggccaggacaacgcagagctgcagatccgtcagatggaayggatacagatcagtcttgatgccagggacggtgcttcaaaagcagctattactctgaaaggacactcagcagatccgggggcttcaggttgtgagatgag

SEQ ID NO: 446362 - DNA, 201 bp, Homo sapiens
gttgtttgaggcctctgaacttgcagcaccgccttttgccatagattagtttagcccgccatgatggattcgagacaggtgctagggatggatggcataawgacccaaaacctgaaatatgcagcattggcttcaggtgacagcgatggtgatggagccctgagtaggtggaggacatggtgaccctggcatgtagtgagg

SEQ ID NO: 446363 - DNA, 201 bp, Homo sapiens
tctgtacccattaaacaactcccatttccccttccccagtccctggaaaccaacattgtactttctgtctctatgagtttgagtgccgtagaaggcttatrtaagtggaatcatagtatttgctcttttgtgactatcttatttcacttagcataatgtcctcaaggtttatccatgttgtggcacgtatcacgatatcct

SEQ ID NO: 446364 - DNA, 201 bp, Homo sapiens
cttgatacctcctggccctaaatccactgactaatgctcttatccactcacattttgtcactatcagcatatataccccatgtagccactgaaaaggtctrtcttatgtctacttaaggctggaggcttggactaaccaatctaacacaggattatcgttccagtttagtattttagggttgaaaacccctctcgctttgg

SEQ ID NO: 446365 - DNA, 201 bp, Homo sapiens
cctgtctgggtgtaaggtgtgctgttccttaacactgtatgtctgccttccctttagtccctttctcccactggagctggagaggggaagatgcaggtgaraagcctggcacctgggtggggtacccagagcgtgtggactgagctccgaggaagtaccaggtgatgtacgtggaagccgtggactgagctcccagtggcc

SEQ ID NO: 446366 - DNA, 201 bp, Homo sapiens
ttgcagtaagggaaaagaagcctcagaatagaactgggctcaactctggacacagcatgggcaagtaggaatttgtagccaatgagcacagtggtggtcaraggatggaaaaattactaagaagaaacatcaaggggaagggagatcctgcctaaactcacctaacaggactcttgccggaagcagaccagggtgataaga

SEQ ID NO: 446367 - DNA, 201 bp, Homo sapiens
gaggtcactcaaggggttaaggaagctggcttttgggcctgttctgggaagggccattcaccactcactagacattttctggacacccaggcggccggagycttccctgctgactcagccctgccttggaagcctacgctttagtgggctgaattaaactccagattggtagaggggtgtttggagggcagcggtgaggag

SEQ ID NO: 446368 - DNA, 201 bp, Homo sapiens
ggggatgggcagcccagctacctgcgtttactattatgtgctggaaagagagcttggaaaatgctagagatgagatgctgaactcactgtctaaccacccracagtttcttgcccactgcatagaaaagccaatacactgagacagcagtgttgcaatagagagaaagagtttaattattgcaaggctatttagtgggagg

SEQ ID NO: 446369 - DNA, 201 bp, Homo sapiens
tgtaactttgtagtaagttttgaaatcagaaactatgagacccccaactttgttcttcttcaagactgttttggatatttggagtcttttgaatttctatwttaattctaggattttcttttcaatgtctgcaaaaatatcattggaattttaatagagattacattaaatctatagatcactttgggtagtattgacatc

SEQ ID NO: 446370 - DNA, 201 bp, Homo sapiens
cttagtttagggaaaggaaagggacagatgagcccccattccccacccttgtccccaaaagcaggaaagatggaagggaggttcccagttattggaagagsctcttatgcgttgggggcatgagagttaatgttatttattcatcttctgaaaattcatgtgctgatatttaaataattacgtcatttttactcttttcat

SEQ ID NO: 446371 - DNA, 201 bp, Homo sapiens
tgcagccttgacctcctgagttcaaatgattctcccacttcagcctcctgagtagctgggactacagtcttgcaccaccacacctggctttttcttttccyttttttttttttttttttttttttttgtagagatgatgtctcattatattgccctgtctggtctcaaactcctggactcaagcaatcctcccacctggtc

SEQ ID NO: 446372 - DNA, 201 bp, Homo sapiens
catagtgaagtttccataaaaacccaaaaggattgggttcagagagcttccggacaggtgaggatgagcagggccccggaggcaggtgccagggagggctyggaagctccacttcctcccacaggccttgccctgtgcatcactttatctggatattttgcaatatcctttataataaaccagtaaaggtaagtttcactg

SEQ ID NO: 446373 - DNA, 201 bp, Homo sapiens
aggagtgctttctctcttgcatgagttaaatgtctctgctcagggaagccagtgtgaacctgggggtccagggcttttataaagggctggccacagagacrcatcttactatatgaccagccagggtaactgaaattcagggctcccaacagtgaaacccagtgtacatcatcaagagttatgcttgtgcaaaggaatcct

SEQ ID NO: 446374 - DNA, 201 bp, Homo sapiens
gagtctcactttgtcgcccagggtggagtgcaatggcgtaatcttggctcactacaagctctgcctcccgggttccagcgattctcctgcctcagcctccrgagtagctgggattacaggcccacaccaccatgcccaagctaattcttgtatttttagtagagtcagggttttgccatgttggacattgacagctggact

SEQ ID NO: 446375 - DNA, 201 bp, Homo sapiens
ctgtgggttagtcatgccccttttcacacccctcctggtaactacatctaaactggataaacacaaataaaggctttttcttctgaccacgtaaatatggktcactcttgggctgtactataatatatagcccaagtgtaatataacatcctttctcatcaaactctgtttttccttggactaaaaaatgggcactttttt

SEQ ID NO: 446376 - DNA, 201 bp, Homo sapiens
ccactatcctcagatctggtccttgacataactcagagaggcttaaatactgaggttgtttttgtttgtttgtttgttcgttttgtttttgatatggagtstcactttgtcgcccagggtggagtgcaatggcgtaatcttggctcactacaagctctgcctcccgggttccagcgattctcctgcctcagcctccggagt

SEQ ID NO: 446377 - DNA, 201 bp, Homo sapiens
gttcttgtgagagttaaaggagataagggaggccaggcgcagtggctcaagcctgtaatcctagcactttgggagcccgaggcaggtgggtcacgaggtcrggagtttgagaccagcctggccaatatggtgaaaccccatctctactaaaaatacaaaaattagccagtcatggtggtgtgcgcctataatcccagctac

SEQ ID NO: 446378 - DNA, 201 bp, Homo sapiens
cagtttcccagtggaggtatcagtgctctcaattattttgagaacatgacagtggaggtgtgttccatggaccatgtgaatcatgtaaagaatgtaacaartaagatgtgggcaagaaatatatgatctcatttttattttcgtagcacttttccttagttgtcctgagtgtttaaaatggaaaggctgatgtaaaaatgt

SEQ ID NO: 446379 - DNA, 201 bp, Homo sapiens
gagcagtctgttgagtgtggggtgacttgatgtgtccagggattgaggactcccagcacacccatccaaagcatgatagggaagcagaggcagaatcctcyctagaaactccctcctggaaagggaatagaggagttcacacagccttcaggaatggagcctcatgagatcctgcctggcagatgtcctgcagcatgtctg

SEQ ID NO: 446380 - DNA, 201 bp, Homo sapiens
actgctgaggccctgtggtcaccacactgggctctggcctagtcccacccatgcccggcttctcctttcacttccctcctctcctagtgttcactgtcctyctcagaaagacccaggtgcacgttgtcatggttttgaaggtgtcgctaaagtcacctcctccaggaagccctccagggcttctgctgctcatgttggtct

SEQ ID NO: 446381 - DNA, 201 bp, Homo sapiens
gcagaagtgatggagggacccggcccaaatctcactctaacaccagctgtgtagccataggaaggtgactcaggggaccccccttttctttatgggaaaarcagcacttggtcataaagctgttgtgagtgatctctgagacctttctaaagaagctcagttaaaaaaaaaaaaagggaaaacagacatctcccaatacat

SEQ ID NO: 446382 - DNA, 201 bp, Homo sapiens
tctgctgctatgaagaatgtaaatcaggatcctggaggaaagggcgtattcacatagacatcttggagctggactcgtactcccgggtctttttccccacrtccttcctgctctttaacctggtctactgggttggatacctgtatctctaagtgttgctcagagtgaagagtgaagagcatttggtacacacttgacctt

SEQ ID NO: 446383 - DNA, 201 bp, Homo sapiens
gggaatagaggagttcacacagccttcaggaatggagcctcatgagatcctgcctggcagatgtcctgcagcatgtctgcctggaagaggaggggaccccwggtgctggctgtacttctgcaaggtctttcttgtccatggtcctccaggacctccagtgaggtgtgtcagcagcatgcctcaggggtgccaccccatgtg

SEQ ID NO: 446384 - DNA, 201 bp, Homo sapiens
cagttccagccactccttgtcctcaccatattaaaagaacctcccccatctccaattttctgtcagggcaatcccccaaacctcccttttttagaaacacmctcctgttcaagatgaccaccatggtgactctccgctctgttcaaagttagcctcctctgtttggcttctgggggctctgcagtgtgacaccccactgtc

SEQ ID NO: 446385 - DNA, 201 bp, Homo sapiens
gcctgggtgaatggttgaagggatgactgcagatagcccatgcccgaggtcccctgggcctcctctgtcatgggccccctgattcttttcctctctttccwcatctgctaaagtaagaagtacatttgtcttttgtcctttagagcacttggccatttgaaaattgctttctctccctggacttatctgctgtagctcccg

SEQ ID NO: 446386 - DNA, 201 bp, Homo sapiens
ggaagaggaggggacccctggtgctggctgtacttctgcaaggtctttcttgtccatggtcctccaggacctccagtgaggtgtgtcagcagcatgcctcrggggtgccaccccatgtgccatttgcttctgcttcatagtggctgtgtccaaggcagatgaaacaagaagcttggcttagagatgacatcttcacctggt

SEQ ID NO: 446387 - DNA, 201 bp, Homo sapiens
tactgacaaaaggctagttgctctgcttccaagtatttaatttgctttctaaaatccaaatatgaatttctctgggagagctttttattagtttttatgamaatgaagtttttcttgattaggcaatttgtgacaagttaattgaatttgtcatgtgcaaagatgaagagcaaattgttacaaactgcaaatgcaattggg

SEQ ID NO: 446388 - DNA, 201 bp, Homo sapiens
tttgctcagctcttctgagtaaatacttctttagctatcagcccctctctccaggccctctcacatagagcaggggctgtcttctcatgcctgtgtccccrgctactgcacaccgaaagcttagtctctgtgctttgtgcctgttgcctgggtgaatggttgaagggatgactgcagatagcccatgcccgaggtcccctg

SEQ ID NO: 446389 - DNA, 201 bp, Homo sapiens
tggctgtacttctgcaaggtctttcttgtccatggtcctccaggacctccagtgaggtgtgtcagcagcatgcctcaggggtgccaccccatgtgccattygcttctgcttcatagtggctgtgtccaaggcagatgaaacaagaagcttggcttagagatgacatcttcacctggtcattaatgaagtgctgccaccagc

SEQ ID NO: 446390 - DNA, 201 bp, Homo sapiens
atactactttttttctaccagcctattgagaagttaagatgtttttaaataatagattcattttttaaacatgtgtcctgaattaatacctatgaatgttygggttctccacttccacatgccttttctaatcagttatgtattattaatggagactcccactcctgtgtggtgttacacccccatttcagagtcacagag

SEQ ID NO: 446391 - DNA, 201 bp, Homo sapiens
gccgacctcaggtgatctgcccgcctcagcctcccaaagtgctgggattacaggcgtgagccatcacacctggacctgattttttttttctggaagttttrgttttcaattttacatttacatcaatcattcattttgagataatatttgtatgcaatatgaagtatggattggaattctttttttttctgcttatggata

SEQ ID NO: 446392 - DNA, 201 bp, Homo sapiens
ctatgggtatcactgcatgtgagaggtctcttgaagatagcatacaattggctttggcttctttatccaagatgccacgctgtgccttttgagtggggtgyttagtccatttatgtttaagattaataacagtatgtgcagatttgatcctgtcatcatgttgttagctggtggttatgtagacttgattgtgtagttgct

SEQ ID NO: 446393 - DNA, 201 bp, Homo sapiens
accccaaatgctatgcctgactcatctctgcaaagttaatggtattcaattatgatttcttacacacatatttgtgaattctttttatgtgtggggtcatrctgcaggctgagacagtgcatatggtcccatgtttagacaaccaccggacggactgtcgcttaataaattgcagtggtaaaacgcctgtagtccccgctg

SEQ ID NO: 446394 - DNA, 201 bp, Homo sapiens
ctgtgctctaatctttattattttcttcctttgctagctttggggttagttcatttttctttttccagttccttagagtgtaaacttagattattgatgtrtcatctttcttctttttaatgtaagcatttacatctctaaatttccttctcagcattgcttttattctgttctataattttttttatgtggtcttttaat

SEQ ID NO: 446395 - DNA, 201 bp, Homo sapiens
ttggtttagtctgttttgtctgaaataagaatagcaaccggtgctcttttttttgttttctgtttgtctgatagatttttctccatccctttacttggagmctatgggtatcactgcatgtgagaggtctcttgaagatagcatacaattggctttggcttctttatccaagatgccacgctgtgccttttgagtggggtg

SEQ ID NO: 446396 - DNA, 201 bp, Homo sapiens
tttgttttctttccatctatctgtgggaaaatttttaaacttcaatttataaaccccaaatgctatgcctgactcatctctgcaaagttaatggtattcarttatgatttcttacacacatatttgtgaattctttttatgtgtggggtcatgctgcaggctgagacagtgcatatggtcccatgtttagacaaccaccgg

SEQ ID NO: 446397 - DNA, 201 bp, Homo sapiens
ttttttttttttttttgtggcttattttctttttcttcctgattcaactttgaaaggttgtacgtttccagaagttttctatttcatctgggttttctatktattggtgtgcattttttttagtattttcttgtaatcctttttatttcattaaaattggttgtaatgtctctttcatcttttggtgctgagtttagttac

SEQ ID NO: 446398 - DNA, 201 bp, Homo sapiens
gtgagattgcattctttatttggctctcagcatgagtgttattggtgtgtagaaatgctactgattttttgtacattgatttttgtatcctgaaactttgrtgaagttgtttattggatctacgagtctttgggcagaaacgatggcattttctgggtatagaatcatatagtctgtgaaaatgatagttcaacttttttt

SEQ ID NO: 446399 - DNA, 201 bp, Homo sapiens
taagtcaaaccaacattgagtattaccaattaattgattcattcgatgcaaatcattcatttaaatgcctcaaatgtgctagcgtctgtgctgggggacargcaaacaaagacaagtaagggactgtttttgtcttaaagaccacacaatctatctaggagacaggtatgtaaagacatatgcgattccctgtgataatga

SEQ ID NO: 446400 - DNA, 201 bp, Homo sapiens
atgtctgtgaaaacactgggtcaactgctaattcccaagagtcgctgagtgaccagcatggtgtgcagaaggtgaagtgtgagtcccctggcatccttagkggcgctgtgctttattcacaccccaaataaaggcactgggcccccccgggaaggacccgcagagggactgtgatgcattcagttcagctcctgctgcaca

SEQ ID NO: 446401 - DNA, 201 bp, Homo sapiens
tctccaggtgccccagacacattactgaatacagcagggacagacccctccttcacggagctcattttctggcacaggcaaagtgacccttttcacctctyagaggagcaagttggcaaagtttttctgtaaggggctagataataaatccttgggacgtgtggaccagcggatttctatggtacctactacggccaggca

SEQ ID NO: 446402 - DNA, 201 bp, Homo sapiens
tttgcctttggtttgaatttcctcctgtagctcatagtttgatcatctgaagcctccttctctcaactcgtcattctccgtccagctttgttccattgctsgtgaggaactgtgatcctttggaggaggagaggtgctctgctttttagagtttccaggttttctgctctgttttttccccatctttgtggttttatctgc

SEQ ID NO: 446403 - DNA, 201 bp, Homo sapiens
tctaagctatccatctcgtgtgtgtctgtgtctcttttctgaatgttttccacaatatttgcttaaacatccagtgttgacccatgcatataaaatagtckaagtcaaaccaacattgagtattaccaattaattgattcattcgatgcaaatcattcatttaaatgcctcaaatgtgctagcgtctgtgctgggggacaa

SEQ ID NO: 446404 - DNA, 201 bp, Homo sapiens
gttccattgctggtgaggaactgtgatcctttggaggaggagaggtgctctgctttttagagtttccaggttttctgctctgttttttccccatctttgtrgttttatctgcttttggtctttgatgatggtgatgtacagatgggtttttggtgtggatgtcctttctgtttgttagttttccttctaacagacaggacc

SEQ ID NO: 446405 - DNA, 201 bp, Homo sapiens
cttttttcatgttttcccttctaagctatccatctcgtgtgtgtctgtgtctcttttctgaatgttttccacaatatttgcttaaacatccagtgttgacycatgcatataaaatagtctaagtcaaaccaacattgagtattaccaattaattgattcattcgatgcaaatcattcatttaaatgcctcaaatgtgctag

SEQ ID NO: 446406 - DNA, 201 bp, Homo sapiens
gttctggtttctatgacctgccttggggaagagggattcttgtttctatggcagcctcagaggagaatgggactgagaggagagcaggagaaggtcagagraaaacttttctttttggggccttcattttgggttatagttttctatccccaataaaacaaataaacaaagaaaactcatggaagcttacaagtcagaaat

SEQ ID NO: 446407 - DNA, 201 bp, Homo sapiens
ttttccttctaacagacaggaccctcagctgcaggtctgttggagtttgctagaggtccactccagaccctgtttgcctgggtatcagcagcggtgtctgyagaacagtggtttttcgtgaaccgcgaatgctgctgtctgatcgttcctctggaagttttgtctcagaggagtatccggccgtgtgaggtgtcagtctgc

SEQ ID NO: 446408 - DNA, 201 bp, Homo sapiens
aaagtaatgtgtcctcatctgtcctgtgtacctactctctgactagtactgcaatgcagatattttactgtagtcccattgagctacagaggtggtgactsttaaaattcagattcctgtgattctggggcccatgaatctggggtcactaaccttccctgtctagtagtcctgacaggtcctgatttcttgggaagactc

SEQ ID NO: 446409 - DNA, 201 bp, Homo sapiens
aacttagtcacttagtctctcagtgtaaacaatgacctaagaactagaaatggcaaaggacagaatgcacaaccccaagagaggagctctgtgcccatgartgtgattaagaccttaagaagtcttggagtggattcttacattgaattagatgctctacatgactcattacaaaccagatatcatggtcctctgattcca

SEQ ID NO: 446410 - DNA, 201 bp, Homo sapiens
ctgatactaggatatttccccacattaagaggtttgaacttgtcaaacactttctcaaacaagcagatgagacctgtgattagccattttaggagcagatrggagcgtccgatgcacagatggaacccaaaatatttaaaacctttgttttctttccatctatctgtgggaaaatttttaaacttcaatttataaacccca

SEQ ID NO: 446411 - DNA, 201 bp, Homo sapiens
ttttcgtgaaccgcgaatgctgctgtctgatcgttcctctggaagttttgtctcagaggagtatccggccgtgtgaggtgtcagtctgcccctactggggrgtgcctcccagttaggctgctcaggggtcaggggtcagggacccacatgaggaggcagtctgcccgttctcagatctccagctgcgtgctgggagaacca

SEQ ID NO: 446412 - DNA, 201 bp, Homo sapiens
gggcttggattttcaggtgatactctttacacctctacaagctgtccaccccatgctttgagacccattctccacctggccctggcagaactgccttgagyagatgcagggaggaattaaacagaggccgtgatgctgcagcaaaggtggaaagtaatgtgtcctcatctgtcctgtgtacctactctctgactagtactg

SEQ ID NO: 446413 - DNA, 201 bp, Homo sapiens
tttcagctttgtcaaagatcagatgctatagatgtgcagccagccttatttctgggctctctattctgtttcattggtctgtgtgcctaggttttttgtgkgtgtgtgtgtgtgtgttgttgtttgtttgttttttgagaagggggtctcactctgtcactcaggctggagtgcagtggtgtgatctcagctcactgcaac

SEQ ID NO: 446414 - DNA, 201 bp, Homo sapiens
taaggttctttttaaaatttgcaaatgattttgagaaaatggagtccacgtaattatatgccttgtctctgtttctttattctgcttagtgccactttccrcacaaaataaatacatttttttaaatcagcaaataattttgagataacagagagtgcactaacttatatgtttcctctttctttcttcaccatgcctagt

SEQ ID NO: 446415 - DNA, 201 bp, Homo sapiens
aagcctacagaggcaggcaggcctccttgagctgtggtgggctccacccagttctagcttcccggctgctttgtttacctaagcaagcctgggcaatggcrggcgcccctcccccagcctcactgccgccttgcagtttgatctcagactgctgtgctagcaatcagcgagactccgtgggcgtaggaccctccgagccag

SEQ ID NO: 446416 - DNA, 201 bp, Homo sapiens
ttctgtttcattggtctgtgtgcctaggttttttgtgtgtgtgtgtgtgtgtgttgttgtttgtttgttttttgagaagggggtctcactctgtcactcakgctggagtgcagtggtgtgatctcagctcactgcaacttctacctcccgggttcaagcaattctcccacctcagcctcccgagtagatgggattacaggg

SEQ ID NO: 446417 - DNA, 201 bp, Homo sapiens
gtctgtcacccctttctttgactaggaaagggaactccctgaccccttgcacttcccgagtgaggcaatgcctctccctgcttcggcttgtgcacggtgcrctgcacccactgacctgcgcccactgtctggcactccctagtgagatgaacccggtacctcagatggaaatgcagaaatcacccgttttctgcgtcgctc

SEQ ID NO: 446418 - DNA, 201 bp, Homo sapiens
acattagggaaaagagctaatgcatgctgggcttaatacctaggtgatgggttgataggtgcagcaaaccaccatggcacatgtttatgtaataaacatgyacattctgcacatgttccatagaacttaaaaaagtaaataaaataaaataatttttttctaaagagctttttccataaaactacatctgacataagtata

SEQ ID NO: 446419 - DNA, 201 bp, Homo sapiens
tgtgtgcctaggttttttgtgtgtgtgtgtgtgtgtgttgttgtttgtttgttttttgagaagggggtctcactctgtcactcaggctggagtgcagtggygtgatctcagctcactgcaacttctacctcccgggttcaagcaattctcccacctcagcctcccgagtagatgggattacaggggtgcaccaccacgccc

SEQ ID NO: 446420 - DNA, 201 bp, Homo sapiens
gtgcgctgcacccactgacctgcgcccactgtctggcactccctagtgagatgaacccggtacctcagatggaaatgcagaaatcacccgttttctgcgtygctcacgctgggagctgtagactggagctgttcctattcggccatcttggctcctcccccgcttcgatgttaatttaagctgtttacatttaaggtagtt

SEQ ID NO: 446421 - DNA, 201 bp, Homo sapiens
accatgactatagtgagcaataatgtacacctggaatttctaagagagtagatattaagcattctcctcacacacacatactcacatacgaaggtaactaygggaagtgatggatatgttaattagcttaattatgggaatgattttgcaatgtatatcaaaatctcaagttatacaccttaaatatatacaatatttatt

SEQ ID NO: 446422 - DNA, 201 bp, Homo sapiens
ttggatgtttattaaaagaggataatggcttccagcttcatccatgtccctgcaaaggacatgatctcattctttttttggctgcatagtattccctgggrgagaacattagggaaaagagctaatgcatgctgggcttaatacctaggtgatgggttgataggtgcagcaaaccaccatggcacatgtttatgtaataaa

SEQ ID NO: 446423 - DNA, 201 bp, Homo sapiens
tagactgctggcagcgggctttgtttcttgtgtgttgtatctgtaagtagcagagcttcacagccttctggtgtcctcatttttgtcttcccctttggatktgggtctctcctgtgtgctgttcttcagagagggtctacgccttgtagctgtttcagctgtaacccgctgctatagtggagctgccttggtataggggct

SEQ ID NO: 446424 - DNA, 201 bp, Homo sapiens
aaatttcctctaacatttcagatgggaggtattactcctatcatgggaaatcagagaagagttgacattttaagttattaaagtcaggattggacacacargaatagtggcaggggtttttggaggcaagaaaatgatagaactgcccaggaactcctaagcagtatgcagtggaaaatagagggaaggcaaaatgtgggg

SEQ ID NO: 446425 - DNA, 201 bp, Homo sapiens
gtgatctgtaaagttttcatgatcccagcaatgacctaaaaatggaagagttttaagtgagaaggaaaacacacacacacacacacacacacacacacacagagagagagagagagagagagagagagagagagaaagagacagagagaagctgctgtggctcttgaagagggcaggggctgtggaagctgtcacctgggg

SEQ ID NO: 446426 - DNA, 201 bp, Homo sapiens
cctagggttatttagctaaatcttaagatagcaaaacactttctcaggagcttgcttctcacatgcagaccaacttatcagaagcccacacctcaacctcstttgtagagctatcacagggttctcacactcgggtcattattcagtactaatcaccccagggaaactggggacaaccctgtcccagagcccagtgaaatt

SEQ ID NO: 446427 - DNA, 201 bp, Homo sapiens
tccctgaactaaatagaaatgcctaaggtttattattcttcagcagggtgaagtttcagggtgggggtggaagtggggaggataaagcgcacggccattgyctacatctggaatacaggccactcatgacaactgatggacaaggtctatggaaattacagacacaaacagtttgtatttctattgaaatagaagctaaga

SEQ ID NO: 446428 - DNA, 201 bp, Homo sapiens
aaaaaaaaaaaaaaaaaaaaaaaaaaaaaaaaaaaaaaaaattagccgggcatgatggcaggtgcctgtaatcccagctactcaggaggctgaggcaggaraatcgcttgaacctgggaggcagaggttgcagtgagctaagatcctgccattacactgcagcctgggcgacagagagagactgtgtttcaaaaaacaaac

SEQ ID NO: 446429 - DNA, 201 bp, Homo sapiens
tgatctgtaaagttttcatgatcccagcaatgacctaaaaatggaagagttttaagtgagaaggaaaacacacacacacacacacacacacacacacacagagagagagagagagagagagagagagagagagaaagagacagagagaagctgctgtggctcttgaagagggcaggggctgtggaagctgtcacctggggc

SEQ ID NO: 446430 - DNA, 201 bp, Homo sapiens
tagagctatcacagggttctcacactcgggtcattattcagtactaatcaccccagggaaactggggacaaccctgtcccagagcccagtgaaattattawaactgggaattataaactgtttattcttctttgcctgttctttcccatggaaaccacagtaaagggccttacccacattttcctcctttcctctgaccgc

SEQ ID NO: 446431 - DNA, 201 bp, Homo sapiens
gcagtgagctaagatcctgccattacactgcagcctgggcgacagagagagactgtgtttcaaaaaacaaacaaaccaacaaaaacaaaaaacaaacaaasaaaaatcactgagtatgtcaatctttagcttgagagcaggaatagatagttttaactaactgtgaacaatcctttaaccagatgttttatgttcatgtgc

SEQ ID NO: 446432 - DNA, 201 bp, Homo sapiens
atctgtaaagttttcatgatcccagcaatgacctaaaaatggaagagttttaagtgagaaggaaaacacacacacacacacacacacacacacacacagasagagagagagagagagagagagagagagagaaagagacagagagaagctgctgtggctcttgaagagggcaggggctgtggaagctgtcacctggggctg

SEQ ID NO: 446433 - DNA, 201 bp, Homo sapiens
tcatggggaggatccctcacgaacggcttgggccatccccttgctgatgagtgagctctagctctgagtttgcaccagatctggttgtttaagattgtgtgggcccctgtttccctggcttgctctgccctgaccatgtgatgcgccttctgcccgtgactgaaaggaagcttcctgaggcctccctagaagcagatgctt

SEQ ID NO: 446434 - DNA, 201 bp, Homo sapiens
ttgagcaatgtggattagaaagtgtttgagtgagaaaagatctggactcacataatgagttctcccaccagttaccagcaggtttcagagtgaaagagacrgcctcactggaccgtgggtttctgtctctaaacgaaataattaaacctatattccaagtcctgctgtaagaattacaggtaatgcactttggaaggccaa

SEQ ID NO: 446435 - DNA, 201 bp, Homo sapiens
ctgtaaagttttcatgatcccagcaatgacctaaaaatggaagagttttaagtgagaaggaaaacacacacacacacacacacacacacacacacagagasagagagagagagagagagagagagagagaaagagacagagagaagctgctgtggctcttgaagagggcaggggctgtggaagctgtcacctggggctgta

SEQ ID NO: 446436 - DNA, 201 bp, Homo sapiens
gtaaagttttcatgatcccagcaatgacctaaaaatggaagagttttaagtgagaaggaaaacacacacacacacacacacacacacacacacagagagasagagagagagagagagagagagagagaaagagacagagagaagctgctgtggctcttgaagagggcaggggctgtggaagctgtcacctggggctgtacc

SEQ ID NO: 446437 - DNA, 201 bp, Homo sapiens
ctgctgctgagttcccgaatccgtgatttggtgtctgtcattaattttggaaaattctcagttattatagttttaaatatttctcctgtgttttcctatctttttttttttacttctggtattcccatttgtgttatacattttataattatccgatggttttttaatgttctgttctgtcctcttaacccttttgttttt

SEQ ID NO: 446438 - DNA, 201 bp, Homo sapiens
ttctaccgtgtatcaggtaactgtacactgtcagagagactcgcgcaggaatcaaaactgtgcatacacatccatctcctctctttcgctgtgtgcatatragggtctgagtgtgtttatgtgtaaatatgaaagggaaaggctagcagagtataaactaaaatgttaactgccgttattataagaaacaggattattatt

SEQ ID NO: 446439 - DNA, 201 bp, Homo sapiens
caaaccctagagctgaaggctttgtacattcggcagagaactctttccatattgtttatataagaaattcattctgccctctgaataattcatgggacctragtcaaacaatccaaaacccagaaagcaagctagaggagatgttcaaagtcatatcatttagaccattaaaagaaatccgtgtcataaggcaatatgagc

SEQ ID NO: 446440 - DNA, 201 bp, Homo sapiens
tcagaccagtgtcctagagagtttccccagtgttttcttgtagtacttgtagtagttccatattttaaggtctcggattgaaacctttaatccattttgattttttttttttttttttaagacagagtcttgctctgtcatccaggctgaagtgcagtggtgcaatctcggctcattgaaacctccgcctcctgggttcaa

SEQ ID NO: 446441 - DNA, 201 bp, Homo sapiens
gtctagtgtgagcttattcatataggagcagtcggaatttggatgagactagaagcaagtcttgttcagaattcatacagcatcacttttatgatattctrttagtcaaagcaagctgcaagtctgacctagatcaagtagagtctacccttggtggtagagtttgtggccaatttcaatttaccatgacagtttttccct

SEQ ID NO: 446442 - DNA, 201 bp, Homo sapiens
ttttccagtgttgtccaggacaccaattcagtgcctgaatcatccacactttcctggcagcaagctatccttcaaagatagcacttcctccctcagcatgsattctgatttcacaaatagttttagaaattttagcagtgggctcatggtggtatttgtctaaactatttaacattttctctcagcattttaatttgttaa

SEQ ID NO: 446443 - DNA, 201 bp, Homo sapiens
agcaagacaccagacagtgggatggggtgggatgcagcgaaccagcacagtgagccttctgagcctttctcagtggctctgattacgtctttaggcaatgsgaagcttgcagaatgagattcacattagagtgtagtaacagggacagacacaccttttattttagaaggaagttggatggaaaatgcatccatatccatc

SEQ ID NO: 446444 - DNA, 201 bp, Homo sapiens
tattgtatggtaaataaatagtttcttgtattctgtgtgttgactttccacttactaatggtatcctttgaatcacaaacacaggaattttaaattaaaawtaatttgaccttttttttcctcttgtttttgcttttggtgtattatctaaaattccattgtctagtgaagatcatgaagttttatttctaatttttcttc

SEQ ID NO: 446445 - DNA, 201 bp, Homo sapiens
atattgtatggtaaataaatagtttcttgtattctgtgtgttgactttccacttactaatggtatcctttgaatcacaaacacaggaattttaaattaaawataatttgaccttttttttcctcttgtttttgcttttggtgtattatctaaaattccattgtctagtgaagatcatgaagttttatttctaatttttctt

SEQ ID NO: 446446 - DNA, 201 bp, Homo sapiens
gcatgtggtattaggtgtcttgagtgaaaaagcacacaaacaaacaagaatctggagctgagggaaaaaaaattaggtcaatttaaatttgtatcagtttrcaaatggatttcctataactaaatggtgacatgcttacattttgtctaaacctctcagagtttacaattcagggaggaaagtcaggtacgaatctgtgaa

SEQ ID NO: 446447 - DNA, 201 bp, Homo sapiens
ctgttatttcaatgaaccagtaactttttttttttcttttggaggatcttaaccatagtttctggaagttttcttctggtctcacattgcttctgtttgtyttggagtacatcattcatgatagagcatttccctactggcctctcatgaataagtagatatgaagcactcctggctggttggaagttctctatgggcctc

SEQ ID NO: 446448 - DNA, 201 bp, Homo sapiens
ttttaatttttcttttgtagagatggagtcttgctatgttgcccaggctggtttcaaactcctggcgtcaagcagtcctcccgcattggcctccaaaagckctgggattacaggcatgagacactgctcctggactgtgcaattttaaagacttgagcaaataaccccttaaaatgtgagttttaggatggtgggtagggc

SEQ ID NO: 446449 - DNA, 201 bp, Homo sapiens
aggtagcttagatccctgaactaaatagaaatgcctaaggtttattattcttcagcagggtgaagtttcagggtgggggtggaagtggggaggataaagcrcacggccattgtctacatctggaatacaggccactcatgacaactgatggacaaggtctatggaaattacagacacaaacagtttgtatttctattgaaa

SEQ ID NO: 446450 - DNA, 201 bp, Homo sapiens
cacatcctcaccagtgtttgttatttttcgtctttttgataattggggtaaggtgatgtcttactgtggttttgatttttcatttccctgatgattagagrtgttgagcattttaaaaatatatatttggccattttcatgtcttcttttgagaaatgtatattcaggtcttttgaccaattttaagttggattatttata

SEQ ID NO: 446451 - DNA, 201 bp, Homo sapiens
ggtcagatacacattccctgcttacaatgttacagtcatgtaattactgaactttgcagaatgtcctagtgtgacctgcttaccttatggggaggaggtcrcatagattatgtttgtccagaaggcgattaagtccctttaaaagaaaataatgtctgacatccaagcactgtagtgttttgttggcagctgtgatggaag

SEQ ID NO: 446452 - DNA, 201 bp, Homo sapiens
gtaactttgcagaagcctggtgtccaagctgaggacatatgccaggcagtcccatgggaaatccagtgacaacctctaactcagccaaagccatgaggtaygaaacacacgtgccaaattataaaaatgacagaaagaaaagacaaagcctttcttggccaggcgtggtgtctcatgccagtaatcccagcacttcgggag

SEQ ID NO: 446453 - DNA, 201 bp, Homo sapiens
ccccaaagaggaagtcatgccaacaggtgtttttgcagagcactcttctttactaggtagcttagatccctgaactaaatagaaatgcctaaggtttattwttcttcagcagggtgaagtttcagggtgggggtggaagtggggaggataaagcgcacggccattgtctacatctggaatacaggccactcatgacaactg

SEQ ID NO: 446454 - DNA, 201 bp, Homo sapiens
tctccagtggtttgtttcctccaaggcagtccttgaatctggattaatcaattgaccactggctgattttaggaagagatggcagaaggggacttttcttkaagagaggttcccataactcagtttttttttttttttttttttttttttttaagatatggtcagtgcaaactagagtgtttagggattgtttgggtatta

SEQ ID NO: 446455 - DNA, 201 bp, Homo sapiens
gaacaaaccatactttttcatgctctatggtccttttaatgtgttgctcaattctgtttgatagcatttcattcaggattcttgtatcagtagtcaaaaakatattggtttgtagttttgtcttcttagagtgtctttgtttggtgttggtgtcaggataaacccaacctcatataatgagtttggaagtgttccctcgtc

SEQ ID NO: 446456 - DNA, 201 bp, Homo sapiens
catgttcctagtaatatccttatatgaacatttgattattccttctcagctacattgatgcctcctggaaacgctagactttccctgtcttacactctacscattttccccttttgttcccccgctcaccttccaaaacaatcatgaaccaagatttggtcagatacacattccctgcttacaatgttacagtcatgtaat

SEQ ID NO: 446457 - DNA, 201 bp, Homo sapiens
accatgatttcttccaggtccatcattgaaacttcaccattgtttcttcattcctcaatgtttctgacaaaggtaatcatctgcaacaggtttttgattcyaagtttgtttacttaggtctgcaatcagcatatcctgtttgtctcattctgttgtttcattttaaattatttttataaattattcatttcttttcttatg

SEQ ID NO: 446458 - DNA, 201 bp, Homo sapiens
tccaaagtcaagaagaaagttgttctaggattctgtgagaccagaatcatccccaaagcatcctatatgtactagactcagctgagataaccttcctgaastcctttgtgctttccccaaagaggaagtcatgccaacaggtgtttttgcagagcactcttctttactaggtagcttagatccctgaactaaatagaaatg

SEQ ID NO: 446459 - DNA, 201 bp, Homo sapiens
ctttctccagtggtttgtttcctccaaggcagtccttgaatctggattaatcaattgaccactggctgattttaggaagagatggcagaaggggacttttyttgaagagaggttcccataactcagtttttttttttttttttttttttttttttaagatatggtcagtgcaaactagagtgtttagggattgtttgggta

SEQ ID NO: 446460 - DNA, 201 bp, Homo sapiens
cagaaggcttagttttggggagatccattgagcgagtcatctgcccacgccttgaagcccataatcctgaggttgagctgcagccagcatggcttcccttytagtgtgtgaatgttttacagagtatgttgtcacttgcattgacacgttgctgatattttatatatttggatggggcattgatgaaataagtgcaacact

SEQ ID NO: 446461 - DNA, 201 bp, Homo sapiens
cctgcctgaacctgggttcattttccattctttaagggatttcttctcttattttccatcatgttcctagtaatatccttatatgaacatttgattattcsttctcagctacattgatgcctcctggaaacgctagactttccctgtcttacactctacccattttccccttttgttcccccgctcaccttccaaaacaat

SEQ ID NO: 446462 - DNA, 201 bp, Homo sapiens
acccaaaccatgaaatactactcagcagtaggaaagaacaaactatcgatgaagcagcagtttaaatgtgtcaagggcattgtgctgaatgaaaaaaaaacaaagccaatatcaaaatgtgttattttagtttgtgtttaaattaggaggtttacttctgactgcagtaagatgccaggatttatattcactcatccctcc

SEQ ID NO: 446463 - DNA, 201 bp, Homo sapiens
acgaaccacgtattgacagactgctttgttttttattgtgttgttaggatagccattatatgagtctggtcctggacgggatgcacttttcttttaaatgmatttgttccttactgcaacaaaacaacatttcccagaatatttctcaatgctaggattaacttgattcccgtttgatggagtatgagcgaaagagaatgt

SEQ ID NO: 446464 - DNA, 201 bp, Homo sapiens
tgtgaattctaatttctgcacttcacggtggagggagtacttaaagataccaacgaacagaatgccagcccccacacctttatacctgcatggccaacacrtgcttaagcagtgtttgttttggtgaccgcattattccctttttccccaagtcatcaacttagcattcaaagcaataatcattctttaaaaaacaaaact

SEQ ID NO: 446465 - DNA, 201 bp, Homo sapiens
ggaaagaaccaaaatatcccgcaacaagtgaaaggctaacgaaactatggaacacccaaaccatgaaatactactcagcagtaggaaagaacaaactatcratgaagcagcagtttaaatgtgtcaagggcattgtgctgaatgaaaaaaaaacaaagccaatatcaaaatgtgttattttagtttgtgtttaaattagga

SEQ ID NO: 446466 - DNA, 201 bp, Homo sapiens
ttatgttcacagaagggcttttgagaatactaatggcactctccatagcaacttaagcccccactctatttcctttaacggctatttttttttttttttawcatcagtaccatgtgaatgagagagccactgcatgagccctggaggcagcggccttcagggttgatgttcttagggttggggtgatgttgagcggtgcat

SEQ ID NO: 446467 - DNA, 201 bp, Homo sapiens
gcatgaaccttgaggacattatgctaagtaaaataagccagtcagaaagacaaattctgtatgattctacttttatgaaatacttagagtggtcaaattcrtagagacagaaagtagaatggtggttgccaggtactgaggggtggggggtgggagccgtttaatgtggacagggttccacttggggaaagtggaaaatct

SEQ ID NO: 446468 - DNA, 201 bp, Homo sapiens
ttattttctcctccctcttcctccacgccctcctcctccatgttctgctataaaacttatatttatctaagcaatttaatttttatggttaaaagaataakataatactaaaagactcaaaaagaaaaatacaggccgggcatggtggttcacgcctataatcccagcactttggaagtacgaggcaggtgaatcacttga

SEQ ID NO: 446469 - DNA, 201 bp, Homo sapiens
accagtaaaaaagcagaaattagcagagaggattaaaaaaataaagcatgatccaactacaatgtgtctccaagaaagtcacttgaaataggatgacattrttacactgacatgaatgttcatgtaatcaccaggaactggaaagaaccaaaatatcccgcaacaagtgaaaggctaacgaaactatggaacacccaaacc

SEQ ID NO: 446470 - DNA, 201 bp, Homo sapiens
atacacaaaagagttaaaaacagggtcctgaacacatctgtgtataccagttttcctagcagcattgttcacagtaattaaaacttggatgcaacccaagkgctcactgatgggatgaatagataaaatatgatagatatatagaatggaatatgattcagcccaaaaaaggaaattcttacatgtgctataatatgcatg

SEQ ID NO: 446471 - DNA, 201 bp, Homo sapiens
ggccattactacctatgtgacactgggtaagttatcagtctaacctccttacctatacactgagggtaataatataacctgccttagcgatagttcttacrcagacatattgcaatatcaacgcataagtgctcatcatcttaatcattactgtagtgagacatcacaacagacaaggcacaatataagactgtgtgcaca

SEQ ID NO: 446472 - DNA, 201 bp, Homo sapiens
tacatcttaaatattaataactacattcaatgtaaattgctggaacgtaccagtaaaaaagcagaaattagcagagaggattaaaaaaataaagcatgatycaactacaatgtgtctccaagaaagtcacttgaaataggatgacattattacactgacatgaatgttcatgtaatcaccaggaactggaaagaaccaaaa

SEQ ID NO: 446473 - DNA, 201 bp, Homo sapiens
taaacagtaggtctttatctgcgagttctgcattccaaggattcaaccaatcgtaaataaaaaatatttaaattgtgctggaggatgtgcataggttagaygcaaacaccatgccattttatctcagggacttgagcatctgtagattttggtgtctgtggggtcctggaacccatccaccacatatactgagggatgatt

SEQ ID NO: 446474 - DNA, 201 bp, Homo sapiens
gtatacattgctgggtattgattgcatttggcagggcattaaaagaaaaagatgatcctaaaaatcaagtggtttcagcaattccacttctaagtgtatayacaaaagagttaaaaacagggtcctgaacacatctgtgtataccagttttcctagcagcattgttcacagtaattaaaacttggatgcaacccaagggct

SEQ ID NO: 446475 - DNA, 201 bp, Homo sapiens
taaagatggattgtcaattatatttttatccttactcttacatatttccatactcttctttcttttgtgaagttccaaaccttcctttattgtcatgtccwttcagtttagagaacttcctttagcaactccttaagggatatttcctaggcacaaatttgcttgatagttctttggctgagagtgtttttatttgtcctt

SEQ ID NO: 446476 - DNA, 201 bp, Homo sapiens
aaagtttctacatttcagtcacattggtaaaatgttaaatatgataaattatgtatttataatactggaggaaccactaaaaaggctacaaagagtgacaygcctcaaaaacactgtaggtaaagcaaaatcaagttctaaaatatgttgagataacccatgggaaggcaggaaaaagaaaacaatatattataaaggaac

SEQ ID NO: 446477 - DNA, 201 bp, Homo sapiens
ggaacaaatgaggcctagagggacttggcctaggatacgttgtccctcactttcagaaaagaaacaaaaagccaggcctctgcctcctaaagcagtactayttatccccaaagaacattttattctcctttaataaaacgttgatatcaggaaaaaaaaactgaaagaaaaaggaaagtaaaccatgtttcacatgaggtg

SEQ ID NO: 446478 - DNA, 201 bp, Homo sapiens
aggtgacagcgatggtgatggagccctgagtaggtggaggacatggtgaccctggcatgtagtgaggtagcattcggcctcaggggcaataacttggaagrcaggtcaggcacctacagacctcatggccagcggagagattggaaaatagatttttaatagtatacattgctgggtattgattgcatttggcagggcatt

SEQ ID NO: 446479 - DNA, 201 bp, Homo sapiens
tggtaacaaaggtatattgtgtgatgctgggttggagtatgaatcaatctgtcacccaggtagtgagcacagtacccaatagacagcttttcagatcttgrcctgctccctctttcctcgagtagtccccagggtctattgaccccatctttatgtccatgcgtcctcttacttatatgtaagaacatgtggtatttggtt

SEQ ID NO: 446480 - DNA, 201 bp, Homo sapiens
cctgagcctgggatgcacccatctggcccctggctctttgctctctgacctcttgtttatacgtgggcgtcaaccagataccccacatagctctagagctygtgcctatgtgatcatcctggggccctggggcccggcctggtctgggagggctgtctggttaatggacattgtctgctcactggtatgagcttgggctac

SEQ ID NO: 446481 - DNA, 201 bp, Homo sapiens
aattaaaggaaatatttaagacaattatattaaaatcaaggaagagtaaggggaaataaagtttctacatttcagtcacattggtaaaatgttaaatatgmtaaattatgtatttataatactggaggaaccactaaaaaggctacaaagagtgacatgcctcaaaaacactgtaggtaaagcaaaatcaagttctaaaat

SEQ ID NO: 446482 - DNA, 201 bp, Homo sapiens
caaatcgcggccactaagtggagggggtgggaccgcagtgtcctcacccagcttcagagacgacgtggcccatgctgatgcaggacactggctgggccccrggcaagctggccaaagtgatgtgtggagaggagaaccctgcacagctcctgctcccggcctgagccaccactcagtggtgacttgtgggctgccatccgg

SEQ ID NO: 446483 - DNA, 201 bp, Homo sapiens
aacctgaaatatgcagcattggcttcaggtgacagcgatggtgatggagccctgagtaggtggaggacatggtgaccctggcatgtagtgaggtagcattyggcctcaggggcaataacttggaaggcaggtcaggcacctacagacctcatggccagcggagagattggaaaatagatttttaatagtatacattgctgg

SEQ ID NO: 446484 - DNA, 201 bp, Homo sapiens
catacatttccaattaaaaataagtataaagagcagagagttgtattatgcaagaggaatttttccctctgttactcatccacataatcttgttccgttcytttcaggcaagctctgttaacaattttaagcgtattaatcagacaaatttaatatatatttaatctatgtgttttaaatgcatatgtttgcacatagtac

SEQ ID NO: 446485 - DNA, 201 bp, Homo sapiens
atcccaaataggttaaatccaaagaatgttaggtaaagacacatcataatcaaactcttaaaaactgaagaaaaattattaagagtagcaaagcaacgtcrccttgcctatatagaaaaaacaaattgaatgacaatggatttctcatccaaaccatggaggcaaggaggaagtagcacagcattttttaatgctgaatgg

SEQ ID NO: 446486 - DNA, 201 bp, Homo sapiens
caagcatacatttccaattaaaaataagtataaagagcagagagttgtattatgcaagaggaatttttccctctgttactcatccacataatcttgttccrttcctttcaggcaagctctgttaacaattttaagcgtattaatcagacaaatttaatatatatttaatctatgtgttttaaatgcatatgtttgcacata

SEQ ID NO: 446487 - DNA, 201 bp, Homo sapiens
acctgtctgtgaaattttgcgaccccagggatcaaattcagctgtgaatggaaagagaattagatagattgagaatcttcctcagtgacactggatgttgyaagacaaagggcctgggaagatgtgttgaaacttctccagaaaaataatgttgtgtcctaatttccatcctcgggactcctgtctatcatgtgttgtcct

SEQ ID NO: 446488 - DNA, 201 bp, Homo sapiens
tctgcagaggatctagaatcaatactccccaggctgtctctcatcaaaccccaaagtccttcattctagagatttgccaccagggagagaaaaacaagagktagttctcttacccatgcacacctttatttggtagaggctcaaccaagactcttgttttgggggaagatttgtatgagatttctatcctaatacaaatgg

SEQ ID NO: 446489 - DNA, 201 bp, Homo sapiens
aaaaaatcactgcccagaccaatgtcatggagctttttccctgttttctcctagaagttctatagtttcaggttttacattgaagtctttaagatatttckgagttgattttcatttatagtataagggtccatctagttttattctttgcatggggatatttagttttcccagcaccatttattgaagaagctgtaccta

SEQ ID NO: 446490 - DNA, 201 bp, Homo sapiens
ttcactcaactttaccccaactcagattctgtttctaaggtgaacttacacattgtgccatgtgtgtgtctgtctgtgtgtgtttgtgtgtgcacgcgtgygcaccccaggtcagttctagcaataattgaaaaacagaaacctattttctttaattattttactaatttctacttgatacctcctggccctaaatccact

SEQ ID NO: 446491 - DNA, 201 bp, Homo sapiens
gattcactcaactttaccccaactcagattctgtttctaaggtgaacttacacattgtgccatgtgtgtgtctgtctgtgtgtgtttgtgtgtgcacgcgygtgcaccccaggtcagttctagcaataattgaaaaacagaaacctattttctttaattattttactaatttctacttgatacctcctggccctaaatcca

SEQ ID NO: 446492 - DNA, 201 bp, Homo sapiens
gttgtagtgggtatagaccagtaatgtttattgattgacattgcctctgtgcagctgttgacctgttaactttaaatttagtttatgtgggggcaggcatrgctgtcacactcaccctaaatcttctgtctattacagaggtggaattccatgagccatattagaaacactaccttctcattcttcactcttaaaatatat

SEQ ID NO: 446493 - DNA, 201 bp, Homo sapiens
aaaaagagccttggccccgacaccagcccaggtctcagatggttttgaggtcactgctccgggctgcgccttgcacgtttagacaccacgccgaatcgatrctgcctatggcaggctcacagaacgaacacggaacagttctgggtgtcactcatgtagtcaccgggctgctggacccactgctggagtgtgtgtctgtct

SEQ ID NO: 446494 - DNA, 201 bp, Homo sapiens
ccttttctagaaaatggaagaaaaggaaacgtatcccaactcattttatgaggctggcatcaacctgacaccaaaatctgacaagaaaaaagaaaactacrcaatatatttcatggatgtgtatatatatatatccatgtgtgtggatatgtatatccactatatatatatccgtgtgtgtatatatatatatacacacac

SEQ ID NO: 446495 - DNA, 201 bp, Homo sapiens
gcaagacaaagggcctgggaagatgtgttgaaacttctccagaaaaataatgttgtgtcctaatttccatcctcgggactcctgtctatcatgtgttgtcytagtctgcccgggctgctataactaagtaccacagacagtggggcttaaacaatggaaatgtattttctccattctggaggctgggaatccaggatcaat

SEQ ID NO: 446496 - DNA, 201 bp, Homo sapiens
ttatctaaatactcatttttccttaaaactctaagccttatttctaacagacagcaaagggtgggtacctgagatacagcaatagagacaggtggaagacracccaggttccctgggcttcacatcggagcgaagggaagcgccgaaagcattaggcagggagttacatgaacagacacaggtcttcaaggaccatgctgg

SEQ ID NO: 446497 - DNA, 201 bp, Homo sapiens
ctgtagtcccagctactgggaaactgaggcaggaggaccacttgaacccaagagttcaaggccagcctgaacaacatagcgagaacctctctctaataagwaaataaataaataaataaaaattagctgaatatggtggtgtgtgcctgtaatcccaactacttgggagactgaggtggcaggatcacttaagcccaggaa

SEQ ID NO: 446498 - DNA, 201 bp, Homo sapiens
ggagcgaagggaagcgccgaaagcattaggcagggagttacatgaacagacacaggtcttcaaggaccatgctggtcccaactaggaaacatgatttgagygagcacttccattccagctaccagtcctttatcaagtatggacgttgcaaatactttctctcagtctgcagcttgccttttcattctctcagctgtgtct

SEQ ID NO: 446499 - DNA, 201 bp, Homo sapiens
ttttcctgactttcattcagaaaggaagtggcatcaaaattttagtcatctgaaccgacaagtggtaaaatttggattcttgaaaagtaagagctattgattttttttttttttttttgagttctgtcaccaaggctggcgtgtagtggtgcaatctctgttcactgcaacctccgccacccggattcaagcgattctcct

SEQ ID NO: 446500 - DNA, 201 bp, Homo sapiens
gcaaggtcaagaagattttctcctggtttttttttttttttgagagtgaccttcgctcttgttgcttaggctggagtgcaatggcaggatctcggctcacygcaacatccacctcccaggttcaagcaattctcctgcctcagcctctcaagtagctgggattacaggcatgtgccaccatgcctggctaattttatattt

SEQ ID NO: 446501 - DNA, 201 bp, Homo sapiens
tttcctgactttcattcagaaaggaagtggcatcaaaattttagtcatctgaaccgacaagtggtaaaatttggattcttgaaaagtaagagctattgattttttttttttttttttgagttctgtcaccaaggctggcgtgtagtggtgcaatctctgttcactgcaacctccgccacccggattcaagcgattctcctg

SEQ ID NO: 446502 - DNA, 201 bp, Homo sapiens
agtcaattactatataggaaacaaaatcatgttatcctcttttaccctttctcttattcgttgtgctcaagcctctgatctagaactggaagaagcttcagctctagccacgttgctgcaaaggacagaatttcactcttttaattttgagacaggggcttgctctgtctcaaggtgtctagtgtgagcttattcatatag

SEQ ID NO: 446503 - DNA, 201 bp, Homo sapiens
atgataactagagctggagatggctgtaaccttcccagcactggacgagcacctggccattttgagccaaggcctggtcagtgaagtctgtagccctttcmaagtaggtgctgaggttgaactcctgcacttcattggccttgatgcccaggtaggtgatgccagagtccttggagaagttggcattgtttatgtgcatga

SEQ ID NO: 446504 - DNA, 201 bp, Homo sapiens
ctcccagtaatgctatgtggtttcaatgtacatatgttttacatcttctgccagatttatgctcatgtattttacatttttgatggtattgtaaatggtatttttttatttgaacttctaattgtttgtggctagtatatagacatacaatttatttttgtatattgatattgtatcctgaaactttgctaatacctttct

SEQ ID NO: 446505 - DNA, 201 bp, Homo sapiens
cacttcacaggtagtgtgagtactttacaacagtattaccaattttcctctcccatccgttactacattgctgtcactcattttatccataagctataatmatcaaattctttattgctgttattttgaacaaactattatctgtcagatcaattaagaataagaaaaataaaatattttattgtatgttcattcattcct

SEQ ID NO: 446506 - DNA, 201 bp, Homo sapiens
gtgcagcaaaccaccatggcacatgtttatgtaataaacatgcacattctgcacatgttccatagaacttaaaaaagtaaataaaataaaataatttttttctaaagagctttttccataaaactacatctgacataagtatagacttttccagtttacatagcgtttttacatgaaattttaccacctatattaaagagt

SEQ ID NO: 446507 - DNA, 201 bp, Homo sapiens
atgatctgcctgcctcagcctcccaaagtgttgggattacaggcatgagccactgcacctggccatcttttacctttagagtatcatgttagctcaaggatttttttttttttctttgagactgtgtcttgctctcttgcccaggctggagtgcagtggtgcaatcatagttcactgcagtctcaacttcccaggctcaag

SEQ ID NO: 446508 - DNA, 201 bp, Homo sapiens
atccgatggttttttaatgttctgttctgtcctcttaacccttttgtttttctctacatttcagatttgaaaatttctattgacatttcttcaagcttacygttttctcagccatgtccaatctattaatgaacctatcaaggacattttccatttttgatgcagtatttttgaccactagcctttccttttaatcctgtc

SEQ ID NO: 446509 - DNA, 201 bp, Homo sapiens
ttgataggtgcagcaaaccaccatggcacatgtttatgtaataaacatgcacattctgcacatgttccatagaacttaaaaaagtaaataaaataaaataatttttttctaaagagctttttccataaaactacatctgacataagtatagacttttccagtttacatagcgtttttacatgaaattttaccacctatatt

SEQ ID NO: 446510 - DNA, 201 bp, Homo sapiens
aggacttactgttgccattttgttaatttttttttctggatgtattataactttctgcccctcctttcctctcttgccgctcactttcttttgtgtttgatttttttttttttttttttgagatggaatctcgctctgtcgcccaggctggagtgcagtggcgcaatctcggctcactgcaagctccgcctcccgggttca

SEQ ID NO: 446511 - DNA, 201 bp, Homo sapiens
catttgtatacaaagaaactgaagaaaaaagagagcaagaaactcacccaagttcacagagccattgattccctgagcctggcggaccttgttgctgatgsttcctccccacatggaaatggagacagaggccagcacggctgctcagggcacacccagctcaccgtggctgaaatggagatctgtgtctgcgagggattt

SEQ ID NO: 446512 - DNA, 201 bp, Homo sapiens
tgatctgcctgcctcagcctcccaaagtgttgggattacaggcatgagccactgcacctggccatcttttacctttagagtatcatgttagctcaaggatttttttttttttctttgagactgtgtcttgctctcttgcccaggctggagtgcagtggtgcaatcatagttcactgcagtctcaacttcccaggctcaagc

SEQ ID NO: 446513 - DNA, 201 bp, Homo sapiens
gttgataggtgcagcaaaccaccatggcacatgtttatgtaataaacatgcacattctgcacatgttccatagaacttaaaaaagtaaataaaataaaataatttttttctaaagagctttttccataaaactacatctgacataagtatagacttttccagtttacatagcgtttttacatgaaattttaccacctatat

SEQ ID NO: 446514 - DNA, 201 bp, Homo sapiens
attttttgtaaagaggggttctcactatattgcccaagctgagctcaaggaatttatagatgccatttatctgattaaggaagttctcttctatttctagyttactgagagttttttttaacacaaaaatagatgaattttgacaaattatttttctgcatctattgatatgattatatgctttccttttttagtttatta

SEQ ID NO: 446515 - DNA, 201 bp, Homo sapiens
gggttgataggtgcagcaaaccaccatggcacatgtttatgtaataaacatgcacattctgcacatgttccatagaacttaaaaaagtaaataaaataaaataatttttttctaaagagctttttccataaaactacatctgacataagtatagacttttccagtttacatagcgtttttacatgaaattttaccacctat

SEQ ID NO: 446516 - DNA, 201 bp, Homo sapiens
aactaatttgtcttctctttttcctgctcagtctggatatagatttgtcaattttattaatctcaaataaccagcttttagttcaattgattttctcaatyttttttatttcattaatttttactctgatttttatatttcctttcttctattttttggaggcagatgtggtatcaatttgcttttctttttccagtttct

SEQ ID NO: 446517 - DNA, 201 bp, Homo sapiens
tttctgggttggcacagcttaagtcctgggttacaaaaggatcagataaatatacatacattaattaaaacaaagtgcgaagttgataagcaaaacttaawgatataaataaataaaaatataaaatggttacacaagtttatgtaagatatgatagctttgttatcattggaaaagcatcccttaaaatgaccctgggtc

SEQ ID NO: 446518 - DNA, 201 bp, Homo sapiens
tcggctcactgcaagctccgcctcctgggttcacgccattctcctgcctcagcctcctgagtagctgggactacaggcgcccgccaccacgcccggctaatttttttttttgtatttttagcagagacggggtttcactgtgttagccaggatggtctcgatctcccgacctcgtgatccgcccccctctgcctcccaaag

SEQ ID NO: 446519 - DNA, 201 bp, Homo sapiens
ggtttcactgggatactctttattaggtcgtgtttgtcacagggcagggatgtgcagttgttaggaggataggtagagtcatattagctttgtgctcaccmctgttatgtttccaaacaagccactgctaggttgtggaaagaatggaaataatgaggtcatatgacctttctccagtggtttgtttcctccaaggcagtc

SEQ ID NO: 446520 - DNA, 201 bp, Homo sapiens
tgatctgtttcttatgtttattcattactgctccaggaattgagcaatgtggattagaaagtgtttgagtgagaaaagatctggactcacataatgagttmtcccaccagttaccagcaggtttcagagtgaaagagacggcctcactggaccgtgggtttctgtctctaaacgaaataattaaacctatattccaagtcc

SEQ ID NO: 446521 - DNA, 201 bp, Homo sapiens
caagtaattcaacctctttattcctccttttcaacattagctcatcttaacttctaatagttcgtatgcttttcaatatacattttagaatagttttctcygtaactacagaaaaatcctgctgggatttggtaggagtttgttaagtgtagatatcaatctggaaagaactggcatctctactatgttgcatcttccaat

SEQ ID NO: 446522 - DNA, 201 bp, Homo sapiens
attaatcccaaataggttaaatccaaagaatgttaggtaaagacacatcataatcaaactcttaaaaactgaagaaaaattattaagagtagcaaagcaaygtcgccttgcctatatagaaaaaacaaattgaatgacaatggatttctcatccaaaccatggaggcaaggaggaagtagcacagcattttttaatgctga

SEQ ID NO: 446523 - DNA, 201 bp, Homo sapiens
caccactcactagacattttctggacacccaggcggccggagccttccctgctgactcagccctgccttggaagcctacgctttagtgggctgaattaaaytccagattggtagaggggtgtttggagggcagcggtgaggaggtcaaccctcagcagtttaactcatgttaagatcacagaagaatggtctgtgtggata

SEQ ID NO: 446524 - DNA, 201 bp, Homo sapiens
tgaattaatcccaaataggttaaatccaaagaatgttaggtaaagacacatcataatcaaactcttaaaaactgaagaaaaattattaagagtagcaaagmaacgtcgccttgcctatatagaaaaaacaaattgaatgacaatggatttctcatccaaaccatggaggcaaggaggaagtagcacagcattttttaatgc

SEQ ID NO: 446525 - DNA, 201 bp, Homo sapiens
tagtaagatgaagggcaaagatgggcctggctggcagtgatggtgtggagctcaggggatcccctttttccctctccctttccatctttttctaagaagcrtattaccctcacatgctgattttgcctaataggacatctgtgaaatcactctttctctttgtcagtgaaactttaattgaaggttggaatatgctgatgg

SEQ ID NO: 446526 - DNA, 201 bp, Homo sapiens
tgacacagttgttagaattatctgactaggattttaaaataatcagtcataaatgtgcttcaatgagcgaatgcacacatgcttcaactaaatgaaaaaayagaaaagctccacaaagaaatagaggatataaagaagaactcaatgaaatttttagaactgaaaaatacaatgccaaaatgaaaaactcactggatgtgc

SEQ ID NO: 446527 - DNA, 201 bp, Homo sapiens
aaaaagaaacatcatgaagatttgtggttttgtatttatataaaataaatacatttttacaatgaatagcatctttctcctctttttatgcatttgatatrcagaaattttaatttaatttattagtctttatattaatatttttgttctaaatatgttgtaaatatgactactttaaagattttctatataatattttag

SEQ ID NO: 446528 - DNA, 201 bp, Homo sapiens
cggtgcttagggtggactgccaattgtttagtctgaagattttacttacaagggtgggctgccgattgtttagtctgacgattttacttataaagtcggartaagtttacctgtagatcaagatttatgatgtttttcattcctgtctgaagaagaatctaagggagaaatgctgggcatttgggttgttcattccctcta

SEQ ID NO: 446529 - DNA, 201 bp, Homo sapiens
ccaatactcctttggctgaggccaattcttgaaggccatcttcttgttatcacaaggttgacttacaggaaatgtattaaaatctcttaagttttttgacygtgtctcacataatatagatattcacctgggtcaaaggcagcctgagattatagctccattgtcataaaaatgtcagctaatctccccagttgttaatat

SEQ ID NO: 446530 - DNA, 201 bp, Homo sapiens
aaaccctgctccacgtataccctcaggttcaactcatcgctctaaccatgtcatcctgattcactcaactttaccccaactcagattctgtttctaaggtraacttacacattgtgccatgtgtgtgtctgtctgtgtgtgtttgtgtgtgcacgcgtgtgcaccccaggtcagttctagcaataattgaaaaacagaaac

SEQ ID NO: 446531 - DNA, 201 bp, Homo sapiens
agtcacgacttatgatgagaatgtatttgatctctcaggtatttaagatggaaaggttaagaagtaacagatttgattattttcacatccctgcaatgaarctttcttgcatgctgtgcatataggataacgttagtgtattccatctatcattctggcagtgctatttgtgagcttaatggagctcctctttcattcaca

SEQ ID NO: 446532 - DNA, 201 bp, Homo sapiens
ctgtgttgtcatctagagtctcaaatggggatgaatgtgcttcactcaggtcattcatagaattcatattcttgtgatttcaggactgaggtcattgggtycgtatggaaaatcatctggaggcttatcacagctcccagccactgctctcagctcccagaggtgccacagttccaagaagccatctccatttccttggca

SEQ ID NO: 446533 - DNA, 201 bp, Homo sapiens
ctcatggttacatggaagtggctaaatggccttctgcagagccactgcctgatcgaacatctctgtgagtcttggccttccccaggagactgtggggctcrttgcacttgttttaccaatcacagagctcacaaagaagttgtccaggcccggggggtgagatacataaattgagcctgcccataatgaacacacactttt

SEQ ID NO: 446534 - DNA, 201 bp, Homo sapiens
cacaaacaagcacatttgtccacttatttaagtgattaaaccagtcaacaaccaaaaagccagtaaaggaatggaggatctgaacaccaatatcaatgtcyttgagctattggatattacagaactctgcacctaataattacatcatgaaagtgaatttcaatatccacctcctgccatacacaaaaaattacttaaaat

SEQ ID NO: 446535 - DNA, 201 bp, Homo sapiens
ttgcatgatgatagttatctactgctgtgtaacaggggagcacagtggtgtaaagccgcatacacttactgcctcatgatttctgcaggtcaggagtctgrgcatgtcttcagtgagttctttggttaaggtctaatgaggctgaagttattgtgtccttgggctgtgttgtcatctagagtctcaaatggggatgaatgt

SEQ ID NO: 446536 - DNA, 201 bp, Homo sapiens
ggggtccattcatcttgtatcttcagaagttttgtttgattctctatttgttgccatctgttctgtgtcttttcatggtgtgaattttgaatgctgtgggwaagatggaagccaaagatgcaccgggtctttggaaaagaaaactataatgattaaagggaggagagctgcgtagaagagagacagtggggtcctcttagg

SEQ ID NO: 446537 - DNA, 201 bp, Homo sapiens
catataataataataaaagggtaaattcaacagaaagacaaaacattcataaatgtgcctgtgcctagtattagagcttcatattaaaagcaacaaaaacygagaagaggataaatttttaaaatcaatcacagtttgatatttaaatatacttctatcagcagtgtacacaaacaagcacatttgtccacttatttaagt

SEQ ID NO: 446538 - DNA, 201 bp, Homo sapiens
ccaattacacctctatgcaactgtccactcttcatcagacccaagcataaacatatgccattttccctgtttgtttgggtcttcgtttatgaaggctccastgtaacataaatcttatactaaatacatttgtatgtttttcttgataatctgtcttctgttatacgagtttcagccatgaaccttacaatggttaaggaa

SEQ ID NO: 446539 - DNA, 201 bp, Homo sapiens
gaaaagtcggttcacaaaaggaaggttaataggagaaaagacatacacatttatttaacatgtatatacaataaccttcagactgaagacccagagacacrggggagattgtctgtttttataattagtttcaacaaaatatggacagttgtgtagaaatatgattaaacaaaaagggtgtgatctaatggtcatagactg

SEQ ID NO: 446540 - DNA, 201 bp, Homo sapiens
tcctatgtggtataaaaatgggtgaaataattctaaaaaaattctaagtagatatattaagaaatcttattgtaatctgttaaaaatgtatgaaaatatartaaaaagcatagctaagaattcaatgtagaaataaataggagcatataataataataaaagggtaaattcaacagaaagacaaaacattcataaatgtgc

SEQ ID NO: 446541 - DNA, 201 bp, Homo sapiens
gggggaaatgcaggttcacctgagggcacgcagggttcagatggaaaacaaagccaggacagagggggctggaggctttctctgctgggtcctaccccctstctctgcctctgccgcctctgatagcccgggcctgcgtccttgccacagtcagatgtggctcctcagcatagctgtgcagtaagagccctgtgagcctgc

SEQ ID NO: 446542 - DNA, 201 bp, Homo sapiens
tctccctgtacctccctgtacccggaggaaaggtatgaaatgtggagacaccaagaagaatctgaacacacagaccttgctaagttctccctgtttcctcrttgtcagatcacacctcctttcatccaattacacctctatgcaactgtccactcttcatcagacccaagcataaacatatgccattttccctgtttgttt

SEQ ID NO: 446543 - DNA, 201 bp, Homo sapiens
ggacttatgacatcagaaaaaataaaatgtaagccataaatagcaatgaggttgggggacatatggaactatgttcctatgtggtataaaaatgggtgaartaattctaaaaaaattctaagtagatatattaagaaatcttattgtaatctgttaaaaatgtatgaaaatataataaaaagcatagctaagaattcaatg

SEQ ID NO: 446544 - DNA, 201 bp, Homo sapiens
tgtgtagcctttatgtctacacagtgcacaagtagagttggttctgtagggggaaatgcaggttcacctgagggcacgcagggttcagatggaaaacaaarccaggacagagggggctggaggctttctctgctgggtcctaccccctgtctctgcctctgccgcctctgatagcccgggcctgcgtccttgccacagtca

SEQ ID NO: 446545 - DNA, 201 bp, Homo sapiens
taccattcttccctgaagcaggccataaaataattgtctaatcttccactatcataagaacctcatcccagcggtattctccctgtacctccctgtaccckgaggaaaggtatgaaatgtggagacaccaagaagaatctgaacacacagaccttgctaagttctccctgtttcctcattgtcagatcacacctcctttca

SEQ ID NO: 446546 - DNA, 201 bp, Homo sapiens
ttgctttaaaaaggcatagggcatcaagctgggattctggcctatgtaaacagtatgctgggaaaaaaaaaaaaaaagaaagaaaaaagaaaacaagccaraaatgcattctatagctcacatttgaatgctaatgaaaattaaaccagttcctttttttaactttaagagaccacacagcttttactatgctaatgtgta

SEQ ID NO: 446547 - DNA, 201 bp, Homo sapiens
ccatagtgaaaattctaaagcaagctaattaggttaatagaaataatcaatagaaaaatggatttacaagaagtaatgaaaaacatcagaaatggtaagtrtgcggtgaagtttaaaaaaaactagttttctatttttattctttcaattaaagtgaaaataataatattgcaagatgggacttatgacatcagaaaaaat

SEQ ID NO: 446548 - DNA, 201 bp, Homo sapiens
agtattttgtttattgtgtcaaaatctgagagcagttaataattagaatatattttttctactgaaataatagaaatgttaccaaaaggccagggactctrtctaggtcccttgcatgctgcacagaaagccaatcgctgagacaagtattgccagggaggaggagcctggatacggcaatctgatgagtttcagttcttt

SEQ ID NO: 446549 - DNA, 201 bp, Homo sapiens
agcagaaaggtcactcacagacattctcctaccattcttccctgaagcaggccataaaataattgtctaatcttccactatcataagaacctcatcccagyggtattctccctgtacctccctgtacccggaggaaaggtatgaaatgtggagacaccaagaagaatctgaacacacagaccttgctaagttctccctgtt

SEQ ID NO: 446550 - DNA, 201 bp, Homo sapiens
gtttggagactgttgcttaagttcctactgtcttcttgcctattgggttgcccatttatttctctggggtcactgggtgcctggaatttccctggaagggrctcagaacttgaggattcaagatttttcctttatttccatgccgagggtggggtggcagggccctaagggggatctctgccctgtttcatcatcttcatt

SEQ ID NO: 446551 - DNA, 201 bp, Homo sapiens
aactcccgccaccaccctttctttctcccttggctctgagcccttcacttgacgtttgtgaatgggattgtttatcctcaaatttgcatactgcacttttrcaaattaaactcctctgcgacactctgctgcccacttccactggctgttcggcactcagaacatcattacctggtctcctctctcttctagctgcaggaa

SEQ ID NO: 446552 - DNA, 201 bp, Homo sapiens
gtgtctgtatttgcagggacttgtgcaactgtttttcataagaacgactccttattcttcaccagcaatagaggagggtggtcattttactagttagtagkggatgcttcttcttgtcaccaaactgaacttgggtcggctcacccagcatgcagacaagaccaaatactgtcactgggattcgcagcaagagagaggcat

SEQ ID NO: 446553 - DNA, 201 bp, Homo sapiens
ggaaaagacctggtcatcgcctcctgcagtgtccaggtagttaatacataacggccaacatgcacttgaaaccttagtccacagtgagccagaagtggccmctgaatcccttttagtcaagttaaatatgactgcagacccggttacccagggcagatgccttcctgcccttccaggtatccagggttattcttggtattc

SEQ ID NO: 446554 - DNA, 201 bp, Homo sapiens
tctctctctctctcactctcacatcttgttgactctcattataaacttgtaggtccttatgttttcaatgcattttaatcagataccatcattactctatrtgattctcagattgtcctatctttggctaacggaagcccctgcaagttggctttcatgacttttgacctctccttagtggtccttgggcatcacatgctg

SEQ ID NO: 446555 - DNA, 201 bp, Homo sapiens
gactaagccatgtcctctccttccaagtagttctttgggcactggtgaatatgtgcgtgttgttacctataattaggtgtgcaatttacaaataatctatrctcgtgtctttttctgagctgtgcttgctggcccagaagaggtgaagggtggcttcagtcccatttatgtcacttaatgaatggaaggaattggctggga

SEQ ID NO: 446556 - DNA, 201 bp, Homo sapiens
gtcattgatcttagagccatggtatgtctgtaacagtatagtacagtggtattttcaaagacctctgcaaagaggtgtctatgactgcacctactctaagytgttccaaagagtgtttttgtatttttttgaaagtctgactgctaagtcagggctgaatcatccacaccaagacaagagttaaagactaattagagtggc

SEQ ID NO: 446557 - DNA, 201 bp, Homo sapiens
gtccaagtgggttatttttggtatttttcctgctcagtgtttgatgagctttctgtatctgtgatttggtgtctgtcactacttttggaaagttcttactwttattacttcaaatattccttctgcttcattctctctttattctcctactggtgttcaaatgatgcatgtgttatattaatatatgacattgcctcatag

SEQ ID NO: 446558 - DNA, 201 bp, Homo sapiens
agactttgaccttaattctaactactgtaattctgaataactgcaattaaatctgctactgttcaacaataaaaaaggaagaaatttagaggccattaaascattatcttttatttctttaactttaaatttttatattattatagtttaagaggaatttgaaaaaatagtactgaaaggtctaggtactatttaccccac

SEQ ID NO: 446559 - DNA, 201 bp, Homo sapiens
ctctgcctcctgggttcaagcgattctcctgcctcagcctcccgagtagctgggactactggtgccccccaccacagccgctaatttttgtatttttagtrgagatggggtttcaccatgttggccaggctggtcttgaactcctgagctcaagtgatatgccctcctcggcctcccaaagtgctggaattacaggtgtga

SEQ ID NO: 446560 - DNA, 201 bp, Homo sapiens
ggtaggagcttagattattgatatgtttttctttcctcttttaaaaaatgtttttatttttaaataaaatgaatacaaaagtttaaaatgttttaaaaacwattttaaaatttaagcctatagcacctggtgtttccaggcagtctcctattcaagtgctgaccagaccaggccctgcttagcttctgagatcagactaga

SEQ ID NO: 446561 - DNA, 201 bp, Homo sapiens
aagaaaataatatcttttgttggtgatggtaaattctacaaatgccaatttaagcccattcattaaatatattgtctaacccttttatattctcactcatkttttgactaatttttctgtcaaagttgagagaggggtgttaaagcctccaactataacagtggatgtgtctatttctcttttcagttttatcagtttttg

SEQ ID NO: 446562 - DNA, 201 bp, Homo sapiens
tttttgtttcatatatttgaatctgtgctgtttatgtatataccttaagattgctgtgtcttctggatagtttgactattttattcttaggtaatgttccyctctgaccttggtaattctctttgctctgaaatctactttatcttatgcttttctgttgattaatgcttgcatgatatatccttatcatccttttacttt

SEQ ID NO: 446563 - DNA, 201 bp, Homo sapiens
cagaattttagactgaagtttttctataatatgttttgtataatgtggtagctgcagtttgcatcttccctagataaatttgctgagctttcaggtgtgtgtgtgtgtgtgtgtgtgtgtgtgtgtgtgtgtgtgtgtgtgttttcttctttgcccaaaaaagtcaccttatctgtaatcttgggtccaagggggaggtag

SEQ ID NO: 446564 - DNA, 201 bp, Homo sapiens
gttaataattagaatatattttttctactgaaataatagaaatgttaccaaaaggccagggactctgtctaggtcccttgcatgctgcacagaaagccaaycgctgagacaagtattgccagggaggaggagcctggatacggcaatctgatgagtttcagttctttgctggagggtggatttcctgaggaaggaactcag

SEQ ID NO: 446565 - DNA, 201 bp, Homo sapiens
agaattttagactgaagtttttctataatatgttttgtataatgtggtagctgcagtttgcatcttccctagataaatttgctgagctttcaggtgtgtgtgtgtgtgtgtgtgtgtgtgtgtgtgtgtgtgtgtgtgtgttttcttctttgcccaaaaaagtcaccttatctgtaatcttgggtccaagggggaggtaga

SEQ ID NO: 446566 - DNA, 201 bp, Homo sapiens
gaattttagactgaagtttttctataatatgttttgtataatgtggtagctgcagtttgcatcttccctagataaatttgctgagctttcaggtgtgtgtktgtgtgtgtgtgtgtgtgtgtgtgtgtgtgtgtgtgtgttttcttctttgcccaaaaaagtcaccttatctgtaatcttgggtccaagggggaggtagag

SEQ ID NO: 446567 - DNA, 201 bp, Homo sapiens
gtactgttgtatatgcagtgtgccatgggattatcagaccaaccctgtgatagaagctattattatcttctttgacagttgaagaaagtgaagcaaagaarcatgaaataacttgttcaggttcccacagctagaagtgggttcaaacccagcatctgcactgttgttaaccagtctgccacagattattccatgtgtgga

SEQ ID NO: 446568 - DNA, 201 bp, Homo sapiens
actgactcgcccacagtcaccactgggagcctgtctctcccaggtctctccactgggatggtcagagtctaactgaacacacagcaacacagcactagcartgacgggccctctgcactcctgtctgctcgcccagcacagggactggatggtccctccagcagtgtcctctgagcgggtggtgctgctccagaggacact

SEQ ID NO: 446569 - DNA, 201 bp, Homo sapiens
aagcttcaagttttaagaccagagggtcaatttctatgtttacttaaaaactcataaatatttatgtgggacacttgggccagcttcagaaaggcattacaaaaaaaatggaatatgaagaaaataatatttaaaagattcacaatcttactactgtaacacagccacttctcacatttctgtagggtttgcaaaaatgtt

SEQ ID NO: 446570 - DNA, 201 bp, Homo sapiens
ttatatataaacataatataaacctacgtgtttatatataaacatatatataatataaacctacatgtttatatataaacatatatataatataaacctayatgtttatatataaacatatataatataaacctatatgtttatatataaacatatataatataaacctatatgtttatatataaacatatataatataaa

SEQ ID NO: 446571 - DNA, 201 bp, Homo sapiens
aggtatcagatatctttttgactcttggacattgttatggtctgaatgtctgtgtccctgcaaaattagtatatagaaacgtaacccccaagatgatagtrctaggaagtggggcctttgggaggtgattaggtcctgaggttggagccattatgaatgggattagtgtgcttataaaagaggcctgtgggaactcactca

SEQ ID NO: 446572 - DNA, 201 bp, Homo sapiens
atataaacatatatataatataaacctacatgtttatatataaacatatatataatataaacctatatgtttatatataaacatatataatataaacctayatgtttatatataaacatatataatataaacctatatgtttatatataaacatatataatataaacctatatgtttatatataaacatatataatataaa

SEQ ID NO: 446573 - DNA, 201 bp, Homo sapiens
agcgcaattaaatgtgtcttcccttagcctaaatccacggggagattggagagacacaatctcacgtgcttacagcaaccagcggcatgacataaaaccaktgagtagcaagttgagagaacagggcttctttattttacactttctttactaaacactttatatattgtcttattggatccccacaaatatcctaaagat

SEQ ID NO: 446574 - DNA, 201 bp, Homo sapiens
aaaggccttgtggttcccagtgacttgcttggaacccttctaaccaccatagaaaccaggcaagctagcctgctggtgggggtggtggtggggagggggayagagacctctcggagaagaggcaggccaccccactcaggtcctcttaggtgaaatggtccctaacgggtggctgagggcacacagctgagtgagttgagc

SEQ ID NO: 446575 - DNA, 201 bp, Homo sapiens
cttcctggaacctcagaatatgaccttatttggaaatagggtcattgcagatgtacttacttaagatgaggtcacacaggactagtagggtggggccttartccattgtaactcctcttataagaagagaagagacagagaaaaacacccagtggggtagaaggactcatgtccatgggggcagagactggagtgatgcat

SEQ ID NO: 446576 - DNA, 201 bp, Homo sapiens
tagaggaagaagatttaaatttaatctctggtacatcccgttctgatacctatgtatatgcagattctaaagtgagatttagtctctatattgggcatggmctgagatagtctccacatgttctttgatgacacacaaagagattagccgtagggaaaagacacaatattttacttcctgtatgaaggaaggcatttgctt

SEQ ID NO: 446577 - DNA, 201 bp, Homo sapiens
tcaatagaaaggaggctcttggagctatatttcctggtgtggtagatccctccagtggctgttaacaggttacatttcactgaattgagttctaatcttcrgtgagagttctcttggggacccagagagtgcttaagttagagtgtttatctgaacacatcctggtgaatgtttagtagtgaagcaaggcacacagtcaca

SEQ ID NO: 446578 - DNA, 201 bp, Homo sapiens
ccagaagatagtcagttgccatctttaaagtactgaaattctatatccagagaaaatatacttcaaaaatttcatcagaatgaagatttttttagataaayaaaatctgtgctaatttatcacagaaaatctaaaaccatagtgaaaattctaaagcaagctaattaggttaatagaaataatcaatagaaaaatggattt

SEQ ID NO: 446579 - DNA, 201 bp, Homo sapiens
ccatttaatcctcacaacagccatctgaggtaggttctattactgtcctgaattttggttaagcaaattcaggcagaaggatgttaaacaatagctcaagrtcacaaagctaataagggaaggaaacaatttcaacccagacagtttggctttgcagcccaaagcctttgtttcttaccttgaactccctttttaaaaaga

SEQ ID NO: 446580 - DNA, 201 bp, Homo sapiens
tctctacctggcaaggtgcctccaaatgggaaatggaggttattctgccctgaccctcagccagaatgttgagatatgatggagattgcctcagtctttarcccaaggttcttttgtagtgagacaaataagcaaacactgagaagactggtcctggtggtacaaccatgaatgtgaacctgggcacttcaggctagcctg

SEQ ID NO: 446581 - DNA, 201 bp, Homo sapiens
attttaattaatgaatagatgggttatctcatcacagaaagtatataaaaagaaattctagagtgaaatgtataatatcttgattgaaaaattcactaackagacttaagagcagattgaagatggcagaaataaaagtttatataaaattgaagaccaccagatgaaatttatctaatctgaagatcaaaggaataaaag

SEQ ID NO: 446582 - DNA, 201 bp, Homo sapiens
aagcagagagctgtcctcaccagacactgaatccaccagcaccttgatcttggacttccccacctccagaaccatgagaaatacatttatattattcatamactaccaagtctcaggtatcgtgttatatcagtacacacagaaagacaccatttaatcctcacaacagccatctgaggtaggttctattactgtcctgaa

SEQ ID NO: 446583 - DNA, 201 bp, Homo sapiens
atatagaagcattcataaaaaataccttcaatgtaaaagactatttaaatgtgaatgatctcatttgagggtgacttgaaccatgcttagaattttctctkaagaagccaagcaaggctgttctttctcacaatgggattctatgtatgccacttaaatcaagacggcgtaggagattcacagtaaatccattgtgatagt

SEQ ID NO: 446584 - DNA, 201 bp, Homo sapiens
aggaaatgattactcctttttgtttctgggttggcacagcttaagtcctgggttacaaaaggatcagataaatatacatacattaattaaaacaaagtgcraagttgataagcaaaacttaatgatataaataaataaaaatataaaatggttacacaagtttatgtaagatatgatagctttgttatcattggaaaagca

SEQ ID NO: 446585 - DNA, 201 bp, Homo sapiens
ctgctttggtagaagagagtggaatgtcaggaaatgattactcctttttgtttctgggttggcacagcttaagtcctgggttacaaaaggatcagataaayatacatacattaattaaaacaaagtgcgaagttgataagcaaaacttaatgatataaataaataaaaatataaaatggttacacaagtttatgtaagata

SEQ ID NO: 446586 - DNA, 201 bp, Homo sapiens
caacttctttatggtgtggttctgctttggtagaagagagtggaatgtcaggaaatgattactcctttttgtttctgggttggcacagcttaagtcctggsttacaaaaggatcagataaatatacatacattaattaaaacaaagtgcgaagttgataagcaaaacttaatgatataaataaataaaaatataaaatggt

SEQ ID NO: 446587 - DNA, 201 bp, Homo sapiens
gggtggaggattcaaatggggaggatgaggatgaggagataatctcagcaagaggtggcctagacaagaaatcaatggagatgctttggggagaaaatgtrcaatgtattaagcatgcaccctctttcaagcccccgggggatcttatggaatctctagtcacatctgcattgctcccaacttctttatggtgtggttctg

SEQ ID NO: 446588 - DNA, 201 bp, Homo sapiens
actccagagtctttgatatgctatctcttggctagttatcattctctctcgcagatttcaagtcccaaggggaccctgtgccatattattttctatttctrttgctctacactgtggagaagccagtattttcatgtgtgcagtgctcttggcctcagggcgggctggccttggggcgggctgggttttagtttgggacca

SEQ ID NO: 446589 - DNA, 201 bp, Homo sapiens
ctggatgactgaatccagcaggctaaaggggtggaggattcaaatggggaggatgaggatgaggagataatctcagcaagaggtggcctagacaagaaatsaatggagatgctttggggagaaaatgtacaatgtattaagcatgcaccctctttcaagcccccgggggatcttatggaatctctagtcacatctgcattg

SEQ ID NO: 446590 - DNA, 201 bp, Homo sapiens
cgctgcgactgatggtaatgggtggtgaccgtggccaggtcaccttccagaggagtctgcctttcctcaccccacagtatgataaaggctctgcatccatycacattcacacacggagaggaagttagcttccattattgtgaatcacagagtaatgaggaaatgaacaaatggatgcaaatccccctggtctcctctctc

SEQ ID NO: 446591 - DNA, 201 bp, Homo sapiens
tgcctcctgtccctgctgaggccgagctctgagagtgattctcacatctcattcctaccctcaatgcaaatcttatgtgctgggtttttcatataaggaartgaggtttagcatagtgctcgggagtcagatgtcattgattttgaaccgctgcgactgatggtaatgggtggtgaccgtggccaggtcaccttccagagg

SEQ ID NO: 446592 - DNA, 201 bp, Homo sapiens
ttgtcaccttcttggtactaagaatgccttaaaatattcaaatcagtgatctgtaaagttttcatgatcccagcaatgacctaaaaatggaagagttttargtgagaaggaaaacacacacacacacacacacacacacacacacagagagagagagagagagagagagagagagagagaaagagacagagagaagctgct

SEQ ID NO: 446593 - DNA, 201 bp, Homo sapiens
aaacaagattccccttatcaaaccatcagatctcatgagacttattcactaccatgagaacagtatgggggaaactgcccccatgattcaattatctcccrctgggtccctttcacaacacatgggaattatgggagccacaattgaagatgagatttgggtggggacacagagccaaaccataacgcatgactacacata

SEQ ID NO: 446594 - DNA, 201 bp, Homo sapiens
tgtgttgcacgtgtgttcatatttgaataaatgtacacatgtacatactcctatctttttatttttataaacagggttcctctctttcacccaggctgaaktgcagtggcacaatctgggtgcaagcaattctcctttctcagcttcccgagtaactgggactgcaggtgtgcaccaccatgctgagctaatttttaaatt

SEQ ID NO: 446595 - DNA, 201 bp, Homo sapiens
ttcagaaaagaaacaaaaagccaggcctctgcctcctaaagcagtactatttatccccaaagaacattttattctcctttaataaaacgttgatatcaggraaaaaaaactgaaagaaaaaggaaagtaaaccatgtttcacatgaggtgcataaacagccagccgcctgtaaggtgaggtctctaagtgtccttcaggct

SEQ ID NO: 446596 - DNA, 201 bp, Homo sapiens
tattttcctgaattatttttgacccatcaaagttgtcttaattttgacaatattttattacaggtgattatgttgtcatgactatatattttgaattgagyagaagaatgggatacttcaccattcagacatacattccctgtatactgactgtggttttatcctgggtgtcattttggatcaaaaaagatgctacgccag

SEQ ID NO: 446597 - DNA, 201 bp, Homo sapiens
gggctcttccagggccctccgaggagtggcacataccactctgcttgtgtttcacttcatcgtgagtgatgtggccacacccagccccaaacggggaacarcagttctatcacatgcctgcaagcagggaagccgcggtatttggcaaacagcaccaatgactatcatgatctgtatctagccactgaatattagcttctg

SEQ ID NO: 446598 - DNA, 201 bp, Homo sapiens
ttaatatttccttttgccgtgcagaagctcttaagtttaattagatcccacttgtcaatttttgcctttgttgcaattgcttttggtgtctttgtcacgamctttttgcccgttcctatgtccagggtggtattgcctaggttgtcttccagggttgctatagttttgggttttacatttaagtcttcaatccatcttgag

SEQ ID NO: 446599 - DNA, 201 bp, Homo sapiens
tctcaaagttgagtccccagggaatcaattccactcaggtgatggctgttgctgcatctggagcccagaaacacgaaactctgagacagagggacctcctmtccagtaagtggggctgcattcctaggactgcatgctggcttttctctctgcgtctttcctcacttgagaaaggatatgggagtgtgtgacagagagggg

SEQ ID NO: 446600 - DNA, 201 bp, Homo sapiens
gtcccacatgggctcttccagggccctccgaggagtggcacataccactctgcttgtgtttcacttcatcgtgagtgatgtggccacacccagccccaaamggggaacaacagttctatcacatgcctgcaagcagggaagccgcggtatttggcaaacagcaccaatgactatcatgatctgtatctagccactgaatat

SEQ ID NO: 446601 - DNA, 201 bp, Homo sapiens
ttcaagtgataaaaaaaattcaccatgggtagccaggcagttagggccatgctattttaagagcatcttcagactttgaaaataagctgttaacaatatgyggagactctcagcagaagttctaggcaggcctacaggcatgggggacaaaaattagagtgcaagcccctcccagagggggtctggtaaagtctgcaaact

SEQ ID NO: 446602 - DNA, 201 bp, Homo sapiens
tgtaaacttagattattgatgtgtcatctttcttctttttaatgtaagcatttacatctctaaatttccttctcagcattgcttttattctgttctataattttttttatgtggtcttttaattttcatttaccgcaagatattttctaatttctcttacgatattgtttttctaggacctgttggttgtttaagagtatg

SEQ ID NO: 446603 - DNA, 201 bp, Homo sapiens
tctctacctaacgatattgatattagtcattaataatattacaggaggagatatatagaaagccctaatcctgaactaatagcttaaagcataagataggraaactgcattcattgaaaatgccacgaaggttcctggggcgatgccgtgaacttgcatgcctgacacctttaaaggctgagggattactgactgctacta

SEQ ID NO: 446604 - DNA, 201 bp, Homo sapiens
ctcacacaccataagaattagaccgctttgtctagttatttgctttgatctgaaaagacagtaagatatctcttatttccacaaaaaggaccaaattgttacagcccagactagatcctaggttaagctccaaggtgcaaggaagattggagtgtctgtttttctaggtattcatatttcaaggaggaaggaactggaaac

SEQ ID NO: 446605 - DNA, 201 bp, Homo sapiens
accagttagagaaggtaggagccttgcttgccgactcagtgaggcatcatatcgatttctgcaaatgacgactccatccaagttgttgattacatgatttggggaagttacatcacaattagttaatatgttataagtctcataccatttcattaaatgtgcataagaacaatgaaatgattttgctttcctttgaattac

SEQ ID NO: 446606 - DNA, 201 bp, Homo sapiens
aaaaatgaagaagttagacatcccaaataaaaaagaaaaaacagaaaacgtatcactagcagacttgcctgcaagaaatactaaagagggactataggacttaaatgaaaaaacaccaaacagtaactcaaatctacgttaagaaataacctgccaggcacggtggctcaaacctgtaatcccagcactttgggaggccaa

SEQ ID NO: 446607 - DNA, 201 bp, Homo sapiens
atgtttatatataaccataggtttatatatgtttatatataaccataggtttatatatgtttatatataaccataggtttatatatgtttatatataaccatataggtttatatgtttatatataaccatataggtttatatatttatatataaacatataggtttatatatttatatataaacatataggtttatatatt

SEQ ID NO: 446608 - DNA, 201 bp, Homo sapiens
cttattcataattacattaaatgtaaatagtttaaatattgcagtcaaaaggcagagattggcagaacggcttttaaaaaatatgacccatatatatgttgcttatgagagacagtttcagttcaaagacacaagtaagttgtaaatgaaaggacagaagtaagatataccatgacaagagtactaaaagagagctggggt

SEQ ID NO: 446609 - DNA, 201 bp, Homo sapiens
tgtttatatataaccataggtttatatatgtttatatataaccataggtttatatatgtttatatataaccataggtttatatatgtttatatataaccatataggtttatatgtttatatataaccatataggtttatatatttatatataaacatataggtttatatatttatatataaacatataggtttatatattt

SEQ ID NO: 446610 - DNA, 201 bp, Homo sapiens
ctaaggccatatgtagtcatatccttaatgtacaagccttttgggcaaccatgatacataagtgatatttgagacaaaacaagtgattcaaagtgaaactrtgttttcatgttttaattggtatgggagagggatgttagaaataattcatatttttgaatccaggctgtgtttgcataatgtctataaacctagctataa

SEQ ID NO: 446611 - DNA, 201 bp, Homo sapiens
aagcacttaatcttggtagaggtgaagggggagcagatgaatctcatggcaagaaagggagcaagagagacgccatgctcttttaaacagccagctgccaygtggactcatcactgccaggcactcatgagggatctgccccacgacccaaacacctcccgccaggcctcgtctccaacactgcggatcatatttcaacat

SEQ ID NO: 446612 - DNA, 201 bp, Homo sapiens
ataaggtggttttcattctctaaaggttacgtatcattttgttacgaatgtataagacataacataaaacattatctacaaaacttttcttttaaggaaartacccagaaaacctttcttagcttaaatttttttttatgttggctttaagtaatatcaaatttgggcaaatgttataattaagggataactctggctcct

SEQ ID NO: 446613 - DNA, 201 bp, Homo sapiens
cctggcagacggtaaaaggcatgtctcttgtggtggcagacaagagaagagtgcttgtgcggggagactcctgtttttaaaaccatcagatcttgtgagayttattcactatcacaagaacagcacaggaaacacctgcccccatgattcaactacctcccactgggtccctcctacaacacattggaattcaagatgaga

SEQ ID NO: 446614 - DNA, 201 bp, Homo sapiens
tatataaacataggtttatgtttatatatttatatataaacctataggtttatatataaatatataatcataggtttatatataaacatataaaataaacmtatgtttatatataaacatatatataaaataaacataaacatatataaaataaacataaacatatataaaataaacatgtttatatataaatatatataa

SEQ ID NO: 446615 - DNA, 201 bp, Homo sapiens
atggaaagacagctcatgttcatggattggaagacttaacattgtgaagatggtaatagctccaaattgatctagattcagtagaatccctgtcaaaatcttcagcctccttttttttgcagaaattgacaagctattccaaaaatgtgtatggaaattgcaagcaatccagaatagcaaaaaacaatcttgcagaagaac

SEQ ID NO: 446616 - DNA, 201 bp, Homo sapiens
taaatgcttcaacctgctctttaagttttaaaaaatttttgcaagatgataaaattaacatttctgataatatttcagatgacacgaaatattttttaaatttattattattattattattattattattattattattattatttgagatggagtctcgctctgttgcccaggctggagtgcagtgacactatctcggct

SEQ ID NO: 446617 - DNA, 201 bp, Homo sapiens
aaatgcttcaacctgctctttaagttttaaaaaatttttgcaagatgataaaattaacatttctgataatatttcagatgacacgaaatattttttaaatttattattattattattattattattattattattattattatttgagatggagtctcgctctgttgcccaggctggagtgcagtgacactatctcggctc

SEQ ID NO: 446618 - DNA, 201 bp, Homo sapiens
aagagtgaaactctgtctcaaaaaaaaaaaaaaaaaagggacatcagtgatagtctttttcattcagcaaatattaattaatttattatggttagccaacrttggtaaacaagagagacatattctataaaccaaccagtttattggttttaagatagatattgtaccagtaattatagaaacaaatccatccaatttatg

SEQ ID NO: 446619 - DNA, 201 bp, Homo sapiens
tgattgcaattttatgccaaaaattaatagacattaagaatcacacataattcaaatcacatttccttaggaaatgatgtaattttagcattcacattacwttaaaatatatacttgtgctcttttattgcttcaggctaatcatcctaattcctttgtactgaaatactaatttgtttaaatttttaaatgtttcttggt

SEQ ID NO: 446620 - DNA, 201 bp, Homo sapiens
agtggtgataaatgaaattactctttggatgttccatttggactctgcataactcctagggtgatttattgtcctttgtttttctgtatgttagcttgttkgtttattcctctagggttttgattgcaattttatgccaaaaattaatagacattaagaatcacacataattcaaatcacatttccttaggaaatgatgta

SEQ ID NO: 446621 - DNA, 201 bp, Homo sapiens
atgtctgggaaaggcagagcctcagtaggatgaccatggaagctaataaccatggatgcccgggtagacttctgaattaggcaagggagtatactgagcayaggcatggggagctcctctcaccccaggcagggagaaagcaggtggatttgctgtaataaattgtgcgtcttgtctggagttgtctttctgtttatcttg

SEQ ID NO: 446622 - DNA, 201 bp, Homo sapiens
cagcaccataacaaaaacagtgtgacctgaatggaagaacacgttaagtagcgttgtgatttgcaaatgtttcttgtgcttgatgattgcgtgtgttgcaygtgtgttcatatttgaataaatgtacacatgtacatactcctatctttttatttttataaacagggttcctctctttcacccaggctgaagtgcagtggc

SEQ ID NO: 446623 - DNA, 201 bp, Homo sapiens
aaataaatgcatgtcagtctctctctggtggtgggaactaccagatatggaacttactaactctaaaataaatgaataagtaagtaaatagaaaagccccwactagtccactgtgacgtttcaaaacatcatcctggggcaaattttatttctatgtttaatgctaaaaagcaattattgagaatggattgctatctaatg

SEQ ID NO: 446624 - DNA, 201 bp, Homo sapiens
cctaacactaggatttctaatctagcatcagtagttgccttgaattaaaataaccacagacctatttggataaatattgtggttatcatgatctgattatyaagcagtaacttgcgaggacctgccatggaagaaaatttctcctgtttgtataaatattgaaaggcagcaccataacaaaaacagtgtgacctgaatgga

SEQ ID NO: 446625 - DNA, 201 bp, Homo sapiens
gaacatggaatcactgagagcaaataaatgcatgtcagtctctctctggtggtgggaactaccagatatggaacttactaactctaaaataaatgaataartaagtaaatagaaaagccccaactagtccactgtgacgtttcaaaacatcatcctggggcaaattttatttctatgtttaatgctaaaaagcaattattg

SEQ ID NO: 446626 - DNA, 201 bp, Homo sapiens
gtgactgaaaaagctggtgaaacaacccagccgtttggaaacaccagatttttcaaggggcctgctttctcacttacaaaagacctcatagggcagtgtgsatttgatgaaataagactgataaaagttgtaacatgaatgtctagtacttaattaattttagataaatggtatgagttatatgagagcaaatatattgag

SEQ ID NO: 446627 - DNA, 201 bp, Homo sapiens
ttggatttggggataaatatggctttctatgtaactttagatatcacttatattttaagaatgttattttaaattcactgtaggttgttcttgagtcatcmtgctttgtatgttaatatctgccctgtgcttggatgaaatattagcgtaaccttggcttttgtgctaaacattaatcattataatcattcccatctatga

SEQ ID NO: 446628 - DNA, 201 bp, Homo sapiens
gaaaggggcaagaaagtgactttacagtggagaaagctggcaaatatgatcttatccagatgatcaagggtgacatcagcagggctaaatcatggtgaccmcttgtactcttgctatgatacgatgagagcaccactgcacctctgtgtatccccccaggaccataacaccaatctaatcactagggaaacaacagaaaga

SEQ ID NO: 446629 - DNA, 201 bp, Homo sapiens
aaatttccacgggctccttgctcctgaagaagtgagtgaaagtttgtgggggtttctgccttctgcagacatctcacgggtcgtgtggatgaggtgatagygctggaccctcctccttagtcctgtgggatgtcatacagggatgcattgctttgactgatggagcccagtcccacagaggagaactgccctcctctgctg

SEQ ID NO: 446630 - DNA, 201 bp, Homo sapiens
tgcctcctgggctggttgctgcaaacgttgttgctcagagttctgtctttctatatggtttggccattgtctatttgcatattcattttgttaataccaaktcaacatcagttaatactaataaggtttaaagggccttaaaatgcatcttcttaaaatgcatggcagaaaattttaagaaaaaggaccccaatcatggtt

SEQ ID NO: 446631 - DNA, 201 bp, Homo sapiens
attttcactagcatcaaaaacattaaatgtctaagaaaaatctagtaaaagatgagtattattctatagagttaactataaaccattaatgagagaaattraaagagacctaaataaaggtcagcatatctacatttatggcttagaagactctgtattggaaacaagacaattatccataaactgatctgcagagtcaat

SEQ ID NO: 446632 - DNA, 201 bp, Homo sapiens
tagaaattaaaagttactcatattactttgatatttttaaaaaatgagcttgacatctcatttcctctgaaagaattcattgctaatacttcccaatcagracaaagttacttctagaatccaatgtatttatcaaacccatgctcaatttacgttctattcagttgaaactgagagtaggtatgtgttaagtcttgattt

SEQ ID NO: 446633 - DNA, 201 bp, Homo sapiens
tctggttttgcctttattgtctgtgcttttgggatcattttcaaaaaaatcactgcccagaccaatgtcatggagctttttccctgttttctcctagaagttctatagtttcaggttttacattgaagtctttaagatatttctgagttgattttcatttatagtataagggtccatctagttttattctttgcatgggga

SEQ ID NO: 446634 - DNA, 201 bp, Homo sapiens
aacttgtcctctacttcacacaacacccaattgtagtagattatagatttaaatataaaagtcaagagaataaaacttctgaacataaataagcagggctrttttcctgatttcagagatagaatttaataggattttaaaagcactattcacatgagtctttcctgagcaagaagacagaataggaagccctggaccttc

SEQ ID NO: 446635 - DNA, 201 bp, Homo sapiens
gaggtggcctgaggaactggcttatgtcttgcttgttctcagagcactgatgggacacagtatattctagatgcctagggactgcttaaaaccaagaaaayaggttggactaacacaaaggtccgagaggctccgaaaatctctgcttgggctgattataagggtcttttgtatgagactagtctgtgaatattgggagag

SEQ ID NO: 446636 - DNA, 201 bp, Homo sapiens
tgcagttcacaatagggttcatgctcctctaagaatctaatgctgccactgatctgacaggaggtagagctcaggcattaatgtgagtgatagggagcagwtgtaatcccagaagctgaggcaggagaatcacttgaacccaggaggtggaggttgcagtgagtcgagatcacgccattgcactccagcctgggcaacaag

SEQ ID NO: 446637 - DNA, 201 bp, Homo sapiens
taaagaaagcttcaaggatttaaaagacattatcaagcagatcatggattgtgagaatcctggaagaagagaaagagaaacaccagaaagcatattcaaakaaacagtagctaatttttttctaaatctgaagatggaaatggtctagatccaggaaacccaaatgacaataaaatgagtccccaaaatgcatactgagat

SEQ ID NO: 446638 - DNA, 201 bp, Homo sapiens
tgaaggtgggctggccgggttccattgtcaaataattttggaaatgctattaaaacacgtttgttcttctctagagcactcacaacaacttctatcaactrcgttgatcccaatgaaaatacaaaatgatttcactactaacccttgccattttccatgtaactcctactcactcatcagaaggcactttgtgaattacct

SEQ ID NO: 446639 - DNA, 201 bp, Homo sapiens
accaaaaagaaatggctaaagtgatagatatggtcacgatcctgatttgattattatacagcttatacgtgcactgaaagatcacccttacctcataaatrtgtaacattatttcatgtcaatcataaatgaaaatgtaatttttaaaaaggtgatgcaccatgattcactatccaggaccaaacattataaggggaatgg

SEQ ID NO: 446640 - DNA, 201 bp, Homo sapiens
tgtgtcttcgcatggtttcccctgtttgtttgtgcctgtgttcaagttttctcttcttatgatttttctttttgtattagattagaacctactgtaatagmctcattttaacatcattacgtctttgaagacccaatctccaaatgcaatgacactctaaagtgctggggcctaggactttaacattcaaattttggaggg

SEQ ID NO: 446641 - DNA, 201 bp, Homo sapiens
gtctttatataattaccatacttttttgattactgtaactttgtagtaagttttgaaatcagaaactatgagacccccaactttgttcttcttcaagactrttttggatatttggagtcttttgaatttctatattaattctaggattttcttttcaatgtctgcaaaaatatcattggaattttaatagagattacatta

SEQ ID NO: 446642 - DNA, 201 bp, Homo sapiens
ctgcaaaaatatcattggaattttaatagagattacattaaatctatagatcactttgggtagtattgacatcttaacaatattagatctttcgacctgtraacacagaatctttccattttttggtatcttccttaatttctttcagcatacacgtctgttgtccattggttcagtttatttgagtgtcttattcttttt

SEQ ID NO: 446643 - DNA, 201 bp, Homo sapiens
cgtcagcactctctgaaaccaccttagttgagggatggatgccttattgtagcccagtaagggtagaattcagggctccttactcagcctttgtgagcgargccaagtccaccattttatctattctgtttggctagaaaagagtggttattgtttaaaagtattctgtcgtggccaggcacagtggctcatgcctgtgat

SEQ ID NO: 446644 - DNA, 201 bp, Homo sapiens
atgattggcagattaggggctccctttggaaatgatgaccactttttgcatttatttctctggatgtgtcttgcaggcaggcacaggcacagaaatggcarcatggatgcttttggtgctgggatgtcccaggcaggcgtgagttgatgcaaataggcaagaggttgaggccagggcagagaggggctgaaagtcagtagg

SEQ ID NO: 446645 - DNA, 201 bp, Homo sapiens
ttttgtgaccgtgtgcttcctgtttgtcttcgccgcgctgatggagtatgccaccctcaactactattccagctgtagaaaaccaaccaccacgaagaagrcaacatcggtgagctgcagtagcaaaggttctccgggaggtaatgggggcgctgtttgagatgagtgtgtacttaaatgcagttgtattcctaaggatcg

SEQ ID NO: 446646 - DNA, 201 bp, Homo sapiens
tccccggcgcccattgctcccgccgcccggttgcgcggaccggcgctagtgcgcgggtgggggcggcgcgccgcggtggcccggcgtcccgtgtgcgtccmgtgtgcgccccgcgggggcgcggccagcgccagagtagatacctgtcccgcccgccgcggccagcagcctcggaggaagccagggcaaagagggccggcg

SEQ ID NO: 446647 - DNA, 201 bp, Homo sapiens
agactttgtctccaaaacaaaacaaacaaaaaacaaagcaaaacaaaacaacaaaaaagagagagataagggagagaaagcacaaggttgtacccaaagcrgatgctcagaaagctcagttcctcccttccctctaatgggagctgtgaagagctgacagcaccacgaggggtggcagggagtccacagctccttaatgtc

SEQ ID NO: 446648 - DNA, 201 bp, Homo sapiens
aacctattccaggatttggtactgaaagtctcctaagtctagtaggacaagcaaagtctctacttgtccaagtaaattagaaattcttgcagaattcatawgtggcaaattatcatatggaaaatgacaaaaataaatgattccagaaacataaaaaccctcaatatactagataaaatgtgtcataccagagagtcttct

SEQ ID NO: 446649 - DNA, 201 bp, Homo sapiens
gaggccccggaccctgcgccccgagctccacggcaccatggccccgaagctgctgctcctcctctgcctgttctcgggcttgcacgcgcggtaagtggcgygggggccgcatccccggaggccccgagctgggcgacagggcggcggggggcgctgtctgctggagtccctggcgcgccagccgtcggctgggctgcggca

SEQ ID NO: 446650 - DNA, 201 bp, Homo sapiens
aaaccatttattttcatatcaagtaatctcaatggactctcaataggaaaaactcagagattcatgctggatacagtttaatcaatctgacaaaagccaargagaaaaaatcttgaaagcaacaaagagaagcagctcatcatgtacaagggatcctcagtaagcttaacagttaatttctcctgaaaacacatagatgtt

SEQ ID NO: 446651 - DNA, 201 bp, Homo sapiens
tttcctcagctcactgttttcttgacaagagaaatttttgattttggttgaagatgaatttgttttccagcttttactctgaaggtgatcagcagtcagakttttgttcagcaatagggccatgaacatttggaacttacagatagaattcgatggtgtggagtgttttcctgtcttttacaggcttatttgccaccactg

SEQ ID NO: 446652 - DNA, 201 bp, Homo sapiens
gatgcagggaggaattaaacagaggccgtgatgctgcagcaaaggtggaaagtaatgtgtcctcatctgtcctgtgtacctactctctgactagtactgcratgcagatattttactgtagtcccattgagctacagaggtggtgactgttaaaattcagattcctgtgattctggggcccatgaatctggggtcactaac

SEQ ID NO: 446653 - DNA, 201 bp, Homo sapiens
aagccaaagacatcacaggaaatgaaaactacaaatcaacacctcatacaaatatacaaatactgttgcaaagattctcaacaaaatactagcaatctgawtccagcaacatataatatgattatacaccagtgaccaagtagtatctaaaaaatgcaaggatggttcaacataaaaaaatcattctatgtaatactctat

SEQ ID NO: 446654 - DNA, 201 bp, Homo sapiens
aatactttctttaattgttttggattattatcctgtaaaaagttgaaagcttggattatgccttcagcattcaggtttgtgaattatgaaactagtcttcrtcctagtctttcttagttgtcagtgaatttggaagatttaacaggtgttgtgatctgtatgaaattgatgctggagcaacacactccaccatgctccaca

SEQ ID NO: 446655 - DNA, 201 bp, Homo sapiens
ggtggcgttcttacattcttagtcagctcacaagtacttcctgggcatccacttctagtacgcaggctctggcttctggctgttaaacagtgaaccagacyatgagctggctctccgggttttttcctttgctttcttgggtcaggtgaagttttcaggtgggaggaacttcagggatgcaggtggaaggggaaatacagc

SEQ ID NO: 446656 - DNA, 201 bp, Homo sapiens
ctgaaactcgactggacttttaaagcataagatgctatgttgctgtcaaatttcaaaacagaaacctagaatttaaaaattgtaaatttgcttatatattkggtattttattaatgtggcccacaagatgttatctagcagccggttagcattttcagaaaaaaaaaaaaacacccctaccaacttcctttttcaataata

SEQ ID NO: 446657 - DNA, 201 bp, Homo sapiens
accgctcactttgcttatggcacctacaaaggactttattttttattttctcctccctcttcctccacgccctcctcctccatgttctgctataaaacttatatttatctaagcaatttaatttttatggttaaaagaataagataatactaaaagactcaaaaagaaaaatacaggccgggcatggtggttcacgcctat

SEQ ID NO: 446658 - DNA, 201 bp, Homo sapiens
aggtcccaggaaaacaggacatgagacacatgttaataaagttataacaaatcaggaagaaagaaaaaaattaaaacacgaacttaaatataaatgtaatktaatttaatttaaatacatcatccatagcaacagaaatatacatgtatcaagaactaaatctaacaaaagacttgccaaagctttatggaagtaattcaa

SEQ ID NO: 446659 - DNA, 201 bp, Homo sapiens
aaaacaaatagaacaaactgtttaaaggctgtattggaaaaaaaatcctgaaatgaaggaagacgtgaatctgccaaccaggtcccaggaaaacaggacaygagacacatgttaataaagttataacaaatcaggaagaaagaaaaaaattaaaacacgaacttaaatataaatgtaatttaatttaatttaaatacatca

SEQ ID NO: 446660 - DNA, 201 bp, Homo sapiens
gtgaatagtaagaaaaaaatgatagatgtgtaaatcaaacagagtactcacaaacacataattaatgtttgtgagacgaggaaaagaataaaacaaatagracaaactgtttaaaggctgtattggaaaaaaaatcctgaaatgaaggaagacgtgaatctgccaaccaggtcccaggaaaacaggacatgagacacatgt

SEQ ID NO: 446661 - DNA, 201 bp, Homo sapiens
ggagtaaatatataatatgaggataagagaagaagaaaggctgactgtgaggttgaaggtcagagcaactaggacagagtgaatgtttgttgagcacagtrcactgcaggtggagctgcttgttacagagcaggaggcacgagaagcaggactcacgtggcctgttgattttgaaatgcctgttatacctgtatggacaca

SEQ ID NO: 446662 - DNA, 201 bp, Homo sapiens
aagcaacgattacaattattattatattgcaataatattatattgtattattattattacaataatcaagtgcgatgtcattggtgcattagagtagtaaatgtggttggaatctgagcatgtttaatgcatttttatggagtaaatatataatatgaggataagagaagaagaaaggctgactgtgaggttgaaggtcag

SEQ ID NO: 446663 - DNA, 201 bp, Homo sapiens
acaatttgtaatatacaagttaagaatgaacaagccaagaaaaatttaatattttttttcttctgaagcactagacttcaaactgctgacataatttttgyctgttttgatgaaatacacaagaacttatcagaatattatttaacagcctagcactcctcagtgagtccaataaacctataatgcccagcaatagaaaca

SEQ ID NO: 446664 - DNA, 201 bp, Homo sapiens
gcctaatttttttttaatgtttaatatttgttaaagatgaggtctcaccatgttgcccaggctgtccagcctcagcctcccaaagtgttaagagtcacagrtgtgacaaaagcacccagccctgttgtcaacgttctgtcttattcgtggcaggaaactcccttaagaggggttttatggcaatcctcatttctcagaatt

SEQ ID NO: 446665 - DNA, 201 bp, Homo sapiens
ggcctacaagagctcaggaagcaaagaaaacggacgaagtgtcatcacggaacttgtattctatggggtagagggaatagatgataaacaagtaaatatgyatctcatatatttcaagaggataagtgctacagagagaaacagagcagggaaaggggtaacagattcccactgttcatagatccattgtgtctccaatgg

SEQ ID NO: 446666 - DNA, 201 bp, Homo sapiens
tctaggaagtatgctatttgtgtggtggtgaatgtcacacttcctggagcaacaggttttcagcacacgctcacatttagcatgcaaaccaggcattcagygacaggactgtgttgtcattaagactgtttggatgctgcatctaaaaattcactttccatttaaatgtttctctttcatgcactatttaatttctgacac

SEQ ID NO: 446667 - DNA, 201 bp, Homo sapiens
aagtcaggaatagataatgagtgttctagatagaatccaaaatagcagggtgtagagtaatataaaaatggtgacaataataatacaactcttagaaaaakgaatcaagtttttctccattaatattatgaatgatgtgtgtttgggcttaggatctagaaatgtctctgttgcaggagagaaaagccatgaagaggaggt

SEQ ID NO: 446668 - DNA, 201 bp, Homo sapiens
cattttttatggctgcatagtattccatggtgtatatgtgccacattttcttaatccagtctatcattgttggacatttggacatttgggctataaagacrcttgcacacgtatgtttattgcggcactattcacaatagcaaagacttggaaccaacccaaatgaccaattcatttcaattaaggaatttttgagtgtct

SEQ ID NO: 446669 - DNA, 201 bp, Homo sapiens
acattgcttataaaattgtatggacattaaaattcaaagtaacattacatgaggtatgcagcatcagggattcctgtaaggcagccgtgctggggtggagkgatgtgggtgaccgtctgggattcctgttgcgtgttgcacccttttacaacatgctacccgtcccctgttcaggcatcaccacggtgctgaccatgacca

SEQ ID NO: 446670 - DNA, 201 bp, Homo sapiens
cacttccccacactgtgttctcgctcttgtgtttgcactgcattttctacatatctccctcccagcaagtttcatattttaaatgaattttcacacatctrtgtgactacaagactctaaagcccttgaaagcaaaccacagcatttatatttcatcttttgtgtctcaggccctgcgtagtcctgacattaataggtgac

SEQ ID NO: 446671 - DNA, 201 bp, Homo sapiens
atgagggccccttgcctcgacagcccctgaactccctggcttctctttctcttgataactgttgggtgctctgactttgctgccctcaaaaacatgttacrtttgccttggcaagccctcctcatgtacttttcagtgcatttcctaagggccaggattggagagaagcaagggctctcccagatgcaccccattcttgcc

SEQ ID NO: 446672 - DNA, 201 bp, Homo sapiens
ctcactctatccgtgaatatgttcgttttgtgccctttacactgaccgattaaatgcctggtacagccatggatactatgaaaattaagtttaagaaaacmagcattttgatccatttcctgatttgatattgttgtagttgtgcatttttatccaagtcattcacttaacaaaataaattgtaaattattttcctgaatt

SEQ ID NO: 446673 - DNA, 201 bp, Homo sapiens
agaggaacagaaaacagctccatgggttcaaaagacacacagggacagggataagttaggaaaggtgaccacggctacaagaagcaaatggtgtcacagartaagtgcaaagtaatgtattaaactggatgtgattttcaaaagagaagcaacagtgcatggtttcaaatcagcttaataagttacttcctgccagctgca

SEQ ID NO: 446674 - DNA, 201 bp, Homo sapiens
ttcctagcatggcctctaattccaggttttcccagaaagttcctatcctaatttcaagcatcagctcaaagttgtatcctctaaccatcacttccccacaytgtgttctcgctcttgtgtttgcactgcattttctacatatctccctcccagcaagtttcatattttaaatgaattttcacacatctatgtgactacaag

SEQ ID NO: 446675 - DNA, 201 bp, Homo sapiens
catcacaggaaatgaaaactacaaatcaacacctcatacaaatatacaaatactgttgcaaagattctcaacaaaatactagcaatctgaatccagcaacwtataatatgattatacaccagtgaccaagtagtatctaaaaaatgcaaggatggttcaacataaaaaaatcattctatgtaatactctatattcatagaa

SEQ ID NO: 446676 - DNA, 201 bp, Homo sapiens
agcaatatctctgcacagcacgtggaaactgtgggggacaccaggggggcacagatgtggtaaggagaagagcctgtgtttgcacagctcctttgctagcrctcaaggtgctgaggtattcactcaggaagtatccaagggtttgggaagggcaatcatgaggggccccttacatcccaggccttacatttctgcagacct

SEQ ID NO: 446677 - DNA, 201 bp, Homo sapiens
catatgtagacaatcatattaactgattaactttttacattatatttatacctcaatttggccaagaattacttgttctaaaaactatccgttactttacrgttaaacaggattacgggcatgaagttaaaaactgattgtaataaaaattagcactttttgtttcaaaatatgtaatactttaaatatttttttcttgca

SEQ ID NO: 446678 - DNA, 201 bp, Homo sapiens
ggatcgaccttgcgattcttcagttgacactcatttgacgcactctgaatcattcagccatttcaaattgatttcataacctgtgcaaatgaagagaattcaagagaacatgaagcctagaatggctgtgagggtgagagcctccttcagacatatttatcacttctctggaagaggagatacagaatgggttatttaaat

SEQ ID NO: 446679 - DNA, 201 bp, Homo sapiens
catacaaatatacaaatactgttgcaaagattctcaacaaaatactagcaatctgaatccagcaacatataatatgattatacaccagtgaccaagtagtwtctaaaaaatgcaaggatggttcaacataaaaaaatcattctatgtaatactctatattcatagaataggcacaaaaataacagaatcatctctatgggc

SEQ ID NO: 446680 - DNA, 201 bp, Homo sapiens
atacaaatatacaaatactgttgcaaagattctcaacaaaatactagcaatctgaatccagcaacatataatatgattatacaccagtgaccaagtagtayctaaaaaatgcaaggatggttcaacataaaaaaatcattctatgtaatactctatattcatagaataggcacaaaaataacagaatcatctctatgggca

SEQ ID NO: 446681 - DNA, 201 bp, Homo sapiens
gaagttaaaagtagcaatttgcacatcagggaacagaaaatctaagagctgatttctgtaaaatagacaagtttgtggtaagtttaattcattaaaagagmaaaaatgtaaacacaaataccatcatacaagtatattcagcagcatttcattgccaattttcattttgctatcacctttttacttcctttccccatctcc

SEQ ID NO: 446682 - DNA, 201 bp, Homo sapiens
tgggccacactggaagaccacaattgtcttaggccatagataaaatacactaacagtaacgatagctgatgagctaaaaaaaaaaaaaaaaaaaaaaaatkctgaaaaaaatatcataacgttttaagaaagtttatgaatttgtgttgggctgcattcaaagccatcctgggctgcacgtggcctatgggccaccagttg

SEQ ID NO: 446683 - DNA, 201 bp, Homo sapiens
cctgagtagctgggaccacaggcacccgccaccactcccggctaattttttgtatttttagtagagacggggtttcaccgagttagaccaggatggtctckatctcctgaccttgtgatccgcccgcctcggcctcccaaagtgctgggattacaggcgtgagccacggcgcctggcctgagttagtttttgtataagatc

SEQ ID NO: 446684 - DNA, 201 bp, Homo sapiens
aattagctgggtgtggtggtgggcgccagtagtcccagttacttgggaggctgaggcaggagaatggcatgaacccgggaggtggagcttgcagtgagccsagttcaagccactgcactccagcctgagtgacagagcgacactctgtctcaaaaaaaaaaaaaaaaaaaagaaagaaatagaagtattctgtcttgttag

SEQ ID NO: 446685 - DNA, 201 bp, Homo sapiens
gtatcacaggcatgagccaccacacccagccaacttcttaagcccttctctccattcccttgtccagcattcccattgtccctttaactgtttctcagctrtgcctgtgtgcttccctccgtggtcctgtcttaaggctagagagctccacagtccactccatgtccacaccgggaggtagttccacagaggcagctgcca

SEQ ID NO: 446686 - DNA, 201 bp, Homo sapiens
aaccgctcactttgcttatggcacctacaaaggactttattttttattttctcctccctcttcctccacgccctcctcctccatgttctgctataaaacttatatttatctaagcaatttaatttttatggttaaaagaataagataatactaaaagactcaaaaagaaaaatacaggccgggcatggtggttcacgccta

SEQ ID NO: 446687 - DNA, 201 bp, Homo sapiens
tatatttatctaagcaatttaatttttatggttaaaagaataagataatactaaaagactcaaaaagaaaaatacaggccgggcatggtggttcacgcctrtaatcccagcactttggaagtacgaggcaggtgaatcacttgagctcaggagttcaagaccaatctgaccaacatggcaaaaccccatctctactaaaat

SEQ ID NO: 446688 - DNA, 201 bp, Homo sapiens
tccccaaattgtgtgtgtgtgcatgtctaacatatatatatatatatatacatatacagatgtatacacatgtatatatatgtatatgtatatatatatakagagagagagagatgctataccaacaattaggaacataatagaaagaaaaatatattccttttcttgctacctgacaccatagcttttgtctgtttctgt

SEQ ID NO: 446689 - DNA, 201 bp, Homo sapiens
ccatcattactctatgtgattctcagattgtcctatctttggctaacggaagcccctgcaagttggctttcatgacttttgacctctccttagtggtcctygggcatcacatgctgtcccagcatttctgtacatttctttaccaagccctagaataggttgatcctctaaaagggactctgcccctctcagaggggaatg

SEQ ID NO: 446690 - DNA, 201 bp, Homo sapiens
ctatactgctactaaccatggaaaaggaaacactacatcactatacctacccctgtagcttataaagatctttttaaatccacactgatatactgctcaaygcaaaatcccaggaggtatgatgatgagaagattaaaagatcattgaacaaacattcacagaaggcctacaagagctcaggaagcaaagaaaacggacga

SEQ ID NO: 446691 - DNA, 201 bp, Homo sapiens
agcatccctgagccgtgtcccctctgatagcgaaagggaggtgttggtgatgctgaagaagggacaggcccattccatgaattaggcaattaatacatgarttacaaaagagattagctatactgctactaaccatggaaaaggaaacactacatcactatacctacccctgtagcttataaagatctttttaaatccaca

SEQ ID NO: 446692 - DNA, 201 bp, Homo sapiens
caaaagcatgcttaacctctcttactacatttttgatttcttgtacttccattagattctttcttataatttccattgatctgctaatttccattatgctratttccattgattgaccaaatcacctctttggtcttgcatgttgcctatttctccattagagccattaacatattaaataattatttaaataccctcttt

SEQ ID NO: 446693 - DNA, 201 bp, Homo sapiens
ttagattggctaatttctactcacctatagtaaagctcactgggtctttctttggctatgataagtttactaatgtgcctatcaaaagcatgcttaacctytcttactacatttttgatttcttgtacttccattagattctttcttataatttccattgatctgctaatttccattatgctaatttccattgattgacca

SEQ ID NO: 446694 - DNA, 201 bp, Homo sapiens
tttgtggtgaaatacacatccaccgtaccatcttagccattttcatgggaccattcactagtgtgaagcacattcacgttgtcgtacaaccgtcaccaccrcccatctctaggaccttttcatcttcccacactgaaactttgtactcacgaaacactaactccctttccctccccctgaccttggcaacaactgttctcc

SEQ ID NO: 446695 - DNA, 201 bp, Homo sapiens
gctgtgtgtttgactggtgatctttggaggtacatttagagtctctgggcctccgtcttctcatctgtacaatggaaataacaataacacttccttgctarggttgctgtggtgcttagacatgtcagcaggtcctgtaagctcagctccctgcctgtcatgtaataggcaagctgtgtgatctgcctttctcctcttctt

SEQ ID NO: 446696 - DNA, 201 bp, Homo sapiens
ggaaacaatcacctccctactcttgagaaaagtggatttataaaaagggtggctggctgggtgcagtggttcacgcctgtaatccctgcactttgggaggstgaggcaggcagatcatgaggtcaggagtttgagaccagcctgaccaacatggtgaaaccccatctctactgaaaatacaaacattagctgggcatggtg

SEQ ID NO: 446697 - DNA, 201 bp, Homo sapiens
gactagtatgtattctcagagtgcatgcagacagcagaacatgcactcagtgatggtttatgttgaatgtttaaacactgccattttggaagtcaagtgtyagcagggtgggaggtgtggtgttcccacagctctgaaaagaacaccccatgaagattcgagcaggcccctttggggacacagcctccactgggaggagcc

SEQ ID NO: 446698 - DNA, 201 bp, Homo sapiens
ccacagactgggggctcaaacagcacacatctcctgtttcacagtgctggaggcaggaagtccaagatcaagatgtcagccaggttggtgtcttctgagayctctctccttggcctgcagacagccaccttcctgctgtgtcctcacacggtctttcctctgcacgtgcatccctggtgtccgtctgtgtgtcccgatctc

SEQ ID NO: 446699 - DNA, 201 bp, Homo sapiens
aatgataactaagtcacaataacatggatgactttgcaggctgctggagcagcaaggttttctttgcagaacaaagcttgaagctttgaagctcctctgayaaaagtgttgtgagcggggtagggagaagaggagcaggaggcagaagagggcttggtccattccaaggagattttagacctgagggaagtcacctgtcaa

SEQ ID NO: 446700 - DNA, 201 bp, Homo sapiens
tttacattttcaaaaaatcctctaacagttctatatgttcagtgccatatgctcaacataataatataactgtagttaaactaatgataactaagtcacartaacatggatgactttgcaggctgctggagcagcaaggttttctttgcagaacaaagcttgaagctttgaagctcctctgataaaagtgttgtgagcggg

SEQ ID NO: 446701 - DNA, 201 bp, Homo sapiens
acaagtgctacactggagctattgtatcaataaaccaagaacttataaagttgcctttatatttcaaagtattttccaaacatttacattttcaaaaaatsctctaacagttctatatgttcagtgccatatgctcaacataataatataactgtagttaaactaatgataactaagtcacaataacatggatgactttgc

SEQ ID NO: 446702 - DNA, 201 bp, Homo sapiens
gttgtgtgagtcacacctacctggttgtctgactagtttttgcagttcactagttgtgggatgctccttaacaactgtgatgtgcatttcaatctcttgasaaaaactctgcaaggatgctgaaaagattagcttaaacaaatcctggaaagccatgcttggcatatcacaggttctccaaacgtgataagtattattcac

SEQ ID NO: 446703 - DNA, 201 bp, Homo sapiens
cgttttaacaaaagccattctgattgttctgagatagtatcttattgtggttttgatttgcacttctttgattacaagtgatgttgggcattttttcacgkttgttgtcttcttttacaaagtgttcttagtctttgcccatttttcaatggggttatttgttttttgcttgttgatttcccattccataggttgtctgtt

SEQ ID NO: 446704 - DNA, 201 bp, Homo sapiens
ttttccaatccatgagcatgggatgtttgtccatttgtttgcatcatctttgatttctttcatcaacgttttgttgttctccttgtagagctctattactyccctagttagctatattcctggatattttattctttttgtagctattgtaaatgggattgtgttattgatttggctctcagcttcaatgttaattttttt

SEQ ID NO: 446705 - DNA, 201 bp, Homo sapiens
atgggatgtttgtccatttgtttgcatcatctttgatttctttcatcaacgttttgttgttctccttgtagagctctattacttccctagttagctatatycctggatattttattctttttgtagctattgtaaatgggattgtgttattgatttggctctcagcttcaatgttaattttttttattttattttattatt

SEQ ID NO: 446706 - DNA, 201 bp, Homo sapiens
tcttgtgccagttttcaaagggaatgcttccagtttttgcccattcagtatgatattggctgtgggtttgtcatagatagctcttattattttgagatacrtcccatcaatacctaatttattgagagtttttagcatgaagtgttgttgaattttatcaaaggccttttctgcatctattgagataattatgtggttttt

SEQ ID NO: 446707 - DNA, 201 bp, Homo sapiens
attgaaccagccttgcatcccagggatgaagcccacttgatcatggtggataagctttttgatgtgctgctggattcggtttgccagtgttttattgaggmtttttgcatcaatgttcatcaaggatactggtctaaaattctcttttttggttgtgtctctgctgggctttggtatcaggatgatgctggcttcatcaaa

SEQ ID NO: 446708 - DNA, 201 bp, Homo sapiens
ttattcttctctctttttttctttattagtcttgctagcggtctatcaattttgttgatcctttcaaaaaaccagctcccggattcattaattttttgaarggttttttgtgtctctatttccttcagttctgctctgattttagttatttcttgccttctgctagcttttgaatgtgtttgctcttgcttttctagttct

SEQ ID NO: 446709 - DNA, 201 bp, Homo sapiens
ttagtttaaagtctgttttatcagactaagattgcaacccctgcctttttttgttttccatttgcttggtagatcttcctccatccttttattttgagccyatgtgtgtctctgcatgtgagatgggtttcctgaatacaacacactgatgatgggtcttgactctttatccagtttgccagtctgtgtcttttaattgga

SEQ ID NO: 446710 - DNA, 201 bp, Homo sapiens
tatctttgtggcgttctctgtatttcctgaatctgaacgttggcctgccttgctagattggggaagttctcctggataatattctgcagagtgttttccarcttggttccattctccctgtcactttcaggtacaccaatcagacgtagatttggtcttttcacatagtcccgtatttcttggaggctttgttcgtttctt

SEQ ID NO: 446711 - DNA, 201 bp, Homo sapiens
tgttttcaaagtttttaatttctttgcctttggtttgaatttcctcctgtagctcatagtttgatcatctgaagcctccttctctcaactcgtcattctcygtccagctttgttccattgctggtgaggaactgtgatcctttggaggaggagaggtgctctgctttttagagtttccaggttttctgctctgttttttcc

SEQ ID NO: 446712 - DNA, 201 bp, Homo sapiens
aaacataaaatatattgtatatttttgctttaaacagttaacttttaaagtcaatattatcaaagcataaatacactcatttattacatttccaacactcktcatttctttgcatgtatgcaagtttctgaatatattatattccatatctctgaagaacttcctttccatttctcgttgattagatcttctgccaatgaa

SEQ ID NO: 446713 - DNA, 201 bp, Homo sapiens
gtgaattttctaaagtcaagtataattttgggattagacacttgttctagacattcatggcatagtggagggagcactggacatagaggcaggctacatcyctctaggcacctgggccaccctgaaagcctctctgtgtctcctgtctcaattgctgtgggcccacaatgaatgagttacatgaaaaagttctaaaatgtt

SEQ ID NO: 446714 - DNA, 201 bp, Homo sapiens
ttttatccaagctgacaacctgtgtgtttcatctgggatgtttagatcattaacatataaagtgattattgataaggtcagattaaaatatacgatctcaytctcatttgtaaaaacatattccagctgttgtttcctttccctcttgctactttgattacatttaattaacaatgctccaattttgttttctgtttagac

SEQ ID NO: 446715 - DNA, 201 bp, Homo sapiens
ttgagcatttttaggtttacataaaaattgagcagaaagtagagttcccctatatattttcctctacacacacacagacacacacacacacacacacacayatacaacacataacacattattattaacatcttgcattagtgtattgtatttgttacaatgaatgaatgcaccttaatccatctttatcatgcaaagcct

SEQ ID NO: 446716 - DNA, 201 bp, Homo sapiens
tttttatccaagctgacaacctgtgtgtttcatctgggatgtttagatcattaacatataaagtgattattgataaggtcagattaaaatatacgatctcrttctcatttgtaaaaacatattccagctgttgtttcctttccctcttgctactttgattacatttaattaacaatgctccaattttgttttctgtttaga

SEQ ID NO: 446717 - DNA, 201 bp, Homo sapiens
tcttactttctgtattagatattactcctgttactgttattttttaattatagattttttccctagaaatatgtgttctatatgcaaaatgaagcataggyttttataatttgtatatgtttgtaaagtttgcatatgctttattttaaaccatttgcttatggtttgggtgaataggtttcctctgtttcatttcaccct

SEQ ID NO: 446718 - DNA, 201 bp, Homo sapiens
ttgatctacagctcaaactacctggtttttaaaaaaatagtcagtttatttccacatattttgactattttctacctgtcagaatgtcactatagacggcygaggaggggtatggaagacataccctttatgtgctcagacctcagagggcacaattaattcattgctattcttactttctgtattagatattactcctgt

SEQ ID NO: 446719 - DNA, 201 bp, Homo sapiens
tagagatctttcacctccctggttagctatattcctaggtattttatttagtgtgtgtgtggcaattgtaaatgggattgcctttctgatttgactctcartttggttgtaataacataaaattctgaacttcatataaatcgaaccaaacctgtagaatgattctgagatgcactataatggtaatcacctgaacttgat

SEQ ID NO: 446720 - DNA, 201 bp, Homo sapiens
agaacagcaccagggcagatgactgagacgtgccatggcagcaatgtccattagtgtcatttgtgcatgtacttaatatacaactactgtgcatctgactyggttcaatttgtgaatcacccagtgccttaagagttccactctgaagctgtttgtcttaccatgtagaccacactggtgcagtctgaataaaattggtaa

SEQ ID NO: 446721 - DNA, 201 bp, Homo sapiens
attaaactctctgctccttaaaaccaaaaaaaaaaaaaaaaaaaagaccaactctctccagcatggggggaagggcacacccacgcatcctctttatctayaggagacagatgtaatatggacctactgcttcatacacctcagggtgtttttattgcattttacaatggttgttgtgtcatttttgttgcttgcagaact

SEQ ID NO: 446722 - DNA, 201 bp, Homo sapiens
aactgaaggaaggttggtgatggggtgtaggggatcctctgcctaatacatcattgtgttcagtgggactcttagtttagggaaaggaaagggacagatgwgcccccattccccacccttgtccccaaaagcaggaaagatggaagggaggttcccagttattggaagagcctcttatgcgttgggggcatgagagttaat

SEQ ID NO: 446723 - DNA, 201 bp, Homo sapiens
gaccgtggaaggaccagacttgtgggtgcaaagaatggacaggaagcagggccttggggtcaggaggagccgcagggaaggcagaacggtggccaagcatkggggaatcagctgcggaatccacagagcgcgacattcccttggattggagaggacagctcgtctgcaggcaactgggaggagcgaggtggacctgctgcc

SEQ ID NO: 446724 - DNA, 201 bp, Homo sapiens
atcaattaagctcgtagctcttattgaaggaattcaatacaaatcataaatttcactcacctcattctgaaaagcctgaaaagtgtcacacaatgtctacracttcagcacattttaaaagcaaagctaacacgtgctggtacttcccatggcttaggccctgttctgggggccgaggaaagcccacaggcagaattctcc

SEQ ID NO: 446725 - DNA, 201 bp, Homo sapiens
ccaatattggcaatttgctattatctttttgagggggccggttctcctagtggtttgttaatcttattgatagtttggagaatcatctctttgtttcttgkttttcttctatatcattctgagtcatcaattccattaatttctgttctttattgtttcccttattctacttgatttgggtttattttgttcttgtttttc

SEQ ID NO: 446726 - DNA, 201 bp, Homo sapiens
aagttgttacactattccctgattatccctctgatgtccttacaagatctgtagttttctgttttatttccaatattggcaatttgctattatctttttgrgggggccggttctcctagtggtttgttaatcttattgatagtttggagaatcatctctttgtttcttgtttttcttctatatcattctgagtcatcaatt

SEQ ID NO: 446727 - DNA, 201 bp, Homo sapiens
tttcagctaagttaccacatttatgtttgagaagttgttacactattccctgattatccctctgatgtccttacaagatctgtagttttctgttttatttycaatattggcaatttgctattatctttttgagggggccggttctcctagtggtttgttaatcttattgatagtttggagaatcatctctttgtttcttgt

SEQ ID NO: 446728 - DNA, 201 bp, Homo sapiens
gtgagaagcagatggccacacgtcactctggttagagaagtgaaatgtttcagcctgaatcgggtcttgaccatcaggtgtgagagtccctccaggcccgscggtaaggcctgtggttgcgctggagtcatgtgaaattggagcttggtgcagcgtttctgacccttctcttcgtccatgaatctcacccgttctcaggag

SEQ ID NO: 446729 - DNA, 201 bp, Homo sapiens
acactctagtctacgttatggctagttaacacactttaaaagactcatgtatatattacataaatatgcatgtgcatatatatgaagacctaaattaagtrgaaaaaatgaatatgaaattttattttttaaattaacatcttgttaattatagataatttaggcaattctcaaaattaagttccagaaacttatatccca

SEQ ID NO: 446730 - DNA, 201 bp, Homo sapiens
ttggctgccacttactacacacctactggaatgggcaaaatccggaacactgacaccagcaaatgctggcaaggatatggagcagcaggaactctcatgtrttgctggtggaaatgaacaatggtagcacactttggagacagtttggcagcttcttacaaaactaaacatactcttaccatgtgacccagcagtcacact

SEQ ID NO: 446731 - DNA, 201 bp, Homo sapiens
acttcccttaaggaaataaaaaattaatgtgttatttttgcttcagtattttttactccaaattttaaccttgcatgtccagttacaaatgatatatttgstctcttaaaaaaattcacagtaaagtaacagttttctttgcttcctgtttattgcaaatcactgtggaaataaatataattaattgcaaagttattttta

SEQ ID NO: 446732 - DNA, 201 bp, Homo sapiens
tgcctaaagtttatggaataagtatgtgtaatatttttaaagcaaatgatgtaaacattttatttctacctcttctctccccttgggatcagttcatgttrtctttctggttcatgaatgtcccaaagccctcatggtttctctctttctggctcttcttgccgtcacctgcctctttcttccgtgctgttattgtgctct

SEQ ID NO: 446733 - DNA, 201 bp, Homo sapiens
gggagtgtgaaagtgatctgttcaggtgaaatttttattttcggcatttatcctgcttaaggtcctctgagcttcctggatctgtggtttcgtatctgacrttaatttgggtaaattatcaagtcaatattttaatttgattatcaaaatcagtattaaaaagtaaattaattttaaataagtattaaagatgttgtcttt

SEQ ID NO: 446734 - DNA, 201 bp, Homo sapiens
tgcccttgagacatgggtctgctcacagaaccctcaagctgctcagtgcttcttaacaatgagtaatacttccagggttttatatttgtgaattttctaargtcaagtataattttgggattagacacttgttctagacattcatggcatagtggagggagcactggacatagaggcaggctacatccctctaggcacctg

SEQ ID NO: 446735 - DNA, 201 bp, Homo sapiens
tgaattttctaaagtcaagtataattttgggattagacacttgttctagacattcatggcatagtggagggagcactggacatagaggcaggctacatccstctaggcacctgggccaccctgaaagcctctctgtgtctcctgtctcaattgctgtgggcccacaatgaatgagttacatgaaaaagttctaaaatgttg

SEQ ID NO: 446736 - DNA, 201 bp, Homo sapiens
gggccaccctgaaagcctctctgtgtctcctgtctcaattgctgtgggcccacaatgaatgagttacatgaaaaagttctaaaatgttgtgcacttctacrgttctaccgtgtatcaggtaactgtacactgtcagagagactcgcgcaggaatcaaaactgtgcatacacatccatctcctctctttcgctgtgtgcata

SEQ ID NO: 446737 - DNA, 201 bp, Homo sapiens
aggacaatgctgctgcttccattcccacagaccttccagagaaaagaaacgtggaaatgcaagggttcgcagattctcagggcattcccaagggacgggarggatgcctctttcaaggggagaagctggaacattcttcatcagagtattgtggacgttattcgaaaacagcttatttaattgcagtaggatttcttggag

SEQ ID NO: 446738 - DNA, 201 bp, Homo sapiens
aggtaaattccatttggtcattactggaggatgatctattgctttgtggaactcttttggagtcatctaagctcaggaaagtttaaaataagtgacagctraagcaccgtggtgctcctgaccttgttttgtttttctttgcatttctcctgcgtaaagttcatagcagtttttgcatctgtagttcgataactttcagca

SEQ ID NO: 446739 - DNA, 201 bp, Homo sapiens
aacatacatgtatttttctccacagtaaaaccgaccgtaattgacgttgacatttatgttaacagcattggtcctgtgtcatcaataaacatggtaagaarctcctttattttctgatctaacggctgttgcacctcttcttgttacattctcattgtggatttctgtttgagatttatcatgccggtttaaaactcacac

SEQ ID NO: 446740 - DNA, 201 bp, Homo sapiens
ccattatttcttaaatattgttttggcaccgttctaggactctgctcatgtgaaggttacatgcttctcccaggtcccacttgcttttatgcttgtgctgktttttatttcttcctttgcactccatcttttggcatatgaagtcactcttcatctctgttctgtgatgttttaaagctgtctattgagttcttgatttca

SEQ ID NO: 446741 - DNA, 201 bp, Homo sapiens
ccttctagccaataggtactcaagaaatagagttatactttaagatcagcctaggaaaaacgtaagtggggaagtcattctttgagacatatgccgtataytcattgtcaacatctctcatttatgtacatgttcatacaggtgtagactatctggccaacactctagtctacgttatggctagttaacacactttaaaag

SEQ ID NO: 446742 - DNA, 201 bp, Homo sapiens
cattttcttcctggagaaccttagtcccttaaatctctagcacgttcttccacagaagatgccccaaatggctctctgctttgtgagtgctacacctgggkggaatcacccctctcctctttcacagttgagagtcagcagctagagacgtcccagccagctgcgcaggcttgaatgctggcttcatcatttactggcaat

SEQ ID NO: 446743 - DNA, 201 bp, Homo sapiens
ctcattgcaggcacactgattgcccccctttttgtgttacagaacacttgcctctaccatctcttctgtattttggatcatttctttgagataaatttcaraacctgtctgggtgtaaggtgtgctgttccttaacactgtatgtctgccttccctttagtccctttctcccactggagctggagaggggaagatgcaggt

SEQ ID NO: 446744 - DNA, 201 bp, Homo sapiens
ccaccagttggacaagcttgcccgagactttaacctcacatcctatacaaaaaccaactaaaaatgaaatataaaagatgtaccacgtccggcctctctaygtccatgtgaaccaagccacgccatcgtggactcccctgatgtgggatgtcttccaaagtggatcggtactcctgagctctgtgtttcagcaaggcccgg

SEQ ID NO: 446745 - DNA, 201 bp, Homo sapiens
ttcccagttattggaagagcctcttatgcgttgggggcatgagagttaatgttatttattcatcttctgaaaattcatgtgctgatatttaaataattacrtcatttttactcttttcatgaaaacatagaaacttaagtgcctagggtgatttttaagcataaacattatttgaaaggcagcaaatgcaatattttggca

SEQ ID NO: 446746 - DNA, 201 bp, Homo sapiens
gggagttaaatttcaacatgagttttgacaggacattcaacccacagcagtgctcaaaggagaagagtgtatacgtggagcaaaaatgtgatatgacgggkctaggacagtgtggacaggtgcatggaaggaagtgttatgataagtgaagctttgcacaggtccttggagtagcccttttgaaatcttggaaggctcctt

SEQ ID NO: 446747 - DNA, 201 bp, Homo sapiens
ctgagaacagctaccctgagtgaaccacacaaatgaggccgccagcagcaatttgtaccctgcgtcatttgggtggcctgaattccactcattcatctgtsaatgcacttaaacaaacattcctccttcctgcaaacttcactctgggattaggaggtctacatcacatcaaatggttagattcatctcctgtgacagtgc

SEQ ID NO: 446748 - DNA, 201 bp, Homo sapiens
aaaatgttctggatgtgatctactttatagttgcagagaaatgtatgcaattagagtcccgttagcagtacagcaaagaactattgcatcctaacagggcygcagcactgagaaagtaactcaaacttacatacccattatacctcctccttggttaatgattctaagccatctggatatgggttgatttagttttattga

SEQ ID NO: 446749 - DNA, 201 bp, Homo sapiens
tgcttagcagtttatctcctcaatgtatctctttcctatcacattttgctattggcatcaagaagaaaccaggttgctccttcaacaggttgcttctttcyaactgtgcttggaaatctcctcacctaaatatacaactcattgtttacaaattctgcattccacatgacagtctaacacagttctgctaagcttcctgcc

SEQ ID NO: 446750 - DNA, 201 bp, Homo sapiens
ctggagtttggggactgcagggctcatagcggaggaaataggcaggctgtactgggtgatgggacccaccgtctcccgggtctcagatacttgtgggcctrgaagagagcctgctccttaatccttgatcagggcccctccctaggaggcttgctgcccgtgccaggaggagcccaaagtcctcagaggggttgccacctg

SEQ ID NO: 446751 - DNA, 201 bp, Homo sapiens
gccccagaagagctccccactttcccgagctccacctaccacgccgacctcagaaggacctgtgacagcaggggtgtggaagtagaaggagctggaggagrggagctgcaggcctcaccttctccagcagcttgacaccaacacggtgggtgtgagtggagggtggggagttgtagcattcattagagaccacagtggcgg

SEQ ID NO: 446752 - DNA, 201 bp, Homo sapiens
ggtccattccaaggagattttagacctgagggaagtcacctgtcaatttctgaatgtcattggattatctgctataattcatgaatgtgggtttgaaaacycaacgttagtgactcccagaaaatgtcttttggagatgaaaggcaggggctggtcaaggctgacatcctagaaaatccctcatatcctggctgtggaatt

SEQ ID NO: 446753 - DNA, 201 bp, Homo sapiens
tttcttctcttcttccttccttcttgcctattaaactctctgctccttaaaaccaaaaaaaaaaaaaaaaaaaagaccaactctctccagcatggggggawgggcacacccacgcatcctctttatctataggagacagatgtaatatggacctactgcttcatacacctcagggtgtttttattgcattttacaatggtt

SEQ ID NO: 446754 - DNA, 201 bp, Homo sapiens
tttacttgttgtgtctctccaggctcttttgatctagattggcaccctcctattcaatttgatgtatttgtcatggcatttactttcctgaagattccagkgcagttatctgttagacgggtaaaatgtcctgcattctgcaatatctgatagctctatgatgatgagatttacgtcgaaccttttgtggctgtaatatca

SEQ ID NO: 446755 - DNA, 201 bp, Homo sapiens
tttggtcattactggaggatgatctattgctttgtggaactcttttggagtcatctaagctcaggaaagtttaaaataagtgacagctgaagcaccgtggygctcctgaccttgttttgtttttctttgcatttctcctgcgtaaagttcatagcagtttttgcatctgtagttcgataactttcagcagtgtttgaaaaa

SEQ ID NO: 446756 - DNA, 201 bp, Homo sapiens
tgctatggtatgagaagtatgcaagtagcatatatcattactctatcaaacaacaagtaaatgatttctgaagttcggttggatgtctatgggcaaaaaaataagcttgaacttatacgatagttaattccaaatgaattgaggccctaaagtcaacataaaaacacaatatattagaaaaaatacataggaaaaaatatt

SEQ ID NO: 446757 - DNA, 201 bp, Homo sapiens
attaaactttcaacagtaaaataattagtaccccactgttgactctttattgtgcaatgttaaatcctgggacactggtcacactaatgcatggcactgcygctgttagcgtgtcttgaaccttatctttaaaatgctatggtatgagaagtatgcaagtagcatatatcattactctatcaaacaacaagtaaatgattt

SEQ ID NO: 446758 - DNA, 201 bp, Homo sapiens
tgagatttggaggggatgaaacatctaaaccatatcacctggcaattttcattgtgtacaaagatttgtagaggcattgagtggtttttcccttgcctctstgtaggtctgagctggcatggggctgacctgcagtcttgcagaggctccactggactctggttcccctgcctttctgcatcgttccccagaggtcccaac

SEQ ID NO: 446759 - DNA, 201 bp, Homo sapiens
tttaatctgtgtcttaatatattttatggaaaaaattaaataaaaaggcaaaatacaaattttggtcatttagttcctcattccttaagttgttttgaaartaatttgttttcttcttggttttcttttgattaaatgtcagcattatgaaataaatgtttctttttgtccagctgattggttaatatatattagtatgag

SEQ ID NO: 446760 - DNA, 201 bp, Homo sapiens
aactttgatttttatgttttaaatagttgagatttttgaaataatattttaattaattaaaaatttcctatagcactttctgtagtcattgtggttaaggrtcacattttaaaaattcctaaaatgtagtttaaaaggtaatgttattagtttatttaaacttgttaaaattattaaaactaaattttaaattacttatat

SEQ ID NO: 446761 - DNA, 201 bp, Homo sapiens
tttccacatgccaccaacttgctgcttgcctgggaggctgcatttcacccttgccctcaccccgtccccagcatgcagggtcccagccaggctctggccarcagatgcagggaagagcctgcagcatccctctgtgtgcagctgcttagcaaggtcgagagctgtcccgatcgggtcctggtccatgctccgtaactagtc

SEQ ID NO: 446762 - DNA, 201 bp, Homo sapiens
agattcacagtaaatccattgtgatagtatcctgtatcacaggctgatatgatcacaaaaacacaggcacatcccagaacctgtcaactcaaaagtccccrtacgttaatgtcaggaaacagaatttgccacacacctctgaggactgaagacatagtattggtaaaaaatagttgatcaataattgaagctctgcttgta

SEQ ID NO: 446763 - DNA, 201 bp, Homo sapiens
cctctagattttgagtcattgctagaaaagtttttccaaagccaaagctataaaggaatttattcatatttctcaaatcctagtatatggctgtttttttttttgtttgtttaatatttagatccctgatccatttggaattgtaactgcccagtgggttcatcttgcctgcatcccagatagaggtgatttatcaagaca

SEQ ID NO: 446764 - DNA, 201 bp, Homo sapiens
gacacgttccctgccccgtatctaaagtggcttggccaggattgatccactgtaccagccctgccctctctaggacgggctgcctccttggagtctgcagcctcacatcagcctagacgcctggtccagccttccttactctgacctgatggttgcagtcgccgtgttttctggccagtggtataacgagtacccactgct

SEQ ID NO: 446765 - DNA, 201 bp, Homo sapiens
aaaatataattagcatagtgaaacttgatcaaagtgaaaatttcaacactggtcattagatggtctttgcaatttcatggttgcgcatgtgcacacacacmcacacttccttgtaagtaaaattaaatacctcagactgatatacatttccttttggttcaattttcagaagtttttccctctcatttcttgctagcaagt

SEQ ID NO: 446766 - DNA, 201 bp, Homo sapiens
actctgacctgatggttgcagtcgccgtgttttctggccagtggtataacgagtacccactgctttttctgcctgtgtttcacaaggggctctaaaggacrgaatgtatttgtcaaagcacctgtgcagtgactcccactcagggaaaccatcagctttcaattggagtgttctcctgactccacatctttaaacaaagct

SEQ ID NO: 446767 - DNA, 201 bp, Homo sapiens
gagtccaccagtgggtcgagaatgcagaggttcagcattccctcccctcccacggacaaaggaaggaggatgtcttcccaaggaacggccaatctggaaasagtgacagggctgccctggagtttggggactgcagggctcatagcggaggaaataggcaggctgtactgggtgatgggacccaccgtctcccgggtctca

SEQ ID NO: 446768 - DNA, 201 bp, Homo sapiens
ccctgtattggtcagctgtgtggcacatgctggacactggcgcacacacagtgcacacacatccaggccgcatcttcaccgaaagcacccgcagatcgtgrtaagtgcggccaccaaaaggcggcttgtaggagaagtgtctctcctattcttcaaagctgctaactgacacataatatgacatcgctccatcctcataaa

SEQ ID NO: 446769 - DNA, 201 bp, Homo sapiens
ttccctgaaattgcatccctgttcacaagctcgtcaagtctggagaggtatccacagctgcctcgcaatttgaggagatgcaagctccatctcattatccrgctgagaggcaatcaatgcctggtggcgccttcgaatcagagattgggtggcaataacgtgtccctcttagggaaggctctgtgaactgagcagggctca

SEQ ID NO: 446770 - DNA, 201 bp, Homo sapiens
tgtagttttacattcctaaataagaatgatatgatggactctggggaccgggggaaagggtgggagggggatgagtgtacactgctcaggtgatgaatgcrccaccatctcagaaatgcccactaaacaacttgtccatgtaaccaaacaccacctgttccccaaaacctactgacatttaaaaaaataaataaattcctg

SEQ ID NO: 446771 - DNA, 201 bp, Homo sapiens
atgtcgtaatggtggtcctttgaatggaattggactgccttattactgttgtcattactcgaaggccatgtctctgaagccacagctgcattcctgaagaytgagtttacctaaatgctaacctttggataaatttaagtattataatagtattataaccggaagtacctcaaatacatcacagttgttaatatttttgtc

SEQ ID NO: 446772 - DNA, 201 bp, Homo sapiens
acaaacatatctactctcccacttgtacacacgagattgtttttgctaagatgaactcactcactccctcctcaccactcagggtcccgcagttcaagatrtgcggcaggcgcctttcccactcagagcactgctgctgctgcttccttattaatggcatcatcctctcccataggatgcagaattcctgccttcattcaa

SEQ ID NO: 446773 - DNA, 201 bp, Homo sapiens
attttataccttggcataaaggtgtacagttcagtggtgtttagtatattcacagaattgcttaactattatcacttcctaatttgataacattgtcatcrccccaaaatgaaaccctgtacccattaagcagttactccctatccccttcctcccagtcccaggcaaccactgatctattttctgctcctccaaacttgc

SEQ ID NO: 446774 - DNA, 201 bp, Homo sapiens
attcttccattggtacctcttgggttatttccactttttggctattatgactattgctgctgtaaactttcatgtacaagttttggtgtgattgtgtacaygtaggactggaatttctgggtcctacggtaactctgcatttaatattttagagaactgtgaaatggctttccaaagtggcttcaccattttgcactccca

SEQ ID NO: 446775 - DNA, 201 bp, Homo sapiens
caaaggaaggacatgtataggggataacgtctggtgaacaccacttggccacgtgatcggtgaacatggtcagtgattatagatggtgatcctatgtgccmtgcatatgatgcgatgaaaatccaccttacgagtctggcaagaaggtggctatggaaagttatcctcttgggttggcgcatcagtgaaagtcaataatta

SEQ ID NO: 446776 - DNA, 201 bp, Homo sapiens
atatgtctgtagcttatctttttatcctaataccagggtttttgacagagcaaaattttaatgttgatgaaatccaacttaatatttttttctttaatggrtcttgcttctgatatcatacctaaaaattcattgtctagactgctgtctgaaagatttattcccatgtttttccaaaatagttatagttttatatttaaa

SEQ ID NO: 446777 - DNA, 201 bp, Homo sapiens
ttatttgcatctcttggtgactaatgatgctaaacatcttttcatgcacttattacccatttgtatatcttcctttaaaaaattctatttaaattctttgyccatttttaaatggactatttgtctttgtattgttgacgtgtgaaagttcttcatatattctgggtgaaaatatcttatcagatacatgatttggaaata

SEQ ID NO: 446778 - DNA, 201 bp, Homo sapiens
gtcaaaaacaaggcacgattaagaaactgtcacagattggaggaaactaaggagagaacacagataatcgtagtgggatccaaggctgaattctggaacgkcaagagggtactagcaaaacttggtaagtctggagctattaaagagtagtacaccaatgtagtttgttagttttgtcaatgtaccagggtaatggaagat

SEQ ID NO: 446779 - DNA, 201 bp, Homo sapiens
ctgatgccccacaatgcagcatccgttccaaggacacactttgcttgttttttaaaagatgagtcagtggccaacatttaaaagtcaggagattttatacmgaattccctatttctgcctctttttgaaaggccagatgatttcgtgaccataggcagattctttccagagaggagggacactgctttgcctagggcagtg

SEQ ID NO: 446780 - DNA, 201 bp, Homo sapiens
ttaacaggatacctgaccagtactcctcaaaaccgtccaggtcgtcaaaaacaaggcacgattaagaaactgtcacagattggaggaaactaaggagagawcacagataatcgtagtgggatccaaggctgaattctggaacgtcaagagggtactagcaaaacttggtaagtctggagctattaaagagtagtacaccaa

SEQ ID NO: 446781 - DNA, 201 bp, Homo sapiens
agagtaggctctggcctctctgtgaggtgtgctcgtgcggggagaaacctcttccaatatccaacattcaaacagcatttgtggaccatatttactgaaattttttttctctcttttgcaatgtcgaatgaaccaaaaaccactgaaaagagacaaatttagatggtatatgcaccattcacaatgcttattataaaactc

SEQ ID NO: 446782 - DNA, 201 bp, Homo sapiens
attcagtaagaatatccttcagggataaaggcactctcagatgaaggtaaactaggaatctgaccatccttaaaaattacacaaggaagctgttaaaacasaaagaatgataccagaaggaaacttggagcatcagaaatgaaggaaaagtgagagaaatggtagatgtattagaaaataggatattcttttatactgaaa

SEQ ID NO: 446783 - DNA, 201 bp, Homo sapiens
attttagagaactgtgaaatggctttccaaagtggcttcaccattttgcactcccaccagcacggtatgagggttctaattttccctaacccctcaaatastgtacttccttgttaaaatcctagccatcctagcgggtatgaagtgatatcttgtactatttatttgcatctcttggtgactaatgatgctaaacatctt

SEQ ID NO: 446784 - DNA, 201 bp, Homo sapiens
ggaaatttgaaactatggaaaaggggagaaatacacctgtcattgagaattagaactagtaaagtgcaattttttacaggggaaagtgctatgtaattgtkcagtagtgtgttgactaagactgaatgtgttagaaggtagttagaaatgattacctttctgacagatttgaccagccactgaaattataaacgtctggtc

SEQ ID NO: 446785 - DNA, 201 bp, Homo sapiens
agatttgaccagccactgaaattataaacgtctggtccaaaaatcattgatagttttacttaatctatgaagtattaaatttaataagctggctgatcagyttttagttttcttttttcaaatgcctaactttgtatattttattgttatttaagaaaaaagaagtggctttcatatttttatcataggttgataagtcag

SEQ ID NO: 446786 - DNA, 201 bp, Homo sapiens
cctctcccagataattttctttcctttttgcctgatatgaggcagatggagtagggcttcatgccagagtaccttgttactggtggtatgtttaccgacarttagacttccagcattgggcagtgctggcgaggtcacctaacccagcattccacctccgcccaggcgctgatccccaccaagcacacaatgacctccatg

SEQ ID NO: 446787 - DNA, 201 bp, Homo sapiens
ttgtaactgatgattcccctgagtcaattccaagccctgggacattggtgtgacatatgcatggggaaaatagcattgttcatagaatcagtaaaattatkattatacttggacacattaacaactacagacaagaaaatgatcccaatttccaaagcagaacttatttcttattgcacagaaacaaaaataaatttggaa

SEQ ID NO: 446788 - DNA, 201 bp, Homo sapiens
agaatagcaaatcacctctgtggtagcccctaaaacactcatgcacatgtttagccacaagaaaacatcaggcaaaaccagattgaggatatttaacaggrtacctgaccagtactcctcaaaaccgtccaggtcgtcaaaaacaaggcacgattaagaaactgtcacagattggaggaaactaaggagagaacacagata

SEQ ID NO: 446789 - DNA, 201 bp, Homo sapiens
gatgtgaaactactgcctggattttctattctcttgtgaccacactgtattactcctcactgtattattatgtctcagtatcacagggcttgtgttcaagyataatttttatttgacttaatgatcccaaagttcaagagtagtgatgctggcaatttggatatgccaaagagaagccatgaagtgcttcctttaagagaa

SEQ ID NO: 446790 - DNA, 201 bp, Homo sapiens
tcggcttctgtttcgggttggtttatgagtaccggaatagagcccttagacaactttactgtcgtaaatgctttgccttacattgaactttcagttcagckgtctgcatttcatcactctgtaattaacatccatatccaagacatcttacagatcctcttatgaagtattactgtgcctatactgatcagattatcgttc

SEQ ID NO: 446791 - DNA, 201 bp, Homo sapiens
gcccacgtgccatttctgcagttgtcttttttacagttggcttgtttgaagcagtaccagtcaagatctacacatcacatcctgctaatacttctctcaaktctctcttcttttttattttattttatttttttggagatggagtcttgctctgtcgcacaggctagagtgcagtggcacaatctcggctctctgcaacct

SEQ ID NO: 446792 - DNA, 201 bp, Homo sapiens
gcctcagcctcccaagtagctgggattataggcgcccaccaccacaccggactaatttttgtatttttagtagagatgtggttttaccatgttgatcaggstggtctcgaactcctgacctcaggtgatctgcctgcctcggcctcccaaagtgctgggatcacagacgtgagccaccgcgcctggcctcaagtctctttt

SEQ ID NO: 446793 - DNA, 201 bp, Homo sapiens
tcctggacatgaggccaccaccaactgcgatgatcactttaaacaattccgtttactggcaggaatttgaagatacctgtgtctatgagtgtctggatggsaaagactgtcagagcttcttctgctgctatgaagaatgtaaatcaggatcctggaggaaagggcgtattcacatagacatcttggagctggactcgtact

SEQ ID NO: 446794 - DNA, 201 bp, Homo sapiens
tatacggggctgggtgggttctgaacgctggccatctggctgattagggtttttaataagtctatcgtaacaaaacaatgctccattgaggtaactgctcttttttttttttttgttaaaattaaatgtcatattttgccctttcactagaaaacaaactgttcagctgcataaagccctccagattatgatttaaactgt

SEQ ID NO: 446795 - DNA, 201 bp, Homo sapiens
ttgaacaataaccctgggatttttccatggaacttgggggactttttttttcaggagaatttttctgtgctctgcgccaaataaagtcatccttgtgtggyagtgctgtggagctgtcagtattcatgggaggccctgctttccagggcagaatttacatgttatggagcttgaattggatgtgagcaacccctggctaaa

SEQ ID NO: 446796 - DNA, 201 bp, Homo sapiens
cagtgctgtggagctgtcagtattcatgggaggccctgctttccagggcagaatttacatgttatggagcttgaattggatgtgagcaacccctggctaaratgctacagactccgctgtttataaccagattcaatggattttcttgaacaaatccttttcaatttgttgtgtgtcctttggccaatatctagacatttt

SEQ ID NO: 446797 - DNA, 201 bp, Homo sapiens
ctgtttataaccagattcaatggattttcttgaacaaatccttttcaatttgttgtgtgtcctttggccaatatctagacatttttaattataactgagaraggaatggccaagttcttcacacagatactctgccaccatagatcactttgttcttggatttcagaaaaatggaatcacacaggatgcacttgtctatgt

SEQ ID NO: 446798 - DNA, 201 bp, Homo sapiens
aaacttaagatgattcttatgaatataaaataaatactgtcaagtgtttttatcaactcattaataaataaggaactcagtaaaatgacaataccagttaraggagcatttaaggaactaggcatttgtagaaaattgaataaagatatgttaagggaaaagattgctgtattagatacaaacctagtaaatccctacagg

SEQ ID NO: 446799 - DNA, 201 bp, Homo sapiens
tttgcatccaagtctgtatatgtgaggaggacaaaaggattagaaaggggtgatctagttccctaaatctcagttctgtgcaaacaattataatgaattcrtcatctcacatatattaatattttatataaacatattttagaaaacacaaaataacactaaatattcaaaagtatcatactatttaaaattagaacatag

SEQ ID NO: 446800 - DNA, 201 bp, Homo sapiens
ccattggttgccactcagtgtggccttatttgaacctggtttaaccagttggccgcctgtgactggctgaagcttggcggctgtgattggctgagactcarttatttgttacagaagcatactcataagttagcctttcaatttatttacatactgagttagattggagcttattacacacagctggtatggaggcctcta

SEQ ID NO: 446801 - DNA, 201 bp, Homo sapiens
ttcattagctgctcgtttaaagaaatcacatggtcttttccccatcagttacatttcgataaaacaagcctgcaatgaattttagttttctggaaaataaytaggaatgacacatgaagtgagcactctggcacattcctctcttgctgtatttaacatagaaaatatctgggtttcccatgcatgcagatgcaatgagtg

SEQ ID NO: 446802 - DNA, 201 bp, Homo sapiens
gagcacaggggtgcagtcacttcctcaggggcacacagagtggaacccaggctcactctgaacctggtgcatcatccttcaattactgaaaaggacaagtrgacatgcttgggaagaaacaaatctatctgcatgggagtctgggaggctttatggtagagacactgagtaaatggagtttgctgggtgtgggaaggtact

SEQ ID NO: 446803 - DNA, 201 bp, Homo sapiens
tcagtactcggacactagagaaagatgcggctttgcaagctcagagattcccaggaagtgctgagctgcctttgggcagggtggctgcatgagcatgcatstcctgcacatgcagggttgggtttaatgctctggtgtctctctcttgatgtgcgtaaccgtttttgattagggagccctgcatttttattttgtgctggg

SEQ ID NO: 446804 - DNA, 201 bp, Homo sapiens
cattttttaattgatttatagggcttgttgttattcctcaaatgtacagattttgatttttctaggcataaatggaagaaggttcccctttatgggaattygttttcagtagcatcagataagaggaagaagaacgaaaacttgcaacatgaagtggtctcctttccatctgtagttcgtggaaacaaacacatgaagctt

SEQ ID NO: 446805 - DNA, 201 bp, Homo sapiens
gaagagtgtgggatgcgatattgagacaatgacagcttttaggggacagcacttgcttccttccccatgagtcttgcacacccatgttgaagcattctcamacattggctatcagggatctcaacccataggggccaagtaacaaggtgagtcctcccaggactgaagccacaatcactagcatcagaacactctaaaagt

SEQ ID NO: 446806 - DNA, 201 bp, Homo sapiens
ttggaatcacctacaagcaggagaagagtgtgggatgcgatattgagacaatgacagcttttaggggacagcacttgcttccttccccatgagtcttgcayacccatgttgaagcattctcaaacattggctatcagggatctcaacccataggggccaagtaacaaggtgagtcctcccaggactgaagccacaatcact

SEQ ID NO: 446807 - DNA, 201 bp, Homo sapiens
tttgaacacttagggatgagaaacaaagagttttcatttcaggtacacctctggtttgtcatattggaatcacctacaagcaggagaagagtgtgggatgygatattgagacaatgacagcttttaggggacagcacttgcttccttccccatgagtcttgcacacccatgttgaagcattctcaaacattggctatcagg

SEQ ID NO: 446808 - DNA, 201 bp, Homo sapiens
ccgtgaatggttcccgggccaagagtgagccgcacatgctgccctgggtgacggaacggccctctccatccccacatggggtgccgtaacggccgccggcyttgccctgtgctgtgtgctgagctagactgacacttggctttttcgcaggctcaccatcaatgctgagtgccagctgcagctgcacaacttccccatgga

SEQ ID NO: 446809 - DNA, 201 bp, Homo sapiens
gttcattttttaattgatttatagggcttgttgttattcctcaaatgtacagattttgatttttctaggcataaatggaagaaggttcccctttatgggartttgttttcagtagcatcagataagaggaagaagaacgaaaacttgcaacatgaagtggtctcctttccatctgtagttcgtggaaacaaacacatgaag

SEQ ID NO: 446810 - DNA, 201 bp, Homo sapiens
gagatgaagccaagaatcaaattcatgtctcatgctgaagtttaagctgctttcactatactgtgaaagacagtagcatcaaaagccaaaaaataaataarttaaatagttcattttttaattgatttatagggcttgttgttattcctcaaatgtacagattttgatttttctaggcataaatggaagaaggttcccctt

SEQ ID NO: 446811 - DNA, 201 bp, Homo sapiens
aggttgtgtgcaaaacattcctgtgaggacagaattattactcattaaaaaataaagaaccagagtacaaagtcctatcttctgttggagatgaagccaakaatcaaattcatgtctcatgctgaagtttaagctgctttcactatactgtgaaagacagtagcatcaaaagccaaaaaataaataaattaaatagttcat

SEQ ID NO: 446812 - DNA, 201 bp, Homo sapiens
atatgcatgtgcatatatatgaagacctaaattaagtagaaaaaatgaatatgaaattttattttttaaattaacatcttgttaattatagataatttagrcaattctcaaaattaagttccagaaacttatatcccagagcacaagtgtcctgacatgacactaacattctggctcccatctgggaagctaaacagaaaa

SEQ ID NO: 446813 - DNA, 201 bp, Homo sapiens
tgactgcacatcagtctctgcatctgcaaaaaatatgcatgatcctgcaggaccacaggacttgtgggaacaaataagaacccgcaaatgagaacgagcaraggctgttcattcagagttgctttagtaagggagatcagccaccatcccttgcatttggcagagacttaagagcaggcagggtgggaaggctctgtggta

SEQ ID NO: 446814 - DNA, 201 bp, Homo sapiens
tgttgtagaaaatatatatgtttaagctataatacatcatgagctcaccatgatactttaattcaaattcagggctacctgatcttacctaacttcatcartcttatagctgtgcattctttctcccatggttggagattccagttcactgactttattctttatttgctttaatccataacacatgcataacagtcccag

SEQ ID NO: 446815 - DNA, 201 bp, Homo sapiens
tggctttgcagcccaaagcctttgtttcttaccttgaactccctttttaaaaagaaatctcatttcattgaagtattttctttgaaactttattcttgtcytacatatgtaaatgtctttcccaccccctactctgtgaatctgagcactaaatttcagtttgaagtcttctcctctggagccgaacaatactcaaagttt

SEQ ID NO: 446816 - DNA, 201 bp, Homo sapiens
agaaatgaaacattcaacaggaactgtgaagccatttacaatggaatcaacaagacaacaagacgtttgatgtaagagagaaggactgcttaggaaacaawtaatccgtgaagcgtggagccgccccatcctaaaaacaaatacactttagagtaactgaatttaaatacttctaaatcagatacagtttttaaaaatgta

SEQ ID NO: 446817 - DNA, 201 bp, Homo sapiens
ctcaccgtgaatggttcccgggccaagagtgagccgcacatgctgccctgggtgacggaacggccctctccatccccacatggggtgccgtaacggccgcmggccttgccctgtgctgtgtgctgagctagactgacacttggctttttcgcaggctcaccatcaatgctgagtgccagctgcagctgcacaacttcccca

SEQ ID NO: 446818 - DNA, 201 bp, Homo sapiens
caagatactcgctaccatgtcatcccttgggtcctgatgccctaactggtttgccttttgtctaattctcagtcttattatgattcttttacatgtaatawccagggattttagttgcatttagcaagaaaagtagagacaagtatgtctcttccatcttaccaaaatgaaatggatttatattttaaaaaattttcctca

SEQ ID NO: 446819 - DNA, 201 bp, Homo sapiens
cgttatcagctgatttgagctgggcagagagtgaccaggaaatgaacacgagggaactgaatgcagggaattcaaggctgaactgaagggcagggaagacrggggatagtgagataccccagagatgataaaggatggaagcaccctcatgcccagcctggtaggacagaggcagcaggcactgttgctagaggcccggtt

SEQ ID NO: 446820 - DNA, 201 bp, Homo sapiens
gttaggttctataaatgccaagttatcttttaaaattctgttttccaaggttgttttgcactggtttatatttaagtgaattcagtgattactgtgcttcytgatataatacttccttcctctctgagttcttaacttgggtgggatttatttttaagtaatttctcttacgaaagactcacgggtgctgtattccagaat

SEQ ID NO: 446821 - DNA, 201 bp, Homo sapiens
tttttttttgtggcttattttctttttcttcctgattcaactttgaaaggttgtacgtttccagaagttttctatttcatctgggttttctatgtattggkgtgcattttttttagtattttcttgtaatcctttttatttcattaaaattggttgtaatgtctctttcatcttttggtgctgagtttagttacatgcatt

SEQ ID NO: 446822 - DNA, 201 bp, Homo sapiens
ataaataaataaataaatcagtagtataagggtttatttctagactctcaattctgttttacttgtctatccatctatccttatgacagtagcacactatwtttattagtgaagctctttagtaagatttgaaattgggatgtttgagtcctccaatgttatttttctttttcaagattgttttggctaatctgggtcctt

SEQ ID NO: 446823 - DNA, 201 bp, Homo sapiens
aaaatgtgtagtggtttcagatagtaccagtgaagctgcaattcattcttgactatatcttcttattaatatatgcactcctttctgttgagcatatactrtggagtggcatcttctgcctctggcaagatggaatagaaaggaacagaatggcagcccccctgataccttgatttcagcccattactgaatgggcttacg

SEQ ID NO: 446824 - DNA, 201 bp, Homo sapiens
gagtagctgggactacaggcgcccgccaccacgcccggctaaatttttgtatttttagttgagatggggtttcaccgtgttagccaggatggtctcgatcycctgacctcgtgatcctcccgcctcggcctccccaagtgctgggattacaggtgtgagccactgtgcccggctcttctctgaaattttagtatataatct

SEQ ID NO: 446825 - DNA, 201 bp, Homo sapiens
tcttcaaaaccctagattttgtttagtatcagtcatgttcttcattcctcttttcccattttttctccctgtttatttccagcgtctttctttatacatgctctgcactctctagtctctcagttccagatttgaaatccaactatgagatgtcttgactaacctaaaaaaagccataaaatctatgcaaatatgcatgta

SEQ ID NO: 446826 - DNA, 201 bp, Homo sapiens
catcaatcattcattttgagataatatttgtatgcaatatgaagtatggattggaattctttttttttctgcttatggatatcccatctttcagtactttrtgctgaagattatcttctgcattggtttttacctttgtcaaaaaattggttttatggactttgttctgttccatcgatcaatctgtttgtctttatcaca

SEQ ID NO: 446827 - DNA, 201 bp, Homo sapiens
tggatatcccatctttcagtactttatgctgaagattatcttctgcattggtttttacctttgtcaaaaaattggttttatggactttgttctgttccatygatcaatctgtttgtctttatcacactgtctggattactgtagctttctaataaaccttgaaatcagattttgatcctgcacatttgttcttctctttca

SEQ ID NO: 446828 - DNA, 201 bp, Homo sapiens
ttaagttttaactggtggtcattttgctaaatgtgttgaacccagataaaaatttaaattgtgaaataactgaattacagaaaacgagagaatcagatgarcaggggtcccagaaaatgcattgagaataggtcgtttgcatccaggcaaggtacaacacagatagtcggtgagtgagggccgccatggctcagggagtct

SEQ ID NO: 446829 - DNA, 201 bp, Homo sapiens
tattttctttttcttcctgattcaactttgaaaggttgtacgtttccagaagttttctatttcatctgggttttctatgtattggtgtgcattttttttartattttcttgtaatcctttttatttcattaaaattggttgtaatgtctctttcatcttttggtgctgagtttagttacatgcattttcttcatttattag

SEQ ID NO: 446830 - DNA, 201 bp, Homo sapiens
aagggaccagttttggatcctgtccaccttctttttgtatttgttgttgtttttctattgctgtatgtgtccaactctacgtgaaagcacttgtgaaccayacaaatgagattcttttcttttctttctatcttttttttttttttttgggagaatgtgtctcactctgttgcccaggctggagtgcagtggcccaatctc

SEQ ID NO: 446831 - DNA, 201 bp, Homo sapiens
tacatttcatttttgtatcttctgggagggaccaataactataagatactaacttctgtttgcatatgtttttcaaatctggaaccagtttccaaataatkaataaattcatactgggtcagaaaagggaccagttttggatcctgtccaccttctttttgtatttgttgttgtttttctattgctgtatgtgtccaactc

SEQ ID NO: 446832 - DNA, 201 bp, Homo sapiens
gaggattgcttgagtccaggagttcaatgctgcagtgagctatgataatgccactgcactccagcctgggtgacaaagtgagactccttctccgaaaaatagagagagagagagagagagagagagagagagagagagagcgcccacattctcatgaggacatcagcagtgatatttgtttgtttccatgttctaatggct

SEQ ID NO: 446833 - DNA, 201 bp, Homo sapiens
aggattgcttgagtccaggagttcaatgctgcagtgagctatgataatgccactgcactccagcctgggtgacaaagtgagactccttctccgaaaaatagagagagagagagagagagagagagagagagagagagagcgcccacattctcatgaggacatcagcagtgatatttgtttgtttccatgttctaatggctt

SEQ ID NO: 446834 - DNA, 201 bp, Homo sapiens
gccactcgaatttaaaacaaacaaaaaagaaactcttaaattttgtggaaaagcatggaaaagtctatgttcaggtgcttcaccttctgagtccctcgtgwagggcacacactgcatctgaagactggtttccctggatactggctcctcgaccgatgacacatgctgctcaccactgctgagctgatagttaaggccaag

SEQ ID NO: 446835 - DNA, 201 bp, Homo sapiens
aaatgagaaaccaaaacacaagtcatcttactgcagattgatgttgatcatctgtccccctacagacaaacactacctcagaatcattccctacaccattyctcaggtgtttatgaactgacatcaaaaatagtgattcccacgggggtccatgtatgtattgtggtccatgatcctcccagggctggctggacagtggta

SEQ ID NO: 446836 - DNA, 201 bp, Homo sapiens
atcttgttttaatgtgtttggaatgtggccatacagatgggattgaccttcctggattctaagaaaagcttctgggcctgaggaggcacagattcctgggrctcaggaaacataaatagagggaagcagttctgcagggagcagggagagccttcccttgttggaattgggcctgagagcattatgtcacctacatttgca

SEQ ID NO: 446837 - DNA, 201 bp, Homo sapiens
agatcgtgccattgcacttcagcctgggaaacaagagcaagagtcagtatgaaaagaaagaaagaaagaaagagagagagagagagagagagagagaggagaagaaaagaaagaaagaaaaagaaagaaagaaaggaaggagagacagagagagaaaagaagaaggagaaggagaagaaaagaaagaagatgaagaaaaag

SEQ ID NO: 446838 - DNA, 201 bp, Homo sapiens
agaggtgcgtggcctcaggaagcaggcctggccacccagactcttccttgacccctttgcacctgagctcctccattcataatgtgaggagggagttaccygaaagcagcaagggtacggcaatggtgccctccgcagagacaggcaccagccctgactctgaggatgtcactgattcagctgccactgtgcagccaagcc

SEQ ID NO: 446839 - DNA, 201 bp, Homo sapiens
aagatcgtgccattgcacttcagcctgggaaacaagagcaagagtcagtatgaaaagaaagaaagaaagaaagagagagagagagagagagagagagaggagaagaaaagaaagaaagaaaaagaaagaaagaaaggaaggagagacagagagagaaaagaagaaggagaaggagaagaaaagaaagaagatgaagaaaaa

SEQ ID NO: 446840 - DNA, 201 bp, Homo sapiens
tacccgaaagcagcaagggtacggcaatggtgccctccgcagagacaggcaccagccctgactctgaggatgtcactgattcagctgccactgtgcagccragccacccccggccacaggcacattccaatggcccccaccggtgaggcttttgcctgtgcagcagagtgagccccagagagtcccatatcccccgttagc

SEQ ID NO: 446841 - DNA, 201 bp, Homo sapiens
caagatcgtgccattgcacttcagcctgggaaacaagagcaagagtcagtatgaaaagaaagaaagaaagaaagagagagagagagagagagagagagaggagaagaaaagaaagaaagaaaaagaaagaaagaaaggaaggagagacagagagagaaaagaagaaggagaaggagaagaaaagaaagaagatgaagaaaa

SEQ ID NO: 446842 - DNA, 201 bp, Homo sapiens
ggccctcaggctttttgatattttgacctttggttcttctaacttttttttcatgttctgtcccctgttccttttaagccatctcaattgtctagcatagycttttgtgttaaactgatgagcattaaggaataaatggttccacatggtctctggatgctgcccttcaatcctggctgcctagcctagaattatttgcac

SEQ ID NO: 446843 - DNA, 201 bp, Homo sapiens
ccaagatcgtgccattgcacttcagcctgggaaacaagagcaagagtcagtatgaaaagaaagaaagaaagaaagagagagagagagagagagagagagaggagaagaaaagaaagaaagaaaaagaaagaaagaaaggaaggagagacagagagagaaaagaagaaggagaaggagaagaaaagaaagaagatgaagaaa

SEQ ID NO: 446844 - DNA, 201 bp, Homo sapiens
gccaagatcgtgccattgcacttcagcctgggaaacaagagcaagagtcagtatgaaaagaaagaaagaaagaaagagagagagagagagagagagagagaggagaagaaaagaaagaaagaaaaagaaagaaagaaaggaaggagagacagagagagaaaagaagaaggagaaggagaagaaaagaaagaagatgaagaa

SEQ ID NO: 446845 - DNA, 201 bp, Homo sapiens
gtgagccaagatcgtgccattgcacttcagcctgggaaacaagagcaagagtcagtatgaaaagaaagaaagaaagaaagagagagagagagagagagagagagaggagaagaaaagaaagaaagaaaaagaaagaaagaaaggaaggagagacagagagagaaaagaagaaggagaaggagaagaaaagaaagaagatga

SEQ ID NO: 446846 - DNA, 201 bp, Homo sapiens
atgccagttttacaactctatgccattattttttctaaagagaggtatctcttcacacacatacacacacaggcacacacatgcatatacacttctgtaarctaatataggggttcaccggacctcgacataatctctttctgttgtttagtttgagatatagaaaattatatatgcaaaataaatgatcattggcaattg

SEQ ID NO: 446847 - DNA, 201 bp, Homo sapiens
gtatacaaaattcctatgtaatattttagatttaacattatcttttttaaatttatttttaatttttatttatttatttattgaaactgagttttgctctygtcgcccaggctggagtgcagtagcacagccttagctgactgcaacctctgcctcccgggattcaagtgattctcctgcctcagcctcctaagtagctgg

SEQ ID NO: 446848 - DNA, 201 bp, Homo sapiens
ggatctcctcccaagcttgcgcatgtggttgttggtgtgagacctcagctccttaccgtgtggatccttccataggctgcctgagcttcctgacaacatgrcggtcatgatgctctggagaaagagacataagcattccaggaggacacagccttcacttatgtattgtataggatcaaggacagagtagtgactggaagt

SEQ ID NO: 446849 - DNA, 201 bp, Homo sapiens
agagaccttattgcgttcccatgcctctgcatccctcactgcatgtgttagacctctgtcatgtatgaattatgcctgtctgtggcctatgtgcacatccmtgaatggtgcactttgtgactgaagtgtctccctctgcccgtcccacttctctccagattcccacccatcctgggcatctgcacacacagtgcttcgagg

SEQ ID NO: 446850 - DNA, 201 bp, Homo sapiens
ataaatctcactaagaaaaatgcaggaaaaagaagaaaatatgctatcaaatgtagccaaataagtgaaataatccagacacagaaagacaaatactgtaygatctcatttataagtgaaatgtaaaacagttgaacttggggtatgaaagaaatggggagatgtttgttgaagagttcaacatttcagttatgcgagatg

SEQ ID NO: 446851 - DNA, 201 bp, Homo sapiens
ttacaattcagggaggaaagtcaggtacgaatctgtgaagccaaattctttgccatgttcagaaaacatactgatgaatatattttaaaagatatagtttyatacatatagataaggttcaaatagatctttgcaatctagaatgacagatctcactgagtctcctaattgtttcatttacttagaaattgaaatctagga

SEQ ID NO: 446852 - DNA, 201 bp, Homo sapiens
gctcaaaaccatgttgaattttgatcactgatgtttagaattgcaacatatcaagttgctcttctgacaaatgggttgggaacttgctgacaaaaatgtayaggatagactggaagaacaaaacttctttgatgtctttaaaacactccaagagacatatatttcaaatgtttgattttttaaaaaaaatcataatctgtt

SEQ ID NO: 446853 - DNA, 201 bp, Homo sapiens
tgaggcaggaagatcatttgaacccaagaggcagaggttgcagtaagccgagatcgctgcactgtgctccagcctgggtgacagagcaagtccctgtctcwaaataaataaataaataaataaataaataaataaataaataaataaataaatcagtagtataagggtttatttctagactctcaattctgttttacttgt

SEQ ID NO: 446854 - DNA, 201 bp, Homo sapiens
gaggcaggaagatcatttgaacccaagaggcagaggttgcagtaagccgagatcgctgcactgtgctccagcctgggtgacagagcaagtccctgtctctaaataaataaataaataaataaataaataaataaataaataaataaataaatcagtagtataagggtttatttctagactctcaattctgttttacttgtc

SEQ ID NO: 446855 - DNA, 201 bp, Homo sapiens
attgagggcagtgaacacctggccagagcagcagtatgaggcatagagtaggcagggagtggaaggagcagtgcctcccctctggtggctttggtttggagggtcttctttgacgtctaacaggagaaaaggtatcttcctgcatcctgccttaataattcccctttggcaagtagctggagtccgactgaaggttagcca

SEQ ID NO: 446856 - DNA, 201 bp, Homo sapiens
tcttcccccttttatactattttatttttccctctagcagagttttgcaagtgtctacaaatggtaaaatagtaaatattgttatttacttttttaagcckttttgggccgtatggtctctcttgcaactactgaactctgccattgtagtgtatgtgtaaataaataaatgtgtgttgctctgttttaataaaactttat

SEQ ID NO: 446857 - DNA, 201 bp, Homo sapiens
tgctggctccaacaagaagtactccaggccatagcagcagagctggaagatggtgttgctctgatgtagtgaggggaaaatgggaagggaaggagcaatcwcctgggaattaatttcacactaagagacaaaacacagcaaggctgtccaggaggagaggtgcgtggcctcaggaagcaggcctggccacccagactcttc

SEQ ID NO: 446858 - DNA, 201 bp, Homo sapiens
atcttgggtcaagtgtatttttcgtttttccccttcttctcgtgcgaggactgggcaggggttccctttgtatcagatctgccaggtgcctgtcactgatrtgcggtagctggtggcttggtgcacacttcacaagctgtggcatgggctaaagccatctctccatctcctagtgactacctttggactagtcccttagct

SEQ ID NO: 446859 - DNA, 201 bp, Homo sapiens
acagacatctttagggactattattctgtctaccacaagttgaaagagttctttacatattctgatattatggatactggaacctgacaaggtgtatgatktgcatttttttctcccattctgtgggttatttcacttattgtatatcctttgatacaccaaaagttagaattttcgtaaagcctaatttatctatttctt

SEQ ID NO: 446860 - DNA, 201 bp, Homo sapiens
ttacagcaaaaacaaacaaacaaaaaaaaaaaccaaaaaaaaaaaacacgccacagctgggaaccatgctgatgaaaaacattgcgagctggagtttgtaraagttgtctcctcatcagttgtaaagccatacaccggagactctgacatgacacggaacttcagcaagccagggcgaagacctggccagttctggaaccc

SEQ ID NO: 446861 - DNA, 201 bp, Homo sapiens
tgtgagacagcattaaagtttcagggaaatcctcattttgccagggagggaacaattacagcaaaaacaaacaaacaaaaaaaaaaaccaaaaaaaaaaaacacgccacagctgggaaccatgctgatgaaaaacattgcgagctggagtttgtagaagttgtctcctcatcagttgtaaagccatacaccggagactctg

SEQ ID NO: 446862 - DNA, 201 bp, Homo sapiens
tggacattaaaataagcagactgtgagacagcattaaagtttcagggaaatcctcattttgccagggagggaacaattacagcaaaaacaaacaaacaaamaaaaaaaccaaaaaaaaaaaacacgccacagctgggaaccatgctgatgaaaaacattgcgagctggagtttgtagaagttgtctcctcatcagttgtaa

SEQ ID NO: 446863 - DNA, 201 bp, Homo sapiens
cgacagtcaacagggacaggtttattttcaataaacctgagagggtcgactggctaagttaggtcagaggcactctgtcttatagactaagagtttgtaakgattcagggtgggagagtttatcagagtcttggactgcttctgtgcctctttgttgtgcttatctgggagggagagttgtgtgtctcttcccatacatct

SEQ ID NO: 446864 - DNA, 201 bp, Homo sapiens
tatagtatgtcacataatgttactacactgttgacaaataatattggtcatcattcactgagtgcttgccatgttgaaccagtctctatcagaaagagaaytggggaggtgaggatgtcaacatggagagaacacaacgtttgacaaagagaacaaattatacagaacatttattaatagaactgtcttgcctctccttct

SEQ ID NO: 446865 - DNA, 201 bp, Homo sapiens
ggagactcctgagcagtaataaatggctgttgctttaagccagtgagtgttggttatagtaaaagctaacaggtatagatgctgccccccacaaacaggtrgcttgcaaattagaaagctggggcccagaggctacaaggatgctagatacatactgatagaactaggatcttttaattctcatgttttgctgagtgcttc

SEQ ID NO: 446866 - DNA, 201 bp, Homo sapiens
ctgtcaaggcttggacttgggagcctagggtttgcctccacaccctgaaatagattctactgtctctcttagcccctcttcacactttgtatatttattgraacttaagatttatagtatgtcacataatgttactacactgttgacaaataatattggtcatcattcactgagtgcttgccatgttgaaccagtctctat

SEQ ID NO: 446867 - DNA, 201 bp, Homo sapiens
tttcatctcatccaggccgtcttgcctcaaccactttgctcacgctccatcctccagctgaactgctcagataaactgatggaatgttgattctttcagtycagactcaaataccatcttgtccttgagccttttgggattatcccacgtgcctctgaaatcctgcggttctgtgtctctcttagacctttggttacagcc

SEQ ID NO: 446868 - DNA, 201 bp, Homo sapiens
agggtgctcatttaatcacttccttttatcttcgttaacaccttgagaaggtggacactattatgttccccattttatagatcagagaacagaggctccartaggtcctgctacctgtcaaggcttggacttgggagcctagggtttgcctccacaccctgaaatagattctactgtctctcttagcccctcttcacactt

SEQ ID NO: 446869 - DNA, 201 bp, Homo sapiens
ggcagatcctgatgggctgggttccatgaggtgaggtttttcttagattcagctctaattctttccctagggtggggcccctgaggtatgttttcactctkactcttgcctccattgtctgggaatatattctttttccattaaccatttttgccatggtaaagtgggcattggataatacacctcctttggggtccaagc

SEQ ID NO: 446870 - DNA, 201 bp, Homo sapiens
tcatactgggtttcttacttctcaattttaaataatctacccaccaatgtacatatgtctgtgcaaagattgcaaataccaagctctctgttgagttaaamatgcaaccaggagtatgatccatactctcctctccatagtacaaacaacttgaaggagccactgagagttcttggcattattgagacgtttgctctgtca

SEQ ID NO: 446871 - DNA, 201 bp, Homo sapiens
gtccgcagcctctccccaggagggcgcagggtggaaaacatgcttttgatactggatacttgcagtgttggctagcatgaggtgtgagaagcagatggccrcacgtcactctggttagagaagtgaaatgtttcagcctgaatcgggtcttgaccatcaggtgtgagagtccctccaggcccggcggtaaggcctgtggtt

SEQ ID NO: 446872 - DNA, 201 bp, Homo sapiens
tggggaggatccctcacgaacggcttgggccatccccttgctgatgagtgagctctagctctgagtttgcaccagatctggttgtttaagattgtgtgggyccctgtttccctggcttgctctgccctgaccatgtgatgcgccttctgcccgtgactgaaaggaagcttcctgaggcctccctagaagcagatgcttcct

SEQ ID NO: 446873 - DNA, 201 bp, Homo sapiens
gcgtgaacccggaggcggagcttgcagtgagctgagatcgcaccactgcactccacagcctgggtgacagagggagactccatgtcacaaaaaaaaaaaaagaaagaaagaaagaaaaggaattctggagatggatgcgccattgcgaatgtactttatgccgccaaattgtgccctcaaaaatgattcaaatgatacact

SEQ ID NO: 446874 - DNA, 201 bp, Homo sapiens
atggggaggatccctcacgaacggcttgggccatccccttgctgatgagtgagctctagctctgagtttgcaccagatctggttgtttaagattgtgtggscccctgtttccctggcttgctctgccctgaccatgtgatgcgccttctgcccgtgactgaaaggaagcttcctgaggcctccctagaagcagatgcttcc

SEQ ID NO: 446875 - DNA, 201 bp, Homo sapiens
aggcaacagtctgaacaattcttgtgctaggtgttactgtggctcttaacgaaattataatcaatctctaaagtcatatttttaataagttttacaaccayattcaatcttttgtataattacacttgtaaggaaaatgtcctttggataataaaaaaattcccatttcatacgctcgggacggacgcatggtggctgtag

SEQ ID NO: 446876 - DNA, 201 bp, Homo sapiens
ctattgggataacataaatatcaaaaatattatttatgacattctgagacttggatgtaatatattaaatatgtttatttaaaatgcacaaagactgttcraaaacattagtcactgaattagtttcctggagctactttaacagttctaccaactgtgtggctcaaacaacagaaacaacgtgttgtctctcagttctgg

SEQ ID NO: 446877 - DNA, 201 bp, Homo sapiens
atcacattcaaatgggatcacagcttagtgtactaagacttctgactggcacagcagtgtgctttgtcatgttactgatggtcttgaacagtctctctgcygtctttatgccttcctcagctattctccaaggacaattgcagctgacctttcccttgcactagccaaaggccaccatgcataataaaaatcacatacttt

SEQ ID NO: 446878 - DNA, 201 bp, Homo sapiens
gtcttgaacagtctctctgccgtctttatgccttcctcagctattctccaaggacaattgcagctgacctttcccttgcactagccaaaggccaccatgcrtaataaaaatcacatacttttttttcttttttttgagacggagtttcactcttgctacccacgctggagtgcaatggcacgatctcgactcactgcgacc

SEQ ID NO: 446879 - DNA, 201 bp, Homo sapiens
aaaatcacatacttttttttcttttttttgagacggagtttcactcttgctacccacgctggagtgcaatggcacgatctcgactcactgcgacctccacytcctaggttcaagcaattctcctgcctcagcctctcgagtagctgggattacaggctcctgccaccacgcctggctaattttttgtatttttagtagaga

SEQ ID NO: 446880 - DNA, 201 bp, Homo sapiens
ctccagcagtgcccactgggagggagggagcacagggggcaggagctccagcactagagtcagaccacactgtacttgaacatatctgcaccacttacctsctatgtgaccttgggcaattcctctgacccatccacgcactcctctcataagtgagagggaaactgccttctcctttatatgggtattgtgaatttaggt

SEQ ID NO: 446881 - DNA, 201 bp, Homo sapiens
tctcaggcatggccttcagcagtccacacaatatgtactgtagctagcattagaccctctcattctgaggccagtggctttttcatgatgccagggccacraagagttaatttgacttcctgtatctgactcccggtttccagaacattttatttatctatccagtgttggactgtatataccaaacagtacatcccctgg

SEQ ID NO: 446882 - DNA, 201 bp, Homo sapiens
tttaaggtagttaggccactatcccatgacgcaaatgacaaactgaatcttaaaagtatcttagttcatgaaatgcgagggcgagccgtcctgtagcctcragatagctgtggagcgcagcactctagaatgcgccaggagaaacctgcactggataaaagccaaacagcctttgacgcctgagctgaagctcctggagca

SEQ ID NO: 446883 - DNA, 201 bp, Homo sapiens
aagatgaaatagtcaggcccatggtggttaaatttgttcccgtgatctcttctactacctgtccagaggaaatgagctgggagagccacttacctcctcaytccctcggaggctgtggtcaggaggggcaggactgccaggaagcacagccagaagccggtaggctgctgtgggcatcagtccagctgaatggcacccagg

SEQ ID NO: 446884 - DNA, 201 bp, Homo sapiens
acttgttcctgcccacatcctagcaagcgctcatgccacactcccataccctcccagcccacctggataacttagtagtccctgggcttttaagcattgawgtcattcctccaggaggccattttcaggagccgctcccacgtccctcaaaggccaagacaggttgacagccatttacttccataatgccctgattttgcc

SEQ ID NO: 446885 - DNA, 201 bp, Homo sapiens
catgtgcaggtgccacaagggccaggtgtagagagttagtacttactagttaatgctccattaattttcactgaactgtaaaggatgtgtttaaaagataragtaaatcctaaaagagaaatttaacagttaatttctttggcgctattactttatttgtaaaataagtggatttggccaaaattatatctgggatctttt

SEQ ID NO: 446886 - DNA, 201 bp, Homo sapiens
acacctgtaatcccagcactttggaaggccaaggcgggcagatcacaaggtcaggagatcaagaccatcctggctaacatggtgaaaccccgtctctaccmaaaatacaaaagataaaaattagctgggcatggtggcaggtgcctgtagtcccagctactcaagaggctgaggtaggagaatggcgtgaacccggaggcg

SEQ ID NO: 446887 - DNA, 201 bp, Homo sapiens
ctgttcaatccaactgcactccacgtatgagtgaaactcattgaaaaatcttgtgaatataagtttcacatcagtaaaatttcctctcttgcacccttaakaatggaattatgcttgtcaccaacatttggaagaatatttggtcagttcatatttttgcccttttttgctttagagattgaagtagaggatttgatgaaa

SEQ ID NO: 446888 - DNA, 201 bp, Homo sapiens
tacatactatatgagtccaaccttaagacagtctagaaaagaaaaaccatggagacggtaaaaggatcagtagttgctgcagggaagggttggagggaggratgaataggtggagcacaggggatttgtagggcaggaaagatactctgtacaatactgcagtggtggatacatgtcattattcatttgtccaaacccata

SEQ ID NO: 446889 - DNA, 201 bp, Homo sapiens
tcttgcacccttaagaatggaattatgcttgtcaccaacatttggaagaatatttggtcagttcatatttttgcccttttttgctttagagattgaagtasaggatttgatgaaatgttaaggtttatgacaatttgtataaatgaaaaacctggaatgtatttcttcttggccctgagcaagcagtgaccctaaaggcat

SEQ ID NO: 446890 - DNA, 201 bp, Homo sapiens
ttaaatgcatattactaataagcaaacctgaaatagctacatactatatgagtccaaccttaagacagtctagaaaagaaaaaccatggagacggtaaaargatcagtagttgctgcagggaagggttggagggaggaatgaataggtggagcacaggggatttgtagggcaggaaagatactctgtacaatactgcagtg

SEQ ID NO: 446891 - DNA, 201 bp, Homo sapiens
ccacagacctgaattaagctggctgcttccacgagtcctgtcctgggttctgtgccaaggacccaggtgcttgccttttccattttagagtgaaggccacmgcagtcaagccttcagaggctgcaggggtgagcattatttcctcattactcctttggagaccaggggtcagaaagccggagtgcatggcccaaggcattt

SEQ ID NO: 446892 - DNA, 201 bp, Homo sapiens
gtcatcattgtctatggctggttgatttaacgtgcattagtgtagggacgtgtgtcctctaaacaacgaagatgtatttaacctcagacctggctcacacractacagaatccacgacgggagacaaaacagtctcccgtttcatggatcttctcttccgcaagtagtccatagacagaatttggagggaatctttgaacc

SEQ ID NO: 446893 - DNA, 201 bp, Homo sapiens
agcactttgcagtcatgtacgaaagtttccaattaatttatctgctttaaaatactgtcttacaatgactaaaatgctgctttccttaccattgaataagrtactatgctttgatgttaaaaattgattagttcctttcactttattactcttccattcacatgtgggtttatttgttttaaatgatatttaagaaagcac

SEQ ID NO: 446894 - DNA, 201 bp, Homo sapiens
ggtgatcaaaactggtgtctactgcatgctcattttattttagtttttattctctattttcaaggctacacataaattttaaatcttttatcactttgctrtgaagggatttgtctgaagctaatgcctgatttttcagatgatgtttttcttctatacaaaagccagatatcgagagttttaacatttctttttcctcta

SEQ ID NO: 446895 - DNA, 201 bp, Homo sapiens
taaaatggattatactcaaatggtaaaactagaaatgttaaatttctagaaaaatgttaggattatattagattagataaagatttctcagaccagaaagkgaatcttaggtgaggaaaactttaaaacatttctgacatgaaaacacacttgaatagatatttcatgttattagataaaaagaaacatcatgaagatttg

SEQ ID NO: 446896 - DNA, 201 bp, Homo sapiens
taggaagcagtcactgaacttacagttgtttgatgtgtttaagtggatacagttgggagagacagtgttgtctgaccgtgggccctaacgcccaccggccrgaggagcaaacttgcccagcagcctgccttgccccacgcccagcatccacggctgccttagctggagggagccgcgcgggggcgcagtgcgtcatcactg

SEQ ID NO: 446897 - DNA, 201 bp, Homo sapiens
aggaatttcaaagtgccattttcgttccttactacatcaaaattctagtaaatattgagctcactggtagatgttttatttaatgcatcagcagagaggcrcatatgttactggattggaaaagtgtattagtaggattatcgtttacaacaatgtgattggattccttaattaccatatgtattttattttattccttta

SEQ ID NO: 446898 - DNA, 201 bp, Homo sapiens
aaatattgagctcactggtagatgttttatttaatgcatcagcagagaggcacatatgttactggattggaaaagtgtattagtaggattatcgtttacawcaatgtgattggattccttaattaccatatgtattttattttattcctttaaaaaccagggttctattggcattatcagattgcaaaaaggccccaaggt

SEQ ID NO: 446899 - DNA, 201 bp, Homo sapiens
aaggcgggcagatcacgaggtcaggagattgagaccatcctggcaacacggtgaaaccccatctctactaaaaatacaaaaaattagccaggcgtggtggygggtgcctgtagtcccagctacttgggaggctgaggcaggagaatggcgtgaacccgggaggtggagcttgcagtgagctgagatcacatcactgcactc

SEQ ID NO: 446900 - DNA, 201 bp, Homo sapiens
gagcatttttaggtttacataaaaattgagcagaaagtagagttcccctatatattttcctctacacacacacagacacacacacacacacacacacacayacaacacataacacattattattaacatcttgcattagtgtattgtatttgttacaatgaatgaatgcaccttaatccatctttatcatgcaaagcctat

SEQ ID NO: 446901 - DNA, 201 bp, Homo sapiens
ggaggctgaggcaggagaatggcgtgaacccgggaggtggagcttgcagtgagctgagatcacatcactgcactccagcctgggtgacagagcgagactcygtctccaaaaaaaaaaaaaaaaaagaaaagaaaagaaaagaatcaggacatgggcgtgaagaaagttcatttatactggagtgctgttgcttctaagccc

SEQ ID NO: 446902 - DNA, 201 bp, Homo sapiens
ggcgtgaacccgggaggtggagcttgcagtgagctgagatcacatcactgcactccagcctgggtgacagagcgagactccgtctccaaaaaaaaaaaaaraaaagaaaagaaaagaaaagaatcaggacatgggcgtgaagaaagttcatttatactggagtgctgttgcttctaagccctctcagcttccaaagcagga

SEQ ID NO: 446903 - DNA, 201 bp, Homo sapiens
cttttgacctacaaatctgtaagataataaattatcattattggattagggttagggtttcagcctaagtatttgaacctatgtgtatctttcagtctaargtgaatctcttatagacagcatatagtctgatcatgttcttgttttaatctattctgccaatctgtgcctttcaactgtattattttattgtttaatatt

SEQ ID NO: 446904 - DNA, 201 bp, Homo sapiens
tatagtctgatcatgttcttgttttaatctattctgccaatctgtgcctttcaactgtattattttattgtttaatatttaatgtaatgacagataaggtwagatttacaactggggtttttatatttgttttctgtatgtcttaggtcatttttgttcctctcactgccttcttgtgtattaaatatgtgttctctagag

SEQ ID NO: 446905 - DNA, 201 bp, Homo sapiens
tcttggttgacaatctttttcttatgacagtgttaaatatatcatcccattgccttttgacttccattagttttcatgacaagtcagcttttgatcttgtygttaagcccttgtactatgagatttttttttcttgcttgctttgaagagtctctctttgtcattgtcttctgtcagcttgactattatgtgcttaggtgt

SEQ ID NO: 446906 - DNA, 201 bp, Homo sapiens
ctagtcagctgaaagtccaaacatggggacttgggctggtaagccacctaggctttgaatcaaacagctacatctgaaagttttatgttagaataataacrccatgtattacatttctgtgcaataagtgaacccatctctagctcctctccccaccataatcacagcagtcagataaaaagttgaggagtttattaggga

SEQ ID NO: 446907 - DNA, 201 bp, Homo sapiens
taagcatcatgtctgattcaatgctgtatgttttattggagtttaacatgcctacatagtaaatacttggtaaatgtgctgaatgaccaaatgattcccargatgagctagtcagctgaaagtccaaacatggggacttgggctggtaagccacctaggctttgaatcaaacagctacatctgaaagttttatgttagaat

SEQ ID NO: 446908 - DNA, 201 bp, Homo sapiens; identical to SEQ ID NO: 224557

SEQ ID NO: 446909 - DNA, 201 bp, Homo sapiens
acatagtaaatacttggtaaatgtgctgaatgaccaaatgattcccaagatgagctagtcagctgaaagtccaaacatggggacttgggctggtaagccayctaggctttgaatcaaacagctacatctgaaagttttatgttagaataataacgccatgtattacatttctgtgcaataagtgaacccatctctagctcc

SEQ ID NO: 446910 - DNA, 201 bp, Homo sapiens; identical to SEQ ID NO: 224535

SEQ ID NO: 446911 - DNA, 201 bp, Homo sapiens
tgggctggtaagccacctaggctttgaatcaaacagctacatctgaaagttttatgttagaataataacgccatgtattacatttctgtgcaataagtgarcccatctctagctcctctccccaccataatcacagcagtcagataaaaagttgaggagtttattagggaaatatgagaggcatagacactccaagtgaca

SEQ ID NO: 446912 - DNA, 201 bp, Homo sapiens
ggtatttcaaaagactgtaagcatcatgtctgattcaatgctgtatgttttattggagtttaacatgcctacatagtaaatacttggtaaatgtgctgaaygaccaaatgattcccaagatgagctagtcagctgaaagtccaaacatggggacttgggctggtaagccacctaggctttgaatcaaacagctacatctga

SEQ ID NO: 446913 - DNA, 201 bp, Homo sapiens
aaattagctggacatggtggtgtgtgcctgtggtctcagctacgcgggcggggggtggcgggggactgagacgggaggaccacttgatcgctagggtagtrcaagtatggggcggggccagagagtattaggggctggagggtgagctgaggtgggacctgggaaaggcccgatccggtagccctggccccactcactgca

SEQ ID NO: 446914 - DNA, 201 bp, Homo sapiens
ccgcgcggtgctctggctaggctggttcctcagctgcctcgggcccttcctgctcagcgccgcactgctggttctggtgctcaaggtgggcgcgcctcggyctgcccggctgcagaatgggtgcgctggagggtgacagacaggggcggccccacgtgggtgcgcgcccccaggccaatccaggagctgcaccctaagctc

SEQ ID NO: 446915 - DNA, 201 bp, Homo sapiens
agaaggaggcaggagtgggagtggaccccgcgccaggcctgcagcaccccaaacgcgtcagccagttcctcgatgaccctagcactgccgagactgtgctytgagcctccctcccctgcggggccgcggggaggccctgggaatggcaagggcaaggtagagtgcctaggagccctggactcaggctggcagaggggctgg

SEQ ID NO: 446916 - DNA, 201 bp, Homo sapiens
gcttccaggtgaggcttggggtggagcctggtgacgaaagcgttaagcccaaactcggtccctggaggattagaggatgatctttaagtccccagctgtcrgccctgctcagagcgacagtcctggcagccaatcagatgcgaggacggctgcgggttgcgctcccattggtttactccacccctggggtagcggagcctc

SEQ ID NO: 446917 - DNA, 201 bp, Homo sapiens; identical to SEQ ID NO: 286665

SEQ ID NO: 446918 - DNA, 201 bp, Homo sapiens
tggggcttgggctgggttgggtcgttggactcagcccctgaccaacatccgtctcccacccttgagcagaagctgcaggaggtgagccggatcttgaaacrggtcttccttatcttcccccacttctgcttgggccgggggctcattgacatggtgcggaaccaggccatggctgatgcctttgagcgcttgggtgagaac

SEQ ID NO: 446919 - DNA, 201 bp, Homo sapiens
actcatgctggctccacccacaccatggccccgccccatactcatgctgcccccaccacactatgtcccattctcacatttgccctgccccatgcccattrtgcccctgctccacactcaatgctggccccgccacactgtggccctgccccatactcatcaatatgagtccccatgcctactctggccccaccccacaga

SEQ ID NO: 446920 - DNA, 201 bp, Homo sapiens
tcctggccctagtggggcgagggcgccaggccccggggtgtaaggacacacagaggtgggacgcggcgccgggatcagaacggtctggggaagagtggggrgatgtccacaccagaagggtggcccaggccgggggaagcaggcagtgtggcgccaggcacaggtggccccggcctcacggagctcgtggtgccgggtccc

SEQ ID NO: 446921 - DNA, 201 bp, Homo sapiens
gcctgtcccccaccctctactggcttggcaactttctctgggacatggtgcgggggctgcttggacgggtgggggcccagccactgcttgccactgccctrtctggccccttgtaggcaggggcttgtccaagatggcctgggtaaagtcttgaggattgtgggagactttgtgccttcctactcaaaaagcaaggaggtc

SEQ ID NO: 446922 - DNA, 201 bp, Homo sapiens
cgggtgcccatgacggcagcttcgccacactcttccgagagctagacacgcggctggcggagctgaggctcactggctacgggatctccgacaccagcctsgaggaggtgtgaggcctgggtggtggtgaggtggggccaggaggagggcttcctggaggaggtggtgttttgaaggatgaatagcgtgtttatgagcagc

SEQ ID NO: 446923 - DNA, 201 bp, Homo sapiens
ggttttgaggaatgagtaggagtttgctacatgtggaccccacttgttgctatggcatttaggggctactgctcaaataccgagacagtaagagttggggrtagacagaggttcccctggattctgcctgaagggccagaaaaggtttccaacaaggaggttctggggatgaggttttgagggatgaataggagtttgctt

SEQ ID NO: 446924 - DNA, 201 bp, Homo sapiens
ggccttctgctgctggacgcggcgctctacggcctcgccacctggtacctggaagctgtgtgcccaggtgggccgtagggggcggggctccgggccgggtsgcacctgctttgcgggaggctgagctaggggtgtggcctccaggccgtttgggggtggggggtggcttattcccttggagagaaggcggggcttcttggc

SEQ ID NO: 446925 - DNA, 201 bp, Homo sapiens
cgcggctgcgggacaccatgcgcgccatggggctcagccgcgcggtgctctggctaggctggttcctcagctgcctcgggcccttcctgctcagcgccgcrctgctggttctggtgctcaaggtgggcgcgcctcggcctgcccggctgcagaatgggtgcgctggagggtgacagacaggggcggccccacgtgggtgcg

SEQ ID NO: 446926 - DNA, 201 bp, Homo sapiens
gatctttaagtccccagctgtcagccctgctcagagcgacagtcctggcagccaatcagatgcgaggacggctgcgggttgcgctcccattggtttactcyacccctggggtagcggagcctctttatcgagtgactactgtttgcctcgctctaatcagagcttccaggaaccctgcgctgtgggataaaggaatgaggt

SEQ ID NO: 446927 - DNA, 201 bp, Homo sapiens
ggatcattgccagctccgtctggtaacctctctctagctcctggcgctgcgcagcctggtggagcttcgggcactgctgcagagaccccgagggaccagcrgccccctggagttgctgtcagaggccctctgcagtgtcaggggacctagcagcacagtgggcccctccctcaactggtacgaggctagtgacctgatgga

SEQ ID NO: 446928 - DNA, 201 bp, Homo sapiens
gggggcagcctggatgctggggtgggagggtggtggccagagcccatccagtaccctcagtccaggtgggccagggccaggccggagggtcacggaaactrtttgaagaagtaggagttagccgatggagggggatcagcttgtgcggaggatcagaggcacacgcaggagcaaggcagagggggcagggggtgggcaggg

SEQ ID NO: 446929 - DNA, 201 bp, Homo sapiens
gcggaacatcgattctgggccggcgtcgtcttcttgggacctgaggactcttcagaccccacagagcacccaaccccagacctgggccccggccacgtgcrcatcaaaatccgcatggacattgacgtggtcacgaggaccaataagatcagggacaggtcaggcgagggagggggcggggggatgagggactgggcgggg

SEQ ID NO: 446930 - DNA, 201 bp, Homo sapiens
agaaagagagaaagaaaaaaaaaaaaacagaaatgtgctttgggtgaaaatgtcaaggtctaaggcagagaagatgggaatggagatttttattcctctcwgggcttctcagtctgagtggttactccagtgactcctattgtcccttcagctggtcgatcacaccgctcatgtacccagcctccttcttcttctccgtgc

SEQ ID NO: 446931 - DNA, 201 bp, Homo sapiens
cctgatggtagttgtgggttggtcccccgtgcctaggtcgcacgctgatcctctccacccaccacctggatgaggcagagctgctgggagaccgtgtggcygtggtggcaggtggccgcttgtgctgctgtggctccccactcttcctgcgccgtcacctgggctccggctactacctgacgctggtgaaggcccgcctgc

SEQ ID NO: 446932 - DNA, 201 bp, Homo sapiens
gagacaaacctacccctgacctccaacactaggtccagcactgccctcaagatctctttttgtttgtttctgagtcttgctctgtcgcccaggctgtagtrcagtggtgtgatctcagctcactgcaacctctgcctcctgggttcaagcatttctcctccctcagcctctcgagtaactgggattacaggtgggttccac

SEQ ID NO: 446933 - DNA, 201 bp, Homo sapiens
gcctacgttcttaaccctgatctctgtctgccgggacagtcccctcacaggtcaccaatgcctcttccccagggagactggggtggggcgtgagccggggytccctgaagcacccctttgtccacacaggcactcctcagctgctggccctggtacagcactgggtgcccggggcacggctggtggaggagctgccacacg

SEQ ID NO: 446934 - DNA, 201 bp, Homo sapiens
ggctggcggagctgaggctcactggctacgggatctccgacaccagcctcgaggaggtgtgaggcctgggtggtggtgaggtggggccaggaggagggctkcctggaggaggtggtgttttgaaggatgaatagcgtgtttatgagcagcaaggacattcagggaggaggcatggcacatgaggagctctggtggctcaga

SEQ ID NO: 446935 - DNA, 201 bp, Homo sapiens
tgcagctcatggggggcctgtcccccaccctctactggcttggcaactttctctgggacatggtgcgggggctgcttggacgggtgggggcccagccactrcttgccactgccctgtctggccccttgtaggcaggggcttgtccaagatggcctgggtaaagtcttgaggattgtgggagactttgtgccttcctactca

SEQ ID NO: 446936 - DNA, 201 bp, Homo sapiens
caggtgtgcgttggagtaggtgcagcctggagaggtgagggtggattgatgggtggagttaggggagggcctggttagtgggcggggccataggaaagtgsggcgggggtatttattgtgtgggcgggggtagagtgcaagggcgaaagaggagtgtccgaaaaaggagtcaagtggggtgatagcttcgagagcaacctg

SEQ ID NO: 446937 - DNA, 201 bp, Homo sapiens
cgactgctgggtggggggtgctcccactggcccactcacctttctgaaagacctgcactctcccaggtataccgtgggcagaggatgccagctgttgaccrcttgtgcctggggattccccctggtgaggtgagtccaggggtggaggccaggtgcagggacagtgagtggctgccctactgcatgccctgcccatcatcc

SEQ ID NO: 446938 - DNA, 201 bp, Homo sapiens
ggggattccccctggtgaggtgagtccaggggtggaggccaggtgcagggacagtgagtggctgccctactgcatgccctgcccatcatcctttactgaamacctactgtgtatccaccaccttttattgggcacctactgtatgccaatatttgtgctcctatttttattttattatattattatttatttatttattta

SEQ ID NO: 446939 - DNA, 201 bp, Homo sapiens
gccccgccccatactcatgctggctccacccacaccatggccccgccccatactcatgctggctccacccacaccatggccccgccccatactcatgctgsctccacccacaccatggccccaccccatactcatgctgtctccacccacaccatggccctgccccatactcatgctggctctacccacaccatggccccg

SEQ ID NO: 446940 - DNA, 201 bp, Homo sapiens
cagggggatgtgttggtgctgaggaacttgaccaaggtaggtgtggtcaggtcgactgctgggtggggggtgctcccactggcccactcacctttctgaargacctgcactctcccaggtataccgtgggcagaggatgccagctgttgaccgcttgtgcctggggattccccctggtgaggtgagtccaggggtggaggc

SEQ ID NO: 446941 - DNA, 201 bp, Homo sapiens
atcctccgtgctcacctgcccccaggcccggcccgccacgcccacagcatcaccacactcaaccaccccttgaacctcaccaaggagcagctgtctgaggstgcactgtgagtccctccaccctgcatgtcctaccctgcacgtcctaccctgcctccatttctctgtcgtttggggtggtgggagctggatttgaaccct

SEQ ID NO: 446942 - DNA, 201 bp, Homo sapiens
atggccccgccccatactcatgctggctccacccacaccatggccccgccccatactcatgctggctccacccacaccatggccccgccccatactcatgytgcctccacccacaccatggccccaccccatactcatgctgtctccacccacaccatggccctgccccatactcatgctggctctacccacaccatggcc

SEQ ID NO: 446943 - DNA, 201 bp, Homo sapiens
gtcctgcaggggtgactgagggggcgagacaggctggggtgtgctgggggcgcaggaccaggaggcgtgagccgggggctctgggtggatttagaagacayaatcaggtgtgcgttggagtaggtgcagcctggagaggtgagggtggattgatgggtggagttaggggagggcctggttagtgggcggggccataggaaa

SEQ ID NO: 446944 - DNA, 201 bp, Homo sapiens
cccagcaggtcccggattccacagcccagctctgagggacttgcaggccccaggacccccatgacctccatggctgagtccaccccatctctgcagtgctrgtagaagaggcaccgcccggcctgagtcctggcgtctccgttcgcagcctggagaagcgctttcctggaagcccgcagccagccctgcgggggctcagcc

SEQ ID NO: 446945 - DNA, 201 bp, Homo sapiens
ggagggagccggccgtgggcctacgaggggaaaacatggcccagccccgaggtccagggggaggagcggagtggtctaggaggcaggcggaccccagcgcstaggactcacccccgcatcccacagtgcctgtccttggacaagctggaggcggcaccctcagaggcagccctggtgtcgcgggccctgcaactgctcgcg

SEQ ID NO: 446946 - DNA, 201 bp, Homo sapiens
cctgccccagttccactcccatgccctctgcctgccccctgggagctctcccggcccccccggccctcagctccccttccctgcctgcatggccccacagrtacggaggcttctcgctggggggccgagacccaggcctgccctcgggccaagagttgggccgctcagtggaggagttgtgggcgctgctgagtcccctgc

SEQ ID NO: 446947 - DNA, 201 bp, Homo sapiens
ccctccccgcaggccagtacgggatccctgaaccatggaattttccttttcggaggagctactggtgcggacctcggccccccaagagtccagccccttgycccaccccgctggacccaaagggtgaggccctacgaggcttaatagctggttgtccacatatgcccagttcccccccaaaacgagattccacagatgcca

SEQ ID NO: 446948 - DNA, 201 bp, Homo sapiens
cctgccatgtgggtcactctgctctgtgcactggccgcaggctgaccgtggacgagcacgtctggttctatgggcggctgaagggtctgagtgccgctgtrgtgggccccgagcaggaccgtctgctgcaggatgtggggctggtctccaagcagagtgtgcagactcgccacctctctggtgagcccatccccaagggag

SEQ ID NO: 446949 - DNA, 201 bp, Homo sapiens
ccaccagtgtggccccgccccatactcatgctgtctccacccacaccatggccccgccccatactcatgctggctccacccacactatggccctgccccayacccatcccagctccacccacaccatggccccgccccatactcatgctggctccacccacaccatggccccgccccatactcatgctgcccccaccacac

SEQ ID NO: 446950 - DNA, 201 bp, Homo sapiens
cccgcttttccgcagagcctgctgtcgcccgtggccttcggcttcggctgcgagagcctggctctgctggaggagcagggcgagggcgcgcagtggcacamcgtgggcacccggcctacggcagacgtcttcagcctggcccaggtctctggccttctgctgctggacgcggcgctctacggcctcgccacctggtacctg

SEQ ID NO: 446951 - DNA, 201 bp, Homo sapiens; identical to SEQ ID NO: 286687

SEQ ID NO: 446952 - DNA, 201 bp, Homo sapiens
tactttgggaggccgaggcaggaggactgcttgtggccaggagtttgagaccagcctgggaaacatagagagacccacctctaaaaaagaaagaaagagasagaaagagaaagagagaaagaaaaaaaaaaaaacagaaatgtgctttgggtgaaaatgtcaaggtctaaggcagagaagatgggaatggagatttttatt

SEQ ID NO: 446953 - DNA, 201 bp, Homo sapiens
ggagggccgttcagtgatgctcacctcccataggtgggccgggctctgatgccctgggctgtggttaaggtgatccaggcctggagagagagccccaaagyacaaggccacaggggatggggggtcctggccctagtggggcgagggcgccaggccccggggtgtaaggacacacagaggtgggacgcggcgccgggatca

SEQ ID NO: 446954 - DNA, 201 bp, Homo sapiens
gcgctggagggtgacagacaggggcggccccacgtgggtgcgcgcccccaggccaatccaggagctgcaccctaagctcccgttgcctctcacagctgggrgacatcctcccctacagccacccgggcgtggtcttcctgttcttggcagccttcgcggtggccacggtgacccagagcttcctgctcagcgccttcttct

SEQ ID NO: 446955 - DNA, 201 bp, Homo sapiens
cccacccacggccttccatgtggacactcagaaatcagaggtgctgaggccaggcgtggtggctcacagctgtaaccccagcactttgggaggccaaggcrggaggatcacttgaggtcaggagttcgagaccagcctggccaacatgccaaaaccccgtctctactaaaaatacaaaaattagccgggcttggtggcaca

SEQ ID NO: 446956 - DNA, 201 bp, Homo sapiens
tccaactggagagatggccaaggctttagattgtcctgcaggggtgactgagggggcgagacaggctggggtgtgctgggggcgcaggaccaggaggcgtsagccgggggctctgggtggatttagaagacacaatcaggtgtgcgttggagtaggtgcagcctggagaggtgagggtggattgatgggtggagttagggg

SEQ ID NO: 446957 - DNA, 201 bp, Homo sapiens; identical to SEQ ID NO: 286697

SEQ ID NO: 446958 - DNA, 201 bp, Homo sapiens
atactcatgctggctccacccacactatggccctgccccacacccatcccagctccacccacaccatggccccgccccatactcatgctggctccacccayaccatggccccgccccatactcatgctgcccccaccacactatgtcccattctcacatttgccctgccccatgcccattgtgcccctgctccacactcaa

SEQ ID NO: 446959 - DNA, 201 bp, Homo sapiens
ccctccccgctcttccccgcggcgggaaggtcccgggtgtgggggtgggcccaggctctgttgggaaccttcctgcggtccaggctgcgaactttgcacckttacaccactccacgtgacctgctgcagcgggaggagcaggggactctgagggtctggtggggggggggactctgagggtctgggggcccccggcgcagg

SEQ ID NO: 446960 - DNA, 201 bp, Homo sapiens
gcttgcgcgcctgcgcggtgtcccggaggcccaggttgcccaggtgagcccactttgtccccaccgctctcacctcccagggcccacccgacccaggccgygcctctaaagcctggcccaatcccgcactctctcgccttggctccatccctgtccctgcccccagaccgtgcttccttcccctatacctctgtcccccat

SEQ ID NO: 446961 - DNA, 201 bp, Homo sapiens; identical to SEQ ID NO: 286702

SEQ ID NO: 446962 - DNA, 201 bp, Homo sapiens
cctggggttggcactgggccaagcccaggagcccttgcacagcttgttggaggccgctgaggacctggcccaggaggtacgaggccccactcatcctcaayccccatggaggcaacgttggcaggcagcctgcgccgggagggtctggggcagcccgggcacttcccttgggtgggttttcaggaggattagacagcgaga

SEQ ID NO: 446963 - DNA, 201 bp, Homo sapiens; identical to SEQ ID NO: 286711

SEQ ID NO: 446964 - DNA, 201 bp, Homo sapiens
aggcagagggggcagggggtgggcaggggtcctcagaggaggagagggtcatcagtggagggggtgctgtccacaggtgaaccggaccttcgaggagctcrccctgctgagggatgtccgggaggtgtgggagatgctgggaccccggatcttcaccttcatgaacgacagttccaatgtggccatgctgcaggtgtgcgg

SEQ ID NO: 446965 - DNA, 201 bp, Homo sapiens
gagcttcctgctcagcgccttcttctcccgcgccaacctggctgcggcctgcggcggcctggcctacttctccctctacctgccctacgtgctgtgtgtgrcttggcgggaccggctgcccgcgggtggccgcgtggccgcggtgagagccgggtcgggcgtggatgggggacgccccccgcttcggccgctcactgaccg

SEQ ID NO: 446966 - DNA, 201 bp, Homo sapiens; identical to SEQ ID NO: 286713

SEQ ID NO: 446967 - DNA, 201 bp, Homo sapiens
cactgctggttctggtgctcaaggtgggcgcgcctcggcctgcccggctgcagaatgggtgcgctggagggtgacagacaggggcggccccacgtgggtgsgcgcccccaggccaatccaggagctgcaccctaagctcccgttgcctctcacagctgggagacatcctcccctacagccacccgggcgtggtcttcctgt

SEQ ID NO: 446968 - DNA, 201 bp, Homo sapiens
tagggagaccccatctctataaaaaatttaaaaattagctggacatggtggtgtgtgcctgtggtctcagctacgcgggcggggggtggcgggggactgasacgggaggaccacttgatcgctagggtagtacaagtatggggcggggccagagagtattaggggctggagggtgagctgaggtgggacctgggaaaggcc

SEQ ID NO: 446969 - DNA, 201 bp, Homo sapiens
caaaatcattgtcccccttgtggtctttctccccaggaatccctggggttggcactgggccaagcccaggagcccttgcacagcttgttggaggccgctgrggacctggcccaggaggtacgaggccccactcatcctcaacccccatggaggcaacgttggcaggcagcctgcgccgggagggtctggggcagcccgggc

SEQ ID NO: 446970 - DNA, 201 bp, Homo sapiens
cgggcccttcctgctcagcgccgcactgctggttctggtgctcaaggtgggcgcgcctcggcctgcccggctgcagaatgggtgcgctggagggtgacagrcaggggcggccccacgtgggtgcgcgcccccaggccaatccaggagctgcaccctaagctcccgttgcctctcacagctgggagacatcctcccctacag

SEQ ID NO: 446971 - DNA, 201 bp, Homo sapiens
atggcaagggcaaggtagagtgcctaggagccctggactcaggctggcagaggggctggtgccctggagaaaataaagagaaggctggagagaagccgtgstggtgaaaccgtgtgcatgtgtgtccttgagccaggctgcacacatgtccacacagctgcctgcacatgcgtctggatatggctggccccttgcaagctg

SEQ ID NO: 446972 - DNA, 201 bp, Homo sapiens
gctgtgtgccacttattggccacctactagggctggtacacatctgcaaacaagtgctgtttgttagcacacattgcagtatatatatatatattttttttctttttttttcttttgagatggagtctcactgtcacccagcttggtgtgcaatggtgtaatcttggctcacggtaacctccgcctcccaggttcaagcga

SEQ ID NO: 446973 - DNA, 201 bp, Homo sapiens
tgtatttgctgtgtgccacttattggccacctactagggctggtacacatctgcaaacaagtgctgtttgttagcacacattgcagtatatatatatatawtttttttctttttttttcttttgagatggagtctcactgtcacccagcttggtgtgcaatggtgtaatcttggctcacggtaacctccgcctcccaggtt

SEQ ID NO: 446974 - DNA, 201 bp, Homo sapiens
atgtatttgctgtgtgccacttattggccacctactagggctggtacacatctgcaaacaagtgctgtttgttagcacacattgcagtatatatatatatattttttttctttttttttcttttgagatggagtctcactgtcacccagcttggtgtgcaatggtgtaatcttggctcacggtaacctccgcctcccaggt

SEQ ID NO: 446975 - DNA, 201 bp, Homo sapiens
ggggtttcaccgtgttagccaggatggtctccatctcctgacctcgtgatccacccgcctcagcctcccagagtgctgggattacaagcgtgagccaccayacctgccctattttatctttttttagagacggagtctcactctgtcgcccaggctggagtgcagtggtgagatctcggctcactacaagctccacctccc

SEQ ID NO: 446976 - DNA, 201 bp, Homo sapiens
ttttttttttttttttgagatggagtctccctctgttgcccaggctggagtgcagaggtgtgatctcagctcattgcaacctccacctcccagtttcaagygattctcctccctcagcctcccgagtagctgggattacaggcacgcaccaccactcccgactaatttttgtatttttagtagagatggggtttcaccgtg

SEQ ID NO: 446977 - DNA, 201 bp, Homo sapiens
ggtctaaggcagagaagatgggaatggagatttttattcctctcagggcttctcagtctgagtggttactccagtgactcctattgtcccttcagctggtygatcacaccgctcatgtacccagcctccttcttcttctccgtgcccagcacagcctatgtggtgctcacctgcataaacctctttattggcatcaatgga

SEQ ID NO: 446978 - DNA, 201 bp, Homo sapiens
agtgagtgactgacctcggtttcccctcttgggaagtggaactctgggcaggggggcagggcctcatggcacccccatcccaggccccgcctgctcggagytgattggagccctggacagccacccgctgtcccgcctgctctggagacgcctgaagcctctgatcctcgggaagctactctttgcaccagatacaccttt

SEQ ID NO: 446979 - DNA, 201 bp, Homo sapiens
caacccccatggaggcaacgttggcaggcagcctgcgccgggagggtctggggcagcccgggcacttcccttgggtgggttttcaggaggattagacagcragagggagaggctgcccctggcccagtgccctgccctggttagggcttggaggtgggatcattgccagctccgtctggtaacctctctctagctcctggc

SEQ ID NO: 446980 - DNA, 201 bp, Homo sapiens
cgcctctttgccccgcaacaccaagttccaccattctcattggtccacccacccttccttccgctgcacgttgcccctctctccttgactctgccttctgyggccctgcccacttgctcctcttctgcctaccccctagggcttcgcgcctttctcgctggggtcacggtcacattctcactctggccgttcccagtttgc

SEQ ID NO: 446981 - DNA, 201 bp, Homo sapiens
aaccatggaattttccttttcggaggagctactggtgcggacctcggccccccaagagtccagccccttgccccaccccgctggacccaaagggtgaggcmctacgaggcttaatagctggttgtccacatatgcccagttcccccccaaaacgagattccacagatgccaatgacaatgacctggacaccccaaccctca

SEQ ID NO: 446982 - DNA, 201 bp, Homo sapiens
gtgggcccctccctcaactggtacgaggctagtgacctgatggagctggtggggcaggagccagaatccgccctgccagacagcagcctgagtgagtgackgacctcggtttcccctcttgggaagtggaactctgggcaggggggcagggcctcatggcacccccatcccaggccccgcctgctcggagctgattggagc

SEQ ID NO: 446983 - DNA, 201 bp, Homo sapiens
gtccagggggaggagcggagtggtctaggaggcaggcggaccccagcgcctaggactcacccccgcatcccacagtgcctgtccttggacaagctggaggsggcaccctcagaggcagccctggtgtcgcgggccctgcaactgctcgcggaacatcgattctgggccggcgtcgtcttcttgggacctgaggactcttca

SEQ ID NO: 446984 - DNA, 201 bp, Homo sapiens
tccacgtttcgcatggtgacgggggacacattggccagcaggggcgaggctgtgctggcaggccacaggtgaggggtgccaggtagggtcagggtggggcrgggttggccctgacgtccttgtgcttccccacccctccacctccagtgaatggactgggctcactgccccacacctgcatggtctctgagacccctgcac

SEQ ID NO: 446985 - DNA, 201 bp, Homo sapiens
cccagacctggaggccgggaccacatggaggccctgcgatcctttctggaccctgggagcggtggctacagctggcaggacgcacacgctgatgtggggcrcctggtgggcacgctgggccgagtgacggaggtgagggcctgtccacctgcggggtctgtttcagtggggagggcaggtcccatcctagtgttcccaccc

SEQ ID NO: 446986 - DNA, 201 bp, Homo sapiens
tggcactgccccaccccgggccaaggacctcccgttccaggcatccaggctgtccctggtctctgcggtgatgctgcttgtccgtctgggcccccagacakagtgtgtctgacccagtgaggaagactcgtctgtgagatctccaatgagtccctttgcctctcagagcctcagtttccctatttgtaaagtgggggctat

SEQ ID NO: 446987 - DNA, 201 bp, Homo sapiens
ggacttgcaggccccaggacccccatgacctccatggctgagtccaccccatctctgcagtgctggtagaagaggcaccgcccggcctgagtcctggcgtmtccgttcgcagcctggagaagcgctttcctggaagcccgcagccagccctgcgggggctcagcctggacttctaccagggccacatcaccgccttcctgg

SEQ ID NO: 446988 - DNA, 201 bp, Homo sapiens
aaaggaatgaggttcagaaaggggcagggagttgcccgcagccgcaccgcacgtcttcagcccgaccgttgtcctgacctctctgtcccgtcccctgcccrgtctcaccatggccttctggacacagctgatgctgctgctctggaagaatttcatgtatcgccggagacagccggtaacgccccagtgtgagaccagggc

SEQ ID NO: 446989 - DNA, 201 bp, Homo sapiens
cgggaggaccacttgatcgctagggtagtacaagtatggggcggggccagagagtattaggggctggagggtgagctgaggtgggacctgggaaaggcccsatccggtagccctggccccactcactgcagattcgcggcgggtcacacactgaccctgcgggtgcccgccgcaaggtcccagccggcagcggccttcgtg

SEQ ID NO: 446990 - DNA, 201 bp, Homo sapiens
cggtggccacggtgacccagagcttcctgctcagcgccttcttctcccgcgccaacctggctgcggcctgcggcggcctggcctacttctccctctacctrccctacgtgctgtgtgtggcttggcgggaccggctgcccgcgggtggccgcgtggccgcggtgagagccgggtcgggcgtggatgggggacgccccccgc

SEQ ID NO: 446991 - DNA, 201 bp, Homo sapiens
ccttatcagcgtggccctggatgggtgggccctgagacccctgtgttagccaccagtatggtcagggactagccagctctctgagcccccggcgcccccayccccagcgtggcccgggaacccagtgctgcgcacctcagcatgggatactgccctcaatccgatgccatctttgagctgctgacgggccgcgagcacctg

SEQ ID NO: 446992 - DNA, 201 bp, Homo sapiens
ctggaggaggtggtgttttgaaggatgaatagcgtgtttatgagcagcaaggacattcagggaggaggcatggcacatgaggagctctggtggctcagatrtcccttgggaaggcctgggggacccatggtgtaggaggggtggggggctcacaagcccccagttctccctgtcggtgtccagtctctgagcccctgcttg

SEQ ID NO: 446993 - DNA, 201 bp, Homo sapiens
cagtggcctaatccaaacccttacccccgtgtgtattcccaacccaaagcacatttattgagggcactggggagccatgggtggttgtagagcaggagcarggacaggtgcaagcaagcctggagggtggatggaagcagcagctgatgggctggtcccccagatcgtgctgcctgccctctttgtgggcctggccctcgt

SEQ ID NO: 446994 - DNA, 201 bp, Homo sapiens
aatccgccctgccagacagcagcctgagtgagtgactgacctcggtttcccctcttgggaagtggaactctgggcaggggggcagggcctcatggcacccscatcccaggccccgcctgctcggagctgattggagccctggacagccacccgctgtcccgcctgctctggagacgcctgaagcctctgatcctcgggaag

SEQ ID NO: 446995 - DNA, 201 bp, Homo sapiens
caagcggtgccgggcgacccgatgggggtggagtcaggcagagtccacagggcctcagcaccaggcgtctccccgcaggccacttcccaaacaagccactkccatcggcgggcaccgtgccctggctccagggtctcatctgtaatgtgaacaacacctgctttccgcagctgacaccgggcgaggagcccgggcgcctga

SEQ ID NO: 446996 - DNA, 201 bp, Homo sapiens
tctatcccagccccttcgcctgactctttctctggctcccgcggtccctctgagcgattaatgctacataaggtgtgggcagagctggggtcgtgcctccrgctgggcaactgcctgtctctctgggtgcctgggtttgctttcttgggcctcggtttccacttctgtagagtggggtgatagtccagcacttcccctggg

SEQ ID NO: 446997 - DNA, 201 bp, Homo sapiens
atccgtgaccctcaactttgaccctgacccctgatggccctgcagatggcagctgcgggcagcacctatgcacaggcattgctggcctagacgtaaccctrcggctcaagatgccgccacaggagacagcgctggagaacggggaaccaggtaagtccttcccagtggccctggggtcctcccagccacccccccacagca

SEQ ID NO: 446998 - DNA, 201 bp, Homo sapiens
gagattccacagatgccaatgacaatgacctggacaccccaaccctcacacctgccctgaagacactgcggtccccaagctcccgcagcttttataggccycggcccagcaggtcccggattccacagcccagctctgagggacttgcaggccccaggacccccatgacctccatggctgagtccaccccatctctgcagt

SEQ ID NO: 446999 - DNA, 201 bp, Homo sapiens
aggtgggccagggccaggccggagggtcacggaaactatttgaagaagtaggagttagccgatggagggggatcagcttgtgcggaggatcagaggcacaygcaggagcaaggcagagggggcagggggtgggcaggggtcctcagaggaggagagggtcatcagtggagggggtgctgtccacaggtgaaccggaccttc

SEQ ID NO: 447000 - DNA, 201 bp, Homo sapiens
ctttctggaccctgggagcggtggctacagctggcaggacgcacacgctgatgtggggcacctggtgggcacgctgggccgagtgacggaggtgagggccygtccacctgcggggtctgtttcagtggggagggcaggtcccatcctagtgttcccaccctggtgttcccagggggaggcgggcccggccctagtaagagc

SEQ ID NO: 447001 - DNA, 201 bp, Homo sapiens
ggtcctggaggaggaagtggaggggttggatgcccagcttggggctacgggctgggagtctcgcgtaccttcctttcctctttttttttttttttttttttgagatggagtctccctctgttgcccaggctggagtgcagaggtgtgatctcagctcattgcaacctccacctcccagtttcaagcgattctcctccctca

SEQ ID NO: 447002 - DNA, 201 bp, Homo sapiens
tccgggaggtgtgggagatgctgggaccccggatcttcaccttcatgaacgacagttccaatgtggccatgctgcaggtgtgcgggggtgctggggaggtsggatgtggctccccggtgaggagggtagacaggcccggtggatgggaaggtgggctccgtgcagacccccacttttttttttttttttttgagatggagt

SEQ ID NO: 447003 - DNA, 201 bp, Homo sapiens
aagaatccagagtgacatggatggagaaagggccagaaaccaagactctcatggacccagtccctcctttctatatccacaggagacaggcagttccagtyacccctgcgctgggaggtggtcggcaagaacctcttggccatggtgatacaggggcccctcttccttctcttcacactactgctgcagcaccgaagccaa

SEQ ID NO: 447004 - DNA, 201 bp, Homo sapiens; identical to SEQ ID NO: 286745

SEQ ID NO: 447005 - DNA, 201 bp, Homo sapiens
tgcaggttctcggcaccagaagttcctgctgaagtggccaaggtcttggccagtggcaactggaccccagagtctccatccccagcctgccagtgtagccrgcccggtgcccggcgcctgctgcccgactgcccggctgcagctggtggtccccctccgccccaggcagtgaccggctctggggaagtggttcagaacctg

SEQ ID NO: 447006 - DNA, 201 bp, Homo sapiens
gggggtccagcctctgacctccttccggtgaatgttgacgacggctgaattgatcactgattctcaaggggggcatcggacatctgggacccttaagaggrcctttgccgatcacacacctgcagccccctgcccgttagaactcctgcactcccccttgccccgtcttacaaatggagaaactgagcccactcccccaga

SEQ ID NO: 447007 - DNA, 201 bp, Homo sapiens
cggaggtgagggcctgtccacctgcggggtctgtttcagtggggagggcaggtcccatcctagtgttcccaccctggtgttcccagggggaggcgggcccrgccctagtaagagcctgggatttgtagagatctcaggagggagccggccgtgggcctacgaggggaaaacatggcccagccccgaggtccagggggagga

SEQ ID NO: 447008 - DNA, 201 bp, Homo sapiens; identical to SEQ ID NO: 427890

SEQ ID NO: 447009 - DNA, 201 bp, Homo sapiens
tccacctcccaggttcaagcaattctcctgcctcagcctcccaagtagctgggattacaggcatgcgccaccacgcccagctaattttttgtatttttagyagagatggggtttctccatgttggtcaggctggtctcgaactcctgacctcaggtgatccgcccgcctcggcctcccaaagtgttgggattacaggcgtg

SEQ ID NO: 447010 - DNA, 201 bp, Homo sapiens; identical to SEQ ID NO: 427950

SEQ ID NO: 447011 - DNA, 201 bp, Homo sapiens; identical to SEQ ID NO: 427933

SEQ ID NO: 447012 - DNA, 201 bp, Homo sapiens; identical to SEQ ID NO: 427936

SEQ ID NO: 447013 - DNA, 201 bp, Homo sapiens; identical to SEQ ID NO: 427938

SEQ ID NO: 447014 - DNA, 201 bp, Homo sapiens; identical to SEQ ID NO: 138811

SEQ ID NO: 447015 - DNA, 201 bp, Homo sapiens; identical to SEQ ID NO: 427911

SEQ ID NO: 447016 - DNA, 201 bp, Homo sapiens
tgcctccagtctcggacttggttgttgcgcgctccggctccggctgagctgggagagttggaggaggtggcggcgggcagaggtgatgtctgggagccctyccttgacagcccgggccgagaaggtgagcgtcgacgctggtcgtgggggcggaggtaaggggcccggggcggggacgtagaggaggcgcgagggcggact

SEQ ID NO: 447017 - DNA, 201 bp, Homo sapiens
ttccctttcgtgtaaaatggtgctgttattactctgtcttgaaataggaaggtgggatttctggggaggctggtgaaggagggcagggttcttttctctaygtgtcatgttaaaattgccaaataaagtacctctgcctgtgatattttctggatgtcctttatttactgtgacgtgtgtttgggtgccttgtttaggggt

SEQ ID NO: 447018 - DNA, 201 bp, Homo sapiens
gcccatggaattatcttcactgaggactacaggaccagagtatgtgactgtgtgcgtcaggggtgctggggggagggcacaggttgggggagacagggaasttgggaaacagaaataaaaacaaaagaaagaatttccctgcccccacatcccatggagagggcacagggccctggtaaatagtaatatgagggagagaga

SEQ ID NO: 447019 - DNA, 201 bp, Homo sapiens
gggggaggaggaggaaggaaggagggggaggaggagggggggaggaagagggggaggaggatgaagaggaggaggaagaagaagggtatgagaggtggaargatctgagcaagaggtaagacaggaagagaaatgctgtcctgggggtggaggttggtagagagtgagggtggggatggaccatgtctctcatctctgctt

SEQ ID NO: 447020 - DNA, 201 bp, Homo sapiens
aagaagagggaagaggtaaagtaaaatataaactgaaatctaggctgagtgtggtggctcatgcctgtactcccaccactttgggagactgaggcaggagwatagcttgaaaccaaaagtttgagaccagcctgggcaacaaagtgagaccccatctttactaaataactgagatcccatctctactaaataaataaatta

SEQ ID NO: 447021 - DNA, 201 bp, Homo sapiens
atgtggtgggagccatggcgcagtctgcctaggcagtggcaggagcgcagaagactctgattcctctcctcggtcctaagaccgaatgtgtgtcaggacakgtggtcagggaagagaagctatttaactgaaccagtaatagtagcaggaaaagaaaaagtggagggagggcagtccaggtagggggcctggaacaagcaa

SEQ ID NO: 447022 - DNA, 201 bp, Homo sapiens
ggtggctcacacctgtaatcccagcactttgggaggccgaggtgggtggatctcttgagctcatgagtttgataccagcatgggcaacatgacataacccmatctctacaaaaaatacaaaaattagccaggcgtggtggtacgcgcctatagagctactggggaggctgaggtgggaggattgcttgagctggggaggcg

SEQ ID NO: 447023 - DNA, 201 bp, Homo sapiens
cccagtggtggggtttgagcaatgcttctctgcccttccatggaaagtggaaccagaaatggtgccaaggctgtggctgttccctttcgtgtaaaatggtrctgttattactctgtcttgaaataggaaggtgggatttctggggaggctggtgaaggagggcagggttcttttctctacgtgtcatgttaaaattgccaa

SEQ ID NO: 447024 - DNA, 201 bp, Homo sapiens
tggctcacacctgtaatcccagcactttgggaggccgaggtgggtggatctcttgagctcatgagtttgataccagcatgggcaacatgacataaccccakctctacaaaaaatacaaaaattagccaggcgtggtggtacgcgcctatagagctactggggaggctgaggtgggaggattgcttgagctggggaggcgga

SEQ ID NO: 447025 - DNA, 201 bp, Homo sapiens
cagacgtcagatcatgacaggccttgtacatcagtgttgtttccatcttacactgaggcgatgggctggtagagaatatcatagagagagggaatggtgtrttggagatagtggatgaggcagggaggtcagctaagaagatactgcatctgagaagtggtgaaggcctaaattaggtcagtgcagtagggagggagagga

SEQ ID NO: 447026 - DNA, 201 bp, Homo sapiens
aagccgagatcccgccactgcactccagcctgggcaccattgagcactgagtgaaccagacaccgtctgcaatcgcggcacctccggaggccgaggctggyggatcactcgcggttaggagctggagaccagcccggccaacacagcgaaaccccgtctccactaacaaaatacgaaaaccagtcaggcgtggcggcgcgc

SEQ ID NO: 447027 - DNA, 201 bp, Homo sapiens
tggctcactgcaacctctgcctcctgagttcaagtgattctcctgcctcagcctcccaagtagctggcattacaggcacctgacaccacgcccagctaattttttttttttttttttttttgagacggagtctcgctctgtcacccaggctggagttcagtggcatgatcttggcttactgcaagctctgcctcctgggtt

SEQ ID NO: 447028 - DNA, 201 bp, Homo sapiens
gagcagggggagatcagaatcgtccagctgggcttcgacttggatgcccatggaattatcttcactgaggactacaggaccagagtatgtgactgtgtgcrtcaggggtgctggggggagggcacaggttgggggagacagggaagttgggaaacagaaataaaaacaaaagaaagaatttccctgcccccacatcccatg

SEQ ID NO: 447029 - DNA, 201 bp, Homo sapiens
tctgctttcgatgatgcaatcattcagcgacagtggcgggcaaacccctcccggggcgggggaggtgtgagcttcacgaaggaggttgacaccaacgtggmcaccggcgcccctccacgccgccaacgagtccccgggcgtgcgtgcccttggagggagccaatccgcggccggcgtggggcccggcctggcggaggtgat

SEQ ID NO: 447030 - DNA, 201 bp, Homo sapiens
gcatctggtgcttccctgcctccctccagttccatccagcctgtcctcctgtttttttggtgaacctgccagaaaagctgccaaaaagctgactcttcttkttaataaaatgacccaagtttgtattcctccccacaagagaggaggcctatcttacctgggccttagaaagagccctgaaatagaattcagttcttggtg

SEQ ID NO: 447031 - DNA, 201 bp, Homo sapiens
gagattcatcaagtactttgttaaaggtatcccatctgcagctcaagcctgcagcccctcaccttttggtggctcctcaggcctctaggccttattcacckttcccctttcctgtgccacttctcctctagggcgccaggctgtccttagcatggtccggaaggcaaagtaccgggaactgctcctatcagagctcctggg

SEQ ID NO: 447032 - DNA, 201 bp, Homo sapiens
tcaagtactttgttaaaggtatcccatctgcagctcaagcctgcagcccctcaccttttggtggctcctcaggcctctaggccttattcacctttcccctytcctgtgccacttctcctctagggcgccaggctgtccttagcatggtccggaaggcaaagtaccgggaactgctcctatcagagctcctgggccggcggg

SEQ ID NO: 447033 - DNA, 201 bp, Homo sapiens
ctgcagcccctcaccttttggtggctcctcaggcctctaggccttattcacctttcccctttcctgtgccacttctcctctagggcgccaggctgtccttrgcatggtccggaaggcaaagtaccgggaactgctcctatcagagctcctgggccggcgggcgcctgtcgtggtgcggcttggcctcacctaccatgtgca

SEQ ID NO: 447034 - DNA, 201 bp, Homo sapiens
gtgatttctaacctttttgtaatctttagaaggtgataaaagctatggctatctctctccagaaaaatgcacgtttgccacatatacatagggtgtatgtrtagttaggggggaaatattttactaatcctgcgaggtccgtggttaaggactccaggtttagagtggaagttaatagggtcaaatccacaatgctgggaa

SEQ ID NO: 447035 - DNA, 201 bp, Homo sapiens
caggcctctaggccttattcacctttcccctttcctgtgccacttctcctctagggcgccaggctgtccttagcatggtccggaaggcaaagtaccgggarctgctcctatcagagctcctgggccggcgggcgcctgtcgtggtgcggcttggcctcacctaccatgtgcacgacctcattggggcccagctagtggact

SEQ ID NO: 447036 - DNA, 201 bp, Homo sapiens
aggaagagtgggtagaggagtgatttctaacctttttgtaatctttagaaggtgataaaagctatggctatctctctccagaaaaatgcacgtttgccacrtatacatagggtgtatgtatagttaggggggaaatattttactaatcctgcgaggtccgtggttaaggactccaggtttagagtggaagttaatagggtc

SEQ ID NO: 447037 - DNA, 201 bp, Homo sapiens
tgttctagctgtttgggaagttgaggcagaaggagtgcttgagcccaggaatttgaggctgcagtgagctatgattgcacgactgcactccaggctgggtracagagggagaccctgtctctaaaaaaatgaaaacaacaacaaaaaaacccagaactgaaatctgtccattggatttagcaggtagaaggttaatagtga

SEQ ID NO: 447038 - DNA, 201 bp, Homo sapiens
tcctgtgccacttctcctctagggcgccaggctgtccttagcatggtccggaaggcaaagtaccgggaactgctcctatcagagctcctgggccggcgggygcctgtcgtggtgcggcttggcctcacctaccatgtgcacgacctcattggggcccagctagtggactggtgagtctttccctggcctctggcagattat

SEQ ID NO: 447039 - DNA, 201 bp, Homo sapiens
gaagttaatagggtcaaatccacaatgctgggaaacaccatcatttaaggcagtgttactgaatatatgagctgagttattatgcctgtgtcaaaattacrtgggctgcttgttaaaaaaaatacaggttcctgggactcatccaaggttaatgaattacgctctcttggggcgggatttgggactctacatttttgaact

SEQ ID NO: 447040 - DNA, 201 bp, Homo sapiens
tggagttcagtggcatgatcttggcttactgcaagctctgcctcctgggttcacccattctcccgcctcagcctcccgagtagctgggactacaggtgccygccactatgcctggctaattgtttttttttttgtatttttagtagagatggggtttcaccgtgttagccaggatggtcttgatctccggacctcgtgatc

SEQ ID NO: 447041 - DNA, 201 bp, Homo sapiens
ggctgcttggtcatttgcttgattattttctcacacagtttttcctttactaagagaaaatgcccccatattggcaaacaaaatctccctgcctgagagcrcccagagtatagcagagcatcttaccctgatacgcctcttttcactctcttctctgtggagacagaaggagcttcaagagcagggggagatcagaatcgt

SEQ ID NO: 447042 - DNA, 201 bp, Homo sapiens
ttaatgaattacgctctcttggggcgggatttgggactctacatttttgaactgcctcaagtgctttttaagtgtgccttaaaatttgagatccactgacrtaaagggaaagcagaagaagaggaatctgtgacagaggcagagagggacttgcctgagttaagaggaacccagaggccggcgcggtggctcacacctgta

SEQ ID NO: 447043 - DNA, 201 bp, Homo sapiens
acaagagaggaggcctatcttacctgggccttagaaagagccctgaaatagaattcagttcttggtggcttatcaaaagcacacaggggcctggcaggaastgtaaaagcttgatgttaatcatactgggactaagaggatagagaatggtaggagctgggatacccctaaacattcacattaaaacaaaaaaaacccaaa

SEQ ID NO: 447044 - DNA, 201 bp, Homo sapiens
ggctcactgcaacctctgcctcctgagttcaagtgattctcctgcctcagcctcccaagtagctggcattacaggcacctgacaccacgcccagctaattttttttttttttttttttttgagacggagtctcgctctgtcacccaggctggagttcagtggcatgatcttggcttactgcaagctctgcctcctgggttc

SEQ ID NO: 447045 - DNA, 201 bp, Homo sapiens
gctcactgcaacctctgcctcctgagttcaagtgattctcctgcctcagcctcccaagtagctggcattacaggcacctgacaccacgcccagctaattttttttttttttttttttttgagacggagtctcgctctgtcacccaggctggagttcagtggcatgatcttggcttactgcaagctctgcctcctgggttca

SEQ ID NO: 447046 - DNA, 201 bp, Homo sapiens
ctcactgcaacctctgcctcctgagttcaagtgattctcctgcctcagcctcccaagtagctggcattacaggcacctgacaccacgcccagctaattttttttttttttttttttttgagacggagtctcgctctgtcacccaggctggagttcagtggcatgatcttggcttactgcaagctctgcctcctgggttcac

SEQ ID NO: 447047 - DNA, 201 bp, Homo sapiens
cccggagacctttggagttaagaggcggcggaagcgagggcctgtggagtcggatcctcttcggggtgagccaggtaaccatggcaaccccgggggtgggkcctcgcttccggtagccgagagttttgttagaaccgcgtccccgccccagttccctgtccgtgagccgatttatctgcccagggtcggcgcgcgcggctg

SEQ ID NO: 447048 - DNA, 201 bp, Homo sapiens
gggggaggaagagggggaggaggatgaagaggaggaggaagaagaagggtatgagaggtggaaggatctgagcaagaggtaagacaggaagagaaatgctktcctgggggtggaggttggtagagagtgagggtggggatggaccatgtctctcatctctgcttgtaggtcctcaaggcctgtgatggccgaccgtatgct

SEQ ID NO: 447049 - DNA, 201 bp, Homo sapiens
taagaccgaatgtgtgtcaggacatgtggtcagggaagagaagctatttaactgaaccagtaatagtagcaggaaaagaaaaagtggagggagggcagtcmaggtagggggcctggaacaagcaactgcaccaacagaggcagttggtgcgagcacagaaccaccccaggctgggattttgttatccagtctctcttgcat

SEQ ID NO: 447050 - DNA, 201 bp, Homo sapiens
catactccctgccccagaaaagttgtggtttagtaagaagaacccccccccccccgctttttttttagacagagttttgctgttgttgcctaggctggagwgcagtggcgcaatctcggctcactgcaacctccgcctcccgggttcaagtgattctccacctcagcctcccaagtagctgggattacaggcatgtgccac

SEQ ID NO: 447051 - DNA, 201 bp, Homo sapiens
cacttatatgcccctgttctactgaagaagacatggtaatggaatgcctgataccagggccaggcattcccatctataacttggattcctgttctgagagrtataagagatggattctgcatatatccttaggtcattctgaacaagtcaggaactatattcatcagggttttccagagaaacagaaccaataaggttgtg

SEQ ID NO: 447052 - DNA, 201 bp, Homo sapiens
cacacatttgttgggtagtgctggctgttggctggcctatgtctattcattaggctagctttggcttcttcacatggctgctagattttaaaagtagaaasaagggcaagctccagtatgcaagcacttttcaaacctttgcattacgtgggatagtttcgcattcctataaatgtttttgagctctgctctgggatgcag

SEQ ID NO: 447053 - DNA, 201 bp, Homo sapiens
ttctactaaaaatacaaaaattagctgggcgtggtggtgggcacctataatcccagctacttgagaggccgaggctggagaatcacttgaacccaggaggyggaggttgcagtgactggagattgcgccattgtgctccagcctggttgacaagagcgaaattccgtctcaaaaaaaaaaaaattttaagatttaatagat

SEQ ID NO: 447054 - DNA, 201 bp, Homo sapiens
tggatttgtgtccctaattgttgtttaaaatatctgctgtatatcactgtatgatacagctttgaaatgaacaattatctcagtagaagattgcctgaccraaaaaaagacaacaaaattgccaaatcattcagtctcttatatcaaaccttggcaaggttagtgttactaattcatgcatctgggacaacatctacttgt

SEQ ID NO: 447055 - DNA, 201 bp, Homo sapiens
agaagagggtctcttttgcacatcttatggtgggttaaagaaggtatgaggggaaaagttttttttttttttttccagtaggtagatatggtcatttcagragaagaatgatagtgtattataaaaatttatgttaacaaactgttgtattttacctagtcgttttacatgcctaaatattgacagtatactagatatgtt

SEQ ID NO: 447056 - DNA, 201 bp, Homo sapiens
gattggatgcctgctatatgcctgtcacttgggatacagtgcctgtccctgtaaagtacagattccagtagaaaagacagacattaagtaaacaaataacrttaattacagattatgctaaatgctatgaagaaaatgggcagagtaatggggttggagggaggaggaaggtagaggtagctgattaaagtatatagggaa

SEQ ID NO: 447057 - DNA, 201 bp, Homo sapiens
gtgtgtgtatatatatatatatatatatgagaactgtgacacacacacacacattagacattgtgagtgtgcatcacatttctcttaaacctctccctctcctcctttcactactttccctttccccttcctctctcttccattcttttccctttatgcttcagtttgggtatttttttattgatttgtcttctagtttac

SEQ ID NO: 447058 - DNA, 201 bp, Homo sapiens
ggaaagtcaaggctgtgaggctgcagtgagccctgattgtgtcactgcattccagcctgggaaacagagagagatctcatctctctctctctctctctctcacacacacacacacacacacacacacacacacacacatacacacacatacaaatagctttttgatttctaaaggcagtttatgttctttagagaacattt

SEQ ID NO: 447059 - DNA, 201 bp, Homo sapiens
aaagtcaaggctgtgaggctgcagtgagccctgattgtgtcactgcattccagcctgggaaacagagagagatctcatctctctctctctctctctctcacacacacacacacacacacacacacacacacacacatacacacacatacaaatagctttttgatttctaaaggcagtttatgttctttagagaacatttga

SEQ ID NO: 447060 - DNA, 201 bp, Homo sapiens
aagtcaaggctgtgaggctgcagtgagccctgattgtgtcactgcattccagcctgggaaacagagagagatctcatctctctctctctctctctctcacacacacacacacacacacacacacacacacacacatacacacacatacaaatagctttttgatttctaaaggcagtttatgttctttagagaacatttgaa

SEQ ID NO: 447061 - DNA, 201 bp, Homo sapiens
ttatttatcatctgaagaatcagacaattctaaattgtctcataatcagagtttatatgttaattctttctttggaatgctttttctctttgaaagtcaayaattttaaggcatcagtggggtatgtgactcatattttagaaattctcatttgaaaagcctgcttaaaagaatacagaacaacaaagatatgtttattac

SEQ ID NO: 447062 - DNA, 201 bp, Homo sapiens
gtcaaggctgtgaggctgcagtgagccctgattgtgtcactgcattccagcctgggaaacagagagagatctcatctctctctctctctctctctcacacwcacacacacacacacacacacacacacacacatacacacacatacaaatagctttttgatttctaaaggcagtttatgttctttagagaacatttgaaaa

SEQ ID NO: 447063 - DNA, 201 bp, Homo sapiens
tgtgtcactgcattccagcctgggaaacagagagagatctcatctctctctctctctctctctcacacacacacacacacacacacacacacacacacacatacacacacatacaaatagctttttgatttctaaaggcagtttatgttctttagagaacatttgaaaaaaaatggaccaattgtagttttttcttgccct

SEQ ID NO: 447064 - DNA, 201 bp, Homo sapiens
gtgtcactgcattccagcctgggaaacagagagagatctcatctctctctctctctctctctcacacacacacacacacacacacacacacacacacacatacacacacatacaaatagctttttgatttctaaaggcagtttatgttctttagagaacatttgaaaaaaaatggaccaattgtagttttttcttgccctt

SEQ ID NO: 447065 - DNA, 201 bp, Homo sapiens
acaataatgtcatctgcaaagagggacaatttgacttcttcttttcctaattgaatacgctttatttctttctcttgcctgattgccctggccagaacttccaacactatgttgaataggagtggtgagagagggcatccctatcttgtgccagttttcaaagggaatgcttccagtttttgtccattcagtatgatattg

SEQ ID NO: 447066 - DNA, 201 bp, Homo sapiens
aaaaaatttagcgggatgtggtggtgcacacttgtaattccagctgcttgggaggctgaggcatgataattgcttgaacctgggaggcagaggttgcagtrggctgagatcatgctactgcactctagcctgggtgacagagcaagaccttgtttcaaaaaacaaaacaaaaaaaaatgtaaatatccagtagtgaagtga

SEQ ID NO: 447067 - DNA, 201 bp, Homo sapiens
tgtctttggttctctttatgtgatgggttacgtttattgatttgcgtatgttgaaccagccttgcatcccagggatgaagctgacttgatcttggtggatragctttttgatgtgctgctggattcagtttgccagtattttattgaggatttttgcatcgatgttcatcagggatgttggtctaaaattctctttttttg

SEQ ID NO: 447068 - DNA, 201 bp, Homo sapiens
tggtaattcaacacttaacttcttgaggaactgtcatgcttctttccagagtagctgtaccattttacgtttctacaacagtgtatgaggatagcagtttctctacattctcacgcttattttccatcttttttattgtagccatcttaatgggtataaagagtgatatggcattctggtatttacttgtttttgctgtat

SEQ ID NO: 447069 - DNA, 201 bp, Homo sapiens
cagattaaactttacagaagtctggaaaatgtatttaataggtagcaaaccaatatgagttattgaaagaagcaaatgtattactttctaagagaatattsatcatactttcagtaagagaattggctttctgtaaactgcaagctcagtatattatatattcttctcttcttcctacaaaaacccaagataagaattctg

SEQ ID NO: 447070 - DNA, 201 bp, Homo sapiens
ctatcccctccttatccaagccttcaatataccatgaagtaagtaacattggaaaggtggaattattttaaattatattgagtaacaaatcaaaaagtcartttcttatcagagataaatattcctaaaatatctttactgatttgcttcttaaaagtggatgtttgttattagaagactgagctgtgacgagagaggtag

SEQ ID NO: 447071 - DNA, 201 bp, Homo sapiens
ctttacagaagtctggaaaatgtatttaataggtagcaaaccaatatgagttattgaaagaagcaaatgtattactttctaagagaatattcatcatactytcagtaagagaattggctttctgtaaactgcaagctcagtatattatatattcttctcttcttcctacaaaaacccaagataagaattctgttgttggcc

SEQ ID NO: 447072 - DNA, 201 bp, Homo sapiens
ttccttctctagtttacggcatcctgggtagaattttcttttaatatgtcctgcttggtgttggcagagcgttctgaatttctagattgatttctgtcatsagtttttgaaaactcccagttattctttcttagaatattgcatttatcaatttatctacttttctaggacttctgttttatatgtgtgtgtgtatatata

SEQ ID NO: 447073 - DNA, 201 bp, Homo sapiens
ggtatgaaagttttgcttcacaaccaaaatagcaggacttggaacaatttaaaaagttgtgctgaagattagatatttgctcaagagtataaatgatctgyttcttcataggtataatggacagtgggaccttggccaggaagttcttgatgatatcatttatagagcccagctagagcttttttctcaaccactattggt

SEQ ID NO: 447074 - DNA, 201 bp, Homo sapiens
tgggaaagaggtgcatcattaaagttgtttgttcccagatgttctcagtactgagacatttgtcagtgctttagataaaaatttttattgatgtttggtgttttgttctttgtcttttctccttttccaagaataatgcaatctcagtcacaaagaaaatttctggttctattttaggtggaattctgtagtgttttgagt

SEQ ID NO: 447075 - DNA, 201 bp, Homo sapiens
atcagactttcagcttgatttttaacttttcattttgaaataacttcagacttacaaaaaacattgctaaaatagtacaaagagtttccataaacccttcrccattcatctatgggaagctttttagaggtacaacttccctagttcctacccgaggatttaagtgggtcaactgggttaagacatagaagtgtatgtttt

SEQ ID NO: 447076 - DNA, 201 bp, Homo sapiens
gcctccacctccttcacagtggcatatgtgacaaacccaaagcccgtggagcacttggtgtttggatctctcattaccacacagtctgtgagcgttccccrttgctcaaaatggctcctcaggctctcatcggttgtttcaaagctcaaccctccaatgaagagcttcctcagctgttcgggctctttaggagactctgac

SEQ ID NO: 447077 - DNA, 201 bp, Homo sapiens
acaaacccaaagcccgtggagcacttggtgtttggatctctcattaccacacagtctgtgagcgttccccgttgctcaaaatggctcctcaggctctcatsggttgtttcaaagctcaaccctccaatgaagagcttcctcagctgttcgggctctttaggagactctgacttagacatgacggcagggtgaagagagact

SEQ ID NO: 447078 - DNA, 201 bp, Homo sapiens
acagatttcggatttttattttttattttttatctttcacctgttcacaactgtatgcctaggcccagaacgatgactggtatataacaggcactcaatawatacttgaggaatgaataaattgaataaatgaatttaggaaaacaaaaactattttatttgatgaatctggaaatcacatgttaaatagtgtattttcct

SEQ ID NO: 447079 - DNA, 201 bp, Homo sapiens
tgcctcagcctcccaaacagctgggattacaggcacccaccaccacacctggctaatttttatatttttagtagagacggggtttcaccatgtttggccaggctggtctcgaactcctgaccttaagtgatctgcctgcctcagcctcccaaagtactgggattatagacatgagccactgtgtctggctattataatggt

SEQ ID NO: 447080 - DNA, 201 bp, Homo sapiens
gatattctgtttctttcagcattagtaatttaatttatattttttaagaaatgtgtccgttttatactgacatggttttttttgtttgttttggggggaattttttttttttttgagacagggtgtcactctgttgcccaggctagagtgttgtggcacagttatggctcactacagccttaaactcgtgggctcaagcaa

SEQ ID NO: 447081 - DNA, 201 bp, Homo sapiens
gtgtgtgtgtatatatatatatatatatatgagaactgtgacacacacacacacattagacattgtgagtgtgcatcacatttctcttaaacctctccctctcctcctttcactactttccctttccccttcctctctcttccattcttttccctttatgcttcagtttgggtatttttttattgatttgtcttctagttt

SEQ ID NO: 447082 - DNA, 201 bp, Homo sapiens
tgtgtgtgtatatatatatatatatatatgagaactgtgacacacacacacacattagacattgtgagtgtgcatcacatttctcttaaacctctccctctcctcctttcactactttccctttccccttcctctctcttccattcttttccctttatgcttcagtttgggtatttttttattgatttgtcttctagttta

SEQ ID NO: 447083 - DNA, 201 bp, Homo sapiens
acacagtctgtgagcgttccccgttgctcaaaatggctcctcaggctctcatcggttgtttcaaagctcaaccctccaatgaagagcttcctcagctgttygggctctttaggagactctgacttagacatgacggcagggtgaagagagactttaacgatgcttcttcggcggcgtccacgggcagaaaggagaagattt

SEQ ID NO: 447084 - DNA, 201 bp, Homo sapiens
ataatctcttaggtgatgttcttcagtgtcttctttaatgccaccaacaaatatctttttcacagttaagtgggcacctggtctttgagaatcttctctcragacagctctctttggttccacgactcttccatccaccttctgtggccttgcattcatagctgcctccacctccttcacagtggcatatgtgacaaaccc

SEQ ID NO: 447085 - DNA, 201 bp, Homo sapiens
cctgggctcaagggatcttcctgcctcagcctcctgagtagctgagattacaggtgcacaccactacacctggctaagttttttttttattttttatagayattgggtctcaccatgttgcccaggctggtctggaacccttgggctcagtcctgcctcagcctcccaaagtgctgggattgcaggcatgagccactgtgc

SEQ ID NO: 447086 - DNA, 201 bp, Homo sapiens
ccagcatttttgggaggccaaggcaggcatatcacttgaggtcaggagttcgagaccagcctggccaacatggtgagactccgtctctactaaaaatacaraaattagctgagcatggtggtgtgttcctgtaatcccagctacctgggaggctgaggcaggagaattgctggaactgaggagttagaggttgcagtgagc

SEQ ID NO: 447087 - DNA, 201 bp, Homo sapiens
gctctgtcgcccaggccagaatgcagtggcacgatcatagctcactgcagcctctatctccggtggtcaagttatgctctgacctttgggtaccaagtaaytaggactggatgtgcacgccaccatgcccagctaattttcttgatttttagtagagacaaggtctcactgtgttgccaggctggtcttgaactccgagct

SEQ ID NO: 447088 - DNA, 201 bp, Homo sapiens
ctggtcttgaactcctgacctcaggtgatccacctgccttggcctcccaaagtgctgggattataggcatgagccaccttgcccagctgcaaaggccccaccctcttaataccaccatatcgatgattaagtttcaacatgaatttagaccacaacagctgttttgaacatgcattcacaaatttttgtgtgaacatacat

SEQ ID NO: 447089 - DNA, 201 bp, Homo sapiens
tttccatcttttttattgtagccatcttaatgggtataaagagtgatatggcattctggtatttacttgtttttgctgtatgttttagttttttatgtagycaactttatcaggaatacacatacatttttttccccaaagctaaatatgctttagctctgcatatttttctttttttcttaagacagggtcttgctttgt

SEQ ID NO: 447090 - DNA, 201 bp, Homo sapiens
tttcttcttagagtggtcaaattccctagaaacaactcttctggtatcttaactagagatctttttgctagtattttggtggcaaactggcaatatctagkcaggtatatttcacttcacttaatcttcctattttcagtttggcatccacccccatcacagctagggctcccaggtagaaattagtttttatcctttcag

SEQ ID NO: 447091 - DNA, 201 bp, Homo sapiens
cttctttggaaggggagtattaatggaaagaaactattccctgctctgtgaggggaaaggaaagggttttttccttcccaaaagtcaagataaggaggtcytgaaagagtcactctctgtcattaagaagagagatttacatttgctctttggttgggtatctgcctagccaccaatctcacttatatgcccctgttctac

SEQ ID NO: 447092 - DNA, 201 bp, Homo sapiens
ggctcactgcaagctccacttcccaggttcacgccattctcgtagctgggactacaggcacccgccaccatgcccggctaattttttttttttgtattttyagtagagacggggtttcaccgtgttagccaggatggtcttgatctcctgacctcgtgatccgcctgcctcagcctcccaaagtgctgggattacaggcgt

SEQ ID NO: 447093 - DNA, 201 bp, Homo sapiens
cttcataggtataatggacagtgggaccttggccaggaagttcttgatgatatcatttatagagcccagctagagcttttttctcaaccactattggtaagttattatcttaactctttattaaatatactggtacctaaaaaaggtactaggttaaaaatgtaagacaatccaaataattaggggaaaatttgtattcca

SEQ ID NO: 447094 - DNA, 201 bp, Homo sapiens
tattttgtgtatttagtatacattataaacaaaattccacataataaagtttagttgtataactgaaaggtaataaggtacaagaaaattgaatctcatgrtaaatattcttctgtaccagtgctcactcctctcttagttactttaaaaaatcattagcaaacatttccatctctagaagtctgaaggaaggagcaaggg

SEQ ID NO: 447095 - DNA, 201 bp, Homo sapiens
atcagccaaaagagacacatatagtagaatatgaagggtttcaaacacaaagcatctgttgtcctttcccctgaagtcaggatacattaccctcctggcaycaatgcatgacagtaaacacaaagtattggtaatgggagaggctcatttaagctctggtttccagagttttttttattgaggcatcattatgtaggcatg

SEQ ID NO: 447096 - DNA, 201 bp, Homo sapiens
atggtaggacaaaatgccagaagtatttagggaacatttctcctcatgtaaacagaagagtggagaacatcctaatgtttatcagagattaaattttgcaygttatttatcatctgaagaatcagacaattctaaattgtctcataatcagagtttatatgttaattctttctttggaatgctttttctctttgaaagtca

SEQ ID NO: 447097 - DNA, 201 bp, Homo sapiens
attttttgtacttttagtagagacggggtttcactgtgttagccaggatggtctcgatctcctgacctcgtgatccacctgcctcggcctcccaaagtgcygagggattacaggcgtgagccactgcacccggccattggacttttggtctttaaagtgtgtttcttgctccaaaaatgtagctaagcagtccatatgggt

SEQ ID NO: 447098 - DNA, 201 bp, Homo sapiens
cccctccttatccaagccttcaatataccatgaagtaagtaacattggaaaggtggaattattttaaattatattgagtaacaaatcaaaaagtcagtttyttatcagagataaatattcctaaaatatctttactgatttgcttcttaaaagtggatgtttgttattagaagactgagctgtgacgagagaggtagaaaa

SEQ ID NO: 447099 - DNA, 201 bp, Homo sapiens
ataaatcagatactgttatcttcttgcttcgaactctgcaatatcttctcactttacttgaggtaaaaggcagaccatttctattgcttgcaaaacccacrtgtattcctgccgcatttcttacagttcttgccccatttcctacagttctcccctttatcagctgcgctggtcttctctctgttgctgttatttctgtgt

SEQ ID NO: 447100 - DNA, 201 bp, Homo sapiens
tctccatgatgccatatccccataatcttgtatcccccctcactcatacagcatactcatatatcatatatcattctcaaaaaggtctttaggccaggcayggtggctcatgcctgtaatcctaccactttgggaggtgtaggcgggtggatcacctgaggtcaggagtttgagatcagcctggccaacatggcgaaaccc

SEQ ID NO: 447101 - DNA, 201 bp, Homo sapiens
catgaggaagaaaaggtaggacattataattggagtgaatgttctgtgctacgaaaacaaagcttattatctctgacggtaaaatggggtagttgattccytaaggcagtggaggaatttgattgaacagtaaaagaagtagcattgtgttagtccaattggctgctactgcaagaaactagatcatggtccatgcttgga

SEQ ID NO: 447102 - DNA, 201 bp, Homo sapiens
ggggttgtggagaccaaagttcccattatgtaaaggaagcctccaggtggcaggcttcagagataatacattgtaaatgtttcttatcagggttgattctytcctggatcaggcaaaaggcctgagaaaggaagggaattaacttcagaatgtagattttccgcacaagagacagctttgcaggactgtttgaagatatgg

SEQ ID NO: 447103 - DNA, 201 bp, Homo sapiens
atgaaatccctacatggcaacctaacataccagtgaggtcaaattcttttaataacccattaggaaatagagcaagtcactctgctaattctcagccttcygctacaacagtcactgcaattacaccagctcctattcaacagcctgtgaaaagtatgcgtgtattaaaaccagagctacagactgctttagcacctacac

SEQ ID NO: 447104 - DNA, 201 bp, Homo sapiens
ggaggatcactcaaacccaggagattgggtcgcaatgagttgtggttgcaccactgcactccagcctgggcaacagagcaagaccctgtctctaatgggaaaaaaaaaaaaaaagactcccattccaaagttactgatttgagcgttctttttcacactggcactaacacctccacttaatgaatgcttggttgatgtttt

SEQ ID NO: 447105 - DNA, 201 bp, Homo sapiens
atatatagtctaagtatcttcttttgtcttatatttgtattcctgtaatatagttctctgaaaacgtaatctctaagaggataagagccagaactactatrcacaatggcaatgtgcttaataaaataccaagatactcatataaaaaagtagttctttttttttttttttttttttttttttaagacggagttttactct

SEQ ID NO: 447106 - DNA, 201 bp, Homo sapiens
gctaaatctttgtacatacctaatgatttcctaaaagtaagttttagaaaacttaaaaaacgttaaggcttttcatagatattgctgtctagaaagatagyaccaatttattattttatttttttatttttttgagatggagtttcactctgttgcccaggctggagtacagtggtatgttctcagctcactgcaacctct

SEQ ID NO: 447107 - DNA, 201 bp, Homo sapiens; identical to SEQ ID NO: 281999

SEQ ID NO: 447108 - DNA, 201 bp, Homo sapiens
gctgaagcaatcctcccacgttggcctcccaaaatgttgggattgcaagcatgagcctgcacctggcttgtagttattttatacattacatctacatacgyttaaaacctcatccagccaggcacggtggctcacacctgtaatcccagcactttgggaggccaaggcaggtagatcatgaggtcaggagatcgagaccat

SEQ ID NO: 447109 - DNA, 201 bp, Homo sapiens
ctgtattaaccactttatagctttcctttctttctttcttttacagagttaattatttatattgtaaagaattttaacagtcctggggacttccttgaagsatcattttcacttttgctcagaagaaagctctggatctatcaaataaagaagtccttcgtgtgggctacatatatagatgttttcatgaagaggagtgaa

SEQ ID NO: 447110 - DNA, 201 bp, Homo sapiens
gttctaaccctggttatttggttattttagatgttttatttacatcaatgggagattgttatacatcacaaaagttatttagtcattgaataacattttcrctaagtaggaacagcaatcatttttcagcatgaagatacagcgttgctttcacttttgatctgacaattattagaaagtgaactgaagaaaatgtcagta

SEQ ID NO: 447111 - DNA, 201 bp, Homo sapiens
ctacatcgtaaaaaacaattagagaatgaaatgatgcgggtaaaaccttttaaaatgtccatttttatacttaatcatctgtttgcttggtgtttattttraaatattgtgtccagtatttttctttctttttatagctaaataaaatatattatcagttatggaatttaaaagtgaataaatattaaagtacttttgatt

SEQ ID NO: 447112 - DNA, 201 bp, Homo sapiens
ggttgcagtgagccaagatcgtgccattgcactccagcctggggaacaagagcgaaactccatctcagaaaaaaagaactgcatcattctttttgacttaratgtatattatataaatgtactatgaattacttgaacaatcctccactgatgaacatctggactggtgtcaacttttgctgttataaatgatgttgcgag

SEQ ID NO: 447113 - DNA, 201 bp, Homo sapiens
tctttttatagctaaataaaatatattatcagttatggaatttaaaagtgaataaatattaaagtacttttgattgtagcattttattttagtatttcaakatttattcagaatttcctataataaaatctcgtgtaaattaagaaaaatataatttgcggtatacagtttaggtgtacataatacctttatatgaaaatt

SEQ ID NO: 447114 - DNA, 201 bp, Homo sapiens
tttgtaaaatttaaaatttgatcctctaggtgaagttgttaataagaggttacctgttttattgttcacttaataatccctggcatttgtataaatgcttrgtatgcttactaaggaactttttttttttttttaaatcatcatagctacgatttgaggtaaatctaggttataggctaggaagtaggcatggagagatta

SEQ ID NO: 447115 - DNA, 201 bp, Homo sapiens
gatcctctaggtgaagttgttaataagaggttacctgttttattgttcacttaataatccctggcatttgtataaatgcttggtatgcttactaaggaactttttttttttttttaaatcatcatagctacgatttgaggtaaatctaggttataggctaggaagtaggcatggagagattaagtaacttgtcctgaaccc

SEQ ID NO: 447116 - DNA, 201 bp, Homo sapiens
ttttttttttttttttttttttggatttttagtagagaccaggtttcaccgtgttagccaggacggtctcaatcttctgacctcatgatttgcctgcctcygcctcccaaagtggctgggattacaggcgtgagcgaccacgcccagcctgtttgtttttttttttttgagacggagttttggtctgttgccaggctggag

SEQ ID NO: 447117 - DNA, 201 bp, Homo sapiens
gctacttgggaagctgaggcgggaaaatcccttgaactcagaaggcggaggttgcagtgagccaagatcttgccatcgcactccaccctgggtgaaagggygaaactcctcaaacaaaacaaaacaaaacaaaaaggtctttagtccattttgaagatttagtccagtttactctttgtcacctactgcctcctggccttg

SEQ ID NO: 447118 - DNA, 201 bp, Homo sapiens
gttggagggttcaactacctgattttaaaatgtactgtgaagcttcaataatgtagacagtaagatagtggcaaacagatacacacttagatcaatggaasagaatatagaatgcagacataagaccacaccactatggccatttgatctttgacaaaggtgcaaatggaaaaatgatagttttccaacaaatggtattga

SEQ ID NO: 447119 - DNA, 201 bp, Homo sapiens
gggcgtggtggcgggtgcctgtaatcccagctattggggaggctgaggcaggagaattgcttgaacccaggaggcagagtttgcagtgaggcaagatcgcrccactgcactccagtctgggtgacagagtgagactccatctcaaaaaataaaaataaaaaaataaaaataaatttaaagcaacaatacccttctaaagaa

SEQ ID NO: 447120 - DNA, 201 bp, Homo sapiens
cgagaacaaaactccgtctcaaaaaaaaaaaaaaaaagaaaaaaagaaaagaatacatatatgtatatgtttaaatagtttatcattgtatttaacagacrtaagtttattctgtcaaatttctataaatgtttctcaatcctcactctccatttccatacttaatctcatgtcagtttgtaatatatcttatgtcagttt

SEQ ID NO: 447121 - DNA, 201 bp, Homo sapiens
gaggcggaggttgcagtgagccaaggttgcaccactacactcctgcactctagcctgggtggtagagcaagattctgtctcaaaaaaaaaaaggctgggcrcggtggctcacacctgtaatcccagcactttgggaggctgaggtgggtggatcatgaggtcaggagttcaagaccagcctggccaacatggcgaaacccc

SEQ ID NO: 447122 - DNA, 201 bp, Homo sapiens
agttaaaaacaacaacaaaaaaagatagctggaattatccctgactggagtttcactaaacaagtacaaaataagatcgataatattgctaaaagggtaattttttttttttttttgagacaggcatgagccaccgtgcccagcctgaaaggataatttaaatccttaatcagagcgtactcctcctctacctttatcggc

SEQ ID NO: 447123 - DNA, 201 bp, Homo sapiens
cctcgtgatcagcccaccttggcctcccaaagtgctgggattacaggcatgagccaccacacccagctgaaaataagaaattttatttctggcacattctrtttacttatttgattaatattattttctatcatttttacacttaagtgttctaaaaatactggatttggaccaggaaatagagagaggaggaggagggaa

SEQ ID NO: 447124 - DNA, 201 bp, Homo sapiens
ggaggccaaggtgggcggtcacctgaggtcgggagttcgagaccagcctgaccaacatggagaaactccgtctctactaaaaatagaaaattaaccgggtrtggtggcacatggcctgtaatcccagctgcttgggaggctgaggcaggagaattgcttgaacccgggaggtggaggttgcggtgagccaagatcgcgcca

SEQ ID NO: 447125 - DNA, 201 bp, Homo sapiens
gccattctccttggcttgcagatggcggccgccttgctgtgtcctcatatgtttgtccctctgcatgtgcatgtgtctggggtctccatctccatgtccarattttctcttacagggatacaggtcatactgcattaggacccaccctaatgacctaatttaatcttaattaccaaatacagtcacatcttgtggtactgg

SEQ ID NO: 447126 - DNA, 201 bp, Homo sapiens
tttcataatgctagttaattatcttaacctatattgtctttatgattgtgtgtataattttaaggtatattgaagaatactggggttttgcttgcctttcmtttttgcttacttagtttttttttcttcttcttaattgaattacctattgctggaaattaaacagcttcttctgaagataactccaaaagttttggcaga

SEQ ID NO: 447127 - DNA, 201 bp, Homo sapiens
tgtgtgcgcactctctctctctctgtcactcactgtgtctcctctctatctcccttccttttcttttccccttactcactcaccgcagtacacaagggccrcagtaagcgctcttcctagaaaaagagaataatgggagataagcagcaaatgctgatctataatctgaaatctcctaggcagattctgtgtaagcaaccg

SEQ ID NO: 447128 - DNA, 201 bp, Homo sapiens
gcgggtggatcacctgaggtcaggagtttgagatcagcctggccaacatggcgaaaccccgtctctactgaaaatacaaaaattagcggggtgtggtggcrggcgcctgtaatcccagctacttgggaagctgaggcgggaaaatcccttgaactcagaaggcggaggttgcagtgagccaagatcttgccatcgcactcc

SEQ ID NO: 447129 - DNA, 201 bp, Homo sapiens
ttttacattttatttgaaaatatgccagacaaacaatttttttttttttttttttttgatggagtctcgctctgtcgcccaggctggagtgcagtggcacsatcttggctcactgcaatatccccctcctgggttcaagtgattctcctgcctcagcctcccgagtagctgggattataagcacctgccagtacgcccggc

SEQ ID NO: 447130 - DNA, 201 bp, Homo sapiens
tttgaaatttttttgaaagacagttttagttttatcttgctttaaccaaatatgaaacataccccctattttacagagctcttttttcccctcataacctygtttttggtagaaaataagctagagaaattaagccatcgtgttggtgagtgttcctaggctaatgataatctgtataattcacatcctgaaactaaggaa

SEQ ID NO: 447131 - DNA, 201 bp, Homo sapiens
cttctgatcttattattaaactttgccgaggacccgaagatcgcttaggcaagaatggtgctgatgaaataaaagctcatccattttttaaaacaattgayttctccagtgacctgagacagcagtctgcttcatacattcctaaaatcacacacccaacagatacatcaaattttgatcctgttgatcctgataaattat

SEQ ID NO: 447132 - DNA, 201 bp, Homo sapiens
tcaacatggcgaaaccccgtctctgctaaaactacaaaaattagccaagtgtggtggtgcatgcctgtaatcccagctacttgggagcctgaggcaggagratctcttgaacccaggaggcagagcttgcagtgagccaagatcatgccactgcactccagcctgggacgacagagcgagactctgtctcaaaacaaacaa

SEQ ID NO: 447133 - DNA, 201 bp, Homo sapiens
aatcccagctacttgggagcctgaggcaggagaatctcttgaacccaggaggcagagcttgcagtgagccaagatcatgccactgcactccagcctgggaygacagagcgagactctgtctcaaaacaaacaaacaaacaaacaaaaaaacaactgaacctcaagtgacctcacacctttacaaagattaactcaaactga

SEQ ID NO: 447134 - DNA, 201 bp, Homo sapiens
caggagaatctcttgaacccaggaggcagagcttgcagtgagccaagatcatgccactgcactccagcctgggacgacagagcgagactctgtctcaaaamaaacaaacaaacaaacaaaaaaacaactgaacctcaagtgacctcacacctttacaaagattaactcaaactgagtcacatatatatagataaagcttaa

SEQ ID NO: 447135 - DNA, 201 bp, Homo sapiens
cagggcttcgtcatgtctcaggcctgctgcaaattgtgtgtgtgtgtgtgtgtgtgtgtgtgtgtgtgtgtgtataattaatttctataaatataaatttwaaaaaattaaaaatgggtatatttttaacagctttattaacatacaatttatatactataaagtttactcaggctaggtggggtggctcatgcctataat

SEQ ID NO: 447136 - DNA, 201 bp, Homo sapiens
ttcagcgggagagactaggtagtcttaggtagtctggcttcacttggcattcctttcttcatcatttcattttattcataaccagagatttttcttttttyttttttttttttttggagacagtgtctcgctctgtcacacaggctggagtgcagtggtgcagtcatggctcactgcagcctcaaactcctgggctccagg

SEQ ID NO: 447137 - DNA, 201 bp, Homo sapiens
gggaggatcactcaaacccaggagattgggtcgcaatgagttgtggttgcaccactgcactccagcctgggcaacagagcaagaccctgtctctaatgggaaaaaaaaaaaaaaagactcccattccaaagttactgatttgagcgttctttttcacactggcactaacacctccacttaatgaatgcttggttgatgttt

SEQ ID NO: 447138 - DNA, 201 bp, Homo sapiens
gcaattgttccgcctcagcctcccaggtagctgggactacagttgctcgccaccacacccgggtaatttttttgtgtttttagtagagacggggtttcacygcattggccaggctgatctcgaactcctgaccttgtgatctgcccgcctcagcctcccaaagtgctgggattacaggcatgagccaccgcacccggccta

SEQ ID NO: 447139 - DNA, 201 bp, Homo sapiens
agaattgcttgaacccaggaggcggaggttgtagggagacaagatgacaccactgcactccagccggggcgacagcccgagactccatctcaaaaaatatrtgtattatcacttgatacaaaattctgggttttagttcttacagcactttaaaatgtctacttccttctgtcgttcataatttgatgagacatctgcaat

SEQ ID NO: 447140 - DNA, 201 bp, Homo sapiens
cagtggcttatgcctgcaatcccagcactttgggaggctgacgcaagaggattgcttgaagtcaggagttcaagaccagcgtgagtaacaaatcatagacrgtgtctctaccaaaaaaaaaaaaaaatagctgggcatggtggatggtggcacatgcctgtggtcccagctactccagacacaagaggatcacttgagccc

SEQ ID NO: 447141 - DNA, 201 bp, Homo sapiens
aaagaacttttttttttaagcataaatcagatactgttatcttcttgcttcgaactctgcaatatcttctcactttacttgaggtaaaaggcagaccattyctattgcttgcaaaacccacatgtattcctgccgcatttcttacagttcttgccccatttcctacagttctcccctttatcagctgcgctggtcttctct

SEQ ID NO: 447142 - DNA, 201 bp, Homo sapiens
tactagtacccttcacagcaggcattatggtgtcgtggagagattttataaattgtgtccatggtgctgagagaaatgagaaaaaagagagaaaataaacycattcaaacttaacagcttttgattgagtctttacaaataagtcttcgcacatatctacctgatgaaatttcagttaaccaggagttggttgttgaatgt

SEQ ID NO: 447143 - DNA, 201 bp, Homo sapiens
ggacggcttactgggtgaagtcacattgagtggtctttcataccatgcttgcttagaggtccgcttgacctggttcctggggtaacatgctagagaaatgyggagtttacgttttgcacatggctctgttcataatactagtacccttcacagcaggcattatggtgtcgtggagagattttataaattgtgtccatggtg

SEQ ID NO: 447144 - DNA, 201 bp, Homo sapiens
acaaaccactaataacaacacggtttcaccgtctgcacaagaggaagccggaaacacacacacccaggaatccccacacagccagcaggtactcattgggyagctcagtgggccaagttgagaacagcagctgaaatgtggaggagtttgtatgttccagtagcagatgagtgcaaataattcctctagaacaaagcctca

SEQ ID NO: 447145 - DNA, 201 bp, Homo sapiens
ggagccttccctcgggaggagctggccaggctgtattacgggtcctgtgtatatgtcagagagaggggtggagatacagagagacacacagacacacacasagatgagatggcaaaaatacccctttgggcacctggccttcactcaacagaggacggcttactgggtgaagtcacattgagtggtctttcataccatgct

SEQ ID NO: 447146 - DNA, 201 bp, Homo sapiens
tgcaacctagatccttggtgtgcacaggtcacaatagagtttgcactcctgtgagaacctgaggccgctgctgagctgacgggaggcagagctcaggctgmaaagctcgctaggctgccacccacctcctgctgtgcggctcagttcctaacaggccaccaggggttgcgggcccccgccttagggaacaaacagaacagt

SEQ ID NO: 447147 - DNA, 201 bp, Homo sapiens
agctggtggccgctgcaggccgtctgctctggctctaccctctggggccacactgaacaccgctgacccccctgctcatgaaagtcattcaggtgatctarggccgtttccagtaactcattcagcaaacatgtaatgagcccttgagttctaggcctgtaaaagatgagtaagatgtaattccctcactctgtagaattc

SEQ ID NO: 447148 - DNA, 201 bp, Homo sapiens
ggttcccgagcatggcgcccgcgacactgcaccacgtggcactgcaccacacagtccccgcccctcgctggtggaggcttcccctggtcctgatgtgggartgcggctgagccctgggcaatgacatgtacagggtgggcagcatgaccagaactccgtcttctccgtctggtgggacacggcaggagtgatggcctacct

SEQ ID NO: 447149 - DNA, 201 bp, Homo sapiens
gccacacctgcgcccttcaaggcagccccagcagcgtgaggtcagatgggggagaagcctacctacgtgtgccgccagctcaccgccctggcacagacccyggctggggatgaagtgtgccctgtgccaggctgggtgatccaaattcagttgtgggaaagagctctcctgggttatacctcggaggcagactggcacagg

SEQ ID NO: 447150 - DNA, 201 bp, Homo sapiens
agtctactaggccaaaaagaattgtgctacagtctctcagcctgcattctttgattactggagaggcctggcgccttgccacgtgctcatcagtggctggygtttcttctttgatgaagtgcttgtcctgcttgttatttccacttctctgtgcagaatctgggcctggccagaggggctacttggtgcagctcaagccca

SEQ ID NO: 447151 - DNA, 201 bp, Homo sapiens
gagtaaatgaccacttcctttatgtatttcttcttctttttaagcatgttttaaacaatttgtacaaatcagtataaaagtaattcatgctctacctaaartttagtgaatattagttcttccactcattttctctgacctatgagatctaggttactgcttattttaagcctttggatcattactattcaatcttatttt

SEQ ID NO: 447152 - DNA, 201 bp, Homo sapiens
tgatgggttgataggtgcagcaaaccaccatggcacacgtttacctatggaataaacctgcacatcctgcacatgtactctggaacttaaaaagaaagaayaaataaaacgagggcaagtttagaaagcataaagtgtcatactgatgtgagtccacatcttaccaacctcactttctaccatttgctcttttgtctctgc

SEQ ID NO: 447153 - DNA, 201 bp, Homo sapiens
tctttctccttaaggttgtactgtctgcgggctgtgtcttccgctgctggtgggtgcctgagaatgcagcagcatcctcagcacctgcgggtgctcagtamgggtttgctgactccatcaaagagtgaatgaggccatcctcctcctatcggtccaaggccagatttgagcctaggcgtagatgtcattcttccacatgat

SEQ ID NO: 447154 - DNA, 201 bp, Homo sapiens
ggaaggacacggcacccagggggaatgcagtgccctggtgcatgtggggccggaccagggcgctgtgaccctggggagcccctggcctcaccgtgcttccyctccctttctgtggcttacttaggacttgcccaggacttgctgagtatgcacagagcaggtgcttcatggagagtgagattaagacacttaatgtcccag

SEQ ID NO: 447155 - DNA, 201 bp, Homo sapiens
cgtccccgcctctgggcccctttgaagctgaccttgagcctgatgaggcaacttcaaagacagcccctgacctttcccaggcagctcttgctgacatcctytccccaaggcccaaggctggtgctccgtcactggatggctgggccagcccaacagctggaagaacacggctgagtaacctttgctctctgagacatcagt

SEQ ID NO: 447156 - DNA, 201 bp, Homo sapiens
cactccctcccactttgtctgggacggagccctcgtgaggacgggatgctgccctcgtgaggatgggatgctctgtgggacagccatcctgttggtgtcakaagaaacggatcctccttctctggtagcagtttgcattttctacccgtgttgatgaacttagctcacttcagaaaacacaggcagagtgggaaaagcaag

SEQ ID NO: 447157 - DNA, 201 bp, Homo sapiens
gatctttgttctttctctgactgagtgacttaccgtctaaaggataaatcatatatgtgagtatccacacattcccctgagcagccaagggccaaatgttrtgtgttgaagcgggtttccagacagagaattcagtagcctgttgtcatcatgaaataccaaagcgaccagtgttttgtaccctttgcccccaaagcttga

SEQ ID NO: 447158 - DNA, 201 bp, Homo sapiens
ttcccctgagcagccaagggccaaatgttgtgtgttgaagcgggtttccagacagagaattcagtagcctgttgtcatcatgaaataccaaagcgaccagygttttgtaccctttgcccccaaagcttgactgaagtgtttagatttttatcctgtaattagagtggctataattggatatgattcactttctttgacttt

SEQ ID NO: 447159 - DNA, 201 bp, Homo sapiens
ggtccagctcagcaccgtgctcctctctcccctcgcagccggcctggctttccttcgtagggtcgaccgctgtcccacgtgggagatgatgtttggatgtyttctgacttctccactgaacatgcgtgccgtgaaaacaggcactttgtcttcctatgttatttatttttagacattttaattttctttctagaagggtgc

SEQ ID NO: 447160 - DNA, 201 bp, Homo sapiens
aataaatgaatgtgatgtggtttctaaacacttttcaaggacgctgtcccctggatctgtctctctgtgttagtatccttctttaaggaaacatggagacrtaaacgccgtctgtcagacgtgctccagagggagcttggccagttctgcaggaccgtgccatggtcgagcacacctccggccaggaatatgtctgcttat

SEQ ID NO: 447161 - DNA, 201 bp, Homo sapiens
cggtttctcctgagccccttccagagccttccacctgtccctactcggtgtcaccacccacagtctcttctcacagggcagcccgagtggcctgtgatccrtaaatccatctatgaccctctgctcagcccatgccgacttctgtctcactcagggcaggcgtgggagcttcgtggggcctcctccttcttgccgccccag

SEQ ID NO: 447162 - DNA, 201 bp, Homo sapiens
tcctcatcaggaaatgacaatttcaataattaatgataataagactcagctcagccttgccaggagaagccctcgttcctccgggaaatgttgtggagcasctgctcctggccatgtgctgcttctggtcctggggaggccgaggaaacatcgcactgtgctaaggcaggtgagccagggagggaggacgcggcacagctg

SEQ ID NO: 447163 - DNA, 201 bp, Homo sapiens
ttcctatcctcatcaggaaatgacaatttcaataattaatgataataagactcagctcagccttgccaggagaagccctcgttcctccgggaaatgttgtsgagcacctgctcctggccatgtgctgcttctggtcctggggaggccgaggaaacatcgcactgtgctaaggcaggtgagccagggagggaggacgcggca

SEQ ID NO: 447164 - DNA, 201 bp, Homo sapiens
gctccagagggagcttggccagttctgcaggaccgtgccatggtcgagcacacctccggccaggaatatgtctgcttattttgcagctcagtttgtcctcrtgttctggagttagcacaccacgtatcttttttctttcatggggattttggtcaagctctccgtcttcccctgagctcctgtgaggttcacttctgggtc

SEQ ID NO: 447165 - DNA, 201 bp, Homo sapiens
gaggcctgcaggatggaaggaaccctgtcggggagcccagagactgaggctgggtcccaagcccccatgactagcacgtggtcctggcagagtccagcctygtcctcttgtcctcaggaaggaggttggtcagggttggtggctattgctcaagacctctgaaggtgcctggtgagaggaggaagacagctcagagccaga

SEQ ID NO: 447166 - DNA, 201 bp, Homo sapiens
tcacttctgggtcttccgaccaggactttacatttgaacttcaccatgaaatgtcttcatgcaggaagtgaatgtgactttggaatcatttggatctaggmttctagactgattccatagttggtgaccatggataagttacttcatctctctaaaaccgtctccttattcagaccgaagacgttcagcataaaaaactgg

SEQ ID NO: 447167 - DNA, 201 bp, Homo sapiens
ctcagtgtttggggctagttcaagaatgactctgcaggggttacaggcaagctgggaactggcacacaggagctacagagggtgcaaggcacagcccccaygtcatcaattggtggtttaggcgaaagtaaccatgttgtcattttatagtaagtcacaggcgcaatggactttggcttttattgcctcagaatcattttt

SEQ ID NO: 447168 - DNA, 201 bp, Homo sapiens
aggcggagggtaaatctatccttgttactccgtcttgactggaagcagaagcctcattcattctgaatgttttgataagattttgtttcaccaacatacaygttatgtaagaagtctcatggccaggatgaatacacgatctagaattctttattgtcaaggaggaaatctttccttcattcatttgctcattcaggaaat

SEQ ID NO: 447169 - DNA, 201 bp, Homo sapiens
tcctcgtgtagctcttgtacatgttttgttagatttatagcacagtatttcattttggggatgctagtgatattatgtttttactttcaaatttgacttgktcattgctggtatataggaaagcgattgacttttgtatattaaccttgtgtcctgcatccttctaattattgctcttcactccaggagggttttttttgt

SEQ ID NO: 447170 - DNA, 201 bp, Homo sapiens
ttggtgttgtatgtaaaatggcattgccatacccaaggttatctagatttcctcctgtgttatcttctaggagctttatagttttgcattttgcatttagktctgcaatccattttgagctaattctttgtgaagggcataaagtctatgtctagattaatttctttgtatgtggatgtccagttgttccagcaccatttg

SEQ ID NO: 447171 - DNA, 201 bp, Homo sapiens
tgcttggttgctaccaagttttggcaattatgaataaaacttctctaaacatccacatgtaggtttttgtgtagacataaattttcaactcatttgggtarataccgagaagtgtgactgctagattatactagtaagagtatttcagttttgtcataaatcaacaaactctcttccaaagtggctgtaccattttgcttt

SEQ ID NO: 447172 - DNA, 201 bp, Homo sapiens
gccttgagacacagagctgaggtgccaccggcggcgattgcaggagcccagcacagagggcaaggggcactgtggatggcagcagatgccaccctgatcamagagccgtggagtgaaggtgcacactggccttggtgccagggagacctgggttgaagtgctgactctgtctctttaaaccaaaacaggcttgtccatcaa

SEQ ID NO: 447173 - DNA, 201 bp, Homo sapiens
cagtctgacctatcagcctctcttagaaatgtttatttctcttgtgccacccatttcatctgcctcactgttccaggaacataaactcagaattcagacasagctcaatataaaaaggtgtgcatcagtcacttacactggaaaacagtggacacgagccacattcaggtggctccctaatagcacaggccatgtcctcat

SEQ ID NO: 447174 - DNA, 201 bp, Homo sapiens
tcctttcctccaggaagccttccctgatgccatccccacagtggcacagagtgaagggctacttccctgggccctatagtgggcacctgttgagtgctgtrtcatgcagaggcttggcatgccccagctcttggctgagcgttccttctcccactggattgtgagcttgctcaacagtgggtcatgctcatcacactggct

SEQ ID NO: 447175 - DNA, 201 bp, Homo sapiens
ggtcttccgaccaggactttacatttgaacttcaccatgaaatgtcttcatgcaggaagtgaatgtgactttggaatcatttggatctaggattctagacygattccatagttggtgaccatggataagttacttcatctctctaaaaccgtctccttattcagaccgaagacgttcagcataaaaaactggttcccagaa

SEQ ID NO: 447176 - DNA, 201 bp, Homo sapiens
actttggaatcatttggatctaggattctagactgattccatagttggtgaccatggataagttacttcatctctctaaaaccgtctccttattcagaccraagacgttcagcataaaaaactggttcccagaaaggggatagtgggaaaacagcaagtcgctcctgcctcctaggctggaggggcaccaggaggaggacc

SEQ ID NO: 447177 - DNA, 201 bp, Homo sapiens
ttattacgtatgtaatttaggattcttatgtattttttgaggaattgacccctttatacttatgaaatggcatttataactttataatatcaattgctatkatgttaatatagccaatataaccttctttacatttgtattaacatgatatacctttttccccccttttctgggagcggggcccctgtggccaggctagag

SEQ ID NO: 447178 - DNA, 201 bp, Homo sapiens
gcttcatctaaccctaattacctcccaaaggccccacctcctaaagctgtcccactgggggataggccttcagtagatgcagctggggaagggggacgcasctcagtccctaacagacgccctccatagagtttgctgtctgcaccctctgcagttcaaatagtcagcatgagcttcttgtatagtgctggtatttggtaa

SEQ ID NO: 447179 - DNA, 201 bp, Homo sapiens
ttgtgtctttcttcaatgtttggtagaatctgctagtaaaataatcgggacctgaagtttctttgtggatgttgactatgaattcaacttcttttgtaggyatattaaagaatattctgattagctgtttcttctttagtgaactttggtagtatgtgtctttcaatgaaattatccattttatctatgttgtcaaatgaa

SEQ ID NO: 447180 - DNA, 201 bp, Homo sapiens
cttctaaggtcagagagaaaaattgagcaaaattgcaatttgggacttgtagcctgggaataccttcttctatcttttaaaacaaaaccaaatcaggcctygaattatggtcaccaggtggtttgtaaatgtgaggctggcctgattgctggtcatggcacgtagtggttactcatgagatgccccctttattaataacag

SEQ ID NO: 447181 - DNA, 201 bp, Homo sapiens
aattattgctgttgtgcgaaaactcctaaagtcaggtaatattttggccattctaggtcttttgtatttccatatgaatcttctcatcagtttgccacttyctattttttttaaggcctgctggaattttaattggaatgatgttgaatacgtagatcaatctggggagaactgacatctttgtattgagttttcctaacc

SEQ ID NO: 447182 - DNA, 201 bp, Homo sapiens
ttgtgtgtgtgtgtgtgtgtgtgtgtgtgtgtgtgtgtgtgtttagtagagatgaggtttcaccatgttggccaggctagtcttgaactcctggcctcacrcgatccactcgcttcagccacccaaagtgctgggattacaggtgtgagccaccctgccaggccaaggttttcttttaaggcatgtgcttttggtgtcgta

SEQ ID NO: 447183 - DNA, 201 bp, Homo sapiens
gaatgcaggaatagaaaagcaaatacagcatattctcacatataagtgggaggtatgcattgagtcctcacagacataaaggtggcagcaacagacacggrggctactcgagaaggcagggagtgaggggtcagggagggaaaaaccagttgttgggcagcacgctcactgtccggatgacagaatcactcatttcccaaa

SEQ ID NO: 447184 - DNA, 201 bp, Homo sapiens
cccagctaattttttgtatttttaatagagacggggtttcaccatgttggccaggctggtctcgaactcctgacctcaggtgatccgctgcctcagcctcygaaagtgctgggattacaggtgtgaaccactgcacctggccttgagttattttcttattagtaacatttgagagtgcttcatatattgtgtatataagtc

SEQ ID NO: 447185 - DNA, 201 bp, Homo sapiens
cacgcagctcccctcaaggcagcaccagagcttggtgcgggcccgggaccctagacacctggctgtgtgcttccgaggcaggcgtgggtctcccgcccgcygggcaggccgtgggctgcagcagatgagtgtgagccagtgccaaagtgaatggagcactttcccacacaagagctccagactgacatttctggtgcattt

SEQ ID NO: 447186 - DNA, 201 bp, Homo sapiens
tcatgttccccagcccggccaggccccaaataaccccattactgagaaggatgatccacaccaaatgtccttcccctgggtcgggagggacgcaccgggaygggagcccgagaaggctgtgggtagggcccgccttcatcagagcaccgccttcaaatgctgcactgaggccggcctacagaagggatgtaccagtcctgg

SEQ ID NO: 447187 - DNA, 201 bp, Homo sapiens
ttgaagtgctgactctgtctctttaaaccaaaacaggcttgtccatcaagtgagcaggacgatgcctctcggaatgtcactgagaatgttcagtgaagcartgccagcgtgctcgccatgggcacgtggaggcgggctgctgcccaccgactcagtttacccatgtgctatagatttgtacatttgagctcagagaggtga

SEQ ID NO: 447188 - DNA, 201 bp, Homo sapiens
acccctggtgagaaccccaaccccttggattgcagtcagtgcccggagcctgcctctcagggcagagatggaggcctgccttcccctgtgagcaacggctstggtctccgaaccccataccccacgcttgtccgtgcccctaccatggcacctcttgctgaagaacaaagcgctccccggtctctttcattctcagcgcac

SEQ ID NO: 447189 - DNA, 201 bp, Homo sapiens
aggaccacccctggtgagaaccccaaccccttggattgcagtcagtgcccggagcctgcctctcagggcagagatggaggcctgccttcccctgtgagcamcggctctggtctccgaaccccataccccacgcttgtccgtgcccctaccatggcacctcttgctgaagaacaaagcgctccccggtctctttcattctca

SEQ ID NO: 447190 - DNA, 201 bp, Homo sapiens
tgtgacaaccagcaatgtctccaggctccgccaagtgtctccccaggggcaggaccacccctggtgagaaccccaaccccttggattgcagtcagtgcccrgagcctgcctctcagggcagagatggaggcctgccttcccctgtgagcaacggctctggtctccgaaccccataccccacgcttgtccgtgcccctacca

SEQ ID NO: 447191 - DNA, 201 bp, Homo sapiens
tgtcaggttctagggacaaagggatgagccagtcttgtaaacacaggcggctttgcagcagctggctccagcactcccgaaggacatcactgacctcagcrgatcctgaagcctttgttggcctccctttcacctatggtcagctctctgaaggcagccactctgtgactctttgtttgggcagcagcaggtgaagtaagt

SEQ ID NO: 447192 - DNA, 201 bp, Homo sapiens
caagagcagcagcatcttttcacaaaagcattaattatccattacacttagggtcccattgaccaggctgttagcgttcttcctgcctctgtgtggcccgstcagccctgtgcatgtaggtgttgaggcgctgtcgtctcagtgtgtgtaaaggaactggatctggatggttattgagcacacactaagtgccagttgcct

SEQ ID NO: 447193 - DNA, 201 bp, Homo sapiens
ccctatacccagcctttcctactgggatataaactcttcaggtctgtggctgggatatttagaaaataaatattgaaaggaattatcttaaacgccacatkaagactcctttgtgatattttaaaagtctgatcaactttccaattttctaaaaaaaccattctgtatctataatgaggcatcggatgtagacgaggtctg

SEQ ID NO: 447194 - DNA, 201 bp, Homo sapiens
gtggccctgcacatccagaagtgtaggatgcagcaaaagctgggatttgagggcaaatcatagccttgaaaaacactagaatagagaaaggtgtcctttcytccaggaagccttccctgatgccatccccacagtggcacagagtgaagggctacttccctgggccctatagtgggcacctgttgagtgctgtgtcatgca

SEQ ID NO: 447195 - DNA, 201 bp, Homo sapiens
aacatttactgaggcctggcttgggtggcacagaggtagaggagggagaagggctggtgatggattggagcctccctgtgctgggttgcacagcacagacrggtaaccaaggctggagacgaaagccgctgccccaacagcactgggcctcaagacaaagtccctcaaatgctcatgggtactgggacgtgctgtgactga

SEQ ID NO: 447196 - DNA, 201 bp, Homo sapiens
cacaacccctgccaacccctaccaccctggcctcacacctaagtgccacacattccttcccctcttcttagaaagtagcaaagaaaggttccaccagcagygttcacagggacagctggctccaagccttcatcagctttctcttcccaaggggttgtacagagctggggctaggaagggttaaacaggcaggccagcgtg

SEQ ID NO: 447197 - DNA, 201 bp, Homo sapiens
ggcccgcctcccagcactgccccactccccacttccaagggaaagcctcagaatatcagtggaaagcctttctcccactgcatggtagcccctgcaagccrgtgcactaagtgtttatttgctttatttatgttgcaaagaaaaaatatgcacaaacatacttcagaatttaggaggtaagaaaggatgtacaagtctcct

SEQ ID NO: 447198 - DNA, 201 bp, Homo sapiens
ccctgtctagtaaacctggacattgtcctgtggcttgtctttcagaagttccctgtgttgtgcaggcagctggggctgctccccagtgggtggtggcttcktcctggaactctgtcacttggccttggggtgctttagggggctgggtcccccaccagccagtgagctcctcgtgagtgggcagggcccagcatgggggtg

SEQ ID NO: 447199 - DNA, 201 bp, Homo sapiens
gtggtgcctctggttaccgtgctgcctcgacagggtgtcacagagtgaagcacgtcccccagctggcgtgaacagcggcagcaggagggctcttgcatgtstgtcacggtgatggtaagaaccgtagtccagcctttctaggctttgcagatgtattatcttgagctttgaagtttaccgagggtttctctgttcacttcc

SEQ ID NO: 447200 - DNA, 201 bp, Homo sapiens
tagttctcctccgctgctcctgcagatcctcccctcctcagggaaggttgggagccatggtggttaggatcaagcggcccctaacaaaaccccacttgacktggtctccttctaccccacctaaagactggggcgtcagagaggtggagattcacagagaagtaactcaaacccaagacagtccgttctccagccaatcag

SEQ ID NO: 447201 - DNA, 201 bp, Homo sapiens
gccatctcatcacccctgtcctgttggccccaggcagccaagaccgatggctttggcccgtccttcccagggcccctggcagtgacagctccgtgtgccgyacagctcctggggtttccctggtagccacaccctgtgttcctagtacgttttgcccgtttgacagatgaggaagtggaagctcagaaagtcactcagtaa

SEQ ID NO: 447202 - DNA, 201 bp, Homo sapiens
aggacctgcccctgctgcgtccatcctctcaattgcatccggcacagagcttcatcagtgttcacagccagcccgcgggagaggaagggccctggagaagmtgtcgaaatgcaaagcatccccgtcctagttctcctccgctgctcctgcagatcctcccctcctcagggaaggttgggagccatggtggttaggatcaag

SEQ ID NO: 447203 - DNA, 201 bp, Homo sapiens
taatcccagctactcgggaggctgaggcaggagaatcgcttgaacccgggaggcagaggttgcagtgagtggagattgtgccactgtgctccagcctgagygacagagcgagactatctcaaaaaaaaaaaaaatttgtccctgtcttgaaaaaacttttggtccagtgcaggggtggggagggcagagctacaggaaggg

SEQ ID NO: 447204 - DNA, 201 bp, Homo sapiens
catattctcacatataagtgggaggtatgcattgagtcctcacagacataaaggtggcagcaacagacacgggggctactcgagaaggcagggagtgaggrgtcagggagggaaaaaccagttgttgggcagcacgctcactgtccggatgacagaatcactcatttcccaaacctcagcatcacacagtatactcatgta

SEQ ID NO: 447205 - DNA, 201 bp, Homo sapiens
acatataagtgggaggtatgcattgagtcctcacagacataaaggtggcagcaacagacacgggggctactcgagaaggcagggagtgaggggtcagggakggaaaaaccagttgttgggcagcacgctcactgtccggatgacagaatcactcatttcccaaacctcagcatcacacagtatactcatgtaacaaacctg

SEQ ID NO: 447206 - DNA, 201 bp, Homo sapiens
gacagaatcactcatttcccaaacctcagcatcacacagtatactcatgtaacaaacctgaacacgtacccgctaaatctaaaataaaagttgaaattacaaaaaaaagttggctttagataaagagatatagatcttcatttcttgtaacttttctgtaggctcgatatttttcaaaatagtaacaagaaaaagattttg

SEQ ID NO: 447207 - DNA, 201 bp, Homo sapiens
gtaacaaacctgaacacgtacccgctaaatctaaaataaaagttgaaattacaaaaaaaagttggctttagataaagagatatagatcttcatttcttgtracttttctgtaggctcgatatttttcaaaatagtaacaagaaaaagattttgtagagcactgtttggatgtattattttgatttctaagtgaattttaga

SEQ ID NO: 447208 - DNA, 201 bp, Homo sapiens
aatgggggactgtgctctctacccctagagcctctgtaccagcacaggcctggagtctagcacagggcaaatgttgacggggacagaaaaaaagaataggyggcaggcggcgggcaagagcctgttttatttgggggaaatcagggagggctccctgtgggaggtgacgtgtgctgaaagctggggtatggacaagtagct

SEQ ID NO: 447209 - DNA, 201 bp, Homo sapiens
aaatgaaggaatacttcttaagtcattctgtgaggtcaacatttctctgataccaaaaccaggcaaagagatcatgggggaaaaaaatccccaaagagtamaacccaaagcactacagaccaatatccctcctgaacacagatgcaaaaattttaagcaaaaattgagcatctactatttaaccctatgtaaaatattgac

SEQ ID NO: 447210 - DNA, 201 bp, Homo sapiens
ggtgatgattgtacaacagtgtgaatgtgcttaatgctgctgaccccgtacatttaaaaatggttaaagtggtaaactttaaattatgtgtattttacagmcacacacacacacacacacacacacaccacaaaacaaagagatgaaaaggctatctgtagtttaagagagagttaaatgacgcatttaaaaacaggcaca

SEQ ID NO: 447211 - DNA, 201 bp, Homo sapiens
gtcacatcgagtaggcagagaactggcatggcttgagagagcaggtgggaaggaagaaagtcagttaccttccttactaatgagccaagatgtcgtcagarcccttctgaaggagtgggaagaaagctgcgacccaattgatgatgtgattttgtgtcagactctccttttccttctgctttctcacctgtaagatggctt

SEQ ID NO: 447212 - DNA, 201 bp, Homo sapiens
ttccaactgctgttggttctcgtccctgcacgagtaggatgtaaagtctgactagatagcagcactattgctccaggtggggtgcaggctgagcccatccmtcgccggccgtgggtccagctctgcaatgcactgtgggggtcccaggcctgcagccccggagctcctgcttccttccttgtgcagtgcagacacccagga

SEQ ID NO: 447213 - DNA, 201 bp, Homo sapiens
ctgtggaactgtccctgccacctgccagctccgtcccttgacagaagatggcccgtggagaccctgtattcctcttgcttccctgtgaatgatgttttttycaactgctgttggttctcgtccctgcacgagtaggatgtaaagtctgactagatagcagcactattgctccaggtggggtgcaggctgagcccatccctc

SEQ ID NO: 447214 - DNA, 201 bp, Homo sapiens
ccttgaagaaatgctgctggggtggagccctgtgggctgaacaggagtcccctgatgagtgacagacctgcagtctcctgcaaagactggcatcaagtagygcagggcacacccatgagctggagtgggcacagccggggtgggcactttgcgtggatggaacacacagggaaaggagtctggttgggacagaggggtcct

SEQ ID NO: 447215 - DNA, 201 bp, Homo sapiens
aaatgagcccatttcctctgatcccccaggactggacaccgcttgttcgggcccagagtcagagaagcgaattggcaacaatggatgtggccggtgttgckgctgacggggtcacgaatcctacccgggcccagccctgccatgcggtcacatgttctcattgcaaggcagctgcgagcatcgccgccatcatcatcacgg

SEQ ID NO: 447216 - DNA, 201 bp, Homo sapiens
tcaagttggatgtggatctgggtctccatgtggatctgggctgacttgtgtaccacccacggtgtaccgtaccacctctctaaacagccacagcctctgamcccaggccacccctagcgacttcagccctcagggaagctgtgtctccttcagctgaggctcctgagctctgcactagggtgcagagatgactaagtctct

SEQ ID NO: 447217 - DNA, 201 bp, Homo sapiens
actggacaccgcttgttcgggcccagagtcagagaagcgaattggcaacaatggatgtggccggtgttgcggctgacggggtcacgaatcctacccgggcmcagccctgccatgcggtcacatgttctcattgcaaggcagctgcgagcatcgccgccatcatcatcacggtcattagacccgtttccaccacatttcctc

SEQ ID NO: 447218 - DNA, 201 bp, Homo sapiens
gccaggaggtggcaggtggtcacaacagccgcaggtgagggcggagtttactctcgacccttgtgccctgtgcctgctgtttgtccagcgcatgcgcagcrtcaagccaggctgggtctgccaagcaagctgtcgccctgcttcctctttgacggtgctgttatcctctggacgctgccatcagtggctgctttacctctc

SEQ ID NO: 447219 - DNA, 201 bp, Homo sapiens
tatttcaaatatcactccctccttcattccgactcaggttagtgagtgaactgccctttttccactgtctggagctgctcaagttggatgtggatctgggwctccatgtggatctgggctgacttgtgtaccacccacggtgtaccgtaccacctctctaaacagccacagcctctgaacccaggccacccctagcgactt

SEQ ID NO: 447220 - DNA, 201 bp, Homo sapiens
cccaccccacatttttctcctgtgtttagaatcatttccaaagataatgcctctgaccccccatttttattgtcctgcggatgcactgtgacgggggtgcrtgcatgctctggtacctgctacctctcaacaagatgtgctgctgtgggcggccaccacggcaccgagcctgggccctggggaggaatgtggatcccagca

SEQ ID NO: 447221 - DNA, 201 bp, Homo sapiens
tggctgctttacctctcagaaatcctcagaaagaatattccagggcaaggtaaggggctcccctcttcgttgtggaagttgcagagaaaacagcccagtcrgcgaatccttcgtggtggttgatgagagggatagggctgtgctttgagaagctccccaaggaagaccgaagaagagatgctgcgagatctgcactgagac

SEQ ID NO: 447222 - DNA, 201 bp, Homo sapiens
gagagactttccattttatttcaaatatcactccctccttcattccgactcaggttagtgagtgaactgccctttttccactgtctggagctgctcaagtyggatgtggatctgggtctccatgtggatctgggctgacttgtgtaccacccacggtgtaccgtaccacctctctaaacagccacagcctctgaacccagg

SEQ ID NO: 447223 - DNA, 201 bp, Homo sapiens
ttcatcctcccagaagaaaccctgtacccatcgctgccattctctattcccctacttccctcccgcaccctaggcaaccactaatctaccactaatctacyttctgtctctctagatttgcttactctagatatttcatataaatggaaacaagtgactaacctctttcacttggtgtgttgttttcaagattcaaccaca

SEQ ID NO: 447224 - DNA, 201 bp, Homo sapiens
ttcacacctggctttccctaagtgtgtccctgaagtgggcccagcgtctgttgtggaaatgccagcacctcagctcaactgaggctcccaggagtccctgyctaacgaaaccgctcccctttggtaagcgagaatgcctccatttggccttggagtcccctttttctggcacacctgtctatggacagcgacatctggaaa

SEQ ID NO: 447225 - DNA, 201 bp, Homo sapiens
ggaattaactgcaaacacgggatggctgcctggctctcctgacttctcggcagtgcgcttcctctcaccgtaattgtctgataaatggggttgtgggcacratgcaaaccttgcagagaagaacaggctctgtgctggagccaggacacctgggcccccgggccttccccagcagggcccatgggggacctgggctggcag

SEQ ID NO: 447226 - DNA, 201 bp, Homo sapiens
tttacttgaatagccatgtgttgactcaggcttgtcacctttgtcccctaggacaagcctcctaatttatttcttgaatagttgtgacaacttttcacagycattttgccttcaatttcttccttcaattatttctgtcagtagattccaaagtattctaaaagacatacatgacattttccttcctcctcctcctcctcc

SEQ ID NO: 447227 - DNA, 201 bp, Homo sapiens
aaggcagctgcgagcatcgccgccatcatcatcacggtcattagacccgtttccaccacatttcctcagctgtaccctgggggtcccaggggagaccaggrcatccttttgaattcaggaagcttaatgctctcggacaaaaacagacctctgctctgccccgtcataggaaggtttgcttttcctctgtgtcatggggaa

SEQ ID NO: 447228 - DNA, 201 bp, Homo sapiens
agcttggtacccaagacttcccataatctgacccagcccttctcccttgtcttcccaaaacccacgtttcctcactcctgtgaggaaggtcctggaagttycccccaataagccgtgctgattgagcttgagacctttgcaaacactgttcacagtgactagagagccctctccctagtagacctgctcgtttacccccaa

SEQ ID NO: 447229 - DNA, 201 bp, Homo sapiens
accctgggggtcccaggggagaccaggacatccttttgaattcaggaagcttaatgctctcggacaaaaacagacctctgctctgccccgtcataggaagstttgcttttcctctgtgtcatggggaagagtcagcgtcaggggatttggtgcctgtatgcctggatctgagctgccggagctgtaggggctgccccagct

SEQ ID NO: 447230 - DNA, 201 bp, Homo sapiens
tacccaagacttcccataatctgacccagcccttctcccttgtcttcccaaaacccacgtttcctcactcctgtgaggaaggtcctggaagtttcccccartaagccgtgctgattgagcttgagacctttgcaaacactgttcacagtgactagagagccctctccctagtagacctgctcgtttacccccaaaacttca

SEQ ID NO: 447231 - DNA, 201 bp, Homo sapiens
agacttcccataatctgacccagcccttctcccttgtcttcccaaaacccacgtttcctcactcctgtgaggaaggtcctggaagtttcccccaataagcmgtgctgattgagcttgagacctttgcaaacactgttcacagtgactagagagccctctccctagtagacctgctcgtttacccccaaaacttcaccaggc

SEQ ID NO: 447232 - DNA, 201 bp, Homo sapiens
agatagcttggtgtatccatcacagtcaggataaagaacagttccattacccgcaacacttcacacactgccacttagaatcatgctctgcatctccccgsccccaccgttgtggcaacactgatctattctccatctctatagtctggtttttccagaatgtcttataaatggaataatactgtgtgttcctttcttgga

SEQ ID NO: 447233 - DNA, 201 bp, Homo sapiens
ttgtaagaaactgccaagctgttttccagagtggtagtaccattttccatctctactagcagtggataagtgctctgtttcctcatcagcatgtggtattrtcagttttcaaaagattttctacccattttaataggcatatagtgatatcttcctgtggttttaatttgcactttttttttttttttttttttgtgacag

SEQ ID NO: 447234 - DNA, 201 bp, Homo sapiens
gtggcctagaatgtggtctaccttgttgaatgttgctgtgcacttgggaagtatgtatattctgctcttggtgggtggagtgttcactaattatcaatcastatgaagtggttggtggtgtttattacttttatgtctttattgatttcatgtctgtgttctatcaattactgagagaagagtgttgaagtctctaattgt

SEQ ID NO: 447235 - DNA, 201 bp, Homo sapiens
agtgggctgaaactgcctgcctggcacctggcttgggagaagctggaaggacctgcccctgctgcgtccatcctctcaattgcatccggcacagagcttcrtcagtgttcacagccagcccgcgggagaggaagggccctggagaagatgtcgaaatgcaaagcatccccgtcctagttctcctccgctgctcctgcagat

SEQ ID NO: 447236 - DNA, 201 bp, Homo sapiens
gaggccctgggtctgcctccctcgtggtcagagtgggctgaaactgcctgcctggcacctggcttgggagaagctggaaggacctgcccctgctgcgtccwtcctctcaattgcatccggcacagagcttcatcagtgttcacagccagcccgcgggagaggaagggccctggagaagatgtcgaaatgcaaagcatcccc

SEQ ID NO: 447237 - DNA, 201 bp, Homo sapiens
caggcattgttgacaaccagaggagcaccaaggaggagtgccacgcccaggggagggggcatcacgcccggggggagcttcacacccagggggagcatcaygcccaatggggagtgtcacgcccaagggggagtgccctgctggggcaggctggaggagggggaggccgtgggtgcaggtagggcaggcctcttcccccac

SEQ ID NO: 447238 - DNA, 201 bp, Homo sapiens
aaggccggttactaggattggttgaaaacgaaatctcattgcaaaataagttccctcctccatggggctaaacacgggggatgctccttattgtatttgaygggtctagaaggatcaagatggcctttgaatattaatctgtcactggtaccattttgtctgtttgatgtctaggatggaaaaaagaggggtgtgactatc

SEQ ID NO: 447239 - DNA, 201 bp, Homo sapiens
agatttagtgaaacacttttaatgaaaagaaaaatgccgaggctgatatgcatgccatgggcttcagcccagcagtcatccttggagagtgagggttgagsccgcagcccagcactgctgggctcaggaccacacagggccagagccacccctccatttcctaccccatgctggcttttcacttatgaggagttttcaatt

SEQ ID NO: 447240 - DNA, 201 bp, Homo sapiens
agaaatcactcatcttctgtgtcgctcacgctgggagctgtagactggagctgttcctattcggccatcttggaaccgccacttcattccttcttatggcyacttagtatccgctatatggagataccatgttttatttatccatgcattggttgatggactttaggttgtttccaccctttgggtattaagaataatgct

SEQ ID NO: 447241 - DNA, 201 bp, Homo sapiens
acacagccaatggcaagctaggaaggtggggatctggggtttgaacccaggcctgtagtttcagttgtgtttaaccacagcttctgcagctgcccacagaygtgtcggcacctacagaagagcacagtggaaaggaactccagcgtcttgtgggagggtagattctcagaatacacatagaatggcaaccaagcggaagca

SEQ ID NO: 447242 - DNA, 201 bp, Homo sapiens
gcagccgccttggaaaacagtctggtgcttcctgaaaccattagacagagttgccatttgacccagcaagtctgctgtcaggtgtacacccatgagaaatrataacctgtgtccacacaaaatcttctccataaatgtgcacagcagcaccactcatcacagccaaaggtggaaacagcccatgtgtcccttggtggatgc

SEQ ID NO: 447243 - DNA, 201 bp, Homo sapiens
atatgttttaaacccgctaaccctcacagcagccctagaaagtaggtacaggtatttctccctgctttacttgtaaaagaaggggaagctgagaccccagraaagtaacacagccaatggcaagctaggaaggtggggatctggggtttgaacccaggcctgtagtttcagttgtgtttaaccacagcttctgcagctgcc

SEQ ID NO: 447244 - DNA, 201 bp, Homo sapiens
gactagacactctgtcacagcaccgtcacccccatttcctggccattatccacgcttctcgcttcttttccaaactctctctggatatacaataaagagtygaaataaaatgcagaaggtctggaccaagggaaaccatattggcatagttggtcaagacttggaagagcagttgtgcaggagaggctgtgagtgcgtgtt

SEQ ID NO: 447245 - DNA, 201 bp, Homo sapiens
ttgcttaaactctctgacttttagttgcctctttaatacacatgtggacaatgtagctgtaatgtgaagtcagaagataggacttaatagatggttgtttsagttattgtcttgtgttctccttcctccttcctccagagtggcccttccatgctatgttagcacaggtagtagaaaggagaggtagaacttacctaatta

SEQ ID NO: 447246 - DNA, 201 bp, Homo sapiens
tgacagggcgtcttgggatgacagaggacatgtgactgcccatgttcaaagagctggtaagatggcagtattaggacccagattcacgtgtgtctgaccckagagctcatgtgcttggccattatattttcttttctgccatatcttttcaaagtactctctcccttcaccttcatgagcctctccttgtgtgtgctttcc

SEQ ID NO: 447247 - DNA, 201 bp, Homo sapiens
ggtggatcacttgaagccagaagttcgagaccagcctggccaacatggtgaatccccatctctgctaaaaatataaaaattagctgggcatggtggcacaygcttgtaatcccagctacttgggaggctgaggcaggagaatcgcttgagcctgggaggcggaggttgcagtgagccaagatcacgccacagcactccagc

SEQ ID NO: 447248 - DNA, 201 bp, Homo sapiens
gtctcattctgtctccacatcacctctaacatggtctccatgtactgacagggcgtcttgggatgacagaggacatgtgactgcccatgttcaaagagctrgtaagatggcagtattaggacccagattcacgtgtgtctgaccctagagctcatgtgcttggccattatattttcttttctgccatatcttttcaaagta

SEQ ID NO: 447249 - DNA, 201 bp, Homo sapiens
gtctctcagttgaagcacgtttaagaaaagaaaagccatcccaacaggcaagaatagtgctataattatagtttttgaatttagttgtacactcctgataygctagactgagagctgaaagaatgagatattttatagaggtctgggaccctagcaggttcaccttttacttccagctactaggacagcaagtcttatttc

SEQ ID NO: 447250 - DNA, 201 bp, Homo sapiens
agtggtggaagggtccctggggatcatctggtccgactcatctcacaggcagtgttctgagatctctgtgtccaggagaagtgtggcatcttcccgaaggscccatggggaattaactgcaaacacgggatggctgcctggctctcctgacttctcggcagtgcgcttcctctcaccgtaattgtctgataaatggggttg

SEQ ID NO: 447251 - DNA, 201 bp, Homo sapiens
ttttaatgtgtgtgtaaaaactctgtggcagaaaagagcaaagccagttccagggactgaacatttgtgtgtgtggtaggggagagagagggtgtgtttakgtgtgtgtgtgtgtgtgtgtgtgtgtgtgtgtgtgtgtgtggtggggagagagggagggagggagggagagagcgagagagagagagagaggaagtgtgt

SEQ ID NO: 447252 - DNA, 201 bp, Homo sapiens
ttcacgcactgggatccagttccctccgtgtgccattttgaggatccatctccaggtggtaattggcttgtgcgcagctgattttctgtcccagaggtccrcctcccacccctcacgctcactggcccaggagagcatcatgacatcagattgtttcccaacactttaattgcgtactctgggtttcaggttagtttgcgg

SEQ ID NO: 447253 - DNA, 201 bp, Homo sapiens
aatttcagatggaattttaagacttttttctttttttttttgcaaagtgctcatatcccacagcctcctagttctaaaacattgctgatttgtgtttttcygaagtacttttacatcaaatctcattgagttttttagttggttcctgttttagagccaagaaaactaaggttcatagagttgtgtgttgcccagggtatc

SEQ ID NO: 447254 - DNA, 201 bp, Homo sapiens
tctgatggaaccctgtgagactggatagcaaatgcagtctgaggaagccagaccctcgtgggagccagcagtggactgatggcttcagtgggtgattcagrgagggtaagggctggcccctccatggatgtggttttggggatgccatgtgtctacagggttatcctcatctgcacaagaagcagtgtggtcagtggaaaa

SEQ ID NO: 447255 - DNA, 201 bp, Homo sapiens
cggcctgagaagcccttgaggacagcagttctgttgtatttgcctcagtggccccatgctcggcacagtgtggggctctgaaaagggggacgagccccagsccgtgggactgcagggcctttcccaaggctgcccagccccgctccttcccctgccaggccggggtaggacattcttcctgttactgctctaagagctcat

SEQ ID NO: 447256 - DNA, 201 bp, Homo sapiens
ggtgggcagtcttcactccaagtacatttgtgcagggccagattctccaccctgcttgctccccgcctggcacagagggtgtgctcaggtgacccatgccrttctgtactgggttgcgtgggacaacagggagtggagaggagggaagaggaatgggctagaggaagaagcccagagctagaaaatcaagctccagccaat

SEQ ID NO: 447257 - DNA, 201 bp, Homo sapiens
ccaccaaggacagtgacagaggggacagggaagctctccccacagccagtaaaccagccgggacccacataccaccactgctgcgcacaggagggaaatcracccctcccgccgggcccccacccatgggaaggggcggagactgtgtgaccacacaaagaaactggcaaagatctgctgctccctttgattgcaggtgac

SEQ ID NO: 447258 - DNA, 201 bp, Homo sapiens
cgccccttctataagcttctcccccgtgcgtgtgcacaccagaggagtgaggaagcctctctctccccatcatgagaagcaggatcctaaaggaaagggtrcagctttgatgcaaagggcctggtgtgaatcctgcagctgctgcttgagaatcagggttcttaactgccagcaacagaaatggactctggtcaacttcag

SEQ ID NO: 447259 - DNA, 201 bp, Homo sapiens
tggaggctgtgcagggcattattaggtgacaggcttcctcctgcctctgagggcccttggttggctgaaggtgtctcgagggcatcggcaggtggctctcyggaggccgctaagtgctcgggccttcctggcctgtggccgatcaaagcactggctcttttccaaagtcaagctgaaagacaactctccttaacacccccg

SEQ ID NO: 447260 - DNA, 201 bp, Homo sapiens
ggacccgcttcaatctccgcacactttcgtccgcagtgcctccgccggtggttgtgttgaggacgtctcctgtcggctcctgtgctgttcattgcgttttmcttgcagatttttgttggtgattaagcaagagcacatttatgaagcgccccgtgtagggtcctctgttttattaatggaagggaatcagtaaagcaagtt

SEQ ID NO: 447261 - DNA, 201 bp, Homo sapiens
atcaaggcctcaggggagcatagagaaatctggaaggagtacagaaggcttgcagcaatgacttactgcatccagaccttgaaggatagatgagcattcakcagccactgggagtatttcccctgagggaagagcagaacaaatcagtaaaacggtaaaacgcatgaacggctattgggaaatctgatgggaagtgaataa

SEQ ID NO: 447262 - DNA, 201 bp, Homo sapiens
gagcaggtgttcagtggatcctcatgcaggaacccaagcgttggcttggagagactggcaagaaggtgacggagtgtctcctttagaatgaattgtcttaygtggcctgaagacctactgtgccctgggatgatggagacgatggtaggagagaaggcagagtgtctagataagtattgcagagagacaggagtgcggttc

SEQ ID NO: 447263 - DNA, 201 bp, Homo sapiens
cttctcctaccagaacttgggcagttacccaggtcctgtggtgaggtccgcctctgagcgatgggatggagaacaaacgaaccaactggagagagtgtgtytggggggaccaggcagcagccccacccttgggtgcatctgtgggtgctcgttccagcctgagcaggtgttcagtggatcctcatgcaggaacccaagcgt

SEQ ID NO: 447264 - DNA, 201 bp, Homo sapiens
tcagagcattttgatgattggatgaaagctttggactatttgtctaggaaaacgcaaacccacacatgtccacacaatagtgctgtccctcgagggcgtcmgtgaccctgtagctgggggagctttaggaatcccattcagtggggtcttcttgacctcagcctggcttttcctcccttctcctaccagaacttgggcagt

SEQ ID NO: 447265 - DNA, 201 bp, Homo sapiens
cttgtagaaggttatttgacttgatgaagttcattcagccaggtagaaggggagccgcacctcagccccgacccctctgatctcctaccgggctctctgcmtgtatacagatcagcaggaggtaggcacgggtctcaggacagagaagatgctggaactctgaggaagacgtacttgctttccattaggacagctagggga

SEQ ID NO: 447266 - DNA, 201 bp, Homo sapiens
acccctgcttggtaccgttcgcccaccttttgtggaggacccgcttcaatctccgcacactttcgtccgcagtgcctccgccggtggttgtgttgaggacrtctcctgtcggctcctgtgctgttcattgcgttttccttgcagatttttgttggtgattaagcaagagcacatttatgaagcgccccgtgtagggtcctc

SEQ ID NO: 447267 - DNA, 201 bp, Homo sapiens
taattcttctttacccagttgaatattgtttgtcatcctgaaaattgaactacttaaggggacataccttagcaaatgatgcttaagagaagtgtttttgtttttttttttttaaattatgaactatttctattatgcttggttaattgcatatttttgcaaagagatattaggcatagggccatgggcctaagttattgc

SEQ ID NO: 447268 - DNA, 201 bp, Homo sapiens
acctccagaacccacccagccggtgcctgtgctttgttcattcaatagagcttcatttttcatatttttttatttatctgatttatattgagctcctcctstgggctctacactggttttccttgaaggctattaacaacctctgtgctcatagtcaaagaaagaatttctcgggtgttaagcagagaggagctgtaacac

SEQ ID NO: 447269 - DNA, 201 bp, Homo sapiens
gaagttgcccggtggctcttgggaactttcctgctattcctcagttcgcagtctcctccctctccagcactgtcagcctctaggcatgcctagaagaggaygcttcactcccattccccgtgctcacttagtcagtgttgctgatgcactcagggcagactgctgcatctgcctttggacaggactgtactgtgaagtcag

SEQ ID NO: 447270 - DNA, 201 bp, Homo sapiens
ctctggaggaccccagatgccagcaggcaaaattagacttgcatcctgaggccacagaaaggccctgctgtgggacagagactgaagtcggaggcgattgyccaggccccctgcttcagtgagatttacacccggctgtcgtatccacactcagtgatttcatagcctgcctcctgtctggcgcaggaagttgcccggtgg

SEQ ID NO: 447271 - DNA, 201 bp, Homo sapiens
taaagaagggggttgttggtagcggggagtgccccattcctggagagcttctgtttgcacggcagcttggttactgtgttgctgggctcttgggttagccraggggactggtgtgggagaagcttcccagcagaggcagcaaaggccccagagtgcaactgcacggcacatgcacggagctaccaagtacgggagggtgct

SEQ ID NO: 447272 - DNA, 201 bp, Homo sapiens
ctggtctgtcctctggcctggccagaggagatcctggagtatgccatggatctcactgccagcattcagggagccacatccaagaaggaggctgcccctcyccataattcatgtcaggactttgccttcatccctccttcatggaatcttgagtccagaggcttcctggcccaagtcctaccaagaatagaacttctgcac

SEQ ID NO: 447273 - DNA, 201 bp, Homo sapiens
tttctggcgggtctgctgttttatcatttccccaactagttttgtgactttaggccagctgcagtgttaccttccctgactgtttcctcctaaaatccagtttttttttttcttttaatttgagatgggagtctcgttctgtcacctaggctggagtgcagtggtgcgatctcggctcactgaagtctctgcctcctgggt

SEQ ID NO: 447274 - DNA, 201 bp, Homo sapiens
ctctcaataccaccaaacccatcagctacatcgtgtgtgcatgcgtggttccaggagatatctctccagcgttctcatgtcctgcttccatgtggcctgaygtcctccaggtctgctgcagggctgtggtcctggcacattcctcccactgtccccagcaagcctctggactctcatctatgccagatcctgcttctgctt

SEQ ID NO: 447275 - DNA, 201 bp, Homo sapiens
ggcttatttttgtatttttggtagagatagggtttcaccatgttggccaggctggtctcaaactcctgacctctagtgattctgccggcctcggcctcccaaagtgctgggattacaggtgtcgcacccggcccaaaacgcctactcttatccattgactgataaaccctctgttgttgtattagtttgtttttatgctgc

SEQ ID NO: 447276 - DNA, 201 bp, Homo sapiens
ttgctttttctagaattataattgtattttctgcagtgtttatttttctgtgacgctaatttttcttgaactttccatcagaaccacaaaattcctctcawtaccaccaaacccatcagctacatcgtgtgtgcatgcgtggttccaggagatatctctccagcgttctcatgtcctgcttccatgtggcctgatgtcctc

SEQ ID NO: 447277 - DNA, 201 bp, Homo sapiens
ccacctatgaacctgtaaaatcaaaaacaagctagttatttcctagatacaataggggtacagacattgggtaaatgcaaccgttccaaatgagagctgagggggggctgtgggaggggcacgcccacctggcctgagaaggaaatggtagggggaggaggcagacagcactcagaggataaacaggcagttcccagtggg

SEQ ID NO: 447278 - DNA, 201 bp, Homo sapiens
ccttaggtatttaccttgaaaatatgactgaattaatgccaaatagagtacgctggtgtagtgtgatctttcggtgttagacatcgtctgtgggctgctcrcctctacctgtctactacagttctatcacagttcttggttaaatccccacagagttcttctgttcatttttactgtgacaatgcgattgtttttcacagc

SEQ ID NO: 447279 - DNA, 201 bp, Homo sapiens
aggagcctctgaactctggattcactgtcctgtcctttaatgtcctcctcaggggccccggggtccttttcctgggcctgctcttgcctgagggacttctyaccctccctcctgctagacagtctgctctcccaagctgagcaatttctcccccatttcctgacagcttgaggggttctgagcagcgacggtgactgtttt

SEQ ID NO: 447280 - DNA, 201 bp, Homo sapiens
tttcactcttggcacccaggctggagtgcaatggttgcagagaggttcactgcaacctccgcctcctgggtagctgggactacaggcacctgccaccacgsctggctaatttttgtattttttagtagagttggggtttcaccactttggccaggctggtctcgaactcctgaccttgggtaatctgcccacttcggcctc

SEQ ID NO: 447281 - DNA, 201 bp, Homo sapiens
tcatgtcaaattctccatgatggagttcaagcttttgctctgtagactttggatactaaccagatgttctgagcatagcacttacttttattttatttttwtttatttatttatttatttatttatttatttatttatttatttttgagagatgaggctcacacacctcaggtctacaggttccaaagagaacctcacaga

SEQ ID NO: 447282 - DNA, 201 bp, Homo sapiens
tccatgatggagttcaagcttttgctctgtagactttggatactaaccagatgttctgagcatagcacttacttttattttatttttatttatttatttatttatttatttatttatttatttatttatttttgagagatgaggctcacacacctcaggtctacaggttccaaagagaacctcacagattcccatctggct

SEQ ID NO: 447283 - DNA, 201 bp, Homo sapiens
tgtggattttcgactgtgtaggcggtagacacccctgaccccatgctgttcaagggtcaactaaatatccttttttgtttgtttctgtttttttaaattctttttttttttttttttttttttgagacggagttttgttcttgtttcccaggctggagtgcaatggtgcgatctcggctcactgcagcctctgcctcctgg

SEQ ID NO: 447284 - DNA, 201 bp, Homo sapiens
gtcatcatcattatggattgacctcttgctccaaatgccagggtccacgtatttaagagatagtagccacccccatcactgccaccattgccactgtatgktgtagtattacaactgtggctgtaatcgctgccttcagccagccttgccattcttgtgcacaggctgagatgcaagactgtttgggtggcttacagggct

SEQ ID NO: 447285 - DNA, 201 bp, Homo sapiens
cttgccattcttgtgcacaggctgagatgcaagactgtttgggtggcttacagggctgaaaggaagtcggatatgcatgcaggtaattagctttattagcktagctgtataattttatggctcatgtccgaaagcaaattaatacagaaatatgctattggaatggcttccaaagctccagcaccatttggcaacttggta

SEQ ID NO: 447286 - DNA, 201 bp, Homo sapiens
ttgggtggcttacagggctgaaaggaagtcggatatgcatgcaggtaattagctttattagcttagctgtataattttatggctcatgtccgaaagcaaaktaatacagaaatatgctattggaatggcttccaaagctccagcaccatttggcaacttggtaattactcacaggcggacttgctccccagactaatcact

SEQ ID NO: 447287 - DNA, 201 bp, Homo sapiens
tgaaaactcacaaggggctctccttgaatctgtggcattcatcctcaccacccccttgcccaccccagggactgggcagtgcatagacccccttcctggcmtccatgcatggtggggccaccatcagagggaggcccaggcaggagctcttcagtctgggggacagtaaggagaggggtgaggccctgcggtctggagtgt

SEQ ID NO: 447288 - DNA, 201 bp, Homo sapiens
ctggagtgcagtggtgcgatctcggctcactgaagtctctgcctcctgggttcaagcgattttcctgcctcagcctccagagtagctggaattacaggcgygcgccaccacacccggctaatttttatatttttagcagagacggggtttcaccatgttgaccaggctggtctcgaactcttgacctcaagtgatccaccc

SEQ ID NO: 447289 - DNA, 201 bp, Homo sapiens
tgggttcaagcgattttcctgcctcagcctccagagtagctggaattacaggcgtgcgccaccacacccggctaatttttatatttttagcagagacgggstttcaccatgttgaccaggctggtctcgaactcttgacctcaagtgatccacccacctctgcctcccaaagtgctgggattacagatgtgagccaccaca

SEQ ID NO: 447290 - DNA, 201 bp, Homo sapiens
aatgacagttcttcccaaattgatctttatattcaatgcaggtgtaatcgaaattccagcaggcttgtttttttttcttagaaattgattgctttattctraagtttgtatgacgtatgtaggaactaaaatatcccagacaacgaagctacagtaattaacacagtgtgatattggcataaggataaacatagattaatg

SEQ ID NO: 447291 - DNA, 201 bp, Homo sapiens
ggggtttcaccttgttagccaggatggtctcgatctcctgacctcgtgatcctcctgcctcggcctcccaaagtgttgggattacaggcatgagccactgygcccggccacagaagatgtctttaatccaagggttctagtttgtgattccactgccccatctgttccatcttggttctctccttcctggtaattcttgta

SEQ ID NO: 447292 - DNA, 201 bp, Homo sapiens
ctctgtgcttcccaaccatagcatctgccaaacacagccgttcttgccagtttctccagtggttaagccagttttatccaggctcgggaatccacccgccyggtccccagcctggctccgtcactcactgcccgtgtccctcatgcaggttccttaacctcgctgggcctcggcttctacgtcaggtctcaaggtgactgt

SEQ ID NO: 447293 - DNA, 201 bp, Homo sapiens
ccaacataagacctcacctgtgtgtttaagcttaaacccaggacgaggagggatgtgccgtcctgtgcaaaccacacctgcaggtgggcaggcttccgagrctgcgggggccaagtggtgagggcggtggcatgaatgtggcatcaaggcgtcgttgctttgttgttgttatgaaaagtagcttgctcattgagaaagccg

SEQ ID NO: 447294 - DNA, 201 bp, Homo sapiens
atctcctgacctcgtgatcctcctgcctcggcctcccaaagtgttgggattacaggcatgagccactgcgcccggccacagaagatgtctttaatccaagrgttctagtttgtgattccactgccccatctgttccatcttggttctctccttcctggtaattcttgtagtagtcttgtagactattaattgaaagctgtt

SEQ ID NO: 447295 - DNA, 201 bp, Homo sapiens
tgtgtcactgaccccaacataagacctcacctgtgtgtttaagcttaaacccaggacgaggagggatgtgccgtcctgtgcaaaccacacctgcaggtggrcaggcttccgaggctgcgggggccaagtggtgagggcggtggcatgaatgtggcatcaaggcgtcgttgctttgttgttgttatgaaaagtagcttgctc

SEQ ID NO: 447296 - DNA, 201 bp, Homo sapiens
ccatggtcaaaggaatctcaccgaatcacagttttctcccctataaatttgggaatgatagtacttttcttgtaggttggttaggagaattatttttaatmatagtaataggtaatgttattgctgcttcctgtgtgctggaaactttctaaactcaaagcatttagcacagtgtgcggcatttctgagtgtcaggaagtg

SEQ ID NO: 447297 - DNA, 201 bp, Homo sapiens
tttgagcctctcttttctcatccatgaaatcaggatagtaagccctacactcatgtataaacagtgtatgcccaattacttagcatatactggtacacacrgtagcttaagaataaattgtggaactgaagtggattaattcagcacatttttgtgatcctcctatttgtctttggggatctcggtatggctttgtaagac

SEQ ID NO: 447298 - DNA, 201 bp, Homo sapiens
ttttggaaaccttctgatggggaattgcatgaatattctctgatatgtgtcactgaccccaacataagacctcacctgtgtgtttaagcttaaacccaggrcgaggagggatgtgccgtcctgtgcaaaccacacctgcaggtgggcaggcttccgaggctgcgggggccaagtggtgagggcggtggcatgaatgtggca

SEQ ID NO: 447299 - DNA, 201 bp, Homo sapiens
gacagttcttcctttgtgtggccacagcagttggcacatacttgagtgggagcaattactgcactgaatttctattatgtatttgcttagccttcagataygaactcagcctttctccgagcctggctcagagtacctgcggcacccatagcagttgtcattttctgttgcttttctgccctcctcacgccgccagatact

SEQ ID NO: 447300 - DNA, 201 bp, Homo sapiens
acttagcctgttctcaaggctcatagatgccgtgctgagcatcagtgcttccttccttctcgtggctggacaatatgtcatcgtactgcccttccacatcygcattctgtttgtccaatcatctgtcgatggccacctgggctgtttccaccttcgggttactgtgaacatgtgtgtgcatgtatttgcttggatgcctgt

SEQ ID NO: 447301 - DNA, 201 bp, Homo sapiens
catccccctgggcctccattcccctctctaaattgaggagagtaacactttcactgcggcaagttgctttgcaaagcaaaggagcctcctctcacatgatacctgaccccccatccagtggggctcagtgaggggtggggtggatgactggatggagaggctggcacaggctgcggcggtgggggtgttcccacaggctgt

SEQ ID NO: 447302 - DNA, 201 bp, Homo sapiens
tgtcatcgtactgcccttccacatccgcattctgtttgtccaatcatctgtcgatggccacctgggctgtttccaccttcgggttactgtgaacatgtgtrtgcatgtatttgcttggatgcctgttttccatcctcttgggtctgtacctctccgtggaattgctggatcctaggctgactctctgttgaaccgtttgag

SEQ ID NO: 447303 - DNA, 201 bp, Homo sapiens
attttctgactagacaagttttctagttaagagttactgctaggtcaaaggctatgaacctttttagggatcttgagatgtttagtcatcacatgggcacktgactctcgattgtgacgtgggcactgttggaacttggatttccaaggtgatcttccaagggggcacaggacactcagccttcccctgtgaggagggtgg

SEQ ID NO: 447304 - DNA, 201 bp, Homo sapiens
cagtggggtgttgaacccttctcatgcttctcatctctgacttccccttctgagatcagctggaaaaatttctctgcctttaaagagctcagcctgttagrttaggcccactcaaggaatctcccttttagcagagaatgccgtaatcatggaagccataacattcccaagttcccacaccctcatggggaggacgctatc

SEQ ID NO: 447305 - DNA, 201 bp, Homo sapiens
agcagcggagccccggaggacctgccaggttccttggctcagtgacttcagaaatttattaatcaaaggcaatgtgtgcacaacgcagtatgtaaaacacrtaaaaagcatctctgttctgctcgaagtgggtgaggaggtcagaggagctggtcagatgggggaggatttgagggtgctttcacccctattgcctccaac

SEQ ID NO: 447306 - DNA, 201 bp, Homo sapiens
cctgccacagccctgaagcctgaggttctcccatgtagaggaagaacttgagctcagcacagctggtctcccccagcactgcacagctgggagggaacagccccaggttcaaatatgagttccttccaccagaatctcaacctccggctagatcacttcatgaaaggaatatattctcatggtagaagatgagagacaatc

SEQ ID NO: 447307 - DNA, 201 bp, Homo sapiens
gaggatatcttactcatcttgatcctgccatatcaggaatgcttcttggtgtgtggtaggacttcattaagtgatttttgggaaggtggatgggggctgartatatgggaagatgagttgatagctagatgggtcaatggtcagatgggtcagtgtataattgggtgaagggatgaagactggattagtagacaattggat

SEQ ID NO: 447308 - DNA, 201 bp, Homo sapiens
ccccagcatggtgtctttctccttaaggttgtactgtctgcgggctgtgtcttccgctgctggtgggtgcctgagaatgcagcagcatcctcagcacctgygggtgctcagtaagggtttgctgactccatcaaagagtgaatgaggccatcctcctcctatcggtccaaggccagatttgagcctaggcgtagatgtcat

SEQ ID NO: 447309 - DNA, 201 bp, Homo sapiens
ggaggatatcttactcatcttgatcctgccatatcaggaatgcttcttggtgtgtggtaggacttcattaagtgatttttgggaaggtggatgggggctgrgtatatgggaagatgagttgatagctagatgggtcaatggtcagatgggtcagtgtataattgggtgaagggatgaagactggattagtagacaattgga

SEQ ID NO: 447310 - DNA, 201 bp, Homo sapiens
tcttatgggatttaaatagtgttttacataacacctagacatacgtacatgcatgtatgtatgcatgatatacagagagccacctcacgtaggctccactgggctcgcactcgtacttcatgtgctgcgtcaaggcgagcagacctttcaaggagatgagaaggggattagtaaatatttgcctggaaccgtggatgatga

SEQ ID NO: 447311 - DNA, 201 bp, Homo sapiens
cttatgggatttaaatagtgttttacataacacctagacatacgtacatgcatgtatgtatgcatgatatacagagagccacctcacgtaggctccactgggctcgcactcgtacttcatgtgctgcgtcaaggcgagcagacctttcaaggagatgagaaggggattagtaaatatttgcctggaaccgtggatgatgac

SEQ ID NO: 447312 - DNA, 201 bp, Homo sapiens
agcagccccatgtggtagagattttatcctcatttcacaaatgaggaattgaagccgtcactaatcgcagggaataatattcttttttttttttttgagayggagtcttgctctgtcacttaggctggagtgcaatggcatgatctctctcagctcaccactacctccgcctcctgggctcaagtgattctcctgcctcag

SEQ ID NO: 447313 - DNA, 201 bp, Homo sapiens
agggtttcacaaaatctgagcaggccgtaaagtagggataggaatgtgccaggccagggatgggacaggctcccggcagtgggaacaggagtggcaggaayccaccattccctgacttgctgtccccctcagccttctgtgcccattggactcttgacttcaaggatcccttacctgtgccatccttcacttctaaatcct

SEQ ID NO: 447314 - DNA, 201 bp, Homo sapiens
tctgggatcagtcaggccagaactgaaaattaccataaattccagcaagcacatagagggaccgggggatgcagtgagagcacatcacactgagagagaayagaactggcaaagacgctactttagaaagggcctttaggacgtggggcatcctttttacctctcccgagccccttcttaacaaacccggagcccagagag

SEQ ID NO: 447315 - DNA, 201 bp, Homo sapiens
tagaaagaaggactttgcttctgctaactgaaaatccccatgaaaatcaacctcattggcagagcagcagatctgtaggagaggagtcttctttttttttatatatatatatatatatatatgtatatatatatatatttttattatagtttaagttctcgggtacatgtgcacaacgtgcaggtttgttaaatatgtgag

SEQ ID NO: 447316 - DNA, 201 bp, Homo sapiens
gaaagaaggactttgcttctgctaactgaaaatccccatgaaaatcaacctcattggcagagcagcagatctgtaggagaggagtcttctttttttttatatatatatatatatatatatgtatatatatatatatttttattatagtttaagttctcgggtacatgtgcacaacgtgcaggtttgttaaatatgtgagag

SEQ ID NO: 447317 - DNA, 201 bp, Homo sapiens
ggtgggtactgaaggtcatcacgggaaaccttgggggaaaaagacgggctcaccatactgcgccagcacctctgtgtgaggtcatctttgttcacctaggygggcagctcagcactccggtgacagtgcagacatgagaagggctcatcgcccgttgaaacaggtgcagcaggcggatcttggcctacatcttgacttgca

SEQ ID NO: 447318 - DNA, 201 bp, Homo sapiens
agagtcaggcgggcagtgaaggggagtgaagggaggctgggatggagtgtacgcagcactttagcctcttatttctcttcagggaagagaactagacctgsggggtgcttttgcagtctggggagggcacttctgctctggactgctgtggtctggccagaagctatgccaggaagagctaaggccctgcgtgaagcagat

SEQ ID NO: 447319 - DNA, 201 bp, Homo sapiens
ttttattctaattgtgctttataagaggctatcatatgttaccttatttagtttttccagtatttttgggagatttcatttttatctcccttttacagatraggaaacaaacttagagaaacgacttttagaagtaactaaaagttactcagttagtgacaagcttgatttcacatcacagaccacgtgtcctgttcccat

SEQ ID NO: 447320 - DNA, 201 bp, Homo sapiens
tcagaacaggaaaatccatagagacagaatgcagattggtgattttcaggtcctgggtggggagaaggggcatcagctgctaaatgggtatagggtttccttttgggttaaaaaaatgttttagaactggatagaggtggttgcataacattgtgaatgcactgaaggctgccgaaccattcgtcactggagaatggttaa

SEQ ID NO: 447321 - DNA, 201 bp, Homo sapiens
agctcagtatctgaaattcctcatgctggaggagtggaggatcttctcacacatgttgccagaccctgagatgtctggggaaaatatttccctagaaacamtactcatgatactcatgccttccctcccttctttaaccatattctgtcggactgcttgcacacgctcctgtgtgtgttcacagtcctgactccctgtggg

SEQ ID NO: 447322 - DNA, 201 bp, Homo sapiens
tcactgctgatgcccagccaggctgctgggaagggaaccatgggacctgatgggcatgcgttattgcacaggggttgattttggggagctttcggtcatgscttttgggcatcatgatgagtgttatcgcactgaggttgctattccagctggactccacaccacctggtcgtaggtgcacatatgcagagtgtgctgcgg

SEQ ID NO: 447323 - DNA, 201 bp, Homo sapiens
agaaggactttgcttctgctaactgaaaatccccatgaaaatcaacctcattggcagagcagcagatctgtaggagaggagtcttctttttttttatatatatatatatatatatatgtatatatatatatatttttattatagtttaagttctcgggtacatgtgcacaacgtgcaggtttgttaaatatgtgagaggag

SEQ ID NO: 447324 - DNA, 201 bp, Homo sapiens
taactgaaaatccccatgaaaatcaacctcattggcagagcagcagatctgtaggagaggagtcttctttttttttatatatatatatatatatatatgtrtatatatatatatttttattatagtttaagttctcgggtacatgtgcacaacgtgcaggtttgttaaatatgtgagaggagtcttaatggggagcttgaa

SEQ ID NO: 447325 - DNA, 201 bp, Homo sapiens
cccatgaaaatcaacctcattggcagagcagcagatctgtaggagaggagtcttctttttttttatatatatatatatatatatatgtatatatatatatatttttattatagtttaagttctcgggtacatgtgcacaacgtgcaggtttgttaaatatgtgagaggagtcttaatggggagcttgaatgactgtgaagt

SEQ ID NO: 447326 - DNA, 201 bp, Homo sapiens
ccatgaaaatcaacctcattggcagagcagcagatctgtaggagaggagtcttctttttttttatatatatatatatatatatatgtatatatatatatatttttattatagtttaagttctcgggtacatgtgcacaacgtgcaggtttgttaaatatgtgagaggagtcttaatggggagcttgaatgactgtgaagtt

SEQ ID NO: 447327 - DNA, 201 bp, Homo sapiens
gatttgacgactgaaaccaggcaacaccatgtactccccatttttgttgtctgttaaattctaaagaggtttttaagtatctttgactttcggttacagtaaaaaaaaaaaaaaaaaatccccaggtgcattgaaaaacagtttggtagttccacaaaaaacatagttatcatatgagcccacatttccaccctgggtcta

SEQ ID NO: 447328 - DNA, 201 bp, Homo sapiens
tgaactatggttttctgttttacattcagatctcagatccatttggagtttactcttgtgtctcctgtgaggtgtgggtttgattttttttttttttttttccaaatggccactcaggtgtcccagaccattattaaaaagtccatcttggccccagtgattccaggcactgtgtcctggtgctggaggactcgatcccac

SEQ ID NO: 447329 - DNA, 201 bp, Homo sapiens
aaggaccttgagaaggggaggcgatcctggatcatccagatgggcccagtgtcatcaccagggtccttccaagagggaggtagggctgggcagagagaggrgtaggggctgtgactatggaagccagaggctggggcaatgcagcaaggggccacagccagggagagcaggcagcctccagaaactggaaggggctcaggc

SEQ ID NO: 447330 - DNA, 201 bp, Homo sapiens
tgattgcacaattctgtgaatatactaaaagtcactgagttgtataccgtttccaaagggtgaattttatggcgtgtgaattatacctcaatttattttattttttaacttttacgtttgggggtacatgtgcaggatgtgcaggtttgttacacaggtaaacatgtgtcatgggggttggttgtgtagattatttcatca

SEQ ID NO: 447331 - DNA, 201 bp, Homo sapiens
gcttgaacctgggaggcagaggttgcagtgagcctagatcacgccactgcactccagcctgggcgacagagcaagactccatctaaaaaaaaaaaaaaaamcattataacaactgtttacaaagcacttacattgtattaggttgtaagtaacctagacctgatttaaattacatgggaggatgtgggtaagtagacatgc

SEQ ID NO: 447332 - DNA, 201 bp, Homo sapiens
atgttctcctatgttgtttttagaagttttatagttttaaatcttacatttatgtccataatccttttgagctaattttttgtgtcgggtgtgaggtgaawgcttttcttatgttgcatatggatatccagttattccagcatggggtgttaaaaaaaaccctggccaggcgcggtggctcacgcctgtaatcccagcact

SEQ ID NO: 447333 - DNA, 201 bp, Homo sapiens
tgtcccgctggactcagagccccgggagggcaggggtgcgtcctgtccttatgtgtgctgtgtgaggagtgcctgtcaccagtgtgcctgttggatgcttsccatgtcttctaccgtactcagcgtacatggtggtctctggctatgaaaaatgatcaattctatagctgaattgatgactgaatctgagaacatagtggg

SEQ ID NO: 447334 - DNA, 201 bp, Homo sapiens
ttcctgtgtgctggaaactttctaaactcaaagcatttagcacagtgtgcggcatttctgagtgtcaggaagtgtcagctgctgctgctgctgctgcgatygtagctctcataaaactcaagtaggctgttcctttcttaagtctcctccattgtaaactccagaggtagtttaaccccctgtccactgtcagaggtagtt

SEQ ID NO: 447335 - DNA, 201 bp, Homo sapiens
ttgtctttttcttagcggtgagagaaattgtaggtgctgatgaagtacagtttatcaatttttaaacataggctgtacctttggtgtcataagcctctgcrtaatccatggtcacaaatatgttctcctatgttgtttttagaagttttatagttttaaatcttacatttatgtccataatccttttgagctaattttttg

SEQ ID NO: 447336 - DNA, 201 bp, Homo sapiens
aggagaagttatttcccctaaaagtggatcgtactctacttgctcttttaaataaaactattaatttaattttacgttagcatatcagagaaaaaaataartcgaagtgaagtttatggaattgctgagcttctgatatgtttattcatgacgagagatatgattccctatcaggtctctttaagatgaagaaaaaagatt

SEQ ID NO: 447337 - DNA, 201 bp, Homo sapiens
ttgtggtgaggcacctgagcctttggcaccctttttaaaaccaggttcgtagccgccttattattgagtcagagagttccttgtgcattgtggtcataagscctttgtcaaatgcctggtttagagatacttctcccagtctgcgatttgtctttttcttagcggtgagagaaattgtaggtgctgatgaagtacagttta

SEQ ID NO: 447338 - DNA, 201 bp, Homo sapiens
gagctcagacacaggagactgacaattcccacacgaggtctccacccacccgcatacacatactataggtaagtgcaaagttcagaagcaatacgggcaacaaaaaatggacacataaatccgcttgttttacttgcctaatgagaaaacatgcctgctcagacactgcaggtgtggggctgggtatgggccaggtgcttc

SEQ ID NO: 447339 - DNA, 201 bp, Homo sapiens
agcggcaggcagcgtgtctgagaggacgcatgcactcagcaggcctctggcagatggcagcccctctgctgtccttcccatggaggcaaggcagccccccmccgccatcctacggctcttggctctcaggtcagactcctctccttgagggaggccatctctagcacctgcttgaggtctggcccctgggtgtgctctttt

SEQ ID NO: 447340 - DNA, 201 bp, Homo sapiens
gtgtctcccttcacataggctcaggtctcccggggcttacaaagtgcttctgtgaactctccaccccacttactgctcccatgtctccctcctgttcatcagtggtggatttcatccacaagagtcacatgtcagtcggttgtcacatcttcagactccacttctaattctaattctactgctatttctaccatatctgca

SEQ ID NO: 447341 - DNA, 201 bp, Homo sapiens
tgtggccatctcccttagccccgtctaaatgctgctaccctgctcccggagtccccatcagggggttcccagcttgccgtggtgtcttcagaagctgcaakaagcttcagaatcccttccaaagggattacggggatcagccatggctcagccttcctctgtcctgcatgcagggccactagcaatgacgtctagcatgtg

SEQ ID NO: 447342 - DNA, 201 bp, Homo sapiens
tgtctcccttcacataggctcaggtctcccggggcttacaaagtgcttctgtgaactctccaccccacttactgctcccatgtctccctcctgttcatcagtggtggatttcatccacaagagtcacatgtcagtcggttgtcacatcttcagactccacttctaattctaattctactgctatttctaccatatctgcag

SEQ ID NO: 447343 - DNA, 201 bp, Homo sapiens
gtctcccttcacataggctcaggtctcccggggcttacaaagtgcttctgtgaactctccaccccacttactgctcccatgtctccctcctgttcatcagtggtggatttcatccacaagagtcacatgtcagtcggttgtcacatcttcagactccacttctaattctaattctactgctatttctaccatatctgcagt

SEQ ID NO: 447344 - DNA, 201 bp, Homo sapiens
tattatgctgtaagtccagatgcggggttatagaatctttcgtgggaaaggagcctgactagtgtccccttctggtgctactcctcatgcttagatcctgycagaggccgtccactgctactggcaccctctcattgcgcagcctgttctcatcctcagactccagtccctcacagagtttactttcaaccctgtgctgct

SEQ ID NO: 447345 - DNA, 201 bp, Homo sapiens
cactgagtcacaaaaccacactagataaatggctacacagagaaaaaggaattcatccttcacttcatggaggaactgccattttaggagggcctgcagcagagagtcgaatttttgctggcaggaaagaggagacacagtgtcaacagagaggcagagcaggggccagcatgtttcgggaggcagggccacccgtgtgcc

SEQ ID NO: 447346 - DNA, 201 bp, Homo sapiens
gggtgggctgagctgccacagggcaggacccaaaggggcggctggttcttggggcccgtgtttcagaaatggtctgacaggacacttgggaggggaggctsttacagggcctcagtatctcagctgtattggcggttcacggggaggttggccaggacccctgcagccctgggataggccatttaaagaagttggcacaca

SEQ ID NO: 447347 - DNA, 201 bp, Homo sapiens
actgagtcacaaaaccacactagataaatggctacacagagaaaaaggaattcatccttcacttcatggaggaactgccattttaggagggcctgcagcagagagtcgaatttttgctggcaggaaagaggagacacagtgtcaacagagaggcagagcaggggccagcatgtttcgggaggcagggccacccgtgtgcct

SEQ ID NO: 447348 - DNA, 201 bp, Homo sapiens
ctaattctaattctactgctatttctaccatatctgcagttacttcctctgccaaagtcttgagcccctgaaagtcatccatgaggtctggattcaacttyttccacacaccttttcatgctgctattttgacctcctttcaggaatcatgaatgttcttactggcatctagcatggtgaatcttttacagaaggttttca

SEQ ID NO: 447349 - DNA, 201 bp, Homo sapiens
agccttgaggagtaagagggacccagaggccagtggaagaggcagggagaagcagcagctggagtaaaggccctggggctgcggaggacacagccaggacmtaaggaatgggcgagagaaatagaaggtgaagctggaaaagcaggcaggagccaggttacacacgtcctaccgaaatgtcatgctcagtagcgtgggttt

SEQ ID NO: 447350 - DNA, 201 bp, Homo sapiens
tcgcctgtctacacctccttttccttcagagcccagctcagacagcctgtcttttggggtagcctcctagactgctggggctggacagggcgcctctcctytgttcaaggctctgtggcacgctgccaagcctgtcagagcggacatggctctgtactcactgtgccgtggcctgtgcttgcttctctgcttcctgcttga

SEQ ID NO: 447351 - DNA, 201 bp, Homo sapiens
ccatgttggtcaggctggtctcgaactcccaacctcaggtgatctgcctgcctcggcctcccaaagtgctgggattacaggtgtgcgccactgcgcccggscaacccctgcctcctctttacagtcctcttccaccccgtccctggctgctgtcctccagcactggggcttctgttcgctgctgtactgcacactcctgga

SEQ ID NO: 447352 - DNA, 201 bp, Homo sapiens
tgcattggttgatggactttaggttgtttccaccctttgggtattaagaataatgctgcaatgaacactcatgtacatgtattttgtgggaacaaagtttwgtgggaatgtacaagtgtttgtgggaacacatattttcagttctcttgggtatatacttagcagtgaaattgctgggtttaactttttgaggaactgtga

SEQ ID NO: 447353 - DNA, 201 bp, Homo sapiens
tcatatatccatcacccggattcagtggttatcaagacttttacacatttacttcatctcttgctttttaaatttgctgaattattttaaagaaaatctcrgagacatatcatttcagaccttcatactttagtatgcattgctaaaaaatgagcattttcttatataactacaatattatacttaaaacattaataatta

SEQ ID NO: 447354 - DNA, 201 bp, Homo sapiens
aggaagagacttgcaggcttggcggcggcgggcgggggaggttactgtgttgtgggcagcaggacttaggcacccagcctggctctccacttcccgggtcygtccctggcagggaacttccgccaagggcagagactctgtcttacacatgctgcaacttcagtgcctacacttcagcgtctggatgttcataggtgttct

SEQ ID NO: 447355 - DNA, 201 bp, Homo sapiens
ggagaatcgcttgaactcaggaggcggaggttgcagtgagtcaagatcacaccacagcattctagcctgggtgacagagcaagactctgccccggaaaagaaaaaaaaaaagaagacaatcaattggctatagaagtatgagtttatttcttgactctcaatcttattctcttggtctgtgtgtctattattatgtcagaa

SEQ ID NO: 447356 - DNA, 201 bp, Homo sapiens
tctcatgtcttggcaaagcagtgaggcctggagtctcttcatttcactctgacagctcttatcaatctccgccttaattaaagaaagcagatttggcagcrgtgtctcttgtctgctgtcctttgggacttgatcgctttacagcagcagcactgattggcctttcttgctgctttccccactgtccccaggtttattagt

SEQ ID NO: 447357 - DNA, 201 bp, Homo sapiens
cacaatgatcacttgagtaaggtggtgtctgcccggcctctccactgtgaagttactctgaaatttggaagcatttctacgaaggtgctgtaaagtgatgtaaagatcctgttctttatcagccttccggtctgtgcatccctttcttcacagcactatgaattcacagtctcattctgtttaatggtgatgatccactcc

SEQ ID NO: 447358 - DNA, 201 bp, Homo sapiens
gtattagcctgccattattggcaagctatctcatggaaagagtgctcttctgtctagaactggtatcatgaacttaagaataaaaaattattttatttttrtttattgcttctttgcaaatctaaaatgttgtgttagcagtcaggagagagggtgctctggggagggatgggctcggtgacagagcagacaggagagggt

SEQ ID NO: 447359 - DNA, 201 bp, Homo sapiens
gtggttctcgctcttccctgggtactgcgttgcgtgtgcgtttctgcgctctaccttattcactcagcgctaatacagaagcattttcccattccactcartgttcgtcagtgtaattgtaaagactgtcagcgatgttatcagaatattctgaatatttttcccaatgttagaccttgagatactgccccatttatttgt

SEQ ID NO: 447360 - DNA, 201 bp, Homo sapiens
ttttattaaacactgtttgatatctccgtggaaaggttttcctggtcatattattaggatagattctctgaagcagaattactgagtccaaagatgtgaattttttttttgagatggagtctcattctgtcacccaggctggagtacagtggcacgatctcagctcactgcaacctccgccttccaggttcaagcgattct

SEQ ID NO: 447361 - DNA, 201 bp, Homo sapiens
actgctgattggggtggtgattcttgcactctctgccgtcctcggagcctcatcctttttgtaacggattctgtgggctttctagggaagctttttttttktttgttttttaatcttcagctttccctctcatgtcttggcaaagcagtgaggcctggagtctcttcatttcactctgacagctcttatcaatctccgcct

SEQ ID NO: 447362 - DNA, 201 bp, Homo sapiens
tcatattattaggatagattctctgaagcagaattactgagtccaaagatgtgaattttttttttgagatggagtctcattctgtcacccaggctggagtrcagtggcacgatctcagctcactgcaacctccgccttccaggttcaagcgattctcctgcttcagcctcccgagcagctgggactacaggcacatgccac

SEQ ID NO: 447363 - DNA, 201 bp, Homo sapiens
ctgtgtctagatgtttgggtaatacacaaatacttaccattgtgttgccgttgtctacagcgttcagtacagtcacacgctgtacaggtttatagcctagwagcaatgggctccaccacacggcctcggtgtgtagaggcttgacctccaggctcgtgtgagtgccctctgtgatgttcacactaggacaaatcgcctaat

SEQ ID NO: 447364 - DNA, 201 bp, Homo sapiens
cgattctcctgcttcagcctcccgagcagctgggactacaggcacatgccaccatgcccagctgatttttttatttttagtagagagggggttttaccatrttggccaggatggtttcgatctcttgaccttgtgatccacctgcctcggccacccaaagtgctgggattacaggcgtgagccaccgcgcctggccaatgt

SEQ ID NO: 447365 - DNA, 201 bp, Homo sapiens
gggaagattttctggagccccaggagaggtccaggaaccatgtccacaggcctcagagactccctggcggattctgcaggcccagtcctggattaggaggytaccgagaggcgcagattgttgacaggcagaccactgcttcagggtttgcatgctccgcaaatcccatttattagctaattggcgcttgagaggtttcag

SEQ ID NO: 447366 - DNA, 201 bp, Homo sapiens
agcctgtcagagcggacatggctctgtactcactgtgccgtggcctgtgcttgcttctctgcttcctgcttgactgcgggctccttgaggacagagaaccrgacttgtgtatccatccccagctccgagacagcatctggcacatattaggtattcacgaaatgctcttgattagaagaatcaaaattaaaatatggcctc

SEQ ID NO: 447367 - DNA, 201 bp, Homo sapiens
ctatcattatttattttgtggctgaaattattccagacttacttttaaagagaaggtttccttgcatttacatccaattaagagaaaggactgcagtttctgtgttgttgttgttgttgttgttgttgttgttgttgttttggagaataccgtgtgatgagatacctctggatgttctttatttgctgtggtaattttgaa

SEQ ID NO: 447368 - DNA, 201 bp, Homo sapiens
tatcattatttattttgtggctgaaattattccagacttacttttaaagagaaggtttccttgcatttacatccaattaagagaaaggactgcagtttctgtgttgttgttgttgttgttgttgttgttgttgttgttttggagaataccgtgtgatgagatacctctggatgttctttatttgctgtggtaattttgaat

SEQ ID NO: 447369 - DNA, 201 bp, Homo sapiens
atcattatttattttgtggctgaaattattccagacttacttttaaagagaaggtttccttgcatttacatccaattaagagaaaggactgcagtttctgtgttgttgttgttgttgttgttgttgttgttgttgttttggagaataccgtgtgatgagatacctctggatgttctttatttgctgtggtaattttgaatt

SEQ ID NO: 447370 - DNA, 201 bp, Homo sapiens
tcattatttattttgtggctgaaattattccagacttacttttaaagagaaggtttccttgcatttacatccaattaagagaaaggactgcagtttctgtgttgttgttgttgttgttgttgttgttgttgttgttttggagaataccgtgtgatgagatacctctggatgttctttatttgctgtggtaattttgaatta

SEQ ID NO: 447371 - DNA, 201 bp, Homo sapiens
cattatttattttgtggctgaaattattccagacttacttttaaagagaaggtttccttgcatttacatccaattaagagaaaggactgcagtttctgtgttgttgttgttgttgttgttgttgttgttgttgttttggagaataccgtgtgatgagatacctctggatgttctttatttgctgtggtaattttgaattag

SEQ ID NO: 447372 - DNA, 201 bp, Homo sapiens
tatttattttgtggctgaaattattccagacttacttttaaagagaaggtttccttgcatttacatccaattaagagaaaggactgcagtttctgtgttgttgttgttgttgttgttgttgttgttgttgttttggagaataccgtgtgatgagatacctctggatgttctttatttgctgtggtaattttgaattagcat

SEQ ID NO: 447373 - DNA, 201 bp, Homo sapiens
ttttgtggctgaaattattccagacttacttttaaagagaaggtttccttgcatttacatccaattaagagaaaggactgcagtttctgtgttgttgttgttgttgttgttgttgttgttgttgttttggagaataccgtgtgatgagatacctctggatgttctttatttgctgtggtaattttgaattagcattataaa

SEQ ID NO: 447374 - DNA, 201 bp, Homo sapiens
caccagtgactcccgttgcacttcctgtgctgctgagacccaggggctccctcaacacagacctcatatgaggggccatctccttaaacaagagagtctcrtcgccatagaccttactcctacctcccacagtttgcccatagtcccacattggagtttctctctgccaagaagctcccggtcctcatctcctcctaggag

SEQ ID NO: 447375 - DNA, 201 bp, Homo sapiens
tgtggctgaaattattccagacttacttttaaagagaaggtttccttgcatttacatccaattaagagaaaggactgcagtttctgtgttgttgttgttgttgttgttgttgttgttgttgttttggagaataccgtgtgatgagatacctctggatgttctttatttgctgtggtaattttgaattagcattataaaccc

SEQ ID NO: 447376 - DNA, 201 bp, Homo sapiens
ccagcccgattcccacccaagctccactgctcatgacaactgggatgctgcagctgggaccgtcagggcctgtgttaggcccaggccctgtgactgccagktgaagcgttgttttgttttgtttcaaaatcctgttgtttgagacacaaaatagtgaatcttggcagtgttttatgtttttccgataccttctctgcaaat

SEQ ID NO: 447377 - DNA, 201 bp, Homo sapiens
tttgctatttgctttatgttctcaaaggcaaaaaaaaaaaaaaaaaaaaaaagaatgaacaatgttttcctgtgtgggtgccatggggtgggaggaggaarcctgtttcttgcaggtgtatgcagcacccttgcctcctcatcttctgtgtcaggaaagggagagggacccctcagatgcttgctgcaagcaattgagaaa

SEQ ID NO: 447378 - DNA, 201 bp, Homo sapiens
ctgctgaaaggtgggaaaaagcccttgatggtaaggacacgagtccaattttccttccttgacagaggaagtttatttcttgactcatgaacgttaaagayatttaaattccaaggagctcaccttgatttattatgcaattgtttcaccaaaatttggtttggatgcagaagctcctctatcagagtctgtatctggaag

SEQ ID NO: 447379 - DNA, 201 bp, Homo sapiens
cagcatttcttcccttgggtggcagaggtctgagtctggaacattcttttctgtcctttggaccaatagtgtgtgacaccaagtgcttcggcgtgggaagsagatccgactccgatcctgtgtgctgtgaccgggagcagggccaggaggagctgggcattggaaagactgctggagagtgtctggagtggggtggtccac

SEQ ID NO: 447380 - DNA, 201 bp, Homo sapiens
catagctcactgcatcctcaaactcctgaacttaagccattcttcctcctcagcctcctgagtagctaggactacaggtgcacaccactacacctggcaattttttttttctttctgtagagatggggcctctctgtgttgcccatgctggtctcaaactcctgggctcaagtgatccttctgcctcagactcccaaagtg

SEQ ID NO: 447381 - DNA, 201 bp, Homo sapiens
ttccacattttcaggtattttttcagcaacactccattctgggtaccaatttactgtattagtctgttttcatgctgctgataaagacatacctgagactsggcaatttacaaaagaaagaggtttaactggacttacagttctgtgtggctggggaagcctcacaatcatggcagaaggcaaggaggagcaagtcaggtc

SEQ ID NO: 447382 - DNA, 201 bp, Homo sapiens
tggccacctcctctgtctgcccctttgtcctgtggccaaacttctccagggagccgtgtgtgtgtttaacctcacctgtcacatgcctctatttgtcatcygctggcatttgtccccactgtgctaccagatatattttctctgtgatcaccagtgacctccttcccaacccactgtttgcagcctgtggattgggaagga

SEQ ID NO: 447383 - DNA, 201 bp, Homo sapiens
agctttgcgtccgcattgtctaacccattctcccggtccgtgtctgccctggaaggagccttgccctggggagggacccaggcttgtcctctagtgatttrtgtgcatggtcacggggctggagccgtggggcagcccaccttgtgttcttgctcaggagggccgggtgtgcccagagcagggagtgggcatggagcagga

SEQ ID NO: 447384 - DNA, 201 bp, Homo sapiens
ggccaaggtgggggggattagttgaggtcaggagttcgagactagcctggccaacatggtgaatccctgtctctactaaaaatacaaacaaaattagccggcatggtggcgcacacctgtagtcccagctacttgggaggctgaggcaggagactcgtttgaacccgggaagtggaagttgcagtgagccgagatcacacc

SEQ ID NO: 447385 - DNA, 201 bp, Homo sapiens
caggagagagctgtacaaatcctgtcctcactgtgttttggggacgtcgtttcctggcctcctgtgggaactccacctttcctctctggagggcgtcttcygagctccgtggggatgggcaggccaccctcagggctcctctgtctcccctggccccggacttgctgtcctacgagtgctcaggctcttccccctgggacc

SEQ ID NO: 447386 - DNA, 201 bp, Homo sapiens
aggcagggcctgatggcagccccagatgtgctccagcgtgtgttgcggtaagcaggagagagctgtacaaatcctgtcctcactgtgttttggggacgtcrtttcctggcctcctgtgggaactccacctttcctctctggagggcgtcttccgagctccgtggggatgggcaggccaccctcagggctcctctgtctccc

SEQ ID NO: 447387 - DNA, 201 bp, Homo sapiens
ttctcatgaagagcgtgcaacctagatgcctcgcgtgtgtatttcacagtggggtttgtgatcctatgagaatctaatgcctctgctgatctggccctccrctcacctcctgctgcatggcccagttcctacaggccacggactgggggttggggacccctgatctcaatgactcattattaattgtatttaattttaatt

SEQ ID NO: 447388 - DNA, 201 bp, Homo sapiens
gtctatgcatgtgtgtgtatgagtgtgtgcatgcatgtgtgtgtgtgtatgcgtttttaaaatgccatttttagtctattgattctgaaagacaccccaaycttgtctctcctgccactgcttctctgatctggagaacatgaggtgacaggaagtgtaggcgctgggtagacgtggtggatgaacaggcagggcctgatg

SEQ ID NO: 447389 - DNA, 201 bp, Homo sapiens
ttctgatgttttgagtagcatgctcagcaacatccccatgaagatctaggcaggtgtctgatgttgttttgctgttagcattcggtaacgcacactgagggcatgggaccggagcaccaggggatgaaggtggctctcccagaggacagggcggtgtggcctgctgttgactgacttgcgttagcccccctgctgccagca

SEQ ID NO: 447390 - DNA, 201 bp, Homo sapiens
gaacagactctaatgtacttgctttgcatggcttgcagggcctctgtggcctgccctgtctccagctttgattgtgagcgccctatttccttggtcctacrctcctgctttcccttgtgggaatacttagagtgggccaaatgtgtggccggttttgttccttcgttgaggctttatctctggcttggaatgcctgtgctt

SEQ ID NO: 447391 - DNA, 201 bp, Homo sapiens
tggctttgcttctgggtgcttcctgtagacagagttgggaaaagtctgtgtgcatatacacatacatgagaacacacacacacacacacacacacacacamtatatatatatctaaacccatatgcctacatatatgtacacatgtgtatacccctgcgtctgcaccatagacatgcatgtagcatctgccctgttcacgg

SEQ ID NO: 447392 - DNA, 201 bp, Homo sapiens
ctgctaagttagttcctttgcctccttccaggccccgttcacatggtgcctttgccatgaagatttaagcatttgagtctcaatggaatcaactcacattycccgaatccaggatcactcctgatccataggagattagaatcaattctactggaaccagtgaaaaatgaatgagtgaggggacatgaaagcggcagaagt

SEQ ID NO: 447393 - DNA, 201 bp, Homo sapiens
ttgatgccccctccctggttctgacgtttctacctctctctttcacttttaaggaccctggtgattacgtggggctcacctggataattcaggatgagctycctgtctccaagtgagcttaattcccctttggccgtggaagaacaccagtccaccggttccgtgggtcaggatctttgggagggatcgttctgcctatca

SEQ ID NO: 447394 - DNA, 201 bp, Homo sapiens
cacagcttgtctgttagggtctacttggctgcaagtagcagaaacccccgagtaatagtggcttcagtaaagctcacaggtctccgtcacattaaaatcgrgaggcagacaggccaaagctgatgtgacctaccagtgccaggcacctgcactgtacctctgccgttgccctggggcacagcctggagtcaggacagctgc

SEQ ID NO: 447395 - DNA, 201 bp, Homo sapiens
ttgcagcctgggaaggtggccacgttcacaatcaacatcaaagtgaagctggatttctcctgccaggagaatctcctgcaggatctcagtgatggtaagcrctttcctaattttaattagcacgtcagggtcctagatactgtgtagcaacccccatcccttgatgcctgctgtttgctgtttgtaactcacttgtcattc

SEQ ID NO: 447396 - DNA, 201 bp, Homo sapiens
gaatgcatcagaattttctaggggattggtaagtcccatactgcctcagttacagcatcctcatcactgtcattgttattattacagaaaaattgtatggygacttcttgagctggaagctagaggaaacccttgcccagttccctttgcagcctgggaaggtggccacgttcacaatcaacatcaaagtgaagctggatt

SEQ ID NO: 447397 - DNA, 201 bp, Homo sapiens
actacacttggatctgtttctctttaaggtgatataatacagaaaatattcattgtggagaaatttagtttaactctgatttagtttataagagcaaaacrgcatttatttggtcaatgagaaggagttgctcactaaggcgtcaagatggcttggcttgagctcggtgcctctagagatgagcagttcttcctcctccct

SEQ ID NO: 447398 - DNA, 201 bp, Homo sapiens
actttccctactacacttggatctgtttctctttaaggtgatataatacagaaaatattcattgtggagaaatttagtttaactctgatttagtttataakagcaaaacggcatttatttggtcaatgagaaggagttgctcactaaggcgtcaagatggcttggcttgagctcggtgcctctagagatgagcagttcttc

SEQ ID NO: 447399 - DNA, 201 bp, Homo sapiens
accatgttgtccaggctggactggaactcctgatctcaagtgattcaccctgcctcagcctttcaaagtgctgggattataagtgtgagccacagcgtccygcttgggttttgattttttattctctttttgtgaagaggtgtctcatattaaatatacactttccctactacacttggatctgtttctctttaaggtgat

SEQ ID NO: 447400 - DNA, 201 bp, Homo sapiens
cagctgtatatgagtttcaaagaccgacgagcaaatgggagggatacataaccttctattcacttccctggttgccagggaaataatttggtggtctcggrggggggagccctgtaggatttatcttcatgcttgatgagaggtgggcagaacacatcaccgagggccggctcttcccgcagtgtccacagtgtgccttcc

SEQ ID NO: 447401 - DNA, 201 bp, Homo sapiens
tttctgtctcagccttagtagggagaagcagtttagagaattttccccaaagtggttaaagtatcaaatgcctgctgctctttcttacacattttttttttggtcttaaaatgtagctttcatttttatctggtttaaaaacaatatgtgcttattataacaaatgaggaagagcagggaacaaaataaaaagcaccacat

SEQ ID NO: 447402 - DNA, 201 bp, Homo sapiens
gtatcttgagaacatgcttatgaaagctctgaaagttgaataattctggtcaacagacgttcttatctgctagagaagaagccctccactgccctgttagscacccgtgtctgctcggggtgcctctgagttcagaggcctgaatccagcagctcctctcgcttgctgtgtggttcctgggccaatttattaccctgtttg

SEQ ID NO: 447403 - DNA, 201 bp, Homo sapiens
agcatggaagcatcagaatttcttcagaatgcagtttacattaaccttcgacaggtgagtgtatgtctacctgtaagtggaagagttcatccagttcttayggaattgattcactatgaattcagcttatttcgttttgctgaggttcagcatgccatgataaaaactgttgaatcttaacttgatttctaattaacatgg

SEQ ID NO: 447404 - DNA, 201 bp, Homo sapiens
gccgtggcctggcagtggagcataggagataggaatggatgagagaggagtaacgaggagtgaagggcttgattcagaatagcacataaccgtaactagtrtgttcacagttgaggagtcagagccttagtcacgcagttcttggttgtttatcctgggtccagactagtgagtgttcatttttagcccgctttgggaaca

SEQ ID NO: 447405 - DNA, 201 bp, Homo sapiens
tagtttaattagatcccatttgtcaattttgtcttttgttgccattgcttttggtgttttagacatgaagtccttgcccatgcctatgtcctgaatggtawtgcctaggttttcttctagggtttttatggttttaggtctaacgtttaagtctttaatccatcttgaattaatttttgtataaggtgtaaggaagggatc

SEQ ID NO: 447406 - DNA, 201 bp, Homo sapiens
aaggcgggggacgccagtctccttgggcaagacccctcagctcttatccaggtgttcctcagggagaagggtggcttgctgtgtcacaggagtcccatcctcccatctagatccagtcccacattaaaaaaagagtctccagattcctttttcttctggttaaaatcccaccattcttttgagaggacagctgatttatgg

SEQ ID NO: 447407 - DNA, 201 bp, Homo sapiens
gctggcctcgaacgcctggcctcaggtgatctgcccgccttggcctcccaaagtgctgggattacaggtgtgagtcactgcgcccggtccacagcttctcraaatcatctgaatgtagggattcattcctcagactgtcgttaaagttgactttccaggaaccagcctgctcaacgattccatcatccttttcccagccat

SEQ ID NO: 447408 - DNA, 201 bp, Homo sapiens
catgctttaaaagacctgcttcatttggattacatttttaaaacattctcccatgttttctcctggtacgttcatggtctcatttgctttaatattcaaaycttttatttatctggaatatactaaggtgagtgcggcatgggtcctccctttgtttttctaaaaagccacctaattggccccaagtcatttaatcaataa

SEQ ID NO: 447409 - DNA, 201 bp, Homo sapiens
ttctttgaaaaaatatctatttagatagttaccaatttttaaattgggttgtctttttgtctttttattgttgagttgtaacagtttttttttttttttttgagacagaatcttgctttgtcgcccaggctggagtgcagtggtgtgatctcggctcactgcaacccctgccacccgggttcgagcgattctcttgcctca

SEQ ID NO: 447410 - DNA, 201 bp, Homo sapiens
gcagaacaaatcagtaaaacggtaaaacgcatgaacggctattgggaaatctgatgggaagtgaataaagggagggaggaaggaaagggggatagatggawagatgagggatggatagatgggtggatggatggatgggtagttgttgatggatgaatggatggatggatggtagatgggtggatgggtggatggtggatg

SEQ ID NO: 447411 - DNA, 201 bp, Homo sapiens
aagtgtcatattcactgctgtggctccagggtccagcacccggcaggcaccagatcctagatgctgagtaaatgaccacttcctttatgtatttcttcttytttttaagcatgttttaaacaatttgtacaaatcagtataaaagtaattcatgctctacctaaaatttagtgaatattagttcttccactcattttctct

SEQ ID NO: 447412 - DNA, 201 bp, Homo sapiens
gcctcgaacgcctggcctcaggtgatctgcccgccttggcctcccaaagtgctgggattacaggtgtgagtcactgcgcccggtccacagcttctcgaaaycatctgaatgtagggattcattcctcagactgtcgttaaagttgactttccaggaaccagcctgctcaacgattccatcatccttttcccagccatctgt

SEQ ID NO: 447413 - DNA, 201 bp, Homo sapiens
aagaccatggtgtatttgccagaaagcaagggaaacacctctccccggaggcccttcccaaggtgccgtccttaattctttgatttgatgttttttttttyttttgagatggagtcttgctctgttgcccaggctggagtgcagtggcatgatcttggctcattgcaacctctgcctgccgggttcaagcgattctcctgc

SEQ ID NO: 447414 - DNA, 201 bp, Homo sapiens
gatccttaattgtatcctggatttaaaaaagaagactttgttttgggacaattgaagaaattgaatactataatattattgtatcaatgacaaatatatcragtatgataatgaaattgaaattgtagcagaaaattcttgttcttaggaaataaatgcagaagcatttaagagtgaaagatcaggccaggcacggtggct

SEQ ID NO: 447415 - DNA, 201 bp, Homo sapiens
tatgataatgaaattgaaattgtagcagaaaattcttgttcttaggaaataaatgcagaagcatttaagagtgaaagatcaggccaggcacggtggctcaygcctgtaatcccagcactttgggaggccgaggtgggcggatcacgaggtcaggagattgagaccatcctggctaacatggtgaaaccccgtctctactaa

SEQ ID NO: 447416 - DNA, 201 bp, Homo sapiens
ctgttccaatacagcagttctatttcctgatgcgggatccagtccaggatcacacacggcatttagtgtttatggcacttagtatcgtctcagcctatctkcgtttttcatgataattgatatttctgaagaatgcaggccatttattttgtggaatgttctcactttgtgtttgcctgaagttgctttttgattatgagg

SEQ ID NO: 447417 - DNA, 201 bp, Homo sapiens
cctcctgtgggaactccacctttcctctctggagggcgtcttccgagctccgtggggatgggcaggccaccctcagggctcctctgtctcccctggccccrgacttgctgtcctacgagtgctcaggctcttccccctgggaccttctagagtctctggctgctcttttgtgttctcattggggttggtgatgaactgtct

SEQ ID NO: 447418 - DNA, 201 bp, Homo sapiens
acccgggaggcggagcttgcagtgagccgagatcgcgccactgccctccagcctgggtgacagagcgagactccatctcaaaaaaaaaaaaaaaaaaaaaraagagtgaaagatgatttgcctgcacttactttaatagggtgaaggaaaaaaaatacagtgtgaatgtgaatctagagagaaataaagtaaaaatgtcaa

SEQ ID NO: 447419 - DNA, 201 bp, Homo sapiens
tttttagacaaggttctactctgttgcccaggctggagtgcagtggcgattacagctcactgcagcctagaattcctgggctcaagagatcctcctgcttycgcctcccaagtagctgagactataggcacatgacatcatacccagctaatcaaagtattttctaatttctaggccaggcgtggtggctcatgcctgtaa

SEQ ID NO: 447420 - DNA, 201 bp, Homo sapiens
agtcaaacagactgaacaactagaatagaaaaaccaaatacccataggcaaaaatatatagcaaaaccagttaccagagtatccccacggaccccaaaatrtaagtagatgtggacaaaccactaataacaacacggtttcaccgtctgcacaagaggaagccggaaacacacacacccaggaatccccacacagccagca

SEQ ID NO: 447421 - DNA, 201 bp, Homo sapiens
ctgaacaactagaatagaaaaaccaaatacccataggcaaaaatatatagcaaaaccagttaccagagtatccccacggaccccaaaatataagtagatgyggacaaaccactaataacaacacggtttcaccgtctgcacaagaggaagccggaaacacacacacccaggaatccccacacagccagcaggtactcattg

SEQ ID NO: 447422 - DNA, 201 bp, Homo sapiens
tgtggttgttttaagaatgaactttggtttttgttgacttttctctattgtttttcaattccccctttcatttatttctgctctaatctttatttccttcyttctgtttgctttgaatttaattttctcttctttttctagtttcttaggttgttgacatgagctctttcttctggtttaagagacagggtcttgctctgt

SEQ ID NO: 447423 - DNA, 201 bp, Homo sapiens
tatagtgagccaagattgtaccactgcactccagcctgggtgacagagcaagaccctacctcaaaaaacaaataaaaagacattgtcaaagattccttttrtgaaaattacaatctgtatttgttgaagagggcttaagcaatcattatccagtgattctcaaaactatttgatgctgatgctgccggcattattatattc

SEQ ID NO: 447424 - DNA, 201 bp, Homo sapiens
aaaaccagttaccagagtatccccacggaccccaaaatataagtagatgtggacaaaccactaataacaacacggtttcaccgtctgcacaagaggaagcyggaaacacacacacccaggaatccccacacagccagcaggtactcattgggcagctcagtgggccaagttgagaacagcagctgaaatgtggaggagttt

SEQ ID NO: 447425 - DNA, 201 bp, Homo sapiens
ccttcagtgtggttagggcctggcgattgtggcttttggggtcagatgcacctgagctctgtggtttactagctacgggaactggagcaacgtacctcacyttgccgaacgacagttgctattcaaggccttcctgtcggataggatggggaagtcctgagagagacccagtgtgcgcagctcccagcattgtgtctggca

SEQ ID NO: 447426 - DNA, 201 bp, Homo sapiens
agttgaactaatttacactcccaccaacagtataaaggcattcctatttctccacatcctctccagcatctgttgtttcctgactttttaatgatcgccaktctaactagcgtgagatggtatctcattgtggttttgatttgcatttctctaatgaccagtgatgatgagcttttttcgtatgtttgttggccgcataaa

SEQ ID NO: 447427 - DNA, 201 bp, Homo sapiens
gaggcaggagaatcgcttgagcctgggaggcggaggttgcagtgagccaagatcacgccacagcactccagcctgggtgacaaagtgagactctgtctcagaaaaaaaaaaaaaaaaaaaaggaaatacagtgtactttcttttgttttcttttttcctttggcctaaagtgtcacaactgtatactcttaatgtctccct

SEQ ID NO: 447428 - DNA, 201 bp, Homo sapiens
acctgagctctgtggtttactagctacgggaactggagcaacgtacctcaccttgccgaacgacagttgctattcaaggccttcctgtcggataggatggsgaagtcctgagagagacccagtgtgcgcagctcccagcattgtgtctggcaggggccggccacctaacacacactggttgtgaggattgcttcttgctga

SEQ ID NO: 447429 - DNA, 201 bp, Homo sapiens
ccatgtgttaccattgttcagctcccacttatgagtgagaacatgtggtgtttggttttctgttcctgtgttagtttgctgagaatgatggtttctagctkcatccatgtccctgcaaaggacatgaagtcatccttttttatggctgcatagtattccatggtgtatatgtgccacattttcttaatccagtctatcatt

SEQ ID NO: 447430 - DNA, 201 bp, Homo sapiens
aaggctgacttgaaataagcaaaggcatgccccgcttgaggaagtcaggtgcctttgtctacatttcctgggtccatctctctctctcccctgccctcccmctccgctctctctctctctcccttccccctccccctcctctctctctcttctttcccccgccccgttttttttctaggatgattcagaaactgtcttagc

SEQ ID NO: 447431 - DNA, 201 bp, Homo sapiens
tagtttatgaagaattggtgttaatttgtccttaaatatttggtagaattcaccattgaagacagctgtacctggcctttctttatttttattttttattwtactttaagttctgggatacacgtgcagaatgtgcaggtttgttatataggtatacacgtgccatggtggtttgctgcacccatcaacccgtcatctaca

SEQ ID NO: 447432 - DNA, 201 bp, Homo sapiens
aatcccacttgatcatgttgtataaacctttttatatcatgctggattcagtgtgctaatattttattgaggatatttgcatctgtctgtctgtctgtctrtctatctatctatctatctatctatctatctatctatctatctatctttttgagatggagtctcgctttgtcgcccaggctggagtgcagttgcatatct

SEQ ID NO: 447433 - DNA, 201 bp, Homo sapiens
agaaaaaaataataaaggtatttaagagatagctaattttaatgattctaaaatataaagatggtttaaaaaatgagcattacttctaccaaatagacaarcagtgtcaacttttggtgaactttcttccaattctttttttttccttgtgtgttgcttttcaaagaacagtataacacttttaaaatggaaaaagagcca

SEQ ID NO: 447434 - DNA, 201 bp, Homo sapiens
gaatcccacttgatcatgttgtataaacctttttatatcatgctggattcagtgtgctaatattttattgaggatatttgcatctgtctgtctgtctgtctatctatctatctatctatctatctatctatctatctatctatctatctttttgagatggagtctcgctttgtcgcccaggctggagtgcagttgcatatc

SEQ ID NO: 447435 - DNA, 201 bp, Homo sapiens
tgaatcccacttgatcatgttgtataaacctttttatatcatgctggattcagtgtgctaatattttattgaggatatttgcatctgtctgtctgtctgtctatctatctatctatctatctatctatctatctatctatctatctatctttttgagatggagtctcgctttgtcgcccaggctggagtgcagttgcatat

SEQ ID NO: 447436 - DNA, 201 bp, Homo sapiens
ctgaatcccacttgatcatgttgtataaacctttttatatcatgctggattcagtgtgctaatattttattgaggatatttgcatctgtctgtctgtctgtctatctatctatctatctatctatctatctatctatctatctatctatctttttgagatggagtctcgctttgtcgcccaggctggagtgcagttgcata

SEQ ID NO: 447437 - DNA, 201 bp, Homo sapiens
agtgcagagtcaatgagctaatgcaggtgtccagcgtacactgagcactcaacagtgttgctgtcgtcgtgatttcatcctcataacccttgggtggcccygttttcgcctccttccctgttttgagcgtctcctcagagggtctcatctatgagacagcggtggaatgaggctgggtttctaagggagctccagctctgg

SEQ ID NO: 447438 - DNA, 201 bp, Homo sapiens
ggacagacagggaacaggctccatgacctgagggctgattccagcagggtgggcaccctgcatgtgcctttttccatacctatgaaagggggcaccaccgrgtgcagagtcaatgagctaatgcaggtgtccagcgtacactgagcactcaacagtgttgctgtcgtcgtgatttcatcctcataacccttgggtggcccc

SEQ ID NO: 447439 - DNA, 201 bp, Homo sapiens
gtcggcagcattggtttcttctgaggcctcactccttggcctgtagacggctgccttcttcctgtgtcttccctctgtgtgtgtctgttttaatctcctcttataatgacaccagtccgagaggattgggcccatcttgggcctcattttactttgtatgtctaaggtattgtactgggctttagggcttcaacatgggaa

SEQ ID NO: 447440 - DNA, 201 bp, Homo sapiens
tgtcggcagcattggtttcttctgaggcctcactccttggcctgtagacggctgccttcttcctgtgtcttccctctgtgtgtgtctgttttaatctcctcttataatgacaccagtccgagaggattgggcccatcttgggcctcattttactttgtatgtctaaggtattgtactgggctttagggcttcaacatggga

SEQ ID NO: 447441 - DNA, 201 bp, Homo sapiens
aatgtcggcagcattggtttcttctgaggcctcactccttggcctgtagacggctgccttcttcctgtgtcttccctctgtgtgtgtctgttttaatctcctcttataatgacaccagtccgagaggattgggcccatcttgggcctcattttactttgtatgtctaaggtattgtactgggctttagggcttcaacatgg

SEQ ID NO: 447442 - DNA, 201 bp, Homo sapiens
ccacgtgactcccgaggcagccagtgctccttcagaggcgtggtcctgccacgggacccacagccactgcgaggtggcccagggcacaaactgtgggcctyctggaggggtgcctcactggggctttaggctggaaaggaacacagtgacctcagcctccagcctcacctgcttcatgaagctgctctgcagggattcact

SEQ ID NO: 447443 - DNA, 201 bp, Homo sapiens
catgtgcctcagcctcccgagtagctggtactgcaggtgcccgccaccacacccagctaattgtgtgtgtgtgtgtgtgtgtgtgtgtgtgtgtgtgtgtktttagtagagatgaggtttcaccatgttggccaggctagtcttgaactcctggcctcacgcgatccactcgcttcagccacccaaagtgctgggattaca

SEQ ID NO: 447444 - DNA, 201 bp, Homo sapiens
agaggtggggttagaatcatctagaagctcttttcctcacccctttggggcagtttgggaggtgggaggacaagagccagggcctcggggttgcttcctgkacagacagggaacaggctccatgacctgagggctgattccagcagggtgggcaccctgcatgtgcctttttccatacctatgaaagggggcaccaccgag

SEQ ID NO: 447445 - DNA, 201 bp, Homo sapiens
aggagacacacctgtgtgagtgtgtgtgtgagtctgtgcagtggagacgggtacctgtgtgagtgtgtgcaggggagatgagcgcctgtgtgagtgtgagygtgtgtgtgtctgtgcaggggagacgggcgcctgtgtgagagtctgtgcaggggagacgggcgcctgtgtgtgtgagtctgcgtgttagagtgcgagtgt

SEQ ID NO: 447446 - DNA, 201 bp, Homo sapiens; identical to SEQ ID NO: 29994

SEQ ID NO: 447447 - DNA, 201 bp, Homo sapiens
cattcacgcatggatgcacacacaatgacatacacaacaagcacgcagcacagtcacacgacggcacacagacaccttcacatacacacacgttcatctayggatgcacacacaacatacactgacatacataacacgcacacaatgcactcacacaacagcacacatcttcacatacacattcacacatggaggcacaca

SEQ ID NO: 447448 - DNA, 201 bp, Homo sapiens
aattgcttcaacaaagcgcatcataaagatatctcaaaattgcatacccattaatttccttgctattggaatttgggatggtctcaattttttttttttttgacggagtcttgctctgttgcccaggctggagtgccgtggcacaatcttttttttttttttttgaggtggagtctggctctgtcgcccaggctggagtgc

SEQ ID NO: 447449 - DNA, 201 bp, Homo sapiens
aatgaatgggagagaagcattagcaggcctggaaagagtctgtttgggatccaacccatcatgcatccagctcgtgtagtttggggtcaggggacctgtgytgaagtttggacttcaccatttactagctatttgtccttggggaactgttactcctgtgcctcgatttcctcttggataaatagggggggtagtatttag

SEQ ID NO: 447450 - DNA, 201 bp, Homo sapiens
ggtggacggacagccatgtgaccgcgaggctgtggcggcctgccaggtgggcgaccccgtgcgcctggaggtgcggctgaccaaccggagcccgcgcagcrtagggcccttcgccctcactgtggtccccttccaggaccaccagaacggcgtgcacaactacgacctgcacgacaccgtctccttcgtgggctccagcac

SEQ ID NO: 447451 - DNA, 201 bp, Homo sapiens
tgaggaggtcgggtgagccccctcccattgaaggtcctcagaagctggtgggcctgggaggtggggggcatggaagctgggatgagggaaggacaagaccygagtttctggggtcctgagaggtgaagcagtagggtgaaaagagtgtaggttttggagacagactggagttcgaatctcagttttcttgcttctcaggac

SEQ ID NO: 447452 - DNA, 201 bp, Homo sapiens
tgtgttgcccagggtatctcaatgtgttgtggaaggagggttgcaggcaggccccatacctggatctttttcttttttttttcctttttctttttctttcttttttttttttttgagaccgagtctctccctgtcacccaggctggagtgcagtggtgtgatctcagcttactgcaacctctgcctctcaggttcaaccag

SEQ ID NO: 447453 - DNA, 201 bp, Homo sapiens
gaaaaagagccacctgccatatcttcggtaaattagactagtgtagacttaaaaagaggaattatctgagatgtcactgggcctcacggatatgtctgccytgtttctgtgcaggttcactgctgtcctgctttcttgtcagctgtggccctgcccccactctcagcccacgactgctgacattggcagtcagttctccag

SEQ ID NO: 447454 - DNA, 201 bp, Homo sapiens
ttatgatggtcaacgttataatatttaggatcagatggacttttgttagagtcctggctttgccacctactggctgggtgacctggaccaagttacttgtrtctgtgaccattgtcccctcctagtggagctggcactccatggctcttctggttgttatactacatgcaaggcacttaatacagtacctggcattagtta

SEQ ID NO: 447455 - DNA, 201 bp, Homo sapiens
ttaagcgattctcctgccttagcgttccgagtagctgggactccaggtatgagccaccacacccggctaatttttttcttttgtatttttagtagaggcaragtttcaccatgttggccaggctggtcttgaactcctaagcccaaatactctgtccgcctcagcctcccaaagtcctgtattacaggcgtgacccaccat

SEQ ID NO: 447456 - DNA, 201 bp, Homo sapiens
ctgctggccgtttgctgtgagaccagctgcgattttctgtatagattattggcacgcttttatctgagcacttgaactccttctagactttcgccatgacttttttttttttttggagacagagtattgctctcttgcccaggctggagtgcagtggcgcgatctcggctcactgcaacctccacctcctgggttcaagtg

SEQ ID NO: 447457 - DNA, 201 bp, Homo sapiens
ctctcactgggtaccgctgggccccagcaggagcacatgagtactccccactgtgcagcaccctgcctctcctggaatgccttggttgccctgggaagtcwtctcttggatgggttccaggaagcatcctgagtgtggagtttgtcggcttttactcactgtcagcccaagtgaccctaccttctggatagaagcaccccc

SEQ ID NO: 447458 - DNA, 201 bp, Homo sapiens
gctgaatcccacttgatcatgttgtataaacctttttatatcatgctggattcagtgtgctaatattttattgaggatatttgcatctgtctgtctgtctrtctatctatctatctatctatctatctatctatctatctatctatctatctttttgagatggagtctcgctttgtcgcccaggctggagtgcagttgcat

SEQ ID NO: 447459 - DNA, 201 bp, Homo sapiens
cgcctacttccgtccctctttctgcagggccagaggtgaccctgcctggcctcccacaccccctgcaatgagcaaggccttcactgcagccccatctcctyctcctcccccagacccctcccagccctctcctcctgttcctcctgtagcatctttgctgggctacgcagaagccccggacatggcagccccaccccatgc

SEQ ID NO: 447460 - DNA, 201 bp, Homo sapiens
gaccaagctattcagctttccatagtgctgtggctatagaaaaatcatctctgcactgtgaatttcctctcttatttcttagctataaataccttggttgkttggcatcagaggggaataagctgttcccatgtgtgtggatttgcttgttatttgaatacgtcactcttaagctacagaacttaatacacaaataagcag

SEQ ID NO: 447461 - DNA, 201 bp, Homo sapiens
tgctggccgtttgctgtgagaccagctgcgattttctgtatagattattggcacgcttttatctgagcacttgaactccttctagactttcgccatgacttttttttttttttggagacagagtattgctctcttgcccaggctggagtgcagtggcgcgatctcggctcactgcaacctccacctcctgggttcaagtga

SEQ ID NO: 447462 - DNA, 201 bp, Homo sapiens
ttatctcttaacatttgagcaggtaggtgtaatagctgtagcttcattcatgggaagctcctgtgggagccagaggttgtgcttcactttaagaaattagaaaaaaaaaaatgtagattaaacccaaagtcagtagaaaaggaaataataaagatcagagtggaaaacaatgaaataggaaacagaaacccaacatagaca

SEQ ID NO: 447463 - DNA, 201 bp, Homo sapiens
tatgcttggaaatagtagcattctgaaggtgggactttgaacattcttcagttactggcctgggcgcggcctggggtggcagcgtcgaatctcttgcactstgctgcttctgtgtatgtggaataggccggcctgttgccctcctggtttctgtgtggttttcctctccctttcgtgggtgttgctgttgctcgttgcctc

SEQ ID NO: 447464 - DNA, 201 bp, Homo sapiens
actttagggcctgtagggccccttccacgccctcgcctctacggtgtcagactctcacctggacaggagtccctgactcactagagagctcctccccttcyaggtgggctgtggcaggaggccctcccagaggcccctccattggggtgcagaccccttgagtcatagctctagccaccacacccgtctttgccaggttcc

SEQ ID NO: 447465 - DNA, 201 bp, Homo sapiens
tcttatttataagttatttttcactagatatttgtttatctctttatacatttttttaagcagtaggtgtgcatgtttaaaaaataacttatacatgtaasaaacctgcacatgtaccccttgaacataaaagttggaaagaaaaaaaaatgtaaaaacaaaatcatgttttttccttattgtaaaagtcatcttcattat

SEQ ID NO: 447466 - DNA, 201 bp, Homo sapiens
agggctcagaaagaaaattgaaatggaaaatataataaaataaaaaagtcaacaaaaaagaagattagaaagtaaaaaaacaaaaaaacaaaaaaaacttttttttttttttgagacagagtcttgctctgtcaccaggctagagtggtgcagtggcacgatcttggctcactgctacctctgcctcctgggttcaagcga

SEQ ID NO: 447467 - DNA, 201 bp, Homo sapiens
tctgtgtatgtggaataggccggcctgttgccctcctggtttctgtgtggttttcctctccctttcgtgggtgttgctgttgctcgttgcctctgtcgctkcgggttgtccagcacagtctctgttcagctggcgtgatgacgagaacacgggttttggcgtctcgtattgtttagctttatgacttgtcttgagcaagtt

SEQ ID NO: 447468 - DNA, 201 bp, Homo sapiens
gatcaagacaccacctcctggggtgtgtggtcttgcagccactggaggagagggacctcgggcctgcctgtgccccaaagctcacctgacccctgacctgsggcactttagggcctgtagggccccttccacgccctcgcctctacggtgtcagactctcacctggacaggagtccctgactcactagagagctcctcccc

SEQ ID NO: 447469 - DNA, 201 bp, Homo sapiens
tttccatattccatcagttgatggacatttgtatcatttgtaccttttggctattatgaataatgatgttataagcatttgtgtggacatgtgtttgtttkatttatttatttatttgttttttgagatggagtttcattcttgttgcccaggctggagtgcaatggtgcggtcttggctcactgcaacctccgcctcctg

SEQ ID NO: 447470 - DNA, 201 bp, Homo sapiens
aaaaaaaaaaaaaccctaggatatacaacaaatagcattgcttcttaatcaagctgtgttacaaattaaaaatggtttccacgagcccttcggggcctggrgggcagcagaatggctgttcccatcagcggcgaggaaaacacgtattatgccagttactccttgaacacttacagcagcctgatttgtgtgaggagcatg

SEQ ID NO: 447471 - DNA, 201 bp, Homo sapiens
tccttgtctgcaagctcttggggcatgtaagcaaggaagggaagaggagatgaatccatgctccttcgcccaggaccagctccctgcctggcagggtccaygggtcccagaaccgtgccacttccctgagcacctgttctgtgctgagctgtgtgtcaggcaccctggacaggctgacagaatgaagaaaacacagtgcag

SEQ ID NO: 447472 - DNA, 201 bp, Homo sapiens
aatattccattctgtgtatatatatatgtatatatatgtgtgtatatgtatatatgtgtatatatgtatatatgtgtatacatgtgtatatgtgtatatatgtgtatatgtgtatatatgtgtgtatgtatatgtgttatatatgtgtatgtatatgtgtatatatgtgatgtgtgtgtgtgtgtgtgtgtgtgtgtgtgt

SEQ ID NO: 447473 - DNA, 201 bp, Homo sapiens
aaaaaaaaaaaccctaggatatacaacaaatagcattgcttcttaatcaagctgtgttacaaattaaaaatggtttccacgagcccttcggggcctggggrgcagcagaatggctgttcccatcagcggcgaggaaaacacgtattatgccagttactccttgaacacttacagcagcctgatttgtgtgaggagcatggc

SEQ ID NO: 447474 - DNA, 201 bp, Homo sapiens
ccaccctgacctcagcctccttccttgctgctgcccagttaggaggcgtcctccttgtctgcaagctcttggggcatgtaagcaaggaagggaagaggagrtgaatccatgctccttcgcccaggaccagctccctgcctggcagggtccacgggtcccagaaccgtgccacttccctgagcacctgttctgtgctgagct

SEQ ID NO: 447475 - DNA, 201 bp, Homo sapiens
taatattccattctgtgtatatatatatgtatatatatgtgtgtatatgtatatatgtgtatatatgtatatatgtgtatacatgtgtatatgtgtatatatgtgtatatgtgtatatatgtgtgtatgtatatgtgttatatatgtgtatgtatatgtgtatatatgtgatgtgtgtgtgtgtgtgtgtgtgtgtgtgtg

SEQ ID NO: 447476 - DNA, 201 bp, Homo sapiens
ggcaagggagggagatgaagctagcgggggcgtggggggacatggaagagagaaggcttcccggagaaccggctgggattcttcaggcagacggggggatggggaagtccagagagagtggaggaaccccccacttccctccagcagcagcagccgccacagtgtcctgtccagcattttccgatgctcacttggtgctgg

SEQ ID NO: 447477 - DNA, 201 bp, Homo sapiens
aaactgcctgcctggcacctggcttgggagaagctggaaggacctgcccctgctgcgtccatcctctcaattgcatccggcacagagcttcatcagtgttyacagccagcccgcgggagaggaagggccctggagaagatgtcgaaatgcaaagcatccccgtcctagttctcctccgctgctcctgcagatcctcccctc

SEQ ID NO: 447478 - DNA, 201 bp, Homo sapiens
tctttttcttcttgcagaataatattccattctgtgtatatatatatgtatatatatgtgtgtatatgtatatatgtgtatatatgtatatatgtgtatayatgtgtatatgtgtatatatgtgtatatgtgtatatatgtgtgtatgtatatgtgttatatatgtgtatgtatatgtgtatatatgtgatgtgtgtgtgt

SEQ ID NO: 447479 - DNA, 201 bp, Homo sapiens
attgcttgaacccgggaagcggaggttgcagtgagccaggattgtgccactgcactccagcctgggcgacagagtgagactctgtctcaaaaaaaaaaaaacaaaaacagaaaaacaaaaaacaaaacaaaaaacccctggcagtcgggctgagcttcagtagattggcttccggggtttagaggtatcagcatatctaca

SEQ ID NO: 447480 - DNA, 201 bp, Homo sapiens
gctaaatgtgctacctaatgccttatgaattctgatgggtgtgtgtgtgtgtgtttgactgatgggaacaggcactattcctcgctctgtgtgagcatcakgcacattttcctgtaacttctcaagtgtttcttgcccttagccttgggtactttcagtgtcttgctgaatccgtaagggaaccccccaccgatctctata

SEQ ID NO: 447481 - DNA, 201 bp, Homo sapiens
gaatagctctttttaacaaaagataaaaaacacaaaacaaaaccctcttatgaacattgtagttactattgaggaagcagttcttttttttttttttttttgagacagagtctcactctgttgcccaggctggagggcagtggcatgttctctgctcactgcaacctctgcatcccaggttcaagcaattcttttgcctca

SEQ ID NO: 447482 - DNA, 201 bp, Homo sapiens
aactaacatatccctttgtacctcccagacccgaggcatcagatcctacccttccaagcaccctagaagggctggctacaggaatgtcagagtgaggcagmcatagaaagtagcagaaaactctgttcatgggcacaagggaaggacaagcctaccagaggcagccaggccttggtgagcgaccctgggctgtgggcgggg

SEQ ID NO: 447483 - DNA, 201 bp, Homo sapiens
tgggaggctagggtttcctttttttaaaatttaattttgttcatacttctctatccatgtgtatttttgaagtctgtagaggtggggttgtgatgtatagtccaggggctctgcatatgcagaatgggatagcccccgacacacagtcctcctcctctccgtgcaggtgagaagcttgccattagaatttcacagaggtct

SEQ ID NO: 447484 - DNA, 201 bp, Homo sapiens
cagcttggtcacaaagaatcatgcaaaaaacaaacactgaggaagtccatgggtagacagcggaggggctggggtctcgagaagagagatgttgctcccgrcggggaatgaggagatgcttctggaagtagtggcttttttgcgccatgccttgaagagaaagcatttgtgcaccggagcagaggtgcaggggcgttccgg

SEQ ID NO: 447485 - DNA, 201 bp, Homo sapiens
ttgggaggctagggtttcctttttttaaaatttaattttgttcatacttctctatccatgtgtatttttgaagtctgtagaggtggggttgtgatgtatagtccaggggctctgcatatgcagaatgggatagcccccgacacacagtcctcctcctctccgtgcaggtgagaagcttgccattagaatttcacagaggtc

SEQ ID NO: 447486 - DNA, 201 bp, Homo sapiens
caccctgaacttcaattccctcagccttgaattcgcgagaaccattgttaattgacaggcatcatctgctgacaggttcaccttccatttcgtaggcaagygataaaaagcctgagctccgcggtttgccaagtaaaaagtatttgtgcatattgttactttgaatcctcatgagaactcattgaggatgaaagttgcctt

SEQ ID NO: 447487 - DNA, 201 bp, Homo sapiens
cagagccccgggagggcaggggtgcgtcctgtccttatgtgtgctgtgtgaggagtgcctgtcaccagtgtgcctgttggatgcttcccatgtcttctacygtactcagcgtacatggtggtctctggctatgaaaaatgatcaattctatagctgaattgatgactgaatctgagaacatagtgggattataggtattag

SEQ ID NO: 447488 - DNA, 201 bp, Homo sapiens
caattctatagctgaattgatgactgaatctgagaacatagtgggattataggtattagcctgccattattggcaagctatctcatggaaagagtgctctyctgtctagaactggtatcatgaacttaagaataaaaaattattttatttttatttattgcttctttgcaaatctaaaatgttgtgttagcagtcaggaga

SEQ ID NO: 447489 - DNA, 201 bp, Homo sapiens
ttacttcattcacaccaaattgggatcgttttgtgttcactcttctgtgcctcttcccataatataaaaagagcttttactgttactcttcaagaacacartgcaatgtcctgtagacacagggggctaaagcagccccctcctgggatgcagcaaggtatggtctgactttgctcccctccagcctgaagtccagcccca

SEQ ID NO: 447490 - DNA, 201 bp, Homo sapiens
acatttcttctcatcttgaaccctcatggcacagtttttgttcagtggtttgaataggaaggcgacagaaaaaaatgagtagctccaactggcctgactcrtgtgctaaccactgggacacccagctgtgaccacttcgaagagaacggtggggcctgcaggcatcaagcccctataggagtagggctttgtgtgaggagc

SEQ ID NO: 447491 - DNA, 201 bp, Homo sapiens
tcgccaggggctgccctctctggctcgccccgcttcccggccccctctcaggtgctggcacctgcccgccacgcctcttgctgtgtgttgtccactcacckcagggccctggctcctatgctccttgacctctccagaccccggtgtccagcagaggtgttatctcttccaggaccttccttggactctgggctttcaccc

SEQ ID NO: 447492 - DNA, 201 bp, Homo sapiens
ccaatttcatagaaatttctcagtgatttttatttccgttactattccctcttctcttagcagtggaacatttcaactttttcagtttgccccctgtccasgtcaggtcttggtaggaaggtggacttggtaagccctgccttgtgtgaccctcacggtcagtgtgagagcaggctgaggcagggtgggtgccacggccct

SEQ ID NO: 447493 - DNA, 201 bp, Homo sapiens
tggaggccattgatttatggatgttgtggctcccaaaagagtacctggcacagaggaagccctcagcaagtgctcggtgaagttggcgtttcaagccctcygttggtgttggcatcttaggccaggaacttcacctaaatacttcatcaaactctcctgacagcttttggggcttgacaactgtctataaccttattttac

SEQ ID NO: 447494 - DNA, 201 bp, Homo sapiens
cccggcgcctgccctctgtgtctcttctaataatcttcatcctgtggtcccacccttaaggaggacaggatctgatgggaaaggtccgtgaagggccttcyaggtaaaggtgctgtgccacccacggaaggagcgtgggtgcgtcctgggtaagagggagcagttgggtttgcctgagatccatcagtagtgaatgtggtg

SEQ ID NO: 447495 - DNA, 201 bp, Homo sapiens
ttatgggagtacaattcaagatgagatttgggtggggacacagaaccaaaccatatcaggaggggtatctggagccctgtgatgggggaagtgctgttgtmgttattgagtcccagtagcacagcctttagaatgtgacagaaacatctgaactcttttttgactgaggcatttcctttacaccctgcagtataagaatgc

SEQ ID NO: 447496 - DNA, 201 bp, Homo sapiens
gttgaaaacatggtatgtatcaccaatcatttgacctttttgggctaacatacaaacttctcattaaagtaggttttacttaatgtctgaggcacacatcwtacgatatgtgtctgtttttatgtttgttttgccaaagcatataagcttattgtaaatgaagaccatgttttgttattcctgtgtctttaggcttggttt

SEQ ID NO: 447497 - DNA, 201 bp, Homo sapiens
gttgggaggctagggtttcctttttttaaaatttaattttgttcatacttctctatccatgtgtatttttgaagtctgtagaggtggggttgtgatgtatagtccaggggctctgcatatgcagaatgggatagcccccgacacacagtcctcctcctctccgtgcaggtgagaagcttgccattagaatttcacagaggt

SEQ ID NO: 447498 - DNA, 201 bp, Homo sapiens
tgttgggaggctagggtttcctttttttaaaatttaattttgttcatacttctctatccatgtgtatttttgaagtctgtagaggtggggttgtgatgtatagtccaggggctctgcatatgcagaatgggatagcccccgacacacagtcctcctcctctccgtgcaggtgagaagcttgccattagaatttcacagagg

SEQ ID NO: 447499 - DNA, 201 bp, Homo sapiens
atgttgggaggctagggtttcctttttttaaaatttaattttgttcatacttctctatccatgtgtatttttgaagtctgtagaggtggggttgtgatgtatagtccaggggctctgcatatgcagaatgggatagcccccgacacacagtcctcctcctctccgtgcaggtgagaagcttgccattagaatttcacagag

SEQ ID NO: 447500 - DNA, 201 bp, Homo sapiens
ttcaccctggtgccaccccatccttcccaattcgttgtgacctctctttgggtcacggaggacaaaccgatcaatactatgttgtgacgagtgagatgacstcacatagcagctgacgtcccctgtttgggcctgttggctttgcctggagtggctgagttcatctgtgcgctgagtcatctgactgggaggctgcagcct

SEQ ID NO: 447501 - DNA, 201 bp, Homo sapiens
ttgctgcaacaaaataccatagactgggtggcttataaacaaccgaaaattatttctcatggttctggagactgcaggttcaagatcaagacgctgggcarattctggaggctgcaggttcaagatcaagacgctgggcagattctgtgggtggtgagggcccatttcctgcttcgtagttggaggcttctcactgtgtcc

SEQ ID NO: 447502 - DNA, 201 bp, Homo sapiens
acgatggaaaaactcagaacattggttccttctggagagattggaacagggtttgatcaggaaagggcataaggtaattttctaggtgatggtcatgttgyatacatcagtagggttttgggttacacacatgtatctattcatcaaaactcggcaactaatcacttgagatttgtacatttcatgatgtatcagctttat

SEQ ID NO: 447503 - DNA, 201 bp, Homo sapiens
tttacgatggaaaaactcagaacattggttccttctggagagattggaacagggtttgatcaggaaagggcataaggtaattttctaggtgatggtcatgktgtatacatcagtagggttttgggttacacacatgtatctattcatcaaaactcggcaactaatcacttgagatttgtacatttcatgatgtatcagctt

SEQ ID NO: 447504 - DNA, 201 bp, Homo sapiens
atgaggaaggcggaaggctaaaagccttctcccaggacatcgcgtttgtatttgggaaggaaagtctctaggggactgtgccttactggctagaacttcaycacatggaccagcccttgcaaggaacaatgggaacttgagcattttacttgtcacctctggaggagaggaaacaaaagagtagaggcttcggagggtgat

SEQ ID NO: 447505 - DNA, 201 bp, Homo sapiens
tactgactgttttttgttggttttttttttttttttttttttttgctaattgtgctgtcaattgtggagagcaggatcttaaaacctccaactatgattgkggaattgtctgactccctctaattgtgtcagtttttgctttgtgtattttgaagttctttgattgtatcctcatatgttggtgagtattatgtcctgcta

SEQ ID NO: 447506 - DNA, 201 bp, Homo sapiens
taccagattaacttgatgagatgttttggtacaactaaattgccagtagaattgtgaacgtatatggacagctgcagagctggctccttttattttaacaygcctgtgtatacaatggagtggatctgtattctcaacattggcctttattcaaaccagggcaaatcttcactgacacgctgtgatgtcacttgagtgtca

SEQ ID NO: 447507 - DNA, 201 bp, Homo sapiens
atgcacacattctgcagatatggggatacacacgttgctccgttgtgtggtctgggatccttccagatggcctcctggattccgaaagtgtcctcgctctrcacagcatagtttccagaacctgaggccaattcctttgttcaagctaaagggactttgagcctggcagactcactgtctccaaggagtttgtgacaaaat

SEQ ID NO: 447508 - DNA, 201 bp, Homo sapiens
ggtagggccagggaccaacccaggtaagtttgctggcaaagtgctcacccccgagtctcaggcttcaaaggagaaggctccgcaggcaactcccacgctgycaggctggggaaaggagggacccctggcactcacctcccagcgtctatgctgggtcttgggtctttctgataggcccatgtttctgataatctttctgtc

SEQ ID NO: 447509 - DNA, 201 bp, Homo sapiens
taggctgagggttggagaggctctatgtgaggcaggaggcatctcttactcgggtctcagagattcagcctctggccgggcgccccatgcagagcaaggcrgtcctggatgggtctgatgcagccccagctcagcgccagcagcaccagtggaggaaggggcaggtgcatggtgggcctggcaggaggttattcattctcc

SEQ ID NO: 447510 - DNA, 201 bp, Homo sapiens
atttcattatgcattttaataatattttctaaacatttagactttgtacaaacatttgagcttaatttgatacccgtccatagttgtagcagttgcccacytgtagcgcatgggtctggatagatgcgttttaaaggaaattggggatcttgcactgggtcgatgcacacctgtctatgaagcagctacggtgacacgatg

SEQ ID NO: 447511 - DNA, 201 bp, Homo sapiens
tctaaacatttagactttgtacaaacatttgagcttaatttgatacccgtccatagttgtagcagttgcccacctgtagcgcatgggtctggatagatgcrttttaaaggaaattggggatcttgcactgggtcgatgcacacctgtctatgaagcagctacggtgacacgatgggcagcccagggctgccgggagctctc

SEQ ID NO: 447512 - DNA, 201 bp, Homo sapiens
cagcaggggacccagaaggcagggtatgagcatggccacattgatgtctttgaaagccaccctggccacagtgtgacaagtgggttgcaaagatgcaagcrcccctggggatgctggtgggttgaggagccactgcgtgagcagctctaagtcagggaccgtgagggcctgagcgaagggagtacccaggaaaaaagtgcc

SEQ ID NO: 447513 - DNA, 201 bp, Homo sapiens
atgagctaatgggttaggtaccccttttttctttttcttttcttttgtttgttgttttttgttttttgaggcagtcttgctttgtcaccaggctggagtayagtggccacaatcttggctcactgcaatctccgcctcccgggttccagagattcccctgcctcagccccccgagtagctgggactacagatgtacaccac

SEQ ID NO: 447514 - DNA, 201 bp, Homo sapiens
tttttgttttttgaggcagtcttgctttgtcaccaggctggagtacagtggccacaatcttggctcactgcaatctccgcctcccgggttccagagattcscctgcctcagccccccgagtagctgggactacagatgtacaccaccacgcccggctaatttttttgtattttagtagagacagagtttcaccatgttggc

SEQ ID NO: 447515 - DNA, 201 bp, Homo sapiens
gtacaccaccacgcccggctaatttttttgtattttagtagagacagagtttcaccatgttggccataatggtctgaatctcctgacctcgtgatccgccygcctcggcctcccaaagtgttggtattacaggcatgagccaccgcgcccagctgggtaccccttttttctttaggaaatcttttcttaaaccctatttat

SEQ ID NO: 447516 - DNA, 201 bp, Homo sapiens
tcagctcgctgcagcctctgcctcccaggttcaagtgattctcctgcctcagcctcccgagtagctgggactacaggcatgagccaccgtgcctggcttattttttttttatttttattgtttttcatttttagtagagacagggtttcaccaagttgcccaggctggactcttaactcctgacctcaagtgatccaccca

SEQ ID NO: 447517 - DNA, 201 bp, Homo sapiens
cacgcacacgccaggttggagggcttctgctgtctttgtgcatttatccttattctatcccaggatcaaagttttcacaaaggactcctcatgctcacaartctcttaagccctttcttccacatttcctaggctttcttgcccacatcagcctgctgattttaaagagaatccttccccccagccccccgacccagacct

SEQ ID NO: 447518 - DNA, 201 bp, Homo sapiens
tcctggctttcccaccgtgctctgccacctgatttccaatggcttttctagatttttagaacagcattttgagccagttcatgcatgtgcatgtgtgtgcrtgcgtggatgtgtgcacgcatgcatatgtgtgtatatgtgtgtgcatgtgtgcatgcatgcatatgtatgtgtgcatgcgtgcatatgtgcgtgtatgtg

SEQ ID NO: 447519 - DNA, 201 bp, Homo sapiens
ggctgcagggggagatcgtggagcagccgcgcaccgacgtggctttctaccccaattacgaggactgccagacggtggagaagagaatcgaggacttcatygagtcactgttcatcgtgctggagtccaagcgtctggacagagccacagacaagtctggggataagatcccccttctctgtgtcccgtttgagaaaaagg

SEQ ID NO: 447520 - DNA, 201 bp, Homo sapiens
ccgagaacaacgagtggggcgacttccagacccaccgcaaagtcgtgggcctcatcaccatcacagactgcttctcggccaaggactggccacagaccttygagaagttccacgtgcagaaggagatctacggctccacactgtatgactcccggctctttgtcttcgggctgcagggggagatcgtggagcagccgcgca

SEQ ID NO: 447521 - DNA, 201 bp, Homo sapiens
aagcgccattcatgtggcatcaaagtgccagtgacagctaccttgctttgtttcagagaaagctggtggaaaaagcagctttgaatcacccatctcaagawgatcatagagcctgctgcctcactgagaatgtaaattgccagaggaataattggaaaccatgtagaaagtgaaaaaataccaactaatacatggattcat

SEQ ID NO: 447522 - DNA, 201 bp, Homo sapiens
attatctcttctgtgcaggatgcattgtctcctctgtgtagaattcattgtttccctgtgcaggatgtattgtttgctctggcagctttccagatggcttytgttctttagctttctgcagtttgattatgtttccaggcagggattaaaaaaaatagtttttgggtcaggcgtgatggctcacgcctgtaatcccagcac

SEQ ID NO: 447523 - DNA, 201 bp, Homo sapiens
gttgcagacctgaggccctgtcctgaatacctcggtgtgcatttcctaaggacaaggtcattcacataaacagtacagtgattaaaatcagagaatttaaygttgatgcattcaatacctttatctaccccccagaccttatttgcattccaccagctgttccaatacagcagttctatttcctgatgcgggatccagtcc

SEQ ID NO: 447524 - DNA, 201 bp, Homo sapiens
gctattgtacagactttccatttaacctcatgtaggtaagacatagaaataactgtgtctgcttttttttttttttttttttgagacagagtcttactctytcgcccaggctggagtgcagtggcgcgatcctggctcactgcaaactccacctcctgggttgaagcaattctcctgcttcagcctctcaagtagctggga

SEQ ID NO: 447525 - DNA, 201 bp, Homo sapiens
ttgcttcacgtgttgatgctgaacgtgggcgcttgaaaccaagtttgctcttggatccatctcggaggagcccctgggtccgtccagggtttttttgcagygtgtgcggctggtgctgtgtgtcacagcatgcaaagaacccacacggagatgatcaggctcctgaactgaacctcaagaacccagtgaacaagacctaca

SEQ ID NO: 447526 - DNA, 201 bp, Homo sapiens
ccacatttcctaggctttcttgcccacatcagcctgctgattttaaagagaatccttccccccagccccccgacccagacctctcctgcttgataagagcrtgcttgtttgtaatgtctgtgcagtttccctggagggcgggggcatctcttcctagtacatgcagcatctggcccagagagctgggcttatttgctatac

SEQ ID NO: 447527 - DNA, 201 bp, Homo sapiens
ctagctgagtgtcttccctgcggacggctgcggaggatctgggcgaacgtcattactttgtggatcccgggatactgaagcagctgagacctagctgtgcrtcgtcccctgtggaaggctgtggagaacccgggtgggcttcagtaccctgaggattgcggcactcctgcagctgctcgctgagacctgtctcccctgcgg

SEQ ID NO: 447528 - DNA, 201 bp, Homo sapiens
cacgcatgcatatgtgtgtatatgtgtgtgcatgtgtgcatgcatgcatatgtatgtgtgcatgcgtgcatatgtgcgtgtatgtgtgtatgcatgcgtgygtgcatgcatatgtgtgtttacatgtgtccatgtgtggatgtgtgcacagatgtgtgcgtgtgtgtgcgtgtgtgcagtctgtcatggaagtttatttga

SEQ ID NO: 447529 - DNA, 201 bp, Homo sapiens
acacatgtgggtttcctgctgtcctcctcttcagcatataccaggagaaggacgttctgtgttgggatctcatgtcctgtaatctgccttgtttgtttttytcttcctgtctctagctctgaaggggttacaaaaggagatgttttgttatttgtttgcttgttttatggaacttggtattggggacacgtggaccctgaa

SEQ ID NO: 447530 - DNA, 201 bp, Homo sapiens
tcctgtgacacccagtacttcattcttgttagttacagtctttaattagtacagaaaattagtttttttctgcagattttctcccttgccagattgtgccrtcttgaggtcaggtggaatcctgttcatccaacagccgtttattgaggctctaccatgtgccagaggttggactgaacaccagggcacaccagatgctca

SEQ ID NO: 447531 - DNA, 201 bp, Homo sapiens
gccagattgtgccgtcttgaggtcaggtggaatcctgttcatccaacagccgtttattgaggctctaccatgtgccagaggttggactgaacaccagggcrcaccagatgctcaaaatcaggtgtggaccctgctctgatagtatgtgttctcttttgcttgcccaagtgctgtgtataatcgctagcacataggtatgaa

SEQ ID NO: 447532 - DNA, 201 bp, Homo sapiens
gtttcactcttggcacccaggctggagtgcaatggttgcagagaggttcactgcaacctccgcctcctgggtagctgggactacaggcacctgccaccackcctggctaatttttgtattttttagtagagttggggtttcaccactttggccaggctggtctcgaactcctgaccttgggtaatctgcccacttcggcct

SEQ ID NO: 447533 - DNA, 201 bp, Homo sapiens
ctccgcctcctgggtagctgggactacaggcacctgccaccacgcctggctaatttttgtattttttagtagagttggggtttcaccactttggccaggcyggtctcgaactcctgaccttgggtaatctgcccacttcggcctcccaaagtgctgggattataggtgtgagccaccatgcccagcctaaaatggtttgtt

SEQ ID NO: 447534 - DNA, 201 bp, Homo sapiens
caagcctagggtcaactcaccctttcattttccttgtttttgttgcaaatcaccctttggagagcatttcagggattggtgcaaggcttgctgaggtatcmgaatccagctgtgtgagctggagtaggaagaattgggtgcgcagtttggctgatccccatgaaggcgaatgacctgggccgtctgagcaatctcttccca

SEQ ID NO: 447535 - DNA, 201 bp, Homo sapiens
acctgggccgtctgagcaatctcttcccaccaggcgcatccgcctcctccattctgtctggaggagcatttttaaccaatttggctgctttgagagtgagktagaggctggagaagcccaaggcaaatggctttagatacccagagtaggggattggagtggaatatctgtgaaatgcggaggacaaatgagcagacatga

SEQ ID NO: 447536 - DNA, 201 bp, Homo sapiens
cctgggccgtctgagcaatctcttcccaccaggcgcatccgcctcctccattctgtctggaggagcatttttaaccaatttggctgctttgagagtgagtyagaggctggagaagcccaaggcaaatggctttagatacccagagtaggggattggagtggaatatctgtgaaatgcggaggacaaatgagcagacatgac

SEQ ID NO: 447537 - DNA, 201 bp, Homo sapiens
gttctccattttcaagactgccttctttccagtaaggaggagttgccttccgctgagctatcctccctttcaggacagaggcgggactcaggcacttgacstgggctgtgtgggcccacccttcggcctctcaaagtggcttctggcctattctcagacatgtttcctaatggagctctgtcttatctcctgaaaaaaatt

SEQ ID NO: 447538 - DNA, 201 bp, Homo sapiens
gaaatgaaatgagtgagcaaaacagtaaataagtgaaaatgggcaaattccttaactcctctacacctcagccatccttgggaagcctagggttaaatctmaccttcctagaagtatctgctgtgctgtttccgtagcccgggcttagaaggaggcagacgcagcattgttagcctgttagccatgatttagtgcaaggct

SEQ ID NO: 447539 - DNA, 201 bp, Homo sapiens
tttgcctccttctgtggctccaacccaactgcctccctctctccattataaggacccttatgctgctcaaggctgtgatgctgggcctccctgagctgacmggggagggagctctggtgggttcttgcagaagctctttgggtcctgctgtgaaagtccatgtgtcctcctggtcaccgtggccacatgcttccagtgggg

SEQ ID NO: 447540 - DNA, 201 bp, Homo sapiens
ctctgcataggtttccatcatataactctaccattgtatgtctgtatctactctccagttgatgtgcacttagttaaaagcagttctttacttttataaaygatgttgcattgaacacttttgaatgtgcccttttaccaaactctgagttgatccaagataggcagctacaaatggaattgttcggtcaaactctttttc

SEQ ID NO: 447541 - DNA, 201 bp, Homo sapiens
gcttttatagctgtttgtaataacgtggttctgaggcctttaatctcccgtagcagggaagccctgtcagccacagagagacgtcctgccttgccagccarcgaggccgtcacatcaccctggctgtttggccttcggtgggctggagggtaaggtgggagaggcacagatttgattgctgcctcccccaaatccaaatct

SEQ ID NO: 447542 - DNA, 201 bp, Homo sapiens
tcacacacctcaggtctacaggttccaaagagaacctcacagattcccatctggcttcacgtttcccaggggcagagtgaactaagcaatcattgttttcytaaaatgccaaaccgggtcatggtagacttcagtcacataaatatagacaggatctcaaagctgccccatggtttcaaatggtctttgactgcggtacat

SEQ ID NO: 447543 - DNA, 201 bp, Homo sapiens
cgagtgacgggatcaccttcaccgtgaggaggacagacggctctggtcaaatggtggaatgaagtcttcctttccacctgctcctggcctggccttgtacrtctagaacacatttggttctgtggggttgtgctccctgcctttggaaattaggcacaagagtctccaaatgtacatatagggcagtacaggtctgtctct

SEQ ID NO: 447544 - DNA, 201 bp, Homo sapiens
tgggcaagtagccgccccttgcccctcttctaggaggagccccacttgcgtacgccacttactcctggagttatgcttcaccatctcactggcaggggackagctgacaccgttattggcctaagccaataacacagagcacatctgtgttcccactgccttatgtcgtcccccagaaaacttcatgtgtgacctcacagg

SEQ ID NO: 447545 - DNA, 201 bp, Homo sapiens
gcaccatggagagctctgtgctgggcttccctctgggctggaaaaacactggccaggcttggtgtggacactgacccaactgctggccaactgcagggccytggcacaacctggccctgtggacagcaggatctttgtccagtgggactcatggctcctggtttccaggtttacggtgaggagtcaatacaacatatcgaa

SEQ ID NO: 447546 - DNA, 201 bp, Homo sapiens
gcagtgagaagatgcgtgttgagcacttacccagggcatccttcacagcaagcaccttggaaatgttctctatagtggcaataatgataggaactactatygtcatcatcattatggattgacctcttgctccaaatgccagggtccacgtatttaagagatagtagccacccccatcactgccaccattgccactgtatg

SEQ ID NO: 447547 - DNA, 201 bp, Homo sapiens
cctctccagagagaggcagctggagtctcagggccaccttggtgctcccctccctctaccctgaccttctcctaggaggggcctggtatgagccatcgtgktgtcccttgggtactacatggggagagagggctccatgccggggtgggggccagagcagcacagcagtgcaggagatttccctggccaggaaggagcggg

SEQ ID NO: 447548 - DNA, 201 bp, Homo sapiens
tgcagccaatcccacctggcccgtggccaccagaccaggagctccaggagggtgccgcatgtgccgctgagctgggttcgggaccctgcatccagcccagrgcccagcctgagtggatgagcacgtgcatgaggaagcataggcgtgggaaccacatagccctgggattgcatcctagctccagccctcacccagcaagac

SEQ ID NO: 447549 - DNA, 201 bp, Homo sapiens
ctgcttcatgtacgtcttggcctgtggcttctccctgtggttttcatttacctctccaagggctgatgggagcgttttctcagctcctcacgagccgtgckcagatcccttgtggtgaggcacctgagcctttggcaccctttttaaaaccaggttcgtagccgccttattattgagtcagagagttccttgtgcattgtg

SEQ ID NO: 447550 - DNA, 201 bp, Homo sapiens
gtccctgggcctggagcagggcacctccttagccctgatggggtgctcggaacggagagcacgaatggccagatgcccgtagggcctgacctccctgttayggcttagggcttgggaagggaccacacaggtcatgcctgaggtcccaaacaccccggacatccaaacccactgggttccacgtgtgctggctcgttgagg

SEQ ID NO: 447551 - DNA, 201 bp, Homo sapiens
atcccttgtggtgaggcacctgagcctttggcaccctttttaaaaccaggttcgtagccgccttattattgagtcagagagttccttgtgcattgtggtcrtaagccctttgtcaaatgcctggtttagagatacttctcccagtctgcgatttgtctttttcttagcggtgagagaaattgtaggtgctgatgaagtaca

SEQ ID NO: 447552 - DNA, 201 bp, Homo sapiens
tgaccacttcacagctggcttgaaagcctcctgtgggagtcgtggttctcaaagtgcggacccaggccagcagcagcaccatcacctgggaacttgctagraatgcaaattcttagacccacgccaggcttactgtggggcagggcccagcgatctgtagtttaagaggccctccaggtgctctgacgttcagggaagtca

SEQ ID NO: 447553 - DNA, 201 bp, Homo sapiens
caaagtgcggacccaggccagcagcagcaccatcacctgggaacttgctagaaatgcaaattcttagacccacgccaggcttactgtggggcagggcccarcgatctgtagtttaagaggccctccaggtgctctgacgttcagggaagtcacagaacctgtgtgctagcgaaatgcggaggccagtgatccaggctgacc

SEQ ID NO: 447554 - DNA, 201 bp, Homo sapiens
ggcccagagactgctgaggaggggctcatcctccagccagcctgggtgcaggtgttggggacagctttctggtggaagaggccttcaggggagattcaccrgccaggaggagctgggcaggcagagggcagctgggtggggattgcttaccagtgaggactgcctgtgccaggccaggaggttgggggcaggggagcacac

SEQ ID NO: 447555 - DNA, 201 bp, Homo sapiens
gcaggtgttggggacagctttctggtggaagaggccttcaggggagattcaccagccaggaggagctgggcaggcagagggcagctgggtggggattgctyaccagtgaggactgcctgtgccaggccaggaggttgggggcaggggagcacactgggttcccgaggctgaagctgttcagggtgggagtgagggcagaga

SEQ ID NO: 447556 - DNA, 201 bp, Homo sapiens
ggagattcaccagccaggaggagctgggcaggcagagggcagctgggtggggattgcttaccagtgaggactgcctgtgccaggccaggaggttgggggcrggggagcacactgggttcccgaggctgaagctgttcagggtgggagtgagggcagagacgatagtccagggtgaggctggaggggcagcagggcccatga

SEQ ID NO: 447557 - DNA, 201 bp, Homo sapiens
tgtgagggaagggacggtcatgagaaggcaggagagtgtgccatcagattggccttttgggaagtgcctggaaggggtgagtgacgactggcgggagcctrggtgctgatctcggggtgggttgcagtggctgggcctgggggtgccattggtgcagagaaaagaggtggattccgggatgtgtgggtaggaggagaattt

SEQ ID NO: 447558 - DNA, 201 bp, Homo sapiens
tacagactccttggggacagggatcatgtctgttcaccttttatcttttatcattttgggcaatgctactagaaagtagtcaatacatgtggaacttatttatttatttatttatttatttatttatttatttagtgacagagtctcgctctgtcgcccaagctgtggtacaatggcacgatctcggctcactgcaacctc

SEQ ID NO: 447559 - DNA, 201 bp, Homo sapiens
ttacagactccttggggacagggatcatgtctgttcaccttttatcttttatcattttgggcaatgctactagaaagtagtcaatacatgtggaacttatttatttatttatttatttatttatttatttatttagtgacagagtctcgctctgtcgcccaagctgtggtacaatggcacgatctcggctcactgcaacct

SEQ ID NO: 447560 - DNA, 201 bp, Homo sapiens
attacagactccttggggacagggatcatgtctgttcaccttttatcttttatcattttgggcaatgctactagaaagtagtcaatacatgtggaacttatttatttatttatttatttatttatttatttatttagtgacagagtctcgctctgtcgcccaagctgtggtacaatggcacgatctcggctcactgcaacc

SEQ ID NO: 447561 - DNA, 201 bp, Homo sapiens
gattacagactccttggggacagggatcatgtctgttcaccttttatcttttatcattttgggcaatgctactagaaagtagtcaatacatgtggaacttatttatttatttatttatttatttatttatttatttagtgacagagtctcgctctgtcgcccaagctgtggtacaatggcacgatctcggctcactgcaac

SEQ ID NO: 447562 - DNA, 201 bp, Homo sapiens
catcatataactctaccattgtatgtctgtatctactctccagttgatgtgcacttagttaaaagcagttctttacttttataaacgatgttgcattgaamacttttgaatgtgcccttttaccaaactctgagttgatccaagataggcagctacaaatggaattgttcggtcaaactctttttctgtctgaaggagttg

SEQ ID NO: 447563 - DNA, 201 bp, Homo sapiens
gccatttagtagagtcagcataaggcctgctcataacacatggaaggaagccgggaaagcaagagtgtaagaagcaccttgggaggccatggggagcaccygggaaaggcaagagtgcgagaagcaccttgggaggccacaggcagcgctgacggggaggagacgattggctcctgctgacaaagggaaacctgttactcg

SEQ ID NO: 447564 - DNA, 201 bp, Homo sapiens
ggaaagcaagagtgtaagaagcaccttgggaggccatggggagcacccgggaaaggcaagagtgcgagaagcaccttgggaggccacaggcagcgctgacrgggaggagacgattggctcctgctgacaaagggaaacctgttactcgtgcaattctcaggacccgaggggttcggtaatgagctggctgaagtgccatat

SEQ ID NO: 447565 - DNA, 201 bp, Homo sapiens
tctctgctttgttggtgattttctccttcctgtttttactgcttgcctggattcccagggcgtgccccaggtgccctggagctttgtgggcagccagtgtytgattagaggttgtgctgaaatgcttcagttcagcaggccttccaccattccccgatggatctgcacgtgccttggggattgctgtcaaactgcagggct

SEQ ID NO: 447566 - DNA, 201 bp, Homo sapiens
gattttctccttcctgtttttactgcttgcctggattcccagggcgtgccccaggtgccctggagctttgtgggcagccagtgtctgattagaggttgtgytgaaatgcttcagttcagcaggccttccaccattccccgatggatctgcacgtgccttggggattgctgtcaaactgcagggctgtttgtttcgtctgaa

SEQ ID NO: 447567 - DNA, 201 bp, Homo sapiens
ccttcctgtttttactgcttgcctggattcccagggcgtgccccaggtgccctggagctttgtgggcagccagtgtctgattagaggttgtgctgaaatgyttcagttcagcaggccttccaccattccccgatggatctgcacgtgccttggggattgctgtcaaactgcagggctgtttgtttcgtctgaattcacaag

SEQ ID NO: 447568 - DNA, 201 bp, Homo sapiens
cagagtttactttcaaccctgtgctgcttcgtgtcttcctcccaccttccttgtgccattccagacttcctcccgagtaggacctcctcaaggccacagasgatgtccttgttttgcctggccatcgctgtatcactccatccattttgcagtggaccagatgtggcgctctcccttaagcccctagcagcgctgactgca

SEQ ID NO: 447569 - DNA, 201 bp, Homo sapiens
tccccagctgttgcttcctgtgcctactcccctagaaggagcacccctcatggagatgcagcctgactgctgagggaggaaatggccactgacgcaaaatsaatgaacacacagggcggctgcatgcttgattggaggaagctgcctgcaaaattgccttaggaaggacgagggggccgcaggggggctgtccttgtccag

SEQ ID NO: 447570 - DNA, 201 bp, Homo sapiens
ggaggaagtcgaggaaggcctgtgagaggaagttgcactcaagtggagtattgaaggaagaagaagctggggtgagctagcaggccagagtggagagggcrttcccgaacctgcggctggcaggtgcagaggcccctgaagtctgtgtgtgtatggcatgctgctgcaggcctgctgtcctgagcacgggagcacggagag

SEQ ID NO: 447571 - DNA, 201 bp, Homo sapiens
ctgttttctacatttttaaacctaatttcttcacccactgatacttgctgagagactttatggcttcctcgattatgagcttgcttaagtgagttcgttcrtaataatatgtgtaattacatcaagaaggataacaggaccgacgtgaaaccagcatgaaactgacgcgtgtcaaagaactcatgggttgtattgaacagt

SEQ ID NO: 447572 - DNA, 201 bp, Homo sapiens
agcctgagtggcaggaaggaaaggcttggtgtttctgcagagggtttcacagtttggttctctggaggcttccctgtagcccagccacttttctaggtggraatgtcctatctatctcctgatgacctgagcacagtcagccgtgtccctagactcagatagctgagccgggaaagacatctgggcccccctggccgtgag

SEQ ID NO: 447573 - DNA, 201 bp, Homo sapiens
ccagagtgagcagagccgggagcactgcgttacaggccaccaggcctctaccagccagggatgaacctcagcccggtcctgcctgaaaactggtggggcgsctggaagaagcctgggcaatttgggaatttcagatgaagaaaagctttagtccttaatgatcataaaggtcctttctgttcattttgccctctcccctgg

SEQ ID NO: 447574 - DNA, 201 bp, Homo sapiens
gtgctcaggtggtgctgggcatcacatggcgagggagctgagcgtactcatgtgctagctcaggtgtctcttccttttcttataaagtcaccattttcccrcccatgagaacccagtcatccatcaacacattaatccttgaatggattaatccattcatgagggcagagccctcacgacccaatcaccaattaaaggctc

SEQ ID NO: 447575 - DNA, 201 bp, Homo sapiens
ttcttcctttatggaatgggatgatgcctgctggataagttactccagggattacatgagatgatgtctattatgtgctcagtgcagcccctgctaccatrcactattgtttcctctgagacccgcacctgtctcctcgccaccctcctaccccctgtgctgactccctttccccatagatgacgtgggccagtggtggga

SEQ ID NO: 447576 - DNA, 201 bp, Homo sapiens
acatgagatgatgtctattatgtgctcagtgcagcccctgctaccatgcactattgtttcctctgagacccgcacctgtctcctcgccaccctcctacccmctgtgctgactccctttccccatagatgacgtgggccagtggtgggaccaggcctgcgcagatgcatactggcccccacagctgggctcagtgcagggtg

SEQ ID NO: 447577 - DNA, 201 bp, Homo sapiens
tggggttgccgttcactcactcggggagggcaggagtcacagctggggtggagggggttcgacagggggcagaggttgtctagccacgtggcccccatccyttcaggttcagctggcttctggccacaccagaaaggttgtactgtgatcctggacaaagggcactgggctgcgcattgcaggcctggcacgtgactctac

SEQ ID NO: 447578 - DNA, 201 bp, Homo sapiens
tctcaggctactggctcccgcttctcccagcccagatctgccctcctgccttcccttgtaccctccctccccttgatcctctccttcctgcccattcttgwgtcctcaaatgcctctcatgtcctgggctccctaatttctaagactttcacatcttctctcatgtgacatgccactgaggctgtgaacagcactggggac

SEQ ID NO: 447579 - DNA, 201 bp, Homo sapiens
caggctcctgcttatcgctcaggctggaatgcagtggtgcaatcatagctcactgcattcttgacctcctgggctcagcgatcctctcgcttcaaccacaygcagctaatttttgtatttgttatttgtatttgttaatttttgtagagatggggtctccctatgttgcccaggctggtcttgaactcccggcctcaagcg

SEQ ID NO: 447580 - DNA, 201 bp, Homo sapiens
tcttctctcatgtgacatgccactgaggctgtgaacagcactggggaccgagttctgcagttcccagcagagggctgtgacgcccagagatgctgcgggcrccagcgtcaggcggcagagctgggacctggactcctgatgcccggctccttctctttgggcatcgctggcgcctgtttccgaggtgcttcccttcagcct

SEQ ID NO: 447581 - DNA, 201 bp, Homo sapiens
tgctctacaggttcacattttccagcccttcagtgttagctgcaggtttgcagatgtgccttgtcacctctgtgatccttgtcatattcctgctagcccaytgaggagacccaggcttggtgaggtgaagccccttgccccaggtggcgctgctaggatgtgtctgagccaggatccgaacctaggccatgagaccctcct

SEQ ID NO: 447582 - DNA, 201 bp, Homo sapiens
cttgaacataagaacgggcatttgcccatccgggccatcttctcaattcccttcgctcatctttccacttggaatggctgcgttagacatgcacgatccaygtgcagtgtgcatacgtgtgttcagagaatgtggctgtgttcacacatcttgcacacacacacaaaaccatgactcctgttcctgctatctctggactcc

SEQ ID NO: 447583 - DNA, 201 bp, Homo sapiens
aacgggcatttgcccatccgggccatcttctcaattcccttcgctcatctttccacttggaatggctgcgttagacatgcacgatccacgtgcagtgtgcrtacgtgtgttcagagaatgtggctgtgttcacacatcttgcacacacacacaaaaccatgactcctgttcctgctatctctggactcctgttgttctagc

SEQ ID NO: 447584 - DNA, 201 bp, Homo sapiens
tgtaggaaggggccctgagtgtttcggacagtaacgcaatctaccgcacttccactgcatttaaagacaaactaccatgcttattaaaacttcgtctttaygttgactttttgctctctttaaaaggtgcatgcttttttcttaccctatgttaatatgtcatgttacagttgactctgtattctcttattcttttctatt

SEQ ID NO: 447585 - DNA, 201 bp, Homo sapiens
aagacaaactaccatgcttattaaaacttcgtctttatgttgactttttgctctctttaaaaggtgcatgcttttttcttaccctatgttaatatgtcatsttacagttgactctgtattctcttattcttttctattttcattccaaagactttcatggagcacccagtttgtgctaaaccgtatgtcgggaatggtgct

SEQ ID NO: 447586 - DNA, 201 bp, Homo sapiens
tcaactccaacttatcccagggaaccctggggagaggaagtcaggctactggcctgtggtcttctccctgtcagcccaccccaatcccctccacccctgcraaccttcccaacgtgaatgtctgttaaccgaaagttttcccgtgttaggatgcgttgtctgtcttcaaatgtttctatagagagaggaattaaaacgctg

SEQ ID NO: 447587 - DNA, 201 bp, Homo sapiens
ccggctgattatgctgctttttagatgagacgatagtttttatttttaaatcatttttatttattaatttttttgagatggagtctcgctctgttacccargctggagtgcagtgttgtgatcttggctcactgcctcctccacctcctgagttcaagcaattctcctgcctcagcctctggagtagctgggactgcgggt

SEQ ID NO: 447588 - DNA, 201 bp, Homo sapiens
agtaggctattctggaagaaggaccaagcttgggcctgtgtgcctccctgcaggagccccaccgctgcaggagctagggctgaggaagggtgcagcatgcrtcctgtgggagcagagagcagggtctgatgggtgagaagtctcagccctgggtgagagcaccctgccctggcagagagaggagcttgtgggcccagggtg

SEQ ID NO: 447589 - DNA, 201 bp, Homo sapiens
acctcaagtgatcctcccgcctctgtctcccaaagtgttgggattacaggtgtgagccaccgtgtctggccgagatgatacttctaaaataaggccctttsttacctgcggtgggccgcactctcctcctctgtagaatgaaggcttcggtgtttctcagcttctgttaaacctgtgcctacttttgagaaacattagcgc

SEQ ID NO: 447590 - DNA, 201 bp, Homo sapiens
ccactccgtgtgccgggaacccagcaaagtggggcttggatgcaggttatctggcatctggtctccttctctggggtggaatgggatgactgtgccccatstccacctcccttcgaggatgagagatggtcaagccagtggccttgtctgttctgcccccacctctcatactgtgactcgcttggaggggcccagaggcac

SEQ ID NO: 447591 - DNA, 201 bp, Homo sapiens
cctctgtctcccaaagtgttgggattacaggtgtgagccaccgtgtctggccgagatgatacttctaaaataaggccctttcttacctgcggtgggccgcrctctcctcctctgtagaatgaaggcttcggtgtttctcagcttctgttaaacctgtgcctacttttgagaaacattagcgctccagtctcccccgctcag

SEQ ID NO: 447592 - DNA, 201 bp, Homo sapiens
gggattacaggtgtgagccactgcgccccgcctcttttttttttttttttgagacggagtctcactctgtcacccaggctggagtgcagtggcgcaatctyggctcactgcagctttcacctcccgggttccagtgattttcctgcctcagcctcctgggtaactgggattacaggcacgtgccaccacacccggctaatt

SEQ ID NO: 447593 - DNA, 201 bp, Homo sapiens
gccactgcgccccgcctcttttttttttttttttgagacggagtctcactctgtcacccaggctggagtgcagtggcgcaatcttggctcactgcagcttycacctcccgggttccagtgattttcctgcctcagcctcctgggtaactgggattacaggcacgtgccaccacacccggctaatttttgtatttttagtat

SEQ ID NO: 447594 - DNA, 201 bp, Homo sapiens
agatgagagacaatcagaaaacatagataaaaaaacagcctttccctatccccaaaacaacctctaattcatttttgtgcattcccaagtctttttgctamtttccaattctaattttgtccatagggatgatcctactgtatttatacttctgtgtccctttttacgcttgacaaaagtataagcatttcccatgttata

SEQ ID NO: 447595 - DNA, 201 bp, Homo sapiens
agcagggccatgctcacaactggaccccgaatctgcacatcgggctggagctcccgagacccctccgtctcagcccatgaacagtcctggaaagggtgtgmtgctcccatcctccaggtgggaagagcaggaggtagggctggacctttctgtgcctgctgcagaaacccagcatgctccctgactgtctattttgaggac

SEQ ID NO: 447596 - DNA, 201 bp, Homo sapiens
cgaggtgtgagtcatccccaaagcgtataaagttgtacccattttatgactgtgagttcctttttctgggaatagggtccatagttttcatcatattcccraggggtctgtggccccagaggggctggacttgttttaattaaagaattagcagagcaggtcccttccctctcctatcgtggttccttcagggtactgcct

SEQ ID NO: 447597 - DNA, 201 bp, Homo sapiens
acgcatgaggatgtggctcagaacccatgggcctccccgaggacagaccacctggagcaggctgtggatcccatggtgtctgggtgttgctgcttccatcygaacagcaccttctgccctgagccagctccgttcaggagtctggagcccacggtgccagcagccagagctctgcctggtgcctctgaggctgagctgcgt

SEQ ID NO: 447598 - DNA, 201 bp, Homo sapiens
gtgagggtgcagagcttacagcctggaggtgtgcagggctgggaggcccctcagcaggaatctgccactgggcccgaggaacctgggagagaggctgcccyccatgtgagggcccacggacggcgacaggcattggtctgtgcttagtgagggatttactcggttagcacttgtttgctgaccatagaccatggacccagc

SEQ ID NO: 447599 - DNA, 201 bp, Homo sapiens
atcccatggtgtctgggtgttgctgcttccatccgaacagcaccttctgccctgagccagctccgttcaggagtctggagcccacggtgccagcagccagwgctctgcctggtgcctctgaggctgagctgcgtcctggtgctttctggggctttgcagagagacatgtccctacagcgagaacgtgccctttcatcaaat

SEQ ID NO: 447600 - DNA, 201 bp, Homo sapiens
aaccctggaggaggttgctacgacatccctcatgtggacgggagaaaggaaacctggaatgtggcagccccagggccacctcatcccatctgaacccaggyagcctggatgcagggcctgtccccaccctgcctgctgccttgtctctctcctctccctcctctctcttcttcccccgtcctgtctaccttcactcctcaa

SEQ ID NO: 447601 - DNA, 201 bp, Homo sapiens
tattaatcctaataagccaagagctaataaaaatggactcaacatagcatgccctatgcctacccaaggtgggcccaggtgtccgggttataacaaaactsagccacagagcgaaggcacctctcagctggcggactctcacttgtaatcagcataactacctttattgagaagcctctactgcagggactttgctggcat

SEQ ID NO: 447602 - DNA, 201 bp, Homo sapiens
tctactcttttccatgttctagaatttaatgttttaatgtttgatatgttttaggcattctgcaattaatttatatttcacttctgtcccgagagttaaawgatagtttttaaaaaaacttcctatggtaattactttgttttgttttcttcttttgttattgctttctaatataatggtattatcagttcaatactattt

SEQ ID NO: 447603 - DNA, 201 bp, Homo sapiens
ctagcctcgggctgcaggagagggaggggggctttgtggtggcctgatggagctgggccagaatgttgggtgcttagcagggcagggaggcattggtcccrctggtgggcggtgctgtccccagcaccttgatgctctctggtcccagtcctggctgggaactgtggggctttctggccatcctgggtgatgtcagctaga

SEQ ID NO: 447604 - DNA, 201 bp, Homo sapiens
ttacagtgctcaaggttccacgctctggatttcaccacaggcctggggcagcatccccagcagaggaagcagtgtcctgccaggggaaagaggtgctcccyggcagcctggagagcatgtaggggccaggcgcaccccttctttgggccctccgtgcctcctccctgtgctgcagctgggcagcgggcaggtctctgtcct

SEQ ID NO: 447605 - DNA, 201 bp, Homo sapiens
ttttttttttttttttgagacggagtctcactctgtcacccaggctggagtgcagtggcgcaatcttggctcactgcagctttcacctcccgggttccagygattttcctgcctcagcctcctgggtaactgggattacaggcacgtgccaccacacccggctaatttttgtatttttagtataggtggggtttcaccatg

SEQ ID NO: 447606 - DNA, 201 bp, Homo sapiens
gccaccacacccggctaatttttgtatttttagtataggtggggtttcaccatgttggccaggctggtctcgaattcctgacctcaagtgatccgccagcytcggccttccaaagtgttaggattacaggcatgagccaccatgcccggccaagacaagttctattatcaccactattttgtagctgaggagttccaggga

SEQ ID NO: 447607 - DNA, 201 bp, Homo sapiens
tgccacggctttccttggggcttcccctgcctctgggtagtgaaggtcacagtcactgcctcccagggtaggctctcagcactcaggactctgtgtctcayagcctcatttcttctctctgaacagggacttcaaaatgagcgtccctgactacatgcagtgtgctgaggaccaccagacgctgctcgtggtggtccagcc

SEQ ID NO: 447608 - DNA, 201 bp, Homo sapiens
tcttacttttaaaaatgtggcaactagaaactgaaatgtacttacgtggcttgcattttatttctgttggacagcactgtgctagagcacagtttgaacasttttattcagtctcgtccctttggttcacagatgagagggtgaatctggagaggtaagggctaggtcctagctgagctagaagtagagcccacgtctccg

SEQ ID NO: 447609 - DNA, 201 bp, Homo sapiens
cagtctcgtccctttggttcacagatgagagggtgaatctggagaggtaagggctaggtcctagctgagctagaagtagagcccacgtctccggattgccrggctgtgcaccctgcgtatgtggctactttttccctcctgatggccacagtgtcgaattcctcacttacagagcagccaagcatggatatcaggatgcca

SEQ ID NO: 447610 - DNA, 201 bp, Homo sapiens
agaagtagagcccacgtctccggattgccaggctgtgcaccctgcgtatgtggctactttttccctcctgatggccacagtgtcgaattcctcacttacaragcagccaagcatggatatcaggatgccagaaataccacctgggagctcctaaacagctaccttatacaaatgaaaagtatgtctgttctctctgtgtac

SEQ ID NO: 447611 - DNA, 201 bp, Homo sapiens
gaatagcgcacactgctgtccagccagcaggcactgtgggagtcatccctgataaggtgttgctgtatggtgtgcacagcttggcggccacctgccaggtyggcagggagtggcctgcccctgctttacagagaaggggtgaggggttgaagctcacaggcagcatgggtcaggaatcctgctctgaccccttgactcatg

SEQ ID NO: 447612 - DNA, 201 bp, Homo sapiens
cttttaaactatttgatttttaaagcattgagcttttaactttatctctttgtagagctgtttcagtgttttctctagggagtataataagtgctcttagrttttcacagttgacttagaaataatattttatcacttggtggaatctcaaatataggcgcttttatctttcccctcctcatgtcttagttgtataatgta

SEQ ID NO: 447613 - DNA, 201 bp, Homo sapiens
tatgtcctgaccaggccacctgtctagcctcctctgtgcaagtgggcctgtccagcattccctgccgtgccgagttctctgactccacgtgcgtgtgtccygctggactcagagccccgggagggcaggggtgcgtcctgtccttatgtgtgctgtgtgaggagtgcctgtcaccagtgtgcctgttggatgcttcccatg

SEQ ID NO: 447614 - DNA, 201 bp, Homo sapiens
agaggcccattgagagaaaggagccactgcttatagaacccctgcattattgcatgtgtcatcaacttaacccccagagaccctgtggggcaggcattacygtccccatctacacgggcagactgagggttccagaggcaggcaccgggcctctggcaggactgtgcaactccagggaaggcccctttgtccagcacgtca

SEQ ID NO: 447615 - DNA, 201 bp, Homo sapiens
cgttttcccatgtggagaccaaggcttggagactcagggggtctgttcaaaaccactcgatttgtgggctccatagcaccccagagcacatcccctctccrgtggcctagaatgggcagaaggaaaagtgcagagcatgttaaatataagtgaaccccaagtttcttttcaaagaatcaatacgtcagtatgttcagctct

SEQ ID NO: 447616 - DNA, 201 bp, Homo sapiens
ccctttccgtctctgcaagtcctgggcttcctggggctcaggcctgctcactgagtcctggggagacagggaccgcgcctgtggggttagtgcatcaggcmccatgctaggacccacctgagcgagagctgagaggggctgcaaagtccgtagccttcctggcttctgccactttgcataaaatgcagccaattcctgtgg

SEQ ID NO: 447617 - DNA, 201 bp, Homo sapiens
agagacgtttggcttgcgagtgggcgggtgagtgggaagctccgtggcagcgtctggccagagcccaggacccctccttcctggggcaggtggtcccaccrgagccttcactcccaggctctcaccacctacacggttcttaagccaagcctggcccagcaggagatttttcagagggacagggtggtggtcaaccttcag

SEQ ID NO: 447618 - DNA, 201 bp, Homo sapiens
cccagggaggtgaccatttcacccttggtctacctgggaggccccaggctctcggtgaagacccctgcttttgtagggaatggagtgatgcagcactggakcatggcaggcaggggagacagtgcgtcttcacgttttcccatgtggagaccaaggcttggagactcagggggtctgttcaaaaccactcgatttgtgggc

SEQ ID NO: 447619 - DNA, 201 bp, Homo sapiens
ctttccgtctctgcaagtcctgggcttcctggggctcaggcctgctcactgagtcctggggagacagggaccgcgcctgtggggttagtgcatcaggcacyatgctaggacccacctgagcgagagctgagaggggctgcaaagtccgtagccttcctggcttctgccactttgcataaaatgcagccaattcctgtggtg

SEQ ID NO: 447620 - DNA, 201 bp, Homo sapiens
tcgcccactctctccatgctttataccacactgcagtgcccactcgcccactctctccatgctttataccacactgcagtgcccactccccactctctccrtgctttataccacactgcagtgcccactcgcccactctctccatgctttataccacactgcagtgcccactccccactctctccatgctttataccacac

SEQ ID NO: 447621 - DNA, 201 bp, Homo sapiens
caaagtttcatctttcccctttcccagggaggtgaccatttcacccttggtctacctgggaggccccaggctctcggtgaagacccctgcttttgtagggratggagtgatgcagcactggagcatggcaggcaggggagacagtgcgtcttcacgttttcccatgtggagaccaaggcttggagactcagggggtctgtt

SEQ ID NO: 447622 - DNA, 201 bp, Homo sapiens
ggactctgcacatgtgcagtgctggcctcctcagacgtgcttcgtcagggaagccactagaagcacagggagagaaggaggccagcagatggagaattttkccaggtggaggtggggctgagatgaggttagccaggtggaggtggggctgaaacttgggaatgacaggagcagagtgttgagtgaaacgtgagttcgggg

SEQ ID NO: 447623 - DNA, 201 bp, Homo sapiens
gacacaaagtttcatctttcccctttcccagggaggtgaccatttcacccttggtctacctgggaggccccaggctctcggtgaagacccctgcttttgtrgggaatggagtgatgcagcactggagcatggcaggcaggggagacagtgcgtcttcacgttttcccatgtggagaccaaggcttggagactcagggggtc

SEQ ID NO: 447624 - DNA, 201 bp, Homo sapiens
aaataaagttctaaggccccctgaccatctgaatggacttcctcctcagccagggctcttaaaattgaacctgagagacaggttcaggccatcatgggacrtgggggtggaatattcctcattatacctccccagcattaacatcaacacatttaggtctgataaggaacattttgcaacctgttgtctctgaagcccgct

SEQ ID NO: 447625 - DNA, 201 bp, Homo sapiens
tgggtgctgcgagccaggagtccaggaacggagagacccctcaggtcacacggccacacaggggcacgtggcatcagacgcaggcagctcggtgcacagcrgtgactcctcctggactctgactcgggccagaaaccggggggctggaggagtaaccctggagaaacaaaatccctcagcttggcctccacgccactccta

SEQ ID NO: 447626 - DNA, 201 bp, Homo sapiens
ttgcctgtggagtgcaaagccacagtggtaggaggggaagccagagccgtgggaggggctagctatggactgcatgcctctccctacgactgaattgagcmtcctgtgaaaggtttgcagtgggggagggacacagactgatttgtgctttgggaaggacactctggctgtgtgtgtatagaagcaatgaaggggaagggg

SEQ ID NO: 447627 - DNA, 201 bp, Homo sapiens
atcccagcactttgggaggctacggcaggccaaatatgaggtcaagagattgagaccatcctggccaacatggtgaaaccacgtctctactaaaaatacamaaattagctgggcgtggtggcacgcgcctatagtcccagctactcgggaggcggaggcagcagaatttcttgaaccaggaggcagaagttgcagtgagca

SEQ ID NO: 447628 - DNA, 201 bp, Homo sapiens
ttagactcctccctcaaaacctcctccatgtgtcacatgatgaatggataaacgaaatgtggtatgggcatacagcggaatattattcagccatgaaaagsagtgaaattgtgataccactgcagcacggatgaaccttgacaactttgtgctaagtgagagaaggcaggcatgaaaaaggccgcagattgtatgattcta

SEQ ID NO: 447629 - DNA, 201 bp, Homo sapiens
ttatatggtatgtgaactctatgtcaatcttaaaaattaaaagaaagggaagaagaaatcctacttcaaagcacagccatctctgatcccccgcagcagtyggcagagcgggtgccctgcctgagatgttgctgacacttcgtggtggaatcggatgtctgtgtgtggtcttccctttggggactgcgcctcctggaggtg

SEQ ID NO: 447630 - DNA, 201 bp, Homo sapiens
gaaagggagtaagaattagggatggaaaagaaaagagaatcagataaaggattatgcaggctgagaaagacatagttttacttggttttcttgaaagagcrttgtctccctaagtactccttattgtatcaattagagaatctgtgcatctcccagtgggctctgagactagggcatgtgcagcaggtgcttctccagaaa

SEQ ID NO: 447631 - DNA, 201 bp, Homo sapiens
agatactcaacagaggattctaacaggatgccctacatggtatgctaggatactgacaaggcacagtggagcccgcaggagggaactggccattcctactygagagttacagtgataaagattttgcttaacaaatactttattgagtgccttctctgtgccagccatgtgctggacaatagggacatgatgacatggtgc

SEQ ID NO: 447632 - DNA, 201 bp, Homo sapiens
catcacagcagactgaatgtagaagctgatagaagatccagctgacttgtattaactctgatattaaagaaatgtgtgaacatgtcaaataatgccattcytccagtactttatttttgttttggaaaacaattatttttcataaaactgttaacacatgacaagcttattattttattttttatttttatttttttgagt

SEQ ID NO: 447633 - DNA, 201 bp, Homo sapiens
tcatgcaatttaaaaagaatgataggggcaaatgaatggtcatagcaattgcattccaagcagaagggacagaaagaacaaatcatggagggaagaagtarcagcgtatgttaggaaatcttaatcaatttgttgccagaagtcaaagggcaaagcaaaactggtgagaaatgaggaggggcctgtgcttggacagtgtcc

SEQ ID NO: 447634 - DNA, 201 bp, Homo sapiens
tttttatttttttgagtcagtctcactctgtcgcccaggctggagtgcaatggcgtgatttcagctcactgaaacttccatttcccaggttcaagcgattmtcttgcctcagcctcccgagtagctggggctacaggtgtgttttatcatgcctggccaatttttgtatttttagtagagtcagggtttcaccatgttggc

SEQ ID NO: 447635 - DNA, 201 bp, Homo sapiens
acagtgttttgctcgtgttgctcaggctggagtgcagtggcgtgatctcggctcactgcagcctctacctcctgggttcaagcgattcttctgcctcagcytcctgagtagctgggattacaggtgcctgccaccacacctggctaatgttttgtatttttagtagagacagggttttgccatgttggcctggctggtctc

SEQ ID NO: 447636 - DNA, 201 bp, Homo sapiens
gagtgcaatggcgtgatttcagctcactgaaacttccatttcccaggttcaagcgattctcttgcctcagcctcccgagtagctggggctacaggtgtgtkttatcatgcctggccaatttttgtatttttagtagagtcagggtttcaccatgttggccaggctggtcttgaactcctgacctcaagtgatccacccacc

SEQ ID NO: 447637 - DNA, 201 bp, Homo sapiens
aatctgcctgcctcagcctcccaaagtggtgggattacaggtgtgagcaactgcatctggcctaaataagataatagtagagaacttggccacagtgcctrgtacatgctaagcccttaagacctgatcaccatcattataaccactgccactgtcatcatgtgacacacatctctcatcagagatggactgcctctatgt

SEQ ID NO: 447638 - DNA, 201 bp, Homo sapiens
tgtggcatagctggagattattaggttgttacgtcatgagagaagaacggactgtgtagcgagttaatatggctgtttttgaggaagagggaggactacarcctcaaaaggagcagatgcctatggggtgcatggtctggaaaggcattctggtcttgctttggtgctattactgtgaaatattttcaatccagggcactt

SEQ ID NO: 447639 - DNA, 201 bp, Homo sapiens
accaagtcttgaatcttatgggatttaaatagtgttttacataacacctagacatacgtacatgcatgtatgtatgcatgatatacagagagccacctcaygtaggctccactgggctcgcactcgtacttcatgtgctgcgtcaaggcgagcagacctttcaaggagatgagaaggggattagtaaatatttgcctggaa

SEQ ID NO: 447640 - DNA, 201 bp, Homo sapiens
tgagagaactgacccctctgggggaaagcttgactagtgagggaaagagttgggagagcaattatttcctcttctgtgcctcaggcgcacagtgtgaagcrcagtcctctcggctccacagaaggacgatgattgagccccagctgcccacagggccgccagctcagcgacacacagcaacatgccctctggcatcacctt

SEQ ID NO: 447641 - DNA, 201 bp, Homo sapiens
gagaactgacccctctgggggaaagcttgactagtgagggaaagagttgggagagcaattatttcctcttctgtgcctcaggcgcacagtgtgaagcacartcctctcggctccacagaaggacgatgattgagccccagctgcccacagggccgccagctcagcgacacacagcaacatgccctctggcatcaccttctc

SEQ ID NO: 447642 - DNA, 201 bp, Homo sapiens
gagttgaatggcatctcttcccgaagaagccatgtgggggttttccatttctgagcagagtcttctctttgagcattgtttgggatcacacatttatatawctgtgtatatacaaagagagggagaacaggcaccttgccctgtgacttatagttcaggcccttgggatgtggaggaacaagcagacgcggaccccatgga

SEQ ID NO: 447643 - DNA, 201 bp, Homo sapiens
cgcaggcagctcggtgcacagcggtgactcctcctggactctgactcgggccagaaaccggggggctggaggagtaaccctggagaaacaaaatccctcascttggcctccacgccactcctagagcatagaggacagggagtgctgaaagggcagcgtctgctgtgggaaaggagggagaacccatgaagacgtgacatc

SEQ ID NO: 447644 - DNA, 201 bp, Homo sapiens
ccccccccggattcacagtcccggtcgcagtggctacttgtcggctctggcctcggcaaaaccgttggtgctgcttgaaggcacagagcattatcattgarcagttaagttcctgcaggtgccggctgtgttgcaggtgtagacactcatggacgagcagactcttggggagggggcccctcacctgtgtcctgtcccctc

SEQ ID NO: 447645 - DNA, 201 bp, Homo sapiens
gttgctctctccacctgctgctggctgtgtgcagctgttggcaggcagcccagggcacccagcctcgtgcttcctggtgagcaagttgctttacaagcagygggccgcccaggcagggaggaggcagaggtggtcagacggccccatgctcagctcctgactctcagagggcaccatacggagctcctgtggctgctccgg

SEQ ID NO: 447646 - DNA, 201 bp, Homo sapiens
tttacaaagggagttagtgctcacagtgcagctaatgccgttgctcttgagaacattcacaaatccattttgcacgccaccccccgccgctgtccagctgytttgctgttgacctgtgttacccatgagctcaggggaagctgagaggacattgtcccacacctctctcctgctagactcaggctgcagcggggagctggt

SEQ ID NO: 447647 - DNA, 201 bp, Homo sapiens
aggtgaagttacaaagttatgcttctatgcaaatgaaaagtagacaaagttatacttctctgcaaactaagactccaccagcaatcagtctgagtggttcyggacagccagtttcccacctgccatgcagaaaaggtcaaagggagcagcctctggtccttttgttacttagtcatggaaagttagggttttcctttcaat

SEQ ID NO: 447648 - DNA, 201 bp, Homo sapiens
gcatgaaaatttcagatgtgcaatgtggacagtggtgaaattggacttttcttccaatgtcagaaggcagtcagccatgatttataaaagagatagaaacygtctggagcaccttaaagctgaaaagaatctggaactccctgagtattgcacccagttttgcatgtttgctagtgggtggtgttgtggtgtcatggaaaa

SEQ ID NO: 447649 - DNA, 201 bp, Homo sapiens
gagatgagaaggggattagtaaatatttgcctggaaccgtggatgatgactcacgtacattcgagtcagacagcagccccatgtggtagagattttatccycatttcacaaatgaggaattgaagccgtcactaatcgcagggaataatattcttttttttttttttgagatggagtcttgctctgtcacttaggctggag

SEQ ID NO: 447650 - DNA, 201 bp, Homo sapiens
ccaaggttatggagctagtaagtggcagagctgggatttaaatcctggcagttggccaggtgcagtggctcacacctgtaatcccagcactgggaggccamggtgggcagatcacgaggtcaggagttcaagaccagcctggccaatatggtaaaaccccgtgtctactgaaaatacaacaacaacaaaaaattagctgga

SEQ ID NO: 447651 - DNA, 201 bp, Homo sapiens
gtttcactgtgttggccaggctagtctcgaactcccgagctcaagtgatccacccaccttggcctcccaaagtgctgggattacagctgtgagccaccacrcctggccccggggaataatattctcattcctatttgagagctcaaggatcctgcatttgtttttgaacttcctggtccattggaagtggcttgtcttcta

SEQ ID NO: 447652 - DNA, 201 bp, Homo sapiens
tgtcttctaggcccgtgctgaccatgctgctgttgggactcattagtccttgtctgcaggtagaccagagcaatggaacgagatcagagggtgacatctcrgatgcctgcaggggcacgcggatgcttgtcctgccacctggaaagctttttcttatgtattagcgccacaggacaaactggtttagcccagcaaagcaca

SEQ ID NO: 447653 - DNA, 201 bp, Homo sapiens
aaattagctctgaaaatgtggaataacgaccgagagcatcattttttattaaaatgatctgggtgtttacatacaaaatgttcaggatacatctgactccytctggctgtctgagggctgtccctcctccctgcacacttccctagccctgggcctcatgtcctactcggtgggggcttcccgtgtgcgtgacaagggagc

SEQ ID NO: 447654 - DNA, 201 bp, Homo sapiens
tcttttcctgtctgaagcaaaaaggcaccaaacttgtaacatactgttcctcagaattgcttttctgatcagatacaagtcagatttttctctaggctatrtgaattatgaaatgtgttttagtagttatttttaaaagtagttttgttttccaaataaaataccataatctgttctttcttccaggggcacaggaagttc

SEQ ID NO: 447655 - DNA, 201 bp, Homo sapiens
caaggttcatgctgttttttttaaaaaatggagatacataaagtggctgaaatagaagttgaattagaaaaaatgtgtatatgcacacaatcacatgcatrtaccaccctccccacacccagcacgcatggttcccactgacaaattctcctcaaggttgagtgtgggatttagttcctggccaaatgcgacttggaacct

SEQ ID NO: 447656 - DNA, 201 bp, Homo sapiens
aatacaaaatgaaaacagtctagaattgaaatcagatggctgtgcttacacagcctttgtgactaacacattcgctttcatcgcctcgtgcatcttggctytgaaatgaagttgccccaggtttgcaggcgttggttttaacatttgcgttcactcctttctctaggccgtggctaagtttcctgatggagtttgtggaat

SEQ ID NO: 447657 - DNA, 201 bp, Homo sapiens
atatactagaagaaggagccaagaatagccaagataaactgaaggatgtggccaagttaaggggtcttggcctattagatattaaggcttataaagcaatrgtaattaaaatagtcttatacagattatttatttgacaaatagacaaatgaaagagaatagaaagccccaaatcagatttataggtatagagaagtttga

SEQ ID NO: 447658 - DNA, 201 bp, Homo sapiens
gggccacactgccatgtggacaccggggctgctgcggtgccggcccacaccagcctactgttgcatctggaccagcacatggctgccctttctgttttggrggtgctttttggaatctggcaatgaaagaggaaggtcatcagatgtcacattgtctattgtgtgcctctaatgttcaattcttggcacttggagaaaaaa

SEQ ID NO: 447659 - DNA, 201 bp, Homo sapiens
atgggtggaattctgaagtgcatacaattgttctctctaaatcactgtatgggaggatgctttgttgaattgtttcattcgctgattgatgtatagaagasacacttcgatgctcttgttcaatgccagataacaccaagcatactggggaaagcaaggtattaaatatccaggccaaaacaaaaacaaaaaaacccaccg

SEQ ID NO: 447660 - DNA, 201 bp, Homo sapiens
ggatgagtaagggctacttccaagaagcccttgactggttccctgcccctgcgtgtgctcacccctgcacttgccctcgtgggacacacagctgtttgccrctcactgcacacaagcaccccgttgtggtcctgccttcactgggtgtggtcgttgttattcataatgaacatattccactccctcagtaaatggtagctg

SEQ ID NO: 447661 - DNA, 201 bp, Homo sapiens
tgtgcctaaacctcagagcttccaggtatcgtgcgtggcctactcccaattcgctgagcattaggatgtcattgagtctctgactctgaccgagcacagcyggttttctgtgatggttcagccctctgcaccctcagactgcacacctgggtcactgccccaggctgcagacattggccactccctagatcagggttgacc

SEQ ID NO: 447662 - DNA, 201 bp, Homo sapiens
agtggctcatgcctgtaatcccagcactttgggaagccgaggcaggtggatcacttgaggtcgggagttcaagaccagcctgaccaacgtggtgaaacccygtctctactagaaacacaaaaattaacaaggtatggtggcacacctctgtaatcccagctactcaagaggctgaggcaggagaatcacttgaaccaggga

SEQ ID NO: 447663 - DNA, 201 bp, Homo sapiens
gctttataccacactgtggtgcccgctcccccattctctccctgctttatcaccacactcagtgcccactcgtcctgtgtgtgccacacacttacctttcrgctctcagtcctcgtcctggggtgccctgcccttgctcaggggcctagtggctctgctctacctttagaaggctctaagccgagtgacttccccatgctc

SEQ ID NO: 447664 - DNA, 201 bp, Homo sapiens
ccagagggttttaatgtatctgagtagaagagtgagtgagaagaggaagaaaactcacaagttggacactaccaggtgcgaggcatttttcttttactctstgatttattccttatagcagctctctacatttggcatttcattatgcctctttacaaatgaagaaatgaaggtttggagaggctaatttatttaggccag

SEQ ID NO: 447665 - DNA, 201 bp, Homo sapiens
gagatttgctaataacacatgatatgcttatgtgcacaaatttcagaatcaaacatacctggatttggttttacttattgaaaaattataatcgtatatgkttatggtttacaaagtaaacatacatggatttaaatgctaacctcgttacttggacaaaattcgtgatatccccaaacctcagtgtttcatatataagat

SEQ ID NO: 447666 - DNA, 201 bp, Homo sapiens
ttggttttacttattgaaaaattataatcgtatatgtttatggtttacaaagtaaacatacatggatttaaatgctaacctcgttacttggacaaaattcrtgatatccccaaacctcagtgtttcatatataagatagagctgtgaatatctactacgtaggattgtaaacgaaatactgaagcgtgaatcagatgcatc

SEQ ID NO: 447667 - DNA, 201 bp, Homo sapiens
aatgtaaaacctgattcagcaggtgcggggtggggctggtgtgggagatcctgccgcagtggcttgaccccgaccgtcacagtgagtgggcagcgtggggwgaggccgcccagggccggtctgcggtaggcacccaggacgtgctcgccaccatgttatctgccgtggaaagctcactacccgctccagagtgatctggac

SEQ ID NO: 447668 - DNA, 201 bp, Homo sapiens
ggctttgctttttccagtggaacctgaaatatccataccaggtccttcccacagccctctcctctgcccactggtccctaagccaccactgcccttgtctrttttttttttaagcctttgcagggcgtggggaatgtacctacctccctctccaaatcactggaaacataacagatgtgaaaatggagagagaaatccatt

SEQ ID NO: 447669 - DNA, 201 bp, Homo sapiens
ctctactaaaaacacaaaaattagctgggcacggtgacaagcacctgtaatcccactactcgggaggctgaggcaggagaatcgcttgaactcaggaggcrgaggttgcagtgagtcaagatcacaccacagcattctagcctgggtgacagagcaagactctgccccggaaaagaaaaaaaaaaagaagacaatcaattg

SEQ ID NO: 447670 - DNA, 201 bp, Homo sapiens
caattggctatagaagtatgagtttatttcttgactctcaatcttattctcttggtctgtgtgtctattattatgtcagaaccacaatgtttgtattaccrtggctttgtagatacttttgaaatcaggacatgtgagtcctctaactttgttctttttttcaatattgtttttgctatttggggtccttttgcaattctg

SEQ ID NO: 447671 - DNA, 201 bp, Homo sapiens
gggaagctttcagtctttctctgttgagtatgatgttagctgtgggtttttcatagataccctttatcatgttgaggagttcccttctgtttctgttttgytggttggatttttatgttttatcgtgaaaggatgttgaattttgtcaatatttttcctgcatcaggagagatgatcatgtggatcttttccattatatta

SEQ ID NO: 447672 - DNA, 201 bp, Homo sapiens
aaatcccccttggtcatggtacatagtccttttagtttactgttcagtttggcttcctagtattttattgagggttttgcatcggtatccatcaggaagaytggtagctttcctcttttcttctgatgtctttggcttgatcttgtttcagggtgatgctgctggccttacagaatgtgtttagaagcattccttcctctt

SEQ ID NO: 447673 - DNA, 201 bp, Homo sapiens
tttagaatgaattgtcttatgtggcctgaagacctactgtgccctgggatgatggagacgatggtaggagagaaggcagagtgtctagataagtattgcasagagacaggagtgcggttctgggacgagaaccgagtacttgctgccacgtttcagtgtcttcttcactccttgtatgcttctttccccaacacatctgca

SEQ ID NO: 447674 - DNA, 201 bp, Homo sapiens
ttctgtgcctcaggcgcacagtgtgaagcacagtcctctcggctccacagaaggacgatgattgagccccagctgcccacagggccgccagctcagcgacrcacagcaacatgccctctggcatcaccttctcctctgctgccccactttgcctactctacatgcttcctggcatcccttccctaagcactagctctgtgc

SEQ ID NO: 447675 - DNA, 201 bp, Homo sapiens
tgggaaaggaaacttattcacagataggaagccaagctccaccaatacatcatcatgtcaacaattagaaagaatagaaacactagatcagacgcccccamactcagacagtgagtcagaaaaaagaagagcaagaggacagaaatgcattgtgtattgatgctgctcattcctgtgccatttcgtaagcaccgtattctg

SEQ ID NO: 447676 - DNA, 201 bp, Homo sapiens
tcatttctgaatgcttctaactcgaatattcttttatttattcataaaatattcattcaataaatattgatacttcagcaatttgctgtgtggtaagcccygtgtcaggcttcaggcgtgctgagaagaataaataagggcccctcctcgctggggattggcaacacattgggacaagtgtctaacccagccagagcggct

SEQ ID NO: 447677 - DNA, 201 bp, Homo sapiens
tctgggaagtcatcttaggcgcttcccctgctgtgcccactgctggggatacccatgaatccatgcaactctgccctgagccctagaatgcatgattcccytcccctccctttcccaaacctctctcagtgcctcaccggccttctgtgggtcagatgcacactcggcctccgtggaggggttgtgcagagcagtgcaggt

SEQ ID NO: 447678 - DNA, 201 bp, Homo sapiens
tggggatacccatgaatccatgcaactctgccctgagccctagaatgcatgattcccttcccctccctttcccaaacctctctcagtgcctcaccggcctyctgtgggtcagatgcacactcggcctccgtggaggggttgtgcagagcagtgcaggtggaggaagtggaaatggctctaccttacttcgcaacgccggac

SEQ ID NO: 447679 - DNA, 201 bp, Homo sapiens
gacagtcccttcagaagaggggagacatctgctgtaggaggtttcccatctgagggtctctgtctagagacttctagacgttcttctgtccctgggctccrcaggagttgcgttttccttgaccaaggctcacccctccctgaagcgcagtggcgaggcgagtgtggaaggactcctgaaccagctcgtcctggagcacct

SEQ ID NO: 447680 - DNA, 201 bp, Homo sapiens
attagaaatgaacacagctgatttagagtcttttgcttaaccaaagcttcaagatgttaacatttataaacaagagaagggataccatattttttcaaatktttgctatatgccaggtaccatccacaatcttttcaaatcctcattttagtcctgagtgatgcttctcaccctttggtggtggctaggcccagagaagta

SEQ ID NO: 447681 - DNA, 201 bp, Homo sapiens
agctatataaaggagtgatgaacctaataaatagtaaataagtgaataaatagaaaagatttgtttccttcacttttaaaatttctttgaaagattaattractacttaaagaaataagaacatttaattctgtagtgtatagcacatatgcaaataaaatatgtaacaaaaaagtggcacaaagaatgggtgggaaaata

SEQ ID NO: 447682 - DNA, 201 bp, Homo sapiens
tagaaatggtgaatggcttaaaatcagtgatattgcttctttattagataaggatagcaaaatgtacctagagtaagcagaagaaataatagagtggatawcagtgctatagagtatgaacaaataaattcataaagttggtgaaaccaacagttggttctctgaaaatagtaacaataaaattaataaattgtaactagg

SEQ ID NO: 447683 - DNA, 201 bp, Homo sapiens
gagtaagcagaagaaataatagagtggatatcagtgctatagagtatgaacaaataaattcataaagttggtgaaaccaacagttggttctctgaaaataktaacaataaaattaataaattgtaactagggtggtcagaaaaaaatgtggaaacacaaataactaataatgagaatgaaagaggtggcattactactaat

SEQ ID NO: 447684 - DNA, 201 bp, Homo sapiens
aattagccgggtgtgatgggacatccctatagtcctagctactcaggaggctgaggcaggaggataccttgagtgacctacgatcgtgccactgcactccrgcctgggtggcagagaaggtgcctgtctcttaaaaagaagaaaaatgacggccaggcgtggtggctcacacctataatcccagccctttgggaggccaag

SEQ ID NO: 447685 - DNA, 201 bp, Homo sapiens
gatcgtgccactgcactccagcctgggtggcagagaaggtgcctgtctcttaaaaagaagaaaaatgacggccaggcgtggtggctcacacctataatccyagccctttgggaggccaaggcaggcggatcacctgaggtcaggagtttgaaaccagcttgactaacatggcgaaacctcatctctactaaacatagaaaa

SEQ ID NO: 447686 - DNA, 201 bp, Homo sapiens
agacattatgagaaaagaaaactgtagaccaataacctcatgtatatacatgtgaaatatgaaaacaaaaaatcaaatcaacttcagtgatatatgaaagsgacaaaacagcatgaacaattcaggttttactcagaagtatgaggttgttttaccattgaaagatcagtcattagaatttgtcatgttagcagaataaag

SEQ ID NO: 447687 - DNA, 201 bp, Homo sapiens
tttccaggcaacagggtcttgattggggatggctgtcttggcatagcatggaaggtgacagcagaggtgtgaccagggaggatccggagagcagggactaygtggccttcagggcaagctggaattctgtggctgaaggggtgagagatgtcctcattggggggccgactgtgaaagttcatgctgcatccagtaaggtgc

SEQ ID NO: 447688 - DNA, 201 bp, Homo sapiens
tgatttggaggtaggtaggtggcagacctttgcagaggagacatcggcagatgtctaaggagttggagagcagtgggatacaggggaaattgcatgggcgrtggtcaataattcaacaattacctcctgagggcctgctctgtgcaaggcactattctcagtgtgtgggataaatccatgactggaagaaagaaagattcc

SEQ ID NO: 447689 - DNA, 201 bp, Homo sapiens
tttaaaaattttgacgcaatcccatacttacagaagattgaagcatagtacaaagaaccccctcagtccgctgagctgttaacccgatgccctgtcacccscaagcactttcctgtgtgtttccaaacaacacacagcattctctgtaccccacagcataaccatcaaaataaggagatggccatccggtcctcagaccct

SEQ ID NO: 447690 - DNA, 201 bp, Homo sapiens
aaccatcaaaataaggagatggccatccggtcctcagaccctgttcacatttgccagctgtcccaggagtggcttttagatgaaggggtcccacttagaaycatctgattcttttagcctcagtctgtgatctggagcattcctcaggctttctttaatgttcatgaccttgatatttttcaagattataattcagttatt

SEQ ID NO: 447691 - DNA, 201 bp, Homo sapiens
ataacagtggacacagccaagggaaggggggcggggcaggagctccagccaccatgcctccttgggggccaggtgtccctctccataggcatgggctcccygggccccagattcctgccacacccacgcaccactcactggtaagccctgatgcctgcggctttgctcctggtgagcaccctggctcaggaggtgtccggg

SEQ ID NO: 447692 - DNA, 201 bp, Homo sapiens
tctggggacagcctgcccactgtccacagcaggggagtctgggtggctccggagcacagatgctgctcagcttgcaggactagaatgggaaggttgtagtkatttatcaaatatcgtttactttagaagtaacataattttaaaataaacatttaaatttattaaacatatatgtagttcttattgctgctgtaagagata

SEQ ID NO: 447693 - DNA, 201 bp, Homo sapiens
taaactccgttgaaagttcaaatgacacatttagacgtcatttatttcagactactgccaaagtgactgaaataaaaatcccagccacagcccggtcctcytggggaagtggtaaagtggagcagcagattctgagaaaagaaactagacagcgtgatgcatctatctcaagaaatagccctgccttccagtgactccggg

SEQ ID NO: 447694 - DNA, 201 bp, Homo sapiens
tccgaagccacagttggggcctgaagtgtgcatgtagctgattcggatgccactgctttcaggccctctcagtgaataggtcatgtatgtatgtgcgtgtrcatgcgtacacgtgcatttacatttctattcgtctatccatctctatacatcgcaaaacatgagttctcagagatccctccaattccgatccggtatcac

SEQ ID NO: 447695 - DNA, 201 bp, Homo sapiens
gtttagaatcatttccaaagataatgcctctgaccccccatttttattgtcctgcggatgcactgtgacgggggtgcgtgcatgctctggtacctgctacstctcaacaagatgtgctgctgtgggcggccaccacggcaccgagcctgggccctggggaggaatgtggatcccagcatggtcctgatgaggaccaggggc

SEQ ID NO: 447696 - DNA, 201 bp, Homo sapiens
cttttctcttggggagaaagctggctctcaccataacttccttttctctcggggagaaagctggctctcaccatccttccattgctgacttaggtgttcartcctcctgtgtgtacccagtctcccatcgcctctactgccccctgccccctgtgtggacatcctgcccacgcagctcgggttccatcccccgtgccggct

SEQ ID NO: 447697 - DNA, 201 bp, Homo sapiens
tagcacagcgggcctcctgtggactggtttcagcctttccagtggactttctagcagtaggcacaattaccaaccaagcttttttttttttttttttttttctgaaagtacaaagatcccttctgcccttatggaactttgtgggagagtgtcatttctttccttctggctcaaatctgaacttcttaaacttgccagtga

SEQ ID NO: 447698 - DNA, 201 bp, Homo sapiens
ttttgaaattgaacagacctagaatagacaaataacttgacaaaaaagaacaaagttggaggacttacactgtatgattttaagacaatgtaaagctatartaatcaagagagtatgttattggtgtaaagacagaaaaagagatcaatggaccataatagatagtccagaaatagttccaattgtatctcatcagttgat

SEQ ID NO: 447699 - DNA, 201 bp, Homo sapiens
agcacagtatcttcttgatttaggggcaaatattttcttagatggggccggaaactgctaaccataaaactaagacttgataggacaaatttcatcaaaaytaaaaacttcagcttattaaaaggcaaattacattctaagataaaaaaattgtaacatatttatgtaacaaacgtcttgtatcttattgatgaagttgta

SEQ ID NO: 447700 - DNA, 201 bp, Homo sapiens
gagaaatataagtccacatccacaaaaagactcctgcaagtattttcgtaacagctttattcctaataactccaaactggaaacaaccccaaatgcccatyaacaggtaaatgaataaacaatgtggggtgctgccacacaatggaatactcctcagaaatagaaactgctggtacatgcaacaaaatggggtcagcacaa

SEQ ID NO: 447701 - DNA, 201 bp, Homo sapiens
tttgtgtatttcgttgtatgtaaattttaaccttgatttaacatttcatgtacgaaaatatatatacgttggagagagcacctaatttttactggggagakctggaaaggcatcacaaaaaaatgaaacgttgtactaattcttgaggaaagaaggatttcaccacccacagtgggaggaacaggagaggtgttaatgttg

SEQ ID NO: 447702 - DNA, 201 bp, Homo sapiens
ttctggttcttccactggattttgagctctgtggaacatgcagccaggtggtcaacctctgcctcccaggacctagcgccttgccccacggtgggcagccrgggaaggtgtaggaatgacaggatgtaaaataccaaggctctattcattcaggtgtttcttttgtataaaagggatgaccccgtttatatatatatttaa

SEQ ID NO: 447703 - DNA, 201 bp, Homo sapiens
ctggttcttccactggattttgagctctgtggaacatgcagccaggtggtcaacctctgcctcccaggacctagcgccttgccccacggtgggcagccggsgaaggtgtaggaatgacaggatgtaaaataccaaggctctattcattcaggtgtttcttttgtataaaagggatgaccccgtttatatatatatttaagt

SEQ ID NO: 447704 - DNA, 201 bp, Homo sapiens
cagagcagcagatctgtaggagaggagtcttctttttttttatatatatatatatatatatatgtatatatatatatatttttattatagtttaagttctygggtacatgtgcacaacgtgcaggtttgttaaatatgtgagaggagtcttaatggggagcttgaatgactgtgaagttgtctgctttcgaaaggaagcag

SEQ ID NO: 447705 - DNA, 201 bp, Homo sapiens
cttccactggattttgagctctgtggaacatgcagccaggtggtcaacctctgcctcccaggacctagcgccttgccccacggtgggcagccggggaaggygtaggaatgacaggatgtaaaataccaaggctctattcattcaggtgtttcttttgtataaaagggatgaccccgtttatatatatatttaagttctatt

SEQ ID NO: 447706 - DNA, 201 bp, Homo sapiens
aaacaacgattagacatctcctttgagccaagtgccatgctaaatgcctttttgcacttgaccatcttaatttccagagcccattgagaggagggtttctstctcttggtttgaaagtgaagaagcggtgtctccagatacatacgttagagatgcccagacatggctgctggagaaaggtagactccagttccagaccca

SEQ ID NO: 447707 - DNA, 201 bp, Homo sapiens
cagttaagggagagagaaacgcacttccacagcccttaaggcactggcattttggtgatggcgtagcacctggatctatgtcctgaccaggccacctgtcyagcctcctctgtgcaagtgggcctgtccagcattccctgccgtgccgagttctctgactccacgtgcgtgtgtcccgctggactcagagccccgggaggg

SEQ ID NO: 447708 - DNA, 201 bp, Homo sapiens
ggaccagagcctgtccagtgaagaaatgaaccttggttgtaagccactgagatttggaggctgcttgttaccacagcataacctagcctctcctgatggayccatttcacctgcactcctcacaaagaactcaagacttccattcattcatcagatactttgcagtgtcctttgatggccaggcactgtttggcccctagt

SEQ ID NO: 447709 - DNA, 201 bp, Homo sapiens
acatggggcatgatggaataaataaggtgcagtggggtgagaagaacccagctgtgcagttggggtggggctcgtggctggagaggaagcagtatgtcagyaccccagatgcccatggcagagtgggtgtggccgggctgtgagggcagggcagggagagcagatgtgaccagtccagagctggcaagtctgggttctgca

SEQ ID NO: 447710 - DNA, 201 bp, Homo sapiens
gaataaataaggtgcagtggggtgagaagaacccagctgtgcagttggggtggggctcgtggctggagaggaagcagtatgtcagtaccccagatgcccayggcagagtgggtgtggccgggctgtgagggcagggcagggagagcagatgtgaccagtccagagctggcaagtctgggttctgcaaggccatgcacgtgc

SEQ ID NO: 447711 - DNA, 201 bp, Homo sapiens
agatttaaaggggtaagtaagaaatgtggttgcagaggcagtaatttgaggtatctgtgtgacatccaaacagagatgtcagattggcagctgtgtgggtrcatcttgctcaacacattaaataaaaataaaaatgtataggacccagtagcacttttcgatgtgcacatccagcaaacattaagtctatgcaaactgtga

SEQ ID NO: 447712 - DNA, 201 bp, Homo sapiens
cattacaaaatccccctttctttctgaagcaaaagtcttcacctgcttctgtcttcagaaatccatgagtggctgctgtcgccctggcccccgcggccctstgtggcccagcctctgccccatgcttggcttcatctatggccacctctcctcttcagctggagtcgcattgctgtcaggagctaattttggcttcctgga

SEQ ID NO: 447713 - DNA, 201 bp, Homo sapiens
ccctatcagccgcatttcgagaatgaggctgatgggagcatgcctttctctcctgttggctgagtggaggacgtagacaagcgtgtgggaaccactgtgcrattttgaatgtgcggcacggctctgccttagatgctcccctctccacgcctgctctgtgcaggtcactgcctctgctgctctaccttagacaccgccccc

SEQ ID NO: 447714 - DNA, 201 bp, Homo sapiens
tattgctattgccacagacaccaccactttgtagagttgtcatgaggattgaagttttgtgcatcagatgtctagccacttctctgcctaaggctaccacygtttgacttctaatggcatagattcatttcacctgcctttacttggtgtttgcactcatgttattcattcttgagatgagagtggtgagagtgaggtata

SEQ ID NO: 447715 - DNA, 201 bp, Homo sapiens
aagtgcttctctggcataaaatccttcatctggtactctgaacttaattaattggttatagagtttggttgatacttgaacaagcaagctaatattgaatwacagaaaattacagtctacgtggcaaacttttctcacatctcctgtaatttaacttgccctcccagcttagcaactggaaaacattttttccttacctca

SEQ ID NO: 447716 - DNA, 201 bp, Homo sapiens
atccttcatctggtactctgaacttaattaattggttatagagtttggttgatacttgaacaagcaagctaatattgaataacagaaaattacagtctacrtggcaaacttttctcacatctcctgtaatttaacttgccctcccagcttagcaactggaaaacattttttccttacctcaaataaactctgtggtaatcg

SEQ ID NO: 447717 - DNA, 201 bp, Homo sapiens
ttggttatagagtttggttgatacttgaacaagcaagctaatattgaataacagaaaattacagtctacgtggcaaacttttctcacatctcctgtaattyaacttgccctcccagcttagcaactggaaaacattttttccttacctcaaataaactctgtggtaatcgtgtgcccattattcattacaaaatccccctt

SEQ ID NO: 447718 - DNA, 201 bp, Homo sapiens
tgtctgtgtcactgagtctgtcaacagtttgatcctttttatttctgagttgctttctgttgtacaggtatgtcacagcctgtggatccattcactgtttraaggacatttaggctgttaccagctttttgtgattatgaatagagctgctgtaaatactcatgtagagtgattcttgtgaatttaagttttcaattctct

SEQ ID NO: 447719 - DNA, 201 bp, Homo sapiens
gaaggggaatgaggaaggcggaaggctaaaagccttctcccaggacatcgcgtttgtatttgggaaggaaagtctctaggggactgtgccttactggctakaacttcaccacatggaccagcccttgcaaggaacaatgggaacttgagcattttacttgtcacctctggaggagaggaaacaaaagagtagaggcttcgg

SEQ ID NO: 447720 - DNA, 201 bp, Homo sapiens
ggtgttggccagagctgcagtctcatctgaggcccaactggggttggatctgtttctaagctcccttcagttgttggtggaattcagttatttgtagtcayaggagtgagagctttggtttctagctggctgttggctgaagaatgcacctcagcatctagaggccacctgcagatccttgactcattgaagtttcccagc

SEQ ID NO: 447721 - DNA, 201 bp, Homo sapiens
tggccggctcctgggcttccctcagtcctcagcacaggctttccttcctccgggagccttcctcggcatgggctcgctggcctaggcccctgtgcggtggyctccttcctgactctgtgcaatagattccttgctggcctcgtgtgtctcgctcagctgcagctccgtgcctattgtggagcctggcacacagtaggtctt

SEQ ID NO: 447722 - DNA, 201 bp, Homo sapiens
taaaggatgtgctatgtcagtttatcttcattcactttctcaacatctactgaccacccattatgtgaaactgtggcatcctggaatctgaatgggactargaagcaaggaattcagtcttgccaagggtactgagatgtgtatagaaggaagtaggttagagggagatggagggaaatactttgagaagcccacaaacag

SEQ ID NO: 447723 - DNA, 201 bp, Homo sapiens
cacctcagtctcccaagtagttgggaccacaggtgcgtgccaccttccctggctaattaaaaattttttttgtagagatggggtcttactgtgttgcccakgttggtcttggtctcctggggctcaagtgttctttccaccttggcctcccaaagtgttgggattacaggtgtgagccaccatgcccagccatgtttttat

SEQ ID NO: 447724 - DNA, 201 bp, Homo sapiens
ggaagcccttagagggtggctgggagttgtacatgaagaagaaagcactttacagccagaaacttgcggggtgagtttctccaaaactcacggggtgaggygtggagtgaggatgcccctggtcagtggtgctggcggcgtggtggggacttgcgggaaagggggttgggaggaactgcttgaggggccatcctgaaagga

SEQ ID NO: 447725 - DNA, 201 bp, Homo sapiens
cgggctcccaacatcagcacatctacttagatgctcagtcctgtcatatctgagatagttgcggggtagctttgaccatactgctgcagaaaaccaacccrctaaaaagaatccaggatttcccccttcgcccagggcttctttatctcagcagtgttctgtaactgttatgaaaccttgcctgtcatttgttaggtttat

SEQ ID NO: 447726 - DNA, 201 bp, Homo sapiens
ttgcggggtgagtttctccaaaactcacggggtgaggcgtggagtgaggatgcccctggtcagtggtgctggcggcgtggtggggacttgcgggaaagggrgttgggaggaactgcttgaggggccatcctgaaaggacttctgttttgccttatcatgcataacatttttgtttagccaattcatcatcctgatcacagt

SEQ ID NO: 447727 - DNA, 201 bp, Homo sapiens
tcacaggaagccaggacacactgcagggccaggccgcaggtgggacccgggctggagagtcctcagaaccagcctgccaggctttctgcaccagtgtgtaytgtcgctcaagtgctgtcacttgctctgtggcttcttgtccttcctttgtctttttctactcactggctcctctgctgcttcaaacccattcccctcacc

SEQ ID NO: 447728 - DNA, 201 bp, Homo sapiens
cattcattaaacatttgctaatcacctgtaatggcaggcgctacctatattctgggggtaaagtgtgtgttgcagtagttgctttgttctagctggacttrcttgaacttcctgtctggttcccattccaggcggctggtctgttctgtgggtgctgtacccactggggtcttgctcctcggtatcaaagcgccacccacg

SEQ ID NO: 447729 - DNA, 201 bp, Homo sapiens
gcctctagcacgtggcatagtttcccgaaatctgtctgagctcctggaagctcagctggatgttcagcttgtagtctcgaggtgcgctcgggaggagcgcytctcctcctgttgggcgaggactgacctgcagtaggatttggctctggcctttcctgtggctttctgtctcagccttagtagggagaagcagtttagaga

SEQ ID NO: 447730 - DNA, 201 bp, Homo sapiens
agatacttatttcgtgggagttgatatttatctctttttatttatttatttatttagagacagggtctcactttcttccctagactggagtgcagtggccrgatctcctctcactgcaacctctgcctcccaggcttaagcgattctcctgcctcagcctcacaagtagctggggttactggcacccgccactactgcccg

SEQ ID NO: 447731 - DNA, 201 bp, Homo sapiens
cgtgacattattgttgctgctttatagataaagaaatttgatgggttatgtaatttaccggagctcacacggctacgtaaggtggatctggaatccatagyggtccagaactgatcatggactttggttaatctcaaatatgtatgaattgattcccaaaactttgtgtgggaagagcagaaaccaagacagggattggcc

SEQ ID NO: 447732 - DNA, 201 bp, Homo sapiens
atttttacataattcttttcttaaaaataatcacggcaaggcagggcaaaattttagaaatcagtctcggagaaaagtggcttctacttcttggtattgtyatagagtggagtgtcttggggagcgggggaaaggattcagttcctctgatctctgcttcagttttcacatcaagtcccacttgcatatctcggcgtggac

SEQ ID NO: 447733 - DNA, 201 bp, Homo sapiens
ttaggcctctagcacgtggcatagtttcccgaaatctgtctgagctcctggaagctcagctggatgttcagcttgtagtctcgaggtgcgctcgggaggascgcctctcctcctgttgggcgaggactgacctgcagtaggatttggctctggcctttcctgtggctttctgtctcagccttagtagggagaagcagttta

SEQ ID NO: 447734 - DNA, 201 bp, Homo sapiens
catgccgatgtaggtcccatccctcaagtcttctctgcattgctgtgtggtgctgctgtgtaacttttcagcagcacgcaaaggagggtgctgcgagaatrgatgttgtcttttagagttttatgactggtgttcagggtaagaggcgggcctttcatgcatgtatctcgctgagtgctcttgccacgtgtcggtccccag

SEQ ID NO: 447735 - DNA, 201 bp, Homo sapiens
cctgttagccacccgtgtctgctcggggtgcctctgagttcagaggcctgaatccagcagctcctctcgcttgctgtgtggttcctgggccaatttattaycctgtttggaccttgagtgtttgccttgcagtgacgggggttatcatacctatctcaggaggtccttatgcagagtaatgagataacctgtgtggaagtg

SEQ ID NO: 447736 - DNA, 201 bp, Homo sapiens
aatactgtgccattttataccagaattcgagaatcaaggatttcggtgtctgtggggttcctggagccaattccccatggctgcactttttattgcttcarttagcacactctgttgtcatttattacctgcagttttactttgcttacattgtgggcttccttcagtcaggaagtgtcctgctttattcttctctctcct

SEQ ID NO: 447737 - DNA, 201 bp, Homo sapiens
ctgatcagagacttcgaggcagctcttacataaatgagccagaagttccgcagatgagcaggcctgactttccgatcgagtgggaagcgtgggtgcagctkcacaggctttgattgtgtcagggactctaatgtggacatgtagagggtcttttgagttgagggccaattaaaggttgggaggtgaaaactgtatgtgcac

SEQ ID NO: 447738 - DNA, 201 bp, Homo sapiens
gggactctaatgtggacatgtagagggtcttttgagttgagggccaattaaaggttgggaggtgaaaactgtatgtgcaccagtcatcaagttggcagtgragaattcggtggatcagttctactcacatgggcttgcggagactccctggacttgaacttatcccccaaaacttgaggaacctgcctctttgtgacttgg

SEQ ID NO: 447739 - DNA, 201 bp, Homo sapiens
tttcattctcaaaggcccaccttctgtgtgctgcctgcttctggacactttcctgatggtcctgctggaaataccgtccctgccgctatgagtttgagagygggcttcagcctccccatgatgcagcacatgctgcctgggatggcgctgcttgtgtcaatctccctgaaatgaagcaccctctgtccaggggactatgtt

SEQ ID NO: 447740 - DNA, 201 bp, Homo sapiens
aggacaaagtatcttgccttgttcttaacagcgagtcgcaaatcctgctgtcagtgtctttcctttctgctttacctccattttgaaggaaagttctatgytgtcctcatacacacattgggactcttttaatgaatgaatgactctcatccctgagaaatgtgagcatatgcactcaggtttgtatcttagggagacctg

SEQ ID NO: 447741 - DNA, 201 bp, Homo sapiens
cgccttccctttgcttgtgaggcatcactttcattatataatttttataaaatccaaacatgtacctagaggcattttggaatcacatttgtttcagaatyggaaaggaaaagtaaagtattttgggtagttataaattacctctgttttggtttttggaaactccatttatattgcactgtttttcagtaagtaaaaagg

SEQ ID NO: 447742 - DNA, 201 bp, Homo sapiens
tggatttagagatgcatgccaataaattattcagatatcttcattgatatgctcaaaaacacgtatttctgttgctcaggaatcagctggtggtatacacygtctctctctcccaggtgggagggtggagtgatggaaagaacacaggagttgggctgcccaggttcaagacctgatcctgtttcttcttagctgggtaac

SEQ ID NO: 447743 - DNA, 201 bp, Homo sapiens
ccttcatctgtaaaaagaatagtcgtgtgtatctcagagggtcattgtgaagaccagctgagatagcgtcatggctaaggagagtgctttgtagtcatgamggtatcattagtaatatggtatcaactattcttcattgctactcattagattctaggcactattctaatatttcacatcaggacttttcaacagcagcac

SEQ ID NO: 447744 - DNA, 201 bp, Homo sapiens
ttgtcttgaacttctggctcaagcaatctgcctgcttcgggcctcccaaagtgctggggttacaggcgtgagccactgcacccacccatttttttttttttgagacagggtcttgctctgttgcccagtctggagtgcagtagcatgatcacagctcactgtaacctcaaaatccttcactcaaccaatcctcccaccctc

SEQ ID NO: 447745 - DNA, 201 bp, Homo sapiens
cccgagtaatagtggcttcagtaaagctcacaggtctccgtcacattaaaatcgagaggcagacaggccaaagctgatgtgacctaccagtgccaggcacytgcactgtacctctgccgttgccctggggcacagcctggagtcaggacagctgctcccacactgcggggagcatggaggaaaggaggaaggcactccctc

SEQ ID NO: 447746 - DNA, 201 bp, Homo sapiens
ccatgttgcccaggcttgtcttgaacttctggctcaagcaatctgcctgcttcgggcctcccaaagtgctggggttacaggcgtgagccactgcacccacmcatttttttttttttgagacagggtcttgctctgttgcccagtctggagtgcagtagcatgatcacagctcactgtaacctcaaaatccttcactcaacc

SEQ ID NO: 447747 - DNA, 201 bp, Homo sapiens
caggtgtgcaacaccatgcccagctattttttttgtattttttgtagagatggggttttaccatgttgcccaggcttgtcttgaacttctggctcaagcartctgcctgcttcgggcctcccaaagtgctggggttacaggcgtgagccactgcacccacccatttttttttttttgagacagggtcttgctctgttgccc

SEQ ID NO: 447748 - DNA, 201 bp, Homo sapiens
atgatgaaagcattgttgggctgatacttgagaacctttttggtggtgcctttttcaaccttcccccctccccgtgacttctcatccatgctctttctttktctctcctcccatctgggtcttagcctcctgtggcattgattttcctgcctgtaatctacaggctatgggtcttgatggctctggtccactagttcatga

SEQ ID NO: 447749 - DNA, 201 bp, Homo sapiens
ttagccattgctgaaattattgccacactggttcttggtgtatctaagccctttttgtgcttctctctaggagagaaaggcaaacctttctcaagcggcayccatctctgctgtcttccttcttttttttgctttatcttatgtgtatgtctgggtttccagttttgtgccttgtatacagtcttgtgtggtagcagctca

SEQ ID NO: 447750 - DNA, 201 bp, Homo sapiens
tcgagtcactgttcatcgtgctggagtccaagcgtctggacagagccacagacaagtctggggataagatcccccttctctgtgtcccgtttgagaaaaargactttgtaggactggacacagacagcaggtaagcttacctagagacccaggccccttggcttccctgcatcagaaagggaaagcacagggcagaatttc

SEQ ID NO: 447751 - DNA, 201 bp, Homo sapiens
gcttctcggccaaggactggccacagaccttcgagaagttccacgtgcagaaggagatctacggctccacactgtatgactcccggctctttgtcttcggrctgcagggggagatcgtggagcagccgcgcaccgacgtggctttctaccccaattacgaggactgccagacggtggagaagagaatcgaggacttcatcg

SEQ ID NO: 447752 - DNA, 201 bp, Homo sapiens
gcaaaaattttctcccattctgtaggttgcctgttgactctgaagatagtttcttttcctgtgtagaagctctttagtttaattagatcccatttctcaaktttggcttttgttgccactgctgttttagttatgaagtctttgcccatgcctgtgtcctgaatggtattgtctaggttttcttctaagatttttatgatt

SEQ ID NO: 447753 - DNA, 201 bp, Homo sapiens
ctgggacatcacaggaaagatggtgcccaccgggggtgtaagatggtgcccgctgggggtgtgagtcggtccccgccgggggtgtgagtcggtacccgccrgggttgtgagtcggccaatgctgatgacttgactagttgggattatcttcagactcttcctaagcgaagccgcttgcctcctggtggatcaaactagaga

SEQ ID NO: 447754 - DNA, 201 bp, Homo sapiens
atgacaccgtatttgttaatggagaataatactcttcacaaaccctcaagcctcttttgtaagaagggagtttggctaggtaaatgtggagaggcagagtkacttatctgattgctgttggtcccgataaccgggtgctggatttgacttggctgggccctgcttggtcttgggagttcgttggtcacagagcctgagttc

SEQ ID NO: 447755 - DNA, 201 bp, Homo sapiens
gactctgggacatcacaggaaagatggtgcccaccgggggtgtaagatggtgcccgctgggggtgtgagtcggtccccgccgggggtgtgagtcggtaccygccggggttgtgagtcggccaatgctgatgacttgactagttgggattatcttcagactcttcctaagcgaagccgcttgcctcctggtggatcaaacta

SEQ ID NO: 447756 - DNA, 201 bp, Homo sapiens
acagcacctggtagagttttatagctgattataaaaccaccttctaaagaccaaaacagacaacaattgtctgtggatgacaaaaggttttagggcagccwtagtcaaagatacaatccataaggaaatttgttacctctgtggcacacaataatttaacataacaattataattattactgataatgtacactaagtcat

SEQ ID NO: 447757 - DNA, 201 bp, Homo sapiens
acaacaaaccccaaaaccaagctgacgtgttacttatgatttttgttcttattttgtagatggaatcagtgtgagtggctttcccctgtccagtccttttyggcaggtcgttcggccccgagtggagggcaaacctgtgaacccacccgagagcaacaaagcaggcgactacagccacgtgaaggtgagttggtatggcag

SEQ ID NO: 447758 - DNA, 201 bp, Homo sapiens
ctcttctttgtctttgtagcccccaggtgaccttgtgtgttgaatgagtaaatagttggatcccttagaatattttgtaatagcagctgatagaaaccagrctaacttaggcaaaaataatttatggcacatatacctggaaagttcagggaggaattcaggtagggctggagtcagggctcaaacaacctcatcaaaact

SEQ ID NO: 447759 - DNA, 201 bp, Homo sapiens
tgtctttacctcaagattaccagatggctgctgcagctccagataacacatctacatccaaggcagaaagaagggagacagggcaggtctagagatgtctrtcttttgcttaatagggaagcaaaaatgttcttgacagattcgagtaggcttctgccccagtctcattaacaggaagtgtgtctcatggccatctctaat

SEQ ID NO: 447760 - DNA, 201 bp, Homo sapiens
attgtatgtctgtatctactctccagttgatgtgcacttagttaaaagcagttctttacttttataaacgatgttgcattgaacacttttgaatgtgcccytttaccaaactctgagttgatccaagataggcagctacaaatggaattgttcggtcaaactctttttctgtctgaaggagttgtaccaatttgtatccct

SEQ ID NO: 447761 - DNA, 201 bp, Homo sapiens
ggcctgccctgtctccagctttgattgtgagcgccctatttccttggtcctacgctcctgctttcccttgtgggaatacttagagtgggccaaatgtgtgsccggttttgttccttcgttgaggctttatctctggcttggaatgcctgtgcttccctgctctgcctgatgacacttagtcatctttcacgattttagttc

SEQ ID NO: 447762 - DNA, 201 bp, Homo sapiens
tcttggttctggaatgttcttgtcactttgatcttacacattttaaaagctcttctttttccttggcttttgagaatgcatcagaattttctaggggattkgtaagtcccatactgcctcagttacagcatcctcatcactgtcattgttattattacagaaaaattgtatggcgacttcttgagctggaagctagaggaa

SEQ ID NO: 447763 - DNA, 201 bp, Homo sapiens
gtaccaatttgtatccctaccagcagtgacaggaattcccgtatttcctgttgatctatagcttgaccaactcttggtactgggacgctttaaaaatattwccaataggttgggtgagaaataatactcttggggtttatttccatttctctaactactagttggattgagcttctgttcctgtttattggtcattgggtt

SEQ ID NO: 447764 - DNA, 201 bp, Homo sapiens
aagtgattctcctgcctcagcctcctgagtagctgggactacaggcgcgtgccaccacgcccggctaattttttgtatttttagtagagatggggtttcaycgtgttagccaggatggtctcgatctcctgaccttgtgatccgcccgcctcggtctcccaaagtgctgggattacaggcgtgagccactgcaccctgcta

SEQ ID NO: 447765 - DNA, 201 bp, Homo sapiens
ctgactacagattcccaaaatagctgggctcctccatgctgccaggactttgttcccttgtgtcttctaagccaggcaaacgtgtctgtccccttcagagrctcgccttggtctcagctcttccaggaagctttcttggatttccccatacttcagacagatgtgtccagaaaaaaaaaaaaaacaaacccaaaaagcaaa

SEQ ID NO: 447766 - DNA, 201 bp, Homo sapiens
ttttttggactagaataccaagctcttgttttccataagccatataaatagtaccaaaatcagaaaaatattaagcattttcttcttttttttttttttttgacagaggctcgctctgtcgaccaggttggagtgcagtggtgcaatcttagctcactgcaagctccgcctcccaggttcacaccattctcctgcctcagc

SEQ ID NO: 447767 - DNA, 201 bp, Homo sapiens
gggtctgtgtccgtggcctgtctagactgtgccatggacaggaagcggacatgattatcacctgtgtcctcttttcctccctccttgtgaaagggatggggcaggatggtgaacaacagtcttttctcacaaagctctatatttgcatcaaaaatgttgatttgtaattatttgcctaagtgtctgtcatacagataaatt

SEQ ID NO: 447768 - DNA, 201 bp, Homo sapiens
ttaatttcccttggtctcaggtttttcatctgcaaagtggggacaggagtgcctgccttcctgagccagcctgagtcctagagcacagcaggtgctcctgwgctctgtcatgctgtgggtgagaaggggtctgtgtccgtggcctgtctagactgtgccatggacaggaagcggacatgattatcacctgtgtcctctttt

SEQ ID NO: 447769 - DNA, 201 bp, Homo sapiens
ttcccaaggccacttggttggtaaaaggcatggctgagctgtgaacacatgtccccaggaccccgggcccaaggaggacctgatgaggacctgatgcctayacccactccttagagttcacactcgtgttcagaaccagtctccgtaatcctctgagcccaggagcacttggcatttcgatatactttgcccttcttaagt

SEQ ID NO: 447770 - DNA, 201 bp, Homo sapiens
ccttgcaaaggaaaaaccttctaaagagaaggctgtgcggtgagcagcagccatgggcccaagcctcgcccttctcaccagccacgtggcgcctgctgccrggacgcatccacgggtaaggggttaatgaacgagaagccaggcctgtggggcaggagaccaggagggcacgctgcggctgctcgattgagggccgtgagg

SEQ ID NO: 447771 - DNA, 201 bp, Homo sapiens
ccaagcatggatatcaggatgccagaaataccacctgggagctcctaaacagctaccttatacaaatgaaaagtatgtctgttctctctgtgtacaaggaktgttggatagagcaggaaaaggtcagcttcccatcttgcctgttattaagtcaaaaactttatttcaaatcaaaattgcagatgagctcttccttgccac

SEQ ID NO: 447772 - DNA, 201 bp, Homo sapiens
ggaggcaggtggagctcagtgactccggggtgatgctgtccttccatggcggagcccctcagtggcccctgacccactctccactcaccctccctccataytaagaggctgtgcttccaagcccagcccggttctagggacacacacttacacatggaattctagagggaataatatttttatttttaattgctgaagact

SEQ ID NO: 447773 - DNA, 201 bp, Homo sapiens
ccagccacgtggcgcctgctgccgggacgcatccacgggtaaggggttaatgaacgagaagccaggcctgtggggcaggagaccaggagggcacgctgcgrctgctcgattgagggccgtgaggacgatccatgggtctggctgcctggagcagcactgaatcgcagactcatcctgctcctttgccactagttcatcctc

SEQ ID NO: 447774 - DNA, 201 bp, Homo sapiens
cctcctgatggccacagtgtcgaattcctcacttacagagcagccaagcatggatatcaggatgccagaaataccacctgggagctcctaaacagctaccktatacaaatgaaaagtatgtctgttctctctgtgtacaaggagtgttggatagagcaggaaaaggtcagcttcccatcttgcctgttattaagtcaaaaa

SEQ ID NO: 447775 - DNA, 201 bp, Homo sapiens
ggaacagggtttgatcaggaaagggcataaggtaattttctaggtgatggtcatgttgtatacatcagtagggttttgggttacacacatgtatctattcrtcaaaactcggcaactaatcacttgagatttgtacatttcatgatgtatcagctttatagcagaaggaaaaactaagccagtgttgagctctgttaatga

SEQ ID NO: 447776 - DNA, 201 bp, Homo sapiens
cacattagaccccaggaagcctgccttgctgacctgggcaccagctttccgaggcccctcaactagtgctgagcagagctgggcccagaggcagctcttcrggcctcatggtgagctgtttgcctctccccacccggtgctgctgccaaggtgctgggaacggtgttcagggaggcctggtgctcccctcctctctaggcc

SEQ ID NO: 447777 - DNA, 201 bp, Homo sapiens
gtcctcacatggtgggaggggcaaagggtttttctcaagcttcatttaaaagaacactgatcctagtcatgtggattccatcttcatgagctgatcacctscctgaagccctgccctttaatataatcaccatggagggtaggatttcagcatgtagattttgtggggcataaacattcatttacagcacgacgtgacgag

SEQ ID NO: 447778 - DNA, 201 bp, Homo sapiens
cttccctggtagagctcaggagagctgagaagacagcctgaggaagggtggagaagtgggccggtcacacccatttggaggaagctgtcagggccaggcgwggagcttgcagctctagaaccttctagcagctgtctgcaaagcaccgttctggcccagcctcacacactcggtgtttttaaccttcccgaaacccatgta

SEQ ID NO: 447779 - DNA, 201 bp, Homo sapiens
aagtactttttcaccttcctaatctctcctttaaaaggtcctttggaaattagtgactcattcctcagcttgtgagtttctgtggcatgtgtgatacatcrgttctgtaattaaggaccattagttaactttgcttttgccagatgtgatttgtgatgcttggtgcctggtgagtctgtttcctgggccccaggccattgg

SEQ ID NO: 447780 - DNA, 201 bp, Homo sapiens
gtcaggttcccaaagacctgccaggaagccatgggtggagagaggctgctgctttattgtttcaatgcaggaatgtatttcttatccctaattgtcaattkcatatcattacagacattctcctattcatatttcaatggttgtggcattttcagtattaagccagacacccaaaagatttttctggctgagttgatctcc

SEQ ID NO: 447781 - DNA, 201 bp, Homo sapiens
ttcaatctagtttatcttttcaagcgtcactcagagaagtttttaattttgatgaagtccaattatcagtttggagtcatgtcttctatgtcttttctagraaattttttcctttaatgtttacttctacacattttttttgagacagagtcttgctctgtcacccaggctggagtgcagtggcacgatctcggctcactg

SEQ ID NO: 447782 - DNA, 201 bp, Homo sapiens
tgaaaccaagtttgctcttggatccatctcggaggagcccctgggtccgtccagggtttttttgcagtgtgtgcggctggtgctgtgtgtcacagcatgcraagaacccacacggagatgatcaggctcctgaactgaacctcaagaacccagtgaacaagacctacatgaggctcctacaggatcccttctggccctgat

SEQ ID NO: 447783 - DNA, 201 bp, Homo sapiens
tgttcctccctgtaaggtcaatgcttctgagcaccaaagccctgcctttgggccagcaccccgccctcagccgcacatcaacacctctgcggcctcttctrtctccttttgaattgtattattgctcttaggtgctcttgtaatgctggacaaattctctgtgaataagggaaaaaattgaagcataaatcatccggagag

SEQ ID NO: 447784 - DNA, 201 bp, Homo sapiens
ttgttcatacttctctatccatgtgtatttttgaagtctgtagaggtggggttgtgatgtatagtccaggggctctgcatatgcagaatgggatagcccccgacacacagtcctcctcctctccgtgcaggtgagaagcttgccattagaatttcacagaggtcttatagcaatgtcactttaatcttagtgtcacctggg

SEQ ID NO: 447785 - DNA, 201 bp, Homo sapiens
ccactttcataggcagttctacagggagtgggctttgcactcatttttccctatgagtaaaagaggtcgagacccaccaggggcatgcagtcagttggagstggaactgggctgctgagcaccagccacctgttctccaccgcccgcctttctgtgggagttgcccatggttccctaggctgcgttcccagaatcggcctt

SEQ ID NO: 447786 - DNA, 201 bp, Homo sapiens
accttagctatagcccatgcccctggaaggcaaagctcttccaagggttcaaattctaggccctgattccaacacctttactcttggtttgtgtcttttgkgggtgcagaaaatacactaatttatataggagtctctggttaaaaatatctatttaactcattaacatttttctttaatgatgagttttctgtaaaggtt

SEQ ID NO: 447787 - DNA, 201 bp, Homo sapiens
ctttttttaaaatttaattttgttcatacttctctatccatgtgtatttttgaagtctgtagaggtggggttgtgatgtatagtccaggggctctgcatatgcagaatgggatagcccccgacacacagtcctcctcctctccgtgcaggtgagaagcttgccattagaatttcacagaggtcttatagcaatgtcacttt

SEQ ID NO: 447788 - DNA, 201 bp, Homo sapiens
tcatgacaaccctcatgtatgcataaacctctttataatgtatgataatagatgttatctcattacatgctttaagatgcccggctctgtccccctcgctygctgcagggacaccgcatttagagggtgcagcggacctggcaccgaagcacccaaacgctgcggctgctggggagatggaccgccggcaggatctgagcg

SEQ ID NO: 447789 - DNA, 201 bp, Homo sapiens
ttcaggagggaacagggtgaatgtgtgtgccaggtctgcctgtctgagcagaatctccccccacctgtatgtttccagttacccagtgatttagcatcagrcagatgtgcagagatgccagatgtgcctctagcacctctgctttcagcgcacacaggagtcagggaagagggtctggggtggcgggaggaaggggggtca

SEQ ID NO: 447790 - DNA, 201 bp, Homo sapiens
tctcattacatgctttaagatgcccggctctgtccccctcgctcgctgcagggacaccgcatttagagggtgcagcggacctggcaccgaagcacccaaaygctgcggctgctggggagatggaccgccggcaggatctgagcggccagctctggctgtgtcttgatagagcatccacgtggatcatggcatggctctgct

SEQ ID NO: 447791 - DNA, 201 bp, Homo sapiens
ttgtcagatgcaagtcagagaacacaaaggggtttggagtcaggcacatccactcctaggcaaagagcattgaaaacatacatccacacaaaacttgtacrtgcctgtttgtggcagcatttgtcataaaagcaaaacgtgaaaatagccagctcaagtgtttttgtttacctatccatcagctgatggataaaatgtggt

SEQ ID NO: 447792 - DNA, 201 bp, Homo sapiens
tgtgcctacttttgagaaacattagcgctccagtctcccccgctcagtattttgatatgtcctccgaggggttttatgcctctttgttggaaggtgatgtsattttggttctttcgaaggtggtttttgtgtgcagaaaagactctttagggaatcgttgtggggaaagggcaggagagagtggggcgtcgtccttgagag

SEQ ID NO: 447793 - DNA, 201 bp, Homo sapiens
tttttcaatctgaaaggaaatgaggagagtccctcagaaacataatttctagaaacaaggggaaagcatcctgatgtgccctcatcccttcagctgatgcrgggagatggagacccgaggtcagttagtgagcccgtggcagaggcctgatagagcctgggctctggactccctggccagagctgtctctgcaacccccac

SEQ ID NO: 447794 - DNA, 201 bp, Homo sapiens
cctttcttacctgcggtgggccgcactctcctcctctgtagaatgaaggcttcggtgtttctcagcttctgttaaacctgtgcctacttttgagaaacatkagcgctccagtctcccccgctcagtattttgatatgtcctccgaggggttttatgcctctttgttggaaggtgatgtcattttggttctttcgaaggtgg

SEQ ID NO: 447795 - DNA, 201 bp, Homo sapiens
ctagcgcgtggaaggtggggggcgtgtggctcctcccacgcccaccctgtctgcagacctgtccccagctgtccacttgctgggctgagatgaacacgcaygggctggagccacgcggagccctctgcagcctcaactccgccccgagctggcttcgcgtgcctgggcagggcctcaccgtgcgccgagtgctcttcataa

SEQ ID NO: 447796 - DNA, 201 bp, Homo sapiens
aactccaacttatcccagggaaccctggggagaggaagtcaggctactggcctgtggtcttctccctgtcagcccaccccaatcccctccacccctgcgaaccttcccaacgtgaatgtctgttaaccgaaagttttcccgtgttaggatgcgttgtctgtcttcaaatgtttctatagagagaggaattaaaacgctgga

SEQ ID NO: 447797 - DNA, 201 bp, Homo sapiens
gctgggctgagatgaacacgcacgggctggagccacgcggagccctctgcagcctcaactccgccccgagctggcttcgcgtgcctgggcagggcctcacygtgcgccgagtgctcttcataaagtaggaatcgaatccatgcccggcaggttgatctaaagagcagcgttagaggccatgcccgatgcatggccagtggc

SEQ ID NO: 447798 - DNA, 201 bp, Homo sapiens
tagaggccatgcccgatgcatggccagtggccagccgttggtgatggtgctgttacctcctggtgcccctttgttacagtgataatttcaaagctgtcccyctccagatcgcacggctggagcacgtcatggctcgtgtgcagggcaggcattccgggacttttgtttccttcttgtggaggtgaccggacccaatttctg

SEQ ID NO: 447799 - DNA, 201 bp, Homo sapiens
ccgttggtgatggtgctgttacctcctggtgcccctttgttacagtgataatttcaaagctgtccccctccagatcgcacggctggagcacgtcatggctygtgtgcagggcaggcattccgggacttttgtttccttcttgtggaggtgaccggacccaatttctgctcaagtagttggttgttatttggggccccattt

SEQ ID NO: 447800 - DNA, 201 bp, Homo sapiens
ttggttgttatttggggccccatttgcctggattctcagtggcattgagagtggaggcagagaaagttctcctggcattggtcaggagtgaggagccaccygcttagtgaacagagaagattcgctatggagaactgtgtccgaggtgtaacattggtagctgggcccgtttaggcagaggacaacactgaggtgtgccag

SEQ ID NO: 447801 - DNA, 201 bp, Homo sapiens
ctgggcgtggtggcacgcgcctatagtcccagctactcgggaggcggaggcagcagaatttcttgaaccaggaggcagaagttgcagtgagcagaggttgyacaactgcactccagcctggcaacagagcgagactccatctcaaaaaaaaataaaataaaataaaaaaagaaatgagaggaaacggcagaagaaattccc

SEQ ID NO: 447802 - DNA, 201 bp, Homo sapiens
tgggcgtggtggcacgcgcctatagtcccagctactcgggaggcggaggcagcagaatttcttgaaccaggaggcagaagttgcagtgagcagaggttgcrcaactgcactccagcctggcaacagagcgagactccatctcaaaaaaaaataaaataaaataaaaaaagaaatgagaggaaacggcagaagaaattcccc

SEQ ID NO: 447803 - DNA, 201 bp, Homo sapiens
attcagacaggcaagtagtgcttcgctgatctgtgtccaaggctctttggagaatggaatgataaaaacacgtggacacaaagtttcatctttcccctttcccagggaggtgaccatttcacccttggtctacctgggaggccccaggctctcggtgaagacccctgcttttgtagggaatggagtgatgcagcactggag

SEQ ID NO: 447804 - DNA, 201 bp, Homo sapiens
atggagaccgtaggaggagccaagactgagagatgggacttatgcgaggcgtgtttaaagggacaggtttagagcgggtggggagggtgtgcagactgtgccccccccggattcacagtcccggtcgcagtggctacttgtcggctctggcctcggcaaaaccgttggtgctgcttgaaggcacagagcattatcattgag

SEQ ID NO: 447805 - DNA, 201 bp, Homo sapiens
tggaggatatcttactcatcttgatcctgccatatcaggaatgcttcttggtgtgtggtaggacttcattaagtgatttttgggaaggtggatgggggctgagtatatgggaagatgagttgatagctagatgggtcaatggtcagatgggtcagtgtataattgggtgaagggatgaagactggattagtagacaattgg

SEQ ID NO: 447806 - DNA, 201 bp, Homo sapiens
ctttcaaatggagcaatctcttaaaaaatatcttctgtgttggaaccatgctttaaaagacctgcttcatttggattacatttttaaaacattctcccatrttttctcctggtacgttcatggtctcatttgctttaatattcaaaccttttatttatctggaatatactaaggtgagtgcggcatgggtcctccctttgt

SEQ ID NO: 447807 - DNA, 201 bp, Homo sapiens
gtagtgtggtttcctagattagctcctggggaccagagatgccaaatagatcataaaagagaatgctaggaggaaagcagccacccttgcagagtagaggrtattctgtcctcacgccagttcaggacaagccaatacaaactgaggacctctgtgtaccaggtacagtgtgaccctcagcagacaggcgtcatgtgggca

SEQ ID NO: 447808 - DNA, 201 bp, Homo sapiens
taattttttgtatttttagtagagatggggtttcactgtgttagccaggatggtcttgatctcctgacctcatgatccacccatctcggcttcccaaagtrttgggattacagatgtgagccactgcgcccggcctggatggtagatttcttggtgtgagctctccttggattaatcatacttggtgctggtggatgattc

SEQ ID NO: 447809 - DNA, 201 bp, Homo sapiens
tgttagccaggatggtcttgatctcctgacctcatgatccacccatctcggcttcccaaagtattgggattacagatgtgagccactgcgcccggcctggmtggtagatttcttggtgtgagctctccttggattaatcatacttggtgctggtggatgattctttcgatgcactgctgggtttgatttgctaatgcttca

SEQ ID NO: 447810 - DNA, 201 bp, Homo sapiens
ttgatctcctgacctcatgatccacccatctcggcttcccaaagtattgggattacagatgtgagccactgcgcccggcctggatggtagatttcttggtrtgagctctccttggattaatcatacttggtgctggtggatgattctttcgatgcactgctgggtttgatttgctaatgcttcatttagaatttttgccct

SEQ ID NO: 447811 - DNA, 201 bp, Homo sapiens
ctgtggtccgaaggcctcccgccagcacccatgggcagagcgggaatgtggtctgtggagtctcagccccacaccccagctggcagagaggagtcagggcrtcacttgcccatcggccacggctcttctttccctcaagccccgctttaggccagctctgtcctgggtccccctggcagtgctgtgaggggcactgtcctg

SEQ ID NO: 447812 - DNA, 201 bp, Homo sapiens
agatggtcccatctggggatgatgggagacagtgacagatcataaggcattagattctcataaggagcacgcagcctagatccatcacatgtgcagttcayaatagggtttgtgcttctgtgagaatttaatgccactgctgatctgacaggaggtagagctcaggcaggaatacaaacgatgtggggtggctgcaaatac

SEQ ID NO: 447813 - DNA, 201 bp, Homo sapiens
gcctcccgccagcacccatgggcagagcgggaatgtggtctgtggagtctcagccccacaccccagctggcagagaggagtcagggcgtcacttgcccatsggccacggctcttctttccctcaagccccgctttaggccagctctgtcctgggtccccctggcagtgctgtgaggggcactgtcctgtcctcgacgctgt

SEQ ID NO: 447814 - DNA, 201 bp, Homo sapiens
atcacatgtgcagttcataatagggtttgtgcttctgtgagaatttaatgccactgctgatctgacaggaggtagagctcaggcaggaatacaaacgatgyggggtggctgcaaatacagatgaagcttcacccgccgctcacctcctgctctccagcctggttcctaacgggacatagaccggtaccagtctgtggccag

SEQ ID NO: 447815 - DNA, 201 bp, Homo sapiens
tctttccctcaagccccgctttaggccagctctgtcctgggtccccctggcagtgctgtgaggggcactgtcctgtcctcgacgctgtgggtctcttggtyccccagccttgctgtgaggggcgctgtcctgtcctcctcgacactgtgggtctcttggatggggtttgttgttttccacctcagattctccctcttgctg

SEQ ID NO: 447816 - DNA, 201 bp, Homo sapiens
gggtccccctggcagtgctgtgaggggcactgtcctgtcctcgacgctgtgggtctcttggttccccagccttgctgtgaggggcgctgtcctgtcctccycgacactgtgggtctcttggatggggtttgttgttttccacctcagattctccctcttgctgtactagaggttcgtagactttgctgtgtgttgtcatca

SEQ ID NO: 447817 - DNA, 201 bp, Homo sapiens
tgagtgggaagctccgtggcagcgtctggccagagcccaggacccctccttcctggggcaggtggtcccaccggagccttcactcccaggctctcaccacytacacggttcttaagccaagcctggcccagcaggagatttttcagagggacagggtggtggtcaaccttcaggtcaccaggaagagacaccaagtcctga

SEQ ID NO: 447818 - DNA, 201 bp, Homo sapiens
ggttaattctcttgtggtgcttgcattcctgtcagacctgaccctcacggctccgcacctggcctgctgtcaaccacggcgccccagttggtctgcgggcragaactcttcactcccctcctggggatgggagcccggccaccgagtcccacacacacatctctcctgtgaagcccacccagatgtctctgcccgtctatg

SEQ ID NO: 447819 - DNA, 201 bp, Homo sapiens
gagtgctctggacggagcagagacgcgttgcgatcccagctccactggttctctgggacctcggcctgccttcagcccctcatctgtccagcggggagtgrgaatcccagccacacccgcctcaggcctgggcaacttccgtgaaggtgcccgagtgaaagggcattgcagagggtagcctggcacagacacagccatcgc

SEQ ID NO: 447820 - DNA, 201 bp, Homo sapiens
gtaaagctactccttgtctctttgttgttactaagtatcttgcgggaaggtgctttgaaactgtgtggatatccgattcctcatcatggatatccgattcytcatcagacctttaaatgtgcttatttatatttgtatggattcatcattttcaattttattcattgggttaaaattcattgctattattagttatttcga

SEQ ID NO: 447821 - DNA, 201 bp, Homo sapiens
gtcaccttttccaggaactttctggggcaccctcaccgacccctgggctgggctgtgaggtctgtcttctgtgagccacattcctgtctgcagccctctgcccccacgctgtcacctctgccccggcaccgtcacctcacccccggtgccgtcacctctgccctggcgctgtcaccatgtggtttttgtctgctacctgcc

SEQ ID NO: 447822 - DNA, 201 bp, Homo sapiens
ccagcatgaggacccctctccaggggagggggcttagtgagttcatgcatgaaacatgctgtgagtgttgccacttgaggacctggccctgagctccagcytgctgctcccaaccatggtggctggtggggagctttccttggttgaattttatactcctcccatacaggggtcctcatgggattcagtaatgtgtctgaa

SEQ ID NO: 447823 - DNA, 201 bp, Homo sapiens
caaggcttggctctagtcatcgacccccttgttttccctgtgatcctgagccacccacctgccctaccgacaccacgggagaagttgactggcgagaaccrtgttgtgtgagcgcgctggccttgccactgctcaccttggctgtatcttgttcacgttacacatcaactcccggctggcgcagccccactgccccacact

SEQ ID NO: 447824 - DNA, 201 bp, Homo sapiens
attggtttgcatcagaattcaagaaatggctatgtctcaatccatgtttaatgtgcaggttgactgttcacctcttttcctcttggacattttgcatttcrttaaaaaggtcccagggtggggttctgccggttgtgtgcctgtggtcctcttaaacttgttcctcagccgggcgccgtggctcacacctgtcatcccagc

SEQ ID NO: 447825 - DNA, 201 bp, Homo sapiens
catcagaattcaagaaatggctatgtctcaatccatgtttaatgtgcaggttgactgttcacctcttttcctcttggacattttgcatttcgttaaaaagrtcccagggtggggttctgccggttgtgtgcctgtggtcctcttaaacttgttcctcagccgggcgccgtggctcacacctgtcatcccagcactttggga

SEQ ID NO: 447826 - DNA, 201 bp, Homo sapiens
ctatgtctcaatccatgtttaatgtgcaggttgactgttcacctcttttcctcttggacattttgcatttcgttaaaaaggtcccagggtggggttctgcyggttgtgtgcctgtggtcctcttaaacttgttcctcagccgggcgccgtggctcacacctgtcatcccagcactttgggaggccaaggtgggaggatccc

SEQ ID NO: 447827 - DNA, 201 bp, Homo sapiens
tttttcggtcttctttctctttttttagtcctcattaaattaggagtaggaggctgggtgcggtggctcacacccataatcccagcactttaggaggccgyggtgggtggatcacctaaggtcaggagtttgagaccagcctgcccaacatggtgaaaccccgtttctactaaagatacaaaaattagccgggcgtggtgg

SEQ ID NO: 447828 - DNA, 201 bp, Homo sapiens
gggtgcggctgatctaggtctgctgatgggaggcagagcaggcagccccagggatggcctgtggaggtgccctcggcagagctacagcccctggggaacarggcggagagggagaggcagccggaggctgccgggcggagtggaagaccacggaaacctgggcccagcctccacatgagctggtcttctgtgagcctcgcg

SEQ ID NO: 447829 - DNA, 201 bp, Homo sapiens
ggctgccgggcggagtggaagaccacggaaacctgggcccagcctccacatgagctggtcttctgtgagcctcgcgtccacgtctgtaaaatggagccctktaggagctgagaaggagcatgaacagcacacacagcaggagccggcacggtgggcagcctggggtgtgcctcacctcccttgtctacagggatgctttag

SEQ ID NO: 447830 - DNA, 201 bp, Homo sapiens
atgagctggtcttctgtgagcctcgcgtccacgtctgtaaaatggagccctgtaggagctgagaaggagcatgaacagcacacacagcaggagccggcacrgtgggcagcctggggtgtgcctcacctcccttgtctacagggatgctttagtgggcccagggccctgggccccagctggctgaatgtcatggagaaaaca

SEQ ID NO: 447831 - DNA, 201 bp, Homo sapiens
gtgatttttatttccgttactattccctcttctcttagcagtggaacatttcaactttttcagtttgccccctgtccacgtcaggtcttggtaggaaggtrgacttggtaagccctgccttgtgtgaccctcacggtcagtgtgagagcaggctgaggcagggtgggtgccacggccctgtggttttcatccaggactgga

SEQ ID NO: 447832 - DNA, 201 bp, Homo sapiens
ctttttcagtttgccccctgtccacgtcaggtcttggtaggaaggtggacttggtaagccctgccttgtgtgaccctcacggtcagtgtgagagcaggctraggcagggtgggtgccacggccctgtggttttcatccaggactggagatttttgagaatgaagggcagacggtgatcacagatcttgcagggacggcagg

SEQ ID NO: 447833 - DNA, 201 bp, Homo sapiens
agtcaatgagctaatgcaggtgtccagcgtacactgagcactcaacagtgttgctgtcgtcgtgatttcatcctcataacccttgggtggccccgttttcrcctccttccctgttttgagcgtctcctcagagggtctcatctatgagacagcggtggaatgaggctgggtttctaagggagctccagctctggaaggccg

SEQ ID NO: 447834 - DNA, 201 bp, Homo sapiens
gaaaactgagcctcatgaggtcgaagtgtttcccgaggatctcacagcttgcggttatagaggtggggttagaatcatctagaagctcttttcctcacccytttggggcagtttgggaggtgggaggacaagagccagggcctcggggttgcttcctggacagacagggaacaggctccatgacctgagggctgattccag

SEQ ID NO: 447835 - DNA, 201 bp, Homo sapiens
aactgtcattgtggatatttgccacgtcattaacctcagtctcctcctctgtgagatggggatgtcaggatccagctcctatggttgcggtgaggattacrtgtatgctcggctctactgcagctggtgttcagtgagtggcagttgtctatggttaatattctcatttttcagattagaaaactgagcctcatgaggtcg

SEQ ID NO: 447836 - DNA, 201 bp, Homo sapiens
agctgctatagagcaataaatcagagtcatcttttccgggtgaaatgggcttaatttctcatccttttgttcgtgtttcccttcctcttctaccgcatggyacttgtaatcctaatgatgctgtgatgagatatgatggtcagagcctcagacttatcaggatgggctgacaaatcgtggagatccgcactggtcccacac

SEQ ID NO: 447837 - DNA, 201 bp, Homo sapiens
acagagcaagaccctacctcaaaaaacaaataaaaagacattgtcaaagattccttttatgaaaattacaatctgtatttgttgaagagggcttaagcaawcattatccagtgattctcaaaactatttgatgctgatgctgccggcattattatattccctatttgcaaataagaaaattaagactgaacgaaatttaag

SEQ ID NO: 447838 - DNA, 201 bp, Homo sapiens
gaccctcacggtcagtgtgagagcaggctgaggcagggtgggtgccacggccctgtggttttcatccaggactggagatttttgagaatgaagggcagacrgtgatcacagatcttgcagggacggcaggcctaaacctggactgtccaggggcgctggcccgtggccaccctgctgctggggtgatacggtgcggggcct

SEQ ID NO: 447839 - DNA, 201 bp, Homo sapiens
gaaaaagggtggcttttaaattccacctgcgctctagttgttgaagccatttcttcctcctccccctagtccatggggtagctgggggcaggaatgagaaygtggtcgtcccttctgagtcagtggtgggaggagaggagctgctgggcttcagccgagcccctggacaaggggagcctgaggccgggtctgggacggagt

SEQ ID NO: 447840 - DNA, 201 bp, Homo sapiens
ttctgagtcagtggtgggaggagaggagctgctgggcttcagccgagcccctggacaaggggagcctgaggccgggtctgggacggagtatcagctgtggsgaactggaactccgaccttcttccccgtctgcctcatctataagcattttggtaatgggaaaagaaatttttgtttattttgcatcctccatgttttagg

SEQ ID NO: 447841 - DNA, 201 bp, Homo sapiens
cttcttccccgtctgcctcatctataagcattttggtaatgggaaaagaaatttttgtttattttgcatcctccatgttttagggaagttctttggggtcyaagttttcattctctctgtgaccccagggatccagcctcagatgctgaggcttagttgaggtacagataaaacatactttggccacagcacctgtgattt

SEQ ID NO: 447842 - DNA, 201 bp, Homo sapiens
acagaggctgggctgcggtccagatgcgtttgctccatgaattggtctacgcctcccgaaggatggggaaccctgccctctctgtcagacacctgtccttycttctacagaccatgctggacttcttgtcggatcagggtgagtgagctcaaaccacaatgttttttttcaaggaactgtgaatgagagcactttagatgc

SEQ ID NO: 447843 - DNA, 201 bp, Homo sapiens
ggacaagttgggtgactcgctcttgtgcacctggtgtagtgcctgtcttgtatttaacaactcatccgtaagtggtagtcgctccacttatgagtactctyctgtggcaggctcctgtcattctgaagaggagaacgggaagaggcccctccacatgagccttgtccggagtagacaacgtctcccttaaggagcgggtga

SEQ ID NO: 447844 - DNA, 201 bp, Homo sapiens
gccctgtgtcccccagagaccccctgctgagggacgaagacaggccagtccacagagagttacagccagcctgggctgacttggaatagactcagtcctasagctgaggacagttcagcaccttcacctggccccgagtccagtggatcagtaggagagcaacagccccagttaggctcggtacgataggatagatcagct

SEQ ID NO: 447845 - DNA, 201 bp, Homo sapiens
gagacaggagaatcgcttgaacccaggtggcggaagttacagtgagctgacatcgtaccactgcactccagtctggatggcagaatgagactctgtctcartttaaaaaagaaaaacaaaattctacctcttggacatctcgaatctcagttttgttcttttctccttagctggacttcactgactctgctccatgcacac

SEQ ID NO: 447846 - DNA, 201 bp, Homo sapiens
tttcaatttttaaaatcccccccatttcattatgtttcatttcattccttctggcactatgaggtttttcacagtatgaaattgaaaatgaagatgatgaygatgataatatttgttggaatagagcatagcaaaaactccccaattaacacaaacttcagtatctgatgtcttccctgtttctctgtctagtaatttgtg

SEQ ID NO: 447847 - DNA, 201 bp, Homo sapiens
cccaataagccgtgctgattgagcttgagacctttgcaaacactgttcacagtgactagagagccctctccctagtagacctgctcgtttacccccaaaayttcaccaggctgccgcttagaattatactcagtgcctttgtgagtgcaggagtcacttcctttcggaaccttccctgactggtgcccacgctgctgtgct

SEQ ID NO: 447848 - DNA, 201 bp, Homo sapiens
atcatagccactgaatcttctccaaggcggaggattcttagagagtgttgagttagtgctctgtgagagagtgcattccagagttggctatgaactgattstccacacaccctgtggagagaccaccatccatctgtcagtctggagaatcccgcctcattctcccagacatcatctctgccctgaggccttccctggcct

SEQ ID NO: 447849 - DNA, 201 bp, Homo sapiens
gacgtgtctgcatgaggaaagcatgaggcatgtggcagctcactttccattcctgagagctggatactgaactccatatatgaagcccagatttcctagcycctgtttctgaaatgcatgagtatggtgattcttctttgggaagtgagtaattttcaaatggccttggcttcttccttctttcttctttaaatttcttct

SEQ ID NO: 447850 - DNA, 201 bp, Homo sapiens
ggctcggtacgataggatagatcagctgcatttgggcaatgttatggacagcattcctctcctgctttcacgtaagcttctcaagtgcatgtatgagcagyactggggtctaaggtccttggtgggaatagtactttagggaaattaaaaatctggcctccagcaaatattatttttcctcaaatttgttgaggactcaaa

SEQ ID NO: 447851 - DNA, 201 bp, Homo sapiens
ttttaagattttttttaggcaggaacagagcagtgtttagtctaggactaattattccccactactaatgcaagagctaaatgtgctacctaatgccttaygaattctgatgggtgtgtgtgtgtgtgtttgactgatgggaacaggcactattcctcgctctgtgtgagcatcaggcacattttcctgtaacttctcaag

SEQ ID NO: 447852 - DNA, 201 bp, Homo sapiens
catcttgtacttatgacgggagaaagaaagggagccataccacgtggtggtccagcgtgcttctgatccagtgtggcatatgtcactctgctcaggtcccrtggccaaggacctgtggccaagcctgacatccacgaggtggggacattctcccatggtggctaccctgagcgaggccccgtggtgcgggactccctcggc

SEQ ID NO: 447853 - DNA, 201 bp, Homo sapiens
caggagtcaggtcagccaacatcttgtacttatgacgggagaaagaaagggagccataccacgtggtggtccagcgtgcttctgatccagtgtggcatatrtcactctgctcaggtcccgtggccaaggacctgtggccaagcctgacatccacgaggtggggacattctcccatggtggctaccctgagcgaggccccgt

SEQ ID NO: 447854 - DNA, 201 bp, Homo sapiens
ctcggccttccaaagtgctgggattacaggcgtgagccaccgcgcccagtgtctacatgacatttctaccccaggagtcaggtcagccaacatcttgtacytatgacgggagaaagaaagggagccataccacgtggtggtccagcgtgcttctgatccagtgtggcatatgtcactctgctcaggtcccgtggccaagga

SEQ ID NO: 447855 - DNA, 201 bp, Homo sapiens
aatcaagctccagccaattcctgggagacacagcaccttgagtgagctctgctaagagcacctgggtggggaagattttctggagccccaggagaggtccrggaaccatgtccacaggcctcagagactccctggcggattctgcaggcccagtcctggattaggaggttaccgagaggcgcagattgttgacaggcagac

SEQ ID NO: 447856 - DNA, 201 bp, Homo sapiens
tccttgagagaactccttgacatgggactggggggctgattcgttaacgtctttgtttggaacctggtgcctgagagtctggttctgaaatggacctgtcggttttcctctgtctagtgtctcacggttaagatgctccagatggggcccaccgtgtctcctcttccagcctggtcctctccctccctggccatctcagtg

SEQ ID NO: 447857 - DNA, 201 bp, Homo sapiens
cttaaggcgaagaaacgctaagggcagatcaccaaaaaggaaaaataacttgagaagaggtactttaactttgtcatttgtcctgctaataaggtgtcccygaaggtccctgccagctgtaaaaggcagtgaagaaagcaggtcctctagctgcttctctttgcccaccccacatttttctcctgtgtttagaatcatttc

SEQ ID NO: 447858 - DNA, 201 bp, Homo sapiens
tgaggcaggagaatggcatgaacccgggaggtggagcttgtggtgagccgagatcgcgccactgcactccagcctgggtgacagagcgaggctccatctcaaaaaaaaaaaaaaaaaaaaaaaagaatgagattcgataaatgaacatgcctaagtcctagaatgttcccgtcacccacaggtcccctgcacaccttcccc

SEQ ID NO: 447859 - DNA, 201 bp, Homo sapiens
tgcagaccagcctcagaggcgagctgctgagtgcaagaagccagatgtaagaggcgcagagcgtgagtcctctgatgtgaaacatccagaaagcaggtctytagtggcaggacacagctcagcggctgcctgagactgccagtggtgtggggactaaactgattggaagtgctcctgcgtcatctctttggggtgctgcaa

SEQ ID NO: 447860 - DNA, 201 bp, Homo sapiens
ggtgactcattacttccccccttcttccctccccagcccccatctctccatctcccatctctcttcctccatagacatttcatgagcatttcctgtgcccygggtggaggtgctggggatgaggaagggtgtcctgagtcccgtgtgcctccgtcaggggaccatgagacccagagagtcatggaggctggtgcatgcagt

SEQ ID NO: 447861 - DNA, 201 bp, Homo sapiens
agcagccaccgtcatcttccttaggatgtatagtgttctccaagcagaagcaaaggacctgacttggtttttttttgtttttttttttttttttttctgcygagatggagtcttgctctgtctcccaggctggagtgcagtggcgcgatctcaggtcgctacaacctccgcctcccagattcaagtgattctcctgcctca

SEQ ID NO: 447862 - DNA, 201 bp, Homo sapiens
tcctcatcaaatctgcacgaatctagtgagatacatattaattattgtccctatgtaacagttgagaagctttgatttcctttttttcctttttcttttctttttttttttttttgcattttgcttatgcttttggtgtcatatccatgaaacctttgcttaatccaaggtcatgaagatttgttcctatgttttcctctg

SEQ ID NO: 447863 - DNA, 201 bp, Homo sapiens
ctagttgggattatcttcagactcttcctaagcgaagccgcttgcctcctggtggatcaaactagagagttactaatgtgtgtgtgtgtattttttttttwaatatcttttagaccctggaagctgtcctgaatttcaaatactctggaggcccgggccacactgaaggatattacaggaatctctccctggggctgcatg

SEQ ID NO: 447864 - DNA, 201 bp, Homo sapiens
ggaggcccaggagaccatgcctagctgtccagccaagtctgagctagagacagagacatggctgttagtaccaggcaggggagaagacagccacagaatgkcagcagccactcaaggcatgatcctgtgggagaggaaattgggccattgctgaattctgcatcccagcgtctgagggatgggaaaatgcagagctgttca

SEQ ID NO: 447865 - DNA, 201 bp, Homo sapiens
gtggtcagaaaaaaatgtggaaacacaaataactaataatgagaatgaaagaggtggcattactactaattccacagacattaaaaggataataagataayattattaaaaatcataaaacatacaaaacattaaaaaaaattagccgggtgtgatgggacatccctatagtcctagctactcaggaggctgaggcaggag

SEQ ID NO: 447866 - DNA, 201 bp, Homo sapiens
agaagagaacttcctcagtctgacaaaggccatctacaagaaaccccacagttaatgttatacttagaggtgaaagtctgatgactttttctctaagaatracaaggcacgtttccaccgtattcattatttttctggcagtcctaatcagagcaataagggaagaaaataaataagggtattaaaataggaaatgaaata

SEQ ID NO: 447867 - DNA, 201 bp, Homo sapiens
tttctttgtatggtacatatgattatgtacataaatattgtgagaaatctgccacaccaaagaaattagtagaaataataagtcaatttagcaagattgcwggatgccactcaatatttaaaaatcacttatgtggccaggcacggtggctcacgcctgtaatcccagcactttgggaggctgaggtgggtggatcacaag

SEQ ID NO: 447868 - DNA, 201 bp, Homo sapiens
ccagttatctgtaacatttaagactgcatcagtctgaggtcttctgatgcctcttgcctccttcggggacactcttccctgtccttcctgcctcactcccrgtcatcctcaggtcacagctggatgccatttcttcggagaggtcctcagtggtcctttcagccttaagtggaactgttttatttttctctttcatcgaat

SEQ ID NO: 447869 - DNA, 201 bp, Homo sapiens
cccagccacttgggaagctgaggcaggagaatggcgtgaacctgggaggtggagcttgcagtgagccaagatcacaccactgcactccagcctgggtgacagagtgagactccgtctcaaaaaaaaaaaaaaaaatcacttatgtttctatataccagcaactaacaatttgaaaatgaaatgtaaaaaataatatatgca

SEQ ID NO: 447870 - DNA, 201 bp, Homo sapiens
gagggcttggttaaatgagctctggtggcctgtaaatgtcacagctaaatgctgtaacaaacagccccaaattccagggacctaacacatcagcctcattwtgtttatatctcatggtgttcttggtgcaggcagctttttggcgctcacctggggacccaggctccacagtgttctggctctgaccacctcgtgtcttcg

SEQ ID NO: 447871 - DNA, 201 bp, Homo sapiens
ccagccacttgggaagctgaggcaggagaatggcgtgaacctgggaggtggagcttgcagtgagccaagatcacaccactgcactccagcctgggtgacagagtgagactccgtctcaaaaaaaaaaaaaaaaatcacttatgtttctatataccagcaactaacaatttgaaaatgaaatgtaaaaaataatatatgcag

SEQ ID NO: 447872 - DNA, 201 bp, Homo sapiens
tgaaaagatatttgcaacgcattaaaaatgaagcttgtctttgctttggtttttgatgtttttcattgtaccaaaattcttaattttaatgcagccaaacrttttattcttttcccttatattttatatgtattgtaactcatttgagaagtctttcttttttccaaggtcatgaactgttcatctatattttgtctaaag

SEQ ID NO: 447873 - DNA, 201 bp, Homo sapiens
ataatagccatgaatgtagggatcttgtgtttctcattcagttcctcaggaggtattttttggatgaaatacttaataaaatctccaatttggggctgaakaaacagtgcccactcactgtatcagagtggttttattaatacgtaactgctctctttgctgaaaaagggcttatttttttcacctggcagcctggtctcc

SEQ ID NO: 447874 - DNA, 201 bp, Homo sapiens
acaggcctagaggctctgagccaggactcgctgggaattgggtgtggggactttcaatatcctgtcccctctgcccccatcctcttcaggggtcgaaagastggcttggggtcttagaaggtgctttcctcctcacctgcgtgtgagggcagtggaacccaggcaggacagcaggaggcccaaccacacctgaagttgcct

SEQ ID NO: 447875 - DNA, 201 bp, Homo sapiens
cacagcccatgccttctggagacccagagctgagtggggaggacaggacgagatatgccacactcaggttgccaaggaatagctagagagcactgtatggrgagtgagggcccagcgctggagtccgcagctcatcagctgcagcagtggctggaggctgctctggtgaatcagcgtgcacatggtggcttaaagcaacac

SEQ ID NO: 447876 - DNA, 201 bp, Homo sapiens
ggtggcactaaccacaccaccagcaagcagagtcccttgtgactcagctcccactgtgacaggctctggtgggcgctgggtacacagaacctcacctcagkcttacaacaactctatgcaccggagtttctcaccctgcttcgttccagaggcccacacagggctccatgacttgcccagtgtcacatggttaccaaagcc

SEQ ID NO: 447877 - DNA, 201 bp, Homo sapiens
ccgtgggatgttctctgaggagcagtggggtgggaggggactctctgggctccacctctcctctgtcccctctgggtcggcccctgtggcccatctccatrctgagatgggggcagcccccttgcgtctctcccagccccacaagccagggactcaaagctctcccagtgctgcaacacacccagcattgctctaaatctg

SEQ ID NO: 447878 - DNA, 201 bp, Homo sapiens
cctgagctcaggcaatccacctgcctcggccttccaaagtgctgggattacaggcgtgagccaccgcgcccagtgtctacatgacatttctaccccaggartcaggtcagccaacatcttgtacttatgacgggagaaagaaagggagccataccacgtggtggtccagcgtgcttctgatccagtgtggcatatgtcact

SEQ ID NO: 447879 - DNA, 201 bp, Homo sapiens
ccctggttctgacgtttctacctctctctttcacttttaaggaccctggtgattacgtggggctcacctggataattcaggatgagcttcctgtctccaartgagcttaattcccctttggccgtggaagaacaccagtccaccggttccgtgggtcaggatctttgggagggatcgttctgcctatcacacctgctatga

SEQ ID NO: 447880 - DNA, 201 bp, Homo sapiens
tatctattgctttctaacaacttgtcacaaatgtagtggcctagaacaacatatattaattagcacacagtttctatgggtcaggagtccaggcatggctyagctgggtcagacaagctgcttagagtctgacaaggctgaagtcaaggtgttggccagagctgcagtctcatctgaggcccaactggggttggatctgtt

SEQ ID NO: 447881 - DNA, 201 bp, Homo sapiens
ctgatatgtaattgtttcaactgttaattaaaatgagaggctgggtgcggtggctcacgcctgtaatcccagcactttgggaggctacggcaggccaaatrtgaggtcaagagattgagaccatcctggccaacatggtgaaaccacgtctctactaaaaatacaaaaattagctgggcgtggtggcacgcgcctatagtc

SEQ ID NO: 447882 - DNA, 201 bp, Homo sapiens
cccccttctctgtgtcccgtttgagaaaaaggactttgtaggactggacacagacagcaggtaagcttacctagagacccaggccccttggcttccctgcrtcagaaagggaaagcacagggcagaatttcattgcagcaaggagtagaaaggtgttgtccattggtttttaaaactaatgactttctgtcagaatctgtt

SEQ ID NO: 447883 - DNA, 201 bp, Homo sapiens
agctacttgggaggctgaggcaggagaatcacctgaacccaggaggtggaagttgtagtcagccgagattataccactgcactccagcctgggcaacagarcgagactctgtatcaaaaaaaaaagtataccatgcttagtgattggaagaattagtttttcttaagatagtggttttccccgaactgattgtaagttgaa

SEQ ID NO: 447884 - DNA, 201 bp, Homo sapiens
gaggcagcaccagttcttggctcagctgggagggagtggggcaacatgtcaggcctaggcccagtgcagggcttcagatgtggcaactgccattctttcaytggatgaggaggctgtatacacatttggaagaaaaagacggataggcaagttggctaagctctaggtgcaggtgtctagaaaccagcactcccattccgc

SEQ ID NO: 447885 - DNA, 201 bp, Homo sapiens
cggaaactgctaaccataaaactaagacttgataggacaaatttcatcaaaattaaaaacttcagcttattaaaaggcaaattacattctaagataaaaawattgtaacatatttatgtaacaaacgtcttgtatcttattgatgaagttgtacaattctaaaaaggtgataaatagaaaatttgaacagatatttctcaa

SEQ ID NO: 447886 - DNA, 201 bp, Homo sapiens
ccaggacccctccttcctggggcaggtggtcccaccggagccttcactcccaggctctcaccacctacacggttcttaagccaagcctggcccagcaggasatttttcagagggacagggtggtggtcaaccttcaggtcaccaggaagagacaccaagtcctgacaccagtggttaattctcttgtggtgcttgcattcc

SEQ ID NO: 447887 - DNA, 201 bp, Homo sapiens
cagaccccagaggcccatcccagcttagcctgctctgctgggccttccttgaacacctggccagcgctgcccaggcttgctgggtgaccagccaagggacytgagtccactccccacacacctatgtgtcgggtgcatggcaccatggttcctgaagcagcagggcatatgcagaaacatggtttcagaagaggacagtat

SEQ ID NO: 447888 - DNA, 201 bp, Homo sapiens
agtgctggagaagggagaagtttggagccccagtacagacaggttcctggaggagtgcacggagaggcggggtcacggtccgagtggaacccagctgctgygactgtgatgggcttgatgggcttgaactccatctggcccttacctgccgagcaggtacccaagagcagcagcatcttttcacaaaagcattaattatcc

SEQ ID NO: 447889 - DNA, 201 bp, Homo sapiens
tctgagatctacctgtgaggctgcaggcctggccattctcaccccagcacaggagtagcgctggagctgggtagttctctagagggaaatgagggtgttgygaccagaagaggagtgagctcatgttgggctataaaacaaccacgtcgtccttgctttccttcaaagagtgctcctgagactgcttttctaaggctcttt

SEQ ID NO: 447890 - DNA, 201 bp, Homo sapiens
ggaaatctggatgtattctgaaggtatagtcaggctgaactgatttctggactcagacgtttccctagatgctggctgccatgtgagatgcaccgcacagygttcccctgtctggtccatctgcccgccaccctctccgtttcccaccaaagtcattcattcagcgcttcattcagttattcattatttcattcggcactc

SEQ ID NO: 447891 - DNA, 201 bp, Homo sapiens
atttttgtatttttagtagagatggggtttcaccttgttggccaggccggtcttgaactcctgacctcaggggaccctcccttctcggcctcccaaagtgmcagtattacaggcttgagccaccatgccctgcctgttaccattatttttaaaatagaagtaaaattttaatcttttgcaaattaaaaaaatacgatacat

SEQ ID NO: 447892 - DNA, 201 bp, Homo sapiens
tttttagtagagatggggtttcaccttgttggccaggccggtcttgaactcctgacctcaggggaccctcccttctcggcctcccaaagtgccagtattayaggcttgagccaccatgccctgcctgttaccattatttttaaaatagaagtaaaattttaatcttttgcaaattaaaaaaatacgatacatgttgatcat

SEQ ID NO: 447893 - DNA, 201 bp, Homo sapiens
tgctccatgtccggcagctactgttgttttctgctgaatgctgactaggcccaggactgcaggctaggttatgggcattgggagagactagtccctcactwcaaggcactcacagcccaagttagaaactcgaggaatttggctttgaaagtcaccgtgaggcagaccaagctgctgtgcttctggagctgagggttgatg

SEQ ID NO: 447894 - DNA, 201 bp, Homo sapiens
cagcaccttcctactctgcaggttcagcttgcacagtgaagcccaaacccagagaagtcagagtccctggtgtcactgctagaggttttaactcattgagwcttatctagagctgagggtttggtttttggtggttggtgtgctatgtttcagaaaccctgatctggtagataggtagtcattcatagtcctccgtgagat

SEQ ID NO: 447895 - DNA, 201 bp, Homo sapiens
gggctcacacctggtgaggccaggccatatctatgggggaaaccaggctggcctcagatgtcctcgggactcagccctgggctgccgccgtgcccccagtyagcccacacccttcccctggagatgtggcctcggccccttgacttcccagcgccccagaaaagcggtcagtgatttctagctgagaacaacacgctctgg

SEQ ID NO: 447896 - DNA, 201 bp, Homo sapiens
tttttgtatttttagcagagacgaggttttggtttttgttgttcacaaacatgttcaccatgttggccaggctggtctcaaactcctgacctcaggtgatmcacctgcctcagcctcccaaagtgctgggattataagcatgagccaccgcacccggcctaatttgtgctttcttagtgatgaatgacattgatcctttct

SEQ ID NO: 447897 - DNA, 201 bp, Homo sapiens
atatttttctatttgtctgctttcattttaattcatttctgccctttattatctccttcttatgcttcctttaagcatttgttctttgtccggtttctttttattattattattattattatactttaagttctagagtacatgtgcacaatgtgcaggtttgttacataggtatatatgtgccatgttggtttgctgcac

SEQ ID NO: 447898 - DNA, 201 bp, Homo sapiens
agcgtgcacatggtggcttaaagcaacacagatttattctcatgcagtgccagagggcagagtcagaagtggggctcctgggctaaaattgaggtgtcacrgggctcattccttctggaggcccttgaggaggatccattccttgccttttctggtttccagaggccacctgctctccttggctcccggccccttccacca

SEQ ID NO: 447899 - DNA, 201 bp, Homo sapiens
tgcagtggagcacaggcgagagtttgtgcctctattgactgccagcctgggccaccactgtaccccatgcagctcctttccccctccccataccctacaaygcttggtggcattagcctcattcctgagacccagaaaaagtaatttttccaagtcatacaaccatataaccagtaaatggtaaaccaagggtcaaaccta

SEQ ID NO: 447900 - DNA, 201 bp, Homo sapiens
cagcttgtctgttagggtctacttggctgcaagtagcagaaacccccgagtaatagtggcttcagtaaagctcacaggtctccgtcacattaaaatcgagwggcagacaggccaaagctgatgtgacctaccagtgccaggcacctgcactgtacctctgccgttgccctggggcacagcctggagtcaggacagctgctc

SEQ ID NO: 447901 - DNA, 201 bp, Homo sapiens
tagatgggtcaatggtcagatgggtcagtgtataattgggtgaagggatgaagactggattagtagacaattggatggtgaaaggataaatgggtggaccrctgatgagtgggtagatggccatatgcatttgtagatggatggatgaatgacttgattgttcaactcattgacacagaaaaaagttttccttctgtgact

SEQ ID NO: 447902 - DNA, 201 bp, Homo sapiens
atctgtggatggagagcttctgcagttttctttttacacgatgatctcttttagacagagttcttttgagcatggaggatatcttactcatcttgatcctsccatatcaggaatgcttcttggtgtgtggtaggacttcattaagtgatttttgggaaggtggatgggggctgagtatatgggaagatgagttgatagcta

SEQ ID NO: 447903 - DNA, 201 bp, Homo sapiens
gggggccagaggcctttacagaattcagcatggagcgtccccatgctgacaagacaggagtggtttaatgccaggtgttggcgtcaccacggaacacttcwtgggaagcctagactcacgggaaagaagatacaaagaacctttgcgaatgacgaacagcagcgtatggcttggtcagcggctgacccagatgatcagaca

SEQ ID NO: 447904 - DNA, 201 bp, Homo sapiens
cttttctcatgaggacccacactgcaaatgggaaactggttgtcgtgtctcccgaagggcaagcatcctgcacattgctcctgccaccgccatgtgctacrggagccgagcttgggaaggctggccagaaccatctggaacagggaaggcctgggggccagaggcctttacagaattcagcatggagcgtccccatgctga

SEQ ID NO: 447905 - DNA, 201 bp, Homo sapiens
tgttttggtaccagtaccatgctgttttggttactgtagccttgtagtatagtttgaagtcaggtagcgtgatgcctccagctttgttcttttggcttacractgacttggcaatgcaggctcttttttggttccatatgaactttagagtagttttttccaattctgtgaagaaagtcattggtagcttgatggggatgg

SEQ ID NO: 447906 - DNA, 201 bp, Homo sapiens
tcaggctgcatgagttgtcattggagggactagattttatggagaacagacttaaagaaactcagaacttggctgggtgcagtggctcatgcctgtaatcycagcactttgggaggctgaggcggatcacctgaggtcaggagtttgagaccagcttggccaacatgacgaaaccctgtctctactaaaaatacaaaaagt

SEQ ID NO: 447907 - DNA, 201 bp, Homo sapiens
tatttttctatttgtctgctttcattttaattcatttctgccctttattatctccttcttatgcttcctttaagcatttgttctttgtccggtttctttttattattattattattattatactttaagttctagagtacatgtgcacaatgtgcaggtttgttacataggtatatatgtgccatgttggtttgctgcacc

SEQ ID NO: 447908 - DNA, 201 bp, Homo sapiens
atttttctatttgtctgctttcattttaattcatttctgccctttattatctccttcttatgcttcctttaagcatttgttctttgtccggtttctttttattattattattattattatactttaagttctagagtacatgtgcacaatgtgcaggtttgttacataggtatatatgtgccatgttggtttgctgcaccc

SEQ ID NO: 447909 - DNA, 201 bp, Homo sapiens
tggggttgtttgtttttttcttgtaaatttgtttaagttctttgtagattctggatattagccctttgtcagataggtagattgcaaaaattttctcccaytctgtaggttgcctgttcactctgatggtagtttcttttgctgtgcagaagctctttagtttaattagatcccatttgtctattttggcttttgttgcca

SEQ ID NO: 447910 - DNA, 201 bp, Homo sapiens
tttagtttaattagatcccatttgtctattttggcttttgttgccattgcttttggtgttttagtcatgaagtctttgcccatgcctatgtcctgaatggyaatgcctaggttttcttctagggtttttatggtgttaggtcttacattgaagtctttaatccatcttgaattaatttttgtatacagtgtaaggaaggga

SEQ ID NO: 447911 - DNA, 201 bp, Homo sapiens
catgcctatgtcctgaatggtaatgcctaggttttcttctagggtttttatggtgttaggtcttacattgaagtctttaatccatcttgaattaatttttktatacagtgtaaggaagggatccagtttcagctttctatatatggctagccagttttcccagcaccacttattaaatagggaatccttttcccattgctt

SEQ ID NO: 447912 - DNA, 201 bp, Homo sapiens
tcctcatgtcttagttgtataatgtattaaatctgtatacattgtaaacccaatgttataattttagcttgtattcatcatatatcgttcattgttttttyttgttttgttttatttatttatttatttttttgagacggagtctcgctgtgttgcccagactggagtgcagtggtgtgatctaggctcactgcaagctct

SEQ ID NO: 447913 - DNA, 201 bp, Homo sapiens
ccgagatcacgccattgcactccaacctgggtgacagagcgagactctgtctcaaaagcaaacaaacaaacaaaaaaatagcaacaacagcaaaaacaaaraactttttgggtttctgaatctgtttatgtcatttgccaattctttttgggggtgtggccattatttatttaaaaatggcatgttattttcttctttgtt

SEQ ID NO: 447914 - DNA, 201 bp, Homo sapiens
gactcagggattctcctactttctgtggcccttcatagtaccttttcccacttgttggaccaggaagagaggctgccctgggagctctgtctggctatacrcagggcacgcctctggagtccacgctgcctttcagttgaggccaggtggtactggagagagatgcagctcactgccagttcagaataacttcagtttctg

SEQ ID NO: 447915 - DNA, 201 bp, Homo sapiens
attgattcccaaaactttgtgtgggaagagcagaaaccaagacagggattggccaagggcagggatgacaaaaatgctgagcaagtgtaagtagaagagtygagtttgggttgcagccagtgtggtcctcagggaggcaagaccgggccacgcggtgcagagatctgggcaaaagcgtggagaagcggccgcggtgggcgg

SEQ ID NO: 447916 - DNA, 201 bp, Homo sapiens
ccttgccctttctgcctttctctccttccctcccattctcccctctcattgcccaaatctagttgctgagccattgccgtgcctctcttgtggccctgtgrtatgctggaatgaacagttgtgcagatcgggcatccctaacttgaaatccaaaatgctgccaaatccgaaactttttgagcacttgcatgacgccacaag

SEQ ID NO: 447917 - DNA, 201 bp, Homo sapiens
ttcagacagatgtgtccagaaaaaaaaaaaaaacaaacccaaaaagcaaacaagaattaaggtaaaccatatgctcagagcatcagccttaaaaccaagcwtccaaagccatatggaaaggtacacagaataaatgacattatgatggcacaaaccactgctgcagtctgggaaaggaaacttattcacagataggaagcc

SEQ ID NO: 447918 - DNA, 201 bp, Homo sapiens
cgccaggctgcttgtcccaggtgattatccagcccctgctctgtgcattcactctacagctgggccttactgcatctgccggttccacatccttagattcaggcaaccatagattgaaaatatttggagaaaaaaaaataatacaaccaaaaaaatagagtataatggccaggtgcggtggctcatgcctgtaatcccagc

SEQ ID NO: 447919 - DNA, 201 bp, Homo sapiens
tcactgacttgttcttctgatcactgcaagtgcccacgtttgagaaggctgatgagggttaaggcattttctagagcatcagtggctggttaacttggggktagaacttgtggtgtcaaaggcattaactaacagtgatatttctgtttcttgaacactcactgagagttttaggcttatgctcagtgtttgcattatttc

SEQ ID NO: 447920 - DNA, 201 bp, Homo sapiens
gtggataaggtatatatgaaacataaatgtatttcatgtttagacttgggtcccatcccaaagatagctcattatgtatatgcagatattccaaaatgcgaaaaaaaaaaaattggagatgtttctggtcctgagcatttcagttaggggatacctgacctgtatctgaagtggaagaccagggagtgaatcttgactcgg

SEQ ID NO: 447921 - DNA, 201 bp, Homo sapiens
gaaacaaaagagtagaggcttcggagggtgatgagtagaccccgcagtgtctgccccagttcgagaggtgcccgcatgggagaagctcgtgctggatgtgcacacacacacacacaagcaggacatgcgtcaccacgcttcagggcccagcgtggaacctggtagctgaagatgctggcttggacacagcatccttgaatg

SEQ ID NO: 447922 - DNA, 201 bp, Homo sapiens
aaacaaaagagtagaggcttcggagggtgatgagtagaccccgcagtgtctgccccagttcgagaggtgcccgcatgggagaagctcgtgctggatgtgcacacacacacacacaagcaggacatgcgtcaccacgcttcagggcccagcgtggaacctggtagctgaagatgctggcttggacacagcatccttgaatgg

SEQ ID NO: 447923 - DNA, 201 bp, Homo sapiens
acaaaagagtagaggcttcggagggtgatgagtagaccccgcagtgtctgccccagttcgagaggtgcccgcatgggagaagctcgtgctggatgtgcacrcacacacacacaagcaggacatgcgtcaccacgcttcagggcccagcgtggaacctggtagctgaagatgctggcttggacacagcatccttgaatggca

SEQ ID NO: 447924 - DNA, 201 bp, Homo sapiens
gtacccggcagtgtcacctgctcctggatgtcttcaactccaccgagcatgagctgaccgtcagcaccaggagcagcgaggcactcatcctgcacgccggygagtgccagcggtaagtgtcccatagaccctcgcgccgccgcaggccaccctctgccttcaccacgctgcttgggagggtgtggagataatccaccccaa

SEQ ID NO: 447925 - DNA, 201 bp, Homo sapiens
aattggggtgagagttacctcgagtgttgtgtgtatgcgaggtacctggaacacagtaagcacccagcaaatgcctgcaggtgatgtgttctcctcccctrctgaagggttgggggagatgggcattcttgctttagatggaaacactgagtcccagcaaactctagggtctgtcagttcttagccatgagacgttttagc

SEQ ID NO: 447926 - DNA, 201 bp, Homo sapiens
cactgactcctccaagcctcaacttcctcatctgtaaaacggataaaaatagccacttctgatgaagtcaggcggttaatttaagcactggaaacattctrcgatgcatagcgagtgcttaggaatctcgctcttgtttcagaactcatgataatctggttcactgatatctcctccctttcattgactattaaatagggc

SEQ ID NO: 447927 - DNA, 201 bp, Homo sapiens
atagcgagtgcttaggaatctcgctcttgtttcagaactcatgataatctggttcactgatatctcctccctttcattgactattaaatagggcagaaactttttttttttcaggaatcttcaagcttcctttttattttatttatttttattatactttaagttctagggtacaagtgcccaacgtgcaggtttcttaca

SEQ ID NO: 447928 - DNA, 201 bp, Homo sapiens
gttcactgatatctcctccctttcattgactattaaatagggcagaaactttttttttttcaggaatcttcaagcttcctttttattttatttatttttaytatactttaagttctagggtacaagtgcccaacgtgcaggtttcttacataggtatacatgtgccatgttgatgtgctgcacccatcaacttatcatttg

SEQ ID NO: 447929 - DNA, 201 bp, Homo sapiens
atgacattcggaaccctgtttccagtcgagcagctggagatctgtattaacttgtatttctaccccggggcagtgttgggaaagacaccactttcataggsagttctacagggagtgggctttgcactcatttttccctatgagtaaaagaggtcgagacccaccaggggcatgcagtcagttggagctggaactgggctg

SEQ ID NO: 447930 - DNA, 201 bp, Homo sapiens
ttcccatcattcaagtggaaatgactgaacagcttagaaagattaagttagcccaaggtcaagcagttactaagtagaagttaaaattcaaatcaggatakgtctgaatccaaagttcacgctgtttccgtgatatcctgctgcccctttacgtataatttctaagtttcccaacttattatgggatacaaaacattctgt

SEQ ID NO: 447931 - DNA, 201 bp, Homo sapiens
actgaacagcttagaaagattaagttagcccaaggtcaagcagttactaagtagaagttaaaattcaaatcaggataggtctgaatccaaagttcacgctrtttccgtgatatcctgctgcccctttacgtataatttctaagtttcccaacttattatgggatacaaaacattctgtctcaattcaaaccatatttatag

SEQ ID NO: 447932 - DNA, 201 bp, Homo sapiens
ctgcgttcttcaagcgcgtggccgccatgcagtgcgtggccccaagcatcgcggagcctgggtggagggcctgctacaaactcctcctggaaacgctgccyggctacagtctgtcgctggatcccaaagatttcagcagaggtactggagtccccttgctggcgctaaggtgttgctttctgtctgatggtcacatgctgt

SEQ ID NO: 447933 - DNA, 201 bp, Homo sapiens
cattcctcagtgactgatgttgtgtgaacttgcctaggaactggcaatcccctctcaggcatcttgtctagttttgggataactgacagttgggaaattctttttgatcttcagtcgaaatcagttacctaggtacctgtcagcaacttttctggcttttctgtgaacgactgtctgacacaaaaatgcgaacctggtgtt

SEQ ID NO: 447934 - DNA, 201 bp, Homo sapiens
atggaatctgtcaaaatcatccttgtcttggacactttatccctggacttctgctttgctgttggcagcttcataggctaagtacaatttttattagttcygcagctacagacagataaggtcctggtgcccctgtcctcagcaggctcacagctgagtggaaacagatacagaatgaaatggttctgatccgctatgata

SEQ ID NO: 447935 - DNA, 201 bp, Homo sapiens
ggtgacagagcgagactccgtctcaaagaaaaagatatgctcattttgatttggaataaagctgcctggccaaaagatggcttgtggctagaagaggaagracaaataagaaaacataaatggttcaaatagcactctatgtacaaaaacatgaaaaggtgaaaatttcttaatttcaactttttgttagaaattagtacg

SEQ ID NO: 447936 - DNA, 201 bp, Homo sapiens
cttgtcttggacactttatccctggacttctgctttgctgttggcagcttcataggctaagtacaatttttattagttccgcagctacagacagataaggycctggtgcccctgtcctcagcaggctcacagctgagtggaaacagatacagaatgaaatggttctgatccgctatgataaaggcataatgaagggcacac

SEQ ID NO: 447937 - DNA, 201 bp, Homo sapiens
acactttatccctggacttctgctttgctgttggcagcttcataggctaagtacaatttttattagttccgcagctacagacagataaggtcctggtgccyctgtcctcagcaggctcacagctgagtggaaacagatacagaatgaaatggttctgatccgctatgataaaggcataatgaagggcacacacagagcgaa

SEQ ID NO: 447938 - DNA, 201 bp, Homo sapiens
gtctctggagggctcagctttcatctctgcccaatgaggggtcaggtttggcctctaaattctatccagctttaaacactttagtttactgtctgaagtcttttttttttttttttttaagacgaagtcgtgctctctcgcccaggctggagtgcagtggcacgatcttggctcactgcaccctccgcctcttgagttcaa

SEQ ID NO: 447939 - DNA, 201 bp, Homo sapiens
ccgcagctacagacagataaggtcctggtgcccctgtcctcagcaggctcacagctgagtggaaacagatacagaatgaaatggttctgatccgctatgayaaaggcataatgaagggcacacacagagcgaagggagctggggagcacctgctgggtgtgcccttggtctggagggcgcggggttagcaccatctcctgc

SEQ ID NO: 447940 - DNA, 201 bp, Homo sapiens
atggtctttctaaaacccgagcaagtcttagttctgaaaaacacctggcctcaagggcttcagatgagtgtatttctgacctctgaaagatagagacattygtgcggatagaagaggatgaggtgctgcctctggggaacactcgggggggaagaggcttttgaagcgggctgcccagtgggagagaagaaaaaggccatc

SEQ ID NO: 447941 - DNA, 201 bp, Homo sapiens
gtggcctcaccttcctgcggaggccgggaggcggggggtggggagcacgtagatttatcacgatcagtgtcactatcagtcttcctgttttcccacctctrctccttgtcctttctgtctgacgtccaggagtgttccagatcttaaccaccgtcttcccaaactggtcacaagggtgacagcaccttctagtactgtggt

SEQ ID NO: 447942 - DNA, 201 bp, Homo sapiens
aaccagacagttgaagtatttgtgttctgtttgaaacaacaggcatgtgaaactattgaaccttcctgctagcctccggccacacaaaatgaaaagcttgmtgggtcagaacgtgtcaaccaaaagtcctttcatctattcaccaattatcgcacacaaccgtggagaagagcggaacaagaaaataggtaggacgtcgat

SEQ ID NO: 447943 - DNA, 201 bp, Homo sapiens
ggcctcaagggcttcagatgagtgtatttctgacctctgaaagatagagacattcgtgcggatagaagaggatgaggtgctgcctctggggaacactcggrggggaagaggcttttgaagcgggctgcccagtgggagagaagaaaaaggccatcagtgcattgaggggcttcgaggagaaacttgtacagcccacagtgg

SEQ ID NO: 447944 - DNA, 201 bp, Homo sapiens
agaggatttgctctgtgagtcagatcagcgtgcgggactcccagcgagtcctctacatccgctacaggcaccactacccacccgagaacaacgagtggggygacttccagacccaccgcaaagtcgtgggcctcatcaccatcacagactgcttctcggccaaggactggccacagaccttcgagaagttccacgtgcaga

SEQ ID NO: 447945 - DNA, 201 bp, Homo sapiens
tttgggtcatgggggtggatccctgatgaatggctgggtgctcgtctcatgggaatgaatgagttttcactctgttagttctcattagtgctggttgttcraaagagcctggtgcctcctcccctctcccctcactgtgtgactgcctgctcccgctttgccctcttctgccatgaatggaagcttcctcaggccctcacc

SEQ ID NO: 447946 - DNA, 201 bp, Homo sapiens
acgtgtgcatgtgtctttacagtagcatgatttataatcctttgggtatatacccagtaatgggatcactgggttaaatggtatttctagttctagatccytgagggatcgccacactgtcttcaccaatggttgaactaatttacactcccaccaacagtgtaaaagcgttcctatttctccacatcctctccagcatct

SEQ ID NO: 447947 - DNA, 201 bp, Homo sapiens
gtgtctttacagtagcatgatttataatcctttgggtatatacccagtaatgggatcactgggttaaatggtatttctagttctagatccttgagggatcrccacactgtcttcaccaatggttgaactaatttacactcccaccaacagtgtaaaagcgttcctatttctccacatcctctccagcatctgttgtttcct

SEQ ID NO: 447948 - DNA, 201 bp, Homo sapiens
ggagttcgagaccagcctggccaacaaggtgaaaccccagctctactaaaaatacaaaacaaaacaaaacttgtttttcggtcttctttctctttttttastcctcattaaattaggagtaggaggctgggtgcggtggctcacacccataatcccagcactttaggaggccgtggtgggtggatcacctaaggtcaggag

SEQ ID NO: 447949 - DNA, 201 bp, Homo sapiens
ctcacacccataatcccagcactttaggaggccgtggtgggtggatcacctaaggtcaggagtttgagaccagcctgcccaacatggtgaaaccccgtttytactaaagatacaaaaattagccgggcgtggtggcacacacctgtaatctcagctattcgggaggctaaggcaggggaattgcttgaacccaggagacgg

SEQ ID NO: 447950 - DNA, 201 bp, Homo sapiens
ctttaggaggccgtggtgggtggatcacctaaggtcaggagtttgagaccagcctgcccaacatggtgaaaccccgtttctactaaagatacaaaaattarccgggcgtggtggcacacacctgtaatctcagctattcgggaggctaaggcaggggaattgcttgaacccaggagacggaggctacagtgagctgagatc

SEQ ID NO: 447951 - DNA, 201 bp, Homo sapiens
gaggccgtggtgggtggatcacctaaggtcaggagtttgagaccagcctgcccaacatggtgaaaccccgtttctactaaagatacaaaaattagccgggsgtggtggcacacacctgtaatctcagctattcgggaggctaaggcaggggaattgcttgaacccaggagacggaggctacagtgagctgagatcgcccca

SEQ ID NO: 447952 - DNA, 201 bp, Homo sapiens
tcttacatttatgtccataatccttttgagctaattttttgtgtcgggtgtgaggtgaaagcttttcttatgttgcatatggatatccagttattccagcrtggggtgttaaaaaaaaccctggccaggcgcggtggctcacgcctgtaatcccagcactttgggaggctgaggcgagcggatcacgaggtcaggagatcg

SEQ ID NO: 447953 - DNA, 201 bp, Homo sapiens
agatcgagaccatcctggctaacacagtggaaccccgtctgtactaaaagtacaaaaaattagccgggcgaggtggcgggcgcctgtagtcccagctactsgggaggctgaggcaggagaatggcgtgaaccccgggggggtgaagcctgcagtgagactccatctcaaaaaaaaaaaaaaaaaaaaaaagactgtccttt

SEQ ID NO: 447954 - DNA, 201 bp, Homo sapiens
gatcgagaccatcctggctaacacagtggaaccccgtctgtactaaaagtacaaaaaattagccgggcgaggtggcgggcgcctgtagtcccagctactgrggaggctgaggcaggagaatggcgtgaaccccgggggggtgaagcctgcagtgagactccatctcaaaaaaaaaaaaaaaaaaaaaaagactgtcctttc

SEQ ID NO: 447955 - DNA, 201 bp, Homo sapiens
tctgtactaaaagtacaaaaaattagccgggcgaggtggcgggcgcctgtagtcccagctactggggaggctgaggcaggagaatggcgtgaaccccgggkgggtgaagcctgcagtgagactccatctcaaaaaaaaaaaaaaaaaaaaaaagactgtcctttctccattggatggctttagtgcctttgtctaaaatca

SEQ ID NO: 447956 - DNA, 201 bp, Homo sapiens
taagaatattaagattgaagaggatattttggttgtttagccagagatccagaaatgcccaaccccagctctaagtggtatattcagaagaggtcatttaycagctcatttaatgggaaagtgcagatggaggtttgttttcagtttcagacatcatctctcaactctctaacctgtttctcgcaacttgatgtcattctt

SEQ ID NO: 447957 - DNA, 201 bp, Homo sapiens
cctccattgcccagaggtagtttaacccccctccattgcccagaggtagtttaacccccctccattgcccacaggtagtttaacccccctccattgcccayaggtagtttaactccccctccattgtccagaggtagtttaaacctcctctgttgtccagaactagttgaaactgacatcatggtcctttttcaatccgat

SEQ ID NO: 447958 - DNA, 201 bp, Homo sapiens
cccagcagagagcatgttcctcaggctcacagaggcgggtgtgatctttgggggctgtgctgtgggtgctgatgccagactacgggcagtgggggaccacmagaatctccctgcttctggggcctgaatcccggagtgagtgtgttcctgctgcagagggtctgatggcaaggcaggaggcagagggcagggctgggccag

SEQ ID NO: 447959 - DNA, 201 bp, Homo sapiens
aatcacagttttctcccctataaatttgggaatgatagtacttttcttgtaggttggttaggagaattatttttaatcatagtaataggtaatgttattgstgcttcctgtgtgctggaaactttctaaactcaaagcatttagcacagtgtgcggcatttctgagtgtcaggaagtgtcagctgctgctgctgctgctgc

SEQ ID NO: 447960 - DNA, 201 bp, Homo sapiens
tgaagtatttgtgttctgtttgaaacaacaggcatgtgaaactattgaaccttcctgctagcctccggccacacaaaatgaaaagcttgctgggtcagaaygtgtcaaccaaaagtcctttcatctattcaccaattatcgcacacaaccgtggagaagagcggaacaagaaaataggtaggacgtcgatcctggctttcc

SEQ ID NO: 447961 - DNA, 201 bp, Homo sapiens
gaatgcagattggtgattttcaggtcctgggtggggagaaggggcatcagctgctaaatgggtatagggtttccttttgggttaaaaaaatgttttagaaytggatagaggtggttgcataacattgtgaatgcactgaaggctgccgaaccattcgtcactggagaatggttaatcttacattatgccaatgtcaccttc

SEQ ID NO: 447962 - DNA, 201 bp, Homo sapiens
cccatctcccttacaataaagcccatacccttggccagtcttgcctcagctcttctcatggctgtcttgtggcctggccacaaggaaatgatttccatgcyttcgcctgtaagccttggccatgcttacctactgcctgaggcaccattcctcttctcccttgcactggctttctcctcctccattctcaggtgtcacttc

SEQ ID NO: 447963 - DNA, 201 bp, Homo sapiens
ctgtccatttcacctgctctccactgtgggactctggaatattctcacccaggcaagatttgcagcagtgagccagttgcagacctctccccttggcagcrcgtcccactgtgtgacatcttctgtccagttgggtctctcacaccagggagctcagctgagacgctggggcacttactgaaatgagagcggcaagagcat

SEQ ID NO: 447964 - DNA, 201 bp, Homo sapiens
gagcggaacaagaaaataggtaggacgtcgatcctggctttcccaccgtgctctgccacctgatttccaatggcttttctagatttttagaacagcatttygagccagttcatgcatgtgcatgtgtgtgcgtgcgtggatgtgtgcacgcatgcatatgtgtgtatatgtgtgtgcatgtgtgcatgcatgcatatgtat

SEQ ID NO: 447965 - DNA, 201 bp, Homo sapiens
tgtgcatgcgtgcatatgtgcgtgtatgtgtgtatgcatgcgtgcgtgcatgcatatgtgtgtttacatgtgtccatgtgtggatgtgtgcacagatgtgygcgtgtgtgtgcgtgtgtgcagtctgtcatggaagtttatttgatttgctgcttttggcaggcaattgcccatagatgtgattttaaaaaatttatttca

SEQ ID NO: 447966 - DNA, 201 bp, Homo sapiens
ttttaaaaaatttatttcatataaggtaattttgtgaaagttctggaaaccagaaagacttttgttaactgagacttatgtgaactacagaagagtgacarttggagatgtagactgattttacaagggctgaagtgacttctgagtcatcagagaaagattcagggttggatggtgttcaggactgagtggagggtgagg

SEQ ID NO: 447967 - DNA, 201 bp, Homo sapiens
agggctcagcatgcaccaccggccctgtcccttggtgtccttcccaaagcccggctgtagtgccaagctccccatcccttgctgccacaaagacatgcccraggccccttgcaggagattgtgactgccagtcactggggaccactgccggctgagcccacacgtcctgtgacagaaccttgagggcctggaggctggccg

SEQ ID NO: 447968 - DNA, 201 bp, Homo sapiens
tagcagaaaaattaatgtgaacatcaggctggaaaaatatgaagttaataacagtttgtcaaaggctaggctattcaaagcagtattttcaaattcagtcrtttatattcctttactcctttaccccttttcttttgtgtatctgtcaccacctaatgttaattaggttgttaaaatgcattaacatatcaagacatggtg

SEQ ID NO: 447969 - DNA, 201 bp, Homo sapiens
gttacggactgcaggcgctccctgacccccccctgcccacacccctcccgctctgtcggggttttcatgccacctcctgccaccatcactctggtttagcyacagggactcctttctggtcgtggaaagaaacaggcttgttccaagcccagggctttggggctcgctctttcctttgccaggaactcgtcccctgcccct

SEQ ID NO: 447970 - DNA, 201 bp, Homo sapiens
cccagcactttgggaggctgaggtgggcggatcacctgaggtcaggagtttgagaccaccctggtcaatatggtgaaaccccatctctactaaaaatacaraaattagctgggtgtggtggtgggtacctgtaattccagctacttaggaggctgaggtacgagaattgcttgaacctgggaggcggaggtcgtagtgagc

SEQ ID NO: 447971 - DNA, 201 bp, Homo sapiens
ctgctctcccacttctgcatgttctgctgggggatctcacctggccctggggcttcaggaatggtctttgcattcatggtgcctgtacttcttccttctgsggtgctgcaggcctgactgtcgacccgcccaccctgccttcgcttccctctcagcacagggcgcagggtgcccctgcccgccccactgcttgggcagaaa

SEQ ID NO: 447972 - DNA, 201 bp, Homo sapiens
aatcgcttgaacccgggaggcagaggttgcagtgagtggagattgtgccactgtgctccagcctgagcgacagagcgagactatctcaaaaaaaaaaaaaatttgtccctgtcttgaaaaaacttttggtccagtgcaggggtggggagggcagagctacaggaagggcagctgagcccacagagtgctcgggggacacag

SEQ ID NO: 447973 - DNA, 201 bp, Homo sapiens
gtggcatgagcctgtaatcccagctactcgggaggctgaggcaggagaatcgcttgaacccgggaggcagaggttgcagtgagtggagattgtgccactgygctccagcctgagcgacagagcgagactatctcaaaaaaaaaaaaaatttgtccctgtcttgaaaaaacttttggtccagtgcaggggtggggagggcag

SEQ ID NO: 447974 - DNA, 201 bp, Homo sapiens
tgcccagatggagcctggcgggagtggtgccttgagcactgacagtgatgagggcagaggtcaggagcaggcggcctgatggcatctcctgtggaattgcrttgtccggccctctccatggccaggcagccatacagagatgcactgcacagggtgaggctcagcaggaggcagctgtgaagtgtgcagcaggccactctg

SEQ ID NO: 447975 - DNA, 201 bp, Homo sapiens
ttgctttgcagggaacttctcaggaaaggcctctgccgaggagacgcgcagaggagcagagctggtaggcagccagtgggatgtggcagagagcattccargatgggagtcgcgggtgcccagatggagcctggcgggagtggtgccttgagcactgacagtgatgagggcagaggtcaggagcaggcggcctgatggcat

SEQ ID NO: 447976 - DNA, 201 bp, Homo sapiens
cactttgcgaagcagtgtcagatggccaggcttgctttgcagggaacttctcaggaaaggcctctgccgaggagacgcgcagaggagcagagctggtaggyagccagtgggatgtggcagagagcattccaggatgggagtcgcgggtgcccagatggagcctggcgggagtggtgccttgagcactgacagtgatgaggg

SEQ ID NO: 447977 - DNA, 201 bp, Homo sapiens
gcgaggtggcgggcgcctgtagtcccagctactggggaggctgaggcaggagaatggcgtgaaccccgggggggtgaagcctgcagtgagactccatctcaaaaaaaaaaaaaaaaaaaaaaagactgtcctttctccattggatggctttagtgcctttgtctaaaatcagttgaccataaacatgagggttattttctg

SEQ ID NO: 447978 - DNA, 201 bp, Homo sapiens
gaagaggcaggccttcagagacagaaggcaggtcactttgcgaagcagtgtcagatggccaggcttgctttgcagggaacttctcaggaaaggcctctgcygaggagacgcgcagaggagcagagctggtaggcagccagtgggatgtggcagagagcattccaggatgggagtcgcgggtgcccagatggagcctggcgg

SEQ ID NO: 447979 - DNA, 201 bp, Homo sapiens
ggtttgggggcctggcactcacctcggcctcctcccccagcctcccagagggtcctgcatgtggggaaggaaaacctttctcagtaccgccttcgactttkccctggtgctgctcagtgtggtttcacccgtgccttccggggtcagcgccagtgactccagaggccggaaactacttttgttcattcgtcgttttccaat

SEQ ID NO: 447980 - DNA, 201 bp, Homo sapiens
ggatgacttgaggtcaggagttcgagatcagcctggccaacatggtgaaacccccatctctactaagaatacaaaaaaatttaggcgggcatggtggcgcktgcctgtagtcccagcaacttgagaggctgaagcaggagaatcgcttgaacccaggaggtggacgtcgcagtgagccatcactgcactccagcctgggtg

SEQ ID NO: 447981 - DNA, 201 bp, Homo sapiens
agtgagccatcactgcactccagcctgggtgacagagcgagcgagactctgtctcaaaaaaaaaaattgtgtgtgtgtgtgtatatatatatatgtatatrtatatgtgtatatatgtgtgtgtatatatatatgtgtgtgtgtgtgtgtatatatatatgtgtgtgtgtgtgtatatatatatatatgaactttagcatt

SEQ ID NO: 447982 - DNA, 201 bp, Homo sapiens
cgagactctgtctcaaaaaaaaaaattgtgtgtgtgtgtgtatatatatatatgtatatatatatgtgtatatatgtgtgtgtatatatatatgtgtgtgrgtgtgtgtatatatatatgtgtgtgtgtgtgtatatatatatatatgaactttagcattcattcttgccattgattcctcatgttaagtgcatgtcatct

SEQ ID NO: 447983 - DNA, 201 bp, Homo sapiens
cgtgcaaagcactgtgctaggggctgagggcctgcagatgaatgggccgtcatccttgccttgtggttagaagcctgtggaaggcagctgggccctgtgtcccccagagaccccctgctgagggacgaagacaggccagtccacagagagttacagccagcctgggctgacttggaatagactcagtcctacagctgagga

SEQ ID NO: 447984 - DNA, 201 bp, Homo sapiens
tcactcatttctcacaggagtcttgattccctctaatgaaaattgatatttagaggccaggtgcagtggctcatgcctgtaatcccagcattttgggaggscaaggcgggcggatcacttgaggttagagttcaagaccagcctggccaatatggtgaaaccccatctctactaaaaatacaaaaactagccagctgtggt

SEQ ID NO: 447985 - DNA, 201 bp, Homo sapiens
agccccagttaggctcggtacgataggatagatcagctgcatttgggcaatgttatggacagcattcctctcctgctttcacgtaagcttctcaagtgcaygtatgagcagcactggggtctaaggtccttggtgggaatagtactttagggaaattaaaaatctggcctccagcaaatattatttttcctcaaatttgtt

SEQ ID NO: 447986 - DNA, 201 bp, Homo sapiens
agtgcatctcgttattgagcaagttacctgatagaggagaaagctggggtttggggagtgggagatgatggcttggcatcttttttagtctcgtccatgtrtctgacatacagccatatgccacatttcatacagttgctgcatagatttctgcaaaactttaacttctccttttatccataatgcatattttctgggtgc

SEQ ID NO: 447987 - DNA, 201 bp, Homo sapiens
gtaagcttctcaagtgcatgtatgagcagcactggggtctaaggtccttggtgggaatagtactttagggaaattaaaaatctggcctccagcaaatattrtttttcctcaaatttgttgaggactcaaaggtatacagtgttgccatgcttcctaccatttcatctctttatgttttcttaaataactaggctttatcat

SEQ ID NO: 447988 - DNA, 201 bp, Homo sapiens
cttgctcttcctagcctaaattgtgggcaagatggaaactgccagacttaaatgtttcactcctctctgccctgcacagattgagtctctgtgctgcctcygtgacccccagtcagagtgcgccatgcatgccttcccatctcccttacaataaagcccatacccttggccagtcttgcctcagctcttctcatggctgtc

SEQ ID NO: 447989 - DNA, 201 bp, Homo sapiens
aaagtccatgtgtcctcctggtcaccgtggccacatgcttccagtggggctgggagaatggcagtgggttctccaggattgggactgatgtctggcaccaygtcaaggtccaacttcaggctcaccccaagtttattctggcaacatggataaatgttccaatgactagatggaagaggcaggatatgatggtgtttggat

SEQ ID NO: 447990 - DNA, 201 bp, Homo sapiens
gtcaggctgacaaaaaggatgaatgacattgagaggcgggagaacccaaggaggggtggccagttcagaccaggtacagagggagagggctctggaacacrgggtgtcggggctcagggccaggctgaatcttccggagggcgatgctgggcagactcaccccaacaggagtctcactgggcctttgttcttttgtaaagg

SEQ ID NO: 447991 - DNA, 201 bp, Homo sapiens
ggtatcaaaaaatttgttgagtattattggtatgaagggtatttgtggtcgttttttcttccgtctttgtctggttttggtattagataatgctgacctcrtaaaatgttctgagaagtgtttcttctgctattttgtatagaattatttctttttgaaatgcttggtagaatgcataagcaaaccatctgggcatagaga

SEQ ID NO: 447992 - DNA, 201 bp, Homo sapiens
gccaggcaaacgtgtctgtccccttcagaggctcgccttggtctcagctcttccaggaagctttcttggatttccccatacttcagacagatgtgtccagaaaaaaaaaaaaaacaaacccaaaaagcaaacaagaattaaggtaaaccatatgctcagagcatcagccttaaaaccaagcatccaaagccatatggaaag

SEQ ID NO: 447993 - DNA, 201 bp, Homo sapiens
ctggcagttgttaatttggcatggtttctgcataaagatggcagaagagtagcatttttattctactctttctcttgaaatctcccccgaacaacaaagtrtgaagaaacagtgaaaataaaaccattccctgtgaaacaaggaaatcatttcaaccccccgtaacaaagcatcggccacaggtgtcgtggaaactgggtt

SEQ ID NO: 447994 - DNA, 201 bp, Homo sapiens
tttaactttgtcatttgtcctgctaataaggtgtccccgaaggtccctgccagctgtaaaaggcagtgaagaaagcaggtcctctagctgcttctctttgyccaccccacatttttctcctgtgtttagaatcatttccaaagataatgcctctgaccccccatttttattgtcctgcggatgcactgtgacgggggtgcg

SEQ ID NO: 447995 - DNA, 201 bp, Homo sapiens
agtttgtctccctttcagagataccgtagtgactattcaagtttggtgggagaatctggagtcgttttaaattagagctaagtgcaaagtaggtaaagccggatggcgtctgaggaagtagcaacatgtgctttcagagcccacatttgaggacccagcagcatccgggcatctttgctgttaaattcttgagaaagtggt

SEQ ID NO: 447996 - DNA, 201 bp, Homo sapiens
caaacgtttatcgacacctaccatgtgctttaggctctgtgctgtaggactagcaattaataaaaaatgcaatgaataaaaaatgccctcgacctaggccrctgcccttgtatgagctctcagtctggaaggaggtactcagactaactagagtcaaatttgctaactggccctgtaatataaaaacaaagtagaggttga

SEQ ID NO: 447997 - DNA, 201 bp, Homo sapiens
ttaaccaccatactctattgctttttttagggaatcatttactgaaaactatttgcttgtttgatttcttgcccgttttttttttttttttttttttttgkcatgagggaccttatctcttcattcaccttgcagagttcggcgtaggtttatttttggtcgaatgtaggcagaatcattgctatcagttaatttctgcat

SEQ ID NO: 447998 - DNA, 201 bp, Homo sapiens
ggctgggtgcggtggctcacgcctgtaatcccagcactttgggaggctacggcaggccaaatatgaggtcaagagattgagaccatcctggccaacatggygaaaccacgtctctactaaaaatacaaaaattagctgggcgtggtggcacgcgcctatagtcccagctactcgggaggcggaggcagcagaatttcttga

SEQ ID NO: 447999 - DNA, 201 bp, Homo sapiens
aaattatctgggcgtggtggtgggtgcctgtaatcccagctactcaggaggctgagtcaggagaattgcttgaatccggggggcagaggttgcagtgagcygagatcacaccactgcactccagcccaggcgacagtgtgagactccatctcaaaataaaagaaaaaaaaaaacgaaacaacatcccatgtagggtgaaat

SEQ ID NO: 448000 - DNA, 201 bp, Homo sapiens
cttcctgcaggagagatgatatctcccttggcaacttggttctatcagcactgcgtataatgtagtttccatactcattgattcattcacagttcaacacrtattcatgcgctaattaggctctattccttaaatgttagaagagatcttagttgtggagttttctgctttagatggagcaggtaggcacagaatccaggt

SEQ ID NO: 448001 - DNA, 201 bp, Homo sapiens
ctggtcttgaactcctgggttcaaacaatccacccatcttggcctcccaaagtgctgggattacaggtgtgagccaccgtgctcagccaactcttatcttstaagaaatagttttgatcttgtttatttgttttttagcgttacaggaaaacataaaaaagaaagaaaaagaaatctcaggagtcccagaagcaattactg

SEQ ID NO: 448002 - DNA, 201 bp, Homo sapiens
ggcatcacagaagcgctgcagagctttcagtttctcttggaaagaagcccctgggacctatttgaggattcctcgacgttagtggacacagaatgttagcrcagccctcacgaacaggaaactcagactgggggtgagtctggtcggtagctggctgaaaaaggtggatttcctatttccagtagtcctgacccacattcc

SEQ ID NO: 448003 - DNA, 201 bp, Homo sapiens
atgtttaaaggcagggataggccagtgtggtcgggagatctgtgccatcaaggtcagagttggaggggtttggagttttgcagggagcagggattcagtarggataaagatataagctgtgcatagaaacaagcttgtagcagaatagagagttccaacttcccaacagctgtgctgagaagtaatgtgttttggagttca

SEQ ID NO: 448004 - DNA, 201 bp, Homo sapiens
ccttccaattgtgcagttctcgaggaatcctgcattgcctgtttctggactggctgcctgggagggagcctaaatcccttcctgtcttagagcatttgcakcagtggggttggagcctttctcagttttgataagtaggagctgtttaatgttgtatttgcttcacgtgttgatgctgaacgtgggcgcttgaaaccaagt

SEQ ID NO: 448005 - DNA, 201 bp, Homo sapiens
ggggaatgccatgtttaaaggcagggataggccagtgtggtcgggagatctgtgccatcaaggtcagagttggaggggtttggagttttgcagggagcagrgattcagtagggataaagatataagctgtgcatagaaacaagcttgtagcagaatagagagttccaacttcccaacagctgtgctgagaagtaatgtgtt

SEQ ID NO: 448006 - DNA, 201 bp, Homo sapiens
ggcaaggatgttcatattcattacttctatttcatattgtgctgaatagtctagttagtgccataaggaacaaaaaatgtgcccagattggaaaggaagawataaaactcgttattcacagaaaacattactatgcatgtagaaaatactaaggaatttacaaaaagtagagtaatttagcaaggtagtaggatacatgat

SEQ ID NO: 448007 - DNA, 201 bp, Homo sapiens
gttgagggtggattggttcctccctcccttctcctccctcccctccacctggtccacagaaagaagagaaggaaggcttttgaatggaaaagggaggcttytgaatggaaaagggaggcttttgaatggaaaagggaggcttttgaatggaaaagggaggcttctgaatggaaaagggaggcttctgaatggaaagggagg

SEQ ID NO: 448008 - DNA, 201 bp, Homo sapiens
catttttaaaacattctcccatgttttctcctggtacgttcatggtctcatttgctttaatattcaaaccttttatttatctggaatatactaaggtgagkgcggcatgggtcctccctttgtttttctaaaaagccacctaattggccccaagtcatttaatcaataatctatcttttcccaatcacttttctcatatat

SEQ ID NO: 448009 - DNA, 201 bp, Homo sapiens
gaagcgcagtggcgaggcgagtgtggaaggactcctgaaccagctcgtcctggagcacctgcagctggcgcctctgcagtggggtgagtacccgccagccrcccatcgattctgggtggatgtgctccttttctccaaatgcacgagcaaggtcttggggggtgtggctgggcaccccaaatgttggtgggtactgaaggt

SEQ ID NO: 448010 - DNA, 201 bp, Homo sapiens
ttctgtatttatccatctggttaaacatgagtgtaactgagtccagtcccacagggctcattctagctttcctgtcttgtttatctgtaacttccctctcyggccgtgagaaactaggtcccaccagctactcttcgttgacttatttgactccagtgtgcatgtaaagcactttcagagctgctcctctgcaccctgtga

SEQ ID NO: 448011 - DNA, 201 bp, Homo sapiens
gggaggcttttgaatggaaagggaggcttctgaatggaaaagggaggcttttgaatggaaaagggaggcttctgaatggaaaagggaggcttctgaatggaaaagggaggcttctgaatggaaaagggaggcttttgaatggaaaagggaggcttctgaatggaaaagggaggcttctgaatggaaagggaggcttttgaa

SEQ ID NO: 448012 - DNA, 201 bp, Homo sapiens
taagtctattccctttagcgaatctctagagagcatttcaaagtgccaagtgcattcacacgcacaagccccttcctcacagggtgaccagtgacccaacwagtatgcttcttattttccaaaaggaagtttgggtgtagagaagctaaggcttgtgtggaagagacgcaggtgactcagacagcccttccctcacagagc

SEQ ID NO: 448013 - DNA, 201 bp, Homo sapiens
tcccctcccatcccgcgcagtggaatccaggtctcggacccacccactcctcacccccagccagggctttggggctgccgtgttccctgcgccccaccccmcatgacctgggctcccctcaccattcttccagagtcccctccaaggatgaactaaggctgcagctccctagaagcccccatggcctgtgggagtttctat

SEQ ID NO: 448014 - DNA, 201 bp, Homo sapiens
tagccctttgagagataaagcttcagggccacacctgcgcccttcaaggcagccccagcagcgtgaggtcagatgggggagaagcctacctacgtgtgccrccagctcaccgccctggcacagaccccggctggggatgaagtgtgccctgtgccaggctgggtgatccaaattcagttgtgggaaagagctctcctgggt

SEQ ID NO: 448015 - DNA, 201 bp, Homo sapiens
tcatttaatgacctgcgtatatgaatacctgcgggtgtgttttccccgtaattcaaaattagatgactataaatactattttgtgtcttgctttgttcaaytagtgctattccattttctgtttcagtaattttttattgcttctactctgcagatgattttaaaatttctcccatttgatccccagattttattataaca

SEQ ID NO: 448016 - DNA, 201 bp, Homo sapiens
agatttgtgtgggcctggtcctttcctccatctaggatttaagtctattccctttagcgaatctctagagagcatttcaaagtgccaagtgcattcacacrcacaagccccttcctcacagggtgaccagtgacccaacaagtatgcttcttattttccaaaaggaagtttgggtgtagagaagctaaggcttgtgtggaa

SEQ ID NO: 448017 - DNA, 201 bp, Homo sapiens
ttgacagcactggccactgtaatctcctttatgtaccttgtcctcctgcagtttgtctgtgtggagggctttcgggttttcttgatgttcttagtcttttrgagcttaataccttggcctcatgtgtgatccttccaccactcctggtacccagccagtggggaagttctgcagactcttccttagaaaggactcttagat

SEQ ID NO: 448018 - DNA, 201 bp, Homo sapiens
gaggggagcacagtcacccaagcccagtctctgtagggcaaagagaggccgcactaccaattgctggccagggtcagcctcaggagacccctggcccggcrgaggtgagtgaggagctgatgcggaagtgagagctggtcaggagcgaggccagggcttgcccggaggcaggtggagctcagtgactccggggtgatgctg

SEQ ID NO: 448019 - DNA, 201 bp, Homo sapiens
cggccttccctcctcgtccattttccatgcacaaccggaaacagtggatgtctctccttagtgaaaccgcatgaactttcttaggaaaatacagtgttggvagcagcagcagcaaatttactggaaaattaagatacgacaattgtgggtttttttgcctaattatcaaaccattgaaattaaatttcatgacaaccctca

SEQ ID NO: 448020 - DNA, 201 bp, Homo sapiens
cctcaatcagatttaaaaaactaaaccccagtgtgttttgcacattgtgaggaactttaaaattgtgagcgaaggtgactattccaggaggacagtgtctygaggggtttatgtagtgggacaagcctcccagaagagccatagtttgattgtgtgttttataggcctgtacaaaagtaattgcactgacctaaatataag

SEQ ID NO: 448021 - DNA, 201 bp, Homo sapiens
gggttggcatcttgttagagaagtctgggggggcatggagctgccacagccatttgagaaggggacacctggggtcttggaagtgaggtgcgatgtcactggggggtacctgcaggaatcgtagacagaaaactctcgaggggcaaggggaggcccagggagagcagatcgcttcttccctctgtggtccgaaggcctccc

SEQ ID NO: 448022 - DNA, 201 bp, Homo sapiens
ggctggtcttgaactcctgggttcaaacaatccacccatcttggcctcccaaagtgctgggattacaggtgtgagccaccgtgctcagccaactcttatcytctaagaaatagttttgatcttgtttatttgttttttagcgttacaggaaaacataaaaaagaaagaaaaagaaatctcaggagtcccagaagcaattac

SEQ ID NO: 448023 - DNA, 201 bp, Homo sapiens
tggaaaagggaggcttctgaatggaaaagggaggcttctgaatggaaaagggaggcttttgaatggaaaagggaggcttctgaatggaaaagggaggcttytgaatggaaagggaggcttttgaatggaaaagggaggcttctgaatggaaaagggaggcttttgaatggaaagggaggcttttgaatggaaaagggaggc

SEQ ID NO: 448024 - DNA, 201 bp, Homo sapiens
caataatagtattaattttatttaactctgccgtcagagatgaacagaagcaagtagtggtggagaccgtctacccgggaggccgcggagtgccgcgttcygaggagtggatggagggccggccccgcatctggtatttgaaatgaagcccctccttggccttgcttttcactttgcaaccttaggtcatctccttagcgc

SEQ ID NO: 448025 - DNA, 201 bp, Homo sapiens
tggcattcaataatagtattaattttatttaactctgccgtcagagatgaacagaagcaagtagtggtggagaccgtctacccgggaggccgcggagtgcygcgttccgaggagtggatggagggccggccccgcatctggtatttgaaatgaagcccctccttggccttgcttttcactttgcaaccttaggtcatctcc

SEQ ID NO: 448026 - DNA, 201 bp, Homo sapiens
tggagttgcacgtgttgttcagttcatttatgtctttactgactgttttttgttggttttttttttttttttttttttttgctaattgtgctgtcaattgkggagagcaggatcttaaaacctccaactatgattgtggaattgtctgactccctctaattgtgtcagtttttgctttgtgtattttgaagttctttgatt

SEQ ID NO: 448027 - DNA, 201 bp, Homo sapiens
tgaaaattggcattcaataatagtattaattttatttaactctgccgtcagagatgaacagaagcaagtagtggtggagaccgtctacccgggaggccgcrgagtgccgcgttccgaggagtggatggagggccggccccgcatctggtatttgaaatgaagcccctccttggccttgcttttcactttgcaaccttaggt

SEQ ID NO: 448028 - DNA, 201 bp, Homo sapiens
tgttcctgcctctgcccccagaccctcacctccgtaccccacacagggtcctctggcagccttctgggaatcccagcccctgtccttcatcaagggcctcyggagcctgccaccacttcacctgcccagccccttgatgggggttctgacctgaaaccaagaaaagccctcccttccttgcctatttctaaactgttcttc

SEQ ID NO: 448029 - DNA, 201 bp, Homo sapiens
atttttttgttttactatttatttctttattattattatttttgagatggagtctcactctgttgcataggctggagcacaatggcatgatcttggctcartgaaacctccgcttcctgagtgcaagtgattctcttgcctcagcctcctgtgtagctggctttacaggtgcatgccaccacacccagctaattttttgta

SEQ ID NO: 448030 - DNA, 201 bp, Homo sapiens
gcagttgtttatctttgttggactgtaattgaaaactccacctcggctgggcacagtggttcatgcctgtaatcccagcactttgggaggccaagacaggygaatcacctgaggtcaggagttcgagaccagcctggccaacatggcaaagacccagctctactaaaaacacaaaaattagctgggcgtggtggtatgcac

SEQ ID NO: 448031 - DNA, 201 bp, Homo sapiens
acattactatgcatgtagaaaatactaaggaatttacaaaaagtagagtaatttagcaaggtagtaggatacatgattaatatacaaaagtcaaacctatktctatatattatcaatggacatttggaaaataaagttaagaataccatatcatttataaaaacaaaaattatatacttggggataaatttaagaaaagat

SEQ ID NO: 448032 - DNA, 201 bp, Homo sapiens
ataggctgtgtgtgtaatgagatggagaaaatttcgtttggagaattcttctaagggagggaattatctttgcaggaaacactttgataaattgcttgcgygagagtaagacccccaagggagttcgaggcaacagaaatggtgggtgaattcctggggcaaggagagaagtttctgcatctcctccgagagggaggagga

SEQ ID NO: 448033 - DNA, 201 bp, Homo sapiens
tctagcatcttgcctccattagaagctcttaagattctcatgattttttttaaaaataaaatgaccaatgaccaaatttctgatccaaataagaacacttkttgggtcaatgcccagggattcaataaataactattgggtgtctattccttaaccgaccctaggaaggtaaaatgccagaatgagggagaaccctcgtgc

SEQ ID NO: 448034 - DNA, 201 bp, Homo sapiens
agtggagggagctgggttccatcccagatgggtttgcttctggagcctgtgttcttcatacaccctcatgtgtctctgtccttcctgcacaccgatctgcmggaccctccccatggggctccttcagatatgctctggcactgtctcccatttgccttaggaagaagtttgcagaacagtgtggcaaacccatgcccggag

SEQ ID NO: 448035 - DNA, 201 bp, Homo sapiens
cccagcctgcctcctgctcggccagcctgccctgagaccttcactgaaatgcttgcatttgtcgtgtttgggagcactggcttgccacagttacagtcacrctgtctgggcaaaccagtctgttgtagatacctgtgactagccttggaaaattcctttccttgtgctgttgaattggatggtgatgttaccacttggcac

SEQ ID NO: 448036 - DNA, 201 bp, Homo sapiens
acctgggcctgggggcacctttgcccagggttccaacctctaagaaagacccgtgagggtcttagctattgaattttcaccacaggtagctcagaaatgckgtggcaaggagatgtggaccaaaggcttggcatttccttaacctcttaacacttcaaaggccccactcggagcagtattgattgggggcgaggaaaggtc

SEQ ID NO: 448037 - DNA, 201 bp, Homo sapiens
tgggagcccggccaccgagtcccacacacacatctctcctgtgaagcccacccagatgtctctgcccgtctatgaagaaagcaactcaggttatctgtggaaaaaaaccagagtgctctggacggagcagagacgcgttgcgatcccagctccactggttctctgggacctcggcctgccttcagcccctcatctgtccag

SEQ ID NO: 448038 - DNA, 201 bp, Homo sapiens
tcctgtgaagcccacccagatgtctctgcccgtctatgaagaaagcaactcaggttatctgtggaaaaaaaccagagtgctctggacggagcagagacgcrttgcgatcccagctccactggttctctgggacctcggcctgccttcagcccctcatctgtccagcggggagtgggaatcccagccacacccgcctcaggc

SEQ ID NO: 448039 - DNA, 201 bp, Homo sapiens
tgaatagaggtccacatctattgggaaaagccgagggtttcgagctctgcatccagggcctcgggcatcacagcagcatggctgtcctctcctgagcctcygtctccagtgcagggggctccacggactacccccgaggctgttgtcatgaagtcacaggcgattgtccctttcctttgaccagactttcctttaacagcc

SEQ ID NO: 448040 - DNA, 201 bp, Homo sapiens
gaggccgaggcgggtggatcatgaggtcaggagatcgagaccatcctggctagcaaggtgaaaccccgtctctactaaaaatacaaaaaattagccgggcrcagtggcgggcgcctgtagtcccagctactcgggaggctgaggcaggagaatggcgtgaacccgggaagcggagcttgcagtgagccgagattgcgccac

SEQ ID NO: 448041 - DNA, 201 bp, Homo sapiens
aggccgaggcgggtggatcatgaggtcaggagatcgagaccatcctggctagcaaggtgaaaccccgtctctactaaaaatacaaaaaattagccgggcgyagtggcgggcgcctgtagtcccagctactcgggaggctgaggcaggagaatggcgtgaacccgggaagcggagcttgcagtgagccgagattgcgccact

SEQ ID NO: 448042 - DNA, 201 bp, Homo sapiens
ggccgaggcgggtggatcatgaggtcaggagatcgagaccatcctggctagcaaggtgaaaccccgtctctactaaaaatacaaaaaattagccgggcgcrgtggcgggcgcctgtagtcccagctactcgggaggctgaggcaggagaatggcgtgaacccgggaagcggagcttgcagtgagccgagattgcgccactg

SEQ ID NO: 448043 - DNA, 201 bp, Homo sapiens
cagcactttgggaggccgaggcgggaggatcacgaggtcaggagatcgagaccatcctggctaacacggtgaaaactcatctctactaaaaaatacaaaawattagctgggcatggtggtgggcgcctgtagtcccagctactcgggaggctgaggcaggagaatggcgtgaacccgggaggcggagcttgcagtgagctg

SEQ ID NO: 448044 - DNA, 201 bp, Homo sapiens
gaatatttgtcattattgtcactgctaactgtaatgacaggagacacccctgccaggtagcctgtgcacgctcctgctgtgcgtacagctactctcatcttctctctctctctctctctctctctgactggacttgaagtcagggattcagccacatttgcctaatctctctgtctctctctgattggacttgaagtcagg

SEQ ID NO: 448045 - DNA, 201 bp, Homo sapiens
aatatttgtcattattgtcactgctaactgtaatgacaggagacacccctgccaggtagcctgtgcacgctcctgctgtgcgtacagctactctcatcttctctctctctctctctctctctctgactggacttgaagtcagggattcagccacatttgcctaatctctctgtctctctctgattggacttgaagtcaggg

SEQ ID NO: 448046 - DNA, 201 bp, Homo sapiens
ggctctcgccttccatcacgcaggccttgcagctgctgcacacaatgcagcagtgtcttccggcaggggtgaacccaggtgtgaggacccctccatgggamagcctctcgcagttttccgggttaacagtcacagggctgccgtcacttcctggtggggaggagccaggaggagggggctcaggtttaggggctgtgcctg

SEQ ID NO: 448047 - DNA, 201 bp, Homo sapiens
atatttgtcattattgtcactgctaactgtaatgacaggagacacccctgccaggtagcctgtgcacgctcctgctgtgcgtacagctactctcatcttctctctctctctctctctctctctgactggacttgaagtcagggattcagccacatttgcctaatctctctgtctctctctgattggacttgaagtcaggga

SEQ ID NO: 448048 - DNA, 201 bp, Homo sapiens
tatttgtcattattgtcactgctaactgtaatgacaggagacacccctgccaggtagcctgtgcacgctcctgctgtgcgtacagctactctcatcttctctctctctctctctctctctctgactggacttgaagtcagggattcagccacatttgcctaatctctctgtctctctctgattggacttgaagtcagggat

SEQ ID NO: 448049 - DNA, 201 bp, Homo sapiens
cttctggaagtagtggcttttttgcgccatgccttgaagagaaagcatttgtgcaccggagcagaggtgcaggggcgttccgggaagaagagctgtatgatttttttttttttttttaccagcttatgctgtggtaacagactattcctaaatgtcagtgactataagcatgagttgacatcttcttacattacatgtcaa

SEQ ID NO: 448050 - DNA, 201 bp, Homo sapiens
ttctggaagtagtggcttttttgcgccatgccttgaagagaaagcatttgtgcaccggagcagaggtgcaggggcgttccgggaagaagagctgtatgatttttttttttttttttaccagcttatgctgtggtaacagactattcctaaatgtcagtgactataagcatgagttgacatcttcttacattacatgtcaac

SEQ ID NO: 448051 - DNA, 201 bp, Homo sapiens
tgctttttaaaagtaattgcattgtttgtatttccccttgcactagggtatgtctctggaacagggaagcagaggtttggttggtgaatgtgaatggataygggatggaaaatctcagccagtgtcagctgggggctcctggagaccagcaagcaaagcttctttgccttggaaacctttgttctttgttcttgataaatt

SEQ ID NO: 448052 - DNA, 201 bp, Homo sapiens
acagagggagagggctctggaacacggggtgtcggggctcagggccaggctgaatcttccggagggcgatgctgggcagactcaccccaacaggagtctcrctgggcctttgttcttttgtaaaggcttttgccacttgggtgtccaagctgtgggaggttcagtggtggtcagaggagtctcatcaagggatggggctca

SEQ ID NO: 448053 - DNA, 201 bp, Homo sapiens
agacatggtcctggtcgctgggttctctgtcttttgttctgcttccatttgttccctataacaaagctcttagtgcccagggagccactggggaggggtgytggtggtgggaaggtggaccctggcagtgctcttccttaagagggcttgccagcgttggtgcccaacagctcaaggtccacggctcagcttcacctctca

SEQ ID NO: 448054 - DNA, 201 bp, Homo sapiens
tgaacccaggaggtggaggttttggtgagctgggatcacgccactgcactccagcctgggtgacaaagcgagaccctgtctcaaaaaaaaaaaaaaaaaaaaaattgtgaagacttatgatgggacttaagagtgaagctcttgatatattcaaaatataacaaaaatttgctcatgatttcacatggttatatttccact

SEQ ID NO: 448055 - DNA, 201 bp, Homo sapiens
cccttgcttccctcgcgtctcttgcaaaacccgggacggatcgggggcccaggcctggcctccgcgcacgcgcaggagcagcgccggctcggccgccagtmggaagcgccagcccagagcctgggaagtggccgcagaggctgctcggccccgctgcccgccaggtcgtgggctcccgctccgggcccggggccaccggct

SEQ ID NO: 448056 - DNA, 201 bp, Homo sapiens
aacctctgccagggtcgtctgccttccctcgcgcgcccccttcggcccccctgtgtgcccttccctcgcgcgcccccatcggccccgctgtgtgcccttcyctcgcgcgcccccatcggccccgctgtgtgcccttccctcgcgcgcccttccctcgcgcgcccccttcggcccccttgtgtgccctctccttgcgtgcct

SEQ ID NO: 448057 - DNA, 201 bp, Homo sapiens
atacttttcaactgtctgtgcatccagatttctccgtctttaattcaaagatgctaaactgttttggagtgagcagctgtagaatttaactttttttttttctaatttagctatctacttttcttcatttttcttatattttagagaaatattatatttttgatttaatgttgttggttgttgataatgaaggcccttcaa

SEQ ID NO: 448058 - DNA, 201 bp, Homo sapiens
gcccctgcgcactgtcaccattggacgctgctgggtttgcattacacaatttagtagcaggtcaagtagtttcgtgagctcccattagaatctcttctgtcccccctagaaaaatgcagttctttttgcctgaaatgcctcatgtttatcaggcgaaagacaaactgcctgtgggaagttggaatcagttcagttctttgt

SEQ ID NO: 448059 - DNA, 201 bp, Homo sapiens
gatacttttcaactgtctgtgcatccagatttctccgtctttaattcaaagatgctaaactgttttggagtgagcagctgtagaatttaactttttttttttctaatttagctatctacttttcttcatttttcttatattttagagaaatattatatttttgatttaatgttgttggttgttgataatgaaggcccttca

SEQ ID NO: 448060 - DNA, 201 bp, Homo sapiens
actccgtctcaaaaaaaaaagaaaagaaacagaagttatgattgctacactacagggttgttgggaggattcagttgggtcttggatgaaagaaaacttttgtaaaccctgaagtcttaagtctgatatcagtggtattgttaataattcattacccagttacatgattctgtgtcttcttgtgttttaagaatttttgtg

SEQ ID NO: 448061 - DNA, 201 bp, Homo sapiens
cttccaggtatctgtccaaggcatagggcacagcatccctgtttcagccatctctccatccatcttcttcccaacactgtgatttttttttttttttttttgagatggagcctcgctcttgttgtgctgaagtgcagtggcgcgatctcggttcactgctaacttccacctcccaggttcaagtgattctcctgcctcagc

SEQ ID NO: 448062 - DNA, 201 bp, Homo sapiens
cccaccaccacacccagctaatttttgtctttttagtagagacggcattttgccatgttggccaggctagtctcgaactcctgacctcaggtgattcaccygcctcagcttcccaaagtgctgggattataggcatgagccactgtacccaacccaaaccgaggtgtttctgactttagaagacacacttctccagtggtt

SEQ ID NO: 448063 - DNA, 201 bp, Homo sapiens
gagtctcaccctgtcacccaggctggagtgcagtggcgcaatctcagctcactgcaacctccgcctcccaggttcaagctattcaggagtttttttttttwttttattttaattcattgtatttttaagttgtaaaatgtccacttgcctctcttttatattttctatttctttgttgtaaattcctatttttaaaacttc

SEQ ID NO: 448064 - DNA, 201 bp, Homo sapiens
cacagaccttctgtctccgctcttctgaggactctgcacatgtgcagtgctggcctcctcagacgtgcttcgtcagggaagccactagaagcacagggagagaaggaggccagcagatggagaattttgccaggtggaggtggggctgagatgaggttagccaggtggaggtggggctgaaacttgggaatgacaggagca

SEQ ID NO: 448065 - DNA, 201 bp, Homo sapiens
ttaacaacaagagcagctctggactaggcaggggtgtaagggcctctggaacaggtagatgtcgggtcccctgagtagctgggagtctggtctttgcccasatcagctgtgggcctttggccaggtacttagtgctgcctagcctggcttcccccaactgcaaagccaggctggtgtctaccctctgagttggatatgacg

SEQ ID NO: 448066 - DNA, 201 bp, Homo sapiens
acagaccttctgtctccgctcttctgaggactctgcacatgtgcagtgctggcctcctcagacgtgcttcgtcagggaagccactagaagcacagggagagaaggaggccagcagatggagaattttgccaggtggaggtggggctgagatgaggttagccaggtggaggtggggctgaaacttgggaatgacaggagcag

SEQ ID NO: 448067 - DNA, 201 bp, Homo sapiens
gggaaagataacatgtgtttctcaggttttccagaaagatgccttcctccatttagctagagtgactgtgtctgtccacgttcatgactgtctttcctgcrtgcctcaggaggaatcttctagggttgaaaatagggactgtgtgaattggatgcatcttagaaacaatatttatgcaagccagcaagacagtccagcttt

SEQ ID NO: 448068 - DNA, 201 bp, Homo sapiens
gtgtatatatatatatgtatatatatatgtgtatatatgtgtgtgtatatatatatgtgtgtgtgtgtgtgtatatatatatgtgtgtgtgtgtgtatatrtatatatatgaactttagcattcattcttgccattgattcctcatgttaagtgcatgtcatcttgccaggcacgcctggtgctggtgaaacagctgagaa

SEQ ID NO: 448069 - DNA, 201 bp, Homo sapiens
cagaccttctgtctccgctcttctgaggactctgcacatgtgcagtgctggcctcctcagacgtgcttcgtcagggaagccactagaagcacagggagagaaggaggccagcagatggagaattttgccaggtggaggtggggctgagatgaggttagccaggtggaggtggggctgaaacttgggaatgacaggagcaga

SEQ ID NO: 448070 - DNA, 201 bp, Homo sapiens
ggtgtaaacatgtggctgggtgtgagctctgagcacagaagtcacttggggatcatagcagttttgtttgtgagggacagtgtggggaagagaggccccaacgcaggctgaggtcagttcctgtcacaggtcttgcataaaagtcatcaggtgggcaagagagaatccctgaaggaatctaagctgggagtcgcagtggag

SEQ ID NO: 448071 - DNA, 201 bp, Homo sapiens
ggttcagctccacttagcggggagatgattatacagggatgtttatttccatggaggctgatgacctaggcacggtgtccctcagtagattttcattcacctccggaacggatggcatcccaggaccctaatactgtgttttagctggcttaccagtccggcccatctgcagctcttctacaaaagctgttgtagggcttg

SEQ ID NO: 448072 - DNA, 201 bp, Homo sapiens
aagccctgcctcacctgccctcctatggaggctgccccagctctcactgccagccatgcctgtctggaggcccagggaatgacatgtcctgtgtgtccacrtagacttgactcctggcagtcacttcattgcctgagcttcagtttcctcatctgctttgtgaagacaaaacccatttcaggccaggagcggtggctcacg

SEQ ID NO: 448073 - DNA, 201 bp, Homo sapiens
acaggagaaccgcttgaacctgcgaggcagggggcaggggtttcagtgagccgagagtgtgccactgtactagcctagtcaacagagcaagactccatccaaaaaaaaaaaaacaccaaaccatttcaaagatcaaccttggaaggaaatgaaaataaatgagttaacatatgtgattgttgcgaacagtaaatattctca

SEQ ID NO: 448074 - DNA, 201 bp, Homo sapiens
aatgaagaaggatttctcttttttaccataattgatctaggaggctgaaggataaaatgatcctctctcagggcgtgatccatacgtccgtgttcacgccrtttccttgtctgctcaaagtcccttctcattcaggatggacgagtcaggaagatgactgcttccctctcacttggcatcgtacttctttgcaaaacagca

SEQ ID NO: 448075 - DNA, 201 bp, Homo sapiens
gtggctccatgtctgggaacagttcctgagagtcagtcgtaagtgcaggcagaaacactcagcacaaagatgtttgtcaggtctttttctacaatagtcattttttttaaacttggaaaagagctgagagtccaaaaaataggagaaccattctgtaggctatgatacaaccctaagatagaatatttcgcagactaattt

SEQ ID NO: 448076 - DNA, 201 bp, Homo sapiens
gcggggttatagaatctttcgtgggaaaggagcctgactagtgtccccttctggtgctactcctcatgcttagatcctgtcagaggccgtccactgctacyggcaccctctcattgcgcagcctgttctcatcctcagactccagtccctcacagagtttactttcaaccctgtgctgcttcgtgtcttcctcccaccttc

SEQ ID NO: 448077 - DNA, 201 bp, Homo sapiens
ggtgtgagtgtgttgtcaggggaagggagccgtggggactggccttgggacctggaagctcaggggccaaggcggccactttccttccctccttctgggaygcctatctcagctgctgtcctcatgcctgcagtggcagtgagtcctttcagcccaagtccccatcaccaactgactcgcgcatgattggcatctgaccca

SEQ ID NO: 448078 - DNA, 201 bp, Homo sapiens
ctcaggggctgtgggtggagctggaaggttggcagaaacctctgatacatttgggaacagaaacgacgtcagtttgattagaacacggggcctttggagargacgaagaggaggctgggatggttggcaagccctttgtgatgggctccccttatgctgctgatggctcggcccgaggggggcagtgtgacctgcatggca

SEQ ID NO: 448079 - DNA, 201 bp, Homo sapiens
aacagaaacgacgtcagtttgattagaacacggggcctttggagaggacgaagaggaggctgggatggttggcaagccctttgtgatgggctccccttatkctgctgatggctcggcccgaggggggcagtgtgacctgcatggcacaggggggtcctgtgtcccctgagcaagcgagtgagccacccctgcggctgtggc

SEQ ID NO: 448080 - DNA, 201 bp, Homo sapiens
gcacctggtgccgggccttctgggccagggaatgtgacacttgcttctttctccctctgcctctccaagcttggacagctggaggtggagagagcacagcyctgtgtactgagcacacgtgccaggcgccagaaggcatggtgcggtgttgccatcccccttttattcccgaggacacccagacacagcgtgccctaccta

SEQ ID NO: 448081 - DNA, 201 bp, Homo sapiens
gcttctttctccctctgcctctccaagcttggacagctggaggtggagagagcacagccctgtgtactgagcacacgtgccaggcgccagaaggcatggtrcggtgttgccatcccccttttattcccgaggacacccagacacagcgtgccctacctaggtccccagagtcaacttgtgacaggtctcctgctgtccctg

SEQ ID NO: 448082 - DNA, 201 bp, Homo sapiens
ggccccagttaccaggctgggccatggactgagcaatgttttttaatgaaaaaaaaaaaaagtctgttaatagttaaaaagaaagaaaagaaaaatttcarataatacttaagtttggaaaatacttagtgatttttgttttgacaatatagtggtccaaaaactctcagcacaagttccttaaaattctgattaagagat

SEQ ID NO: 448083 - DNA, 201 bp, Homo sapiens
cttggacagctggaggtggagagagcacagccctgtgtactgagcacacgtgccaggcgccagaaggcatggtgcggtgttgccatcccccttttattccygaggacacccagacacagcgtgccctacctaggtccccagagtcaacttgtgacaggtctcctgctgtccctgcctctctctgactccagagtccttgct

SEQ ID NO: 448084 - DNA, 201 bp, Homo sapiens
caggctgccctggtaaaaaccagcaccgggcaggccctgtggccccagttaccaggctgggccatggactgagcaatgttttttaatgaaaaaaaaaaaaagtctgttaatagttaaaaagaaagaaaagaaaaatttcaaataatacttaagtttggaaaatacttagtgatttttgttttgacaatatagtggtccaaa

SEQ ID NO: 448085 - DNA, 201 bp, Homo sapiens
ctaaaggtaggtattgtaagcagctttgaccctgggaatgtttgtattgtttacttgtagaagagatactttaaattctcagttttcagagaatctaaaarcttctttgtggattcagttgaagtcagtagaagtcaggcgagggcttacaggctgagagcttgagtgcaggagccttggggaggcttggtgccatcatga

SEQ ID NO: 448086 - DNA, 201 bp, Homo sapiens
acttgtgacaggtctcctgctgtccctgcctctctctgactccagagtccttgctgtctgccaaacatcccttcatttattttaaaaagaaaaggctacaygtagagcgatacaggttgcctgctgttcccctccgataggtgccgcccaccctagcgtgccccgtccaggacagccacctcagtcgcccgagtcccccaa

SEQ ID NO: 448087 - DNA, 201 bp, Homo sapiens
ttcacaagagccaggaaaccaggcaggagaccacagctacacccacggtcgcacataaataagaaaaggtgcatggaagaggatgggaaggacagccttgmaccagcctcctccggccccaggcagcacagcatggagggagatgacctccactagggaaaggagagcaacgtgagtgccaggcctgcctcggacaccagc

SEQ ID NO: 448088 - DNA, 201 bp, Homo sapiens
gtggacaaggaggataagagctttcaggccctcagaccattccaggccctctcctggacaggagccacctcagggcctccttcaggtcggaaacactggtkctgagccagggcgaagtgaggtatgctggcagagctggctctctgggcagacagactccactgtgaagaagtggcttcacctcctgaccatctcatcctc

SEQ ID NO: 448089 - DNA, 201 bp, Homo sapiens
tccgtccctctttctgcagggccagaggtgaccctgcctggcctcccacaccccctgcaatgagcaaggccttcactgcagccccatctcctcctcctccyccagacccctcccagccctctcctcctgttcctcctgtagcatctttgctgggctacgcagaagccccggacatggcagccccaccccatgccacgcccc

SEQ ID NO: 448090 - DNA, 201 bp, Homo sapiens
tgcctgctgttcccctccgataggtgccgcccaccctagcgtgccccgtccaggacagccacctcagtcgcccgagtcccccaaggctgcagggcaggtasgcggccctccctgctcatggcaccctcccaggtctgctgtttccatggcaaccctcttggcctgggctggcccaagcttccggactagggtggctgtggc

SEQ ID NO: 448091 - DNA, 201 bp, Homo sapiens
aggtgcttgtcctccagggtgtgggaggccactctgtagggataggggagtaggaggcataggacctgcccggggtggcacaacgagtctacgcggagccrggatggaagcagtctggccagtgcttcccctctgcatccacaggcgccaggctctgctgagctgagcagtgctgttccaggcacacaggtctttgtttct

SEQ ID NO: 448092 - DNA, 201 bp, Homo sapiens
gtcccttaccagatccatgctttgcagaatttctctcccattttgttattgtcatttcactttctttctttttcttttcttcttcttttttttttttttttgagatggagtttggctctgttgcccaagcttgagtgcagtggcacagtctcagctcactgcaacctccgcctcccgggttcaagcaattctcctgcctca

SEQ ID NO: 448093 - DNA, 201 bp, Homo sapiens
cttcatttcattcatttgatcttcaatcactgataccctttcttccagttgatcgaatcggctactgaagcatgtgcattcgtcacgtagttctcgtgccwtcgttttcagctccatcaggtcatttaaggacttttctacactggttattctagttagccatttgtctaatcttttttcaaggtgtttaagttctttgca

SEQ ID NO: 448094 - DNA, 201 bp, Homo sapiens
gggtggagaaataggtcaggcgtaggcccaacatcaaggagacgctatgctggcagctgatggagacacatgcctcagaaacaacatcccatgggccgggygcggtggctcacgcctgtaatcccagcactttgggaggttgaggtgggcggatcacaaggtcaagagtttgagaccagtgtggcaaacatagtgaaaccc

SEQ ID NO: 448095 - DNA, 201 bp, Homo sapiens
tcttggcatcaggtcatttctgcccaggaggcccttcgcatacaaaggctttctctcctgcctactttccagacctaatcttccttcagggagaaagaaawtggacagtttgtacacttgaaacccagaggtggcaagagatactcagggtattcttttctgaggtgggagaatgatatttctcatccagaactttcccct

SEQ ID NO: 448096 - DNA, 201 bp, Homo sapiens
tacatttaaggttaatattgttatgtggaatttgatactgtcattatgatgttagctggttattttgctcgttaattgatgcagtttcttcctagtctcgrtggtctttacaatttggcatgtttttgcagtgactgttactggttgttcctttccatgtttagtgcttccttcaggagctcttgtagggcaggcctggtg

SEQ ID NO: 448097 - DNA, 201 bp, Homo sapiens
tctctgccaggctatggtatcaggatgatgctggcctcataaaatgagttagggaggattccctctttttctattgattggaatagtttcagaaggaatgrtaccagctcctccttatacctctggtagaattcggctgtgaatccgtctggtcctggactttttttggttggtaagctattaattattgcttcaatttca

SEQ ID NO: 448098 - DNA, 201 bp, Homo sapiens
ttcttccatttgtttgtatcctcttttatttccttgagcagtggtttgtagttctccttgaagaggtccttcacatcccttgtaagttggattcctaggtwttttattctctttgaagcaattgtgaatgggagttcactcatgatttggctctctgtttgtctgttattggtgtataggaatgcttgtgatttttgcaca

SEQ ID NO: 448099 - DNA, 201 bp, Homo sapiens
ttgtccttgcgatagtttgctgagaatgatggtttccagcttcatccatgtccctacaaaggacatgaactcatccttttttatggctgcatagtattccrtggtgtacatgtgctacatttcttaatccagtctatcattgttggacatttgggttggttccgagtctctgctgttgtgaatagtgctgcaataaacata

SEQ ID NO: 448100 - DNA, 201 bp, Homo sapiens
cactaccctgagccgcgaggccctgctccaggccgagacctgctgtaggcgcttcccgggctctagctcaccattctgcaacagctgtggggcaagtgccktcccttccccattttagaaatgggcaaacaggtgtgagaggtgtcctgcaagggtttccacctgatggctatgttctgtgttagctcctgcattgggagc

SEQ ID NO: 448101 - DNA, 201 bp, Homo sapiens
ggccccggtgtgtgatgttccccttcctgtgtccaagtgttctcattgttcagttcccacctatgagtgagaacatgcggtgtttgtttttttgtccttgmgatagtttgctgagaatgatggtttccagcttcatccatgtccctacaaaggacatgaactcatccttttttatggctgcatagtattccatggtgtaca

SEQ ID NO: 448102 - DNA, 201 bp, Homo sapiens
atcctctaaggagaaaactgaggctccttgaggtgatgtcacactctccaagttacccactttggtctctgtcagttacactgtgacaccttcttctttcrctacagcttttctgaattttacctgtggacagagtcccaacgcctctgtatcctgcactcgaggcctttgatgccttccccttggaccatcatttcatcg

SEQ ID NO: 448103 - DNA, 201 bp, Homo sapiens
aaagccacaaattacatgggaacaaaactgatgataattgtagacctcttgttggaaaaaatgctcctggaagacagtggaatttgatctttcacttggtaaaaaaaaaaaaaaaaatagctgttaacttggaattctatatccagcaaaaatatccataaaaaaatacaaataaagacaaaagctgagagaattcctctc

SEQ ID NO: 448104 - DNA, 201 bp, Homo sapiens
gcgagactctgtctcaaaaaaaaaaattgtgtgtgtgtgtgtatatatatatatgtatatatatatgtgtatatatgtgtgtgtatatatatatgtgtgtrtgtgtgtgtatatatatatgtgtgtgtgtgtgtatatatatatatatgaactttagcattcattcttgccattgattcctcatgttaagtgcatgtcatc

SEQ ID NO: 448105 - DNA, 201 bp, Homo sapiens
gagcgagactctgtctcaaaaaaaaaaattgtgtgtgtgtgtgtatatatatatatgtatatatatatgtgtatatatgtgtgtgtatatatatatgtgtrtgtgtgtgtgtatatatatatgtgtgtgtgtgtgtatatatatatatatgaactttagcattcattcttgccattgattcctcatgttaagtgcatgtca

SEQ ID NO: 448106 - DNA, 201 bp, Homo sapiens
cagagcgagcgagactctgtctcaaaaaaaaaaattgtgtgtgtgtgtgtatatatatatatgtatatatatatgtgtatatatgtgtgtgtatatatatrtgtgtgtgtgtgtgtgtatatatatatgtgtgtgtgtgtgtatatatatatatatgaactttagcattcattcttgccattgattcctcatgttaagtgc

SEQ ID NO: 448107 - DNA, 201 bp, Homo sapiens
gggagtcagctgtcttcttgtgctgagttggttcctgggtgggggccgcaagatcagacaagccagtttatcgatctgggtggtaccagctgatccatcargtacagggtttgcaaaatacctcaagcagtgatcttaggagcggttcagggagggtcagaatcttgtagcctccatctgcgtgactcctaaaccataatt

SEQ ID NO: 448108 - DNA, 201 bp, Homo sapiens
gacagagcgagcgagactctgtctcaaaaaaaaaaattgtgtgtgtgtgtgtatatatatatatgtatatatatatgtgtatatatgtgtgtgtatatatrtatgtgtgtgtgtgtgtgtatatatatatgtgtgtgtgtgtgtatatatatatatatgaactttagcattcattcttgccattgattcctcatgttaagt

SEQ ID NO: 448109 - DNA, 201 bp, Homo sapiens
aacaacatcccatgggccgggcgcggtggctcacgcctgtaatcccagcactttgggaggttgaggtgggcggatcacaaggtcaagagtttgagaccagygtggcaaacatagtgaaaccccgtctctactaaaaatacaaaaaattatctgggcgtggtggtgggtgcctgtaatcccagctactcaggaggctgagtc

SEQ ID NO: 448110 - DNA, 201 bp, Homo sapiens
gagccgagatcacaccactgcactccagcccaggcgacagtgtgagactccatctcaaaataaaagaaaaaaaaaaacgaaacaacatcccatgtagggtraaatgcacgaaagaacaaggtgctgtgcacacaggggtgggtgtttcgaacgaggagcatcggagctggttctaggcacagccacactctcgtcaggtct

SEQ ID NO: 448111 - DNA, 201 bp, Homo sapiens
gtctcctaatgctatccctcccacctcccccctccccaccccacaacaggccccggtgtgtgatgttccccttcctgtgtccaagtgttctcattgttcarttcccacctatgagtgagaacatgcggtgtttgtttttttgtccttgcgatagtttgctgagaatgatggtttccagcttcatccatgtccctacaaagg

SEQ ID NO: 448112 - DNA, 201 bp, Homo sapiens
gagctccttggagaagtgatttaattctaggcctggggctggatatgaaccagaaacaaagggatcaaagaataatgggaccttatccaaaggacacaggraccaaccagaagggactcccactggccaaagatggtgcctacatcaaaaaagaagaaagctttcaaataaacaatctaacactgcatcttaaggaattag

SEQ ID NO: 448113 - DNA, 201 bp, Homo sapiens
cgccactgcactccagcctgggtgacaagagcaaaactccatctaaaaaaataaaataaaataaaataaaataaaataaaataaaataaaataaaataaaaataaaatgggaatgataatattcacttctttctagagttgctgtaagttgtgaatgatagaataatgcatataaagtgctaagcactgtgcttggctttt

SEQ ID NO: 448114 - DNA, 201 bp, Homo sapiens
gcgccactgcactccagcctgggtgacaagagcaaaactccatctaaaaaaataaaataaaataaaataaaataaaataaaataaaataaaataaaataaaaataaaatgggaatgataatattcacttctttctagagttgctgtaagttgtgaatgatagaataatgcatataaagtgctaagcactgtgcttggcttt

SEQ ID NO: 448115 - DNA, 201 bp, Homo sapiens
ggcgccactgcactccagcctgggtgacaagagcaaaactccatctaaaaaaataaaataaaataaaataaaataaaataaaataaaataaaataaaataaaaataaaatgggaatgataatattcacttctttctagagttgctgtaagttgtgaatgatagaataatgcatataaagtgctaagcactgtgcttggctt

SEQ ID NO: 448116 - DNA, 201 bp, Homo sapiens
tggcgccactgcactccagcctgggtgacaagagcaaaactccatctaaaaaaataaaataaaataaaataaaataaaataaaataaaataaaataaaataaaaataaaatgggaatgataatattcacttctttctagagttgctgtaagttgtgaatgatagaataatgcatataaagtgctaagcactgtgcttggct

SEQ ID NO: 448117 - DNA, 201 bp, Homo sapiens
atggcgccactgcactccagcctgggtgacaagagcaaaactccatctaaaaaaataaaataaaataaaataaaataaaataaaataaaataaaataaaataaaaataaaatgggaatgataatattcacttctttctagagttgctgtaagttgtgaatgatagaataatgcatataaagtgctaagcactgtgcttggc

SEQ ID NO: 448118 - DNA, 201 bp, Homo sapiens
acgtgcacacatgcacttacacgcgcatgctcacacccgcacacaggcacgtacacacgcatgctcacacacatgcacatacacacatgttcacacacacrtacatacaagcatgctcacacacgcacacacatgcacgtacacacatgctcacgcgtgcacacatgcatgtacacacatgctcacatgtgcgcacacatg

SEQ ID NO: 448119 - DNA, 201 bp, Homo sapiens
tgacctttatgcctatgagacacacacacacacacacacacacacacacacacacacgcatgctcacacacacgtgcacacatgcacttacacgcgcatgstcacacccgcacacaggcacgtacacacgcatgctcacacacatgcacatacacacatgttcacacacacatacatacaagcatgctcacacacgcacac

SEQ ID NO: 448120 - DNA, 201 bp, Homo sapiens
ccatagcctccatgacctttatgcctatgagacacacacacacacacacacacacacacacacacacacgcatgctcacacacacgtgcacacatgcacttacacgcgcatgctcacacccgcacacaggcacgtacacacgcatgctcacacacatgcacatacacacatgttcacacacacatacatacaagcatgctc

SEQ ID NO: 448121 - DNA, 201 bp, Homo sapiens
atgttgtagtattacaactgtggctgtaatcgctgccttcagccagccttgccattcttgtgcacaggctgagatgcaagactgtttgggtggcttacagkgctgaaaggaagtcggatatgcatgcaggtaattagctttattagcttagctgtataattttatggctcatgtccgaaagcaaattaatacagaaatatg

SEQ ID NO: 448122 - DNA, 201 bp, Homo sapiens
ccaggaggtggacgtcgcagtgagccatcactgcactccagcctgggtgacagagcgagcgagactctgtctcaaaaaaaaaaattgtgtgtgtgtgtgtrtatatatatatgtatatatatatgtgtatatatgtgtgtgtatatatatatgtgtgtgtgtgtgtgtatatatatatgtgtgtgtgtgtgtatatatata

SEQ ID NO: 448123 - DNA, 201 bp, Homo sapiens
gcatgtagataattgattattccatcgtgtcctctgcctctgaatccagggcactggaaacagccatcctcttacttcctgtggcaggcagtttggcctgygtctcaggcttggtgtctagagtcagactacttggattcaagtccagctctgcttctgacaagccgtggggtcttggaaagttagctgacctctttacct

SEQ ID NO: 448124 - DNA, 201 bp, Homo sapiens
tcctcttacttcctgtggcaggcagtttggcctgcgtctcaggcttggtgtctagagtcagactacttggattcaagtccagctctgcttctgacaagccrtggggtcttggaaagttagctgacctctttaccttcagtttccacatctgtaaagtgtgttaataatagaatgtgctggtttgggttgttatagaatccg

SEQ ID NO: 448125 - DNA, 201 bp, Homo sapiens
cctcccagataatgcttaattgccacagtgatgagaaggtatattcacctgctgcttggccttaagcgtttcaagagcatgtttttcttcacttgcattckatttgaaacaactaagtaatcactattcaatctctggcctttagaagatctctgtgagccccttttctgtcctgtcagtgccctttggtgcagactcaga

SEQ ID NO: 448126 - DNA, 201 bp, Homo sapiens
catgtaatcgtcggtttgctgggtgggaaagggggtgcgggtacagggaatccaggagagaaagggcttaggcaagggagggagatgaagctagcgggggygtggggggacatggaagagagaaggcttcccggagaaccggctgggattcttcaggcagacggggggatggggaagtccagagagagtggaggaaccccc

SEQ ID NO: 448127 - DNA, 201 bp, Homo sapiens
tcgggtccccagtcagtctgaggatgcgcagggcacatagggccaccctggctttatgcacagggaaagtgaaagcagaagaggtgggtggccagcctcargtcacaggtcagctgcacgaggagccggcataaaaacaaaggcctcctccttcccagctcttgtgactttacctgtaatcatgataaacgtaaatagacg

SEQ ID NO: 448128 - DNA, 201 bp, Homo sapiens
gcctttagaagatctctgtgagccccttttctgtcctgtcagtgccctttggtgcagactcagaggtgcgtggagtgagctcggcatctgtaatcacatartgagaagaacagaggcctacctctgcctcccagcctctaactctgcagcttgaggtacagcttctcctaagtttcagtgccctgtgcagaaaatgggcat

SEQ ID NO: 448129 - DNA, 201 bp, Homo sapiens
tctttttgaagggggaaaaaaaatgaaaacaacctatattcagaggaaaagccccagctcctaatcccccatttggagaggcctctgttcacaggcccccrgtgttccatctgtggacatggctgctgtgtttcaggcgcagtctcctttctgcgtccctgtggcaaccctggaggaggttgctacgacatccctcatgtg

SEQ ID NO: 448130 - DNA, 201 bp, Homo sapiens
gtccatagcctccatgacctttatgcctatgagacacacacacacacacacacacacacacacacacacacgcatgctcacacacacgtgcacacatgcacttacacgcgcatgctcacacccgcacacaggcacgtacacacgcatgctcacacacatgcacatacacacatgttcacacacacatacatacaagcatgc

SEQ ID NO: 448131 - DNA, 201 bp, Homo sapiens
aggcctgtgtcacaggtggggaggtggcggtggggatgtgcgcgcctgggtctggctgactccaagccgtgagcaggtgaggcactctgtttggcagggcrttgtcctcggttgactcacctcacccttttatagttcatttgtttggctgtaaggcgggtgcggctccctccctgccgcgcctcctcttgccgcatgcca

SEQ ID NO: 448132 - DNA, 201 bp, Homo sapiens
tcatttgtttggctgtaaggcgggtgcggctccctccctgccgcgcctcctcttgccgcatgccatgtgttttggtgcataccaaagaggccttcggagcyggtgttcacttactggttggtgtgcaaccactacatcagtccgttttttctgctcttgtagcctaattgaattgtcagttgctgaatgttttcaccagtg

SEQ ID NO: 448133 - DNA, 201 bp, Homo sapiens
ggtccatagcctccatgacctttatgcctatgagacacacacacacacacacacacacacacacacacacacgcatgctcacacacacgtgcacacatgcacttacacgcgcatgctcacacccgcacacaggcacgtacacacgcatgctcacacacatgcacatacacacatgttcacacacacatacatacaagcatg

SEQ ID NO: 448134 - DNA, 201 bp, Homo sapiens
gttgacaggctcaccctgataatgggaaaggctgcaaagggggcacctgtgcgtgaggcctggctcctagccccaatcctgtggccagatcagggttgccrtaattggaaaccttgataagaattttacatttgaaggtggaggtggaggtagggtggggggctcctcctaaaggaaggggctgccgtaatgaacaaaact

SEQ ID NO: 448135 - DNA, 201 bp, Homo sapiens
tggtccatagcctccatgacctttatgcctatgagacacacacacacacacacacacacacacacacacacacgcatgctcacacacacgtgcacacatgcacttacacgcgcatgctcacacccgcacacaggcacgtacacacgcatgctcacacacatgcacatacacacatgttcacacacacatacatacaagcat

SEQ ID NO: 448136 - DNA, 201 bp, Homo sapiens
ttggtccatagcctccatgacctttatgcctatgagacacacacacacacacacacacacacacacacacacacgcatgctcacacacacgtgcacacatgcacttacacgcgcatgctcacacccgcacacaggcacgtacacacgcatgctcacacacatgcacatacacacatgttcacacacacatacatacaagca

SEQ ID NO: 448137 - DNA, 201 bp, Homo sapiens
tacttataaacaacgtatagttgaattttgcctttttatttttttgttttactatttatttctttattattattatttttgagatggagtctcactctgtygcataggctggagcacaatggcatgatcttggctcaatgaaacctccgcttcctgagtgcaagtgattctcttgcctcagcctcctgtgtagctggcttt

SEQ ID NO: 448138 - DNA, 201 bp, Homo sapiens
acttggtccatagcctccatgacctttatgcctatgagacacacacacacacacacacacacacacacacacacacgcatgctcacacacacgtgcacacatgcacttacacgcgcatgctcacacccgcacacaggcacgtacacacgcatgctcacacacatgcacatacacacatgttcacacacacatacatacaag

SEQ ID NO: 448139 - DNA, 201 bp, Homo sapiens
aacttggtccatagcctccatgacctttatgcctatgagacacacacacacacacacacacacacacacacacacacgcatgctcacacacacgtgcacacatgcacttacacgcgcatgctcacacccgcacacaggcacgtacacacgcatgctcacacacatgcacatacacacatgttcacacacacatacatacaa

SEQ ID NO: 448140 - DNA, 201 bp, Homo sapiens
gacaggttcaccttccatttcgtaggcaagcgataaaaagcctgagctccgcggtttgccaagtaaaaagtatttgtgcatattgttactttgaatcctcrtgagaactcattgaggatgaaagttgccttcattccatagacgaggactaagcagaacctggactgtggaccagcaatctatcctgggctcctgtggcca

SEQ ID NO: 448141 - DNA, 201 bp, Homo sapiens
caacttggtccatagcctccatgacctttatgcctatgagacacacacacacacacacacacacacacacacacacacgcatgctcacacacacgtgcacacatgcacttacacgcgcatgctcacacccgcacacaggcacgtacacacgcatgctcacacacatgcacatacacacatgttcacacacacatacataca

SEQ ID NO: 448142 - DNA, 201 bp, Homo sapiens
gatcatggcctatgatcttaatttgtaatttatcttccccattttcatttcatttatattcccagttgtatatgttttagcgcttttgtctttacgaaatrcatcctgtttttaatataatagaattgttttgtagcttaatgagtttactgtaattctaatttttttaaactgttgattttgaaataatttaaaacttat

SEQ ID NO: 448143 - DNA, 201 bp, Homo sapiens
tcaacaacttggtccatagcctccatgacctttatgcctatgagacacacacacacacacacacacacacacacacacacacgcatgctcacacacacgtgcacacatgcacttacacgcgcatgctcacacccgcacacaggcacgtacacacgcatgctcacacacatgcacatacacacatgttcacacacacataca

SEQ ID NO: 448144 - DNA, 201 bp, Homo sapiens
tccagtccaggatcacacacggcatttagtgtttatggcacttagtatcgtctcagcctatcttcgtttttcatgataattgatatttctgaagaatgcasgccatttattttgtggaatgttctcactttgtgtttgcctgaagttgctttttgattatgaggttttgcattttggcagggcagaaggaggggtcaagtg

SEQ ID NO: 448145 - DNA, 201 bp, Homo sapiens
tattatcaacaacttggtccatagcctccatgacctttatgcctatgagacacacacacacacacacacacacacacacacacacacgcatgctcacacacacgtgcacacatgcacttacacgcgcatgctcacacccgcacacaggcacgtacacacgcatgctcacacacatgcacatacacacatgttcacacacac

SEQ ID NO: 448146 - DNA, 201 bp, Homo sapiens
gcccagcgcctctcctattctttccacctcatttccctacccttatatcatttgttcctggccttttcttcttcttattttttaaataaacacattaatgytcttaattctttttcttgtgcaaaaggtaagatattacatatattcttttgtacttggtgttttttgttctattttggttgctaatgtatcctggagatc

SEQ ID NO: 448147 - DNA, 201 bp, Homo sapiens
ttattatcaacaacttggtccatagcctccatgacctttatgcctatgagacacacacacacacacacacacacacacacacacacacgcatgctcacacrcacgtgcacacatgcacttacacgcgcatgctcacacccgcacacaggcacgtacacacgcatgctcacacacatgcacatacacacatgttcacacaca

SEQ ID NO: 448148 - DNA, 201 bp, Homo sapiens
tgggtggcaggctcatccctgagcctcccaacagtgcaagggaaacaggatttgtgggagatgctcactctctgtaagctaaacaagtggtttcatagaarcccagctttccctgctattgagatttaggagaatattttttgagtgttctgtgaagtcaatgaatattttatctttattttttttctgccagagttctct

SEQ ID NO: 448149 - DNA, 201 bp, Homo sapiens
catttttagtagtgagagaattgaatagtgcttagtcagagtgctttctgggtgggagttgtatagtaataaagatacattttcatgtattttctagacaytacaagaagcggtgccaaggccgcatgcggaagcacgtgggggacctgtgcctgcaggcagggatgctgcaggactccctggtgcattaccacatgtcgg

SEQ ID NO: 448150 - DNA, 201 bp, Homo sapiens
tccaaaatgcttgtccatgtgggtttggtggctggggaatcagatgcttctgcttattgataggagttggtcagaaatagaaaaaggcatagaaagcataytatcatttataattttttttttcaatgccgtgtggttcagaaaatgcttttgcgtagttgacctcctttgaggatgcggggtggtttcttgctaacatga

SEQ ID NO: 448151 - DNA, 201 bp, Homo sapiens
agaggtattaggtagagcccctctgtggtttggggaattcatccttggctcttggaattctggcaataggacttgaagctgggtgaccttaggtgagtcaytcgatttcttggtaccccagttttgtcactgcaggaaaaggaacgcggcctttgggatttttgccagcgtcggccatcccagggctgcagaggagaaggc

SEQ ID NO: 448152 - DNA, 201 bp, Homo sapiens
caaggaaagacacgggagtgactcctgctcgttgttttaggcggatcgtctgcagaggcctcaccacagagatgccacggaagaggcagagtgtgtccacrgggccccttcagggcctatgtcagtgatggtttgctgtgctgagcaacaaacactgtctgaacaacatcaacaccaactgccagcattttaaatgatggt

SEQ ID NO: 448153 - DNA, 201 bp, Homo sapiens
gccccgcatctggtatttgaaatgaagcccctccttggccttgcttttcactttgcaaccttaggtcatctccttagcgcctcagctccttggtctctccmtctgtaatgcgggtttcagaatcatgacagcagccactatttatagagcgctatttatgtaccggatgcttcgctgaccgtttgtatccaccatctatct

SEQ ID NO: 448154 - DNA, 201 bp, Homo sapiens
gagatgccacggaagaggcagagtgtgtccacagggccccttcagggcctatgtcagtgatggtttgctgtgctgagcaacaaacactgtctgaacaacaycaacaccaactgccagcattttaaatgatggtctccccttggtatacacgggggattggttccaggatcttccatacacccaaatccacacatactctag

SEQ ID NO: 448155 - DNA, 201 bp, Homo sapiens
cagagtgtgtccacagggccccttcagggcctatgtcagtgatggtttgctgtgctgagcaacaaacactgtctgaacaacatcaacaccaactgccagcrttttaaatgatggtctccccttggtatacacgggggattggttccaggatcttccatacacccaaatccacacatactctagtcctgcagttggccctgc

SEQ ID NO: 448156 - DNA, 201 bp, Homo sapiens
tcaactcagacccatgttgttcaagggccgatggcatgtatgtgtggtttccccagtagactttgtgtccatggatcagagtgggataccacaggaacctytgcacttctagtgcctgctacaggggctgacatggagcaggctgtcattaaacgttggatgagggaacaggaaagcaaatgaaatgacctctaaagaatt

SEQ ID NO: 448157 - DNA, 201 bp, Homo sapiens
acccatgttgttcaagggccgatggcatgtatgtgtggtttccccagtagactttgtgtccatggatcagagtgggataccacaggaacctttgcacttcyagtgcctgctacaggggctgacatggagcaggctgtcattaaacgttggatgagggaacaggaaagcaaatgaaatgacctctaaagaattgctctgctc

SEQ ID NO: 448158 - DNA, 201 bp, Homo sapiens
tatgttagaatgtttgatattgttccacaggtccctgaagctctgttttgttttgtttttttcctagctgctcatgtttcatttatctgtcttcttaagaytggatgacttactttgacctgtcttctatctactgattctttcctccatcactttcattcttctgtgaagcctatccaatgcattgtttattaaagatac

SEQ ID NO: 448159 - DNA, 201 bp, Homo sapiens
aggtccctgaagctctgttttgttttgtttttttcctagctgctcatgtttcatttatctgtcttcttaagattggatgacttactttgacctgtcttctrtctactgattctttcctccatcactttcattcttctgtgaagcctatccaatgcattgtttattaaagatactctatttctcagttttagcttttccact

SEQ ID NO: 448160 - DNA, 201 bp, Homo sapiens
ctgatccaaataagaacacttgttgggtcaatgcccagggattcaataaataactattgggtgtctattccttaaccgaccctaggaaggtaaaatgccaraatgagggagaaccctcgtgctcagcaggcggagatgtcatcacccttgctgagaactagagaagggttgctacgtggccgccccctgttattaccatcc

SEQ ID NO: 448161 - DNA, 201 bp, Homo sapiens
ctgagaactagagaagggttgctacgtggccgccccctgttattaccatcccgagtcaccgtccacaaagtgttctcatatccgtcagcccagttcagtgytcacaaatcagtaaggcgagtcttttaatttgtaaaacacagaaaaggacactaaggcttgagaaggtaggtgacttagtggagggagctgggttccatc

SEQ ID NO: 448162 - DNA, 201 bp, Homo sapiens
ggggcggggcaggagctccagccaccatgcctccttgggggccaggtgtccctctccataggcatgggctccctgggccccagattcctgccacacccacrcaccactcactggtaagccctgatgcctgcggctttgctcctggtgagcaccctggctcaggaggtgtccgggctgggatgctggggtgtgtggcccaat

SEQ ID NO: 448163 - DNA, 201 bp, Homo sapiens
gcctttgttcttttgtaaaggcttttgccacttgggtgtccaagctgtgggaggttcagtggtggtcagaggagtctcatcaagggatggggctcaggccmttgtctgtggacagcagctgcatgcactgcagggtccaaagtatgccgaccacaggtgatgaggccagacggggttatatttaaattccaacctggcatt

SEQ ID NO: 448164 - DNA, 201 bp, Homo sapiens
ggtgcagagtggaatatgccctctgcccagcctgcctcctgctcggccagcctgccctgagaccttcactgaaatgcttgcatttgtcgtgtttgggagcwctggcttgccacagttacagtcacgctgtctgggcaaaccagtctgttgtagatacctgtgactagccttggaaaattcctttccttgtgctgttgaatt

SEQ ID NO: 448165 - DNA, 201 bp, Homo sapiens
tggagccccaggagaggtccaggaaccatgtccacaggcctcagagactccctggcggattctgcaggcccagtcctggattaggaggttaccgagaggcrcagattgttgacaggcagaccactgcttcagggtttgcatgctccgcaaatcccatttattagctaattggcgcttgagaggtttcaggataaagaacag

SEQ ID NO: 448166 - DNA, 201 bp, Homo sapiens
tttattatcaacaacttggtccatagcctccatgacctttatgcctatgagacacacacacacacacacacacacacacacacacacacgcatgctcacayacacgtgcacacatgcacttacacgcgcatgctcacacccgcacacaggcacgtacacacgcatgctcacacacatgcacatacacacatgttcacacac

SEQ ID NO: 448167 - DNA, 201 bp, Homo sapiens
tccaaccaaacgacgggaatcccagacgtgtggccagcaggcccagtccagctcgcaggtatatttgggctgcctagggtgaaaaaagaaacaacaaattragctgtcattgtaaaaatataggaatttcagattcaatctcgtttctggttctctcgagagatcaggagctggagctgtgcagagccgcatgctgtggcc

SEQ ID NO: 448168 - DNA, 201 bp, Homo sapiens
tctggaaaaccttctgccagtaaactgggaaggaagtgaacatttgttgatgggctgatatgtgcaagtgataggcagaacatgagacatgaggtgttggyatccagctgtgtttggggtctgtgtgtgcacaccctccaactgtgggcttatggtctgactgcctgcacagagagcggtgctgggcctgaggcttccctg

SEQ ID NO: 448169 - DNA, 201 bp, Homo sapiens
ttggtttattatcaacaacttggtccatagcctccatgacctttatgcctatgagacacacacacacacacacacacacacacacacacacacgcatgctcacacacacgtgcacacatgcacttacacgcgcatgctcacacccgcacacaggcacgtacacacgcatgctcacacacatgcacatacacacatgttcac

SEQ ID NO: 448170 - DNA, 201 bp, Homo sapiens
gccctggaggcatttttgttgccattctgaacttagagatttctttccaattctaggacttaggaactgaaactgttttgggcaatactgaataagccatsatcagatgtgaccaggctgttgtggagccacagaaggtgggagcacttgctgaaaaggaccagagggaggcacagagcccccagcgacggggtggcctgg

SEQ ID NO: 448171 - DNA, 201 bp, Homo sapiens
ctggtgcctgtcgcctggagaacagtgggcattccctcctgtctgtcaagtggcagggaggaatggaggagctgaatctgaggacatggcactttattcawttgtcttatttctctcctttggccttaaaaaattaatcggggccgggcgcggtggctcacgcctgtaatcccagcactttgggaggccgaggcgggtgga

SEQ ID NO: 448172 - DNA, 201 bp, Homo sapiens
cttggtttattatcaacaacttggtccatagcctccatgacctttatgcctatgagacacacacacacacacacacacacacacacacacacacgcatgctcacacacacgtgcacacatgcacttacacgcgcatgctcacacccgcacacaggcacgtacacacgcatgctcacacacatgcacatacacacatgttca

SEQ ID NO: 448173 - DNA, 201 bp, Homo sapiens
cttcagctacagtgtcacggcacgcgctcacaggcctgtgcagggcaccagccgcccaacgaaagctggaggtgggcactgagagagctcataaaggagaycgtggctccatctccagcttagcaagctccggccagcgctccagcaaaagggcggggggtggcttaaggcgaagaaacgctaagggcagatcaccaaaaa

SEQ ID NO: 448174 - DNA, 201 bp, Homo sapiens
aacttggtttattatcaacaacttggtccatagcctccatgacctttatgcctatgagacacacacacacacacacacacacacacacacacacacgcatgctcacacacacgtgcacacatgcacttacacgcgcatgctcacacccgcacacaggcacgtacacacgcatgctcacacacatgcacatacacacatgtt

SEQ ID NO: 448175 - DNA, 201 bp, Homo sapiens
aagctggacgcctcgtgcgaggccgatggggatgctgatgggacatcccttttgaaaatacattggcagtttcttcagaagttacacataagtttaccatrtgacccaacaactccactcctaggtacctgctcaagacaatggaacacatatgttgacacagaaacctgtgtgcgagtgttcatagcagcatcgttcaca

SEQ ID NO: 448176 - DNA, 201 bp, Homo sapiens
caacttggtttattatcaacaacttggtccatagcctccatgacctttatgcctatgagacacacacacacacacacacacacacacacacacacacgcatgctcacacacacgtgcacacatgcacttacacgcgcatgctcacacccgcacacaggcacgtacacacgcatgctcacacacatgcacatacacacatgt

SEQ ID NO: 448177 - DNA, 201 bp, Homo sapiens
acccgggaggcggagcttgcagtgagccgagatcgcgccactgcactccagcctgggcgacagagcaagactccatctcaaaaaaaaaaaaaaaaaaaaaagttcaaaataactttcaagggcattaggtgctctaatttgactaaaatcattgttggataatctgatcaaaaatggaagaagatggattgatttttagtg

SEQ ID NO: 448178 - DNA, 201 bp, Homo sapiens
aacccgggaggcggagcttgcagtgagccgagatcgcgccactgcactccagcctgggcgacagagcaagactccatctcaaaaaaaaaaaaaaaaaaaaaagttcaaaataactttcaagggcattaggtgctctaatttgactaaaatcattgttggataatctgatcaaaaatggaagaagatggattgatttttagt

SEQ ID NO: 448179 - DNA, 201 bp, Homo sapiens
ttttttaatctctaaaatgaggatgataacagtacccatcatctcatagagctgtagttaagataagctgagataatctatgcaaacatatatctgtattyaccgttattagcatttaaaatatttttataattatctaattatctgtaatttattttgtgtgtattatgacataagaatacaatttattttttccaggtc

SEQ ID NO: 448180 - DNA, 201 bp, Homo sapiens
ctaattatctgtaatttattttgtgtgtattatgacataagaatacaatttattttttccaggtcattacctcattgtcgcaccacaatgtattgaattcmtatttttttctttttgatttgaattcttacctgtactaaatactttcacatattaacttttcattcctttctatgaatctttcttttcttcagcaccata

SEQ ID NO: 448181 - DNA, 201 bp, Homo sapiens
catggctcactgcagtctcgaattccagggctcaagtgatcctcctgcctctgcctcctgagtagctgggactacaggtgggagccaccatgccaagctamttaaaacaattttttttgtaggctgggcacagtggctgactcctataaatctagcactgtgggaggccaaggcaggtggattgcttgggcccaggagttc

SEQ ID NO: 448182 - DNA, 201 bp, Homo sapiens
atataaatagtaccaaaatcagaaaaatattaagcattttcttcttttttttttttttttgacagaggctcgctctgtcgaccaggttggagtgcagtggygcaatcttagctcactgcaagctccgcctcccaggttcacaccattctcctgcctcagcctcccgagtagctgggactacggcgcctgccaccacgcccg

SEQ ID NO: 448183 - DNA, 201 bp, Homo sapiens
cgggccacgcggtgcagagatctgggcaaaagcgtggagaagcggccgcggtgggcgggaggcgtctgatcgagggctcaagacgctggccctgtggtttscgtggcctgtgtctgcccaaatgggtcctattctgcccccacatctgaaggttataactcttgctctgttttgttcaaggctgtgcgctgagtggatcag

SEQ ID NO: 448184 - DNA, 201 bp, Homo sapiens
ccccctgcatcttctctgatccctgcacacctccccacctgctctgaccccgggacacccccacacccactctgacccctgtacgcccccccaacctgctstgacacttgctgtgtataccccctgcatcttctctgatccctgcacacctcccacctgctctgaccccgggacaccctcacacccactctgacccctgta

SEQ ID NO: 448185 - DNA, 201 bp, Homo sapiens
catcttctctgatccctgcacacctccccacctgctctgaccccgggacacccccacacccactctgacccctgtacgcccccccaacctgctgtgacacytgctgtgtataccccctgcatcttctctgatccctgcacacctcccacctgctctgaccccgggacaccctcacacccactctgacccctgtatgccccc

SEQ ID NO: 448186 - DNA, 201 bp, Homo sapiens
tgatccctgcacacctccccacctgctctgaccccgggacacccccacacccactctgacccctgtacgcccccccaacctgctgtgacacttgctgtgtrtaccccctgcatcttctctgatccctgcacacctcccacctgctctgaccccgggacaccctcacacccactctgacccctgtatgccccccctacctgc

SEQ ID NO: 448187 - DNA, 201 bp, Homo sapiens
taattttttagaaatctttcccctctccttccctggcagccactacattgaagaacccccgagtctaccattttggggttctaggacagaaggtcctgcaygcagacatcagtaggctttcattcaccatgcaccttctctcgcacggtgatgtcttgtctggtctttcggggctcccatgagatcacgtaccgggagggg

SEQ ID NO: 448188 - DNA, 201 bp, Homo sapiens
tcacagttcaacacgtattcatgcgctaattaggctctattccttaaatgttagaagagatcttagttgtggagttttctgctttagatggagcaggtagkcacagaatccaggtacgattcagagcactgttccctagggcatgtcctcaaggcagctggagaaacagcttggtcacaaagaatcatgcaaaaaacaaac

SEQ ID NO: 448189 - DNA, 201 bp, Homo sapiens
cacagttcaacacgtattcatgcgctaattaggctctattccttaaatgttagaagagatcttagttgtggagttttctgctttagatggagcaggtaggmacagaatccaggtacgattcagagcactgttccctagggcatgtcctcaaggcagctggagaaacagcttggtcacaaagaatcatgcaaaaaacaaaca

SEQ ID NO: 448190 - DNA, 201 bp, Homo sapiens
gttttccataagccatataaatagtaccaaaatcagaaaaatattaagcattttcttcttttttttttttttttgacagaggctcgctctgtcgaccaggytggagtgcagtggtgcaatcttagctcactgcaagctccgcctcccaggttcacaccattctcctgcctcagcctcccgagtagctgggactacggcgcc

SEQ ID NO: 448191 - DNA, 201 bp, Homo sapiens
catccggagagtagcattttctaatttggatgtgtggcaaaacaactctgggtgatttttattctttattttcaacacagaatttctctgacaggccatcrtcagctgctatagagcaataaatcagagtcatcttttccgggtgaaatgggcttaatttctcatccttttgttcgtgtttcccttcctcttctaccgcat

SEQ ID NO: 448192 - DNA, 201 bp, Homo sapiens
cgagtgcagagtcaatgagctaatgcaggtgtccagcgtacactgagcactcaacagtgttgctgtcgtcgtgatttcatcctcataacccttgggtggcsccgttttcgcctccttccctgttttgagcgtctcctcagagggtctcatctatgagacagcggtggaatgaggctgggtttctaagggagctccagctct

SEQ ID NO: 448193 - DNA, 201 bp, Homo sapiens
cgtgtgtcatctgccatgctaggcacttggtatttgccattttattaattattacaataaccccattttacagatgctgacatcatcagaggctcagagargctgagccacttacccagtttcacgtactagtgagcaggtggagccaagactgaagcacgttctagtctgactactggacatattttgctgtctctgata

SEQ ID NO: 448194 - DNA, 201 bp, Homo sapiens
tgcccaggcttgctgggtgaccagccaagggacctgagtccactccccacacacctatgtgtcgggtgcatggcaccatggttcctgaagcagcagggcayatgcagaaacatggtttcagaagaggacagtattcttctggaagaccatggaagcctgtagctcaggaagaagcagcaggcagcacggtaactctgtgtg

SEQ ID NO: 448195 - DNA, 201 bp, Homo sapiens
tgttctccccagtgatgccgggcaaatgaaccaacagctggatcatacttctcatttgacatgctttttgggggacctacgtggggttcagcactgcgccrggccacagatttgcagggccaatgaggatgtggtccctgccccggagcctgatgctctaagtgctgagggtggagggcttcccggaggaggtgttctctg

SEQ ID NO: 448196 - DNA, 201 bp, Homo sapiens
gagattgagaccatcctggccaacatggtgaaaccacgtctctactaaaaatacaaaaattagctgggcgtggtggcacgcgcctatagtcccagctactygggaggcggaggcagcagaatttcttgaaccaggaggcagaagttgcagtgagcagaggttgcacaactgcactccagcctggcaacagagcgagactcc

SEQ ID NO: 448197 - DNA, 201 bp, Homo sapiens
tacgtgtccttgcaattcagaaacggagcatggaagcatcagaatttcttcagaatgcagtttacattaaccttcgacaggtgagtgtatgtctacctgtragtggaagagttcatccagttcttacggaattgattcactatgaattcagcttatttcgttttgctgaggttcagcatgccatgataaaaactgttgaat

SEQ ID NO: 448198 - DNA, 201 bp, Homo sapiens
tccctgcacacctccccacctgctctgaccccgggacacccccacacccactctgacccctgtacgcccccccaacctgctgtgacacttgctgtgtatamcccctgcatcttctctgatccctgcacacctcccacctgctctgaccccgggacaccctcacacccactctgacccctgtatgccccccctacctgctct

SEQ ID NO: 448199 - DNA, 201 bp, Homo sapiens
ccagtagtgtcctttatatttaagatttgggtctcatgcagaatcatttgctgcgttgagctgttatatacatttagtctccttcagcctggaacagttcstccatctttctttgacttccatcaccttgacactttaagatattaccaatcagcgattctgtagaatgttctcacttttggtgtatgtgatgtgtcctca

SEQ ID NO: 448200 - DNA, 201 bp, Homo sapiens
tgaccccgggacaccctcacacccactctgacccctgtatgccccccctacctgctctgacacctgctgtgtgtaacccctgcatcttctctgatccctgyacacctccccacctgctctgaccccgggacacccccacacccactctgacccctgtacgcccccctacctgctctgacacctgctgtgtataccccctgc

SEQ ID NO: 448201 - DNA, 201 bp, Homo sapiens
tagattttccacaagatgggattgccattggcgtgcacagcaccagcttgggcaccctcccgcgcccacgcacacgtctcccgtaagcaacatcgaggggygtgatgcttgcaaggcgttgtcttagggaccgaggagaatcaacagactgtgatgcaagggactgtggagaatcaacgggctgtgatgcattcttcctct

SEQ ID NO: 448202 - DNA, 201 bp, Homo sapiens
ccagtcagctctctactgagtcgttctctccaggaggcttttgggtgcctcttagttccaccagcctgttcttcaatacctgctatgtctgaggcattgaktcaggtgctagaaaggtgaacacacagaccttctgtctccgctcttctgaggactctgcacatgtgcagtgctggcctcctcagacgtgcttcgtcaggg

SEQ ID NO: 448203 - DNA, 201 bp, Homo sapiens
caacgtagtcttcttgtataggttcagctccacttagcggggagatgattatacagggatgtttatttccatggaggctgatgacctaggcacggtgtccstcagtagattttcattcacctccggaacggatggcatcccaggaccctaatactgtgttttagctggcttaccagtccggcccatctgcagctcttctac

SEQ ID NO: 448204 - DNA, 201 bp, Homo sapiens
agccccactcctgaagcaaacttctgcctgggcatccagctgtttccatacatctcctgaaatctaggcggaaacttcccaaacttcagttattgacttcsgtgcacccacacactcaacaccacatggaagctgccaaggcttggggcttgcaccctctgaagccatggcccgagctgtatgttggctcctttcagcctt

SEQ ID NO: 448205 - DNA, 201 bp, Homo sapiens
ccaaaccatttcaaagatcaaccttggaaggaaatgaaaataaatgagttaacatatgtgattgttgcgaacagtaaatattctcactctctatagttaaygttctttactttcttctgttgtttcttctctgtgctaccttgcttgatttcctatgttctgaacactagcctttgacatttatttccatgtgggcttctc

SEQ ID NO: 448206 - DNA, 201 bp, Homo sapiens
agagagaatgaggagaggactccaaagcggaagctcctgataaaaacacagatctcatgagacttattcactaccacaagaacagtatgggggaaaccacmtccacaattcaattatctcccactggatccctcccacaacatgtgggaattgtgggagtacaatttaagatgagatttgggtggggacacagagtcagat

SEQ ID NO: 448207 - DNA, 201 bp, Homo sapiens
tttgtttgttttgttttgcttgagacagactttcactctatcactcaggctggagtgcagtggcacgatctcggctcactgcaacctccacctcctgagtycaggttattctcctgcctcagcctccagagtagctgggattacaggtgcgcgccaccacgcctggctaatttttgtatttttaatagagatggggtttta

SEQ ID NO: 448208 - DNA, 201 bp, Homo sapiens
aaacagtatatacaattgatagatttctgacttcattgttggtatttaagcaggtataagtagctcctttttctgatcgtctgtgataacttatatttaayataacagattacatgtacattatatgtgtggaaaaggggaggaatgaagcctaccctttctgacatagtaattataaaactgcttgtcccaccttgtaca

SEQ ID NO: 448209 - DNA, 201 bp, Homo sapiens
tacaaaaaaattagccgggtgtggtggtgcacacctgctgtctcaggtaccagtgaggctgaagtgggaggatcacctgagcctgggagattgaggctacratgagctgtgatcaagcaactgcactccagcctgggcaacagagcaagactctgtctcaaaaaaaaataatttttcatgatttcattttaaatctctttg

SEQ ID NO: 448210 - DNA, 201 bp, Homo sapiens
aataatattctactatcagaatatgtcacagttatttatacattcacctaatgaatcttggttgacaacttggttgcctgcaagttttggcaattgtaaarcagccataaacattcatgtgcaagtttttgtgtggatataagttttcagctcatttgagtaaatatcaaggggcatggttcctggatgatatggtaaaaa

SEQ ID NO: 448211 - DNA, 201 bp, Homo sapiens
aatagaatgatttatatttctttaaatcattctattataaagacacatggacaggtgtgttcattgcaggattattcacaatggcaaagatatggaatcawcctcaatgcccatcagtgatagactggataaagaaaatgtgctacatatacactgtggaatattatgcagccataaaaaatgagatcatgttctttacag

SEQ ID NO: 448212 - DNA, 201 bp, Homo sapiens
ctggatatggtagtgttgagattagttaaattgggtctttctgaattcatggctaggttagtcatgacattgatttcagcttcataatctttaaaaaaatstcttcttcattttggcatttggtcttggcttcttttgacaatgtggaatattgcagggactcgtctttctctcctttcctgcagttgtatgagaagtact

SEQ ID NO: 448213 - DNA, 201 bp, Homo sapiens
tattcattgaataataatattaatagcaactagcatttattgagaacttatgataaataaactgctgaagtgctttaaatgggttattgcactgaagcctyataactttaacttgtactccgactactgtctccgttttacagtttggcgtggcccccttctcatcgagggttcaccccagatgtcacctccttgcccacc

SEQ ID NO: 448214 - DNA, 201 bp, Homo sapiens
agggctgaggggatgaaggtgtctggcctgccacttgggagctcctgaaaatcaaactcccacttagttgtttggggtctttggtatgtcacgtctctgtaaaaaaaaatgaggaaaaaagtgcacttcttaaaatagaactacagcatgatttcacaggctttcaggattaagccagtgaacttactaaggggtaggttg

SEQ ID NO: 448215 - DNA, 201 bp, Homo sapiens
cttaactgatttcaacattaactcaaaagtccacagtccaaagtctcatctgagagaaggcaagtcccttccacctatgaacctgtaaaatcaaaaacaasctagttatttcctagatacaataggggtacagacattgggtaaatgcaaccgttccaaatgagagctgagggggggctgtgggaggggcacgcccacctg

SEQ ID NO: 448216 - DNA, 201 bp, Homo sapiens
caaatctggaagagtgttgaaatggttccagcactaggcggaagggtccgggcagtgccatgccgcgcctggagtctgagcgggtcatgaagggtaaaacyagggagcatggagaccgtgctgccttgggccctcaagccactgccttcctgtgcatggggtcctccgcacctgctctgggccacacactggtagcatggg

SEQ ID NO: 448217 - DNA, 201 bp, Homo sapiens
agtgcaagcgaaggggctgtgcttcccacagcagtgctggctgggatggagggagaagctcccgatgtcgggcacttccacgctgagaacagcactgctcrgggaaggcggtgtctggctgagtcctaaagggcaaggggagccggctccgtggtgggagggccggggagggcccctcgctctggccggtttgctcacgct

SEQ ID NO: 448218 - DNA, 201 bp, Homo sapiens
cacctctctgtgacctgagggtagtgatataggatctccgtaagcataaaatgagaagctgtgtatttggggctttcccagtgcagggtcgggggctcttygcaggttccctccctgggagaccagccaggctgacagatcgaggaagcagagtgctcagagcacaccatccctcttcggagaagccacctctgcagcaag

SEQ ID NO: 448219 - DNA, 201 bp, Homo sapiens
tgtgggcctggtcctttcctccatctaggatttaagtctattccctttagcgaatctctagagagcatttcaaagtgccaagtgcattcacacgcacaagycccttcctcacagggtgaccagtgacccaacaagtatgcttcttattttccaaaaggaagtttgggtgtagagaagctaaggcttgtgtggaagagacgc

SEQ ID NO: 448220 - DNA, 201 bp, Homo sapiens
agccccttcctcacagggtgaccagtgacccaacaagtatgcttcttattttccaaaaggaagtttgggtgtagagaagctaaggcttgtgtggaagagaygcaggtgactcagacagcccttccctcacagagctcccagcccaggaccaaagattgctctctgggttagcagacagctgtggcaaggactggcctcttg

SEQ ID NO: 448221 - DNA, 201 bp, Homo sapiens
actccatggcttttccctccacctctcaggcttcttttcagcctcctgtgttgcctcccatttccttagcctgcctttttaaaaatataaatgtcaaagcrtaacatttacatagaggagtgcacgactcataggaatgtggctcagtaaattctcaccaagtggccaccgctataatcaacacccagatcagagacgggc

SEQ ID NO: 448222 - DNA, 201 bp, Homo sapiens
gtgtagagaagctaaggcttgtgtggaagagacgcaggtgactcagacagcccttccctcacagagctcccagcccaggaccaaagattgctctctgggtyagcagacagctgtggcaaggactggcctcttgtcccctctgcccattcagggaagatgtctctgccctgatgttccccgcagaagccctcctgttctgca

SEQ ID NO: 448223 - DNA, 201 bp, Homo sapiens
tttgaactgtgcttttcttgattgtacctgcagagtgagcaggtggccagcagggccaccgtggaagctggctccatggcccatttgcactccggcgtttyggtgacgggagggagcagcaggccgaggcagagctcccagagccacccgtgtctcctgctggggtgactgtggctcagtggcggcttgggcagtggtctg

SEQ ID NO: 448224 - DNA, 201 bp, Homo sapiens
tcccactctcacattcactctgtatttggccgtactaaattgttgacagttctccaaatacaacagcattgctattctgctgccttcgtacatgccgtttmcattactgtcacattgtccaggaattcatccctgccatgactgcagtgccccctctgggagctccccgtgccctgtgcctgccgctgtcagagcttccag

SEQ ID NO: 448225 - DNA, 201 bp, Homo sapiens
gagcgagtaaggttcaaccatatgtaggctctgctactgtgagtgaagtgcggttatcaatacttacgaaaagaaggggaaaaaatgcatactataaatakgtcatattaatgctactgtgaaaagactgaggagtgacgaaaggggggggtcccatgagatgggagggggccagtgaatgaacctgtgttaaggatgtgc

SEQ ID NO: 448226 - DNA, 201 bp, Homo sapiens
agaagaaataaaaccacaagtatgagacaaaagcaagctaatttgaaaaagaacctcatggagattctaaaataaaaaatatatagtgacggctgggtgcrgtggctcacacctgtaattccagcactttgggaggccgaggtgggtggatcacttgaggccaggagtttgagaccagcctggccaacatggtgaaacccc

SEQ ID NO: 448227 - DNA, 201 bp, Homo sapiens
ccatggcacaagcgctcatgccctcctgcccactccgtgttccccgctccctcctgccgcctccctctctcccaccccactggcttccctgtgtgcagacrtgccgtagttaccacgatgtgcagctcagctcagcccagccaagccaagcaaccttccgctctgaagcggaacctctgccagggtcgtctgccttccctc

SEQ ID NO: 448228 - DNA, 201 bp, Homo sapiens
ctagctagaggcacatgttggcagtcacctatagttgaatgcattaataatacatgcttttttttgttccctttcttgcttgcttttcaggttgtttttgrtactgttgataacactgtggtgaacatctttaggtctttggctttttttttagcaggagagagttttcatcaggagggggcttcctgggtcagccttttt

SEQ ID NO: 448229 - DNA, 201 bp, Homo sapiens
gtgcgcgccaccacgcctggctaatttttgtatttttaatagagatggggttttaccatgttggccaggctggtctcgaactcctgacctcaagtgatccrcccggcttagcctcccaaagtgctgggattacaggcgtgagccaccgcgccccagtggtaaagaatctgatagatattttaatcttaatacaaacatctt

SEQ ID NO: 448230 - DNA, 201 bp, Homo sapiens
tttaagcttaaacccaggacgaggagggatgtgccgtcctgtgcaaaccacacctgcaggtgggcaggcttccgaggctgcgggggccaagtggtgagggyggtggcatgaatgtggcatcaaggcgtcgttgctttgttgttgttatgaaaagtagcttgctcattgagaaagccgttatggagccatcaaggcactcag

SEQ ID NO: 448231 - DNA, 201 bp, Homo sapiens
aaatactctggaggcccgggccacactgaaggatattacaggaatctctccctggggctgcatgtagaagtcgagccgtctgtatttttcacccgagtcarcaccctcccagcaaccaggtaaatgtcttcctgccgcacagccgtcttgttctagagtctcaacagcactacgttcagaatcctgacctcagtgtgtttt

SEQ ID NO: 448232 - DNA, 201 bp, Homo sapiens
aaccctcccagctgttaggtgcgggtggcactgactgcattccacagagatgctcagggaagtgtcaggcctcgccccaaagtcacctccaagccgagctrggcatccagcccaggtggtgggctctgaagcctgccgccatctcccgctgcgctgctgccccggtgcctaccacgatggacaggccactgccagctacac

SEQ ID NO: 448233 - DNA, 201 bp, Homo sapiens
aaaattagtcggatgtggtagtgcatgcctggagtcccagctacttgggtggccgaggcaccagaattgtttgaacccaggaggcggaggttgcagtgagyggagatcgcaccactgcactccaacctgggtgacagtgcgatactccctctctctctctctcaaaaaaaagaacaagttaaggtaaccagagtgagggga

SEQ ID NO: 448234 - DNA, 201 bp, Homo sapiens
tgtcaggcctcgccccaaagtcacctccaagccgagctgggcatccagcccaggtggtgggctctgaagcctgccgccatctcccgctgcgctgctgcccyggtgcctaccacgatggacaggccactgccagctacacctcagcgccttccgcccttcctctctggaagatgactgcaataggtgatctcagcttcgtgc

SEQ ID NO: 448235 - DNA, 201 bp, Homo sapiens
taccacgatggacaggccactgccagctacacctcagcgccttccgcccttcctctctggaagatgactgcaataggtgatctcagcttcgtgcccctcgrtggccctgggtttcttccttaccttccagcacctgggtgtccctgcctgcgggtcgtctccctgtgagcctctcagccaagcgccaccaccccgcatgcc

SEQ ID NO: 448236 - DNA, 201 bp, Homo sapiens
tgatggcctcggccctcattcaaagttctggcagtgctgccattgaatttagagcaaggtcacctaccagggcagccggccaggggctctcgccttccatsacgcaggccttgcagctgctgcacacaatgcagcagtgtcttccggcaggggtgaacccaggtgtgaggacccctccatgggaaagcctctcgcagtttt

SEQ ID NO: 448237 - DNA, 201 bp, Homo sapiens
agcttcatgcttttgagtctgccctcttcccctcaactgaattattttgcagcgtggacaggcgatatagtttgttgatctttcattcatttatttaatayttactgagcacctattatgtattaagcactggacttagttctggaaatacagatcaaataagataggtactgtccttaaggcactcagtgtaatcagcag

SEQ ID NO: 448238 - DNA, 201 bp, Homo sapiens
cagttggccgttaacacaagcagcaggcctgttggaggcagggtctgcagtttcagggtctctgtcccatgctgctctgcaaacagcatgagcaagaaatkgtctctctttaggtgtcctgcctaagcaaagcagagccaagtaaagctcaagacaaaacacagaggatggagtctgtgacacaggctctgagcgaggctt

SEQ ID NO: 448239 - DNA, 201 bp, Homo sapiens
ctgggggatctcacctggccctggggcttcaggaatggtctttgcattcatggtgcctgtacttcttccttctgcggtgctgcaggcctgactgtcgaccygcccaccctgccttcgcttccctctcagcacagggcgcagggtgcccctgcccgccccactgcttgggcagaaaccttgacgctgtcgtggcttccccgc

SEQ ID NO: 448240 - DNA, 201 bp, Homo sapiens
caaagcagagccaagtaaagctcaagacaaaacacagaggatggagtctgtgacacaggctctgagcgaggcttgctagctccatgatgttgggccagatrgcttgggcacccagaggtgcagcctgtcatctgtaacatgaagcagagcttggccttccctgggctggctgtaagttaacaaagatgagcgtacacacag

SEQ ID NO: 448241 - DNA, 201 bp, Homo sapiens
taccatccagaaaactggacacagaatctctgctccatgtccggcagctactgttgttttctgctgaatgctgactaggcccaggactgcaggctaggttrtgggcattgggagagactagtccctcacttcaaggcactcacagcccaagttagaaactcgaggaatttggctttgaaagtcaccgtgaggcagaccaag

SEQ ID NO: 448242 - DNA, 201 bp, Homo sapiens
gcacttgtttttttctgcgtgaacagcttccccctgggtcttggcatggctgccatttctgtgcacctcagttctgagccaaacgcccacccttctctgcytggcgctaccatcagtctccctccttgctagatggaggctccttgagggcaggcgtgccaccgtcctgcgcagtctctgtggcttggagcactgtgtgac

SEQ ID NO: 448243 - DNA, 201 bp, Homo sapiens
ttgtgaagaccagctgagatagcgtcatggctaaggagagtgctttgtagtcatgacggtatcattagtaatatggtatcaactattcttcattgctactyattagattctaggcactattctaatatttcacatcaggacttttcaacagcagcactatgacattttttctagataattctttgcggttggagggggcta

SEQ ID NO: 448244 - DNA, 201 bp, Homo sapiens
atctttactggttgctttaacaaaatactgcagactaggtggcttataaataagggacatttacctctcacagctcggggggctggaagttcaagaccagsgtgccagcagatttgtgtcctgtgagggccacttcctggctcagagacatgctggaaggggcgagggagctctctgggatctcctttacaagggaactcc

SEQ ID NO: 448245 - DNA, 201 bp, Homo sapiens
catggctaaggagagtgctttgtagtcatgacggtatcattagtaatatggtatcaactattcttcattgctactcattagattctaggcactattctaakatttcacatcaggacttttcaacagcagcactatgacattttttctagataattctttgcggttggagggggctacaggatataggatgtttaggagcat

SEQ ID NO: 448246 - DNA, 201 bp, Homo sapiens
ttttaaacttggaaaagagctgagagtccaaaaaataggagaaccattctgtaggctatgatacaaccctaagatagaatatttcgcagactaatttttarcgatgggaaaatattcatagcatattaagagaataaaacaagacttcaaactatgtatgtgggtgtatttctttgtgtatatgatacatcatgatttata

SEQ ID NO: 448247 - DNA, 201 bp, Homo sapiens
gttcagaccataacagggtgtgtgtgaggattaaagctggttccatttccaccgttccctccactctgtctcggcttgggaagctcagacagctgttagtkcctctttccctctgccctccacactcagctgggtgtggatttggttattttgtgcaagtaagacttagttctcagggacaatgcttttatttttaaagaa

SEQ ID NO: 448248 - DNA, 201 bp, Homo sapiens
ctgaaaaagggaagctcgtaaacaattgtcatcgagggtctggaagagagcgctgatgtaattaaggagggtgtctcaggctgagtatgaggaaaccctaytgctaaccctctgttgttacctcccatccctcggtcctctcgtctgtgctgtgggagtggggagcggcaggtctttcatgctccttctgctagtggaatt

SEQ ID NO: 448249 - DNA, 201 bp, Homo sapiens
accataacagggtgtgtgtgaggattaaagctggttccatttccaccgttccctccactctgtctcggcttgggaagctcagacagctgttagttcctctytccctctgccctccacactcagctgggtgtggatttggttattttgtgcaagtaagacttagttctcagggacaatgcttttatttttaaagaaaatctt

SEQ ID NO: 448250 - DNA, 201 bp, Homo sapiens
tttgctcaggattatgcctcatcttcgtaagtcagacatgatcctggcgcttcagacactcagctttgcaactccctcaaaatgggagccacaggcatgtsgggggttgagctttatcctgcccagcccctcgctcagtgggggtgaacagagtgagaggcaggacttgaaagtatttgcccagaatcatacagcaagata

SEQ ID NO: 448251 - DNA, 201 bp, Homo sapiens
tcagggcaggtggatccggtacccgcacccacgtgctgcatggcagagccggagggaggcgcatctggatgagtcgcagtccgtttgttctctctcttgcyggtgaccttgttctctatctctgctttctggattgacaagtcctgatcctctctgtctgtggctcatatgtcacagtcctggcctgctcaagcttgatta

SEQ ID NO: 448252 - DNA, 201 bp, Homo sapiens
tgcggactgcggcaagggtgcgactgcgtatgttggtgggcatccttatccttcagacggcggcaattctgcagctgctcattgaggacatgagctggcayctttcccggtaggactgcggcacgtctgtagccacgcactaaggacctgggtaggcgtcatgaccctgggagcagcggcacagctgcgactgcgtatgga

SEQ ID NO: 448253 - DNA, 201 bp, Homo sapiens
gtgccttcatgtgtgtgaactcctctgatcatcatggttagagggatcattgcaggctgagattacgaggaggaggcagtaaggcatggtgggcttccgcrgctgcgtgtgcgagctgggattacagttccgggcgcctggctctggagcacatgcctgaccccacatcctgggtcacctgcagccagctaaggacactta

SEQ ID NO: 448254 - DNA, 201 bp, Homo sapiens
ggcaaggctgatgctgagcaccccactgaaaattttcctctctcccaagaccctcttctcagtccctctacttggctcatttcaggtgtctagcacgtcaygccctttaatacattttgcaagtatttctccacgagtgtgagaaagtggttttctttggtgggggttgatttttcatggcacataaagggcagcagggtt

SEQ ID NO: 448255 - DNA, 201 bp, Homo sapiens
ttagacccagaaaatgaaggaagctgcccagagttacatgctgggaaatggtggagctgggattcggacccagagtgcaggcttgcctctgttgcggcatrgatgtcttgcttgccagggcaccgtgcccagtgctaggtcagatatgaatgcttacaggacgaggccctcttcttgaggacttccctctccttccctccc

SEQ ID NO: 448256 - DNA, 201 bp, Homo sapiens
gattgtggtggagaagtagaaggcacactgaactgaatgggggtgagttctttctaagcttcaatttctctcatctgtaaacaatggcacttttttggtarggttttgggaatcatttagtaaggcatatgtaaagtgcttggactagtgcttggcatgtagtaagacctcattaaatgtcagttatcaatgcagctgttg

SEQ ID NO: 448257 - DNA, 201 bp, Homo sapiens
gcttgcctctgttgcggcatagatgtcttgcttgccagggcaccgtgcccagtgctaggtcagatatgaatgcttacaggacgaggccctcttcttgaggrcttccctctccttccctcccctctactctgctgcctctccgagtagctgtcaggtcactggtaggtaccagttgtgttgggttacatggtggatacacga

SEQ ID NO: 448258 - DNA, 201 bp, Homo sapiens
gaggaaataaagttgtttgctgagataaagggcataactagggtaggagtactcaaagaaccttgtgcttttaaaaatggtaatcatttcttttattctarttgtgctttataagaggctatcatatgttaccttatttagtttttccagtatttttgggagatttcatttttatctcccttttacagatgaggaaacaaa

SEQ ID NO: 448259 - DNA, 201 bp, Homo sapiens
cccggacttgctgtcctacgagtgctcaggctcttccccctgggaccttctagagtctctggctgctcttttgtgttctcattggggttggtgatgaactrtctcccctacggaacttttgaggaaagcttcagttctttcgttgagaaaaacttccagaggtgatttaggagactggaggtgtgagactcctcttctcag

SEQ ID NO: 448260 - DNA, 201 bp, Homo sapiens
cttccagaggtgatttaggagactggaggtgtgagactcctcttctcaggatgggccatgtgatttgtggggcccagtgcaaaatgcaaacatagggcctytgttcaaacatcactaggaattcgaagacagcaacagcagagcgtgaacccagatgccagggcacagggccctgtgccactgatggcatggattgtaggc

SEQ ID NO: 448261 - DNA, 201 bp, Homo sapiens
tttaaacttggaaaagagctgagagtccaaaaaataggagaaccattctgtaggctatgatacaaccctaagatagaatatttcgcagactaatttttagygatgggaaaatattcatagcatattaagagaataaaacaagacttcaaactatgtatgtgggtgtatttctttgtgtatatgatacatcatgatttatac

SEQ ID NO: 448262 - DNA, 201 bp, Homo sapiens
ggtctcacagcaccacacagcacagcgggctggggacctcagccaaaggcgccccagcggcaggagcgcagtctggcccgtccagtacaatgccctctccrtcttttggcacctggccagctgctagcaagcgtaggtgttttgtggcatctgtttgctgtgccttccatgcgtctgtggaatctgactgcctctggagct

SEQ ID NO: 448263 - DNA, 201 bp, Homo sapiens
gagatttattggcactgcagtagttctttcccaagctgtcgtggagactgagacttctttgggtcttatcttgtctttatatccccttaacagcaggtccycttatttcttgctcgttcaagggaatagccacagaggccaattagagcatggttttgctgaatgttttggccacagcacaatctatgcaataataaaaaa

SEQ ID NO: 448264 - DNA, 201 bp, Homo sapiens
gcgtctgtggaatctgactgcctctggagctagtcctgccctttgtccatctccgtgtctgtctcagctgctgccctctgggccccgcatcacttccctcycgtgattagtttccttgcctgtctttccccatcggcctgagaagcccttgaggacagcagttctgttgtatttgcctcagtggccccatgctcggcacag

SEQ ID NO: 448265 - DNA, 201 bp, Homo sapiens
gagatagggtttcaccatgttggccaggctggtctcaaactcctgacctctagtgattctgccggcctcggcctcccaaagtgctgggattacaggtgtcrcacccggcccaaaacgcctactcttatccattgactgataaaccctctgttgttgtattagtttgtttttatgctgctgatgaagacatacccgagactg

SEQ ID NO: 448266 - DNA, 201 bp, Homo sapiens
cctgtaggtggctgtaaggccagagatctgaaatgcaggtgttggtggtgctggcttgttttgaggccttttctctggcctgtaggtggccgtctggtggygttggttttctctgagccgtttcccgtcggcctgtaggtggccgtctggtggcggtggttttctctgagccgtttcccgtcggcctgtaggtggccgtct

SEQ ID NO: 448267 - DNA, 201 bp, Homo sapiens
cacgggaattacgggagtacaactcaagatgagatttgggtggggatagagccaaactctatcattctgcccctggcccctcccaagtctcatatcttcayatttcaaaaccaatcatgccttcccaacagtctcccaaagtcttaactgatttcaacattaactcaaaagtccacagtccaaagtctcatctgagagaag

SEQ ID NO: 448268 - DNA, 201 bp, Homo sapiens
tctctgagccgtttcctgtcggcctgtaggtggccgtctggtggcggtggttttctctgagccgtttcccgtcggcctgtaggtggccgtcttcttgacargtctccacatggtctttcctctgtgcctgtgtcctaatcccctctcgttataaggacgccagtcatattagcttagggttcaccccagcaaaactcattt

SEQ ID NO: 448269 - DNA, 201 bp, Homo sapiens
tgagatttgggtggggatagagccaaactctatcattctgcccctggcccctcccaagtctcatatcttcacatttcaaaaccaatcatgccttcccaacrgtctcccaaagtcttaactgatttcaacattaactcaaaagtccacagtccaaagtctcatctgagagaaggcaagtcccttccacctatgaacctgtaa

SEQ ID NO: 448270 - DNA, 201 bp, Homo sapiens
attgttttctgttattttaaaaattgggttaattgctttctttcttttcattcttttctttttctcttttttttttttgagacaaagtctcgctttttagsccaggcttgggtgaagtggtatgatctcggctcactgcaacctctgcctcccgggttcaagtgattctcttgcctcagtctctggagtagctgggactac

SEQ ID NO: 448271 - DNA, 201 bp, Homo sapiens
ttgaagtcaggtaatgtgatgcctcctgctttgttattttttgctcaggattgccttagctatttgaggatttttaaggttccatatgaattttaggattygtttttctatttctgtcaaaaacatcactggtattttgatagggattagttctaggatatctgtgttttctttgcattttttcattttggggcagtctgg

SEQ ID NO: 448272 - DNA, 201 bp, Homo sapiens
ctgatcctcagccttttggactgcgacttttaatttttgtagcactgggagcgctcgagtctctgggagcagggtcacaccagtccggcttctggagctamgacgtatcacccagaagccagcccattaatatggcctagaaatggtctgtccatcacgtcagcctgttggcctccgctgtcaatgaacagctgcatggga

SEQ ID NO: 448273 - DNA, 201 bp, Homo sapiens
agatacaataggggtacagacattgggtaaatgcaaccgttccaaatgagagctgagggggggctgtgggaggggcacgcccacctggcctgagaaggaamtggtagggggaggaggcagacagcactcagaggataaacaggcagttcccagtgggctgatggatccccagggttaaataattgtcagcgttctccatga

SEQ ID NO: 448274 - DNA, 201 bp, Homo sapiens
atgatgaaggcaaggaggagcaagtcacgtcttacatggatgacagcaggaaactcccccttatgaaaccatcagatcttgtgtgacttattcactacccygagaacagtatgggggaagccacccccatgattcaattatctcccaccgcgtccctcccacaacacacgggaattacgggagtacaactcaagatgagat

SEQ ID NO: 448275 - DNA, 201 bp, Homo sapiens
gattctcctgcctcagcctcctgagttagctggaattacaggtgcccaccagcacctgggtaatttttgtatttttttagtagagacggggtttcaccacrttggccacgctggtctcaaactcctgacctcaggtgatctgcccgccttggcctcccaaagtatgattacaggtgtgagccaccatgcctggccggtatt

SEQ ID NO: 448276 - DNA, 201 bp, Homo sapiens
gtctctgggagcagggtcacaccagtccggcttctggagctaagacgtatcacccagaagccagcccattaatatggcctagaaatggtctgtccatcacrtcagcctgttggcctccgctgtcaatgaacagctgcatgggaagccaggctgcaaggcaaggctgctctatgagctcaagatcggagccaggcattaatg

SEQ ID NO: 448277 - DNA, 201 bp, Homo sapiens
ctggggtaacacaggtcttcccagaggtttgaagcaatgactgtgtcttcagctccaaattgtgtgttgaaccagctctgaagtcagggccaccttaggartctattatttcattttcttggaatgaatccgttatgaattactaacgataatgattcattatagtgtctcacgctggcatgtgctgattctccaacagcc

SEQ ID NO: 448278 - DNA, 201 bp, Homo sapiens
gccaccatgcctggccggtattgagtttgaatataatttagcttcttattaccttaataaccccaggaaagtaacatgacctttccaagccttagattccsaaatgggcacaaaaatgccgaggaggttgcttaatatggtagaaagagcaatagattcaagaagcctggggttaaaatctcagcctcacttactagcagt

SEQ ID NO: 448279 - DNA, 201 bp, Homo sapiens
ctctatgagctcaagatcggagccaggcattaatgagatgcccagctctttaccctccttatcctgggatgggctcatgtactttgttctgaaagcagggrtgggtacacttggtgggggatggcgattttcagggttagccatgaagtgtgctaagggcctggcccggacctctacgcagctggcgtggccaggaaatct

SEQ ID NO: 448280 - DNA, 201 bp, Homo sapiens
atgcctggccggtattgagtttgaatataatttagcttcttattaccttaataaccccaggaaagtaacatgacctttccaagccttagattccgaaatgrgcacaaaaatgccgaggaggttgcttaatatggtagaaagagcaatagattcaagaagcctggggttaaaatctcagcctcacttactagcagtgtggcc

SEQ ID NO: 448281 - DNA, 201 bp, Homo sapiens
ggcccagcgatctaggtgttcaagcaagctcccctggtgaccctgctgtaggctggagggcagagctgctccttcagatgtgctgtgaatggatctcaagrgttatgacactgacccatcaggcctcaggatggtcggctggggttcggggtagccagggtgaagggactatgctggggaaacccttcccatggaagcagg

SEQ ID NO: 448282 - DNA, 201 bp, Homo sapiens
atcgctttgtctgctcctgtcccatttttaatttgttgctgctgggttcctgcatggatgaaagtttttttgaaggtcacaaatgaccacttaactctcaygtatggtgatcccaacagatgtttctctcatatccacccccatttcttttctttccagaagatctcaccttttggcctcttgagtctcatctcgaacctc

SEQ ID NO: 448283 - DNA, 201 bp, Homo sapiens
acccccatttcttttctttccagaagatctcaccttttggcctcttgagtctcatctcgaacctctagcattctttccagatgtgtttctcactgcccctyacctctgtgttccccaggatgtcatccttgggccctctgtttttctttgtcaccttcacattctacctgggagtgttacctctgctgatgttcatggtgc

SEQ ID NO: 448284 - DNA, 201 bp, Homo sapiens
tagtggtgatttctgagacctgagcagtatacactgaacccagtttgtagccttttatccttcacctgctcccaccctttccccctgagtccccaaagtcyattgtatcattcttgtgcctttgcatcctcatagcttagctcccacttaggagtgagaacatatgatgtttgattttacattcttgagttactcacttgg

SEQ ID NO: 448285 - DNA, 201 bp, Homo sapiens
gagatggggtttcaccatgttggccaggctggtctcaaactcttgacctcaggtgatgcacctgccttagcctcccaaagtgctgggattacaggcgtgarccaccgcgcccggccaattttaaattatttttacattgattttgaaaactgtggtaagatatacacaacacaaaatgtacccttttaactgttttaagcg

SEQ ID NO: 448286 - DNA, 201 bp, Homo sapiens
gtgtttgttgtttaagtgcagtttgcttaaatatgattttcatttttataaatacaagcacagcagaagggtctagagaaaaaggcttcccaaaccttacyacccagaaatcgacgttattaatgttagagaaaccttcaaacagacccgtcctctgcatttacgtgtgctgagaaagactggcaggaaggagaagttatt

SEQ ID NO: 448287 - DNA, 201 bp, Homo sapiens
tctgaaagagtttgtatgagattgatattatttcttctttaaatgtttgacagaacttacgagtgaagccatctgggatggaaatttttgtgggagtttgsattacagattcaacttctttaataaatacaggactattaagattgtcaattttttcttgtgtcattttacccccaaggagtttgtctatttcaccacatt

SEQ ID NO: 448288 - DNA, 201 bp, Homo sapiens
gaggcttgtatagccagagtgaccaaggagcatctcttgaggaggtagcatttgtcctgaggtctgaaccatgagaaagagatagccatctaaagagctasgggctctggtaagccacatcttccaagcagaaatcacagctggtgcagaggcccagagatggtaccacgtggtaatggaggagctgggagctgaagcctg

SEQ ID NO: 448289 - DNA, 201 bp, Homo sapiens
gcagttcctgcctgttcctggctcccctgagagcacagggaggcttggctccatagctgcagtttcagtggctgtagccctgcccagtagggtggggctcytgcctgctccgtagagcaggaggcctgggtctgcagctatggtttgggtggtggtttgggcagctgtggcaccccaggtgctcccactccaattcagaag

SEQ ID NO: 448290 - DNA, 201 bp, Homo sapiens
cccatgactagcacgtggtcctggcagagtccagcctcgtcctcttgtcctcaggaaggaggttggtcagggttggtggctattgctcaagacctctgaargtgcctggtgagaggaggaagacagctcagagccagaagcaacagaagctgggaggctggcccaggggctgccttgcttgtcagatgcatggcccagaga

SEQ ID NO: 448291 - DNA, 201 bp, Homo sapiens
agccactgcgaggtggcccagggcacaaactgtgggcctcctggaggggtgcctcactggggctttaggctggaaaggaacacagtgacctcagcctccarcctcacctgcttcatgaagctgctctgcagggattcactttgcattcactttgcaaatgtcggcagcattggtttcttctgaggcctcactccttggcct

SEQ ID NO: 448292 - DNA, 201 bp, Homo sapiens
ccgggccctgtgccagggccgcactccaggggctcacagtcatgtggtgggcacagacatgcaggtgaggacgcaagagagcatatgataagtgctgtagscacaggtctgcgggacgcacaagacagcaattccctcaggagaacagggatgattcccaaaggatgtgacattccgttggcttgggccttgaagaaagtg

SEQ ID NO: 448293 - DNA, 201 bp, Homo sapiens
aaccctggctcctcctgcgacctgctgtcctcatccccaaaccctggctcctcctgcgacctgctgtcctcatccccaaaccctggctcctcctgcgaccygctgtcctcatcccccaacgctggctcctcctgcgacctgctgtcctcatccccaatccctggctcctcctgcgacctgctgtcctcatccccaaaccct

SEQ ID NO: 448294 - DNA, 201 bp, Homo sapiens
tctttactaaaagtataaaaattagctgggcatggtggtgggtgcctgtaatcccagctactgaggaggctgaggcaggagaagcttgaatctgggaggcrgaggttgcaacgagctgagatcgcaccattgcactccagcctgggcgacaagagtgagactccgtctcaacaacaacaacaaacaaaacaaaaacctatg

SEQ ID NO: 448295 - DNA, 201 bp, Homo sapiens
ccctgagagccatggggaggctgctgccctcatcacagaggaaaggggctatgtggggctgcagtgcaaaattgttggtggagagacgtgtcatttcaacygactgcctcacctgctccccttccatttctaccccgcttcttctgtctcttcttgcctctccctgctcctttcatcgtcttcccctgtccttcttcctct

SEQ ID NO: 448296 - DNA, 201 bp, Homo sapiens
gtggtagcacatttcaaaacctgtgtctttcacccacaccatacccgctctccagcacacgatccaagccctggttaggctttgtttctggtttagtcttyaggaggatgggaaggatctggtaacctgctaggttgccttctgcttcaggtggggaaagtcatagttagaaaatggagaagtcttcttagagttgtgtgt

SEQ ID NO: 448297 - DNA, 201 bp, Homo sapiens
tccaagcccattaaactttattgctgtgtccatcaacagatgaatgcataaagaaaatgtggtatgtacacacaatggaatactatacacctgtaaaaagrgaagaaattctgttatttgtgacaacatggatggaactggagagcattaggctaagtgaaataagccaaacacagaaagacaaataccgtatgttctcac

SEQ ID NO: 448298 - DNA, 201 bp, Homo sapiens
gttaaacttaaaaaaaaattaaagcagaaatcacttataatcttatcactgtgaaaactttgtaagttgtcctgtcctttgtaaagcccttcagagaccawgagaatccagtagcaaagagcacttctagcctctgggttttagtctctaaacacttctttccactaaagggaatgagagctccttggagaagtgatttaa

SEQ ID NO: 448299 - DNA, 201 bp, Homo sapiens
atggggcatgaggtttgcaaaaggtgtttgcagtgaaacatggagctctgcagagtgtgctctccctgcacccccatctccactctccatgaatctgtacytggattggctatagatcacacagatgtaaagctttcagagtcgagcgttgcgagcataggcctcggagtccagcctaacgctcatcccaggcctctcctc

SEQ ID NO: 448300 - DNA, 201 bp, Homo sapiens
gaaaaaaagaataaatgtcaaatcaataaaatcagagatcaaaaaggagaaatttacaactgataacacagaaacataaaagatcacaagagactattacraacaattatatgccaacaaactcagtgacctagaagacgtggataactgcgtggacacatacaatctgccaagaatgaatcatgaagaaatagaaaatct

SEQ ID NO: 448301 - DNA, 201 bp, Homo sapiens
ctgcacccccatctccactctccatgaatctgtacctggattggctatagatcacacagatgtaaagctttcagagtcgagcgttgcgagcataggcctcrgagtccagcctaacgctcatcccaggcctctcctcttgggcaagttaccataccccactggatatcagtttcctgtctgtaacaggagcctaatgataca

SEQ ID NO: 448302 - DNA, 201 bp, Homo sapiens
ggcattgcaggagcagagagcctgtgtgccccggcggcgtcacctagtacagcctgcctcatacgcttccacccatgattctatgtcaaagagtatttcaytggacttagagcagctattttgtttattttttcattgatttattgtcatcctccccactgattctaagccaggggactagcctgtcattagcatggaggc

SEQ ID NO: 448303 - DNA, 201 bp, Homo sapiens
tccaagggaggaaaaagcttatcctaccctttgaggtttcaggccccagagccagggctttctgacagatgcatcacctggctgaggggccaaggaccatrccagatctttcaggatgctgctcaccactgggagccttggacagtcctgggcctgcctgtcagtcagcagccttgtcctcggcggttcttgggcagaaga

SEQ ID NO: 448304 - DNA, 201 bp, Homo sapiens
aaacacatataactaaggacttgcattcagaatatatacagaactcgtacgactcagtaataaaacaaacgatctaattttaaaaactgtcagaagatttraacaagcgcttcacaaaggaagatataccagtggccagtgatcatatgaaaaaggttcaacatcattagttttcagggaaatggaagttaaagccaccac

SEQ ID NO: 448305 - DNA, 201 bp, Homo sapiens
cattattattattattttgagacagaattgtgctctctcgcccaggctggagtgcagtggtgcaatcttggctcactgcaacctccacttcccaggttcargcgattctcctggctcagcctcctgagtagctgggattacaggcatctaccaccacgcttggccaatttttgtatttttagtagaaatggagttttgcca

SEQ ID NO: 448306 - DNA, 201 bp, Homo sapiens
taggtgcctgtgtcgaccaaacatggctttgtcctgaggctctctgggctcatggcttctcagtcaattgtctgcctagtgcccaaaagcagttgcgctcsagcttttcccattaaggaaccgttttagggctttaaagtgatgtcaattccatttgcaatgtagtatttatcatttgacttcttattacactgaaatgat

SEQ ID NO: 448307 - DNA, 201 bp, Homo sapiens
actcctgatgtccacagtgggaagggtcctctccctgttctgtgtccttgccttgtccatcacatcacatcgaccagccacttggccttggagtccccccrgcaagcatctgccctgctcaaatgcatgcaagcagaagatagcggaaggcaccttctctgggctgcctcagccctggggctcaggctgggatctctgggg

SEQ ID NO: 448308 - DNA, 201 bp, Homo sapiens
cctttacctcctgggttcaagcgatcctcctgcctcagcctcccgagtggctgggactacaggtgtgtgctaccatgcgcagctaatatttaaattttttrtagagacagagtcttgctatgttgcccaggctggtcttaaactcctgtgcttaagccatccttctgcctcagcctcccaaagtgctgggattacagatgt

SEQ ID NO: 448309 - DNA, 201 bp, Homo sapiens
aacacttggcagcctcttcttttctcctatggaaaagtggttataggaaagaagggggatgatgctgtgccgtgctcactttactgacgtgcatataatayacatgcttaacaaatgttggagctgatgatggtggtggcagtgatgacactggctagctacttatatggcggcagcgaaggcagttccatggggctgaaa

SEQ ID NO: 448310 - DNA, 201 bp, Homo sapiens
gtgaacggtaaggagagtcccttcatgcttcctgctcaggagggtctgctgaacccttgcatggcctccatgaggtccagagccgatcgcccgtcatgccrgtcctaaccagttagaagataatgaagaccttgtctctttgggaagcatgaaaaaaacctgttcgtggggtgcgggatgtgtggtggtgggaggggtcct

SEQ ID NO: 448311 - DNA, 201 bp, Homo sapiens
ctcttccttgcccaccaggcagaatgggctctcacccccacctgggagaggacaggggccctggagctcccctgctgttgcacatcctcatcatggcctgktccacgggcgggttatatccgatgctcacctctccccaccagagcctggcatggcgctttgcacaggaaatattctgattcaggaacccatgggtgagga

SEQ ID NO: 448312 - DNA, 201 bp, Homo sapiens
agagctgcaaatgcgaagcaaaagatttgggagattgtttttatttgtgcttatttttttcctatcacaaagtaatgaatgatccttgtaaaaaaaaaaaatctggaaacttgggaagactctaaaggagaagggcaaaacattccccaaaatctcactacccagaaatgggtgctactctcattatggcctatttccttc

SEQ ID NO: 448313 - DNA, 201 bp, Homo sapiens
tcgagatcatcctggctaacacggtgaaaccccgtctctactaaaaatacaaaaaaaattagccaggcctggtggcgggtgcccgtagtcccagctactcrggaggctgaggcaggagaatggtgtgaacccgggaggcggagcttgcagtgagccgagatcgcgccactgcactccagcctgggcgacagagcaagactc

SEQ ID NO: 448314 - DNA, 201 bp, Homo sapiens
agaagaaaattctgcggatactctcatatctcttcacctgcctcttctttccccttgtgctgccacctaacatctttattatctggcctttgagacactgscataccttgctaaatgcttgcttttcctgcttcttttcctctataagcattcatggtaaatagcactgctagaggaagagcaaagaagcaaaactccaag

SEQ ID NO: 448315 - DNA, 201 bp, Homo sapiens
ccaaagggatggcgccgagtcattcaggagggattggtccctcatgatccagacacctcccactaggacctacctccaataccggggattacatgtcaacrtgagatttggtggggacataaatccaaaccatatgaggctttaaagtcagacctgacttcaccactattagtatcccccactggcaaattactgagtttc

SEQ ID NO: 448316 - DNA, 201 bp, Homo sapiens
ctctcaggactggcctgaggtttacaagaatcatgtgcaaagcctgcaggaaagcaagggcttcctgttagctgttattattagcactgctcttctcgttrtcgttgcattagaagtgggctatcataagagatttcactccaatgtttagttgcttcaaatcagtaactgcaaaaggcagctaagcagaagtgagtcaaa

SEQ ID NO: 448317 - DNA, 201 bp, Homo sapiens
atttaaaaatacttaaccccaaaaaaggggaagaggtatcaagaaagaaggagaaaagaacaaggaacgtacagtcaaataggaaacagatggcaatgtgkaggactcaaatctactgtatccagagttacactaaacgtaaatagatttaatactacctttaaaaatggagattgtcaaactatacaagaaagtaagatg

SEQ ID NO: 448318 - DNA, 201 bp, Homo sapiens
tgcactccaccagcgcccttcagcctggagaccccctgatcctgcagaggctgcctcctggctcctcacaggtgaaagctgtcgggaccaggtgggcaccrtcatggcggctatgggtttccattttacactcgggctccttctgtggcctcttcctcctctctgagccagcctgagtggcaggaaggaaaggcttggtgt

SEQ ID NO: 448319 - DNA, 201 bp, Homo sapiens
tgcggatcgcggggatgctgaagctgcgcgctgagacctagctgggtatctcccctgcggaaggctgcggaggacctgggtgagcgtcagtaccctgaggmttgtggcactcctgcagctgcgcagagacctagctgggtgtcctcccctggagaaggctgcggaggaccagcgtgggcatcagtaccctgcgcgtcacgg

SEQ ID NO: 448320 - DNA, 201 bp, Homo sapiens
attgaaagaatatgtgggcacactgctaatttattgtctttgtggaggcttggtttgtgcattccttatttcaaacacttatgggtggactctggtaatgrgcagtcatatttatgagtccccctccaagtgaggagatgtactaggtggaatgtgcgccctccctcacgtggtatactcttgatacagagccaagcaggt

SEQ ID NO: 448321 - DNA, 201 bp, Homo sapiens
cccgtccccatggagcacctgagctcaccgcccgtgtgggccttatcctgtagaacatcaccactggaactgcctcccctgcctaccactctccaggacasggctcccggacctgcttccgcagggcccgcatggggcccaggcagctcctgtcacctctctacacctcagtgtgcttctgcaaataaagctgcacctgct

SEQ ID NO: 448322 - DNA, 201 bp, Homo sapiens
tataatatacatgcttaacaaatgttggagctgatgatggtggtggcagtgatgacactggctagctacttatatggcggcagcgaaggcagttccatggkgctgaaaccctcctaatggaggaggaataagtgcctttgcatcccacatggtggcgataagcaggctggaggaggagagggatgtggggactttgtccat

SEQ ID NO: 448323 - DNA, 201 bp, Homo sapiens
gcagcgaaggcagttccatggggctgaaaccctcctaatggaggaggaataagtgcctttgcatcccacatggtggcgataagcaggctggaggaggagarggatgtggggactttgtccataatgacagagttgaggtctgacattcgtgctgtctgtgggctgatcttctctgtcttcactccgtgatgaccacacaga

SEQ ID NO: 448324 - DNA, 201 bp, Homo sapiens
atgggcacacattgcctccttttattgcagaggagagtgggtcagaggcaggaggtctaggcttcagatctcttctaacatgaaggctgacattgggcaartgatgtctcttttctgggttccagtcccctcatctaaaaaaattgggtagcaattttcctgaggtgcttacagggatcagcatctgaatgcaggtcatac

SEQ ID NO: 448325 - DNA, 201 bp, Homo sapiens
aggcctgcattgcccacaatcagattgtgactccaccgagctgaggtctttcacagcttgatcctgcttgtcttctcctaaggaattggccccctcagggyggggactgtctttcctctgagtttttcaagtgcccagaacaaagtctgtctgacaacgagagcccagtaagtgtttgttaagtgcagcgacatcagccaa

SEQ ID NO: 448326 - DNA, 201 bp, Homo sapiens
cccacgatgcctttggaattttgtccgtgatcgggagcacttcctgtctgtgacggtaaagacctgcattgggcagtggcaggagggatgaaaggcgacaygggggtccttggctggttctccacgtctcattttcttctcctggacaatggacttgcctcacaggattgctgggaggatttaatgaggtcacaggtgtga

SEQ ID NO: 448327 - DNA, 201 bp, Homo sapiens
tctattaacccttctccctcgtagaacatttctatctccccagaaagttctcttgtatcccatctaggttaatccccatacgctaactagaggtgtcctcrgttctgatgtttttgcctttgcctagtttagagtgtcacataataggcacctcagcataagtgctcttctgtcctgcttctttgctcagtataatgttcg

SEQ ID NO: 448328 - DNA, 201 bp, Homo sapiens
tttctttttattgctcaattagtaatccattgcatggacacactgtaatttgtttattctcctattgatagacatttgttttcagtttttgactattatgmataaagctgttatgaacatttttcaagtaattttgttgacatgatttttctttcttggaaatattgataaattggaaatactaggagttattaaggggta

SEQ ID NO: 448329 - DNA, 201 bp, Homo sapiens
tccagagaggcccattgagagaaaggagccactgcttatagaacccctgcattattgcatgtgtcatcaacttaacccccagagaccctgtggggcaggcrttaccgtccccatctacacgggcagactgagggttccagaggcaggcaccgggcctctggcaggactgtgcaactccagggaaggcccctttgtccagca

SEQ ID NO: 448330 - DNA, 201 bp, Homo sapiens
tgtaggtaaggcagtgggtttcaatataagccagacatgagtttgaatcagctgttatcacttagccttggcttcagctcaggcaggtttcatgatctgakcctccatttcttcatctggaaattggagaaaaaataatatttacctgtgaggattaggtgagataatatggggcaccaaagctcaatatgctagaacgat

SEQ ID NO: 448331 - DNA, 201 bp, Homo sapiens
tataagccagacatgagtttgaatcagctgttatcacttagccttggcttcagctcaggcaggtttcatgatctgatcctccatttcttcatctggaaatwggagaaaaaataatatttacctgtgaggattaggtgagataatatggggcaccaaagctcaatatgctagaacgatcgcacgcactaacgcttggtggtc

SEQ ID NO: 448332 - DNA, 201 bp, Homo sapiens
atttatatccaagacttacattcagctgactcaggtaagaagctaggctttgcaatgcctacaacgtgaagcttctccctattctgaaggcaggtcactcwgtttgggtgaaattcgtgttcatgattttaaagcttagatctgcaagaatctaggccttagttctaagtgtgtaatttaaatttattcccgtgggggaaa

SEQ ID NO: 448333 - DNA, 201 bp, Homo sapiens
ttgtgctagtatatgttttcagctcaactttgaagatttatatccaagacttacattcagctgactcaggtaagaagctaggctttgcaatgcctacaacrtgaagcttctccctattctgaaggcaggtcactctgtttgggtgaaattcgtgttcatgattttaaagcttagatctgcaagaatctaggccttagttct

SEQ ID NO: 448334 - DNA, 201 bp, Homo sapiens
ctcctgtggactggtttcagcctttccagtggactttctagcagtaggcacaattaccaaccaagcttttttttttttttttttttttctgaaagtacaargatcccttctgcccttatggaactttgtgggagagtgtcatttctttccttctggctcaaatctgaacttcttaaacttgccagtgatataaaaaatgga

SEQ ID NO: 448335 - DNA, 201 bp, Homo sapiens
cccaggtgctggcagctttgccgtacacatactggtggcagcaaggagcatgcgggtttcctgtgacatcaatggccctgctggcatcaactcggtgcccrgccatgtctgtcctcaaggagctagcagcatcgttttccagaccctgctctgcaagcacgttgggtgatttataggaactccttgggtgcaggattctga

SEQ ID NO: 448336 - DNA, 201 bp, Homo sapiens
tgcctagaagaggacgcttcactcccattccccgtgctcacttagtcagtgttgctgatgcactcagggcagactgctgcatctgcctttggacaggactrtactgtgaagtcagtttcagaaatggcttctgtgcaattcaaggtgactttttctctcttgtttggataaatgctaagtgggacaagttaagtggattat

SEQ ID NO: 448337 - DNA, 201 bp, Homo sapiens
ggcttagaaggaggcagacgcagcattgttagcctgttagccatgatttagtgcaaggctccaagggagagcatgagagccactggggtgggaaaaaatascagtattatcaccgatttctatgtattgtatccaaaggtctatgaaaaattaaaccttgctacatgatacttaatatgcaggccacattaaatatcatgt

SEQ ID NO: 448338 - DNA, 201 bp, Homo sapiens
agttacttatgatggtcaacgttataatatttaggatcagatggacttttgttagagtcctggctttgccacctactggctgggtgacctggaccaagttwcttgtgtctgtgaccattgtcccctcctagtggagctggcactccatggctcttctggttgttatactacatgcaaggcacttaatacagtacctggcat

SEQ ID NO: 448339 - DNA, 201 bp, Homo sapiens
cagtaaataagtgaaaatgggcaaattccttaactcctctacacctcagccatccttgggaagcctagggttaaatctaaccttcctagaagtatctgctstgctgtttccgtagcccgggcttagaaggaggcagacgcagcattgttagcctgttagccatgatttagtgcaaggctccaagggagagcatgagagcca

SEQ ID NO: 448340 - DNA, 201 bp, Homo sapiens
gagcaaaacagtaaataagtgaaaatgggcaaattccttaactcctctacacctcagccatccttgggaagcctagggttaaatctaaccttcctagaagkatctgctgtgctgtttccgtagcccgggcttagaaggaggcagacgcagcattgttagcctgttagccatgatttagtgcaaggctccaagggagagcat

SEQ ID NO: 448341 - DNA, 201 bp, Homo sapiens
gggctggaagttcaagaccagggtgccagcagatttgtgtcctgtgagggccacttcctggctcagagacatgctggaaggggcgagggagctctctgggrtctcctttacaagggaactcctcctatcatgagaactctactcacatgccctgatcgcccccacaaaggccctgtctcttaatcccatcaccttgggagt

SEQ ID NO: 448342 - DNA, 201 bp, Homo sapiens
tccctctgcttcacaacagagcctgagctgtaggtaagagacgtggagggcctggcacccagggctgtaggtaagagacgtggaggggctggcacccacarctgcctggcaatgcttgtttgcctgtctccagccctcctggaagtgtttcctgggcctgctgatggctttgatcatgtgtggctctatggagagtctgtg

SEQ ID NO: 448343 - DNA, 201 bp, Homo sapiens
tattgtggggtcatatggggtatattaatgtgatttgcaggccacaaagttgtctaagtttatgcagattatactcatttataagttgcgtgcaagtaaayagggcccagagggaccgccctcagtgaagcaacactgaggccttttcagacctctgtgctgagcacttacgtcttggtgccttacccatgcccaccaaat

SEQ ID NO: 448344 - DNA, 201 bp, Homo sapiens
ctttacattgacgtatttacaaattgtagtctagagtaaacctaataaaaacttctggtattcattttctcagacagacatttcattttgcctgtattctsaatctcacaggtcttgccccagctcatatcaacttagttcagttcaattcactgcacttcaagagatattcattgtgtggcccgtgggggagcgacatta

SEQ ID NO: 448345 - DNA, 201 bp, Homo sapiens
cccctgaaagtcatccatgaggtctggattcaacttcttccacacaccttttcatgctgctattttgacctcctttcaggaatcatgaatgttcttactgscatctagcatggtgaatcttttacagaaggttttcaatgtactttgcccagatccatcggaggaatcactatctatggcagctgtagccttatggaatgc

SEQ ID NO: 448346 - DNA, 201 bp, Homo sapiens
gccactgaggagacactcggagaaatttgatgcataccccgcccgcaagtcccgctcttaaggaaacacagagcaattcctcaaaagcagaaatatttctrgttagtattagttcagcatcctgccgaaataattcttttatggaaaaaagtatgcactaaatcttatagtgtgactagtactcaggcactgtttttactg

SEQ ID NO: 448347 - DNA, 201 bp, Homo sapiens
cctgctagcccattgaggagacccaggcttggtgaggtgaagccccttgccccaggtggcgctgctaggatgtgtctgagccaggatccgaacctaggccrtgagaccctcctgcagtgacttctgtcagacctgccttgcttggccattccaaatatgaatcacgttttctccaggagccaagccacgcaccaggcgctg

SEQ ID NO: 448348 - DNA, 201 bp, Homo sapiens
cgggtttcctcactggccttttccacgcagtttccaaagataatgatttcccacccctttgcagtgacttgccagagcatcagccacggttccgagtcackttttggaaaccttctgatggggaattgcatgaatattctctgatatgtgtcactgaccccaacataagacctcacctgtgtgtttaagcttaaacccagg

SEQ ID NO: 448349 - DNA, 201 bp, Homo sapiens
caactccaacttatcccagggaaccctggggagaggaagtcaggctactggcctgtggtcttctccctgtcagcccaccccaatcccctccacccctgcgraccttcccaacgtgaatgtctgttaaccgaaagttttcccgtgttaggatgcgttgtctgtcttcaaatgtttctatagagagaggaattaaaacgctgg

SEQ ID NO: 448350 - DNA, 201 bp, Homo sapiens
gtgacctgaggccatgaaaggagaatgagttgtgttgccttcaactgaaaggacgagtctcccatccctccaaaagctcctacatggccacaggaagccaygctcacccagggaataaggatgaaatgaaatgagtgagcaaaacagtaaataagtgaaaatgggcaaattccttaactcctctacacctcagccatcctt

SEQ ID NO: 448351 - DNA, 201 bp, Homo sapiens
acgtgcagaaggagatctacggctccacactgtatgactcccggctctttgtcttcgggctgcagggggagatcgtggagcagccgcgcaccgacgtggcyttctaccccaattacgaggactgccagacggtggagaagagaatcgaggacttcatcgagtcactgttcatcgtgctggagtccaagcgtctggacagag

SEQ ID NO: 448352 - DNA, 201 bp, Homo sapiens
caaagccttgcctcccacttggagaaatacatttgagaattcaaatgccctttggaaggccatgttttgaagtcacactaggctgataataatgacccagwgcacagatctttttctctgtgttttctccccccatgaaaactgtttaccctgctcttccaagaagaatggcctctgctcagttgctgtcatctgtgtctg

SEQ ID NO: 448353 - DNA, 201 bp, Homo sapiens
ttggattggttgtaaaggggcaggaggaaggtttagggggtgatggagtggctttatcttttctctgtgtggattatacaagtatacatttgtcataataygttgaacttgacagttaaatatgtatgttttattgtatggaaatcatacttcattacgatggatttaaaaacagcagcagcaacaacgcagaaccagcct

SEQ ID NO: 448354 - DNA, 201 bp, Homo sapiens
gcatcccgtcagatccgtgccatggggccaagttgctgagcctctctgggatgtaggtttttctttaggaaaccaggtgttacatgagaactgcctctcargtggtcgtaagtgaatgggctttacatatcacgccgtgctgtaatcataacgctgatgattgcagcattcctacgtgtggttctcactgtgcacacacat

SEQ ID NO: 448355 - DNA, 201 bp, Homo sapiens
cggtggtgtcactggagagtgtcaccgaaggcccactgacgagcaagggccacacacacagcagccaggggagggcagctcttttcgaggctctccggggygccattttggcagtgatgtcatcaagtggacatttataggccatgctgtgttccacacatgcaaatcagaaactctcttccttatgtagactcgtcacag

SEQ ID NO: 448356 - DNA, 201 bp, Homo sapiens
ttcaagggctgacccaggaattttctaaaaccaaacaggacagtgtcccagaagtccagagtagacgtgccccatgagctgtcacattcgcgagcacttcygtatgcaatgcgcttagaaaaacaaaagctcagctggaatgccagccgttgctgggtggatgctgcccccagcgtggtgcaggtggtcggagactggcag

SEQ ID NO: 448357 - DNA, 201 bp, Homo sapiens
atgggaccttatccaaaggacacaggaaccaaccagaagggactcccactggccaaagatggtgcctacatcaaaaaagaagaaagctttcaaataaacartctaacactgcatcttaaggaattagaaaaacaagaacagactcaaccaaggttagtagaaagaaggaaataataaagatcagagtggaaataaatgaaa

SEQ ID NO: 448358 - DNA, 201 bp, Homo sapiens
gatggagattacatctgtggattgctttgagtagtatagctattttaacaatattaattttttcaatctatgaatacgagatgtccttgtattcatttgtrtctttaattttgttcatcgatattttgtagttttcaatgtacaagtctttcacctccttggttaagtttattccttagtatttttgatgttattatgtta

SEQ ID NO: 448359 - DNA, 201 bp, Homo sapiens
ttattatgttattataagtgaatttgtttccttaatttctttttctgatagttcattgttagtgtttagaagtgtaactaatgtttgtatgttgcatcctrtaactttgctgatatttgtttagcagttctaatagcttgtagagtaatgttttctggatataagatcatgtcatctgcagaaataattttacatctcttc

SEQ ID NO: 448360 - DNA, 201 bp, Homo sapiens
ttaatttctttttctgatagttcattgttagtgtttagaagtgtaactaatgtttgtatgttgcatcctgtaactttgctgatatttgtttagcagttctratagcttgtagagtaatgttttctggatataagatcatgtcatctgcagaaataattttacatctcttctgatttggatgccttttatttgtttgctttt

SEQ ID NO: 448361 - DNA, 201 bp, Homo sapiens
aaaagccttcagttttttttaccatggagtgtgatattagctgtgggcttttcagatatggtttgtattttatcgaggtaatttcttcccattcctggctygttgagagtttttgttatgaaagggtgttgaattttctcataggcttttgctgcatcagtgcaggtgatcctgtgattttgccctttattttgttaatgt

SEQ ID NO: 448362 - DNA, 201 bp, Homo sapiens
gctgtgggcttttcagatatggtttgtattttatcgaggtaatttcttcccattcctggctcgttgagagtttttgttatgaaagggtgttgaattttctsataggcttttgctgcatcagtgcaggtgatcctgtgattttgccctttattttgttaatgtggtagagccacattgattgatttcctgtgctgacccttc

SEQ ID NO: 448363 - DNA, 201 bp, Homo sapiens
atcagtggccccgggcaggctgggtgaggcggggtcaggcgggctgggagcatgttgtgctctggccactgacttgtgtaaatgaggaggtcgggtgagcyccctcccattgaaggtcctcagaagctggtgggcctgggaggtggggggcatggaagctgggatgagggaaggacaagacctgagtttctggggtcctga

SEQ ID NO: 448364 - DNA, 201 bp, Homo sapiens
acatagtacccaacaggtagattttcagaccttcccttgacctccccacttttggagtcctcagtgtctcttgtttccatctttatgtctgtgtgtagccrttatttagcttccacttttaagtgaaaacatagagtatttgattttctgtttctgtgttaattcacttagcatagtggcctccagctacatccatgttgt

SEQ ID NO: 448365 - DNA, 201 bp, Homo sapiens
tctgtgtcgctcacgctgggagctgtagactggagctgttcctattcggccatcttggaaccgccacttcattccttcttatggccacttagtatccgctrtatggagataccatgttttatttatccatgcattggttgatggactttaggttgtttccaccctttgggtattaagaataatgctgcaatgaacactcat

SEQ ID NO: 448366 - DNA, 201 bp, Homo sapiens
atacaaacccagatggctctgggatcaatagggacctcccagtgattaataggcagagggaaggaacgtttgcgttcagcctggagaagcaattggattcragaaattcaatgctggggaagatgcagtggtttgctgactcaggtgacaagagaaattcttctctttctgtgagaaaagaaaaataggatgacttgattg

SEQ ID NO: 448367 - DNA, 201 bp, Homo sapiens
cattccacagagatgctcagggaagtgtcaggcctcgccccaaagtcacctccaagccgagctgggcatccagcccaggtggtgggctctgaagcctgccrccatctcccgctgcgctgctgccccggtgcctaccacgatggacaggccactgccagctacacctcagcgccttccgcccttcctctctggaagatgact

SEQ ID NO: 448368 - DNA, 201 bp, Homo sapiens
gagcagtgggatacaggggaaattgcatgggcgatggtcaataattcaacaattacctcctgagggcctgctctgtgcaaggcactattctcagtgtgtgsgataaatccatgactggaagaaagaaagattcctgattccgtagagcctgcattctggtaggggtgatagtaaatgtggtaatagatttaggcattttaa

SEQ ID NO: 448369 - DNA, 201 bp, Homo sapiens
cattattttcacttttcagagcagaaactgaggctttaagatgttaaatgattgcactgaagttacataactagtgaatgtccaggttgcattgaatgctyccgtcaccttgctcccaggttggtgctgccagatgtctgtgtgtttatcattttcttcaggggatcataggctacacgaagcaggtggtggcgggaggtg

SEQ ID NO: 448370 - DNA, 201 bp, Homo sapiens
ttttgagaatcaagtaaagtaatccatacgaaaatgcttttaaaaccgtgaagtgttattaattgaacactgattaagctgtgtctgtctaccactgtctrtcactgtcattatgctcattgaagccagagtgatgttcactgaaacataactgtaatcatgttgctaagttctgatttaggctttgatttctcatcttct

SEQ ID NO: 448371 - DNA, 201 bp, Homo sapiens
ggcatttcattatgcctctttacaaatgaagaaatgaaggtttggagaggctaatttatttaggccagtaaactaataacgtggctaagctgaaattaaarcctgcaactgtctagcttcaagcaccctgatcctatgtggaaaataacccatcttttatgagaaatgtgggtaagatgtccctggagtgtaaaagtgggg

SEQ ID NO: 448372 - DNA, 201 bp, Homo sapiens
ttctattacgtgtccttctctgctcctgccacctggggccagtgggccctgagccccttagtgacagacatggctatcagaggcctttcctgtgcacagaygacagttcccaaagaaggagaccattgtgggctagaaagagacttcacagggtgtccactaagatactcagacattacagaatcctttgactactaacgg

SEQ ID NO: 448373 - DNA, 201 bp, Homo sapiens
ccttcctggactggctggtatgtcctggagggaacttcgttagacttcataatcgatgcagtgtggactccatggggagttttggaaagaaagcaacagtmatgaggatgactaagggtgaaagaaattaggtgtgtggccatggttgggattctaagtctagccctgccagtcattgtcaggtgacctcaagcaggcacc

SEQ ID NO: 448374 - DNA, 201 bp, Homo sapiens
agctttccatctttgtgctttgagactggatgctggatttgtgtgtttgggggagttttctctgatctccagccctatctctggctttctgcattttgggrgctctctcttggtcctgcccccagccttccacagggtactgccttgcactcagtgaagggtcctgatgccttggaggggtttcttcaagctttgctgctt

SEQ ID NO: 448375 - DNA, 201 bp, Homo sapiens
tgttggcttggggtctgggcacagaaaagactggagtttggtttgcagccagtcaccagctttccatctttgtgctttgagactggatgctggatttgtgkgtttgggggagttttctctgatctccagccctatctctggctttctgcattttgggagctctctcttggtcctgcccccagccttccacagggtactgcc

SEQ ID NO: 448376 - DNA, 201 bp, Homo sapiens
ttttgttctgtggaaaaacacactcaaagtgttttttctgttctctcaacatgacaaccaacacagaaaatttctgtgacctctggttgccaaaatgtgtwtaaggatttcttccccttaataaccagtcagtcagttttccaacagataccagctgggtgtcctctaatttacttctgataccgtctatctgaagatagt

SEQ ID NO: 448377 - DNA, 201 bp, Homo sapiens
agatctacggctccacactgtatgactcccggctctttgtcttcgggctgcagggggagatcgtggagcagccgcgcaccgacgtggctttctaccccaaytacgaggactgccagacggtggagaagagaatcgaggacttcatcgagtcactgttcatcgtgctggagtccaagcgtctggacagagccacagacaagt

SEQ ID NO: 448378 - DNA, 201 bp, Homo sapiens
ccacatattcttacccacagggatccaggactacaaatactccctttgtcctacgtgggggagcagccgtccttacgatgcatccttaaataattatcaaygtcctttatagaccatttactataaatctctagagaacaaatttttccatttcctaagaatgtgctttgtatttgctatttgctttatgttctcaaaggc

SEQ ID NO: 448379 - DNA, 201 bp, Homo sapiens
aaggacttcttcattggctttgatgactcatgaagcactggaggctttacgcctgagctgcccagtgtgaaaaccaaaggcctccattgccgaatcctctygctagctcatggctgacctcagatctggtggccccactatcaacatgggtccccaggtgtcccttgtacactcagtggcttagccctgttgcccccacgc

SEQ ID NO: 448380 - DNA, 201 bp, Homo sapiens
tggtgttacacaccccagtggcctgcctgacagtcaccgctcacacctgcatgtgtcatttggcgtgtaggcaacagttacacactatctgctcaatggcyatccagtttggggactgagttgtggtggaattgaaggagcctttcccacttgatcttggacaagttttctgatccctacaatgaggaataaagctcgcac

SEQ ID NO: 448381 - DNA, 201 bp, Homo sapiens
caatagcaggaaccttggagctctccccttcctctggcaaagagtaagcctgggttgcagcttattgattttccacttcggcccggaagggagcatttatmtttttaagtcagatggcatgactctccttgccaaaagttttaggagcctcatgccataggaccaactctgggcccgcaggccccagcatgggcttttgtt

SEQ ID NO: 448382 - DNA, 201 bp, Homo sapiens
tgtgactttgggtgagtcacttcagctccctaaacctcagtctcccactctgggaagagcattgagacttgagagttagaatttgtgtttggggcttcagwtagatgaaaaccctgtccctccgcacccaagctatagctcctggcctttctgagccttgctctgcttgtctgttccatggagctcttggtctccacttca

SEQ ID NO: 448383 - DNA, 201 bp, Homo sapiens
tgtggctgtgtctgctctcacacagcctgcagagaagcaggcagagctgagcagcggccgctgggcccagccagcccactcttgtccccttcttcatgcgygatgtgttttcttccctatatcccgaggcagtcactcgttttcttctccattctctcagcctctcctctggcccctggggacccgcctttcaccctgtgg

SEQ ID NO: 448384 - DNA, 201 bp, Homo sapiens
cccttcgcattcgggctcttagcgcaacccggactattcttagcataccgaaatgcgagctgtcccccgtgcactgcaggtggattgactgagcttctgcmtgcgtgtttctgaaaggggcctccgccgaggagcatgtgttttgtgcgtgcgcgtgtgtgatgtggaaggaggcacagcccgggcgggtgaccatccgcc

SEQ ID NO: 448385 - DNA, 201 bp, Homo sapiens
ggtaatggagcggacacatatgaaatgtcagctgaagacctcccctgtgcctcctttgcccactggtccatatttgtgggctttgcttatacgtatggcgyggggacagaatacagttatttggcccatgcagccacccagtcttgctggtgtccacttcggtgatctgagagagaaaaataagacttttctggctgtcat

SEQ ID NO: 448386 - DNA, 201 bp, Homo sapiens
caaggcgggggacgccagtctccttgggcaagacccctcagctcttatccaggtgttcctcagggagaagggtggcttgctgtgtcacaggagtcccatcmtcccatctagatccagtcccacattaaaaaaagagtctccagattcctttttcttctggttaaaatcccaccattcttttgagaggacagctgatttatg

SEQ ID NO: 448387 - DNA, 201 bp, Homo sapiens
ggttggatcattaatcatgtcacagctagagtcaaaggttgacctgtgtgttaaccacattatattcattgaataataatattaatagcaactagcatttrttgagaacttatgataaataaactgctgaagtgctttaaatgggttattgcactgaagccttataactttaacttgtactccgactactgtctccgtttt

SEQ ID NO: 448388 - DNA, 201 bp, Homo sapiens
gctgaaatttgtgcaaaatacagcggaaatacagaagagggactggtcagctgtgcagggcagagtgctgagggaagagctcaggaagggctgtgagcggkggaacccttggagcaacgtcttcaaatatcaatgggcaaacagagaaaggttaggatagaaggaagggcccctgctatttgcgttagggaggaggcatcc

SEQ ID NO: 448389 - DNA, 201 bp, Homo sapiens
tttttttttttttttttgcatcctttgaatataactccaggctggcttcagggtaaaagcaagcctcctgggctctatgcaagttatcttaggagtggtcytcattttctttttttcctgtcccggggccagttatctgtaacatttaagactgcatcagtctgaggtcttctgatgcctcttgcctccttcggggacact

SEQ ID NO: 448390 - DNA, 201 bp, Homo sapiens
tcaagtgattctcctgcctcaccttcccgagtagctgggactacaggtgcgtgccgccacacccagctaatttttgtgtttttaatagagttggggtttayaccatgttggccaggatggtctctaactcctgacctcaggtgatccacccgcctcggtctcccaaagtgctgggattacaggcatgagccaccgcacctg

SEQ ID NO: 448391 - DNA, 201 bp, Homo sapiens
tggtggtgggctgggcactgctgacagtctcgagggagttttcacgcttctcatgatatacatgtgtctatcagcagtggttcccttcaggagagtctcaratttcttaagggagttgtagactcctccacatagtcagtattagaattgctccatttgatcttgatggggtcttgctcctgggagagggatatgggtttt

SEQ ID NO: 448392 - DNA, 201 bp, Homo sapiens
gtagcgtagggctaatgatatcaaagatggactggttaccacagatttaacaccggatgggatcttgtagatcactgcacattgacctgaggctttgaccstgcaggtttgtgccccttctcgctccgctccttccccagctctgtgctgagctccctgtgagttccaggtacgagggtgtgaggatgaaatgctgggtgt

SEQ ID NO: 448393 - DNA, 201 bp, Homo sapiens
gctgagctccctgtgagttccaggtacgagggtgtgaggatgaaatgctgggtgttctgtctctggggacacagtctagcagagatacagagccatctgargctgtggcttgcatcctatggaggctccgaggagggcctctgattgcgccctgcagacgggaaccatctaagcacgtggattagacagacttggcagata

SEQ ID NO: 448394 - DNA, 201 bp, Homo sapiens
aagtgtttattagcaagagggctgaaagactgtatgataaaataatgtgacggtcacacaccagggcctgtcgggggtggggggctaggggagggatagcwttaggagaaatacctaacgtaggtgacaggttaatgggtgcagcaaactaccatggcatgtgtatacctatgtaacaaaactgcacgttctgcacatgtg

SEQ ID NO: 448395 - DNA, 201 bp, Homo sapiens
acttggatgtccttcggaatctcaaacttcctgtgtcctaaatcagagtcatggatcttcgtaccacaccctgtcttcttgctcctctgcctctctccccracttgagtaaactggtagtgcattcttctcattttttttcggtcaagaatctaatcttgaagagatccgtggcttcccttttcccttcccactcagcgta

SEQ ID NO: 448396 - DNA, 201 bp, Homo sapiens
actggccttttccacgcagtttccaaagataatgatttcccacccctttgcagtgacttgccagagcatcagccacggttccgagtcactttttggaaacsttctgatggggaattgcatgaatattctctgatatgtgtcactgaccccaacataagacctcacctgtgtgtttaagcttaaacccaggacgaggaggga

SEQ ID NO: 448397 - DNA, 201 bp, Homo sapiens
aaaatcttacttcacctcacttctacaaaacaaaattaaaaaacattaactgggtggagaccagcctgagcaacatagggagacctcacttctaccaaaawaaaaataaaataaaataaaataaaaagacattagctgggcttggtggtctgtgcctgtagtcccagctacttgtgagggtgaggcaggaggatcgcttgg

SEQ ID NO: 448398 - DNA, 201 bp, Homo sapiens
cattgagtcctcacagacataaaggtggcagcaacagacacgggggctactcgagaaggcagggagtgaggggtcagggagggaaaaaccagttgttgggyagcacgctcactgtccggatgacagaatcactcatttcccaaacctcagcatcacacagtatactcatgtaacaaacctgaacacgtacccgctaaatct

SEQ ID NO: 448399 - DNA, 201 bp, Homo sapiens
gctgtagggggtatatttatttgtattatgctgtaagtccagatgcggggttatagaatctttcgtgggaaaggagcctgactagtgtccccttctggtgytactcctcatgcttagatcctgtcagaggccgtccactgctactggcaccctctcattgcgcagcctgttctcatcctcagactccagtccctcacagag

SEQ ID NO: 448400 - DNA, 201 bp, Homo sapiens
ttccttgtgccattccagacttcctcccgagtaggacctcctcaaggccacagaggatgtccttgttttgcctggccatcgctgtatcactccatccattytgcagtggaccagatgtggcgctctcccttaagcccctagcagcgctgactgcagaggctgggttcaggcttccttctgaccctccctcactctgcctct

SEQ ID NO: 448401 - DNA, 201 bp, Homo sapiens
tgtgtcctaaatcagagtcatggatcttcgtaccacaccctgtcttcttgctcctctgcctctctccccaacttgagtaaactggtagtgcattcttctcrttttttttcggtcaagaatctaatcttgaagagatccgtggcttcccttttcccttcccactcagcgtaccgtcggtcagctctgatgtcttcaatggca

SEQ ID NO: 448402 - DNA, 201 bp, Homo sapiens
cacctaggcttgatgggggagctgtggccagacgccaggtttctcctgcaggggttctcagtttaccgccttgcctggtgttggctgtgggctcacgtggrgcaaggcatcgaaagacgcttcttcaggccgattcccggtgaagtcacagtgccctgtcctttatcagtggccttcagtgtggttagggcctggcgattg

SEQ ID NO: 448403 - DNA, 201 bp, Homo sapiens
tcagtgggaagagggtagggtggagaggtgagggaaatctttgtaaagccaggttatgaagtatggaaaaagtgtttattaataagattatccatccatcygtttaatggacattgatacatggttaatgtataaatcatcttcaaatgtaattctacttagcaagcatttattgaatagttgctttgtgccaagtcttgt

SEQ ID NO: 448404 - DNA, 201 bp, Homo sapiens
aaacactattaccatctggaatgaaagaggaacatactatagatcttacagatgtgaaaaggttaataagagaacataatgggctgggcacagtggctcaygcctgtaatcccagcactttgggaagccgaggcaggtggatcacttgaggtcgggagttcaagaccagcctgaccaacgtggtgaaaccccgtctctact

SEQ ID NO: 448405 - DNA, 201 bp, Homo sapiens
acaaattttgtattctaactttttggagatttccctggatgaaattttatcttaaaggaaatgaattttttttttcctttgatgtttagtgctttttgtgkcttctccgagatctcttttcctatcccaagactacaaagatattccatgtcttcttccagacgttctaggtgttatatgtttagatgtatgacccacctc

SEQ ID NO: 448406 - DNA, 201 bp, Homo sapiens
tctccttagtgtagaaaacctcccaggaatttggacaaaaatacaggtcaattaaaaaaatagggaaatgatatgaatgtgtaattcatgaaaaaggcatkaaaatgtgccaagcatatggaaagatgttccacttttttaataatgagagaaatgtaaaatgaaactacattgagattcttcatctgtcagactgtcaaa

SEQ ID NO: 448407 - DNA, 201 bp, Homo sapiens
atctgtcagactgtcaaaaagccaaaagttgaacaatataccctgttttcaaggctttgagaaaagaagtgctctctcaagcatggctgttaacatgtgamatggttcgactttcagttgaacatttgggtagtatccattaaaatgacaagatttgttttttgacccagaaatctcccttgaaaaatatatctttcagaa

SEQ ID NO: 448408 - DNA, 201 bp, Homo sapiens
agaaggtgaaatttggctggagcgtaagtgcaggtaggacgtggcggccctctgcactgctgtggtctatggcactgggctcatcgcccagggagttaggytgggggtcccaggttctgtctggcctcgactctctgacttgatgctctccttagtatcctaaaccagactttcaacttggtcttctaacagtccccagac

SEQ ID NO: 448409 - DNA, 201 bp, Homo sapiens
ccgtcaggatggagctggtagggaggccaggatggcaggtgcagaggctctgggacaggaaggatgtgctggagggacaggatggccagggagcagtggcrgggaggacacagcccgggagacgggctctgggaggaaactcgtagggccgaggagaccagagttggggtgagaatttcatcaagactttcttttattctg

SEQ ID NO: 448410 - DNA, 201 bp, Homo sapiens
tcgataaacaaggtcgcttcagatcagatgccagggccatgagaaaatacatgaatgtggccgagtggctggcaggggcaggaagccctctactgtgtggkcagggacaacctttctggcagagccaagtcctgaccgtcaggatggagctggtagggaggccaggatggcaggtgcagaggctctgggacaggaaggatg

SEQ ID NO: 448411 - DNA, 201 bp, Homo sapiens
gtgtctgccatttgcctgcctgtgctgggtattggggacaccacggtgaatgagacggccaagtgccagtgttcctagagcttcctgacgaggaggaacaygggtagttaacaatgaaacaaatcgataaacaaggtcgcttcagatcagatgccagggccatgagaaaatacatgaatgtggccgagtggctggcagggg

SEQ ID NO: 448412 - DNA, 201 bp, Homo sapiens
ggccatcagtagtgaattggataaagaaaatgtggtacatatacaccctggaagactatgcagccatagaacagaatgaaatcatggcctttgcagcaacrtggatgcatctggaagccattatcctaaaccaatgaatgcaggaatagaaaagcaaatacagcatattctcacatataagtgggaggtatgcattgagtc

SEQ ID NO: 448413 - DNA, 201 bp, Homo sapiens
tgggaccatggagcccatcgccctccctggcggcctcaccctgccaccggtgcccttcaccaagcttcccatcgtcaggtgagatgggcactgcagagccrgaaaggcagctgccctctgggacaccgtcctctagtctgattgtgaatagagatctttagaagagttcccatttttgttggctgtgtatcgggttcatta

SEQ ID NO: 448414 - DNA, 201 bp, Homo sapiens
atttggtcacctacctcttgttggacatggaggttgtttccagtttggtattattatgaataaagtctccgtggacatttacatccatgtttttgtgtagmtatgtgtttttatttttcttggtaggagttgctttgctgagtaatatgttaattgtaggtttaagcgtaggaggatttacctagctatttttcaaaagga

SEQ ID NO: 448415 - DNA, 201 bp, Homo sapiens
gatattttcaagaagtaggttttagtatagttgtttttttccattatttatccattttcaattgataattgtctaatcctgtcttccttactggtttgttkttccttcctctgcaactcctacccacctggcatatgtagtcctttctcctcctgtattctcatatattctaatacacttatccatgacacaacgtgtcac

SEQ ID NO: 448416 - DNA, 201 bp, Homo sapiens
caaatattgaagggaacctgtcaatatgtagtcatgaaatatacctataggagtggtgagaggggatttggaatagtgagcttttaaaatgagactgaagractcaaatagaaatttctccaaagaagatacataaatggaccataagcacataaaaagatgctcaacatgactagtcaccagggaaatgcaaatcaaaac

SEQ ID NO: 448417 - DNA, 201 bp, Homo sapiens
cagccactgtgcgaaacaatatggtggcttctcaaaaaattacatagagaatacccgtatgattcagaaattccacttccgggcatataccccaaagaacygaaagcagggtctcggcactgtccaaccatagcagcactgttcacacgagccaaggggtaggagcaacccaagtgcccgctgacagacgaatggatgagt

SEQ ID NO: 448418 - DNA, 201 bp, Homo sapiens
ccagtcacaaaaggacaagtactgtaggattccactcatgcaaggtgcctagagtgtcaaattcaggaagacaaaaagtagcatggtgggtgccagggcckagaggaagggagactggggagtccatgtttaatgggttcagagggtcagtttgggaagatggagtagttctggggacggaaatggatgatggagatggtt

SEQ ID NO: 448419 - DNA, 201 bp, Homo sapiens
ttacaagctgtaaacaaatgtaaaaactgttcttagctctcaggccacacaaaaacaggcggtggtcagatttggtccatgggctggatctgctgtgtcckctgcttccggagggtcctggggaaggcagggtccttcagtccggaggggaacctggttgaacttcttgttgctgtggttactctgggtgcccccaggctc

SEQ ID NO: 448420 - DNA, 201 bp, Homo sapiens
ccgcccccgcctgtcacctcatctgatgttgaaatgatgctcatagaaatgtgtttttctctctaaaatgccgtgtttaggccggcgcagtggctcacgcytgtcatcccacacgcctgtcatcccacatgcctgtcatcccacacgcctgtcatcccacacgcctgtcatcccagcaccttgggaggccgaggcgggtgg

SEQ ID NO: 448421 - DNA, 201 bp, Homo sapiens
ggaggccgaggcgggtggatcacccgaggtcaggagttcaagaacagcctggccaacatggtgaaatcccatatctactaaaatacagaaattagccaggmgtggtggtgtgcacctgtaatctcagctacttgggaggctgaggcaggagaattgcttggacctgggaggcagtggttgcagtgagctgagtttgtgcca

SEQ ID NO: 448422 - DNA, 201 bp, Homo sapiens
cgccttgaggaaggaggctgattggctcccaggagattccttacaacatgaggttctcctgcataagtcatctgtgggcccagagcggagcatggtagctsggcctagagtcctcattcaggacgcacttctgggacgtggccctggtccctcatgtgccaaatggtgcactaggggtttaaatggggcagggcacagcca

SEQ ID NO: 448423 - DNA, 201 bp, Homo sapiens
taccacctgtgagcctcgaccagcctgcctccccctgcccagcatgcgcacattgcctcgttctcagccccacggtggccccctggccccatgcacaggckggccaatggcttcctttctctgtgccctgccaagcccctccctggcgggcacagcctttacttatagcccgtgtttctaccagagcctggacgtgctata

SEQ ID NO: 448424 - DNA, 201 bp, Homo sapiens
actggaactgcctcccctgcctaccactctccaggacagggctcccggacctgcttccgcagggcccgcatggggcccaggcagctcctgtcacctctctrcacctcagtgtgcttctgcaaataaagctgcacctgctctctgacctcttaggaggatgtgggcgctgagtgagacacactttaccacctgtgagcctcg

SEQ ID NO: 448425 - DNA, 201 bp, Homo sapiens
tattagttcagtctgtagttaattcccattctgcttgatattcctgaacatttcagttctccatgagtcctgaaagtttttcttctattctgatgtcacartctccaaagttatcagaaacttgtattcaacagcacctggtagagttttatagctgattataaaaccaccttctaaagaccaaaacagacaacaattgtc

SEQ ID NO: 448426 - DNA, 201 bp, Homo sapiens
catcacagccaaaggtggaaacagcccatgtgtcccttggtggatgctatatgaacaaaatgtgccccatccagacatggagtattgtcccgccatgagaragaacgcagcactgacccatgctgcagcacgggtgagccttagagacatcatgctctgcgaaggaagccaggcgccggagctcactgccctccgcttctg

SEQ ID NO: 448427 - DNA, 201 bp, Homo sapiens
atgttctaaattttgttcataggagtacactcaatcattaaaagctgttaatagctcaaaagaaaagtttccttgactctgaaaaaacaaaggaccagcarcgttttaagcaaaaaatcaaaaagattacttcagtcttgtattagttcagtctgtagttaattcccattctgcttgatattcctgaacatttcagttctc

SEQ ID NO: 448428 - DNA, 201 bp, Homo sapiens
cccactctgagtgaggcagacatggcttgtgcattgggcctgcaaccctggacacatgcacggcagaaactcatgctcagcaccaccctagacagaggaarcccgcctctctagggtgcagtcaggcaggtctcttgaaaagtccactgtggtttgaaatctctgctgtacactgaacctgagcccacaggtggcggctgt

SEQ ID NO: 448429 - DNA, 201 bp, Homo sapiens
aagtggaattcatcccagggatgcgaacatggttgaacatagatgtgacatatcacattaacggaatgaagaaccaaagccatattatcatttctatagawgcagaaaaagcatttgacaaaattcagcatcccttcatgataaaaactctcaacaaattaggtgttaagaatactcacaaatagtttccaaattctggaa

SEQ ID NO: 448430 - DNA, 201 bp, Homo sapiens
ctgaaatttaaaagttaaatatattatagctgaggcaggctggatagagccttaaaaacttgactcactttgttccttggtcttcaagtcatgtatttccrctgcattgtttttgtctttacatttttaaatcccaaattagatatttgcaactgaagtctacttagtcccctgtttctcgccagcgcaaaaggttggaga

SEQ ID NO: 448431 - DNA, 201 bp, Homo sapiens
tgaaagatcttccaccatgatcaagtggaattcatcccagggatgcgaacatggttgaacatagatgtgacatatcacattaacggaatgaagaaccaaarccatattatcatttctatagatgcagaaaaagcatttgacaaaattcagcatcccttcatgataaaaactctcaacaaattaggtgttaagaatactcac

SEQ ID NO: 448432 - DNA, 201 bp, Homo sapiens
ggcgtggtttgcctccagggtctggtaaaccagtattcattctcagggtggctgccataatggagagcaggaatcctgtgcacatctgggaccccggattraattaatacttgcagcttttggggtgctcaagccccatcagagaagcctggggagcaggggaggttgggcaacccctggtggatgcttcaggactgaggt

SEQ ID NO: 448433 - DNA, 201 bp, Homo sapiens; identical to SEQ ID NO: 160162

SEQ ID NO: 448434 - DNA, 201 bp, Homo sapiens
caagattgagacgtgccaagatgaagtcagtttgattcagcaaatatttatggaatacctgctctgtgccaaggagcaggattgggatgcacaaacaaccrtgatgggggtgcttcagctgaggagacagacatgcagacacctcgctgtcccatggccacaacacaggcgaggagaggggggtggcattgcccagcagca

SEQ ID NO: 448435 - DNA, 201 bp, Homo sapiens
ggtggggccaaggctaagtctctgatgagttgaatgtggttttgcaccagcaggagacctgttttcagccaggggaggaagatgtgctgttcagcttgtgwcacggggtgggggcgtctctggaaaacagaggctggcacgcagcaccttcaggtcagcacggtgggaaggagaggaggaagcagatggacagagaaagaa

SEQ ID NO: 448436 - DNA, 201 bp, Homo sapiens; identical to SEQ ID NO: 160160

SEQ ID NO: 448437 - DNA, 201 bp, Homo sapiens
gagcccgccagcagtgccgactgcttgcctactaagcgtgagaactgtgggcagtgcaggtgatgtagaaggtcctctctgcactcagcccaccaggcccyaagagaccaggcctcaagaatgagacaggcctggccagtggcgtcagaagtgaatgatgcctgggctggggggactccctctagatggcactgacaggca

SEQ ID NO: 448438 - DNA, 201 bp, Homo sapiens
cgtggcacaggtcctcctgccctggggcaacccctccttcagggagcctggctcagtaaacattttatcagctgaacccacgaggtgcttccctcgtaccycgtttgcctccctgtgtctgcatccccatcccctgcccccggcctccccacagcaggcagaagggcaccaggcctcatttctgcattggcctcaccttct

SEQ ID NO: 448439 - DNA, 201 bp, Homo sapiens
gtcagaaacccgcctcagcctcaccacctgggacttggagcgattcccataacttacttggctgatttgtagcataacccggtttcgctacctgtccagcmttttctctgccactacctccacacactgaagctaggaaagcttcctcagcctgccccaaccgccttcaccttctgacacaaggttttcttgcccctgcct

SEQ ID NO: 448440 - DNA, 201 bp, Homo sapiens
agagaacagaggcacctctcactcatgcagtgtcttgggttcagtgccagggaggccagggctgcccctgcccttccacagtctccacctggctccacagrtgcttggctagggtccgctggaggatggggaggcaacacaggctttggcgtcagaaacccgcctcagcctcaccacctgggacttggagcgattcccata

SEQ ID NO: 448441 - DNA, 201 bp, Homo sapiens; identical to SEQ ID NO: 160159

SEQ ID NO: 448442 - DNA, 201 bp, Homo sapiens
ttcactcatgactccagaacgaaccctccgaagctcctgcatctgaccaccaactcccaataacaaaccaaggtgcacacataatgtccgaatgtaggtgycagcctcacaactcacccaaaagattcctaagatacacacacacaaaagaaaagcagcacctactgtaaatacatcactggttgagaaatgcagttatcc

SEQ ID NO: 448443 - DNA, 201 bp, Homo sapiens
ttccctccctctcccacatacctgcactctgttgtgacttcaccaagcgagtggctcgttctatgcacacgattaaacaaccagtcaccttgggatccagmgtaccactgtgccctgtcttctccacccgaagtatccgtcgaatccaggctaccacctcatgggaagaggggttagagggcttgtcaagattaatgaaac

SEQ ID NO: 448444 - DNA, 201 bp, Homo sapiens; identical to SEQ ID NO: 177260

SEQ ID NO: 448445 - DNA, 201 bp, Homo sapiens
ctctcccacatacctgcactctgttgtgacttcaccaagcgagtggctcgttctatgcacacgattaaacaaccagtcaccttgggatccagagtaccacygtgccctgtcttctccacccgaagtatccgtcgaatccaggctaccacctcatgggaagaggggttagagggcttgtcaagattaatgaaacctgtcctg

SEQ ID NO: 448446 - DNA, 201 bp, Homo sapiens
gtctcaaagtagcagctaaaatgtgccagaactcttcaccctgtctaggacctatgttccactctctcagcaacaaaaggatctataacatgttttctcartaaggctttagtttctcctccagcttcaagtggccttcactactcagaaaccaattctacctcttttgctttcttcttcttcttcttcttcttggtggta

SEQ ID NO: 448447 - DNA, 201 bp, Homo sapiens
ctccagtagtgtaatgtctgaggccttcacattcagtcaccgactcaaccagggcaacttccagctcagcaagctccattcatggtaagtgccctcctctwcgggtgcaccacttataaccttgtgtactatatatatataatatacatacatataatacatacatatataatatacatatatacacacacatatttatat

SEQ ID NO: 448448 - DNA, 201 bp, Homo sapiens
ttggttaagtgttagatcttgggcaataatggacaagaaaggttcagtgagtcaaaaggtagcaaggcaccaagaaagatcccaactgaatctaacaggaygttttctgactacaaacccggacagggccttagtttactgaggatttgaagacagtctcatcccccaaatccaagaagccttgaggcaggcacaagagaa

SEQ ID NO: 448449 - DNA, 201 bp, Homo sapiens
aggcattcatctgatgcacgattttaaccacatacctttagcaaaaggggccactgagacgtgtccaacttagcaactttggattcaggtttgataagaamttcttcagcgtgttgtatttccttcgacaggacagaaatataacctattaaacttcccacccgattttgaacaattccattactgccatggaaatgtatg

SEQ ID NO: 448450 - DNA, 201 bp, Homo sapiens; identical to SEQ ID NO: 177264

SEQ ID NO: 448451 - DNA, 201 bp, Homo sapiens
taaactcctaacccggaacttactgcactgtctttcataaccagccgtttatgagatgtcaacagcttttccaaagggtaaacaactcgccgcaggtaackctcatccttgtggttatcatacagccactgagcatcaagcacatcatgcattgtcaccatgtggtcctgaaaagcagccatgtatgaaaataattcagtt

SEQ ID NO: 448452 - DNA, 201 bp, Homo sapiens; identical to SEQ ID NO: 177265

SEQ ID NO: 448453 - DNA, 201 bp, Homo sapiens
gccacgtcccacgccaccgcggggtgggcagcacggcagatgtctttcgacggcgacccggaccccagggaggtgagagggccgagccccatcatgccaartcaccgcgaggggctcccactctcgcgcccttgccacggagccagggccgagagacaaggccggcttaaggccgggcggtgaagaggccgacacgccggc

SEQ ID NO: 448454 - DNA, 201 bp, Homo sapiens
taatttttgtatttttaatagagacagggtttcaccatattgcccaggctggtctcaaactcctgagctcaagcaatttgcctggcccggcctcccaaagygctgggattatgggtgtgagccaccgcacgtggtccatattttcatttgaaacataaaaatagccttggcattccttaattactcctctctcctccttat

SEQ ID NO: 448455 - DNA, 201 bp, Homo sapiens
atagccttggcattccttaattactcctctctcctccttatgaggagaaagaacagatttactggagatccaggcaataacaggctcttaaagaacttgaraacaagattactgagccctgttgaaccaatcacacaaaagtcttggtgcagaatttataggtcagtgggtacaagttaaggctacctctccagaggttca

SEQ ID NO: 448456 - DNA, 201 bp, Homo sapiens; identical to SEQ ID NO: 177281

SEQ ID NO: 448457 - DNA, 201 bp, Homo sapiens
ttcttcttatgtttctttggcaaaataattactaaaaaaacaaacacaggatttgggaattttccccaagaataaatgaaacaagggtttaaaataaagaycgaaattagggcaggtaggaaatggattttaggtctacaattacagtcacatgccacataatgttttgcaagtacagactgcgtatgtgatggtggcccc

SEQ ID NO: 448458 - DNA, 201 bp, Homo sapiens
catgtatgaaaataattcagtttatttgtatctcagcccatcagaccccaaacttcctaaaactgaatgtcacttgtttactagtccaagctcattatgtyttcagcctcttcagtcctggctcttccaggcatctttttttttttttttttttttttttgagacggagtctcgctctgtcgcccaggtgggactgcggac

SEQ ID NO: 448459 - DNA, 201 bp, Homo sapiens
acataccttttcactcatgactccagaacgaaccctccgaagctcctgcatctgaccaccaactcccaataacaaaccaaggtgcacacataatgtccgamtgtaggtgccagcctcacaactcacccaaaagattcctaagatacacacacacaaaagaaaagcagcacctactgtaaatacatcactggttgagaaatg

SEQ ID NO: 448460 - DNA, 201 bp, Homo sapiens; identical to SEQ ID NO: 177261

SEQ ID NO: 448461 - DNA, 201 bp, Homo sapiens
aagtatgcctaccattaaacttttactttaaattaatatacttggtttggacttgaaaaaaataaaataaaacccaaggaaaacaataaaaagagcaagcstcatctttggagtacgttctttccaaatataaactcctaacccggaacttactgcactgtctttcataaccagccgtttatgagatgtcaacagcttttc

SEQ ID NO: 448462 - DNA, 201 bp, Homo sapiens
tccaaatataaactcctaacccggaacttactgcactgtctttcataaccagccgtttatgagatgtcaacagcttttccaaagggtaaacaactcgccgyaggtaactctcatccttgtggttatcatacagccactgagcatcaagcacatcatgcattgtcaccatgtggtcctgaaaagcagccatgtatgaaaata

SEQ ID NO: 448463 - DNA, 201 bp, Homo sapiens
atttgctgtaaagatctgtaattctggccaggcacggtggctcacgcctgtaattccagcactttgggaggcagaggcgggtggatcacgacgtcaggagrtcaagaccatcctggctaacatggtgaaaccccgtctctactaaatgtacaaaaaattagccgggcatgatggcgggcgcctatagtcccagctacttgg

SEQ ID NO: 448464 - DNA, 201 bp, Homo sapiens
caggtatattcagcatggtatgtttcatggatgggaggaaaattggcattgtcttaaatttacttctgacaacagaaacttctaagcagtcaaaattgcarcaaataaaaaacacatgcaaaacatactttggtgaaaacacttacctttgaacaaagcaccgaactacacaaatgcagaatgaaaacatttcaactccag

SEQ ID NO: 448465 - DNA, 201 bp, Homo sapiens
tagctgatgtgaaagcattttcaaaagaaagtaagtttgcacagtgcctcctcccaacacttacctgatatagtccccaatctctctcttcagaggatttkaaccacatgcaagaggtgtatagtgtgttgtccttacattcagcttatcaaaattctacaaagcaacgacacaacacaaaacaaaataccatgtcgtgag

SEQ ID NO: 448466 - DNA, 201 bp, Homo sapiens
ccttcaatagcattgtgcagccggacaatccccacatactctttgcctgaaaaatgacaaaagagtagtcaggtgtggccactgagttttctgttttccawatttcttatatgctcagtcactcccattttgcacagcaggaaaagcggcagtttgaccttgtgtttctataaaatttgcattaagagagatttcatggtg

SEQ ID NO: 448467 - DNA, 201 bp, Homo sapiens
aaggccctgcttgatcatcagcttcttctgacttgcctggtggaacatcaaggtgtcaacattagaatggtgtcaatgctggaagcgggcatggtgactayaaagaatagaacaaggttcctccctggtgtattctcagcagggcctcaaactcctctccagagcattcagaatttgcccactaactccaacacacacagg

SEQ ID NO: 448468 - DNA, 201 bp, Homo sapiens
ttaaaaaataaacatcccctcttacccatgcagattgcttctcctttggtggtgataaccacaatctcctgattgacctcaatgccgtcctcatatcgaabaacacctggaagcataatcttggccccatagcagatggcatttacctgcagagatggcaccaagtgtaaggggcccagctgctgccctccaccccactcc

SEQ ID NO: 448469 - DNA, 201 bp, Homo sapiens
tttccccacgcagggactaagccagcccaaggaacctgaacgtgtttccacacaccccatctccaggctcggccccgctctccagaccagctttggccttyttgtccttcttactcttcttcttttccttcttgatcaactgaggagctgctggaggagtctcgtcactttcactctcactctctcgcttccgctgagatg

SEQ ID NO: 448470 - DNA, 201 bp, Homo sapiens; identical to SEQ ID NO: 177275

SEQ ID NO: 448471 - DNA, 201 bp, Homo sapiens
tgacttcaaattatagtatagagctacagtaaccaaaacagtatggtactggcataaaaacaggcacataaaccaatggaacagaataaggaacccagaarcaaatgcacacacctacatttaactcatttttgacaaaggtgccaagaacatacactgggtaaaaaccagtctcttcaataaatggtgctgggaaaacta

SEQ ID NO: 448472 - DNA, 201 bp, Homo sapiens
gcatatgaaaaagtgctcaatgctgatcacgagagaaatgcaaatcaaaactacaatgaaatatcatttcactccagttaaaatggtttatatccaaaagrcaggcaatgacaagtgctggcaaggatgtggagaaaagggaacctttgtacactgttgatgggaatgtaaattagtataaccactatgaagaacagtttg

SEQ ID NO: 448473 - DNA, 201 bp, Homo sapiens
gtaacaaagctggtaccacctgggtaattctttccccacgcagggactaagccagcccaaggaacctgaacgtgtttccacacaccccatctccaggctcrgccccgctctccagaccagctttggccttcttgtccttcttactcttcttcttttccttcttgatcaactgaggagctgctggaggagtctcgtcacttt

SEQ ID NO: 448474 - DNA, 201 bp, Homo sapiens
ctgttgtccatgtactcctgcgtccagatggcaagtgggctctaccttcccatcctcacctgttgttgacatactcctgcatcaaggcagcaagtgtgccrtctctacccaccccggctctgaaacatcctgccctcacctgtagtcaacatactcctgcttccaggtggcaggtgtgctgtctgtgggcttcccatgctt

SEQ ID NO: 448475 - DNA, 201 bp, Homo sapiens; identical to SEQ ID NO: 177282

SEQ ID NO: 448476 - DNA, 201 bp, Homo sapiens
tttactgtcctttttctgcttagacatgtttaagtacacaaactctcgacgctgtgtcccaactgcctacagcattccgcacaataccatgctgtccaggkttgaagcctaggagccatacgctacaccatatacagcctaggtgtgtagtagcctatgccacctaggtttgtgtaagagccctctgatgttcacacaatg

SEQ ID NO: 448477 - DNA, 201 bp, Homo sapiens
acccatatccttaaaacaggacaagatgggatgaccacaccaggtaacatcaccgaggtctcaaagtagcagctaaaatgtgccagaactcttcaccctgyctaggacctatgttccactctctcagcaacaaaaggatctataacatgttttctcaataaggctttagtttctcctccagcttcaagtggccttcactac

SEQ ID NO: 448478 - DNA, 201 bp, Homo sapiens
gatgtttggagtcaccaagaaacaaagaaagccagagcatctggaatatggcagacaagagggagagtggcttcagtagaggacgtggaggcggcaggagycggattccacaggctgattgggaaatgcgaattgtattctaactagtggaaagtcatgtagtccccacaccccaacacacacacacacacacacacacac

SEQ ID NO: 448479 - DNA, 201 bp, Homo sapiens
gattactgattagtgtctttgcaatgtacagagctccatagttccagtcagtagagcagatgttaattttccagagaaacacattctcgattctggttttwcagtgtatcagattgtcacctattgctctatatcaatgtttgtggaattcttaaaattaatcaaaattattttagttcatgctagctacatagcaccact

SEQ ID NO: 448480 - DNA, 201 bp, Homo sapiens
tatatgcatgttgaatgacattttttggttatatcttccatcacttttaaacatgagaaatcctttcatctataaattagaaatatctgcatatattttartcttgttgttttatgtttattttagagcatttagtattttaattcatttttagtttattttattgtgctatctttcatcacttctcagcataggaaatcc

SEQ ID NO: 448481 - DNA, 201 bp, Homo sapiens
agagcgattccacagatccctgcaaaagtcatacattttttggaaacttagtttctccttctgtaaaatgggggctactaatattgattatggaacacgtwtgcaataaggactaaggaaagtattttgaaatgttcaagttctatacaaatgtagtgtatacaaatgtatacattttacacgactgtaatttctcatatg

SEQ ID NO: 448482 - DNA, 201 bp, Homo sapiens; identical to SEQ ID NO: 29141

SEQ ID NO: 448483 - DNA, 201 bp, Homo sapiens
aacctattgtcatttggaacctaaactgtacacaatctgattataaaacaataagagcgattccacagatccctgcaaaagtcatacattttttggaaacktagtttctccttctgtaaaatgggggctactaatattgattatggaacacgtatgcaataaggactaaggaaagtattttgaaatgttcaagttctatac

SEQ ID NO: 448484 - DNA, 201 bp, Homo sapiens
ctgtgccagtttcttggtctatacttgtcttacatgactttggtacattgagttctgatcaattatttctagctgagtcatttgaaaatatgtatgtcacraatcttagcttaaattttaaatttttgttaccaatctgcatttttttttttgcaaatttatctgattgtatctattagacttttagtgattttccttaaa

SEQ ID NO: 448485 - DNA, 201 bp, Homo sapiens
ttctcctctatgtcttatgcccctctgaatggggcggggggaataatgatgtcataggagtagacttttacacttgggaagttttagctgaattaaatctygtttttttaaaaaattttcatttccttcccattgttttgctgccctatgtgaagtacaacccatgaaacgcatggaatttgttcatgtatgtttatatca

SEQ ID NO: 448486 - DNA, 201 bp, Homo sapiens
gcaaggcgtggctaggccacaaggaactcttcagcaagttaaagagaaaaacaacaacaagaacaaagcaaacaaacaaacaaaaatcctttagagttatwtaagggaaaaagagagttgtaattagggtgggcacgttcaaagggctagattaaattaaaactagttaggttttctgtggaggaagtgaaatgtgagaca

SEQ ID NO: 448487 - DNA, 201 bp, Homo sapiens
aaatgcctggaagaatccaatgaagagcttgtatgaccttaagaatgtcataattattaagaatataatggaattgctaagaaaatcataattaaacttgyattttaattctgcgaaatacacctaaatcaaatcattgttaagtctgaaactgttggtggtccgtgtaataaattatgaatgatcaatgtattttgagaa

SEQ ID NO: 448488 - DNA, 201 bp, Homo sapiens
ctcctaaggcaattcatgtagtaaattttatacttgagtgaatgagtcagcattttgacaacacacctacagaaatatagtgctttgaaaaaaaaatattyctctgttgaaaataaacaatgtagaccaggcactgctaccataaacatttctggaattgtagagataacaaataatttataaaaatccacttcagaatag

SEQ ID NO: 448489 - DNA, 201 bp, Homo sapiens
acatgctcaaggtttcacatccagttcatatcagaaccagaccagaatctcaactacttgtccactgttcttttatctgttctttcctgttgtctgcctcygcccatttgcaaagatcatcaggactgggagaagagagattgtcagttactttggtggaagttgctgcacttcatttctcgttcttccctattccctttt

SEQ ID NO: 448490 - DNA, 201 bp, Homo sapiens
tttcttgagactaaatcacagaaattatggaactgaaatcttcacatgttgatttaagacatggaatttggaaaatattcaggctcctaaggcaattcatrtagtaaattttatacttgagtgaatgagtcagcattttgacaacacacctacagaaatatagtgctttgaaaaaaaaatattcctctgttgaaaataaac

SEQ ID NO: 448491 - DNA, 201 bp, Homo sapiens
aaccgaaatccacaaatatgtagtagccttccccattagtcaatacagacatgacaatcctatattggctcaatgcaagctagtgcctgtttttcttacgwcctccaatgaacccatttgtttctcatgttttgtttttttttttcagtctggttatgaaggtcgagtcccactgaagagcgctcgtctgttttatgacat

SEQ ID NO: 448492 - DNA, 201 bp, Homo sapiens
aacctgcttgcctgcatttcctcttctcctctccttcctatccttttcctctctctcatccttctcttcctccttctttttgtgatgttaccaaaactttmatgttgaatttttactgtgaatttcttgagactaaatcacagaaattatggaactgaaatcttcacatgttgatttaagacatggaatttggaaaatatt

SEQ ID NO: 448493 - DNA, 201 bp, Homo sapiens
atgggttttgagtctgtgtccaaagttgaccttcatgtgttgtgagccaacctgcttgcctgcatttcctcttctcctctccttcctatccttttcctctytctcatccttctcttcctccttctttttgtgatgttaccaaaactttcatgttgaatttttactgtgaatttcttgagactaaatcacagaaattatgga

SEQ ID NO: 448494 - DNA, 201 bp, Homo sapiens
gagtcaggtttggtttttcctgtggcctctctccttggcttgcagattgttgccctcttattgtgtctttatgtagtgtttcctctgtttgtgctcgttcycctggtgtctctctctgtgtcctaatctcctcttctcaaaaacaaacaaataacaaaccaaaaaaccaccagattggattagggcccacccttatggcct

SEQ ID NO: 448495 - DNA, 201 bp, Homo sapiens
tattttcagcatatattagtttgctagggcagccatcacaaaaaccacagactgggtaggttaaacagcagacatttaccttctgactgttctagaggccwgaagcccaaagtcaaggagtcaggtttggtttttcctgtggcctctctccttggcttgcagattgttgccctcttattgtgtctttatgtagtgtttcct

SEQ ID NO: 448496 - DNA, 201 bp, Homo sapiens
atgattgacatatactttcttgtttaatagtaacctgtaagttttaattaaattcatcataaatgcagtaaaaactgctaaaatgaccaatttcatagccstgactattgaatttgtcccatcttccaacaaatgtttatcaagtgactatcaaatgctaggcactgtcctaagcactgaagatacaataagtaaaaaata

SEQ ID NO: 448497 - DNA, 201 bp, Homo sapiens
tcagtaaatcatgaaagaaccctttttcttaaaaaaaagcacagctatagcaaaatacagcaatggcattaaaactgcaaatgtaataaaagtaaacagcrttgtatcaacaatattaagttagcaagatcaaataaaccttgacaactaagtggtatgtgacagaaaatgcctggaagaatccaatgaagagcttgtatg

SEQ ID NO: 448498 - DNA, 201 bp, Homo sapiens
ttggcttttgacctgccttcctcagtaaacttaatcatgtttagtttttgatttaaagtgagagatatgtgactcttaacttgaacacttagagccattgkgggattattaattggcctaatttcagtgttgttgtgtctcaggggacagggaggcctgaggacagggagagagacaggtgaatggtgagttgatgaagcc

SEQ ID NO: 448499 - DNA, 201 bp, Homo sapiens
aacttagaaaattggcataatgtgataaaaactagaacatcatataattctctataatcctctctgaacctttccgatactcttattttatacctaggagstgaggccagtgtaaattgttcaggattatactgtgattttccagctcccagtccagtggtttgcccattgtacctgtatgtttcaaactggggttttaaa

SEQ ID NO: 448500 - DNA, 201 bp, Homo sapiens
tattctattttggcttttgacctgccttcctcagtaaacttaatcatgtttagtttttgatttaaagtgagagatatgtgactcttaacttgaacacttaragccattgtgggattattaattggcctaatttcagtgttgttgtgtctcaggggacagggaggcctgaggacagggagagagacaggtgaatggtgagtt

SEQ ID NO: 448501 - DNA, 201 bp, Homo sapiens
gatttggtgaactgatgcaagaaacctagcttttattctattttggcttttgacctgccttcctcagtaaacttaatcatgtttagtttttgatttaaagkgagagatatgtgactcttaacttgaacacttagagccattgtgggattattaattggcctaatttcagtgttgttgtgtctcaggggacagggaggcctg

SEQ ID NO: 448502 - DNA, 201 bp, Homo sapiens
ttatatattgcaatgtaataataatagaaataaagtgcacaataaatgtaatccacttgaatcattctcacaccatcgccctaccccaccccctcacaatycccaccgtggtgcatggaaaaattgtcttccacgaaatcctggcaccaaaaaggctggagaccgctgagttaaatcacacctaccaaaaaagccaaaact

SEQ ID NO: 448503 - DNA, 201 bp, Homo sapiens
aattattttattatatattgcaatgtaataataatagaaataaagtgcacaataaatgtaatccacttgaatcattctcacaccatcgccctaccccaccycctcacaattcccaccgtggtgcatggaaaaattgtcttccacgaaatcctggcaccaaaaaggctggagaccgctgagttaaatcacacctaccaaaaa

SEQ ID NO: 448504 - DNA, 201 bp, Homo sapiens
tatccatgtgttcactgtagtagcacttttaatttccttcaatcgcttttttttttttttttttttttttttgcgttcatgatttggtgaactgatgcaaraaacctagcttttattctattttggcttttgacctgccttcctcagtaaacttaatcatgtttagtttttgatttaaagtgagagatatgtgactcttaa

SEQ ID NO: 448505 - DNA, 201 bp, Homo sapiens
gggtgggacttaggctcctagtcatcttccttttatttctatagggtcttagcgtcctcagctcctagacacacagatttaataagtttcaagtcatatascctttcccacagtacttcctctactcacatggggcaaggagcaaagattaatgaaagtggaacagaatctctctgcttcactgtctccatgtagaggcaa

SEQ ID NO: 448506 - DNA, 201 bp, Homo sapiens
gtataattattttattatatattgcaatgtaataataatagaaataaagtgcacaataaatgtaatccacttgaatcattctcacaccatcgccctacccyaccccctcacaattcccaccgtggtgcatggaaaaattgtcttccacgaaatcctggcaccaaaaaggctggagaccgctgagttaaatcacacctacca

SEQ ID NO: 448507 - DNA, 201 bp, Homo sapiens
tgtttcactttcttatccatgtgttcactgtagtagcacttttaatttccttcaatcgcttttttttttttttttttttttttttgcgttcatgatttggkgaactgatgcaagaaacctagcttttattctattttggcttttgacctgccttcctcagtaaacttaatcatgtttagtttttgatttaaagtgagagat

SEQ ID NO: 448508 - DNA, 201 bp, Homo sapiens
gaattctagttaatgtattttaggccatggttgccagcctactccctataaatagttacataatgcaaaaaagaaaagaggaaaaaacagtaccaaggccytaagacacacatgccagaacacacatgcatggaatatttagcagtaataatatccacatgcatgattggcatcagtcctctgatttccgactcttgtctc

SEQ ID NO: 448509 - DNA, 201 bp, Homo sapiens
acgcaaatttctgtttattaaatatttggcggtaaaataacaaaattgttgaaaagaggagattgtcttaccctgagcaataggatatgaatatcatccayttttggttggaaaaataaacaacaacatgggattttaggataggaggtcttcagcagtctcttgcaaatagcttaaatcatggggattaaaaggcagcaa

SEQ ID NO: 448510 - DNA, 201 bp, Homo sapiens
tgggtgacagaaaattgctatatacatcatagctggtagattaaaagggagtgacaaagagatgtcctgagaaatttattcaagggtttacaagagaaaaraaaatgaaggatttaagactgtttaatctttaagaatttaaaacttttaaatatctctttaataagctttatattcacataacattttaataggatttta

SEQ ID NO: 448511 - DNA, 201 bp, Homo sapiens
ggtacagaacactaggggacatataaaacaggtgcttgacccattcaatctgagtaactggcttcacgttcaacactgcgcactgtagcacagacttaccygcctctccaccatcaagataaaacaaaaatcatcctcttaatggaaattcgaggctgttcatttgctatgttaagaaatgttcttttctttcttccccat

SEQ ID NO: 448512 - DNA, 201 bp, Homo sapiens
agaacataacctgtatgtaccctttgtcccctgcccccactccaaatattactgctaattagaagcacatgttgaaggaaaaactctaataagacattccrgtataagatctgggtttgctttaaatcccccaagcagcctaaagcccaacagaaggtatttagccttttgccttttgtttaaatggagattattttgagt

SEQ ID NO: 448513 - DNA, 201 bp, Homo sapiens
tagggttgatgaaaggacaaaatgaggaaatatttgtgaaagtcatttatgagggataggatacataaaattaggagtgagaaaatagagaaattaaaatmcttattcgtagactaaattattcacacaaaaatgctatgaaagcgcaacaagaagaaaatcttctattcacacagctgaaacacaggtcaaagaatctcc

SEQ ID NO: 448514 - DNA, 201 bp, Homo sapiens
ataactggtcagaaatattcatccaactaacaaatggtttccagggacccttcactgcagcttactgtgtagaatttaaactaagtaacttaacaattgakaacataacctgtatgtaccctttgtcccctgcccccactccaaatattactgctaattagaagcacatgttgaaggaaaaactctaataagacattccag

SEQ ID NO: 448515 - DNA, 201 bp, Homo sapiens
attggggttttgatacacagatgaaagctacagtgtcatttctatatatagtatattaaaatagagcccctttgactgattttttttaaaaaaggcattckttctccccaccctttaccaccctatctttctgcagctgcaccctgccacattaatggaacactagtattccaggcatcccattttacagatggaaaataa

SEQ ID NO: 448516 - DNA, 201 bp, Homo sapiens
gacaagaattgattcaggtaactaagtcaaactatttgctaaaatctgagccacggtatcttattttcttctgcagactctatccagagcaatgattcttycctagggtccatatttttcctgaagcttagggatctatgaagcacataaaattgtgtagatgtgatcatctttctggggagaaatctagagcttatacta

SEQ ID NO: 448517 - DNA, 201 bp, Homo sapiens
agtttcaacttaggcaggagagtggctttgttacaaaaataaatgttggtgatggcttatcgatattgttatttgagcccatgtgtgatgctttcattgcwatagaaatattctgttgtctcattttaaagaaactattattttgcttaacaaatttgagtgtctgcaatatgtgacataaaggaggtgcaagaaatgttt

SEQ ID NO: 448518 - DNA, 201 bp, Homo sapiens
cttgctctgtgccccaggctggagtgcagtggcgcaatctcggctcgcgacaggtcttgacttgcagtgtgttaggcacagtagataagcattttgtgaarcagtatgaatggaaatcaaaagcaatttgatctaattttctcttagatttagttatatctcaataccaacttctaattcagttttatttttgctgatttt

SEQ ID NO: 448519 - DNA, 201 bp, Homo sapiens
atgctttcattgctatagaaatattctgttgtctcattttaaagaaactattattttgcttaacaaatttgagtgtctgcaatatgtgacataaaggaggygcaagaaatgttttagacacaatagccatagttaaattgcttataaattgactttattaaaatgtcttaccatataatcattaacattcatatctcaaat

SEQ ID NO: 448520 - DNA, 201 bp, Homo sapiens
tttggtaagaatccttagcagcaaatgcgtggtttgagggatatcaaaaagcaatccaaaaaggcttctttgaggagatggcatttgaaaaaaagctttaraagatcaatttctttagggagaggcattttagacagagaaaggcttcatccatttacacatttactcatcaaagaaaatagaactcttgccacatgtcag

SEQ ID NO: 448521 - DNA, 201 bp, Homo sapiens
tggctgaaatgcctccctcagcatttttgttttgaacgccctttcttgggggatcctaacccagctgcaagaattcactgtgggctgaaacctggcagatkagatcttggagagggaaagtgatttgaaagtaatgtttgttcttaaaaatgacaaacaagtattgcaggtttctgttattttttgtgttccaattaaatt

SEQ ID NO: 448522 - DNA, 201 bp, Homo sapiens
tcattctgcagttagttcttcttgttgaatatctaggtttttatctaggaggacacctggggtgattgagataatgcaggggtgtatctggtgtttggagraagactgtatgctcaggaggctgagaggccacagcacttctagtgccaaaagttctgtttatctcatcatgttactcactcatagtctccaggaagcttg

SEQ ID NO: 448523 - DNA, 201 bp, Homo sapiens
cttcagtgattaatgcatcctagaggaccaactttcttttagctataatgccagcttctatccttatttcatccctggagctttaggcagaaagggaactraaaagtcatcagcttttattttatgtgacttttttctactcctgtttgggtttcacttttttttttttttttttcattctgcagttagttcttcttgttg

SEQ ID NO: 448524 - DNA, 201 bp, Homo sapiens
atttaagatagaaaggaggcaagggatatacctaataaaagtaatatgacagctctcactatgtaaattcttgtctgcttcaaaattgtcctaaattaggwataaaactggctttttaaatagcaaatgtattagaaaatcagaatatttgaattttagagttagacattaacagttcgggaaaaatacaaatggctgctg

SEQ ID NO: 448525 - DNA, 201 bp, Homo sapiens
gaaggaaactataaggtatatttctggcttgtcttggggatgaaataaatggcctctgcagtcatttccacctctggcttcagtgattaatgcatcctagrggaccaactttcttttagctataatgccagcttctatccttatttcatccctggagctttaggcagaaagggaactgaaaagtcatcagcttttatttta

SEQ ID NO: 448526 - DNA, 201 bp, Homo sapiens
atggggaaagagaaaatattggtagacctaaggtcaggtttctagctgtattaaaataaaagccattgagcctttcatttaatctgataaaccgtcatagrtatctactttttgatactgtttttatgtcacttaccctcatgtgtgttgtgcaagacctgggtatgggttagaggaagatgttccccaccagctctctat

SEQ ID NO: 448527 - DNA, 201 bp, Homo sapiens
ttttagacaagaggttttgccatgttgcccaggctcatcttgaactgctgggctcaagccatgtgccagcctcagcttcccaaactgctagaattataggyatttaccaccaccccagccaaaatctcattgtttttctaatattttaatttttcatatctcagtgaaattttgtatttttttcatgtagctatgacacat

SEQ ID NO: 448528 - DNA, 201 bp, Homo sapiens
gctagtaattttgtatctttggggcctgttttctcatctgtgaagataacacatgctatatttcatgaagttatcatatcagaattagatgcattaaattytgcaaactgagaagcaaagcattataccaaggtacagacttattaaaattgaatattgctttcatttaaacatgagttgccatttaactatggctggtag

SEQ ID NO: 448529 - DNA, 201 bp, Homo sapiens
aatatgtggtggtgctttacaaatatcttcatcccaggtttttcaaatctcccctggaatctatgcagccaaatgtgcagttgttctgtaactgatggtcrcctggatatcatttgataaaagtgtaagacgggttttttgtgtgtgtgtgatgccaattactgaggacttgaagatacgcatcttgaattattacatata

SEQ ID NO: 448530 - DNA, 201 bp, Homo sapiens
gattctgttactaatatcatctgctcattgataaactccaaaggggtagctgtgaaattctcttggaaatgcttgataaaatgtcaacttcctcataggcragacttgatacattttgaaaggtggataggttcacctaaatgaagacttgctggatttgatataatgactattcttttgtattgctaaggaattaagtaa

SEQ ID NO: 448531 - DNA, 201 bp, Homo sapiens
tctcccttacaagcctcaggtaatcctgtgtgcacaccaggtttatggaccgaatgagtaccacagtggtttatagacccaataaaaactgtttaaatatstggtggtgctttacaaatatcttcatcccaggtttttcaaatctcccctggaatctatgcagccaaatgtgcagttgttctgtaactgatggtcacctgg

SEQ ID NO: 448532 - DNA, 201 bp, Homo sapiens
aagtgctgggattacaggcgcgagccactgcgcccggcctcctttaacaatggaaattaataaactgctgcctccctttcttcatagacctcgtctctcaraatcaaatggattctgttactaatatcatctgctcattgataaactccaaaggggtagctgtgaaattctcttggaaatgcttgataaaatgtcaacttc

SEQ ID NO: 448533 - DNA, 201 bp, Homo sapiens
ttcactgccaccctcctttaaaaaatatactcttaatatgctaaaaagaaacagggtatgaaaataaaaaatgaagaacttatgtaaacacaaattttagkgcttttttttttttttttttttaaagacaggttatcactttgttgttgcccaggctggagtgcaatggcacaatcttggctcactgcagccttaacctcc

SEQ ID NO: 448534 - DNA, 201 bp, Homo sapiens
aatatatcattgcttgttacatggagatcattgtattaagtggtttaggagacagttggcagtgtctgtgtagtggtggttcaaaattcttttttattaatgagaatcaaagttgtaagtttggaatcaaatatctcaaagctgtgtggtaaagcattttatgtgctgttcttagcatctttatgcattggaataatttat

SEQ ID NO: 448535 - DNA, 201 bp, Homo sapiens
gaaattagctaattcaggttttaacatgttaatagaggggcaacaatgactagaccagctgtgctattgacctaggtctttgaggcctttcaggttgcaargtagctattattctccttaagcatttgcaggtcaggcatggaaacttttaagcaggctctgactgaagtactagtttgcattctgtaattgcagtaagca

SEQ ID NO: 448536 - DNA, 201 bp, Homo sapiens
tgatgatgatgaatataatttggaatggatatgatttcagatctctagcagagttttgttaccaatactttaccacaaaaagctactgaaggcagggtgcrgtggctcactcctgcaattccagcactttgggaagccgaggctggcagatcacttgaggtcatgagttcaagaccagcctggccaacatagtgaagtccc

SEQ ID NO: 448537 - DNA, 201 bp, Homo sapiens
ctgtgtggtaaagcattttatgtgctgttcttagcatctttatgcattggaataatttatccttttaatttttttaaaagttttgtcttatttttaattgmcataataagtatacataattacgggtacagtgtgatgtttccatatgtgtattcattgtatgatgattaaatcagggtaatcagcaaatctgttgcctaa

SEQ ID NO: 448538 - DNA, 201 bp, Homo sapiens
ttttttgtatgttaaaattttttttaagttgaacttcccatgaccatgaatttttaagttctgttcacagcattgtttttcacttaaaaattaaaaattgyctttgtgtaaaaaattaaaaatttaaaaagcagagtgtctctttcctggtacttgagaacataaaaaaccatataaaagtaatagggagaaattagctaa

SEQ ID NO: 448539 - DNA, 201 bp, Homo sapiens
cgggcatggtggctcatgcctgtaattccagtactttgggaggccgaggtgggcagatcacctaaggtcaggagttcaagaccagcctggccaacatggtsaaaccccgtctctactaaaaattcaaaaaattagccaagcgtggtggcacatgcctgtaatcccagttacgcagaaagctgagacaggagaatcactgta

SEQ ID NO: 448540 - DNA, 201 bp, Homo sapiens
gacctttgaatttgccaaatggcaggtttcctttgctccttttaatttttaaaagaaaataagctgtaacttgtaaaaattggctcttctttaagcaagamcttcttattacagctactaaatgcccaggatttatctctatatgcttttcaactatggcctctagtatgaaaagttgagcaaatttttaccttttccgta

SEQ ID NO: 448541 - DNA, 201 bp, Homo sapiens
acacaatgaaagtacatctgaaaagaagagagcagaggggaaaatggggaaagagaaaatattggtagacctaaggtcaggtttctagctgtattaaaatraaagccattgagcctttcatttaatctgataaaccgtcatagatatctactttttgatactgtttttatgtcacttaccctcatgtgtgttgtgcaagac

SEQ ID NO: 448542 - DNA, 201 bp, Homo sapiens
ggtggcaggaggttttctcactttagttgtttggcttcctggctggtcagttggaagagaacgtttcaggactgttgactgcctgacttctcactattttytacttacaagttctggctaatgttgcaaactttcaccccctttcccaccccactttttcttctttagttcttattacttaaaactatacttcaaaatacc

SEQ ID NO: 448543 - DNA, 201 bp, Homo sapiens
tgataatttcgttattacttaggtgagcttcctgaaatcaagaactgtcttagtgattcttgtatctcctaaagcagaggttcccagatttggatgattastaaatggataattattattaatcatcaggggctttaaaatgtgattcaaaattacagatacaggctcagtaggtctgagttgggtgattcacaaccatct

SEQ ID NO: 448544 - DNA, 201 bp, Homo sapiens
ctggtgtgttggaggggaagaaggatgaaaaatcatgaaatctgagacccaatgagttcaatttcttggttcacagatgaggaaagggatgtttctaaatrtttaatagaaaggtaaagaggtttgctcagtgtcacatatttagtggcataccaaatgatctgttgaaatgagcacagggctgggagtcaggagtctgga

SEQ ID NO: 448545 - DNA, 201 bp, Homo sapiens
ccgatagacatctttctcctgaatctatattgtgtttatcaagcttcctaatttgcaatttgtctttgcatttctaaatattcatgaagaaatggactcaytcgaattgcacattgaaagctgtttggtattctgtgcttcctttcgggggacagaggtaacagggaagacaatgtgctctgttcctgtaggtggtcctct

SEQ ID NO: 448546 - DNA, 201 bp, Homo sapiens
aaagccccagttttagcctttgcttggcttccttggaatttcacttatgaatacgcacacacaccatcttttgagactgaaaaaaaaaaaaaaaacctctsaaataataaaagaacatcctggagctctgacaggtctggattctagggcattgattccctgatgttaggatgaggaactccctgccatgtgactggatat

SEQ ID NO: 448547 - DNA, 201 bp, Homo sapiens
tttaatcattaagaataaagaattgccccgtggggaatgtgttttccatgcatatgctgttctaaactgaaaacaaactaggtaagaaaaataaacaaacygggtaagtgattactttctttttactttcttcatatgcttttttgtatgttaaaattttttttaagttgaacttcccatgaccatgaatttttaagttct

SEQ ID NO: 448548 - DNA, 201 bp, Homo sapiens
ggctcacgcctgtaatcccagcactttgggaggctgaggcaggcagatcacgaggtcaggagatcgagaccaccctggctaacatggtgaaaccccgtctytactaaaaatacaaaaaaattagccaggcatggtagtgggtgcctgtagtcccagctactcgggaggctgaggcaggagaatggcgtgaacctgggaggc

SEQ ID NO: 448549 - DNA, 201 bp, Homo sapiens
gtgaattactgggtgttgtctgatgaattaatgaagtttaagaagttctttcaaagatccgtggcttcgtgtgttcatttcagttctaccagcaatatttytgagagcagaacaagtcttgcgtcttctccctacttctcttctctggcagtttcttggatctacataattgataatctcttaagaagaaaatattttatc

SEQ ID NO: 448550 - DNA, 201 bp, Homo sapiens
tacaagacaatgaagttcttaggatatcctgacaccaaggacacacagagtaaacaagtaaaaatttttggaaccgtgtcctcagattcctaataccatayactttctgctgtcagtttcatagttacttgccacaaactttgtggactggataagttaaacaaaaaacatcaaatatggcaataaccctcagtccctaat

SEQ ID NO: 448551 - DNA, 201 bp, Homo sapiens
ttgcaaatgatgggatttcattattttttatggctgaataatatttcattgtgtatatgtaccacattttctttatccattcatctgctgatgggcacttaggttgatttcatgtcctggctattgtgaatagtgctacaataaacatgggagtacagatatagcttcaacatactgacttcatttcctttggatatatac

SEQ ID NO: 448552 - DNA, 201 bp, Homo sapiens
cactcttaacccttctttctcgttttctgtgttaatatatcaatgtatcttctacagctaccggaaaagtggaagctttggggttggttgttcatgctagycaatggaccaggctgctctgctctgctctgctctgctctgctgtgctctgctttgctttcttttctcctctcctctcccctcctctcctctcccctccga

SEQ ID NO: 448553 - DNA, 201 bp, Homo sapiens
tgtggtactctgttctgctactggaaattagtttaggaagaaaaattaacgaccatttctagtgattacatttcaaatgaaaaaaatctgccttcattttyagcgttaaaattgactagcctttgtttctagtctggctttctaccaaagcattattttatgagtgaaaaaaaatgttaagggctcaacagttttctccaa

SEQ ID NO: 448554 - DNA, 201 bp, Homo sapiens
atcacttatcttcttaaacctccgcatctgggcctacagggcctctatgggttttttttctatttatttatttatttattctttttttttttaactttacrttccgggatacacgtgcagaatgcgcagatttgttgcgtaggtacacatggcatctacggtttgattcagtctgaaatggcgctccaggcttcatttaga

SEQ ID NO: 448555 - DNA, 201 bp, Homo sapiens
ctggggaccacaagcgaggcagatgtcagaactgttttctgtgtgcactgcattctagcgagaggtgtggcagctgcaaaggattgagagcccagagaatrtgccttggctaaaagtttctgtattactccaccactctgatttctctgtactgtaaaatgtctcccatttggcatctggctcatctgaaactaatgtgtc

SEQ ID NO: 448556 - DNA, 201 bp, Homo sapiens
ggcccagcgccctgatccaatgcccggacacacatccacaccaagttggacgaaaaggtaagggagagaccttccccaagagaagaagcggtaagctttgrttctaaaggccctgggttgggtccgtcctttgccacttctcagctctatgcatttaggcaaatcacttatcttcttaaacctccgcatctgggcctacag

SEQ ID NO: 448557 - DNA, 201 bp, Homo sapiens
agtcctgagtggaacagcatatatcaatgtcgagaattcttactggggaccacaagcgaggcagatgtcagaactgttttctgtgtgcactgcattctagygagaggtgtggcagctgcaaaggattgagagcccagagaatgtgccttggctaaaagtttctgtattactccaccactctgatttctctgtactgtaaaa

SEQ ID NO: 448558 - DNA, 201 bp, Homo sapiens
tattgttcttcccctggcccagcgccctgatccaatgcccggacacacatccacaccaagttggacgaaaaggtaagggagagaccttccccaagagaagragcggtaagctttggttctaaaggccctgggttgggtccgtcctttgccacttctcagctctatgcatttaggcaaatcacttatcttcttaaacctccg

SEQ ID NO: 448559 - DNA, 201 bp, Homo sapiens
tctgaatcctttccaggacttgtcttctgcttgcttgtgcctcctgattgctaaggcatgtatgaagtataactctaatttcttctaagtgatttacacartttctggtggtcttacagaaatcagtcaacaccaggcagagaggggaccttgagtgtctgacggtgaagttatcataagctagttcccagagcagaacat

SEQ ID NO: 448560 - DNA, 201 bp, Homo sapiens
acaagatctctgccctcatctgtggtagggttctctcagattggcaactgttggtggagtgcacgaaatttcaactaagtataaatcttaacttccttgtrttgtggctaaggtgttggagttcactggactagtatcttgggcaagaaatgaggagaaagtctgaatcctttccaggacttgtcttctgcttgcttgtgc

SEQ ID NO: 448561 - DNA, 201 bp, Homo sapiens
ttcaaaataagtgtgatatcttgtgtaagtcaggattcaaccagaaaaaatagaaccagatagatcacaagagatgtactgcaaggaaacggcatacacgrttgtggaggctggcttggcaagtctgaaatccttagggcaggcaccaggaagggcaggtttgaactctttttttttttttttttgagatggagtcttgct

SEQ ID NO: 448562 - DNA, 201 bp, Homo sapiens
ggttacctgagcttttgaggtcttctacaataccaattagagtggcttaatagggtaaattaccctaaaataaattaaattaagttaaaaataaattaccwtaaatttctttaatttacattaatattgggcatttagttagtttaattctctgtggttcaattacaaattttatagagaaatccatttgcatcaattttg

SEQ ID NO: 448563 - DNA, 201 bp, Homo sapiens
ttgtcaatttttgttttggttacctgagcttttgaggtcttctacaataccaattagagtggcttaatagggtaaattaccctaaaataaattaaattaarttaaaaataaattaccttaaatttctttaatttacattaatattgggcatttagttagtttaattctctgtggttcaattacaaattttatagagaaatc

SEQ ID NO: 448564 - DNA, 201 bp, Homo sapiens
aaaaaaggtttgatgttaatctgaaatgtctctgagaggccatacatgatttgagaatggattaaatatcaatgggtgactaggggattcttatactcagytaattttagaaagaacttttatttagagctgcctttatgcctgtgatggggcgggatacaccacaattacacattttcagaagggtggatcctttgatga

SEQ ID NO: 448565 - DNA, 201 bp, Homo sapiens
ctctctatctttctgccactgcccgtctgccacattaatgaaacattagtactgcaaccattgcattttatggatgggaaaataaagctcaaaagagaatygagttgatcaaagtaaatgcaatcaaatggaagatccaggattagaatccaggaacctagactccctccaagtcctatgacattgccattgaccactagt

SEQ ID NO: 448566 - DNA, 201 bp, Homo sapiens
cattgcattttatggatgggaaaataaagctcaaaagagaatcgagttgatcaaagtaaatgcaatcaaatggaagatccaggattagaatccaggaaccyagactccctccaagtcctatgacattgccattgaccactagttgtaagatccacactagaacagggttcctcccatcaatgagctcacatctaatataga

SEQ ID NO: 448567 - DNA, 201 bp, Homo sapiens
ttatggatgggaaaataaagctcaaaagagaatcgagttgatcaaagtaaatgcaatcaaatggaagatccaggattagaatccaggaacctagactcccwccaagtcctatgacattgccattgaccactagttgtaagatccacactagaacagggttcctcccatcaatgagctcacatctaatatagaggatttcaa

SEQ ID NO: 448568 - DNA, 201 bp, Homo sapiens
caggaaaggcaggctatatattgttcttcccctggcccagcgccctgatccaatgcccggacacacatccacaccaagttggacgaaaaggtaagggagaraccttccccaagagaagaagcggtaagctttggttctaaaggccctgggttgggtccgtcctttgccacttctcagctctatgcatttaggcaaatcact

SEQ ID NO: 448569 - DNA, 201 bp, Homo sapiens
cacaggaaaggcaggctatatattgttcttcccctggcccagcgccctgatccaatgcccggacacacatccacaccaagttggacgaaaaggtaagggasagaccttccccaagagaagaagcggtaagctttggttctaaaggccctgggttgggtccgtcctttgccacttctcagctctatgcatttaggcaaatca

SEQ ID NO: 448570 - DNA, 201 bp, Homo sapiens
atagcattttacgtgttaggcgtctggctgtttaggagatgaggaaactgaggccctcagttgccaaggtcacacagctggtaaacggacggagccagaaygcgagtacagctcctcctgcctccaaaggttctctgggccctgtaaaaccacgggctgcacaggaaaggcaggctatatattgttcttcccctggcccag

SEQ ID NO: 448571 - DNA, 201 bp, Homo sapiens
tcccaaagtgctgggattacaggggtgagccactgcacctggcccacagcaagaatttttttctgaatagcattttacgtgttaggcgtctggctgtttargagatgaggaaactgaggccctcagttgccaaggtcacacagctggtaaacggacggagccagaatgcgagtacagctcctcctgcctccaaaggttctc

SEQ ID NO: 448572 - DNA, 201 bp, Homo sapiens; identical to SEQ ID NO: 156178

SEQ ID NO: 448573 - DNA, 201 bp, Homo sapiens
gcctccctagtagctgggattacaggcacatgccaccacacccggctaattttgtattttttttttagtagagacggggtttctccatgttggtcaggctrgtctcgaactcccgacctcaggtgatctgcccgcctcggcctcccaaagtgctgggattacaggcgtgagccaccgcgcctggcctgaaaagaaattctt

SEQ ID NO: 448574 - DNA, 201 bp, Homo sapiens
aactatggcctctagtatgaaaagttgagcaaatttttaccttttccgtattaaattgcattgtttgaccaaagattaaatgacattatcttaatgccatwaaattctatgtcattttttcctatttccattttttatagagaaaaaacaagtgttattttgtattggttgttcatcatcctgacaaaagtaactttttct

SEQ ID NO: 448575 - DNA, 201 bp, Homo sapiens
taaattgcattgtttgaccaaagattaaatgacattatcttaatgccattaaattctatgtcattttttcctatttccattttttatagagaaaaaacaartgttattttgtattggttgttcatcatcctgacaaaagtaactttttcttcagctgcctcttcactcttttctcatccagagtaacctcccagctattaa

SEQ ID NO: 448576 - DNA, 201 bp, Homo sapiens
tctatgtcattttttcctatttccattttttatagagaaaaaacaagtgttattttgtattggttgttcatcatcctgacaaaagtaactttttcttcagytgcctcttcactcttttctcatccagagtaacctcccagctattaatagcctatttcctttaaatcctaacctgtacccgcatcaaatggcattagcatt

SEQ ID NO: 448577 - DNA, 201 bp, Homo sapiens
taacctcccagctattaatagcctatttcctttaaatcctaacctgtacccgcatcaaatggcattagcattgtcctgtttctgcattattgattctaacwtatcaaattacatgatgatacagttattgatgtcacaggtgaactaacaggacctgcactacctatagctatgactggtctgcttcagttcgcagattag

SEQ ID NO: 448578 - DNA, 201 bp, Homo sapiens
cctcatactcgtggaataaatagaggcatcgcaattcactttccaagtacaatcaatcactcctccatatgtgatagtttttgtcctagcttgtaccattrtattttctggctacatatattgttattgtaagttaccttacactattatttttggaagttgttagtgtatagtgtatgataagtgcatgcttttgcagaa

SEQ ID NO: 448579 - DNA, 201 bp, Homo sapiens
aaaagcaatttcatttatagaggctttgcaatcctattctgatttgcttcctgtatgtactgtccagaggccaatctttaaacctggtggtgttctacacygtagttcatttctcaaactttgatactgttaaagaaatttaaagggtattaaaatattaaatattttataataatatttaaataatccctttatccagct

SEQ ID NO: 448580 - DNA, 201 bp, Homo sapiens
attgcctctttgttcaactcttagaataagaatttccctctcctctcccgtcccctcccctcccctcctctcctctcttttctttttctttgttttttttktttttgagacggagtctcactctgtcacccaggctgcatgatctcagctcactgcaaccttcacctcccaggttcaagcaattatcctgcctcagcctcc

SEQ ID NO: 448581 - DNA, 201 bp, Homo sapiens
aaataaattgtatttgtaataacaatataagtgtaaaatataaaactgttagaacaaaatgagggaaaatatttgtataatattaggagaagaaaagctctttttttttttttttttgagacagagtttcgctcttgttgcccaggctggagtgcaatggcgtgatcttggctcactgcaacctctgcctcccggattcaa

SEQ ID NO: 448582 - DNA, 201 bp, Homo sapiens
tcccccacaccagaaaatgcacgtttccttcctgttgtgttttggggtccctctgcaaaatcaccaagatccaagccaaactcagactaaacagagaaccttttgaaaaaaaggcagttgtggtaaattaaattgcacagctatgagatcaaatgattttatcatcattctcaaaagaacccactcagcgcagccatgaat

SEQ ID NO: 448583 - DNA, 201 bp, Homo sapiens
gaaatccttttattttaattaattattaggcaatatatcaataatttacattctttttatttccataaaaagtgacagtatttgataataaaaatgtagartgaagattaaataaagatatctcttttaattaaaagaatagttataccagcatcctggaataaaatggggatggttcttagcattgactagagttctcag

SEQ ID NO: 448584 - DNA, 201 bp, Homo sapiens
ataattctcttggaattatttatttgcacactattttaatactaacactatctcatgtgggaagatttagtgactactctaaagtctcatagctcacaacrgattgaacaggcatttgaatcctagtaatgcataaaagtaccattttaccacaaatttatcagcgataagaaataacatttgaaaatcacttttattatt

SEQ ID NO: 448585 - DNA, 201 bp, Homo sapiens
cgcatcaaatggcattagcattgtcctgtttctgcattattgattctaacatatcaaattacatgatgatacagttattgatgtcacaggtgaactaacargacctgcactacctatagctatgactggtctgcttcagttcgcagattaggaaattgcgacagattaatatcctaatttcagaaggcatttgacagtatc

SEQ ID NO: 448586 - DNA, 201 bp, Homo sapiens
tgtcacatatcaacaaccactcatcaacctgagaataaggctaaagctccagaacttttttttcttctttttttccctttccctcccctgccatttaggcraaaagccaatttcttgaaagtggtacaggaggggatgtgagcaaatacagcgtaatgattgagctacaatttaagcatctggttttatttatgtgcaagc

SEQ ID NO: 448587 - DNA, 201 bp, Homo sapiens
tcttagtaataatgggaaataggggcatcctattatatcatttcattaactatgaattatgcagaagtgtaaagttgagagtgtatagtcattaaaagaakttactgttaaggtaacaaatgtgtccacttcgtgtttccatatggcaatcatgactcttagaaccacttccatcaatctgaatgctttatatcagaccag

SEQ ID NO: 448588 - DNA, 201 bp, Homo sapiens
gacacctattcattctcttacttgtgcttttgttttgtttttattttaaagaaacacttatttgaccctgcatttattttaagaggtgtgcaatatgctamctaaaaatgaagtaaaatataacaatctctctttcattttatacttctttgtaaagtgtttatgactaccttggaagttcaggaaagcaatacagttctg

SEQ ID NO: 448589 - DNA, 201 bp, Homo sapiens
gtgtagtgatcattttattatatgtatatttcaaaacatcaaattgcacacattaactatatacaattcctgtttaccagttatacctcaataaagtgagrggggataaagatcaataggaaattcttgtgtagtgaaattgtggcaagttctcacgggtgacctgcactctgctgttctttcttccacctgtgtaaagta

SEQ ID NO: 448590 - DNA, 201 bp, Homo sapiens
tgggagcgggaggagtgccctgataccatcactggagtggaggggagtgggtggaagtccatgctgtctcggaccagctgacataaaggtgaattgagccrtggtttttgccccatgctgtttggctggagtaggatagatattatcactaatatttctgttctgctatgcctaatcctttgactagagagagcatgcttt

SEQ ID NO: 448591 - DNA, 201 bp, Homo sapiens
aacatagtttctcaaagaatgatgattcagtttttccatgcctttggaggcctttgttgttaaatgaatcagtgtaagtatctcatgtaccatggctgctscctggtttacatcacagtggaggagaagggatcatcgctcaagggcagagcagagggtgtccctggtctttgtcagattctacagagggaacttggggga

SEQ ID NO: 448592 - DNA, 201 bp, Homo sapiens
agacagacctttcatgatgataccaacttcatatgtcagtttgagaataatagcatgaaattgggtggaacattttggaaactgtattagagtgaggaatwtagaaagtgtggctctagttttaattatgttactaactctgtagggctttataatagttaaccttttcttggcctcagagtcttcttttacaaaatgagg

SEQ ID NO: 448593 - DNA, 201 bp, Homo sapiens
taaagtaatgactactaccatagtcatgggatgctggcaaagctaaggtatgaaattaatgacaactaccttcagaataaactttgaaaaggattaaagcwgattccaaaaacagtagcaggaaacaaatgtcagcaaggtcttggcccacactgcttttcggtaaccattagtcatcatctgacacctcaagggagagtg

SEQ ID NO: 448594 - DNA, 201 bp, Homo sapiens
aaaaaatatataacttgaaaaagcattcactacgaattatagtacatactcttaatacatctgtagtttatttttagcaggatatgaggctaagatcaaartgatgttttccaaatgatcaaccaatttttctaacatcatttattgattttatgtaatattctcattaattgacattgcctcatttttcctatattaagt

SEQ ID NO: 448595 - DNA, 201 bp, Homo sapiens
gaatataatttggaatggatatgatttcagatctctagcagagttttgttaccaatactttaccacaaaaagctactgaaggcagggtgcagtggctcackcctgcaattccagcactttgggaagccgaggctggcagatcacttgaggtcatgagttcaagaccagcctggccaacatagtgaagtcccgtctctacta

SEQ ID NO: 448596 - DNA, 201 bp, Homo sapiens
tccgggtaatttttgtatttttagtggagacggggtttcaccatgttgaccaggctgatctcaaactcctgacctcaggtgatccacccacctcggcctcycaaagtgctgggattataggcgtgagccactgcgcatggctggaaaacatttttacatgtaagacatggccccacttatttaatgcacatcagtaaaacc

SEQ ID NO: 448597 - DNA, 201 bp, Homo sapiens
tttaaattgatgtatcattcatctgtgcttacatatactaactcaattctcacaatacttctttgtggtaggtactattatgtccccagctttacagatawggattatttatttatttatttatttatttatttatttatttatttattttttgagacagagtcttgctttgtcacccaggctggtgcagcggcgtgatct

SEQ ID NO: 448598 - DNA, 201 bp, Homo sapiens
tgaaagatggattagactcaaatcatgtctgcaaaaggtatgaatctgatagtagagacatctacaaaaatacacaaataataggtaaatgtaagaataargctgggtgtggtggctcacacctgtaatcccagcactttgggaggccaaggcaggaggattacttgagcccaagagtttgagaccaggctgggcaacaaa

SEQ ID NO: 448599 - DNA, 201 bp, Homo sapiens
gacaaagtataggactctggaatggccaaagctgcccaaagctagaatgggctgttttggaaggtagtgaatgtcctgttgctgaatgcgtgcaagaaggkggtcatgggacaattgacagaactctgcagaagatgcaagtaccagaggagagagtggggtttggccagatgactcttaagaacttttcagtctcagatt

SEQ ID NO: 448600 - DNA, 201 bp, Homo sapiens
ctttgtgttgagaactttccaaatcttaccttctagctattttgcaatagattataaattattgttaactgtagtctccctactgtgctattccatactgkaacttattccttctatctaactgtatttttataaccattaaccaatgcctcttcattctcacctctcccactaccctttccagcctctggtagccatcag

SEQ ID NO: 448601 - DNA, 201 bp, Homo sapiens
gtataggactctggaatggccaaagctgcccaaagctagaatgggctgttttggaaggtagtgaatgtcctgttgctgaatgcgtgcaagaagggggtcaygggacaattgacagaactctgcagaagatgcaagtaccagaggagagagtggggtttggccagatgactcttaagaacttttcagtctcagattcaacgg

SEQ ID NO: 448602 - DNA, 201 bp, Homo sapiens
acagcttagctattgtgaatactcctacaataaacatgagagtacagatacctcttcaatacactaatttcctttcccttggatatatactcagcagtgcrgttgctagatcttatggtaattctacttttagttttttgaggactctccatactgtttccatattggtttccatagtggctgcactgatttgtatctcta

SEQ ID NO: 448603 - DNA, 201 bp, Homo sapiens
caaagctagaatgggctgttttggaaggtagtgaatgtcctgttgctgaatgcgtgcaagaagggggtcatgggacaattgacagaactctgcagaagatscaagtaccagaggagagagtggggtttggccagatgactcttaagaacttttcagtctcagattcaacggaaaaaagcaatgagactacattaaacatat

SEQ ID NO: 448604 - DNA, 201 bp, Homo sapiens
ctcctctcttcatcatcatctaccgttacttcatttggccagaacaatggaatttggcagcattatacctgagtagactgttcttcctttcatcttccacrtaattgaaaccatattgtatgggtcacagaaataaagggattatgtcgatcttacccctttggtgtttggcatgagttatctttaagacgtttattcaaa

SEQ ID NO: 448605 - DNA, 201 bp, Homo sapiens
taatagaggtctaccctcatgcctgaactttacgggaaatagtcaagaagtagaatgcaagcacccccaccctccaacgcagatacacacacatgcacatrcacacacacatgcacacatgcacaaatttctccacccaaatgtcccctaactgcttacttccagtggaccatttatctccagtcctatccttgggcagag

SEQ ID NO: 448606 - DNA, 201 bp, Homo sapiens
actagtttgcattctgtaattgcagtaagcagagccagctgtgaacctctcgggatttccccttattggactaagaatttaaacattttgctgagtaggcrgtaaagttttcttctcttcactgccaccctcctttaaaaaatatactcttaatatgctaaaaagaaacagggtatgaaaataaaaaatgaagaacttatg

SEQ ID NO: 448607 - DNA, 201 bp, Homo sapiens
tgcctgaactttacgggaaatagtcaagaagtagaatgcaagcacccccaccctccaacgcagatacacacacatgcacatgcacacacacatgcacacaygcacaaatttctccacccaaatgtcccctaactgcttacttccagtggaccatttatctccagtcctatccttgggcagagcttcagtccaggcagggtg

SEQ ID NO: 448608 - DNA, 201 bp, Homo sapiens
tgagattgcagtctgaaatggttcccttttacccacaatacattgggaaatgaaacaaggcaaaacaaagctcaacagcatggtagattaatattttagaygaattctagatttccaaaacaaaagtagcttatgaactcttattctgcttctttctttttcttccttttgttcttctgaagttccagaaaaccctcgttc

SEQ ID NO: 448609 - DNA, 201 bp, Homo sapiens
ctctggtaaagaatatacaatgtacttagtattagaatatactatgtctaggcgatagactaatttataactggatagaataggtttctgaccaataggtktaaaaaaaaagagtttttatttctcttttaggacaatttggcttgaaaatgttaagaaagaaaaagagcacttttgcttcacttctcagcctgaattttc

SEQ ID NO: 448610 - DNA, 201 bp, Homo sapiens
aattcatttgagaacaatctaatttaaaactgcatatttttccatgaatgtttagtgagcccttgctatgtggaccctgtgttgagtactcgggaatatarcggtgaaccaaatgaaggcagtaactgccctcatgaccgtagggaactgcctgtggtctctatcagggggacagcttcttaacaagctgtattagcttgg

SEQ ID NO: 448611 - DNA, 201 bp, Homo sapiens
ttggctcactgcaacctctgcctcctgggttcaagtgattctcctgcctcagcctcccaagtagctaggattacaggcatgcatcaccatgcccagcgaattttttttttgtgttttagtagagatggggtttcactgtgttgcccaggctggtcttgaactcctgagctcaggcagtctgctcgcctcagcctcccaaag

SEQ ID NO: 448612 - DNA, 201 bp, Homo sapiens
atatactaaattgcctctttgttcaactcttagaataagaatttccctctcctctcccgtcccctcccctcccctcctctcctctcttttctttttctttkttttttttgtttttgagacggagtctcactctgtcacccaggctgcatgatctcagctcactgcaaccttcacctcccaggttcaagcaattatcctgcc

SEQ ID NO: 448613 - DNA, 201 bp, Homo sapiens
ttagttgatgggtgatgggtcgtttttgttaaatgtacgtgtggaaaatatctgtgtaaaattctacacttagtaatattaatgattatgttagctacatgaaaggcatatttctaatgcagattctcccggaacccaagattcagatgttgaagactccatgttacattcttccttcacttgatctttgcatgttacttg

SEQ ID NO: 448614 - DNA, 201 bp, Homo sapiens
tcgaaatcacctaaaacagtgcttggctcgtattgtagaaggcagttatgttttaaataaagtataaatattttctcctagcttatccccttttcattttrtagcttcatacacccagcaaatattcattgagttttgataaatactacacacttcgcagattgggaaaccagacctggttattagaacaactaatacctg

SEQ ID NO: 448615 - DNA, 201 bp, Homo sapiens
tgtagcttcatacacccagcaaatattcattgagttttgataaatactacacacttcgcagattgggaaaccagacctggttattagaacaactaataccygtatgatattttcagtttatgaagcacttcttattttactttaatctttatgttaccagaaagggagggttcttggatctcccgcaagaaagaattcagg

SEQ ID NO: 448616 - DNA, 201 bp, Homo sapiens
aaagaatacttactccatggtcagagtagcccaagggctgctggttgcctatttttatgattatttcttgatgatatgctaaacaaggggtggattattcmtgcctccgctttttagaccatatagggtaacttcctgaggttgtcacggcatttgtagactgtcctagcactggtgggagtgtagcagtgaggatgaccg

SEQ ID NO: 448617 - DNA, 201 bp, Homo sapiens
gatgaaagaaaaatgttttcaagggcccgagaaataatggttaataaaaacaaaaaatcaaatcaaaataaagttagcaactctaaaaggtactttccctyactaaagacaaacacttattattttggtctttaaaaagtgtactgtaaatccagtagtaaatttctaaaattagcttttcaaaaaaaatttttttttggt

SEQ ID NO: 448618 - DNA, 201 bp, Homo sapiens
atcagctccaaaaatatctcgaattcattttattttctttcattcatacttctatttgacttttatctattttggggctgcaatataaagagaagaagatrtaagtgagacataatgataatagctttatcaaactcttatatgcaaaggagagttctaagttcttaacaaatgccaatttacattatccgcatcataacc

SEQ ID NO: 448619 - DNA, 201 bp, Homo sapiens
ttcaggaaatagattgtagaggttttcttgtgaatccacaaacaaagtgtttgctccttctccaagactaactaacaagggctgcagcatcagccatactyagcaactcggcacatgcataatacattgtggcttaggggtgtggctcgatggcaaacacataacggtactgctggtggtgaatgtgctgaagagaaatcc

SEQ ID NO: 448620 - DNA, 201 bp, Homo sapiens
aatatactcttaatatgctaaaaagaaacagggtatgaaaataaaaaatgaagaacttatgtaaacacaaattttagtgcttttttttttttttttttttwaagacaggttatcactttgttgttgcccaggctggagtgcaatggcacaatcttggctcactgcagccttaacctcctaggctcaaatgatcctcctacc

SEQ ID NO: 448621 - DNA, 201 bp, Homo sapiens
gaaatccagagaagaatttctgctaaaatccatttcccattatgcaagctgtcttcaggacttgcttttgttattgtcaggagtcaaatatatttaccacrctgttactggctccatatagtcaacagttcttttgcatccatgtgtatgctctttggcctctggaaataatacctttttgaaatattttttgggggatga

SEQ ID NO: 448622 - DNA, 201 bp, Homo sapiens
tgacctgtatcttgtgctgattttctgtctcatcctgtgacttagaatgcctaaccatctgggaatgcagcccagtacgcctcaggctccttttacccagscactactcaagatggagttgctctggttcaaacgtctctgacacaacaatactataagaaagagattacaggaattccccaaaatttgacttttaagtaa

SEQ ID NO: 448623 - DNA, 201 bp, Homo sapiens
acttggcattattattattattttttctaaccagtttagatcacaattggcattcatttcacaaatcacatgccagattaaaaaataaaataagcaggccrggtgcagtggctcatgcctgtaatcccagtactttgggaggccgaggcgggtggatcacctgaggtcaggagttcaagacagcatggccaacgtggtgaa

SEQ ID NO: 448624 - DNA, 201 bp, Homo sapiens
cagcaggaattcacaagaaaatttcctacagctgttttcctttgtacatttaaatatgtcccccgccccccactacacacacacacacacacacacacacmcctttacctacacacaggcacacacctttttgaaatttcacttgtcttatataaactatataaattaaattgactggtggcataatttgtcccaatttca

SEQ ID NO: 448625 - DNA, 201 bp, Homo sapiens
tgtaaacacaaattttagtgcttttttttttttttttttttaaagacaggttatcactttgttgttgcccaggctggagtgcaatggcacaatcttggctyactgcagccttaacctcctaggctcaaatgatcctcctacctcaatctcccaagtagctggggctacaggtgtgcaccaccatgcccagcttatatatat

SEQ ID NO: 448626 - DNA, 201 bp, Homo sapiens
gcaggccgggtgcagtggctcatgcctgtaatcccagtactttgggaggccgaggcgggtggatcacctgaggtcaggagttcaagacagcatggccaacrtggtgaaaccctgtctctactaaaattacaaaaaattagctgggcgtggtggagggcgcctgtaatcccagctacctgggaggttgaggcaggagaatcg

SEQ ID NO: 448627 - DNA, 201 bp, Homo sapiens
tccagaatgcttacaaaaatcatttttcttgaattgtttagtcttattctgagaaagtataaaagaaaagcagacattttcatttttgcatgaaactctattttttttttttttttggagatggagtcttgctctgttgccaggctgcagtgcagtggcgcaatctcggctcactgcaagctccgcctcctgggttcaagc

SEQ ID NO: 448628 - DNA, 201 bp, Homo sapiens
caaatgatcctcctacctcaatctcccaagtagctggggctacaggtgtgcaccaccatgcccagcttatatatatatatatatatagagagagagtgtgwgtgtgtgtgtgtgtgtgtgtgtgtgtgtgtatatatatatatatatatatatatatatatagtagagccatggttttgccatgttgcccaggctgatctt

SEQ ID NO: 448629 - DNA, 201 bp, Homo sapiens
gaggccgaggcgggtggatcacctgaggtcaggagttcaagacagcatggccaacgtggtgaaaccctgtctctactaaaattacaaaaaattagctgggygtggtggagggcgcctgtaatcccagctacctgggaggttgaggcaggagaatcgcttgaacccaggaggtggaggttgcagtgcgccgagatcacacca

SEQ ID NO: 448630 - DNA, 201 bp, Homo sapiens
tctgcattcgggattctgggatcacttaggtcattattttataattaaagtcattcatcaacgttactgaagtttactatatatatatatatatatatatrtgtgtgtgtgtgtgtgtgtgtgtcaacaaatagagtctcaggcagctgattagttttttgagccagtctgaagcagactagaaggtttttggccgaaaga

SEQ ID NO: 448631 - DNA, 201 bp, Homo sapiens
aggtgtgcaccaccatgcccagcttatatatatatatatatatagagagagagtgtgtgtgtgtgtgtgtgtgtgtgtgtgtgtgtgtatatatatatatrtatatatatatatatatagtagagccatggttttgccatgttgcccaggctgatctttaactcctgagttcaagtgatctgcctgcctcagcttcccaaa

SEQ ID NO: 448632 - DNA, 201 bp, Homo sapiens
tgcattcgggattctgggatcacttaggtcattattttataattaaagtcattcatcaacgttactgaagtttactatatatatatatatatatatatgtrtgtgtgtgtgtgtgtgtgtgtcaacaaatagagtctcaggcagctgattagttttttgagccagtctgaagcagactagaaggtttttggccgaaagagt

SEQ ID NO: 448633 - DNA, 201 bp, Homo sapiens
ggagatggtggtggcaactgagactttcagaagaaaaaatttcattctgaatatggaaaaatgggaaaccaaatggtgcagaagtagagacaattcttgcrattgaataaaataactggtcagaaatattcatccaactaacaaatggtttccagggacccttcactgcagcttactgtgtagaatttaaactaagtaact

SEQ ID NO: 448634 - DNA, 201 bp, Homo sapiens
cattcgggattctgggatcacttaggtcattattttataattaaagtcattcatcaacgttactgaagtttactatatatatatatatatatatatgtgtrtgtgtgtgtgtgtgtgtgtcaacaaatagagtctcaggcagctgattagttttttgagccagtctgaagcagactagaaggtttttggccgaaagagttt

SEQ ID NO: 448635 - DNA, 201 bp, Homo sapiens
ggggcagacgcggtggcttacacctgtaatctcagcacttcaggatgctgaggcaagcagatcacttgaggtcaggagtgtgagaccagccagaccaatayggtgaaacactgtctctaataataatacaaaaattagtcgggtgtggtggtacatgcctgtaatcccagcgactcaggaggccgaggcaggagaatcgct

SEQ ID NO: 448636 - DNA, 201 bp, Homo sapiens
ttcgggattctgggatcacttaggtcattattttataattaaagtcattcatcaacgttactgaagtttactatatatatatatatatatatatgtgtgtrtgtgtgtgtgtgtgtgtcaacaaatagagtctcaggcagctgattagttttttgagccagtctgaagcagactagaaggtttttggccgaaagagtttga

SEQ ID NO: 448637 - DNA, 201 bp, Homo sapiens
cggcaggtgagcaagcgactgtatttacagctgctctccaccgcctgcattactgccagagctctgcctcctgtcggatcagcagtggcattagattctcytaggagcgcgagcgctattgtgaacattgcatgtgggggatctaggttccgagttccttatgagatctaatgcctgaggatctgtcactgtctcccatca

SEQ ID NO: 448638 - DNA, 201 bp, Homo sapiens
cgggattctgggatcacttaggtcattattttataattaaagtcattcatcaacgttactgaagtttactatatatatatatatatatatatgtgtgtgtrtgtgtgtgtgtgtgtcaacaaatagagtctcaggcagctgattagttttttgagccagtctgaagcagactagaaggtttttggccgaaagagtttgaaa

SEQ ID NO: 448639 - DNA, 201 bp, Homo sapiens
agactccctccaagtcctatgacattgccattgaccactagttgtaagatccacactagaacagggttcctcccatcaatgagctcacatctaatatagargatttcaaatggcgcataattataacacaagacccatggggaaaattgtcaaccataataccagttataggattatttttatcgcactccccattattcc

SEQ ID NO: 448640 - DNA, 201 bp, Homo sapiens
acagctgctctccaccgcctgcattactgccagagctctgcctcctgtcggatcagcagtggcattagattctcctaggagcgcgagcgctattgtgaacwttgcatgtgggggatctaggttccgagttccttatgagatctaatgcctgaggatctgtcactgtctcccatcaccgctagatgggaccgtctagtttca

SEQ ID NO: 448641 - DNA, 201 bp, Homo sapiens
agccagtctgaagcagactagaaggtttttggccgaaagagtttgaaaaatgtgaaatacagtgtcccatttacacagattaactgttacagtagtacataaaaaaaaaaaatctgaacgctgtatcctaaagaaatgtgtttaactcttactacagttcatcataccctttgttaattataaaagcatttttataagtct

SEQ ID NO: 448642 - DNA, 201 bp, Homo sapiens
taccgtgttggccagacgtctcgaactcctgacctcaggtgattagcctgtcttggcctccaaaagtgctgggattacaacaggcatgagacctcatgccyggcatacacttctttaaaaatattttttctaacatgataatgtaattttatgtacacaagggtttattttggtcttatttttcttcattttatgtatatg

SEQ ID NO: 448643 - DNA, 201 bp, Homo sapiens; identical to SEQ ID NO: 156172

SEQ ID NO: 448644 - DNA, 201 bp, Homo sapiens
acaacaaaatttgtttttgtatcctaaagttcattaaggggaactctgtccctggacaagttttgacttggtgctataaattattgttcgtggccaggcgyggtggctcacacctgtaatcccagcactttgggaggccgaggcgggcggatcacgaggtcaggagatcgagaccatcccggctaagacggtgaaaccccg

SEQ ID NO: 448645 - DNA, 201 bp, Homo sapiens
ctggagtgaagtggaacaattatagctcactgcagccttgacctccctgggctcaggtgattctcccacctcagcctccagggttgcgtgccatcacgccyagctaatttttgcattttttagacaagaggttttgccatgttgcccaggctcatcttgaactgctgggctcaagccatgtgccagcctcagcttcccaaa

SEQ ID NO: 448646 - DNA, 201 bp, Homo sapiens
agacctttgaatttgccaaatggcaggtttcctttgctccttttaatttttaaaagaaaataagctgtaacttgtaaaaattggctcttctttaagcaagrccttcttattacagctactaaatgcccaggatttatctctatatgcttttcaactatggcctctagtatgaaaagttgagcaaatttttaccttttccgt

SEQ ID NO: 448647 - DNA, 201 bp, Homo sapiens
cgtggccaggcgtggtggctcacacctgtaatcccagcactttgggaggccgaggcgggcggatcacgaggtcaggagatcgagaccatcccggctaagayggtgaaaccccgtctctactaaaaatacaaaaaattagccgggcgtggaggcgggcgcctgtagtcccagctactcgggaggctgaggcaggagaatggc

SEQ ID NO: 448648 - DNA, 201 bp, Homo sapiens
ggccgaggcgggcggatcacgaggtcaggagatcgagaccatcccggctaagacggtgaaaccccgtctctactaaaaatacaaaaaattagccgggcgtrgaggcgggcgcctgtagtcccagctactcgggaggctgaggcaggagaatggcgtgaacccgggaggcggagcttgcagtgagccgagatcccgccactg

SEQ ID NO: 448649 - DNA, 201 bp, Homo sapiens
ttaaggctctatgcttattaaggtgtctcaatcagaacttaacacagtattccaggtgtagcttattaattcaacaataacgatagtaatgataatacatacttataatggagcttaagactggtagacattttcctaaatatttcatttttgctaactttcaaaatcatattttgaaaataagctaattatgtttaaaat

SEQ ID NO: 448650 - DNA, 201 bp, Homo sapiens
ccgaggcgggcggatcacgaggtcaggagatcgagaccatcccggctaagacggtgaaaccccgtctctactaaaaatacaaaaaattagccgggcgtggwggcgggcgcctgtagtcccagctactcgggaggctgaggcaggagaatggcgtgaacccgggaggcggagcttgcagtgagccgagatcccgccactgca

SEQ ID NO: 448651 - DNA, 201 bp, Homo sapiens
aaacagtagcaggaaacaaatgtcagcaaggtcttggcccacactgcttttcggtaaccattagtcatcatctgacacctcaagggagagtgctggacaamcactgcagaggttaagatccctgcccagttattcagtcttaccctgtcctagcatttagaaccaaaaacaacagtaacataccaatagaccatgcacact

SEQ ID NO: 448652 - DNA, 201 bp, Homo sapiens
tactcttcagaaacgtcatttccatttaatccttaccaaattgcattttgaaaacgataaatagttacttatacctatgactgtattttagagtgacattycataaatgcaaagataagttcattttctacattagcatggccacctaacttgtgaattaacatgtgttcttcaaagctagaaattttaaaatgttctgcc

SEQ ID NO: 448653 - DNA, 201 bp, Homo sapiens
gggcaaaatagacgaagagaaaggaatcgaggcaggcaatggaaggaaagtaaaacaggcaactgacttacgctgtgctgcattattttgcaaagtaaaarcatcatctctgactgattactgcagtgctcttctgccctctaggaagatctgttttccacaaagaagtttgaattatcattttaaaatgtgtatcagatc

SEQ ID NO: 448654 - DNA, 201 bp, Homo sapiens
ctttcaaagtgctgcattgggaagctgtacagtacttctttccccaggagaccttgtcagcacattcctctgatttgaaaacttttggctctctacagctstcacatttcccatccctttccttccttagcttccaagtcagttttgaaccagtaaacaggataatatgctcatctaatctgacctggacctcagtttgca

SEQ ID NO: 448655 - DNA, 201 bp, Homo sapiens
gcaatggaaggaaagtaaaacaggcaactgacttacgctgtgctgcattattttgcaaagtaaaagcatcatctctgactgattactgcagtgctcttctrccctctaggaagatctgttttccacaaagaagtttgaattatcattttaaaatgtgtatcagatctgattatatccctccttaacattttttactgtttc

SEQ ID NO: 448656 - DNA, 201 bp, Homo sapiens
tttcttcatagcacttaatacaatctgaaattactttccttacttatttatttacttgggatttgtccccttctatgagaatgtcaacatttgttatagaraggagggcctttgtctgtcttgaccacgtaggtattctgtttagtgtctgatacagagttggtgcaaaataaatatttgctgaataagtaaatgggtgaa

SEQ ID NO: 448657 - DNA, 201 bp, Homo sapiens; identical to SEQ ID NO: 156173

SEQ ID NO: 448658 - DNA, 201 bp, Homo sapiens
gtggtagaatagtaattacacaccaacagtactataaggaatcctggctcaaaagaacccagaccagatcagtgagtagaatattcatgtggaaggtagctttttattttcagaaaaataacgttaaccattccatttgttgattggaatttagttcattttatggtcttgcttttatttagtcttgtaaattggtttggg

SEQ ID NO: 448659 - DNA, 201 bp, Homo sapiens
ttttataaagtagacatcaatttcaattgtctcttcttcctctgttggagtgttttaggccaacgtgttggtgacctttgctagacctggggtggcagggrgttgtgccttccctatccctgctgtcttatcttcggctgttgctatggacaagcacgcaccaggccccttgggagtgttataaatggttagaagcagtgt

SEQ ID NO: 448660 - DNA, 201 bp, Homo sapiens; identical to SEQ ID NO: 156177

SEQ ID NO: 448661 - DNA, 201 bp, Homo sapiens
tattataatataaaagtgattttgaaattgtttcatttcttacattttcaaacactttcctatacttactctctcacaaccctttgctaataggccatgtrtggtactctgttctgctactggaaattagtttaggaagaaaaattaacgaccatttctagtgattacatttcaaatgaaaaaaatctgccttcattttta

SEQ ID NO: 448662 - DNA, 201 bp, Homo sapiens
  misc_feature (1)...(201): n = A,T,C or G
catagtcaaggtcagtcctataaaaacaaataaccatgaggtaactctcaatatgtgggtttccctggttctggaattctgcttgcttcactgttaatgtnagcatttgtcagtcatttcccctccggttccctggttggaggtcaaagaaggtgaagccataggtttaacatacctcaaatttttgtggtgaattgatta

SEQ ID NO: 448663 - DNA, 201 bp, Homo sapiens
acaagttttgacttggtgctataaattattgttcgtggccaggcgtggtggctcacacctgtaatcccagcactttgggaggccgaggcgggcggatcacraggtcaggagatcgagaccatcccggctaagacggtgaaaccccgtctctactaaaaatacaaaaaattagccgggcgtggaggcgggcgcctgtagtcc

SEQ ID NO: 448664 - DNA, 201 bp, Homo sapiens
cattctgtgaaatggccgttgaccactatttgtaaggccccggtgaaaacacaagcttaacgaagttaaaatgaaacacacagcatgccacttgcattatwtgccaaatgaaagagaccctgaaataaaagctgcaatcttcttatgcaatgttattccttgcactactgttcttcctacttctggggaaaactcagaaat

SEQ ID NO: 448665 - DNA, 201 bp, Homo sapiens
ttggctgttcccttggtaggaagttagacaatacacagatgacttgagcgattttgtctaattcaaagcacacacttatttctggctaatacttagatagttttttttttttttttaacatcaagggcatttcatttttaatagtctctaatcggaaatagtatgtttaaaagttctgtgtcttcactttaatgttttcct

SEQ ID NO: 448666 - DNA, 201 bp, Homo sapiens
tggctgttcccttggtaggaagttagacaatacacagatgacttgagcgattttgtctaattcaaagcacacacttatttctggctaatacttagatagttttttttttttttttaacatcaagggcatttcatttttaatagtctctaatcggaaatagtatgtttaaaagttctgtgtcttcactttaatgttttcctt

SEQ ID NO: 448667 - DNA, 201 bp, Homo sapiens
tctgccaaaatcaatagatttgcacagagaaattgacacataattaagactctgggcatagagaattaccttaaaaccagatttggctgttttttaaaaaygagctcaaattatagtatcaaagactaatccagtagaccatacaaattatttctccactgaagcatgtgctattttaaaataatattttcatatgaaatc

SEQ ID NO: 448668 - DNA, 201 bp, Homo sapiens
gaaggtttttatgggccaagcctgggaatggcatgtatcacctgcatccatattctgatgtataactcagtcttgtggtcacattaatgcaaaaggactgracaatattgtctcactttttgcccaggatgacagggaaacaagtttagtgaacaaccagatggaatctgaaatgctgtcattgccttggggagactcggt

SEQ ID NO: 448669 - DNA, 201 bp, Homo sapiens
acggtggctcacgcctgtaatcccagcactttggtaggccaaggtgggcggatcacgagatcaggagttcaagactggcttggccaacacggtgaaactcyatctctactaaaaatacaaaaattagccgggtgtgttggcgcgtgcctgtaatcccagctgcttgggaggctgaggcaggagaattgctcgaacccagga

SEQ ID NO: 448670 - DNA, 201 bp, Homo sapiens
aatcagagtatgtcagtactaatctgttgtactcatagcttgtagactggctattgcccagagaaaattttcaccaaccagaagcacctactctatcctcttatattatgtgttcatgggagctataaactctactcttcattaatgggagcagattcacctccttgaaacagatcatttatatattgtatgctattattt

SEQ ID NO: 448671 - DNA, 201 bp, Homo sapiens
atcagagtatgtcagtactaatctgttgtactcatagcttgtagactggctattgcccagagaaaattttcaccaaccagaagcacctactctatcctcttatattatgtgttcatgggagctataaactctactcttcattaatgggagcagattcacctccttgaaacagatcatttatatattgtatgctattattta

SEQ ID NO: 448672 - DNA, 201 bp, Homo sapiens
tcagagtatgtcagtactaatctgttgtactcatagcttgtagactggctattgcccagagaaaattttcaccaaccagaagcacctactctatcctcttatattatgtgttcatgggagctataaactctactcttcattaatgggagcagattcacctccttgaaacagatcatttatatattgtatgctattatttat

SEQ ID NO: 448673 - DNA, 201 bp, Homo sapiens
gaaatgaactctaaaaggtttagtactatttagattttgtagtatagtaggatgtattgataaacacaaacagggtaacctgtttttaactctgaagtttrtggttgaacctgctttcctgtcatctagctgccagtctttgtaattctggacccttccttgagccatttttatcactttcaccttcatatgagggtttgc

SEQ ID NO: 448674 - DNA, 201 bp, Homo sapiens
cagagtatgtcagtactaatctgttgtactcatagcttgtagactggctattgcccagagaaaattttcaccaaccagaagcacctactctatcctcttatattatgtgttcatgggagctataaactctactcttcattaatgggagcagattcacctccttgaaacagatcatttatatattgtatgctattatttatc

SEQ ID NO: 448675 - DNA, 201 bp, Homo sapiens
tcacatctaatatagaggatttcaaatggcgcataattataacacaagacccatggggaaaattgtcaaccataataccagttataggattatttttatcrcactccccattattccattaatgataaagtgacttaaccctagggacattaacgatttcagcaagttttacttttctctctctgagcatcttccatgaat

SEQ ID NO: 448676 - DNA, 201 bp, Homo sapiens
atgctccagtcctgagtggaacagcatatatcaatgtcgagaattcttactggggaccacaagcgaggcagatgtcagaactgttttctgtgtgcactgcmttctagcgagaggtgtggcagctgcaaaggattgagagcccagagaatgtgccttggctaaaagtttctgtattactccaccactctgatttctctgtac

SEQ ID NO: 448677 - DNA, 201 bp, Homo sapiens
agagtatgtcagtactaatctgttgtactcatagcttgtagactggctattgcccagagaaaattttcaccaaccagaagcacctactctatcctcttatattatgtgttcatgggagctataaactctactcttcattaatgggagcagattcacctccttgaaacagatcatttatatattgtatgctattatttatct

SEQ ID NO: 448678 - DNA, 201 bp, Homo sapiens
attgtcaaccataataccagttataggattatttttatcgcactccccattattccattaatgataaagtgacttaaccctagggacattaacgatttcarcaagttttacttttctctctctgagcatcttccatgaattcctgtgaatagaagtggctggatcagcttaattatttaggttccttcaggtctgtgattg

SEQ ID NO: 448679 - DNA, 201 bp, Homo sapiens
gatcgagaccatcctggccaacatggtgaaaccccatctctactaaaaatacaaaaattagccgggcatggtggtgtgtgcccatagtcccagctacttcrgaggctgaggcaggagaatcgcttgaaccctggaggcagagattgcagtgagccaagatcacgccattgcactccagcctggcaacagagcaagactccg

SEQ ID NO: 448680 - DNA, 201 bp, Homo sapiens; identical to SEQ ID NO: 156175

SEQ ID NO: 448681 - DNA, 201 bp, Homo sapiens
gtttctccatgttggtcaggctggtctcgaactcccgacctcaggtgatctgcccgcctcggcctcccaaagtgctgggattacaggcgtgagccaccgcrcctggcctgaaaagaaattcttgattctgcatgtgttcgggggagagttgataaaaatatgacactggtcttaaagatgtctaacaatttagcaaaggtt

SEQ ID NO: 448682 - DNA, 201 bp, Homo sapiens
ttatagagaaatccatttgcatcaattttgagtttatatctgattgtttcttaaaggtaacctgtgagattatagtgttgaaatgtttagttttaatgttwctggctactatgacaagctattctggcaatagcatccacagctacagtggcccacacatccaaaatggatgagggctctctaactctgctcctctcttca

SEQ ID NO: 448683 - DNA, 201 bp, Homo sapiens
acaagctattctggcaatagcatccacagctacagtggcccacacatccaaaatggatgagggctctctaactctgctcctctcttcatcatcatctaccrttacttcatttggccagaacaatggaatttggcagcattatacctgagtagactgttcttcctttcatcttccacataattgaaaccatattgtatgggt

SEQ ID NO: 448684 - DNA, 201 bp, Homo sapiens; identical to SEQ ID NO: 156183

SEQ ID NO: 448685 - DNA, 201 bp, Homo sapiens
tctgtgccccaggctggagtgcagtggcgcaatctcggctcgcgacaggtcttgacttgcagtgtgttaggcacagtagataagcattttgtgaagcagtwtgaatggaaatcaaaagcaatttgatctaattttctcttagatttagttatatctcaataccaacttctaattcagttttatttttgctgattttctaaa

SEQ ID NO: 448686 - DNA, 201 bp, Homo sapiens
cacattcatatgtatttcacagttgaatccttccaaaatcctccacagtaaatgatggtgtatagttcttttgagcattttttctttagggaaaattaaarcaccagtgtttaaacaactttttccaggttcacttggccaataaatgcaaaccacacacaattttgaacccattctttatacctatgtagttattactat

SEQ ID NO: 448687 - DNA, 201 bp, Homo sapiens
gtatagttcttttgagcattttttctttagggaaaattaaagcaccagtgtttaaacaactttttccaggttcacttggccaataaatgcaaaccacacayaattttgaacccattctttatacctatgtagttattactatgtagatgcatacaattcatatttatctgtattgatatgtaagagattgagaagattaaa

SEQ ID NO: 448688 - DNA, 201 bp, Homo sapiens
  misc_feature (1)...(201): n = A,T,C or G
agggaaaattaaagcaccagtgtttaaacaactttttccaggttcacttggccaataaatgcaaaccacacacaattttgaacccattctttatacctatntagttattactatgtagatgcatacaattcatatttatctgtattgatatgtaagagattgagaagattaaagttgagaaagacgaaatccaaaattagt

SEQ ID NO: 448689 - DNA, 201 bp, Homo sapiens
cattctttatacctatgtagttattactatgtagatgcatacaattcatatttatctgtattgatatgtaagagattgagaagattaaagttgagaaagaygaaatccaaaattagtgattttgacagtcaaaataattctgagtgcacagaattgaggacaaaggtaaaagtggcaggaagagctcatttcaggcaagat

SEQ ID NO: 448690 - DNA, 201 bp, Homo sapiens; identical to SEQ ID NO: 156170

SEQ ID NO: 448691 - DNA, 201 bp, Homo sapiens
atactgacttcatttcctttggatatatacccagcagtgagattgctggatcttatggtagttctacttttaattttttaaggaaactccatactgttttycataatggtcttgctaatttatattcctaccaacagtgtataagggtgcccttttctccacttccttgtcaacacttgttatcttttatctttttgttaa

SEQ ID NO: 448692 - DNA, 201 bp, Homo sapiens
tcttttgcccattttttaatctttcttttcttgctatagagttttttcagctttttatatatcttatagatcctagatattaaccccttttggatatggawatatagtttacaagtattttcttgcattctgtaggttgtatcttcacctgttgattgctttctttgctgtgcagaagttttttactttgttataatccca

SEQ ID NO: 448693 - DNA, 201 bp, Homo sapiens
ctgtaggttgtatcttcacctgttgattgctttctttgctgtgcagaagttttttactttgttataatcccatttattttgtttttattgcctgtctgataaaaaaaaaaaaaaaacccaaggctcctagtttcattcttaaactgtgagattttggattgatctttgtatttctctgagtgtgatttggaaatatttgcc

SEQ ID NO: 448694 - DNA, 201 bp, Homo sapiens; identical to SEQ ID NO: 156179

SEQ ID NO: 448695 - DNA, 201 bp, Homo sapiens
cctcatcttggggcagtgaatccctttaaagtaaaacttgaaaggaagttacacaaatatttaatttaatggtaatttaagaggacagaataaactaggcmatgttcaagagagacaaagaagatagataaaaggctcaaaaccatatatgagaaacagctgatatagaggatgagtaagctaatgaagaaaagacaagca

SEQ ID NO: 448696 - DNA, 201 bp, Homo sapiens
gccatggttgccagcctactccctataaatagttacataatgcaaaaaagaaaagaggaaaaaacagtaccaaggccctaagacacacatgccagaacacrcatgcatggaatatttagcagtaataatatccacatgcatgattggcatcagtcctctgatttccgactcttgtctccatgagatgacatctgagatgga

SEQ ID NO: 448697 - DNA, 201 bp, Homo sapiens
accttggttcaacacatccatgttctgatttacacaatattgtgaattaaaccagagcaacagaatctttcttgctatgtgataaagaaacaagaagtttytgctgataaaacctttataaagatataaagctttagtgataaagaaaaaaggagttattccacactttccccctgcatatatacccgttgtccaagtgta

SEQ ID NO: 448698 - DNA, 201 bp, Homo sapiens
tgccttggctaaaagtttctgtattactccaccactctgatttctctgtactgtaaaatgtctcccatttggcatctggctcatctgaaactaatgtgtcrtgtgttaggattatgcagagtggtgagaaggcaatgagcatctgggaaacaacgtgtgctcctgacaagtgctcaagtattagctaatgattttcaaaat

SEQ ID NO: 448699 - DNA, 201 bp, Homo sapiens
gcaagttttacttttctctctctgagcatcttccatgaattcctgtgaatagaagtggctggatcagcttaattatttaggttccttcaggtctgtgattstgacattgaggctgtcaagaatattgtttatggcaagaatccatgcatcaggtaaattagatgcatgggattctgtacaaaattttctgtgtctttgaaa

SEQ ID NO: 448700 - DNA, 201 bp, Homo sapiens
ctctgatttctctgtactgtaaaatgtctcccatttggcatctggctcatctgaaactaatgtgtcatgtgttaggattatgcagagtggtgagaaggcawtgagcatctgggaaacaacgtgtgctcctgacaagtgctcaagtattagctaatgattttcaaaatatcctgggaatggagttggacacctattcattct

SEQ ID NO: 448701 - DNA, 201 bp, Homo sapiens
ccgggcatggtggtgtgtgcccatagtcccagctacttcggaggctgaggcaggagaatcgcttgaaccctggaggcagagattgcagtgagccaagatcrcgccattgcactccagcctggcaacagagcaagactccgtctcaaaaataattttaaaaatgtgttaaaatgggtaaattaattccattttttaaaaata

SEQ ID NO: 448702 - DNA, 201 bp, Homo sapiens
ataaagatatctcttttaattaaaagaatagttataccagcatcctggaataaaatggggatggttcttagcattgactagagttctcagctttctggcasccaaagcagaaaaagacctgatgaattcatagttatcattgatgacgtatcttcttgtatttgcttccagggaatcatgcttgttggtgatggatacaga

SEQ ID NO: 448703 - DNA, 201 bp, Homo sapiens
tgagcatctgggaaacaacgtgtgctcctgacaagtgctcaagtattagctaatgattttcaaaatatcctgggaatggagttggacacctattcattctyttacttgtgcttttgttttgtttttattttaaagaaacacttatttgaccctgcatttattttaagaggtgtgcaatatgctaactaaaaatgaagtaaa

SEQ ID NO: 448704 - DNA, 201 bp, Homo sapiens
gctacttcggaggctgaggcaggagaatcgcttgaaccctggaggcagagattgcagtgagccaagatcacgccattgcactccagcctggcaacagagcragactccgtctcaaaaataattttaaaaatgtgttaaaatgggtaaattaattccattttttaaaaatatatcattgcttgttacatggagatcattgta

SEQ ID NO: 448705 - DNA, 201 bp, Homo sapiens
attactaaacctgacttttgacagagtcaaaataatcacatatgtgattatttcaactatccctttatctagtcctttggacaggattatttataaaagargtctatgcacatttttagatgtctttatatcatgttgagtcttatcttgccacaataactacattaaatctttttttataacatcgtgttccgtctgaat

SEQ ID NO: 448706 - DNA, 201 bp, Homo sapiens
ttcccagcgtaacacacttcattcatatggtaccatgtgactttaaaaaatctcagatgacgagaaggaatcttcattttccaagcttgaaaaacaagaarttagtcagacttgtgaacaagaagacactgtggagagtggttagggctcttgcaggatactaaaaaatgatcaagaattatgtttggttttgtcccctag

SEQ ID NO: 448707 - DNA, 201 bp, Homo sapiens
tatgaaagaggaaagtaaattcagactgttggaattcatctatttacaattttttttctttccgtccttcctttttttttttttttttttttgagagggarcctcactctattgcccagtggcaatatcttggctcactgcaacctctgcctccccagttcaagtgattctcctgtctcagccacatgagtagctgggatt

SEQ ID NO: 448708 - DNA, 201 bp, Homo sapiens
ttatatcatgttgagtcttatcttgccacaataactacattaaatctttttttataacatcgtgttccgtctgaatattgtttacgaaagtattctgtaaygtgagcttcaaattgtagcaaaacccatgttaggaaagtaaatatctaaaagcagaaaatataagcttccctggttgccaagaaaaccactgtacgcaaa

SEQ ID NO: 448709 - DNA, 201 bp, Homo sapiens
gttgcaaatgatgggatttcattattttttatggctgaataatatttcattgtgtatatgtaccacattttctttatccattcatctgctgatgggcacttaggttgatttcatgtcctggctattgtgaatagtgctacaataaacatgggagtacagatatagcttcaacatactgacttcatttcctttggatatata

SEQ ID NO: 448710 - DNA, 201 bp, Homo sapiens
gttgagtcttatcttgccacaataactacattaaatctttttttataacatcgtgttccgtctgaatattgtttacgaaagtattctgtaatgtgagcttsaaattgtagcaaaacccatgttaggaaagtaaatatctaaaagcagaaaatataagcttccctggttgccaagaaaaccactgtacgcaaatttctgttt

SEQ ID NO: 448711 - DNA, 201 bp, Homo sapiens
tgtaggttgtatcttcacctgttgattgctttctttgctgtgcagaagttttttactttgttataatcccatttattttgtttttattgcctgtctgataaaaaaaaaaaaaaaacccaaggctcctagtttcattcttaaactgtgagattttggattgatctttgtatttctctgagtgtgatttggaaatatttgcct

SEQ ID NO: 448712 - DNA, 201 bp, Homo sapiens
aatttctgtttattaaatatttggcggtaaaataacaaaattgttgaaaagaggagattgtcttaccctgagcaataggatatgaatatcatccacttttkgttggaaaaataaacaacaacatgggattttaggataggaggtcttcagcagtctcttgcaaatagcttaaatcatggggattaaaaggcagcaaaacca

SEQ ID NO: 448713 - DNA, 201 bp, Homo sapiens
cacctgttgattgctttctttgctgtgcagaagttttttactttgttataatcccatttattttgtttttattgcctgtctgataaaaaaaaaaaaaaaacccaaggctcctagtttcattcttaaactgtgagattttggattgatctttgtatttctctgagtgtgatttggaaatatttgccttcattttggtcattt

SEQ ID NO: 448714 - DNA, 201 bp, Homo sapiens
aaatgtttaaaaataatagataattttctctcaaggagtatgagaaaagtacccagttggttctagatattttattttctttcacagatttctctctatayttttctaaatttccaatattaattttaataaaggtatatattctggttattttgaaaagagaaaacaccacaatattactaattcagttaaatcaggagt

SEQ ID NO: 448715 - DNA, 201 bp, Homo sapiens
caacccttctttatccctccgcagcagaagcatccagtaccccatctacctagatgatcctgagtcaacaaaaacccttctctttgaaaataagggtttttttgtttgtttgtttgtttgtttgtttgtttgttttttcttgtctgtttcattacaggagagttacaatgcaggagttaaacattatgaggctgatgactt

SEQ ID NO: 448716 - DNA, 201 bp, Homo sapiens
ttaataaaggtatatattctggttattttgaaaagagaaaacaccacaatattactaattcagttaaatcaggagtccacaacccccaggtcacggacccrtacaagtctgtggcccattaggaactgggccacacagcaggaggtgagcggcaggtgagcaagcgactgtatttacagctgctctccaccgcctgcatta

SEQ ID NO: 448717 - DNA, 201 bp, Homo sapiens
aacccttctttatccctccgcagcagaagcatccagtaccccatctacctagatgatcctgagtcaacaaaaacccttctctttgaaaataagggtttttttgtttgtttgtttgtttgtttgtttgtttgttttttcttgtctgtttcattacaggagagttacaatgcaggagttaaacattatgaggctgatgacttt

SEQ ID NO: 448718 - DNA, 201 bp, Homo sapiens
agagaaactagttctgttttttatacagatgagtttttattttgacttacaaaatctcttaatcttctgtatactggtaaacagtgtcttcagaactctgyccccagagagccactggggggaatacagacataacagtggatgattataatactaccagagaggcaccacgaggggaagtccagaagtggatgggatcat

SEQ ID NO: 448719 - DNA, 201 bp, Homo sapiens
acccttctttatccctccgcagcagaagcatccagtaccccatctacctagatgatcctgagtcaacaaaaacccttctctttgaaaataagggtttttttgtttgtttgtttgtttgtttgtttgtttgttttttcttgtctgtttcattacaggagagttacaatgcaggagttaaacattatgaggctgatgactttg

SEQ ID NO: 448720 - DNA, 201 bp, Homo sapiens
cccttctttatccctccgcagcagaagcatccagtaccccatctacctagatgatcctgagtcaacaaaaacccttctctttgaaaataagggtttttttgtttgtttgtttgtttgtttgtttgtttgttttttcttgtctgtttcattacaggagagttacaatgcaggagttaaacattatgaggctgatgactttga

SEQ ID NO: 448721 - DNA, 201 bp, Homo sapiens
aagaggttaagagagtttcagtaaatgtatagatcataaactgttagaagtatccataaaaatctagtacgttgtaaagatgagtaaattaaagaattgaratattaatcattttatcatgatcatatagctagttagtgttagacttggaaccaaaacctaggtcttctaattctttgtcaagtaatctgatggaaacgt

SEQ ID NO: 448722 - DNA, 201 bp, Homo sapiens
acccggctaattttgtattttttttttagtagagacggggtttctccatgttggtcaggctggtctcgaactcccgacctcaggtgatctgcccgcctcgkcctcccaaagtgctgggattacaggcgtgagccaccgcgcctggcctgaaaagaaattcttgattctgcatgtgttcgggggagagttgataaaaatatg

SEQ ID NO: 448723 - DNA, 201 bp, Homo sapiens
gtttgtttgtttgttttttcttgtctgtttcattacaggagagttacaatgcaggagttaaacattatgaggctgatgactttgagatggctatcaggcayttcgaacaagccttaagagaatatttcgttgaagatacagaatgccggaccctatgtgaggggcctcagagatttgaagaatatgagtatttagggtata

SEQ ID NO: 448724 - DNA, 201 bp, Homo sapiens
gtttcgctcttgttgcccaggctggagtgcaatggcgtgatcttggctcactgcaacctctgcctcccggattcaagcaattcttctttctcagcctcccragtagctgggattacaggcatgcaccaccagacccaactaattttgtatttttcatggagacggggtttctccatgttggccaggctggtctcgaactcc

SEQ ID NO: 448725 - DNA, 201 bp, Homo sapiens
cagggaggcatgtgtcgcagaatagagtatacttcagcttttctcatcttccccaaagagactgtcatctactctggatgcctatcagtgtttagtatttygtattattcctactggacagctcctaagcattaagatggggtgacccagggctacttacatcccacagtggcttcagtccatgaaacatgcgtgatatgg

SEQ ID NO: 448726 - DNA, 201 bp, Homo sapiens
gttcacttggccaataaatgcaaaccacacacaattttgaacccattctttatacctatgtagttattactatgtagatgcatacaattcatatttatctktattgatatgtaagagattgagaagattaaagttgagaaagacgaaatccaaaattagtgattttgacagtcaaaataattctgagtgcacagaattgag

SEQ ID NO: 448727 - DNA, 201 bp, Homo sapiens
aaagcttttgttttatgaactattcctagttgccaaggaagcaattacaaacaaaaaaaccaaaaaaaagaaaagaaaaaaatagccatttgggggcagaygcggtggcttacacctgtaatctcagcacttcaggatgctgaggcaagcagatcacttgaggtcaggagtgtgagaccagccagaccaatatggtgaaac

SEQ ID NO: 448728 - DNA, 201 bp, Homo sapiens
cagtagtaataataaccaacacatatgtagcaattgtaacatacaaagcacttaacatatttttatctatttaatgctttaagcaactcttatagatactrttgttacttactctcctctcccttttgtaaatgaggaatttatctgaaaaagattaagtgatgtgattagagtgaagctggaactcatatttggactttt

SEQ ID NO: 448729 - DNA, 201 bp, Homo sapiens
atgccctccatgggcaaaccaccctcccagcatctccacgtgctcagcaacctagaagctcatcaaatcttgttgttcaagagtttttatagagcttaatytgcaggccccaaactcctttcccagaggtctgtgggtggggctaaaagtttcactttcctaatcacttggtctttctggtgaccagccccattctgaatc

SEQ ID NO: 448730 - DNA, 201 bp, Homo sapiens
ctgagacaggtggatcacatgagctcaggagtttgagactagcctggccaacatggtgaaaccccatctctactaaaaatataaaaaattagccaggtgtkgtggtgggcgcctgtaatcccagctacttaggaggctgaggcaagagaatcacttgaaccttggaggccgaggttgcagtgagccgagatggtgccattg

SEQ ID NO: 448731 - DNA, 201 bp, Homo sapiens
gggcaaggtatggggggatggcaggaggagcttccatgccctccatgggcaaaccaccctcccagcatctccacgtgctcagcaacctagaagctcatcamatcttgttgttcaagagtttttatagagcttaatctgcaggccccaaactcctttcccagaggtctgtgggtggggctaaaagtttcactttcctaatca

SEQ ID NO: 448732 - DNA, 201 bp, Homo sapiens
gcacttcgagccatccaagatatccaaagagagaccccaaagttgttaaatatgaaaactgacattcagctgggtgtaggtggggtaaagtggactgtggrgtataaaaagtgtacatgggaagggaaaagtgaggtgtagagaacagactgtgagctggaggattcggaatctactgtcgttctagtgatcgctgaccag

SEQ ID NO: 448733 - DNA, 201 bp, Homo sapiens
gatatcaaaaatatatcacctattgatgaaagaattgcaagacaagaggctttcaaagtgctgcattgggaagctgtacagtacttctttccccaggagaycttgtcagcacattcctctgatttgaaaacttttggctctctacagctctcacatttcccatccctttccttccttagcttccaagtcagttttgaacca

SEQ ID NO: 448734 - DNA, 201 bp, Homo sapiens
aaggacagatccagatcttcttatttagaatcttgaagtctttcacgaggcttcaaaaactcaacccttgggtggcataaaattatttcgagagatccaaraatgtatatacacatttggatttgtttgatttttacgtatataaagaacagcctgctatcatttgtgtgtttgcatatgacaaacctgtgtcttcttttc

SEQ ID NO: 448735 - DNA, 201 bp, Homo sapiens
taattttaatgtactatttctaatataacaccttctaatatattaatatttatatcgggccttacttattattcttttaaaattatgttatccaagagacsttaaaatatgttatttactaatttcatgatctatacagatgattactaaagctcaattttgtttgcttgttttattcagcaaacataaagaagttgaact

SEQ ID NO: 448736 - DNA, 201 bp, Homo sapiens
tcagaaagttatactaaaatagctaaaatattaggtgtcactaactgaatcagaaatcaagaaagctcatttttttttaaattttattattattatacttwaagttttagggtacatgtgcacaacgtgcaggtttgttacatatgtatacatgtgccgtgttggtgtgctgcacccattaacttgtcatttagcattagg

SEQ ID NO: 448737 - DNA, 201 bp, Homo sapiens
agaaatacttagtgtcataacctatcatagagaaatgtagctctatgaaataggcaaggagatataataaaataattctaagctctgaattaggagctctrcatccaggtcccagctcttcctgccacgtttttgtaaccttaggtaatatatcttctgctttctggatctcattttttccaggaaaaaaagggttaaatc

SEQ ID NO: 448738 - DNA, 201 bp, Homo sapiens
tgtttttctgccaccaaattccaagtcactttcttggacaaaaggatggatatctaggctaattccatagtatttgaaaactcgacttgtatttcattttktccttgccaaatctccactaactttagccttccttttcattaatctataaaatataaatatattgtatctttacacaatatgcaaaattcctaaattata

SEQ ID NO: 448739 - DNA, 201 bp, Homo sapiens
ctgtaaaatgaacataataataagtctcagttttcatgtctgtacaatgagcaacttctaaaagtgttataataattaaataagctaatacatataaaatkcttagatatgcctgtcaaaacctaagaataaagcacatgttcacttttctgtgaaaactaatggaacttactttgggaaatactggctctattcttttac

SEQ ID NO: 448740 - DNA, 201 bp, Homo sapiens
tatatgtatttattatacacacatacatgcacacacacactatatatatacacacatacgtatattgtaaatttccattagaagaaatacaatgttgtgamctatttgaaaacaaggcatacagacatttaaaatttcccttgtaatagctaaatatttctataatgaaaagtttatattggaaacatccttgttagttcc

SEQ ID NO: 448741 - DNA, 201 bp, Homo sapiens
cttccaagtgtagacttgcacaatgcttttaaatactgccaacaaattttacatagataaatagactctcattgacaaggttaggttttgtgtccccaccsaaaactcctcttgaattctaatccccataatccccgccgcccatgtcaagggagagaccaggtggaggtaattgagtcatgggggcagttttccccatgc

SEQ ID NO: 448742 - DNA, 201 bp, Homo sapiens
gcgacttccagcgcagagtgccctacaactacctgcagcgggcctacatcaaggtacccacagagcgctcctccactgcaaagcccctgcggctctcacaygctctcttgagccctccctgctgcccccgtcatctctgttcagtctttcgaattgggtctccttaaatatgtgtctcagtttgtgaatccagatatctgg

SEQ ID NO: 448743 - DNA, 201 bp, Homo sapiens
aggtttgttacatatgtatacatgtgccgtgttggtgtgctgcacccattaacttgtcatttagcattaggtatatctcctaatgctatccctctcccctycccccaagaaagctcattatttaaaaatgacaaaagtcaatttacatcttttaaaaggactgaaactcagaaggttagaaacacctgcttgagatcacat

SEQ ID NO: 448744 - DNA, 201 bp, Homo sapiens
ctgttgtccagtcgtcagatacctaattaggatctaaattaagaacagttgtagatagatacaaagtttccaaccagaaaacactttcatatctctttttytttttttttgagatggagtctcgctctgtcccccaggctggagtgcagtggcgtgatctcagctcactgcaacgtccgcctcctgggttcaagcgattct

SEQ ID NO: 448745 - DNA, 201 bp, Homo sapiens
ttgtattttttttttagtagagacggggtttctccatgttggtcaggctggtctcgaactcccgacctcaggtgatctgcccgcctcggcctcccaaagtsctgggattacaggcgtgagccaccgcgcctggcctgaaaagaaattcttgattctgcatgtgttcgggggagagttgataaaaatatgacactggtctta

SEQ ID NO: 448746 - DNA, 201 bp, Homo sapiens
aacctctgcctcctgggttcaagtgattctcctgcctcagcctcccaagtagctaggattacaggcatgcatcaccatgcccagcgaattttttttttgtrttttagtagagatggggtttcactgtgttgcccaggctggtcttgaactcctgagctcaggcagtctgctcgcctcagcctcccaaagtgctaggattac

SEQ ID NO: 448747 - DNA, 201 bp, Homo sapiens
gcttagatgaaagctgatatggtttagctgtgtccccacccacatctcaccttgaattgtaataatccccatatgtcaagggcagggccaggtggagatarttgaatcatgggggtggtttgttctcctggtagtgaataagtctcacaagatctgatggttttataaacgggagtttccctgcacaagctctcttgcctg

SEQ ID NO: 448748 - DNA, 201 bp, Homo sapiens
tgtaagacatgactttctccttctttgccttccaccatgattgtgaggcctccccagatgtggaactgtgagtccgttaaatctctttttctttataattwcccagtctcaggtatgtgtttattagcagcaagaaaatggactgatacaaaggccaaaattaatcgtggtacattaagattgtgtagtagtttaactaga

SEQ ID NO: 448749 - DNA, 201 bp, Homo sapiens
aatacaaaaaaattagccaggcatggtagtgggtgcctgtagtcccagctactcgggaggctgaggcaggagaatggcgtgaacctgggaggcagaggttkcggtgagccgagatcgcgccactgcactccagcctggcctgggcgagagcgagactccgtcttaaaaaaaaaaaaaaaaaaaaaaaaaaaaaaaaaagaa

SEQ ID NO: 448750 - DNA, 201 bp, Homo sapiens
catggtagtgggtgcctgtagtcccagctactcgggaggctgaggcaggagaatggcgtgaacctgggaggcagaggttgcggtgagccgagatcgcgccmctgcactccagcctggcctgggcgagagcgagactccgtcttaaaaaaaaaaaaaaaaaaaaaaaaaaaaaaaaaagaaagaaagaaagaaaaaagtttt

SEQ ID NO: 448751 - DNA, 201 bp, Homo sapiens
gaggttgcggtgagccgagatcgcgccactgcactccagcctggcctgggcgagagcgagactccgtcttaaaaaaaaaaaaaaaaaaaaaaaaaaaaaaraaagaaagaaagaaagaaaaaagttttgaatatatacctatcaggacagctgaaagaagcaagagtgaaatgaaaccttcattgtagttaatcattcctc

SEQ ID NO: 448752 - DNA, 201 bp, Homo sapiens
agtttcattcttaaactgtgagattttggattgatctttgtatttctctgagtgtgatttggaaatatttgccttcattttggtcatttttttttctcttyagcttaaccagctcgaaaaagcagtggaagcagctcacacatttttcgtggctaaccctgagcacatggaaatgcagcagaacattgagaattacagggc

SEQ ID NO: 448753 - DNA, 201 bp, Homo sapiens
tcaggtacccaaccactgtccctcacgtgggttaagaatgggttactgtattttccacagtggtggaattcgctggctgtgaaaccctgttcttgcccttrtggatagaacacagagataaaatgccacaagatgtgtttacatcatctttgcttcatggtgtagtattatctgttgggtggtttctctgtccagagctaa

SEQ ID NO: 448754 - DNA, 201 bp, Homo sapiens
ttgtcatttagcattaggtatatctcctaatgctatccctctccccttcccccaagaaagctcattatttaaaaatgacaaaagtcaatttacatcttttwaaaggactgaaactcagaaggttagaaacacctgcttgagatcacatggtccagcttattcattttcaaattgggaacctgaggccctgacaaggcaagc

SEQ ID NO: 448755 - DNA, 201 bp, Homo sapiens
cataaacagtgaatcaaagatgagagagttgcttaatttttatcattccttttaaaaatcagagtcatctcagagtatatatatatgtgtgtgtgtgtgtrtatgtatttattatacacacatacatgcacacacacactatatatatacacacatacgtatattgtaaatttccattagaagaaatacaatgttgtgacc

SEQ ID NO: 448756 - DNA, 201 bp, Homo sapiens
attaaattgcacagctatgagatcaaatgattttatcatcattctcaaaagaacccactcagcgcagccatgaatgaacctttcttgctggaaaatacatmcatcttcattgtaaaaatcagtcaaggtgaaacgtaggaggcattttcttctctgggacattcaccacttgtgtttcctcatctcaggctttgataaaat

SEQ ID NO: 448757 - DNA, 201 bp, Homo sapiens
gaaaaaaaggcagttgtggtaaattaaattgcacagctatgagatcaaatgattttatcatcattctcaaaagaacccactcagcgcagccatgaatgaayctttcttgctggaaaatacatacatcttcattgtaaaaatcagtcaaggtgaaacgtaggaggcattttcttctctgggacattcaccacttgtgtttcc

SEQ ID NO: 448758 - DNA, 201 bp, Homo sapiens
tatctgtgtaaaattctacacttagtaatattaatgattatgttagctacatgaaaggcatatttctaatgcagattctcccggaacccaagattcagatrttgaagactccatgttacattcttccttcacttgatctttgcatgttacttgtggaatgctaggagaattgtcaatatcccagtagccttctcttaaggc

SEQ ID NO: 448759 - DNA, 201 bp, Homo sapiens
caccaatggccactgaacagttttggccaatgtcctagatctggtttaggaaaatggaccgacgatttcccacagatgaatatttagtgatttgctcaagrtcaccacagcatgtcggtagctggaaaagaatagagatctcataactcaggttctttaatttttaagactcaaacttattaaaaacatattaattgcaca

SEQ ID NO: 448760 - DNA, 201 bp, Homo sapiens
tgcatgttacttgtggaatgctaggagaattgtcaatatcccagtagccttctcttaaggctctatgcttattaaggtgtctcaatcagaacttaacacartattccaggtgtagcttattaattcaacaataacgatagtaatgataatacatacttataatggagcttaagactggtagacattttcctaaatatttca

SEQ ID NO: 448761 - DNA, 201 bp, Homo sapiens
tttttttggatctctgccagatccagttgcctaaatttttggaatgtcagttttatgtgtggttcacattttaattgctatttctctacacttgatcttgyatttgggaatggcagattcttcctttattatagttaactgtgttgtggttgtggggagatatgcatcctgctttcacgcccacattcgcctctacacctg

SEQ ID NO: 448762 - DNA, 201 bp, Homo sapiens
tgcaggtggtggattcagtaaccattagttggcattctcccttacaagcctcaggtaatcctgtgtgcacaccaggtttatggaccgaatgagtaccacartggtttatagacccaataaaaactgtttaaatatgtggtggtgctttacaaatatcttcatcccaggtttttcaaatctcccctggaatctatgcagcca

SEQ ID NO: 448763 - DNA, 201 bp, Homo sapiens
aggtttcttatagagacaattagggtatagctatcaaaaattagactaggaagtagactgaaaattaatatgacgaatgaccaatttgtgacacacccagwtacccaaaatcaactcagttcacctaaattcaatacagcaatctcaattattgaggatattttcctgaaagttttatttttttggatctctgccagatcc

SEQ ID NO: 448764 - DNA, 201 bp, Homo sapiens
gtttattcctccaaatacctgacatgtaacagatgatgttcgctgtgtgatgagatgggtcttagagatccttgtgaatccacggctataatcagttccarccgcctcatacagttcacagcttcttttcctaaactttcccaaagttattcatgtttaaaattactttcaattccagaagaaagaaaatactaatttgtc

SEQ ID NO: 448765 - DNA, 201 bp, Homo sapiens
aaggcaagagactgagaaggcaagagagaagttgcaatttcatgtaacatagtcacagaaatgacaccttatcacctttgccatattctactgtttagaartaagttccaggttccactcgcacttgtgggaagcaaattgcacagctgtatgaatgttgggaggcaatgatcattgcagcccatcgtaaagtctctgctg

SEQ ID NO: 448766 - DNA, 201 bp, Homo sapiens
ggtttaggattattgttaagaattatttttaaggtttcttatagagacaattagggtatagctatcaaaaattagactaggaagtagactgaaaattaatrtgacgaatgaccaatttgtgacacacccagatacccaaaatcaactcagttcacctaaattcaatacagcaatctcaattattgaggatattttcctgaa

SEQ ID NO: 448767 - DNA, 201 bp, Homo sapiens
cagtgagccgagatggtgccattgcactccagcctaggcaataagagcgaaactccatctcaaaggaaaaacaaacaaacaaacaaaaagcactactcacmtaataactcaaaccaagttacctttcaatccaacatcttccttaattcctattcccatatgattttttaccaaacttggatagaggttatctcctaatag

SEQ ID NO: 448768 - DNA, 201 bp, Homo sapiens
cgttaaatctctttttctttataattacccagtctcaggtatgtgtttattagcagcaagaaaatggactgatacaaaggccaaaattaatcgtggtacaktaagattgtgtagtagtttaactagagaaaagttgtggtagaatagtaattacacaccaacagtactataaggaatcctggctcaaaagaacccagacca

SEQ ID NO: 448769 - DNA, 201 bp, Homo sapiens; identical to SEQ ID NO: 156182

SEQ ID NO: 448770 - DNA, 201 bp, Homo sapiens
ggttttggcatagtgtaaaggaagtgaatggtgagaaattattcgggaaattcttgctctatatgcaatatacataatcagctcatttgagtcctaacttsatgtgtagattcaggtcctttctcggctttttaatagctgcttgaccttggctaagtcactgagggaatatgccaccatttaaatcatcttcttactgag

SEQ ID NO: 448771 - DNA, 201 bp, Homo sapiens; identical to SEQ ID NO: 156171

SEQ ID NO: 448772 - DNA, 201 bp, Homo sapiens
gagacaaactgtgacttcattttagagaacaacagaagtgggaaggagatggtggtggcaactgagactttcagaagaaaaaatttcattctgaatatggmaaaatgggaaaccaaatggtgcagaagtagagacaattcttgcgattgaataaaataactggtcagaaatattcatccaactaacaaatggtttccaggg

SEQ ID NO: 448773 - DNA, 201 bp, Homo sapiens
ttatatatataaaaaatatatatataatatatatacacacatataaatatgcccactgcagcttcctttcccatgcagacatggcctcatatatatatatatatatatatatatatatatatatatatatatatttgcatatatatatgcatagagagatatatgattgtgactgtatgtaataaactcatacctgaaaat

SEQ ID NO: 448774 - DNA, 201 bp, Homo sapiens
gaaatgcagcagaacattgagaattacagggcgacagctggtgttgaagcattgcagttggtagacagagaagccaagccacacatggtaagctctgtggscccctgccctcaccacagggagctaagtgctcctaagtttcatctgagtcacagcaaatttctatgaatgaatatctcataaagtttattctcaaatttt

SEQ ID NO: 448775 - DNA, 201 bp, Homo sapiens
tatatatataaaaaatatatatataatatatatacacacatataaatatgcccactgcagcttcctttcccatgcagacatggcctcatatatatatatatatatatatatatatatatatatatatatatatttgcatatatatatgcatagagagatatatgattgtgactgtatgtaataaactcatacctgaaaatt

SEQ ID NO: 448776 - DNA, 201 bp, Homo sapiens; identical to SEQ ID NO: 156174

SEQ ID NO: 448777 - DNA, 201 bp, Homo sapiens
tatatatatatatatatatatatatatatttgcatatatatatgcatagagagatatatgattgtgactgtatgtaataaactcatacctgaaaattgatmcacacacacacacacacacacaaatatgtaaacaaagagtaaatcaaaagttcaattcaacgaccatcttcctaagtaaacccgtgcctttggaaagaag

SEQ ID NO: 448778 - DNA, 201 bp, Homo sapiens
aaggatctagaaccagaaataccatttgacccagcaatcccattactaggtatatacccaaaggattataaatcattctactataaagacatatgcacatstatgtttattgcggcactgttcacaatagcaaagacttggtaccaacccaaatgctcatcaatgatagactggataaagaaaatgtagcacatatatacc

SEQ ID NO: 448779 - DNA, 201 bp, Homo sapiens
catcattctcaacaaacaaacacaggaacagaaaaccaaacaccacatgttctcactcataagtgggagctgaacaatgagaacacatggacacggagggyaacatcacacaccagggcctgtcagggggataacattaggagaaatacttaatgtagataatggtttgatggggtgcagcaaaccaccatggcacatgta

SEQ ID NO: 448780 - DNA, 201 bp, Homo sapiens
caaatgcgtgtttgagtgagtcctgaccagcaccagggagtgggcagcccagaaaacctgaaattccaacatcccaaggccatttactcagaaggcttttytttctttctttctttctttctttctttctttctttctttctttctttctttctttctttctttctttctttctttctttcttttttctttctttctttct

SEQ ID NO: 448781 - DNA, 201 bp, Homo sapiens
aattccaacatcccaaggccatttactcagaaggcttttctttctttctttctttctttctttctttctttctttctttctttctttctttctttctttctttctttctttctttctttcttttttctttctttctttctttcttcctttctttccttctttctctttctttctttctttcttttctttctttctctctct

SEQ ID NO: 448782 - DNA, 201 bp, Homo sapiens
tccaacatcccaaggccatttactcagaaggcttttctttctttctttctttctttctttctttctttctttctttctttctttctttctttctttctttctttctttctttctttcttttttctttctttctttctttcttcctttctttccttctttctctttctttctttctttcttttctttctttctctctctctt

SEQ ID NO: 448783 - DNA, 201 bp, Homo sapiens
ctgtagacacgttgatggcctccctttaaaatcctttggacagacctaggctgactctaatgctgcaactcctttgtctttcagttggtgagtatgtgaargccctggagtgtgccaaagcctatcttctatgccatccagatgatgaggatgtcctagacaatgtggattactatgagagtctgctggatgatagcattg

SEQ ID NO: 448784 - DNA, 201 bp, Homo sapiens
tgtggtagaatagtaattacacaccaacagtactataaggaatcctggctcaaaagaacccagaccagatcagtgagtagaatattcatgtggaaggtagmtttttattttcagaaaaataacgttaaccattccatttgttgattggaatttagttcattttatggtcttgcttttatttagtcttgtaaattggtttgg

SEQ ID NO: 448785 - DNA, 201 bp, Homo sapiens
acttatcatttatgttggtgacatcattaaaaatgctttcttctagctattctgaaatatacaatacataattgttagctattgttatcctactgtgcaakagaacaccagaaattattcttcttctttaactataactttgtactctttgaccaacctcttcctgtctctccctttcctacattttccagcctctggcaa

SEQ ID NO: 448786 - DNA, 201 bp, Homo sapiens
acataattgaaaagtaggcaaaggataatttattaataaaattttcacaaatattttgagcacacttttttttctgagttacccatatatgaaaagcaacrttcaacttcatttacttactgaaatgccagtgaataaaatcagtttgctctccccaacttccagtgctttcagtcttcctaaaaagcactactcatccgg

SEQ ID NO: 448787 - DNA, 201 bp, Homo sapiens
  misc_feature (1)...(201): n = A,T,C or G
ctttctcagaagagagtcctatgagatgcccagtcgactttttgggatcagcattagaaacaaatgcaaaagtagttctatctctcccaaaataatgtacncatgtaacattattatgacattatgaggaaacccgatagacatctttctcctgaatctatattgtgtttatcaagcttcctaatttgcaatttgtctttg

SEQ ID NO: 448788 - DNA, 201 bp, Homo sapiens
cttttctgaatctagaatctatacttttaaggtctacataattgaaaagtaggcaaaggataatttattaataaaattttcacaaatattttgagcacacwtttttttctgagttacccatatatgaaaagcaacgttcaacttcatttacttactgaaatgccagtgaataaaatcagtttgctctccccaacttccagt

SEQ ID NO: 448789 - DNA, 201 bp, Homo sapiens
aaaagttttgaatatatacctatcaggacagctgaaagaagcaagagtgaaatgaaaccttcattgtagttaatcattcctccgttcagccatcaacttaycaaactttacatttcctgacaaaaactacatacaatccctctttgtaaaatcatgatctaatagtgaaaacatattcaaacaagtaattattctctactg

SEQ ID NO: 448790 - DNA, 201 bp, Homo sapiens
ggagtgcagtggcgtgatctcggctcactgcaacctccgcctcctggattcaagcaattctcctgcctcagcctcccgagtagctgggattacaggcacaygccacaatgcccagctaatttttttttgtatttttagtagagatggggtttcaccatgttggtcaggctagtctcggactcctgacctcaggtgatccgc

SEQ ID NO: 448791 - DNA, 201 bp, Homo sapiens
ttagtgatgagtgtttaagaggctgaaatttttcattattataaacaatgtagtagtgaacacttttgtgtagtcttcaactacttaaaatgttttattayttaataagaatttaatatattacaaagcggcatttaaaatactaggtaatgcacattatagaataatttgggagattggctagttaaccacttatgagga

SEQ ID NO: 448792 - DNA, 201 bp, Homo sapiens
tcccgagtagctgggattacaggcatgcaccaccagacccaactaattttgtatttttcatggagacggggtttctccatgttggccaggctggtctcgawctcctgacctcaggtaatccgcccacctcggcttcccaaagtactgggattacgggcgtgagccagcacgcccagcagaaaagctcttctaagtatgaca

SEQ ID NO: 448793 - DNA, 201 bp, Homo sapiens
gacagctgaaagaagcaagagtgaaatgaaaccttcattgtagttaatcattcctccgttcagccatcaacttatcaaactttacatttcctgacaaaaamtacatacaatccctctttgtaaaatcatgatctaatagtgaaaacatattcaaacaagtaattattctctactgcaggaagggttgttagagaggatggt

SEQ ID NO: 448794 - DNA, 201 bp, Homo sapiens
gactgtcttcccaaactttttcaggtccttatgtaaatatttatgtatttatttatagttattatttcattttttataaaataggacaatactatatatawtgtttttcaacttttgttgttttattttatgcttaacaatatattgtggacttcttctcacgtaagtacgtagagccattttattgtatttaatggttgg

SEQ ID NO: 448795 - DNA, 201 bp, Homo sapiens
caccatgatgtctaccagcattaagtggaagcatagaagatgaagggatgattgaaagaaatactcttaaaaagaccgggaccttctcggtccctgctcakcattatttctcctctatgtcttatgcccctctgaatggggcggggggaataatgatgtcataggagtagacttttacacttgggaagttttagctgaatt

SEQ ID NO: 448796 - DNA, 201 bp, Homo sapiens
cccatctacctagatgatcctgagtcaacaaaaacccttctctttgaaaataagggtttttttgtttgtttgtttgtttgtttgtttgtttgttttttctygtctgtttcattacaggagagttacaatgcaggagttaaacattatgaggctgatgactttgagatggctatcaggcatttcgaacaagccttaagagaa

SEQ ID NO: 448797 - DNA, 201 bp, Homo sapiens
acacttgggaagttttagctgaattaaatcttgtttttttaaaaaattttcatttccttcccattgttttgctgccctatgtgaagtacaacccatgaaaygcatggaatttgttcatgtatgtttatatcagaaataacttttatagctgaagagacaggtgtgacatgctcaaggtttcacatccagttcatatcagaa

SEQ ID NO: 448798 - DNA, 201 bp, Homo sapiens
ccccatctacctagatgatcctgagtcaacaaaaacccttctctttgaaaataagggtttttttgtttgtttgtttgtttgtttgtttgtttgttttttcytgtctgtttcattacaggagagttacaatgcaggagttaaacattatgaggctgatgactttgagatggctatcaggcatttcgaacaagccttaagaga

SEQ ID NO: 448799 - DNA, 201 bp, Homo sapiens
aaggactttatcacatcaattatctttattcatacccaagaagaactatgtctgcattttataaataagacactagaaactcaggagaaaagaatgtcctwacctattgagagagatttcagtgtgtaaggaatcaggagttatagtcaccatgtgttcatccttactacactgtactcgattccaaaacatttattaagc

SEQ ID NO: 448800 - DNA, 201 bp, Homo sapiens
ccagtccagtggtttgcccattgtacctgtatgtttcaaactggggttttaaaaagtgatgtagttctttatatagactaaacattacttgaaatcacatkttgaaagccttttttttttttaatttttgacatcaccattctcaacatgtagcctccaaaattatcacagaaaaggataaggaaagattttagaaaatat

SEQ ID NO: 448801 - DNA, 201 bp, Homo sapiens
ttttaaattaagagaaaataaaaattaacttagaaaattggcataatgtgataaaaactagaacatcatataattctctataatcctctctgaacctttcygatactcttattttatacctaggaggtgaggccagtgtaaattgttcaggattatactgtgattttccagctcccagtccagtggtttgcccattgtacc

SEQ ID NO: 448802 - DNA, 201 bp, Homo sapiens
tatgcacatgtatgtttattgcggcactgttcacaatagcaaagacttggtaccaacccaaatgctcatcaatgatagactggataaagaaaatgtagcasatatataccatggaagactatgcagccataaaaaaggatgagttcatgtccttttcagggacatggatgaagctggaaaccatcattctcaacaaacaaa

SEQ ID NO: 448803 - DNA, 201 bp, Homo sapiens
ttttttaaaattttaattaaaattttaaaagttgaaataaaaaaactaaaaaattaaaaatttttaaattaagagaaaataaaaattaacttagaaaattrgcataatgtgataaaaactagaacatcatataattctctataatcctctctgaacctttccgatactcttattttatacctaggaggtgaggccagtgta

SEQ ID NO: 448804 - DNA, 201 bp, Homo sapiens
gttttttaaaattttaattaaaattttaaaagttgaaataaaaaaactaaaaaattaaaaatttttaaattaagagaaaataaaaattaacttagaaaatyggcataatgtgataaaaactagaacatcatataattctctataatcctctctgaacctttccgatactcttattttatacctaggaggtgaggccagtgt

SEQ ID NO: 448805 - DNA, 201 bp, Homo sapiens
tctttatccctccgcagcagaagcatccagtaccccatctacctagatgatcctgagtcaacaaaaacccttctctttgaaaataagggtttttttgtttktttgtttgtttgtttgtttgtttgttttttcttgtctgtttcattacaggagagttacaatgcaggagttaaacattatgaggctgatgactttgagatg

SEQ ID NO: 448806 - DNA, 201 bp, Homo sapiens
ccaacatcccaaggccatttactcagaaggcttttctttctttctttctttctttctttctttctttctttctttctttctttctttctttctttctttctttctttctttctttcttttttctttctttctttctttcttcctttctttccttctttctctttctttctttctttcttttctttctttctctctctcttt

SEQ ID NO: 448807 - DNA, 201 bp, Homo sapiens
atttaatatattacaaagcggcatttaaaatactaggtaatgcacattatagaataatttgggagattggctagttaaccacttatgaggagaaagtgggktctctgctgtatgccttacacaaaaataaattgtatttgtaataacaatataagtgtaaaatataaaactgttagaacaaaatgagggaaaatatttgta

SEQ ID NO: 448808 - DNA, 201 bp, Homo sapiens
caatgatatttgatagtcactaatctctcttgagcttattaacaaattgtaaggctgggcgtggtggctcactcctataaccccagaactttgggaggccraggtgggcagatcacttgaggtcgggagttcgagaccagcctgatcaacatgctgaaaccccatctctactaaaaatacaaaattagctggatgtggtgg

SEQ ID NO: 448809 - DNA, 201 bp, Homo sapiens
ttgaacctgggaggcgtaaattgcagtaagccgagatcgcaccactgcacttcagcctgggcaacagggcaagactctgtctcaaaacaaaaacaaaaacmaaacaaccctgtggcatcagggaggaatcactttttattggtcacccagaagacggatttgttttctcgcaaatcataagaaatagtattgaatcattta

SEQ ID NO: 448810 - DNA, 201 bp, Homo sapiens
gaacctgggaggcgtaaattgcagtaagccgagatcgcaccactgcacttcagcctgggcaacagggcaagactctgtctcaaaacaaaaacaaaaacaaracaaccctgtggcatcagggaggaatcactttttattggtcacccagaagacggatttgttttctcgcaaatcataagaaatagtattgaatcatttatg

SEQ ID NO: 448811 - DNA, 201 bp, Homo sapiens
gggaggcgtaaattgcagtaagccgagatcgcaccactgcacttcagcctgggcaacagggcaagactctgtctcaaaacaaaaacaaaaacaaaacaacyctgtggcatcagggaggaatcactttttattggtcacccagaagacggatttgttttctcgcaaatcataagaaatagtattgaatcatttatgaaacgt

SEQ ID NO: 448812 - DNA, 201 bp, Homo sapiens
tgacattccccaggcagctctttctgtcgggtgctctggtatttggggttttcagcacttttcagtaactttaccagctaatcaaaataatatcagaaaastatcttccctttgggaagctttctgcattaggaaaactgtttacttccaataaaataagtggagatgcttaaaggaagagggtcttgatcaaacttattt

SEQ ID NO: 448813 - DNA, 201 bp, Homo sapiens
atcccacaagatctctgccctcatctgtggtagggttctctcagattggcaactgttggtggagtgcacgaaatttcaactaagtataaatcttaacttcyttgtgttgtggctaaggtgttggagttcactggactagtatcttgggcaagaaatgaggagaaagtctgaatcctttccaggacttgtcttctgcttgct

SEQ ID NO: 448814 - DNA, 201 bp, Homo sapiens
caaggaagacttctataagctcagacctagaagcaaagacgatagccaggcatagaaaaaatggccctggctgggcgtggtggctcacgcctataatcccygcacttttggaggcctaggtgggtggatcacctgaggtcaggagttggagaccagcctggccaacatggtgaaaccccatctctactaaaaatacaaaaa

SEQ ID NO: 448815 - DNA, 201 bp, Homo sapiens
agctcagacctagaagcaaagacgatagccaggcatagaaaaaatggccctggctgggcgtggtggctcacgcctataatccccgcacttttggaggcctwggtgggtggatcacctgaggtcaggagttggagaccagcctggccaacatggtgaaaccccatctctactaaaaatacaaaaattagcctggcgtggtgg

SEQ ID NO: 448816 - DNA, 201 bp, Homo sapiens
ctttcttgctctgtgcctttcagccacatccttaggtgctaacggccatgagctccgactctccaaagtgagctccactttgggtctgaggagcccctggyagagtccacgctgcctcaggtatcatgggcgtaatgatcacccaggctccgggagatctcatggatgattactgtatgagacagaggggacttcagtctt

SEQ ID NO: 448817 - DNA, 201 bp, Homo sapiens
aggctgcagttgcagtgagctgagatcactccaccacactgtaacctgggcgacaagagtgagactctgtcttaaaaaaaaaaaaaaaaaaaaaaaaaaaraagaagaagaagaaaaagaaagaaaggccctgacaaaaggaccagagcacagagtcctgaaaacctcaagggagcagcaaacaattgccttcccctatca

SEQ ID NO: 448818 - DNA, 201 bp, Homo sapiens
gcctcaggtatcatgggcgtaatgatcacccaggctccgggagatctcatggatgattactgtatgagacagaggggacttcagtctttccagggccttgktggaatttttggctctggtgttttcgccagacaataaacttacactggaagctttgattcaccctccacagtactccagaaaggactgtcctataagttg

SEQ ID NO: 448819 - DNA, 201 bp, Homo sapiens
ccgggcacggtggctcagtcctgtaatcctagcacttggggaggccgaggcgggcagatcacctgaggtcaggggttcgaaaccagcctggccaacatggygaaaccccgtctctactaaaattacaaaaattagccaggcatggtggcatatgcctgtaatcccagctactggggaggctgaggcaggagaatcacttga

SEQ ID NO: 448820 - DNA, 201 bp, Homo sapiens
ggattccacaggctgattgggaaatgcgaattgtattctaactagtggaaagtcatgtagtccccacaccccaacacacacacacacacacacacacacawctcctccagtcctggagagttacaggatacagaagattactttagctaacatgtggtcttggactggagtagtaatagagaaggtaaaaagagatggaag

SEQ ID NO: 448821 - DNA, 201 bp, Homo sapiens
ttctacttttagttttttgaggactctccatactgtttccatattggtttccatagtggctgcactgatttgtatctctaccaacatcgttgtcaggtcascatttgctatatgaagtcttttggattatagccattttaactggggtgagatgatatctcactgtggttttgatttgcatttctctgatgattggtgatg

SEQ ID NO: 448822 - DNA, 201 bp, Homo sapiens
atcttatggtaattctacttttagttttttgaggactctccatactgtttccatattggtttccatagtggctgcactgatttgtatctctaccaacatcrttgtcaggtcagcatttgctatatgaagtcttttggattatagccattttaactggggtgagatgatatctcactgtggttttgatttgcatttctctga

SEQ ID NO: 448823 - DNA, 201 bp, Homo sapiens
gcacatgtacacctatgtaacaaacctgcacattctgcacatgtacactagaacttaaaagtataataataataaaaaaatttccaattgagaaagtaagyagattatagatgaccaggtatctctcaccaccatacaaaatctaagtagttgggacatgtatgtgataaacttcaaagttttggcattatagaagctatt

SEQ ID NO: 448824 - DNA, 201 bp, Homo sapiens
ttcatgttcattgatggacacttaggttgatttcacagcttagctattgtgaatactcctacaataaacatgagagtacagatacctcttcaatacactartttcctttcccttggatatatactcagcagtgcagttgctagatcttatggtaattctacttttagttttttgaggactctccatactgtttccatattg

SEQ ID NO: 448825 - DNA, 201 bp, Homo sapiens
gttaactggaattctactttttaaagatgtgaaagcagataatattctcctttcagagtgctacaattttaattaaaatctataactatttttaaaaaccmagaatctaacctcccctaaaaaaactaaaactgatttaaacaaatttttaatccaaaagctcctgtttgagaacatttatttcctcaaatacttcatatt

SEQ ID NO: 448826 - DNA, 201 bp, Homo sapiens
ttccaccatgaaaacgataactaatgtgaatttttatttttctgatgtgaggtaaatggatctctctattgaaattctccatgactaaagcatatgtaaayatgtgaagtgggcggatcacaaggtcaggagatcgagaccatcctggccaacatggtgaaaccccatctctactaaaaatacaaaaattagccgggcatg

SEQ ID NO: 448827 - DNA, 201 bp, Homo sapiens
tatctgtactttcatgttcattgatggacacttaggttgatttcacagcttagctattgtgaatactcctacaataaacatgagagtacagatacctcttyaatacactaatttcctttcccttggatatatactcagcagtgcagttgctagatcttatggtaattctacttttagttttttgaggactctccatactgt

SEQ ID NO: 448828 - DNA, 201 bp, Homo sapiens
agaagataaaatttaatgagttccatttgtttcatgaaaaattaaattcagtataaacggggctgtgttacaaaagtatgtttataatcatttatccaaasttcataacatatttttgctgtagaaacaatgtcacacatggaagcaggttcactaaagcttgtttattcctccaaatacctgacatgtaacagatgatgt

SEQ ID NO: 448829 - DNA, 201 bp, Homo sapiens; identical to SEQ ID NO: 156180

SEQ ID NO: 448830 - DNA, 201 bp, Homo sapiens
ggtcttaaaacagggcagtttatgtttttgtgttaagagttgattatatttcacaagactgcagggactgggcacttgtgagtctactacttctagttttyaataattgagtggcaaaatggtcaaaagcagatacagttgaatcttacatgccattctgtgattttatattgttcagcaacaattagttttcatttcttc

SEQ ID NO: 448831 - DNA, 201 bp, Homo sapiens
agctattttgcaatagattataaattattgttaactgtagtctccctactgtgctattccatactggaacttattccttctatctaactgtatttttatamccattaaccaatgcctcttcattctcacctctcccactaccctttccagcctctggtagccatcagagactacttactacctctatgagatcaatttttt

SEQ ID NO: 448832 - DNA, 201 bp, Homo sapiens
attagcccaggctgtgaatcattctttgctacacgtggagatcatctattgatcgttacaaactactaacatctgtgtttcaggagttttaagagctcccyaggtgattctaacgtgcagcagcagagtttgggagttcctggcctagacgtctttttgcagattgaatctcagaaaaaaaaaatgcctacctatgaacaa

SEQ ID NO: 448833 - DNA, 201 bp, Homo sapiens
aaaccacacacaattttgaacccattctttatacctatgtagttattactatgtagatgcatacaattcatatttatctgtattgatatgtaagagattgrgaagattaaagttgagaaagacgaaatccaaaattagtgattttgacagtcaaaataattctgagtgcacagaattgaggacaaaggtaaaagtggcagg

SEQ ID NO: 448834 - DNA, 201 bp, Homo sapiens
tatttgcaaaattgggatatgaatatctgcccagtctacacatgatgatgacttaagattatttatattaacattctttgtaaattaaatggtagaatacycttgtgtattttaggcatacacgcatatactcaccatcttctctttgagaatatgcaagttgcatccaggcatttgctgttagcttctttttacattaaa

SEQ ID NO: 448835 - DNA, 201 bp, Homo sapiens
gaagcgtttccttttgtgttacgtgtttgccttctgaattgagaaacattgttatagcaaggatgggcaaaatagacgaagagaaaggaatcgaggcaggmaatggaaggaaagtaaaacaggcaactgacttacgctgtgctgcattattttgcaaagtaaaagcatcatctctgactgattactgcagtgctcttctgc

SEQ ID NO: 448836 - DNA, 201 bp, Homo sapiens
acctcccaagtagctgggattacaggcatatgccacctcacccggctaattttgtatttttagtagagacagggtttctccatgttggtcaggctggtctygaactcgcgacctcaggtgatccgcccgccttggcttcccaaagtgctgggattacaagcgtgaaccaccgcacctggccacagtcctcaattcttaaac

SEQ ID NO: 448837 - DNA, 201 bp, Homo sapiens
gagctgggaccacaggcacgtgccaccacacccagctctctttcttggtttttcatcatttcatgtatctatcaaagcccagttcacctcctcccccaaamacacacacacacacacacacacacacacacacaattaagttgctgcaaattcaaaagcttagagagaataagcttcttggtggtgaaactacaactctca

SEQ ID NO: 448838 - DNA, 201 bp, Homo sapiens
aatagggaacttacatattttccacacaaaatctttggaaattttagaagcgtttccttttgtgttacgtgtttgccttctgaattgagaaacattgttakagcaaggatgggcaaaatagacgaagagaaaggaatcgaggcaggcaatggaaggaaagtaaaacaggcaactgacttacgctgtgctgcattattttgc

SEQ ID NO: 448839 - DNA, 201 bp, Homo sapiens
gatgaatttggttgtttagtgtgatatacatgctgtaatttgatgacttcctttctctctagctgttgtgcttatgctgctagctagagcttagaacttgygctgtggcttagaaacaggatgtcttcagtgtcagcttacatgcttgtcacttgggagttaaaaatctctaaagttactatattgtgaaatttaagtaaa

SEQ ID NO: 448840 - DNA, 201 bp, Homo sapiens
tgggatatgtagctgatctcctgctactgtccctatagtccaccgaaaagttaaaaggcttcagttctgatcatcttctccaggagaatttttatagccartgatgtcaagcttacattttaactttgttttcatttgtttgttttttaatatacttggttattaatgtcatagttcatcaatagcctaccaggtacaaaa

SEQ ID NO: 448841 - DNA, 201 bp, Homo sapiens
aactcttttaagtgataagccttctccctcaggaaatcgcaacttcagcttttaggaaacagctctgtctactcgtccaccttcatccaggaatgaactgrgcaagcagtagtttttcaaagaaaacaaatctcctacatagatttactctatgtatttttgccagctccttagtaactgttcagttttgatatcactaaa

SEQ ID NO: 448842 - DNA, 201 bp, Homo sapiens
taatatagttactgtaaatgacagtgaatgcaattctgagcttcccagtagtcaaggcaaaaggtgcaacagaatatattaggtagttctctatggatgtwaaaattaattttataaatttgtcaggagatataaactgttttttcttataactgaattgtgaaaatttcaaatatggatctttttacaagttatattaat

SEQ ID NO: 448843 - DNA, 201 bp, Homo sapiens
ggagcgcgagcgctattgtgaacattgcatgtgggggatctaggttccgagttccttatgagatctaatgcctgaggatctgtcactgtctcccatcaccrctagatgggaccgtctagtttcagaaaacaagctcaggactcccactgattctacattatggtgagttgtataattattttattatatattgcaatgtaa

SEQ ID NO: 448844 - DNA, 201 bp, Homo sapiens
tttgcttttcttgcattgctcacagtaaagcgatttgagtggaatgttaagtttgtttcataaacacaaaatggaagggagaccaagcatgttggaaattrtaatgacagaatttatttgtacattcactaaaccctaaaagcctcctcaaataatcaaatttgccaagctattttcagtgttatcctagcattgttacaa

SEQ ID NO: 448845 - DNA, 201 bp, Homo sapiens
cacacttttaaaccactagatcttgtgagaattcactcactatcatgagaacagcaagggaggaatcagcctctgtgatcaaatcaccacccaccaagccscttctccagttcaacatgagatttgggcagggacacaaatccaaaccgtatcactgaataatattcccaattgttcattattgtacttaaaggaaatggc

SEQ ID NO: 448846 - DNA, 201 bp, Homo sapiens
caggagttcaagacagcatggccaacgtggtgaaaccctgtctctactaaaattacaaaaaattagctgggcgtggtggagggcgcctgtaatcccagctrcctgggaggttgaggcaggagaatcgcttgaacccaggaggtggaggttgcagtgcgccgagatcacaccattgtactccagcctgggcaacaagagtga

SEQ ID NO: 448847 - DNA, 201 bp, Homo sapiens
gcctctctcccatcgagaattttcttcctctgcactatgattacctacagtttgcctactatcgaggtaaagcgtggatcatccgtgaagacttcttgggrggttgtggttcatcattacagacatcacatttttgtaattgagttttctgacttcttcagtttattatgaaagcaataggaatttatgcatttcttctct

SEQ ID NO: 448848 - DNA, 201 bp, Homo sapiens
gaatgacatgatactgacctggaagaaacattgcttctgggatatgtagctgatctcctgctactgtccctatagtccaccgaaaagttaaaaggcttcarttctgatcatcttctccaggagaatttttatagccaatgatgtcaagcttacattttaactttgttttcatttgtttgttttttaatatacttggttatt

SEQ ID NO: 448849 - DNA, 201 bp, Homo sapiens
tttctatttttctttccctgtagttttatatctagaaaactactactttggcaagggttgaggactgagtcacggacgtgcccttactcacgtcttctgtratttgaaggcagaatctgaagcaaattccaacacagctgtgagaggcagcccgtttttgttcttaaaatgctaactacacacatttgcaaacctgcaaag

SEQ ID NO: 448850 - DNA, 201 bp, Homo sapiens
aattttgaaagagtttttatgaaggccaataaattaatagcatgatgaataaatactcctttaagaatctcaactgcctcaagaaaactacaattcttaaytttccatagagatgtcatgaaagcgaaatgtatttgtcacatatcaacaaccactcatcaacctgagaataaggctaaagctccagaacttttttttctt

SEQ ID NO: 448851 - DNA, 201 bp, Homo sapiens
ttaaagattcctccaggaggggtctttggaataaaattccccttggcttgcagccacgatgcattcctttgcatgagctgaaatgagtgtttggaaataayttttgaagtaaatcttcccactcctataaaagcaagagtttatatttcacagaagaacgtggcgtatttataccaaaaaggtacaagtggaaaggctttt

SEQ ID NO: 448852 - DNA, 201 bp, Homo sapiens
ttgattccatgaaactattttctccatatgtattgacaggttattttataaattcacacacatacatctgtgtgtttgtgtttgtgtgtatctatgtagcygagggtgggttttaagtcttatttatagataggtgacaattttgaaagagtttttatgaaggccaataaattaatagcatgatgaataaatactccttta

SEQ ID NO: 448853 - DNA, 201 bp, Homo sapiens
tctcacgggtgacctgcactctgctgttctttcttccacctgtgtaaagtacaagtttaaagagaataagaagaagctgagagttgcgaattacccatagsaagtcagcactctttccactcatcactctgcagcctcatcatctccattcatcagtaggctccacatggcttcctggaggttagcaactctggttcctta

SEQ ID NO: 448854 - DNA, 201 bp, Homo sapiens
agttctatgactgaagtgaccagcaaacctgttacataaacaagacatgcacaaactcacctctactttgaaatagtggtgactaaaatcccaagtgtctrtttgtgaatgtttgttttaatcgaagaggtagcttctaattatacttctgctgctaatattctaggcaggttctttatccacctgtaaaatgaaacagtg

SEQ ID NO: 448855 - DNA, 201 bp, Homo sapiens
tttaagcccctcagtttttcacatatcgtggaacaaatatgcttcagaacacacattgggaaatgcacttaaaggaggtgaaccagataactttgattccrtgaaactattttctccatatgtattgacaggttattttataaattcacacacatacatctgtgtgtttgtgtttgtgtgtatctatgtagccgagggtgg

SEQ ID NO: 448856 - DNA, 201 bp, Homo sapiens
atgatttaattacatcttaattgattttcttctctcgtggaggattttcaagctattagcatttggcagccaggaccattccacttactctctggacctgkaaaagatatttgaaaactgagcctcaggcaaagccagggttgttaaaatcaccatttccctaaaggatgttaaaagtcctaagggaaaatatttacaagg

SEQ ID NO: 448857 - DNA, 201 bp, Homo sapiens
acaataaagaaagctgtttaactttgtgtaacccggcatttcccaatttatttaagcccctcagtttttcacatatcgtggaacaaatatgcttcagaacwcacattgggaaatgcacttaaaggaggtgaaccagataactttgattccatgaaactattttctccatatgtattgacaggttattttataaattcacac

SEQ ID NO: 448858 - DNA, 201 bp, Homo sapiens
taaatacttctcataaatcaactatttattgtccatattttgccaccaaatttttttttctcgctagtagacagcaaatgcccagagagtaattttcttcrggaaaaatatcaagaaaacattacacctacttttttcctacttaaaaaaaaataagatcaaagctaacatttactgatactctactcacaccaaattctt

SEQ ID NO: 448859 - DNA, 201 bp, Homo sapiens
agtagagaggattaatttgacgcattcatttaagaactagagctgtgtcttcctgcaaaatggaagagtttgtgaatatgattgtcgctttcaaatatctwaaaagctattgcaggaaaaaggaattgcattactcttctttttgttcttccaaagtgcaaaatcaagagcaatagtggaagttatagagagatagattat

SEQ ID NO: 448860 - DNA, 201 bp, Homo sapiens
agcagagccaaaactagaattcctctcttctgatgtctggtcttacacattccctcttaccaaggctccctccttcctcacaagtctagtaaggaagtttytgtggctctgaaggcaccagccggggagtatggaaagagtcatacagagcagaatgataaagaggcttccatgctaaggccagggaattagagaagccac

SEQ ID NO: 448861 - DNA, 201 bp, Homo sapiens
gcatctatagaagcatagatacttctagagatctgaatttctgtaatcattttgaagccccatgtcttaagacattgacaagtagagaggattaatttgaygcattcatttaagaactagagctgtgtcttcctgcaaaatggaagagtttgtgaatatgattgtcgctttcaaatatcttaaaagctattgcaggaaaaa

SEQ ID NO: 448862 - DNA, 201 bp, Homo sapiens
atagaacgctggtattggcatgaagggaaaaccgtgggttggaatcagttattcttcagtgagtaaacagagccaagggggctctgagtaaggcttgttakacactgaagcatgcttttacattttttcacaatttagtttctaaagtggattaagcagattatactatttaagcctttaattcttagaatttatagaaac

SEQ ID NO: 448863 - DNA, 201 bp, Homo sapiens
ttcctaatattcctcaaaaaactcatacatacacaaacaaatgatcatacagatatagaactgtagagaattgacttagccacaatatttatgaggactcraaagttttagtaaattaattggaatcaatgataagacatgccttccagaaaaaaacaaaacctgacatctaagtctgcatctatagaagcatagatactt

SEQ ID NO: 448864 - DNA, 201 bp, Homo sapiens
ggggcaatggagtggcttgctgaagtttcaaaaatgaaagacagacccaggtcatctgtcttcttactattaaaatgtgcaaaattaatggtaatagaaaygataatgagcatccagacatctatggatatagggataaagggacagtcatcagcatccagacatctgtggatatagggataaagggatatgatttagtct

SEQ ID NO: 448865 - DNA, 201 bp, Homo sapiens
aaaagatgaccaattttattataaagcacagtctctgtcatgaaggacaaataaaatctaatggacttgtgttttcctaatattcctcaaaaaactcatayatacacaaacaaatgatcatacagatatagaactgtagagaattgacttagccacaatatttatgaggactcaaaagttttagtaaattaattggaatca

SEQ ID NO: 448866 - DNA, 201 bp, Homo sapiens
ctaagacttattcctgatttcatatccagtgctgttcagatacctggtgtaggtttcctgaaacctacagtctctgttttgccagaaacctggtgtcgaaygccttagcctttctgaaggtggcagccaccacagataatggaagaaactttgaactaatttgatagcttttcaccatatttcagcagtagaccaactatg

SEQ ID NO: 448867 - DNA, 201 bp, Homo sapiens
tgtgctaagacttattcctgatttcatatccagtgctgttcagatacctggtgtaggtttcctgaaacctacagtctctgttttgccagaaacctggtgtygaatgccttagcctttctgaaggtggcagccaccacagataatggaagaaactttgaactaatttgatagcttttcaccatatttcagcagtagaccaac

SEQ ID NO: 448868 - DNA, 201 bp, Homo sapiens
aagcctttggtcatttccagagagctaaagtcacaaatgttacatatgtaaattttaagaatttactgtttattatatggaatattatttgtgagatgctmtttaatgtttactataagaaaaataaatcaatggtaaaatttgtttctcagttattgggagaagtctggttagtcatttgtaaccaagatactctcaata

SEQ ID NO: 448869 - DNA, 201 bp, Homo sapiens
aatacttgaaatcatgtctttccttttatctgtgactgtttctgctttctctgctgagcctcaatttatcttccctcttattcatgtttaatgctgacctytgtagacacgttgatggcctccctttaaaatcctttggacagacctaggctgactctaatgctgcaactcctttgtctttcagttggtgagtatgtgaaa

SEQ ID NO: 448870 - DNA, 201 bp, Homo sapiens; identical to SEQ ID NO: 156176

SEQ ID NO: 448871 - DNA, 201 bp, Homo sapiens; identical to SEQ ID NO: 156181

SEQ ID NO: 448872 - DNA, 201 bp, Homo sapiens
ggatttgttttctcgcaaatcataagaaatagtattgaatcatttatgaaacgtatttgaaagagggcaaggaaacctaaaagattattattacttattamtgttattacattaagtatttcaatattattatatgcaaactagctgaggacacttagctaggaggagaccatgatctcatcgttttggaagcccgtgggc

SEQ ID NO: 448873 - DNA, 201 bp, Homo sapiens
atgcaaactagctgaggacacttagctaggaggagaccatgatctcatcgttttggaagcccgtgggcagatgtcatagtctccacctgtggagctgcagmggtatgaattaagaccaatgggtagaagccctggagggaaaatttgggctccacacaaggaataactttcaaatagtcaccacagtttggcagaattgtc

SEQ ID NO: 448874 - DNA, 201 bp, Homo sapiens
cttaattctgtaagtgatgttttagtgacaaaattactgcattttttttttactcgattcaaaacagaattattggatcagatatggaggacgacaggatragaatcggtaagtccattcagaatgcaaactggttttttatgaggagaaatacttagtgtcataacctatcatagagaaatgtagctctatgaaataggc

SEQ ID NO: 448875 - DNA, 201 bp, Homo sapiens
cttccctccaaatacctaaaacagggggtggttcagtgtatgtttgttgaatgaataataacttggttccatgcatatgaaatgttgttgaggaagatttytgcatggtggcaggaggttttctcactttagttgtttggcttcctggctggtcagttggaagagaacgtttcaggactgttgactgcctgacttctcact

SEQ ID NO: 448876 - DNA, 201 bp, Homo sapiens
ctcacacatttttcgtggctaaccctgagcacatggaaatgcagcagaacattgagaattacagggcgacagctggtgttgaagcattgcagttggtagayagagaagccaagccacacatggtaagctctgtgggcccctgccctcaccacagggagctaagtgctcctaagtttcatctgagtcacagcaaatttctat

SEQ ID NO: 448877 - DNA, 201 bp, Homo sapiens
agaatttgcatgaagctgagatattataactttataagagaaggtaactgagaaaagatgaccaattttattataaagcacagtctctgtcatgaaggacraataaaatctaatggacttgtgttttcctaatattcctcaaaaaactcatacatacacaaacaaatgatcatacagatatagaactgtagagaattgact

SEQ ID NO: 448878 - DNA, 201 bp, Homo sapiens
tttcagaaggcatttgacagtatcttttatattatgacttcatgaccagctagataaatgtattatcattggtattgtgtaggtttgtgaaacaatttacytggtatcaagtaatgaattggtattaagctggaaggaggtcactagtataggtagtaagtttcaggctaatactcttcattcttctaatgtaatagaatt

SEQ ID NO: 448879 - DNA, 201 bp, Homo sapiens
tacatgatgatacagttattgatgtcacaggtgaactaacaggacctgcactacctatagctatgactggtctgcttcagttcgcagattaggaaattgckacagattaatatcctaatttcagaaggcatttgacagtatcttttatattatgacttcatgaccagctagataaatgtattatcattggtattgtgtagg

SEQ ID NO: 448880 - DNA, 201 bp, Homo sapiens
aaactgaagttttagaaattaaatataatgtcactttttggcagaagaaaattaatgtgggaaatttttagaagttttatccaaacgaacacaaacttggmtaagtactgaggagactgctgaatgtaagaccctatgttacgcacagcttgtagttattcccgattgtaagatgcactattaaaagttgtttgtggacaa

SEQ ID NO: 448881 - DNA, 201 bp, Homo sapiens
gcaagtaaggaggatgaagagtggaggaagaaggtgttttagttttgtttttaattccagttcaatcttactttgtatattcctctatagtcagaaacaayggaatgtcctagagccctttagtgaagaatgaagcaagataagaaattagtaaatgagtatagtgtacactatctgggtgatggaatagcctggaagccc

SEQ ID NO: 448882 - DNA, 201 bp, Homo sapiens
cacacacacatgcccacataaacacatatgcacccacctgtctctctggctttccgactcctccacctacctcttaccttccatatgtagtcacgtagtcygggagtacctatgttatgtagcaaccaaggactttaggaaatttttcaaatattcttcctgaagctagcagtgaaaaaccagccagctcattttatgcag

SEQ ID NO: 448883 - DNA, 201 bp, Homo sapiens
cctttcaatggaatgtgtgttttaatggttgtcagttttccctccattgggattcctatggcgttaattcccaaacacagaacggtatttaaatgctctcytaaggtccagaggaaaaaaagtgaaggagctattctcaggcacttgtggggcaagtaaggaggatgaagagtggaggaagaaggtgttttagttttgttt

SEQ ID NO: 448884 - DNA, 201 bp, Homo sapiens
ataactggatagaataggtttctgaccaataggtgtaaaaaaaaagagtttttatttctcttttaggacaatttggcttgaaaatgttaagaaagaaaaasagcacttttgcttcacttctcagcctgaattttccatgcccatggtggtttctttttccaaactgttccttaacatttactagcatctgaacttccattc

SEQ ID NO: 448885 - DNA, 201 bp, Homo sapiens
tgtagtattatctgttgggtggtttctctgtccagagctaagtggcggagatttagttaggtatcatagtttaaaactacaggcctcagagccaaactgcytgtgtttgcattacattatctgttatttccaacccatttgtttggtgaagttagttgtacttctcagtgcctcagttttgtcatatgtaagtgagaatga

SEQ ID NO: 448886 - DNA, 201 bp, Homo sapiens
gagtaagaaatcatcttcaggacatggcagaaatgaactctaaaaggtttagtactatttagattttgtagtatagtaggatgtattgataaacacaaacwgggtaacctgtttttaactctgaagtttgtggttgaacctgctttcctgtcatctagctgccagtctttgtaattctggacccttccttgagccattttt

SEQ ID NO: 448887 - DNA, 201 bp, Homo sapiens
ggtggaattcgctggctgtgaaaccctgttcttgcccttatggatagaacacagagataaaatgccacaagatgtgtttacatcatctttgcttcatggtrtagtattatctgttgggtggtttctctgtccagagctaagtggcggagatttagttaggtatcatagtttaaaactacaggcctcagagccaaactgcct

SEQ ID NO: 448888 - DNA, 201 bp, Homo sapiens
aaactggcaggtgaatgaagagtaagaaatcatcttcaggacatggcagaaatgaactctaaaaggtttagtactatttagattttgtagtatagtaggakgtattgataaacacaaacagggtaacctgtttttaactctgaagtttgtggttgaacctgctttcctgtcatctagctgccagtctttgtaattctggac

SEQ ID NO: 448889 - DNA, 201 bp, Homo sapiens
aaatgtctttctttacttctttttctctaggatttaacaatgtttgtgaaacgtcataagctggagtctgagctgataaaatcagctgcagaaggtctggrgttttcatacactgaaccggtaagaggaaagaggaaacgtttattaaaataatgattcagtggaatcctttttatgtttttattacctgcctccattttt

SEQ ID NO: 448890 - DNA, 201 bp, Homo sapiens
ttccaacaaaggaagtctgggtttatttcaaaacgcaatgcttatacataataatagtgccaggcttattattaatcagtaaatattcactggacacctaktaagtccacgacttacaagtgtggatattctacatttagtgataaagcagtgggtaatgtatgggccacagttttagttattagagctagttcttaagag

SEQ ID NO: 448891 - DNA, 201 bp, Homo sapiens
actactgtttctattacctcttttataccacgtgactttgtgatttttaaagtgatatgaatgcagttaaaatggtacaggagatatgatactctgatacsagactgttacaatagtgatttaagaatgatatttactttctctggaataatttatgttcatggtagataatttgcaaaatatagagaagcaaagtataga

SEQ ID NO: 448892 - DNA, 201 bp, Homo sapiens
taaatttatttttaaaggaatatagaaaagctaaacattttatgtaattatatatttttatacagctatttaactgaactcttagcctgatagttcagcamattatctttttttctttttttttcttttttttttgagacggagtttaactcttgttgctcagtctggagtgcagtggcacgaccttggctcactgcaacc

SEQ ID NO: 448893 - DNA, 201 bp, Homo sapiens
atatgtaactaacctgcacattgtgcacatgtaccctaaaacttaaagtataataataaaaaataaataaataaaagaaaaaaaaagaagagagacaggtrtaaagcaacttcttataagcacaccaagaaaagtagacctgaaacttcaagcagtagggacccattgaagagctgtgagtaggaaagagatataatcaga

SEQ ID NO: 448894 - DNA, 201 bp, Homo sapiens
aacttccaatacaatctcattgtttttattatttattcatttaattacttatttatttgagacagggtctcactctcttgccgaggctggagtgaagtggmacaattatagctcactgcagccttgacctccctgggctcaggtgattctcccacctcagcctccagggttgcgtgccatcacgcctagctaatttttgca

SEQ ID NO: 448895 - DNA, 201 bp, Homo sapiens
tttccaaatgatcaaccaatttttctaacatcatttattgattttatgtaatattctcattaattgacattgcctcatttttcctatattaagttcttttrtagtctaagatctctttgggggctaatttgttccactgattattttctcccattttctctcactaacagattattttagttattataaatttactatagc

SEQ ID NO: 448896 - DNA, 201 bp, Homo sapiens
ccacaccagaaaatgcacgtttccttcctgttgtgttttggggtccctctgcaaaatcaccaagatccaagccaaactcagactaaacagagaaccttttraaaaaaaggcagttgtggtaaattaaattgcacagctatgagatcaaatgattttatcatcattctcaaaagaacccactcagcgcagccatgaatgaac

SEQ ID NO: 448897 - DNA, 201 bp, Homo sapiens
attgatctttgtatttctctgagtgtgatttggaaatatttgccttcattttggtcatttttttttctctttagcttaaccagctcgaaaaagcagtggargcagctcacacatttttcgtggctaaccctgagcacatggaaatgcagcagaacattgagaattacagggcgacagctggtgttgaagcattgcagttgg

SEQ ID NO: 448898 - DNA, 201 bp, Homo sapiens
cccacaccagaaaatgcacgtttccttcctgttgtgttttggggtccctctgcaaaatcaccaagatccaagccaaactcagactaaacagagaacctttwgaaaaaaaggcagttgtggtaaattaaattgcacagctatgagatcaaatgattttatcatcattctcaaaagaacccactcagcgcagccatgaatgaa

SEQ ID NO: 448899 - DNA, 201 bp, Homo sapiens
atcccacaggttaagggcttagcccacaactggcatttcagatgccaattgcaagtataagttgttacctatacttctgaccaacccctcattgaccagcyacaaaccagtgttcccatgatcctgactttgggttaggttaatttgctagagcatcccacagaactcaggaaactcttgtgtttactggtttattataaa

SEQ ID NO: 448900 - DNA, 201 bp, Homo sapiens
ccctaaaggatacctttctgtcactcctattttgctgctatttgtatccgctttgaaaaaatatttccattcagattttgagttctcggtgggtatctttygcctttaccttttgcttgtcacttggaattaaaaggaatgtgtattagaaagtaaatagaaatgcaaatggtaagttgagtaggagaaaacagttgaagg

SEQ ID NO: 448901 - DNA, 201 bp, Homo sapiens
ataagtgatttataagatttatcttataaaatttttataaacaatgtaattcagacatgagattatactatcccattcatcttaacctttcttgatttgaraaaaattatataaacattttaagcataaatttgacttaaaattaaattaaaaagttgtatattttattgttatcatatgaaaaatctaactcatgctatt

SEQ ID NO: 448902 - DNA, 201 bp, Homo sapiens
aatcgcccggaagctgaaaacaagcagattgtttatggctcattttgaggaagagggcttttatcagggctgcgtggcaatggaatgatactcaaggatcrcagcacttcttatctgtggaactgaagaaatgggatgagaggttggaaatgacctcttgggtttcctgccagctttgctgtgaatctaggaaataacagg

SEQ ID NO: 448903 - DNA, 201 bp, Homo sapiens
tgtctcaaaaaaaaggaaaagaaaaagaaaaaagcactcaaatttaattctctcccggctatgccaacatgatcagatgttgtgtggccaaaactcttacyatggcactcaaggtccttcatacactaaagcctggcttactctgtagcctcagtgccctctgctatgcccgtatcttgttatccaactccaatcaaatac

SEQ ID NO: 448904 - DNA, 201 bp, Homo sapiens
tggcaaaagggagagaaaaaaggtttgatgttaatctgaaatgtctctgagaggccatacatgatttgagaatggattaaatatcaatgggtgactagggrattcttatactcagttaattttagaaagaacttttatttagagctgcctttatgcctgtgatggggcgggatacaccacaattacacattttcagaaggg

SEQ ID NO: 448905 - DNA, 201 bp, Homo sapiens
ggggttttaaaaagtgatgtagttctttatatagactaaacattacttgaaatcacatgttgaaagccttttttttttttaatttttgacatcaccattcycaacatgtagcctccaaaattatcacagaaaaggataaggaaagattttagaaaatattaaaaaaaaaaacaaaaaacacaggcagggcctaaaagtgga

SEQ ID NO: 448906 - DNA, 201 bp, Homo sapiens
cagatcaagtcttcctctcaagttcccatcttaggctgggctatggagaagaattttaaattgccaatctgtccccttctggttttgtttgtttaaatggygcaatcttttggggaaaatacttggtctttcagatttcttctctcttctcaatgcccctttccaacacaatgcctggatatttgagaggctttgtgtgac

SEQ ID NO: 448907 - DNA, 201 bp, Homo sapiens
ctaagtgtcagaaatattcacatgtattttattccagctttttaaaaaaatatataacttgaaaaagcattcactacgaattatagtacatactcttaatwcatctgtagtttatttttagcaggatatgaggctaagatcaaaatgatgttttccaaatgatcaaccaatttttctaacatcatttattgattttatgta

SEQ ID NO: 448908 - DNA, 201 bp, Homo sapiens
ccacccgcctcagcctcccaaagtgctgggattacaggcgtgagccaccgtgcgcggccaataggtggtaaatattttttgagtctaaaatatgctcagtragaactgtgaaaaatatgtccataaaatgtttatttacctttctgtacagattaatattttgttttcagtaagcattttactcagcatattttttagtgc

SEQ ID NO: 448909 - DNA, 201 bp, Homo sapiens
tccatccttatctaagtgtcagaaatattcacatgtattttattccagctttttaaaaaaatatataacttgaaaaagcattcactacgaattatagtacrtactcttaatacatctgtagtttatttttagcaggatatgaggctaagatcaaaatgatgttttccaaatgatcaaccaatttttctaacatcatttatt

SEQ ID NO: 448910 - DNA, 201 bp, Homo sapiens
tataaattagaaatatctgcatatattttaatcttgttgttttatgtttattttagagcatttagtattttaattcatttttagtttattttattgtgctrtctttcatcacttctcagcataggaaatccatccttatctaagtgtcagaaatattcacatgtattttattccagctttttaaaaaaatatataacttga

SEQ ID NO: 448911 - DNA, 201 bp, Homo sapiens
ggatcacttgaggccaggaggttgaggctgcaatgaactgtgatcacaccattgcactacagcctgggtggcagcgagaccctgtctccaaaaaaaaaaawaataataatttttacattaaatctcaggaaaatataacacagaaaatcttctctttacaatcatcaagtaggaacatgtttttcctcacttcttagcctc

SEQ ID NO: 448912 - DNA, 201 bp, Homo sapiens
cctcaccacccgggccagccgcttccctctgtgtatcgacccccagcagcaggccctcaactggatcaagagaaaagaggagaagaacaatctgcgggtayggtggctcctcccagggcgtcttctgccccctattcctgttctctggagaatgcccctcccgcctcctgtacgtggcagtccctagcctcagcgaggctg

SEQ ID NO: 448913 - DNA, 201 bp, Homo sapiens
catttctcactgggtgctgcaaggagtatgcctcaccctgaattctgattaacctttgggtgaagaaaactgcttaatgaattcggagcctggggttgtcrgagtgatcgggtctgctgtcatttcttggggcctctcaagaggcaggagggggactgacactgatttttcatttgaaatcagccacttaaatctctttcc

SEQ ID NO: 448914 - DNA, 201 bp, Homo sapiens
gcgtgatgtccgacccgaatttcctgcggtctctgatggagattgattttgattcgattacccagagccaagtgaaaaacatcaaaggtgagtgtagccaygtgtgggaatcgccagggtggatctcggtctggcatctcaggctctgggacagggatggagggcaaggaggcttgtcgtgggcaggccctccccttctgg

SEQ ID NO: 448915 - DNA, 201 bp, Homo sapiens
gccgagacgaccctggcagaggtcatgcccatcctggaggccgccaagctggaactgcagaagctggacaagtcggacgtgactgagattaggtaatgcayctgagccaccattctgggcttccattccacctctgcaagccagtagtctccatgatcgtggcaaccaggagcttacaaaggagccgatgccacatgctgc

SEQ ID NO: 448916 - DNA, 201 bp, Homo sapiens
tgaagtgtaagcctgatgatattcactgagtctgaaatcacaccagattcagctatttttccacagtccaaaacctttctttttataaactaaaaaaaaaraaaaaacaaaaaaaccagaaatatatgaagactaatatattaaatagggaggcattagaggatagtggtttagcacatggactctagaaccagattgctg

SEQ ID NO: 448917 - DNA, 201 bp, Homo sapiens
tggatcctctgaagcctgtaagttgtatatgttgtcattaagccaaacacgtattgattggcagagtcctgctgagagtgtaaatgcccagagcctccagrcctggggggttgcctcgggtcgggcagcttcagggtgtcaggctaccccggagacctcaggcctgggcagtgggcaccgggtaccggccgtggacgagag

SEQ ID NO: 448918 - DNA, 201 bp, Homo sapiens
cctaccctgcagccgaggagaagaagaaactggcagaggaaaaggccatggagatagaggagcagaacaaagtcattgccatggagaaggccgaggccgaracgaccctggcagaggtcatgcccatcctggaggccgccaagctggaactgcagaagctggacaagtcggacgtgactgagattaggtaatgcacctgag

SEQ ID NO: 448919 - DNA, 201 bp, Homo sapiens
cttcgtgaacaaaagtgcaaataacctgcacattgtcctgggcatgtcgccagtgggggacaccctgaggacctggtgcagaaacttcccaggtacccgcrgtggagcctgtgaacccatttcccctgctttggcagagtgtgtggctgagggtctgtccacacctctccaggttcccccagcaaagcaaaacaagacacg

SEQ ID NO: 448920 - DNA, 201 bp, Homo sapiens
cagacccacgccctctgcactctcctccagcgtccccaccccggagcccgcagggaagggaggctggtggtggtgacgcccatgtgctctgtgtctgcatygcaggtgtttgagatcctgctgagccgaggctactcggagaacagtttccgggaagacctgaagagcctctatttgaaacttgggattgagaacaaagcg

SEQ ID NO: 448921 - DNA, 201 bp, Homo sapiens
cctgttccgcgatgttgatgaatacatcgatcctgtgattgacaacgtcttagaaaaaaatataaaagtctcccaaggacggcagtttattatcctgggaracaaggaagtggactatgattcaaatttcagactgtacctgaacaccaagctggccaatcccagatattccccatccgtgtttgggaaagctatggtgat

SEQ ID NO: 448922 - DNA, 201 bp, Homo sapiens
ccactatgcctggctaattttttgtatttttagtagagacggggtttcactatgttggccagactggtctcgaactcctgacctcgcgatccgcccacctyggcctcccaaagtgctgggattacagttttttatgtaccatttcagtcaaacctctgggccaactagggtgctctgtctcagatactgggtagaaaaccc

SEQ ID NO: 448923 - DNA, 201 bp, Homo sapiens
agatcatagcatgatgttttcatagagtatcgaggtgggtgttttggtttgttttattttttcttgtttttggcttgatattactatattttaactgaatrgccagagcatctaagtacaggtgttctttggcttaggatagggttacatcctgataaaataatcataagtcaaaaatattgtcagttgaaaatacattta

SEQ ID NO: 448924 - DNA, 201 bp, Homo sapiens
gaatctctcagttctagacccctttctaggggctggagagcttcattcctcaggctggcttccttgcagcagtttctggcctcacattctgtacacctcarttgtccggagaaaggcagagtgtgtttctagcattctcagctggagccctgagattcactatgattggaccacccagggtcaagagcccacccctgaaga

SEQ ID NO: 448925 - DNA, 201 bp, Homo sapiens
ttgagctcaggagttggaaaccagcctggccaacatggtaaaaccctgtctctccaaaaaatacaaaaattagctgggtatggtggtgtgcacctgtagtyccagctactcaggaggctgaggtggaaggattgcttgagcctgggagatggaggttgcagtgagccaagattgcgccactacactccagcctgggcaaca

SEQ ID NO: 448926 - DNA, 201 bp, Homo sapiens
tccattgagtccatcttgggagtcgacaccatgttttctctgtgttaaatttgttgggttatttagtgatgcttagtctttttttttaaatcacaagtaawacctgcttattaattataaaaaacaaaaacaatgcagaagtgcataaggtaaaaatgaacattcctccatcttctttgtcctcacacccattctccaggt

SEQ ID NO: 448927 - DNA, 201 bp, Homo sapiens
cttagcattctggggagcagcgacccactctgcgtccaggagcacatgatcaaggtcagccctctgggtgtgcaggggctccccgtgtaagccttagaacygccttcggtcctccctggttccctttgccatgaggttcaacccagagggttaagactgaaatgctgctggagttggttttttggtttgttttttgagaca

SEQ ID NO: 448928 - DNA, 201 bp, Homo sapiens
ggccgccaagcaaggaggcaggtgagcagccctcacatctgccttcctgaagataaggcttagggatgtttaggcattaggggagtggggtggtcgaagtygagggggaaggtggttggtggtgggaaaaaggaagtaacaggttcattctgagcaagtgtagctggggttcacagcatttcacaggacataggcacagaa

SEQ ID NO: 448929 - DNA, 201 bp, Homo sapiens
ctgtctgaaccaacatgttgggtcttatgctcccatcgctctgggacctgggatcccaggatttatgactggaatggactctgtgggggtggactatgtgrgctgaaccagatattttcctgtgaaccaggtaacccagttagccaagatgttggatgcgttgctagaaggagaaatagaagaccttgacctgctggagtg

SEQ ID NO: 448930 - DNA, 201 bp, Homo sapiens
ttctaacataacagtgaggctgaaagaattttttctgtgaacatctgccggcatgccatctagatccctcctttctcgccttgctgcacttgctctgccaygcgtgtaaacagctttccctccctccctgcttccgcccttctcgtttttagatgcgtttcagagtcaattgcaacatcactgctctccccgctaaatgct

SEQ ID NO: 448931 - DNA, 201 bp, Homo sapiens
tcctggctccaaaggagcattgggccttttccccaaatatctaccctgccctttccgcgctctccgcagctgatctttctccctgcttcaacaggaacaayggaagctgtctgataggaatctctccttccagctgaaaagcctatagctcctgtctctgactttctccttttacagtggaagaggccacccccactgcac

SEQ ID NO: 448932 - DNA, 201 bp, Homo sapiens
cacgacacagttctataatgttgtttctatgtaaagtgtctgtaaaactgtcaaccacaggattcttttaaaaaagaaagatcccagcaggtgcaaagtggcgtttgcagttgcttttctcgaagatttaaaaaactatagtaagtgaccttgatcagccccatccagcagacatcaaacggaactcacatatgtaattta

SEQ ID NO: 448933 - DNA, 201 bp, Homo sapiens
ccacgctcacaaccactttaccgtgttgttatcttgtctaccctggggccctgcaaagatccgtgctgacttcgtctggcctaatggcttacagggacctmctttctttcccagggacctatttcatcgattgcttgtttgtttcagcacctgaccatattcattattgtattgctgtgttattcattgagccccagcctc

SEQ ID NO: 448934 - DNA, 201 bp, Homo sapiens
tgttccaggtggggatgagccccaccctgtccatgggctcactttctcctgagcatgggccaagcgggagctgagcatcgcgcgggtgcccgggagcctawcacctggggctctgtctgagggcttgaaatacgggcttgtgtctggtccggtggttcccacatccagcatgcttgggagtgacgttaggaaattgttaga

SEQ ID NO: 448935 - DNA, 201 bp, Homo sapiens
ctcatttgccctcatcttgggggcctgaatggccctgtgggcatcccatttccagacacctgctcacagcttcagccctgcaggccctcgagcatacgctygacggtgatctctggcactgtcatgtctgcatcacaaatcctgctctccacctactctgcctctgagactcgggccacatgtgtttctgtttggcctcat

SEQ ID NO: 448936 - DNA, 201 bp, Homo sapiens
tctggaacctgagagggggacccggccctgcccttagggacgctcccgcccaggagtgcggtttgtgttgggacctggcttctttcgtttgcttgcagcaktagctccagggactgtcttttggttgagctcgtttttctggagctctctttcaggccagatcctggccacatcccggggttgtgacccacgtgccttggt

SEQ ID NO: 448937 - DNA, 201 bp, Homo sapiens
gccttcctttttttccctcacactatttgcctttattttaatctcatttttttttttaaactttctatcatatcaagtattctgtcgagcccctttatttyctggaggctattctccaaagccctctatctcttaggatatggactgctcgtttcataggtgtggccctgggacttgctttcactctagcttagtattaat

SEQ ID NO: 448938 - DNA, 201 bp, Homo sapiens
ttgtcctgacatgtctttcttcctaggccgtggggaagattttctctggcctggcacagtgcggggcttggggctgctttgatgagtttaatcgaatcgaygcttctgtgctctccgtgatctcctcccagatccagacgatccgaaatgctctgatccatcagttaaccacgttccaggtgagacacatgaagcccccgg

SEQ ID NO: 448939 - DNA, 201 bp, Homo sapiens
tcatggctcattgcagcctccacctccccgactcaagtgatctgccacctcagctgcctgagtggctgggaccacaggtgcacaccaccatgcctggctartttttatatattttttggagagatgaggtctcactgtgttacctgggctggtctctaactcctgagctcaagcaatgctcccacctcggcctcccaaagt

SEQ ID NO: 448940 - DNA, 201 bp, Homo sapiens
gacagggtctggctctgttgcccaggctggagcgcagtggtacaatcatggctcattgcagcctccacctccccgactcaagtgatctgccacctcagctkcctgagtggctgggaccacaggtgcacaccaccatgcctggctaatttttatatattttttggagagatgaggtctcactgtgttacctgggctggtctc

SEQ ID NO: 448941 - DNA, 201 bp, Homo sapiens
atcagccgcgatgattatattggccaagtggccaaagaaatagaaaacaagatgcccaaagtctttgacttggaccaggtgaggaagcgcctcggaacagkactctcccccacttcggtggtgctcctgcaggaactggaacgcttcaacaagcttgtggtccggatgacgaagtctctggctgaacttcaaagggtgagc

SEQ ID NO: 448942 - DNA, 201 bp, Homo sapiens
ggaggattgcttgagcccaagagtttgaggctgcagtgagctgtgatagtaccactgtactccagcctgggcaacagagtgagattatatatttcaatttaaaaaaaaaaaaaaaaaagaaaaagaaaaaacccacacacaaaacacaaaactcaaaactcaagatgtggaccattcaggacacgcctgtggaacctcagg

SEQ ID NO: 448943 - DNA, 201 bp, Homo sapiens
aagttgacccaagatttatttcgctattcagtgtcttcaatgtgccatttccttcagaggagtctctgcatttaatttattcctccatcctgaaaggccayacctcggtaacttgattttaactagaagtctaaaccggaagaccttgtgttggggggaaacatacacagggctgacttatccatgtaggcacagcagggt

SEQ ID NO: 448944 - DNA, 201 bp, Homo sapiens
tgagggcaacttacttcaagatctctcacgaaatgctggaccagtgcccgcaccctgccttcaagccgctggtctacgtgctggcgttctttcatgctgtrgtgcaggagagaaggaagtttgggaagattggctggaacgtgtactatgacttcaatgagtctgacttccaggtgacagtggctgcttctccttggaaat

SEQ ID NO: 448945 - DNA, 201 bp, Homo sapiens
cagcaacaaagaagctgagtttttgatatcctggcataagtcagaattgcatctcaaaaccggcttgggcgttctaaccctggactgtggtgatggtcgcrccgctgcagaactgtgccaaagtcaatcagttatacacttcaatgggtgaatgtttctgaggtcatgtcttggcctttgctcctgttttttatgggattt

SEQ ID NO: 448946 - DNA, 201 bp, Homo sapiens
tattattagctgctattttaagtgttacttgctttttcagttgaacctttttttggttttcttttattattttttattttttagggacagggtcttgctctgttgctcaggctaaagtgcagtggtgtgatcctggctcactgcagcttcaaccttctgggctcaagtgatccttccgcctcagcctaccgagtagttggg

SEQ ID NO: 448947 - DNA, 201 bp, Homo sapiens
cgagcccagcgtgatgtggctctcggggctgcacatccctgagtcctacctcacggcgctggtgcaggccacctgccggaagaacggctggccactggacygctccaccttgttcacacaagtgaccaagttccaggatgcagatgaagtgaatgagcgggcgggacaaggtaccgtcagctcgttagggatccacagcct

SEQ ID NO: 448948 - DNA, 201 bp, Homo sapiens
cccaagcagctgggactacaggcatgtgctgccatgctcagctaattaaaacattttttatagggataggatcttgctatgttgtccaggctggtctcaarctcctagcctcaactgactctcccacattggcctcccaaagcactgggattacaggagtgggtcaccttgcctggcccactagtagcttctgaatttttc

SEQ ID NO: 448949 - DNA, 201 bp, Homo sapiens
tacaatctgctgaaaggaaagaggaactcttactttagcacttagaaaataatgaagcacagtctcacactgggttattaaaaagttagttcagaggccartggatttgcaaaatagttgctagcttatttgcaaatgtttactgctgctaccctggggaaaaagctggcttttcacatcatctctttctgcttcagattg

SEQ ID NO: 448950 - DNA, 201 bp, Homo sapiens
atagttgctagcttatttgcaaatgtttactgctgctaccctggggaaaaagctggcttttcacatcatctctttctgcttcagattgtgttaatggtcarcttctcctcccgcaccacgtccatggatatccaaagaaatttagaagcaaatgtggaaaagcgaaccaaagatacttacggcccacccatgggaaaacgc

SEQ ID NO: 448951 - DNA, 201 bp, Homo sapiens
ctggtgggctttagctggtctcttgcagccctgctcaggagtcctcaggggacaggagcgactgtgtgggaggagctgggacttccagggccagggaggcmgatgagtgcaaaatgctcacccatcttccaggctgggtgtgaccagctcagtgcacccacggggcccatggggtttctcaaagatggtttatttgaaggc

SEQ ID NO: 448952 - DNA, 201 bp, Homo sapiens
gatggggtggttgacaaaagtcattattatttatgggtaaggattcgagcgctgatcttttctttagtaagatggggcatcttcagtattgaggccaaacraagcacatcttggattttgtgtcttggagcgattctttcatgtgggcaggaccctggcatgtccttatttttgttctcagtgttgagtcttagactttga

SEQ ID NO: 448953 - DNA, 201 bp, Homo sapiens
gcagtggcttttatatgaggatattttgtgcttagaacttttatatgaggatattttgtgcttagaaacaaatgatcctctttcatacttttttgtcttgwtttattttgaggacaagagtgcatgatcaaaggaattgatctgaatttttattttagtgaatgattttcatttccaagattcctaattgcttctttttca

SEQ ID NO: 448954 - DNA, 201 bp, Homo sapiens
tgtgtttctggttggctcttttgtcaaattatcagtcaatcaatcagccaatcacctaccaaccgactgatctgtctccctaccttcctatgcatctatcwatactttatctatctatctatctatctatctatctatctatctatacatacctctatctatacatctatttatctatctcctgtctacctacctacctat

SEQ ID NO: 448955 - DNA, 201 bp, Homo sapiens
catcctgaaaggccacacctcggtaacttgattttaactagaagtctaaaccggaagaccttgtgttggggggaaacatacacagggctgacttatccatktaggcacagcagggttagggccctcaatacttttaagggcctatgaaaatgttttaatttcttgcaaaatcagaagaaaaaaatcatctttatacgatgc

SEQ ID NO: 448956 - DNA, 201 bp, Homo sapiens
caaagcgatgatctttctgttcacggatgcccatgtggctgaggagggcttcctggagctcatcaacaacatgctgacctcaggtacagccaaggctggcrcccgctgtggccaacaccccgctcagctcttaagggagttcactttcttcagcagttaccacctccagacactgtgggtagccctgtgcgggtgtacctg

SEQ ID NO: 448957 - DNA, 201 bp, Homo sapiens
tcaagccaacctttgaggactgcactctgctcagagccggggccgcgagtgcatctcctctgagcccaagctttactcaccccctgtcctaccctgcagcygaggagaagaagaaactggcagaggaaaaggccatggagatagaggagcagaacaaagtcattgccatggagaaggccgaggccgagacgaccctggcag

SEQ ID NO: 448958 - DNA, 201 bp, Homo sapiens
ggtgttcagttaaaaagctcatggaagctgtgttgattttggtattatttggatttcatgcagttgtaaaaactttccataagagaaggtccttaaacatytagtttatcttgtgtatagctatagccatgattgattttctttatttatccaggttggagatttacagtatgcctcccctgcaactgtctctcgatgtgg

SEQ ID NO: 448959 - DNA, 201 bp, Homo sapiens
tctactcaggaggacttcattagtttgattggggttttacgattgcttcttgtagccctcccacgttgctgatgcctttcccagaactggaaggctcaggrggctccggttctgcacgtggatgccttgctttctctgaaaagtgtcctggttttaggggaatccagcagtggtatcagccgcgatgattatattggccaa

SEQ ID NO: 448960 - DNA, 201 bp, Homo sapiens
gtcagcacttagagcggtcatgaccctgggactcagagagatcaccagcatgtcttccttttccaggaattgtacctgcgcttttttctgaagaggagaargagtctatcctgagtcagattggacaggaagctctgaagcaaggcatggggccggccaaggagtctgtgtggcagtacttcgtgaacaaaagtgcaaata

SEQ ID NO: 448961 - DNA, 201 bp, Homo sapiens
gcagttcgctagtgctgactgcaggagtttcgcgtggtttacatgccccatttaatttattctccgggaaattcttttggaaaggttttgtcattctctgyctctctctctctctctggggaggtggagggaagactttactttcattttatatatagtaaaggatctcatggttcagaggaaggtcaaagactcttgacc

SEQ ID NO: 448962 - DNA, 201 bp, Homo sapiens
ccattttcatatgtttatagagacaattaacaatttttgagggttaagaaatacaagttgcggaacttagaactgatctccaggctgtcgttgggatgaasataagaggggtgatattttcacactctgcagacccaaagcacatttctcccaaaagaaaatcacctttacttttatttttttaattaaaaatgtaatttg

SEQ ID NO: 448963 - DNA, 201 bp, Homo sapiens
gattaggacgtggacatctttgggaggcgaggccatcattgtgcctgccacacctaattaccccaacgagagctcagacatgcttcttttaaaaacacagktctggtgactgtagtcaataacctaattatacatctaaaagtaactaaaagagtataattggattgtttttataacacaaaggataagtgcttgagggga

SEQ ID NO: 448964 - DNA, 201 bp, Homo sapiens
aggccgtgtactgttgttgagtttgggtccttaagtgggcttctgtttcaaggtacaacagcacataggcagcttggttgtggaacattttaaagatgacrtggaggtggtgatgagggatcccatattgtttggagacttccagatggctctgcacgaaggagaaccacgcatttatgaagacatccaggactacgaggc

SEQ ID NO: 448965 - DNA, 201 bp, Homo sapiens
accacagccccagaacctaagtgtgtctgcttaaagaccctgctttgttagcaggatgtagagcaagagtcccggattcactaccctagtagggtcaggtwgataatgtacgtgagtaaagcggccagcagacaagagagtggtgggatctgtggctaactggagagcaaaagtccatctaaagagggtgcccgtccagct

SEQ ID NO: 448966 - DNA, 201 bp, Homo sapiens
ttttccttggtttgatttcggatctgtttcctgggctggactgccctcgcgtccgctaccctgacttcaacgatgcggtagagcaggtcctggaggagaayggctacgcggtcctacccatccaggtaaagccaggaaaatgacctcactgtggccgtgcatcctttccattggctttttgtttttgcagttctttaaaaa

SEQ ID NO: 448967 - DNA, 201 bp, Homo sapiens
tctgtgttgtcaccaactgtggcgaaggcatggattacagggtaaggcctggctgtcacctttggtactggctcattaggcagagagcttaaagcaggacrtggcatttcacctcctagtctttgacatggcgacagtggaagaagctagtagaaaaccttccaccaccacagccccagaacctaagtgtgtctgcttaaa

SEQ ID NO: 448968 - DNA, 201 bp, Homo sapiens
aaatgtgaacaattgaatcccactattgtctgtctttcccatctgaattcagagaaactagaattttcccaaattagcatgttacgtaatacacgtaaccygaacaaagtgggtttgtttatttagtggagaaattcaataagaattaagtatattatgatttactcacattgtggtgggccctgtgtgggttagtaataa

SEQ ID NO: 448969 - DNA, 201 bp, Homo sapiens
agatggggaaactgacgccctggctggttcctaacttgcccaagggctcaggaccccgccgcaggcctgggctccttctgtcttgaatctgaaaacatctsccccattctttccccacctgcttgttcacagagcggtggccggggcctggtttccatccaccctgaagggaccttttaaagacacttgacagccccgccg

SEQ ID NO: 448970 - DNA, 201 bp, Homo sapiens
caagccattctccccttatatttggcagggccacagttaaacgtgggctttcagcatctgcctcccttctcttccaggtcgcttcctttaatgaccctgamttcctcaagcagctagagatgtccataaagtacgggacccctttcctgttccgcgatgttgatgaatacatcgatcctgtgattgacaacgtcttagaaa

SEQ ID NO: 448971 - DNA, 201 bp, Homo sapiens
tttgagacagagtttcgctcttgttgcccaggctggagtgtaatggcgtgatcttggctgactgcaacctctgcctcctgggttcaagcaattctcttgcyttggccttctgagtagctggggttacaggtgtgtgccaccacacccagctaatttttgtgttttttagtagagacagggtttcgccatgttggccaggct

SEQ ID NO: 448972 - DNA, 201 bp, Homo sapiens
gggctctggtgagtgcctgttctgggctcaagaacagtgtctccgctctccctgctcaccctgcttgacggctgtcctctgttctggtccagatcatgggygagaccttaaaagaccccgtgatcaagaggtgctgtgaagccccaaaccgcctcagtgacctacagaacgtcagcgagggcctggagaaatgccagaaaa

SEQ ID NO: 448973 - DNA, 201 bp, Homo sapiens
tgaaacagacaagcagctggtcagtacatccaatgcttcttctcaggaaattcttctcaggaaaataaacaagcgccaaaagtgttttttatattaggackcgaattgtggaaaaataggcacgaaaggtcaatggggcaaaggagggtgggtgggttattaagcgtcttgcagcaactgaaaaaaaatagaacgcaaatt

SEQ ID NO: 448974 - DNA, 201 bp, Homo sapiens
cagttatacacttcaatgggtgaatgtttctgaggtcatgtcttggcctttgctcctgttttttatgggatttgtggggttctaggacaactccatgttgyccccagtgctcaccctattggagttgctgagatgcccctgttcctaatgtctactttagttcacacagtggataccactcggactacctggatattggaa

SEQ ID NO: 448975 - DNA, 201 bp, Homo sapiens
ggggtggactatgtgggctgaaccagatattttcctgtgaaccaggtaacccagttagccaagatgttggatgcgttgctagaaggagaaatagaagaccwtgacctgctggagtgctacttcctggaggctttgtactgctctctgggagcctccctgcttgaggatggaaggatgaaatttgacgaatatatcaaacgc

SEQ ID NO: 448976 - DNA, 201 bp, Homo sapiens
tttgtcatgtaacattacatattttcagcttctggggattaggacgtggacatctttgggaggcgaggccatcattgtgcctgccacacctaattaccccmacgagagctcagacatgcttcttttaaaaacacaggtctggtgactgtagtcaataacctaattatacatctaaaagtaactaaaagagtataattggat

SEQ ID NO: 448977 - DNA, 201 bp, Homo sapiens
tagagggaaatcaagctagaaaggtgggttgggtaaataattggtgatgaacaaagaggacaggagtgaggaaggagacttacttcagtaggcaagagggygccattgaaggtggttgaccaaggaatgatatagccagaattataggtcgggtgtagcggctcatgcctgtcatgccaacactttgggaggccgaggaga

SEQ ID NO: 448978 - DNA, 201 bp, Homo sapiens
tcaagtctctggtcccagctgccaatttgcaggaaatacacatcacagaggaacttcagctgcacagtgagtgtgtagtcagcaaaatttggattgggcasctctacaaatccaacattctgggttcttcagtatgttgcaggaaatacatatagattcaaagagtcataaaaagatgtatcaaaattttaagaaatatag

SEQ ID NO: 448979 - DNA, 201 bp, Homo sapiens
tcggtaacttgattttaactagaagtctaaaccggaagaccttgtgttggggggaaacatacacagggctgacttatccatgtaggcacagcagggttagrgccctcaatacttttaagggcctatgaaaatgttttaatttcttgcaaaatcagaagaaaaaaatcatctttatacgatgccattataaaatgtaattgt

SEQ ID NO: 448980 - DNA, 201 bp, Homo sapiens
gacccaagatttatttcgctattcagtgtcttcaatgtgccatttccttcagaggagtctctgcatttaatttattcctccatcctgaaaggccacacctyggtaacttgattttaactagaagtctaaaccggaagaccttgtgttggggggaaacatacacagggctgacttatccatgtaggcacagcagggttaggg

SEQ ID NO: 448981 - DNA, 201 bp, Homo sapiens
ccaaaaccaagaatttgattcctgatggaagatacaccctggtcaagtctctggtcccagctgccaatttgcaggaaatacacatcacagaggaacttcarctgcacagtgagtgtgtagtcagcaaaatttggattgggcacctctacaaatccaacattctgggttcttcagtatgttgcaggaaatacatatagattc

SEQ ID NO: 448982 - DNA, 201 bp, Homo sapiens
gttcccgctggtgtggacagcagatgtcttctgctctgcctgggccaggacccacttttaaccagggtgtcagtgtgaagccaggtccccgtgaagctggyggagggtggccctgagcagccccagccttgtgcgtgttctcaggtgcagtcttgcacaggggcccctgcctgtcaagacttacactgcacctctgccttt

SEQ ID NO: 448983 - DNA, 201 bp, Homo sapiens
accctgaggacctggtgcagaaacttcccaggtacccgcggtggagcctgtgaacccatttcccctgctttggcagagtgtgtggctgagggtctgtccayacctctccaggttcccccagcaaagcaaaacaagacacggccattaggtggaaatgtgggctctgcactgtagcttggggctcactgccccttctaggtg

SEQ ID NO: 448984 - DNA, 201 bp, Homo sapiens
ccacagggtctcctgtctgggctgctcctccacagagggaaggtgggcaggacagaaatgctggagaagggcctgggctgtccccaatgcgctggggaggmggccagccagtggcctgtgtgtcgctgtgtgtgcgcctgatagagccactccgtggcaggctgtgcatgctccagttgtatccagtctctgccttgtgtc

SEQ ID NO: 448985 - DNA, 201 bp, Homo sapiens
tgccagtgttgcaggtatttctccaagcttgtcataagtcttgactttgcttacggtattttttccacagaaaagctttacatttttccgtagtcaaaccyacaaggcttttcttttttatcctgggctttgtatttcctactccacgatatgaaagcattcattggagatgtggcccagtacttttgtggttttatttat

SEQ ID NO: 448986 - DNA, 201 bp, Homo sapiens
aaagctcttttgagatggcttaaggactggggacttacggtaaagatgcagggactctccaggtctcagtggcaggggaggtggcaggtgtccgggccacyactctctctggggccacaggagtgtgttcctctctttgcacatctgctgggtcctcctccccggagaccactttctctgtgaggcttcgacttcctgctc

SEQ ID NO: 448987 - DNA, 201 bp, Homo sapiens
aactgcttttgtatttccgtgtttatgattcaagtgaaatcaaccatgatttcctgcaggtcaacttccaaccttgtatgactttcattttgataacaaayggaatcaatgggtcccatggagtaaattagttccagagtatattcatgcccccgagaggaaattcatcaacatcctgggtaagtcagagtcaaatccttg

SEQ ID NO: 448988 - DNA, 201 bp, Homo sapiens
ttggctattacacgcaggcggctcgagacatgtgggctcacctgctggagctgcagcctcagacaggtaaactctactcaggaggacttcattagtttgaytggggttttacgattgcttcttgtagccctcccacgttgctgatgcctttcccagaactggaaggctcaggaggctccggttctgcacgtggatgccttg

SEQ ID NO: 448989 - DNA, 201 bp, Homo sapiens
caacatagcatcactgaggtttaatgacggcgatagtggagaaaaactggtgtccgcgatgatttcagcagaaggagaagtcatggagtttcggaagatcktgcgggctgaagggcgcgtggaggactggatgacggcagttttgaatgagatgagaagaactaatagactaattaccaaagaggctatttttagatactg

SEQ ID NO: 448990 - DNA, 201 bp, Homo sapiens
agagctgattggaaacaacctttgggattgaggaagctttggatgggggaaatggggacgaggaaggaggctgagacagcagagggggtttcaggtgggargaacagtgtgaatgaaggtgacagacatgagaaaaacaggaattgtctgaggcagagcaaacagaggggtttggcataacacatatgggtagtagaggga

SEQ ID NO: 448991 - DNA, 201 bp, Homo sapiens
gtcagaaggcgggggcatggagagctgattggaaacaacctttgggattgaggaagctttggatgggggaaatggggacgaggaaggaggctgagacagcrgagggggtttcaggtgggaggaacagtgtgaatgaaggtgacagacatgagaaaaacaggaattgtctgaggcagagcaaacagaggggtttggcataac

SEQ ID NO: 448992 - DNA, 201 bp, Homo sapiens
atttcaaaagggaccctttgtggtccgctgatctgtctcaacggtttccacttcctccacctttcttgccgtccagtatcctggaggcccgagagtttgamtgggaaagtcagttgcggttttattgggaccgggagccggatgagctgaacatccgccagtgcacgggaacctttggctacggctacgagtacatgggcc

SEQ ID NO: 448993 - DNA, 201 bp, Homo sapiens
agagaatcacaaagcgccctgtgagtttttgagaattgcgttttgtcagaaggcgggggcatggagagctgattggaaacaacctttgggattgaggaagmtttggatgggggaaatggggacgaggaaggaggctgagacagcagagggggtttcaggtgggaggaacagtgtgaatgaaggtgacagacatgagaaaaa

SEQ ID NO: 448994 - DNA, 201 bp, Homo sapiens
cagggtgaacagtagcattgttggtcagtgccaaggcgggcgccgtgcttgcttttgtgcaagtcaagatactgggttccatctgtctgaaccaacatgtkgggtcttatgctcccatcgctctgggacctgggatcccaggatttatgactggaatggactctgtgggggtggactatgtgggctgaaccagatattttc

SEQ ID NO: 448995 - DNA, 201 bp, Homo sapiens
cttgcccccaggtcagtctcgatatgctatccatttgtagttctaatattcacaggaaaacccaaatgtaatctcctcattgttccgtttgattggacagrttttggaggaattttataacatatttggtccagaactaaaggcagtgacgggggaccccaagcgcattgatgatgtcctatgcagagtggacggcctagt

SEQ ID NO: 448996 - DNA, 201 bp, Homo sapiens
gcagggcctctcactgggttcgggtggcagggccggcagacctttgattttttttttaaaggtaccaggcagattcatttattgtattctattttttaactttttttttttttttttttgagatagggtctcactttgtcacccaggctggagtgcagtggtgcgatcttgactcactgcaacctctgcctccagggctca

SEQ ID NO: 448997 - DNA, 201 bp, Homo sapiens
gatggacaaagtgcctagtggctgattgaattagccacagcacttgtctcctaaaggttcacccaccccttcattctaaatgcattcacggagaactcacsgtgtgccgggtactcagatgtcttaatgctagaggaaccatagtgagtacaaagcaggtccggctgcggtgtggcagtgcccagcccgagagggaggtga

SEQ ID NO: 448998 - DNA, 201 bp, Homo sapiens
tgtttctggttggctcttttgtcaaattatcagtcaatcaatcagccaatcacctaccaaccgactgatctgtctccctaccttcctatgcatctatctayactttatctatctatctatctatctatctatctatctatctatacatacctctatctatacatctatttatctatctcctgtctacctacctacctatac

SEQ ID NO: 448999 - DNA, 201 bp, Homo sapiens
ccgagactggacagatggggtgttgtcaaacatcttcagggaaatcaacaagccaacagacaagaaggagcgaaagtgagtatctttgtaggtaggaaagwgcctgggttagttaatgttaattagctcaacattaaaaacggtggcaggactatacattgtagcttcatgcttggatttcaacagacttagagtccagtc

SEQ ID NO: 449000 - DNA, 201 bp, Homo sapiens
tggattacagggtaaggcctggctgtcacctttggtactggctcattaggcagagagcttaaagcaggacatggcatttcacctcctagtctttgacatgrcgacagtggaagaagctagtagaaaaccttccaccaccacagccccagaacctaagtgtgtctgcttaaagaccctgctttgttagcaggatgtagagca

SEQ ID NO: 449001 - DNA, 201 bp, Homo sapiens
cttgtgtggcctggggatgggtagattgttctggaaggccagtcctaccacccttagcccttggctcacaaattggtgagaaaaattcatttcccaatggstgtttcttccagatggggatcccagggccttccccccgatgagctctccgttcagaatggcatcctcaccacccgggccagccgcttccctctgtgtatc

SEQ ID NO: 449002 - DNA, 201 bp, Homo sapiens
aagaacttaattttcaagaacaagatggtcctgagctgatggtttaacacacagtttcttacctccctgtgccagtttcccctccctccctccctcctttytctctctctctctctctctctttctttctgagacagggtcttgctctatcgcccaggttggagtgcagtggtgcgatctcggctccctgcaaccgccgcc

SEQ ID NO: 449003 - DNA, 201 bp, Homo sapiens
gaggtgggaggatcacttgagtccgcaggggagtcgaggctgcagtaagccatgtttgtgccattgcactccagcctgggcaccagacttggtctcaaggaaaaaaaaaaaaaaaaagagtgaaacttcttgcatgcttactgttttatgaaactatttggaccccaaggctaagggctcttgcgtggctctctcctctct

SEQ ID NO: 449004 - DNA, 201 bp, Homo sapiens
tatcttactaaaatatgccccacaggtatgatagttttcttattcttttaagacagagggcttatcagtggatttgatgaatcgttgtatgaattaattayccaatgtctttgcttatgttgaagaagagagaccaacacttggcttaaggcttgatgctttgtaagcctttgcattgaaacaggcaaaaccaagagaagc

SEQ ID NO: 449005 - DNA, 201 bp, Homo sapiens
tgaagttctggcaagtgacacgtccattgagtccatcttgggagtcgacaccatgttttctctgtgttaaatttgttgggttatttagtgatgcttagtctttttttttaaatcacaagtaatacctgcttattaattataaaaaacaaaaacaatgcagaagtgcataaggtaaaaatgaacattcctccatcttctttg

SEQ ID NO: 449006 - DNA, 201 bp, Homo sapiens
gtagagcagctgcactggaacacctgcccccgttttcttgcatttgtagaatgatgctccattgcttttgaatcattttcttttttctttttttttgtatyattatcttctatcaaaaagactctggcgaaaaagatgacggttctgtataagctggcccgggagcagctgtccaagcagtatcactatgattttggactc

SEQ ID NO: 449007 - DNA, 201 bp, Homo sapiens
cacggatgcccatgtggctgaggagggcttcctggagctcatcaacaacatgctgacctcaggtacagccaaggctggcgcccgctgtggccaacaccccrctcagctcttaagggagttcactttcttcagcagttaccacctccagacactgtgggtagccctgtgcgggtgtacctgttcctccctcacggcggcccc

SEQ ID NO: 449008 - DNA, 201 bp, Homo sapiens
tttatcataaactaaacttccaggccagctttgacctggcattggatggcagccccaggctcccagcacttgtcctctcttctctccaggtgaccgagagygagcccagcgtgatgtggctctcggggctgcacatccctgagtcctacctcacggcgctggtgcaggccacctgccggaagaacggctggccactggacc

SEQ ID NO: 449009 - DNA, 201 bp, Homo sapiens
aaaatatttactatctggccctttgtagaaagtttgccaacacctcttctagactctaatggacacaaatgccatggagtcaggcaaacaacctgccttcrgtggagagggctgcccctgctgtactgcccctcactggcttttcctcttcccaggttggtgtgattttacctcctgtagacatggccatttccgttacat

SEQ ID NO: 449010 - DNA, 201 bp, Homo sapiens
gctgcgttcttaacattttggatcactgtctccctgataggtgaaaataatatctcattgttttgcatgtctttaattatggtgagtctgagcgtattttrcatgctttacagacattttgtgtttgtttttctgtgaattgtccttttgtatctggatttcatttttagtgaggtctccatctttctcattgatgtttaa

SEQ ID NO: 449011 - DNA, 201 bp, Homo sapiens
ataaacttcacggcccccccccccacacacagcctgcagttcgctagtgctgactgcaggagtttcgcgtggtttacatgccccatttaatttattctccrggaaattcttttggaaaggttttgtcattctctgtctctctctctctctctggggaggtggagggaagactttactttcattttatatatagtaaaggat

SEQ ID NO: 449012 - DNA, 201 bp, Homo sapiens
tgctgcgttcttaacattttggatcactgtctccctgataggtgaaaataatatctcattgttttgcatgtctttaattatggtgagtctgagcgtatttygcatgctttacagacattttgtgtttgtttttctgtgaattgtccttttgtatctggatttcatttttagtgaggtctccatctttctcattgatgttta

SEQ ID NO: 449013 - DNA, 201 bp, Homo sapiens
ttttatttgcctggttatttatgtacccattgttaattttttccaacttctctaatatctctgccacatacctatcaacaatagcctctaaatacttaaayatatcagtgccattatttacctagaggccttcctcccagagctcattgtcctcctactctagcttgtttaccttttttttcctttgtccttttttttttt

SEQ ID NO: 449014 - DNA, 201 bp, Homo sapiens
gcatttgtagaatgatgctccattgcttttgaatcattttcttttttctttttttttgtattattatcttctatcaaaaagactctggcgaaaaagatgayggttctgtataagctggcccgggagcagctgtccaagcagtatcactatgattttggactcagagccctgaaatcggtgctggtcatggctggtgagctg

SEQ ID NO: 449015 - DNA, 201 bp, Homo sapiens
tgaggaaggtcagagtcagggtggctgcctagtgctggaggccccacgcatggtgaggttttctgtcccaccaggatcactgaggctgccacattggccaragccccttagatccccgctagggctcaagccaacctttgaggactgcactctgctcagagccggggccgcgagtgcatctcctctgagcccaagctttac

SEQ ID NO: 449016 - DNA, 201 bp, Homo sapiens
gtttttgatatcctggcataagtcagaattgcatctcaaaaccggcttgggcgttctaaccctggactgtggtgatggtcgcgccgctgcagaactgtgcmaaagtcaatcagttatacacttcaatgggtgaatgtttctgaggtcatgtcttggcctttgctcctgttttttatgggatttgtggggttctaggacaac

SEQ ID NO: 449017 - DNA, 201 bp, Homo sapiens
ggatttgtggggttctaggacaactccatgttgcccccagtgctcaccctattggagttgctgagatgcccctgttcctaatgtctactttagttcacacrgtggataccactcggactacctggatattggaacaaatggttaaaattaagcaacctgttatttttgttggtgaatctggcacttctaagacagccacta

SEQ ID NO: 449018 - DNA, 201 bp, Homo sapiens
atccagctggacgagctgaaccagaagctggccgagcagaagatcgtgctggcggagaagtccgccgcctgcgaggccttgctggaggagatcgccgtcamcaccgctgtaggtgagtgagggcggggccagggcagcccatccccaacacccaatacccaccgtaggtgagtgagggcggggccagggcagcccatcccg

SEQ ID NO: 449019 - DNA, 201 bp, Homo sapiens
tgtgttgattttggtattatttggatttcatgcagttgtaaaaactttccataagagaaggtccttaaacatctagtttatcttgtgtatagctatagccrtgattgattttctttatttatccaggttggagatttacagtatgcctcccctgcaactgtctctcgatgtggaatggtttatgtggatcctaaaaacttg

SEQ ID NO: 449020 - DNA, 201 bp, Homo sapiens
tttctgacgatgagttgcttagcattctggggagcagcgacccactctgcgtccaggagcacatgatcaaggtcagccctctgggtgtgcaggggctcccygtgtaagccttagaaccgccttcggtcctccctggttccctttgccatgaggttcaacccagagggttaagactgaaatgctgctggagttggttttttg

SEQ ID NO: 449021 - DNA, 201 bp, Homo sapiens
ggcccagcaggaaccggcaaaaccgagaccaccaaggacctggcgaaagccttgggcttgctctgtgttgtcaccaactgtggcgaaggcatggattacarggtaaggcctggctgtcacctttggtactggctcattaggcagagagcttaaagcaggacatggcatttcacctcctagtctttgacatggcgacagtgg

SEQ ID NO: 449022 - DNA, 201 bp, Homo sapiens
ctcagtgtaatataggtaagccttggggatggggtggttgacaaaagtcattattatttatgggtaaggattcgagcgctgatcttttctttagtaagatsgggcatcttcagtattgaggccaaacgaagcacatcttggattttgtgtcttggagcgattctttcatgtgggcaggaccctggcatgtccttatttttg

SEQ ID NO: 449023 - DNA, 201 bp, Homo sapiens
tttatttgcacattgtattttctccattagtagcttctctctcattttttagagacagggttttgctctgttgcccaggctggagtgcagtgatgtgatcrtggctccctgtagccttgaacttatgggctaaagagatcctcctaactcagcctcccaagcagctgggactacaggcatgtgctgccatgctcagctaat

SEQ ID NO: 449024 - DNA, 201 bp, Homo sapiens
cagagctccacggatggacaaagtgcctagtggctgattgaattagccacagcacttgtctcctaaaggttcacccaccccttcattctaaatgcattcayggagaactcacggtgtgccgggtactcagatgtcttaatgctagaggaaccatagtgagtacaaagcaggtccggctgcggtgtggcagtgcccagcccg

SEQ ID NO: 449025 - DNA, 201 bp, Homo sapiens
ttctggttggctcttttgtcaaattatcagtcaatcaatcagccaatcacctaccaaccgactgatctgtctccctaccttcctatgcatctatctatactttatctatctatctatctatctatctatctatctatctatacatacctctatctatacatctatttatctatctcctgtctacctacctacctatacatc

SEQ ID NO: 449026 - DNA, 201 bp, Homo sapiens
gggtacaaagagctgaactggaaaacagccaagggcgtgatgtccgacccgaatttcctgcggtctctgatggagattgattttgattcgattacccagarccaagtgaaaaacatcaaaggtgagtgtagccacgtgtgggaatcgccagggtggatctcggtctggcatctcaggctctgggacagggatggagggcaa

SEQ ID NO: 449027 - DNA, 201 bp, Homo sapiens
tccccagcattcccattcatttggagtggaggggagctggccatgcagatgctcactctgtcaccttgcctggaaggtcctcccacctgagttgatttggktctgtctcatgtcaggatggggctttgccatccacttttggaggtatctgataacccctgctgacactgaccttttgtacatttacagatttggatgttg

SEQ ID NO: 449028 - DNA, 201 bp, Homo sapiens
ttctgtctatttgcataggtgaagtaggtacccaaatggaggcattgtcctgcgccgtgttgcagctgccgctgttgacctctggcctggggccaaggccrcctgccccttctggtgtagggagcgaggtcaccaggtagccccagccctgcacgcaggttggcggctgcaacggaaacctcgcagcttgggactcccgcc

SEQ ID NO: 449029 - DNA, 201 bp, Homo sapiens
tctggttggctcttttgtcaaattatcagtcaatcaatcagccaatcacctaccaaccgactgatctgtctccctaccttcctatgcatctatctatactwtatctatctatctatctatctatctatctatctatctatacatacctctatctatacatctatttatctatctcctgtctacctacctacctatacatct

SEQ ID NO: 449030 - DNA, 201 bp, Homo sapiens
tggttggctcttttgtcaaattatcagtcaatcaatcagccaatcacctaccaaccgactgatctgtctccctaccttcctatgcatctatctatactttatctatctatctatctatctatctatctatctatctatacatacctctatctatacatctatttatctatctcctgtctacctacctacctatacatctat

SEQ ID NO: 449031 - DNA, 201 bp, Homo sapiens
ggtaactgtttaacctcttgaggaatttctagactgttttccaaagtggttgtcccattttacattctgaagagcaatacacgaaggttctggtttttccrtatcttcaccaccacttgttatcgtctttctgataatagccattgtggtttaatttgcatttccttaacaactagtgagactgaacaactttttatgtac

SEQ ID NO: 449032 - DNA, 201 bp, Homo sapiens
gttggctcttttgtcaaattatcagtcaatcaatcagccaatcacctaccaaccgactgatctgtctccctaccttcctatgcatctatctatactttatctatctatctatctatctatctatctatctatctatacatacctctatctatacatctatttatctatctcctgtctacctacctacctatacatctatct

SEQ ID NO: 449033 - DNA, 201 bp, Homo sapiens
gggtcatatatggtaactgtttaacctcttgaggaatttctagactgttttccaaagtggttgtcccattttacattctgaagagcaatacacgaaggttytggtttttccgtatcttcaccaccacttgttatcgtctttctgataatagccattgtggtttaatttgcatttccttaacaactagtgagactgaacaac

SEQ ID NO: 449034 - DNA, 201 bp, Homo sapiens
acatctatttatctatctcctgtctacctacctacctatacatctatctctctctattatctatctaccaactgaccaatctgtgtgtctatctacctatyattcacctatcatctatccatctatcaattatctaccaatctacctacctacctatacatctatctatctctgtctatacatctatctacctacctacct

SEQ ID NO: 449035 - DNA, 201 bp, Homo sapiens
tctgtggcagaatcatattccatagcatggatagactacatttggtttctctattcatcagtcggtgggcatttgagttgtttctgcattttggctattaygaagaatgctgctacgaacattcttgtacaaggatttgtgtggatgtgtgtttttaattattcatgtattatgcataggagtggaatagctgggtcatat

SEQ ID NO: 449036 - DNA, 201 bp, Homo sapiens
gaccaatctgtgtgtctgtctacctatcacttacctatcatctatctatccatctatcaattatctaccaatttatctacctacctatacatctatctctrtctatacatctatctacacatctgtttatctgtctatacatctatctatacatctatctatctatacatctgtctgtctatctatctatacatctatctc

SEQ ID NO: 449037 - DNA, 201 bp, Homo sapiens
gggtcaagagcccacccctgaagaccctgaaggattggagcagttggacagaaagaacggatgctggagaaaccaccataagtgtctgctccaccctaatratgagagttctttgtgtgttcatttcacctctcagggtaaaggccctctggctgaaattgaattctggagggaaagaaatgcaaccttaagtgcgctgca

SEQ ID NO: 449038 - DNA, 201 bp, Homo sapiens
aatttatctacctacctatacatctatctctgtctatacatctatctacacatctgtttatctgtctatacatctatctatacatctatctatctatacatctgtctgtctatctatctatacatctatctcctgtctacctacctacctatacatctatctctctctatctatacatctatctatctatgtacctaccta

SEQ ID NO: 449039 - DNA, 201 bp, Homo sapiens
tgggaggtggaagacgtcttccacaaagcgcaaaaaggggagaagcaggccatgaagaactatggcaggaaaatgcaccggcagatcgatgagttggtaaygcgcatcaccatgccgctaagcaaaaacgacaggaaaaaatacaacactgttctcatcattgatgtgcatgccagagacatagttgattctttcataaga

SEQ ID NO: 449040 - DNA, 201 bp, Homo sapiens
gccacctcgacgatgaacataggtgccctctttcctcagctcagtgcaagcgtctggatgggggactggacaagctgaaggaggccaccatccagctggaygagctgaaccagaagctggccgagcagaagatcgtgctggcggagaagtccgccgcctgcgaggccttgctggaggagatcgccgtcaacaccgctgtag

SEQ ID NO: 449041 - DNA, 201 bp, Homo sapiens
gtaatcatttttcctgaacgaatgactgactgatcgcttttattttcctaggtgagatcaagttagaaatgccaatcatcagtgtggagggagaggtgtcygacctggcagctgacccggaaaccgttgacatcttggagcagtgtgtgataaactggctgaatcagatatccacagcggttgaggcccaactgaagaaga

SEQ ID NO: 449042 - DNA, 201 bp, Homo sapiens
atttatctacctacctatacatctatctctgtctatacatctatctacacatctgtttatctgtctatacatctatctatacatctatctatctatacatctgtctgtctatctatctatacatctatctcctgtctacctacctacctatacatctatctctctctatctatacatctatctatctatgtacctacctac

SEQ ID NO: 449043 - DNA, 201 bp, Homo sapiens
ccgaggagaagaagaaactggcagaggaaaaggccatggagatagaggagcagaacaaagtcattgccatggagaaggccgaggccgagacgaccctggcrgaggtcatgcccatcctggaggccgccaagctggaactgcagaagctggacaagtcggacgtgactgagattaggtaatgcacctgagccaccattctgg

SEQ ID NO: 449044 - DNA, 201 bp, Homo sapiens
tttatctacctacctatacatctatctctgtctatacatctatctacacatctgtttatctgtctatacatctatctatacatctatctatctatacatctgtctgtctatctatctatacatctatctcctgtctacctacctacctatacatctatctctctctatctatacatctatctatctatgtacctacctaca

SEQ ID NO: 449045 - DNA, 201 bp, Homo sapiens
aaagaggctaaattgagtcacagttctgcatggctgtggaggcctcaggaaacttaaaatcatggtggaaggggaagcaaacacatccttcttcatatgayggcaggaaggagaagtgctgagcaaagagggaaaagccgcttataaaaccatcagatctcatgagaactcactcactatcatgagaacagtggcatgggg

SEQ ID NO: 449046 - DNA, 201 bp, Homo sapiens
gcccagtagcaggaggatggccactgtggctggagggagggctggaaatgaaggcaggtttaagcaggggaacaacaggatctggtttgcattttacctckggctattgtgggaaaacatattgctggggtggaggggaaggaaagaccaaatagaaagccatggaagagcccaggtggagggctgtattagtccattttc

SEQ ID NO: 449047 - DNA, 201 bp, Homo sapiens
ttatctacctacctatacatctatctctgtctatacatctatctacacatctgtttatctgtctatacatctatctatacatctatctatctatacatctgtctgtctatctatctatacatctatctcctgtctacctacctacctatacatctatctctctctatctatacatctatctatctatgtacctacctacat

SEQ ID NO: 449048 - DNA, 201 bp, Homo sapiens
ctgatttttcatttgaaatcagccacttaaatctctttccatacaaattaacctgaatggttttgtttttaatactactttttaaaaggaatttatataaycaaaaagtaaatattggagagtattttaagatgtgtggagttttcttttccttctcagagaaaacacttgattaggcaaaagtgcctggcatacatagca

SEQ ID NO: 449049 - DNA, 201 bp, Homo sapiens
tgacaccagggcccttcctcttctgactgtagttatggctgaggtggtttccaacagtcctactttttaaaacaggggtgcctaagctttatgggctgggragagtcttggagccgtgataaaagctacggatagctgcttcctggaaaaggcgcggctgtatgtgtgtgtggatgccggtccttccagaggtgtcaggct

SEQ ID NO: 449050 - DNA, 201 bp, Homo sapiens
atcctagcactttgggaggccgaggccagcggattgcttgagttcaggagtttgagaccagcctaggcaacatagcaaaactccatctctacaaaaaataygaaaattatcctggtgtggtggcgcacacctatggtctcagctacttgggaggcagaggtgggagaatcacctgggccaatggaggttgaggctgcagtg

SEQ ID NO: 449051 - DNA, 201 bp, Homo sapiens
tgagggcctctcactgtcccccacagtcacgctgaagggcctggaggaccagctgctgagcgtgctggtggcttacgagaggcgggagctggaggagcagygggagcacctcatccaggagaccagcgagaacaagaacctgctcaaggacctggaagattccctccttcgggagctggccacgtccacggggaacatgct

SEQ ID NO: 449052 - DNA, 201 bp, Homo sapiens
gaatacagaccaggaggctgaaaacaacagaaatgtatctcctcacggttctggaggccaggagtgcaaaatcaaggtgtctgcagggccacgatcactcyggaggctgcagaagaggcttcttcttgcctcttccagctcctggtggcttttgactgtccctggcgttccgtggcttgcggctgtgttgctcctgtctct

SEQ ID NO: 449053 - DNA, 201 bp, Homo sapiens
tgggttcaagcaattctcttgccttggccttctgagtagctggggttacaggtgtgtgccaccacacccagctaatttttgtgttttttagtagagacagrgtttcgccatgttggccaggctggtcttgaacttctgacttcaagtgatccgcctgcctcagcctctgaaagtgctgggattacaggcatgagccaccac

SEQ ID NO: 449054 - DNA, 201 bp, Homo sapiens
tgaaatgactggtggctgggagccctaggcagcttcagcatgggggctggttgccagaaagatcaagccataaattatttagaggtttggaactttcaggygcccatccttgccacccttggggagggaagaggggctggagattggagatcaacaaaggccagtgatctaatcagtcatgcctgtataatgaaacctcca

SEQ ID NO: 449055 - DNA, 201 bp, Homo sapiens
cgtgtactatgacttcaatgagtctgacttccaggtgacagtggctgcttctccttggaaatggcttccttaggcggcccacttcctcccgactttcctcygggttcaaccacagcagggttgcaccgttcccagcagccttttcagaaaagtatcagaatgtgaacagcttggtgggtttcagtataactgagcgtgttc

SEQ ID NO: 449056 - DNA, 201 bp, Homo sapiens
gccacagtgaagctcactgagccattttcgtaaaagatgaacatacggctggactgggtgtggtagtgtagaatttttacattaaaaacatgtcattggcyggtcatggtggctcgcacctgtaatcccttctttggaaggccaagaagggcagatcgcttgagcccagaagttcaagaccagcctgggcaaccaagcaag

SEQ ID NO: 449057 - DNA, 201 bp, Homo sapiens
ctgaggcaagagaatcacttgagcctgggaggcggagttttcagtgagccgagatcatgccactgcactccagcctgggcaacagcgcaagactctgcctmaacaacaacaacaacaaaaagattactacagagcataagaaaaagtagtaaataataagtaaacagtgaaaacactattctgcatcttagaatatttttt

SEQ ID NO: 449058 - DNA, 201 bp, Homo sapiens
ggaggatcacttgaggccaggaggttgaggctgcaatgaactgtgatcacaccattgcactacagcctgggtggcagcgagaccctgtctccaaaaaaaawaataataataatttttacattaaatctcaggaaaatataacacagaaaatcttctctttacaatcatcaagtaggaacatgtttttcctcacttcttagc

SEQ ID NO: 449059 - DNA, 201 bp, Homo sapiens
tatttcatttattctctgttactacttttaatttagattcctaaagcagtcccttacatggagctacctcctatagtgtttcccttactaatatgctatgtttttttttttttttttgagacggagtcttgctctgttgcccaggctggagtgcagtggcgcaatcttggctcgctgcaacctccgccttctgggttcaca

SEQ ID NO: 449060 - DNA, 201 bp, Homo sapiens
ccgttcctgcccttcttgagtccccaagggagactgactatgttagtctgggttcttgagaaacagaatcaataggagatatgtgtatctatatctatatmtgtctatatctaatctgtatctataacctgtatctatacctgtatctatatctaatctacatctgtattacattatctaatctatatctatctgtatcta

SEQ ID NO: 449061 - DNA, 201 bp, Homo sapiens
gattgtgcaaacaaacctagctgggatgactactgcacacctaggctattgggtagaatctattgctctagactgcaagcctgtacagcaaggaactacaytgagtacggccagccattgtaacctaatagtacgtgtgtatctaaacatagaaaaggtacagccaaggccgggcatggtggctcacgcctgtaatcccag

SEQ ID NO: 449062 - DNA, 201 bp, Homo sapiens
aatcctcgtgcctctggcctgctggctgagacccgcgctaagcttgtcccgtcacagcagggcagcgggagagactgttgttgggggccgcaggtggtgarggcctctcactgtcccccacagtcacgctgaagggcctggaggaccagctgctgagcgtgctggtggcttacgagaggcgggagctggaggagcagcggg

SEQ ID NO: 449063 - DNA, 201 bp, Homo sapiens
gcaagctgaggtgcccagctcagcacaaaccaactgaatcgagtgtgagggggtacagagaagtccctgccactcaggagttccccatcagggtgggagaygtgcatagaaactagaatctaaaacagggaagactgcaacgagctatcccagaggagtggtcagaaggttctggacaccggaggaggcagcgctgatcag

SEQ ID NO: 449064 - DNA, 201 bp, Homo sapiens
ccaggatcactgaggctgccacattggccagagccccttagatccccgctagggctcaagccaacctttgaggactgcactctgctcagagccggggccgygagtgcatctcctctgagcccaagctttactcaccccctgtcctaccctgcagccgaggagaagaagaaactggcagaggaaaaggccatggagatagag

SEQ ID NO: 449065 - DNA, 201 bp, Homo sapiens
cctaaatcattgattttttcaaaagactttttattatggaaaacatatgcaaaagagaatagtgtcgtgatcgtctgcacagccctcacctggcaatgatyagctctggatttgtttatatgtaacacggttccccatcaacccagattatgttgaaaatttgcttcatattcagatcacttatctgtaagtatgttagtt

SEQ ID NO: 449066 - DNA, 201 bp, Homo sapiens
gaggtgatgggcacagtatggtatcacctgaaaggtttaagtcttagctgcctcttcaccccgcggtctggccttactttggcctcttacctgttgtatcrtttgcttgtaattacacttagtaccttaaggtcaagtgcaatgtcttcgctccaatagcaacatttatgatgcttccatagtaataatctgtagtctcag

SEQ ID NO: 449067 - DNA, 201 bp, Homo sapiens
gaaggtaagacttcagttaaaaacaggctggagaaaacagtctttttttaattcaaagagaaaatagggagaactcatctatactaaaaaaaaaaaaaaawtagctgagcgtggtggtatgccattactcccagcttcttgggaggctgaggtgggaggatcacttgaacctggaaggtggaggctgcagtgaactgtgat

SEQ ID NO: 449068 - DNA, 201 bp, Homo sapiens
ttgagcttacggagtgagacatccctgttttctcgggagcccatcagggttgaaacctgccagtgcaagagggagccagacccgatgctgtggcttcactrtctcttcggaggaaggtgttgctcaggaagttaaatcccgcaggggtctgagtgatgtcagcaacaaagaagctgagtttttgatatcctggcataagtc

SEQ ID NO: 449069 - DNA, 201 bp, Homo sapiens
tatcccttatgggaaacgaagggatgggccgaattaaagaaataggtgggctagttaactgcagcaggagcatgtccttaaggcataaatcgctcatgctrttgcctgtggcttaagaatggctttcagcggttttccaccctgggcgggccaggtgttccttgccctcattcccgtaaacccacaaccttccagcttggg

SEQ ID NO: 449070 - DNA, 201 bp, Homo sapiens
aggtgcgtcatttcatttagactgtttttcttcttgtccctcacaagttttgcatctcatagtgaaaaaggagtaaatgctaacatgctagctgtaattctttttttttttttttttttgagatggagtctcgctctgccacccaggctgcagtggcacaatcttggctcattgcaacctctacctcctggcctcaagcga

SEQ ID NO: 449071 - DNA, 201 bp, Homo sapiens
ttttctgaagaatattatatgtcaggtaaacatggagaaaggaagaaattctagtatttctaaagttgaggtcatgtggtttgtttattccacaaataggyagcgggcagctcttctgtctcaggtgctgttatgggcactgaggtgctgagaccagctcggttggggagaccctaacccagcggcgctagagaaattaaa

SEQ ID NO: 449072 - DNA, 201 bp, Homo sapiens
cagaaaataggcacaagcttccatctgttccctcccaatggagtttcatggatagcacttaattctcctggtagctatgagtgacaacatgcatgaagtaytgccaaccagagaggctcacctgagccttgctgtctggggtttttaatggggatcagtcacacaggcatggagcatccacgtggctgaccttagttactc

SEQ ID NO: 449073 - DNA, 201 bp, Homo sapiens
acatctcactgcagcctcaaactcccaggttcaagtgatcctcccatctcagcctccggagtagctgggtctataggtgcacaccactaagactgtctcattttttttttttgaggcggagtctcactgtgtcgcccagtctggagtgtagtagtgcgatctcagctcactgcaacctctgcctcccgggttcatgccatt

SEQ ID NO: 449074 - DNA, 201 bp, Homo sapiens
gaaggctccacctgtagctcctggatcctcggcttgcttttggcttctgctggagctgccatcgcccttctgtgggtgtggagtgggtctctggagagcayggggttgggtttggatgccaacccctctcctcttccctctcccccggcgcaggtggccctgcagctgctggagacggcggtggctcgggggcagtggctg

SEQ ID NO: 449075 - DNA, 201 bp, Homo sapiens
tgggttttcaccatgttagccaggatggtctcgatctcctgacctcgcgattcacccgcctcggcttcccaaagtgctgggattacaggtgtgagccaccrtgcccggcctaatttttttcttttaattgtagagatggggtctccctatgttgccccggctgttctcgaactcctgggctcaagagattttcccgccttg

SEQ ID NO: 449076 - DNA, 201 bp, Homo sapiens
ggatgacgaagtctctggctgaacttcaaagggtgagcctgtctctcatgtgcagattactgcctagatacgtggcacctggggttctgatagagtcctgyccgattgctcttgattctaaataggccttggctggagaagttggaatgagcaatgagttagatgatgtggccaggtctctttttatcgggcatatcccta

SEQ ID NO: 449077 - DNA, 201 bp, Homo sapiens
gttctgggctcaagaacagtgtctccgctctccctgctcaccctgcttgacggctgtcctctgttctggtccagatcatgggtgagaccttaaaagacccmgtgatcaagaggtgctgtgaagccccaaaccgcctcagtgacctacagaacgtcagcgagggcctggagaaatgccagaaaagcctcaacgactacttag

SEQ ID NO: 449078 - DNA, 201 bp, Homo sapiens
gggtgggtgggttattaagcgtcttgcagcaactgaaaaaaaatagaacgcaaattattttagataatagtacgtatcctctgctcctagcaagtttcagsccgtgtactgttgttgagtttgggtccttaagtgggcttctgtttcaaggtacaacagcacataggcagcttggttgtggaacattttaaagatgacgtg

SEQ ID NO: 449079 - DNA, 201 bp, Homo sapiens
ttttgggtaccagtccccggattgatcagagcctcttacaggtgtgcgttttctgcagagtcgactggatgctcctgtaccagggcatggtggtgctggcygctagccaggtgtggtggacctgggaggtggaagacgtcttccacaaagcgcaaaaaggggagaagcaggccatgaagaactatggcaggaaaatgcacc

SEQ ID NO: 449080 - DNA, 201 bp, Homo sapiens
atgaccctgacttcctcaagcagctagagatgtccataaagtacgggacccctttcctgttccgcgatgttgatgaatacatcgatcctgtgattgacaaygtcttagaaaaaaatataaaagtctcccaaggacggcagtttattatcctgggagacaaggaagtggactatgattcaaatttcagactgtacctgaaca

SEQ ID NO: 449081 - DNA, 201 bp, Homo sapiens
gacaggaaaaaatacaacactgttctcatcattgatgtgcatgccagagacatagttgattctttcataagaggcaggtgagcattttccggggtcactgrcatttcaaaagggaccctttgtggtccgctgatctgtctcaacggtttccacttcctccacctttcttgccgtccagtatcctggaggcccgagagtttg

SEQ ID NO: 449082 - DNA, 201 bp, Homo sapiens
agtcctactttttaaaacaggggtgcctaagctttatgggctggggagagtcttggagccgtgataaaagctacggatagctgcttcctggaaaaggcgcrgctgtatgtgtgtgtggatgccggtccttccagaggtgtcaggctcaagctgtgatcctgtggtctagactaaccaaggggagactccctcccttcttgc

SEQ ID NO: 449083 - DNA, 201 bp, Homo sapiens
acaaatacaggcacttgcttacctaaaacctttactttgccctccctattccagatcaaagaaataaattcctgaagggactgttttgggtaccagtcccyggattgatcagagcctcttacaggtgtgcgttttctgcagagtcgactggatgctcctgtaccagggcatggtggtgctggccgctagccaggtgtggtg

SEQ ID NO: 449084 - DNA, 201 bp, Homo sapiens
ccatcagggttgaaacctgccagtgcaagagggagccagacccgatgctgtggcttcactgtctcttcggaggaaggtgttgctcaggaagttaaatccckcaggggtctgagtgatgtcagcaacaaagaagctgagtttttgatatcctggcataagtcagaattgcatctcaaaaccggcttgggcgttctaaccctg

SEQ ID NO: 449085 - DNA, 201 bp, Homo sapiens
acacgtacttaacgaaagccttccagcaacgggacccaaggatcccgtggggcagcctcaagtacctaattggagaggtaggggtgaccggggatccttcygcaggtgcctctggggctacagagctgtggcctcgtgcccctattttcctctgagccctcagaaccagcctcttctgcccctgtgttccccttgggtttc

SEQ ID NO: 449086 - DNA, 201 bp, Homo sapiens
actttgaaaggccgaggtgggcagatcacctgaggtcaggagttcaagaccagcctggccaacatggtgaaaccctgtctctactaaaatacaaaaattakctgggtgtggtggcatgtgcctgtaatcctagctacttgggaggctgaggcaggagaatcgcttgagcccgggaggcgaaggatgtagtgagctgagatc

SEQ ID NO: 449087 - DNA, 201 bp, Homo sapiens
aataagactcagttgctcctttctcaatgtcatagcctttgggggtagagaatgacagatctgaccaggtggccttcagttagtacacctatggattctcrtccctttccagtggcttttgccaccttcacacataaatggggacctatgtcatttctgagttgacgcacaatgaatattctttgcttttcccagtggtat

SEQ ID NO: 449088 - DNA, 201 bp, Homo sapiens
gtggtggtaataaaggcgaggtgtccttccgggcagcagatacccaagatactgatgcagtaggtacatgtgttccttctggaaaaaacaaaacggaatcrtactgtacatatcatttagtaacttccttacatttaaagaaattacacaaatactgccataacacatgttctcttatgaattcacagaacatagaattac

SEQ ID NO: 449089 - DNA, 201 bp, Homo sapiens
tgcctccagcaggcaccatgggttcctcttgcaaggatctccatagctgttccctcacctggaacattctgctcccctgaccttcttgtcctctctctccygtcacccccctcccatcttcctaccacgtaccactctccgaccttttcttatttttttccttgcttatttatctattgatcctttcaggccactagaatg

SEQ ID NO: 449090 - DNA, 201 bp, Homo sapiens
caggacgtggtgctgatgagggccttgcgagacatgaacttgcccaaatttgtgtttgaagatgttcctcttttccttggtttgatttcggatctgtttcytgggctggactgccctcgcgtccgctaccctgacttcaacgatgcggtagagcaggtcctggaggagaacggctacgcggtcctacccatccaggtaaag

SEQ ID NO: 449091 - DNA, 201 bp, Homo sapiens
gaatagggaatttcatttcacagtacttaaaaattgatgaataaggccaggcgcggtggctcacgcctgtaatcccagcactttgggaggccgaggtgggyggatcatgaggtcaggagattgagaccatcctggctaacatggtgaaccctgtctctactaaaaatacacacacatacacacaaaattagctgggcgtgg

SEQ ID NO: 449092 - DNA, 201 bp, Homo sapiens
gagaaatagaagaccttgacctgctggagtgctacttcctggaggctttgtactgctctctgggagcctccctgcttgaggatggaaggatgaaatttgaygaatatatcaaacgccttgcttctttgtctactgttgacacagaaggagtttgggccaaccctggggaactgccaggtgggaaccgagtgtcgcctgttt

SEQ ID NO: 449093 - DNA, 201 bp, Homo sapiens
ctggtggctgggagccctaggcagcttcagcatgggggctggttgccagaaagatcaagccataaattatttagaggtttggaactttcaggcgcccatcyttgccacccttggggagggaagaggggctggagattggagatcaacaaaggccagtgatctaatcagtcatgcctgtataatgaaacctccatgaacatc

SEQ ID NO: 449094 - DNA, 201 bp, Homo sapiens
tacagggtttccatttggggtgttgaaaaagttctggaaataggctgggtgcggtggctcacgcctgtaatcccagcactttgggaggccaaggcgggtgsatcacctgcggtcaggagttcgaggtcagtctggccaacgtggtgaaaccctgtctctactaaaaatccaaaagtcagccaggtatagtggcaggtgcct

SEQ ID NO: 449095 - DNA, 201 bp, Homo sapiens
ctgtgatcccagctgcttgggaggctaaggcacaagaatcgcttgaacccaggaggtggaggttgcggtgagctgagattgcgccactgcactccagcctrggtgacagagtgagactctgtctcaaaaaataaaaataaaaaagttgcaaatgtcatgtcatttgggtgcctctcattggtatgtttcccatgcaaattc

SEQ ID NO: 449096 - DNA, 201 bp, Homo sapiens
atcaccaagccccacccagacttccgcctgtggctcaccacggaccccaccaagggcttccccattgggattctgcagaagtccctaaaggtctggcttcrggatggacatcaacatgccagcacgcagcttctcagaacacctgcatgctgctctggggccggggtgtgcctttgtctgtgtagaaataaaccttaggct

SEQ ID NO: 449097 - DNA, 201 bp, Homo sapiens
tgctggcttgttttcaacacctgttacatctgtctctccctctcaacaaggagcaggcagccctcaggccctggtgacgtggagtcttagccctcttttcrctgtctgctggcttccctggagcactcacctttacctttgcaggcttcagtttcctcatctgtaaaactaggtagaagtaggcattttctagctaaagtt

SEQ ID NO: 449098 - DNA, 201 bp, Homo sapiens
ctacgagtacatgggcctgaacggcaggctggtcatcacgcccctcaccgatcggatttacctgacgctcacccaggtgactgccagcctggcacttgtgkttaccacttaccttggggcggggcattttctctaagcttgaggtgtgatgactgcagtgattgaaatagcaggggagatcattgctttgaaatctcgaaa

SEQ ID NO: 449099 - DNA, 201 bp, Homo sapiens
gggtctgagtgatgtcagcaacaaagaagctgagtttttgatatcctggcataagtcagaattgcatctcaaaaccggcttgggcgttctaaccctggacygtggtgatggtcgcgccgctgcagaactgtgccaaagtcaatcagttatacacttcaatgggtgaatgtttctgaggtcatgtcttggcctttgctcctg

SEQ ID NO: 449100 - DNA, 201 bp, Homo sapiens
tgtggggtttagaccctgtttctggggctcagtagctgagcttcatgtctgagccccagttgccatctctgtaaaatgtgggtgataataatccctaccartatactttgaggtatttgctttgaggactgaatgagatcgtgtatgtgacatgcttacctgccacatagcgaatgcttgataagtggcaattattaccat

SEQ ID NO: 449101 - DNA, 201 bp, Homo sapiens
ttccttcctcttcagggtataatccaatgatcccggcagaaaatatagaaaatgtggtgaagcatgttgtcttggttcaccaatccgtggaccactacagycaacagtttctacagaaattgaggcgcagcaactatgtcactcccaagaactaccttgattttattaacacctattcaaaattgctggatgagaaaactc

SEQ ID NO: 449102 - DNA, 201 bp, Homo sapiens
cttttgtgtctggcgcctttcactcagcctgatgttttcaaggtccgtccttgctgtagtgcatcagggcgtcattccttcctcgggctgaatgatattcyggtgtatgaacagacacattgtgttcatccatccatttgctgagggacagttgggttgtcctactttttggctgtttgaagaatgccgctgtgaatgttg

SEQ ID NO: 449103 - DNA, 201 bp, Homo sapiens
tacagagttgtataccaatcaccagagtcagtcttagaacatttttattatccctggaagaaatgctacatcctttagccatcacccctccagtccttccrtttctccctccccgagcccctggcagccactcatctgctttccgtctgtgaatgtgcctcctctggacatttcttaggaatggactcagacgctgtgtgg

SEQ ID NO: 449104 - DNA, 201 bp, Homo sapiens
ccccagtgaagagtcttcagccttttcctagagtatgtaatcctggctgccagccttcgtggaaccaagtgagaaaagaaggctgtcgatttcagcattcrtcgtgaaaacgttcactgaaagccatattttcagtacggtttaccctcaactatgcctggtgttcccccgtccagagaccctgctttatcttttccaaag

SEQ ID NO: 449105 - DNA, 201 bp, Homo sapiens
ccaagggacccattcagagtcagaattcacatgtacatacctttgctgaaaaacttctcccgaggttctgacttcaagctgcataaactttccctccaccmcccaataaatggcaatcctgaaacaccactatcacttaggcatagtgtgggtggtggacaagaccgaggtctgaaagagtttcaaacttcctgtgaaagt

SEQ ID NO: 449106 - DNA, 201 bp, Homo sapiens
tcgtttttctggagctctctttcaggccagatcctggccacatcccggggttgtgacccacgtgccttggtttcttgccaggtcgtttgctaagcccccgragcaggtgcagacggtctgcgaatgcatcctcatcatgaaagggtacaaagagctgaactggaaaacagccaagggcgtgatgtccgacccgaatttcct

SEQ ID NO: 449107 - DNA, 201 bp, Homo sapiens
ttgcaccgatatgtgaacaaataaccacgcccccaagatatgtgctggaaatgaggtggacagagtcctgagcttgcagaggaggaaggagagtggcccaytggcccagggaatgctgctgaggaggtggcctgggagtgaggctcagaaccagagcaggcttttgcctggtgcagaacaaggctttccaggcagagcgct

SEQ ID NO: 449108 - DNA, 201 bp, Homo sapiens
ctggaatgcagtggtgcgatcacggctcactgcaacctccacctcccaggctcaggtgatcctcctacctcagcctccagagtagctgggactaaaggcaygccaccacacccagctaagtttttgtatattttgtagagatggggtttcactatgttgcccaggctggtctcgaactcctgagctcaaacgatccaccca

SEQ ID NO: 449109 - DNA, 201 bp, Homo sapiens
tccggctggaaagcctgctcacggatgatgttgagatcagcaggtgtgtggcaccctgagccagcaggagggaggggacaccttagcacagggggtctacrtgggtgtcaccctggggggaggcaatggcctggggggcatcaccaggaccacagttggctcgactgcatggaagtggccgggcaagctgcaaacccagca

SEQ ID NO: 449110 - DNA, 201 bp, Homo sapiens
agaagtgaagtgacttgtctgagatcccatagaaagtgggagttcaagcagggatgacccacctgtgccctcagaggacaggaggtggggagggggtacaygtggaggagcggagaggcagtctctggctagtatcaagcattctgtaaggggaaggagaaccccgtgctgagctgggacctgccctgagcgctgggctgg

SEQ ID NO: 449111 - DNA, 201 bp, Homo sapiens
cctagctggaacagtgaccgatggagccccatttgagcccagccagtcagggctctgatggggctggggcttgcactgacacccctattccactagacccyacccagccacacccagacagggcaagtggagtggtggccccccttcctccacgtcaacctcactgcagtgtcttccccacccccgggatggcctcccccg

SEQ ID NO: 449112 - DNA, 201 bp, Homo sapiens
gagccctgcagcacagcctagctggaacagtgaccgatggagccccatttgagcccagccagtcagggctctgatggggctggggcttgcactgacacccmtattccactagaccccacccagccacacccagacagggcaagtggagtggtggccccccttcctccacgtcaacctcactgcagtgtcttccccaccccc

SEQ ID NO: 449113 - DNA, 201 bp, Homo sapiens
gccaggcaagcagggctggggaagggaagaggacagaggggagtgggccaaatgtctggagcacatggcttcggagagaagaccagactgtcctggctggsgtggggggaggtgctgagacctgggttattagaatgattgcgttcaaatgtgccagacactgcactgcgtgctttagccatatgatctcatcaaatcttc

SEQ ID NO: 449114 - DNA, 201 bp, Homo sapiens
ttgccccttgtgagtcagggctgccccattctctcaaggcctcagccctgttagtccttgactccttgtctcccctggaagccgggccttcccctcagcaktcagcctgcctcctccagtaaggcaggcatggtcccattggttcccaggcttccctgggcttcctgggccagccctgccatgaccctggacttctccagg

SEQ ID NO: 449115 - DNA, 201 bp, Homo sapiens
ttgagtgcctggtggcggggcccactgacgtggaggtggattggctgtgccgtggccgcctgctgcagcctgcactgctcaaatgcaagatgcatttcgayggccgcaaatgcaagctgctacttacatctgtacatgaggacgacagtggcgtctacacctgcaagctcagcacggccaaaggtaactccccactcaggc

SEQ ID NO: 449116 - DNA, 201 bp, Homo sapiens
tctatttattgagtacctactgtgtgcagtaaccacgttaggcattgtatgtacatatgacgtattagcctcacaatagctttgcaaaggaaggcattatyagtcccattttgttgacaaggaaacaggctttaatcagtgatggagttgggggtatacatactggactccagggcatacgtctggacctctccatcctgg

SEQ ID NO: 449117 - DNA, 201 bp, Homo sapiens
ctgcacactcacactcaggtgcacagtagcatggccctgagcactgtgcacctgacactaatgtccttctgggtctgggtgttggcctccggtctgcataygtcaatcaagctatcttccccaacaggctcagtggacgctccccgttctatgagccagacccccaggaaacggaggctcggattgtggggggccgctttg

SEQ ID NO: 449118 - DNA, 201 bp, Homo sapiens
agctctcccaggcctgagggtaccactcttcgacagggtccccctcagaaaccctacaccttcctggaggagaaagccaggcaagcagggctggggaaggraagaggacagaggggagtgggccaaatgtctggagcacatggcttcggagagaagaccagactgtcctggctggggtggggggaggtgctgagacctggg

SEQ ID NO: 449119 - DNA, 201 bp, Homo sapiens
cccgaagctctcccaggcctgagggtaccactcttcgacagggtccccctcagaaaccctacaccttcctggaggagaaagccaggcaagcagggctgggraagggaagaggacagaggggagtgggccaaatgtctggagcacatggcttcggagagaagaccagactgtcctggctggggtggggggaggtgctgagac

SEQ ID NO: 449120 - DNA, 201 bp, Homo sapiens
ttcgtccttgacactgggaccccgatcccagcctccactcctcaaggggttaaaccagtgtcttcctctactcctgtgtatgtggtgacttcctttgtgtstgcaccaccagcccctgagcccccagcccctgagccccctcctgagcctaccaaggtgactgtgcagagcctcagcccggccaaggaggtggtcagctcc

SEQ ID NO: 449121 - DNA, 201 bp, Homo sapiens
ggctaggccggagtggggactgagcacggttaggggggatgctggagtggggagtgagtgagggggcctggacatgtgctgcctcactcagcagcaactcstgctcctccctgtccccagacaagaagtccttgaggtcagagccctcagtgatcatcgtgtcctgcaaagatgggcggcagctgctcagcatcccccggg

SEQ ID NO: 449122 - DNA, 201 bp, Homo sapiens
tggggcctcagcacgccggtgtctacaagagcgtcattgccaacaagctgggcaaagctgcctgctatgcccacctgtatgtcacaggtgaggcaggcacyctcgtggtcagctgcacgcacagcctggcctctggcactacgtgggggctcagggaaaggggcctccacccagctcccttcccctccatcccctggggac

SEQ ID NO: 449123 - DNA, 201 bp, Homo sapiens
aatgaatgggtgactgttctatgcagagataactgcaaagagaagggaagggtgtctagggacagccctgacatgaaggaggacagtgcaggcctcctctvtgtgtcttcgccagagacagcctccttatcatccagggagcagggagtagggaaagagctttggaatcacatggtaccaaggtcaaactatcatttatta

SEQ ID NO: 449124 - DNA, 201 bp, Homo sapiens
agttgggtcaccagtacgtgcgcagtgagtcaggtaataagaggcctgctgggtgaggaccctcctcccctcctgccctcccctacccccatcagggagcrgtcatggctggtgagaggtgggccaccttgacaaacctagtggaaggggtctgctcagacaactataacaatagcagtagctgacattcattagataagc

SEQ ID NO: 449125 - DNA, 201 bp, Homo sapiens
cagggttaactgttcctaggagggagtgcatctgctgaggtgaacgtgggttcccacgcctgccctgcaagtcaccagccatataactttgaacaagtcasttcatctctctgagctttagcctgttcatctgtagaacagggatggtgatcattcctcctctgtagagggattggcaggattaatgagatagtttatgtg

SEQ ID NO: 449126 - DNA, 201 bp, Homo sapiens
actgaggcttagagagatacaggaagctgccaagaggcaagaaaggactgtctgaccctggtgcccagctcttaaccaggatgtccctgtcacccatgctrcatcctccctgcccacccgcctgcccatctccagtgatgccaccccggctccaacccctgcccacagcctcccatgactgtcattctcagcagcaggcct

SEQ ID NO: 449127 - DNA, 201 bp, Homo sapiens
tcagttccatccttgaaggaatctgagtcttgtgtgagaaggtctgcccccctcccataagacagtgcccactctttgacccacgatgatttcctcttatrgctgcaacatgacaaagatcactttcattaagtgctttctaagtgccaggtcctgagagctaaaggtatgacaaggaccatcttaccttgccacaggcct

SEQ ID NO: 449128 - DNA, 201 bp, Homo sapiens
ccttaggtcaggagtggtgggttgggatgcctgggcctccttagccttccctatctctgagctgccccctgccccacagatgagctgacctgcagtgcccrgctgaccgtgcggccctcgttggcacccctgttcacacggctgctggaagatgtggaggtgttggagggccgagctgcccgtttcgactgcaagatcagt

SEQ ID NO: 449129 - DNA, 201 bp, Homo sapiens
accacgttaggcattgtatgtacatatgacgtattagcctcacaatagctttgcaaaggaaggcattattagtcccattttgttgacaaggaaacaggctytaatcagtgatggagttgggggtatacatactggactccagggcatacgtctggacctctccatcctgggcgtcctcagtggagttctcccccatgcttg

SEQ ID NO: 449130 - DNA, 201 bp, Homo sapiens
ccaccagctagctgtgaaggcagcttctctgctttgctggaacagcctttctctgggggtctgtctgctccaggcttctctgctggccatattattgagawaatgataacaacaagagaagttagtatttatgatcagttactctatggcagacactttacatgcctcgtaattgtcacagcaagcatcctgtgggcgtgg

SEQ ID NO: 449131 - DNA, 201 bp, Homo sapiens
acaggctggctacattggaggaaggaaaactggtcgcatccctagccctgcatgtgcacagccaccagctagctgtgaaggcagcttctctgctttgctgraacagcctttctctgggggtctgtctgctccaggcttctctgctggccatattattgagaaaatgataacaacaagagaagttagtatttatgatcagtt

SEQ ID NO: 449132 - DNA, 201 bp, Homo sapiens
tcaaggacgacaagcaaaggcttcgggaggttgggttttccaggccagcatgcaggaagggagcgagtccatgaagccaggctgtgtgcaggatcttgacragccaccagtcctgttcttcccccatttcctggtaaaactcagaatagagtggctgtcgagtcttgcctcagctgggcttatagggattgtgtccagcct

SEQ ID NO: 449133 - DNA, 201 bp, Homo sapiens
cttccccctcccgtgggccttcatctcctgctcctgtcttctcgctttcactggctccatgcctagcttcctgcctgttccctgaccctctgcatgctcargcctcttccccagggctgaggtgggcctgggggggacaatcctgccccaggggtccctcaggtctgactccagtaccctgtctccagcgctcccagatca

SEQ ID NO: 449134 - DNA, 201 bp, Homo sapiens
gtgagagatgcgctgcccagagtaggagatgaggccctggccccaaggtagagatgaggccaggcccaggctgaaggtgagaccccactctgcaggacgargtgctgctgaccgagagcagccatgtgagcttcgtgtacgaggagaatgagtgctccctggtggtgctcagcacgggggcccaggatggaggcgtctaca

SEQ ID NO: 449135 - DNA, 201 bp, Homo sapiens
cagatgaggagactgaggccgaggctaagagtaactggcccaagttcacagaacctaataagtacaggagctgggttcaagtgtggctgcctgactcctarctcctgtgttaaacataataggaaatagtatctcagatataacaaacatgggaagaccaagttggtttttaaagaaacccatgggcacatcttatcaccg

SEQ ID NO: 449136 - DNA, 201 bp, Homo sapiens
tcctgacttctgtctgtccatctctgtcctgcactggtcccacacaatagcgttgggggtgaccaggcagtctcagccccttggttatgagcttcatgtgrgcaggttctcggttctcactcattcatcttcaaaccccagtgcctcagggcacagtgccaggcattgatggggtcttggggatttgggagggggggttca

SEQ ID NO: 449137 - DNA, 201 bp, Homo sapiens
ccaccgtgtgtgagtctgaggtgagggcagtgggtggcaggggccaggttgggcaccagccttcacccacctgagctttgagaaccaacaaatgggtcctsagtgtgccatctgtgcccacaggaagccaggggtggaggtggagagcactgttaggtaggcagcagagtccccacccaatgataccagacccccatctat

SEQ ID NO: 449138 - DNA, 201 bp, Homo sapiens
tgggagccaggaggtgaagcatccttccttgttcatttggcccgcacacctcgccttgtgtcttccagcctgagaacctgctggtgtgggatggtgctgcrggcgagcagcaggtgcggatctgtgactttgggaatgcccaggagctgactccaggagagccccagtactgccagtatggcacacctgagtttgtagcac

SEQ ID NO: 449139 - DNA, 201 bp, Homo sapiens
atgtggtgacttcctttgtgtctgcaccaccagcccctgagcccccagcccctgagccccctcctgagcctaccaaggtgactgtgcagagcctcagcccrgccaaggaggtggtcagctcccctgggagcagtccccgaagctctcccaggcctgagggtaccactcttcgacagggtccccctcagaaaccctacacct

SEQ ID NO: 449140 - DNA, 201 bp, Homo sapiens
tttgcaaaggaaggcattattagtcccattttgttgacaaggaaacaggctttaatcagtgatggagttgggggtatacatactggactccagggcatacstctggacctctccatcctgggcgtcctcagtggagttctcccccatgcttgagaccagaccctggtcttcctgacttctgtctgtccatctctgtcctgc

SEQ ID NO: 449141 - DNA, 201 bp, Homo sapiens
acaaatgccacctggtgctgcgccccatccccgagctgctgcgggcccccccagagcgggtgtgggtgaccatgcccagaaggccaccccccagtgggggrctctcatcctcctcggattctgaagaggaagagctggaagagctgccctcagtgccccgcccactgcagcccgagttctctggctcccgggtgtccctca

SEQ ID NO: 449142 - DNA, 201 bp, Homo sapiens
tgtgctcacttacattatgtgagtgtcccctaccccaccgcagccctctctgcccatacagtgagctcccggactcaccttctgccaacaccctctccccygtgccccacctcccctgtacacacatccacactgcacactcacactcaggtgcacagtagcatggccctgagcactgtgcacctgacactaatgtccttc

SEQ ID NO: 449143 - DNA, 201 bp, Homo sapiens
ggagaaggcaggctcaggcaggacaccatgggggccaggccccagaagcggatgggcaggggcaggagctgatggaatgctggtgggaccagctttgcccrtcttctctccacgttgcatggggctcttgctctgggtgaggagaggaggcacggggcactgccacattcccttcccatcctcagagtgggtgcctgggtc

SEQ ID NO: 449144 - DNA, 201 bp, Homo sapiens
agggaagggtgtctagggacagccctgacatgaaggaggacagtgcaggcctcctctctgtgtcttcgccagagacagcctccttatcatccagggagcasggagtagggaaagagctttggaatcacatggtaccaaggtcaaactatcatttattagccgtgggaccttgaacaagtcaatatctctgacctcattggt

SEQ ID NO: 449145 - DNA, 201 bp, Homo sapiens
gactgtcattctcagcagcaggcctccctgtctcccagtctgctctgaggccctgggtgagtgtctgtctcaggatctaagctggcgtctccgcttctgcstgtatctggggtcactggcagcccttggcttctcttctcttataaatagtgtcagcagagataaatgaatgggtgactgttctatgcagagataactgca

SEQ ID NO: 449146 - DNA, 201 bp, Homo sapiens
cattcattagataagctgagtgttctattaaacactttacaagcactgcctcattcaatcctgcagcactgtttgggaaatattagtatcattgtctctaytgtacaggtgaggaaacgggcttagtgatgctaaggatctgtccaagtcgcagggctagtaagtggagcagctgaagttggactgtgtgaccttctgcag

SEQ ID NO: 449147 - DNA, 201 bp, Homo sapiens
ccggggagatggcgctgtttgagtgcctggtggcggggcccactgacgtggaggtggattggctgtgccgtggccgcctgctgcagcctgcactgctcaartgcaagatgcatttcgatggccgcaaatgcaagctgctacttacatctgtacatgaggacgacagtggcgtctacacctgcaagctcagcacggccaaag

SEQ ID NO: 449148 - DNA, 201 bp, Homo sapiens
gccagcgtccaggaggagttgggtcaccagtacgtgcgcagtgagtcaggtaataagaggcctgctgggtgaggaccctcctcccctcctgccctcccctrcccccatcagggagcagtcatggctggtgagaggtgggccaccttgacaaacctagtggaaggggtctgctcagacaactataacaatagcagtagctga

SEQ ID NO: 449149 - DNA, 201 bp, Homo sapiens
caacccctgcccacagcctcccatgactgtcattctcagcagcaggcctccctgtctcccagtctgctctgaggccctgggtgagtgtctgtctcaggatmtaagctggcgtctccgcttctgcctgtatctggggtcactggcagcccttggcttctcttctcttataaatagtgtcagcagagataaatgaatgggtga

SEQ ID NO: 449150 - DNA, 201 bp, Homo sapiens
tcctccctgcccacccgcctgcccatctccagtgatgccaccccggctccaacccctgcccacagcctcccatgactgtcattctcagcagcaggcctccstgtctcccagtctgctctgaggccctgggtgagtgtctgtctcaggatctaagctggcgtctccgcttctgcctgtatctggggtcactggcagcccttg

SEQ ID NO: 449151 - DNA, 201 bp, Homo sapiens
ggatgtccctgtcacccatgctgcatcctccctgcccacccgcctgcccatctccagtgatgccaccccggctccaacccctgcccacagcctcccatgastgtcattctcagcagcaggcctccctgtctcccagtctgctctgaggccctgggtgagtgtctgtctcaggatctaagctggcgtctccgcttctgcctg

SEQ ID NO: 449152 - DNA, 201 bp, Homo sapiens
cactctccttttcccacaggcctgtgggtgttgttgccttcctctggtaaggacccctctgcaatgtcccagcagtctcctggcaggtctacccctaaccwttgcagggctgcagcccacccccttctcttccgcaccccccactccttcttgcactgcaaggagcctcatgtgcatgaaggtggacacccctgtctgcat

SEQ ID NO: 449153 - DNA, 201 bp, Homo sapiens
gggacagggcttgaggggttcttagctagggtataggggctcactgggactcttctttctcttgccaggagtcccaggaaagctagctcctccagaggtamcccagacctaccaggacacggcgctggtgctgtggaagccgggagacagccgggcaccttgcacgtatacgctggagcggcgagtggatggtgaggatgg

SEQ ID NO: 449154 - DNA, 201 bp, Homo sapiens
agcccaccctacccagtacccacgtcaccccaagtgagcccaagcctttcgtccttgacactgggaccccgatcccagcctccactcctcaaggggttaamccagtgtcttcctctactcctgtgtatgtggtgacttcctttgtgtctgcaccaccagcccctgagcccccagcccctgagccccctcctgagcctacca

SEQ ID NO: 449155 - DNA, 201 bp, Homo sapiens
cacgtcaccccaagtgagcccaagcctttcgtccttgacactgggaccccgatcccagcctccactcctcaaggggttaaaccagtgtcttcctctactcstgtgtatgtggtgacttcctttgtgtctgcaccaccagcccctgagcccccagcccctgagccccctcctgagcctaccaaggtgactgtgcagagcctc

SEQ ID NO: 449156 - DNA, 201 bp, Homo sapiens
cacacatccacactgcacactcacactcaggtgcacagtagcatggccctgagcactgtgcacctgacactaatgtccttctgggtctgggtgttggcctccggtctgcatatgtcaatcaagctatcttccccaacaggctcagtggacgctccccgttctatgagccagacccccaggaaacggaggctcggattgtgg

SEQ ID NO: 449157 - DNA, 201 bp, Homo sapiens
tccttctccctcctgaaagcagcagggcacggtggctgaagctcaggctttgggatcgggcctgctggggtccaaccccacaacctcagctttgctgctcyctggctgtgttcccctgacaaatcgctaaacctctctgagcttcagctttcccatctgtaaaaacggaactcaagtgttgatgaggggtgttagaggagt

SEQ ID NO: 449158 - DNA, 201 bp, Homo sapiens
ccgtgcaaggcagactcactgtccccattccggagactggggaactgagctcttgagctgcccaagatcacacatgtaggggtgggatccaggactgggacatgggtctgcgggaggacagagccccggcagctcccagagcttccttccaggttcatcatccctggctctgcctggcaggagccggccctccctgcagga

SEQ ID NO: 449159 - DNA, 201 bp, Homo sapiens; identical to SEQ ID NO: 106080

SEQ ID NO: 449160 - DNA, 201 bp, Homo sapiens
tgccccttgtgagtcagggctgccccattctctcaaggcctcagccctgttagtccttgactccttgtctcccctggaagccgggccttcccctcagcatycagcctgcctcctccagtaaggcaggcatggtcccattggttcccaggcttccctgggcttcctgggccagccctgccatgaccctggacttctccaggc

SEQ ID NO: 449161 - DNA, 201 bp, Homo sapiens
cctggcggcccctagaggcacggaccacagccaggcctcgggcttcaactggggttcccaccaatgccacgggacattccagggcccacgctgagccaggmgggcctggggcttcggttaccaccagcagcaacatctggctgggctcttacctcatagaccttcaaggacagagaccccagggcctggacctgatgccac

SEQ ID NO: 449162 - DNA, 201 bp, Homo sapiens
ttatttaaataaggagaaccagctaccatcgagcaccctgctaaatgcttgacgttcatgatctctcttccttggtgtggttctacaggccacactttacrgatgaggctgtggagagccaggcaggtttagtaaatcgcccagggtcccatagctagaaggggcaggtctgggattagagccagccaggctgattttgaa

SEQ ID NO: 449163 - DNA, 201 bp, Homo sapiens
gacattgtcctgctgctcaagcacccagggacctcccccgcccccacttccctgccaccaggaagctgggtcagcttggcctctgtctcctgtcagctcckgagatggtgaagggagaacccatcggctctgccacggacatctggggagcgggtgtgctcacttacattatgtgagtgtcccctaccccaccgcagccct

SEQ ID NO: 449164 - DNA, 201 bp, Homo sapiens
ccaccacctctgtcctgcctactggccttcagggcctgccactctggacattcccatggtctggtgaccaggacattgtcctgctgctcaagcacccaggsacctcccccgcccccacttccctgccaccaggaagctgggtcagcttggcctctgtctcctgtcagctccggagatggtgaagggagaacccatcggctc

SEQ ID NO: 449165 - DNA, 201 bp, Homo sapiens
ggtctgggtgttggcctccggtctgcatatgtcaatcaagctatcttccccaacaggctcagtggacgctccccgttctatgagccagacccccaggaaayggaggctcggattgtggggggccgctttgatgccttccagctgtaccccaatacatcccagagcgccaccctcttcttgcgaaaggttctctctgtacat

SEQ ID NO: 449166 - DNA, 201 bp, Homo sapiens
tgctgcaccatggatgcacttcttgctgcctgccccatccttgccccatccttgcccactcgcctcctccctgcagtggatgggggtgagggaccaggccygggatggcatgggcctacccctcaaggtatcctccgggctcaggcccagtgtcactgtccctcccctcccagacagggatgtccatcgcttggtgttccc

SEQ ID NO: 449167 - DNA, 201 bp, Homo sapiens
gggagaacccatcggctctgccacggacatctggggagcgggtgtgctcacttacattatgtgagtgtcccctaccccaccgcagccctctctgcccatayagtgagctcccggactcaccttctgccaacaccctctcccccgtgccccacctcccctgtacacacatccacactgcacactcacactcaggtgcacagt

SEQ ID NO: 449168 - DNA, 201 bp, Homo sapiens
tggtgcccagctcttaaccaggatgtccctgtcacccatgctgcatcctccctgcccacccgcctgcccatctccagtgatgccaccccggctccaacccstgcccacagcctcccatgactgtcattctcagcagcaggcctccctgtctcccagtctgctctgaggccctgggtgagtgtctgtctcaggatctaagct

SEQ ID NO: 449169 - DNA, 201 bp, Homo sapiens
tgggagtcagtgtggcaaagcgggggcaggacacagatacagtggcaggggcccagggctgggacatgagagaaggcagcgaggcggcagagggagaagaraggactcaggtggaggtggggtgggtcagctgtcagcatccctcagaggagaaatgtggagagctggaggccagcagtcactcacactcgctctgtcctc

SEQ ID NO: 449170 - DNA, 201 bp, Homo sapiens
gggactcgaaccctggtttctaggattgaactctggagcccacactggaaccactgcattcttgcccctaggggtccctgctctcctccgttagccctcaytatggaagtgtccccctcctctcctctgagccggtggtgtccctccccccgacacacaggggccgctttggtgttgtgcgagcgtgccgggagaatgcca

SEQ ID NO: 449171 - DNA, 201 bp, Homo sapiens
tcctgggtttgcagactcaggcaaagggcgcagaggtgagcacggatcacctgaagctattcctctcccggcggaggtggcaggtaagtgtggcaggccarcctctgtgctttccaccttctccttttctctagcactgccttccccctcccgtgggccttcatctcctgctcctgtcttctcgctttcactggctccatg

SEQ ID NO: 449172 - DNA, 201 bp, Homo sapiens
ccctgcaccgcacatctcctggatgaaaggtaaggagactctgtctcccacagagagggaggccagcaagtggccctgagcccaggggatgggaggggctrggccggagtggggactgagcacggttaggggggatgctggagtggggagtgagtgagggggcctggacatgtgctgcctcactcagcagcaactcctgct

SEQ ID NO: 449173 - DNA, 201 bp, Homo sapiens
cctcaaggccagccagggcccggcctcctgactctcctacctcactggccccacccctagctcctgctgcccccacacccccgtcagtcactgtcagcccmtcatctccccccacacctcctagccaggccttgtcctcgctcaaggctgtgggtccaccaccccaaacccctccacgaagacacaggggcctgcaggctg

SEQ ID NO: 449174 - DNA, 201 bp, Homo sapiens
tgggtgactgttctatgcagagataactgcaaagagaagggaagggtgtctagggacagccctgacatgaaggaggacagtgcaggcctcctctctgtgtyttcgccagagacagcctccttatcatccagggagcagggagtagggaaagagctttggaatcacatggtaccaaggtcaaactatcatttattagccgtg

SEQ ID NO: 449175 - DNA, 201 bp, Homo sapiens
catctgctccatccctgccctcccaggttccggtattctgaggatgacgtggccacttacatggtgcagctgctacaaggcctggactacctccacggccrccacgtgctccacctagacatcaagccagacaacctgctgctggcccctgacaatgccctcaagattgtggactttggcagtgcccagccctacaacccc

SEQ ID NO: 449176 - DNA, 201 bp, Homo sapiens
ggaggccagcaagtggccctgagcccaggggatgggaggggctaggccggagtggggactgagcacggttaggggggatgctggagtggggagtgagtgasggggcctggacatgtgctgcctcactcagcagcaactcctgctcctccctgtccccagacaagaagtccttgaggtcagagccctcagtgatcatcgtgt

SEQ ID NO: 449177 - DNA, 201 bp, Homo sapiens
ccatggccttgccccaaggcaccacggtgatgattttctctctctcttagattcttcagctgtgccatctgctgcccaccaagaggcccctgtcacctcarggccagccagggcccggcctcctgactctcctacctcactggccccacccctagctcctgctgcccccacacccccgtcagtcactgtcagcccctcatc

SEQ ID NO: 449178 - DNA, 201 bp, Homo sapiens
cagacttccccccagtcttccacatcaaactcaaggaccaggtgctgctggagggggaggcagccaccctgctctgcctgccagcggcctgccctgcaccrcacatctcctggatgaaaggtaaggagactctgtctcccacagagagggaggccagcaagtggccctgagcccaggggatgggaggggctaggccggagt

SEQ ID NO: 449179 - DNA, 201 bp, Homo sapiens
agtgtccccttacctcatccgctccccgttccctgcagaaacaaggctgtcccaggctactttaacaaccagggctggcacctaggaatgggggtggggcyggcggggctggcagggctgggcccgggtcactttcacctctgagagaggtggcctctctctctctctccctgctacccagtaccctcacttggcctggag

SEQ ID NO: 449180 - DNA, 201 bp, Homo sapiens
ggatctgtccaagtcgcagggctagtaagtggagcagctgaagttggactgtgtgaccttctgcagccaggtccctgaaacggcttcaggacaccacttaygtctgtcgggctggcctcctctctcctgggagaccctagaatgtttctgtaactggctgtacttttcaaggagctcaagatatagggccctcctgcctcc

SEQ ID NO: 449181 - DNA, 201 bp, Homo sapiens
tcattcaatcctgcagcactgtttgggaaatattagtatcattgtctctattgtacaggtgaggaaacgggcttagtgatgctaaggatctgtccaagtcrcagggctagtaagtggagcagctgaagttggactgtgtgaccttctgcagccaggtccctgaaacggcttcaggacaccacttatgtctgtcgggctggc

SEQ ID NO: 449182 - DNA, 201 bp, Homo sapiens
cttggggcccgtaggctacaggagtctccttccctgtctgccctcagcgaggcccagccatccagccctgcacggcccagcgcccccaaacccagtacccytaagtctgcagaaccttctgccaccacacctagtgatgctccgcagccccccgcaccccagcctgcccaagacaaggctccagagcccaggccagaacca

SEQ ID NO: 449183 - DNA, 201 bp, Homo sapiens
atctgtgaatagacacttttacttctgctttccaatttggggagaacctccaatacaatgttgttttgttttgttctgagacggagtctcgctctgtcgcycaggctagagagcaatggcgcgatcttggctcactgcaagctccgcctcccaagttcaagcgagtctcctgcctcagcctcccaagtagctgggactaca

SEQ ID NO: 449184 - DNA, 201 bp, Homo sapiens
tcttggctcactgcaagctccgcctcccaagttcaagcgagtctcctgcctcagcctcccaagtagctgggactacaggcacgcaactccgtgcctggctratttttatttatttattattattattattattattattatttttagtagagacggggtttcaccattggccagggtggtctccaactcctgacctaaggt

SEQ ID NO: 449185 - DNA, 201 bp, Homo sapiens
aattagtatcattttaaaattgggagatttcacatcacaatcttatttttggattttctttaaaaatgcacattccaggctgggcgcagtggctcacgtgygtaatcccagtactttgggaggctgagggcggatcacaaagccaggagttcaagaccaacctgggcaatatggtgaaaccccatctctactaaaaatata

SEQ ID NO: 449186 - DNA, 201 bp, Homo sapiens
gcatttccctggtcctgggcaccctgataagcatcctgaaaaatcagctggggcatatttttaccaatgatgagtaggtaatcagttttctgtgctgactsttggaaaatgtcaaagtggttcccagtgtgtcctcagatttatcacattcctggctcagtgctgggcccaaaggaagcaggaagagcccaggcttggctc

SEQ ID NO: 449187 - DNA, 201 bp, Homo sapiens
gcgaatggcttagcacagtgcctgctgcatgacacctgctcttagtctcatcatcctgactcttgcccatttctgtctcccctcctagtgtgtctatggcrgagttctgagaggaactgggaagcaggcctttggtgccgctgtgaatgccatcacatattacatcatcggcctaccactgggcatccttctgacctttgt

SEQ ID NO: 449188 - DNA, 201 bp, Homo sapiens
gtgaggaacttccatactgttctccacagtggctgtactaatttacattcccaccaacagtgtacaagggctccctttttttttttttagacggagtttcrctcttgttgcccaggctggagtacaatagcgcaatctcggctcactgcaacctccgcctcccaggttcaagcaattctcctgcctcagccttcccgagta

SEQ ID NO: 449189 - DNA, 201 bp, Homo sapiens
tagtgcctgccttttgaatagaagccattttaactggggtgagatgatatctcattgtagttttgatgtgcatttctctaacgatcagtgatgttgggcaycttttcatatatgtttgccatttgtatgtcttcttttgagaaatgcctattcagatcttatacattttaggattattttttctatttctgtccattttta

SEQ ID NO: 449190 - DNA, 201 bp, Homo sapiens
cttccgcagtggctacaggcagttcccctggcattaccttgacaacgtattcaaggtctgagtgccacgtggacttcttcaggactccagaggaggcccaygccctttcagctcctaccagcagactatcagtgaaacagctggtcatccgccgtggggctgctctgggggcggcgtcagccacactgatggtggggctca

SEQ ID NO: 449191 - DNA, 201 bp, Homo sapiens
gcctgtaattccagctacttgggagagagaggcagagaatcgcttgaacccgggacgggtaggttgcagtgagccgagatcgcgccactgcactccagccygggcaacaagggcgaaactccgtctcaaaaaaaaaaaaaaaaaaaaaaaaaacaaaaccaaaaaggagtaatggaattgcacttcctgtaaaacttttag

SEQ ID NO: 449192 - DNA, 201 bp, Homo sapiens
gaaggccgctgtgccattacaggctgcgggcgccaggctgtggtcaccagaggccgccgggtccgccacacaccgctggcgccgctgacagcccgctcccygcgcgggatttaggaatgtcccgggcagtggaaacggctgacgcggggcgggctgttttgcagagcttcggcagccccaacaagaagcacgtgggcgtga

SEQ ID NO: 449193 - DNA, 201 bp, Homo sapiens
ccagctacttgggagagagaggcagagaatcgcttgaacccgggacgggtaggttgcagtgagccgagatcgcgccactgcactccagcctgggcaacaasggcgaaactccgtctcaaaaaaaaaaaaaaaaaaaaaaaaaacaaaaccaaaaaggagtaatggaattgcacttcctgtaaaacttttagaaaaaaatga

SEQ ID NO: 449194 - DNA, 201 bp, Homo sapiens
gctacttgggagagagaggcagagaatcgcttgaacccgggacgggtaggttgcagtgagccgagatcgcgccactgcactccagcctgggcaacaagggsgaaactccgtctcaaaaaaaaaaaaaaaaaaaaaaaaaacaaaaccaaaaaggagtaatggaattgcacttcctgtaaaacttttagaaaaaaatgaaag

SEQ ID NO: 449195 - DNA, 201 bp, Homo sapiens
gacagttctctgatctcttgcccccagaggaggtcaccaagtagagaaagacaaccggttccccagcctcaatcctaagttcggctgcctacatgcaggcwtgtgtcgaaggccaaggggacacagaaggaacctccctgcttgcaggggcctgcagtccagcaggggctgcccaggtggccatggggtcacaaagcggca

SEQ ID NO: 449196 - DNA, 201 bp, Homo sapiens
tcgaagaaatgaagtgtgtgcattttcccatattccgaaaaggagaaagatgacaaccactttttgatgaattatagatgatgatgatgatgatgatgatkattattattattattattacttgagacagagtctcgctctgtcgcccaggctggagtgcagtggtgcaatcttggctcactgcaacctctgcctcccagg

SEQ ID NO: 449197 - DNA, 201 bp, Homo sapiens
gtgagcccgggggctggtggggcctggtcaggggacactgcccactgagctctccacccctggtggagacagatcagtcaccatcctggccctgcctgtgycgtcctgaagtggagggttatggggagttggaggggcctgatggtcccttggggacctcagtttgacgcttgattgggtgagaggacagccactccccgc

SEQ ID NO: 449198 - DNA, 201 bp, Homo sapiens
agacggggtttcaccattggccagggtggtctccaactcctgacctaaggtgatccaccctcctcagcctcccaaagtgctgggtttacaggtgtaagccmctgtgcccagctctccagtacaatgttgaatccaagtgtaaagagcatacatctgagccttgattccactattaaggggaaagtattcgaagtattcagt

SEQ ID NO: 449199 - DNA, 201 bp, Homo sapiens
ttatactgcccggctggactggaagcttgctgcagaggaggtaagtgggtcagctgaccctggccacaagacaccctgcacctgaccccagcaggtggagkgactactcagccagaaatgcccagagcacatcagaacttggcagcagtgtggtataagctgcaggtgttttttttgtttgtttgtttgtttgtgagatgg

SEQ ID NO: 449200 - DNA, 201 bp, Homo sapiens
acaatctgggctcactgcaacctctgcctcccgggttcaagcgattcttctgcctcagcctcctgagtagctgggactacaggtgtgtgccacctcgtccrgctaatttttgtatttttagtagagatggggtttcaccatgttggccaggctggtttcgaattcctgacctcgtgatccacccgccttggcctcccaaag

SEQ ID NO: 449201 - DNA, 201 bp, Homo sapiens
ctctgttttctttaaaaagttttaatgttaagtctttcttacatttaggtttatgatccttttttttttttttttgagatggagtcttgctcttttacccrggctggagtgcagtggcacaatctgggctcactgcaacctctgcctcccgggttcaagcgattcttctgcctcagcctcctgagtagctgggactacagg

SEQ ID NO: 449202 - DNA, 201 bp, Homo sapiens
attaatgtcattatctttttcctttgagacggagtcttgctctgtctcccaggctggagtgtagtagcacgatctcagctcactgcaagctccacctcccrggttcatgccattctcctgcctcagcctcccgagtagctgggactacaggcatgcaccacctacacctggctaattttttttatttttatttttagtaga

SEQ ID NO: 449203 - DNA, 201 bp, Homo sapiens
caggaacacaccccttgcatacattcccatagctctgcagaaggatatgcccttacttagcaatactggcgcattccagccctttccctacctggggaaaraacacttgcataataattaccaactcattacaaatctactgaaagaaatcatatttatggaggatatttccaaaggcctctgtgtactccatccagttcg

SEQ ID NO: 449204 - DNA, 201 bp, Homo sapiens
ccccattccctctcccactatccatcccagcctctagtaaccatcattctattcactatctccatgagttcaattgttttaatttatgtctcctacaaacragtgagaatgtacaaagtctggctttctgtgcctggcttatttcacctaacataatttcctccaggtccatgcatgttgttgcaagtgacaggatcctat

SEQ ID NO: 449205 - DNA, 201 bp, Homo sapiens
cagcagtgatgctctcattttcatttctgattttggtaatctatgtctaactctctttgttttttggttttattttaccaagatcagatccttggtaagcrtgggtcaattttatggatcttttctttttctttttttttttttgacatggagtctcgctctgttgcccaggctggagtgcagtggcacgatcttggctca

SEQ ID NO: 449206 - DNA, 201 bp, Homo sapiens
ccgcacagaggcaggtgagaggctgtgcgtcccagcctcttccaactcctcaacagggatggctgaaggggcaggaggaggagtccccattccaaaccccrggtttgtccatcctccatccatctcactcacaccttagcagggccagttttcatttatttcagaagatcacctggccccaagtcctcagtggtgtggtgg

SEQ ID NO: 449207 - DNA, 201 bp, Homo sapiens
ccgggttcaagcaattcccctgcctcagcctcccaagtagctgggattacaggcacgcaccaccacacctggctaatttttgtactttgagtagagatggkatttcaccatgttggccaggatggtcttgatctcctgacctcgtgatccacctgcctcggcctcccaaagtgctgggatcagaagcatgagccactgcgc

SEQ ID NO: 449208 - DNA, 201 bp, Homo sapiens
tttaccaatgatgagtaggtaatcagttttctgtgctgactcttggaaaatgtcaaagtggttcccagtgtgtcctcagatttatcacattcctggctcartgctgggcccaaaggaagcaggaagagcccaggcttggctctcactgagaggaagccaacttctgtctatccaccccaggcctttagtgcctgtccatag

SEQ ID NO: 449209 - DNA, 201 bp, Homo sapiens
tctcctgcctcagcctcccaagtagctgggactacaggcacgcaactccgtgcctggctgatttttatttatttattattattattattattattattatttttagtagagacggggtttcaccattggccagggtggtctccaactcctgacctaaggtgatccaccctcctcagcctcccaaagtgctgggtttacagg

SEQ ID NO: 449210 - DNA, 201 bp, Homo sapiens
gtctcctgcctcagcctcccaagtagctgggactacaggcacgcaactccgtgcctggctgatttttatttatttattattattattattattattattatttttagtagagacggggtttcaccattggccagggtggtctccaactcctgacctaaggtgatccaccctcctcagcctcccaaagtgctgggtttacag

SEQ ID NO: 449211 - DNA, 201 bp, Homo sapiens
acatttaagatattaatccaactaaaatttttttgaacaccatttattacatattctctcctttctgcattaatttgttaattaatcaacagtacatctakctaggtcagtgattgtatgtccagtgacccggggatctgtatgtctcttctgcagcccagtgcttcactgtttgacttgcagcttagtgatgcctgttac

SEQ ID NO: 449212 - DNA, 201 bp, Homo sapiens
agtctcctgcctcagcctcccaagtagctgggactacaggcacgcaactccgtgcctggctgatttttatttatttattattattattattattattattatttttagtagagacggggtttcaccattggccagggtggtctccaactcctgacctaaggtgatccaccctcctcagcctcccaaagtgctgggtttaca

SEQ ID NO: 449213 - DNA, 201 bp, Homo sapiens
cactttctgacagtgtagcctccatggcaccagggggaatgtttggggcaagggagctgggcagggaagaggtcagggtgaaggtggggtgtcccaacagygtgcagtcccagcagacccagccacacccacctctctgccaggccagtgccatgacctttttggggcctagctggttacagatttttttctggtttacgg

SEQ ID NO: 449214 - DNA, 201 bp, Homo sapiens
gagtctcctgcctcagcctcccaagtagctgggactacaggcacgcaactccgtgcctggctgatttttatttatttattattattattattattattatwatttttagtagagacggggtttcaccattggccagggtggtctccaactcctgacctaaggtgatccaccctcctcagcctcccaaagtgctgggtttac

SEQ ID NO: 449215 - DNA, 201 bp, Homo sapiens
ggaagggcccgccacccccgtagggtcttgaacctgcttagcataggctgcccacggccagcatgtctcagtacctgccattccctcgtccgaggtcacaycttcaaatcctgtctctaaggccagaaccaaagtgggcccttctgtgaacaggtccttgggtcacttctcaccttcctaagctgatggaagcctggctta

SEQ ID NO: 449216 - DNA, 201 bp, Homo sapiens
tccacctcctgggttcaagcaattctcctgcctcagcctcccaagtagctgggactacaggtgcgcaccactctgcctggctaatttttttttttttttttgtattttagtagaaatggggtttcaccatgttggccaggatggtcttgatctcctgatctcatgatctgcccacctcggcctcccaaagtgctgggatta

SEQ ID NO: 449217 - DNA, 201 bp, Homo sapiens
gggtttcttggattgtagatggtcatcttttccctgtctcttcaagtcttccttccatgtctgtctctgtccaaattctctctattttttttttttttttttgagatggagtcttgctatgttgccaggctggagtgcagtactgcaatctggccttactgcaacctccacctcctgggttcaagcaattctcctgcctca

SEQ ID NO: 449218 - DNA, 201 bp, Homo sapiens
tcatatttgtggcctttatcaaggaacattaaatgaaactactttatggagcccattattgcttttgtcataggatactatttttttttttttttttttttgagacagagtctcattctgtcgcccaggctggagtgcagtggtgtgatcttggttcactgcaacctccacctcctgggttcaagtgattctcatgcctca

SEQ ID NO: 449219 - DNA, 201 bp, Homo sapiens
ccagtgcctgagcctgctaagccccagagcaggaagagccaaaggggtttaggggcctcctggcagtggggagcaggaatgaggtgggcaagcagggcagrctgtcagctcatggggcctctgtttccaggttggtccagccagtgcctgcaggactggggccccttcttctccctggctgtccccagcatgctcatgatc

SEQ ID NO: 449220 - DNA, 201 bp, Homo sapiens
agaaaattcaaatcacctataattctaccacccagagagaacatatgttactatctctctccaggatttgattttttttgagatggagtcttgctctgtcrcccaggctggagtgcagtggcacaatcttggctcactgcaacctccgcctcctgggttcaagccattctcctgcctcagcctctggagtagctgggatta

SEQ ID NO: 449221 - DNA, 201 bp, Homo sapiens
gcctaggcaacagagtaagactctgtctcaaaaaaaaaaaaaaaaaaaaagcacattccatcgagcagcaggccacattcctgcacactgcagtcggccaragctgggtgacagcgtccccagcagggccatgggctctcctccaccacagcccccacctcccctctactccccacagagacacagccatcgtcttgctta

SEQ ID NO: 449222 - DNA, 201 bp, Homo sapiens
gctgggtgtggtggcaccacctgtagtcccagctacttgggggcctgaggtgggaggatcacctaagccaggaggtggaggctgcagtgagctataattgygccactgcactccagctcaagcgacagagtgagaccctgtctcaaggaagaaaaaaaaaaaaagcccctgagtccccaaagcaaagcagcgtcctgtcgg

SEQ ID NO: 449223 - DNA, 201 bp, Homo sapiens
gtagtcccagctacttgggggcctgaggtgggaggatcacctaagccaggaggtggaggctgcagtgagctataattgcgccactgcactccagctcaagygacagagtgagaccctgtctcaaggaagaaaaaaaaaaaaagcccctgagtccccaaagcaaagcagcgtcctgtcggcgcagggtctgggtgtctgggg

SEQ ID NO: 449224 - DNA, 201 bp, Homo sapiens
cgcagggtctgggtgtctggggctgcgggccggactcacggcgggcctcttctctagggctgctcagtgtggtggatctctctgcccaggctgtcatctaygaggtggccactgtgacctacatggtaaggctcctgcaggggtgccttccccacatcccccacctgatggctggaggtgtcataggaggggggcaggctg

SEQ ID NO: 449225 - DNA, 201 bp, Homo sapiens
ataatgctgtttagaatgttcacgtggaagtctttgtgtggatttgttttcatttcttttagtagagttctgggagttgaactgttaagtcaaatgataaytttatttttagctttttaagaaactgccagccaggtgcagtagagctcatgccagcataccagtgctggtaatcccagcactttgggaggctgaggtggg

SEQ ID NO: 449226 - DNA, 201 bp, Homo sapiens
gggtgggcccactgacagtgctttcttatctttgatcccagattcccttggggctcagcatcggggtctgtgtccgagtggggatggctctgggggctgcrgatactgtgcaggccaagcgctcggccgtctcgggcgtgctcagcataggtaggtggagtcctctcctggtgggccttcaaacgttggcctgagtcacca

SEQ ID NO: 449227 - DNA, 201 bp, Homo sapiens
ttccagttttatttcactgtggtcagagaaaatacctgataggatttcaattttttctgaattttttaagacttgttttgtgactcaaatatggtctgtcyttgagaatgatccatatgttgaggagaagaatgtgtattctgcagcagctgaatgaaatcttttgtaaatatctattaggtctatttagtctctagggca

SEQ ID NO: 449228 - DNA, 201 bp, Homo sapiens
atatatttataaatgtgatattctcttgctgaactgaccccctttatcgttatacaatgaccttgtctctttttacagttttggtcttgaaatctattttrtctaagtataaactactcctgatcacttttggtttcaatttgcatgcaatatctttttccatctctttattttcagtctatgtgtgtctttgtaggtgaa

SEQ ID NO: 449229 - DNA, 201 bp, Homo sapiens
cagtggcatgttgctcttgtctgccctctgtgcctcatgcaattggaaattgtacaagcccaagctatttttcttcccattattatgaaaatgatgtcctragcaccaggaagacaacaacatctattgtctagcaggcatgcaagtaccaggccccacaccaagtctttggccttgagaggcaactagatgtatgcccat

SEQ ID NO: 449230 - DNA, 201 bp, Homo sapiens
cagccagggaagggcccgccacccccgtagggtcttgaacctgcttagcataggctgcccacggccagcatgtctcagtacctgccattccctcgtccgargtcacaccttcaaatcctgtctctaaggccagaaccaaagtgggcccttctgtgaacaggtccttgggtcacttctcaccttcctaagctgatggaagcc

SEQ ID NO: 449231 - DNA, 201 bp, Homo sapiens
gaatgtcccgggcagtggaaacggctgacgcggggcgggctgttttgcagagcttcggcagccccaacaagaagcacgtgggcgtgatcctgcagcggggmgcgctggtcctgctcctctgctgcctcccttgctgggcgctcttcctcaacacccagcacatcctgctgctcttccggcaggacccggacgtgtccaggt

SEQ ID NO: 449232 - DNA, 201 bp, Homo sapiens
agctttggaagaacagtggagacagtggtaggcccaggctcaggaaggccgctgtgccattacaggctgcgggcgccaggctgtggtcaccagaggccgcmgggtccgccacacaccgctggcgccgctgacagcccgctccccgcgcgggatttaggaatgtcccgggcagtggaaacggctgacgcggggcgggctgtt

SEQ ID NO: 449233 - DNA, 201 bp, Homo sapiens
atttcacatcacaatcttatttttggattttctttaaaaatgcacattccaggctgggcgcagtggctcacgtgtgtaatcccagtactttgggaggctgrgggcggatcacaaagccaggagttcaagaccaacctgggcaatatggtgaaaccccatctctactaaaaatataaaaagttagccaggtatggtggcaca

SEQ ID NO: 449234 - DNA, 201 bp, Homo sapiens
taagccaggaggtggaggctgcagtgagctataattgcgccactgcactccagctcaagcgacagagtgagaccctgtctcaaggaagaaaaaaaaaaaaagcccctgagtccccaaagcaaagcagcgtcctgtcggcgcagggtctgggtgtctggggctgcgggccggactcacggcgggcctcttctctagggctgc

SEQ ID NO: 449235 - DNA, 201 bp, Homo sapiens
gcatagactattattattaaaagatttcttccaattagaaatagtattaacatgcatttcttttttcttttccttttttttttttttttttttttttttttgagacggagttttgctctgtcatccaggctggagtgcagtggtacgatctccgctcactgcaacctctgcctcccagattcaagcaattctgcctcagcc

SEQ ID NO: 449236 - DNA, 201 bp, Homo sapiens
ctactcccaccagcaaaaacttccactagcatagactattattattaaaagatttcttccaattagaaatagtattaacatgcatttcttttttcttttcyttttttttttttttttttttttttttttgagacggagttttgctctgtcatccaggctggagtgcagtggtacgatctccgctcactgcaacctctgcct

SEQ ID NO: 449237 - DNA, 201 bp, Homo sapiens
gcattttcccatattccgaaaaggagaaagatgacaaccactttttgatgaattatagatgatgatgatgatgatgatgattattattattattattattwcttgagacagagtctcgctctgtcgcccaggctggagtgcagtggtgcaatcttggctcactgcaacctctgcctcccaggttcaagtgattctcctgct

SEQ ID NO: 449238 - DNA, 201 bp, Homo sapiens
ctttcgaagaaatgaagtgtgtgcattttcccatattccgaaaaggagaaagatgacaaccactttttgatgaattatagatgatgatgatgatgatgatkattattattattattattattacttgagacagagtctcgctctgtcgcccaggctggagtgcagtggtgcaatcttggctcactgcaacctctgcctccc

SEQ ID NO: 449239 - DNA, 201 bp, Homo sapiens
ttgctcagcagcaggcagcccccacacagaaggggtgggtgtgcctcagctggaaacccacaaaagcctgagttggaagatggctccaggacaaatgggasccagagatgcatgaagcctgcagcaccttcgcagggggaagaaggggccggctacccatttcatttccaaaggggaaattgttttaaatacatttatttt

SEQ ID NO: 449240 - DNA, 201 bp, Homo sapiens
tgtttaacaaagcacatcttgcaccgcccttaatccatttaaccctcccagacggggcggccaggcagaggcgctcctcacctcccagatggggcgactgrgcagaggcactcctcacttcccagacggggcggccaggcagaggggctcctcacatcccagatgatgggcggccaggcagagacgctcctcacttcctag

SEQ ID NO: 449241 - DNA, 201 bp, Homo sapiens
cccttaatccatttaaccctcccagacggggcggccaggcagaggcgctcctcacctcccagatggggcgactgggcagaggcactcctcacttcccagayggggcggccaggcagaggggctcctcacatcccagatgatgggcggccaggcagagacgctcctcacttcctagacgtggtggcagccaggcagaggcgc

SEQ ID NO: 449242 - DNA, 201 bp, Homo sapiens
atcaaaattttcaagtttgaaatatttttaaatttctcatgtgatttattctttgacttatggtttagaagtgcatttaatttccaaatatttggggtttkatttctggcaggcatctctaatttaattctgttgtggccagagaacatactttgtatgaattcagtctttcaaaatttgccaggcatgatggaatgtgcc

SEQ ID NO: 449243 - DNA, 201 bp, Homo sapiens
gtcctatcttcaggtaatactgtcaccgctgcttctactttggtacacatataaatgtcagtggcatgttgctcttgtctgccctctgtgcctcatgcaaytggaaattgtacaagcccaagctatttttcttcccattattatgaaaatgatgtcctaagcaccaggaagacaacaacatctattgtctagcaggcatgc

SEQ ID NO: 449244 - DNA, 201 bp, Homo sapiens
tttatgtgtattttatcaaaattaaaagaattttttttaatcaaccctgacataaagtattgatacaaggctgggtgcagtggctcatgcttgtaatcccyggactttgggaggctgaggcaaaggaggtcctcacttgaggtcaggagttcaagaccagcctggccaacatggcgaaacctgtctctacaaaaaatacaa

SEQ ID NO: 449245 - DNA, 201 bp, Homo sapiens
gggtatgtggtgtgaggaagtcgggagaggcctgggtggtcgtcggacattgttcccatcatcacttgtctcctccaggcctctggctgggcatgctggcstgtgtcttcctggcaactgctgcctttgttgcttatactgcccggctggactggaagcttgctgcagaggaggtaagtgggtcagctgaccctggccaca

SEQ ID NO: 449246 - DNA, 201 bp, Homo sapiens
tcttgatctggcttttgtgtaagggtaacattggctttacagaatgagtttggaagtattctctcctccagtactttctaaaagagtttgtgaagaactgrcattatttcttgtttaaatattgaatacaattcatcggtaaggtcatgtgggctttggcttttgtcagaagagtttaaattataaattcaatctatttac

SEQ ID NO: 449247 - DNA, 201 bp, Homo sapiens
gccagtttgtcaatgtctgcggagtttctgtaggagttggtttgtcttcggcatgtgacaccttgatgtctcaggtgggtggcctcctggagctgggcagraagccaggcaagggcagagccaattccacaggtgccatggagatggcaggtgggaggggcgcagccaggtgatctgggagcaatgggccctggggtcagc

SEQ ID NO: 449248 - DNA, 201 bp, Homo sapiens
caccaattctacctttactttctagggaggccatatggtgtggcagtgaagcctgagtactgtagggttgtgttcaaaacacagttacttctgtgtaacayggacaagtgatctgacctgtcttggacagccaccctcagggaagaaagggagataagggcacccatccagtgctgtgagaactcagtgaagcaatgccat

SEQ ID NO: 449249 - DNA, 201 bp, Homo sapiens
agtataccttttgttgtttatattaaaacctagtggttgaatttgaaatgaataatagttctattttctgttaattttgtattataggcgtcattgatggytatgcagatgaaaaaactctttttgaaaggcaaattcaggaaaaaactgatataatagatcgtcttgagcaggagttgttatgtgcaagtaacaggttgc

SEQ ID NO: 449250 - DNA, 201 bp, Homo sapiens
ttttggaaagagcattgatttgttccaactccttatatctgtaggcagtcattccttggatggttttattagaatgtataagagccttgaatttagctatrttttttttaaattatgtgtttcttgtgtttccgctgtcattcagacaactactgagctatttcatagcaatgaagaaagtggattttttaatgaactcga

SEQ ID NO: 449251 - DNA, 201 bp, Homo sapiens
caagaaagcaaaaaggcctgcatgtttgagccacttcctataaaactgagtaagagcattgcatcccagacagatgggactctgaagatcagtagcagcartcagactccacaaattcttgttaaaaatgcaggaatacaaattaatttacagagtgaatgttcctcagaagaagttactgaaataatcagtcagtttact

SEQ ID NO: 449252 - DNA, 201 bp, Homo sapiens
aaagtggaagatcttcagcgccagctggaagagaaaagacaacaagtttataagttagaccttgaaggacagcgactacaaggaatcatgcaggaattccrgaagcaagaactagaacgagaagaaaaacgagaaagtagaagaattctgtatcagaaccttaatgaggtaaactgacagtttctttttagatatttttaa

SEQ ID NO: 449253 - DNA, 201 bp, Homo sapiens
aatgaatgctcattccctctcagaagaagcagacagtttaaaacatcaattggatgtggttatagctgaaaagctggccttggaacagcaagtagaaaccrctaatgaagaaatgaccttcatgaaaaatgtacttaaagaaaccaattttaaaatgaatcagctaacacaggaattattcagcttaaagagagaacgtga

SEQ ID NO: 449254 - DNA, 201 bp, Homo sapiens
tcatgagagcttctcagactggcgaggtgaactactgcttgcccttcaacaagttttcttagaagagcgtagtgttttactagcagcatttcggacggagytgacagctctaggtactacagatgcagttggtttactaaactgtttggaacagagaatacaagaacaggtataatgaaacttcattttaaaaacacttta

SEQ ID NO: 449255 - DNA, 201 bp, Homo sapiens
taacagaatcaaatcaatagttaaaaatctactcataatacttaacacccagatctttttttttaatatattctccactgaaaagaactaggacttcttgyagaactgatgattctagggatggaccagggaaagtataaggtgagcctggaacatcttgttttgctggcaagtaaggaattgttcaaagaatgaagggaa

SEQ ID NO: 449256 - DNA, 201 bp, Homo sapiens
atttacatagtctcaaagtaaatccccagaaaatcttctttaattaccagggaaaagcagtaactttacagtggagaaaccttgcagataccaccttaacsaagtgatcagaattactattaccagaaatggaatagacatcatacagttcctaatgtgaagggcacgatgccacttttgtagtgtttttgtcaaatgaat

SEQ ID NO: 449257 - DNA, 201 bp, Homo sapiens
tagctttaattaattcaaaataaaaagttttttaaaattgaggaacgtacaacaaaatagcctgtagtcttcaaaaattcaaggtcatgaaagacaaagaragacttgggaatatcactttttttctttttgctgtgaagtacatttcacaaaatttgaataggctctgtatatcacataatagtattgtagtaatgttaa

SEQ ID NO: 449258 - DNA, 201 bp, Homo sapiens
ataaggttaagcccattggattcattctttttctttattttagagctgtatgttaagaaaacagtctttccaatcataaaacagaaaatactctttagagraaaatccacaatgcatgtaactaattattttttaatccttttttaaaaaaattgtgagccataacatacagaaaattacaaattgcaaatatgcagtatg

SEQ ID NO: 449259 - DNA, 201 bp, Homo sapiens
tttataacatactttttttcatttaacatactgaggcatttaaaattttcagtttgtttttattgtagcaaacatgtagtaagggtttggttggctttcartggataaaaggacggtatccaaaggggggtttgaatttcccacttctgggaacagactcctattaaagttccaggggactatctgcagtggggtgctgaa

SEQ ID NO: 449260 - DNA, 201 bp, Homo sapiens
aaattttaatcacagaaatgttaagagaaatttcttctaagaaggccaaaactactgtagtgtttgctcacaagtagtgttggttacacgagttctaagtstcattattgtggaaaaaattgaggggcaggaccaacatttactttttgtagaattttttaaaagagaaacttctgtcagtcttttggtaatgagatgaag

SEQ ID NO: 449261 - DNA, 201 bp, Homo sapiens
tactagtgggttgtatacctttacatgttttgttttttcacattagtgtttttttctttcagattgaagaactctctttagcttttcttgtcagacaggtmtgtgttagtgaattctctcagcttttgtttgtctgtgaaagactttgttcctcttctttgtatttgaaggatagctttgctggatacagtatccttgggt

SEQ ID NO: 449262 - DNA, 201 bp, Homo sapiens
tttctcatcccaagctccaaagctgaagcttggaggagatacattatgtgtgtacaagtgacccacctttttggggaagggagtggaggcaggttggtaayttatatgcatatttctggataacttgattcatgtacatatttttaatcctttaggtacccaggcactccagctgatttcaatcctggttctttagcatgt

SEQ ID NO: 449263 - DNA, 201 bp, Homo sapiens
aatatgtatcctattatgtacactagagaaatcggactaaatgaaaaatactcttcttacaaattaaattatatgcagtcatcttcaatcattaatgaagrgacgtttcatgtccagaataccatatttacatgaattgtttttgataccctttgagcagggttatttggaggaagttgggaatacaggcaatatagagtc

SEQ ID NO: 449264 - DNA, 201 bp, Homo sapiens
ggtaatgttttttctagagcaaccaaaattctcaaaggctgtacttgaatgggcactgccaacatttccctctgaggcttttctttttctcagccttgacrtttcttctttagttatgttcattcattcattcattcattcattcaaggcacctttaagtcctgtttgcctgggactcctgtctctttaaaatgattttac

SEQ ID NO: 449265 - DNA, 201 bp, Homo sapiens
aaacactgaagcatgtaaagacctcactatatgccaatatgtaccgtattcatagtggaaagatgtaaagaaaaatgtcagttctctccaaattaatctcwgtattcagtgtacttccagtcataattacaaggaaatttttcatggatcttgaaaaactgattgtaaaattgatatagacaagtaaatactcaagaataa

SEQ ID NO: 449266 - DNA, 201 bp, Homo sapiens
tggcaatcctgtcagtttaatacagaggtagttttggttcctgttttctcctagggaagaggaacagggatacttttctggagccctcactgcttaagaayatttaaagtgaacattggcccctttcagagagacacacccctgctttgcaaggctctcagctcaaggcaggctgctttgagtatctgcttttaatagagg

SEQ ID NO: 449267 - DNA, 201 bp, Homo sapiens
tattagtcaaaaatatgatttaacttgcaatacctataaccctagactcatttttgtctcccatgccccagtacacattttatgtgtggtgtagattttgsatgaacactaaagcacatatacaactctaattctttaaccttttttatttatattcagcttacctgttgattcggtggtaattacagaatctgatgcaca

SEQ ID NO: 449268 - DNA, 201 bp, Homo sapiens
gttcccttaagatagactgtgatatgctgttcacttataattattgttttcttattctgtccaaaattgccagccaaccacgtggagcttaaccagtgatmgaactagaaattgggttcttcaacagaaaatagaaggagaaacaaaagaatcaaactacgctaaattgattgaaatgaatggaggaggaaccggctgtaa

SEQ ID NO: 449269 - DNA, 201 bp, Homo sapiens
gggtatcatagagttgtcattatatttacccagggttgccacagtgcctacataaaccagaatgctgttacatttctccaccgataaaagaaaatttatayatcagcacttagtactcttaccagtatctgtgaggtatggatgacatcctgaaaccatcctatagattaaggaaagattagaaataaagactttttagga

SEQ ID NO: 449270 - DNA, 201 bp, Homo sapiens
cttttgcttaatatgcccttccttatcttttctgcctggtaaatatctacctattactgaatactcaactcaagcaccaattcatgaattctgttgttctyggtgcctattcacactttatatgcattattcacatccatttgtgcttaagtgaccttacaccattttatttttccagcccagcttggtgtccccaagtac

SEQ ID NO: 449271 - DNA, 201 bp, Homo sapiens
accacaggtgcacgctgccaagcccggctaatttttttgtatttttagtagagacggggtttcactgtgttagccagtatggtctcaatctcctgacctcrtgatccgcctgcctcggcctcccaaagtgctgggattacaggcgtgagccacaacgtccaggctagggtctcacttttattcaagttagtattgccttat

SEQ ID NO: 449272 - DNA, 201 bp, Homo sapiens
ccacatccttttcctctttgtgaacatttggatgaaaataactcagtaattgttaatacttctattttccattttattcataaaagaaacgggcatatatkaaagcttatttctaaaatttcactgcctacccctccttattcagtaagtataaaaaatattcatttagttaaacactataatgagaaattaaattttgag

SEQ ID NO: 449273 - DNA, 201 bp, Homo sapiens
tagatcttgataaactaaaaagaactttttaatgtattagaaaattgataaagcaaattaggaatctcggcagctgtatcttctgggatggattcttatarcacctatttggcaactgtcaaagtcagtggctcgtggttagaagagcaagatgaagacatttatgaggttgaatctcgcgtgcctttaccacatcctttt

SEQ ID NO: 449274 - DNA, 201 bp, Homo sapiens
tttttcttagcttgcccagtttcgacaaagaaaagctcagtcggatgggcagagtccttccaagaagcagaaaaaaaagagaaaaacgtcaagcagtaaayatgatgtgtcagcacaccatgatttgaatattgatcaatcacagtgtaatgaaatgtacataaatagttctcagagagtagaatcaactgtgattcctga

SEQ ID NO: 449275 - DNA, 201 bp, Homo sapiens
atagaccactttccttcacccttatctgcacatctagacagtcactaaatcctgtccctcttaccttctaaatacctctcccacacaccctttactttctktcccttagtcgttgcctccattcaggctttcagcatttcttacctggctgttgaaacaacttcctgataggtctacctgactcgaagattatatcttccc

SEQ ID NO: 449276 - DNA, 201 bp, Homo sapiens
tccctggtttggcctcccaaagtgctaggattacaggcgtgagccaccatgcccggcctcttctttctatttcttcccatcacattgctgaactccattgkctcttgttttttcaatttctttttccttgtaggagagggaaatgaggaaatcaaaagaggggaaaagttttgtgagatggagaaacataggatgtggact

SEQ ID NO: 449277 - DNA, 201 bp, Homo sapiens
aaatactttgtgtgactatcagaaatctttggaattttttaatgtacattcttgaaattctgaatgtacaaatatgagttccatttaaagtttttttttttaattttaagtcttgcatccattaatgtattctcttaaacttttatccttatatatttatagctctgaaatcttggccactagcactatgaggaaaacatg

SEQ ID NO: 449278 - DNA, 201 bp, Homo sapiens
ttgtataattcacttactctaaggtttttgtaattcagacctaaggatctcttggtcttagtttctatcttggcttccttctgcttaacaaaccacatggsagccaggccttttagtaagttaattagatatttttggactaaattgagttagtcttatatggtggctaacaaaacaaacagttctacaacttttctaggc

SEQ ID NO: 449279 - DNA, 201 bp, Homo sapiens
gtagggccaggcacggtggcttacacctgtaatcccagcactttgggaggctgacgtgggtggatcacgaggtcagaagttcaagatgagcctagccaaartggtgaaacccagtctctactaaaaatacaaaaattagccaggcgtggtggcgggtgcctgtaaggccagccactcaggagactgaagcagagaattact

SEQ ID NO: 449280 - DNA, 201 bp, Homo sapiens
tgtaacattcttccaacattcttccaagttactgcatttttcaagttactgcattcttccaaattagtagtagaacattcttccaagttactgcatttatytctagttcattcattcttgttactctataactctatgaccctgtgtagggccaggcacggtggcttacacctgtaatcccagcactttgggaggctgacg

SEQ ID NO: 449281 - DNA, 201 bp, Homo sapiens
ctatagtcccagcactttgggaggccgagatgggcagatcacgaggtcaggagatcaagaccatcctggctaacacggtgaaaccccgtctctactaaaawtacaaaaacaaaaaattagctgggcgtggtggcgggtgcctgtagtcccagctactgtcccaggcaggagaatcgcttgaacccaggaagcggaggttgc

SEQ ID NO: 449282 - DNA, 201 bp, Homo sapiens
tctctgctttgtgtaggatagtttaaggatggccagtttgagcatgtctaggaaccacacaggtaacacagattatacctggcttagaaaaaccacattcstttattcttatgactcatgttttaagcatgcatactttgtaaagctaatatagcactcttcattttatcttgataaacgtttgtataaacattttttctc

SEQ ID NO: 449283 - DNA, 201 bp, Homo sapiens
tgagcagcgggcattactgcccgagctccacctcctgtcagatcagccgtggcattagattctcataggagcacaaatcctattgtgaactgcacatgtgrggaatctaggttgtgtgctccttatgagaatctaactaatgcctgattatctggggtggaacagtttcatccagaaaccattctggcccctttgggtcca

SEQ ID NO: 449284 - DNA, 201 bp, Homo sapiens
tctttgagacataattccagatatcagaaatactcatattcaaaagtaaacaaaataacatttgaaagccgaatttttgtttgtactgttttctcctttakcaagaataatagaaaatgactataaataggagattgtataatatagtataatagtcttttgagcagttacctattttgtagaaattttttaaggtcttgg

SEQ ID NO: 449285 - DNA, 201 bp, Homo sapiens
cagatctggactatattaggtcccctttaccatttcagaataggtaagaatatgagaaaacctgcctggaattgttaaatgtattaatatttaacagagawaaatggacatttttagggctttgacttctttgcattgagatagacatctttgttatatataatttacataatatgaccaagtgcggtggctcacacctat

SEQ ID NO: 449286 - DNA, 201 bp, Homo sapiens
gtattaatatttaacagagataaatggacatttttagggctttgacttctttgcattgagatagacatctttgttatatataatttacataatatgaccargtgcggtggctcacacctataatcccagcactttgggaggctgaggcgggcagatcatgaggtcaggagttcaagaccagctagttggagactagcctgg

SEQ ID NO: 449287 - DNA, 201 bp, Homo sapiens
tctttgcattgagatagacatctttgttatatataatttacataatatgaccaagtgcggtggctcacacctataatcccagcactttgggaggctgaggygggcagatcatgaggtcaggagttcaagaccagctagttggagactagcctggccaacatggtgaaaccctgtctctactaaaaatacaaaaaattagcc

SEQ ID NO: 449288 - DNA, 201 bp, Homo sapiens
agttggagactagcctggccaacatggtgaaaccctgtctctactaaaaatacaaaaaattagccaggcgtggtggcaggcgcctgtggtcccagctactygggaggctgaggcaggagaatggtgtgaacccgggaggcggagctggcagtgagctgagattgtgccactgcactctggcctgggcaacggagcgagact

SEQ ID NO: 449289 - DNA, 201 bp, Homo sapiens
caggcgtggtggcaggcgcctgtggtcccagctacttgggaggctgaggcaggagaatggtgtgaacccgggaggcggagctggcagtgagctgagattgygccactgcactctggcctgggcaacggagcgagactctgtctcaaaaaaaaatacaaaaaaattagccaggcatggtggtgggtgcctgtaatcccagct

SEQ ID NO: 449290 - DNA, 201 bp, Homo sapiens
attactgagagctgtccataatgaaggcatgcaggtgctttctctcactgagtctccctatagtgatggagaggaccattctattcagcaggtttcagaaycttggctagaagagagaaaagcttacatcaatacaatctcatctctaaaggatttaattacaaagatgcaactgcaaagagaagccgaggtaaccaaaga

SEQ ID NO: 449291 - DNA, 201 bp, Homo sapiens
ttcagttgatcacctggtaaaatactgttattcaattgtgttcttttaagtggaaatattagtcaaaaatatgatttaacttgcaatacctataaccctagactcatttttgtctcccatgccccagtacacattttatgtgtggtgtagattttgcatgaacactaaagcacatatacaactctaattctttaacctttt

SEQ ID NO: 449292 - DNA, 201 bp, Homo sapiens
ggtaccttgaaggcagtgatacagtgtctgagaagtaaagaggtatttggtttttataatatgtgtttttcaacattgtgtggttttttaaaaaaaaaaaatcagtttaattcattttgtagatgacaaaccaaaatgcaactcattaaggcacttgatctttctaagtaggtgtattatcaaggcaagttttaaactcct

SEQ ID NO: 449293 - DNA, 201 bp, Homo sapiens
ctgggatgtgaggagcgcctctgcctggccgctgtgcaatcttccaagtgtgaagtgacagcctttctgcaggtgtacccaacagctccgaagagacagcraccattgagaacaggccataatgacgatggcggttttgttgaaaagaaaagggggaaatatggggaaaagaaagagagatcagattgttactgtgtctgt

SEQ ID NO: 449294 - DNA, 201 bp, Homo sapiens
acggtgaaaccccgtctctactaaaaatacaaaaacaaaaaattagctgggcgtggtggcgggtgcctgtagtcccagctactgtcccaggcaggagaatygcttgaacccaggaagcggaggttgcagtgagccgagatcgcgccactgcactccagcctgggccacagagtgagactccgtctcaaaaaaaaaaaaaaa

SEQ ID NO: 449295 - DNA, 201 bp, Homo sapiens
ttttcatttttatttagtgatagtttgatctttaaaagagagactcccaaagctgcttttttcttggtggcaataaagaaaaattatctttgacaataacrgttattttcttttttcttagcttgcccagtttcgacaaagaaaagctcagtcggatgggcagagtccttccaagaagcagaaaaaaaagagaaaaacgtc

SEQ ID NO: 449296 - DNA, 201 bp, Homo sapiens
ctgccccgtctgggaagtgaggagcgcctctgcccggctgccgcgtctgggaggtgagcgcctctgcccggctgcccatcgtctgggaagtgaggagcacytctgcccagccgccccgtctgggatgtgaggagcacctctgcccggccgccaccccgtctaggaagtgaggagcgcctctgcccggccgcctcgtctggg

SEQ ID NO: 449297 - DNA, 201 bp, Homo sapiens
gtgtatatatatatatattatatatataaccaaatatgtgtaaatttggagggggtagattcatttttattttgtttattgttcgtctctggtgaaagackttaagctttataagggtggggctctttttccatttaggtcagtgatatatcacaaacacctaagataattccctgcacataataggtactcaataaatta

SEQ ID NO: 449298 - DNA, 201 bp, Homo sapiens
tgctgtgaacccgggaggcagagcttgcagtgagccaagatcgcgccactgcacactccaacctgggtgacagagcgagactccatctcaaaaaaaaaaaagaagaagaaaaactagacaaactaaatttacgagagtttatttgaacaaaaaaggattcacgtattgggtagcattcagaaccagaggagtttcacaaat

SEQ ID NO: 449299 - DNA, 201 bp, Homo sapiens
cttgggtgacagagtgagaccctgtctcaaaaagaaaaaaaaaaaaaagcaaagacacattggtttaataatttatatgtatttttctcccctcctaatawtgtcataggattctaatgtttttcagaaaggctctgtgacttagattttatcatgttattctaaccaaatctattataaattataatatttaatatgagt

SEQ ID NO: 449300 - DNA, 201 bp, Homo sapiens
cagctgcagtgagcctcatcatgccactgcactccagcttgggtgacagagtgagaccctgtctcaaaaagaaaaaaaaaaaaaagcaaagacacattggyttaataatttatatgtatttttctcccctcctaatattgtcataggattctaatgtttttcagaaaggctctgtgacttagattttatcatgttattcta

SEQ ID NO: 449301 - DNA, 201 bp, Homo sapiens
acgaagatggcggcggcggcggcggtgacggcgcttcccgtgcggctgaggacgatccgccagtgagcgcggagactgcttccacttcgggcgggggagcsccggaccgaatcggctctctaggccgtggagcttgccgtcccacctccgtccaaatcgacctttcctttctatccccaaccacccctcaacccctgtttt

SEQ ID NO: 449302 - DNA, 201 bp, Homo sapiens
ggtgggagggggcctgggaagcggagttcgccgcagccccagtgcactgcccgagagggaggtgctgcagggtcttagggtctgcatctctcctcgccctmctcctttcccctttttccagttgggggacaaagccttgtgctagctgataatacttccgcgaggattgaatattgtggctcctttctcgtgaatgtccaa

SEQ ID NO: 449303 - DNA, 201 bp, Homo sapiens
gtggctcctttctcgtgaatgtccaaataaaactccccttttactgtattgctgtaaactagtgtttagttgcttctaaacctccgatctttcattttttwaaggagttttctgggtggtgcaggcattgtgctttccagggtggggatttagggcttttctttattgggttggggatttgtgcgctgatcatcagcttgt

SEQ ID NO: 449304 - DNA, 201 bp, Homo sapiens
aagtgccagctgtgaacttggctttaggggcgtttttagaagcgtgtctttgtatgtttgtacttgaaggtctttgtcatggcatgcgcttttgtgtcctrtggaatgttaatgcagtctgtgaatggaacttctgaggaccgaaaggttccatatgccaacacctatagaattcctgctttaaataatttagttgttata

SEQ ID NO: 449305 - DNA, 201 bp, Homo sapiens
tttgttcactggacttaagtattgtatttgataatctagttttgcaaaccacaacttacaaatctttttgggggtaatttattgataaacagttccattgraaaattccctttctgtatctaaaccttataaatgatcactttttaaacagtttgtcatgtatgcagtataatatatagtatactgtataaaatgttttat

SEQ ID NO: 449306 - DNA, 201 bp, Homo sapiens
ataccgcagagatgcagtgatagaagctcaacacaagtttgttaaatgaatatatatataaaaactagcttcatatttctaaaatatagttgactttcctrtaagctccctctatttaagatcaaggtttaaatgcttgtatatagccaggtaaatttttactttcgaatctataaatggtgggaaaggggaatcagggta

SEQ ID NO: 449307 - DNA, 201 bp, Homo sapiens
taaaaacactttaatagaaataaggaaatgactattgattttagagtcttaatttaagtatgaaggttaagattttaataggagccactatgaatattttwaaaaaattattgtaactattttaacgtattatgttagaaggtaagaaagactgaaagttaatgagcttattttctaacctaggaaattagaaaaagagca

SEQ ID NO: 449308 - DNA, 201 bp, Homo sapiens
cattgggagcctggggcgagaggattgcttgacaccaggagttcaagaccaacctgggcaacatagtgagactctacaaaaaattaaataaaaaaaaaaaatagcagggcatggtggtgtgcgcctgtatgtagtcctagctactcaggagtctgaggtgggaggatcacttgagcccaggagttcgaggctgcagtgagc

SEQ ID NO: 449309 - DNA, 201 bp, Homo sapiens
gcagcagagcgagaccctgtctcaaagaaaaaaaaaaaaaaaagaaagtggtaaggcatgcaaatcgggtggagttaaggaggaagcacttactttaagcrcttaatgtaaccattatccctgctactatattgtgcttttatgtatcatcgaaaaaaactatcccatttaaaatactttgtaaggattattttttctttg

SEQ ID NO: 449310 - DNA, 201 bp, Homo sapiens
tagttaagaaaaacttttatctgtaaataagtcatagtttcagtcctatattgctttattattattattattattatttctttctttttttttttttttttgagacttagtctcactctgttgcccaggctggagtgcaatggtgtgatctcggctcattgcaagctccgcctccctggttcaagcaattctgcctcagcc

SEQ ID NO: 449311 - DNA, 201 bp, Homo sapiens
tctattatattcagtaatttgtaattacatgacttttgtttaacaaacattttcagtgtgaagagtagttccaattgtgtacaaaaaaaaggatggtgctycatgcaagctgtatattgattattgatagcaggacttttcagttactgtttccactgtgatagacaaagctggttatggtgtaaaactgttctttgcata

SEQ ID NO: 449312 - DNA, 201 bp, Homo sapiens
ttgtctttaaatgtctggaaaatccagaatgatagaagagggtcttaaggctttcctccatctaaaatgtcaaccttagacttcttaataagatatggtargttgttcactgtgcattgaatactacataaaccgtattatgaggaaatgctaatggagtggtgattggttttttttgtttgtttgtttgttttgctacat

SEQ ID NO: 449313 - DNA, 201 bp, Homo sapiens
attcctaagtagcgcatggcagaaagtggtaaggccgtgccgcagcactccagcctgggcagcagagcgagaccctgtctcaaagaaaaaaaaaaaaaaaagaaagtggtaaggcatgcaaatcgggtggagttaaggaggaagcacttactttaagcacttaatgtaaccattatccctgctactatattgtgcttttat

SEQ ID NO: 449314 - DNA, 201 bp, Homo sapiens
aatgggtagaaatacgtatccccagtgggattatcttccatatatatatatttttaggctttttgggctttgccaaaatttaaattgttgcttcctttgartgataggttcttggtgagttgataacagcatgatgctgaagcttgatttctttgttggccagtgagtcattccattccatgagcagctgttttacaagtg

SEQ ID NO: 449315 - DNA, 201 bp, Homo sapiens
ggaggccgaggtgggtggattactaggtcaggagagcgagaccatcctggctaacatggtgaaaccccatctctactaaaaatacaaaaaaaaaaaaaaaattagccgggtgtggtggcgggcgcctgtagtcccagctactcgggaggctgaggcaggagaatgctgtgaacccgggaggcagagcttgcagtgagccaa

SEQ ID NO: 449316 - DNA, 201 bp, Homo sapiens
cttttctattcatatacaacttaaaaatactggaaattcttttggtgtgaaattttttatatttgccaaaataatatttaattttaatttgtataaattcmtttcacaatgaaaattcatatctgagcatttctaatgactcaacaagagaactctcacttttccactttaaacaaccattagtaatttttataataaagt

SEQ ID NO: 449317 - DNA, 201 bp, Homo sapiens
ttgaaagagataaaaacactttttaaaaaaggaaacaggccaggcgtggtgactcacgcctgtaatcccaacactttgggaggccgaggtgggtggattamtaggtcaggagagcgagaccatcctggctaacatggtgaaaccccatctctactaaaaatacaaaaaaaaaaaaaaaattagccgggtgtggtggcgggc

SEQ ID NO: 449318 - DNA, 201 bp, Homo sapiens
gagaaaaagaaaagataatttgaggttttttttttagttgagaagaatgcgtaattttttaataaattcaaagggtgaaataaggtaggcaattttaatargcctcagaattttaattgtatggcaggagagtctgtctactttttctctaggatttgtacttaaatttttttaatgttctaagctttctcttctttcttt

SEQ ID NO: 449319 - DNA, 201 bp, Homo sapiens
tcgggaggctgaggcaggagaatcgcttgaactcaggaggtggaggttgcagtgagccgaggtcacgccactgcactctagcctgggcaacaaagcaagakttggtctccaaaaaaaaaaaaaaagaaaaaaaatatacataacctaaggcttaatgtaaaaatgtaaaaaccagtgtttaaatttgtaactgatttccaa

SEQ ID NO: 449320 - DNA, 201 bp, Homo sapiens
aaggtaggcaattttaataagcctcagaattttaattgtatggcaggagagtctgtctactttttctctaggatttgtacttaaatttttttaatgttctragctttctcttctttctttctctatctcactctctttctctctattttcttttatttctcttttttttcttttctttcattttttgagacaggatctcac

SEQ ID NO: 449321 - DNA, 201 bp, Homo sapiens
catcttgattgaaagatcctttgaattattctgtgattattttcctttattctatatactcataaccacatcctactttttaaattaaaaatttgtctcamacgcttgcagtgagccaagatcatgccactgcactccagcctgggcaacagagtgagactccgtctcaaaaaataaaaataaaaaataaaaataaaaaaa

SEQ ID NO: 449322 - DNA, 201 bp, Homo sapiens
gggaagaaggtcgtaacttgctgcacctgggtcatgaagctaacactcccattccttttgaaaccaacgtttttttgtccctgatcaaagggacaagagcytcacccaccttgcagcattcccagcacattcttattgccaatttaagggtctttttgttctcttcttatctcatctgccctttattctctgttcttttct

SEQ ID NO: 449323 - DNA, 201 bp, Homo sapiens
agcacttaatgaagagcttcatttgcaaagaataaatccaactacagtgaaaatgaaaagttctgtctttgatgaagacaaaacttttgtagcagaaacaytggaaatgggtgaggttgttgaaaaggatacaacagaactcatggaaaaacttgaggtaaccaagcgagagaaattagagctgtcacagagactgtctga

SEQ ID NO: 449324 - DNA, 201 bp, Homo sapiens
agtcagtgggaattcagagatagtcacaagcttgcctctgatactttcacattcgagtagaaagtcaatcacgatacaataagttaagtattcagagtgawctacagggagctatttatttactcattcagtaaatatgattgaacacttactacttgctaggcactttgctaagatgataggatatgagagacatggact

SEQ ID NO: 449325 - DNA, 201 bp, Homo sapiens
gtttgggatttttaatatggaaagtatatgtcatatatgcaaaatattcaagaaatactggaacttctcaaaatgttaccagtgataatcagtgtcttcarctcttgtttttgatacgtgtgtgtgcatgtgcattatcccattttaggaagtagaagacatataaattatacttttgttgtgtctttttttttttttttc

SEQ ID NO: 449326 - DNA, 201 bp, Homo sapiens
cttggtgtggaactaaaggaatagggatgattcaatgccagaaggaaaattgactatgttggatacaaagagaagtgttttatagtctgtaacatgtttartaggttgattatataaactgtactttatagatgattttaggagtatctgtagattgatatgattattgtatgacacactcattttagaatcctttatata

SEQ ID NO: 449327 - DNA, 201 bp, Homo sapiens
tgttttatagtctgtaacatgtttaataggttgattatataaactgtactttatagatgattttaggagtatctgtagattgatatgattattgtatgacrcactcattttagaatcctttatataagatgaatctcctcgtgttatctttctggacagcttcttacctccttgttccctaattctaagagaagaatctaa

SEQ ID NO: 449328 - DNA, 201 bp, Homo sapiens
atgatcttggctcactccattctccacctctcaggctcaagtgaccctcccacctcagcctgccaagtagctaggaccacaggcctgcaccaccacgcccrgcaaatttttgtattttttgtagagatgaggtttcactatgttgcccaggttggtctcgaattcctgggcttaagcaatatgcccacctcagcctctcaa

SEQ ID NO: 449329 - DNA, 201 bp, Homo sapiens
ctactaggctagtgattagctatttctgatttataaattagatgtctttattaagtaaatagtacatatgctttccttcatccacagcagacaaaataagyataaaatatgttgtgtgttattctgtagataacatatttgtcacacacacacacacacacacacacacacacacacacacacacacacacatatttttga

SEQ ID NO: 449330 - DNA, 201 bp, Homo sapiens
ctgggtttttaaactaaaaattttaatcacagaaatgttaagagaaatttcttctaagaaggccaaaactactgtagtgtttgctcacaagtagtgttggktacacgagttctaagtgtcattattgtggaaaaaattgaggggcaggaccaacatttactttttgtagaattttttaaaagagaaacttctgtcagtctt

SEQ ID NO: 449331 - DNA, 201 bp, Homo sapiens
ttacttttctaaaaaagaaatgacagtgatactgacttttagtttgtgccaaggatagaaagtctccttttagaataaatttactttaaaatttttattgwtatgtaatgtatatattttgggaatacatgtgataatttaatgcactcatatagtttgtaaggatcaaatcagtgtaattgggatgtccgttagctttaa

SEQ ID NO: 449332 - DNA, 201 bp, Homo sapiens
aaactatagtcaccctaccaatctatcaaacactaggttttatttcttctgttaaactgttctttgtatccattgtcagcccctcttcatcttctccaccytcctactcttcccagtctctggtaaccaccaatctactcactatttgcatctactttttcagctcccatatatgagtgagaacgtctgatatttgtcttt

SEQ ID NO: 449333 - DNA, 201 bp, Homo sapiens
gttaaggcaagcacatatgcggcaaatggagagacagcgagaagaccaggaacagctacaagaagagattaagagacttaatagacaattagcccaggtargggtcttgtagtcccctttctctccccagttatttttttttccaaacaccaacttgaaccagatccccaattaaaacaacagtattttttatgtagccat

SEQ ID NO: 449334 - DNA, 201 bp, Homo sapiens
gaaagttttcgaaaggctctcatttaccagaagaaatacctgctgctgttactgggtgggttccaggaatgtgaagatgccaccttggccctgcttgcccsgatgggggggcagccagctttcacggatctagaggtgatcaccaatcgcccaaagggcttcaccaggtttcggtcggccgtcagagtatccattgcaatt

SEQ ID NO: 449335 - DNA, 201 bp, Homo sapiens
gcctagccaatgttttgaaattttgtaggtttgagaccaacctgggcaacaaagtgaaatcttgttgcccaggttggttttgaacttctgggctcaagcawtcatcccacctcagccactcaaagtgctgggattacagacatgagccaccatgcccagcaggaacatacttaattattatttgtttgtgttttctgaggt

SEQ ID NO: 449336 - DNA, 201 bp, Homo sapiens
tagaacaactccgggcagagctggatgagatgtatgggcagcagatagtgcaaatgaaacaagaattaataagacaacacatggcacagatggaggaaatkaaaacacggcataagggagaaatggagaatgctttaaggtcatattcaaatattacagttaatgaagatcagataaagttaatgaatgtggcaataaatg

SEQ ID NO: 449337 - DNA, 201 bp, Homo sapiens
acataaatgtttattacttcattatttccatgtctgtacgtttaaaatcttttagaacaaaaaatcaaagatgagtcatgctagctataccaaatatcacmatttagtataaaactgaggtaatgaaaacattgtgctactttccttgaaaaagaaaggtagatcaatgcaacagcacgaagatagaaaaaaaattagact

SEQ ID NO: 449338 - DNA, 201 bp, Homo sapiens
gtgagatatggtaccaggattatctgggaagaaacagaatggcatataatgtttaaggtgcttgagctctgtatagacacattttgattcaaatttctgcygtaatatttattaaatatgtgacctttgatgtggttcctaatgttgcagcacttgaattttctctgcattggctactggtattataattattcctcaagt

SEQ ID NO: 449339 - DNA, 201 bp, Homo sapiens
gattttgaaccccagcttcaatgatttatttgctttgtgtttttgagtcaaattactccaaaggaggctagcacaggaaccaggtgggaatcaggaccccmgataggtgaatcacattcaggacaggaaattaaaactaaagttcagttatatgacctggaccagcaaggaaaataatgctgcagatcagtaaatacaaat

SEQ ID NO: 449340 - DNA, 201 bp, Homo sapiens
gttaacgtggctatagatcatctgagcaaagacaaacctgaactagaagtagtccttacagaggatgctcttaaatccctagaaaatcagacatacttcaratcttttgaagaaaatggcaaaggttccataattaatttggaaacaaggttgctacaacttgagagcactgttagtgcaaaggacttagaacttacccag

SEQ ID NO: 449341 - DNA, 201 bp, Homo sapiens
atgaaatgtacataaatagttctcagagagtagaatcaactgtgattcctgaatctacaataatgagaactctacatagtggagaaataaccagtcatgakcagggcttctctgtggaagtaagtattctcccagatttttaatcattatggttctcgatggaaagtagtcataacaacagtcattagcaactgtgcgcaa

SEQ ID NO: 449342 - DNA, 201 bp, Homo sapiens
atcaaagcaagcacatgctgtgtgtcagcaagaacaacattattttaatgaaatgaaattatcacaggatcaaattggttttcagacttttgagacagtgsatgtgaaatttaaagaagaatttaaaccacttagtaaagagttaggagaacatggaaaggaaattttattatcaaatagtgatccccatgatataccaga

SEQ ID NO: 449343 - DNA, 201 bp, Homo sapiens
aaaggatcatctgttatttttcaaatcaaatattttgcagtgtactttttagtggacataagcaaagtgtttgcttcaaaaatattaaacattttaatcartgcttctttatctatacaggtatgcactccagaaagctaataatagacttttgaagatcctcttagaagttgtaaagacaacagcagctgttgaagaaac

SEQ ID NO: 449344 - DNA, 201 bp, Homo sapiens
ttaagctaattggccaaaatttttcagacaaaaacaaatcattttataatatagttacaaataaaaaacaagaagcactttattgtagatgctattgggtwttttaataaaaaggatcatctgttatttttcaaatcaaatattttgcagtgtactttttagtggacataagcaaagtgtttgcttcaaaaatattaaaca

SEQ ID NO: 449345 - DNA, 201 bp, Homo sapiens
ttgtttatgttttcagaaaagcaactttttgtttcattgacttctgtattgactgttttggcctcaatttcatttgtatctgctctgatttttgttatttmctttcttctactaattttgggtttggtttgttcttggttttctagtttcttgcagtgcgttgtttggttgtttatttgaagtctttctcatattgtttta

SEQ ID NO: 449346 - DNA, 201 bp, Homo sapiens
tcttcctttaattagtgatgctttctgtccaaagcatgaagaaaagagaggcttctggaaacataggcttacattgttattcctgcatttgggcttctgcragctcaccaccctctctcagagtttctataatactccatggaaatgtgttgacaaggcctttgaatgaaaatcattcgtttgctccctgcacccctacca

SEQ ID NO: 449347 - DNA, 201 bp, Homo sapiens
gtttattgatttgtgtgttttgaaccagccttgcagcctagtgatgaagctgacttgatcacggtggataagctttttgatgtgctgctgtatttggtttrccagtattttattgaggatttttgcattcatgttaatcagggatattggtctaaaattcttttttgttgtgtctctgccaggctttggtatcaggatgat

SEQ ID NO: 449348 - DNA, 201 bp, Homo sapiens
gtcttcctttaattagtgatgctttctgtccaaagcatgaagaaaagagaggcttctggaaacataggcttacattgttattcctgcatttgggcttctgyaagctcaccaccctctctcagagtttctataatactccatggaaatgtgttgacaaggcctttgaatgaaaatcattcgtttgctccctgcacccctacc

SEQ ID NO: 449349 - DNA, 201 bp, Homo sapiens
tgtaatcttctaagtcactgtttattccacacggtaagatagctcatcaatttagtttttttgaccaacattaacaagaaacagtatcatcacaagatatrtcatactgtaagaataagtatctttccaaaaacttgagcccaggagtatgatcacaccactggcactccagccttggtgacagagcaagaccccctctca

SEQ ID NO: 449350 - DNA, 201 bp, Homo sapiens
gccttcgacttgtaggttcagaagtctgatttttttttcccctgtcaactgagacgagctacctcagaagtgaactcagatttttcaaagttaacgaggcwaattttttttgtttgttttgagacagagtctcgctctgtctcccaggctggagtgcaatggtgagatctcagctcactgcaacctctgccctctgggttc

SEQ ID NO: 449351 - DNA, 201 bp, Homo sapiens
ggatataagggagaagtgataggtgaagtagaacgtcgcctgctctgtaatgtttgtggtagtaaacacccccaattaagaaggtatgttttgactttttstctttttcttgaagactacagtttgaaacagcagatgatgaagatttcatttgggttcaggaaaatattgatgaaattattttacaactacagaaattaa

SEQ ID NO: 449352 - DNA, 201 bp, Homo sapiens
ttgtggctcattgactgaaagactactgagacaaaatgctgagctgacagggcatatcagtcaactgactgaagagaagaatgacttaaggaacatggttrtgaagctggaagagcagatcaggtggtatcgacagacaggagctggtagagataatgtatgtccatttttagcatctccatatatgagaattagtgcatg

SEQ ID NO: 449353 - DNA, 201 bp, Homo sapiens
tgattctcctgcctcagcctccctagtagatgggattacaggcatccaccaccatgcccgattaatttttttgtatttttagcagagatggggtttcaccrtgttggccaggctggtcttgaactcctgacctcaggtgatctgcccgcctcagcctccccagtagctgtgattacaggcatccaccaccatgcccgatta

SEQ ID NO: 449354 - DNA, 201 bp, Homo sapiens
tattaagtggtttctaattgtggttttggtttgtattttcctaatgaataatgatattgagtatcatcttttaatgcactttttggccacttgtagatttcttttttttttttttttttttttgagatggagttttgctcttgtctcccaggcttgagtgcaatggcgcaacctcagctcactgcaacctccacctcctgg

SEQ ID NO: 449355 - DNA, 201 bp, Homo sapiens
tagatgcagcagtttgatagcttcatcaacatttattgcagcaatagtgcagtgcctgtgacttaaaactaattcataaccttcaggctttttttttttttgagacgagatctcgctgtgttgtccaggctggagtggcagcctgccttgacctcctgagctcaagtgatcctcctgcctcaacctcctgagcacctggga

SEQ ID NO: 449356 - DNA, 201 bp, Homo sapiens
taaaataaaattgccaactctttatggaatgcaaaacttgttaggtgttcttcaagacctctttaatttaccagcaactgttcaaagcaaaattatttgtrtaagtaacattcctccaggaaatgatgtactcgtagaacatattaaggagttgacttcttatgagtgtgagactctggaatgtaaagcttttatcttcaa

SEQ ID NO: 449357 - DNA, 201 bp, Homo sapiens
gcttgaactcaggaggtggaggttgcagtgagccgaggtcacgccactgcactctagcctgggcaacaaagcaagagttggtctccaaaaaaaaaaaaaaagaaaaaaaatatacataacctaaggcttaatgtaaaaatgtaaaaaccagtgtttaaatttgtaactgatttccaagggtatagcaaacaagctgaccaa

SEQ ID NO: 449358 - DNA, 201 bp, Homo sapiens
ctgcactctggcctgggcaacggagcgagactctgtctcaaaaaaaaatacaaaaaaattagccaggcatggtggtgggtgcctgtaatcccagctactcrggaggctgaggcaggagaatcgcttgaactcaggaggtggaggttgcagtgagccgaggtcacgccactgcactctagcctgggcaacaaagcaagagtt

SEQ ID NO: 449359 - DNA, 201 bp, Homo sapiens
tctcctgacctcatgatccgcccgcctcggcctccgaaagtgctgggattacaggcgtgagccactgcaccggcctatttttctctaaaaatatggcacarttttttaattggaagctgtctgagatcacctagtccagaatctcatttcacacttgaggaaactgaggcagggagcggttacaaagccagtagtgataga

SEQ ID NO: 449360 - DNA, 201 bp, Homo sapiens
tgctatctcagctcactgcaagctccgcctcccgggttcatgccattctcctgcctcagcctcctgagtagctgggactacaggcgcccaccaccacaccyggctaatttttttgtatttttagtagagactgggtttcactgtgttaaccaggatggtctcgatctcctgacctcatgatccgcccgcctcggcctccga

SEQ ID NO: 449361 - DNA, 201 bp, Homo sapiens
cccttttaggaggcagacagaatcttaaaggaattttgctttttaaagttatttctatcaggtcacatctgatgctgctttatttatttatttattttttwtttttttttttgagacagagtcttgctctgtcgcccaggctggagtgcagtggtgctatctcagctcactgcaagctccgcctcccgggttcatgccatt

SEQ ID NO: 449362 - DNA, 201 bp, Homo sapiens
ctgtagtcccagctacttgggaggctgaggcaggacaatggcatgaacctgggaggtggagcttgcagtgagctgagatcgcgccactgcactccagcctsggtgacagagcaagactctgtctcaaaaaaaaaaaaaaaatctgaataagcccatgaacaagctcacacatgtaaataaataaaagattataaaatttaa

SEQ ID NO: 449363 - DNA, 201 bp, Homo sapiens
ggagaattgcttgaatctgggagacggaggttgcagtgagccgagatcacgccactaaactccagtatgggtgacagagtgagactccgtctcataaattwaaaaaaaaaataaataaataaataaataaataaataaatagatagattagtgaccctaataaaaatagctctgtacaattaaaaaaaaaattgggatgac

SEQ ID NO: 449364 - DNA, 201 bp, Homo sapiens
aggagaattgcttgaatctgggagacggaggttgcagtgagccgagatcacgccactaaactccagtatgggtgacagagtgagactccgtctcataaatwtaaaaaaaaaataaataaataaataaataaataaataaatagatagattagtgaccctaataaaaatagctctgtacaattaaaaaaaaaattgggatga

SEQ ID NO: 449365 - DNA, 201 bp, Homo sapiens
tgctgcttaaaccagcttctcctctcatatcagtttcaaaggaacaacattcaaccagaaacttggggattgtcttagatagtcttctcttttcactcctrgtcttctaccatactgaaatatacactgaagggagtacaaagaatatgaaagaaaaatttatactttgttctcattcagttatacagtcaacaattttta

SEQ ID NO: 449366 - DNA, 201 bp, Homo sapiens
atagaattttgactttgacctttattttaccatcaaccaatttgaagtgatatttatgaacgcagtagaattcatgattgagtgagctaaaatatgcaaartatttgaagagacaatgcttgttaaaagaatatatttcttggtataaatactgagatattctgttgccaaagacacattacaactagtcatttttatatt

SEQ ID NO: 449367 - DNA, 201 bp, Homo sapiens
tgaatcagtggctaccaaagcagaacttgccagttataaagaaaaggctgaaaaacttcaagaagagcttttggtaagataagtaacatagctcctaattyactcatttctacctatcttaattacgtttcaaagtatatactcttttataacaaatgagctccataacttaaaagctagataaaaagtattttgtggatt

SEQ ID NO: 449368 - DNA, 201 bp, Homo sapiens
gaacctgggaggcggaggttgcagtgagccaagatgatgccgctgcactccagcctgggcaacagagtgagactctgtctcaaaaaaaaaaaaaaaaaaaagagaatcttatgagttaggaaccactgttaataggattttagattacaggcaagtttatttttgttcttggcctcagttactacttcatggagaaggtag

SEQ ID NO: 449369 - DNA, 201 bp, Homo sapiens
aatattttgggtatttaaatggtctaacatatagtcatctttctgttcttcagagtggataattgcaattcatctatcttgaagtttgctgattctctctycctacttagatctactactgagtccttctagtggcttttcatttattttccttttcaattccagaatttttatttgattattttataatttcttcgtttt

SEQ ID NO: 449370 - DNA, 201 bp, Homo sapiens
gtttaataataaaatatcacatgctttatgggataaggaatagaattgctttcgtatttgtttacaatattaatgctgacagatttttacaaaatgtgttatggttgaattgtttttttttttttttttactattaaagattcatgatgagatttcagtgtcaagcatggatgcttctagacaactaatgttgaatgaaga

SEQ ID NO: 449371 - DNA, 201 bp, Homo sapiens
ttttgagatgggttctcactctgtcaccgagactggagtgcagtggcatgatcttggctcactgcaacctctgtcacccaggcccaagccatcctcccacytcagcctcctgagtagctgggaccacaggtgcatgctaccacacctggttaatgttttgtatttttggtagagatgggattttgccatgttgcccaggct

SEQ ID NO: 449372 - DNA, 201 bp, Homo sapiens
ttaaatatactctcaagcattttatttttattttaattttcatttatttactttttgagatgggttctcactctgtcaccgagactggagtgcagtggcaygatcttggctcactgcaacctctgtcacccaggcccaagccatcctcccacctcagcctcctgagtagctgggaccacaggtgcatgctaccacacctgg

SEQ ID NO: 449373 - DNA, 201 bp, Homo sapiens
ggaaaattattctagtggagaaggcagacttaaaggtatgcagtgtgctatgattagacctttgctagtatgagagatagatgtccaacttcattttttttgtttgtggctatccagttgtaccaataccatttgttgaaaagactattcttttcccaatgaactgtcaatgaatataaaggtgagggtttatatttatcc

SEQ ID NO: 449374 - DNA, 201 bp, Homo sapiens
caaggcagtgtggtcaccttgtttgacctcagctagaagtgtatgtccagcaactcaaattttttgtcgctctgtgcacacctacaaatgactaaaagcaycatgagcattgatttgggggttacaaataaattttagcaagaactcacaaatatggaatctacaaagaatgaggatggattgtacatgcaatataatact

SEQ ID NO: 449375 - DNA, 201 bp, Homo sapiens
ttaactgcagtgagataatatatcgtggtggttttgatttgcaattctctgatgattagtaacattgagcattgtttcagatacttgttgaccatttgtawgtattctcttaagaaatgtctgttcagatattttgcccatgttttaatcagattatttgctcttttgctgtccagctgtttgaacttcttgtatattctg

SEQ ID NO: 449376 - DNA, 201 bp, Homo sapiens
caacattagaaggaaatagctacctatttaggaagactaaaagattttactatctatatcctaattcttgatttatgtacttatttattaatagaagatcyattctgtgtctgtacctcaactgttcactgcctttaacagaaagtaataaatcctacttcttttaacattatctgaattaaaattttttattaatattca

SEQ ID NO: 449377 - DNA, 201 bp, Homo sapiens
acaaaacagggataagtgtgggcaaaaagtgctttgaaagttctgaataggtctggcttcataagagaagagattcagggtaagctttagtggaagagttkccatttgaggtaagtttataaattgggacaactttttaattgtattttgtttccccaacaattggcctaatgcctggaacatagtagctactcaatactc

SEQ ID NO: 449378 - DNA, 201 bp, Homo sapiens
actttttagatagagtgtggagtaggcataaagactcaggatgaaacatgttaaaaatcagtaaggagcaaaaaatggtgtaacttgtctagaaacagtartctttgaaagttaatctttccaggaggtaagagtgggaggataatctaggactaggtgagaagagcctggagattggattgtattatatttactctgtgg

SEQ ID NO: 449379 - DNA, 201 bp, Homo sapiens
acataaggagcttgcagcctagatccttcacatgcacagttcacaataaggttcgagctcctagaagaatctagtgccgcagcagatctcacagagatctygctggtaatgcttgcttacctcctgctgtgtggccccatctctaacaggccccaaccggtaccgggtctgcaacctggaggttggggaccccttccctac

SEQ ID NO: 449380 - DNA, 201 bp, Homo sapiens
gagctacctcagaagtgaactcagatttttcaaagttaacgaggctaattttttttgtttgttttgagacagagtctcgctctgtctcccaggctggagtkcaatggtgagatctcagctcactgcaacctctgccctctgggttcatgtgattctcctgcctcagcctcctgagtagctgggatcacgggcgcccagccc

SEQ ID NO: 449381 - DNA, 201 bp, Homo sapiens
gttaaagaattatatgtatataataatagatcactcctgataatttatatttgccagatactgatattaaaataacaggaaaattctgctatctacaatgkaatggtgctaactaaagttttatgtgtttcttcatttttctaacatatttattgactctcttggcaagtacgaatatagtggccaacaagagagaggttt

SEQ ID NO: 449382 - DNA, 201 bp, Homo sapiens
ttccatgatcatcagtcctttgtcttcaaacaaaactaacatatctctaaaggagaagtaagaaataatagcttctctaaatactgtttcttcagctactrtcattattgtcattaaactttaggagcaagccattgacagagaacatgagagagatgtattccaacaggaaatacagaaactagaacagcaacttaaggt

SEQ ID NO: 449383 - DNA, 201 bp, Homo sapiens
gagtgggaaaatttgaatatcgtaaaaacccaggttatctctagattaatctgtaatccttatgtagttccattccaactcacaatgaaaagttactgaarttcaacttagtaattggtttatagtttatctggagaagaaatgcacaagaagagtcaataatatttttgaaaaacgcagaatagtaattggtgtatagtt

SEQ ID NO: 449384 - DNA, 201 bp, Homo sapiens
taaatagatttccttttgtaaatcaatggttcttttgtgcttttgtattgtgaatattcaatgggaccaatatgaacacagcttatgattgtatacaaatmccttgccagcacatgaaaacaaactggaatttgtatatataagcattgtgtatgtattcatgcacaataattattgaattacctgtatatttgtggaatg

SEQ ID NO: 449385 - DNA, 201 bp, Homo sapiens
aggttcaactactcaatttcatgctggcatgagaagataatcctttgaaacatcattaattgaagtgattttaaatagatttccttttgtaaatcaatggytcttttgtgcttttgtattgtgaatattcaatgggaccaatatgaacacagcttatgattgtatacaaatcccttgccagcacatgaaaacaaactggaa

SEQ ID NO: 449386 - DNA, 201 bp, Homo sapiens
atcgtctgaacttaggaggcagaggttgcaatgagttgggatcgtgccattgtactccagcttggacgacagggcaagactctgtctcaaaaaaaaaaaamaaaaaaaaaaaacaaagcagaagcattcttaccactgagtttaagaaggaaaaaaaaaagcaggttaaaattacttcagaaaagagagtcataatgagat

SEQ ID NO: 449387 - DNA, 201 bp, Homo sapiens
ttgtttacacccaagcatcttgtagtaataggaaacttttattatcatagctgagtttgttggtttgcctaggcttgttttgttttgagcatccaaatttsacaagacccagattttgaagaccaaaagatttttcaaaaatgtatgaggtatagaacatccaactttgagagcactttaaaaaaactctaaatattagtc

SEQ ID NO: 449388 - DNA, 201 bp, Homo sapiens
aagaggaatgtggtaccttgaaggcagtgatacagtgtctgagaagtaaagaggtatttggtttttataatatgtgtttttcaacattgtgtggttttttwaaaaaaaaaaatcagtttaattcattttgtagatgacaaaccaaaatgcaactcattaaggcacttgatctttctaagtaggtgtattatcaaggcaagt

SEQ ID NO: 449389 - DNA, 201 bp, Homo sapiens
gtttcaccatgttgaccaggctggtctctatctcctgatgtcaggtgatccacccacctcagcctcccaaagtgctggtattactggcatgagccaccacrcctggcccaattctcttttattaattttaatttattaagacacattggtggccaggcacagaggctcacacctgtaatccttatactttaggaagcctag

SEQ ID NO: 449390 - DNA, 201 bp, Homo sapiens
aaattatttaaggtaattagttaagaaaaacttttatctgtaaataagtcatagtttcagtcctatattgctttattattattattattattatttctttytttttttttttttttttgagacttagtctcactctgttgcccaggctggagtgcaatggtgtgatctcggctcattgcaagctccgcctccctggttcaa

SEQ ID NO: 449391 - DNA, 201 bp, Homo sapiens
aataggctacttgttcttaacaggctactagagagaaacttctccaaaatttgttaatgctgccaacagtcaagcatgtgggctcctcctgaaacattcayttccccaggccaagaccacagctcatagcagctgtctgcttatgtgaccaggtagtgaagtatagtaggagtctgaccatggcattttccagatttttcc

SEQ ID NO: 449392 - DNA, 201 bp, Homo sapiens
aatgtttacctgagaggctcttatttattttgacttttgattttttttattggaggtggggagcatttttgtttatatgtaactatttctgtgtttcaaaragctaacatttaaagatttcccttaaactgagtaaagtaatttatatgttgcctaaaaagacagaccttctcaactggacccaaagcaatgatagttgac

SEQ ID NO: 449393 - DNA, 201 bp, Homo sapiens
aacacaggagtctccatagcatcttcccagtcgttgtcttgtttgtctttctagacaaataacattactaaagtgtcttgaagccgtctctttttgtctgytggaacatctctctcctgcctctctctgatattttttaacacaggttcttttgttagattatgatatacagagacttcaactttgtcttccttctctcac

SEQ ID NO: 449394 - DNA, 201 bp, Homo sapiens
aactcttgtttttgatacgtgtgtgtgcatgtgcattatcccattttaggaagtagaagacatataaattatacttttgttgtgtctttttttttttttttctctattttcctaggactagtagatgctgcagtcgatgcagcaccaggagcaggtgtgtgtataccattgcatggccaatgtttgggtggtagactttaa

SEQ ID NO: 449395 - DNA, 201 bp, Homo sapiens
caactcttgtttttgatacgtgtgtgtgcatgtgcattatcccattttaggaagtagaagacatataaattatacttttgttgtgtctttttttttttttttctctattttcctaggactagtagatgctgcagtcgatgcagcaccaggagcaggtgtgtgtataccattgcatggccaatgtttgggtggtagacttta

SEQ ID NO: 449396 - DNA, 201 bp, Homo sapiens
ttcaactcttgtttttgatacgtgtgtgtgcatgtgcattatcccattttaggaagtagaagacatataaattatacttttgttgtgtctttttttttttytttctctattttcctaggactagtagatgctgcagtcgatgcagcaccaggagcaggtgtgtgtataccattgcatggccaatgtttgggtggtagactt

SEQ ID NO: 449397 - DNA, 201 bp, Homo sapiens
gtctttttgatgaaagtcagtttaactgcagtgagataatatatcgtggtggttttgatttgcaattctctgatgattagtaacattgagcattgtttcakatacttgttgaccatttgtatgtattctcttaagaaatgtctgttcagatattttgcccatgttttaatcagattatttgctcttttgctgtccagctgt

SEQ ID NO: 449398 - DNA, 201 bp, Homo sapiens
agatcacgaggtcaggagatcaagaccatcctggccaacatggtgaaaccctgtctctactaaaaatatgaaaaattagctgggcatggtagcgtgcaccwgtagtctcagctactctggaggctgaggcaggagaatagcttgaaccctggaggtggagtttgcagtgagctgaaatcacaccactgcactccagcctgg

SEQ ID NO: 449399 - DNA, 201 bp, Homo sapiens
tttattataggatttctttttgtttagaaccgtgaggccatgcttttttctgtttatacaattttgagtactaatttactttttaaattcctgctgatatktctaaatctaatcctttattgtttgcttttatttctttaggttattgtgtcaatgagtatagcatttgctcaacaaactgaactgtctagaatatctggg

SEQ ID NO: 449400 - DNA, 201 bp, Homo sapiens
attgtacttcagcctgggtgacagagtgagaccctgtctctaaaacaaactaacaaaatcaaatgaatgaaaatcaaaacctacgtatagataccaaagasattcataaaagtcataaaagaatactataaataaacatccatcaacaaatttgaaaatagacataaactgatggttttctggaagaatataaactaccag

SEQ ID NO: 449401 - DNA, 201 bp, Homo sapiens
agatgaggtcttgctctgtcacccaggctggagtgcagtcagacaatcacatttcactatggctgcaacctcccaggctcaagtgatcctcccaattcagyctcccaagtagctgggaccacaacaggcacatagcaccatgcctagctaagattttttaaaacatttttttacagacaggaggatctcgctgtgttgccc

SEQ ID NO: 449402 - DNA, 201 bp, Homo sapiens
tggggatctattaatgaggggtatttttgtgttttatatattttttagaggcagagtctcactctttcacccaggctgcagtgcagtggcgtgatcatagrtcattgcagccttgaactcccaggctcaagcagtcctcctgcctcagcctcctgactgaggactacaggcatgagccaccccacctggcttattgatgag

SEQ ID NO: 449403 - DNA, 201 bp, Homo sapiens
acaggctagtgtttttcaaactagaggctaatgaataggtccattaatgggtggtgaagtcagtttagtgagtaatgatcaacatttttaaaaaaaaaaamaaagtagaacagaagacattggagtacatggcactacagtagaagaataaatattgatttctgagatttttatttcagttttacatagatgtatgtaata

SEQ ID NO: 449404 - DNA, 201 bp, Homo sapiens
tcaaactagaggctaatgaataggtccattaatgggtggtgaagtcagtttagtgagtaatgatcaacatttttaaaaaaaaaaacaaagtagaacagaaracattggagtacatggcactacagtagaagaataaatattgatttctgagatttttatttcagttttacatagatgtatgtaataggttatgatatatga

SEQ ID NO: 449405 - DNA, 201 bp, Homo sapiens
tgggtggtgaagtcagtttagtgagtaatgatcaacatttttaaaaaaaaaaacaaagtagaacagaagacattggagtacatggcactacagtagaagartaaatattgatttctgagatttttatttcagttttacatagatgtatgtaataggttatgatatatgatgcatttttttgtgttgggttgtagtaaaaag

SEQ ID NO: 449406 - DNA, 201 bp, Homo sapiens
ataggttatgatatatgatgcatttttttgtgttgggttgtagtaaaaagaagtcactgctttgtaccattttgtggatagaaatggaaaatctcacaaaktttctgagacaatgttgagcaatggaaaataactcaaagaaataaagaatttaaaatgattcttattgcaggggagcttccagttgaaacataagttaaa

SEQ ID NO: 449407 - DNA, 201 bp, Homo sapiens
gtgtagagtgagccaaaacactaagatggcacccatctttctgggtcccagtttctttgtctgtaaattgggtgattgtttaaggtttctaaaatcaactstaatgtgagaaaactgcatcttaggggctatgctgaaaatttaataaacttaattattaattgacagtatagtttaagcaaatctcaagaaatctgaaga

SEQ ID NO: 449408 - DNA, 201 bp, Homo sapiens
acaatttgatttttaagtctagaagttggtggtggtaattttttagttatatgaggaacaaaggtaaaagttatttgagagcttatcaaatgataatgggrcatgtattgttttaaatgatgatagaagtgtctgttgctcaggagaagaaccggaacaacgcgtcaaatattttcaatttttgtgtgtgcatataaacta

SEQ ID NO: 449409 - DNA, 201 bp, Homo sapiens
tgagatgtagagagctagaaatcattattaaccacaacagggcagaaaatgtacagtcatgtgatactcaagtaagctctttattagatggagttgtgacyatgacaagcaggggtgctgaaggatcagtttctaaagtaaataaaagttttggtgaagaatcaaaaataatggtggaagataaagtttcttttgaaaata

SEQ ID NO: 449410 - DNA, 201 bp, Homo sapiens
aacttattttaaatgctttagtatttaaagggtatatgtttttaattaatctgcatatttaaaaactttttgtaacgcgaataactacttcctgatttacrtctcaatatattctcctttcatttgcccaattaaaaaaatatgtagtctctattattgctgtttactaatagttttagatcccaatgtgtattagaatta

SEQ ID NO: 449411 - DNA, 201 bp, Homo sapiens
ttttttaacataaaatatttacttgattaaaatagccaagtgtaagcagtctaattctagtaggactcttttgttccaaaacaaaacaaaactcgttaagygaaggagagaaaagagagggttattgtaaagatgtggagatttcagaggaaggtcagtgtatagctgggtctcatggaaactgaaaagccattggaaact

SEQ ID NO: 449412 - DNA, 201 bp, Homo sapiens
gcagtggcgcagtctgggctcactgcaacctctgtctcccgggttcaagcaattctcctgcctcagcctctcaactagctgggactacaggtgcatgccaycatgcccagctaatttttgtatttttagtagagacaggattttaccctgttagccaggctggtcttgaattcctgacctcaggtgatctccctggtttgg

SEQ ID NO: 449413 - DNA, 201 bp, Homo sapiens
tttgacccagggaagaaagcatgggatataagggagaagtgataggtgaagtagaacgtcgcctgctctgtaatgtttgtggtagtaaacacccccaattragaaggtatgttttgactttttgtctttttcttgaagactacagtttgaaacagcagatgatgaagatttcatttgggttcaggaaaatattgatgaaat

SEQ ID NO: 449414 - DNA, 201 bp, Homo sapiens
aaagtgaatatttgtaaattaagattcttctctttaccaccactgctcctgactgagttccactagaggtaaacattgttactttcgatgtgtatacatargaagataatcaaactttttgtatccaaatatacatatgtatgttaaaagaagtttctcataaaagtgagattttacaaacttttttaaagtcattaatat

SEQ ID NO: 449415 - DNA, 201 bp, Homo sapiens
catggatcctaaatgctgatcttaccttagtttttatgacctaagttaagcgttttaagaaaaaaaaaatttttaatcatgtaaaaactacacaatacagatgtgaataccaaaagataaaacaaaaaagtccgaaagtgaatatttgtaaattaagattcttctctttaccaccactgctcctgactgagttccactaga

SEQ ID NO: 449416 - DNA, 201 bp, Homo sapiens
ccatggatcctaaatgctgatcttaccttagtttttatgacctaagttaagcgttttaagaaaaaaaaaatttttaatcatgtaaaaactacacaatacagatgtgaataccaaaagataaaacaaaaaagtccgaaagtgaatatttgtaaattaagattcttctctttaccaccactgctcctgactgagttccactag

SEQ ID NO: 449417 - DNA, 201 bp, Homo sapiens
cccatggatcctaaatgctgatcttaccttagtttttatgacctaagttaagcgttttaagaaaaaaaaaatttttaatcatgtaaaaactacacaatacagatgtgaataccaaaagataaaacaaaaaagtccgaaagtgaatatttgtaaattaagattcttctctttaccaccactgctcctgactgagttccacta

SEQ ID NO: 449418 - DNA, 201 bp, Homo sapiens
tcccatggatcctaaatgctgatcttaccttagtttttatgacctaagttaagcgttttaagaaaaaaaaaatttttaatcatgtaaaaactacacaatacagatgtgaataccaaaagataaaacaaaaaagtccgaaagtgaatatttgtaaattaagattcttctctttaccaccactgctcctgactgagttccact

SEQ ID NO: 449419 - DNA, 201 bp, Homo sapiens
aactaagaaagcagcatagttacacatgaaaatgggtatggaaaattatatttgccagaaatgaaaattataatttgctccttttttttttcccatggatsctaaatgctgatcttaccttagtttttatgacctaagttaagcgttttaagaaaaaaaaaatttttaatcatgtaaaaactacacaatacagatgtgaat

SEQ ID NO: 449420 - DNA, 201 bp, Homo sapiens
tttgcaccactgcactccagcctggatgacagagcaagactctgcctaaaaaatatatatatattatgtgtgtgtgtatatatatatatattatatatatwaccaaatatgtgtaaatttggagggggtagattcatttttattttgtttattgttcgtctctggtgaaagactttaagctttataagggtggggctcttt

SEQ ID NO: 449421 - DNA, 201 bp, Homo sapiens
agctgaatttgcaccactgcactccagcctggatgacagagcaagactctgcctaaaaaatatatatatattatgtgtgtgtgtatatatatatatattatatatataaccaaatatgtgtaaatttggagggggtagattcatttttattttgtttattgttcgtctctggtgaaagactttaagctttataagggtggg

SEQ ID NO: 449422 - DNA, 201 bp, Homo sapiens
aagcggaggttgcagtgagctgaatttgcaccactgcactccagcctggatgacagagcaagactctgcctaaaaaatatatatatattatgtgtgtgtgkatatatatatatattatatatataaccaaatatgtgtaaatttggagggggtagattcatttttattttgtttattgttcgtctctggtgaaagacttta

SEQ ID NO: 449423 - DNA, 201 bp, Homo sapiens
ttggattatatcctgtagattgtggggatctattaatgaggggtatttttgtgttttatatattttttagaggcagagtctcactctttcacccaggctgsagtgcagtggcgtgatcataggtcattgcagccttgaactcccaggctcaagcagtcctcctgcctcagcctcctgactgaggactacaggcatgagcca

SEQ ID NO: 449424 - DNA, 201 bp, Homo sapiens
aaggtaaaagttatttgagagcttatcaaatgataatgggacatgtattgttttaaatgatgatagaagtgtctgttgctcaggagaagaaccggaacaaygcgtcaaatattttcaatttttgtgtgtgcatataaactacataaaactattctcatgtgttaggaattttttttttttttttttgagacagtcttgctc

SEQ ID NO: 449425 - DNA, 201 bp, Homo sapiens
atataaattaatgactaccaaaagaaattaacatattttaatatgaaattttcaagttatctttgtagcaggcatttcacatgaatgagatttcaattttyagttactaaatatctgaggtttacttctagcaggcaatttttttaagttataaataggtgaataatatttattgaaagatgcagacttttactgtgaagt

SEQ ID NO: 449426 - DNA, 201 bp, Homo sapiens
aattaatgactaccaaaagaaattaacatattttaatatgaaattttcaagttatctttgtagcaggcatttcacatgaatgagatttcaattttcagttrctaaatatctgaggtttacttctagcaggcaatttttttaagttataaataggtgaataatatttattgaaagatgcagacttttactgtgaagtgaaat

SEQ ID NO: 449427 - DNA, 201 bp, Homo sapiens
atttctaaagtaagagaacatgaaaaaggagattgggaaaagtgacatatatttgtagtagataatttatattggtaagctgaaagaatttctgcaagtcraataataacccctttagagagtttttagaattatgataagttaaaatatatatatcaacttgtaaactgtgtgaaacaattgcatttaattttacatata

SEQ ID NO: 449428 - DNA, 201 bp, Homo sapiens
attgatagtgaaagttataatgttgatgatttatgttttggctgaaattcttcctctccatctctctccccttctttctttccctcctgtttcttcttgcytactctgtttctgtgcaattaagtacaaccttatctagcctttccaaaaatctataaacctactccagtagatttatatgagtagaatctcttttggttt

SEQ ID NO: 449429 - DNA, 201 bp, Homo sapiens
tcattttaattgagtaatggaaagggaggaggtttatgtcagtaatcacaaatgtaaatgcctacattaacttagctaataaaataaatgaagaaggccargtgaaacctggagaaaacatgcctcatccaaaaggagcggcggctgcccagcttgtgcatcgtgttgccattaagtaggaatcagggcccagtgttgcta

SEQ ID NO: 449430 - DNA, 201 bp, Homo sapiens
agggctttcaccatgttgaccaggctggtctcgaactcttgaccttgtgatccgcccaccttggcctccctaagtgctgggattacaggcatgagccaccrcacccgacctacttatttatttatttatttatttattccttagatctgaggacagactggtcagccaatatttattatttgctaattaaatgccaggttg

SEQ ID NO: 449431 - DNA, 201 bp, Homo sapiens
aaaagattaatagtaaattgctttaatagtaaagcaattaagcaattatataaagttctcctttgtttctctgccccttcttccaaaaaactaaaaatctrctttcagaacaatggtcacctcaacttcctaatttataacttatttaagcctttgtctactaatagtttttaaaaaacatatcctactctatctacattg

SEQ ID NO: 449432 - DNA, 201 bp, Homo sapiens
aacatggtgaaaccccatctctactaaaaaaaaatacaaaaaaattagctgggtgtggtgacacgggcctataatcccagctactctggaggctgatgcargagaattgcttgaacccagaaggtggaggttgcagtgagccaagattgcaccactgcactccagcctgggcaacagagtgagactccatctcaaaaaaaa

SEQ ID NO: 449433 - DNA, 201 bp, Homo sapiens
ggcacggaacccatagattgacatttggaaaccactgctttctgatatgaaacaaaataggtaattaggaagaactttctaataaacagtatttcaagcartcttcctttaattagtgatgctttctgtccaaagcatgaagaaaagagaggcttctggaaacataggcttacattgttattcctgcatttgggcttctgc

SEQ ID NO: 449434 - DNA, 201 bp, Homo sapiens
tacatcactttacagaaagtcgtgcacagccaatatacatgtctcctctgatttctcctacctgctaatcttagcatacactggcaatatctaaatgactrcaattcagtagtatatctttattttaaaatcctccttttttccagctttaatagggaatgaaactagtatttccacactttattttcttttatgtattgt

SEQ ID NO: 449435 - DNA, 201 bp, Homo sapiens
attgtgccactgtactcctgcctgggcaacagagctcaagacctcatttctaaaaatataacacacacacacacacacacacacacacacacacacacacmcacacagagaaatattcaaaactaaatgttctgttttaaggttgggaaacagaaagcagccagacaacaacaaaaactgttttgtccccaaaagagcact

SEQ ID NO: 449436 - DNA, 201 bp, Homo sapiens
tcaaatattttcaatttttgtgtgtgcatataaactacataaaactattctcatgtgttaggaattttttttttttttttttgagacagtcttgctctgtygcccaggctggagtgcagtggcacaatctcggttcactgtgacctctgcctcctaggttcaagctattcttgtacctcacctcccgagtagctgggatga

SEQ ID NO: 449437 - DNA, 201 bp, Homo sapiens
tgtcctcttcaaacaggctagtgtttttcaaactagaggctaatgaataggtccattaatgggtggtgaagtcagtttagtgagtaatgatcaacattttwaaaaaaaaaaacaaagtagaacagaagacattggagtacatggcactacagtagaagaataaatattgatttctgagatttttatttcagttttacatag

SEQ ID NO: 449438 - DNA, 201 bp, Homo sapiens
atgtcctcttcaaacaggctagtgtttttcaaactagaggctaatgaataggtccattaatgggtggtgaagtcagtttagtgagtaatgatcaacatttttaaaaaaaaaaacaaagtagaacagaagacattggagtacatggcactacagtagaagaataaatattgatttctgagatttttatttcagttttacata

SEQ ID NO: 449439 - DNA, 201 bp, Homo sapiens
gcgtgatctcagctcactacaacctccgcctcccgggttcaatcaattctcctgcctcagcctcctgagtagctgggattacaggcatgcaccaccaccacgcctgggtaatttttgtatttttagtagagacaaggtttcaccatgttggccagtttggtctcaaactcctgaccttaggtgatccaacagcctcggcct

SEQ ID NO: 449440 - DNA, 201 bp, Homo sapiens
ggcgtgatctcagctcactacaacctccgcctcccgggttcaatcaattctcctgcctcagcctcctgagtagctgggattacaggcatgcaccaccaccacgcctgggtaatttttgtatttttagtagagacaaggtttcaccatgttggccagtttggtctcaaactcctgaccttaggtgatccaacagcctcggcc

SEQ ID NO: 449441 - DNA, 201 bp, Homo sapiens
tggcgtgatctcagctcactacaacctccgcctcccgggttcaatcaattctcctgcctcagcctcctgagtagctgggattacaggcatgcaccaccaccacgcctgggtaatttttgtatttttagtagagacaaggtttcaccatgttggccagtttggtctcaaactcctgaccttaggtgatccaacagcctcggc

SEQ ID NO: 449442 - DNA, 201 bp, Homo sapiens
ttaattcacttaagtgaaaatgtatatatgtgtcttttgcattgtaagcactcagatttgtgaggaatgattggcatttgaaatggtcattatgtctcttrgatattttaaattaatctctgtatctgttttcgccaatgatgcattttccctaggaataaaagacatacacgtgaatacagttaacagaaatattgttag

SEQ ID NO: 449443 - DNA, 201 bp, Homo sapiens
cccctctctgagaaacacccaagaatgatcaataaatactaaaaaaaaaaaaaaaaaaaaaaaaaagaatgaagtcattgtggactaagtagtactttttrgagtttagatcataatgaccggatagataatcaggaggattttctaggctgtgaaagtaagatccaggacataaagccaaggatcagagcagtatataca

SEQ ID NO: 449444 - DNA, 201 bp, Homo sapiens
ttcacagcaggaaaaacctaaacggccaataacatttgaaagaaaatgtcttctcaaaaataaagacatacatgttctagcaaagttttacaattgttatracccccgattgctgaagttttaagaaaatacttaaatgatactattatgagaataaaattaataaaactttttggaatatgaccctgtattaaaacatta

SEQ ID NO: 449445 - DNA, 201 bp, Homo sapiens
aatcatgtaaaaactacacaatacagatgtgaataccaaaagataaaacaaaaaagtccgaaagtgaatatttgtaaattaagattcttctctttaccacyactgctcctgactgagttccactagaggtaaacattgttactttcgatgtgtatacataggaagataatcaaactttttgtatccaaatatacatatgta

SEQ ID NO: 449446 - DNA, 201 bp, Homo sapiens
accagaaaagaatattcaaatgccattttttttttttttgagacagcctgtctcccaggctagagtgcagtggcaggatcttggctcactgcagcctccamctcccaggttcaagcgattctcctgcctcagcctcccaagtagctgggattacaggcatttaccaccacgcctggctaatttttgtatttttagtagaga

SEQ ID NO: 449447 - DNA, 201 bp, Homo sapiens
ataagtttcatatatagttcatctttaagtgattggataatatcaattatagttgcctttaaacaaaatatcttgtgaatttttatttgagaagagcattsttcttgatgtagactagtaattagaagcttttcagaatgccaaaacaagtctatgtatttgttgccttgtgaagaagtttggtcttccttaaaagttggg

SEQ ID NO: 449448 - DNA, 201 bp, Homo sapiens
gacattcatttacatttcactgttaagcaatgttctgggtgctgaagtataacagagaataaaagaggatgaaatctttgtttccatagaccttacattcyagttggtacagatagacaacatacagatgatgataagtactatgaagaaaaaaagcaggactaggaaaatccatggggagtgagatggtgttattttata

SEQ ID NO: 449449 - DNA, 201 bp, Homo sapiens
tccagttggtacagatagacaacatacagatgatgataagtactatgaagaaaaaaagcaggactaggaaaatccatggggagtgagatggtgttattttrtatagggttgtcatggaaggcctgacttatgaagtgacattagaggaaaatcctaaaggaagtgagggagtgaatcaggaagatatcaggttgaggacct

SEQ ID NO: 449450 - DNA, 201 bp, Homo sapiens
ggtggagtgcagtggcatgatctcggctcactgcaacctccatctcccaggttcaggcgattctcctgcctcagcctcctgagtaactgggactccatgcrcgtgccaccacatccagctaatttttgtatttttagtagagacaggattttaccatgttggacaggatggtctcgatctcttgaccttgtgatctaccct

SEQ ID NO: 449451 - DNA, 201 bp, Homo sapiens
atatcctaattcttgatttatgtacttatttattaatagaagatccattctgtgtctgtacctcaactgttcactgcctttaacagaaagtaataaatccwacttcttttaacattatctgaattaaaattttttattaatattcaggataggttatgttttgttcagactaatattcaagtaaaattgccaactccaggc

SEQ ID NO: 449452 - DNA, 201 bp, Homo sapiens
tcttttttttctattagaattagattaagtctaaactaattgataaatagctgttttgcttttggaaaataatgataaagtagctttatgttgttttagarttgtaattaagaaaaacaccattttaaaaattatgtttttgtttaataataaaatatcacatgctttatgggataaggaatagaattgctttcgtatttg

SEQ ID NO: 449453 - DNA, 201 bp, Homo sapiens
ttgaaataatgtggatgccacacagatatctctaatacacttaggtagtttgggcagaaggagaaaaataaaaacatcatagaagtcttttcagtgttggratgcaaggaagaaggaagagtggcaggaattttttagatactgattaattattgatgctgggagaggtcatagattgaagtgtatgtgtttaaaattgaa

SEQ ID NO: 449454 - DNA, 201 bp, Homo sapiens
tcaggtgatccacccacctcagcctcccaaagtgctggtattactggcatgagccaccacgcctggcccaattctcttttattaattttaatttattaagwcacattggtggccaggcacagaggctcacacctgtaatccttatactttaggaagcctaggtgggcggattgcttgggcccaggagttcaagaccagcct

SEQ ID NO: 449455 - DNA, 201 bp, Homo sapiens
acgggaaaccagcaaaataattcattgtattctatttttattaaagcaaaaaatatatgtactttttgttttctctaattagggatcctcaattcctgagytagcacattctgatgcttaccagactagagaaatatgctccagtggtaagttatataaatatttgtaatgtttgtagtagttgtttaagaaataatagtt

SEQ ID NO: 449456 - DNA, 201 bp, Homo sapiens
atgatcttatatcaaatgtcgagatattttatatttatgatttatatcaaatgtagagatattttatatatttacttgcctaaatagagtcaagaaattcraattgcttaacgatttttttgtttgtttgtttttgagaccgagtctcactctgtcacccgggctggagtgcagtggcgtgatctcagctcactacaacct

SEQ ID NO: 449457 - DNA, 201 bp, Homo sapiens
agaagtgaactcagatttttcaaagttaacgaggctaattttttttgtttgttttgagacagagtctcgctctgtctcccaggctggagtgcaatggtgaratctcagctcactgcaacctctgccctctgggttcatgtgattctcctgcctcagcctcctgagtagctgggatcacgggcgcccagccccacgcccagc

SEQ ID NO: 449458 - DNA, 201 bp, Homo sapiens
ttttgggatgacatcaggcattagttagattcacataaggagcttgcagcctagatccttcacatgcacagttcacaataaggttcgagctcctagaagamtctagtgccgcagcagatctcacagagatctcgctggtaatgcttgcttacctcctgctgtgtggccccatctctaacaggccccaaccggtaccgggtc

SEQ ID NO: 449459 - DNA, 201 bp, Homo sapiens
cactgcatcctctgcttcctgggctcaagcgatcctcccacctcagccttgtgagtaactgggactacaggcatgcactaccacacccagctaattttttrtagagacagggtgtcacctcagattcctggactctccttggcctcccaaagtgctaggattacaggcgtgagctactgtgcctggcctaaagaagggggt

SEQ ID NO: 449460 - DNA, 201 bp, Homo sapiens
gttcagcaaagtgtggttttttaaattgctcatcactagaaatacacttttctttacactacatttatatgaaatgagtgatgatgattcccttaataaattgttctcagaaggatttcaggttctgataatatttgattagaacttaatttgtaaattgtatttatttaggtatattgtgggtttaatgttcttgacttc

SEQ ID NO: 449461 - DNA, 201 bp, Homo sapiens
cgttcagcaaagtgtggttttttaaattgctcatcactagaaatacacttttctttacactacatttatatgaaatgagtgatgatgattcccttaataaattgttctcagaaggatttcaggttctgataatatttgattagaacttaatttgtaaattgtatttatttaggtatattgtgggtttaatgttcttgactt

SEQ ID NO: 449462 - DNA, 201 bp, Homo sapiens
acgttcagcaaagtgtggttttttaaattgctcatcactagaaatacacttttctttacactacatttatatgaaatgagtgatgatgattcccttaataaattgttctcagaaggatttcaggttctgataatatttgattagaacttaatttgtaaattgtatttatttaggtatattgtgggtttaatgttcttgact

SEQ ID NO: 449463 - DNA, 201 bp, Homo sapiens
gacgttcagcaaagtgtggttttttaaattgctcatcactagaaatacacttttctttacactacatttatatgaaatgagtgatgatgattcccttaataaattgttctcagaaggatttcaggttctgataatatttgattagaacttaatttgtaaattgtatttatttaggtatattgtgggtttaatgttcttgac

SEQ ID NO: 449464 - DNA, 201 bp, Homo sapiens
caaaaacttgagcccaggagtatgatcacaccactggcactccagccttggtgacagagcaagaccccctctcaaaaaaaaaaaaaaaaaaaaaaaaaaaagctaggtgatagtgtgtgcctgtacttccagctgctcaagaggctgaagtaggaggatcccatgcacccaggagtttgagtttgcaatgacctaatgatc

SEQ ID NO: 449465 - DNA, 201 bp, Homo sapiens
atgttgaatgaagaacagttggaagatatgagacaggaacttgtacgacaataccaagaacatcaacaggcaacggaattgttaaggcaagcacatatgcvgcaaatggagagacagcgagaagaccaggaacagctacaagaagagattaagagacttaatagacaattagcccaggtaagggtcttgtagtcccctttc

SEQ ID NO: 449466 - DNA, 201 bp, Homo sapiens
atggataatttgaacccattaaaattttttatttgtgtacgagaatgttttatcctcttttgataacactaatctcgagtgtagttaaatattataccaamcagtatcaattttgtgcacagaggtttctattttatctcataccaatatagaagaatgacatgctgtttccaagttgacaggttttctttctgtcttctc

SEQ ID NO: 449467 - DNA, 201 bp, Homo sapiens
aaattttgattggatattaatcacatacttaactgttaatcacctgatgttagcaaaacttttccttactttgattttgtagaggttaatataaaaatgtraaatattaagtgagaatagttatcctacattagtattaaagactttaagcacaatattttaaactttgttttgttcaaatgaaaataatttctttaattt

SEQ ID NO: 449468 - DNA, 201 bp, Homo sapiens
tttaccatgaaaatcttttattttgtctgcatgtataaagtgtgcctttgttgaactgagttgctaggacaagagagttgtttagtttttaagaaaattawtcaggcagtcttctgaatcaccatttatggaagtagctttctttgcatggtagaatgttcatgttaagcaaaaaagagagtgtacaaaaacactttgttc

SEQ ID NO: 449469 - DNA, 201 bp, Homo sapiens
gggttcaagccattctcctgctgcagcctcccaagtagctgggattacaggtgcctgccaccatgcctggctaatatttttgtatttttagtagagacagrgtttcactatgttagccaggctggtttcgaactcctgacctcaagtgatccaccaacctcggcctcccaaagtgctagaattacaggcgtgagccactgc

SEQ ID NO: 449470 - DNA, 201 bp, Homo sapiens
cctctttattttgtgcttgagatttgctcccatctaatacaccataccttcaatcttttcctcatgttgattccttctctatagcccaaaacattagactrtcttcatactgccttaaaaatttaagaagtgttgaattttctcacctttgttccctgctcaaggtaaatttcagcaaactttttttttttttttttttga

SEQ ID NO: 449471 - DNA, 201 bp, Homo sapiens
agttcccatcgtatcacactgttccctttgcgtcacatttctgtacccatgagaaagaaaatgttactagaatgcatttaatttctcacataaagatgctrtaaattccaagattatcttgcacttctaaatgttttcaaggcattcaattttgagcacatggagtaatataaataagtaccagtgtagctgatgtgtttt

SEQ ID NO: 449472 - DNA, 201 bp, Homo sapiens
gatatgtcatactgtaagaataagtatctttccaaaaacttgagcccaggagtatgatcacaccactggcactccagccttggtgacagagcaagaccccmtctcaaaaaaaaaaaaaaaaaaaaaaaaaaaagctaggtgatagtgtgtgcctgtacttccagctgctcaagaggctgaagtaggaggatcccatgcacc

SEQ ID NO: 449473 - DNA, 201 bp, Homo sapiens
tcagataagtagattgcaaaaattttctcccattctgtaggttgccttttcactctgatggtagtttcttttgctgtgcagaagctctttagtttaattayatcccatttgtctattttggcttttgttgctattgcttttggtgttttagtcatgaagtccttgcccatgcctgacctaaaggttattgcctaggttttc

SEQ ID NO: 449474 - DNA, 201 bp, Homo sapiens
tggtggcgcaagtatttttgtatttttgttagagatagggtttcaccaactgtcttccacaatggttgaactagtttacactcccacaaacagtgtaaaascgttcttatttctccacatcctctccagcatctgttgtttcctgacttttaaatgatcgccattctaacttttgtgagatagtatctcattgtggttttc

SEQ ID NO: 449475 - DNA, 201 bp, Homo sapiens
gccacattttgttaatccagtctatcattgatggacatttgggttggttccaagtttttgctattgtgaatagtgccgcaataaacataggtgtgcatgtrtctttatagtagcatgatttataatcctttgggtatatacccagtaatgggatcactgggtcaaatggtatttctagttctagatccttgaggaattgct

SEQ ID NO: 449476 - DNA, 201 bp, Homo sapiens
aactcgtcatttcatttggtatacctcctaatgctatccctcctcctgcccgccaccccacgacaggcccccatgtgtgatgttccctgccctgtgtccargtgttctcactgttcagttcccacctatgagtgagaacatgtggtgtttggttttctatccttgtgatagtttgctcagaatgatggtttccagcttcat

SEQ ID NO: 449477 - DNA, 201 bp, Homo sapiens
attgagataatagagcaaattttaatttaatttttttgtcattctaagtattttacgtacgtatgtatgtatgtatgtatgtatgtatgtatgtatgtatgatactttaagttctagggtacctgtgcacaatgtgcaggtttgttacataggtatacatgttccatgctggtttgctgcacccatcaactcgtcatttac

SEQ ID NO: 449478 - DNA, 201 bp, Homo sapiens
cattgagataatagagcaaattttaatttaatttttttgtcattctaagtattttacgtacgtatgtatgtatgtatgtatgtatgtatgtatgtatgtatgatactttaagttctagggtacctgtgcacaatgtgcaggtttgttacataggtatacatgttccatgctggtttgctgcacccatcaactcgtcattta

SEQ ID NO: 449479 - DNA, 201 bp, Homo sapiens
acattgagataatagagcaaattttaatttaatttttttgtcattctaagtattttacgtacgtatgtatgtatgtatgtatgtatgtatgtatgtatgtatgatactttaagttctagggtacctgtgcacaatgtgcaggtttgttacataggtatacatgttccatgctggtttgctgcacccatcaactcgtcattt

SEQ ID NO: 449480 - DNA, 201 bp, Homo sapiens
cacattgagataatagagcaaattttaatttaatttttttgtcattctaagtattttacgtacgtatgtatgtatgtatgtatgtatgtatgtatgtatgtatgatactttaagttctagggtacctgtgcacaatgtgcaggtttgttacataggtatacatgttccatgctggtttgctgcacccatcaactcgtcatt

SEQ ID NO: 449481 - DNA, 201 bp, Homo sapiens
cacactgttccctttgcgtcacatttctgtacccatgagaaagaaaatgttactagaatgcatttaatttctcacataaagatgctgtaaattccaagatyatcttgcacttctaaatgttttcaaggcattcaattttgagcacatggagtaatataaataagtaccagtgtagctgatgtgttttttactttggagaat

SEQ ID NO: 449482 - DNA, 201 bp, Homo sapiens
cttacaaagaggacatgcttagtgaatattgaattgtgctgaattcaggtcttgcgtctgaagctgtatctgatgtcattactacatagattaagaaaatrtggcaccagctactttagcaagacaagttctaataagtagctcttattttgagtgaatgtgtcaaactgaatgcttattccaagcacttggtacatgaag

SEQ ID NO: 449483 - DNA, 201 bp, Homo sapiens
ttcaggaaaatagctttgtacaggatactctgagaccagagaagagagcaacatctgacatgttagagtgtggtggggaccaagtaaagtttacttgggasttgatgcttaagatgtttaagatgagttattcactggcaaaatttttgaatatcagggcactggacaagtatctgccttataggctgattgggtgatttc

SEQ ID NO: 449484 - DNA, 201 bp, Homo sapiens
tattttaaggaagtcagctaacttgtagaagctttagagtttcaagttttttatgcaagtggtttttttttgttaggcacatgaatcacaaaatttcatarttaagctctttgtgtaatttatttcaaaagcaaatgggaatctcagtaatgtagtttttaagataatagtcattactgagttccctaaaagtgatcagcc

SEQ ID NO: 449485 - DNA, 201 bp, Homo sapiens
ttgatttgaggggtaacttgcccagtggtatgtccaagtccatattatagtacatttattacaacggttttacctctcttttgcttggacaggctaccatrcaatcaggcctatattcactttattgttaggttcctactggttggggtagctttcatgatagtatgaaaaagaatgcttaagagactgtcataaggccct

SEQ ID NO: 449486 - DNA, 201 bp, Homo sapiens
aaacaccagcttatcttacaaacattataaacttgtctaaatgccctttcaaagccctgacgtggaacttggatcctgtctggcaggcttttttgtgggcrtattaattcacattccacctgtcagtgtacctataggtaaagacattaaaccacaccctctgttctgaccttttcctcaggggacactgactagaatcct

SEQ ID NO: 449487 - DNA, 201 bp, Homo sapiens
atcaagattgatagagacctaagtttttttagatttgtagtttttttcctggactttccccttccttttattgtgcagttgtatgaattaattttataacrtttatttgatagtgctaaaaaagaaactttttatactgctatggtagatcttgataaactaaaaagaactttttaatgtattagaaaattgataaagcaa

SEQ ID NO: 449488 - DNA, 201 bp, Homo sapiens
aatttaaaatgtatgattaattttctattatgagtcttatacgtgtattcatattaattgcaaataagttataagtgatatttgaaatatcctattaaaasaagaataattgcatactggatattttggaaattgatttagagtagccatcaaaagctgtagttactctaaaatccatttgctatgacaaatacctctcag

SEQ ID NO: 449489 - DNA, 201 bp, Homo sapiens
taaaacaagaataattgcatactggatattttggaaattgatttagagtagccatcaaaagctgtagttactctaaaatccatttgctatgacaaatacckctcagatgtgaaaagtggaagtctttaacaataaagtatcctttagtattatcatgattttgtaatacattttcaatatgtgactataaattagaaacca

SEQ ID NO: 449490 - DNA, 201 bp, Homo sapiens
tgcatactggatattttggaaattgatttagagtagccatcaaaagctgtagttactctaaaatccatttgctatgacaaatacctctcagatgtgaaaastggaagtctttaacaataaagtatcctttagtattatcatgattttgtaatacattttcaatatgtgactataaattagaaaccactacatttgatcata

SEQ ID NO: 449491 - DNA, 201 bp, Homo sapiens
tgtattcttcaaaggcttaaggtggcttttttcctctttcagtgccattattcatatattttatagagagatttaaaaaattataagaaaatctaccttakagataaatgtcttattagccaatcatgtggaatcaggttttttttttctttttccttaggcagatgttaacaggaaaagatagttcttcatttatcctca

SEQ ID NO: 449492 - DNA, 201 bp, Homo sapiens
agcagttctcctgcctcagcctctcaggtagctgggattacaggcatgcaccactaccgcctggctagtttttgtatttttttttttttttttttttttttagtaaagacgagagttcaccattttggctaggcaggtctcgaactcctgaccttaaatgatccacccacctcagcctcccaaagtgctgggattacaggc

SEQ ID NO: 449493 - DNA, 201 bp, Homo sapiens
aagcagttctcctgcctcagcctctcaggtagctgggattacaggcatgcaccactaccgcctggctagtttttgtatttttttttttttttttttttttttagtaaagacgagagttcaccattttggctaggcaggtctcgaactcctgaccttaaatgatccacccacctcagcctcccaaagtgctgggattacagg

SEQ ID NO: 449494 - DNA, 201 bp, Homo sapiens
tggttcattaagtgttttcattataaagaaatgttgaggtttttttgttttgtttttattttttagtttattggtttgttttttgtttgtttgtttgtttkttttttttttgagacaaagtctcgctttgactttgcactccactgctggagtgcagtggggtgatctcagctcactgcagtctccacctcccaggttcga

SEQ ID NO: 449495 - DNA, 201 bp, Homo sapiens
tttgctttatcacatagattttggtatgttgtatttccattttcatttctttcaagaaatttaaaattttctcttttaatttcatcattgacccatttgtycttcaggattatgttggttttttgtttgttttgttttttgagacagggcctttctctgttgcccaggctggagtgcagtggtgtgaacatggttcattgt

SEQ ID NO: 449496 - DNA, 201 bp, Homo sapiens
tacttaaatcttactctatatatgcagctttgttcttttttatccaagtttatgttgagagcatttttgctcattaagattttttttttgaaaacatcatyattattattattattattatttgagacagggtctcactctgtcacccaggctggaatgcagtggcatgatcttggctcactccattctccacctctcagg

SEQ ID NO: 449497 - DNA, 201 bp, Homo sapiens
taagtaaaacgttacttaaatcttactctatatatgcagctttgttcttttttatccaagtttatgttgagagcatttttgctcattaagattttttttttgaaaacatcattattattattattattattatttgagacagggtctcactctgtcacccaggctggaatgcagtggcatgatcttggctcactccattct

SEQ ID NO: 449498 - DNA, 201 bp, Homo sapiens
gatattcatgtgtttattacatgcctggtttcatcacataaatgatctctgacagatgtccatgggagctgatgatggatacctgatgtccatcaacatgsatcactatgctgaccagatgcagcagttcttttattttttagtaaatatttcctgcaaaaatatatccatatgaaagggaataatgtataatgtaggttt

SEQ ID NO: 449499 - DNA, 201 bp, Homo sapiens
cactgcagcctcaacctcctgggttcaagtaatcctcccatctcagcctcccaagtaactgggactacaggtacacaccaccatgcccaattattttttayagaggcagggtctcactatgttgcgtaggttggtcctggactcaagtgatcctcccacctcagcctcctgaagtgctggggttatgggcgcaagccactg

SEQ ID NO: 449500 - DNA, 201 bp, Homo sapiens
aagacagcaaaaccaagcattggaaaagcagttagaaaaaatgagaaaatttttagatgtaagtattctcaagttgaatactgatttttctcagtggaatrttctttgctagtatactaggctatgaattttaaattatgaaaagactgttgagttagtttttcagtgttttattaggtgtcgaatctactaatcgatcaa

SEQ ID NO: 449501 - DNA, 201 bp, Homo sapiens
gagacagagtcttgctctgtcacccaggctggagtgcagtggcactatctcggctcagtgcaagctctgcctcccgggttcacgccattctcctgcctcakcctccccagcagctgggaccacaggtgcacgctgccaagcccggctaatttttttgtatttttagtagagacggggtttcactgtgttagccagtatggt

SEQ ID NO: 449502 - DNA, 201 bp, Homo sapiens
ctgggattataggcatgcgccaccacaaccagctgatttttgtatttttagtagaaacggggtttctgcatgttgatcagactggtctcaaaatcccaacytcaggtgatccacctacctcagcctcccaaagtgctgggattacaggcgtgagccatcatgcccggccaacttttttattattcactaattagaagtaga

SEQ ID NO: 449503 - DNA, 201 bp, Homo sapiens
tcttcccgaggacagactctgttatccccattttacagatgtgtaaactgagccttaagggaagttaaataacttgatcatggtcacaccttaagtggttraaaaggagttcctctcagatttctgtgagtctgaagcccttgtgatactatactgccaaagcattggggcccattttgtcttgttggtgagaagtgttaa

SEQ ID NO: 449504 - DNA, 201 bp, Homo sapiens
gcatgtttgctagggtctcaagcctgcagagttcccagagagctattgcagggacaccccaaaggtgtctgttccctaatacagtcacttcagaatttaaygttttgaggtttctttctattttcagttacaggctagtgaaactctgagaaacagcactcatagtagcacagctgcagacttactacaagccaaacaaca

SEQ ID NO: 449505 - DNA, 201 bp, Homo sapiens
ctctactaaaaatacaaaaaaaaaaaaaaaattagccgggtgtggtggcgggcgcctgtagtcccagctactcgggaggctgaggcaggagaatgctgtgmacccgggaggcagagcttgcagtgagccaagatcacgccactgcactctagcgtgggcaacagagtgagactccatctcaaaaaaaaaagaaaacaaaaa

SEQ ID NO: 449506 - DNA, 201 bp, Homo sapiens
gtgatgtgttagtgtgtaatcagcgattccctctttcagtttctaaggcagtaaatgattcataagctgctttctgagccacttgtcactaagtgttgctraggataggctctgttgccttagataacagagatgctcctgcatcttagtttgctttttgatcagcagttttgatcatgaggtaaatacacatttggaaat

SEQ ID NO: 449507 - DNA, 201 bp, Homo sapiens
tctcctgaattgtataattcacttactctaaggtttttgtaattcagacctaaggatctcttggtcttagtttctatcttggcttccttctgcttaacaarccacatggcagccaggccttttagtaagttaattagatatttttggactaaattgagttagtcttatatggtggctaacaaaacaaacagttctacaact

SEQ ID NO: 449508 - DNA, 201 bp, Homo sapiens
tggaaaatgaaaaagataaagctctttgcagtcttaaagaagagcttatttttgctcaagaggaaaagatcaaggaacttcagaaaatacaccagttagarctacagactatgaaaacacaagaaacaggtaaaatggtttctgacttataagtaccatgatccaaataagtattggatagagcccaccattctataattt

SEQ ID NO: 449509 - DNA, 201 bp, Homo sapiens
aaatagtgtgaaaagggcattatcaaaaatagtatgtacattatttcatttgtataaacgtgtgctttcagattagaactgaaaaactctggattataatkttattcagcaaacgtatattgaatccctattttatacctagaggtggtgacagtgtctgctctcaagttgctcactgtttagtgggagagacagactctg

SEQ ID NO: 449510 - DNA, 201 bp, Homo sapiens
aataatttcagaaaataccaaaaaggatagtggtgactcgttactgtaatcacaccatcttaagacaacccttgtaatttaaagatgagcaaactgaagckaaaagatgttattaaattgttaaagggcacaaataccattacatagtgattccaggctttgaatctctaaagccctatgctctttttaattctcctctgc

SEQ ID NO: 449511 - DNA, 201 bp, Homo sapiens
agttgtttatcttctaaaattctgagtggcttatttattcactattgcccaggtttctggagctacccagaaggctattctatataacttgggcttttaargtttagtcagggttcataagataccttaagtggtatagttttcaactgttacatacagtgtagctttaaaaagaattttttccttagcatgtactctgta

SEQ ID NO: 449512 - DNA, 201 bp, Homo sapiens
caaataatacaggaaaaagaggtagaaattgaccaattaaatgaacaagttacgaaactccagcagcaacttaaaattacaacagataacaaggtatactyatttaaaattgattatgaaattaatatgaaccagagttttaaagggcaaaatggttataatgttgctccccattgaatttaaaaaacaaaccaattttat

SEQ ID NO: 449513 - DNA, 201 bp, Homo sapiens
tgccaccccatctaggaagtgaggagcatctctgcctggccgccccatctaggaagtgaggagcgcctctgcccagctgccccgtctgggaagtgaggagygcctctgcccggctgccgcgtctgggaggtgagcgcctctgcccggctgcccatcgtctgggaagtgaggagcacttctgcccagccgccccgtctggga

SEQ ID NO: 449514 - DNA, 201 bp, Homo sapiens
aatccttatactttaggaagcctaggtgggcggattgcttgggcccaggagttcaagaccagcctgggcaacatggtgaaactttgtctctacaaaaaatrtaaaaattaactggacatggtggcataccacctgtagtcccagctgcagtgagcctcatcatgccactgcactccagcttgggtgacagagtgagaccct

SEQ ID NO: 449515 - DNA, 201 bp, Homo sapiens
tagtagttctccatatgtatcatgaatcaaattttgtgtgtggagaccttgtggggattgcagtgggcatggggcagagatctcagttaattcttacgccrtttatatcctctactccatttcttgagagccaaataaattagtagatcttcttctaaatggcaagatattagaaaatatgttaaaactgcattaggaaat

SEQ ID NO: 449516 - DNA, 201 bp, Homo sapiens
ttcattaacatcatcattaaatggagcagtcagaagaaactaagaaacattaattttagcaaatgttctctaggatttatggggatttttttcttaatttscttctaatatgcatgttatgttatcattccttttaagtaataataagtatgaaaatatgttaggattgacaaagaatgcagactttacagaaagaaatct

SEQ ID NO: 449517 - DNA, 201 bp, Homo sapiens
tccctcctgagcagctgggactacaggtgtgcaccacaacacctggctaatttttgtattttttgtagagacagggtttcgccacgttgcccagactggcytcaaactcctggcctcaaatgatctacctgtctcagcctctcaaagtgctgggattacaggcgtgagccaccgtgcctggcctaaaatagtaatgtaact

SEQ ID NO: 449518 - DNA, 201 bp, Homo sapiens
tttaagaggaggaggtaaaagacatttcttgtttagttaggaggcaaaagacattctagttgttatgctgaggaagtttaataaattatttagagtggaarttatatttaaaagcaccgacacaggttatctaaaatcattcatcctatcgaaaatatagttcacaaggatttatagtgctcctttgccacaatacactct

SEQ ID NO: 449519 - DNA, 201 bp, Homo sapiens
aaataactgggcaaggaccaccaagatgaagaagttaaataaaatgtcacaatgaaattgagtgcaataatacaactgttgactgactttccaaaaccacrgtgatcggtagagtatcatcaatgttaccgaggattttgtttctgcctcattataactcacttccatgtattttgtcagtatagtacgtatatttaagca

SEQ ID NO: 449520 - DNA, 201 bp, Homo sapiens
ttaaataaccatatatggttagtagttaatatattgaacagtgcatgaatgtgctgctttagcttatgatttttttttttttttgagacggagtcttgctytattgcccaggctggagtgcaatggcacgatttcctcttaccacaacctccgcctgctgggttcaagcgattctcctgcctcagcctcccgagtagctag

SEQ ID NO: 449521 - DNA, 201 bp, Homo sapiens
tttgactcctttaaatggcttatatttctccccatacatgtccaaacggtttacttttaagcctgtatcaaaaagaatgaaaaagaataaattatcatcaycccaaccaatataatgttagcaatgagcgctatatggtaaatctgacattaaccagtgtcccttccaccatttggaagaaatgtctcttctatcatttac

SEQ ID NO: 449522 - DNA, 201 bp, Homo sapiens
gaagaatcgcttgaacccgggaggcggaggttgcagtgagccgagactcaagattgcaccactgtactccagcctgggtgacagattgagactccatctcaaaaaaaaaaaaaaaaaaaatcccagctgccttttcgtggaatttgacaggctaatcctaaattcataaggaattgaaaaagatcaacagccaaaacaatc

SEQ ID NO: 449523 - DNA, 201 bp, Homo sapiens
tcccgagtagctgggattacaggtgcgcgccaccatgcccggctaattttttgtatctttagtagagacagagtttcaccatgttggccaggctggtctcraactctgacctcatgttccgcctgccttggcctcccaaagggctgggattacaggcgtgagccaccgcgcccggccaggacttcagttttctattcatct

SEQ ID NO: 449524 - DNA, 201 bp, Homo sapiens
gcagtgcagtggtgcaatctcagctcactgcaacctctgcctcccgggttcaagcaattctcctgcctcagcctcccatgtagctgggattacaggtgtgygccaccatgcctggctaatttttgtatttttagtagagatggagtttcaccatgttggccaggctggtctcgaactcctgacctcaagtgatccgcccac

SEQ ID NO: 449525 - DNA, 201 bp, Homo sapiens
agagttagcttttggggacatagtcctcttcttccttaaagaaacactgactaaaatagtaggagcaggtttttagagtagagttgggacatcactttttscctgattttctagatctgaaaggggtaacatgtcattaaagggtgatgatattgatatttagtgttgccaactgctattatcactgctttatcttggaaa

SEQ ID NO: 449526 - DNA, 201 bp, Homo sapiens
ctaatagtgatacatcgtaatgacacttggaaaacaaactggtcctgaggaattttggcctcttctcatgtcctcacttggaactttccagctttcgtgaygtatttgactcctttaaatggcttatatttctccccatacatgtccaaacggtttacttttaagcctgtatcaaaaagaatgaaaaagaataaattatca

SEQ ID NO: 449527 - DNA, 201 bp, Homo sapiens
tcctaagtgaaaagatacaaaataagctaagtcactaaaaggtttccttagcttaaagctccttaagaatcctacattgataactaagtaactttgttagyggtgtgtagctagacacaaatgctttaactagaatatgtattcccactcacttggtacctaatagtgatacatcgtaatgacacttggaaaacaaactgg

SEQ ID NO: 449528 - DNA, 201 bp, Homo sapiens
gttcatatactatgaccacattatccttaattgcagcctctgaacactcaccaaagtagtcctgacaaaatacacacaaaatatcacacaatggaaggcamaaagaaaggcctgctaaatactttttgttctgaagaataaacttagagtagcataattcattgcttaagctgctgaacatatataaaacagagcggggga

SEQ ID NO: 449529 - DNA, 201 bp, Homo sapiens
ttcagggatccaccagggctataaaacagagttagcttttggggacatagtcctcttcttccttaaagaaacactgactaaaatagtaggagcaggttttyagagtagagttgggacatcactttttccctgattttctagatctgaaaggggtaacatgtcattaaagggtgatgatattgatatttagtgttgccaact

SEQ ID NO: 449530 - DNA, 201 bp, Homo sapiens
attaaaaaaaaaaaggaacaacgaagatggataactcgtgcttcctgatttcaaaacttactacaaaactactatgtggtattggcacaaggacagacctrcagatcaatagaacattaacccttacatttatggtcaactgattttcaacaagggtgccaagacctgggtgaccagttggagagagaacaaccttttcaa

SEQ ID NO: 449531 - DNA, 201 bp, Homo sapiens
ttaactataatctttagctgataaacttttcattttcattttttaaatgaaacaggaatatccaaccataagatctgcaactaaatttttattattacacmtttttcttggaagaaaatcagcatctgaaatatataatgtatgacttcaagtggagcactgtaatccacaagcagactcagatttgggcacttcaggtga

SEQ ID NO: 449532 - DNA, 201 bp, Homo sapiens
actgccaaaggacttcaattttcttttcctttcttcttcttttttttttttttgttgagacagagccaggctggagtgcaatggcatgatcttgtctcatygcaacctctgcctcctgggttcaagcaattttcctgcctcagcctcccgagtagctgggattacaggtgcgcgccaccatgcccggctaattttttgtat

SEQ ID NO: 449533 - DNA, 201 bp, Homo sapiens
gaatgaagataaattccaaagaggaaaggaagactttccagaattgattcatttgattctgttgacagaaaacaacatcaaccctttcttttatgaaagcrgctgacatttaaagaatatgtggtgatgatctcctcttcccattcgacacatgttcagtagttatcaataatactagttactaagatatgttttagtaat

SEQ ID NO: 449534 - DNA, 201 bp, Homo sapiens; identical to SEQ ID NO: 258755

SEQ ID NO: 449535 - DNA, 201 bp, Homo sapiens
ttaattgcagcctctgaacactcaccaaagtagtcctgacaaaatacacacaaaatatcacacaatggaaggcaaaaagaaaggcctgctaaatacttttygttctgaagaataaacttagagtagcataattcattgcttaagctgctgaacatatataaaacagagcgggggaaaaaaccctctatagtccgggcatgg

SEQ ID NO: 449536 - DNA, 201 bp, Homo sapiens
tttctattctctagtaattgtggagtagcagcataccagttatgtaatgctattttaaatattaaaatgccagtctataaatggactaaattctcttctargtgggctcatatactggcttctttaggaataactggaacaatttattcagtcttagtatttagtgttaaataatggtaataatattgttgtggtgtttta

SEQ ID NO: 449537 - DNA, 201 bp, Homo sapiens
atctactcagtagcagctgcaggattccttctgcagccagtggcagaagcacagcacagtatgctctctaggttttgatacgaactttagttttaaacaargtgccaaacctttccctccattcctccccacaaatcacaaaatagattgcagaaacacttgctcactcttgatttgaagtggctgtaccttggtgactgg

SEQ ID NO: 449538 - DNA, 201 bp, Homo sapiens
tcgtgatccgcccgcctcagcctcccaaagtgctgagattacaggcatgagccactgcacccagcctagcttatgatttaagaggaggaggtaaaagacatttcttgtttagttaggaggcaaaagacattctagttgttatgctgaggaagtttaataaattatttagagtggaagttatatttaaaagcaccgacacag

SEQ ID NO: 449539 - DNA, 201 bp, Homo sapiens
ttaccatgaaagaaagggagagatcaggcattccagatagtttaatgcaagcatcaatgaccccctgaatttctgcaaagactgtagatcctgaagaaagaaaaaaaaaggaagataacatcaatggaatatgagtcttcactagacctatcactgtatctttttatttttatttattgtttttagagacagagtcttgct

SEQ ID NO: 449540 - DNA, 201 bp, Homo sapiens
ctagacctatcactgtatctttttatttttatttattgtttttagagacagagtcttgctctgttgccaaggttggagtgcagttgtatgatcatagctcrctgcagcctcactcctgggctcaagtaatcctcctgccctagcctcccaaatagctgggaatataggtgcgtgccatgacacctagcccaacaatcacta

SEQ ID NO: 449541 - DNA, 201 bp, Homo sapiens
gcaggcagatcactggaggtcaggagtttgagaccagcctggccaacatggtgaaatcccctctctaataaaaaaaaaaaataacaaaaaacaaaaattakctgggcgcggtggcaggtgcctgtaatcccagctacttgggaggctgaggcaggagaatcgcttgaacccaggaggtagaggttgcagtgagccaagatc

SEQ ID NO: 449542 - DNA, 201 bp, Homo sapiens
gctctctaggttttgatacgaactttagttttaaacaaggtgccaaacctttccctccattcctccccacaaatcacaaaatagattgcagaaacacttgstcactcttgatttgaagtggctgtaccttggtgactggatcaaatgtatagctgccttgtgtgggtgtcaggttcatgttcagcacaacttttggcatgt

SEQ ID NO: 449543 - DNA, 201 bp, Homo sapiens
aaatctttgttatcagtaggtggtggtagtgatagggaagggagctttgatcactaatctctcagactgtggccagaatggtgatgcttaagccaagtatkaatggctattaacatactgaggttagggaaggagtactgagaagtgctttgcagcaacactcgcagcttgtgtgatgatgcagaagaaaatctgatcatg

SEQ ID NO: 449544 - DNA, 201 bp, Homo sapiens
tggattctagcaaattaataaatacagtaatttgattgtaaaaggaaacattctacttggacattttagtagaaattgctagagggaaggagctcctggcrtacattctacttggatagaagagaagatagcacaggaggagaactggacagtccaggtatagattgttgagattagggattcagcagaaagcaaagcaaa

SEQ ID NO: 449545 - DNA, 201 bp, Homo sapiens
aagcagctgggatacaggcatgcgccaccatgcccagctaattttgtagttttagtagagatggggtttctccatgttggtcaggctggtctcgaactccygacctcaggtgatccacccacctcggcctcccaaagtgctgggattacaggcgtaagccactgcgcccagcctctgtttatttttctgtaaaataattag

SEQ ID NO: 449546 - DNA, 201 bp, Homo sapiens
tgttaagtttgtaggagtaccacaggtccttccccctgctgcaagacagagacttgctctgttgcccaggctgcagtgcagtggtgcaatctcagctcacygcaacctctgcctcccgggttcaagcaattctcctgcctcagcctcccatgtagctgggattacaggtgtgcgccaccatgcctggctaatttttgtatt

SEQ ID NO: 449547 - DNA, 201 bp, Homo sapiens
cagcctcccatgtagctgggattacaggtgtgcgccaccatgcctggctaatttttgtatttttagtagagatggagtttcaccatgttggccaggctggyctcgaactcctgacctcaagtgatccgcccaccttgacctcccaaagtgctgggattacaggtgtgatccaccacgcccggccacacaggtccatttttc

SEQ ID NO: 449548 - DNA, 201 bp, Homo sapiens
ctacaatctccatgtaaaccactgtttcaaattcgataaaactcaaactccataaaatacctcctcctgtcactggcaccatcttcttaatcacacataargctgtaagtttcaggttcaaacaaatctaccaaatacaaacagccacatcgcccgtcactcttccacactcactgccacctgctcagcttagaaccccgt

SEQ ID NO: 449549 - DNA, 201 bp, Homo sapiens
aaaacaaaaggcttccaaattggaaaggaagaagtaaaactgtatctgtagaagatacaatcttatatatagaaaatcctaaggaatccacacacacacamaaaaaaacctattagagctaataaatttagttcagcaagcttgcaggacacaagtcaatataaaaatcaattatatttctatccactatagctataaaat

SEQ ID NO: 449550 - DNA, 201 bp, Homo sapiens
gaattaaaaaaaaaaaggaacaacgaagatggataactcgtgcttcctgatttcaaaacttactacaaaactactatgtggtattggcacaaggacagacmtacagatcaatagaacattaacccttacatttatggtcaactgattttcaacaagggtgccaagacctgggtgaccagttggagagagaacaaccttttc

SEQ ID NO: 449551 - DNA, 201 bp, Homo sapiens
agcttgagaccagcctggccaacattgtgaaaccccgtctctactaaaaatacaaaaaattagccagggccgggagcggtggctcacgcctgtaatcctarcactttgggaggccgaaacgggcagatcacctaagttcaggagttcgagaccagcctgaccaacgtggagaaatcccatctccaccaaaaacacaaaatt

SEQ ID NO: 449552 - DNA, 201 bp, Homo sapiens
gtctgggggtggggcgggacatcggcgacgggagctgagccaggagagccgtgtggactgggctgctcggcctgtgtcttggtgtgtcgggggtggagagscgtgtggactgggctgctcggcctgtgtcttggtgtgtcgggggtggagaggcgtgtggactgggctgctcggcctgtgtcttggtgtgtcgggggtggg

SEQ ID NO: 449553 - DNA, 201 bp, Homo sapiens
ctgccaccctggaagtgcacgtggggaggagccgaaggatggggctcggggggcacgttgcagggcagaggcggcggggtggggggagcacccaggctccrgtccctggagcctggggagccatggatggagaggagtggggagttagtcagaggcaggcttggcactgactgtggccccatctacaggtggccatggtgc

SEQ ID NO: 449554 - DNA, 201 bp, Homo sapiens; identical to SEQ ID NO: 295680

SEQ ID NO: 449555 - DNA, 201 bp, Homo sapiens
gggtggccgctgggcttggtggccaggtagaccctcaggaccaggaggacccggcctcataggaagaaactggaggagtgactttgccattcccacacacmgtggggccttattctctctcttgcagccccaagcgtgacccagctgcagagaagctgagacggtgattcggactgactggactctggcctccaggtgtct

SEQ ID NO: 449556 - DNA, 201 bp, Homo sapiens; identical to SEQ ID NO: 295681

SEQ ID NO: 449557 - DNA, 201 bp, Homo sapiens; identical to SEQ ID NO: 295705

SEQ ID NO: 449558 - DNA, 201 bp, Homo sapiens
ccggcccagctgcgtccctgccagtggctcctcccacttcctccagttctagtttccaacaacagaggctgcagccacccagccccgaagcagggcccagmgagacagggcccaggtaagagacccctccccccggcctctctcggtggggcaggtggaggccctcggaataggctgcctcgcccctaaggggtcagaagt

SEQ ID NO: 449559 - DNA, 201 bp, Homo sapiens
tgtgccgcctttagacacacacgcatacacacgcactcacacatgcatgcatgcacacatgcacacacaatgcacacacgtgcacatgaacacaagcatgsacagaggcacatgcacacacaggcgcacacacgtgtgcacacacacgcacatgcacgcacacacacgtgcatgcacacgcacacatgcacacacacagac

SEQ ID NO: 449560 - DNA, 201 bp, Homo sapiens
agccttggaatacattgaagtcatcgtacggtaaagtggcagacaaggttatagaattaaaatgccaacaaaaaaagaaagcaaggagacactattattaytattactattatttgagacagggtctcgctctgttgcccaggctggagtgaagtggtgagatctcagcttactgcaacctccgcctcccaggtccaagtg

SEQ ID NO: 449561 - DNA, 201 bp, Homo sapiens
ggccatagtgggaggatcacttgagcccaggggttcaagaccagcttgatagtgagcaacatagtgagagaccctgtctctacaaaaaaaaaaaaaaaaaatttaaattagctgggcatggtggcatgtgcctgtagtcccagatactcaggaggctgaggtaggaagactgcttgagcccagaaagtcaaggctgcagca

SEQ ID NO: 449562 - DNA, 201 bp, Homo sapiens
tgacacctcaaaagttgtggggtttttttgttttgttttggttttttttgagacggagtttcactcttgtcacccagactggagtgcagtggtgcaatctyggctcactgcaacctctgcctcccaggttcaagtgagtctcctgactcagccctcagcctcctgagaggctgggattacaggtgcccaccaacacgcccg

SEQ ID NO: 449563 - DNA, 201 bp, Homo sapiens
tctttatttcagtaatatcttgcagatacccattatttttagtggtcagccatatagaaaataactcagatatcaataaattcaagcaaatctaacctctrtaaagcaataaatatgacatatcttcctaaacaccaactcacttaggaaatcaattccttggtcaacgatctacgggtcattacctgaaagcacatggca

SEQ ID NO: 449564 - DNA, 201 bp, Homo sapiens
actatcagaaaactaaatgttcatcttaccttgagataatagtaaggattgttgagtgcagtatggagggcaattcgcggagcagcatttaaatgctcacraagggcatgggcagcactgaagtacaccacctcatggagaggctgtgtctcaggaggcagaaggtattctctgaaacagccagtcaggcatccatgttta

SEQ ID NO: 449565 - DNA, 201 bp, Homo sapiens
aagtacagtaaaatgtgtgagcagttttagttacattattatttgttggagtctaaagtactccacaggtgttttgatacatgcctgtttggggttagcartgtacttttctggttaaacatcaatgggggttacacatttatcttctcaacaaaacaggctcctctaatatatgtaaatatgactggtcacctttttctc

SEQ ID NO: 449566 - DNA, 201 bp, Homo sapiens
ctacccgttggtcttagagccacataatgaaaaaaaaaaaaaagcctagcaaacttctaaagcaaaattcaaatcatacaattatacacatcaggtttacyagtactaaaaactataaaccaatcctaataagttgtagcttaaattcaatacaaaaagttctaaatagaaacttggccttatataatgagaggcagtatt

SEQ ID NO: 449567 - DNA, 201 bp, Homo sapiens
ggcaatgggactaacaggatgttcaacttagaagtgagttaaaagtctgctttgttcctggttgtggtttaaaaatgaaaacaaaaacatccaggcagagytaatctagagcacaaactgaaaaaagggagtgtcacaggatgcagctggaagggaagagagtgacctgaccttctgaagatgatagaggtctgtcttctg

SEQ ID NO: 449568 - DNA, 201 bp, Homo sapiens
ttttaaattaacacctagtgctgcagaaacatatccttgttagatcaaaacagtactgtctaatattattccaagccacatcaatcatacgtcaatttccygggagaaaatcatcagtttatatctacctgtgtgacagtcatataccaactggaaagtgaatccattgaataatgtgtctttctttgggtgacgtgaaca

SEQ ID NO: 449569 - DNA, 201 bp, Homo sapiens
tgacgcccagagtctgagctaaactatcagaaaactaaatgttcatcttaccttgagataatagtaaggattgttgagtgcagtatggagggcaattcgcrgagcagcatttaaatgctcacgaagggcatgggcagcactgaagtacaccacctcatggagaggctgtgtctcaggaggcagaaggtattctctgaaaca

SEQ ID NO: 449570 - DNA, 201 bp, Homo sapiens
gctgggcttggtggcaggcacctgtaatcccagctacttgggaggctgaggcaggagaattgcttgaacccaggaggcggacgttgcagtcagccaagatygcactactgcactccagcttgggcgatagacgagactccgtctcaaaaacaaacaaacaaacaaaaaaaacaaaaaccaaaaaaagagaattcaataatg

SEQ ID NO: 449571 - DNA, 201 bp, Homo sapiens
tcaaaaaaaaaaaaaaaaagagagtgtaaaaaagtaagtgaataaaaaatatatatgcatgcatatatacatatccatataatgtaatcaatatcttataytaaactacataatgaaaaaaaagcccatgttcaaaatggtaacaaaacctactaaatacacagcaatacacattataatatatgtgtatgacctatatta

SEQ ID NO: 449572 - DNA, 201 bp, Homo sapiens
tgagttaagactttgggggactgttgggaaggcatgattggttttgaaatgtgaggacatgtgatttgggaggggccaggggcagaatgatatggtttggytgtgtccccacccaaatctcatcttgaattcccaagtgctatgggagggacctggtgggcggtaattgaatcatgggagcaagtctttcctgtgctgttc

SEQ ID NO: 449573 - DNA, 201 bp, Homo sapiens
actgcttgagcctgggaggtcaaggctgcagtgagccgtgatcatgccattgcactccagcatgggtaacagagaccctctctcaaaaaaaaaaaaaaaaagagagtgtaaaaaagtaagtgaataaaaaatatatatgcatgcatatatacatatccatataatgtaatcaatatcttatattaaactacataatgaaaa

SEQ ID NO: 449574 - DNA, 201 bp, Homo sapiens
attataaatcatacgactacaaagacacatgcacacgtgtgtttattgcggcactattcacaatagcaaagacttggaaccaacccaaatgtccatcaatratagactggattaagaaaatgtggcacatatacaccatggaataccatgcagccataaaaaaaggatgagttcatgtcctttgcagggacatggatgaag

SEQ ID NO: 449575 - DNA, 201 bp, Homo sapiens
acttgcttttgattctacaggctcataggcagaagggacttgccttgtctcggatgagactttggactgtggactattgagttaatgctgaaatgagttargactttgggggactgttgggaaggcatgattggttttgaaatgtgaggacatgtgatttgggaggggccaggggcagaatgatatggtttggctgtgtcc

SEQ ID NO: 449576 - DNA, 201 bp, Homo sapiens
ctggagtgcagtggcatgatgttggctcagtgcgatctccgcctcccaggttcaagtgattctctcctgcctcagcctcccgagtggctgtgactacaggygcgtgccaccacgcccgctcaattttgtatttttagtagagatggggtttcaccatgttggccaggctggtctcaaactcctgacctcaagtgatctgcc

SEQ ID NO: 449577 - DNA, 201 bp, Homo sapiens
tggagtgcagtggcatgatgttggctcagtgcgatctccgcctcccaggttcaagtgattctctcctgcctcagcctcccgagtggctgtgactacaggcrcgtgccaccacgcccgctcaattttgtatttttagtagagatggggtttcaccatgttggccaggctggtctcaaactcctgacctcaagtgatctgccc

SEQ ID NO: 449578 - DNA, 201 bp, Homo sapiens
aggctagtctcgaactcctgacctcaggtgatccgcccacctcggcttcccaaagtgctgggattataggcgtgagccactgcacccagtctagtcctcttattcttagccaaagattatgttttgctcccagagcagaaagatcttacactttctcaagtattctcttgtttaatgtaaaatgacaagacttgagataag

SEQ ID NO: 449579 - DNA, 201 bp, Homo sapiens
ccctgctatgtaataaggattggatatctaacaaggcaatcagatagagtcaacttcagaaactcaaactatcgcctcacattttaacatttttacatgtsatatatagaaattcaggcatttcccaaggcaaaagacctctctagatatcctcaaagaaccatcagagcaaaaataaaatatctgccttaattttgtttc

SEQ ID NO: 449580 - DNA, 201 bp, Homo sapiens
cagtttttattaagtggcttttttgagttatatacatttaataatgttttcattatttgctgttattctacaaccttgtatactttgtttcatacatttgytttgaactctcctctattgaatgacttactactactattcttacatttttccactgacatagtttagtccagtctttcatttattctgtctgtatatttt

SEQ ID NO: 449581 - DNA, 201 bp, Homo sapiens
caggctagtctcgaactcctgacctcaggtgatccgcccacctcggcttcccaaagtgctgggattataggcgtgagccactgcacccagtctagtcctcttattcttagccaaagattatgttttgctcccagagcagaaagatcttacactttctcaagtattctcttgtttaatgtaaaatgacaagacttgagataa

SEQ ID NO: 449582 - DNA, 201 bp, Homo sapiens
aaaaaccccttttttttttaatggatgggcaaagcaataaccatgcaataattaataatttcctaacctaatgccttagtgaagaatactttttctaaagrgaacagttctcaaactggttcatcctgggaagcacctggaagtcatgatgccctttgtgggatgccatgcttttttgtggaatacatcaaaaagaataaa

SEQ ID NO: 449583 - DNA, 201 bp, Homo sapiens
tcaggctagtctcgaactcctgacctcaggtgatccgcccacctcggcttcccaaagtgctgggattataggcgtgagccactgcacccagtctagtcctcttattcttagccaaagattatgttttgctcccagagcagaaagatcttacactttctcaagtattctcttgtttaatgtaaaatgacaagacttgagata

SEQ ID NO: 449584 - DNA, 201 bp, Homo sapiens
ttgctagctgattctctttctcttgctgagcccacaggaatggtttccacctatgttagctagtaggttccagaatgtgtatatgtagagtaatgatggcratgggactaacaggatgttcaacttagaagtgagttaaaagtctgctttgttcctggttgtggtttaaaaatgaaaacaaaaacatccaggcagagctaa

SEQ ID NO: 449585 - DNA, 201 bp, Homo sapiens
aaaagaaaaaaaaagaaaaaattatttcactatcaggtaaatggtccaaaaaatgcctgtgatacctaatgtattaaaagctttataggtaatctgtcacwggagttgagaaaaacaataaaggctttatagattgtcattttttaaaaaagttttcttaactaagaaagagaatcattaagcaatcattaaaagcaatca

SEQ ID NO: 449586 - DNA, 201 bp, Homo sapiens
cagctactgaattttaaaagtgtaaccacaatgaaaacaaaacaaaatacaacctaacaaaactccctcaaaccaacagcaaaaagtctcaaaaaaaaaawtttttttttttcagatggagtcttgctctgttgcccaggctggagtgcagtggcgccatcttggctcactgcaacctcctcctcccagttcaagtgcttc

SEQ ID NO: 449587 - DNA, 201 bp, Homo sapiens
tcactagacagtcaatgaagttcacaacattttctctgagtacttcaaatttggtttgcttcttacttcttcttaactccttcatttccaataaggactayagataaaagaacatagcttttctggtgatcctcagacagaaaacccctcagagggagctctgttggtaagttctatagaagcacctgatgccctttccat

SEQ ID NO: 449588 - DNA, 201 bp, Homo sapiens
gcttgaggccaggagttcaagctgcactgagctatgatcatgctactgtagtacagcctaggcaacagagtgagaccctgtctcaaaagaaaaaaaaaaaagctttttaatatattagtgtgaacactctttatgatttcatgggttcacatgctcaggattagctctgtcagtggactatttttcaccatggtggctttt

SEQ ID NO: 449589 - DNA, 201 bp, Homo sapiens
tgttcactgcctggtaaaagggaagagtcaagagtttggggctagactctacaagaacaggaaagcccagtagggcaaggttaactctgtgggttctaaaatgtaatttttgaccagtatttggccaatattgcagttcatcactttttttttttttctcgagatggagtcttgctctgttgcctaggctggagtgcagtg

SEQ ID NO: 449590 - DNA, 201 bp, Homo sapiens
aatttaatattcagacaccttacctattggcagagagatctttctctttttggagtttggcttaaaaacaaagcaaccctataaaaagaaagacgaaaagyataaagtcaaagtagccaaggagcagagaaatctgattaaccaaatattttatgggtaagcacttttttaaaaaaagatggtaggggagagaacacattt

SEQ ID NO: 449591 - DNA, 201 bp, Homo sapiens
atgttcactgcctggtaaaagggaagagtcaagagtttggggctagactctacaagaacaggaaagcccagtagggcaaggttaactctgtgggttctaaaatgtaatttttgaccagtatttggccaatattgcagttcatcactttttttttttttctcgagatggagtcttgctctgttgcctaggctggagtgcagt

SEQ ID NO: 449592 - DNA, 201 bp, Homo sapiens
aaggtggggttttccatgccattttagttaaatgactgtcatggccaatagaattggaaggatattacactcttaccatcgaggctctgaaactgggccargaactcctctattctcttagctgtgctgccaaggtggttttcacaataagacttaaaaaccttgaaacatttctcaagtatggtcatcagttcatccttt

SEQ ID NO: 449593 - DNA, 201 bp, Homo sapiens
catgttcactgcctggtaaaagggaagagtcaagagtttggggctagactctacaagaacaggaaagcccagtagggcaaggttaactctgtgggttctaaaatgtaatttttgaccagtatttggccaatattgcagttcatcactttttttttttttctcgagatggagtcttgctctgttgcctaggctggagtgcag

SEQ ID NO: 449594 - DNA, 201 bp, Homo sapiens
gttaactcaaagtcagatacacttgaacaatctgttaaacctgacctttaggcctattcaaatagacaagattagcatttctggtgtccaaggaatcaccrgcactgacttgcttggaggggaaagacgggtgaggttctgctggcagaagatctaacccaagttagcagcatgtgaaggattagcttcccaggatagggg

SEQ ID NO: 449595 - DNA, 201 bp, Homo sapiens
caaagaccatgggaacccacctcttgcatcagcatgacctggatgtgagaaatggagtcaaaggagatcatctggagctgtaagacttgactacctcgctrgatttcagatttgcatggggcctgtaactcctttgttttggccaatttctcccatttggaatggctgtatttacccaatgcctgtacccccattgtatct

SEQ ID NO: 449596 - DNA, 201 bp, Homo sapiens
tatacacatcaggtttactagtactaaaaactataaaccaatcctaataagttgtagcttaaattcaatacaaaaagttctaaatagaaacttggccttayataatgagaggcagtattaagctatggttaaatcatgagctctggaatcagacaggttgggttcaaatcctagctctatcatttactaacattataacat

SEQ ID NO: 449597 - DNA, 201 bp, Homo sapiens
catcttggtacctaacggagtgcttggcgcacagtatttgtgagatggaaaaatgagagactgggccacatcatcaggacatccgacctccaccaaccagwacttaaaaatcctcctagccataccacaaggcagatccgcgtcctcgctccccaagcaaagttggcctcaactgatctggagcaaggacgcctcagctca

SEQ ID NO: 449598 - DNA, 201 bp, Homo sapiens
ttggacaatacagctctagggcttatcttcttaccaactacactatgtcttgcaatttcttgccatctaggtagccaacatgaggaggtctataagatatyccaccacacacacccgcatccacattactttttcattctcatttttcatgacgctcccactctttgtctactttctgattatgatttttaaattcctcta

SEQ ID NO: 449599 - DNA, 201 bp, Homo sapiens
aaataaatctgaagccaacaagttttataatttagaatctagcaaggatgatgacatgagggatagtgtcttaagaaatctatgcaggtgtagtggctcaygcctgtaatcccagcactttggagggctgaggcaggaggatagcttgagcttagaagtttaagacctgggtgagcaacatagtgagacctcatttgtata

SEQ ID NO: 449600 - DNA, 201 bp, Homo sapiens
tctactctacagatggttgataggtttatcgaataacataaaggccagctgagcataatttttcaagcagcagaagtactgcttctctttttattctgggygtagtgcaaggttaaccatcaagcattctcaaacagattccttcttccattaagggaagagaaacagctctctcagtacaggtgacaaggaagtgttaaa

SEQ ID NO: 449601 - DNA, 201 bp, Homo sapiens
aggctgtgtctcaggaggcagaaggtattctctgaaacagccagtcaggcatccatgtttagataagcacaggtttattttctttatatataatatatatwttttttcctttaagctctgttggacttcaattttcactataacatttttgtcaatcctctctctgtagaggactgaaccatttactaaaagcaaaattaa

SEQ ID NO: 449602 - DNA, 201 bp, Homo sapiens
acttgcaaattatgtccctttgtaaaaatacttttctttttgccaaattttcaaatccaacaaggaaatcccacaattaaaaacagaataggttactattyctttccctacttcagaaataactggatctgagatctcttatttagtaccaaattctagtatagtatgtgttaaacatgtacttctctttttacctcctaa

SEQ ID NO: 449603 - DNA, 201 bp, Homo sapiens
aatttattacatttacatactctaagttcaagaatgatttactcacaatttagtaatgactttggaaagtacagtaaaatgtgtgagcagttttagttacrttattatttgttggagtctaaagtactccacaggtgttttgatacatgcctgtttggggttagcaatgtacttttctggttaaacatcaatgggggttac

SEQ ID NO: 449604 - DNA, 201 bp, Homo sapiens
ttctatacctcagatactgttaacatcttaattactcaaggttaagttaacttagctgtagcttcaggaaatagtttctgtgatggctggctaccaatttktaatttctgaccataaactcttcctacactaacctcaggcagttatttcccaatcattatacatggctgtcattaaaagatcttgttgcagtccctgcta

SEQ ID NO: 449605 - DNA, 201 bp, Homo sapiens
aaatatgtaaaaagtcactgaaaagcagacataaatgtcaggctctttttgttttgttttgttttgtttttttttaaagacagagtcttgctctgtcaccyaggctggagtgcaatggtacaatctcggcttaccacagcctccacctcccaggttccagcgattctcctgcctcagcctcctgagtagctgggactacag

SEQ ID NO: 449606 - DNA, 201 bp, Homo sapiens
acctgacctttaggcctattcaaatagacaagattagcatttctggtgtccaaggaatcaccggcactgacttgcttggaggggaaagacgggtgaggttytgctggcagaagatctaacccaagttagcagcatgtgaaggattagcttcccaggataggggcagcaacagctcttgtccactttgagctccaaataact

SEQ ID NO: 449607 - DNA, 201 bp, Homo sapiens
gtaatagtcacaattactctgagagcccccaaacctcaccctgcctaaaacatagcactgtgttctttccaccaaaaaaagggataaagaaagcctgaaawagagagaaaaggatgaaagaagtctgtaacatctcatcaaggttattatggcatttatattttacctggacaatctttagcttgcaatgagactacatat

SEQ ID NO: 449608 - DNA, 201 bp, Homo sapiens
cttatgaaacctgatggttttataaagaggagttcccctgcacaagctctctctctttgcctgctaccagccatgtaagatgtgatttgttcctccttgcsttccaccatgattgaggcctccccagccatgtggaactgagtccattaaacctctttcttttgtaaattgcccagtctcgcctatgtctttatcagcggt

SEQ ID NO: 449609 - DNA, 201 bp, Homo sapiens
ctcttcccctactgttgcttttgcctgaaattctgacctggctcgctcctatttcttaggcatacacttctgttttcctatggaaccccagggcatgtttytttcatagcactgactactcagatttgtgggtttactgttttgcctccatcattaaacaaataacaatttgaaggcagagatttcttttttttttttttt

SEQ ID NO: 449610 - DNA, 201 bp, Homo sapiens
gacataaatgtcaggctctttttgttttgttttgttttgtttttttttaaagacagagtcttgctctgtcacccaggctggagtgcaatggtacaatctcrgcttaccacagcctccacctcccaggttccagcgattctcctgcctcagcctcctgagtagctgggactacaggcatgcgctaccacgcccagctaattt

SEQ ID NO: 449611 - DNA, 201 bp, Homo sapiens
ctttcatagcactgactactcagatttgtgggtttactgttttgcctccatcattaaacaaataacaatttgaaggcagagatttctttttttttttttttgagatggagcctcacactgttgcccaggctggagtgcagtggcatgatctccgctcactcgctcactacaacctccacctcccaggtttaggtgatctcc

SEQ ID NO: 449612 - DNA, 201 bp, Homo sapiens
taactcaataaatgttacatgcatattcttctttatgaaaggaaaaagagaatgaaactgaaacacattcacattcctaccttcaaatatctctcattggkcaagagcgcaacttgcttttctgaagcttgcttttccacgtacctagaattttcaccattccatacataaaaagagaaaattaaacattcaacatattta

SEQ ID NO: 449613 - DNA, 201 bp, Homo sapiens
gtggtttaaaaatgaaaacaaaaacatccaggcagagctaatctagagcacaaactgaaaaaagggagtgtcacaggatgcagctggaagggaagagagtracctgaccttctgaagatgatagaggtctgtcttctgaagcccctttggctgtgacccagaagcatcttcttcctctttggtttctgcttttaatacaaa

SEQ ID NO: 449614 - DNA, 201 bp, Homo sapiens
gggtgacagagcaagaccttgtctcaaaaaaaaaaattgtatatatatatatattatatatgtgtatatatatataaacgtgtatatatatataatatatatatgatatatgacattaaagggtttggattttgtcctatggggagcaccactgaagggatgtgaagtaaagacataattggatcagggttaagaagggtt

SEQ ID NO: 449615 - DNA, 201 bp, Homo sapiens
aacctcggcttcatcccttcttcaaaggggaatgaggcagcggtagagccacagtgcgcatcggccaccacataccttagacatcgaggacgtagccatgstcttactgactctgcgtattccagatgcactcgggatttcccgcgcgccctcgcggctgcagggcagaggttagtggcgagccacacggctccttgattg

SEQ ID NO: 449616 - DNA, 201 bp, Homo sapiens
gccagcctgggtgacagagcaagaccttgtctcaaaaaaaaaaattgtatatatatatatattatatatgtgtatatatatataaacgtgtatatatatawaatatatatatgatatatgacattaaagggtttggattttgtcctatggggagcaccactgaagggatgtgaagtaaagacataattggatcagggttaa

SEQ ID NO: 449617 - DNA, 201 bp, Homo sapiens
gtaacatctcatcaaggttattatggcatttatattttacctggacaatctttagcttgcaatgagactacatatggtgtgacattattctgaagggcctmtgttagacttccgaatgtcaaatcatgatctgtgacattcacacctatgagataatacatcaatattacatcaccatttttattaataataatttaatga

SEQ ID NO: 449618 - DNA, 201 bp, Homo sapiens
aaagaagtctgtaacatctcatcaaggttattatggcatttatattttacctggacaatctttagcttgcaatgagactacatatggtgtgacattattcygaagggcctctgttagacttccgaatgtcaaatcatgatctgtgacattcacacctatgagataatacatcaatattacatcaccatttttattaataat

SEQ ID NO: 449619 - DNA, 201 bp, Homo sapiens
aaatctattcctggcttctgaaataactctgacagaaagttctagcaggaaatggacttggcaactagctgactcaacagagagctaatctagctaatctycaaagactcagtaaacatgcacacattctttctcactagttcttaaatttcttcccagcaaaacaacctgcatggaggtctgagaacctcctatactgct

SEQ ID NO: 449620 - DNA, 201 bp, Homo sapiens
actgcctacagccattcagcttctccacaaataaagacttttcctttgatggcttcattgttttcctcaaaagtttccccctccccgctttttttttttttaacctctccctttattttctggaagtatttgtcaaagtatagttcctgggtcatctgtctgaatgtgccagagtgcttgttaaatgcaaattcctgctga

SEQ ID NO: 449621 - DNA, 201 bp, Homo sapiens
aaaatttaaaaacgaaatacacagagatgcatgcatgaacaaacatacgcatatataccaagaacaagagcagcagttggaatttctctgagttttatttkaccgcccaagtctcttgaattcttctggaatccagaatgtgatttttgcagaaattcaatcagattgtcaaacaagtttttatttaattcctcttgtagt

SEQ ID NO: 449622 - DNA, 201 bp, Homo sapiens
acatgtgaagattaaacatatttgttatattttggcagtaaatctattgcgctacaatctgctcaattttaaggatttttttaaagagccaaagtatttayggcactaatatatttaataatgtcacaataacactgcaaacaacataaaaatggctatataactccatattttaaggttccaattctgtgaagaaggtca

SEQ ID NO: 449623 - DNA, 201 bp, Homo sapiens
agacaaaataggctcatcaaaacaggtccttccactattctcaacaataaaaaaaaatttaaaaacgaaatacacagagatgcatgcatgaacaaacataygcatatataccaagaacaagagcagcagttggaatttctctgagttttatttgaccgcccaagtctcttgaattcttctggaatccagaatgtgattttt

SEQ ID NO: 449624 - DNA, 201 bp, Homo sapiens
ttttcgagccaatttgagatcaactgcctacagccattcagcttctccacaaataaagacttttcctttgatggcttcattgttttcctcaaaagtttccycctccccgctttttttttttttaacctctccctttattttctggaagtatttgtcaaagtatagttcctgggtcatctgtctgaatgtgccagagtgctt

SEQ ID NO: 449625 - DNA, 201 bp, Homo sapiens
aatctaaaatcagtgtaaaaactggtctgttacaaaaaataatgctgcaatggtaggagctgtgcctatggattaaagtgaatgatgaaaatttatctttwcaaattaatttttttcccatggaggaaaacatggtgtactatctggtagatataagcattttaataatagaatgctgtgggctctatggtagaagggaag

SEQ ID NO: 449626 - DNA, 201 bp, Homo sapiens
tttgccatttaaaatgcctatcacactagacagcctgaaataatgtgcaaattatttagaatcagcttgagaattttcaaacccattactgtgttcttacytgaagtccttttataaagttttgaactgagaaatcatgatacaaaaagatgttggtcagaacctgtaatactttttcatttattttaaagggaaactgag

SEQ ID NO: 449627 - DNA, 201 bp, Homo sapiens
gtgctaaattacttttgcacatattaacataattttgtttcttctcttttctaattatgtcaaagtgataatgcttatcccaatgttaacagtacttttcrgacatgagaaaaataaaaactaaacaggctaaggggcttgctgcggaagaggaatgggaggaagccacagaagttacagtagagctacaaataggatatg

SEQ ID NO: 449628 - DNA, 201 bp, Homo sapiens
gagtgataaaaatccactcccttaatatcatgagtatgtgtgtctatgagtgattaaaactcaataatttaacaaatttgttttatgaaatgaagagtgaytgagaactgtgtgggaccctggtgcttccgagagatgatggagggtgcaaactggtagaaaggatgtgaagactaagagaggaaatctgggccacttgga

SEQ ID NO: 449629 - DNA, 201 bp, Homo sapiens
taaaaaatttattcttcttttggcttctggaagattacagcacaggacacttaagggctgggaatagaaatgctctaatagagaaagctgaaagacatgtraagattaaacatatttgttatattttggcagtaaatctattgcgctacaatctgctcaattttaaggatttttttaaagagccaaagtatttatggcact

SEQ ID NO: 449630 - DNA, 201 bp, Homo sapiens
aataaatagctacttttaaattaacacctagtgctgcagaaacatatccttgttagatcaaaacagtactgtctaatattattccaagccacatcaatcayacgtcaatttcctgggagaaaatcatcagtttatatctacctgtgtgacagtcatataccaactggaaagtgaatccattgaataatgtgtctttctttg

SEQ ID NO: 449631 - DNA, 201 bp, Homo sapiens
tcaagtgatctctctgccttgacctcccaagtgctctaattcataggtgtgagccaccgtgcctgccagaaattatattttaatgatgcagtcttacaaakctcttggatggataaatctacatcatcataagttagattattaggaagcttatcatagattgtggagctgtgtcatttttcctaagtagatctttaaata

SEQ ID NO: 449632 - DNA, 201 bp, Homo sapiens
cagaaacatatccttgttagatcaaaacagtactgtctaatattattccaagccacatcaatcatacgtcaatttcctgggagaaaatcatcagtttatayctacctgtgtgacagtcatataccaactggaaagtgaatccattgaataatgtgtctttctttgggtgacgtgaacactttcctcctctttggattttat

SEQ ID NO: 449633 - DNA, 201 bp, Homo sapiens
ataccacaaggcagatccgcgtcctcgctccccaagcaaagttggcctcaactgatctggagcaaggacgcctcagctcagtacgccgctccctccctccyctccagccagggaagggatgcctacgtaacctcggcttcatcccttcttcaaaggggaatgaggcagcggtagagccacagtgcgcatcggccaccacat

SEQ ID NO: 449634 - DNA, 201 bp, Homo sapiens
gctgggtgcaatggttcatgcaagtcctaggatctgggctgggtgcgatggttcatgtctgtaatcccagcacgttgggagactgaggagggcagatctcytgaggccaagagtttgagaccagcctgggcaacacggcaaaaccccatctctacaaaaaatacaaaaattagccgggcatggtggtgtgtgtctatagtc

SEQ ID NO: 449635 - DNA, 201 bp, Homo sapiens
gagagagaaaatgagcagtaatcagagagaggccatgtggggagaggaggggggcagtcacatagtgtcactgtatacggcttttactctgagtgaaatgsggagttaacggagggttttgagcaaaggagtaacattatctgaaatattttaaaaggactattctgactgctactttgagaagaacctgtaggggagcag

SEQ ID NO: 449636 - DNA, 201 bp, Homo sapiens
ttttctcagcatgtattgatgtgcacagcatttatccctaagttagaacatgcagtattctaacacacatgtagttactaagccctaagttctaaaatgcyccatacagatagatgattgctttaatttattttgccaagtttattcataaaatggaatatcacatcaaaatttttaagcatatttaagtctccccatgaa

SEQ ID NO: 449637 - DNA, 201 bp, Homo sapiens
aaaattgataaatgttatggaaaaatattgaacagaataagcggagagccatgggaggaggaagctttcaatttttaaatggttagggcctcactgaaaaratgacatttgatcaagtacataaaggaggaaaggaagttagccatacaaatatccagaagagcttttcctggcagacagaacaatgggtgcaaaggttcc

SEQ ID NO: 449638 - DNA, 201 bp, Homo sapiens
agaattactgtaagagatccaagaccttgggcttttttctcagcatgtattgatgtgcacagcatttatccctaagttagaacatgcagtattctaacacacatgtagttactaagccctaagttctaaaatgctccatacagatagatgattgctttaatttattttgccaagtttattcataaaatggaatatcacatc

SEQ ID NO: 449639 - DNA, 201 bp, Homo sapiens
atctggaatattcaagaaaacaaggaggccaagatgtctgaaatggagagagaaaatgagcagtaatcagagagaggccatgtggggagaggaggggggcrgtcacatagtgtcactgtatacggcttttactctgagtgaaatggggagttaacggagggttttgagcaaaggagtaacattatctgaaatattttaaaa

SEQ ID NO: 449640 - DNA, 201 bp, Homo sapiens
tagaattactgtaagagatccaagaccttgggcttttttctcagcatgtattgatgtgcacagcatttatccctaagttagaacatgcagtattctaacacacatgtagttactaagccctaagttctaaaatgctccatacagatagatgattgctttaatttattttgccaagtttattcataaaatggaatatcacat

SEQ ID NO: 449641 - DNA, 201 bp, Homo sapiens
cagcctggcactcaggagagaggtataggcttacgattaagccctggggcactgtaatgttaagatgtcagagagaagagaaagcactaaaggagaatgtraaggagcatatactgaggtaggagaaaaaccaagaaagtcctagaaatccattaagaagggagtgatgaactgtagtcaaatgctgataacaggttaatg

SEQ ID NO: 449642 - DNA, 201 bp, Homo sapiens
gtagaattactgtaagagatccaagaccttgggcttttttctcagcatgtattgatgtgcacagcatttatccctaagttagaacatgcagtattctaacacacatgtagttactaagccctaagttctaaaatgctccatacagatagatgattgctttaatttattttgccaagtttattcataaaatggaatatcaca

SEQ ID NO: 449643 - DNA, 201 bp, Homo sapiens
aaggatagcataaataaatgctaagaaaatatgtaaaaagtcactgaaaagcagacataaatgtcaggctctttttgttttgttttgttttgtttttttttaaagacagagtcttgctctgtcacccaggctggagtgcaatggtacaatctcggcttaccacagcctccacctcccaggttccagcgattctcctgcctc

SEQ ID NO: 449644 - DNA, 201 bp, Homo sapiens
gatattaatgatggatgtttaagtacttaagaaatttacaacctgcaatttgaaagcaatttatgtgcaattcatccaaacacctccttgtaggtaattartatgaatataatgaaacaatctaagatggaaaaactatgcacaggaaaataaaattaaggtcatagagtaattccattgaagatacgactaaaaaaagta

SEQ ID NO: 449645 - DNA, 201 bp, Homo sapiens
tgggtgcattgaggttgagaattaattccttatctcagagctaactagcataacaaatcttgaataaattgaaagagaaattaagagcatgtttggaaccsaaataaattcaactttgttttcaaagggaatgaagaaaatttgctaatattccaaagaaattttttccattgtgctggaatccaaatgtttggtaaagat

SEQ ID NO: 449646 - DNA, 201 bp, Homo sapiens
ataatatgtccttgtaaaaacctaagcacttacctggaattaggctgcatactaataaaagaacattttaaaattcgagtagcattagaaaaaataaatasctacttttaaattaacacctagtgctgcagaaacatatccttgttagatcaaaacagtactgtctaatattattccaagccacatcaatcatacgtcaat

SEQ ID NO: 449647 - DNA, 201 bp, Homo sapiens
cttgagcctgggaggtataggctgcagtgagcctatcatgctactgcactccagcctggacaacagtgggagactctgtctccaaaaaaaaaaaaaaaaaattcagctggatgttgtggcccttttctgtagtcctagctactcaggaggtggaggcaggaggattacttgagcccaggaggtctgagggaactgtgagct

SEQ ID NO: 449648 - DNA, 201 bp, Homo sapiens
accttctgaagatgatagaggtctgtcttctgaagcccctttggctgtgacccagaagcatcttcttcctctttggtttctgcttttaatacaaaaccagyagacatcaatgagggtaaatccaagtcaagggaacaaacatttctactactccaaagtaaaagtttcacctatatatatttttttaatgtggcaagggat

SEQ ID NO: 449649 - DNA, 201 bp, Homo sapiens
actccacaggtgttttgatacatgcctgtttggggttagcaatgtacttttctggttaaacatcaatgggggttacacatttatcttctcaacaaaacagsctcctctaatatatgtaaatatgactggtcacctttttctcttaagctaaatgtgatagttctggctttgcttatttgctttctagcagcctccccatgt

SEQ ID NO: 449650 - DNA, 201 bp, Homo sapiens
gacaaagattggaacagttctatgcacaatagagatgatactgcatgaggaagcaatcggtggatgataataggagatgtggctattccaaaaatgagtaytagtggaaattcatggagatgttgactagttttgaaagacagacacaaaagtgaaatttatttagcaaatatatttcaatacatcatatttcaacataag

SEQ ID NO: 449651 - DNA, 201 bp, Homo sapiens
aggcttattgttaacagttatcttaacaatctattattggcagttttcttttcatcctatttcactggtaaaacttattctttttaccttatcgagtaccrtagtcaggtgctccttacaagacaaagattggaacagttctatgcacaatagagatgatactgcatgaggaagcaatcggtggatgataataggagatgt

SEQ ID NO: 449652 - DNA, 201 bp, Homo sapiens
attatttgttggagtctaaagtactccacaggtgttttgatacatgcctgtttggggttagcaatgtacttttctggttaaacatcaatgggggttacacrtttatcttctcaacaaaacaggctcctctaatatatgtaaatatgactggtcacctttttctcttaagctaaatgtgatagttctggctttgcttatttg

SEQ ID NO: 449653 - DNA, 201 bp, Homo sapiens
caacttttagagctaaggttttatgtcatctttaaaactcacattcctaggtgactatcaagacccagtacttcactgtataaatattaagatgcacaaayatgttttattaactcaataaatgttacatgcatattcttctttatgaaaggaaaaagagaatgaaactgaaacacattcacattcctaccttcaaatatc

SEQ ID NO: 449654 - DNA, 201 bp, Homo sapiens
cctgacttcaagtgatccgtccacctcagattcccaaaatgctgggattacaggagtgagccaccgtgcctggcctaaaacattcattttttcttagacaytttctgtcttttgatttcagcaggtagcctgcagctaactttttcagggtaagggtacaaatctctgtgctttttcatatttctcactgtataagtctct

SEQ ID NO: 449655 - DNA, 201 bp, Homo sapiens
taaaaagaaagacgaaaagcataaagtcaaagtagccaaggagcagagaaatctgattaaccaaatattttatgggtaagcacttttttaaaaaaagatgktaggggagagaacacatttctttcaggttctaagaaatcacatcacttctctctgacctatagaaggaaaattctaaaacaacaagggggactatctact

SEQ ID NO: 449656 - DNA, 201 bp, Homo sapiens
aaaattttggatacactctgaacatgtaatactggccacaaaaccataaatttccttttattaccacctctaagtaactggaatagggttgaaagagtttyagctctgtcaactgtagaaaagtcaatgtttctggccttggtttcctcatttgaaagaaaatggaataactgtagatgagtaattctcaattgatgaggt

SEQ ID NO: 449657 - DNA, 201 bp, Homo sapiens
atgcaaatcaaaaccacaatgagataccatctcacaccagtcagaatggcggtcattaaaaagtcagggaacaacagatactggagagaatgtggagaaayaggaacacttttacactgttggtaggagtgtaaattagttcaaccattgtggaagacagtgtggtgattcctcaaggatctagaacaagaaataccattt

SEQ ID NO: 449658 - DNA, 201 bp, Homo sapiens
aaaatttttgcaatctacccatctgacaaagggctaatatccagaatctacaaataagttaaacaaatgtacaagaaaaaaataaccccatcaaaaagtgrgcaaaggatatgaacagacacttctcaaaagaagacatttacgcagccaacagacatatgaaaaaatgctcatcatcactggttatcagagaaatgcaaa

SEQ ID NO: 449659 - DNA, 201 bp, Homo sapiens
aacagagtgagaccctgtctcaaaagaaaaaaaaaaaagctttttaatatattagtgtgaacactctttatgatttcatgggttcacatgctcaggattasctctgtcagtggactatttttcaccatggtggcttttcaaagtgggacaataagatgatttatggctgaaacatgagcccatgtggtctactctcttttg

SEQ ID NO: 449660 - DNA, 201 bp, Homo sapiens
ctgattttgtgccttttgttcatgagacactatgataagcatactaaacggtgaaaagaagtccttactctaccatgaacttgctctgtgacatgagatayttcacttcctttctcttggctgcagttcttcatttttgaaatgagggtgctaaaggagttcaaggtttatttctcactctaaaaggatttaaagtctagt

SEQ ID NO: 449661 - DNA, 201 bp, Homo sapiens
cagatctcttgaggccaagagtttgagaccagcctgggcaacacggcaaaaccccatctctacaaaaaatacaaaaattagccgggcatggtggtgtgtgyctatagtcctagctacttggggacctgagaagggaggactgcttaagcccaggaggtggagggtgcagtgagccaagatcatgtcactgcgctctagcct

SEQ ID NO: 449662 - DNA, 201 bp, Homo sapiens
cctgtaatcccagcactttgggaggccaaggtgggaggatcacttgaactcaggagttcaggaccagcctgggcaacatagtaagatcccatctctatttwaaaaaaaaattatatatatatgtgtgtgtgtgtgtgtgtgtgtgtgtgtgtatatatatatatcattacttaaaaaaaatcctattctatatattcaagt

SEQ ID NO: 449663 - DNA, 201 bp, Homo sapiens
ttccagacttagcatattactgctatctaataagaatgccaaaccacagctttctcctagcacttatgtggcaagagtgctagtcttctcatctgtctctrccttttgttctccatattcctacctcagcagtatagatcaagagaagcacttgacaaagagtttgaatttaaatgattaattcctgacacactaggctaa

SEQ ID NO: 449664 - DNA, 201 bp, Homo sapiens
catactaataaaagaacattttaaaattcgagtagcattagaaaaaataaatagctacttttaaattaacacctagtgctgcagaaacatatccttgttasatcaaaacagtactgtctaatattattccaagccacatcaatcatacgtcaatttcctgggagaaaatcatcagtttatatctacctgtgtgacagtcat

SEQ ID NO: 449665 - DNA, 201 bp, Homo sapiens
gctgatttgacatgcccttatagtctaaatacttatatatactttgaactatgtttgaactttttattttgttctactgaatccaaccctattctcctacyagtcttgaactgttttaattattatggctttgtatgttgtacattttatcaaatacatttaggtcttcctcccactgcccccaaacattgttattctctt

SEQ ID NO: 449666 - DNA, 201 bp, Homo sapiens
tgggggtaagagcagcggaggcagaagtcaccttttcttccatgttcttcccaaacaaagcagaagaattaggggtagagggatgtctacagccatactamcctgaatgggctggatctcatctgatctgtggttatttaaacatgtcagcttccacatacagattgagtatcccttatctgaaatgcttgggaccagaag

SEQ ID NO: 449667 - DNA, 201 bp, Homo sapiens
acatggaagaggaaattttctacaaaattgatttttctgttggtagaaagttatattctgctttgctttatagtgagaactagtatttttaatgaaaaaaatataatgaatagtagtgcttgctactctgccactgtgaaatttcaagcctgaaatggatactaggtatcatctggtccaatctcaatttttaaaaagata

SEQ ID NO: 449668 - DNA, 201 bp, Homo sapiens
aggctggtctcgaactcctgacctcaggtgatccacccacctcagcctcccaaagtacttgaattacaggcgtcagccactatgctcggcctatttattawtttttttgagacagggtttcactctgttgcccaagctggagtgcagtggtacaatcacagctcacggcagcctcaacctcctgggctgaagtgatcctgc

SEQ ID NO: 449669 - DNA, 201 bp, Homo sapiens
gagtttttcataaaagccaggtaatacaccatctacctgctgataattatgaagtcttgtagtacttttgtggcaaagctttccatatccttcaagataaygacaacaggaggagactgccattggctagaagtagtcctttttttgcttagcatttttgggtccgtcttcttttaagccattgcagaaagaaagagttaa

SEQ ID NO: 449670 - DNA, 201 bp, Homo sapiens
tacagataattgtgaaggccctaatgtgatgcaaattcaggattggcaattccttttctaaaataaagaaattatattattttatttatttctatttttttatttttcattttatttttattttttatttatttatcttttttgagacagagttttgctctgtcgcccaggctggagtgcagtggtgcgatctcggctcac

SEQ ID NO: 449671 - DNA, 201 bp, Homo sapiens
taaaacttatacaggtaaagaaaaaaaggctaggcagaattacatttgccatgcatttatttctcttctacttccatagtacttaccacttttgtctctaraattgtatgtataggggtgaacagtgacctcagattataaaataaagtatgtaaaaatgactataaacttctgtaatttcttttcaatcaattcactgat

SEQ ID NO: 449672 - DNA, 201 bp, Homo sapiens
ctacagataattgtgaaggccctaatgtgatgcaaattcaggattggcaattccttttctaaaataaagaaattatattattttatttatttctatttttttatttttcattttatttttattttttatttatttatcttttttgagacagagttttgctctgtcgcccaggctggagtgcagtggtgcgatctcggctca

SEQ ID NO: 449673 - DNA, 201 bp, Homo sapiens
tttcacagttgtatacctgaaaggataatttaagagcgtcaccatttgaaagctccttgccttaacagctatcataaacatctgttccactcacaagaaayatgagttttttttgtttttgtttttgagacaagatctctctctgctgcccaggctggagtgccgtggtactatctcggctcactgcaacctccacctccc

SEQ ID NO: 449674 - DNA, 201 bp, Homo sapiens
catatatcactgtttacttatatgacagagcccctattgttattgagctagctgctttctctggaggagaagtcaatacatatgtaaaacttatacaggtraagaaaaaaaggctaggcagaattacatttgccatgcatttatttctcttctacttccatagtacttaccacttttgtctctaaaattgtatgtataggg

SEQ ID NO: 449675 - DNA, 201 bp, Homo sapiens
aaaaaatgtctaagataggtcacattaatgccacaaaagagcgatttatctttatcccacttaattaagaaataattacttcacaattggcagagcacggkagctcacgcctgtaatcccagcactttgggaggccgaggcgggcggatcatgaggtcaggagatcgagaccatcctggctaacacagtgaaaccccatct

SEQ ID NO: 449676 - DNA, 201 bp, Homo sapiens
ctcacttatacgtgagagctaaataataggtacacatgtatatacagagtaaaataacagacactgtggacttcaaaaggggtagggttgggaggggtgasggcagagaaattatttattaggtacaatgttcactattcaggtgatgggcacactagaagccaaaaactcaccatcatccaatatgtaacaaacctgcac

SEQ ID NO: 449677 - DNA, 201 bp, Homo sapiens
tattcttaactgagattaaaagaatgaactaagtcatttgattagacatcttgataatgatggaaaaagaataaaaattacaattctttttttttttttttgagacggagtcttgcaccgttgcccaggctggagtgcagtggcacgatcttggctcactgcaagctccgcctcctgggttcatgccattctcctgcctca

SEQ ID NO: 449678 - DNA, 201 bp, Homo sapiens
tattttaggcttctcatgcaagcacagatgccatggttattttaggtgtcatttttaaaaattatatagctcatttataaacctttattttttaaaccttktttatattactgctgtccttatcagatcattctagcaatgccaaaattatgatagtggcttctgaaaatatttgaaaaatctaaaaagatgatactacct

SEQ ID NO: 449679 - DNA, 201 bp, Homo sapiens
gaaaggtaagtagagctacttcttttagcaataggatcatgtaaattaatctcatttcagacaattaaaaatgtaggtaggaaccaatatcctactcattrgtcccactgtattaagattggtggggtaggggtagtgcaggtagagttagaaaggaattattgatgtggtggaggaggtcttaccttttaacagaggaat

SEQ ID NO: 449680 - DNA, 201 bp, Homo sapiens
taaagacataaaggaaggtacttttcttttttcccatacttttttattttattcagtttgaacttaattgattgaatctgcattaagtgtaacagatttcrtgttagctgaagaaaggactctttcttctacctagaagatttgagatttagtgtcacaggagcataaacacgatgttcctgaagctgtgaaagaaactat

SEQ ID NO: 449681 - DNA, 201 bp, Homo sapiens
ttttcttttagaattgggttgtgagcaaatttggaagagtcttacctgttcttcaccttaaaaatcaacataaacgtaaaatatcctttggcctctcaacrtaattatttaccacagtgacggatacttgtaaaatacctttagcatttcactgtctcttatcagtgaatctttaggtgtttgtttgcgtgttcccagttt

SEQ ID NO: 449682 - DNA, 201 bp, Homo sapiens
aagtaatcaaatgaatgtgttcagaaatacttggctgtggagttacaatcccatcatcttttgttgtcataacgatatagagacctacagagttgaaacartgaaacctggaaagattgtctggcaggaagaccctcgtttacaagacagcagttcagaagaggaagatgttactgaagaaacagatcacagaaactccag

SEQ ID NO: 449683 - DNA, 201 bp, Homo sapiens
aaagctttctgcacaggtaagttttgctccacatggatttaagccctattttttttatattgtaagtggttttatatattatttcaaattatcaagtaatrtagtattatattcttaacaaattcaaacatataagtagagctgaaatccctttcaactctgaatccccttcaccccagacgaacaaaaaggataatttca

SEQ ID NO: 449684 - DNA, 201 bp, Homo sapiens
atttcttttcttccacttcccctggatctctttgtgataaacaagcctgcttttcttgatactaaataattagaaaaagcacaagctgaaatatatttttrcattgccatgtacttgtaataattctttactttataggtatgtctgttttaaataaaacaaaatggaaaggtggaacattacaaattcaactagcaaaag

SEQ ID NO: 449685 - DNA, 201 bp, Homo sapiens
attacttcaaaaattaaattcaacttcttataaaggaagaacaagatagtccttgaaaatactttttgtatataatctctttgccctctatcctgagtaastaatggacatcttctcatgcaaggtttacatgaagcctttttaaataaatgagtcaaagcacttgtattttccagcctaggctttgtgtgaattataggc

SEQ ID NO: 449686 - DNA, 201 bp, Homo sapiens
ataaaggaagaacaagatagtccttgaaaatactttttgtatataatctctttgccctctatcctgagtaactaatggacatcttctcatgcaaggtttayatgaagcctttttaaataaatgagtcaaagcacttgtattttccagcctaggctttgtgtgaattataggctatttgaaattttatttctgattatgtca

SEQ ID NO: 449687 - DNA, 201 bp, Homo sapiens
atcgtaaatctccctctcactccagtagcagtgaagatgctgattctgcatcagaattagctgactctgaaggaggtgaggagtataatgccatgatgaawaactgccttcgtgtgaatctcactttagctgatttggaacaattggctggcagtgatctgaaggttccaaatgaagatactaagagtgatggaccagaaa

SEQ ID NO: 449688 - DNA, 201 bp, Homo sapiens
attctccacaacatctgcagcatgacatcaatattagtgaaacgctacaaaaactgttcttgcatgtaataactacctccccaaatccaggcttcactggrgagcctctggattagtgatcccagaggccagttagatttcactgagtcaggaatttccacctgacctgccatttactcattcctggtagatgagtctggg

SEQ ID NO: 449689 - DNA, 201 bp, Homo sapiens
aagcggcctcacatctctcaagaaatcaccaaaggtctcatccaaggacactcgggaaatcaaaactgatttctcactttctattagtaattcgtcagatstgagtgctaaagataagcatgctgaagacaatgagaagcgtttggcagccttggaagcgaggcaaaaagcaaaagaagtgcagaagaagctggtgcataa

SEQ ID NO: 449690 - DNA, 201 bp, Homo sapiens
atctcttccaacctcccttcctttttttacatagggacatcatacattatgatccaacgaagcaagaccatgccacttacgaaagaaaaagagatgataarccaaaagaaaggtaagtagagctacttcttttagcaataggatcatgtaaattaatctcatttcagacaattaaaaatgtaggtaggaaccaatatccta

SEQ ID NO: 449691 - DNA, 201 bp, Homo sapiens
gctggttttgatactgaatgtgaacaaggctcacctaaggaaactgacccagaaaacagttttagctgacaaagaagaaatttcagagtgaaggaattttwaaaatctggctgacggaatatcattctggttgccatctttttctgtggaactcctctgcatttcttcctaagtaattacttcaaaaattaaattcaactt

SEQ ID NO: 449692 - DNA, 201 bp, Homo sapiens
  misc_feature (1)...(201): n = A,T,C or G
aagtaggcagtagcctggacttggcccatggactatagtttgccaaccccttctttagaccatgtttttctgaggctgtcatagagttgatctttgcttanaagccctttcttaaatttcatgtcatttgccttctggagattaggagtcttcaaaaccatgaattcctggctccctttaaaaaaaaaaattcctcccttt

SEQ ID NO: 449693 - DNA, 201 bp, Homo sapiens
actttattatttcaatatatgtgttcgttttgtttccaacacctagcatgctttcctaccacctctagggattcaactctatctttcctacctcataactytacctagtttataaagcatcttttgattcagttaaacactatctcaacttcctttgaacccttagaaactttgggggcatccctgtagagtacttaaatt

SEQ ID NO: 449694 - DNA, 201 bp, Homo sapiens
aatactgcttgtttgcctctgctattaataaatgttgtgtttcttcacaggagtctatgggtaaaacatcagggaagctgtttgatagcagtgatgatgasgaatctgattctgaagatgacagtaataggttcaaaattaaacctcagtttgagggcagagctggacagaaggttagtgaagactgaaaataattagact

SEQ ID NO: 449695 - DNA, 201 bp, Homo sapiens
tgtttctttgtgatgcacatgtctacatatgtcatttcagtaaagcaaaacgaaaaaagaaaagggaggaagctgagaaactacctgaggtgtctaaagamatgtattataatattgctatggatctgaaagaaatattccaaactacaaaatataccagtgaaaaggaagagggcacaccctggaatgaggactgtggta

SEQ ID NO: 449696 - DNA, 201 bp, Homo sapiens
ttttttttttttttttttttttacagggtctcactctgtcaccctggggtgcagtggtatgatctcagctcactgcaacctccatctcccaggctcaagcrattctcccacctcagcctgctgagtagctgggactacagtcacgtgccaccatgcccagctaatttttgtgtttttgtagagatggggtttcaccatgtc

SEQ ID NO: 449697 - DNA, 201 bp, Homo sapiens
actgtgcccggcccaataggtggcttttcaatccttactctctttccaccctccaccctcaagtagaccccagtgttgattgttctttttttttttttttyttttttttttacagggtctcactctgtcaccctggggtgcagtggtatgatctcagctcactgcaacctccatctcccaggctcaagcaattctcccacc

SEQ ID NO: 449698 - DNA, 201 bp, Homo sapiens
gccctcagtcatggattaaagtctcttaatcgtaaatctccctctcactccagtagcagtgaagatgctgattctgcatcagaattagctgactctgaagraggtgaggagtataatgccatgatgaaaaactgccttcgtgtgaatctcactttagctgatttggaacaattggctggcagtgatctgaaggttccaaat

SEQ ID NO: 449699 - DNA, 201 bp, Homo sapiens
agaaatgtattataatattgctatggatctgaaagaaatattccaaactacaaaatataccagtgaaaaggaagagggcacaccctggaatgaggactgtrgtaaagagaaacctgaggaaatccaggaccctgcagctctgaccagtgacgctgagcagcccagcgggttcacgttctctttttttgattcagacactaa

SEQ ID NO: 449700 - DNA, 201 bp, Homo sapiens
  misc_feature (1)...(201): n = A,T,C or G
tatttctgtaatccaaactagctgtttaactttattctgtgatattttgtctgtttgtagtagttgaggatagtagcttgtaaaagtccatgatgccttantatgtgtagggcatatggtttttttcccataatacttgttattgaatcaaagactgaaacaactatccactaatatcttatattgtcagatataccatta

SEQ ID NO: 449701 - DNA, 201 bp, Homo sapiens
aactgccaagtaactttttgtcccagatcaaagagaaaagcatattcattcctaaatacagagcagatttatggtaatataaaaatttcatttcaaaagasactatacatatttataattaatttctacaactgatttacaattttaccagttactggtaaaattcccagtatcttagaagtcatgtggcttacagttttc

SEQ ID NO: 449702 - DNA, 201 bp, Homo sapiens
atctgtcttaaaacctaacgaggttggtttatttaccgaaatactaaaagtttctctctttgatatggtctctaccactaagaatggttatttaggatatyctgttcacttattattttacgtagtacattacaaactttggcctggtcttcgaggaaaaaggattttaatattttcttagctcaaaattcagtattggaa

SEQ ID NO: 449703 - DNA, 201 bp, Homo sapiens
aaagccaccacatggtggttaaatgataatcacttggaactgcctaccattttttatagagcttggtttcctaagaggcatatctgtcttaaaacctaacsaggttggtttatttaccgaaatactaaaagtttctctctttgatatggtctctaccactaagaatggttatttaggatatcctgttcacttattatttta

SEQ ID NO: 449704 - DNA, 201 bp, Homo sapiens
aaatagataagactttgcaggccagaccatctctgctgtgatgactccactctacctttgtaaaagaaaagcagccatagacaatatgtaaacaaatgagyaaggctgtgtgccgataaaactattaaaggacactgaaattttcatttcatataattttttcatgaaatgatgtttgtttttccccctatcatttcaaat

SEQ ID NO: 449705 - DNA, 201 bp, Homo sapiens
ctttctaataaagacctaaaaatgttgcagagagtgagttcatgtgaagtggatgttattcagctaggagaatcagagttaggatgagtaagaactgagakaacagaaatagccaaaagaatttgagagtaaaggacacacatgtggccatgtcctctgggttctcctgaacccagaactttgctttactgtatcagttcg

SEQ ID NO: 449706 - DNA, 201 bp, Homo sapiens
attataaacagttaatgccaaaaatgccaatatcccctcttcatttcaaaagagcactttcaaaataggtttccacagccctgacagtgagaataacctgktttacttctatctactgaacatcttaaaaacaatttgtttattgctaaccaagtcttttttttttcctaggattgtcgaaagaaacataaagacgcaaaa

SEQ ID NO: 449707 - DNA, 201 bp, Homo sapiens
ccaagtgcagtggcattgtctccaatgacatcctcttcagctaacctagagcatatgtcactgttgatcatcccttcttgaaatgttcactttgcttccaattgcatcataacttcctggttttcttaactctttattcctaatttttcttttgcctccaaatatgggttcttcccagggttctgtaagtccctatagctt

SEQ ID NO: 449708 - DNA, 201 bp, Homo sapiens
agatagtccttgaaaatactttttgtatataatctctttgccctctatcctgagtaactaatggacatcttctcatgcaaggtttacatgaagcctttttwaataaatgagtcaaagcacttgtattttccagcctaggctttgtgtgaattataggctatttgaaattttatttctgattatgtcaaatacaccttccat

SEQ ID NO: 449709 - DNA, 201 bp, Homo sapiens
acatggatttaagccctattttttttatattgtaagtggttttatatattatttcaaattatcaagtaatatagtattatattcttaacaaattcaaacatataagtagagctgaaatccctttcaactctgaatccccttcaccccagacgaacaaaaaggataatttcatgcatttacgtatgtatgtaataagctata

SEQ ID NO: 449710 - DNA, 201 bp, Homo sapiens
tattaaggaagctgacggcagatgctcagagaaatcaattactacggcatagtaattcaaacagttcagtcactcatagttaattcatctgcaagttctayagtgataattagtatgaggtgataaataaaattaaggtgctgtaggattccagagtgtcctctgattcacctgaaaagatgattgttttatagttacagg

SEQ ID NO: 449711 - DNA, 201 bp, Homo sapiens
tttcatagaaactgcctgttacatatatcccactgaatatcatgccacattccccctcagtctgatcatttctttgacagctaatccttgtcactaaacaytcttgagggggctttaaaatacacccttgtaagaccgtatccttgaaattgtgaaatctcttgttgataagtttagtaaagtcaagggcaaacagtggcc

SEQ ID NO: 449712 - DNA, 201 bp, Homo sapiens
ggaaaagaatgatcttaactggtattcgagaccttgataatgccaacacttagaatattaccaattttagtagtagtttgctgcctcatctttcttctttytcccctaataggttctgacttattctggagaggagtaggaagtaatatgagcaggaactcttgggaggccagaacaaccaacctgcgtatggtgagtaat

SEQ ID NO: 449713 - DNA, 201 bp, Homo sapiens
gatcacgtggaggggagcgcctctttatttttttcacctacttcctctcttacgccgacctagtccaggaattggtacacacagcgatagtgttcaatagmaactaggggattttggtttaggctcttttgcagtcgttgagggggaggtgacggaggcgtcagggaaggtgggaggacggaaaaggaaattaaaagctct

SEQ ID NO: 449714 - DNA, 201 bp, Homo sapiens
ctcttttatttgtattttctttttgattcagattggcccaagagagagaagcagcaaaagctaagaaagaagaatcaacaacaggtaacgccaacttgttrgaaaagacaggaggagtggatttccatatgaaagctgtgccagggacagaagtgccagggcataaggtgagtctcctctgtagcctgagccaattacatg

SEQ ID NO: 449715 - DNA, 201 bp, Homo sapiens
accccagtgttgattgttcttttttttttttttttttttttttttacagggtctcactctgtcaccctggggtgcagtggtatgatctcagctcactgcarcctccatctcccaggctcaagcaattctcccacctcagcctgctgagtagctgggactacagtcacgtgccaccatgcccagctaatttttgtgtttttg

SEQ ID NO: 449716 - DNA, 201 bp, Homo sapiens
ccctcaagtagaccccagtgttgattgttcttttttttttttttttttttttttttacagggtctcactctgtcaccctggggtgcagtggtatgatctcrgctcactgcaacctccatctcccaggctcaagcaattctcccacctcagcctgctgagtagctgggactacagtcacgtgccaccatgcccagctaattt

SEQ ID NO: 449717 - DNA, 201 bp, Homo sapiens
aaaatgccaatatcccctcttcatttcaaaagagcactttcaaaataggtttccacagccctgacagtgagaataacctgttttacttctatctactgaayatcttaaaaacaatttgtttattgctaaccaagtcttttttttttcctaggattgtcgaaagaaacataaagacgcaaaaaggaaaatgaaaccaaaata

SEQ ID NO: 449718 - DNA, 201 bp, Homo sapiens; identical to SEQ ID NO: 47001

SEQ ID NO: 449719 - DNA, 201 bp, Homo sapiens; identical to SEQ ID NO: 239993

SEQ ID NO: 449720 - DNA, 201 bp, Homo sapiens
tgttgtctaggttggactccaactcctgggctcaagtgatcctagcacctcagcctcctgagtagctgggactacaggtatgccgtaccatgtagcttacktaacatttcgtatttctgttagtcttgggatttttctaaggcttaagagtgatttgatttgtattcaactgcattatcgattcttgacatttaatgatgt

SEQ ID NO: 449721 - DNA, 201 bp, Homo sapiens
tcgggcgtgttcagagtggtatgatcatagactgaaagtgcatttgaaatgaccctttaagaagataaatgattatcaaaagcaaaccaaaacatcatcctttttttttttttttttttttcctcagagcctcactctgtagcccaggatggagtgcactggcgccatcttggctcactgcaacctctgctgcccaggttc

SEQ ID NO: 449722 - DNA, 201 bp, Homo sapiens
aggattgagtgagatgaatatagtgatttttgaaatgtttgaaataaggctttaaatctcaactctgacactcactaaaatgagaaataaccatatatatsttaaagaactgttgggattgtgcatataaacctgtcaataagtaacacttggtattattttatctaatttatcagaactagggttgaatgtttcacagta

SEQ ID NO: 449723 - DNA, 201 bp, Homo sapiens
aaaattaattttgtaaattcagatgttttgtaaaacaaatggttacttatgggtggaattttatcactttcgagcatcaactttgcattttcaggttaaasttttgctggatgtgtgagtcgtgactcagtagtaatgtttgattagtaaccaatgacactgaacaatagttttcttactgacagaaagagacactttttt

SEQ ID NO: 449724 - DNA, 201 bp, Homo sapiens
gcgtgagctaatgtgcccagccgaagttctgattcattaggtataggatcctttggtccaaagtttgaaattttgtctcttgatttatacttatatatcctttttttttttttttttgtagagatgggggtcttgctatgttgctcagggtggtcctggattcctgggctcaagtgataataccaccttagcctcccccaa

SEQ ID NO: 449725 - DNA, 201 bp, Homo sapiens
atatcctttttttttttttttttgtagagatgggggtcttgctatgttgctcagggtggtcctggattcctgggctcaagtgataataccaccttagcctcccccaaagtgctgggattacagacatgagccaccatgcctggccccatttcttttaaaaatttgaaagactgtttagtatagtagcaagatcacttttat

SEQ ID NO: 449726 - DNA, 201 bp, Homo sapiens
gcaaaatgagaatgtggtacctagtaagtaaggttgttttcaggactaaatgggacatgttgcctggcacagaagtgttgactattattggtagtaggtartaagtggtgttggtcaaattttgaactttgcttggaaattgttaactgttgttaattaagtatccctggctactcactctgtatcaggctgtactaaaat

SEQ ID NO: 449727 - DNA, 201 bp, Homo sapiens
tctctctctgttacaaaacttactgatgataaatattttatgttttctgattaacttgacatttaaaagttttcttatagcatttttattctaaagtcttyctttgaaaaatgatttttacattatttctattctaggcaagcaaatatggaataacaaagactagagcatatttacggtagagttcttctatggaaaaag

SEQ ID NO: 449728 - DNA, 201 bp, Homo sapiens
ctgagaatcatagataaactaagaaatacggctgaggccccttagtatctttaggaacttcaagggaaatgtgggatgtgaaaaatagtacagtctgttasaatggctcatgcctgtaatcccagcactttgggaggctgaggctcgagaatcacttgaggtcaggagttcaagactagcctggacaatgtagtgagacct

SEQ ID NO: 449729 - DNA, 201 bp, Homo sapiens
tcatttataaaataatcagttaacttggctgggcaaggggctcaggcctataatgccaacactttgggaggccaaggcgggagaattgcatgagcccaggrgtttgagaccagtatgtataacataccaagaccccatctcttataaaaataaaaaaaattagtcaggtgtggtggtacacacctgcagtcgcagctgagg

SEQ ID NO: 449730 - DNA, 201 bp, Homo sapiens
tgcttatttttgttcagtttatttatctcaatgtattctgttcttaagataacatctaatttaatgttaagttgctgttaatgtgacccattgtaagcatrttaatcatgtttaaactttattttttgatggctttatctaaatttcaaaaattcttccctaatttactcctgattacaaggcaaacttaaaattttcaac

SEQ ID NO: 449731 - DNA, 201 bp, Homo sapiens
catgcctgtaatcctagcactttgggaggctgaagcaggtggatcactcgggctccagagttcaagaccaggctgggcaatatggtgaaaccctgtctctmcaaaaaaaaaaaaaaaaaaaaattagctgggtgtggtggctcattcctgtagtcccacctatttgggggcctgaggtgagaggattccttgaacccggga

SEQ ID NO: 449732 - DNA, 201 bp, Homo sapiens
gtacatttatctgttaatagtcatggggtaactgctgacagatggagaagttcttatttttttttagaccgaatctcactctgttgccaggctggagcgcrgtggcgcgatctcagctcactgcaacctctgcctctcaggttcaagtgattctcctgcctcagcctcccgagtagctgggactacaggcatgtatcacca

SEQ ID NO: 449733 - DNA, 201 bp, Homo sapiens
agagaagggcaaattaaaaaataatgtttatgatgacctgttagaaaacatactaggcactttacatagattatttcatttgattccacaccacaaccctrtgagtgagatggtatttaacctcttttttcagatgaagaaatgaaatttacagttacttgctcatgctcatatagtatgtaaatggcacaagtaggaccc

SEQ ID NO: 449734 - DNA, 201 bp, Homo sapiens
ggccaagacaggcagatcactggagcccaggagtttgagaccagcttgggcaacatggagagactcccatctccacaaaaagtatagaaattagctgggcstggtggtacacacctgtagtcccagctcctacggaggctgaggtgggaggatctcttgagcctgggaggcagagattgcagtgagctgagattgcaccac

SEQ ID NO: 449735 - DNA, 201 bp, Homo sapiens
tggtggattaaagacttaaatgtaaaacctaaaactataaaaacccttgaaaacctaggaaataccattctggacatacgccccagcaaagatttcatgakgaagatgccaaaagcaatggcgacaacaacaaaaaattgacaaatgagacctaattaaagagcttctgcacagcaaaagaaactatcaatagagtaagca

SEQ ID NO: 449736 - DNA, 201 bp, Homo sapiens
ttttgacaattttttgagacagagtctcactctatcacccatgctggagtgcagtggtgtgatctctgctaactgcaacctccgcctcctgggttcaagcrattctcatgccatagactcatgagtagctggacttacaggcacatgccaccgtgcctggctaatttctttgcctttttagtagagacagggtttcaccat

SEQ ID NO: 449737 - DNA, 201 bp, Homo sapiens
gtgaattaaatacattaatggatatagtgtttataatgccttgtacttgtcaaatggtagttattgttatagtctcctatttatgatctgcaatttaaaagtttgtttatctaattatgtacaagacgacttttcattatttaccatctttgtttaaattcaattataataaaactcatttctgaaaaagtgtacacatac

SEQ ID NO: 449738 - DNA, 201 bp, Homo sapiens
tgaattaaatacattaatggatatagtgtttataatgccttgtacttgtcaaatggtagttattgttatagtctcctatttatgatctgcaatttaaaagtttgtttatctaattatgtacaagacgacttttcattatttaccatctttgtttaaattcaattataataaaactcatttctgaaaaagtgtacacataca

SEQ ID NO: 449739 - DNA, 201 bp, Homo sapiens
acaggtgtgagccactgtgctggccagaaagaggcactttttaaaatgctggtgttagacttcataggtgatctttctaggattctctttttaaaaaaaayttttaaagttttatttatctattaatcttattcctgacagacagctctgacgatcattctaggattttctttttctttttttcttttttttttttttttt

SEQ ID NO: 449740 - DNA, 201 bp, Homo sapiens
gaattaaatacattaatggatatagtgtttataatgccttgtacttgtcaaatggtagttattgttatagtctcctatttatgatctgcaatttaaaagtttgtttatctaattatgtacaagacgacttttcattatttaccatctttgtttaaattcaattataataaaactcatttctgaaaaagtgtacacatacaa

SEQ ID NO: 449741 - DNA, 201 bp, Homo sapiens
aattaaatacattaatggatatagtgtttataatgccttgtacttgtcaaatggtagttattgttatagtctcctatttatgatctgcaatttaaaagtttgtttatctaattatgtacaagacgacttttcattatttaccatctttgtttaaattcaattataataaaactcatttctgaaaaagtgtacacatacaag

SEQ ID NO: 449742 - DNA, 201 bp, Homo sapiens
gtgaaatatctcttttcagacactgcttaaacgagtatatgaatttattttcttttacagcatcaactcagcagcctatctcctgacactcctaagggtcwtaggtacatcaattgagaaatctctggcctaggatttattatatatttatttcaaaataagcctgcattttttttgcaacctcctctgactcctaatgag

SEQ ID NO: 449743 - DNA, 201 bp, Homo sapiens
cagcagcctatctcctgacactcctaagggtcttaggtacatcaattgagaaatctctggcctaggatttattatatatttatttcaaaataagcctgcattttttttgcaacctcctctgactcctaatgagcttctttctgttcattaaatatcctgatactttagcatatctgcaattataagaattaaatatcaaat

SEQ ID NO: 449744 - DNA, 201 bp, Homo sapiens
ccaggaagcagaggttgcagtgagccgagatcatgccactgcactccagcctggggcaacagagtgagaccccgtctcaaaacaaaaaaacaaaacaaaacaaaaaaactctcagtgttaagatcaagctccaagggggcaaggagctacaaggacttgcgatgctgaatttttaaacccctaccccttttcattttgagg

SEQ ID NO: 449745 - DNA, 201 bp, Homo sapiens
aggctgatcttgaagtcggctcaaacagtgctctcatctctgcctcccaaagtgctgggattacaggcatgagccactgtgcttggcactaaaacaatactttttttttttttttttttgagactgagtctctgtcacccaggctggagtgcagtggcaccatctcagctcactgcagcggcaccatctcagctcactgca

SEQ ID NO: 449746 - DNA, 201 bp, Homo sapiens
cccaccaccatgcccggctaattttttgtatttttttttttttagtagagacggggtttcaccgtggtctcgatctcctgacctcgtgatccacccgcctyggcctcccaaagtgctgggactacaggcgtgagccaccgcgcacggcgactttgcggtttttaaaacaatgttaactttcctccctggaggtctgatacc

SEQ ID NO: 449747 - DNA, 201 bp, Homo sapiens
tacaagtaacattagattgaaacttgctaaaaatatggtagttcttatagagaaagactttgagagttgacttttctttcctgctaagtaaagagtattcrtggttgagtttccaggattgggttgagataaagatgtactttggaaagaacagattaaattttgttttaacaagtgtgaggttcaaccatgtacttcctg

SEQ ID NO: 449748 - DNA, 201 bp, Homo sapiens
atggattcaaagctgaattctaccagacatattaatataaagagctggtacaattgctactgaaactattcaaaaaaatggaagaggaggggattcctccytatctcattcaatgaccagcatcatcctgataccaaaacctggcagagactcaacaaaaaacgaaaacttcaggccaatatccttgataaacatagatgc

SEQ ID NO: 449749 - DNA, 201 bp, Homo sapiens
aaccaaaatcagagctgaactgaataaagttgaggtgcaagaaaccatacaaaagatcagtgaaaagagaagttggttatttaatataataaataagattkctagactgctaactagactaatacagaaaaaagaagatccaaataaacacagtcagaaatgacaaaggggacattaccacctaccccacagaaatacaaa

SEQ ID NO: 449750 - DNA, 201 bp, Homo sapiens
tttgaaatatttttcgaaagatgtatgaggcatacatacctggtagaaaagggcattctaggtagatgagaaaagacacagattttgagaggaagctctaktcatagttttgtagtcatctgatgtggttagagaataggccaattatggagagtggtaccagataataagctgtggccacgttgtgaaggcccttctagg

SEQ ID NO: 449751 - DNA, 201 bp, Homo sapiens
ctaccgaatcataatcttttattttagcaagatccctggaagatttctgtgttcactattgtttgagaagtgctactctagaatatattttcaaacctttycttcttgaaaacttttattcaagccttgagcttttttgtttgttttgatattttacttttgagacagagtcttgctcttatcacccaggctggagtccaa

SEQ ID NO: 449752 - DNA, 201 bp, Homo sapiens
ctacatagtgacagctacatgggagactgaggtgggaggtttgagttcaggggtttgaagctgcaatgagctgtgatcgggccactgtgttccagcctggrcaacagaacaagactgttaatataatgaatgcatttggtaagggactgaaattgatagaaaactttaatgatcattacaattgatagattatcatggaaa

SEQ ID NO: 449753 - DNA, 201 bp, Homo sapiens
gaaataaaattttctctctgttattaaatttctagccgcattactagaaaacaataatggaaaactttttaggccatttattgctttattggcagctttcsattatgtagaaaatagtaattatcttggcatagatctcaaactaaaactgctttattggaggatatttttcggtgagtattcagattgatgatactaaat

SEQ ID NO: 449754 - DNA, 201 bp, Homo sapiens
aaatagcaaaatattaagccaatttttgttaaaataacatggaaatctctgctctaatgagttagtaattcgaatataaagggccgtccttgtttttatakaattaatttgaatacactgtgatttttattgtgaatgatctctagtaatcagtttcccttagtaaatggctatgtgttctctcttttctctgctttttaa

SEQ ID NO: 449755 - DNA, 201 bp, Homo sapiens
attcaatgaccagcatcatcctgataccaaaacctggcagagactcaacaaaaaacgaaaacttcaggccaatatccttgataaacatagatgcaaaaatyttcaacaaaatactagcaaactgaatccagcagcataacaaaaagctagtccaccaggccaggagcagtagcttaggcctgtagtctcagcactttggta

SEQ ID NO: 449756 - DNA, 201 bp, Homo sapiens
ggttttttttttcttactataggccttgctgtggctatcttggtgcatagatatgacaacttccttaagagccagtttgccagatagaccttgcagtttgkattttttatatatttatttattttgagacagagtttcactcttgtcgcccagggtggagtacaatggcacgattttggctcactgcaacctctgcctcta

SEQ ID NO: 449757 - DNA, 201 bp, Homo sapiens
tttttcttctaacattatagacatcccagagtggttatcagcatttgaaagcagcagggcctctttcttcttcttggatttggttaaaacaaaagggctayggacagtcttgaaatgtgaaccaaaaccccatgtttttaaacacctcagcaaatccgaatgaagacaagtttcctccttcagggacaaagcagggttcag

SEQ ID NO: 449758 - DNA, 201 bp, Homo sapiens
ggctttgggatggcagcattctagagggtccccaggctcctttctttttttttttttcctttaacttataagattatttatttagctatcagaaatacaasattgttcccttttcttttttttaaattatactttaagttttagggtacatgtgcacaatgtgcaggtttgttacatatatatatacatgtgccatgttgg

SEQ ID NO: 449759 - DNA, 201 bp, Homo sapiens
agatacggcaaataaaacatattgggggttaaatattttgatttccttctttacctgtcatgtgatgctatgccagagtcaggttggaaagcagcccccaytatatagtgttcaatgaaacccctctgatgagggtttgtagggtggactccccagtcccttagataagaatttgggcaagagaagaaaaagatcagccat

SEQ ID NO: 449760 - DNA, 201 bp, Homo sapiens
gagagcagtgagccaagccggatgcctgcaagtcacgtgaaactgtccaggcagacaaattaggcagtgttcggtgctcattcagccgtggggagcggacrggacggaaaaattcctttcattcccaggctgcccagaagtagctgcaagcacttttaaggtaactgtgtcaaggacttacaataagtagccagtaaccct

SEQ ID NO: 449761 - DNA, 201 bp, Homo sapiens
tactaatttacattcccaccaatagagtatgagagtttccatttctgttcattctcaccagcatttttattttttgtctttttgataatagccattctaastagggtgagatgatatctcattgtggttttgatttgcatttccctgagaattagtgatgttgaatgttttttcatacatttgttgaccatttacatgtct

SEQ ID NO: 449762 - DNA, 201 bp, Homo sapiens
gcctgatgtacatgccaggtactcactgttgcatgctttgtagaattttttgtctgaatgtgaactggacgggcccacctcagggcttgggcacctttgtytccgtgcagcccttgaacttaggtgagactgcattaagctccagagggataatgggggttgcccactgaataatccaaccccacttgctttcccctttca

SEQ ID NO: 449763 - DNA, 201 bp, Homo sapiens
tccaaccccacttgctttcccctttcacgatgtccatggtgctcactccagctgcttgaggacttcttttgcattaaaataattaaaattatatgtatatmgttgtatgtttattatggaaaaaaatcaatgcatgtttatttttagaaaaaataaatataaagataggcacaagaaatagtttaaaaaaatcacccacac

SEQ ID NO: 449764 - DNA, 201 bp, Homo sapiens
ggaacacctagcaggactgctcccagctgtggttgcagagacaaaaggaacaaaggccattgattgattaacttgccaccagggaacccacctgccgtggyttttcttgcagcaggattcagaggtgctagagagacaatggtttttctagagtcaaaagggaatacttgacaagtcttctcttaaggtgtcagttttaga

SEQ ID NO: 449765 - DNA, 201 bp, Homo sapiens
tgactctaggtggtgggcggtgtcttgtggttgataagcagggtcccaccagccctgcgcctcctgtcttggttggcttgtcaccctagagagtggctgcktaggagcctagttgcatccttccctgctcctgagacccctttctccctcatgctccctggttcagaccctcttccccaggtcaacagttgctctcgcccc

SEQ ID NO: 449766 - DNA, 201 bp, Homo sapiens
ttttgattcatgttctaaacgctatgctttgatagccagactaagaggacttttgctgttttggtagcaaatcccacagcttcaagtagaattaatgatcyccattttacatatgaaaagtaaagaggcaccagttctttacaacagcataccagcttgacttgtctgtcctgtagtaccttgctccgtaactgttgcttt

SEQ ID NO: 449767 - DNA, 201 bp, Homo sapiens
tatgcctttctcctaagatgattttgaggtctttagtatttacaggggaaagggcaggatattaagaaataggcaattttcatgtgagaggtgggtaaatrgtcattcatgcctttgtctggctcggtgaatctgcatttgtacataaggtaacgtagacagtagggcagaggaaacaatcagatatgcatttgtttcagg

SEQ ID NO: 449768 - DNA, 201 bp, Homo sapiens
cagagtgctgggattacaggcgtgagcctgcccggccataatattcctaatcttcagaccttgtttgaatttttccaattttcctgtaatgtcctttttcyggtccaggatcccagccagaatcccatattgcattgggttttcatgttgctttattcatgttcaatctgtaatagttcctcagtcttctcttttgtaaac

SEQ ID NO: 449769 - DNA, 201 bp, Homo sapiens
acagatgtaggaagtcttcggaggggcatttctaggtaaatgcatgctgattctgcccatctttacatgtaccttttgtggtgtttcctctttaaaacagstgcgtgtaatatgcaaatttggtttcaaagggagaattttatatcttttaaggaatgattgcatgtgtattaagtcttgtttcctatctcctttcatttt

SEQ ID NO: 449770 - DNA, 201 bp, Homo sapiens
tgggaggatctcttgagcccaagagtttgataccagcctgggcaacatagcgaatcctcatctctatgaaaaaaataaataaataaaaaataaaaaattascccaagcgtggtggcatgcacctgtagtcctagatacttgggaggctgagatgggaggattgcttgggtccaggagtttggggatgcagtgagccatgat

SEQ ID NO: 449771 - DNA, 201 bp, Homo sapiens
tggtccaatattactcactgctttggatgtcccttcgtggttgccaaaatgttacggggggtggggggtccttgctcccagagctcccaagatggtggtgrgccacttccaagatggcggcaagcctcgtgttctctgacctggggttcttggcctcacgaattccaaggaatggaatcttgggccatgcggtgagtgtta

SEQ ID NO: 449772 - DNA, 201 bp, Homo sapiens
gtgccaccatgtgtggccaatttttatattttttggtagagacggtatttttggtagagacagtattcactatgttggccaggctggtctcgaacccctgrcctcaagtgatcctcctgcttcagcctcccagagtgctgggattacaggcgtgagcctgcccggccataatattcctaatcttcagaccttgtttgaatt

SEQ ID NO: 449773 - DNA, 201 bp, Homo sapiens
acctggggttcttggcctcacgaattccaaggaatggaatcttgggccatgcggtgagtgttatagctctattagaagctgtgggtcatgggagagaaccrtggaagccagtgactagtgtttagctcgattaggatgaacccaggcacttagccatgcaggaacaatggcgagcctttagcctgattggaagtggcaatg

SEQ ID NO: 449774 - DNA, 201 bp, Homo sapiens
tagataattgtattagatattttggttatttgtgtctttctagcacatgggaggattttgcttctcccacctcttgaagttacgcaaagcatgtggctttycctggccaatgaaaagggagctaaagggatgtgtgctgagacattgaattgcaggtgcatgatttcccagctgtctttgctctgcttgtttaaagcaaat

SEQ ID NO: 449775 - DNA, 201 bp, Homo sapiens
ccaaaatggcttattttggggtggcatatcctaatccctttcagcatagaggtttatttttttgaatcaataactgaggaataattattcttactaaaacycaataattcaactcagaagggtcttccaaagaagttggtctcccagcatgctctgggttctgtttgcttgctgatggaacacagttaacagttaacacag

SEQ ID NO: 449776 - DNA, 201 bp, Homo sapiens
tcagaagggtcttccaaagaagttggtctcccagcatgctctgggttctgtttgcttgctgatggaacacagttaacagttaacacagctcacgggactcstgatgcttgcgtgctgtgaataataagacactttcggaatgggggctcagcacactgtcagggctctcagagtttgccattgttatcattattattatta

SEQ ID NO: 449777 - DNA, 201 bp, Homo sapiens
cactgtcagggctctcagagtttgccattgttatcattattattattagctatcattgtttttattgcctactattacaatttctaacatgcctctattcrcccttcaagtgagtaaaacattcctcagaacttgcctggcaaaagcaccttggagaagttcaggctgctggtgagggtctagggctgaccccagcacgcc

SEQ ID NO: 449778 - DNA, 201 bp, Homo sapiens
gttatcattattattattagctatcattgtttttattgcctactattacaatttctaacatgcctctattcgcccttcaagtgagtaaaacattcctcagracttgcctggcaaaagcaccttggagaagttcaggctgctggtgagggtctagggctgaccccagcacgccctaaggaaggtcagcccaagggcaggcac

SEQ ID NO: 449779 - DNA, 201 bp, Homo sapiens
tttttattgcctactattacaatttctaacatgcctctattcgcccttcaagtgagtaaaacattcctcagaacttgcctggcaaaagcaccttggagaarttcaggctgctggtgagggtctagggctgaccccagcacgccctaaggaaggtcagcccaagggcaggcacttggcttggttagttgctttctcctgcct

SEQ ID NO: 449780 - DNA, 201 bp, Homo sapiens
ttcgcccttcaagtgagtaaaacattcctcagaacttgcctggcaaaagcaccttggagaagttcaggctgctggtgagggtctagggctgaccccagcaygccctaaggaaggtcagcccaagggcaggcacttggcttggttagttgctttctcctgcctaggctaagtgttaagtgctctctgaatagccactgcata

SEQ ID NO: 449781 - DNA, 201 bp, Homo sapiens
ttgctaagattatccaggagtgactggaagaccccagcactggcctccccagggtcacctgaggcttctacctccccaccatgctgcactgactgtcttgkgcggatggatgtgtgttgactggctcacccccctttcttcttactcttcttatactgccaggggtgggttgtgttgtcagatgattggcccaaattatga

SEQ ID NO: 449782 - DNA, 201 bp, Homo sapiens
gcctccccagggtcacctgaggcttctacctccccaccatgctgcactgactgtcttgtgcggatggatgtgtgttgactggctcacccccctttcttctyactcttcttatactgccaggggtgggttgtgttgtcagatgattggcccaaattatgatgcagtcataatcaagagcatgagccccagggaatggaggcg

SEQ ID NO: 449783 - DNA, 201 bp, Homo sapiens
ctgcctgccagcctccctggccaggtctccctgaatatccacaggcaggacctctgttctctcccctgccccgttaaagaaaagccagagctggaggtagkaggtgaagacagtttctattcaggaactattgcagtaggggaaagagacctcagtatagagccgggcttaattctgaatacagcatggacaagtggggag

SEQ ID NO: 449784 - DNA, 201 bp, Homo sapiens
tacttaagttaaaaaaaaaatagagcttcagcaggcggtagattgtagagtgaggggaggggacaggacagagcctgaatgggggccagaccctcctagcwtgtgcaccttctctttctcactgtcctgagtctgagtcccaaggccaggtgaggtcgtcttctctatgtttaggagagaataagagtctagggggttaag

SEQ ID NO: 449785 - DNA, 201 bp, Homo sapiens
ttgcaaaaacaaaaacaaaaaaaaatcaaatctaaatcaggtcagacttttatatctaactaccaatctacaggaaatccaggggacagaagaatctcttkactagcaacacaggcaatcagcaaagtctcggatggtgggaaactatgggacaaacaactgggtttcttccacaaatatattgtaaggaaaagagaatgc

SEQ ID NO: 449786 - DNA, 201 bp, Homo sapiens
acaagtttggccctccatgcagttgagggaaatctgaggagacccccatggccactccccatgaccagtgccatgctgtatacagcaggtgctcaataaaygctgggagatgatctttgctatggactgaattgtgtctccttacaattcctgtgttgaaggcctcacccccaaagggatggtgattggagaggaggacat

SEQ ID NO: 449787 - DNA, 201 bp, Homo sapiens
taccaatctacaggaaatccaggggacagaagaatctcttgactagcaacacaggcaatcagcaaagtctcggatggtgggaaactatgggacaaacaacygggtttcttccacaaatatattgtaaggaaaagagaatgcagtggtgggatggggaggagcttatggattaagacagaaagaaagcaacattgtgggcaa

SEQ ID NO: 449788 - DNA, 201 bp, Homo sapiens
cacactgtgttttctctgtttgtgagtctgtgtccaaatttccctggagaaatacccatcatatgggttagggatcccccaatgacctcactgaaacttartgtggagcctgtctccaaataaggtcacattctgaggtattggtggtgaggactttaacatgggagttttttgggaggaggccctcacccacagtagtag

SEQ ID NO: 449789 - DNA, 201 bp, Homo sapiens
taggcattttccacaatagaatgtagaaaacaatatacaaaagttacctgaggaaaagcacacccttcatttttttctttagactgtgtttattaattgtmtgcacaaccaattaagtttagagcaaaagttgaacatggtccatggtaataaggatattaactttgccctatttatgacaccaagaggaaaatgcagatg

SEQ ID NO: 449790 - DNA, 201 bp, Homo sapiens; identical to SEQ ID NO: 86562

SEQ ID NO: 449791 - DNA, 201 bp, Homo sapiens
agatgactctgtcaagaagtttaaagaaaagaaggggaagaaaggcagctcagggaaaagaagtgaaacatctccatttaaacataatgtgcttcacacgwgttcacaagtctgcactgtgggtttaagttctaagctcaataccagctagttgagtaacatcaacccttaaaactcactgctttactgataatgcaaatg

SEQ ID NO: 449792 - DNA, 201 bp, Homo sapiens
tcaagaagtttaaagaaaagaaggggaagaaaggcagctcagggaaaagaagtgaaacatctccatttaaacataatgtgcttcacacgtgttcacaagtmtgcactgtgggtttaagttctaagctcaataccagctagttgagtaacatcaacccttaaaactcactgctttactgataatgcaaatgacctggagaga

SEQ ID NO: 449793 - DNA, 201 bp, Homo sapiens
aaggggaagaaaggcagctcagggaaaagaagtgaaacatctccatttaaacataatgtgcttcacacgtgttcacaagtctgcactgtgggtttaagttytaagctcaataccagctagttgagtaacatcaacccttaaaactcactgctttactgataatgcaaatgacctggagagacataaaataggagcagaagt

SEQ ID NO: 449794 - DNA, 201 bp, Homo sapiens
gaatagaaagaggaaccattataggatgatgctacagataaaatttagtttgcctaatttattatcttgttttcaaagcaaaactgtaacgtggtggtgarttatataaaaagaagctaattggtaggaaaaagtcaattaaaaatagcactttaccattataaaacatttgtactcattctcattcagcttcacaacaac

SEQ ID NO: 449795 - DNA, 201 bp, Homo sapiens
atggggaaactgccgccatgattcagttatctcccaccaggtccctcccacaacaggtgggaattatgggaggacaattcaagatgagatttgggtggggwcacagccaaaccatatcacctggccacatggcctggggggttccaggaacctggaagtggacttaactgtaatatcaaagaagaagctcctctgccaaca

SEQ ID NO: 449796 - DNA, 201 bp, Homo sapiens; identical to SEQ ID NO: 86556

SEQ ID NO: 449797 - DNA, 201 bp, Homo sapiens
tgttgaaatgacaagaaagaatttacagtgttacatagagttagttgatgaagcagtagcaggattcgagaggatcgattccaatttcaaaataagttctkctgtgggtaaaatgctatcaaatggcgtcgcatgctacagagaaatctatcatgaaaggaagagtcaattgatgtggcaaacttcattgttgtcgtattt

SEQ ID NO: 449798 - DNA, 201 bp, Homo sapiens
aattcaagatgagatttgggtggggacacagccaaaccatatcacctggccacatggcctggggggttccaggaacctggaagtggacttaactgtaataycaaagaagaagctcctctgccaacactgacttagcagaactgtttaatgaattaattacttaggaatgacgggagttacctccaagttaataaggatgat

SEQ ID NO: 449799 - DNA, 201 bp, Homo sapiens
ggcctggggggttccaggaacctggaagtggacttaactgtaatatcaaagaagaagctcctctgccaacactgacttagcagaactgtttaatgaattarttacttaggaatgacgggagttacctccaagttaataaggatgatgaaaattcattatttacacaaggaaacccacagaaccaggcaagagaccacctaa

SEQ ID NO: 449800 - DNA, 201 bp, Homo sapiens
aaacccacagaaccaggcaagagaccacctaaaattttgttcacctaaaattctagagttctttgagcaaaccaaatgagtggttgtatcattttaaattmacaggaatagataggaagtctaggtcattaacataatttgtgctctcagttcatttttcaagtgggcttcctattgcatttttcttctgattcagttgag

SEQ ID NO: 449801 - DNA, 201 bp, Homo sapiens
ctagtgtccaaggacaaggcaactctggaaagaaaatggtttaagtgagcagtagccagagaaacagagtgcacatgaaaaactctggcaaaaaaaaaaamaaccgattcctgttaaaaatggcttttaacactgaagcactgaaggattaaatgttcataatttagaattgatgattataccagattttcagatatggcc

SEQ ID NO: 449802 - DNA, 201 bp, Homo sapiens
ggcgtcttggaatctgtatctgaagtcttgcgagtctgttttgtcatttgttattcttctccacagtgccttgtgaccttgtgtggttgacttcctttgaytgggcgctgatcattgctcttaaaattatttgtgggattccctgaggcctaggatgaaagtgcctgccttcagctctgaggtccactccctagacatgta

SEQ ID NO: 449803 - DNA, 201 bp, Homo sapiens
tataggcagaagtccctgggggaggattctcctgtgcttttcctcttctgtcttcctgaaatgtagatgtaatagctggaggagcagcagtcatcttttcrcctttagaatcacatgacgatgatgatgatgaagctgaagacagtaaacaccttatgagcagctttgttggctttggacttttacccttaaactcgatgt

SEQ ID NO: 449804 - DNA, 201 bp, Homo sapiens
tgattgcttgccatgtgggtgtctccaacatgactatgtgcaccatccaagtgcacctgctgagaagggaatagagagattctgctagcaagatggaagckgcaatcccatggaatcacagaagtgacttttgctgcaatctgtgagttagagaagcaagtcagaagtcccagccccactcaaagggaggaaattacacag

SEQ ID NO: 449805 - DNA, 201 bp, Homo sapiens
tcatgccctctcagcctaacctctaatttcagcagagatggggtgtgtttctgttccgtggttaagtcgctgcatgctcacagaggcttacttcaagcacrggctgcaaggttttactttcttcatcaggattcctctcatgccacgaatggggaaagttcacagttgttggagctgatattcctagagaaaaatgctggt

SEQ ID NO: 449806 - DNA, 201 bp, Homo sapiens
gcagacagctgacacccgaggcccatcaggctgggagcttgcttgtctggaatgtctttgaatgcatgggctatcctttcccactcccccatagcctcccmtatcagccaaagtaatttgaagatgtggtggtgttataagataatctaggataatctcccaattcttgcacacttctctgttgagaggtcggtttatcgc

SEQ ID NO: 449807 - DNA, 201 bp, Homo sapiens
ggatttatcaactttgtacccaaatataccacccttatgaaaatgacaataagcattgctgttgaaggtgtgatgaaataagctatctctgacacaaaacrtgggattgtaaattggcatagttctggaaactaatttaactctatcaataattttaaagtgagaaatgttttgacatataattctaattaaaagagttaa

SEQ ID NO: 449808 - DNA, 201 bp, Homo sapiens
aaaaaatatttcctcttgttcgtgtgaaaaaaaaaaaaacccctcaccactcaatgtgctttttcctgttctctcattcaacaccgtaacaactagcacaracttctgggtggggttggggttctccaacacaaattggcaggggtggggttctccccaccaccgagcaagcactcagctctgcactggacagtggctggg

SEQ ID NO: 449809 - DNA, 201 bp, Homo sapiens
tgtttttacactgagccacgtgttgtctttctcattcatgggactgtttcttgcaagtgtcttcctcttagtgtctgtgtttttggagggaccctgccctygagaacaggggacctgtgctgtgctcctcttgatcccctgggacatttactattagggccgagcacacggggccagcacatactttctgaattaaatttc

SEQ ID NO: 449810 - DNA, 201 bp, Homo sapiens
tatgagcagctttgttggctttggacttttacccttaaactcgatgttatgtgagaaaattaaccttgttacttgttgaagctatcctttgtcaagttttytgtttttgcaaaaaaaaaaagaaagaaaaaaaagaaaagaaaaaagccttatatctttatatctccatactctctcacacacttgggagagtgttcttaa

SEQ ID NO: 449811 - DNA, 201 bp, Homo sapiens
ggagcaatcataagtagggcagcactccttccagccactgaatcccatactcatggtagaccttctggggacacaataccatgcctttgttattgatttcragagaatattgcatcttggagtgtagtgccccatccttgcaggagattatctccaagctgtatcctcaaagggtagcttctttgagctatcaggacagaa

SEQ ID NO: 449812 - DNA, 201 bp, Homo sapiens
ttcagtatggtgctgaacatcaggttcttgggacacagtcttccagaactgtcacagtgctctgcaaagccacgttcctgtgttcatctcctagcacttgrgggtggggggttggagctctgccctatccaccagtcctccagcaaatgccatggaagccacacttactcctaatggctgtctcatccagaggacgcaccc

SEQ ID NO: 449813 - DNA, 201 bp, Homo sapiens
gctggccagccctcacaactcctggtgccgactgacgcatgatgacagaggccaagagattacaaagcacacagggcacaaatgcactaccctgacctcakatttctattcctatggcacattgttctggagttatttgaattatgacttatgctaggcctgcagagacatggcccatggataagatgctacaaccctgtg

SEQ ID NO: 449814 - DNA, 201 bp, Homo sapiens
ttactttctctgtaggttccaacttttctttatgtatccacctggattagttgatatctaggtttggctgctgtgacaaagaccaaaatatgagtgacttraacaagatggacgtgtatttctctttacagaaagctacatatggggcagtcctgctcctcagggcccacagaagctcagattcctcctgtctacttgctc

SEQ ID NO: 449815 - DNA, 201 bp, Homo sapiens
aagggaggggtcccaaagggggttgctcccatccctctttttctatctctactttttctcaattatcttcagctcaaaataatttatatgccaaaatggcwtattttggggtggcatatcctaatccctttcagcatagaggtttatttttttgaatcaataactgaggaataattattcttactaaaacccaataattca

SEQ ID NO: 449816 - DNA, 201 bp, Homo sapiens
aagaaaaaaagatatagtaccaaagacaaaataaaagaaaacaataaccctctatgcatacataaattcatctcagtattatttgcaatattgaaaaatgrcaaacgacataatgcttaaccacatgggtattcttatgatgtatttaaaatgattttatgttttgtatcataaatgtagcatattattatgaagccatta

SEQ ID NO: 449817 - DNA, 201 bp, Homo sapiens
ccagtttgtggctcccctgtgacaggtgtttgtcaagtgagtttctccatagggcccctcaagccccgcacaggccgttatctgggtttcccaggaaagtkctggacatttgcacacatgatcttcgctttccaacttccacagagttaaaaactacaagcgtgggcttctctgagaagttcagaatttctggatggtttc

SEQ ID NO: 449818 - DNA, 201 bp, Homo sapiens
tctctaaataccatgacattgggagtgagggcttcaacatagcaatttcgggggaacacaattccgtttatagaagctagaaaataatgtgctagttgtgraaaggaatgattttcacactataatttttttattttaatggagtggttgtggtcaactgaagttccaccagaagtaaggaaaacagccagtgaggttagc

SEQ ID NO: 449819 - DNA, 201 bp, Homo sapiens
cagctgaaagggaatcttttcaatggtgggtggcaaccagttgtttactcggagatgcctggtaggacaggagagaaagcaagagggcagggctcgagatrtggatttgagaactggagagagttggcataaataagaatcttccaagtggataaactcctataaggaaatcgtgtagccagcagaggccaggatgttgtg

SEQ ID NO: 449820 - DNA, 201 bp, Homo sapiens
gacaggagagaaagcaagagggcagggctcgagatatggatttgagaactggagagagttggcataaataagaatcttccaagtggataaactcctataargaaatcgtgtagccagcagaggccaggatgttgtgttgggtgactgtggacaaaaagagtcaaacttcgtaaagtgtttgaagagatttatcctgagtca

SEQ ID NO: 449821 - DNA, 201 bp, Homo sapiens
ttatcctgagtcaaatatgagtggccaatggtgcgtgacaaagccctcaggagatcctgaggacagtgcccaaggtgatcaggattacaacttagttttayacattttagggagacatgagacatcaatcaaatacatgtaagatgtacatccaggtcataggtagattcaaagattttctaattggcaattggtttaaag

SEQ ID NO: 449822 - DNA, 201 bp, Homo sapiens
gggcttgttgtacctatttttacatcacccagatattaagcccagtacccaatagttatcttttctgctcctctctctcctcccaccctctccgctcaagyagaccccactgtctgctgtttccttctttgtgttcgtaagttcttatcatttagctcccgcttgtaagtgagaaaatgcagtatttggttttctgttcct

SEQ ID NO: 449823 - DNA, 201 bp, Homo sapiens
atgaaaatttctgtatttctttctttccttctttttgtgttgaaagaagctcttgctatgttgcccaggctggtcttgcactcctgggctcaagcaatccycctgcctcagcctcccgtgtagctggggctacaggtgtgtgctttttattgcacttttcttccacctgactgtaagctccatgagggcagaagccatgtc

SEQ ID NO: 449824 - DNA, 201 bp, Homo sapiens
tgtgctctctgtgtgttgaaagagtgaatgggtgtagggggtgcctgtgttgtaaatcatgttctggaggtgacctcatttccttggaggcttcctctggrtcaggtcaggcatatgatgaatccctaggctctctttgccagcgtggtggcaggttctcttccaggtcttgttcaggctgataattgatcagcagtaatt

SEQ ID NO: 449825 - DNA, 201 bp, Homo sapiens
agcacacagttgatttatggagatccattcatttaacaacttgaaaaattggctaccttccaggttctgggtctggtaatgaagtcatagaaggcccccaraatgcaacagtcctgaagggctcccaggctcgcttcaactgcaccgtctcccagggctggaagctcatcatgtgggctctcagtgacatggtggtgctaa

SEQ ID NO: 449826 - DNA, 201 bp, Homo sapiens
aggtggaactaaatgcctagctcaacacaggtaacacagtcagggaaagttggtgtttagggttggatgcctcctgtttcatctgaaagtcaaatcaaggycaagaagtttccatttggtgtagctccctcctccctccttttcatctcccagctgcagaatagggttatttggcctgcacagattgtatgattccgtagt

SEQ ID NO: 449827 - DNA, 201 bp, Homo sapiens
gttgatttatggagatccattcatttaacaacttgaaaaattggctaccttccaggttctgggtctggtaatgaagtcatagaaggcccccagaatgcaasagtcctgaagggctcccaggctcgcttcaactgcaccgtctcccagggctggaagctcatcatgtgggctctcagtgacatggtggtgctaagcgtcagg

SEQ ID NO: 449828 - DNA, 201 bp, Homo sapiens
cttctccaagatattgcgagaggaacccatagagcttggcctgaacttcatccctttatcctcatctcattgctctgaatggcacttagttcctagaggascaaatgttctctgagcaacagggtctccctcaagggagaaagaatcttgaaaaaagaggaaacaaccatgaattattctatgattttttcacctccttat

SEQ ID NO: 449829 - DNA, 201 bp, Homo sapiens
ttgctataaactctgaatgacatcagaagggaaaagagtacgaaattcagagtgaaaggcctgagtttgggtcccagccccactgctgtgaatgcaaatcytgggatgttgccagctggcagagttggttttttatggaggctctgagggaaggtcttccatgcctcttccttagcttctgatgttgctccaatccttgcc

SEQ ID NO: 449830 - DNA, 201 bp, Homo sapiens
aaaaggaatgattttcacactataatttttttattttaatggagtggttgtggtcaactgaagttccaccagaagtaaggaaaacagccagtgaggttagmagtaagcctcagcactcactgaattgtgacgtgcagctgaagtcatcctgagaaagttgcattggatgacaaaaaggacacaaatgagacaagtgtctgg

SEQ ID NO: 449831 - DNA, 201 bp, Homo sapiens
gaaaacagccagtgaggttagcagtaagcctcagcactcactgaattgtgacgtgcagctgaagtcatcctgagaaagttgcattggatgacaaaaaggayacaaatgagacaagtgtctggttattgtataacacacacaaaaattaacttttctgctaccttcttaggttcagcaccaggcgcctgcggaagaaacata

SEQ ID NO: 449832 - DNA, 201 bp, Homo sapiens
gaagtcatcctgagaaagttgcattggatgacaaaaaggacacaaatgagacaagtgtctggttattgtataacacacacaaaaattaacttttctgctaycttcttaggttcagcaccaggcgcctgcggaagaaacataaaagacaaattaacgggagaaaaaaaatgtttatgccttatgcatatgggagccaacaaa

SEQ ID NO: 449833 - DNA, 201 bp, Homo sapiens
tacatctgcaaagaccctattttcaaaggttccattctgaggatccggtggacatgtgttttgaggaatactattcaacccaatacagctgtagagttagrgggtagagtggaaaggagggcatggcagtggcttccaccggaagcacctgatctgccagggagagctggtgttcggattcaaaagacacagtctgagtca

SEQ ID NO: 449834 - DNA, 201 bp, Homo sapiens
tcccctggttccacctgttacatcacacctccccttcaaggaccagtgcagatgccacgtccttcacggggctcagaatgctcaccagcttcctctccacygagggccacagcccctggagaccccttgagctgagtgctttgtccttgcatactctttctggcctcatagtggggcttggccattgtcccttcactccag

SEQ ID NO: 449835 - DNA, 201 bp, Homo sapiens
caaaacaaaacaaacaaaaccaaccacagccacccaaagagaacacagccttatgtcacgtggctggtggattgaactgcaggtggaagtaacttaacctrtagaacgagacattttaaaccatatctttcattgaaagaaaagttttccaaatgggagattaaattagtgaagcatcttataaactttatcataaatatt

SEQ ID NO: 449836 - DNA, 201 bp, Homo sapiens
aagaatacagggagactctgaagtcaatgttaaagacaaaactcgtggcctcccaatagcaatagcatgactcttggcaatatcgtgagatctttatagcytccgtttagtcccggtaaagtgagtataataatacccacctcttatcattgtaaggctgattgaatgagactgtaggtacagccccctacaaagtacctg

SEQ ID NO: 449837 - DNA, 201 bp, Homo sapiens
agctcacatggctattggcaagcctttatttcttgcaggctgttggactgagggctgaagtttctagctggctgttcaggagagtctgccctcagtcttgwttgcttgccatgtgggtgtctccaacatgactatgtgcaccatccaagtgcacctgctgagaagggaatagagagattctgctagcaagatggaagctgc

SEQ ID NO: 449838 - DNA, 201 bp, Homo sapiens
gcttatgtaaatgaaaccgagatatttttcttttttctgtgtgaagtcaagcccattttttcttctaacattatagacatcccagagtggttatcagcatytgaaagcagcagggcctctttcttcttcttggatttggttaaaacaaaagggctacggacagtcttgaaatgtgaaccaaaaccccatgtttttaaacac

SEQ ID NO: 449839 - DNA, 201 bp, Homo sapiens
tgagttaagatttcctagtagagacacagcctctttgggcttgggaaaataggtctcacaaaatgtaatttgaagcaaaacttaaaaaaaaaaagaaaaaraaaaagaaaacttagaagcgagaggcatggtcatgtcttcaatgtgtttctctcttttcttctttagttatgggagagctgttcattcccagtgttaatc

SEQ ID NO: 449840 - DNA, 201 bp, Homo sapiens
aggaaacacaaacacctaattttgatcttatttattaggattttattttaatgtggatctggaaaaaaaactagcacatcatgctcataattatacggatyttactgcttaggaggaggcctaattaattgtgtgcaattaacagccgttaattgtgttttagagatcaagttaaagaataatccttggtaaatcttggct

SEQ ID NO: 449841 - DNA, 201 bp, Homo sapiens
ctgatggaagtttcagaggctggactggaagatgaaactggggcaagatgttacacagcatggcctcaggaacctgagctccagcaacctgcgggtcccartggaggcgaagtcaaggagcgtctcagagagtggttgatgtgtgaagtctctgtctgcccatctgaataacaagagatggggcttgtgattttcctccac

SEQ ID NO: 449842 - DNA, 201 bp, Homo sapiens
ggagatggtggctggccacgatcttgcaggcttagtgacagaacaatctgagaagaacgagggggggagctgctgcagacccatgtggtgctctgcctcaygccctctcagcctaacctctaatttcagcagagatggggtgtgtttctgttccgtggttaagtcgctgcatgctcacagaggcttacttcaagcacgggc

SEQ ID NO: 449843 - DNA, 201 bp, Homo sapiens
ctttcttcatcaggattcctctcatgccacgaatggggaaagttcacagttgttggagctgatattcctagagaaaaatgctggtaagtaaaggctcatayctcctgtttttcttggggggactgttctagagccttctgtgcccttctcagtatgtctaagcagaatggagcgcccattgttcacagcagtttccttggc

SEQ ID NO: 449844 - DNA, 201 bp, Homo sapiens
tgacaaaaaggacacaaatgagacaagtgtctggttattgtataacacacacaaaaattaacttttctgctaccttcttaggttcagcaccaggcgcctgyggaagaaacataaaagacaaattaacgggagaaaaaaaatgtttatgccttatgcatatgggagccaacaaaggaagtagctggctcattaatagagtta

SEQ ID NO: 449845 - DNA, 201 bp, Homo sapiens
gattttttccaacctgcttattgtgtttctaagcaagtgaacttaatccatttataatatacataatttctgaggcctttggatttaattcttttatctcwttatgtgttttctttttcataccttttttctttagttctcttttcttcattttttcgtctcctgttggattgatacagttttctacattcccattttact

SEQ ID NO: 449846 - DNA, 201 bp, Homo sapiens
ggacatttgcacacatgatcttcgctttccaacttccacagagttaaaaactacaagcgtgggcttctctgagaagttcagaatttctggatggtttctamtcagtgagtgtcgctttcacagtgaactgttcttgggatgggttgaaagctgagacttggctgaaatttgatgggctgggtggggtggggtcaggattca

SEQ ID NO: 449847 - DNA, 201 bp, Homo sapiens
ttagaaagcagttttcgtgtgtgatcagtcgttctgagcctgatggctctaccacgcctgctaaccacctcggttgacccggctgcaaccccactcggtcsatcttttatttatctgatttcctcattagtccatggggtgtgttcctcgcaagcttgaattcttttcgcctcacctagctgcactaggggttgctcactt

SEQ ID NO: 449848 - DNA, 201 bp, Homo sapiens
ttctggcttataaggcttctgctgaggaatctgtatggctatttcccaccaaccttgagcaggcacttgccccctgttgtttgtttttgagcttcttgccrttgccccaaacatgacattttctgccacttttgaagattccattatcaagccatttccaataatccaaaaataaggggctgagtgcgatctcaaaagcac

SEQ ID NO: 449849 - DNA, 201 bp, Homo sapiens
tgggctgtcaggtagctcttattttccatgtccattctgttctattctactagtaactgtctgtcttttccagcatttcccaagtcttcccttaccctttrtggtgattctgcagaaggaacaagctggtaaaagcacttttgggagactggggaaaggaatacaaatattcctgtgttaactattttctggccccaagta

SEQ ID NO: 449850 - DNA, 201 bp, Homo sapiens
cacacacaattatgtaagatatataatacttgctaatgataataaacagcgatattactggtttatatatttactacgctatactttttatctcttagagkgtactcttttacttatattaagaaaggtaacgataaaacagcctcaggcaggtccttcaggaggtatccagaagaaggcattgttatcatcggagatggc

SEQ ID NO: 449851 - DNA, 201 bp, Homo sapiens
tgttctacatttgtagcacactgcctgtgagataatagtggtgattgtgtaattcaaaaatgactacccgtagatggtacaaaggaatgagttggatagaygagttagaatctaaacctctctgagaacatcttgttttgtaaatttgactttgtaacaatatgaatatttttatgattatacaccaaaataaaaaagtaa

SEQ ID NO: 449852 - DNA, 201 bp, Homo sapiens
caaataaggccacattctgaggaactgtgggtttggacttcaacatgtcttttttgggggccacaactcaacccataccagcttgcttgatggatattcayagctgatgtcaaagtaaatttaattctcatcctcagaagcaagaaagattccacgactaaggccaacaataacatccagggagttcgtttcttgagcaac

SEQ ID NO: 449853 - DNA, 201 bp, Homo sapiens
cactgtgcccaattctaggttcgggctgcaaaagacttgtagcttttatttgtttcttggggcatttgctcccggaatccagcagccatgctgtgaggaarcccaagcagccccacagagaggtccatgtcaaagagagtaagaccctcagcccagccagaaccaagctcctagtcaatggccaggactgactttccagct

SEQ ID NO: 449854 - DNA, 201 bp, Homo sapiens
atgtctctagtaatatggttgatgtccaggataacttaaatgagaccattaagtgacaatgtgacattcctatccaaggggaaaaacagctcttgcaaccrtaagtacacattgttctaacctgctttcttcataggattttgtgaatcaaggactgcaatggacagagaatgttttgcaaattcttagatatagggggat

SEQ ID NO: 449855 - DNA, 201 bp, Homo sapiens
aattaaaaaaattaaaaagttaaaatgcagtatttgaaaaaagaaaaaaagatatagtaccaaagacaaaataaaagaaaacaataaccctctatgcatamataaattcatctcagtattatttgcaatattgaaaaatggcaaacgacataatgcttaaccacatgggtattcttatgatgtatttaaaatgattttatg

SEQ ID NO: 449856 - DNA, 201 bp, Homo sapiens
caaagacaaaataaaagaaaacaataaccctctatgcatacataaattcatctcagtattatttgcaatattgaaaaatggcaaacgacataatgcttaascacatgggtattcttatgatgtatttaaaatgattttatgttttgtatcataaatgtagcatattattatgaagccattaaagcaatgttcatgaatggt

SEQ ID NO: 449857 - DNA, 201 bp, Homo sapiens
gtcacatgctgaggttctgggtagacaagaattttgggtgaatactattcaacctagtggatgaagtgaaaaaatagattttcaatatgtaaaattacttwtactacttcaatacaaagttaaaaatgatggctgtgtgcagtggctcacgcctgtaatcccagcactgtgggatgccaaggcaggtagatcacgaggtca

SEQ ID NO: 449858 - DNA, 201 bp, Homo sapiens
ttttgggtgaatactattcaacctagtggatgaagtgaaaaaatagattttcaatatgtaaaattacttttactacttcaatacaaagttaaaaatgatgkctgtgtgcagtggctcacgcctgtaatcccagcactgtgggatgccaaggcaggtagatcacgaggtcaggagttcgagaccagcctggccaatatggtg

SEQ ID NO: 449859 - DNA, 201 bp, Homo sapiens
tgcaaagaccctattttcaaaggttccattctgaggatccggtggacatgtgttttgaggaatactattcaacccaatacagctgtagagttagggggtaragtggaaaggagggcatggcagtggcttccaccggaagcacctgatctgccagggagagctggtgttcggattcaaaagacacagtctgagtcactggat

SEQ ID NO: 449860 - DNA, 201 bp, Homo sapiens; identical to SEQ ID NO: 394523

SEQ ID NO: 449861 - DNA, 201 bp, Homo sapiens
tgaaatccatgtgaatattctagtatcacttttgtataaagggtttgtcatgctactggctaacctttgtgaaagccagtgggggaaagtggaatcccaaktgtatacagaaaaaggaaatccttcagatcgctgagttggtccacttgctgccttatccaccaatcaatcacacaccaaactctagacctcttatgtttt

SEQ ID NO: 449862 - DNA, 201 bp, Homo sapiens
ggtttgtcatgctactggctaacctttgtgaaagccagtgggggaaagtggaatcccaagtgtatacagaaaaaggaaatccttcagatcgctgagttggyccacttgctgccttatccaccaatcaatcacacaccaaactctagacctcttatgttttgagggctgcaaggacttgagttcaagagcttctgttattaa

SEQ ID NO: 449863 - DNA, 201 bp, Homo sapiens
ctatttcccaccaaccttgagcaggcacttgccccctgttgtttgtttttgagcttcttgccgttgccccaaacatgacattttctgccacttttgaagaytccattatcaagccatttccaataatccaaaaataaggggctgagtgcgatctcaaaagcaccaatgttctttctgagaggactagcttggtgagtcctg

SEQ ID NO: 449864 - DNA, 201 bp, Homo sapiens
atcgctgagttggtccacttgctgccttatccaccaatcaatcacacaccaaactctagacctcttatgttttgagggctgcaaggacttgagttcaagarcttctgttattaactgagacaatatcattcctcccagttctgtcatcttaaaccgtctctctgtcaaacaaaacaaacacaaaaccctttagactcaagg

SEQ ID NO: 449865 - DNA, 201 bp, Homo sapiens
cctgaccagtgcttccttctgtacaggattgcaggatcctgggactggaaaggatcctgtgatcactctcctcacccagtctcttcatacggagggaagakcaaggttgtctcctgtgtggctttggtggcggtcaaatggggttctttttattggtgttgccagagtctgctggggagcagagcacacagagcatgctca

SEQ ID NO: 449866 - DNA, 201 bp, Homo sapiens
cttgagcaggcacttgccccctgttgtttgtttttgagcttcttgccgttgccccaaacatgacattttctgccacttttgaagattccattatcaagccrtttccaataatccaaaaataaggggctgagtgcgatctcaaaagcaccaatgttctttctgagaggactagcttggtgagtcctggctgatcttctgagt

SEQ ID NO: 449867 - DNA, 201 bp, Homo sapiens
aaaaaattttaaaagctgaaatgtgatatgaaattgatgccctaaattcttactctaactttgtttactagaatattagcattatggaatttagatgaaaraaaagttcttaaaattaagctagtcttatagtccatgtaatgcttgaattccctttaccgcgttttttaatatcttcatggtaaataattaactattttc

SEQ ID NO: 449868 - DNA, 201 bp, Homo sapiens
tatctatcatctatctatctgtctatcctactccctgccatggttggcccaagagcattttaaattatatagataatctttgctaatccttcctgcttttyccgataattgtaggggaaaatggccaaggaggggccttcagtggatacatacataaaataatttaaaatgttgacaaaaggtaaattcccatgatctaga

SEQ ID NO: 449869 - DNA, 201 bp, Homo sapiens
cccaaacatgacattttctgccacttttgaagattccattatcaagccatttccaataatccaaaaataaggggctgagtgcgatctcaaaagcaccaatkttctttctgagaggactagcttggtgagtcctggctgatcttctgagtgtgtttgcctctcgtcaggacagggaggaattggtgggtggctaaatcctgt

SEQ ID NO: 449870 - DNA, 201 bp, Homo sapiens
caaactccagactttatttcctggaatctgttttgtgagacactggcccatgaaatgctctcccagaaatagtcggatttgtggtcaaataaatttgggcwattctacagaacatgtgtctttttcagagatttatttttaattaaacttatttaaaaatattaacatggtacaatttgcatatagtgaagtgtgcaaatc

SEQ ID NO: 449871 - DNA, 201 bp, Homo sapiens
ccacacctggataatttttgtatttttagtagagatggggtttcagtatgttggccaggctggtctcgaactcctggcctcaagcagtgatccacttaccytggcctcccaaagtgctgagattacagatatgagccactgtacctggccaaaggataatcatttttaaaaaacaaatatatgctatgctggtaacagtgc

SEQ ID NO: 449872 - DNA, 201 bp, Homo sapiens
agtcattaaaaattcataacgcttaactatgggtgctactgaaattacaaatagttgttattttcttctttatgttgagtctaatagaaaactgctatttstatagattacaaaaagttaaatattggccctttaatttaacttacttttaaaaatattttctaaatattctacaggaatcatatgcctaaattcctcata

SEQ ID NO: 449873 - DNA, 201 bp, Homo sapiens
ctggtcaatagaaacagtcccggcccggggtcaccgggttggggaccctgtacttgctatggaacttccgagagtggctattactaaggcatatgcattgwtgttgtagcactcattgttatcataacttaacatcttccagaagctctaacaatattctccagtagtggtgctgaggctgaggctgaggccgggcatctt

SEQ ID NO: 449874 - DNA, 201 bp, Homo sapiens
gatctcactcttctcacctaggctggagtgcaatggtgcaatgttggctcactgcaacctccatctcccgggttcaagcaattctcctgcctcagcctccygagtagctgtgattacaggagcccgccaccacgcccagctaatttttgtattttttgtggagactgccgccacgcctggctaatttttgtatttttggta

SEQ ID NO: 449875 - DNA, 201 bp, Homo sapiens
agcaggctgaatagttataatattactagaaaacataatgcaacttataatggggcagaatctgtgattctaggcagtgcaagtatcactaaaatatattwttttcttctttagacactggaggtggtattaatattccaggtgtattatcaagtttaccgagtttaggtttttcattgcctacttggggcaaagttggac

SEQ ID NO: 449876 - DNA, 201 bp, Homo sapiens
cgcccagctaatttttgtattttttgtggagactgccgccacgcctggctaatttttgtatttttggtagagacggggttttgccatattggtcaggctgrtcttgaactcctgacctcaagtgatccgcccacttcgacctcccaaagtgctgggattacagtcatgagccattgagtcccgccctctttttcttttttt

SEQ ID NO: 449877 - DNA, 201 bp, Homo sapiens
gagactgccgccacgcctggctaatttttgtatttttggtagagacggggttttgccatattggtcaggctgatcttgaactcctgacctcaagtgatccrcccacttcgacctcccaaagtgctgggattacagtcatgagccattgagtcccgccctctttttctttttttcttctgcttttttttttttgcagttgaa

SEQ ID NO: 449878 - DNA, 201 bp, Homo sapiens
agggatattagagacattaaacaagcaacacctgaactgggttactaagaagttgtttactggcagaaataagtattgtgatggaaggtactgtagagtaytgaataattaaacacattgaaagaaacttggcctatgacgcctagccatagcaggctgaatagttataatattactagaaaacataatgcaacttataat

SEQ ID NO: 449879 - DNA, 201 bp, Homo sapiens
agaacatctcttcttggtattatggagtctgtatagtctcactcatcaaattcaatagtcacaaagtaataagtaaatacccctgggtgactgaaatatartaagtactatacagtctgtatttcaggtacctaggagttatttatttttctaatagttaacagtgaattctactttcctatgctgggaagtcatttgata

SEQ ID NO: 449880 - DNA, 201 bp, Homo sapiens
ctgagattctaaaataccttttggctacattctgtgaatgaatatggacaatcaccatgtggcaaaggttatcccttctccctctgacccctggcaattgygaagtttggagagaggacaccaccaagcagcagtctgaaaatatttctcctttgaggcctgacttagggcaagggaagaggaagaaaaatagaccctgat

SEQ ID NO: 449881 - DNA, 201 bp, Homo sapiens
aactttaatttcaaatatgataaatattggtagataaaacccacacaaatgaaaggtctttggagtcctcaatgcttttgaagagtgtaaaaggtactgaraccaaagtgtttgagaagtgctgatctggtcaaactatctcattcagtaagtacaacaaagagagccaaaaaaattcagtgacttgcccaaagtgatgac

SEQ ID NO: 449882 - DNA, 201 bp, Homo sapiens
tgtctttactggggccaatcctcaggttgttttagtcacacttgtgaaaacaagtactattttcatatgggttgtttgcagtatgaatgctgacctatgcragagtgttcttaataaaaaaataacttatctaagttattctggcacatgatttgggttagttatttctgtaaatattagattggaattcgatttaatttg

SEQ ID NO: 449883 - DNA, 201 bp, Homo sapiens
caggttgttttagtcacacttgtgaaaacaagtactattttcatatgggttgtttgcagtatgaatgctgacctatgcgagagtgttcttaataaaaaaawaacttatctaagttattctggcacatgatttgggttagttatttctgtaaatattagattggaattcgatttaatttgtaatgagaaacctatgttaagg

SEQ ID NO: 449884 - DNA, 201 bp, Homo sapiens
tttaagaataaaagatttttcaactaagtgtaggtaattcaagtctgctataatgaaatgaaagacaagttaaatctcaagtcctgttcagactaccccayagggatattcatgaacaatacccggcatatgtctttaattaaagcagcttgtctgatttcagttaaacttgaaatcagctttatgacagtgttccaactg

SEQ ID NO: 449885 - DNA, 201 bp, Homo sapiens
tggtgttacaggagtacttggcaagacagcagtttccccgggtacacccgctaggtgttttgtagcagagtgcatctgtgagacaactggtgaactgcttyccttgcaacctagagggcagatttctggcaagttccagagggtggattccaaacatgttcctctaatgtggatctgcagtgatgtctctgccattcagtg

SEQ ID NO: 449886 - DNA, 201 bp, Homo sapiens
ctgctataatgaaatgaaagacaagttaaatctcaagtcctgttcagactaccccatagggatattcatgaacaatacccggcatatgtctttaattaaarcagcttgtctgatttcagttaaacttgaaatcagctttatgacagtgttccaactgcatacacccttcaaatgctatcccctctcaaatccatatctgta

SEQ ID NO: 449887 - DNA, 201 bp, Homo sapiens
cgagcagccttgcttttctccacttggcacagtggtgagtcctccgatgtatctgctttcataggaagcttgggaccagccctgcccaaggagtgtgccayctgaccccttttcctgtcttctgtcacttttttttttccaagtgttgatatgagtttcagtctgccccttcctgggcctgtttgacctcctgggattcgg

SEQ ID NO: 449888 - DNA, 201 bp, Homo sapiens
gccctgtgattctgctagactcctctttcatacagagatgaaatgtggatgacatgtgagggtgttggcagaatggagtgttgagtaagttaagcaatctrttcttagtctgttgcctgactctacctgcttgtcggggactagaagtctttcctaacagaccttaatctattgctgtgtcgttttctgtaacactgggtt

SEQ ID NO: 449889 - DNA, 201 bp, Homo sapiens
tcctgtgaagaaccaccaggtaggtacaggaaggaatcactttggcagaaaaccgcaagacaacacacttctgactgtctttaggtttctaggtaattgcrgtttgcatgttcagacttacagcgcctctgaaccacgacgaaacattcttttcgtcaggcatccgtggccaggaacattgtctctggcaggcctctccca

SEQ ID NO: 449890 - DNA, 201 bp, Homo sapiens
aatttggattatagtaaccattaattcatagcttgctcttttcactttgcacattctgaagattatttctgttaacaaatacttgcccacagcatttttgyagtatttgtttgctagttttagatagatacttttaagtacagaaaagtgcacacgttacaggtgtgtagcttgatcaggtttcacaaaaagcacaaatgc

SEQ ID NO: 449891 - DNA, 201 bp, Homo sapiens
gtagctcacttcagggattgtataacccccctatggcatgcacttttctttcccacataattatttccccctggtttctgacttttatgaagcattttctrtgtaactttgctttcttgtgagcaacctcaccttcttcagagactctggcaggtgtacaaaaaagacccagataaaatctgagttaagatttcctagtag

SEQ ID NO: 449892 - DNA, 201 bp, Homo sapiens
ttctttcccacataattatttccccctggtttctgacttttatgaagcattttctatgtaactttgctttcttgtgagcaacctcaccttcttcagagacyctggcaggtgtacaaaaaagacccagataaaatctgagttaagatttcctagtagagacacagcctctttgggcttgggaaaataggtctcacaaaatgt

SEQ ID NO: 449893 - DNA, 201 bp, Homo sapiens
tggcaggtgtacaaaaaagacccagataaaatctgagttaagatttcctagtagagacacagcctctttgggcttgggaaaataggtctcacaaaatgtartttgaagcaaaacttaaaaaaaaaaagaaaaaaaaaaagaaaacttagaagcgagaggcatggtcatgtcttcaatgtgtttctctcttttcttctttag

SEQ ID NO: 449894 - DNA, 201 bp, Homo sapiens
tgagtaagttaagcaatctattcttagtctgttgcctgactctacctgcttgtcggggactagaagtctttcctaacagaccttaatctattgctgtgtcrttttctgtaacactgggttcacacttggcagtgactgcttttggtaaaatatgtaattttttataactggacgactcaatttctccttcatcctctgcta

SEQ ID NO: 449895 - DNA, 201 bp, Homo sapiens
agtctttcctaacagaccttaatctattgctgtgtcgttttctgtaacactgggttcacacttggcagtgactgcttttggtaaaatatgtaattttttayaactggacgactcaatttctccttcatcctctgctagagcctgacattccagatgactacttgtggagttgtgttaatcgaaccttaaaaattattaaat

SEQ ID NO: 449896 - DNA, 201 bp, Homo sapiens
tcaaaaaaaaaaaaaaaaattagtaaatgatttatttgacacttcataattctggattttggatcaatctgggaaggctgtgatttcattttggtttgtgyacagctgttgtacaacttgctactgaggcatatgtgtagggatttgctgagtctattgtagattattgcaaggggctgggtcccacagtgaaatggtgct

SEQ ID NO: 449897 - DNA, 201 bp, Homo sapiens
cctttccttttgagaatgtgagctcatgagggcaggagttttttctcagtgattagtgattgaaacgaatgtaataagcccatgatctgcatttggtcagkcattcagaggtgaggctacaccatctgcatcccttcatgatgcaggtgggctggcgggtggtgtaagacgatttcaaccagtgattctcaaatttgacca

SEQ ID NO: 449898 - DNA, 201 bp, Homo sapiens
gcctctttgggcttgggaaaataggtctcacaaaatgtaatttgaagcaaaacttaaaaaaaaaaagaaaaaaaaaaagaaaacttagaagcgagaggcayggtcatgtcttcaatgtgtttctctcttttcttctttagttatgggagagctgttcattcccagtgttaatcttgtagtcgctgagaatgaaccttgtga

SEQ ID NO: 449899 - DNA, 201 bp, Homo sapiens
gaggctgcccctgtccacactgagatgcgctgatccaatgtgtccacgggcacacaccagctgcggggggtggaggtggcggtgggcacagaagacttctraacggtagatgcttgtcagtgatgggttgttgcctgcttgctttattttcccggggccaggaagaacatatggaggtgcagggctgagggaaagctgtcc

SEQ ID NO: 449900 - DNA, 201 bp, Homo sapiens
tagttatgggagagctgttcattcccagtgttaatcttgtagtcgctgagaatgaaccttgtgaagttacttgtctaccctcacactggacccggctcccrgatatttcctgggagctcggtctcctggtcagccattcaagctattattttgttccggagcccagcgaccttcaaagtgcagtgagcatcctggctctga

SEQ ID NO: 449901 - DNA, 201 bp, Homo sapiens
acaccagctgcggggggtggaggtggcggtgggcacagaagacttctgaacggtagatgcttgtcagtgatgggttgttgcctgcttgctttattttcccrgggccaggaagaacatatggaggtgcagggctgagggaaagctgtcctgactgtgctggtcgtcctggcacgtagggatcgcctgagcttggtgggctgt

SEQ ID NO: 449902 - DNA, 201 bp, Homo sapiens
ggttgttgcctgcttgctttattttcccggggccaggaagaacatatggaggtgcagggctgagggaaagctgtcctgactgtgctggtcgtcctggcacrtagggatcgcctgagcttggtgggctgttcaccaacgtccacttggagtgtagggggaagacaagggccacaggaggccgctggaacacacaactgccag

SEQ ID NO: 449903 - DNA, 201 bp, Homo sapiens
ttagggactgactgtagggttaacaaaccacccttaatgtacatcttaggcatatggcactgtatgggcctatttcagccgtggttacaaaaaactcttcyaaaggtttggtgggcagtggatgaactctgggtctagtgtttctgagatactttttcctgaaaaagctgaggcaggctgggtgtggtggctcacgcctgt

SEQ ID NO: 449904 - DNA, 201 bp, Homo sapiens
ggcatatggcactgtatgggcctatttcagccgtggttacaaaaaactcttctaaaggtttggtgggcagtggatgaactctgggtctagtgtttctgagwtactttttcctgaaaaagctgaggcaggctgggtgtggtggctcacgcctgtaatcccagcactatgggaggctgaggcaggcagatcatgaggtcagga

SEQ ID NO: 449905 - DNA, 201 bp, Homo sapiens
atcctttagtttaacttggacaaaatgggcattctttgcttgtccatattgtccttctgttgcccagacttcaggactaattccttcctcaagcaggagaygacaaatgggtgttccttctcctatgttcaggtgtataatggcccctgcttttactagaatctctctctctaacaagggagtgaggctttcaggcataat

SEQ ID NO: 449906 - DNA, 201 bp, Homo sapiens
cggagaaagtctgtgctttcatccgggtcacacagccaaagtggcagagctgggcctagaagctgagaagagcttttcttttcgtgtctaaagcttttccsaccatgaaaacacctttacctgagatcttccaaagttcagaacaaagccatagccaaagccaaataatgatggtaacgataataaacagcaccctatagc

SEQ ID NO: 449907 - DNA, 201 bp, Homo sapiens
gaactagtgccttaacgatggtagctggaggcatggctgctggagagggaggctcagtgggtgcttgcaatgagtctagctttattggattcatttggaamagggtaatttgtttctaaattattcatcaagatccagtgcagctggtggctggctgcatgttgtgtgttttaggtaagttttattagctgaagacctcat

SEQ ID NO: 449908 - DNA, 201 bp, Homo sapiens
ctggaggcatggctgctggagagggaggctcagtgggtgcttgcaatgagtctagctttattggattcatttggaacagggtaatttgtttctaaattatycatcaagatccagtgcagctggtggctggctgcatgttgtgtgttttaggtaagttttattagctgaagacctcattgcagccttggttggcggagctgg

SEQ ID NO: 449909 - DNA, 201 bp, Homo sapiens
aacttagagcccagtagggaaaacaggcattaattgtgagcaaaagtaaatacaaaacaactactgtgacaattgtaacccccgaacaatcaggccagggsttagagactgcattgcaggccggtcactgcacatgtgagagccctgaggccagaaagagttgatgaggttgataaattaaaggaggtctggtgatcggag

SEQ ID NO: 449910 - DNA, 201 bp, Homo sapiens
tccccagtcccttagataagaatttgggcaagagaagaaaaagatcagccattggtccttagtgacaaccaaagctagtggccacagggaggttcttgggygggaggagacattgatctttcccagtgctctgccccccatctggctgtttgctctataaagcaaaagggagagcaaagaggaaagggaggttttaagtga

SEQ ID NO: 449911 - DNA, 201 bp, Homo sapiens
tggctcttaaacaggtggaactaaatgcctagctcaacacaggtaacacagtcagggaaagttggtgtttagggttggatgcctcctgtttcatctgaaartcaaatcaaggtcaagaagtttccatttggtgtagctccctcctccctccttttcatctcccagctgcagaatagggttatttggcctgcacagattgta

SEQ ID NO: 449912 - DNA, 201 bp, Homo sapiens
taaagcctttaccacacctggctcatagcaatcactgtatggccatttgctattatttattgtgctcccaataaaagcatgccattgtgttggttatttargagtgactcaaagaggaatagaataagacacagtttctttctttagaacctcacaagaagagtggataatgcaagttgcacaaataatagggatgccagc

SEQ ID NO: 449913 - DNA, 201 bp, Homo sapiens; identical to SEQ ID NO: 86560

SEQ ID NO: 449914 - DNA, 201 bp, Homo sapiens
ggttgatttcatcttgagatccttacctaattacatctgcaaagaccctattttcaaaggttccattctgaggatccggtggacatgtgttttgaggaatrctattcaacccaatacagctgtagagttagggggtagagtggaaaggagggcatggcagtggcttccaccggaagcacctgatctgccagggagagctgg

SEQ ID NO: 449915 - DNA, 201 bp, Homo sapiens
tcaaaaggtttctttagagaaaaacatactgggagggctgacattcatttcagatctgttttttagaaattgattttcttaactacagaaatgatacaaayctcgagcattgcagacgtatccaaaactggagagtgaggccgtctcaccctgtcttgggagaagcactgtcagagccatctgcccctcggggtggttttc

SEQ ID NO: 449916 - DNA, 201 bp, Homo sapiens
ctttataaatatgctgaggctcagcctcctcctgggggttttgtttcattggtttttgtggagcctgggaattgcaattgtaaaaaaagttcccaagttaytctaatgggcagccaggattgggggctactgaactgaaaaaaaaaatctctaaggcctagccttcccctccagcccgatcaagtgctatgtctacacaga

SEQ ID NO: 449917 - DNA, 201 bp, Homo sapiens
atataaaatatatattatatatgataaattttaaatggttatgaaaataagaaaggtctatctttgtagccccagcactaaatcatgcctcttgctgactygtacactacactttgagctccagtggattaaagggagacttcagcttaagtctcacccaggcataaaacttggaacatttgccttccaatggagcatggt

SEQ ID NO: 449918 - DNA, 201 bp, Homo sapiens
aaaatgtttatgccttatgcatatgggagccaacaaaggaagtagctggctcattaatagagttaaagagttaaaaggcttatatatctaacgttgtaggrgaggagaagtggggagaaaggcttcctatagaaagaacaaataggtttcttttggaaagacaaataggttttttttttttttttgaaacagaatctcacc

SEQ ID NO: 449919 - DNA, 201 bp, Homo sapiens
gttctagaagtttttatttaccttcaatgtgactgtgaagtccttaccatgactcacaagatgacctctggctcctgaatgcccctgcaactccccaccaygccctgcctttcacccctgggccagcacacggtccttgcactttcctccaggcagcccagccccttcagccccgtcagtgtcacgtgtttccccaggacc

SEQ ID NO: 449920 - DNA, 201 bp, Homo sapiens
gtcagaaacaaagccttcctactcatgtctctgtaattttagctgtttctagatattgaatgccacaataaatagcacgtaagatgttacattgaaaaacraaaccttggccaggcgcggtggctcacgcctgtaatcccagcacttgggaggccgaggcgggcggatcacctgaggtcagaagttcgagaccagcctggc

SEQ ID NO: 449921 - DNA, 201 bp, Homo sapiens
aggcataaaacttggaacatttgccttccaatggagcatggtcacaacaaataggaagtgaaagaataagtgatgtggttcctaataccagttccattttkgtcagagtttgggtcttttaactgaatgcaggcatcactttctgaactttgtggttaaattaagggacaaaagagtgtttaaagtccctctggccctcag

SEQ ID NO: 449922 - DNA, 201 bp, Homo sapiens
atggcagtctctcaagagtgggcatgcctgcgggacccgtgttgatatttggatttggatttttgcttgtttgtagattttggggtcatcttttgttagtsttgggaggtagctgtgtgtggtgaaatccgtggatttttcccacagctagaggaaataggaggttgagggcaagatgtgccatggagagtgaaggtgtgt

SEQ ID NO: 449923 - DNA, 201 bp, Homo sapiens
gacaaaagagtgtttaaagtccctctggccctcagtctctcccttgactcagtcaccattcccagcaaagtgtcccttcccttctgttaaacatgcattcyctgaaaataaggcaggccctctctgtcctagattaaggcaggctctctctgggctagattagaggaaatgttatgtccagattcaggaagtttggcacac

SEQ ID NO: 449924 - DNA, 201 bp, Homo sapiens
aaaagagtgtttaaagtccctctggccctcagtctctcccttgactcagtcaccattcccagcaaagtgtcccttcccttctgttaaacatgcattctctraaaataaggcaggccctctctgtcctagattaaggcaggctctctctgggctagattagaggaaatgttatgtccagattcaggaagtttggcacactcg

SEQ ID NO: 449925 - DNA, 201 bp, Homo sapiens
ttaaggacgccaaaggagaaataaaccgtgacatcagccattccctctacatggcctgatgactttctctagccatacagcataatgatcgaacaaagaartgccctcattgtcatgaggtccttatgcaattgtgctatcctgtgaagaaccaccaggtaggtacaggaaggaatcactttggcagaaaaccgcaagaca

SEQ ID NO: 449926 - DNA, 201 bp, Homo sapiens
gttatttttcctgcttctctccctcctcccaccctccaccctcagatagaccccagtgtgtgttgttcccctctatgtatccttgtgttctcatcattcarctcccacttataagtgagaacatgcggtatttggttttctgttcctacgttagtttgctaaggataatgacctccagctccatccacgtccttgcaaagg

SEQ ID NO: 449927 - DNA, 201 bp, Homo sapiens
tgttgttggcaggacttagttctgtattagttgtctctctctaccagagagagacagcaccagcaggagatgtatttctatccatatctgtatttgtagcyctacctcgatgtctttattgcaaggaattggcttgtgcaattatagttattggcctgacaggtctgaaacccacagggcaggccatcaggaagggcaggc

SEQ ID NO: 449928 - DNA, 201 bp, Homo sapiens
accccagtgtgtgttgttcccctctatgtatccttgtgttctcatcattcaactcccacttataagtgagaacatgcggtatttggttttctgttcctacrttagtttgctaaggataatgacctccagctccatccacgtccttgcaaaggagatgattttgttctttttttacctactaacttttacattcattgataa

SEQ ID NO: 449929 - DNA, 201 bp, Homo sapiens
ctatgtgtcatctatctatctgcctaccaatctatctaatctgtcttgtcatctatcatctatgtattaatctattacgcattttgtactggtcagatgcwaggctttatttgagcctacagtcatgcaccatgtaacaatgttttgatcacgatgaactgcctatatgatggtggttccataagattataatgtagctga

SEQ ID NO: 449930 - DNA, 201 bp, Homo sapiens
tagagattttgagaactaacatggccttcagttgaaaaccagaattaggagctctgagtatcgtgcaggtgcagtgagattcatttgaaaaacaaaacaaycggaatttttatatctaattttgaacatcatccccacatccttaatagaagacatcggagccagaagtcgtttgggaccaagttgggtaaacagagtggc

SEQ ID NO: 449931 - DNA, 201 bp, Homo sapiens; identical to SEQ ID NO: 86557

SEQ ID NO: 449932 - DNA, 201 bp, Homo sapiens
tggaactgtcttgattttattactgttagtctctcattactccactcccttattatagtaaatgattctttgtatttgactttccctggtcaaggtactawgtggtttttctctcctgtttggatctagattgatacaataattttttgcaattatgagcaatgctgctgtgaacattcttgatcatgtcttagtggacat

SEQ ID NO: 449933 - DNA, 201 bp, Homo sapiens
caatgctgctgtgaacattcttgatcatgtcttagtggacataagcaataattgctgctgggtctgtgtgcaggaatgatttgctagatcatagcacataygtttatctgtagcagaaactgccaaggtatatacagctttccaaagtgtgttaatttacatgcctgctagcaaggtaggagaaatacagttgcttcccaa

SEQ ID NO: 449934 - DNA, 201 bp, Homo sapiens
atacaattaataaaaataattacgtgtttctttagaatgaaattctctgagatactcccacatcgtatgaaagcagtagccttgcttgcggttgggatcartggtgaggtgggcacataaacactaggtgggcttgtcgtagcattaggcagtttgtggcttcagaagcctacggatgctttatcatgagaatgctccagg

SEQ ID NO: 449935 - DNA, 201 bp, Homo sapiens
tagttcctcgatgaatttggtttgtgattgggcaattcactctgtagtataacttaaaaaaatttcagacacgtgaatattttcttatattctcttccttcttacatgaagggcagtacactatagatattcttttgcattttactttttttcccttacagtatatcctggaaatcaatccatgtcagttcattgagattt

SEQ ID NO: 449936 - DNA, 201 bp, Homo sapiens
tctatctatctgtctatcctactccctgccatggttggcccaagagcattttaaattatatagataatctttgctaatccttcctgcttttcccgataatkgtaggggaaaatggccaaggaggggccttcagtggatacatacataaaataatttaaaatgttgacaaaaggtaaattcccatgatctagagacagagtg

SEQ ID NO: 449937 - DNA, 201 bp, Homo sapiens
tctatcctactccctgccatggttggcccaagagcattttaaattatatagataatctttgctaatccttcctgcttttcccgataattgtaggggaaaakggccaaggaggggccttcagtggatacatacataaaataatttaaaatgttgacaaaaggtaaattcccatgatctagagacagagtggttcttaatcta

SEQ ID NO: 449938 - DNA, 201 bp, Homo sapiens
acaaatctcttccttctccacttccttacagcatgtgttaaaatttttttttttttagtatttaaaaaatagaggcagggtgtcactatgttgccttggcwggtctcaaactcctggggtcaagtgatcctcctgcctcccaaagtgctgggattacaagcatgagccatcacacctggccaaacacagcacattgctaat

SEQ ID NO: 449939 - DNA, 201 bp, Homo sapiens
gtcctgaaggaagatcctcctaggtctggtcggacctttgtatggtaattaagatgtaaatcccctgttagaaaatctgctgggttaagggaattatcagyggttggagttacattacttttttctaacataatggccccatactttaagatttttgagttagtaagctacctttttgcttttttgacttagactaattct

SEQ ID NO: 449940 - DNA, 201 bp, Homo sapiens
tcattcccagtgttaatcttgtagtcgctgagaatgaaccttgtgaagttacttgtctaccctcacactggacccggctcccggatatttcctgggagctyggtctcctggtcagccattcaagctattattttgttccggagcccagcgaccttcaaagtgcagtgagcatcctggctctgaccccacagagcaatggga

SEQ ID NO: 449941 - DNA, 201 bp, Homo sapiens
gtatataacggtctggctattttgccgtacctgggaatccatattcggcagaaacctgttatgccaaggaaccctcttagttgctttagggttttgggatraggataagccagtataggctggatacgttcctcactgagggccctggtgactttggataattttagccctaagcatttaacctgctgtgagcagagctga

SEQ ID NO: 449942 - DNA, 201 bp, Homo sapiens
tttaggaaatgaagcacccttgctgaagccctccaaagggtttacctgtcatctggggtaagacaactccagtttgtggctcccctgtgacaggtgtttgycaagtgagtttctccatagggcccctcaagccccgcacaggccgttatctgggtttcccaggaaagtgctggacatttgcacacatgatcttcgctttcc

SEQ ID NO: 449943 - DNA, 201 bp, Homo sapiens
gtgttcatctcctagcacttgagggtggggggttggagctctgccctatccaccagtcctccagcaaatgccatggaagccacacttactcctaatggctrtctcatccagaggacgcaccctcgggacttttttctttcttaagaggatttgttcttgtggatgtcaaggtgcctggctgggagaaggagccagttccac

SEQ ID NO: 449944 - DNA, 201 bp, Homo sapiens
aaaggagggcatggcagtggcttccaccggaagcacctgatctgccagggagagctggtgttcggattcaaaagacacagtctgagtcactggatggacamcctgggggttaccactggtaaatacagaaaggttacagcacacagttgatttatggagatccattcatttaacaacttgaaaaattggctaccttccagg

SEQ ID NO: 449945 - DNA, 201 bp, Homo sapiens
tagagacagggtttcaccatattggccaggctggtctggaactcctgacctcatgatctgcctaccttggcctctcaagagaacgagatcttataaggacmtgagtcccattacgagggctccattttgaggaccttatgacctttcaaaggcttcatctctaaataccatgacattgggagtgagggcttcaacatagca

SEQ ID NO: 449946 - DNA, 201 bp, Homo sapiens
acggtggcaaattcttggagaagaaaaggactttcttaaggaaggaagctgtttctttggggcctgatgcaaccccttaggaagaccaagatcttcatgctcttgaaaaagtgattgaagcagtgcctttctcaccaaagacactgattattggatttttgtgcttatttgtaaggatatatagctattataatgtcattt

SEQ ID NO: 449947 - DNA, 201 bp, Homo sapiens
tgtgtgtgtgccaggcactgtgctaactcttttacatggagtatctcactaaaatgcatggactagccttaactaaactaaaggtctagtcttagttcctygatgaatttggtttgtgattgggcaattcactctgtagtataacttaaaaaaatttcagacacgtgaatattttcttatattctcttccttcttacatga

SEQ ID NO: 449948 - DNA, 201 bp, Homo sapiens
ggagaggagaagtggggagaaaggcttcctatagaaagaacaaataggtttcttttggaaagacaaataggttttttttttttttttgaaacagaatctcrccatgtcacccaggctggagtgcagtggcacgatctccactcactgcaacctccgcctcctgggctcaagtgattctcctgcctcagcctcccgagtagc

SEQ ID NO: 449949 - DNA, 201 bp, Homo sapiens
tcggctcactgcaacctccacctcctgggttcaaacaattctcctgcctcagccactggagtagctgggactacaggcacgtgccatcacatccggctaakttttgtgttattagtagagacagggtttcaccatattggccaggctggtctggaactcctgacctcatgatctgcctaccttggcctctcaagagaacga

SEQ ID NO: 449950 - DNA, 201 bp, Homo sapiens
gtccctcccacaacaggtgggaattatgggaggacaattcaagatgagatttgggtggggacacagccaaaccatatcacctggccacatggcctggggggttccaggaacctggaagtggacttaactgtaatatcaaagaagaagctcctctgccaacactgacttagcagaactgtttaatgaattaattacttagga

SEQ ID NO: 449951 - DNA, 201 bp, Homo sapiens
cccaataattcaactcagaagggtcttccaaagaagttggtctcccagcatgctctgggttctgtttgcttgctgatggaacacagttaacagttaacacagctcacgggactcgtgatgcttgcgtgctgtgaataataagacactttcggaatgggggctcagcacactgtcagggctctcagagtttgccattgttat

SEQ ID NO: 449952 - DNA, 201 bp, Homo sapiens
acccaataattcaactcagaagggtcttccaaagaagttggtctcccagcatgctctgggttctgtttgcttgctgatggaacacagttaacagttaacayagctcacgggactcgtgatgcttgcgtgctgtgaataataagacactttcggaatgggggctcagcacactgtcagggctctcagagtttgccattgtta

SEQ ID NO: 449953 - DNA, 201 bp, Homo sapiens
aacccaataattcaactcagaagggtcttccaaagaagttggtctcccagcatgctctgggttctgtttgcttgctgatggaacacagttaacagttaacacagctcacgggactcgtgatgcttgcgtgctgtgaataataagacactttcggaatgggggctcagcacactgtcagggctctcagagtttgccattgtt

SEQ ID NO: 449954 - DNA, 201 bp, Homo sapiens
aaacccaataattcaactcagaagggtcttccaaagaagttggtctcccagcatgctctgggttctgtttgcttgctgatggaacacagttaacagttaacacagctcacgggactcgtgatgcttgcgtgctgtgaataataagacactttcggaatgggggctcagcacactgtcagggctctcagagtttgccattgt

SEQ ID NO: 449955 - DNA, 201 bp, Homo sapiens
aaaacccaataattcaactcagaagggtcttccaaagaagttggtctcccagcatgctctgggttctgtttgcttgctgatggaacacagttaacagttaacacagctcacgggactcgtgatgcttgcgtgctgtgaataataagacactttcggaatgggggctcagcacactgtcagggctctcagagtttgccattg

SEQ ID NO: 449956 - DNA, 201 bp, Homo sapiens
ctaaaacccaataattcaactcagaagggtcttccaaagaagttggtctcccagcatgctctgggttctgtttgcttgctgatggaacacagttaacagttaacacagctcacgggactcgtgatgcttgcgtgctgtgaataataagacactttcggaatgggggctcagcacactgtcagggctctcagagtttgccat

SEQ ID NO: 449957 - DNA, 201 bp, Homo sapiens
tactaaaacccaataattcaactcagaagggtcttccaaagaagttggtctcccagcatgctctgggttctgtttgcttgctgatggaacacagttaacagttaacacagctcacgggactcgtgatgcttgcgtgctgtgaataataagacactttcggaatgggggctcagcacactgtcagggctctcagagtttgcc

SEQ ID NO: 449958 - DNA, 201 bp, Homo sapiens
ctgaaaacaaaacaaaaaaaattgaacaacaacaataataacaacaatacgtacacacaactgcgggatttttggatttatgttatccagaattaagtacyggaggtagacaatgctgaaaaacacgtatgccgatcacaaactcatagggcaacatgaactgtgggatgaaacagatgggttgccactgcctacctttga

SEQ ID NO: 449959 - DNA, 201 bp, Homo sapiens
acccctcggatagtgacagatctggaggacagttgtccgggacaggagagtaagactgagaaggccgcaccggcgtccaggagacagttaacctcttggcyctcaatggtcaagcatacctggggctctgtgagggtgatggcatgggctggcgcttgccctgggcaccctcagccctgctgctggatcatctggttagtg

SEQ ID NO: 449960 - DNA, 201 bp, Homo sapiens
tctactgtgactgtggcagaagccacttggcccccgtggtgccagaacccctggtattggactgactccagctcttcttccacagctcctgatgtggcctmactctcgtcctaccacctgctgtcccctctgctggatcaccccattagcacacagacacgctgccattttccacctgaccagaaatggccaccaccttcc

SEQ ID NO: 449961 - DNA, 201 bp, Homo sapiens
tgtttcacgcgacttgaatgtaacctttgtgtgggccgtgggtctttctctgtttccttcactgacgcaccttggattcttagcatggtcccagcacatartagatgctcaataaacatttgttgagtggaactgaatgtattggtatggtaggtgggttttagaagggaatgggtgaaccaggactgaaaaaaaagaaat

SEQ ID NO: 449962 - DNA, 201 bp, Homo sapiens
ttcacgcgacttgaatgtaacctttgtgtgggccgtgggtctttctctgtttccttcactgacgcaccttggattcttagcatggtcccagcacatagtaratgctcaataaacatttgttgagtggaactgaatgtattggtatggtaggtgggttttagaagggaatgggtgaaccaggactgaaaaaaaagaaatatt

SEQ ID NO: 449963 - DNA, 201 bp, Homo sapiens
aatttcagacacgtgaatattttcttatattctcttccttcttacatgaagggcagtacactatagatattcttttgcattttactttttttcccttacartatatcctggaaatcaatccatgtcagttcattgagatttccttcctttcttattacagctatatggttatccattgtgtagatgtaccatggtttattc

SEQ ID NO: 449964 - DNA, 201 bp, Homo sapiens
aggtatgggtcagaaggaaaggtaagggcgcatgcgtgggcgactgttgagtagagacttctggctgagccatgatctcaatcagctactgctgggaggtygggacgacagctttctgcctctagttggcccttggtttccccaagaaaattgaaagtggaagctggctccaggcagaccaatgtccccaacaaccccaga

SEQ ID NO: 449965 - DNA, 201 bp, Homo sapiens
gacgcagcgtagggcttccttagatccctttggagatacaacctgctagaggaaatgaaagtctgaaccattagtacctaggaggcagggatcagaggaartagattcagaggtaaggagaattttggggctatactttcaagaaagtcgtgttcgggacccaggaggtatgggtcagaaggaaaggtaagggcgcatgcg

SEQ ID NO: 449966 - DNA, 201 bp, Homo sapiens
ctaaattaggagggacgccagggataagactccctgggctatagcctaggtgcctgaggacgcagcgtagggcttccttagatccctttggagatacaacytgctagaggaaatgaaagtctgaaccattagtacctaggaggcagggatcagaggaagtagattcagaggtaaggagaattttggggctatactttcaag

SEQ ID NO: 449967 - DNA, 201 bp, Homo sapiens
tacattcagcagctgatgcattagtctgttttcatgctgctgataaggacatacccaaggctgggaagaaacagaggtttaatggactcacagttccaggkggctggggaggcctcataatcatgacagaaggcaaaggcacctctttcatggcagtagcaagaaagaatgagagaagtgaaagcggaaaccctttttaaa

SEQ ID NO: 449968 - DNA, 201 bp, Homo sapiens
gcataactgctcatgtcaagagctgtatacctaaattaggagggacgccagggataagactccctgggctatagcctaggtgcctgaggacgcagcgtagrgcttccttagatccctttggagatacaacctgctagaggaaatgaaagtctgaaccattagtacctaggaggcagggatcagaggaagtagattcagagg

SEQ ID NO: 449969 - DNA, 201 bp, Homo sapiens
ctctctctcttcatctctctctctctctctccatctctctctctccgtgtctctctcttagccattacaaacttggggccctggcaagggtggtggggaaygggtcctgcataactgctcatgtcaagagctgtatacctaaattaggagggacgccagggataagactccctgggctatagcctaggtgcctgaggacgc

SEQ ID NO: 449970 - DNA, 201 bp, Homo sapiens
tcaggaggccctacatgcgtctctcggggagccacaagagtgggggccagctgctttaccctgtagtccttgccatttggagaaggcctctcagtaggagragagaaggacaccaagcagggaggcgagaggtgtgggtgatggcagagggggtcccactggtgtctggtccccagttcccgtcgctgaggcccccggaac

SEQ ID NO: 449971 - DNA, 201 bp, Homo sapiens
tttctttttctttcttttactctttgacttccttggaatccgtgaggccaagaacctgcctctctgtctctctctctctcttcatctctctctctctctcyccatctctctctctccgtgtctctctcttagccattacaaacttggggccctggcaagggtggtggggaatgggtcctgcataactgctcatgtcaagag

SEQ ID NO: 449972 - DNA, 201 bp, Homo sapiens
aattctgaactggtgaggtgtgctcacagcgaagtttcctctaaaagttacttttctacttttagcaaagcagttgccgctaccaactgaatgcatttggytcatccgtgggttactgggttaaggattttagacaggaaggctatgggttgtcagtggcctcagtgctttcgggctacgcccttatttacactgacaaca

SEQ ID NO: 449973 - DNA, 201 bp, Homo sapiens
aatctgctgggttaagggaattatcagcggttggagttacattacttttttctaacataatggccccatactttaagatttttgagttagtaagctacctytttgcttttttgacttagactaattctgaactggtgaggtgtgctcacagcgaagtttcctctaaaagttacttttctacttttagcaaagcagttgccg

SEQ ID NO: 449974 - DNA, 201 bp, Homo sapiens
acagctcgcacatttgaggagaccaattattaggcaatttttctaactctgcttccacaagagtctccgtatcaattactgaatacccattgtgttttttwcctcaatcacctgggaggaaccatctatcatcctgtcctgaaggaagatcctcctaggtctggtcggacctttgtatggtaattaagatgtaaatcccct

SEQ ID NO: 449975 - DNA, 201 bp, Homo sapiens
ctagaagtccaaggttaaggtgccagcagagtcagcgtcttggtgagggctctcttcctggcttgcaggtggcttcctttttgctgtgtcttcacatgacytttccttgaagtgtgcaagtgaagagaaaacaagatctttttttttttttttttttttttttttttttttttttgagacagcgtctctctctgtcaccca

SEQ ID NO: 449976 - DNA, 201 bp, Homo sapiens
acctgttttcccgcctttcttgaccacaaagaaaggggtccgggctgctggattctagtggtcctttaccagcgtgcccaacattgcctttgcgctcaggrgtgagtcctagagctgggctgggttcctgagtatttcataacaacccagctgccccatcaagatgcattcccataaacaacagtttttatgcaaattcgt

SEQ ID NO: 449977 - DNA, 201 bp, Homo sapiens
accaggtccctcccacaacaggtgggaattatgggaggacaattcaagatgagatttgggtggggacacagccaaaccatatcacctggccacatggcctrgggggttccaggaacctggaagtggacttaactgtaatatcaaagaagaagctcctctgccaacactgacttagcagaactgtttaatgaattaattact

SEQ ID NO: 449978 - DNA, 201 bp, Homo sapiens
cagtctgtgcgcctgtcctccagcccgacacctggccagtcctgtctcatctacactgtcatgcaaactcttgtttttgtttgtttgtttttgagacagartctcactctgtcacctaggctgaagtgcagtggtgcagtcttggatcactgcaacctccacctcctgggttcttgtgcctcagcctcccgagtagctagg

SEQ ID NO: 449979 - DNA, 201 bp, Homo sapiens
agacccacccggtaaggaggtaactgggacaccaggttactgtctacctggtggggaagctggggaaaagggcccatgggaggatactaactggggaagargagaccttgcttccagggctgggcgacccacttacggaggccccattccatttacatctccgctcaagcctccgcctccgggttccagccctggctctgc

SEQ ID NO: 449980 - DNA, 201 bp, Homo sapiens
gctagctgtggccccaggtggtcattctctctgcacctcagtctctgcatctctataaaatgggatgataatagtgttcacctcagaaggttgtcagaggygtggaaattaagataattcacattgagttcttggcacggctgtgcctagcactgggtgcaggctgaatgcatgggctgctatcgcgatgttgtatctaat

SEQ ID NO: 449981 - DNA, 201 bp, Homo sapiens
gcactggcctctggtgagggccttcatgctgtgtcattgtgggcaaaagagcaaaacttgctttgataaaatcactcttggcaataactgaccctcctctyataataacattaattcattcatgacagcagaaccctcctgacccagtcacctcttaaaaggtcccacctctcaacgctgttgcactggggattaagtttc

SEQ ID NO: 449982 - DNA, 201 bp, Homo sapiens
aaaatcttctcttccagacttttgaaaacacagcaccttatagttaaccatattcactttacagtgctgcagaacactgaaacttttcctcttatctagcygtaactttgtgttcattaaccaagctgtccctagcttcccccgactacctccccttcccagcctctgatccccacaattataatctctgcttcaatgtgc

SEQ ID NO: 449983 - DNA, 201 bp, Homo sapiens
caggttaggtacaatggctcatgcctgtagtcccaacattttgggagaccaaagcaggaggattgcttgaggccagaagttcaagactagcctgggcaacrtagtgagaccctttctctgagaaaaaaaagtgataatggacatccttgtcttcaccttcaccttaatgggaatgcttttaagtttcactatcaaatatgt

SEQ ID NO: 449984 - DNA, 201 bp, Homo sapiens
tccagggtgcgtaaccacccatggacctctgcttatcggattagttacactcaccgatgtagcagtcctgcacctgttttcccgcctttcttgaccacaargaaaggggtccgggctgctggattctagtggtcctttaccagcgtgcccaacattgcctttgcgctcaggggtgagtcctagagctgggctgggttcctg

SEQ ID NO: 449985 - DNA, 201 bp, Homo sapiens
tcctaatgcttattcctttccagggtgcgtaaccacccatggacctctgcttatcggattagttacactcaccgatgtagcagtcctgcacctgttttccygcctttcttgaccacaaagaaaggggtccgggctgctggattctagtggtcctttaccagcgtgcccaacattgcctttgcgctcaggggtgagtcctag

SEQ ID NO: 449986 - DNA, 201 bp, Homo sapiens
ctagagtgtcctctgtggtcctaatgcttattcctttccagggtgcgtaaccacccatggacctctgcttatcggattagttacactcaccgatgtagcastcctgcacctgttttcccgcctttcttgaccacaaagaaaggggtccgggctgctggattctagtggtcctttaccagcgtgcccaacattgcctttgcg

SEQ ID NO: 449987 - DNA, 201 bp, Homo sapiens
aaaaggaacatagggatgccagcatccctagtcattttccgatgagcattagtcctagagtgtcctctgtggtcctaatgcttattcctttccagggtgcrtaaccacccatggacctctgcttatcggattagttacactcaccgatgtagcagtcctgcacctgttttcccgcctttcttgaccacaaagaaaggggtc

SEQ ID NO: 449988 - DNA, 201 bp, Homo sapiens
ctaattctccagaatacatcttaggggcaattttgccttggggggaacgtttcccatctgaaaaaggaacatagggatgccagcatccctagtcattttcygatgagcattagtcctagagtgtcctctgtggtcctaatgcttattcctttccagggtgcgtaaccacccatggacctctgcttatcggattagttacac

SEQ ID NO: 449989 - DNA, 201 bp, Homo sapiens
cctcccgctgcttggagggggcataatcggggaatattggcactctttggttcattgtttacccctttgtctatctccttttggaccatttgggctgaagmgggggttcttattagttggggaaggagtcagggggatgttggggtagggaggtagattctgagggcttcctgtagggcataagtcatactttttgcataa

SEQ ID NO: 449990 - DNA, 201 bp, Homo sapiens
ctggtgttcggattcaaaagacacagtctgagtcactggatggacaccctgggggttaccactggtaaatacagaaaggttacagcacacagttgatttayggagatccattcatttaacaacttgaaaaattggctaccttccaggttctgggtctggtaatgaagtcatagaaggcccccagaatgcaacagtcctgaa

SEQ ID NO: 449991 - DNA, 201 bp, Homo sapiens
attagttggccttcactagagtcaggtgacagggaggtatgcttcctcaatgcctcccttagtctctccagaaaggcagtaggattttcttcctttccctrtgctatagtgtacatcattgaataattcacagccttcttcctagttttccttagtccttctagcacacacgtgagcaaatgtctgcggcaccaatctcca

SEQ ID NO: 449992 - DNA, 201 bp, Homo sapiens
taagccctattaggcattcgatttgcccagcttttcccttttacagagcctccaaagtccacttgcctgagggccatgactaaagtgatggccttttttttatcctgtttgtcctgttctgcctgctcctcctgatctctattataaaaaagcgaggttgccaagttcaatagggtttctaagttttgctccaggcctaag

SEQ ID NO: 449993 - DNA, 201 bp, Homo sapiens
ggcaggtgacctacagcccttggactgtgtcactctagggaacctctgctcagtcagccgttcagtttacaaaccttagattaagacctttgaaaacaagwtgaatggtaaggaagttttctcccagcaacaatgcaataaactgaaattaaaatagataatctaacatcttatgtttgtgtactgttaatgatttacaaa

SEQ ID NO: 449994 - DNA, 201 bp, Homo sapiens
ccttgtagaccgcactggaagtaagccctattaggcattcgatttgcccagcttttcccttttacagagcctccaaagtccacttgcctgagggccatgastaaagtgatggccttttttttatcctgtttgtcctgttctgcctgctcctcctgatctctattataaaaaagcgaggttgccaagttcaatagggtttct

SEQ ID NO: 449995 - DNA, 201 bp, Homo sapiens
tggaaaaacatttaggctacttggttaagtggtcatattagcctcccagggctgcctgggaagagctccacaattagaaagcttaaaacaacagaaatgcmctctgccacagtactgggggtcagaagtcttgatttcagaagtctgatattgaagtattggcagagccatgttccctttgacggctctagggatgaatct

SEQ ID NO: 449996 - DNA, 201 bp, Homo sapiens
aatctccccatctcaaggtcagatgattagcaaccttaatttccctttgccatgtaatctaacatattcacaaagtctaggaattagggtgtagatatctktggcggatggaattattctgcctgctacattatatgttaggcattttccacaatagaatgtagaaaacaatatacaaaagttacctgaggaaaagcacac

SEQ ID NO: 449997 - DNA, 201 bp, Homo sapiens
gaggtggaatcctttagtttaacttggacaaaatgggcattctttgcttgtccatattgtccttctgttgcccagacttcaggactaattccttcctcaarcaggagacgacaaatgggtgttccttctcctatgttcaggtgtataatggcccctgcttttactagaatctctctctctaacaagggagtgaggctttca

SEQ ID NO: 449998 - DNA, 201 bp, Homo sapiens
ttatggattaagacagaaagaaagcaacattgtgggcaattgcaatttatggctgtttcttattttctgattacaacacaaatactctgataaaacatttrtaagtggggaaattaaacacattctagatatttgataacatcacagaattattgttaaattttagatgtgatagttgtattatggctgtgtttaaaagag

SEQ ID NO: 449999 - DNA, 201 bp, Homo sapiens
gaagagagacaaccagatactaaaggctttctgatagaattgcatgataccacctgcattagtccgttttcatgctgctgataaagacatacctgaaactsgcaatttataaaagaaagaggtttaattgagcttacagttccacatcgctggggaagcctcacaatcatggtggaaggcaaggaggagcaaatcatgtct

SEQ ID NO: 450000 - DNA, 201 bp, Homo sapiens
tttaaatatgagcagaaaaacgaactccatagccaaatgcaacattttgtgtcatactgctttacatcatctattctacctccattcactggtcaaagaarcgcagagttaagttggccagtgtggcgtggacacagccaggcgcagaccctcctgccagcgaagccagcgtgaggtctgttggctcaggggtccagtccc

SEQ ID NO: 450001 - DNA, 201 bp, Homo sapiens
tgagatattttgatataaagggagctatcttttaatagctgtattgaagataataaataaaaaaggagtgatagaatatcaccagcttgcaactattaatrcaaataggggaacaaattaataattataaatggttgctaatattattgaagagagacaaccagatactaaaggctttctgatagaattgcatgataccac

SEQ ID NO: 450002 - DNA, 201 bp, Homo sapiens
actcctttcagggatcttgtctgtggtggtagagttgatgtggtcattcctagacaattatatctgtaatgtgaaatgaagcaagtgagtaattacattgrgaaccagaatgttcagtgttgctgagaggagatgcgaatgtaagatctatgaggttaaataaacactctgttgctccgaacttgatttggcaatatcaag

SEQ ID NO: 450003 - DNA, 201 bp, Homo sapiens
tacaaaatataaatggatttccagattgattatactaacttagccccacaaacagtatatgagaggtctcgttgctttaaatattccatagcactggtatkcccagttccgtagtgtttaccagtatggtgcgtgggtaacagtgtttccttgaagttttaatttgagtttcctcaattaataaagagactcagaatatgc

SEQ ID NO: 450004 - DNA, 201 bp, Homo sapiens
tcacatttgtttattcatgatattcatttttgctgtcttttggtctgcctgttctatcaattactgacagaaaaatgttaaaattgtcccataagtattgyggattttgcttcatatagtttgaagccaagttattggatatatagtaattaaaaagagttatatcaccttggtcatccgagcgttgcatcattgtgagtg

SEQ ID NO: 450005 - DNA, 201 bp, Homo sapiens
ttccctctaatagtttggaaattgtgaactctgattctattgctttagtggtcactctgaaaccacacagccatacttctttgataagaatctagaattartcaatgcctttatcctcttcttggataatacaaagagtttaaacatgttaattataattattctcctcctgacacgagttaatattgtcatatattataa

SEQ ID NO: 450006 - DNA, 201 bp, Homo sapiens
agcactttaccatgctgagtaataattgttttggatcaagaatgaggtatggaaagaaggaaacaaaactagttgtttcttattgaattttaaaaaataayatgatttgaaaagtaattcccaaaaagttgtgagaagaatattgtgagcaagggcagaattatttttataagatgactaacatcaggggaacaatattta

SEQ ID NO: 450007 - DNA, 201 bp, Homo sapiens
ccaaagctgaaatgagaaccgtccgggtcactggactccactcattggtgctgtggaggaatgtttgcaataaagagaccctttcctgaggctaaggagtrttgttttgcgggtggttcatgacatgttcagcacataggtgatctaaccctgaatcttccaggaggatacatcagtactggggagtgtcttggataagcc

SEQ ID NO: 450008 - DNA, 201 bp, Homo sapiens
aaccctgaatcttccaggaggatacatcagtactggggagtgtcttggataagcctctcctaggggagagaaaaaagcaaaaaggaaaaaatgcaagggtrgagggtgaccaagagggcatcaaagaacaaagggggttggaaggaaggaacaagaggtatacatggcagaatccttatgtgctgtcaatggtctggccag

SEQ ID NO: 450009 - DNA, 201 bp, Homo sapiens
gataagcctctcctaggggagagaaaaaagcaaaaaggaaaaaatgcaagggtggagggtgaccaagagggcatcaaagaacaaagggggttggaaggaargaacaagaggtatacatggcagaatccttatgtgctgtcaatggtctggccaggccttaccccatctatcctggcctccctgaactctgacctcacccct

SEQ ID NO: 450010 - DNA, 201 bp, Homo sapiens
agcgagaggcatggtcatgtcttcaatgtgtttctctcttttcttctttagttatgggagagctgttcattcccagtgttaatcttgtagtcgctgagaawgaaccttgtgaagttacttgtctaccctcacactggacccggctcccggatatttcctgggagctcggtctcctggtcagccattcaagctattattttg

SEQ ID NO: 450011 - DNA, 201 bp, Homo sapiens
gcaaaaaggaaaaaatgcaagggtggagggtgaccaagagggcatcaaagaacaaagggggttggaaggaaggaacaagaggtatacatggcagaatcctyatgtgctgtcaatggtctggccaggccttaccccatctatcctggcctccctgaactctgacctcaccccttccacccacccctgtctgccacagagcct

SEQ ID NO: 450012 - DNA, 201 bp, Homo sapiens
gggtgaccaagagggcatcaaagaacaaagggggttggaaggaaggaacaagaggtatacatggcagaatccttatgtgctgtcaatggtctggccaggcyttaccccatctatcctggcctccctgaactctgacctcaccccttccacccacccctgtctgccacagagccttctctgcagttcatcaagcacagcagg

SEQ ID NO: 450013 - DNA, 201 bp, Homo sapiens
tttttttctttgtttgtttgttttttgtgacatatgaggaaaagtcttgccccgttagcaagcttagcactggggcttgcattagggccttctttagggcrtggaaagctgcttctgcttcaggtgtccatcttactaaatgggtattggctttctgagtttccttaattagcgtatataacggtctggctattttgccgt

SEQ ID NO: 450014 - DNA, 201 bp, Homo sapiens
cgttcttatctccctcataggagggatgagggtacatcttcacaagggaaatttatgccctcctctctggcagatacgaggagggcagaagctttttttttgttttgagacaggatctcactcttctcacctaggctggagtgcaatggtgcaatgttggctcactgcaacctccatctcccgggttcaagcaattctcct

SEQ ID NO: 450015 - DNA, 201 bp, Homo sapiens
agctacagattcaggccagttcagacgggtccaagaagagtttcagggtctccatcttgtccttcctgggcatggaactgagcccagtactggcatcccargggatgccccccatgcatgcttgtccatttaactgggcgtctgatcagatttctgcttggttttctgccaggcctagagcctgatcctgaatcctggtta

SEQ ID NO: 450016 - DNA, 201 bp, Homo sapiens
ccccccaggaacctccatgtgttccggagacgtcattggatatgtatcgttgcagcgtggacaggtgtgttgaaatgagactgggcaaaaagggtttggtstaaacccagcagggcctgtctgttcacattcttttggcctctctctgcagcattccttcctccaagggatgcggcaggaccctttctggaatgagggcct

SEQ ID NO: 450017 - DNA, 201 bp, Homo sapiens
ctgaatgagcttggaagtggaatcgttctcagagcttccagaaaaggactcatctgtctaacaccttgatgttggccttatgagaccctacctaagaagasaacccagtcaaaccttcccaggcttttatggaactgagagataataaataggtatagttttaaggcatgaaatttgtaatagtttgttatttgccaatgg

SEQ ID NO: 450018 - DNA, 201 bp, Homo sapiens
tgagacatagcttgtattactccattttcacactgctataaagaacttccagagactgggtaatttataaaggaaagaggtttaattgattcacagttctrcatggctggggaggcctcaggaaacttacaatcatggcggaaggggaggcaggcatgtcttacatggcctgagagagcaagtgagagaacatgtgagcgt

SEQ ID NO: 450019 - DNA, 201 bp, Homo sapiens
aattgtgacatgtttaccatactaaggtaagatgttaataacaggggaactgtgagtgggggtacatgggaattctctgtatgatcatattactttttttrtgaatctaaaactactctaaaataattttatttaacaacaacaaaaaatcagatacttcaaaacaaaacaaacaaaaccaaccacagccacccaaagaga

SEQ ID NO: 450020 - DNA, 201 bp, Homo sapiens
gggggacgaggaaccgatcagatagtgacgttggggatctggaggcagagtccaaggtggccagacactgagggtagaagacaaggaactgatcagatagygatggtgtgggatcctggcaaaaccaactttgcaggattcttgctaaaactgggcagtgcagagacagacatggaaatgtaaaggtggaggcctggttgg

SEQ ID NO: 450021 - DNA, 201 bp, Homo sapiens
gttttctacattcccattttacttcttttgctggttttcagactgtagactgtatatatatttttaatgattatatttaatcttgaatcatgtattttaaygatatataaacatttttggtattcctggtattttctctatcatgacaaggacctcagcacaatttaactaacaaccttgttcccttattttgtaactatt

SEQ ID NO: 450022 - DNA, 201 bp, Homo sapiens
tactacacatttgagcaataatagttgtgaatattattcaactcatcagcagttgctcagagtgggtgttcaatggcttggttttgtagggagtctggcayaattcccaggtgtctggaagctttgaagagaaacaggtgcctattataattggatataaatgaaggaattgaggaaattgaatgaggcaaatggtggagt

SEQ ID NO: 450023 - DNA, 201 bp, Homo sapiens
gcaggacaggacattaccactgagccctgcccagattgcaaaataaatggttgttcttatttgaaatcactaatttttggggtggtttaaatagagggcamattttctgctgctcatcctcataccaaaattgctaattatgtctctagtaatatggttgatgtccaggataacttaaatgagaccattaagtgacaatgt

SEQ ID NO: 450024 - DNA, 201 bp, Homo sapiens
gagccaagaaaccaacaaaaggccccaaaatgaatgctttaaaagactgtgcatgttttaaaggcctctcgcctatcagcaagcaccactgtttctccatrgacaaaccagagtgtcctgacaaggtctcctgtcccctggcagacagctgacacccgaggcccatcaggctgggagcttgcttgtctggaatgtctttga

SEQ ID NO: 450025 - DNA, 201 bp, Homo sapiens
gtgtctgttctgatttctttgagcagtaattcttttataattctcattgtagagatctttcacatccctggttagctgtattcctgggtattttttttttgtgtgtgtcacaattgagagtgggattgcctttctgatttggctctcagtttggttgttcctggtgtataggaatgctagtgatttttgtacattgatttt

SEQ ID NO: 450026 - DNA, 201 bp, Homo sapiens
tcaagcaattcccctgcctcagcctcctgagtagctgagactacaggcatgggccaccacaactggctaatgtttgtatttttagtagagacggggtttcrccatgttggccaggctggtctcgaactcctggcttcgtgatccacccacctctgcctcccaaagtgctgcaattacaggcatgagccaccacacttggcc

SEQ ID NO: 450027 - DNA, 201 bp, Homo sapiens
ttgaacaatgagaacacatggacacagaaaggggaacatcatactctggggactgttgtggggtagggggaagggggagggatagcactgggagatatacstattgctagatggtgagttagtgggtgtagcgcaccagcatgtcacatgtatacatatgtaactaacctgcacattgtgcacatgtacccgaaaacttaa

SEQ ID NO: 450028 - DNA, 201 bp, Homo sapiens
ttgtttgtgtctgttctgatttctttgagcagtaattcttttataattctcattgtagagatctttcacatccctggttagctgtattcctgggtattttwtttttgtgtgtgtcacaattgagagtgggattgcctttctgatttggctctcagtttggttgttcctggtgtataggaatgctagtgatttttgtacatt

SEQ ID NO: 450029 - DNA, 201 bp, Homo sapiens
gaaaccaaacagagagaataaaatgtgtttacataaagtccccaaacaggcaaaactaatcaatggtattggaagtcttgactatggtcattgtccctaayctgtgagaggaagtgagttggaggaacttgcagggacgaggtggggaggagggcttctgggctgctgaccacgttccatgatgtgatctgggcagttacc

SEQ ID NO: 450030 - DNA, 201 bp, Homo sapiens
ccctttcagcatagaggtttatttttttgaatcaataactgaggaataattattcttactaaaacccaataattcaactcagaagggtcttccaaagaagktggtctcccagcatgctctgggttctgtttgcttgctgatggaacacagttaacagttaacacagctcacgggactcgtgatgcttgcgtgctgtgaata

SEQ ID NO: 450031 - DNA, 201 bp, Homo sapiens
aaatcatcattctcagtaaactatcgcaagaacaaaaaaccaaacactgtgtattctcactcataggtgggaattgaacaatgagaacacatggacacagraaggggaacatcatactctggggactgttgtggggtagggggaagggggagggatagcactgggagatatacctattgctagatggtgagttagtgggtg

SEQ ID NO: 450032 - DNA, 201 bp, Homo sapiens
ggtacttttataggaataacattgaatctgtaaattgctttgggtggtatagccattttaatgatattgattcatctaatccatgagcatgcagtgttttyccatttgtttgtgtctgttctgatttctttgagcagtaattcttttataattctcattgtagagatctttcacatccctggttagctgtattcctgggta

SEQ ID NO: 450033 - DNA, 201 bp, Homo sapiens
gcaaaactaatcaatggtattggaagtcttgactatggtcattgtccctaacctgtgagaggaagtgagttggaggaacttgcagggacgaggtggggagsagggcttctgggctgctgaccacgttccatgatgtgatctgggcagttacccacgtgtgattgcttagtaagaatatatcagtttgtgtgcttacaactt

SEQ ID NO: 450034 - DNA, 201 bp, Homo sapiens
cctttgtagggacatggatgaaattggaaatcatcattctcagtaaactatcgcaagaacaaaaaaccaaacactgtgtattctcactcataggtgggaaytgaacaatgagaacacatggacacagaaaggggaacatcatactctggggactgttgtggggtagggggaagggggagggatagcactgggagatatacc

SEQ ID NO: 450035 - DNA, 201 bp, Homo sapiens
tgataaagactgaagttcttcaaaggatctccatataactcagccttttgctaaacttctaaaaaatgaacaattaatcagttcatcaactctcagagatygtaaaagccaaaatgatttagataaagcaggaaaatcagagcagaggagacagttatggcatatgagaaacctgttcactactcaagttggccctgacat

SEQ ID NO: 450036 - DNA, 201 bp, Homo sapiens
tgagttcatgtcctttgtagggacatggatgaaattggaaatcatcattctcagtaaactatcgcaagaacaaaaaaccaaacactgtgtattctcactcrtaggtgggaattgaacaatgagaacacatggacacagaaaggggaacatcatactctggggactgttgtggggtagggggaagggggagggatagcactg

SEQ ID NO: 450037 - DNA, 201 bp, Homo sapiens
tactgtgaaaggaggagcatagaaatccaagtgtgatcagtcagcaggtcttggccaggagcatacacagaataaacaaataaataagtaaagagaggaargggaagtaatgttaagactgttcaagacttggaatacagctctcctaaaaagcagtcctttgaagtcttgggatactacagaaagatcccaacaaccact

SEQ ID NO: 450038 - DNA, 201 bp, Homo sapiens
tgttcactactcaagttggccctgacatcaggccaggaatacagagcaaggttcgccattgttctgcccaccaaatgctcttttctagtcctaatgcaaamtgatggtctctacttagacctgaggcacaaagaaaacatttcagggctgggcagtggctcatgcctgtaatctagaactttgggaggctgagatgggtgg

SEQ ID NO: 450039 - DNA, 201 bp, Homo sapiens
gcaaagacttggaaccaacccacatgtccaacaacgatagactggattaagaaaatgtggcacatattcaccatggaatactatgcagccataaaaaatgrtgagttcatgtcctttgtagggacatggatgaaattggaaatcatcattctcagtaaactatcgcaagaacaaaaaaccaaacactgtgtattctcactc

SEQ ID NO: 450040 - DNA, 201 bp, Homo sapiens
agtctcaaacaaacaaacagaatatttcagaagggtcttctactccctatgcaaactgctaagccagcaagtcccacaggggtacagatggaaggggcctytgctaatccctgagggaaatgtcagctggggtttttattacaaagttagcatatactggggagcttagaaacaagagaaacgtgtttctcacagttctgg

SEQ ID NO: 450041 - DNA, 201 bp, Homo sapiens
attggaaatcatcattctcagtaaactatcgcaagaacaaaaaaccaaacactgtgtattctcactcataggtgggaattgaacaatgagaacacatggayacagaaaggggaacatcatactctggggactgttgtggggtagggggaagggggagggatagcactgggagatatacctattgctagatggtgagttagt

SEQ ID NO: 450042 - DNA, 201 bp, Homo sapiens
ctggggggtgtagcatgggccttcataccttagacgtcctccaggtgattctgatgtgcagcccaggctgagaacctccactctgcaatcagcctctttcyctgcactgctgggctgatggtcctcatttcctccctcattctctctcctccacactacagtttcctaactgatctgcatatgtccagtctccctattctt

SEQ ID NO: 450043 - DNA, 201 bp, Homo sapiens
ttctttctgtcttaaaaacatttccttatttttgtctaggctacaggactagagacaatgaataatccttcagcaatgaagactctcactgtccatattgkgctaaaaaaaaaaaaaaaacccacaaacaaaacacacaatctagagatccttgaaaaaatggctgatttcagaattgaggtagaaattgtagaagataag

SEQ ID NO: 450044 - DNA, 201 bp, Homo sapiens
cggctggagtgcaccgccgccatctaggctcactgcaacctccgcctcctgggttcaaacaattctcctacttcagcctcccatgtagctgggattacagrtgcatgccaccacgcagggataatttttgtatttttagaagagatggaagtctttctttattgtggatgtcctgtgactttgaaataaatgaaatagtct

SEQ ID NO: 450045 - DNA, 201 bp, Homo sapiens
cagtctaccattcatgggcatttacactgatttgattccatgtctttgctattgtgaatagtgcttcaatgatcgtatgtgtgcatgtgtctttatggtaraatgatttacattcctttgggtagatagccagtaatggcattgctgggccaaatggtaattctgttttaagttctttcgggggtcaccacattgctttcc

SEQ ID NO: 450046 - DNA, 201 bp, Homo sapiens
aggttatgagacataccatcctcactctaatttatattttggggggaatttaatagatccattttctttttcatagagttatgtttgatcatcaatccagratcatcaatcctgggctgatctggtgtgttcagaattaagatgaattatttctaccattaatcagctattaataatataacatttccttttgctgaagtt

SEQ ID NO: 450047 - DNA, 201 bp, Homo sapiens
ggagatgaaaacagcttgaggacagggtttttgtctcatgtgtttgttccactctgcagaaccaagcttcgaactgtacttcatgcactacgatggcacaraaaagattttctgggtgaaaccattttggtgccattgtcttgtaattattaggaaatcaaaaacagcacagaattattatttcctccagtattctggagg

SEQ ID NO: 450048 - DNA, 201 bp, Homo sapiens
tgaccaaatccaacccccctgttgttgcttcccaatgaccaaatccggaggacactggccaacaaggcagccccagatgatggcattcacaggagacaggstcctgtggcttagataaggactggcacatcttcttgaggggctgtgcacacaccttattgttgcccacgaattccctgttttccacgagtccttggcctg

SEQ ID NO: 450049 - DNA, 201 bp, Homo sapiens
agagcacacagagcatgctcagaacgtggtggtggaagggatccgctgtttctcatgacttttagcctttacagcggcaccatgtttttacactgagccaygtgttgtctttctcattcatgggactgtttcttgcaagtgtcttcctcttagtgtctgtgtttttggagggaccctgccctcgagaacaggggacctgtg

SEQ ID NO: 450050 - DNA, 201 bp, Homo sapiens
cagcctgcccgtctttatgctcccctagaggtttgagcagcggggcatggaagaagcgagtcactcccccatcacacgccctgggaggaggacaagggaayttcttctgtttcatgttgacacagaggtggagtgtgtgactaggagagggattgtgtttgcgagaagtgagcgataggtggattgcatgctgactgaagc

SEQ ID NO: 450051 - DNA, 201 bp, Homo sapiens
aaatgtcccttcccctccctcgtttctcacctcttcaatttctatctgggcttcgaggaagacctgactcagaaatcacctcctccctgaagcctcctaamccttgccattttcagggcgagaatctcagtttccatttactgacagggtaagggttctgttgtgtgtgacacttcctcttcctcaccaccccagcgctct

SEQ ID NO: 450052 - DNA, 201 bp, Homo sapiens
gcaggatttcgtattcaatttcaaaagtaagtttgaaaccacatctattttctgaaaacaaaacaaaaaaaattgaacaacaacaataataacaacaataygtacacacaactgcgggatttttggatttatgttatccagaattaagtaccggaggtagacaatgctgaaaaacacgtatgccgatcacaaactcatagg

SEQ ID NO: 450053 - DNA, 201 bp, Homo sapiens
cctcctccctgaagcctcctaacccttgccattttcagggcgagaatctcagtttccatttactgacagggtaagggttctgttgtgtgtgacacttcctyttcctcaccaccccagcgctctccaacggtgtcagctggagtgaactcctgtgtgtgcaaggcctgggtctcctggtcagactactttctatgggaaagg

SEQ ID NO: 450054 - DNA, 201 bp, Homo sapiens
tgcccaccccaattacacatggtggatggggaagcacccactgggtgagtctacgggcctgatgggcctgggccaggactcttccttccttccttccttcyttttttctccctttcctttccttttctttctttcgttctttctttcttttctttctttctcatctcccttcccttctcttcctttctttcttttcttttc

SEQ ID NO: 450055 - DNA, 201 bp, Homo sapiens
cctaacccttgccattttcagggcgagaatctcagtttccatttactgacagggtaagggttctgttgtgtgtgacacttcctcttcctcaccaccccagygctctccaacggtgtcagctggagtgaactcctgtgtgtgcaaggcctgggtctcctggtcagactactttctatgggaaaggcatagtgtatagtctat

SEQ ID NO: 450056 - DNA, 201 bp, Homo sapiens
taatctagaactttgggaggctgagatgggtggattgcttgagcccaggagttcgagaccagcaatgggtcacatggaaaaatcccatctctacaaaaaaatacaaaaattagccaggcgggttggcacgcatctgtagtctcagctgcttggagggctgaggtgggagggtcacttgagcccaggaggtcgaggctgcag

SEQ ID NO: 450057 - DNA, 201 bp, Homo sapiens
cttcctcttcctcaccaccccagcgctctccaacggtgtcagctggagtgaactcctgtgtgtgcaaggcctgggtctcctggtcagactactttctatgsgaaaggcatagtgtatagtctatatactatacataggggtgctgggaggaactggggttttcacagccagctttggttttcattaggtttgtttagtttc

SEQ ID NO: 450058 - DNA, 201 bp, Homo sapiens
aaaagtcaggaaacaacaggtgctggagaggatgtggagaaataggaacacttttacactgttggtgggactgtaaactagttcaaccattgtggaagtcrgtgtggcgattcctcagggatctagaactagaaataccatttgacccagccatcccattactgggtatatacccaaaggactataaatcatgctgctata

SEQ ID NO: 450059 - DNA, 201 bp, Homo sapiens
ccacactgtcatcgagggataatcagtgtttttggttttttttttttttttttttttgagacggtgtctcgctctgttgcccaggctagagtgcagtggcrcgatcttggctcactgcaacgcactctgcctcccaagttcaagcaattcccctgcctcagcctcctgagtagctgagactacaggcatgggccaccacaa

SEQ ID NO: 450060 - DNA, 201 bp, Homo sapiens
ctctccaacggtgtcagctggagtgaactcctgtgtgtgcaaggcctgggtctcctggtcagactactttctatgggaaaggcatagtgtatagtctatayactatacataggggtgctgggaggaactggggttttcacagccagctttggttttcattaggtttgtttagtttccattgcttcaggggtgttagttttg

SEQ ID NO: 450061 - DNA, 201 bp, Homo sapiens
tgtaaattaccttgggcagtatggccattttcatgatattgattcttcctacccatgagcatggaatgttcttccatttgtttgtatcctcttttatttcsttgagcagtggtttgtagttctccttgaagaggtccttcacatcccttgtaagctggattcctaggtattttattctctttgaagcaattgtgaatggga

SEQ ID NO: 450062 - DNA, 201 bp, Homo sapiens
ttacatatatatatacatgtgccatgttggtgtgctgcacccattaactcgtcatttaatgttaggtatatctcctaatgctatctctcccccctcccccmaccccacaaaaccctagaagaaaacctaggcaataccattcaggacataggcatgggcaaggactttatgtctaaaacaccaaaaacaatggcagcacca

SEQ ID NO: 450063 - DNA, 201 bp, Homo sapiens
aagcttttttcaaatagtgcatatttttctgctgctaatgatgtgagcttgctctagacctaagggtctgtgctgtgattctcctgttgagacttgtcttractgccacctggtgtcttttcccactagggcctgccgggctgtatgggcccaacagcagggacacttgcacctcagcctggacctgctgccctgctcttc

SEQ ID NO: 450064 - DNA, 201 bp, Homo sapiens
atttccttatttttgtctaggctacaggactagagacaatgaataatccttcagcaatgaagactctcactgtccatattgtgctaaaaaaaaaaaaaaaacccacaaacaaaacacacaatctagagatccttgaaaaaatggctgatttcagaattgaggtagaaattgtagaagataagcttgaaatatgttatccta

SEQ ID NO: 450065 - DNA, 201 bp, Homo sapiens
ttaatcttttctttaactttgagatgaaaagcctttgtaagagtgaactgtcaccccacccctgcccaccccattcacagtaagtccagataaggctacaracaggtctgccacagcctacttacaatgcccaccttgccccaccaggtgtgattcatagtggaaattatgctatacctttacataagtgtgaaagatgag

SEQ ID NO: 450066 - DNA, 201 bp, Homo sapiens
ttcaccactgccagtgaatctatatgtgttttaacctcgggccacttttgtttccgctccaagtagatgacattgggaagaagtccctcattacgtctttyaggggcaccctgaattatcaggggctgtagtgcaggaatagtccattttcagctagtaccatgtagcaagtttacccatctgccatctgtgaaccaagca

SEQ ID NO: 450067 - DNA, 201 bp, Homo sapiens
agatcgagaccatcctggctaacacggtgaaaccctgtctctactaaaaatacaaaaaattagccgggtgtggtggcatgcgcctgtagtcccagctactygggaggctgaggcaggagaatttcttgaacccgggagttggaggttgcagtgagccgagatcacgccactgcactccagcctgggtgacagagtgagact

SEQ ID NO: 450068 - DNA, 201 bp, Homo sapiens
tgttgaatgttttttcatacatttgttgaccatttacatgtctaagaagacatctaaattgagaaatgtctgttcagaccattaactcattttaacattgsattgtttttttgctgtcgagatgtttgagttccttatatagtctggatattaatcccctgttggatgaatagtttgcaaatatttcctcccattctgtag

SEQ ID NO: 450069 - DNA, 201 bp, Homo sapiens
ccagccaagccattcaccactgccagtgaatctatatgtgttttaacctcgggccacttttgtttccgctccaagtagatgacattgggaagaagtccctmattacgtctttcaggggcaccctgaattatcaggggctgtagtgcaggaatagtccattttcagctagtaccatgtagcaagtttacccatctgccatct

SEQ ID NO: 450070 - DNA, 201 bp, Homo sapiens
atctaaggccgatggcaaccggatgccaccctgagcatgaggtaggaggcaattaacccctggttggctgaattgacccagagaacggagttgaccttcarttatcaatgttgaacattcttctaagaagacgtgaggagagcttgagatagaaattaaattcagacatactcagcatgtaaaaataagggatgttccatc

SEQ ID NO: 450071 - DNA, 201 bp, Homo sapiens
aggggctgctgagtgggcccagccaggagagggtgtaaggaaagagggcagcggtacctgcctcccgtcacgcagtgtcttggaagaatgaatgtggggaygtatttcatttcatgccatttgaatagctactagaattatccccactttacaacagacacaagtggcctgcattagattattaaggacgccaaaggagaa

SEQ ID NO: 450072 - DNA, 201 bp, Homo sapiens; identical to SEQ ID NO: 86570

SEQ ID NO: 450073 - DNA, 201 bp, Homo sapiens
gttcctcgatgaatttggtttgtgattgggcaattcactctgtagtataacttaaaaaaatttcagacacgtgaatattttcttatattctcttccttcttacatgaagggcagtacactatagatattcttttgcattttactttttttcccttacagtatatcctggaaatcaatccatgtcagttcattgagatttcc

SEQ ID NO: 450074 - DNA, 201 bp, Homo sapiens
tcattgttttagatgagaagctcagaaaagtcaagtagcttcgttaagattgcacaactagtaaatgagggaatcgggagtgctgggatttttaaggtgcrtttcccttctgaatggctgaaaactgcaaagtagagtcagttagacatccagctatcagctttatgcattgggtcctatggtagagagaatgtatctcag

SEQ ID NO: 450075 - DNA, 201 bp, Homo sapiens; identical to SEQ ID NO: 394517

SEQ ID NO: 450076 - DNA, 201 bp, Homo sapiens
agttcctcgatgaatttggtttgtgattgggcaattcactctgtagtataacttaaaaaaatttcagacacgtgaatattttcttatattctcttccttcttacatgaagggcagtacactatagatattcttttgcattttactttttttcccttacagtatatcctggaaatcaatccatgtcagttcattgagatttc

SEQ ID NO: 450077 - DNA, 201 bp, Homo sapiens
cattgggtcctatggtagagagaatgtatctcaggtctgagcctgaactttcaccctcatgctccttcatagccccatgtctccagagtctgggcttcagrcattgccctgggtcaggattcccaggaaacagactctgagatggagatgtgcatgcaggtggtgactgggaatggctctgaggaacagcccctgtgtggg

SEQ ID NO: 450078 - DNA, 201 bp, Homo sapiens
caaaagaaatcacttattttcacatcgcaccgtagtagcagtggacatctccaaataccggcgaagctagtcctgcctgcaaagttaaggcagttttttttatcagatctagagctggaaatcattgttaaatgaggcgatgaggaagtgtgtatattattctggctcacttttaaaaatattttgatccatttatttcaa

SEQ ID NO: 450079 - DNA, 201 bp, Homo sapiens
aaaatagtatcaatacaattaataaaaataattacgtgtttctttagaatgaaattctctgagatactcccacatcgtatgaaagcagtagccttgcttgsggttgggatcaatggtgaggtgggcacataaacactaggtgggcttgtcgtagcattaggcagtttgtggcttcagaagcctacggatgctttatcatga

SEQ ID NO: 450080 - DNA, 201 bp, Homo sapiens
cattctgacttgtgtgagatggtatctcactgtggttttgatttgtatttctctcatgatcagtgatattgagctttttttcatatgcttcttggacgcaygtatgtcttctgttgagaagtgtctgtttatgtcttatgcccactttttaataggattgtttttctcttgtaaatttaagttccttacagatgctggata

SEQ ID NO: 450081 - DNA, 201 bp, Homo sapiens
atttttcagtatacagtaaatgcactctttttaaaaaaattagccccatactaaacaaaaatatacatgcatgtgtgtatacctatgtgtatagatatatataaaatatatattatatatgataaattttaaatggttatgaaaataagaaaggtctatctttgtagccccagcactaaatcatgcctcttgctgactcgt

SEQ ID NO: 450082 - DNA, 201 bp, Homo sapiens
ggggtttcaccatattggtcaggctggtcttgaactcctgacctcatgatccacctgcctcggcctcccaaagtgctgggattacaggggtgaaccactgygcccagcccagcacgcatctggcattttctaagtcactggcccctgcatcctgtagctctcctagcggctaatctgaaactatgggatgcagggcttgtt

SEQ ID NO: 450083 - DNA, 201 bp, Homo sapiens
tatttttcagtatacagtaaatgcactctttttaaaaaaattagccccatactaaacaaaaatatacatgcatgtgtgtatacctatgtgtatagatatatataaaatatatattatatatgataaattttaaatggttatgaaaataagaaaggtctatctttgtagccccagcactaaatcatgcctcttgctgactcg

SEQ ID NO: 450084 - DNA, 201 bp, Homo sapiens
tcaaataatttctttattctgtagttcagatgaagaaccttttttttttttttttttaatggagtctccctccgttaccccggctggagtgcaccgccgcmatctaggctcactgcaacctccgcctcctgggttcaaacaattctcctacttcagcctcccatgtagctgggattacaggtgcatgccaccacgcaggga

SEQ ID NO: 450085 - DNA, 201 bp, Homo sapiens
gctgcgtaggagcctagttgcatccttccctgctcctgagacccctttctccctcatgctccctggttcagaccctcttccccaggtcaacagttgctctygccccatgggtgagaagtccagctcttttcaggatctatgtgtctcaacataggaaaacaccttaagagtacctgtaaggcagtcagtatttgggcctat

SEQ ID NO: 450086 - DNA, 201 bp, Homo sapiens
agagaaggtacagcttcagcggcttacagaaccattgtctgaccttcgaaacgatggcgtgtatccctagagagagtgaaggaatgtcttgtgttcttgtwatgcacaaggagggaaaggcagctagtatttattaaactcctactgtgtgccatgaatgctttcatttaattctcacatcaaccttcagattgggcattg

SEQ ID NO: 450087 - DNA, 201 bp, Homo sapiens
ggcttacagaaccattgtctgaccttcgaaacgatggcgtgtatccctagagagagtgaaggaatgtcttgtgttcttgtaatgcacaaggagggaaaggsagctagtatttattaaactcctactgtgtgccatgaatgctttcatttaattctcacatcaaccttcagattgggcattgtgaccttttaaaaatgagag

SEQ ID NO: 450088 - DNA, 201 bp, Homo sapiens
gctaagattatccaggagtgactggaagaccccagcactggcctccccagggtcacctgaggcttctacctccccaccatgctgcactgactgtcttgtgsggatggatgtgtgttgactggctcacccccctttcttcttactcttcttatactgccaggggtgggttgtgttgtcagatgattggcccaaattatgatg

SEQ ID NO: 450089 - DNA, 201 bp, Homo sapiens
gaggtgctggagaccagcagcacctcctggactagctcctgccagagtctctgctggctaagaggcaaattggggggagtcatactggacttggaatagaracctgttgtccctgttccagttgggacaacctttgagaaacaccacaccccaagggcaggcagtggtcaaaaggggagaataattcactgtcagcatccc

SEQ ID NO: 450090 - DNA, 201 bp, Homo sapiens
tcagtgaaatgttaggctcggacactgatcccgcagccgccctctgcctcccagcacaggtgggatatctcggatgcatttattctctccccttgcacggytggagtaaagtgcttatgaaaacatctcttttattgattctacatgctttttaaaattccattttcaagatcgagaacagagaatgcgtggtgcgaccga

SEQ ID NO: 450091 - DNA, 201 bp, Homo sapiens
cctctgggtccttcccacaatacgcaggaattaacggagctacagttcaagatgagatttaggtggggacacagagccaaaccatatcagctggcaactgwgaattaaagtgacaaaacatagagtcacaggagaaaaggcatacacattttacttgataatattttaatttttatgtgcgtggaggccttcaaagaaagt

SEQ ID NO: 450092 - DNA, 201 bp, Homo sapiens
ctcttttattgattctacatgctttttaaaattccattttcaagatcgagaacagagaatgcgtggtgcgaccgaaggtctcctgctggtgtggaaaggtkgcaggctgcctctgcagctttgcccggaagctggtgccccggactactgcttctcaacactcctgaggagttgcctttggctgtaatcacccaccggcct

SEQ ID NO: 450093 - DNA, 201 bp, Homo sapiens
agggatttccccttataaaaccatcagaactcatgagacttattcactaccagagaacagtatggggaaactgccgccatgattcagttatctcccaccargtccctcccacaacaggtgggaattatgggaggacaattcaagatgagatttgggtggggacacagccaaaccatatcacctggccacatggcctggggg

SEQ ID NO: 450094 - DNA, 201 bp, Homo sapiens
agttttgtgttcccaactagattataaactcctcttgcattcctgatggcagtgacttgaaggcatttatttgaagaataatagacatacagaaaggggcrcatgtcataaaggtacagctggacgacttttcacaaagtgagcacatttgtatgatcgatgttgagaccaagagcattcagtggacaactcctttccagt

SEQ ID NO: 450095 - DNA, 201 bp, Homo sapiens
atgttttgtgacattttggctttgggtctatttacacattaaatctaagagcaccagaatgtggtgtcaaaatgtgtttggggatgaagatattctaaagwcctgtagtaagcaatgcaaaacgttctggaggtgtttattaaacatttgtttgtagaatggagaggaagacaaggtccctgcttgtgtagagcttaggga

SEQ ID NO: 450096 - DNA, 201 bp, Homo sapiens
ttgggtctatttacacattaaatctaagagcaccagaatgtggtgtcaaaatgtgtttggggatgaagatattctaaagtcctgtagtaagcaatgcaaarcgttctggaggtgtttattaaacatttgtttgtagaatggagaggaagacaaggtccctgcttgtgtagagcttagggactgactgtagggttaacaaac

SEQ ID NO: 450097 - DNA, 201 bp, Homo sapiens
ggatctgggttgaggcctggaggtggctatttcaggagaggagagtatatatgggctaattctagagctcctgagggtccatcccaaaatttgtaatgaaygcaaatttgtaatgaataccaaagcgttcaaatgcttcatgttggaaagtcttatgggtggagtcattttcatttgtagatatggctctgaatatccatt

SEQ ID NO: 450098 - DNA, 201 bp, Homo sapiens
cccagacctctccttgccaccattcctactgtataatgggttatatagaactcagccaccatgtttattcactcagtacatattcactgagtagttgttayggatcacttctttgtaggcactgggatgtaagattgagcaaaaccaggcattgttcttgttgacatagaacttagagcccagtagggaaaacaggcatta

SEQ ID NO: 450099 - DNA, 201 bp, Homo sapiens
caccatgtcccacttcttccaccccagcgccaacaccctcactcagccgtggtccagccagaagacaaggtcagataaaacaaccataaagaaaaaaaaaaccttcttctagagtggctgggaatgaggtcaccgtgatgtcttcccctgaatcggtgccatcgtggttttgaagtgtgacggtcactcagctcaggagtc

SEQ ID NO: 450100 - DNA, 201 bp, Homo sapiens
gccgggcttaattctgaatacagcatggacaagtggggaggtgcagcccagaaacagggtggaaggctcagtgggtggaaagttactaagaggagaccccaggggcgagggggattctggctaaacccaccttgctggaggcagaccagggtgaccagacatcaagggtgggggacgaggaaccgatcagatagtgacgtt

SEQ ID NO: 450101 - DNA, 201 bp, Homo sapiens
cttggacctgggaggtggaggctgcagtgagccaagattgcgccactgcactccagcctgggcaacagagcgagactctagctcaaaaaaaaaaaaaaaaagaaaaagaaaagcaaagcctgtgtgaaaagccttagcattagctctcctggcagcaacagctgccttgcctgcctctgctttcgcagctgttttatgtag

SEQ ID NO: 450102 - DNA, 201 bp, Homo sapiens
ctatttttcagtatacagtaaatgcactctttttaaaaaaattagccccatactaaacaaaaatatacatgcatgtgtgtatacctatgtgtatagatatatataaaatatatattatatatgataaattttaaatggttatgaaaataagaaaggtctatctttgtagccccagcactaaatcatgcctcttgctgactc

SEQ ID NO: 450103 - DNA, 201 bp, Homo sapiens
gctcttaaccattctccttgggatcttgattacactattaatttgcttagcaaacacttccctcagagtataacaaaatatactgtgagataaaagtcttytgatggctacatgcatctccagggcaaatagctaggaaggtgagcaggtttggtcataggtcagtgacttttctttcctttgaattccccaaaagtcttg

SEQ ID NO: 450104 - DNA, 201 bp, Homo sapiens
tctatttttcagtatacagtaaatgcactctttttaaaaaaattagccccatactaaacaaaaatatacatgcatgtgtgtatacctatgtgtatagatatatataaaatatatattatatatgataaattttaaatggttatgaaaataagaaaggtctatctttgtagccccagcactaaatcatgcctcttgctgact

SEQ ID NO: 450105 - DNA, 201 bp, Homo sapiens
aatgaagcagataagttgataatattgaagttggctaatagttacatgtagggttgtcatactattttctccacttttatatatgtattagttttctgtgrgtgttgtaagaaataaccacaaacttggtgacttaaaacaaggttaaatttatcttacagttctgtagatcagaagtccaacatgagtctcatggtgcta

SEQ ID NO: 450106 - DNA, 201 bp, Homo sapiens
attgcttgagcccgagaggtcaaggctgcagtgagccaagatcgtggcactgcactccagcctgggcgaaagagtgagaacttgtctcaaaaaaaaaaaaatttttgtaaatgttctttactaatgggatagacacagtggggaggggtagcttgagtctgttacatgaatgaaatggaatgagtactaaactggactcaa

SEQ ID NO: 450107 - DNA, 201 bp, Homo sapiens
gtgatttcctgcttccattattctttccatatctcttaattggctttcttttgttaaacaaaagacttccctcccctttcttccttttctttttttttccttttttcctcacagttttagtagggactcaattttgtccaatacattctaatctattcctgtcatttttcgttttgacacccagattgctccagacttggt

SEQ ID NO: 450108 - DNA, 201 bp, Homo sapiens
tcagcacttagtggcagtgggaagaccagacctcctgacccttcagcctgctggcatccaccatgccttaaaaaacaaaacaaaaccctaaatgtatttarttcctgctcctcttcaaacacaccattgtaaccacataatacactgtgtgaaaagagaggaaagaaaaatccaagtcaacaataacttgccaggccttct

SEQ ID NO: 450109 - DNA, 201 bp, Homo sapiens
cacattgggaggctgaggcaggatcatggctggaagccaggagttagagaacagactgggcaacataacgagactcccattgccacaaaaaaaaaaaaaaraaaagaaaagaaaagaaagctgggcatggtggtgtgtgccttcgatcccagctacttgggaggctgaggcaggaggattgcttgagcccgagaggtcaag

SEQ ID NO: 450110 - DNA, 201 bp, Homo sapiens
tcaggttgttttagtcacacttgtgaaaacaagtactattttcatatgggttgtttgcagtatgaatgctgacctatgcgagagtgttcttaataaaaaaataacttatctaagttattctggcacatgatttgggttagttatttctgtaaatattagattggaattcgatttaatttgtaatgagaaacctatgttaag

SEQ ID NO: 450111 - DNA, 201 bp, Homo sapiens
ttcatccctttatcctcatctcattgctctgaatggcacttagttcctagaggagcaaatgttctctgagcaacagggtctccctcaagggagaaagaatyttgaaaaaagaggaaacaaccatgaattattctatgattttttcacctccttatatgtcaacaaaatagagatgacataactccaaattgagtcatctga

SEQ ID NO: 450112 - DNA, 201 bp, Homo sapiens
gatggggtttcaccatattggtcaggctggtcttgaactcctgacctcatgatccacctgcctcggcctcccaaagtgctgggattacaggggtgaaccamtgcgcccagcccagcacgcatctggcattttctaagtcactggcccctgcatcctgtagctctcctagcggctaatctgaaactatgggatgcagggctt

SEQ ID NO: 450113 - DNA, 201 bp, Homo sapiens
ccatagagcttggcctgaacttcatccctttatcctcatctcattgctctgaatggcacttagttcctagaggagcaaatgttctctgagcaacagggtcyccctcaagggagaaagaatcttgaaaaaagaggaaacaaccatgaattattctatgattttttcacctccttatatgtcaacaaaatagagatgacataa

SEQ ID NO: 450114 - DNA, 201 bp, Homo sapiens
gctaatttttgtatttttagtagagatggggtttcaccatattggtcaggctggtcttgaactcctgacctcatgatccacctgcctcggcctcccaaagygctgggattacaggggtgaaccactgcgcccagcccagcacgcatctggcattttctaagtcactggcccctgcatcctgtagctctcctagcggctaat

SEQ ID NO: 450115 - DNA, 201 bp, Homo sapiens
ggctagagtgcagtggcgcgatctctgctcactgcaacctccacctcctgggttcaagcaattctcctgcctcagcctcctgagtagctgggattacaggygggtgccaccacgcctggctaatttttgtatttttagtagagatggggtttcaccatattggtcaggctggtcttgaactcctgacctcatgatccacct

SEQ ID NO: 450116 - DNA, 201 bp, Homo sapiens
ttggctttggcgaaaaatttatggctaagtctccaaaagcaattgcaacaaaaccaaaaattgacaagtggtatccaattaagctaaagagcttccatgcrgcaagagaaattgccaacagagtaaatggatagcctacagaatgggagaaaatattcacatattcacaaactatgcatctgacaaaggtctaatatccag

SEQ ID NO: 450117 - DNA, 201 bp, Homo sapiens; identical to SEQ ID NO: 86554

SEQ ID NO: 450118 - DNA, 201 bp, Homo sapiens
tgtaatcacccaccggcctcctctgtatgaacagcacgggtgaaactcttgatgttacttcttcctccattgaataagccagattctctttcttctgaggrataattgaagtcttttgcagtgtacgtaagcaaaattacctaacgctcttaaatttttcatacaacagtttcatctggaagagaggccattgaaaccaag

SEQ ID NO: 450119 - DNA, 201 bp, Homo sapiens
ccagttactccaccccactcccagtgaccatcattctgacttctaactgtgtagacatgttttgcttgttttgtactttacaaacatatctactctattttaggtggctagacaatgtgttttacaatgctggccatgacagtgtttgaaagaataaaatggaatcaaatagaatgggcagtatcagagtgtgttgcctgc

SEQ ID NO: 450120 - DNA, 201 bp, Homo sapiens
tccagttactccaccccactcccagtgaccatcattctgacttctaactgtgtagacatgttttgcttgttttgtactttacaaacatatctactctattttaggtggctagacaatgtgttttacaatgctggccatgacagtgtttgaaagaataaaatggaatcaaatagaatgggcagtatcagagtgtgttgcctg

SEQ ID NO: 450121 - DNA, 201 bp, Homo sapiens
tgtctttgttttcaaggtgttttatatggggttaaagataccatcctcctgttatctcactagatgtagacagttaaaaagcttttacaaaattttcggarttttctaatgtggttggttgcacagaataattggcagccctattaatgatgttctgatgatcctcttttgctatggtattaatttgtttagtttagtttt

SEQ ID NO: 450122 - DNA, 201 bp, Homo sapiens
gagtctctgccagacctcacgcaccaccctgctgtgtcagatcccagttactgcttggctcatgctgtgaatcctgaaccccgcaaagatttgtcgtcttygtcgtggaacccccagcacctggacccctgcctgccccaggggaggtgatcagaagaggcttcccgaggcagtggaagggcctgggatgaaggtgcaggg

SEQ ID NO: 450123 - DNA, 201 bp, Homo sapiens; identical to SEQ ID NO: 394524

SEQ ID NO: 450124 - DNA, 201 bp, Homo sapiens
taaggtcacattctgaggtattggtggtgaggactttaacatgggagttttttgggaggaggccctcacccacagtagtagaacttgtgactttgtcaccraaagaaatcacttattttcacatcgcaccgtagtagcagtggacatctccaaataccggcgaagctagtcctgcctgcaaagttaaggcagtttttttta

SEQ ID NO: 450125 - DNA, 201 bp, Homo sapiens; identical to SEQ ID NO: 394527

SEQ ID NO: 450126 - DNA, 201 bp, Homo sapiens
tttcaccatattggccaggctggtctggaactcctgacctcatgatctgcctaccttggcctctcaagagaacgagatcttataaggacatgagtcccatyacgagggctccattttgaggaccttatgacctttcaaaggcttcatctctaaataccatgacattgggagtgagggcttcaacatagcaatttcggggga

SEQ ID NO: 450127 - DNA, 201 bp, Homo sapiens
gatacagttcccagcttgactttctccctttggcttagtgattttggggtcccgtgatttattttcctttcacaccttcaactggaaggaagagcattctycgcctcccctggccccatttacttgcttcttggtctttaaatatgttagctatatcttccattggtgcctattacatgcagaaatccttgattctgagtt

SEQ ID NO: 450128 - DNA, 201 bp, Homo sapiens
atctcattgctctgaatggcacttagttcctagaggagcaaatgttctctgagcaacagggtctccctcaagggagaaagaatcttgaaaaaagaggaaayaaccatgaattattctatgattttttcacctccttatatgtcaacaaaatagagatgacataactccaaattgagtcatctgaaatccatgtgaatattc

SEQ ID NO: 450129 - DNA, 201 bp, Homo sapiens
tgagggcctccaggaggaatgacatctcaaacagaaacctgcataacatcagcccaaaccaaggacccattttatcatcaaagaggtgtgccatgaatgcrtgactgtgggatccactgctttgaccacatatggatgacttggaagctgccagcctacatgaacaatggaaaggccattgatggctcagcaaagttgcca

SEQ ID NO: 450130 - DNA, 201 bp, Homo sapiens
tgccttatgcatatgggagccaacaaaggaagtagctggctcattaatagagttaaagagttaaaaggcttatatatctaacgttgtaggagaggagaagkggggagaaaggcttcctatagaaagaacaaataggtttcttttggaaagacaaataggttttttttttttttttgaaacagaatctcaccatgtcaccca

SEQ ID NO: 450131 - DNA, 201 bp, Homo sapiens
aaccctaaaataaacccatacacctacaaccatctgacctttgacaaaatcaacaaaagtaaacaatggggaaagaactgcctattcaataaatggtgctrggataaccagctagccaaatgcagaagaataaaactaggcccttacctctcaccattcaaaaattaactcaagatggactaaagatttaaatgtaaaact

SEQ ID NO: 450132 - DNA, 201 bp, Homo sapiens
taactcaagatggactaaagatttaaatgtaaaacttcaaactatgaaaatcctagaagaaaacctaggaattatccttcttgacattggctttggcgaaraatttatggctaagtctccaaaagcaattgcaacaaaaccaaaaattgacaagtggtatccaattaagctaaagagcttccatgcagcaagagaaattgc

SEQ ID NO: 450133 - DNA, 201 bp, Homo sapiens
ttcttctttagttatgggagagctgttcattcccagtgttaatcttgtagtcgctgagaatgaaccttgtgaagttacttgtctaccctcacactggaccyggctcccggatatttcctgggagctcggtctcctggtcagccattcaagctattattttgttccggagcccagcgaccttcaaagtgcagtgagcatcct

SEQ ID NO: 450134 - DNA, 201 bp, Homo sapiens
gatcctctcctggatcaggaaaaagtaaggaaaaggaagaggattctcttcagaaggtaatttaccccatgagtcagctttgcaggcctatttcaagatayggcaaataaaacatattgggggttaaatattttgatttccttctttacctgtcatgtgatgctatgccagagtcaggttggaaagcagcccccattatat

SEQ ID NO: 450135 - DNA, 201 bp, Homo sapiens
ctttctttttttctttctctctctctctctctttctttctttctttttttttgacagagactccctctgtcacccaggctagagtgcagtggcgcgatctytgctcactgcaacctccacctcctgggttcaagcaattctcctgcctcagcctcctgagtagctgggattacaggtgggtgccaccacgcctggctaatt

SEQ ID NO: 450136 - DNA, 201 bp, Homo sapiens
aggagaacaacatgggggaactgccttttaatccaatcacttccctccctcgacacttgaggattacagccggagatgagatttgggtggggacacagagytaaaccatatcacagctgtagttcaagcttgtccaacctgcagcccaggacggctttgaatgtggccccaaacaaattcataaactttttaaaaactttg

SEQ ID NO: 450137 - DNA, 201 bp, Homo sapiens
tcaagatacggcaaataaaacatattgggggttaaatattttgatttccttctttacctgtcatgtgatgctatgccagagtcaggttggaaagcagcccscattatatagtgttcaatgaaacccctctgatgagggtttgtagggtggactccccagtcccttagataagaatttgggcaagagaagaaaaagatcagc

SEQ ID NO: 450138 - DNA, 201 bp, Homo sapiens
tctttctttctttctttctttctttctttctttctttctttctttctttctttctttttttctttctctctctctctctctttctttctttcttttttttkgacagagactccctctgtcacccaggctagagtgcagtggcgcgatctctgctcactgcaacctccacctcctgggttcaagcaattctcctgcctcagc

SEQ ID NO: 450139 - DNA, 201 bp, Homo sapiens
tctttctttctttctttctttctttctttctttctttctttccttccttccttccttccttccttccttccttccttccttccttctttctttctttctttctttctttctttctttctttctttctttctttctttctttctttttttctttctctctctctctctctttctttctttctttttttttgacagagactcc

SEQ ID NO: 450140 - DNA, 201 bp, Homo sapiens
ctttccagttactccaccccactcccagtgaccatcattctgacttctaactgtgtagacatgttttgcttgttttgtactttacaaacatatctactctattttaggtggctagacaatgtgttttacaatgctggccatgacagtgtttgaaagaataaaatggaatcaaatagaatgggcagtatcagagtgtgttgc

SEQ ID NO: 450141 - DNA, 201 bp, Homo sapiens
cccctctgatgagggtttgtagggtggactccccagtcccttagataagaatttgggcaagagaagaaaaagatcagccattggtccttagtgacaaccawagctagtggccacagggaggttcttgggcgggaggagacattgatctttcccagtgctctgccccccatctggctgtttgctctataaagcaaaagggag

SEQ ID NO: 450142 - DNA, 201 bp, Homo sapiens
ttctttctttctttctttctttctttctttctttctttctttccttccttccttccttccttccttccttccttccttccttccttctttctttctttctttctttctttctttctttctttctttctttctttctttctttctttttttctttctctctctctctctctttctttctttctttttttttgacagagactc

SEQ ID NO: 450143 - DNA, 201 bp, Homo sapiens
tcctttccagttactccaccccactcccagtgaccatcattctgacttctaactgtgtagacatgttttgcttgttttgtactttacaaacatatctactctattttaggtggctagacaatgtgttttacaatgctggccatgacagtgtttgaaagaataaaatggaatcaaatagaatgggcagtatcagagtgtgtt

SEQ ID NO: 450144 - DNA, 201 bp, Homo sapiens
ggactccccagtcccttagataagaatttgggcaagagaagaaaaagatcagccattggtccttagtgacaaccaaagctagtggccacagggaggttctygggcgggaggagacattgatctttcccagtgctctgccccccatctggctgtttgctctataaagcaaaagggagagcaaagaggaaagggaggttttaa

SEQ ID NO: 450145 - DNA, 201 bp, Homo sapiens
ctttctttctttctttctttctttctttctttctttctttctttctttccttccttccttccttccttccttccttccttccttccttccttctttctttytttctttctttctttctttctttctttctttctttctttctttctttctttttttctttctctctctctctctctttctttctttctttttttttgacag

SEQ ID NO: 450146 - DNA, 201 bp, Homo sapiens
acacggtgaaaccctgtctctactgaaaatacaaaaaaattagccgagcatggtggcaggtgcctgtagtcccagctactcaggaggctgaggcaggagartggcatgaacctgggaggtggagcttgcagtgagccaagatcgcaccattgcactccagactgggtgacagagcgagactccatctcaaaaaaaaaaaaa

SEQ ID NO: 450147 - DNA, 201 bp, Homo sapiens
tttctttctttctttctttctttctttctttctttctttctttctttctttctttccttccttccttccttccttccttccttccttccttccttccttcyttctttctttctttctttctttctttctttctttctttctttctttctttctttctttttttctttctctctctctctctctttctttctttcttttttt

SEQ ID NO: 450148 - DNA, 201 bp, Homo sapiens
agatcgagaccatcctggctaacacggtgaaaccctgtctctactgaaaatacaaaaaaattagccgagcatggtggcaggtgcctgtagtcccagctacycaggaggctgaggcaggagaatggcatgaacctgggaggtggagcttgcagtgagccaagatcgcaccattgcactccagactgggtgacagagcgagac

SEQ ID NO: 450149 - DNA, 201 bp, Homo sapiens
gattctgtttcccttgcaagcagcttcaggcatctggctctttctttctttctttctttctttctttctttctttctttctttctttctttctttctttcyttccttccttccttccttccttccttccttccttccttccttctttctttctttctttctttctttctttctttctttctttctttctttctttctttct

SEQ ID NO: 450150 - DNA, 201 bp, Homo sapiens
gcgggcggatcacaaggtcaggagatcgagaccatcctggctaacacggtgaaaccctgtctctactgaaaatacaaaaaaattagccgagcatggtggcrggtgcctgtagtcccagctactcaggaggctgaggcaggagaatggcatgaacctgggaggtggagcttgcagtgagccaagatcgcaccattgcactcc

SEQ ID NO: 450151 - DNA, 201 bp, Homo sapiens
gtgattctgtttcccttgcaagcagcttcaggcatctggctctttctttctttctttctttctttctttctttctttctttctttctttctttctttctttccttccttccttccttccttccttccttccttccttccttccttctttctttctttctttctttctttctttctttctttctttctttctttctttcttt

SEQ ID NO: 450152 - DNA, 201 bp, Homo sapiens
gtgctccattgttaggtgcatataaatttaggattgtaatatcttcttgttggattaattcttttatcactatataatgcccttctttgtcttttttttttaactgttgttgctttaaagtctgttttgtccgaaataagaatagctacttttgcttgcttttggtttccatttgtgtgaaatatctttctccaacctttc

SEQ ID NO: 450153 - DNA, 201 bp, Homo sapiens
ttgtgattctgtttcccttgcaagcagcttcaggcatctggctctttctttctttctttctttctttctttctttctttctttctttctttctttctttcyttccttccttccttccttccttccttccttccttccttccttccttctttctttctttctttctttctttctttctttctttctttctttctttctttct

SEQ ID NO: 450154 - DNA, 201 bp, Homo sapiens
tcttttgctgtgcagaagctttttagtttaactaggtcctatttatttagtttttgcatttgcttttgaggtcttagtcattaattctttgcctaagctartgtccaggcattttttctgatgccattttctagaattcttagagttttggatcatagatttaagtctttcatctatcttgagttagtttttgtataaggt

SEQ ID NO: 450155 - DNA, 201 bp, Homo sapiens
attgtgattctgtttcccttgcaagcagcttcaggcatctggctctttctttctttctttctttctttctttctttctttctttctttctttctttctttctttccttccttccttccttccttccttccttccttccttccttccttctttctttctttctttctttctttctttctttctttctttctttctttctttc

SEQ ID NO: 450156 - DNA, 201 bp, Homo sapiens
gcaaatatttccccccactctgtgggttgtgtgtttactctgctgattacttcttttgctgtgcagaagctttttagtttaactaggtcctatttatttaktttttgcatttgcttttgaggtcttagtcattaattctttgcctaagctaatgtccaggcattttttctgatgccattttctagaattcttagagttttg

SEQ ID NO: 450157 - DNA, 201 bp, Homo sapiens
aaatgtctttcctctgagaaagcccaggcctccaaaggcccagccaggctggcgtcagtctggggtcagctgcggggaggctccaggccatgtgtgacacrggagtttaccccatcccagtttccagtggagaagcatcgttctcgtccacccccgtcatgctcttttccaccttctccaggggaagggatattttcagtc

SEQ ID NO: 450158 - DNA, 201 bp, Homo sapiens
tttagttccttgtagattctggatactagtcctttgttggaggcatagtttgcaaatatttccccccactctgtgggttgtgtgtttactctgctgattayttcttttgctgtgcagaagctttttagtttaactaggtcctatttatttagtttttgcatttgcttttgaggtcttagtcattaattctttgcctaagct

SEQ ID NO: 450159 - DNA, 201 bp, Homo sapiens
gaggctccaggccatgtgtgacacgggagtttaccccatcccagtttccagtggagaagcatcgttctcgtccacccccgtcatgctcttttccaccttcyccaggggaagggatattttcagtctgtacaacgaatccactgaaatgttaaggtgggcacagtggtctggggtcttcgaccttgtttatacgtggtgcct

SEQ ID NO: 450160 - DNA, 201 bp, Homo sapiens
gagcctaggagttcaaggttgcagtgacctatgatcgtgccactgcactccagcctgggtaacagagcaagacactgtctccaaaaaaaaaaaaaaaaaaagcagttcagtatggtgctgaacatcaggttcttgggacacagtcttccagaactgtcacagtgctctgcaaagccacgttcctgtgttcatctcctagca

SEQ ID NO: 450161 - DNA, 201 bp, Homo sapiens
taccccatcccagtttccagtggagaagcatcgttctcgtccacccccgtcatgctcttttccaccttctccaggggaagggatattttcagtctgtacarcgaatccactgaaatgttaaggtgggcacagtggtctggggtcttcgaccttgtttatacgtggtgcctgttactggtcgggtctgtacaggcagtttcc

SEQ ID NO: 450162 - DNA, 201 bp, Homo sapiens
actcactggatttgagaaccgtggggttgttcagacagcagggacgttgatgttgttccttctgcgttcctggtgatgctgttctgttctcccaaggcctrtgcggtggtgagaatctccaaggatacaagacagtgatctggagcgagtgtcctgaaagcagactctagcactcaggactgccaacaccctccccgggtt

SEQ ID NO: 450163 - DNA, 201 bp, Homo sapiens
ctcactggatttgagaaccgtggggttgttcagacagcagggacgttgatgttgttccttctgcgttcctggtgatgctgttctgttctcccaaggcctakgcggtggtgagaatctccaaggatacaagacagtgatctggagcgagtgtcctgaaagcagactctagcactcaggactgccaacaccctccccgggttt

SEQ ID NO: 450164 - DNA, 201 bp, Homo sapiens
actgccaacaccctccccgggtttccttggtctggaattcccatcccctggttccacctgttacatcacacctccccttcaaggaccagtgcagatgccaygtccttcacggggctcagaatgctcaccagcttcctctccaccgagggccacagcccctggagaccccttgagctgagtgctttgtccttgcatactctt

SEQ ID NO: 450165 - DNA, 201 bp, Homo sapiens
ttagctatatcttccattggtgcctattacatgcagaaatccttgattctgagttccctgacaagattatcaaaaaggaccattaaaaaagcagacctttsactgggtgtggtggctcccacctgtaatcccggcactttggaaggctgaggctggaggactgcttgagcctaggagttcaaggttgcagtgacctatgat

SEQ ID NO: 450166 - DNA, 201 bp, Homo sapiens
ctggagaccccttgagctgagtgctttgtccttgcatactctttctggcctcatagtggggcttggccattgtcccttcactccagatctctcctttcagdtccaggaagtgcatcttgaacttaactttccagacccccccttcagttttccagtccttagagaggtggacttctgattcctttgtctctgtgccctgta

SEQ ID NO: 450167 - DNA, 201 bp, Homo sapiens; identical to SEQ ID NO: 394526

SEQ ID NO: 450168 - DNA, 201 bp, Homo sapiens
tttgggcaggaaggatctgtcagcctccagctggtggaagaggaccagggcgggagctgagcagtgccttgactccgaaggacttggaagaggagggagakggagtggaggccggagtggagaggatagactggccctgaggcctctgcgttcccagcccggggcctggacttcctgtgtttggctgctgtttggagcttg

SEQ ID NO: 450169 - DNA, 201 bp, Homo sapiens
tcatagtggggcttggccattgtcccttcactccagatctctcctttcagatccaggaagtgcatcttgaacttaactttccagacccccccttcagtttkccagtccttagagaggtggacttctgattcctttgtctctgtgccctgtagcctcaggtcaggcttaaggcaaggtctcctcacctggcctggggagagt

SEQ ID NO: 450170 - DNA, 201 bp, Homo sapiens
agctggtggaagaggaccagggcgggagctgagcagtgccttgactccgaaggacttggaagaggagggagagggagtggaggccggagtggagaggatasactggccctgaggcctctgcgttcccagcccggggcctggacttcctgtgtttggctgctgtttggagcttggtgatgattaatgaggaaatacgcactc

SEQ ID NO: 450171 - DNA, 201 bp, Homo sapiens; identical to SEQ ID NO: 394528

SEQ ID NO: 450172 - DNA, 201 bp, Homo sapiens
ggagtggaggccggagtggagaggatagactggccctgaggcctctgcgttcccagcccggggcctggacttcctgtgtttggctgctgtttggagcttgstgatgattaatgaggaaatacgcactctgaagagcttatacctccctggactgtgaggccacatctgcatttataacacagtctgtgatgtgacagagcc

SEQ ID NO: 450173 - DNA, 201 bp, Homo sapiens
cccagcccggggcctggacttcctgtgtttggctgctgtttggagcttggtgatgattaatgaggaaatacgcactctgaagagcttatacctccctggastgtgaggccacatctgcatttataacacagtctgtgatgtgacagagccatttcttgaggaactttggttctggtgaggcagcatcaggactctctagag

SEQ ID NO: 450174 - DNA, 201 bp, Homo sapiens
taacactgggttcacacttggcagtgactgcttttggtaaaatatgtaattttttataactggacgactcaatttctccttcatcctctgctagagcctgrcattccagatgactacttgtggagttgtgttaatcgaaccttaaaaattattaaatgatgacctggtgcggtggctcatgcctgtaatcccagcactttg

SEQ ID NO: 450175 - DNA, 201 bp, Homo sapiens
gtctcgaaaaaagaaacaacaacaaaatcctttctgtgttatttgctgatcctgccatatgtcagagaagaccgtagttaagactgtatataagagcagaraaaaccattctatccagaggctcagaaagtttacttttttgcccaagtcatacagctagaaattgaccctggagttttaacttcaactttactgcattac

SEQ ID NO: 450176 - DNA, 201 bp, Homo sapiens
gcccaggatggtggcatgcagctgtggtcccagctacttgaaaggctgaggcaggaagctcacttgagcctgacaggtcaaggctgcagtgagccatgatygggccacggtactctatgctgggcagcagagtaagaccctgtctcaaaaacaaacaaacaaacaaacaaacatcactgcattggaatcccattagttgtc

SEQ ID NO: 450177 - DNA, 201 bp, Homo sapiens
gagctcccgggacctaaagtgaccagaaatacagctcctgagtcttgaggcacagctgcggcgtggtttacttagggtttgttctagcaaggacattaacygtcctccagtgtttattctgaagaaatgtttggttggccttcctcatctcactgcctgaccttgcagtatagaaaaatactgatcatcttggctcttaaa

SEQ ID NO: 450178 - DNA, 201 bp, Homo sapiens
aggctggaggactgcttgagcctaggagttcaaggttgcagtgacctatgatcgtgccactgcactccagcctgggtaacagagcaagacactgtctccaraaaaaaaaaaaaaaaaagcagttcagtatggtgctgaacatcaggttcttgggacacagtcttccagaactgtcacagtgctctgcaaagccacgttcct

SEQ ID NO: 450179 - DNA, 201 bp, Homo sapiens
gtgttttagagtcatactttctttctgttttttttaatgatgtccagggacaaaacaaagagtagtaatcatgtttatccaaatgctggcttagccttagwgaactctcaccttcttcagttctgcctctcccgggacctaaagccagtgggcccctcctccaccctggcatcctcgcctcctggtcctgcttatggaggg

SEQ ID NO: 450180 - DNA, 201 bp, Homo sapiens
tctgaattaaatttcacaaggattacctggaaagctgtgacgttttccgagtcctaaaacagaggagcactgttggttcctcccttttcctttctaggggyattgtggcagatgtctgttcctgcacttgcagctccatgagaggagaaaagcccccttcctcccagcagggccattgccactctgatgggcattacaggg

SEQ ID NO: 450181 - DNA, 201 bp, Homo sapiens
gagtcttgctctgttgcccaggctctagtgcggtggcgtgatctcggctcactgcaacctctgcctcctgggttcaagtgattctctgcctcagcctctcragtagctgggcttacagggatccacaaccacgcctggctaatttttgtattttcagtagagatggggtttcaccatgttagccaggctggtcttgaactc

SEQ ID NO: 450182 - DNA, 201 bp, Homo sapiens
atcagttagctgtaaatacgtggatttatttctgggttctcagtattgttccatctgtgatatacctttattctctgggaagcagaaattgaaaggcagtraactcctgttggacctaaattagaagggaaattgtttttacctgggaattattccatatgccccagatgggttactcaaatggaagacactggattttaa

SEQ ID NO: 450183 - DNA, 201 bp, Homo sapiens
tgaaccactgcacctggcctaccttgccatttgactttacaaggcagaaggaaagggaggagctgcagtttttggggctacccagtgtatatgttggcagrccacctggttcacccacagggatcccacaacaccagaaggtagtaggacatgttgcagtgtcactgatggggtgggcacaaactaggagaagccacggta

SEQ ID NO: 450184 - DNA, 201 bp, Homo sapiens
gcagtttttggggctacccagtgtatatgttggcagaccacctggttcacccacagggatcccacaacaccagaaggtagtaggacatgttgcagtgtcaytgatggggtgggcacaaactaggagaagccacggtatgtggtctgccagggtgtcttcttgctataaactctgaatgacatcagaagggaaaagagtacg

SEQ ID NO: 450185 - DNA, 201 bp, Homo sapiens
gcagaccacctggttcacccacagggatcccacaacaccagaaggtagtaggacatgttgcagtgtcactgatggggtgggcacaaactaggagaagccayggtatgtggtctgccagggtgtcttcttgctataaactctgaatgacatcagaagggaaaagagtacgaaattcagagtgaaaggcctgagtttgggtcc

SEQ ID NO: 450186 - DNA, 201 bp, Homo sapiens
cccaagaccaccctggcctgccacacccccatactgtgcctgtaaaaaccccaagaccctagcaggcagacacacaggtggcgggacgtcgagaggagcasatcagcggaggaacacatgggcggctggacgtcaagagaaaagcacagacaggcactgacaggcaccagcaggctgcaggccaccgactggcagaaggat

SEQ ID NO: 450187 - DNA, 201 bp, Homo sapiens
tccatgctcttttttttgtttttttgacatggagttttgctcttgttgcccaggctggagtgcaatggtgcgatctcagctcactgcaacctctgcctccygggttcaagcaattcttctgcctcagcctcccaagtagctgggattacaggcctgtgccaccacacccagctaattttgtatttttttagtaaagacagg

SEQ ID NO: 450188 - DNA, 201 bp, Homo sapiens
cccaaagtcacaagtctacaaatttgtctgaatcccgctgactttttatatattggtaattatggtagtttttggttttaatacagatgaaagagcaagcrtctagagaaggcaaagacttctccaagatattgcgagaggaacccatagagcttggcctgaacttcatccctttatcctcatctcattgctctgaatggc

SEQ ID NO: 450189 - DNA, 201 bp, Homo sapiens
tttcttttcctccctccctccctccatccttccttccctccctccttccttcgttccttctttccttccttcctccctcccttcctccctttctctttctytctctctctctctcttttccatccatccctccctccttcctccctccctccctccctccctccctccctccctccctcccttccttccttccttccttcc

SEQ ID NO: 450190 - DNA, 201 bp, Homo sapiens
gctatcaaatggcgtcgcatgctacagagaaatctatcatgaaaggaagagtcaattgatgtggcaaacttcattgttgtcgtattttaagaaattgtcasgaccaccccaaccttcaacaaccatgaccctgatcagtcaggagccatccacattgaggcgagaacctccagcagtaaaaagattatgattctctaaagg

SEQ ID NO: 450191 - DNA, 201 bp, Homo sapiens
gagaagagcttttcttttcgtgtctaaagcttttcccaccatgaaaacacctttacctgagatcttccaaagttcagaacaaagccatagccaaagccaawtaatgatggtaacgataataaacagcaccctatagctcttaccaagttatcaggcactattctgagcacttctcaggtattcacagaattaaccggccct

SEQ ID NO: 450192 - DNA, 201 bp, Homo sapiens
tctgtctcttggaaatggcttgcacaaaaaggttttttttttttgttgttcctttaaaatttggtaaagctcacctctaaatctttctgggttgttgcatygtagagtggaggcagtggacttctgatgacagattcattgtttatttaggttctatttccttttgtttattcaggttctattccttttcaatgaactaca

SEQ ID NO: 450193 - DNA, 201 bp, Homo sapiens
atctttacttggtgttgtcccattttttatggtcttttctgagataaacacttttgaacggtacaggttatttttgcaagatgcctctcaatttgggtcartttggatcaatttggatcaatttggatttgtctaaaatttttcatcatactttgacttaggttacatatttttggcaagatataggtaatgtaatgtggt

SEQ ID NO: 450194 - DNA, 201 bp, Homo sapiens
gaggatctcttgagcccaagagtttgataccagcctgggcaacatagcgaatcctcatctctatgaaaaaaataaataaataaaaaataaaaaattaccccaagcgtggtggcatgcacctgtagtcctagatacttgggaggctgagatgggaggattgcttgggtccaggagtttggggatgcagtgagccatgatcaa

SEQ ID NO: 450195 - DNA, 201 bp, Homo sapiens
gtgccgggcgcaggggaccgcggcgcggccgcgcactgcaggcgtgctcttctgttttctccttcgttccttttaaatgaagggaaagaaaattgttacagaccaaatgtcatcaaacttggtgtgaaaacatactcatttataaagtcttatcgctactcacgccacgccccgaggaagttgtgttcctgggtgggcacg

SEQ ID NO: 450196 - DNA, 201 bp, Homo sapiens
agaaagaatgagagaagtgaaagcggaaaccctttttaaaaccatcagatcttgtgagacttattcactaccatgagaacagtatgggggaaaccgcccarcagccgcttgattcaattagctccctctgggtccttcccacaatacgcaggaattaacggagctacagttcaagatgagatttaggtggggacacagagc

SEQ ID NO: 450197 - DNA, 201 bp, Homo sapiens
gtttcgccatgttggccaggctggtctcgaactcctggcttcgtgatccacccacctctgcctcccaaagtgctgcaattacaggcatgagccaccacacytggcctagttgttgttttcatttgcccaagacatactgttctgttcctcccctcagtccctctgtctgcaagtgaaacattgtctttttaacctaaatac

SEQ ID NO: 450198 - DNA, 201 bp, Homo sapiens
ggtcaatgtcaccttctcagtgaggcctaccctgacctccctgtaggaaaatgcaactcacctcactcccatgccccgtaccttatattgttttccttgcrcttaccaatttctaacaaagcatgtaatatctgtttattataacatatctatattttatggtttatgtttcacgcgacttgaatgtaacctttgtgtggg

SEQ ID NO: 450199 - DNA, 201 bp, Homo sapiens; identical to SEQ ID NO: 86558
  misc_feature (1)...(201): n = A,T,C or G

SEQ ID NO: 450200 - DNA, 201 bp, Homo sapiens; identical to SEQ ID NO: 86559

SEQ ID NO: 450201 - DNA, 201 bp, Homo sapiens; identical to SEQ ID NO: 86561

SEQ ID NO: 450202 - DNA, 201 bp, Homo sapiens; identical to SEQ ID NO: 86555

SEQ ID NO: 450203 - DNA, 201 bp, Homo sapiens
ctcccgagtagctaggattataggcatgcaccaccaaccagctaatttttgtattgttagtagagacggggtttcaccatgttggccaggctggtcttgarctcctgacctcaggtaatctacgtgcctcagcctcccagagtgctgggattataggtgtgagccaccacacccagccatgtttcaagaatttgtgcttca

SEQ ID NO: 450204 - DNA, 201 bp, Homo sapiens
tgtcattgcctatttaacgagcttcgcagtgccctcaatttgctaagttaactttggccacgccgtccgtgagaggtcagactggtgatttccaactcccrccgggcaccgggtgctgcaccggttatcccaacaggctggcacagagggctgaaatggacttggaaagccaaataattaattttcatgcgagtttttgat

SEQ ID NO: 450205 - DNA, 201 bp, Homo sapiens
ctccagtgtgaccttgggcatacccttcacccccgggctctgttcgctggggcagggtctgcgctctggagtcaggctgcctgggtttgaattttaccttyctcgccaagtcccttgagtggcaagttacttatcttctcattgtctccgttttgttatctgaagaatgggaccatagtagttcccgcctcatgggatgat

SEQ ID NO: 450206 - DNA, 201 bp, Homo sapiens
ttacaggcaagaactgaggaggcaatactatttagaatccttgataaacagttccaaaagaaaaaaaaaaacaggctttggtgactctcatgggccctccrtgccaagagtctatggctctgtgatatattaaatcaggcttgttaattatttaatctaacagctgccatgcaccctcattttaaaaacagatgaggcaat

SEQ ID NO: 450207 - DNA, 201 bp, Homo sapiens
ctggctcatggttctagaggctaggaagtccaagagcttggcactggcctctggtgagggccttcatgctgtgtcattgtgggcaaaagagcaaaacttgytttgataaaatcactcttggcaataactgaccctcctcttataataacattaattcattcatgacagcagaaccctcctgacccagtcacctcttaaaag

SEQ ID NO: 450208 - DNA, 201 bp, Homo sapiens
taacttataagattatttatttagctatcagaaatacaacattgttcccttttcttttttttaaattatactttaagttttagggtacatgtgcacaatgkgcaggtttgttacatatatatatacatgtgccatgttggtgtgctgcacccattaactcgtcatttaatgttaggtatatctcctaatgctatctctccc

SEQ ID NO: 450209 - DNA, 201 bp, Homo sapiens
gcaggtttggtcataggtcagtgacttttctttcctttgaattccccaaaagtcttggcaagagctccatagctttcccattttctttttttgtgtgtgtrtaatgcaggttatgagacataccatcctcactctaatttatattttggggggaatttaatagatccattttctttttcatagagttatgtttgatcatca

SEQ ID NO: 450210 - DNA, 201 bp, Homo sapiens
caggccaggccaggtgatcttgaacccgaggaacagaagtcatcacgtttgctctatgtctatcaggaaaacagctcaaagcacattccctattcatgtcrgggcagtagaatcttcccattttcccagagacaacgcgtaatggcaggccagaggaagctctgtgatcaccctagagaggaaaacagcaggcgtaagaaa

SEQ ID NO: 450211 - DNA, 201 bp, Homo sapiens
atcctggccaagcatattggttctcaaagtgttgcctggagtctggatgtgggaatctgcttcaggccaggccaggtgatcttgaacccgaggaacagaartcatcacgtttgctctatgtctatcaggaaaacagctcaaagcacattccctattcatgtcggggcagtagaatcttcccattttcccagagacaacgcg

SEQ ID NO: 450212 - DNA, 201 bp, Homo sapiens
ctcactcatcaaattcaatagtcacaaagtaataagtaaatacccctgggtgactgaaatatagtaagtactatacagtctgtatttcaggtacctaggarttatttatttttctaatagttaacagtgaattctactttcctatgctgggaagtcatttgataatttggtatgggaaaacttaataatgctccttgggtc

SEQ ID NO: 450213 - DNA, 201 bp, Homo sapiens
ctccccgatcagtgcctggttctctgatcctggccaagcatattggttctcaaagtgttgcctggagtctggatgtgggaatctgcttcaggccaggccargtgatcttgaacccgaggaacagaagtcatcacgtttgctctatgtctatcaggaaaacagctcaaagcacattccctattcatgtcggggcagtagaat

SEQ ID NO: 450214 - DNA, 201 bp, Homo sapiens
ggagttatttatttttctaatagttaacagtgaattctactttcctatgctgggaagtcatttgataatttggtatgggaaaacttaataatgctccttgsgtcacaaatactaatgttgggtctgttaaaataagggagtgtataaaaattaatgagactcgatttttagaataagtatcccgatttttccaatgtaatt

SEQ ID NO: 450215 - DNA, 201 bp, Homo sapiens
aaggaatggggtgtgtgtttttccagaatagggtgggagggaaatggcctctcacagcccacttgtcagaactgctcccatgtcccgatccgacttcagargtgggaaaacgttgggagctggtgaggtgggtggggaaaatcactgtctgccacacctctcgtttctggcattcagtccacttttgtggccatcgtttgt

SEQ ID NO: 450216 - DNA, 201 bp, Homo sapiens
tgaaaacaaaacaaaaaaaattgaacaacaacaataataacaacaatacgtacacacaactgcgggatttttggatttatgttatccagaattaagtaccrgaggtagacaatgctgaaaaacacgtatgccgatcacaaactcatagggcaacatgaactgtgggatgaaacagatgggttgccactgcctacctttgac

SEQ ID NO: 450217 - DNA, 201 bp, Homo sapiens
ttcattattgagtaacttattttctgtttgaagaaacggaggcttagtggtttaagaaagctgattaaagtcaaatggcaaggatggggtaaatgatggarctctaagcattgggtgttggcgtctgtaatatttgtgcatgactgactacacagctctccttctgagtcagtggcttttaagctctttggaaccacagta

SEQ ID NO: 450218 - DNA, 201 bp, Homo sapiens
gcaagtcacgtgaaactgtccaggcagacaaattaggcagtgttcggtgctcattcagccgtggggagcggacaggacggaaaaattcctttcattcccargctgcccagaagtagctgcaagcacttttaaggtaactgtgtcaaggacttacaataagtagccagtaacccttttaaatgtctgcaatgttaacatagc

SEQ ID NO: 450219 - DNA, 201 bp, Homo sapiens
tctccgccttcatcgttacttggtgttctctgtgtgtgcctgtctgtgtccaaatttcccctaattataaggacagcagggatattgtattaggggcccascctacttcagtatgacctcttcttactgaattgtatctgcaaagatcctatttccaaataaggtcacattctgaggtaattggggttaggacttcagcac

SEQ ID NO: 450220 - DNA, 201 bp, Homo sapiens
tgatgtacatgccaggtactcactgttgcatgctttgtagaattttttgtctgaatgtgaactggacgggcccacctcagggcttgggcacctttgtctcygtgcagcccttgaacttaggtgagactgcattaagctccagagggataatgggggttgcccactgaataatccaaccccacttgctttcccctttcacga

SEQ ID NO: 450221 - DNA, 201 bp, Homo sapiens
gacactggtgactatcctttgttcttgaggctcctttgatctctgggacactttcctgtgatgccatgaaggggaacgagcaggaagtttagggtgcagamtttggggtgcatcacctggcttcagatgctatctttgcccatgaactcactcttggtaaagtcaccctgtggggtttctccttagtgaaagagcacatta

SEQ ID NO: 450222 - DNA, 201 bp, Homo sapiens
ttatggaaaaaaatcaatgcatgtttatttttagaaaaaataaatataaagataggcacaagaaatagtttaaaaaaatcacccacacttctatagttccraagtaattattgttaactaactatgtatgtacctatgtactcaaatgttcatgtatatacccatagatatgcacacaaagcattttgtgaaatttggatt

SEQ ID NO: 450223 - DNA, 201 bp, Homo sapiens
gtagcccatgtaagtgaaaccatacagtatttgtcctgttgtgtctggtttattttatgtagcatgtcttcaaggttcatccatgttggagcatgtgacaraatttccttgctttttagggcagaatagtatttcactgtgtgtatatatatagcattttgtttgtctattcatctaccagtgaacgctcgggttgttttc

SEQ ID NO: 450224 - DNA, 201 bp, Homo sapiens
aatcacccacacttctatagttccaaagtaattattgttaactaactatgtatgtacctatgtactcaaatgttcatgtatatacccatagatatgcacasaaagcattttgtgaaatttggattatagtaaccattaattcatagcttgctcttttcactttgcacattctgaagattatttctgttaacaaatacttgc

SEQ ID NO: 450225 - DNA, 201 bp, Homo sapiens
cattttgtccatacacggtattgtgtgaccttcactactgtctagccccaggacattttcattaccccagaggaaatcttgtacccattatcagtcatttytcctccctacccccagcccctgggaacccccattctatttcctgtttctatggattttgctactctaggtagcccatgtaagtgaaaccatacagtattt

SEQ ID NO: 450226 - DNA, 201 bp, Homo sapiens
ccgacatccccctattagtttttgagcacctggaccagtaaggtgttccagtctcactttgcacttccctgtctccacctggaatcagtcatttctccagrgaaccaaccttaaatatcataagttagtctacttaaatatgataaagtatggtccaaactttgaaagagaagattttaaaaaaatccattagcaccaaat

SEQ ID NO: 450227 - DNA, 201 bp, Homo sapiens
tttgagaaatggcaattttgggtgcagagaagagtagtagaagtgacagtcctaggcctttgccctggcactgatggtgcaactttgggcaagtcagcaamcttcagggctcagttttctcacctgtaaagtgggtaggagaagaatagagaagtcctctctcccggctgtggatcagagacagcagaggagccttcttta

SEQ ID NO: 450228 - DNA, 201 bp, Homo sapiens
aggatgtttgttgtggggggtgcttgtggctccttaactggctctggaaagagcctacttcccatagtgaaccctgtgaggtccaattctgttcctccccytggagctccaagagaaggtcattgtccttgtagcagcaggtgcccccccaagctgggttctcactgcaggtgccagcgggctctcagtaggtatgacctg

SEQ ID NO: 450229 - DNA, 201 bp, Homo sapiens
tgggcaagtcagcaaacttcagggctcagttttctcacctgtaaagtgggtaggagaagaatagagaagtcctctctcccggctgtggatcagagacagcwgaggagccttctttataaatatgctgaggctcagcctcctcctgggggttttgtttcattggtttttgtggagcctgggaattgcaattgtaaaaaaagt

SEQ ID NO: 450230 - DNA, 201 bp, Homo sapiens
gacatctccaaataccggcgaagctagtcctgcctgcaaagttaaggcagttttttttatcagatctagagctggaaatcattgttaaatgaggcgatgargaagtgtgtatattattctggctcacttttaaaaatattttgatccatttatttcaacataattgatttcccctgtgattctgtatgttttgtattatac

SEQ ID NO: 450231 - DNA, 201 bp, Homo sapiens
tcttgtgtcgcctctagtgggcacagggatatgctttgcacatgatagtggtgacatttggtattaatatgtacttggcacgtgttggtggtgacattttrtattaatccatttggttttaagaaattctatacctttttaaaactctatgcattcctttgagagcatctgggaaatgctattttccttttcttcacagat

SEQ ID NO: 450232 - DNA, 201 bp, Homo sapiens
gcttttggaaaggactgactcatgacgtctgccattcattggacaagcttgtaaatgccttttccaccctctaatgagaagccttagggaaagtagaattstcccaaagtctctggaggttctgagaaggccgaccctgaatgcaagatgctcagagctggagtcttccgagtgcaggagaaatgccagcacctttttatt

SEQ ID NO: 450233 - DNA, 201 bp, Homo sapiens
atgcaagatgctcagagctggagtcttccgagtgcaggagaaatgccagcacctttttattgagccgtggcggtgtccaggttgctccttagtcccttgcrtggtttttgttacagctatttctttcttctttttttctttacttttaaaaaatttcaatagtttttggggtactggtggtttttggttacatgaataagt

SEQ ID NO: 450234 - DNA, 201 bp, Homo sapiens
agtttttgcatttgcttttgaggtcttagtcattaattctttgcctaagctaatgtccaggcattttttctgatgccattttctagaattcttagagtttyggatcatagatttaagtctttcatctatcttgagttagtttttgtataaggtgagagatggggatccagtttcattcttctatgtgtggcttgccaatta

SEQ ID NO: 450235 - DNA, 201 bp, Homo sapiens
agtcacctcttaaaaggtcccacctctcaacgctgttgcactggggattaagtttccttacacatgcactttgggggacacattcaaactgtagcaggaaktatttgctttctcataacatttttttaattaattaattttcagcgtttgttatatcagaatggacattatagcaatttccatggctgtgtcgctcctggc

SEQ ID NO: 450236 - DNA, 201 bp, Homo sapiens
gggccatggaaacagaacacaagccatccagctggaaagaaacgcaacaggtgtttctcttcccgtcgtcttggaggccaggtgtccaagataaaggtgtygtcagggctggctcctcctgaggcctctctccttggggtgtggatggcgccttcctcctgtctctgcacatggcctctcctttgtgtgtgtctgtctcca

SEQ ID NO: 450237 - DNA, 201 bp, Homo sapiens
tttcctccaggcagcccagccccttcagccccgtcagtgtcacgtgtttccccaggaccttcccgtgggtgcctctcatgccataacagggcaccacagaygagtcggcttcaacaacagacctcggttctctcacagtcctggaggctggcgtcccagatcaagccgtcacagggctggttcctcctgagacccctctcc

SEQ ID NO: 450238 - DNA, 201 bp, Homo sapiens
ctttaggagctggagggtgggtctgtgactgcactggcgaggactacctggtggaggggctgctgagtgggcccagccaggagagggtgtaaggaaagagrgcagcggtacctgcctcccgtcacgcagtgtcttggaagaatgaatgtggggacgtatttcatttcatgccatttgaatagctactagaattatccccac

SEQ ID NO: 450239 - DNA, 201 bp, Homo sapiens
cagtgtcttggaagaatgaatgtggggacgtatttcatttcatgccatttgaatagctactagaattatccccactttacaacagacacaagtggcctgcrttagattattaaggacgccaaaggagaaataaaccgtgacatcagccattccctctacatggcctgatgactttctctagccatacagcataatgatcga

SEQ ID NO: 450240 - DNA, 201 bp, Homo sapiens
cagtagtgtaatggtattaggagatggggcctttgggagttaattcagttatgggggtggagccctcataaatgcaataggtgcctttataagaagaaacrcaagagaaatgacctctctccctgccatatgagggcagggcaagaaggccaaaaaggtgactatctgcaaaccaggaagagtggggaccatggcatgcta

SEQ ID NO: 450241 - DNA, 201 bp, Homo sapiens
ctggtggcagaaatccaggctgcaaactgactattggttttagtcttagctctggacctcgcactttaagcaagagacttagtctctctaagactgggtgyctacaaatttttttttttttaatcagcaaaataaagataactatcctttccttaccattcacccagcgatactgttgtcccataaaaccacctgtgcata

SEQ ID NO: 450242 - DNA, 201 bp, Homo sapiens
ttgtcccataaaaccacctgtgcataaaaaagaaaagcatccctttcttctggctcttcagctgggtgtccttgggaaggggacctcctgcatgagcttcrgtgatggctgcatgagttagctaatgctatgtaatgaattaccactccagtagctgaaaccaacatttatcattgcagaatttctttgagactctaggca

SEQ ID NO: 450243 - DNA, 201 bp, Homo sapiens
ttctgggtctggtaatgaagtcatagaaggcccccagaatgcaacagtcctgaagggctcccaggctcgcttcaactgcaccgtctcccagggctggaagstcatcatgtgggctctcagtgacatggtggtgctaagcgtcaggcccatggagcccatcatcaccaatgaccgcttcacctctcagaggtacgaccaggg

SEQ ID NO: 450244 - DNA, 201 bp, Homo sapiens
tctgtagcctgaccatgtaagatgcaatgacctcttgtttctcttgttggattctgttcattagaagtaaatctcctggtcccacccctactcagggggasaggtttgcttcagggccgtgagtagaagtctgcaatcacagtggccctactcagtcatttctggggaaagtatctgagatgatatgtgtgaaataattgt

SEQ ID NO: 450245 - DNA, 201 bp, Homo sapiens
ttgacagtttggatttggaaatggagtagaaaataatttccttcccagtccatctctggaagcacacactgggagtggttgcccttgaggaggaaaacagsttagggatggagcgagacttacttcactatataactttttgtactattcaacttttagaaaccatttgtagacactgctttacgaaacttaaatagacat

SEQ ID NO: 450246 - DNA, 201 bp, Homo sapiens
tgtgtagcttgatcaggtttcacaaaaagcacaaatgcctgggcttgatggcagaaattcacagctagaacatcctcagcatccccaaagccccctagacyccggtcaaattgctgcctacccctcctccccaaaggtgacattcttctgacatctttcccacatccccagagattaggtgcatgcatcaatggcgtcatt

SEQ ID NO: 450247 - DNA, 201 bp, Homo sapiens
aacaacgtcaaaaaacaactactctgagtactattgtaggagtcttttggtgaacataagtactcatttctgtttggttctgtggggaaatacagctgatyctctttatctgcaggttccacatcctctgattcaaccaacaatggatcaaaaatatttgaaaaaatatacaacagtaaaaagtaatacaaaataaagaag

SEQ ID NO: 450248 - DNA, 201 bp, Homo sapiens
taataattttgacagatgccatggaattccattttagagaaccatcatcatttattttactagtcctccctgattgggcactcggttgtttgcagtttgcytttataaatagctcatgaatcaacattctttcaagtacatatttatacatatccttgattgtttccctagcatacatccttagaggtcaagtgtgactat

SEQ ID NO: 450249 - DNA, 201 bp, Homo sapiens
cagacttccttccagcctccaaaccctaggaggctgcaccaacttttgctttatttcaggagttggcacattttttccataaaaggccctgtagtaaatakttttagttttgccagccatatggtctctgtcatgaggactcaactctgctgttataacatgagtatggctacatgtttaggtagccatagacaatatgtg

SEQ ID NO: 450250 - DNA, 201 bp, Homo sapiens
cctgtagtaaatatttttagttttgccagccatatggtctctgtcatgaggactcaactctgctgttataacatgagtatggctacatgtttaggtagccrtagacaatatgtgagctgatagatgtaaccgtgttccaatgaaactttatttacaaaaacaaggagtgggtcagatttggcctgtgggtcatagcttgct

SEQ ID NO: 450251 - DNA, 201 bp, Homo sapiens
attttctgtttgaagaaacggaggcttagtggtttaagaaagctgattaaagtcaaatggcaaggatggggtaaatgatggagctctaagcattgggtgtyggcgtctgtaatatttgtgcatgactgactacacagctctccttctgagtcagtggcttttaagctctttggaaccacagtaaattccttttacctcatg

SEQ ID NO: 450252 - DNA, 201 bp, Homo sapiens
gatattataatttgctttcttaagagcactgactacaaagacatctcctaaactctttctttgtaaacttaccagaaacccttgtatccccatggatgaakccagagcttttcagtggctcaggtttctccttctaacagtgcttgaaattccttccacagagaatgaagcttttaattctagaaccaatgttcagattgt

SEQ ID NO: 450253 - DNA, 201 bp, Homo sapiens
ggcacagggatatgctttgcacatgatagtggtgacatttggtattaatatgtacttggcacgtgttggtggtgacattttatattaatccatttggtttyaagaaattctatacctttttaaaactctatgcattcctttgagagcatctgggaaatgctattttccttttcttcacagatgggaaaaggacaatctcca

SEQ ID NO: 450254 - DNA, 201 bp, Homo sapiens; identical to SEQ ID NO: 394515

SEQ ID NO: 450255 - DNA, 201 bp, Homo sapiens
tgatctgcccgcctcagccctccaaagtgctgggattataggcgtgagccaccatgccgagccttaacatcttgattgtattctatacgtgccatttcacrtggtctatttctcatttttcttgttcttttttcttttctatgttgattagatacactggagcttaatccattttagagtgtgagtgcatagtgcatattt

SEQ ID NO: 450256 - DNA, 201 bp, Homo sapiens
gtgttttctgtccactgtcagatttttggtttgtcaataatatatggctatgatctatttttcagtatacagtaaatgcactctttttaaaaaaattagcyccatactaaacaaaaatatacatgcatgtgtgtatacctatgtgtatagatatatataaaatatatattatatatgataaattttaaatggttatgaaaa

SEQ ID NO: 450257 - DNA, 201 bp, Homo sapiens
tcctgggttcaagcaattctccctgcctcagcctcctgagtagctgggtctacaggcccacgccactgcacccggctaatttccatatttttagtagagaygaggtttcaccatgttggccaggctggtctcgaactcctgatcttaagtgatctgcccgcctcagccctccaaagtgctgggattataggcgtgagccac

SEQ ID NO: 450258 - DNA, 201 bp, Homo sapiens
gaatttcaagcctgtctcttaaatcttgagccagacctcattggttaaccccagccagctcccttattaagaaaacttgttatatatgcaaacttcagttmgtaagagtccgttaaactggaaataggatgaccactgccatcttgagcctgtgcactgtagcttacagcattctcagaactttcacacacacccctgaac

SEQ ID NO: 450259 - DNA, 201 bp, Homo sapiens
cctgttttcatttggtttaacccagtggtttcccagtttgcaattctaccttcctctcacccccgcaggggcgcacacagggactcctgatgtctgaaggrgcatggttagggaaactctgcctccacctacagagagaactccacgttccctctagccctagtcttggcttcccttcaagcccttgatttttttctttct

SEQ ID NO: 450260 - DNA, 201 bp, Homo sapiens
ttttgcatttgcttttgaggtcttagtcattaattctttgcctaagctaatgtccaggcattttttctgatgccattttctagaattcttagagttttggrtcatagatttaagtctttcatctatcttgagttagtttttgtataaggtgagagatggggatccagtttcattcttctatgtgtggcttgccaattaccc

SEQ ID NO: 450261 - DNA, 201 bp, Homo sapiens
ggctgcgtacaagggattcccaaaatgtgggtcaccaactatctgcatcagaatcacttggggtatcattcgggatatcctgactctgtgatcctggaggygggctttgaatctgcatgtgcaatgatattccaggtgacgcttgggattctgctgtctgtggagcaaggggataaatgtgctctctgcatgtgaagggtc

SEQ ID NO: 450262 - DNA, 201 bp, Homo sapiens
gtttatgtccattgtttctttgttgactttctgccttgatgatctgtctagtgttatcactggggtattgaagtcccccactattattgtgttgctgtctrtctaatattgtaggtctagtagtaattgtttttaaaatctgggtgctccattgttaggtgcatataaatttaggattgtaatatcttcttgttggattaa

SEQ ID NO: 450263 - DNA, 201 bp, Homo sapiens
gggtctgccttgtgttagtgcttcagctccggggctgggaaggtgtggaatgggaagggtgtaatctgttccttccatcttcaccatttttgggagagccytttacaagtctctatctattccagctcatctcggatggtgggagatgtggagatagacagcattaggaaagtagtttgacttccttataatcctacagtt

SEQ ID NO: 450264 - DNA, 201 bp, Homo sapiens
cagaatttgaaaaaattacactcagttccttccccaagaagtagaggaaggtcagaaatggaggatggtggggaaggaatggggtgtgtgtttttccagartagggtgggagggaaatggcctctcacagcccacttgtcagaactgctcccatgtcccgatccgacttcagaggtgggaaaacgttgggagctggtgagg

SEQ ID NO: 450265 - DNA, 201 bp, Homo sapiens
gcaaactactattgcaaggtcaattttccaggaaaattctaaggaagaacatctaagagctgtttttgaactccagtctgtggttccaaagtggtggatgsccattgatttcaaagcaaaccccatgttccttcataggaagtctactgtttcagtattttctaaagactagtatctaacaaaatagcatgcatttacatt

SEQ ID NO: 450266 - DNA, 201 bp, Homo sapiens
gattgtaatatcttcttgttggattaattcttttatcactatataatgcccttctttgtcttttttttttaactgttgttgctttaaagtctgttttgtcygaaataagaatagctacttttgcttgcttttggtttccatttgtgtgaaatatctttctccaacctttcaccttgagtttatgtgagtgcttaggtgtta

SEQ ID NO: 450267 - DNA, 201 bp, Homo sapiens
actcctttccagttactccaccccactcccagtgaccatcattctgacttctaactgtgtagacatgttttgcttgttttgtactttacaaacatatctactctattttaggtggctagacaatgtgttttacaatgctggccatgacagtgtttgaaagaataaaatggaatcaaatagaatgggcagtatcagagtgtg

SEQ ID NO: 450268 - DNA, 201 bp, Homo sapiens
accccatgttccttcataggaagtctactgtttcagtattttctaaagactagtatctaacaaaatagcatgcatttacattaagataccacccaagcacrcagggttgagtgacagccttttgttgaataacaattcacaattaaacagatcaacttaaatgtgtgtggtttgacttcagcgtggtgcgctagggagaag

SEQ ID NO: 450269 - DNA, 201 bp, Homo sapiens
ctctattagaaactgtggttgcacactgttggtgggatgtaaattgttacagcctttatggaaacagtatggaggttcccccaaaaattaaaatagagctrtcctataatccagcaatcccattcctgggtctatatccaaaagaaatgacatcttcatattgaagagatatctgcatttccacgttcattacatcactct

SEQ ID NO: 450270 - DNA, 201 bp, Homo sapiens
caacctttcaccttgagtttatgtgagtgcttaggtgttagctgaatctcttgaagacagtagatatttggttggtgttttttttgtttttttttagtccwttctgccatttttaatcttttaagtggaacatttaggccatttacattaggtcaatattaagatgtgaggtactgttgtattcatcatgttagttgttac

SEQ ID NO: 450271 - DNA, 201 bp, Homo sapiens
agcccttcctttctttatgaatataggcactgtcttagttccctgcggctgtggtaacaaagcgcctcaaactgggtggcttaaaacacagacatttgctstctcagggctctggaggctggaagtctgagaccagagtgtcactggggttggttcttctgaggctgtcagggagaatctactccaggccctcccgcaggc

SEQ ID NO: 450272 - DNA, 201 bp, Homo sapiens
tgaattagcttgatttaatcatttcacaatatgtacatagctcaaaatatcacagcgtacactgtaaatacacataatttttatttgtctgtgtgttttamtaaagctcagacaataacaataaaataaaaaccacaatgaaagacacattggctttaagagtccttgaaagaaacggtggcaaattcttggagaagaaaa

SEQ ID NO: 450273 - DNA, 201 bp, Homo sapiens
aacaggcattaattgtgagcaaaagtaaatacaaaacaactactgtgacaattgtaacccccgaacaatcaggccaggggttagagactgcattgcaggcyggtcactgcacatgtgagagccctgaggccagaaagagttgatgaggttgataaattaaaggaggtctggtgatcggagggtgaagtttgggaaaaattg

SEQ ID NO: 450274 - DNA, 201 bp, Homo sapiens
caaaggggtggaaaccccacattctttctcgaggctgtgaatacccagtaatgcacttaaatgctaaatgcaggtcatgggcctgagaatctttgctgtcyttcacgctgacactgtgggtttcattcagtaacttggatgagatgtccgcagatcaaggtgtggtagttgttttcccatcacagtttcaattcttgtatt

SEQ ID NO: 450275 - DNA, 201 bp, Homo sapiens
ctgatgggacctgtcacctcatattctggagggacgggtggacgagactcgcagggctgtggaatgtgtgtagatgccaaagctgaaatgagaaccgtccrggtcactggactccactcattggtgctgtggaggaatgtttgcaataaagagaccctttcctgaggctaaggagtgttgttttgcgggtggttcatgaca

SEQ ID NO: 450276 - DNA, 201 bp, Homo sapiens
attctctaacaaccaacactcaaagccagatacctgtgaaaaaactgacatgttttaaatggaacaggagacctctccaacaaacccatcaatgtttaacwatcttaatgagctttaaaaaagtgtcatattttagctgtgaatcacttcacgttaaaatctgtggttttcctgccaaagttatctttagtaaacgcgatg

SEQ ID NO: 450277 - DNA, 201 bp, Homo sapiens
ttccaattagggccagaatcaggatcttgagtacaaagttcacacatcttctttgtaaaaaaatatgaaatcagaaatgaatctttaagaaattagctgtkgattacatgaaattattaaacaaattgcttggatctaaaaaacctttgggcctggcatggtggctcatgcctgtaatcccaggactttgagaggctgagg

SEQ ID NO: 450278 - DNA, 201 bp, Homo sapiens
ctggagtgcagaatctgctggagaaactgccattccgttattgactggctggtcaggccatacagcctggtggtctagatgtgtttggaggtagggcttcygtagcacagatagtgcctgttcatggctctgtcccaggtaaggcagagctagcttgtgctgagggcttctgctttgcagctggcctggggtggctaggat

SEQ ID NO: 450279 - DNA, 201 bp, Homo sapiens
ggggttagagactgcattgcaggccggtcactgcacatgtgagagccctgaggccagaaagagttgatgaggttgataaattaaaggaggtctggtgatcrgagggtgaagtttgggaaaaattgtagctggagagagagttgatgtgggactaagtcaggtcttttttttttttagacggagtctcactctgtcgtcagg

SEQ ID NO: 450280 - DNA, 201 bp, Homo sapiens
aattcttggagaagaaaaggactttcttaaggaaggaagctgtttctttggggcctgatgcaaccccttaggaagaccaagatcttcatgctcttgaaaargtgattgaagcagtgcctttctcaccaaagacactgattattggatttttgtgcttatttgtaaggatatatagctattataatgtcatttagatgctat

SEQ ID NO: 450281 - DNA, 201 bp, Homo sapiens
ggaaaaattgtagctggagagagagttgatgtgggactaagtcaggtcttttttttttttagacggagtctcactctgtcgtcaggctggagttcagtgaygtgatctcggctcactgcaacctccgcctcacatgttaaagcgattctcctgcttcagcctcccgagtagctgggactacaaatgcatgccaccacgccc

SEQ ID NO: 450282 - DNA, 201 bp, Homo sapiens
ttttttagacggagtctcactctgtcgtcaggctggagttcagtgacgtgatctcggctcactgcaacctccgcctcacatgttaaagcgattctcctgcytcagcctcccgagtagctgggactacaaatgcatgccaccacgcccagctaattttttgtattttgagtagagacggggtttcactatgttggccaggat

SEQ ID NO: 450283 - DNA, 201 bp, Homo sapiens
ggagtctcactctgtcgtcaggctggagttcagtgacgtgatctcggctcactgcaacctccgcctcacatgttaaagcgattctcctgcttcagcctccygagtagctgggactacaaatgcatgccaccacgcccagctaattttttgtattttgagtagagacggggtttcactatgttggccaggatggtctcgatc

SEQ ID NO: 450284 - DNA, 201 bp, Homo sapiens
aataagaaatggtatctcagcatagttttgattctatcttattataagtgaggttgaactactgttccatctttttgtatgattgagaacaatttttatawgtttttataacttgtcattctatatcttttgctcattattttctctctcagatttttgggctttttactccttctaattttaagaattcttttgatgtta

SEQ ID NO: 450285 - DNA, 201 bp, Homo sapiens
ttataacttgtcattctatatcttttgctcattattttctctctcagatttttgggctttttactccttctaattttaagaattcttttgatgttaggacygatggccccctttatctgcgttttgagtcataggaagtatttccttatatggaagtttttttctggtgcttatatcttatatggtttcatttatttgtct

SEQ ID NO: 450286 - DNA, 201 bp, Homo sapiens
gtttcatttatttgtctttctaggttttattcattcttctgtgtgatatgttgtatgcatctaatttttatcttcttccaaataactaagcagttgtcccrgcagcattgactgaaatctctgtctttggcctggtggtttgagatgccacctttatcaaacactgatttccatatgcacttaggtctctttctgggctct

SEQ ID NO: 450287 - DNA, 201 bp, Homo sapiens
tctaatttttatcttcttccaaataactaagcagttgtcccagcagcattgactgaaatctctgtctttggcctggtggtttgagatgccacctttatcawacactgatttccatatgcacttaggtctctttctgggctctctattctgttccattggtccgtttgcctattcatgcacttacactgtactgttttaatt

SEQ ID NO: 450288 - DNA, 201 bp, Homo sapiens
atcctatagattggtagtaataattaaataagtatattaaaagtttctgtgatccatcctagatttaatcttttctttaactttgagatgaaaagcctttrtaagagtgaactgtcaccccacccctgcccaccccattcacagtaagtccagataaggctacaaacaggtctgccacagcctacttacaatgcccacctt

SEQ ID NO: 450289 - DNA, 201 bp, Homo sapiens
gttccattggtccgtttgcctattcatgcacttacactgtactgttttaattatagaagttttatagtatgttttaatgtctccttgggtgagtctgcctygtagctttccgttttagtgttcttctggctagttttgcatgtttattgttaaaacttgtttattttaaaaaattgtggcaaaatctacataaaattttcc

SEQ ID NO: 450290 - DNA, 201 bp, Homo sapiens
taagtggaatcatgcagtatttgtctttttaaaaatggcatacagagtgatattttgatatgtgtgtacaatgtataatgatcaaatcagggtaattagcwtatccatcatctcaaacatttatcatttctttgtgtggtgaacatttaaaaatcttctcttccagacttttgaaaacacagcaccttatagttaaccata

SEQ ID NO: 450291 - DNA, 201 bp, Homo sapiens
tagtcagggcccttagggtgggtatccatcacccgagtaacgtgtattgtacccgttaagtaatttctcatccatcccctcacccttccgagtctttgttrtctctcattccactctctacatccgtgtgcacacgttttagcacccacttagggatactgtctcaacattttagtgggaggcttcttgtagcacaaaacg

SEQ ID NO: 450292 - DNA, 201 bp, Homo sapiens
cgcctcaaggtgacgctggccaagacccagacaggcatcatgtgtcccagtggagactggctcgtgatgacacctgagccacagacgatccctctcacacytagatgctatctaaggccgatggcaaccggatgccaccctgagcatgaggtaggaggcaattaacccctggttggctgaattgacccagagaacggagtt

SEQ ID NO: 450293 - DNA, 201 bp, Homo sapiens
gttcgcagggtaaaccaagagaccgagaggggaagggggctgggctaggattcgaacgctgcccttggtcccccaaaggtcccctccccgccttccccagmggtgatcgcgggccacgcccccgatctgcgttccgtcgcgcgccaagccccgagcccggtgaccctgggggccgccccgccgcgctccagctgtacctgc

SEQ ID NO: 450294 - DNA, 201 bp, Homo sapiens
cctgaagcgctgtgtgactcagccccgtacacccgcccattcgccccagactaaaaataagacggtctctggggcgatcccaggccaaccgggtgacccgycacggccccagggccggtttcaatctcctcatcggtgactcggggatcaatactgccacccgcccccagagagaccaggaatctactttgcaaactgtaa

SEQ ID NO: 450295 - DNA, 201 bp, Homo sapiens
aactgtaaagcgctttaaatactcccaacctgtctaaattgggactcagccccatctctggcggggtcgcgcaggcctcagtccacagccttccagctccragaagcaggaaagggcacgggtggctgaaaataacccaagtttgcgcagcggggccctggaggccgtttggccttccctcctccgccaaacctgcctgcc

SEQ ID NO: 450296 - DNA, 201 bp, Homo sapiens
cgtttggccttccctcctccgccaaacctgcctgccctgggcccgggcggagcaggccgcgcagcagccctaggtgggcgggtgacgccccgttcgcaggrtaaaccaagagaccgagaggggaagggggctgggctaggattcgaacgctgcccttggtcccccaaaggtcccctccccgccttccccagaggtgatcgc

SEQ ID NO: 450297 - DNA, 201 bp, Homo sapiens; identical to SEQ ID NO: 404865

SEQ ID NO: 450298 - DNA, 201 bp, Homo sapiens; identical to SEQ ID NO: 404904

SEQ ID NO: 450299 - DNA, 201 bp, Homo sapiens
agtcagggcaaagcctgggctgcgtctcttgaatgtgacaccaaaagaggggaaggagtgccactcacctggggcagacgacgagggggccaagggcaacrctggctggctaagggcagcaggtggaggccggggctgcaggtgtggtgtggccttgagcaggctcagttccttccagctgtctgccttggtgtcatcctc

SEQ ID NO: 450300 - DNA, 201 bp, Homo sapiens; identical to SEQ ID NO: 404943

SEQ ID NO: 450301 - DNA, 201 bp, Homo sapiens; identical to SEQ ID NO: 404905

SEQ ID NO: 450302 - DNA, 201 bp, Homo sapiens; identical to SEQ ID NO: 404944

SEQ ID NO: 450303 - DNA, 201 bp, Homo sapiens
tcattgccccagagtccaacaccctggcgacaacagcttcatgcagagtaggtaggtatgtcacgcccctctggacctcagtttccccatctaaagctccycaccatcacaacgctaccaccttgctccaggaacagggcaaagaaacaccacccccattaaatatctgaggagcccacaaccgagagagaagcagggact

SEQ ID NO: 450304 - DNA, 201 bp, Homo sapiens
gaagatattaaaataaaaacttaaataattacttttgtagattgggaatggagatttggagctatggaggataatttttatttttgtattgctagtttttwaaatttttgtcttgcttttataatttaaaaccaatttattttattttaaaatttgtattctttttcttaattgcagtaaaaaatgcataacttaaaattc

SEQ ID NO: 450305 - DNA, 201 bp, Homo sapiens
tgttcctgtgccctagacatgccattgcccctcccaggaggcaattattaccagtttcttacgtatttttctaggggttgtgtacaaaacatacaatctaatatatatatatatataatagtatatcatatttattatacattatgtgtctgattttgctagaaaaatagaaataacaaaaagtaacatttcttgaatact

SEQ ID NO: 450306 - DNA, 201 bp, Homo sapiens
gttcctgtgccctagacatgccattgcccctcccaggaggcaattattaccagtttcttacgtatttttctaggggttgtgtacaaaacatacaatctaatatatatatatatataatagtatatcatatttattatacattatgtgtctgattttgctagaaaaatagaaataacaaaaagtaacatttcttgaatactt

SEQ ID NO: 450307 - DNA, 201 bp, Homo sapiens
gagaccactgaggaatcgatcaaggaaactgagaggtaaaaggcccatttgtcttgatttgtcttacaggtgaattcctgtgctgcactgatggagttagrgatggaaaaaggaaacaggatactgttatcacccagttgggatgtgcacatagtgactcagaatgttctgtttaatgcaatgggtcggttagtctacagt

SEQ ID NO: 450308 - DNA, 201 bp, Homo sapiens
ttgatgatactgacctcctgaaagctgttatccctgtttattattcaaagattaggctataaaggatgattaattccttctgacgtgtttcagaggtattytaaaaagtccttgacttttgttttgttttgttcttctggctaggttttaatggtttggatttctatatttttagttttcaataactgtcattacaaatgc

SEQ ID NO: 450309 - DNA, 201 bp, Homo sapiens
ttttaagcaacgtttagccaaatgagacctctccatatccacaggcagtctgcttgtctactaggctgagggatgttctaagtgcatatgaattagtgacrgattagtgatgtttcctttcttcacagtacattttaattgtgtttcttgagagtgtgcaagcgttgcttgcttcgaaagtgtgagtcaggcccaaatttc

SEQ ID NO: 450310 - DNA, 201 bp, Homo sapiens
gtgtgcaagcgttgcttgcttcgaaagtgtgagtcaggcccaaatttctaggtgtcctctgtgaggcttcttttatgactgaatgactgaattaaaaattkttttaatgggtatggggcaggaggacgtgttttctgttcttgatgcctttatcttcctcatatttaagagcatcaggctgtatgcatgttgacactggtg

SEQ ID NO: 450311 - DNA, 201 bp, Homo sapiens
tggtgctagattcactagcaagctatctttagtatctcttttagacttgacaatgtcattatttccactaacagatgaggaagttgagacttgagaagtcrtgcattcagatacggtggtggtgtagctggattttgaattagtatggggcaaaggccatgttctctttactgtcgctgactgcttctctagggcacagtc

SEQ ID NO: 450312 - DNA, 201 bp, Homo sapiens
tgtgagtcaggcccaaatttctaggtgtcctctgtgaggcttcttttatgactgaatgactgaattaaaaatttttttaatgggtatggggcaggaggacrtgttttctgttcttgatgcctttatcttcctcatatttaagagcatcaggctgtatgcatgttgacactggtggttttcatcactttctgcaggaactca

SEQ ID NO: 450313 - DNA, 201 bp, Homo sapiens
aggtaagaaataatttaaattttagtagaagactgaagtctttgaagaaagattatatttaaaatgcagagattcttatatcaagcacacaagttatgtgyggttgaatttaagtcatgattaaaataccataaagggatgtctcagacagtttttaatagacttggcccaatacacagtgtatctacaggtctatctcag

SEQ ID NO: 450314 - DNA, 201 bp, Homo sapiens
tgcttttatgccttctatatattgggtttctgtgaatttttatatgaataatatattcagtgccgagagaatttggaaaatcactcatctagcccaacccttttttttttttttttttgaaagatgggaaaattgctgtccaaagaaaagaatgactttctctaggacacatagctgtcagaacttgggccaaacccagct

SEQ ID NO: 450315 - DNA, 201 bp, Homo sapiens
ccaaatgttgtaggtaagaatttggggaattgacaggaaaaggccatgagggaatttgctggggtgatggaaatgtttaatatcttagtttttttgcaaartagttaatgctatataattgttaacattctccaaactgaacatctaagttatatatgtattatgatattttagttatacctcagttaaaaaaatgacaaa

SEQ ID NO: 450316 - DNA, 201 bp, Homo sapiens
gcttttatgccttctatatattgggtttctgtgaatttttatatgaataatatattcagtgccgagagaatttggaaaatcactcatctagcccaacccttttttttttttttttttgaaagatgggaaaattgctgtccaaagaaaagaatgactttctctaggacacatagctgtcagaacttgggccaaacccagctc

SEQ ID NO: 450317 - DNA, 201 bp, Homo sapiens
caacatggtgaaacacatttctactaaaaatacaaaaattagctgggtgtggtggcatgtgcctgtagtcccagctacatgggaggctgaggcagtagaaytgcttgaacccaggaggtgaaggttgcagtgagccgagattgcaccactgcactccagcctgggtgacagagagagactcaaaaaaaaaaaaaattcctt

SEQ ID NO: 450318 - DNA, 201 bp, Homo sapiens
ctaacagccaagctacagcttcggtctctctctaaaataccttgtgagtgagtacccacttaatcatttgtgagcggtaaactccacgtagggcactcttytctccagacagtgatggcacacggctgctacctctctgcagaagaactgaacgtattccatgaacgaggagcatccatcgcacactgtcccaattctaat

SEQ ID NO: 450319 - DNA, 201 bp, Homo sapiens
aacagctctttgatctcttgtagactctagtccaatgactccatgctttctcaaaatccattattctaattcgaattcttagatgtcagagtacatcactrtaatcatttccttggaaacattctcgcttttcatattcccctcattttctttgtattcacattgcaaaagctccacccttgattatctcaaaagtcccct

SEQ ID NO: 450320 - DNA, 201 bp, Homo sapiens
cttccacatatattagttggtattccactggaagaaagaactctccattctcactcatgtactcattcatttacttatcattgtggactcatggattcccrtattattctttggattttaatttgttagtatttttatttattttgatgctcaaattggcccagatttacctagtgggagtttgtttagagtggcttcttt

SEQ ID NO: 450321 - DNA, 201 bp, Homo sapiens
gtactcattcatttacttatcattgtggactcatggattcccatattattctttggattttaatttgttagtatttttatttattttgatgctcaaattgscccagatttacctagtgggagtttgtttagagtggcttctttgtccttttgactactttctgactatattctagcacttccttacttttggcacaaaatt

SEQ ID NO: 450322 - DNA, 201 bp, Homo sapiens
ggcaaggtacttaacatctctgtgcctcaattttatcctctgcaaaatggggctagtaatagtgcctcatagggttcttgtgaggtttaaacaagttaacrcatgtaaagtatgtaggatggtgtttggcacataggaaatatattttaatctctttattattatcagacatcccatcattttagaatatgttgctttata

SEQ ID NO: 450323 - DNA, 201 bp, Homo sapiens
ttgcagtgagccgagatcgcaccactgcactacagcctgagtgagactccatctcaaaaaaaaaaaaaaaattaatgcaaaaactcatgatgaacaaaatrccaacattttaaataaagacaagatgttgtttgttttacagccatgcattttttttgtgcaatggaacagtcactttcaaataacggattctcaggccca

SEQ ID NO: 450324 - DNA, 201 bp, Homo sapiens
tctctactaaaaatacaaaaattagctgggcacagtggtgcgtgcctgtaatccaagctactcaggaggctgaagcaggagaatcacttgaaccagggagktggaggttgcagtgagcccagatcacgccactgcactccaggctggtgacagagtgagactccgtctcaaaaacaaaacaaacaaacaaacaaaaaaacc

SEQ ID NO: 450325 - DNA, 201 bp, Homo sapiens
cacatcttgtagctttttgcctctttgctgctcctgttgttaccccttccatcccttttcccacaaccctggatacttaccaagtaccaagtcctaccaaycactgtccaagttctgccttttctttgaaatcttcgctgatcacacttattatctctccattggaacccacagggccattgcacttcctcatcctccctt

SEQ ID NO: 450326 - DNA, 201 bp, Homo sapiens
aataataattctgtagtcactgggccgggcctggtggctcatgtctgtaatcccagcactttgggaggcagaggcaggcagatcacgaggtcaggagatcragaccatcctggctaacacggtgaaaccccgtctctactaaaaatacaaaaaaattagccaggcgtggtggcaggcgcctgtagtcccagctactcggga

SEQ ID NO: 450327 - DNA, 201 bp, Homo sapiens
ggaatttctgctgccaactccaaaggatgccattctgtcctcatccaatgggacttgtcagcagtatttgccatgattgactgttctctccattgtccaartaatcttatcttgaatcctatgaagcaccttcgttcttcccttctttctcttctctgaaggctgattctcttcctctgggccatttgaaagcttgcttca

SEQ ID NO: 450328 - DNA, 201 bp, Homo sapiens
aaaaagcttcaagggataagaaaaaaatggccaagagttttggttacacactatagtcagttaatatgaaaaatttagcagacacataaaaatcagtcagatattgttttcagatattctaggattttggtctccataatttaagttcatcacatgacttccttttcttgactttggattgtttagtgatggtctataaag

SEQ ID NO: 450329 - DNA, 201 bp, Homo sapiens
tgaatgtcaatattatttttgtgtaacaaattatatttaaagcctgcaggaacttgctataggagtcctagggtaaatcctcttgtaaaatgaagtaaatyatttaccctctccctaccctttattatagaccagggcttctcctgtagattggatttgcttttaagtacatatggcctgctcattaaattacttttggtt

SEQ ID NO: 450330 - DNA, 201 bp, Homo sapiens
caggctggtctcgaactcccggccctcaggtgatccacctgccttggcctctcaaagtgctgggattacaggtgtgagccaccacacctggcccttccagrgtttttatagttttcggttttacatttatgtctttaatccatcttgagttaatttttgtatatgatgtaaggaagaggtatcaattgtttttaattatct

SEQ ID NO: 450331 - DNA, 201 bp, Homo sapiens
ccttccagggtttttatagttttcggttttacatttatgtctttaatccatcttgagttaatttttgtatatgatgtaaggaagaggtatcaattgttttyaattatctccagtattctagagtgaagcccatagtgacaccacgtttttccctctcctgctctgagactttgatgggtgaactgggcaacattgctaaaa

SEQ ID NO: 450332 - DNA, 201 bp, Homo sapiens
atacctgttattcccactgcttaagttatcagaggacttttatacaaacatttgcatttgtagcattctgaggaaaaaatgctctggctgggccgggcacrgtggctcacgcctgtaatcccagcactttgggaggctgagtcaggcagatcatgaggtcaggagatcgagaccatcctggctaacatggtgaaaccctgt

SEQ ID NO: 450333 - DNA, 201 bp, Homo sapiens
aataaaacacttttttaaagcttatatctgggttaaaattgagagttccccttctcccatccaagcttaattacatactgtactaaaatttctcctcttargagttgacggtcttataagaaaggtcagatcagggcagagacaacacattgattctttaccatttgtaaatcagtgtttttttggtttttgtttcccaaa

SEQ ID NO: 450334 - DNA, 201 bp, Homo sapiens
actctgaatcatctttcactctctcatctcagctacaatgaacatgctcatttctcctacatgaaaaacataaagtgacttgaactcttcttcatcctaaytttcactaccaaatattttaaaagggcgctctccatctgcacaggactttctcaaacactctctttttagcacttagtgcagtaacaaaaacattctaga

SEQ ID NO: 450335 - DNA, 201 bp, Homo sapiens
caaaactgcttcatgaatgatgtgttgaggaggtacacagcttgatggtaggccgggtctgttgggaactgttgaggttatatattgggaactgttgaggktatatatatatatatatagagagagagagagagagacagacagacagacagagacagagagacagagacagagtggggatggggaattggaaaagcttcc

SEQ ID NO: 450336 - DNA, 201 bp, Homo sapiens
tcccagagtctcaatcctgctgcatccggaggggcagtgcttttatgccttctatatattgggtttctgtgaatttttatatgaataatatattcagtgcygagagaatttggaaaatcactcatctagcccaacccttttttttttttttttttgaaagatgggaaaattgctgtccaaagaaaagaatgactttctcta

SEQ ID NO: 450337 - DNA, 201 bp, Homo sapiens
tgatgtgttgaggaggtacacagcttgatggtaggccgggtctgttgggaactgttgaggttatatattgggaactgttgaggttatatatatatatatakagagagagagagagagagacagacagacagacagagacagagagacagagacagagtggggatggggaattggaaaagcttcctaaggaagggacagcta

SEQ ID NO: 450338 - DNA, 201 bp, Homo sapiens
ggccagactgcagtggtgctatcttggctcactgcaagctccgcctcccgggttcacgccattctcctgcctcagcctctggagtagcttgattcttttcrcttttgttgcccaggctggagtgcaatggcgcaatctcggctcactgcaacctccacctcctgggttcaagtgattcttttgcctcagcctcccagatag

SEQ ID NO: 450339 - DNA, 201 bp, Homo sapiens
atgtgttgaggaggtacacagcttgatggtaggccgggtctgttgggaactgttgaggttatatattgggaactgttgaggttatatatatatatatatakagagagagagagagagacagacagacagacagagacagagagacagagacagagtggggatggggaattggaaaagcttcctaaggaagggacagctaaa

SEQ ID NO: 450340 - DNA, 201 bp, Homo sapiens
gtgttgaggaggtacacagcttgatggtaggccgggtctgttgggaactgttgaggttatatattgggaactgttgaggttatatatatatatatatagakagagagagagagagacagacagacagacagagacagagagacagagacagagtggggatggggaattggaaaagcttcctaaggaagggacagctaaact

SEQ ID NO: 450341 - DNA, 201 bp, Homo sapiens
tctcataccatcctaggcccttccagtccattgtgatttacaaaagaatcacaatgaaaatctgatcatgtcacccccttgtgctcgtcacccttcaatgygattttgagtgtgtaaggctcattacaaggcccacaaagctctgcaatggtttgacacccatccactgcccagcctcatctcacactactctctcctcct

SEQ ID NO: 450342 - DNA, 201 bp, Homo sapiens
gcgtgagcgacagcggcaaagtaagcaggcgcggggtcgagcgcactccgacgggcgggaggataggtgcaaggaacctggcgcggtgcttcgcgtagccyggggttcgctcggtgcgcagtgagcgccgcggctccggagttgaacttgagtctttggctcttgggcaacgcagagagaaccctggcgctaggttcgtgg

SEQ ID NO: 450343 - DNA, 201 bp, Homo sapiens
gttgtagtttaaatgtcattgccttaaagaggtcttccctcaccatcctatcaaaatgggcccttcatctccattttctttatcactaaagtgaaaacaayttattgttaatatatgtctgtttatatgattcttttctttctccccaacaagatagttaacttgctcatgtgggaagcccataggttttatttacaagtg

SEQ ID NO: 450344 - DNA, 201 bp, Homo sapiens
tcctttcatcagttgatggacatttgagttgtttctgccctttggctatttgtcagcagtgctgctataaatatttcatgcacatgtttaaaaaagcagcyggttaaaaaaaatctttgtatggtttcccattgcctaaccgtgtgataaacccaggcctggccttgctgactgtttgcccaaccttccacgttgttaaat

SEQ ID NO: 450345 - DNA, 201 bp, Homo sapiens
tcacaggtcctaagtaactgatcaaaggtccgcaaagcaaaaagttccatgcgcacagtttaaaaccaggtctgtaaaatgtagatattcgtgatttctcyttctatcctaccacagtgcctctagccatatgacaaagtagggattccacctacattaaatgtgttgtagatggaaggggaaaactacaaagctaatcca

SEQ ID NO: 450346 - DNA, 201 bp, Homo sapiens
ataccttatttttaaaactgcaggtatttaagtcttccatattcataccatcccaactgcattgctttcatttctctatgtttacttccagtcgttacccrtatattataaaatatagttagtctttacatattttataccacatagtgatataatttttattccacctttatttatatttaacatttttgttgttttagc

SEQ ID NO: 450347 - DNA, 201 bp, Homo sapiens
tacaggccttttctaaggtataacttgtacctagcaactttgtacatatagatcatcataaatgttcttgtgaagatgctaacagccaagctacagcttcrgtctctctctaaaataccttgtgagtgagtacccacttaatcatttgtgagcggtaaactccacgtagggcactcttctctccagacagtgatggcacac

SEQ ID NO: 450348 - DNA, 201 bp, Homo sapiens
tcatggtgctttaaaaaatactctttctatgcacgttcagggagcctgctgttgtgtttccaaggtgataaaactctcagagctctcccagggagattccrgtaaaccctgagactgatgaacccatgcttggggacttggtcctcaagtttcagggaactcaggtttggggcaagtcccaggaagcaaaggaacggagat

SEQ ID NO: 450349 - DNA, 201 bp, Homo sapiens
ccgtctctactaaaaatacaaaaattagctgggtgtggtggtgcaggcttgttatctcagctactcaggaggctgaggcacaggaatcacttgaacccacraggtggaggttgcagtgagccgagatggtgccactgcactgtagcctggtgacagagtgagactccttctcaaaacaacaacaacaacaacaacaacaaa

SEQ ID NO: 450350 - DNA, 201 bp, Homo sapiens
ctccacattgtgagagaataaatttctgctgttttaagctagaaaatttgtgataattagttgcagcagctgtaggaaactaatacaagtatgcatttgamactaattacagattttgaattgctttaaatcttagtctacgactatcttgtgtttatagttaagagctttttaaaaaaagtatattaaggactgaatatc

SEQ ID NO: 450351 - DNA, 201 bp, Homo sapiens
ccagcctggccaacatggtgaaaccccgtctctactaaaaatacaaaaattagccgggcatgatggcaggtgcctgtaatcccagctacttgggaggctgaggggggagaactgctcgaatccgggaggtggaggttgcagtgagctgagatcatgccattgcactccagcctgggtgacagagcaagactctgtctcaaa

SEQ ID NO: 450352 - DNA, 201 bp, Homo sapiens
cgaaattcacacacctttctgcatctgctgggattttctcttctttgccctgttgcagcaaaaacaacaacaacaaaacccttcttccaatcaaaggcaawaataccaaaataccccgacgtgtgttctgtattctttccctctcccagcatctcaataaactaattcctttggccatagaccgtcctgtatcatcagtgt

SEQ ID NO: 450353 - DNA, 201 bp, Homo sapiens
tattacattgtttcatgtcagggctttagaagcaggtgaaatagatattggttttgggaagtgggggaaagctgactagtaattgatgaatggctagcatytttatacaggagaggaatttgcaaggcaagtaggtgggcttgttctgagtttcttttgttagtttcaggagttaggcttgttgaattaagtaaataaagc

SEQ ID NO: 450354 - DNA, 201 bp, Homo sapiens
tttgtgtatacttcgtatcagatcatctagactccttgagattctaaatctggactttgtagcttctgctagcctttacctgggatggtttgttccttttkattttggtgacctattttttatgggttcaattttggttaatcttaacctgggaaaatttggaggctgaaattaaagatgtgatcctccagaaaacatttt

SEQ ID NO: 450355 - DNA, 201 bp, Homo sapiens
ttagctgggcgtggtggcgggcgcctgtagtcccagctactttggaggctgaggcaggagaatggcgtgaaaccgggaggcggagcttgcagtgagccaasatccagccactgcactccagcctgggctacagagcaagactccatctcaaaaaaaaaaaaaaaatgctctggctgtcctctggtcttcaaatactttgct

SEQ ID NO: 450356 - DNA, 201 bp, Homo sapiens
aggaaactaatacaagtatgcatttgacactaattacagattttgaattgctttaaatcttagtctacgactatcttgtgtttatagttaagagctttttaaaaaaagtatattaaggactgaatatctgtcataaaaacaatgttatatatgtattattccatttatcctcacaaggttactgttttggttttattttac

SEQ ID NO: 450357 - DNA, 201 bp, Homo sapiens
gagagctctttcactgctcccaccatggctcaagcaggtccatgtgtggctcaggccacaacttcagaagatgcaagtggcaaatcttggttgcatccatrtggtgttaagtttgcaggcatgcagaatgcaagatctatgggggcatggcttcatccacctagatttcaaagtatgttgcaaatagcctggagccccagg

SEQ ID NO: 450358 - DNA, 201 bp, Homo sapiens
aggtggggaggggtatgatagaggttaactattaagaagtagggaggaaagaaaatttgagaatcaattggttggggaagttcagaagcacacttgagctrtgatattatatttcatctacttttagtggtttttaatattcgttatatttcatatataatatatatttaatatatgttatacagttcttaaagaaatgat

SEQ ID NO: 450359 - DNA, 201 bp, Homo sapiens
ctcttgggcaacgcagagagaaccctggcgctaggttcgtgggctggctggggagttcccagaagtcgggagcagtggcgtgctaacgccacaactggctsgacagcagtccgggctgcggtagagccgggagcaaggatgtcaccccccgctcccccgccccccgttccaatcctaagataccggcaataatcttcaatc

SEQ ID NO: 450360 - DNA, 201 bp, Homo sapiens
ctcagctacaatgaacatgctcatttctcctacatgaaaaacataaagtgacttgaactcttcttcatcctaactttcactaccaaatattttaaaagggmgctctccatctgcacaggactttctcaaacactctctttttagcacttagtgcagtaacaaaaacattctagagactcagtgactactttttaaaggaag

SEQ ID NO: 450361 - DNA, 201 bp, Homo sapiens
cctgtgagctaagtatggttttaaaatgattgaaaaaaagtgaagaagaagaggaagaagaagaagattttataacaaatgaaaattacataaaatgcaartttcagttcctgtaaataaacttatattggaatatagccatagccatttgctactatattgtctatggttgattttgcaattcagcgacagatttaagta

SEQ ID NO: 450362 - DNA, 201 bp, Homo sapiens
taacttcattataggatgagtagtgaaggcagtgaatttgggtcccaaacgtcactgtgaagacatctttcttttagagccattcattttctctagaaaakaatcgtttagtcccctgccaggagttgtgggagtagtacacgtggtattctggggaaaatgactgagtgcccttgaggtcagccagattttcacttaaac

SEQ ID NO: 450363 - DNA, 201 bp, Homo sapiens
aaacctgaagttccttataccctcaatgttttctgatcagtcttctaaagacaagaaaatcgttttaagtagtggcaagatcaataacagactgtgatctrttctctgtaggatacatttaatgcatttatttcctacttctctttcacttgatactttctcagtgtgttctgtaccttcattcttagagaaaccagctat

SEQ ID NO: 450364 - DNA, 201 bp, Homo sapiens
gggaatcctttccccattgcttgtttttctcaggtttgtcaaagatcagatagttgtagataggcggcattatttctgagggctctgttctgttccattgrtgtatatctctgttttggtaccagtaccatgctgttttggttactgtagccttgtagtatagtttgaagtcaggtagcgtgatgcctccagctttgttct

SEQ ID NO: 450365 - DNA, 201 bp, Homo sapiens
tgttaaatttgtctgatagaattctgaattatttctctgtgttatcttgagtttctttgagtttcctcaaaacaagtattttaaagtctctttctgaaagrttacatatctttctctctcctggattaatccctggtactttatttagttcatttggtaaggtcattttttttttcctggaatgtcttgatacttgtagat

SEQ ID NO: 450366 - DNA, 201 bp, Homo sapiens
ttcctcttttttcccctttaaccttcatattctcccttaggtcctgcaaagtgctacctaaaaggtcttgtacattataatgttattttataacttaaagkcccctcagggtatcttgcccaccatatttctaaaagtgaaattgctgatgttattgaatgcttaccctgtgccaagcattcttttgagcattttacttgt

SEQ ID NO: 450367 - DNA, 201 bp, Homo sapiens
gagtttcctcaaaacaagtattttaaagtctctttctgaaaggttacatatctttctctctcctggattaatccctggtactttatttagttcatttggtwaggtcattttttttttcctggaatgtcttgatacttgtagatgtttgtgcctgggcattgaagagttaggtatttattatacttgtcactatctgggctt

SEQ ID NO: 450368 - DNA, 201 bp, Homo sapiens
aatggggatgggggaggtagtgggttaaagtgatgaatagaaaaacttttactgtttactgaatatagtagggaatttgtggtggttcttgttcttaagtrgtgtgatggtggatgatcttttacattttcatttatgttttccatatatgattttaatttaaaaattactgttgaaagcttagaaaaagtactgttttgg

SEQ ID NO: 450369 - DNA, 201 bp, Homo sapiens
ctcaaaacaagtattttaaagtctctttctgaaaggttacatatctttctctctcctggattaatccctggtactttatttagttcatttggtaaggtcattttttttttcctggaatgtcttgatacttgtagatgtttgtgcctgggcattgaagagttaggtatttattatacttgtcactatctgggcttgtttgta

SEQ ID NO: 450370 - DNA, 201 bp, Homo sapiens
aaagactttcactacaaaaggatttttttaaaagataccaaagtaatatgtgtttccatggtccagaacttagagaagcacaaaaaggtataaagaagaatttttttttgtaatgaaaccaccaaaagttaccataatagggtatcttttattgttttctcaaggtggtatatgcatccttcactactatttcgtcctacc

SEQ ID NO: 450371 - DNA, 201 bp, Homo sapiens
aagtaaagatgtgcaaggaaaatgaaaacatgtttccacgtaaagacttgcaggtaaatgttcatagtgacatcatttatagaagacaaatgcagagcagkttcactgcacataggtatcaatcccaggggaggactctaaacacctcaccaatactgcacaccacttgcatgaatctggtgagacagcacacttatacaa

SEQ ID NO: 450372 - DNA, 201 bp, Homo sapiens
caccacttgcatgaatctggtgagacagcacacttatacaacaagttaagcaaagcaagtttattatgcacagataggtagcaagggacaatagaagcctwggtgaactgatcctccacggctcaggaaagttgcccaagagtctcatatgtgcatgccccacatcacatcatagctgagggaccctgtgagcatgctcta

SEQ ID NO: 450373 - DNA, 201 bp, Homo sapiens
gtgtagcttttaaatctattttctgggtcactgggcttactcatggaatttcttttccttagtttgtttctctactatagtcagagtaaaatgagatgaakggatctgtatttaaagtgtggcattttcccagaactgccatggcctttacattcattctcaagaagatcaagatgagcagaaatgatcttcacagaacca

SEQ ID NO: 450374 - DNA, 201 bp, Homo sapiens
tcatactgaattagggcctatcctaatgatttcattttaacttgattacctctgtaaagatgttatctctaaataaggtcacattctgaattactggcggkgggggttaggactgtaacatattaaattggggtgggaggggaggttcaactcataccaggtcttcaaggcagatttcaagtttttttaaaaatggccatc

SEQ ID NO: 450375 - DNA, 201 bp, Homo sapiens
gcctggcctgggataaactcttcagagcagtgggcttccctttggcccagggcagatccataaatgctgtgtaagagccaagttctggaactggggactcsaggagcctgcttgatgttttattcttctgtggccgaactggtacctaaagtgtaagacaaagtaccgtttaccctctgctttcctcaagcagaaggagtc

SEQ ID NO: 450376 - DNA, 201 bp, Homo sapiens
gatagaggttaactattaagaagtagggaggaaagaaaatttgagaatcaattggttggggaagttcagaagcacacttgagctgtgatattatatttcawctacttttagtggtttttaatattcgttatatttcatatataatatatatttaatatatgttatacagttcttaaagaaatgattgggccagccaggcat

SEQ ID NO: 450377 - DNA, 201 bp, Homo sapiens
aagtcatatttaatttactaatcatgaagttgtaaattttaatcaacattcatttaagcaacatttcataataaataccaggtatgggtcagttctgaggrttaaaaataacattcatctctttgaagaactcacagtctgggatgggaggtgagaggaaacacatagacaatatgttatgtttatgacagatgtatagag

SEQ ID NO: 450378 - DNA, 201 bp, Homo sapiens
aaaccccgtctctactaaaaatacaaaaattagccaggcatgatggcaggtgcctgtaatcccagctactcaggaggctgagggggaagaactgcttgaamccaggaggtggaggttgcagtgagccgaaattgtgccactgcactccagcctgggtgacagagtgagactccgtctcaaaaaaagaaaaagagaaaaaaa

SEQ ID NO: 450379 - DNA, 201 bp, Homo sapiens
gaacactaaagaatggaacaaccacagcttgttactttgcaacaattcacactgactcatctctgctccttgccgacattacaggtgagcaaatgaagcaygatttatgggcacctcaagcaaagacagccagaccatcgtggcaaacaacttatatgtacttttgggcagacctgccttttaattgctagaacatgagca

SEQ ID NO: 450380 - DNA, 201 bp, Homo sapiens
atgggtgactctgaaaatagatactacagtcttcagagaaggcaaagagaacccagaactacgacatctgggaaggctttatgaaagggtcctttaaactkggctttgaagtaaagacaagatgaggagaggacaaactgtcttctagataggggaaggacacaggtatgggaacaggagtgtcaatagtggatgcaggga

SEQ ID NO: 450381 - DNA, 201 bp, Homo sapiens
cccagaactgccatggcctttacattcattctcaagaagatcaagatgagcagaaatgatcttcacagaaccaacatttactccaaaggcatcaaaactcyatttcctgaaatgcatttgagtcacttaccagcccagtgggatctctgtgcaacaatttgaatttatatcagtttacaaattcactgaaaagaattgtgt

SEQ ID NO: 450382 - DNA, 201 bp, Homo sapiens
gctgggattacaggcatgtatcaccacgcctagctaatttttgtatttttagtagaggcagggtttcaccatgttggtcaggctggtctcgaactcctgayctcaggtgttctgcccgccttggcctcccaaagtgctgggattacaggcgtgagccaccgtacccagcctggaatcgatttttatgggcgactgttctgt

SEQ ID NO: 450383 - DNA, 201 bp, Homo sapiens
cgcttgaacctaccttgaaggagatggttgcagtgagctgagattgtgccattgtactccagcctggatgacagagacagactctgtctcaaaaaaaaaawaatatatatatatatatatggctggcacatctctttagctcagagtcacaaggtcccaaattcagcccaggaaccatctatcctactttctctgtcttca

SEQ ID NO: 450384 - DNA, 201 bp, Homo sapiens
tttaaaacgtgtttctaggttgaccttgtgttttagaaatttgcacttaatggaatttgcatttcagagatgtgttagtgttgtgctttgccttctttggsgatgaatgtcagaaattgaatgccacatgctttcataatatagttttgtgcttcaaagtgtttgacagaagttgggtattaaagatttaaagtctcttag

SEQ ID NO: 450385 - DNA, 201 bp, Homo sapiens
ttgaacctaccttgaaggagatggttgcagtgagctgagattgtgccattgtactccagcctggatgacagagacagactctgtctcaaaaaaaaaaaaatatatatatatatatatggctggcacatctctttagctcagagtcacaaggtcccaaattcagcccaggaaccatctatcctactttctctgtcttcagag

SEQ ID NO: 450386 - DNA, 201 bp, Homo sapiens
aactgtctactatcagacttctagacttccttttttttttttttttttttttttttgagatggagtttcactcttgttgcctaggctggggtgcagtggcrcgatcttagctcactgcaacatccgcctcctgggttcaagcgattctcctgcctcagcctcccgaggaggtgggattacgggcactcaccaccatgccca

SEQ ID NO: 450387 - DNA, 201 bp, Homo sapiens
ccccttcctctgttcttccataaaatttttcatatatttcaaatcagtattttacaggtagttaagaacatggtttctagagtcagattatgtgaattcaratcaaaactctgctacttactaggacaaattttctgacatagctgaacctcagcatcctcatttaaaaatgtggattaaggctgggtacagtggcccgca

SEQ ID NO: 450388 - DNA, 201 bp, Homo sapiens
tctaggcattgttcttacacacactaaatacatcctcacgacagccctatgatgctactactatctccattttacataaggggaaactgagtcacacagartttttttttttttttaatatgtcaaatatctaactgctgatttatggtcaaacctgatttcagatcttagcaggccaaaaccagaatgtatacactttaa

SEQ ID NO: 450389 - DNA, 201 bp, Homo sapiens
ttctgtggccgaactggtacctaaagtgtaagacaaagtaccgtttaccctctgctttcctcaagcagaaggagtcttgccccatagccaccacagcttgkgtgaatgtgctgagtttcacccaaggccctcaacatagtacctggtattgctgctggttattcagggcccaagggctcttcagttagcaggtgacgaatc

SEQ ID NO: 450390 - DNA, 201 bp, Homo sapiens
gtcaccatcattattataataactgactacaaaaaagctagtcttttccatgcgatgtagaggctttcttgtagtcagacaagatcaagatgaccactgartctgccattccttgctcttgttttaaaataaagcatttagagttactcatggctttatttggcttacagttaggtggtatgtatacatttgatttgatag

SEQ ID NO: 450391 - DNA, 201 bp, Homo sapiens
gttgattccatgcctttgctattgtgaatagtgctacagtgagtgtatgtgtgcatgtgtctttataacagaatgatttatttccttttggtatatacccygtaatgggattgttgagtcaaatggtatttctgtctctaggtatttgcagaatcaccacattgtctttcacaatggttgaagtaatttacactcttacca

SEQ ID NO: 450392 - DNA, 201 bp, Homo sapiens
tcagattttgctttcctgtgcttactccactttatgtaagtagaagtcttgtgacctgttagaatgagagtgattttctgtctcactgttaagatactaatttttttttttctcctagcgacatgttggcaaaatctgtccttacaaactgagacattagtgtggtctgatggcttgcaatcctgactgtttattcacttg

SEQ ID NO: 450393 - DNA, 201 bp, Homo sapiens
cattaatctgtttgacatgaactgagctaatacggcaatttttgtctctgttcaaaaacttcaagaaattttgagacctcatatttttatctggttttatytcccctcacagtgacgtaagagtggattttgtataatagattgaaatatgttcttttattttgttggatggctgagctatttcacagtggctcaaagagc

SEQ ID NO: 450394 - DNA, 201 bp, Homo sapiens
ctcatcagttagctcctacttataagtgagaacatgcaatatttgactttcccttcctgcgttagtttgctaagaataatggccttcagcttcatccatgwccctgcaaatggcatgatctcattctctttttatggctgcatagtattccatggtgtatatgtaccacattttctttatccagtctatcattgatgggca

SEQ ID NO: 450395 - DNA, 201 bp, Homo sapiens
tggaaactgatagatttagctacatgaaaagaataaataaaataggcaggcatttatttcactgtacaatgacaacttctctcctagataagagaggaaamgtggcctctcatttaaactgcttccctgcactctctgtacctcatgaaaacctgagttattttcgatagcccattctactgacctacgctgattggattc

SEQ ID NO: 450396 - DNA, 201 bp, Homo sapiens
attccaggcttcttccacattctggtcacctccttgtgaaaacattctgattcagtttatccttccagaactgaaaacacactactaattctgtagcccgmgctaagtataaagggacacagcaagggtttcctcactttgcgtaatagtggaggactgaaaaatgactgtgaaacctgaaataatgcaaagtgatcctag

SEQ ID NO: 450397 - DNA, 201 bp, Homo sapiens
actccttgagattctaaatctggactttgtagcttctgctagcctttacctgggatggtttgttccttttgattttggtgacctattttttatgggttcarttttggttaatcttaacctgggaaaatttggaggctgaaattaaagatgtgatcctccagaaaacattttttttttcctgttcagagatagtgaccattg

SEQ ID NO: 450398 - DNA, 201 bp, Homo sapiens
gctgtgcagaagctctttagtttaattacatcccatttatcaatttttacttttgttgcaattgcttctggtgtctttgtcatgaaatcttttcccatgcytatgtcctgaatggtattgcctaggttgtcttccaaggttgtttttttgttgttgtttggttggttttttgtttttttttgagactgagtttctcttttg

SEQ ID NO: 450399 - DNA, 201 bp, Homo sapiens
tttatgatcctgtttactccaggacttggatggtctgatttgactaatatgtttgtgtcaacattagagccgatatattgggaagcacaattttcagtggyatcaccgtcattgttattagtgttcatcttttattggaaccacatggatctccttgttctgacatctcctctctctacaggctcagcagtggatttctaa

SEQ ID NO: 450400 - DNA, 201 bp, Homo sapiens
tcccatctgtaaaaaatagagatcatgatagtacctatttcacaggattctcatgataattaagcaagttaatatttgtgaagttcttagaatagtgcctrgcacatggtgggagctctatttgtttgctttaaaaatgcccaaggaaatttaaaattaaatatttaaattactgttagaaggaatatcatgttattctgg

SEQ ID NO: 450401 - DNA, 201 bp, Homo sapiens
tggtacaatcttggctcactgcaatctccgcttcccaagttcaagcaattctccacccgccacctctcaagtagctgggactacaggtgtttgccactaattttttttttttttttgtatttttagtagagacaggatttcaccatgttggccaggccagtctcaaactcctgacctcaggtgatctgcccacctcggcct

SEQ ID NO: 450402 - DNA, 201 bp, Homo sapiens
caattttggttaatcttaacctgggaaaatttggaggctgaaattaaagatgtgatcctccagaaaacattttttttttcctgttcagagatagtgaccaytggggccaccatgcattttgtgtgggtttattgttcacggctcccatttcagcttagaatctctttttttcttcctcttttttcccctttaaccttcata

SEQ ID NO: 450403 - DNA, 201 bp, Homo sapiens
agtctttggcagtctctttgactttacacattcttcttaggaggtgccatccacaaccatggcttcatgtgatttaatatactcagatgacacacaggttsttatatccagcccagacttctctgaattctaaacctatgttttcaactgactacattctcccttctcttagacccctcctgaaggaacccccgaacttca

SEQ ID NO: 450404 - DNA, 201 bp, Homo sapiens
tttgaaatgcacatgactccctctagtcataaattctaagctgaggaatggaaggccaaaggtgaagagatcttcatgttcaaccctcttgtactcattcrgtatctgacatactgccctgccatgtttttgtgacaaatgtatagtagagtctcaccacacgtgctggtgatgtactcacattcaattccattcactgag

SEQ ID NO: 450405 - DNA, 201 bp, Homo sapiens
ttcctaaagagataagcactgtcattatttagacacctgctatggtttgaatgtttgtcctctcagaaactcatgttgaaactcaattgccattgtaatastattaagaggtggggcctttcagaagtgattaggccgtgaggacagagctctcataaatggattaatcttgttaccatagtagtggttatcttgacagtg

SEQ ID NO: 450406 - DNA, 201 bp, Homo sapiens
actccagcctgggcgacagagccagactctgtctgaagaaaaaaataataataaagaaaagaaaaaaagaaaatgctcaagttttctaacccatttgttgytttatttcagatttgtgtcagaaatgctccaaaagaacgtgagtaactttgttcagagctcgcttttagattgcctttgcattagctgtaggattcataa

SEQ ID NO: 450407 - DNA, 201 bp, Homo sapiens
agggttcaagtgattctcctgcctcagcctcccgagtagctgagattacaggcgtgcaccaccacatccagctaatttttgtatttttagtagagacaggrtttcaacatgttggtcagtctggtcttgaactcctgacctcaggtaatccacctgccttggcctcccacagtgctgggattgcaggcataagccaccacg

SEQ ID NO: 450408 - DNA, 201 bp, Homo sapiens
tgcacctatcaacccgtcatctaggttttaagccccacatgcattagatatttgtcctaatgctctccctccccttgccccccaccccccaacagaccccrgtgtgtgatgttcccttccctgtgtccatttgttattattgttcaactcccacttacgaatgagaacatgcggtgtttggttttctgttcctgtgttagt

SEQ ID NO: 450409 - DNA, 201 bp, Homo sapiens
ctgggattttctcttctttgccctgttgcagcaaaaacaacaacaacaaaacccttcttccaatcaaaggcaaaaataccaaaataccccgacgtgtgttstgtattctttccctctcccagcatctcaataaactaattcctttggccatagaccgtcctgtatcatcagtgtctccttcctgctggatcattcctgctg

SEQ ID NO: 450410 - DNA, 201 bp, Homo sapiens
tttgtgaggcagctgctgaaattatttgcttgtttgatgatttcaggattcaaatgtgtcatttaactttagagctgagatttatggtgaatttcactccragcttggtgttaattttacacacatctaagcagtttccttcttccacaagttggttaagcatcagaggattctgaatttaggaaaaaaaaataaattagg

SEQ ID NO: 450411 - DNA, 201 bp, Homo sapiens
ctttgtagatccttatcctcactacccctctatgagtccttctctcctgcctggccactcacctcaggtgccaccagagccaatcctacaactgaatagtkctcaggaaggctgtaaccagcacacctggacaagatgtattcccaaaatggaatcggctatcacctcacttttagtctccccagcactcttttaaaactt

SEQ ID NO: 450412 - DNA, 201 bp, Homo sapiens
gtccactccacctggacctgccccatggaggtgctgcgggatcacctcctcggcgtgagcgacagcggcaaagtaagcaggcgcggggtcgagcgcactcsgacgggcgggaggataggtgcaaggaacctggcgcggtgcttcgcgtagcccggggttcgctcggtgcgcagtgagcgccgcggctccggagttgaactt

SEQ ID NO: 450413 - DNA, 201 bp, Homo sapiens
caaggtgtacaatgtgatgatttgatatatttatacattgtttattgattattagaatcaaatttgttaacacatctattcccacacacgctgtacactasatcctcagaacttgttcatgttataactgaaaatttgtaccctttgaccatcatctccccacataagccagcaatcccacttttgggtgtatatccaaaa

SEQ ID NO: 450414 - DNA, 201 bp, Homo sapiens
caactcaaaatatgctgttggtcctgagaaaggaaactgggctaatcccttccttctgaggctgctgaataggagcttggctttcatcagaaagatgcttkcactcccaattattacaagatcatcttgcaaattcccattttctagaaggctgattgcttgttcagaatgctcatggcaaacactgttggttacccactc

SEQ ID NO: 450415 - DNA, 201 bp, Homo sapiens
gatgccttgccaaatttctccccatttctctacggggctagcaaaaatcttcagctttatcactcaacccctgccaaaggaacttgattacatggtgtctmaccaaatgagcaggcttaggaatttagatgagatgtgtaagattcacttacaggcagtagctgcttctagcatttgcaagatcctacacttttaccttct

SEQ ID NO: 450416 - DNA, 201 bp, Homo sapiens
cttcccttatcaccattatactaaattttatgcttatcatgtccttacttttacttatactttcacaattttttttgtgtgtgtcacttgttgcttaggctggagtgcagtggcgcgatcttggctcactgaaacctccacctcctgggttcaagcaattctctgcctcagcctccggagtaactgggattacaagcgccc

SEQ ID NO: 450417 - DNA, 201 bp, Homo sapiens
ctgtatttccaatatttctaattcctgagccacgtcaaagatgccttgccaaatttctccccatttctctacggggctagcaaaaatcttcagctttatcmctcaacccctgccaaaggaacttgattacatggtgtctaaccaaatgagcaggcttaggaatttagatgagatgtgtaagattcacttacaggcagtagc

SEQ ID NO: 450418 - DNA, 201 bp, Homo sapiens
tgactaatatgtttgtgtcaacattagagccgatatattgggaagcacaattttcagtggcatcaccgtcattgttattagtgttcatcttttattggaamcacatggatctccttgttctgacatctcctctctctacaggctcagcagtggatttctaaatgtgctagaagtcctgaaacatgaagtcaagatagggct

SEQ ID NO: 450419 - DNA, 201 bp, Homo sapiens
gttattataaaagaggaaaaatatatttttctctacccatcttagggtcaaggctgaggtcactataacaagagacagatttaacaggagaaaggcatacwcatttatttaatataaatttttttgagacggagttttgctcttgtcgcccaggctggagtgcaatggcatgatctcagctcactgcaaccactgcctcct

SEQ ID NO: 450420 - DNA, 201 bp, Homo sapiens
ctgaggcatgagaatcgcctgaacccggaggaggaggttgtagtgagccaagatcaggccactacactctagcctgggtgacagagtgagactctgtctcaaaaaaaaaaaaaaaaaaaaaaaattgcggagcacatatcctatgttctttcttatgtgtctgataatgaatgagtgtgggcccacaaacttttaagttgg

SEQ ID NO: 450421 - DNA, 201 bp, Homo sapiens
tctgaaactaaatcataataatgagagatgttcttccttgatatccaataatcttggaacatgaattgtagctatgagatgagccaagtcaatagatattrttggcctgtgctctattttagaagaccattcttctctggtgaccagaaaacctttgaggttgcaaagagattggtctgttttcaaaagcattgagacttt

SEQ ID NO: 450422 - DNA, 201 bp, Homo sapiens
tgaggcatgagaatcgcctgaacccggaggaggaggttgtagtgagccaagatcaggccactacactctagcctgggtgacagagtgagactctgtctcaaaaaaaaaaaaaaaaaaaaaaaattgcggagcacatatcctatgttctttcttatgtgtctgataatgaatgagtgtgggcccacaaacttttaagttgga

SEQ ID NO: 450423 - DNA, 201 bp, Homo sapiens
tataggtagaaatataatgtattagatattgcctaacaaaggtagtcgattcaatattttcacatgaaactttatcttagcggtgatagaatgcaacaaayacatgtgaaaattgaaataaggctgagcacagtggctcacgcctgtaatcccagcactttgggagtccgaggtgggcagttcgcgaggttaggagatcga

SEQ ID NO: 450424 - DNA, 201 bp, Homo sapiens
ctcttgatccctagaattcaaggttacagtgagctgtgatgtgtgatggcacctctgcactccagagcaagaccctgtctcaaaaaacaaaacccaaaataacaacaacaacaaaaaatggaacacactggatctaattagaggctactgtctaaggtacggcatgttcatttctattatcctaactccaaactatttcaa

SEQ ID NO: 450425 - DNA, 201 bp, Homo sapiens
tcttgatccctagaattcaaggttacagtgagctgtgatgtgtgatggcacctctgcactccagagcaagaccctgtctcaaaaaacaaaacccaaaataacaacaacaacaaaaaatggaacacactggatctaattagaggctactgtctaaggtacggcatgttcatttctattatcctaactccaaactatttcaat

SEQ ID NO: 450426 - DNA, 201 bp, Homo sapiens
cttgatccctagaattcaaggttacagtgagctgtgatgtgtgatggcacctctgcactccagagcaagaccctgtctcaaaaaacaaaacccaaaataacaacaacaacaaaaaatggaacacactggatctaattagaggctactgtctaaggtacggcatgttcatttctattatcctaactccaaactatttcaatc

SEQ ID NO: 450427 - DNA, 201 bp, Homo sapiens
agctgccactcatgtcgcacagtgggtgcaaaccttctgctgctaggcattgtgccatcgctggacctgcaaacatgcaaatatttagaccatcaacgacwgatgtgtagtcgggttctgaaactcctatatcctattcaccaacaccctcaactcaatttcctccctgatccttcgcccacctgcaaaactgttagtctg

SEQ ID NO: 450428 - DNA, 201 bp, Homo sapiens
gagctgccactcatgtcgcacagtgggtgcaaaccttctgctgctaggcattgtgccatcgctggacctgcaaacatgcaaatatttagaccatcaacgasagatgtgtagtcgggttctgaaactcctatatcctattcaccaacaccctcaactcaatttcctccctgatccttcgcccacctgcaaaactgttagtct

SEQ ID NO: 450429 - DNA, 201 bp, Homo sapiens
tcgcacagtgggtgcaaaccttctgctgctaggcattgtgccatcgctggacctgcaaacatgcaaatatttagaccatcaacgacagatgtgtagtcggkttctgaaactcctatatcctattcaccaacaccctcaactcaatttcctccctgatccttcgcccacctgcaaaactgttagtctgcaacagttcaacca

SEQ ID NO: 450430 - DNA, 201 bp, Homo sapiens
gctcaagtcatccgcccacctcggcctcccaaagtgctaggattacaggcgtgagccaccgcacctggccaggttaggatttttaagacatttccttagcygttgcccattgacacacgctgggcagcttctaagctgctgagaagccgcgcgagtaccatgtacatcagcggctgccacatcctgaggagctgtgtcctg

SEQ ID NO: 450431 - DNA, 201 bp, Homo sapiens
ccctgtcctatgaggaaaactccacatctctcaggacacacacacacactggcatccgggatttttgggacctccgtgatgagtggcttccctggccccargtgaatgctgtgccaacagctgaacaggtcccctcgccccgggggagggggctgctcctcagggtcatctgtgtccagctctgggctcgccttcgtaaca

SEQ ID NO: 450432 - DNA, 201 bp, Homo sapiens
aggaagttcatcaccctgtacaccttgtgcaaggagctgctctcgaagcaggtgtgtgtgtcctggagctcacggcgggtgtgggtgggagtttgagatgygggcagcagccagggttggcttccagacctgcctgctggccacaggaaggtgagctcacgtctgcccacctgtgcccactgcccgcaggatcattacgac

SEQ ID NO: 450433 - DNA, 201 bp, Homo sapiens
tccttatgctccctctgcctcagtcattccccagccccagggctggaggccccatgaccaagagaatggggaccccaaaccatgggcagtgctggctgttrccgtggggaccctctcccttgcccccagcacaggagcagagctgctgagcacctccgacgtccatgaacaaaccccagaatatttatatagcccctactc

SEQ ID NO: 450434 - DNA, 201 bp, Homo sapiens
atccgcccacctcggcctcccaaagtgctaggattacaggcgtgagccaccgcacctggccaggttaggatttttaagacatttccttagccgttgcccaytgacacacgctgggcagcttctaagctgctgagaagccgcgcgagtaccatgtacatcagcggctgccacatcctgaggagctgtgtcctgatgtggcct

SEQ ID NO: 450435 - DNA, 201 bp, Homo sapiens
tgctgggattacaggcgtgagccgttgtgcccggctgagagcctgctttatacaccaacttaacccctgactctcggcttggcagtgatgtggactccctstgcctccaccttctaacctgtaaggcggtgttggtgacacaggtctgccagcaggattagaggtgcctggggtggctgcttcctcctctccttatgctcc

SEQ ID NO: 450436 - DNA, 201 bp, Homo sapiens
cctcggcctcccaaagtgctaggattacaggcgtgagccaccgcacctggccaggttaggatttttaagacatttccttagccgttgcccattgacacacrctgggcagcttctaagctgctgagaagccgcgcgagtaccatgtacatcagcggctgccacatcctgaggagctgtgtcctgatgtggcctgcgctggcc

SEQ ID NO: 450437 - DNA, 201 bp, Homo sapiens
ctgcgctggccaaccttccctctgtcctcaggcctccctccccctccacagactccccaccggctcccatattcccttcatggcacaggtcatgctacackctgagtgaccaccgggaatgatgtcatctgtgtccacggcctgtttagccgtctgggctctgaggaaatagatcagggattcccatgcgaacggaacaca

SEQ ID NO: 450438 - DNA, 201 bp, Homo sapiens
aagctgctaagcaagatgcaggaaaagcagcccgcaaacagttgtgatgaccagacagagaaggttgtaagtcgctaatgataatgtggaaaacattaacrttttgagtaaaaagtcatgagactaagccgagtgcagtggcccaagcctgtaatcccagcactgtgggaggccgaggcaggaggactgcttgagcccagg

SEQ ID NO: 450439 - DNA, 201 bp, Homo sapiens
acttcctgaaggaggtgacaagctggcagcagaagctgtccacggcggactccgtcatctccatctggtttgaggtccagcgaacctggagccacctggaragcatcttcatcggctccgaagacatccgcacccagctgccgggggactcccagcgctttgacgacatcaaccaggaattcaaggtgagcacagcccggt

SEQ ID NO: 450440 - DNA, 201 bp, Homo sapiens
aggcattccttggcctgtggccgcatcatgcctgtctctgccttggtctccacaaggccctctttcctgtgtgcctcagatctccctctccttcctgtcaygaggacacttggccctggatttatgtctcaccggaaaatccaggatgaactcacctcaagatccttagtatctgcaaagaccctatttccaaataaggtg

SEQ ID NO: 450441 - DNA, 201 bp, Homo sapiens
cagggtgtcagcaggctgcactccttctagaggctccgggggagggtccttcctgcctcctccagcttctgggggctccaggcattccttggcctgtggcygcatcatgcctgtctctgccttggtctccacaaggccctctttcctgtgtgcctcagatctccctctccttcctgtcatgaggacacttggccctggatt

SEQ ID NO: 450442 - DNA, 201 bp, Homo sapiens
gttcctgaaaatctgctctcccaggcaactgcgtgccattagttcagaaggaatcatcgtgcttgagattagacctgaaatcgattgggccgtcctacacrgccatgccttctctgtgtgctggggccgctgttgtggggccaggacgatgccagacccaagggggaacctaaggggaccctcccgcagtacgtggccctc

SEQ ID NO: 450443 - DNA, 201 bp, Homo sapiens
tccagtgagccaagatgcactccagcccaggtgacaaagcgagactctgtctcaaaagaaagaaagaaaacagacctgtgttttctcacagtgctggaggscaggactctgaaatcagggtgtcagcaggctgcactccttctagaggctccgggggagggtccttcctgcctcctccagcttctgggggctccaggcatt

SEQ ID NO: 450444 - DNA, 201 bp, Homo sapiens
gcaaggttccatctgttggttaaaattccacagtgggctcagaatcaatgctcagaaacatctgactatgtgacaccaaaaagaatattagacaagggacrtggaagcgatttgggaagtgggtggcactaggcaagtacctggtatgttcgtactagactaacggtgatctggtactagagtaacagtacctgtgattcg

SEQ ID NO: 450445 - DNA, 201 bp, Homo sapiens
ccaataattgaccatttttgacctttaaaagatggcagttctcacagccgagctcaatggctcatgcctgtagtccaaacactttgggaagcccaagcagsagtattgcttgagcctagggccttcctatgttgctcaggctggacaacacctgtggtcccagctattctggaggctgacgtgggaggatcacttttgagc

SEQ ID NO: 450446 - DNA, 201 bp, Homo sapiens
caaagggcaaacattagttacagtatatataaagtatttaaaagcaaaatagattgtttaaaaatgtagttatatgctacttccaagagatatctaaaacraaatggaaaggttgaagataaaatgattgacaagtaggtgaaaccatatgaaacttccaataattgaccatttttgacctttaaaagatggcagttctca

SEQ ID NO: 450447 - DNA, 201 bp, Homo sapiens
agtttttaaagcaaaataccacaacaaagggaaacggtgagaaagcagaaaggataaaacgtgataacaaagggcaaacattagttacagtatatataaastatttaaaagcaaaatagattgtttaaaaatgtagttatatgctacttccaagagatatctaaaacaaaatggaaaggttgaagataaaatgattgacaa

SEQ ID NO: 450448 - DNA, 201 bp, Homo sapiens
tagtggaattagaaacaggatttctcctatccaaatcagtaaagaatataaaagcaaataagctatagtttttaaagcaaaataccacaacaaagggaaayggtgagaaagcagaaaggataaaacgtgataacaaagggcaaacattagttacagtatatataaagtatttaaaagcaaaatagattgtttaaaaatgta

SEQ ID NO: 450449 - DNA, 201 bp, Homo sapiens
ttctgcctcctggctgtgtggatctgctttaacttcaagggggctaaaggatagttacttccacctgcctgcccaggcaaaaaaaaaaaaaaaaagcccayctgtgtcacttagaaacggaatccggcaaagactccctgggaactgccaagaggtttccaagtttcccaaactgggcttgctggaggcccagtttccact

SEQ ID NO: 450450 - DNA, 201 bp, Homo sapiens
ggtcacttctgcctcctggctgtgtggatctgctttaacttcaagggggctaaaggatagttacttccacctgcctgcccaggcaaaaaaaaaaaaaaaaagcccatctgtgtcacttagaaacggaatccggcaaagactccctgggaactgccaagaggtttccaagtttcccaaactgggcttgctggaggcccagtt

SEQ ID NO: 450451 - DNA, 201 bp, Homo sapiens
tggaagataacacagacctcatagagatgagggaggaggtgtccagcctggtcatcaatgccatgaaggaggccgaggagtaccaggattcctttgagagrtactcctacctctggacggacaacctgcaggagtttatgaagaatttcctgatatatgggtgtgcagtcactgcggaggacttggacacctggacagatg

SEQ ID NO: 450452 - DNA, 201 bp, Homo sapiens
cgagaaggacacagcaccaatggctgggttcccacgccctgcctgcctgagcctgaccctctcatggcagagaaggggcacaggggcactttcccctaccygctgtcatccttcctcaggtgccctgggacgatctccgctacctttttggtgaaatcatgtatggcggccacatcacagatgactgggaccgtcggctgt

SEQ ID NO: 450453 - DNA, 201 bp, Homo sapiens
cccttcctgagaaacctattccaggatgtattccaggataccaagaggtcaaccacattctagagtaccaaggagagcattaacatttaaaaagactagcratgagcttggaaccaattaaatataaagaggtaagtatataaagagataaatacggttgtaaaaggttacattccaaagtcaaaagcaatacttgtagaa

SEQ ID NO: 450454 - DNA, 201 bp, Homo sapiens
gcgtgggttctattttggcctcctgggctggtggctgcagactgcaggtcggagttccatttgaacatttggtctggccactgcttgtttgcatattcagyctgtgagcctcgagtaattgggtggccggccgcttcggcaccccagatcgggcagcaacgatgggacgtgccgaagacaccccacaggagatatccagtg

SEQ ID NO: 450455 - DNA, 201 bp, Homo sapiens
agggcgagggccaaggcaggacgagtgagttcatatgagccccgatatttgataaacttgggacatttgaagcaaacgtggcctcatctctctttctctcytctaaggacaaagagcccgtgccttgggaattcccttcttctcttgccttttccaggataaattccttcttccagcgcatccagaccattgaggtaaaaa

SEQ ID NO: 450456 - DNA, 201 bp, Homo sapiens
actgcaccattgcactccagcctgggcaacagagcgagactccatctcaaaaataagcaacctaaaaaatatatacatatgtatataaattcatgagaccwaatcagatgattgattcatcaactgattcttattcaatgaactcccactggtatttgatgacagctcttccggccagcgcacagtggaagtgatgttatg

SEQ ID NO: 450457 - DNA, 201 bp, Homo sapiens
agctcttccggccagcgcacagtggaagtgatgttatgaaaacatctgcctcgcccttcaggagctgcaaacttcagggaaagaacaggtgtgcggaagcrggaagaagctgactgtgagcggcaggatttcacatgctgggtaccaaaaaagaatcaattatcttatttttatcccaattacatgttggaatgatctctt

SEQ ID NO: 450458 - DNA, 201 bp, Homo sapiens
cgtggctcccaccgtccttctgctgaactgcgctgtgcaggagaaagaggctccaaaacgggcacatggaggcgggaagaacaagggcctggcttcatggygaggccgcccatgagccaggctttgtaggaagaagaatgttccagagcaaaggtgtgacgtgagactgcaaggaagcatgaagggagtgggaacggcggc

SEQ ID NO: 450459 - DNA, 201 bp, Homo sapiens
caggagaaagaggctccaaaacgggcacatggaggcgggaagaacaagggcctggcttcatggcgaggccgcccatgagccaggctttgtaggaagaagartgttccagagcaaaggtgtgacgtgagactgcaaggaagcatgaagggagtgggaacggcggcggggtgggaagcgtgtggtcgcctggcgtgtgctctg

SEQ ID NO: 450460 - DNA, 201 bp, Homo sapiens
ggagaaagaggctccaaaacgggcacatggaggcgggaagaacaagggcctggcttcatggcgaggccgcccatgagccaggctttgtaggaagaagaatrttccagagcaaaggtgtgacgtgagactgcaaggaagcatgaagggagtgggaacggcggcggggtgggaagcgtgtggtcgcctggcgtgtgctctggt

SEQ ID NO: 450461 - DNA, 201 bp, Homo sapiens
ctgcaggatgggctggcctgagctgcctagccaaggtgttcagggcccgatgctggtaaagccaatgtgggcagggctggcttcgtgcacaagtgacctgygcagtcacactgggctccacgctggttgggggtggtggggcaggctccgtttaccatctcaacttcaccatctcaaaattcttagtaattttctttttct

SEQ ID NO: 450462 - DNA, 201 bp, Homo sapiens
taatctgctcacctcggcctcccaaagtagtggggttatagacgtgggccaccgtgcccggccaactgttaacttttaaatcttaccttttgtgacgccayggttgttttttcttgtatctaatcactttactgatctcgggtattagttctaaatattcctcactgggctttgctccctgcgagtaagtgcagaaaggta

SEQ ID NO: 450463 - DNA, 201 bp, Homo sapiens
tgggcacccagccacaagaccccccagtgcatgtgggcacccgtggtgtctcatcgaaggcactctcccccgcagattagccagctgaacgtactcatcaygctgctcattgggaacctcaacgctggcgacaggatgaagatcatgaccatctgcaccatcgatgtgcacgcacgggacgtggtggccaaaatgatcgtg

SEQ ID NO: 450464 - DNA, 201 bp, Homo sapiens
ggtggcgcggaatggaaagaaaggtggccctggggcctggtgaccctgaaggtaaatggccaggaggctgacctggagggcgagaaggacacagcaccaawggctgggttcccacgccctgcctgcctgagcctgaccctctcatggcagagaaggggcacaggggcactttcccctacccgctgtcatccttcctcaggt

SEQ ID NO: 450465 - DNA, 201 bp, Homo sapiens
ccataaactgctgagagtggggtgctgaaatctctccaactataattatagatgtgtttatttctcctttcagctccatcagtttttgctttgtgtatttygaggctctgttgcttggtgtgtacagatttgggattattgtcttcttataggttgaccctttttcccattatgtaatgttccttttgtctctaggaattt

SEQ ID NO: 450466 - DNA, 201 bp, Homo sapiens
aattctacatatctatgcgcccagcaccagagcacccagatatataaagcaaacagtggtagatctaaagggagagaccccagtacagtaacagttagggwtttcaacaccctgctctcagcgtcagacagatcatctagacagaaaatcagcaaagaaacattggagttaaactgcactttagatcacagggaccaacag

SEQ ID NO: 450467 - DNA, 201 bp, Homo sapiens
atccggacggagatgctggagggagacgtcctgctggcccccggctttcagatcccccccaacctggactacaaggtaaggatgacaagttaaacaggagytcaacgtaatgaaggctcgtgcctcccggtgagagcctgccagcacaaatggagtgtcaataattgagcaagaacccaggcagccaaaataagagaggat

SEQ ID NO: 450468 - DNA, 201 bp, Homo sapiens
acgtgtcaattagatcctgtcagttggttgtgttgttctgtccttttatagtcttgctaattttctgtctagcagttccataaactgctgagagtggggtrctgaaatctctccaactataattatagatgtgtttatttctcctttcagctccatcagtttttgctttgtgtattttgaggctctgttgcttggtgtgta

SEQ ID NO: 450469 - DNA, 201 bp, Homo sapiens
taatacaaacaacctttttttttttttttttttttttaaagaaagaaatgcagcctcagggaagggggaatggaattttcctttatgtcgctgggagcacrgggggcagcccacaaagggggctgggaaacaagtgggatctgtacagacagcaaggtgtgggtgaacgttctggcaaggaatgcttaaccaacaggacat

SEQ ID NO: 450470 - DNA, 201 bp, Homo sapiens
tggtatcttctatttcattcctagtgttggtgacttatgtcttcactcttcatctttgtcggtcataatagaggtttataaactttattgatttttcaaakaaaaagatttttgtttaacttttgtgctgttttattttaaacttcatcagtttctggtctttattattttgttccttcctttgctttgggtttatcttgc

SEQ ID NO: 450471 - DNA, 201 bp, Homo sapiens
ggatctttgaaactgctcccaagcgagaggaagggggaggatctagaactgaggagggggtcacagggactggcggcagtacaggggaacttgctggtgasgtacactctgccccagcctcgggcttgggtatcagaaacactggggtatggcccgcaggctggtcagcaggtcctcagacgtggcagctgcaggcttcgg

SEQ ID NO: 450472 - DNA, 201 bp, Homo sapiens
agagtgtgtctgtcaactactcgatggacacaagtccacagaatcaacccagatcacagaggcagagaggttggatccctgcccttggtcactgagtgttycaaattgttacctattctctccagactacagaattcagagccatgactgggtgtctaactgcatgcctgagatgctgaatggctgcttttggaatgaatg

SEQ ID NO: 450473 - DNA, 201 bp, Homo sapiens
tgtcaaatttttttgtgtttactgatatgattgatttttgtttagtctgctaagataattgattacactgactttttttttcttgaaacagagtttcgttytatcgcccaggcctggagtgcagtggtgtgattttggctcactgcaacctctgcctcctgggttcaagcgattctcccacctcagcctcctgagtagctg

SEQ ID NO: 450474 - DNA, 201 bp, Homo sapiens
aagcgagaggaagggggaggatctagaactgaggagggggtcacagggactggcggcagtacaggggaacttgctggtgaggtacactctgccccagcctygggcttgggtatcagaaacactggggtatggcccgcaggctggtcagcaggtcctcagacgtggcagctgcaggcttcgggtgagcgtacgggcccagac

SEQ ID NO: 450475 - DNA, 201 bp, Homo sapiens
acaatgaagttaatgcagtcatgaatttggtgagcaggctggagctgatagcaagggcacgggacctggaccgggtcaccctctccggttgcattatcgayatccgagtggcattgtgtggggctgcgtggcacacagtgcacacctcagcatgtgcagagtccgtgctggtgacagaggtgattccaggtgctacaagat

SEQ ID NO: 450476 - DNA, 201 bp, Homo sapiens
ttgccattatgtatattagctgtaagttttcaaattgaggaaattctattccttttctttttattcatcatgaacaggtgttagatcttgtcaaatttttytgtgtttactgatatgattgatttttgtttagtctgctaagataattgattacactgactttttttttcttgaaacagagtttcgttctatcgcccaggc

SEQ ID NO: 450477 - DNA, 201 bp, Homo sapiens
gatcctaaagattttctcctatgcttttatagttttctgctttctgtttgtctatgagccattttgagttaatttttgtataaggagtgaggtttattggrttaaggttcatttattatttttgtttgtttatggatgtctaattgctccagcatgtttgtagacaagtcggtccctccattaaaaaaaattctttttttc

SEQ ID NO: 450478 - DNA, 201 bp, Homo sapiens
gctcagtgatccacatgtatttctttggcttagaatcacaaaaagaaatcaagtacaaacctttgtgattatatactgaggatttatgtattaaaagtaayggaaaagatggcaattacttttacaccaacctatacacagttaattcttaattagtcatggtatgggctagaaagagataggaatactataacataaaac

SEQ ID NO: 450479 - DNA, 201 bp, Homo sapiens
ttccagaagattgttccctgaaacaaatcagaatagttgcactcacatattaaaaagtccctcttcctcttcctctagcattttaatttcttgctcaggartagaaactattggctcatactgagggtcctggttggacttgtctgcattctcagtggaggtactgtggttctcgtgagcgtcctcggtagccgccatggt

SEQ ID NO: 450480 - DNA, 201 bp, Homo sapiens
tgtccatggtccattcattagaaacacagcacctttctccagctggttagattctgtctaaagagctcccgccttggactccaggtatggtaggagcaccrtgatttagtcacgagcacactaaagaggtgtgttctgagattctctcacgtagggtgtagtctcagagcagggttcctcgactgggaagagaccactgtc

SEQ ID NO: 450481 - DNA, 201 bp, Homo sapiens
ttttttttttttttttttgagacagtctcactctgtcacccaggctggagtgcagtggcacaatctaggctcactgtaacctctgcctcccaagttcaagsgattctcctggctcagcctcctgagtagctgggactacaggcgtgtaccaccaagcccagctggtggtagtaaaaatacaaataatttttgtatttttag

SEQ ID NO: 450482 - DNA, 201 bp, Homo sapiens
tagacaggtagaattgccattggccaagagggcaggtggggcagaggccacaggggaggatgggctgctgtgctttagccttgttgggtgtgagatgtcayctggacatccaaagagaggagctgagtaggcgggtggatacagaaggctggaagtcacgagagaggctggggttggagacataaacgtgggagccaccca

SEQ ID NO: 450483 - DNA, 201 bp, Homo sapiens
caatagagccggtagaaggggcaggtgcaattttagatgtgagcagagacttgtgggaggtcagagtgccgctgagcagagatggagggaacagctttgcrgcacggcatgcgggtaaagaaaaggccaggtggcgcccgagagcctggtgcagtccaggagcagcaaggaggccagtggggcgggggaatgggcaaaggg

SEQ ID NO: 450484 - DNA, 201 bp, Homo sapiens
gcttccaggtgaaggccgtgctggacgacatcctggagaagattccggagactttcaacatggctgagatcatggcaaaggcagcggaaaagaccccctaygtggtagtcgcctttcaagaatgtgaaagaatgaacatcctgaccaacgaaatgcgccgttcgctcaaggagctgaacctggggctgaaggtaaacatgg

SEQ ID NO: 450485 - DNA, 201 bp, Homo sapiens
gtcagagagctgtctgtcctgccctcctagagcctacctccaggcaggagggcggggaggatgatcagctagcattcacgagggagtcaagtgtatgatayggtagaaggtgcaacaggttccgcggaaggaagagcaggaagggcaggttaagaagatcaatagagccggtagaaggggcaggtgcaattttagatgtga

SEQ ID NO: 450486 - DNA, 201 bp, Homo sapiens
gttcaccaaatacttactgagcacctactacatgtatgtgcttgggataaattagtgatccagacagtcagagagctgtctgtcctgccctcctagagcckacctccaggcaggagggcggggaggatgatcagctagcattcacgagggagtcaagtgtatgatatggtagaaggtgcaacaggttccgcggaaggaaga

SEQ ID NO: 450487 - DNA, 201 bp, Homo sapiens
tcccaagaagaaatgacaatttgaaactggggggggggaaaaagtctttgccgaatctagataaatgcactggctggtcaaggcaggcacactggggagarttcacacttgtgggctctgggatgtgggttctatggctaaaacccggaaagttcagatgagcagaggatggaaccgaattcctacaagcacagccccaga

SEQ ID NO: 450488 - DNA, 201 bp, Homo sapiens
aaagtgttgggattacaggtgtgtcggttgtctggatgatgggtcttcaggtttttggggtttttttctatttttctgacttccaagtaaaacatctaccygcattacaggatagtcataaaccattaagaggaacattttttttttccaactgccccatgtcaatgctttgaacaaatgaaactggtgacctcatacgtc

SEQ ID NO: 450489 - DNA, 201 bp, Homo sapiens
gcatgaagggagtgggaacggcggcggggtgggaagcgtgtggtcgcctggcgtgtgctctggtccacactgccgagtttggtcttcgttccctaaggccygggcagcctaggtcagataagtcacttgctcaaaccctctatgtgactgcaaagaccctggaggcacgggagctactggaaggatgagaaccaggaagga

SEQ ID NO: 450490 - DNA, 201 bp, Homo sapiens
tggatcacctgaggtcaggagttcaagaccagcctgaccaacatggtgaaaccctgtctgtactaaaaataaaaaaaaattagccaggtgtggtggtgtgygccttgggaggctgaggcaggagaatcgcttgaacactgcaacctccctcactgcagagggtgcagtgagccaagatcacgccactgcactccagcctgg

SEQ ID NO: 450491 - DNA, 201 bp, Homo sapiens
ctaatgcagagctggcagaggcacaagagaagctgtcccggatcaaaaacaagattgccgtaagtgccggctcgctcccgtccctgcgaaacaccagagcygcttgctcgcgctgccagtcaatacctctgttgaaaatgggttggcacggcccgccgtcatgaattattcagcagtgcaagaggatgcaggcagaggcag

SEQ ID NO: 450492 - DNA, 201 bp, Homo sapiens
catgccggctgtggaagcgctgtccaaggtggagggaggtgccacacagccccttgtgagagaagccaaaggggccggacattggcgtctggtggcgcggratggaaagaaaggtggccctggggcctggtgaccctgaaggtaaatggccaggaggctgacctggagggcgagaaggacacagcaccaatggctgggttc

SEQ ID NO: 450493 - DNA, 201 bp, Homo sapiens
ttgggaattcccttcttctcttgccttttccaggataaattccttcttccagcgcatccagaccattgaggtaaaaacagaactcggtgcatcttgacctscacttcccagactgctcctaccctaggacacctgcagcgtccatccctaccccccttgccaataatcccccaggcagaaaataagtgaggcccaaatatc

SEQ ID NO: 450494 - DNA, 201 bp, Homo sapiens
agaacgagtggcccctggacaagatgtgtctgtctgtcgaggtgaccaagaaaaaccgagaggacatgaccgctcctccgcgagagggctcctacgtgtayggactcttcatggaaggtaaggagggctcttgtctgtctgcagaagcttccagagccagtgctacttgccaagacaagataaaactagctcttggcaaag

SEQ ID NO: 450495 - DNA, 201 bp, Homo sapiens
gatgtctgggcaggggctgagtgagctggagggatccaaggtgggcaggggcgctccctccccacctggggccttcagtgatggccagttgacctcaccgyggtcgtccccctctcatggggctccgtaccatcaagggtgggcctaaggggggctggggccacacaaatggtccccttgtcccttagcctggctgacctg

SEQ ID NO: 450496 - DNA, 201 bp, Homo sapiens
ttgggaacaagttgtgggctcctaggtcacccctcgcttggcgctgtctcgctcagagggcaggggctgctggtcggagcgtgcgcaccgttccatcacgrggccctctgccatgaaccagcttccgtgttgtgcccgcagctacctggatgtcatcgagcaggccatctcggaaggggacacgttgctcattgagaacat

SEQ ID NO: 450497 - DNA, 201 bp, Homo sapiens
gggcttgggtatcagaaacactggggtatggcccgcaggctggtcagcaggtcctcagacgtggcagctgcaggcttcgggtgagcgtacgggcccagacmaaagggatccttgggggtgtggatgcggctccgagagcatcccagccctccaccctgcagtcttccagcttccctagctgagcgccaggaagggcaccga

SEQ ID NO: 450498 - DNA, 201 bp, Homo sapiens
cgcaggctggtcagcaggtcctcagacgtggcagctgcaggcttcgggtgagcgtacgggcccagacaaaagggatccttgggggtgtggatgcggctccragagcatcccagccctccaccctgcagtcttccagcttccctagctgagcgccaggaagggcaccgaccattccccaccctggcctggccagcacaacag

SEQ ID NO: 450499 - DNA, 201 bp, Homo sapiens
tcagcgagaggatttaacaattctacatatctatgcgcccagcaccagagcacccagatatataaagcaaacagtggtagatctaaagggagagaccccartacagtaacagttagggttttcaacaccctgctctcagcgtcagacagatcatctagacagaaaatcagcaaagaaacattggagttaaactgcacttta

SEQ ID NO: 450500 - DNA, 201 bp, Homo sapiens
ttcgggtgagcgtacgggcccagacaaaagggatccttgggggtgtggatgcggctccgagagcatcccagccctccaccctgcagtcttccagcttcccyagctgagcgccaggaagggcaccgaccattccccaccctggcctggccagcacaacagcagtagcagctcgcaccgggcagccggatgtgcaggcaggta

SEQ ID NO: 450501 - DNA, 201 bp, Homo sapiens
cgtgaggcccctttctccttgtgcttcaggagcttgatgttgccagtgcctccacccttccattccagaagattgttccctgaaacaaatcagaatagttkcactcacatattaaaaagtccctcttcctcttcctctagcattttaatttcttgctcaggagtagaaactattggctcatactgagggtcctggttggac

SEQ ID NO: 450502 - DNA, 201 bp, Homo sapiens
ctttgcttatctgaattatctcattttcaaagcattacttaagtcatttttaataagataaaaatataatatgaaagttgaagaaatgctgggaaatcagraactctcaggaggaaatgaggcatttaccatgcccattgggagtcagtccccacgctggtgtgggtagaggtcacccgccctcccctgcaggcaggaccc

SEQ ID NO: 450503 - DNA, 201 bp, Homo sapiens
cccttaccaacgaggtcccctgcacagacaagatctccatgcacatctgggtcccgatggggcctctctgcagctgtcatgtgggctctgggctataggcygtcttcagttgtctggtacctgaccctgggtgatttagggcaggggaaatactggcttggtgtgagagttgggtaaaggggagtggttgagggtcggctg

SEQ ID NO: 450504 - DNA, 201 bp, Homo sapiens
gctcttgtcgagcttgcctagagtcacttgcttagtaaatggccaagccaggactggaccagataggcttgctgtggtacccaagcttgtgacctgccctrtggcatcggtcacctgctttcctttgcaattagcctcccttgtccctcctccaccattcactcttctggaggatgaggccccaaccctgtcctatgagga

SEQ ID NO: 450505 - DNA, 201 bp, Homo sapiens
ggcagctgcctgctgaacaacaggggagtgtgcctttcctgttctcacaggggagcacccggagcctcagcagagcctggggctgagtctgttccaggccygcaagctgtgttttctcctcccaagtgggtggctgccactgatgggccagttgtcagctgtgagtgccccaggctgcatgaggctggtcttcagggtggt

SEQ ID NO: 450506 - DNA, 201 bp, Homo sapiens
aagatccgtgttaggttccacgcgatcattccagcaagtggctgtggatcggttccacgcgataactccggcacgtggctgtgggtccgagggttccacgygataactccggcacgtggctgtgggtccgagggttccacgtgataattccggcacttggctgtgggtccgagggttccacgcgataactctggcacgtgg

SEQ ID NO: 450507 - DNA, 201 bp, Homo sapiens
gaggatgggcttgagctaagttgctgaggcttggggtgatgtctgggcaggggctgagtgagctggagggatccaaggtgggcaggggcgctccctccccrcctggggccttcagtgatggccagttgacctcaccgcggtcgtccccctctcatggggctccgtaccatcaagggtgggcctaaggggggctggggccac

SEQ ID NO: 450508 - DNA, 201 bp, Homo sapiens
cgtgttaggttccacgcgatcattccagcaagtggctgtggatcggttccacgcgataactccggcacgtggctgtgggtccgagggttccacgcgataaytccggcacgtggctgtgggtccgagggttccacgtgataattccggcacttggctgtgggtccgagggttccacgcgataactctggcacgtggctgtgg

SEQ ID NO: 450509 - DNA, 201 bp, Homo sapiens
cctccgcctcccgggttcaagcaattctcccgcctcggcttcttgaatagctgggattacaggcatgggccaccacgcctggctaatttttgtatttttartagagacggggtttcaccatattggccaggctggtctcgaccccctgacctcaagtgatccacccgcctcagcctcccaaagtgctgggattgcaggcat

SEQ ID NO: 450510 - DNA, 201 bp, Homo sapiens
ttccacgcgatcattccagcaagtggctgtggatcggttccacgcgataactccggcacgtggctgtgggtccgagggttccacgcgataactccggcacktggctgtgggtccgagggttccacgtgataattccggcacttggctgtgggtccgagggttccacgcgataactctggcacgtggctgtgggtccgaggg

SEQ ID NO: 450511 - DNA, 201 bp, Homo sapiens
tgatgtctgtcttcattctgttcttaggcattttgcaaatcttgggactgcattacctttaaaaattcacataacgtaaaattaaccacattaaaatacayaattgaagagcatttggtacactcacgatgttgtacaaacacatctgtccagttgcacattttcaccaccccgaaaggaagccctgtacccactcttctt

SEQ ID NO: 450512 - DNA, 201 bp, Homo sapiens
cactcttctggaggatgaggccccaaccctgtcctatgaggaaaactccacatctctcaggacacacacacacactggcatccgggatttttgggacctcygtgatgagtggcttccctggccccaagtgaatgctgtgccaacagctgaacaggtcccctcgccccgggggagggggctgctcctcagggtcatctgtgt

SEQ ID NO: 450513 - DNA, 201 bp, Homo sapiens
gaattgagtgctcagtagatcagggtgtgatcacctccctctgtccacttggggtggagaaaggccctgcttggctctgtgtgcctcgctggtgtgtcccrtgtgttcttggtggaatcatttctttggactatgaattcatttctgatacagtggggatcagaccctcccactctaggaaattttgccccagtggtttgc

SEQ ID NO: 450514 - DNA, 201 bp, Homo sapiens
ttctctcccttgttgtcccttccagcccctgcctgttccggagttagttctcattatcagcaactcgcacacagccaggaacgttctagagcaattttccrcatgatctccttttggcggaaaatagaattcgcttcctttccaaaagtcattaaactaaaaactatataaacatgaaaaggaggagagagaaatgggaag

SEQ ID NO: 450515 - DNA, 201 bp, Homo sapiens
gaatggcctggctgccagcccttgcacctgccacatttctggctgttatagccacttgcatgggctcaggaggcccaggcccgcctgtccccgttctgccycctacagtctccgtgacaggaagcctcaaggctgggagcagggccagggcctctctgaggttccaggggctctgcttctgcagccccttccaggacctga

SEQ ID NO: 450516 - DNA, 201 bp, Homo sapiens
tgagtgctcagtagatcagggtgtgatcacctccctctgtccacttggggtggagaaaggccctgcttggctctgtgtgcctcgctggtgtgtcccgtgtrttcttggtggaatcatttctttggactatgaattcatttctgatacagtggggatcagaccctcccactctaggaaattttgccccagtggtttgctggg

SEQ ID NO: 450517 - DNA, 201 bp, Homo sapiens
gccctgtgctctaaataggatagggccctggggtttctctcccttgttgtcccttccagcccctgcctgttccggagttagttctcattatcagcaactcrcacacagccaggaacgttctagagcaattttccgcatgatctccttttggcggaaaatagaattcgcttcctttccaaaagtcattaaactaaaaactat

SEQ ID NO: 450518 - DNA, 201 bp, Homo sapiens
ccatctgttcacgtttctctttgacctaagaacattttccccctggtttgacagccctgtgctctaaataggatagggccctggggtttctctcccttgttgtcccttccagcccctgcctgttccggagttagttctcattatcagcaactcgcacacagccaggaacgttctagagcaattttccgcatgatctccttt

SEQ ID NO: 450519 - DNA, 201 bp, Homo sapiens
tcgccatctgttcacgtttctctttgacctaagaacattttccccctggtttgacagccctgtgctctaaataggatagggccctggggtttctctcccttgttgtcccttccagcccctgcctgttccggagttagttctcattatcagcaactcgcacacagccaggaacgttctagagcaattttccgcatgatctcc

SEQ ID NO: 450520 - DNA, 201 bp, Homo sapiens
gctgttccgatgtggaaaaatctgaaaaattaagtaacttggtcacccggccagggccagatgagtccccagagtcttgctgtccccaacatggagattgygccacctgcatctagtttggcacaaggggaagagcagataaggaccagcgtacgggtctgggctgaacctcccccagggttcactaggggatccggcagt

SEQ ID NO: 450521 - DNA, 201 bp, Homo sapiens
cgtcaggactgccccagcgcagaagggtcccaatggagccaattctttcatttggaaacctcacttttgggtctccaaaattaaagatggggcacaggctyatgggctgggcgggcgggcagctggcttctgtggctcctgcacccctaacactggctccacggggaggtgctgtgactccctgctgctgttccgatgtgg

SEQ ID NO: 450522 - DNA, 201 bp, Homo sapiens
caaagaatctggcaacattccctttctcagaaggctcttccccaggtagctgcatctagttgcagggtcctcacttccttccttccactcaaatgcccccaggctggtcccttctcagcaatggccttccctcatattcatttgtatactaatgtctgtgtgttcgttgtcttcctgactagaaggtaaactccctgaggt

SEQ ID NO: 450523 - DNA, 201 bp, Homo sapiens
ccccttttcatttctccaagtaacctgaaagcagccaggtttcccaaaggacactcatgtccctaatagaattaccctctgatggccaggtgcagtggctsacacctgtaatcccagtactttggggaggatcacttgagcccaggagtttgagaccagcctgggcaacatagtgagaccccatctctacaaaaagtctaa

SEQ ID NO: 450524 - DNA, 201 bp, Homo sapiens
gcggcctggtacgcagacctgctgctccgcatcagggtaagtgccgttttctctgagaggcttcctaagactcggggaccgagtgcccagagctcggcacrccccacaccctagagcctgcaggagcatggccaggaggctcctgggggcctgtcctctgtcagatcagggccagaagggcctagcccatgcccctcccac

SEQ ID NO: 450525 - DNA, 201 bp, Homo sapiens
cttcaagattctagctggaagcaggttagggtaatcagacatcccctgcgggatggtggaggatggagaccctgatgagaatctttggctaagcaaagaayctggcaacattccctttctcagaaggctcttccccaggtagctgcatctagttgcagggtcctcacttccttccttccactcaaatgcccccaggctggt

SEQ ID NO: 450526 - DNA, 201 bp, Homo sapiens
attcagttatacttgctaaagcaagatgaggctgacttgattcagaccttactcacgatttataccatctcaatagatacaggtgtagggagagcgatgggagctcagctttgaatacactgcaggtaagtaggaatttctagcaaaggagcagggtgggagtccatggatagaaaattacttagaggggacatcaggggt

SEQ ID NO: 450527 - DNA, 201 bp, Homo sapiens
ctcccagaccgagaatgtggaggagagtcacagtcacactttgggccaaggagctctggttcccacatgactgattctgaatcagaaggaagattctgggyaggaagggactttggaggtggaggaaatggctttgctgtccaccccctgacaacaggccatgccagcttgtctgtgtcctccgcgtcgggtggaagagcc

SEQ ID NO: 450528 - DNA, 201 bp, Homo sapiens
ggggcacacaggcacgtggcctgcaatggtggcaccatggtaacaaagtttatggggagcagtgggcacgtagcacccgggctgggggataaggaatgggrgccacaggagctgggacggtgaggactgcaggcctgccccgagcaggccaaggggagagggcagagcaaggacaggtgtgacccgtgaggagtgcatggg

SEQ ID NO: 450529 - DNA, 201 bp, Homo sapiens
atgcaattcgggccaagaaaaaagcattcaatttcctgggagagatcataggcctcattcccaccgtcggtatcttcatcaccatgaaccctgggtacgcyggacgcgcggagctgcctgagaacctaaaagccttattcaggtacgtggcccaggtgaaagtgagtggctgcagtgagccaggccggccacagcaacgtc

SEQ ID NO: 450530 - DNA, 201 bp, Homo sapiens
acgggaaactctgaagattcacagaggtgcagaggtggaggcttgtctggtccagtcccctcacttgtgcaaatatgttttattctctctcatcccacttyaggctggtcgggggattagcatcggaaaacatccgctgggctgagtctgtggagaacttcaggagccagggggtcacgctgtgtggggacgtcctgctca

SEQ ID NO: 450531 - DNA, 201 bp, Homo sapiens
ccaagttccgcctgatcctacacaccaagtacttcaacccacactacaagccagagatgcaggctcagtgcaccctcatcaacttcctggtcaccagggayggactcgaggaccaactcttggccgctgtggtggccaaagagcgcccagatctggaacagctgaaggtaatggcctgaagtttggtcacacgggaggagg

SEQ ID NO: 450532 - DNA, 201 bp, Homo sapiens
ccagaagggagggttcaaggtggcggcctggcctggggctggggtgaaaggtggtctgtacttgtgttcctctcccctggtcactgggaggcccactaacyctttcctccaccaaccgccaggtacattaagatcggtgacaaggaggtggagtaccaccccaagttccgcctgatcctacacaccaagtacttcaaccca

SEQ ID NO: 450533 - DNA, 201 bp, Homo sapiens
tgggaggccgaggtgggtggatcacctgacgtcaggagttcaagaccagcctggccaacatagcaaaacctcatctctactgaaaatacaaaaattagccrggcatggtggcgggcgcctatagtcccagctacttgggaggctgaggcatgagaatcatttgaacccaggaggcagaggttgcagcgagccaagattgta

SEQ ID NO: 450534 - DNA, 201 bp, Homo sapiens
aatgaagttaatgcagtcatgaatttggtgagcaggctggagctgatagcaagggcacgggacctggaccgggtcaccctctccggttgcattatcgacayccgagtggcattgtgtggggctgcgtggcacacagtgcacacctcagcatgtgcagagtccgtgctggtgacagaggtgattccaggtgctacaagatgt

SEQ ID NO: 450535 - DNA, 201 bp, Homo sapiens
tcagtctcccaagtagctgggattacgagcatgcatcaccaagcccagcttggtgatgtatttttttgtagagatggggttttgccatgttgttgcccagrgtggtcttaaacttcttaatttttttattttttgagacagagtcttgctctgttgcccaggctggagtgcagtagcataatctcagctgactgcaacctc

SEQ ID NO: 450536 - DNA, 201 bp, Homo sapiens
cacattggtatctgcggccactcaagtgtcatttgaacctggagccgtatggttttactgagctttctccattgaagtctctagtctattaactaaatcaygttggtttacgttcatgacggcatcgtttccttgctctgcgtccctgcggggattttctccctgatccttcctgttggggctgattgtgggtgctcagcc

SEQ ID NO: 450537 - DNA, 201 bp, Homo sapiens
cccccactccctaaccctaaccctcgcacccctactccctaaccctaaccctcgcacccctactccataaccctaatgtctcacacacccccactcccaartctcggctccgtgtcctgcctgtctactgccagtggcattggctatggcaaggaaaggcactgctgctgatgttttggccaaagaaagggaagcctgtgc

SEQ ID NO: 450538 - DNA, 201 bp, Homo sapiens
gtgatgatagggacgcaggcagatccagcttcagtagcaccatggggctctcaaccaagataggagggagggtgggggagaactgccctggggccaggccyggaggagatgagatacctggggatgaggcggccatcgcacagcgggacacatggggctgggaagtgcagggataggatgcgggtagagatgtgggggcca

SEQ ID NO: 450539 - DNA, 201 bp, Homo sapiens
gggggagaactgccctggggccaggcccggaggagatgagatacctggggatgaggcggccatcgcacagcgggacacatggggctgggaagtgcagggayaggatgcgggtagagatgtgggggccagcctcagcagcataagaggacgggagtggaggggactgtgccagagagtgagcggggaaggtgaggtggggac

SEQ ID NO: 450540 - DNA, 201 bp, Homo sapiens
agaaggaaacagccacccactgcggaagcatttgcgtgctctgcggtggccttggaccatcccaaacacccatgagcgcagatcatccctcagcattgacrtgtttcacatttctatgacgtggagcaaagcagatttactgccctgattgtatagggagggggtcacttaaaagcaaggagattgaaacagacgtgacta

SEQ ID NO: 450541 - DNA, 201 bp, Homo sapiens
cacccatgagcgcagatcatccctcagcattgacgtgtttcacatttctatgacgtggagcaaagcagatttactgccctgattgtatagggagggggtcrcttaaaagcaaggagattgaaacagacgtgactaataacaaagccagcactggccaagggtgtctcgtgtcaggcactgttgcaagcactgacagccgcg

SEQ ID NO: 450542 - DNA, 201 bp, Homo sapiens
cctggagactttttcacgtgggtcgttagaggtatcttggggccaaaagaaatgttttacagtcgtcctttggtatctgaggaggttggattccaggaccsccatggataccagaatccacggagggatggatgctcaaggccccgatataaaacagtgtcgtatttttgaagatgctcccctctactttaaatcatctct

SEQ ID NO: 450543 - DNA, 201 bp, Homo sapiens
aagtttactaatcttagctcaggtgattcattctttatacattacagtaagctcagccctctgtgatcacagaagaaaggccaacacctgatccaaagacygccagaacatcactcggtcctccatgggaggattagccgagaccccgactgaccccagacttattggggtcatgttagaaagagttgggggcttttgtag

SEQ ID NO: 450544 - DNA, 201 bp, Homo sapiens
gggaggcccgctcaggagttcaaaattgcagtcacagagcgcggactaatgcctgaaatctcccagaccgagaatgtggaggagagtcacagtcacacttygggccaaggagctctggttcccacatgactgattctgaatcagaaggaagattctgggtaggaagggactttggaggtggaggaaatggctttgctgtcc

SEQ ID NO: 450545 - DNA, 201 bp, Homo sapiens
cccctaccaaactctcgctgtcactctcccaccagcctggaggggccctggccagccctgctcggcactgcaactcacttggcatttgagacagagtctcrctctgtcatccaagctgggatgcagtggtgcgatcgtggctcactgcagcctggacttcctgggctcaagtgatcctcccacctcagcctcccaggtagc

SEQ ID NO: 450546 - DNA, 201 bp, Homo sapiens
ctcatctctactaaaaatccaaaatattagctggctatggtggtgtgcacctgtaatcccagctactcaggaggctgaggcaggagaattgcttgaacccrggaggcagaagtttcagtgagcagagactgcaccattgcactccagcctgggcaacagagcgagactccatctcaaaaataagcaacctaaaaaatatat

SEQ ID NO: 450547 - DNA, 201 bp, Homo sapiens
cacatccttaaaaaaggggaaaatcatcctggaactgtaaagcattgacttaagggtggacaccattgtcagaggcttgggagaggcttgtccagttctcwtctacacctcctggggggcaggggagggaggcccgctcaggagttcaaaattgcagtcacagagcgcggactaatgcctgaaatctcccagaccgagaat

SEQ ID NO: 450548 - DNA, 201 bp, Homo sapiens
ccaggaagaagtcaaggtcgaggtcatcaataaggtaggtgaaggcagcccagcgtgccttcaggaaggctgctgcactggccaggcctcctgggcttccmcgtgtggtcaggtgccaccgacaggcgtgggaaaggctgagacttacatagaaggacaaggttcctaaaccagtgggacccccgaaggagtctctcccag

SEQ ID NO: 450549 - DNA, 201 bp, Homo sapiens
acacagaatcaaaccacttgtgttgaaattggaccgtgaagggcagagtctcagatggtaacacagagtgggagaggcagagggagcgagttccgattcakccctgtggcctctgaggcacagtgaggcacagcagaaacacctgccccacgggaggtgcagagcatgccggctgtggaagcgctgtccaaggtggaggga

SEQ ID NO: 450550 - DNA, 201 bp, Homo sapiens
ccagaactctggcaggccgaggagggaggatcacttgagctcagaagtttgaggctgtggtgagtcatgattgcgccactgcagtccagcctgagcgacamagtgagaccctgtttcaaaaaaaagcttcaaggcggttttctctggggctctggagagaagagatgagagggatcaagacggggtagggcaagaaagttt

SEQ ID NO: 450551 - DNA, 201 bp, Homo sapiens
ggaggtgcagagcatgccggctgtggaagcgctgtccaaggtggagggaggtgccacacagccccttgtgagagaagccaaaggggccggacattggcgtytggtggcgcggaatggaaagaaaggtggccctggggcctggtgaccctgaaggtaaatggccaggaggctgacctggagggcgagaaggacacagcacca

SEQ ID NO: 450552 - DNA, 201 bp, Homo sapiens
cttagcagagacttcttttccttcttcccattcataagcacctgctagccagccatggcgttcgagctgaagggctgtatccctgggccacctctatatawtaaaaccatgctgtggccccgtctgcaggaccagaagggcaccggggtcccctgtccctggagggcctctcatcatctgcgacccccacccatttatgct

SEQ ID NO: 450553 - DNA, 201 bp, Homo sapiens
aagccttttcaggccccgagctgagatggagccctcttcaaggctacctagagttcttctaggggagggtactgagggaaaagaaagggaagacggggacrgaggaggaggtctgccctgagagtccccgtaccccgagacccatctagtgctttgtgggcttctctaatcgcacatcaaaccaccttccgtctcccttag

SEQ ID NO: 450554 - DNA, 201 bp, Homo sapiens
aagatgtcagcacaagccttttcaggccccgagctgagatggagccctcttcaaggctacctagagttcttctaggggagggtactgagggaaaagaaagrgaagacggggacagaggaggaggtctgccctgagagtccccgtaccccgagacccatctagtgctttgtgggcttctctaatcgcacatcaaaccacctt

SEQ ID NO: 450555 - DNA, 201 bp, Homo sapiens
ctgaaggaagccaacgacatcgtgctctatttgaagcccctacggatcctgctggaggagatggaacaagccgacttcacgatggtgcgcaggcaagggaragccggctttggtggggagggtcttgtttcttttcttttcttttcttttttcttttttttttttttttttttgtgagagggagtctcgctctgtcaccag

SEQ ID NO: 450556 - DNA, 201 bp, Homo sapiens
ttgagatcctagagaaagccaaaagctgctactggccagccctgcaaaacgtttacaccaacgtcactgaaggtgagcctgtgaccctgtcatgagttctkcacgaagctgtttgtgcctcctgggagggctgggtcagacttgtcaccaaccctaggatgttggcctccctctgcgagcagctttctcagccccctccac

SEQ ID NO: 450557 - DNA, 201 bp, Homo sapiens
accagacggtgctgctgctggtggtttgggattggtgggcagaaggattcatgggagagcttggtgggacccacgtgtgtgtcgccatgagagcaatgccscaaccttccactgggcaggatcccctcttcactggacaacttgctcctgcacgccattgaaaccaccatcatcgactggtcccaccagatccgggatgtg

SEQ ID NO: 450558 - DNA, 201 bp, Homo sapiens
ggtggctggaggcaccagggacatgagaccagacggtgctgctgctggtggtttgggattggtgggcagaaggattcatgggagagcttggtgggacccaygtgtgtgtcgccatgagagcaatgccccaaccttccactgggcaggatcccctcttcactggacaacttgctcctgcacgccattgaaaccaccatcatc

SEQ ID NO: 450559 - DNA, 201 bp, Homo sapiens
agcctgggcaacagagcgagactctgtctcaaaaaaataataataaggagggcattcttgggagcacagtgggggcaggggatggttcctccaggccaggrgcacaacatgaatgctggtttcccccctcaggtatgacagacataagctgacgttaaaagatatccataattgtcagtacgtggcctgcatgaaccccac

SEQ ID NO: 450560 - DNA, 201 bp, Homo sapiens
ccttcacacctgaaggttttctgccctctcccatgtgtctcctggggctcatgcctgtaatcccagcactttgggaggccgaggtgggtggatcacctgasgtcaggagttcaagaccagcctggccaacatagcaaaacctcatctctactgaaaatacaaaaattagccgggcatggtggcgggcgcctatagtcccag

SEQ ID NO: 450561 - DNA, 201 bp, Homo sapiens
cagcctcccgagtagctgggattacaggtgcccactgctatgcccagctaattttttgtatttttagtagagatggggtttcaccatgttgcccaggctgstctcgaactcccgacctcgtgattcgcctgccctgacctcccaaagggctgagattacaagcttgagccaccgcgcccagcctgaattgttcattttgta

SEQ ID NO: 450562 - DNA, 201 bp, Homo sapiens
caaatgagtggtggccggaggggcagcctctcttatggagctcagacctgctggggcctgggccgcccctcaccactgctgcctacacatgcacatatgcmcatggatgcacatacacatacatgcacacacatacactcatgcacatatatgcacacatacactcatgcacgtgcatacatgcacacacatgcacacaca

SEQ ID NO: 450563 - DNA, 201 bp, Homo sapiens
tgcagtgacaggggctgtccggggactggcttccaggtgaaggccgtgctggacgacatcctggagaagattccggagactttcaacatggctgagatcayggcaaaggcagcggaaaagaccccctatgtggtagtcgcctttcaagaatgtgaaagaatgaacatcctgaccaacgaaatgcgccgttcgctcaaggag

SEQ ID NO: 450564 - DNA, 201 bp, Homo sapiens
cgaaactttccggaagtttgtgggcaacctggagctcatcgttggctggtataatgaggtgagttggtgagtcggtactattcctgatgcagctttgtatygttttggttttttgtcaagtttgtttgtgtgtttcagagatgtggctcttcctgggaaatcttcccattcactcaaattcattcttccattcactgcata

SEQ ID NO: 450565 - DNA, 201 bp, Homo sapiens
gcttccttggaggtgagcgcctccaggccctggtatctctgaccacgcccattatttccctgggctctcttcctagctgggagtcttgggaacttctttakcgtccccgaggtggctggaggcaccagggacatgagaccagacggtgctgctgctggtggtttgggattggtgggcagaaggattcatgggagagcttgg

SEQ ID NO: 450566 - DNA, 201 bp, Homo sapiens
ccgccctgatatgtgagacccccgtgacaattagttccgtattttgcctcacgtgggcaagtcctccactgatcattcacaaagccccaagcaccatgtcyggtggtgacaccaggggagccatcttgaatagggtttaaatagggtttacttaattctctcccgcttccttggaggtgagcgcctccaggccctggtatc

SEQ ID NO: 450567 - DNA, 201 bp, Homo sapiens
ttcccagggctccagacaccaggtctttggaatccccctggggacctggctctgtgcgggacccagttttcccagggctccagacaccgggtctttggaamcccccggggacctggctctgtgcggttgccgagctggtgaaggcacagggggcggaaccacagaagtgtttccttttaggtcctctcttctctgttaaac

SEQ ID NO: 450568 - DNA, 201 bp, Homo sapiens
cctcctaggcttttagcaaggagtgtgtgctatgggtgcaagagcttggggatggctttggtaccaccaggacagggcagctggtataaactccatgaccrgccacacctccttctggaagaaggatccagttttcccagggctccagacaccaggtctttggaatccccctggggacctggctctgtgcgggacccagtt

SEQ ID NO: 450569 - DNA, 201 bp, Homo sapiens
ctcacaggctctagcaaatgtgaaccccagggtcctcagggttgcctcactcttcccctccctgagcttcggctctttggcctccagctccaatccgaccyttcctcatggccgtttcctcatgtcgcattcctcaagccacgatggagatgcagccattctctccctagggccccgggctggattttctggaaagatttg

SEQ ID NO: 450570 - DNA, 201 bp, Homo sapiens
atctcagcactttgggaggccgaggcaggtggatcacctgaggtcagaagtttgagaacagcctagccaacatgatgaaaccccgtctctacgaaaaataygaaaattaactgggcgtggtggtgtgcacctgtaatcccagctactcgggaagctgaggtagaagaattgcttgaacctgggaggcagaggttgcagtga

SEQ ID NO: 450571 - DNA, 201 bp, Homo sapiens
attttcgtattttttggtaagagatgaggtctcaccaaaaaatagcctgttgcccaggctggtctcaagactcctgggctcaagcgatcctcctgcctcarcctcccaaactgttgggattataggcgtgagccatcatgcccggccacagacctgctgtctaacaagacctccaggtggtgctcgtgcccttgaagtctg

SEQ ID NO: 450572 - DNA, 201 bp, Homo sapiens
acaactacagggcccggctcctttacggcgacatcagccccacacccgtggaccagctgatcgcggtggtggaggaggtgagtgcgtccaggctgccatcyggggtgtcgagcacgaccgacttctcgggagcggccttgagtcctgctgctcagcctggagtccctgggccagcagcagctgcagagccggggagggatt

SEQ ID NO: 450573 - DNA, 201 bp, Homo sapiens
cacgtcacaggccagggaggaggaacagacaaggagaggtgcagtgctcttccagggaccagaagggagggttcaaggtggcggcctggcctggggctggrgtgaaaggtggtctgtacttgtgttcctctcccctggtcactgggaggcccactaaccctttcctccaccaaccgccaggtacattaagatcggtgacaa

SEQ ID NO: 450574 - DNA, 201 bp, Homo sapiens
gtgggaaattggggagcccgggagacagttcgtacctgtttcttgcactcttaacagatacacagtgtaaggaaaggccaagatgacaatggccccggacrtcagactagagtatctggaggaagttgcctccatcgtcctgaagttcaagccggacaagtggagcaagctgataggcgccgaggagaacgtggccctgtt

SEQ ID NO: 450575 - DNA, 201 bp, Homo sapiens
atgggtgggaaattggggagcccgggagacagttcgtacctgtttcttgcactcttaacagatacacagtgtaaggaaaggccaagatgacaatggccccrgacgtcagactagagtatctggaggaagttgcctccatcgtcctgaagttcaagccggacaagtggagcaagctgataggcgccgaggagaacgtggccc

SEQ ID NO: 450576 - DNA, 201 bp, Homo sapiens
tcccacggccattaagtttcattatgtcttcaacctcagggacctctccaatattttccaggtactgctcttgtagctttatgtcatgcctgccttacggyccagtgcctgatccacaggtgctttcctcatcacagctctcagggaggtgtggactgatgatggtggtgatggtggtaatgataatgatgataataatgg

SEQ ID NO: 450577 - DNA, 201 bp, Homo sapiens
tatttgaagcccctacggatcctgctggaggagatggaacaagccgacttcacgatggtgcgcaggcaagggagagccggctttggtggggagggtcttgkttcttttcttttcttttcttttttcttttttttttttttttttttgtgagagggagtctcgctctgtcaccaggttagagtgctgtggcgcgatctcggc

SEQ ID NO: 450578 - DNA, 201 bp, Homo sapiens
caaacccagaaccaggactgtgctgcccaggccctgggcggctgagcccggcagggcgcgttgctttctggcagagctttctgcagagtgatggattaggycccagcactgcagtcccagtaggcagcgcatctgtgtctcccacacccaggtgatcctgtgtttctcccctgtgggctccgtgctgcgggtacgagccag

SEQ ID NO: 450579 - DNA, 201 bp, Homo sapiens
gaggctccgggggagggtccttcctgcctcctccagcttctgggggctccaggcattccttggcctgtggccgcatcatgcctgtctctgccttggtctcyacaaggccctctttcctgtgtgcctcagatctccctctccttcctgtcatgaggacacttggccctggatttatgtctcaccggaaaatccaggatgaac

SEQ ID NO: 450580 - DNA, 201 bp, Homo sapiens
gggatttccggggagcagcgtggggctcacccagggccctgcggcatacagggtggggccacccttggggcaggtggccgccccgtgactctctgtacttygcactcttctctcgcagctcaagcaacatgagttcagggagaggttcaggcgcgaggccccgttctccttcagcgaccccaacccctacaagtccctgaa

SEQ ID NO: 450581 - DNA, 201 bp, Homo sapiens
ccccaggccttcaacgtggtgtttgagaaagccatccagaggaccacccctgccaacgaggtgaagcagcgggtgatcaacctgacggacgagatcacctwctccgtctacatgtacacggcccggggactcttcgagagggacaaactcattttcctggcacaagttacgtttcaggtaatgtctagcctcactgttcct

SEQ ID NO: 450582 - DNA, 201 bp, Homo sapiens
gaaggttttctgccctctcccatgtgtctcctggggctcatgcctgtaatcccagcactttgggaggccgaggtgggtggatcacctgacgtcaggagttyaagaccagcctggccaacatagcaaaacctcatctctactgaaaatacaaaaattagccgggcatggtggcgggcgcctatagtcccagctacttgggag

SEQ ID NO: 450583 - DNA, 201 bp, Homo sapiens
gggtgatcaacctgacggacgagatcacctactccgtctacatgtacacggcccggggactcttcgagagggacaaactcattttcctggcacaagttacrtttcaggtaatgtctagcctcactgttcctagtgtggtccgtggaccagcggtgtcactgacccctgggagctttgtggaaaggcagattgttgggcccc

SEQ ID NO: 450584 - DNA, 201 bp, Homo sapiens
gcagaagaatgagagcgcagaccaactgatccaggtggtcggcatcgaggccgagaaggtcagcaaagagaaggccattgctgaccaggaagaagtcaagrtcgaggtcatcaataaggtaggtgaaggcagcccagcgtgccttcaggaaggctgctgcactggccaggcctcctgggcttccccgtgtggtcaggtgcc

SEQ ID NO: 450585 - DNA, 201 bp, Homo sapiens
agatggacctggaagataacacagacctcatagagatgagggaggaggtgtccagcctggtcatcaatgccatgaaggaggccgaggagtaccaggattcmtttgagaggtactcctacctctggacggacaacctgcaggagtttatgaagaatttcctgatatatgggtgtgcagtcactgcggaggacttggacacct

SEQ ID NO: 450586 - DNA, 201 bp, Homo sapiens
tgggtttcttggctgccatcagatgtgtgggcctagggagttgcctctcccctcctctttgggaaccctctgctggatacccagtgagagccatgggaagrgaagggctgggacaccgggataaggtgcagcggccagtcccctccagtgtgcctgggcctgtctccccccagctccccaccttcattgccaaggtgctgg

SEQ ID NO: 450587 - DNA, 201 bp, Homo sapiens
tttccaacttggttttgcaggaacttaacgccaacctgagcaacctaacctcagcgtttgaaaaagcaacagctgagaaaatcaagtgtcagcaagaggcygatgccacgaacagggtgatcttactggcgaacaggtatcagctcctccccgagaccaccctcctgctctcagaccccctgaaagggacaagcccacaca

SEQ ID NO: 450588 - DNA, 201 bp, Homo sapiens
caccgcacctggcctccattgattaacttctatcattcttggtagagggggcggtgggactccttggcaaatttatttcctgcttgtaggcaaataggggraggacagagagcttctcttgtatctgcttcttctcaagtgccttcagctcaaaataaaccttaagccaaagtggcgtattttggtggcaaattctgccaa

SEQ ID NO: 450589 - DNA, 201 bp, Homo sapiens
taaccctaaccctcgcacccctactccctaaccctaaccctcgcacccctactccataaccctaatgtctcacacacccccactcccaaatctcggctccstgtcctgcctgtctactgccagtggcattggctatggcaaggaaaggcactgctgctgatgttttggccaaagaaagggaagcctgtgccccttattaat

SEQ ID NO: 450590 - DNA, 201 bp, Homo sapiens
tcgcacccgccactcccaaatcctaaccctaatcctcgcacccccattccctaaccctaaccctcgcacccccactccctaaccctaaccctcgcaccccyactccctaaccctaaccctcgcacccctactccataaccctaatgtctcacacacccccactcccaaatctcggctccgtgtcctgcctgtctactgcca

SEQ ID NO: 450591 - DNA, 201 bp, Homo sapiens
cccaacccctacaagtccctgaataaggtatttttgctcaagggtgagatcagggggtaagtctgggaaccccactgctttcttttctcaagtagttatcmtttcaagtccagaaacgtggtctccgccggactgaccttggggccgtgcacgagtgctcttatgtgtatgcatgcacatacgtgtgcgagcacatgcatg

SEQ ID NO: 450592 - DNA, 201 bp, Homo sapiens
ttttgtgagagggagtctcgctctgtcaccaggttagagtgctgtggcgcgatctcggctcactgcaacctccaactccctggttcaagggattctcctgyctctgcctcccgagtagctgggattacaggcatgtgccaccatgcccagctaatttttgtatttttagtagagatggggtttcattatgttggccaggat

SEQ ID NO: 450593 - DNA, 201 bp, Homo sapiens
tgttccagaataggagtattttcccagggctgtctcatagtgatgagtgttaagccaacccaagaaaagttttcatcctgctgaatttttttttttttttycctgagatagagtctcactctgttgcctgggctggagtacaatggcacaatctcggctcactgcaacctctgcctcccgggttcaagctattctactgcc

SEQ ID NO: 450594 - DNA, 201 bp, Homo sapiens
attaaccctcgcggccacattatttcatgttcgaagcacatcactccaacttgtgcttccgtcatcacactgatgccttctcttttgaccttcttgcctcyttttttttttttttttttttttgtgacggaatcttgctcctctccccggcagccgtggcagggctccccagattctgatcaccaggggccgtaatatctt

SEQ ID NO: 450595 - DNA, 201 bp, Homo sapiens
tccgtctcaaagaaaaaatggccctgtgctctggttggttgtggaggatgtctctaattgagcatctttttaccaaggcccctaagcgtgtcctcactccrtccagattgacctcgctgctcagtacataaaggctgccgtgaagaacgttccctcggtgttcctgatgacagactcccaggtggccgaggagcagtttct

SEQ ID NO: 450596 - DNA, 201 bp, Homo sapiens
ggccaggagctgggcaaagtgtgtaaccagcctctagtcttggctgcagaatatccacctggtggcccggtggctgggaacactggacaagaagctggagygctacagcacgggcagccatgaggactaccgggtgttcatcagcgcggagcctgcccccagccccgagacccacatcatcccccagggcattctggagaa

SEQ ID NO: 450597 - DNA, 201 bp, Homo sapiens
tgccctggacagataaagtgccctcctttgagctggatcccgatgtcccactgcaggtaactgtccccaaagcagggccaccgactggtgatttagaggcrggaatcggtgcagtaccctccacacgcctgcacggaatgtccaaacacaaccgattttcaacattaggacctgttcggtagaacatggcctgcacaccca

SEQ ID NO: 450598 - DNA, 201 bp, Homo sapiens
agtgagccgagatcgcacccctgcactacagagcaagactccatctcagaagaagaaaaaaaatgagtctctgtctaaagaggcacgtctgccggtcagcrcagggcaggctggctgtgtgtgttaacaggagcttcctgcttaggccctgggcatcctggaaatgatgcacgtgctgagctcactggcactcgagggggc

SEQ ID NO: 450599 - DNA, 201 bp, Homo sapiens
aatcaagtgtcagcaagaggccgatgccacgaacagggtgatcttactggcgaacaggtatcagctcctccccgagaccaccctcctgctctcagaccccytgaaagggacaagcccacacaactgccttgggaggaagaggagggagcccaggtggaagcagccaggttgccactttcacttcttgagctcaaagtaatt

SEQ ID NO: 450600 - DNA, 201 bp, Homo sapiens
gcagaaagcgtaagttgtagaaaagtaatctgtgtaagaggctggaaggtgagagctgttctaaaagggtctgagcagacaggattctttccgcctccacytcccatcctagtgatgagaatgatcgtttcattctggtatcagaagagcatcattcacctgggaattgcatctcctgcttcccaggaacagcatgaggct

SEQ ID NO: 450601 - DNA, 201 bp, Homo sapiens
tatgcccagctaattttttgtatttttagtagagatggggtttcaccatgttgcccaggctggtctcgaactcccgacctcgtgattcgcctgccctgacstcccaaagggctgagattacaagcttgagccaccgcgcccagcctgaattgttcattttgtaagattcctctacatttccattttaggtgtgtttcagta

SEQ ID NO: 450602 - DNA, 201 bp, Homo sapiens
agacggccctgcagaagctgtgcatggtgcgctgcctgcggccagatcgcatgacctacgctatcaagtgagtgtcccgccgcgccgggggccccgccccygaggcccaggcctgatggaagcttgaccgagcggctgtgctagactctctgtggacttgagttgatcccctgaacttttttcttctccccattttacaca

SEQ ID NO: 450603 - DNA, 201 bp, Homo sapiens
tgttcctgatgacagactcccaggtggccgaggagcagtttctggtgctgatcaatgacctgctggcctcaggagagatccctgggctgtttatggaggaygaggtggagaacatcatctcctccatgcgaccccaagtcaagtcccttggcatgaatgacactcgggaaacatgttggaagttcttcatcgaaaaagtgc

SEQ ID NO: 450604 - DNA, 201 bp, Homo sapiens
catctaaggtcaggagttcaagaccagcctggccaacgtggcgaaaccctgtctctactaaaaatatgaaaattagccaggtgtgatggtgcacgcctgtratcccagctacttggaaggccgaaacaggagaatcgcttgaacccaggaggcagaagttgcagtgagccgagatcgcacccctgcactacagagcaagac

SEQ ID NO: 450605 - DNA, 201 bp, Homo sapiens
gtgtgtgtctggccaagcacagtgcctcatgtctgtaatcgcagcactttgggaagctgaggcgggcagatcatctaaggtcaggagttcaagaccagccyggccaacgtggcgaaaccctgtctctactaaaaatatgaaaattagccaggtgtgatggtgcacgcctgtgatcccagctacttggaaggccgaaacagg

SEQ ID NO: 450606 - DNA, 201 bp, Homo sapiens
tgttcacagagttctttgaaaagcccgacgtccaggtgctggtgctgacgctcaatgcagccggcatgatcataccctgcctgggcttcccccagtccctyaagtccaaaggggtttacttcatcaagacaaagtccgagaacatcaacaaggacaactacagggcccggctcctttacggcgacatcagccccacacccg

SEQ ID NO: 450607 - DNA, 201 bp, Homo sapiens
ggagtgcagtggtacaatcttgctcacagtagcctctgccttcctagtccaagtgatcatcccagctcagcctcctgagtagctgggactacaggcccatrtcatcacgcccagctaaaatgtttttgtattttttgtagagatggggtctcactttgttgcccaggctggtctcgaactcctgggctcaagtgatccttc

SEQ ID NO: 450608 - DNA, 201 bp, Homo sapiens
acgtggcgaaaccctgtctctactaaaaatatgaaaattagccaggtgtgatggtgcacgcctgtgatcccagctacttggaaggccgaaacaggagaatygcttgaacccaggaggcagaagttgcagtgagccgagatcgcacccctgcactacagagcaagactccatctcagaagaagaaaaaaaatgagtctctgt

SEQ ID NO: 450609 - DNA, 201 bp, Homo sapiens
aaggttttctgccctctcccatgtgtctcctggggctcatgcctgtaatcccagcactttgggaggccgaggtgggtggatcacctgacgtcaggagttcragaccagcctggccaacatagcaaaacctcatctctactgaaaatacaaaaattagccgggcatggtggcgggcgcctatagtcccagctacttgggagg

SEQ ID NO: 450610 - DNA, 201 bp, Homo sapiens
aattagccgggcgcggtggcgggcgcttgtagtcccagctacttgggaggctgaggcaggagaatggcgtgaacccgggaagcggagcttgcagtgagccragattgcgccactgcaatccgcagtccggcttgggcgacagagcgagactccgtctcaaaaaaaaaaaaaacaaaaattaaccgggcacgttggcacatg

SEQ ID NO: 450611 - DNA, 201 bp, Homo sapiens
aaaatacaaaaattggccgggcgcggtggctcacgcctgtaatcccagcactttgggaggccgaggcgggtggatcatgaggtcaggagatcgagaccatctggctaacaaggtgaaaccccgtctctactaaaaatacaaaaaattagccgggcgcggtggcgggcgcttgtagtcccagctacttgggaggctgaggca

SEQ ID NO: 450612 - DNA, 201 bp, Homo sapiens
cctcatgtggtcggccttctgtgcatgtctaatctcccctcctcgtaaggacacctgtcagactagggcccaccctagtaatctgattttaattacctctytttttttttttttttgacagtatttttgctctgttgtccagtctggagggcaatggtgtgatctcagctcactgcaacctccacctcccaggttcaaatg

SEQ ID NO: 450613 - DNA, 201 bp, Homo sapiens
ggtcctcatgtggtcggccttctgtgcatgtctaatctcccctcctcgtaaggacacctgtcagactagggcccaccctagtaatctgattttaattaccwctttttttttttttttttgacagtatttttgctctgttgtccagtctggagggcaatggtgtgatctcagctcactgcaacctccacctcccaggttcaa

SEQ ID NO: 450614 - DNA, 201 bp, Homo sapiens
ggtctgggaagttccatatgaaagtgctggcatctggcaagggccttcttgctgtgtcatcccatggtggaaggctagagggcgagagagagcacaaaacrggccaaactccttgtgtaacaaacccactcccttgatcatgacattaagccattcactctgctgtcacggcccaactgcctctcagaccccacctcccaa

SEQ ID NO: 450615 - DNA, 201 bp, Homo sapiens
ataattaaaagtggccaccacccccaccttttttttttttttttttttttttgagactgagtctcgctctgtgccccaggctggagtggagtggcgtgatytcggctcactgcaagctctgcctcccgggttcacgccattctcctgcctcagcctcctggtagctgggactacaggtgcccgccaccatgcgcggctaat

SEQ ID NO: 450616 - DNA, 201 bp, Homo sapiens
tttttagtagagacagggtttcaccatgttggccggggtggtctcgaactcctgacctcaggtgatccacctgcctcggcctcccaaagtgctgggattayaggcgtgagccaccacgcccggccccttcatgccttttaacacagagcacatctcagagcagacctgccgtggtcccagtgtttgggagccccagggctg

SEQ ID NO: 450617 - DNA, 201 bp, Homo sapiens
aggcaactgccaggggcagggatgccggatgcacccaggatggccttggggacagggcaagaagccgtatggaccagaggtgagaaagtcggcctgtctcrcaagcatgtgtctctcctggggcctgtgctacgcatatcagagacagcacacacaccgacccgcactcagtgactcctaccaaggcagcatcacaaattt

SEQ ID NO: 450618 - DNA, 201 bp, Homo sapiens
aggtcttgctatgttgctcaggctggtcttgagctcctggcctcaattgatcctcccaccttggcctcccaaagccctagaattataagcatgagccaccrcacctggcctgtgtttcttagaaagttgtccctgtgggccgggcacagtggctcacacctgtaatcccagcactttgggaggccgaggcgggtggatcac

SEQ ID NO: 450619 - DNA, 201 bp, Homo sapiens
ggcagtggctcacgcctataatcccagcactttggggggccaaagcgggcagatcacttgaggtcaggagttcgagatcagcctggccaacatggtgaaamcccatctctaccaaaaatataaaaaattagccgggtgtggtggtgcatgcctgtaatcctagctactccagaggctaaggcaggagaatcacttgaaccc

SEQ ID NO: 450620 - DNA, 201 bp, Homo sapiens
attggcgtctggtggcgcggaatggaaagaaaggtggccctggggcctggtgaccctgaaggtaaatggccaggaggctgacctggagggcgagaaggacrcagcaccaatggctgggttcccacgccctgcctgcctgagcctgaccctctcatggcagagaaggggcacaggggcactttcccctacccgctgtcatcc

SEQ ID NO: 450621 - DNA, 201 bp, Homo sapiens
tgtgcatgtgtatatgtgcaggtatgtgaatgcatgtgcacgtgtacatatgcaggtatgtgaatgcatatgcacgtgtatatatacaggtatgtgaatgygtatgcacgtgtatatatacaggtatgtgaatgcgtatgcacgtgtatatatgcaggtatgtgaatgcgtgtgcacgcgtatatatgcaggtatgtgaat

SEQ ID NO: 450622 - DNA, 201 bp, Homo sapiens
ggcggtccagagaggcactaaacagtgtgatcaaagagcaagcacagccagtgaagtgaggcccaactgtgcgcttctgtttgcaggaaaacgcagaactrttcagggcagacacactgagcctgccctggaaggattatgtcatctacattgacgacatggtcttagatgaatttgaccagttcattcgcaaatctctga

SEQ ID NO: 450623 - DNA, 201 bp, Homo sapiens
accaggaatgtctcatacttgtgaccctgtgtacgcagtcagggtttataacttacttttaagatattgaaaagactctccaaaacgagtcactgggagtsgtaagacacggccctgccgttctgcccctctgtggctcccagccctcgtctgcccagtgcagggcggcgtgtgtcggctgcggcccacacttgctgtttc

SEQ ID NO: 450624 - DNA, 201 bp, Homo sapiens
gactccggccctctggttccctcgctaggccctaccaaggcaacccgacgttcgaccccgagttcatccgctccaagtccacggccgccgccggcctgtgytcctggtgcatcaacatcgtccgcttctacgaggtctactgcgacgtggcgcccaagaggcaggcactggaggaggctaatgcagagctggcagaggcac

SEQ ID NO: 450625 - DNA, 201 bp, Homo sapiens
gcatagtcagtggcctccacaaaatatgccctgtcgcgtggttccaagtaacccacactggcctgggacactgggtcccacggggcttgatccggggcatkactcggtcataacccactttcagccaccacgtggcttccaggatcctttcgcagccagtggacagtcatttcacggattacatcatggtttggggctcca

SEQ ID NO: 450626 - DNA, 201 bp, Homo sapiens
cattggcgtctggtggcgcggaatggaaagaaaggtggccctggggcctggtgaccctgaaggtaaatggccaggaggctgacctggagggcgagaaggayacagcaccaatggctgggttcccacgccctgcctgcctgagcctgaccctctcatggcagagaaggggcacaggggcactttcccctacccgctgtcatc

SEQ ID NO: 450627 - DNA, 201 bp, Homo sapiens
gaggtcaggagatcgagaccatcctggctaacacggtgaaactccgtctctactaaaaatacaaaaaattagccaggtgtagtggcgggcgcctgtagttscagctacttgggaggctgaggcaggagaatgttgtgaacccaggaggcggagcttgcagtgagccgagatcgtgccactgcactccagcctgggtgacag

SEQ ID NO: 450628 - DNA, 201 bp, Homo sapiens
cagtgaggcacagcagaaacacctgccccacgggaggtgcagagcatgccggctgtggaagcgctgtccaaggtggagggaggtgccacacagccccttgkgagagaagccaaaggggccggacattggcgtctggtggcgcggaatggaaagaaaggtggccctggggcctggtgaccctgaaggtaaatggccaggagg

SEQ ID NO: 450629 - DNA, 201 bp, Homo sapiens
tctgaaagagctggaagattcgctcctggcccgtctgtcggctgcgtcggggaactttctgggagacacggccttggtggagaatctggagaccaccaagyacacagccagcgagatcgaggagaaggtcagagctgcctcggtgacgtgccctggcagccagggcttgggaggctgggccacgggcgatcggcgcctccc

SEQ ID NO: 450630 - DNA, 201 bp, Homo sapiens
gggttaggaccaaaaggaggctgttcaaagattgtgcagcatttgagagtaacaagtcgtttagatatctcagaaaaacacagaccgactgaagctctttrtttagtaaacctaagacattttttcttaaattaaaaaggccgtggccgggtgcagtggctcatgcgtgtaatcccagcactttgggaggccgaggcgggt

SEQ ID NO: 450631 - DNA, 201 bp, Homo sapiens
ccagagcaaaggtgtgacgtgagactgcaaggaagcatgaagggagtgggaacggcggcggggtgggaagcgtgtggtcgcctggcgtgtgctctggtccmcactgccgagtttggtcttcgttccctaaggcctgggcagcctaggtcagataagtcacttgctcaaaccctctatgtgactgcaaagaccctggaggca

SEQ ID NO: 450632 - DNA, 201 bp, Homo sapiens
aagattgcaccactgcattccagcctgggcgacaagagtgagactccacctcagaaaaaaaaaaaaaaaaaagtattttagggcagtttttggggggggcggtttccagtgggtggtgcaaatcagtggtgtggactttaatgatgagtcacatcatctagacagaccagcaggccacacccgggggatgggccattattg

SEQ ID NO: 450633 - DNA, 201 bp, Homo sapiens
ggtagcgccatttctgcgtgtttgctgtgagcttccccggccaggaggccctcaccaccatctacaacacaatcctgacgcagcacctggccttccgctcrgtctccatggctatccagaggataagcagccagctggtggccgcggccctgggtaagctggctggcctcatcccctctcccatcggtaaaacctatggct

SEQ ID NO: 450634 - DNA, 201 bp, Homo sapiens
tacatgtgtgggggcctcatggagcggcccctgattcttgccgaggtggcgcccaggtattcagtcatgctggagctgtttgacgctgagctagacaatgytaagatcttgtacgatgcccagatggcggcctccgaggaggggaacatccccctgatccacaaaaacatgcctcccgtggccgggcagctcaagtggagc

SEQ ID NO: 450635 - DNA, 201 bp, Homo sapiens
ctcattcccaccgtcggtatcttcatcaccatgaaccctgggtacgccggacgcgcggagctgcctgagaacctaaaagccttattcaggtacgtggcccwggtgaaagtgagtggctgcagtgagccaggccggccacagcaacgtcccagtgccaaggagtgggcagaggggaggggcagagggcaagctggggaggga

SEQ ID NO: 450636 - DNA, 201 bp, Homo sapiens
gtggccctggccccaggcaggtccccaagagctggctgactggagtgtttggttgttttggggtagcgccatttctgcgtgtttgctgtgagcttccccgkccaggaggccctcaccaccatctacaacacaatcctgacgcagcacctggccttccgctcggtctccatggctatccagaggataagcagccagctggtg

SEQ ID NO: 450637 - DNA, 201 bp, Homo sapiens
cactctgtcacccaggctggagtgcagtggtacaatcttgctcacagtagcctctgccttcctagtccaagtgatcatcccagctcagcctcctgagtagmtgggactacaggcccatatcatcacgcccagctaaaatgtttttgtattttttgtagagatggggtctcactttgttgcccaggctggtctcgaactcct

SEQ ID NO: 450638 - DNA, 201 bp, Homo sapiens
gttcccactctgttcccactgtccaagttcatggtcacgtccagtgcacaaattcacacagccctggacctggcagcccactcaagctcaggcccaaaagrcccttgtgggcaggagcatgtggggtgctcagggcccaggggggcctcttggggcccagtggggcccttgtcagttcctctttgctcccagtacggtgcc

SEQ ID NO: 450639 - DNA, 201 bp, Homo sapiens
gcctcttggggcccagtggggcccttgtcagttcctctttgctcccagtacggtgcccaggtactgctgggtcggccccacctgcacctccgcctcacagsctctagcaaatgtgaaccccagggtcctcagggttgcctcactcttcccctccctgagcttcggctctttggcctccagctccaatccgacctttcctca

SEQ ID NO: 450640 - DNA, 201 bp, Homo sapiens
ttggtagtgaattttggtagcttgtggtttttgaggaattggtttatttcttctaaattgtttaattcaagcaagcataaagttgtttatactagttccayactatcctctagatggctgcaagctcagcagtggtatcttctatttcattcctagtgttggtgacttatgtcttcactcttcatctttgtcggtcataat

SEQ ID NO: 450641 - DNA, 201 bp, Homo sapiens
caagattgcaccactgcattccagcctgggcgacaagagtgagactccacctcagaaaaaaaaaaaaaaaaaagtattttagggcagtttttggggggggcggtttccagtgggtggtgcaaatcagtggtgtggactttaatgatgagtcacatcatctagacagaccagcaggccacacccgggggatgggccattatt

SEQ ID NO: 450642 - DNA, 201 bp, Homo sapiens
aacctgggaggcggaggttgcagtgaaccaagattgcaccactgcattccagcctgggcgacaagagtgagactccacctcagaaaaaaaaaaaaaaaaaagtattttagggcagtttttggggggggcggtttccagtgggtggtgcaaatcagtggtgtggactttaatgatgagtcacatcatctagacagaccagca

SEQ ID NO: 450643 - DNA, 201 bp, Homo sapiens
ctgcagctggggctgggtgcctccctcaaggtggggctgcatctgggctccacagccaggcctgttgcccacacagccatcgggcagtgccagggccaccstcagagggcagacctggtccagcctgcagatggagctggaagagggggagccaggggcccccatcagtcctacacccattctccccaggagagggtatga

SEQ ID NO: 450644 - DNA, 201 bp, Homo sapiens
gaacctgggaggcggaggttgcagtgaaccaagattgcaccactgcattccagcctgggcgacaagagtgagactccacctcagaaaaaaaaaaaaaaaaaagtattttagggcagtttttggggggggcggtttccagtgggtggtgcaaatcagtggtgtggactttaatgatgagtcacatcatctagacagaccagc

SEQ ID NO: 450645 - DNA, 201 bp, Homo sapiens
tgaacctgggaggcggaggttgcagtgaaccaagattgcaccactgcattccagcctgggcgacaagagtgagactccacctcagaaaaaaaaaaaaaaaaaagtattttagggcagtttttggggggggcggtttccagtgggtggtgcaaatcagtggtgtggactttaatgatgagtcacatcatctagacagaccag

SEQ ID NO: 450646 - DNA, 201 bp, Homo sapiens
tcctgcctctgcctcccgagtagctgggattacaggcatgtgccaccatgcccagctaatttttgtatttttagtagagatggggtttcattatgttggcyaggatggtctcgatctcctgacctcatgatccgcccacctcggcctcccaaagtgctgggattacaggcgtgagccaccacgcccggcctgggtcttgtt

SEQ ID NO: 450647 - DNA, 201 bp, Homo sapiens
ttcatcaactgattcttattcaatgaactcccactggtatttgatgacagctcttccggccagcgcacagtggaagtgatgttatgaaaacatctgcctcrcccttcaggagctgcaaacttcagggaaagaacaggtgtgcggaagcaggaagaagctgactgtgagcggcaggatttcacatgctgggtaccaaaaaag

SEQ ID NO: 450648 - DNA, 201 bp, Homo sapiens
actaaacagtgtgatcaaagagcaagcacagccagtgaagtgaggcccaactgtgcgcttctgtttgcaggaaaacgcagaactattcagggcagacacastgagcctgccctggaaggattatgtcatctacattgacgacatggtcttagatgaatttgaccagttcattcgcaaatctctgagtttcctaatggacaa

SEQ ID NO: 450649 - DNA, 201 bp, Homo sapiens
ccaacccaagaaaagttttcatcctgctgaattttttttttttttttcctgagatagagtctcactctgttgcctgggctggagtacaatggcacaatctyggctcactgcaacctctgcctcccgggttcaagctattctactgcctcagcctcccgagtagctgggattacaggtgcccactgctatgcccagctaatt

SEQ ID NO: 450650 - DNA, 201 bp, Homo sapiens
gagattggctttctgacggtcacctcagagaagctgttccgcactgtcctggaaatgcagccaaaagagacggactcgggggcaggcacgggagtgtccckcgaggagaaggcaggatctttgaaactgctcccaagcgagaggaagggggaggatctagaactgaggagggggtcacagggactggcggcagtacagggg

SEQ ID NO: 450651 - DNA, 201 bp, Homo sapiens
agctcccaagatggccgggcacagtaactcacttctgtaatgtcagcactttgggcggctgaggagggtggatcacctgaggtcaggagttcaagaccagyccggtcaagatggtgaaaccccgtccctactaaaaatacaaaaattagctcggtgtggtggtgcatgcctgtaatcacagctactcaggaggctgaggca

SEQ ID NO: 450652 - DNA, 201 bp, Homo sapiens
ggactgcgactgaaagcagtttctccagaacaccttttctcactcctgtgctttccttccaggactggtcggccaacccgctgtttgaaagaaaggacaayaagaaagaggccctgttagacttggatggaagaattgccaacctcaacaagcgctacgcagcagtcagggatgctggagtgaagatccaagccatggttg

SEQ ID NO: 450653 - DNA, 201 bp, Homo sapiens
cgccctcccctgcaggcaggacccaggaggccttgggggatggagggctctgtcctccctccaggtgggacaccgttgtatggacacctcctcccagaagktttatcagggagggcacactggagagacgggcagaacgtcggggagtggggtggggcaccgctgagggtaggtagccctactgacggccccctcgccgcc

SEQ ID NO: 450654 - DNA, 201 bp, Homo sapiens
atcaacccagtgaccagggaatggaaagatggtaacgagggtggtcccgggacaggctgcaggggcactcctggtccagtgcagtgagcgtgtgctcagcygttcccacgtggaaggccagcctccccaggctagggtggggcacacaggcacgtggcctgcaatggtggcaccatggtaacaaagtttatggggagcagt

SEQ ID NO: 450655 - DNA, 201 bp, Homo sapiens
tcaacccagtgaccagggaatggaaagatggtaacgagggtggtcccgggacaggctgcaggggcactcctggtccagtgcagtgagcgtgtgctcagccrttcccacgtggaaggccagcctccccaggctagggtggggcacacaggcacgtggcctgcaatggtggcaccatggtaacaaagtttatggggagcagtg

SEQ ID NO: 450656 - DNA, 201 bp, Homo sapiens
tttggcttagaagggctgcggttcctggcctggtttctgtgtcctgactcagagcagtcttcgctggttccttttgttgacttagtcatgtttagtcaacrttgatcaaagatggggagtatattccaaaaagaacgatgcctaaaaccacccacggaaagcccaagccacgcacatgcctttcaaatcccccgttgcata

SEQ ID NO: 450657 - DNA, 201 bp, Homo sapiens
acctgctcatggcactgcccatctgctgtgtcattcacaccccttttgtttgtgtcgaggtggtggaggcaaaaatcacagaagttaaaatcaacgaagcragagagaactaccgcccggctgcggagagggcatctctgctctacttcatactgaacgatctcaacaaaatcaaccccgtctaccagttctccctcaagg

SEQ ID NO: 450658 - DNA, 201 bp, Homo sapiens
gagtgtgggtagggaacagtaacatgggaagagcgaggaccatttgaacgtgcacagggtgtatcactacctgcatatgtgaatgggtagaatgtgataaygcacgcctgctttgctacctaggatgccagctggtccttcttgccagtagtcccaacagcatatgactctatgtccctaccagcctcctgggagccccca

SEQ ID NO: 450659 - DNA, 201 bp, Homo sapiens
tggctgggctccatggcccctactctgtccagcacttctagctcgctgagtggcccgtggaaggttctggcgtgacccctgctcagaacggccaaggccckgtcgttcccatgtcattctatgtcctctcctcctagcggctcgtgtgtccttgcaggaactcgaggcctggacgacagactttgccctgcccaccaccgt

SEQ ID NO: 450660 - DNA, 201 bp, Homo sapiens
aggaataaaaggtccttaccagagaacaatttaaaatctggttggactcggaacaaaacctgtcacctctgtttttcagataaagactatagtgaaggcartagaatttctactaataaagtcagaactggaagcaattgatgtcaagttattgagcgctgaaacgacattattctggaatggcgaaggtacggaggccac

SEQ ID NO: 450661 - DNA, 201 bp, Homo sapiens
agattccggagactttcaacatggctgagatcatggcaaaggcagcggaaaagaccccctatgtggtagtcgcctttcaagaatgtgaaagaatgaacatyctgaccaacgaaatgcgccgttcgctcaaggagctgaacctggggctgaaggtaaacatgggtcagcccggccccagggacgtggctggatggtgaaacc

SEQ ID NO: 450662 - DNA, 201 bp, Homo sapiens
ggagggaaagaaaggggacccctggcctggttggagaggaagctgccttcgctgttggcgtgggtggtgacacactcatggcggcttcttcggggcatcaycgaggacccggtccaaactcccatcggacccatcccgtctgtcatttgcagaacaacctgacagagctgaagtcctttgggtccccgccggatgctgtgg

SEQ ID NO: 450663 - DNA, 201 bp, Homo sapiens
tgcagctgtatcaagtcctccgcaaaggtaagcatgcagtggagacgcaggcagatctggagcctggcactgtggtggtggattcatgtcgagaacgatcytggagaccatttcatcctctccatgtagagctgatgtccagggagggagggcccgtctcctgtgcctcagagtcagtcagccgtgaacacccagtgtagc

SEQ ID NO: 450664 - DNA, 201 bp, Homo sapiens
cctgttactgctcaaaggattagaagagttcaggggatgccagtgttctgaacaaattctcgcttgtctgggtggctctgtgctgcctcctgggtacctcyacttttttttttttttttttttgagacggagttttgctctcgttgcccaggctggagtgcaatggcacgatctcggctcactgcaacctccgcctcccag

SEQ ID NO: 450665 - DNA, 201 bp, Homo sapiens
tgacagagctgaagtcctttgggtccccgccggatgctgtggtcaacgtcaccgccgccgtcatgattctgaccgcacctgggggcaagatccccaaggayaagagctggaaggcggccaagatcatgatgggcaaggtggacaccttcctagactccctgaagaagttcgacaaggagcacatccctgaggcctgcctga

SEQ ID NO: 450666 - DNA, 201 bp, Homo sapiens
ccccaagtgaatgctgtgccaacagctgaacaggtcccctcgccccgggggagggggctgctcctcagggtcatctgtgtccagctctgggctcgccttcrtaacagctgacggtgctgatcatcctgtgtttggggcagggactcttattttccacagcagaagttctgaaaaccccactggacctcgtccgcctttggc

SEQ ID NO: 450667 - DNA, 201 bp, Homo sapiens
caagattgccgtaagtgccggctcgctcccgtccctgcgaaacaccagagccgcttgctcgcgctgccagtcaatacctctgttgaaaatgggttggcacrgcccgccgtcatgaattattcagcagtgcaagaggatgcaggcagaggcaggggccagatggtgccgggagccgcttggtgtccttagcctccatgctcc

SEQ ID NO: 450668 - DNA, 201 bp, Homo sapiens
accgtggctcccgtccccaggtggaagtgtggctgaatcgagtgctggaccgaatgtgctctaccctccggcacgaaatcccagaggccgtggtgacctaygaagagaagccgagggagcagtggatcctggactacccagcccaggtctgaggcgggtgggggctcggcggcgcctcgtggctgagataaggggcgagtt

SEQ ID NO: 450669 - DNA, 201 bp, Homo sapiens
gactgggaccgtcggctgtgcaggacctacctggctgaatacatccggacggagatgctggagggagacgtcctgctggcccccggctttcagatcccccscaacctggactacaaggtaaggatgacaagttaaacaggagctcaacgtaatgaaggctcgtgcctcccggtgagagcctgccagcacaaatggagtgtc

SEQ ID NO: 450670 - DNA, 201 bp, Homo sapiens
ggacgtgccgaagacaccccacaggagatatccagtggggcctcgccttcccgctctgattccagggtcatgtctggagcagaggccaagctgacctatcrgaagtatgacgagatgatggagctgctgaggtgccaccgcgagaagatctaccagcagtgggtggcgggcgtggaccaggactgccactttaacctgggg

SEQ ID NO: 450671 - DNA, 201 bp, Homo sapiens
gtccccctctcatggggctccgtaccatcaagggtgggcctaaggggggctggggccacacaaatggtccccttgtcccttagcctggctgacctggaagscttcatgaaagtcgccagaatgggcttgaccaagcccctcaaggagggggactatgatgggcttgtggaggtgatggggcacctgatgaaagtcaaggag

SEQ ID NO: 450672 - DNA, 201 bp, Homo sapiens
ggaggtgatggggcacctgatgaaagtcaaggagaggcaagcagccaccgacaacatgtttgagcccctgaagcaaaccatcgagctgctcaagacctacrgggaggagatgccagaggagatccacttgaagctgcaggtacgtggtgggtgggtgtggctgcgtccaggtgagcagggagagccatcccggccgcgacc

SEQ ID NO: 450673 - DNA, 201 bp, Homo sapiens
aaagtccaaatcataattaaaagtggccaccacccccaccttttttttttttttttttttttttgagactgagtctcgctctgtgccccaggctggagtgsagtggcgtgatctcggctcactgcaagctctgcctcccgggttcacgccattctcctgcctcagcctcctggtagctgggactacaggtgcccgccacca

SEQ ID NO: 450674 - DNA, 201 bp, Homo sapiens
cgcaccgttccatcacgaggccctctgccatgaaccagcttccgtgttgtgcccgcagctacctggatgtcatcgagcaggccatctcggaaggggacacsttgctcattgagaacatcggcgaaaccgtggaccccgtgctggaccctctactgggcaggaacacgattaaaaagggaaagtgagttgtttccgcctccg

SEQ ID NO: 450675 - DNA, 201 bp, Homo sapiens
aggtccccgtcccagactacaagcagctcaaggcctgccaccgggaggtccgcctactgaaggagctctgggacatggttgttgtggtgagtgcagggcaygccgcgtgggtggggcccgggattctgcagggagctgcccccggcaacaagagggcaggctctgggcaccctttggttgtaagaatgtgacaagaaggtt

SEQ ID NO: 450676 - DNA, 201 bp, Homo sapiens
cggcgcctcgtggctgagataaggggcgagtttctttgcgttcatgggctccgctgttaactgtggtcccctggaaaaccatctaagctttcagcaggaaygtctgcgttagcaggcgccagcgatcgctcactgcgtgggcaatggggggtatgtactttcaggtggccctgacttgcacccagatctggtggacgaccg

SEQ ID NO: 450677 - DNA, 201 bp, Homo sapiens
caggaagaagctgactgtgagcggcaggatttcacatgctgggtaccaaaaaagaatcaattatcttatttttatcccaattacatgttggaatgatctcttttaaagtggctgccacaaaatttaaaatgacacatgtggcctcaatccgtggctcccaccgtccttctgctgaactgcgctgtgcaggagaaagaggct

SEQ ID NO: 450678 - DNA, 201 bp, Homo sapiens
ctggcagcgtacatcagcgggcttgacgtgtttcagatcaccctcaagaagggctacgggatccccgacctcaaggtgagagcttactgttcaataggctscctttcagggtagggtcagggagtaaagaaaaacttcactcccttttccaaaatgaagccagcgagtacagggaatccgagcatcaccaatagtccttat

SEQ ID NO: 450679 - DNA, 201 bp, Homo sapiens
aattgagcatctttttaccaaggcccctaagcgtgtcctcactccgtccagattgacctcgctgctcagtacataaaggctgccgtgaagaacgttccctyggtgttcctgatgacagactcccaggtggccgaggagcagtttctggtgctgatcaatgacctgctggcctcaggagagatccctgggctgtttatggag

SEQ ID NO: 450680 - DNA, 201 bp, Homo sapiens
ttaatttatttattttttattgataattcttgggtgtttctcacagagggggacttggcagggtcataggacaatagtggagggaaggtcagcagataaasaagtgaacaaaggtctctggttttcctaggcagaggaccctgaggccttccggccttcggcagtgtttgtgtccctgggtacttgagattagggagtggt

SEQ ID NO: 450681 - DNA, 201 bp, Homo sapiens
tcgccattaaggaggctggtttttgtttttgtttttttgagacagggtcccactctgtcacccaggctggagtgcagtggtacaatcttgctcacagtagsctctgccttcctagtccaagtgatcatcccagctcagcctcctgagtagctgggactacaggcccatatcatcacgcccagctaaaatgtttttgtattt

SEQ ID NO: 450682 - DNA, 201 bp, Homo sapiens
ggaggcatgctggccttccttaggcagccctagctcttgtattccacctggcaacaagagctccggctcatcctgcaggtggagagttctcaggccttcayctggcaggcccagctccggcatcgctgggacgaagagaagcgacactgctttgccaacatctgcgatgcccaaatccagtattcctatgagtatctgggc

SEQ ID NO: 450683 - DNA, 201 bp, Homo sapiens
tgtctggacctttaacttgaagaccaaagagaaggcagcgaagtggatcctggcagccgtggcgctgctcctacaggtttagctcgctcctgcctcacagsccacactccctggggctggaccacaactcagcccttcacctgtgcacctgtgacttattctttacaggaactggtggtggtttttcgttctcttaaataa

SEQ ID NO: 450684 - DNA, 201 bp, Homo sapiens
ggtggtggaggcaaaaatcacagaagttaaaatcaacgaagcgagagagaactaccgcccggctgcggagagggcatctctgctctacttcatactgaacratctcaacaaaatcaaccccgtctaccagttctccctcaaggtgcgccctgcagctggggctgggtgcctccctcaaggtggggctgcatctgggctcca

SEQ ID NO: 450685 - DNA, 201 bp, Homo sapiens
aggaaagcccggtaaagactctgctctcctgccacaggccttgtcccgctgaagaaagtccaccaaaaaatggcccccctgcctgggccacagcccacccygagcgccccgccctggcccagagcctcaggttccgctgcctctgatgcactccacccctaggaacttcgtggaggaaaagatgggcagcaagttcgtgga

SEQ ID NO: 450686 - DNA, 201 bp, Homo sapiens
cctcccaaagtgctgggattacagacatgagccactgcgcctggaccccagccacattttttaagtgagtctttgattagccgggtgtggtggtgcacacrtgtagtcccagttgcttgagaggctgaggtggaagcatcgcttgagcccacaggtggaggctgcagtgagccaggactgcagttactgcacagcagccgg

SEQ ID NO: 450687 - DNA, 201 bp, Homo sapiens
gcagagcacggcttcccaggtaggagaggggggctggctgccagctcctgtgccgttccctggaggcctcgcaggagctgctactgtcacaggcatccacrggctggtcacactggggctcagcactgcctaaagtaagatgagcacgcttcctgcctttgagaagcatttactcctaggccagagttagtatacttgtcg

SEQ ID NO: 450688 - DNA, 201 bp, Homo sapiens
ccccacctggggccttcagtgatggccagttgacctcaccgcggtcgtccccctctcatggggctccgtaccatcaagggtgggcctaaggggggctgggsccacacaaatggtccccttgtcccttagcctggctgacctggaagccttcatgaaagtcgccagaatgggcttgaccaagcccctcaaggagggggacta

SEQ ID NO: 450689 - DNA, 201 bp, Homo sapiens
ggacttgtagtgagatcagaatgctcggagccgctggccaaggctccctctcctcatcaaatgtgtggctgcacccatgaccctgcatttctggcaactcyacttgcctcttccctcctctccaggacttggggctgggaacattttgggcaggctccctgaccctgcagtgggtggggtgggctctttgcagtgacaggg

SEQ ID NO: 450690 - DNA, 201 bp, Homo sapiens
tgaacaggtcccctcgccccgggggagggggctgctcctcagggtcatctgtgtccagctctgggctcgccttcgtaacagctgacggtgctgatcatccygtgtttggggcagggactcttattttccacagcagaagttctgaaaaccccactggacctcgtccgcctttggctacatgagactgaacgagtgtatggt

SEQ ID NO: 450691 - DNA, 201 bp, Homo sapiens
ctgtccaagttcatggtcacgtccagtgcacaaattcacacagccctggacctggcagcccactcaagctcaggcccaaaaggcccttgtgggcaggagcrtgtggggtgctcagggcccaggggggcctcttggggcccagtggggcccttgtcagttcctctttgctcccagtacggtgcccaggtactgctgggtcgg

SEQ ID NO: 450692 - DNA, 201 bp, Homo sapiens
gtggggccacccttggggcaggtggccgccccgtgactctctgtactttgcactcttctctcgcagctcaagcaacatgagttcagggagaggttcaggcrcgaggccccgttctccttcagcgaccccaacccctacaagtccctgaataaggtatttttgctcaagggtgagatcagggggtaagtctgggaaccccac

SEQ ID NO: 450693 - DNA, 201 bp, Homo sapiens
tggggccacccttggggcaggtggccgccccgtgactctctgtactttgcactcttctctcgcagctcaagcaacatgagttcagggagaggttcaggcgygaggccccgttctccttcagcgaccccaacccctacaagtccctgaataaggtatttttgctcaagggtgagatcagggggtaagtctgggaaccccact

SEQ ID NO: 450694 - DNA, 201 bp, Homo sapiens
gagtaagtgcagaaaggtaagagggttttcttcctgaattctccttgatgagagtggaaggagaaacgggatgttttcgtttcaggtaaataccagcatcraggactggaagaccaccaagtggaaagatatcaacgttgagcagatggacatagattgtaagaagtttgccaaggacatgaggtctttggacaaggagat

SEQ ID NO: 450695 - DNA, 201 bp, Homo sapiens
caacatggctgagatcatggcaaaggcagcggaaaagaccccctatgtggtagtcgcctttcaagaatgtgaaagaatgaacatcctgaccaacgaaatgygccgttcgctcaaggagctgaacctggggctgaaggtaaacatgggtcagcccggccccagggacgtggctggatggtgaaaccagcagaaacccaggcc

SEQ ID NO: 450696 - DNA, 201 bp, Homo sapiens
atacctgtgaatggcactggagaggaggtgccagggcccccacttgctggtagcatccccctcaggtggtccctctggaaagacttccagggtggacagaygcagccccaaatgtcctgccccagcccctgccctggaggtgaccctctctcaatttcagttgttaagattgccccgaactggggactccgcacaggggtg

SEQ ID NO: 450697 - DNA, 201 bp, Homo sapiens
ccaaccttccactgggcaggatcccctcttcactggacaacttgctcctgcacgccattgaaaccaccatcatcgactggtcccaccagatccgggatgtkctgagcaaagactcagcccaggcgctgctggatgggctgcaccccctgccccaagtggagttcgagttctgggacgctcggctgctgaacctcaagtgca

SEQ ID NO: 450698 - DNA, 201 bp, Homo sapiens
ctgtccgacttggaggtcagctgtggaggctggaaggactgggcatttgcgtcaggtggacctgtgttcacattcagttctaccaccgtgtccttgttctrgcaccggctgtgtggccttgggagagttcctgcacccctctgtgggcctgctgagttggggtcatgttttatggaccctcatgagcagactctggttgtc

SEQ ID NO: 450699 - DNA, 201 bp, Homo sapiens
ctgatgaagctgcagagcacggcttcccaggtaggagaggggggctggctgccagctcctgtgccgttccctggaggcctcgcaggagctgctactgtcasaggcatccacgggctggtcacactggggctcagcactgcctaaagtaagatgagcacgcttcctgcctttgagaagcatttactcctaggccagagttag

SEQ ID NO: 450700 - DNA, 201 bp, Homo sapiens
caagtgggatctgtacagacagcaaggtgtgggtgaacgttctggcaaggaatgcttaaccaacaggacatgggtttcagcctgcacagctttgcctctgyttacaaactgccctctttttcagggttaccacgaatacatcgatgagaacctgccccctgagagtccctatctgtatggcctgcaccccaacgcagagat

SEQ ID NO: 450701 - DNA, 201 bp, Homo sapiens
attctgtttggtcagtcttaggttctctgtgttgatgttaatgctggtcagctgtgcctgaatcccaaagggaggggggtataatgaggcctgtcccccarcctccttcccgtcatggcctgaactcatttttccggtttactttggaatgcccctagcagagggggggttcattcaatttgttcgggggcttaggatttt

SEQ ID NO: 450702 - DNA, 201 bp, Homo sapiens
cagccccaaatgtcctgccccagcccctgccctggaggtgaccctctctcaatttcagttgttaagattgccccgaactggggactccgcacaggggtgascacctccctcatggttcagcatggggtggggtacaagcagtgtccaggtgggtttgggaggggagcaggggattggcccggtcccatcagtcattagagc

SEQ ID NO: 450703 - DNA, 201 bp, Homo sapiens
caggcactggaggaggctaatgcagagctggcagaggcacaagagaagctgtcccggatcaaaaacaagattgccgtaagtgccggctcgctcccgtcccygcgaaacaccagagccgcttgctcgcgctgccagtcaatacctctgttgaaaatgggttggcacggcccgccgtcatgaattattcagcagtgcaagagg

SEQ ID NO: 450704 - DNA, 201 bp, Homo sapiens
gcaggacagggtgacgactccggccctctggttccctcgctaggccctaccaaggcaacccgacgttcgaccccgagttcatccgctccaagtccacggcygccgccggcctgtgctcctggtgcatcaacatcgtccgcttctacgaggtctactgcgacgtggcgcccaagaggcaggcactggaggaggctaatgcag

SEQ ID NO: 450705 - DNA, 201 bp, Homo sapiens
ccatcatgcagtccatggccaggaagaacgagtggcccctggacaagatgtgtctgtctgtcgaggtgaccaagaaaaaccgagaggacatgaccgctccyccgcgagagggctcctacgtgtacggactcttcatggaaggtaaggagggctcttgtctgtctgcagaagcttccagagccagtgctacttgccaagaca

SEQ ID NO: 450706 - DNA, 201 bp, Homo sapiens
agaaggcagcgaagtggatcctggcagccgtggcgctgctcctacaggtttagctcgctcctgcctcacagcccacactccctggggctggaccacaactmagcccttcacctgtgcacctgtgacttattctttacaggaactggtggtggtttttcgttctcttaaataatcaggtgctttgtaaccaagcacatcgga

SEQ ID NO: 450707 - DNA, 201 bp, Homo sapiens
accaacgagccccccacgggcatgcacgccaacttgcacaaggccctggacctgttcacccaggtagggccacgcctgctcgggctgcctccccatcccaygccacggcctggcatccatcccttggggccccgaggaccactgaggaccgctctgaactctggggacacctcccctctgggcttcccctgtccacacacc

SEQ ID NO: 450708 - DNA, 201 bp, Homo sapiens
ccgtgctgcgggtacgagccagaaagttcccagctgtggtcaactgcacggccatcgactggttccacgagtggccggaagatgcgctggtgtccgtcagygcccgcttcctggaggagactgaggggattccggtgagtcactgaggccacctctgcctgagtgtagagcccagaggacaaggacaggcccaagggctgg

SEQ ID NO: 450709 - DNA, 201 bp, Homo sapiens
ccaaactccagataaataaatatgtttttagtctaagtatgttacatacaatatttgggacataccgttctttttttgttgttttgtttttgttttgaggmtgagtctcactctgtcacccaggctggagtgcaatggtgtgatctgagctcactgcaacctccgcttcccgggtttaagcaattctcctgcctcagcctc

SEQ ID NO: 450710 - DNA, 201 bp, Homo sapiens
tcatgcagtccatggccaggaagaacgagtggcccctggacaagatgtgtctgtctgtcgaggtgaccaagaaaaaccgagaggacatgaccgctcctccrcgagagggctcctacgtgtacggactcttcatggaaggtaaggagggctcttgtctgtctgcagaagcttccagagccagtgctacttgccaagacaaga

SEQ ID NO: 450711 - DNA, 201 bp, Homo sapiens
ccctgaaccgcaccatgaggctggtgttcgaaatcagccacctgaggacggccaccccagccaccgtttccagagccggcatcctctacatcaacccagcygacctgggatggaacccgtgagtggggctttggctttcctgttccaaacctcggcagggaaaaacgaacttgttggcctgtttcagagttgcatattcat

SEQ ID NO: 450712 - DNA, 201 bp, Homo sapiens
gagcccaaggaatgtgcagagcaccagggagtggccttccacttgagtgggtggcatttgtcaggtgcctcctctggggtagcagggggtggaggctgggyttcaaggccaactaccccaccaagcgtgagcagaaaggtgtcaccgggctgcgagcaaacattatcccttctccaaacccggtgtaccgagcacctgctc

SEQ ID NO: 450713 - DNA, 201 bp, Homo sapiens
ggtgttagggctgcaggccgacattttctggagaactccttaactttgcagaatgtgtcagaaaattccagggcatggagaggatgagcagctagccagcyttccctgtgacccggtcaactggcagagttagcaaataaaattgcagttaaatccaaactccagataaataaatatgtttttagtctaagtatgttacat

SEQ ID NO: 450714 - DNA, 201 bp, Homo sapiens
ccgtcacctgccatgagtctgaggcttgcttctggcaaatgagaggaaaagctttggtttagggtgttagggctgcaggccgacattttctggagaactchttaactttgcagaatgtgtcagaaaattccagggcatggagaggatgagcagctagccagccttccctgtgacccggtcaactggcagagttagcaaata

SEQ ID NO: 450715 - DNA, 201 bp, Homo sapiens
gggggacaggagaccctggggactgcctccacggtgaggccagtgctccctccgttccattggtgttttgttggattaaaaatgtcttcattgtaatcccrgcactttgggaggccaaggtgggcagattgcctgagctcgagtttgagaccagcctgagcaacgtgggagaaagcccatctctacaaaaatatagaaaat

SEQ ID NO: 450716 - DNA, 201 bp, Homo sapiens
ggggctccgtaccatcaagggtgggcctaaggggggctggggccacacaaatggtccccttgtcccttagcctggctgacctggaagccttcatgaaagtygccagaatgggcttgaccaagcccctcaaggagggggactatgatgggcttgtggaggtgatggggcacctgatgaaagtcaaggagaggcaagcagcca

SEQ ID NO: 450717 - DNA, 201 bp, Homo sapiens
agtacgtggcctgcatgaaccccacttccggatccttcaccatcgactccaggcttcaggtaagcagaaaccatactcatccccgtcacctgccatgagtmtgaggcttgcttctggcaaatgagaggaaaagctttggtttagggtgttagggctgcaggccgacattttctggagaactccttaactttgcagaatgtg

SEQ ID NO: 450718 - DNA, 201 bp, Homo sapiens
catttccattttaggtgtgtttcagtacattcaagaggtgcgagaaattctgcacaacttgcagaacaggatgcaaaaggcaaaacaaaatatagaaggartttcccaggctatgaaggtaagcaaggggcagagcacagagtggggctttgtgggggcctggggctgccctggggcaaaccaggctacgtagaggcccat

SEQ ID NO: 450719 - DNA, 201 bp, Homo sapiens
agcagaaaggtgtcaccgggctgcgagcaaacattatcccttctccaaacccggtgtaccgagcacctgctctgtccgggtgccagatgcggaggaaaccwgaagtctgtcagggaaggctggcgctgaacaaacagactggcagctgtgggattataggcggccatcagggccatgatgggcacagtgccaggagagagc

SEQ ID NO: 450720 - DNA, 201 bp, Homo sapiens
gtggtggctcacacttgtaatctcagcactttgggaggctgaggcgggcgcatcacgaggttaggagatcgagaccatcctggctaacacggcgaaacccygtctcaactaaaaatgcaaaaaattaggcaaagcttgcagtgagccgagattgtgccactgcactccagcctgggcaacagagcgagactctgtctcaaa

SEQ ID NO: 450721 - DNA, 201 bp, Homo sapiens
ctatgacaccgtgcctgatacgtgggtggcccgggcctacccctccatgatgggcctggcggcctggtacgcagacctgctgctccgcatcagggtaagtkccgttttctctgagaggcttcctaagactcggggaccgagtgcccagagctcggcacgccccacaccctagagcctgcaggagcatggccaggaggctcc

SEQ ID NO: 450722 - DNA, 201 bp, Homo sapiens
tacatttccattttaggtgtgtttcagtacattcaagaggtgcgagaaattctgcacaacttgcagaacaggatgcaaaaggcaaaacaaaatatagaagkaatttcccaggctatgaaggtaagcaaggggcagagcacagagtggggctttgtgggggcctggggctgccctggggcaaaccaggctacgtagaggccc

SEQ ID NO: 450723 - DNA, 201 bp, Homo sapiens
tagggagacacgggtcgtagctgggcccccaagcttgtggggccacaaggcattgaggtagggccagggtaggggagaggttctatcagtttcgtccatcrcccatttcacaaacatgcagcagtggcctagagcccccgcggaggggggatcctccttccccccttccaccgaggtgtctgtcccgccgggagaggaaga

SEQ ID NO: 450724 - DNA, 201 bp, Homo sapiens
atcacttgaaccttggaggcggaggttgcagtgagcagagatcacactactgcattccaacctggacgacacagcgagaccccatcttaaaaaaaaaaaaatggagtcctactcatcactcgggaaatgtggggaggtcccagcagggcagaaccagccacatggcaccttgacttccgtgatgaggctcaggcccctttg

SEQ ID NO: 450725 - DNA, 201 bp, Homo sapiens
ggagagcgataagtgaggttttaatgtaatatttttgaaaatcaaattagcgctaaaaaattcatgatgaacaaatcatcagaattgtaaaccaaggtggrctgttgggtttttttgtttcattgtcctgcaatcctgtgccagggaggggtggtttccaatcagccccggcgcagccaaggctccagggccagttcagga

SEQ ID NO: 450726 - DNA, 201 bp, Homo sapiens
gccaaaagaaatgttttacagtcgtcctttggtatctgaggaggttggattccaggaccgccatggataccagaatccacggagggatggatgctcaaggscccgatataaaacagtgtcgtatttttgaagatgctcccctctactttaaatcatctctagattacttataatacctaatataatgtagaatgctatgta

SEQ ID NO: 450727 - DNA, 201 bp, Homo sapiens
catctgtgtgtctcctagggagaactgaccatcacgaccgacgtggaagatctgtccacggctctcttctatgacaccgtgcctgatacgtgggtggcccrggcctacccctccatgatgggcctggcggcctggtacgcagacctgctgctccgcatcagggtaagtgccgttttctctgagaggcttcctaagactcgg

SEQ ID NO: 450728 - DNA, 201 bp, Homo sapiens
ccccgactgaccccagacttattggggtcatgttagaaagagttgggggcttttgtagagagaggtgtttatatcatctgaagttgcttttttctttgacktttttaggctcaccaaagctttgctctaatctgaacttccttccttctcagcgcccccaccccccgcagttgaccctgggtgccttccaaggctggcctc

SEQ ID NO: 450729 - DNA, 201 bp, Homo sapiens
agcccaagagttcaaggctgcagtgagccatgatcacagcactacactccagccggggcaacagagcaacaccctgtctctcaaagacaacaaggccgggyacagtggctctcacctgtaatcctggtacgttgggaggccaaggtgggcagatcacttgaggccagtagttcaagaccagcctggccaacacggtgaaac

SEQ ID NO: 450730 - DNA, 201 bp, Homo sapiens
atccctaatgccttggcgatccccttctcttcccaggccttgatggaagatgcagtgaaaacacccaacgtggtggaagccaccagcaaacccggcctctmcaataaactggaggccctgaagaagaggtgcggctcacacctatccagaccaggggagtcagtggtgcagattccctaagtcttaagtctgacggaactt

SEQ ID NO: 450731 - DNA, 201 bp, Homo sapiens
gcgtgcgcaccgttccatcacgaggccctctgccatgaaccagcttccgtgttgtgcccgcagctacctggatgtcatcgagcaggccatctcggaagggracacgttgctcattgagaacatcggcgaaaccgtggaccccgtgctggaccctctactgggcaggaacacgattaaaaagggaaagtgagttgtttccgc

SEQ ID NO: 450732 - DNA, 201 bp, Homo sapiens
cgtctaaacgcatcaaacaagacacacggagagcctggccaggctctggggtaggaaggacaacaaaagtcatgggaaattcagctccccgcttaagggargtttgaggtggtgtgtttgtcaaagcacctatttgtatagcaataaaaaaaaatctgaaaagacttaagtgacctaaatgtttgtggaagaggggagtgg

SEQ ID NO: 450733 - DNA, 201 bp, Homo sapiens
gaatatgtgagggattcacaggtggaacaaaccaaaggcagaagggaacccaggacgcgtcatcccagacacccagcaacaaaagcttcaggagggagcaytcacctcagtaggatggcacccagagtcaagccaaggacagaagagttcccattgcatttgggagctaggcgcatctccatcactcagggagaacagctt

SEQ ID NO: 450734 - DNA, 201 bp, Homo sapiens
tagctgggactacaggcgtgtaccaccaagcccagctggtggtagtaaaaatacaaataatttttgtatttttagtagagacacagtttcaccacattggycaggctggtctcgaactcttgaccttaggtgatttgcccgcctctgcctcccaaagtgttgggattacaggcataaggccccaagcctggccaattacat

SEQ ID NO: 450735 - DNA, 201 bp, Homo sapiens
tccatggtgcgggagagcgagagggactgtcccaaccccgagcgggaccacccctcctgtcgaccagactgttacctcccagagcaaaagcccagaagagwccccttctggtcctccctcctcccctgatcaccttcttggtgggagtgctcaggagaaatctggctggtccccacccttgcccaccagcctggtagacat

SEQ ID NO: 450736 - DNA, 201 bp, Homo sapiens
ggaagggatgggtttaagaaatatctgaagtctggagaaatggaagacttgatattgattccagaggcatattttcgggcttggacacgtggctggtgatwgacagagtaagggatttcctggggacatagaaatgacagctttgtgcaaatgtcctgcgtggacttaggcagaaatcccagtgaggtgttcctgaggcta

SEQ ID NO: 450737 - DNA, 201 bp, Homo sapiens
aagattggccctgcccgttttgtccacagccacaggctggggaaggggaggagactgtggtgaagaggcccccttctcctttgtcctcagctcctgtacaygtgtgggggcctcatggagcggcccctgattcttgccgaggtggcgcccaggtattcagtcatgctggagctgtttgacgctgagctagacaatgctaag

SEQ ID NO: 450738 - DNA, 201 bp, Homo sapiens
ctcctgcctcacagcccacactccctggggctggaccacaactcagcccttcacctgtgcacctgtgacttattctttacaggaactggtggtggtttttygttctcttaaataatcaggtgctttgtaaccaagcacatcggaaccagagggtggaggttggtgtggaagaggtggggcagattaaagccagtggagcca

SEQ ID NO: 450739 - DNA, 201 bp, Homo sapiens
cttgcccccagcacaggagcagagctgctgagcacctccgacgtccatgaacaaaccccagaatatttatatagcccctactctgggcactgaatgttcaygggctccaatggagaccacaggagaggcttggcctagctggaagcggtgctgttccgaaaggccccagtcctgccaggggacaagctgcacgctcagcag

SEQ ID NO: 450740 - DNA, 201 bp, Homo sapiens
gataaggggcgagtttctttgcgttcatgggctccgctgttaactgtggtcccctggaaaaccatctaagctttcagcaggaatgtctgcgttagcaggcrccagcgatcgctcactgcgtgggcaatggggggtatgtactttcaggtggccctgacttgcacccagatctggtggacgaccgaggtgggcctggcattt

SEQ ID NO: 450741 - DNA, 201 bp, Homo sapiens
gtgtgtggcgatccctaatgccttggcgatccccttctcttcccaggccttgatggaagatgcagtgaaaacacccaacgtggtggaagccaccagcaaamccggcctctacaataaactggaggccctgaagaagaggtgcggctcacacctatccagaccaggggagtcagtggtgcagattccctaagtcttaagtct

SEQ ID NO: 450742 - DNA, 201 bp, Homo sapiens
agttgaacacttaagtactgagttgcagaaagcgtaagttgtagaaaagtaatctgtgtaagaggctggaaggtgagagctgttctaaaagggtctgagcrgacaggattctttccgcctccacttcccatcctagtgatgagaatgatcgtttcattctggtatcagaagagcatcattcacctgggaattgcatctcct

SEQ ID NO: 450743 - DNA, 201 bp, Homo sapiens
tcaagaggagaaaagtatgcaaattatttaaatccaagttttctgtggtatgggaggaaaggaagactccaaaacacagttagagttgaacacttaagtaytgagttgcagaaagcgtaagttgtagaaaagtaatctgtgtaagaggctggaaggtgagagctgttctaaaagggtctgagcagacaggattctttccgc

SEQ ID NO: 450744 - DNA, 201 bp, Homo sapiens
gagaattccattgacgtaagatagatcaagaggagaaaagtatgcaaattatttaaatccaagttttctgtggtatgggaggaaaggaagactccaaaacrcagttagagttgaacacttaagtactgagttgcagaaagcgtaagttgtagaaaagtaatctgtgtaagaggctggaaggtgagagctgttctaaaaggg

SEQ ID NO: 450745 - DNA, 201 bp, Homo sapiens
ttaagcaattctcctgcctcagcctcccaagcagctgaggctacaggtgtgcgccaccacacctggctaatttttgtatttttagtagggacggggtttcmccatattggccaggctggtctcgaacttctgacctcaagtgatctgccctcctcggcctcccaaagtgctgggattacaggtgcgagtcaccgtgcccgg

SEQ ID NO: 450746 - DNA, 201 bp, Homo sapiens
acaatgctaagatcttgtacgatgcccagatggcggcctccgaggaggggaacatccccctgatccacaaaaacatgcctcccgtggccgggcagctcaartggagcctggagctgcaggagaggctagaggtgtccatgaaacacctgaagcacgtcgaacacccgtgagtcacagccctgggcaggggcaggcaccccg

SEQ ID NO: 450747 - DNA, 201 bp, Homo sapiens
gcctcatggagcggcccctgattcttgccgaggtggcgcccaggtattcagtcatgctggagctgtttgacgctgagctagacaatgctaagatcttgtaygatgcccagatggcggcctccgaggaggggaacatccccctgatccacaaaaacatgcctcccgtggccgggcagctcaagtggagcctggagctgcagg

SEQ ID NO: 450748 - DNA, 201 bp, Homo sapiens
tgcctcagctgcccttgagagtggcagtgctcttcctaagaggaacgcttcctgtggataaaatatttcttcatttatctgtatcagagtagaagcccagrtatataaatgcaacgttatggctattttaaaattgtttacttggagttgttttgggtttgttttttctggagacagggtcttgctctgttgcccaggctg

SEQ ID NO: 450749 - DNA, 201 bp, Homo sapiens
ctgctcttcccctggtgcctccaggcactcacaacccaatcaaaacaaactggatggcctggcatggtggctcatgcctgtcatctcagcactatgggggrccgaggcgggtggatcacctgaggtcaggagttcaagaccagcctgaccaacatggtgaaaccctgtctgtactaaaaataaaaaaaaattagccaggtg

SEQ ID NO: 450750 - DNA, 201 bp, Homo sapiens
tgcaggagtttatgaagaatttcctgatatatgggtgtgcagtcactgcggaggacttggacacctggacagatgacaccatccccaagacaccgcccacyctggctcagttccaggagcaggtgcgtgcagacctcacccaccagcctccttgtctccagagtcttccaggagaggatcaccaggcttgctttaaaactt

SEQ ID NO: 450751 - DNA, 201 bp, Homo sapiens
gctatgtttcgacaggagaaattgtgaaatacaattgcttcatggggaggtaggggctaggaaattctatacacaaatgatttaaggagaacagcaaattycctcccacttcaaagagctgtgcagatttcttactccagttgtcaccatttcgtagtccattggctttagaaacttgaggcttgcacttcctggggccat

SEQ ID NO: 450752 - DNA, 201 bp, Homo sapiens
ttgaacaattttgaaaaacacaattaacttaaaaatagccgcaatcttgcatttgggaaatctgtactcttgggggcctgaaaaatctccctctcttcgcrgtcatgttttggtttttcctcctgtggccatttctagggacagtggtcacctttctcagacccaagtctggggaaagtctgagactcaggctcaccgcag

SEQ ID NO: 450753 - DNA, 201 bp, Homo sapiens
atcggttccacgcgataactccggcacgtggctgtgggtccgagggttccacgcgataactccggcacgtggctgtgggtccgagggttccacgtgataaytccggcacttggctgtgggtccgagggttccacgcgataactctggcacgtggctgtgggtccgagggttccacgcgataactccggcacgtggctgtgg

SEQ ID NO: 450754 - DNA, 201 bp, Homo sapiens
ctggtcccaccagatccgggatgtgctgagcaaagactcagcccaggcgctgctggatgggctgcaccccctgccccaagtggagttcgagttctgggacrctcggctgctgaacctcaagtgcatccatgaacaggtacggcctcctctctcctgtggggctgcagcctcgtcccagctgggcgaccgggccgagctctc

SEQ ID NO: 450755 - DNA, 201 bp, Homo sapiens
ggtctcactttgttgcccaggctggtctcgaactcctgggctcaagtgatccttccatctcagcctcccaaagtgctgagattacaggtgtgagccaccgygccggcccctgcactgtttttgcagcttcttaccagtctctaattatttcacaatagaaggtttaagaaaagaaatgagaaaggagccctcctctgcctt

SEQ ID NO: 450756 - DNA, 201 bp, Homo sapiens
ctgtggatcggttccacgcgataactccggcacgtggctgtgggtccgagggttccacgcgataactccggcacgtggctgtgggtccgagggttccacgygataattccggcacttggctgtgggtccgagggttccacgcgataactctggcacgtggctgtgggtccgagggttccacgcgataactccggcacgtgg

SEQ ID NO: 450757 - DNA, 201 bp, Homo sapiens
gagctcttgccctccagggtcccaaagcctggttaggcaaacacattgaaaacagaatcagattacaggttacatgtatggtagcaaacgtgtaacaaaawacaggtgggagaataattaattttgcttaggaaagaaagacaaagtgctttgttattggtatcagcggagctgggcataggaggtgctgaaagggaatgg

SEQ ID NO: 450758 - DNA, 201 bp, Homo sapiens
atgtactttcaggtggccctgacttgcacccagatctggtggacgaccgaggtgggcctggcatttgccaggctggaggaaggctatgaaaacgctatcaragattataacaaaaagcaggtgtgttactagtgtgtagttagttacgtttttaaaacttgtttaaaaagcaggtgcatgggcccgtgtatccttctgaaa

SEQ ID NO: 450759 - DNA, 201 bp, Homo sapiens
gacagagccaggcaatgcagtgactcctgcacctccccttgcaggcaaacctcaccaagtctcaaaacgaatttaagattgttctgaaagagctggaagaytcgctcctggcccgtctgtcggctgcgtcggggaactttctgggagacacggccttggtggagaatctggagaccaccaagcacacagccagcgagatcg

SEQ ID NO: 450760 - DNA, 201 bp, Homo sapiens
aacctcaacgctggcgacaggatgaagatcatgaccatctgcaccatcgatgtgcacgcacgggacgtggtggccaaaatgatcgtggccaaggcatgagygcccctgtcccaggggccaggggaagggcaaggggacaccgggttcagggcagtgcattcagggacttcagaccctgccacttcctcttcctggggcact

SEQ ID NO: 450761 - DNA, 201 bp, Homo sapiens
ctcagtgagagacaccatggacatatataatggagaaataaaagaatggaagaaaacatttgcaatgtataaaattgacagtggattaatatctgaaatayacaaggaattactagaaactaacagacgtcaacttccaacacacaaagtgcataatgggggaaaaaaacaaaagtgctgggcgcagtggctcaggcctgt

SEQ ID NO: 450762 - DNA, 201 bp, Homo sapiens
tgccccacccgctggcctttccttcctgagtcggagacagaggaggagcagccgggacccctctttctggtgctcccttgtgggcatggtgatggggtttatgatggccagtcgaggcagcaggtcccccgggagtgtctcagccaatctaaggcgacccaaaggtgacggagagcaaggttcctgccaccctcgcctctg

SEQ ID NO: 450763 - DNA, 201 bp, Homo sapiens
cccgcctacccggctgccccccgccagtccccgttccctcctgtcccctctcactgcaggcccaggcactcactagccactttgcacctcctcacttcccrtgccccacccgctggcctttccttcctgagtcggagacagaggaggagcagccgggacccctctttctggtgctcccttgtgggcatggtgatggggttt

SEQ ID NO: 450764 - DNA, 201 bp, Homo sapiens
ggaaagcctgaacacggacaactacctggtgcaggctgtgcccttcaacttctacacgacctcagccatgctgcagggtgaggctggtccggccacgcccygcctacccggctgccccccgccagtccccgttccctcctgtcccctctcactgcaggcccaggcactcactagccactttgcacctcctcacttcccatg

SEQ ID NO: 450765 - DNA, 201 bp, Homo sapiens
tggacctgctcatggagaagtcctggccggtgatgctggtggggaacgcggggacgggcaagtcggtgctgatgggggacaagctggaaagcctgaacacsgacaactacctggtgcaggctgtgcccttcaacttctacacgacctcagccatgctgcagggtgaggctggtccggccacgccccgcctacccggctgcc

SEQ ID NO: 450766 - DNA, 201 bp, Homo sapiens
gtgccccccacatgacatcatgagatctttctccttttctgttctgccccatccaccagcccttggtatgtgcttcccgtgtggtagcaagaatggcttcyaactgttctagacctacagcacccccatagctagcaaccccagagagggcacagcccccacgaccctggcatcctcctccgaccctttcagggcctgcaa

SEQ ID NO: 450767 - DNA, 201 bp, Homo sapiens
tacaggcgtgagccactgcgccagcctacttctggaatttttcttagaaaacccaatttgcggctatagctctgcccgccccgtacatgcaatagtttggracattttgtaaataaccagaactcgcatttcctttgcctcaagcgtctttgtctgtggtcccgtctgactcctccatggacgtcagttgtttcttctgac

SEQ ID NO: 450768 - DNA, 201 bp, Homo sapiens
ggaggacgagtacatggtttttgatcaggaatgcgacctctcggggcaggtgagtgtgtgcgcacaccacacagggaacccaggacaagggtgcagcacgygtgtgggccacacgccctcagatggcgatgtccggagaaccagcaccctgtgcagctgccagcccgcccctgctcctctcctctccctctctagaaaaca

SEQ ID NO: 450769 - DNA, 201 bp, Homo sapiens
tccctccagcagcccgggatcgtgccccggcaatggctctccatgaaggatcatgacgtctgcccactgcagagtgcacatgacctgaaatgaatcctgcytggatttttttcccttaggtgaaatttaaaatgtcagaagagacgaccctggcagatttactgcagctgaacctccacagttacgaggatgaggtccgca

SEQ ID NO: 450770 - DNA, 201 bp, Homo sapiens
cttcttcggggcatcaccgaggacccggtccaaactcccatcggacccatcccgtctgtcatttgcagaacaacctgacagagctgaagtcctttgggtcyccgccggatgctgtggtcaacgtcaccgccgccgtcatgattctgaccgcacctgggggcaagatccccaaggacaagagctggaaggcggccaagatca

SEQ ID NO: 450771 - DNA, 201 bp, Homo sapiens
gaatgtgaaagaatgaacatcctgaccaacgaaatgcgccgttcgctcaaggagctgaacctggggctgaaggtaaacatgggtcagcccggccccagggmcgtggctggatggtgaaaccagcagaaacccaggcctctggcaacccaggcctagcacaggccccggatcagcatggtactgctccctctccagagctct

SEQ ID NO: 450772 - DNA, 201 bp, Homo sapiens
gagaagccgagggagcagtggatcctggactacccagcccaggtctgaggcgggtgggggctcggcggcgcctcgtggctgagataaggggcgagtttctytgcgttcatgggctccgctgttaactgtggtcccctggaaaaccatctaagctttcagcaggaatgtctgcgttagcaggcgccagcgatcgctcactgc

SEQ ID NO: 450773 - DNA, 201 bp, Homo sapiens
aagacgttcagctcttaattctctcttgtgatagaggttcaggaagaagcggagctcccccagagcacactcacagaagagtgtgtgtctggccaagcacrgtgcctcatgtctgtaatcgcagcactttgggaagctgaggcgggcagatcatctaaggtcaggagttcaagaccagcctggccaacgtggcgaaaccct

SEQ ID NO: 450774 - DNA, 201 bp, Homo sapiens
gcaagaagccgtatggaccagaggtgagaaagtcggcctgtctcgcaagcatgtgtctctcctggggcctgtgctacgcatatcagagacagcacacacaycgacccgcactcagtgactcctaccaaggcagcatcacaaatttttgacacaaacatcttcaaagtagaaggcagaaagcagcagcctctgcgtagattt

SEQ ID NO: 450775 - DNA, 201 bp, Homo sapiens
ggagtaggcagtgctggttccctctgaggctctgcgggagaacctgtcccaggcctctctcccagctcctgggggctctcggcggtccttggcatcccttrgcttatggacacacccctcccatctccgcctctgtctccacgtggccttctctgtatgtctgtgtccaaatttcccatttgcttataaggacacagtcat

SEQ ID NO: 450776 - DNA, 201 bp, Homo sapiens
gtgtgtccaaccccaggatattccatgctggggagctgggctctccaggaaagatgtagagagtgatgaaaaaagctggttttctgagaaaaaccagcacygtgggggaggaagaagaatatgtgagggattcacaggtggaacaaaccaaaggcagaagggaacccaggacgcgtcatcccagacacccagcaacaaaag

SEQ ID NO: 450777 - DNA, 201 bp, Homo sapiens
aaatgtcctgcgtggacttaggcagaaatcccagtgaggtgttcctgaggctagaggctccagaggagcgtcttggctggaggtcacagttcatccatccmtccatccatccgcccacccacccactcacccatccattcaccctcccgcccacccagtacttcgcacacctgccatgtgtgtccaaccccaggatattcc

SEQ ID NO: 450778 - DNA, 201 bp, Homo sapiens
tccctttccaatgtgacgagggaaaagcagctggtcatgccagcaagatgggggcctctagggatcagagaggaagggatgggtttaagaaatatctgaartctggagaaatggaagacttgatattgattccagaggcatattttcgggcttggacacgtggctggtgattgacagagtaagggatttcctggggacata

SEQ ID NO: 450779 - DNA, 201 bp, Homo sapiens
tgtatcaggccctcaccaggcaccagtgtcacagcagtgaaggggtgagagacagacctgggaataaatggtgtaaattcacagtgacacgaggcagggcrgctgagcaagcggatgtttgcacaaagtgccagggaacaagggctggtgtgggaagggaggtcttggcctctgtggaggtgggaagtcttcccaggtgat

SEQ ID NO: 450780 - DNA, 201 bp, Homo sapiens
actacaaggtacgcggccggggtccggaggagggacccagagtcttcttttatagaagcagatcctagcaccctgtcctccgaggccccacagtaaactcyagatctctggatacctgtgaatggcactggagaggaggtgccagggcccccacttgctggtagcatccccctcaggtggtccctctggaaagacttccag

SEQ ID NO: 450781 - DNA, 201 bp, Homo sapiens
gtttttcttttctttaggaaaaaaactagggtttaccatagacaatggaaaactccataatgtgtccctggggcagggacaagaggtggtggctgagaackccctggacgtggctgcagagaaaggacactgggtcattctgcaggtacgagggggccagcactgcagggtaagggctccccgcactgaggtggccaatgg

SEQ ID NO: 450782 - DNA, 201 bp, Homo sapiens
ggagaagtcacttcctcaagtctcagagctgaaaatggcagagcagagctcgcctccctccctccagcagcccgggatcgtgccccggcaatggctctccrtgaaggatcatgacgtctgcccactgcagagtgcacatgacctgaaatgaatcctgcctggatttttttcccttaggtgaaatttaaaatgtcagaagag

SEQ ID NO: 450783 - DNA, 201 bp, Homo sapiens
acgtgaaggttctgggcggatgtgaattttgcggggggggccgcaattccgcccagtgcaggtgcgttctgctcttatgcggttttacagggaaggaaggkgaggcttggagaagtcacttcctcaagtctcagagctgaaaatggcagagcagagctcgcctccctccctccagcagcccgggatcgtgccccggcaatg

SEQ ID NO: 450784 - DNA, 201 bp, Homo sapiens
tccagcttctgggggctccaggcattccttggcctgtggccgcatcatgcctgtctctgccttggtctccacaaggccctctttcctgtgtgcctcagatstccctctccttcctgtcatgaggacacttggccctggatttatgtctcaccggaaaatccaggatgaactcacctcaagatccttagtatctgcaaagac

SEQ ID NO: 450785 - DNA, 201 bp, Homo sapiens
caacgctggcgacaggatgaagatcatgaccatctgcaccatcgatgtgcacgcacgggacgtggtggccaaaatgatcgtggccaaggcatgagcgcccstgtcccaggggccaggggaagggcaaggggacaccgggttcagggcagtgcattcagggacttcagaccctgccacttcctcttcctggggcactgactc

SEQ ID NO: 450786 - DNA, 201 bp, Homo sapiens
ttccactgagggtggccatacagttggatgtgggtgctggagggggaaagagggccagggagggttccctgggcagcaggggaccggccttggaggcatgytggccttccttaggcagccctagctcttgtattccacctggcaacaagagctccggctcatcctgcaggtggagagttctcaggccttcacctggcaggc

SEQ ID NO: 450787 - DNA, 201 bp, Homo sapiens
gcttcccccaggaggtggcgtcactgggtttgcactttatgaaaggaactccggacgttggagagtgggctgcagaaaggagctgcgagagctgaggagtmgtcagcgggagcagggtggtcctgaccaggagcctaggggagggctgtgcctagcctgtcccccgcaccctacccatcagaagtggccctacccctgacc

SEQ ID NO: 450788 - DNA, 201 bp, Homo sapiens
agcttcccccaggaggtggcgtcactgggtttgcactttatgaaaggaactccggacgttggagagtgggctgcagaaaggagctgcgagagctgaggagkcgtcagcgggagcagggtggtcctgaccaggagcctaggggagggctgtgcctagcctgtcccccgcaccctacccatcagaagtggccctacccctgac

SEQ ID NO: 450789 - DNA, 201 bp, Homo sapiens
gctgcccggggagccctggcctcagtcggtgggctctggggagaagcttcccccaggaggtggcgtcactgggtttgcactttatgaaaggaactccggaygttggagagtgggctgcagaaaggagctgcgagagctgaggagtcgtcagcgggagcagggtggtcctgaccaggagcctaggggagggctgtgcctagc

SEQ ID NO: 450790 - DNA, 201 bp, Homo sapiens
cctaagtcaatgagaaaagcatagaggcttccactgagccagttgacacacacaaaggttccagtggattgttttgttttggcaaggtacacattctctcrctcctgaagattggccctgcccgttttgtccacagccacaggctggggaaggggaggagactgtggtgaagaggcccccttctcctttgtcctcagctcc

SEQ ID NO: 450791 - DNA, 201 bp, Homo sapiens
ttggggagggagtgggcagaagcccacaggcaccgctgacctccccaggccctgtgccatggtcgtccccgacttcgaactgatatgtgagatcatgctcrtggccgagggctttctggaagcccgccttctggccaggaagttcatcaccctgtacaccttgtgcaaggagctgctctcgaagcaggtgtgtgtgtcctg

SEQ ID NO: 450792 - DNA, 201 bp, Homo sapiens
gttggggagggagtgggcagaagcccacaggcaccgctgacctccccaggccctgtgccatggtcgtccccgacttcgaactgatatgtgagatcatgctsatggccgagggctttctggaagcccgccttctggccaggaagttcatcaccctgtacaccttgtgcaaggagctgctctcgaagcaggtgtgtgtgtcct

SEQ ID NO: 450793 - DNA, 201 bp, Homo sapiens
ctgctgtggtctacctggcagtcgaggtgtgctctcctaggtgaagagggacaggcaggggtgtaggttggggagggagtgggcagaagcccacaggcacygctgacctccccaggccctgtgccatggtcgtccccgacttcgaactgatatgtgagatcatgctcatggccgagggctttctggaagcccgccttctgg

SEQ ID NO: 450794 - DNA, 201 bp, Homo sapiens
accgaaggttcaacactctgctgtggtctacctggcagtcgaggtgtgctctcctaggtgaagagggacaggcaggggtgtaggttggggagggagtgggyagaagcccacaggcaccgctgacctccccaggccctgtgccatggtcgtccccgacttcgaactgatatgtgagatcatgctcatggccgagggctttct

SEQ ID NO: 450795 - DNA, 201 bp, Homo sapiens
ctgccgagggtgggcaccgtgtgtttatcggtatcccccgtggatttcccatccatgagtgtgggtagggaacagtaacatgggaagagcgaggaccattygaacgtgcacagggtgtatcactacctgcatatgtgaatgggtagaatgtgataatgcacgcctgctttgctacctaggatgccagctggtccttcttgc

SEQ ID NO: 450796 - DNA, 201 bp, Homo sapiens
ggtggctctcagaggaggggccctgaaggtgcacccagtggatgatgtgggaggaggagggaagtagggagcaggcgggctgggagcccggctccaggacygaaggttcaacactctgctgtggtctacctggcagtcgaggtgtgctctcctaggtgaagagggacaggcaggggtgtaggttggggagggagtgggcag

SEQ ID NO: 450797 - DNA, 201 bp, Homo sapiens
actgcaaaaatgttacttggaagagttaactgattagcttgttaacactctcagaagggttggaaacagagcacaggagagagatttgacttagggttagkaaagtttcagagggcaggagcatagcaagagggcaggcgaggaggcaggactgggctgaggttgaagccaagcagcagggacaggagcctaagaggggca

SEQ ID NO: 450798 - DNA, 201 bp, Homo sapiens
aaatatatatttagctaaccatacaaaatcaagtaaaatctatataaaaattatagttgtcctaaaatgttgtgttcccaatgagaatattgttaatatakctatataaataaaagcaaaagctattagaagagttgaaaaatgggcagaacgcaaatgtaatgggaaggctaacacaacattattatactgccatggact

SEQ ID NO: 450799 - DNA, 201 bp, Homo sapiens
ttctaccaagcaggtagcccacacagaaacaaaaatcaggcagccttttgactttacacagatctccagaacatgataaaaatggccagtcttgagaaagrctcctgacaattatctgtgaatgcagcagtaaagtcatcctcacacatgcaggggcttggaaaaataccatttggatacccttcctgagaaacctattcc

SEQ ID NO: 450800 - DNA, 201 bp, Homo sapiens
ccatgaaccagcttccgtgttgtgcccgcagctacctggatgtcatcgagcaggccatctcggaaggggacacgttgctcattgagaacatcggcgaaacygtggaccccgtgctggaccctctactgggcaggaacacgattaaaaagggaaagtgagttgtttccgcctccgtggcttgagccaggtaaacatcttcag

SEQ ID NO: 450801 - DNA, 201 bp, Homo sapiens
tatgcatgtgtgtgcatgtatgcgtctgtgtgtcagagataatgataataagctctgctgtgtcctgtgcgctgagctaaacccttccatggtgcagtgcycacaagggccccaggatctgttgctctcaggagcccctttgggcagttgaagacactgaggttgagagcggtctcagggcaccttgtccagggcccctgg

SEQ ID NO: 450802 - DNA, 201 bp, Homo sapiens
tcctgtgtttctcccctgtgggctccgtgctgcgggtacgagccagaaagttcccagctgtggtcaactgcacggccatcgactggttccacgagtggccrgaagatgcgctggtgtccgtcagtgcccgcttcctggaggagactgaggggattccggtgagtcactgaggccacctctgcctgagtgtagagcccagag

SEQ ID NO: 450803 - DNA, 201 bp, Homo sapiens
gctcatcgttggctggtataatgaggtgagttggtgagtcggtactattcctgatgcagctttgtattgttttggttttttgtcaagtttgtttgtgtgtytcagagatgtggctcttcctgggaaatcttcccattcactcaaattcattcttccattcactgcatacttactgagtacctgctatgtgtatgtgcttgg

SEQ ID NO: 450804 - DNA, 201 bp, Homo sapiens
aggggtcaaacggagggaagggggcaagagggaaggggtgtggctataagagggctgtcaccccatggtgacagcaatgctggcctcagtgtcgcgcccaycctccccccgcccaccacccccgctgtgactggtactgttattaggcaagatgttcccatcaggctacatggggcagagagtacacagaattgcctttgt

SEQ ID NO: 450805 - DNA, 201 bp, Homo sapiens
aaaaggacatggttgccaggggtcaaacggagggaagggggcaagagggaaggggtgtggctataagagggctgtcaccccatggtgacagcaatgctggyctcagtgtcgcgcccaccctccccccgcccaccacccccgctgtgactggtactgttattaggcaagatgttcccatcaggctacatggggcagagagta

SEQ ID NO: 450806 - DNA, 201 bp, Homo sapiens
agcacaggagcagagctgctgagcacctccgacgtccatgaacaaaccccagaatatttatatagcccctactctgggcactgaatgttcacgggctccartggagaccacaggagaggcttggcctagctggaagcggtgctgttccgaaaggccccagtcctgccaggggacaagctgcacgctcagcagactgggcat

SEQ ID NO: 450807 - DNA, 201 bp, Homo sapiens
ctctccttatgctccctctgcctcagtcattccccagccccagggctggaggccccatgaccaagagaatggggaccccaaaccatgggcagtgctggctkttgccgtggggaccctctcccttgcccccagcacaggagcagagctgctgagcacctccgacgtccatgaacaaaccccagaatatttatatagccccta

SEQ ID NO: 450808 - DNA, 201 bp, Homo sapiens
ttcctcctctccttatgctccctctgcctcagtcattccccagccccagggctggaggccccatgaccaagagaatggggaccccaaaccatgggcagtgmtggctgttgccgtggggaccctctcccttgcccccagcacaggagcagagctgctgagcacctccgacgtccatgaacaaaccccagaatatttatatag

SEQ ID NO: 450809 - DNA, 201 bp, Homo sapiens
aggtgggagaataattaattttgcttaggaaagaaagacaaagtgctttgttattggtatcagcggagctgggcataggaggtgctgaaagggaatggcargaaagaaagaaaggagggggagagggaggaagaggaggagggaggaaatgcgcccgtgtgttttgggaacaaccatgccggggcacagagcgtgcagcgg

SEQ ID NO: 450810 - DNA, 201 bp, Homo sapiens
gggctgctttgacgagtttaatcgcatctcagtggaagtcttgtctgtgattgccgtgcaggtaaagtcccctgcctgcggcctcggggtcacgtcgggtractggctcgtcagctttcctgtgacctcacacgccagatagaccctccttgcctctctgcaacgttccaagcaccgaagggtggtgtggtgccattgagc

SEQ ID NO: 450811 - DNA, 201 bp, Homo sapiens
ttattagggactccaggaagtccccatcctggggtctgggaggcaagggtgaaaggatggctcttcctcgtgtccagccctccacggtgttaccctgggcrgtaagctgacctgcctgctggcctgcggaaggctccaatgcaccggggcctgagcaagctttgggaagagaaaacacagccgaagaggcagggggaggcc

SEQ ID NO: 450812 - DNA, 201 bp, Homo sapiens
atatatgggtgtgcagtcactgcggaggacttggacacctggacagatgacaccatccccaagacaccgcccaccctggctcagttccaggagcaggtgcrtgcagacctcacccaccagcctccttgtctccagagtcttccaggagaggatcaccaggcttgctttaaaacttgggtgaattgttttaagatgcaggtt

SEQ ID NO: 450813 - DNA, 201 bp, Homo sapiens
ccctgcagtgggtggggtgggctctttgcagtgacaggggctgtccggggactggcttccaggtgaaggccgtgctggacgacatcctggagaagattccrgagactttcaacatggctgagatcatggcaaaggcagcggaaaagaccccctatgtggtagtcgcctttcaagaatgtgaaagaatgaacatcctgacca

SEQ ID NO: 450814 - DNA, 201 bp, Homo sapiens
acggagatgctggagggagacgtcctgctggcccccggctttcagatcccccccaacctggactacaaggtaaggatgacaagttaaacaggagctcaacrtaatgaaggctcgtgcctcccggtgagagcctgccagcacaaatggagtgtcaataattgagcaagaacccaggcagccaaaataagagaggatgagaaa

SEQ ID NO: 450815 - DNA, 201 bp, Homo sapiens
tgggtggagctggggcacaagctctgtgaccccacaaaggctgaaagtgggcaggtgcgacgagaagggagaacggagggggaggggaaaccagggccagygagggctgtgcctgccgagacagcgtgcgtgacctcggggactcggctggggtccaggatccgaaaccttcaggtgctaccccagctcccctccccacac

SEQ ID NO: 450816 - DNA, 201 bp, Homo sapiens
atcacgcccagctaaaatgtttttgtattttttgtagagatggggtctcactttgttgcccaggctggtctcgaactcctgggctcaagtgatccttccayctcagcctcccaaagtgctgagattacaggtgtgagccaccgcgccggcccctgcactgtttttgcagcttcttaccagtctctaattatttcacaatag

SEQ ID NO: 450817 - DNA, 201 bp, Homo sapiens
gcagagccctgggcaccatggtctacgtcttcaactgctccgagcagatggactacaaggtacgcggccggggtccggaggagggacccagagtcttcttktatagaagcagatcctagcaccctgtcctccgaggccccacagtaaactccagatctctggatacctgtgaatggcactggagaggaggtgccagggccc

SEQ ID NO: 450818 - DNA, 201 bp, Homo sapiens
gtaatcccagctacttgggaagctaaggcaagagaatcacttgaaccctgaggcagaggttgcagtgagctgagatcacaccactgcactccagcctcggygacaagagtgaaactccatctcaaaaaaaaaaaaaaaaaaaaaaaaccatccaggcccacccatggtcctgaggctagtggggcaggatgtgccaggaac

SEQ ID NO: 450819 - DNA, 201 bp, Homo sapiens
cctgggcagagccctgggcaccatggtctacgtcttcaactgctccgagcagatggactacaaggtacgcggccggggtccggaggagggacccagagtcktcttttatagaagcagatcctagcaccctgtcctccgaggccccacagtaaactccagatctctggatacctgtgaatggcactggagaggaggtgccag

SEQ ID NO: 450820 - DNA, 201 bp, Homo sapiens
gttggcctgtttcagagttgcatattcattcatcattcatgtcacaaactgtgtatcaggccctcaccaggcaccagtgtcacagcagtgaaggggtgagagacagacctgggaataaatggtgtaaattcacagtgacacgaggcagggcggctgagcaagcggatgtttgcacaaagtgccagggaacaagggctggtg

SEQ ID NO: 450821 - DNA, 201 bp, Homo sapiens
acgaccaaggacctgggcagagccctgggcaccatggtctacgtcttcaactgctccgagcagatggactacaaggtacgcggccggggtccggaggaggsacccagagtcttcttttatagaagcagatcctagcaccctgtcctccgaggccccacagtaaactccagatctctggatacctgtgaatggcactggaga

SEQ ID NO: 450822 - DNA, 201 bp, Homo sapiens
ttggcctgtttcagagttgcatattcattcatcattcatgtcacaaactgtgtatcaggccctcaccaggcaccagtgtcacagcagtgaaggggtgagagacagacctgggaataaatggtgtaaattcacagtgacacgaggcagggcggctgagcaagcggatgtttgcacaaagtgccagggaacaagggctggtgt

SEQ ID NO: 450823 - DNA, 201 bp, Homo sapiens
tggcctgtttcagagttgcatattcattcatcattcatgtcacaaactgtgtatcaggccctcaccaggcaccagtgtcacagcagtgaaggggtgagagacagacctgggaataaatggtgtaaattcacagtgacacgaggcagggcggctgagcaagcggatgtttgcacaaagtgccagggaacaagggctggtgtg

SEQ ID NO: 450824 - DNA, 201 bp, Homo sapiens
ggaggccatggggtcactggcacacacgcttacctgtggtcacttgcaggtgctatatcaccctgacccagtccctccatctcatcatgggtggagccccygccggccccgctgggaccggcaagactgagacgaccaaggacctgggcagagccctgggcaccatggtctacgtcttcaactgctccgagcagatggact

SEQ ID NO: 450825 - DNA, 201 bp, Homo sapiens
cagaggttgcagcgagccaagattgtaccactgcactccagcctgggtgacagagtgagactctgtctcaaaaaaataaaagcagggaggccatggggtcrctggcacacacgcttacctgtggtcacttgcaggtgctatatcaccctgacccagtccctccatctcatcatgggtggagcccccgccggccccgctggg

SEQ ID NO: 450826 - DNA, 201 bp, Homo sapiens
tacaaaaattagccgggcatggtggcgggcgcctatagtcccagctacttgggaggctgaggcatgagaatcatttgaacccaggaggcagaggttgcagygagccaagattgtaccactgcactccagcctgggtgacagagtgagactctgtctcaaaaaaataaaagcagggaggccatggggtcactggcacacacg

SEQ ID NO: 450827 - DNA, 201 bp, Homo sapiens
catgattcttggaactgtccgacttggaggtcagctgtggaggctggaaggactgggcatttgcgtcaggtggacctgtgttcacattcagttctaccacygtgtccttgttctagcaccggctgtgtggccttgggagagttcctgcacccctctgtgggcctgctgagttggggtcatgttttatggaccctcatgagc

SEQ ID NO: 450828 - DNA, 201 bp, Homo sapiens
gcccgcccattggaagtgccattctgtagcgagattccactgagggtggccatacagttggatgtgggtgctggagggggaaagagggccagggagggttmcctgggcagcaggggaccggccttggaggcatgctggccttccttaggcagccctagctcttgtattccacctggcaacaagagctccggctcatcctgc

SEQ ID NO: 450829 - DNA, 201 bp, Homo sapiens
gtcagatgagcggtgcccgcccattggaagtgccattctgtagcgagattccactgagggtggccatacagttggatgtgggtgctggagggggaaagagrgccagggagggttccctgggcagcaggggaccggccttggaggcatgctggccttccttaggcagccctagctcttgtattccacctggcaacaagagct

SEQ ID NO: 450830 - DNA, 201 bp, Homo sapiens
tccgatggaggacagaggtgttgaccactgccaaccccacccctctttcaggagagtatcgctcccctgtttgagatccgcatggagctggacgaggatgrgctgaccttcaacccgaccctggaggtgggctcagatcgcggcttcctggcactgatcgagggcctggtcaacgacatctacaacgtagccaggctcatc

SEQ ID NO: 450831 - DNA, 201 bp, Homo sapiens
ctcccatcggacccatcccgtctgtcatttgcagaacaacctgacagagctgaagtcctttgggtccccgccggatgctgtggtcaacgtcaccgccgccstcatgattctgaccgcacctgggggcaagatccccaaggacaagagctggaaggcggccaagatcatgatgggcaaggtggacaccttcctagactccct

SEQ ID NO: 450832 - DNA, 201 bp, Homo sapiens
tcgctcccctgtttgagatccgcatggagctggacgaggatgggctgaccttcaacccgaccctggaggtgggctcagatcgcggcttcctggcactgatygagggcctggtcaacgacatctacaacgtagccaggctcatccctcggctggccaaggacaggatgaactacaaggtcagtcctggcctcttctggccgt

SEQ ID NO: 450833 - DNA, 201 bp, Homo sapiens
gaaaagactctccaaaacgagtcactgggagtcgtaagacacggccctgccgttctgcccctctgtggctcccagccctcgtctgcccagtgcagggcggygtgtgtcggctgcggcccacacttgctgtttctcggtttctccttccccaggtggatgatttgaaagccaagttggcgattcaggaggctgagctcaagc

SEQ ID NO: 450834 - DNA, 201 bp, Homo sapiens
ccaagatgacaatggccccggacgtcagactagagtatctggaggaagttgcctccatcgtcctgaagttcaagccggacaagtggagcaagctgataggygccgaggagaacgtggccctgttcacagagttctttgaaaagcccgacgtccaggtgctggtgctgacgctcaatgcagccggcatgatcataccctgcc

SEQ ID NO: 450835 - DNA, 201 bp, Homo sapiens
ggcctgtttcagagttgcatattcattcatcattcatgtcacaaactgtgtatcaggccctcaccaggcaccagtgtcacagcagtgaaggggtgagagacagacctgggaataaatggtgtaaattcacagtgacacgaggcagggcggctgagcaagcggatgtttgcacaaagtgccagggaacaagggctggtgtgg

SEQ ID NO: 450836 - DNA, 201 bp, Homo sapiens
agggactcaggcatgtgcagtaacctgcctaaagcagcagctggccatggtagagctgactcaagcctgggcagtcaggccccagagtccacacccctcaycgccgtggtgggccacctccacacgagccacccagagatgtctgtggccaacagtctggcacggctcttcaaggattgctggttgtattgatttgtactc

SEQ ID NO: 450837 - DNA, 201 bp, Homo sapiens
acggggtttcaccatattggccaggctggtctcgaacttctgacctcaagtgatctgccctcctcggcctcccaaagtgctgggattacaggtgcgagtcmccgtgcccggcctgggacatactattctaaaaaaaaaaaaaaaaaaaaaaaaaaaaaaaaaaaaagtacttgttgtttatctgaaattcagatttagcag

SEQ ID NO: 450838 - DNA, 201 bp, Homo sapiens
cctggattttagaaaagtgaaatctgaagttggatctccctggaagggacttaacatccacctggaatcccaggtgtagatgggacgagtccttctgattggcccaggtggggcctagagagacacagatgtcttgagggaaagcctccggcctgctagacgtgcccccatcccgccttagaggactccctctcctctcca

SEQ ID NO: 450839 - DNA, 201 bp, Homo sapiens
cccagctactcgggaggctgaggcaggagaatggcgtgaacccgggaggtggagcttgcaatgagccgagatcatgccactgcactccagcctgggtgacagagcaagactccatcttaaaaaaaaaaaaaaaaaaaaaaaaaaaggtgtgtcactgttactgctctgtaaaatccttgacctgtctgcccctgggatgag

SEQ ID NO: 450840 - DNA, 201 bp, Homo sapiens
ctgcaccatcgatgtgcacgcacgggacgtggtggccaaaatgatcgtggccaaggcatgagcgcccctgtcccaggggccaggggaagggcaaggggacrccgggttcagggcagtgcattcagggacttcagaccctgccacttcctcttcctggggcactgactctgttgctggctgcagctgcctcctaacctcctt

SEQ ID NO: 450841 - DNA, 201 bp, Homo sapiens
ccagctactcgggaggctgaggcaggagaatggcgtgaacccgggaggtggagcttgcaatgagccgagatcatgccactgcactccagcctgggtgacagagcaagactccatcttaaaaaaaaaaaaaaaaaaaaaaaaaaaggtgtgtcactgttactgctctgtaaaatccttgacctgtctgcccctgggatgagg

SEQ ID NO: 450842 - DNA, 201 bp, Homo sapiens
gccacaagaccccccagtgcatgtgggcacccgtggtgtctcatcgaaggcactctcccccgcagattagccagctgaacgtactcatcacgctgctcatkgggaacctcaacgctggcgacaggatgaagatcatgaccatctgcaccatcgatgtgcacgcacgggacgtggtggccaaaatgatcgtggccaaggcat

SEQ ID NO: 450843 - DNA, 201 bp, Homo sapiens
gtgcaaatgcctcctgggctgcttaagccccacaacctgggtggagagcctgctttatttatttatttatttatttatttatttatttatttatgttttgtttttttgagacggagttttactcttgttgcccaggctggagtgcaatggcacagtctcggttcactgaacctccgcctcccgggtttaagcaattctcct

SEQ ID NO: 450844 - DNA, 201 bp, Homo sapiens
actctgtgtgtgtataattgatttatatgtaaaaatatacagactctggatggcgttaaagtcagctgtttttgcttctcatccaccctctctcgtggccytgaatttccttctactacgtccatgctagccactgccaggtgtcccatcagggccgcaccctggtgaaaccagtgcctggctggggcctaccgagggcgc

SEQ ID NO: 450845 - DNA, 201 bp, Homo sapiens
gctactcaggaggctgaggcaggagaatcgcttgaacctgggaggcggaggttgcagtgagccgggatggcaccattgcactccagcctgggcaacaagarcaaaactctgtctcaaaaaaaaaaaaaaaaacactcccaggatgaggcaggcgagggcctccttagaaagcactctgtcttcccctgggtgggaggaccg

SEQ ID NO: 450846 - DNA, 201 bp, Homo sapiens
gcaccacagccccaggcacctctccccacgagtaacagacaccttcagaaatatgtactttgatttctcgcctgaaaattggcagatgctactgagagtcyttaaaaaaaaaatgtccttggttagaaatatggaaacaaaagatcatcttgaaaagaaggagaatttacctgtaattccacaacccaagcatgacactgc

SEQ ID NO: 450847 - DNA, 201 bp, Homo sapiens
atgtggtggaagtggagcaggccggggctgagaaatcgctccagggtcccttttataagagcatgaatcaggcccggtgtggtggctcatgcctgtaatcycagcactttgggaggccgaggcaggtggatcacctgaggtcagaagtttgagaacagcctagccaacatgatgaaaccccgtctctacgaaaaatacgaa

SEQ ID NO: 450848 - DNA, 201 bp, Homo sapiens
atcgctccagggtcccttttataagagcatgaatcaggcccggtgtggtggctcatgcctgtaatctcagcactttgggaggccgaggcaggtggatcacytgaggtcagaagtttgagaacagcctagccaacatgatgaaaccccgtctctacgaaaaatacgaaaattaactgggcgtggtggtgtgcacctgtaatc

SEQ ID NO: 450849 - DNA, 201 bp, Homo sapiens
gacattctctccaatggcaatgaccccgtggaggtaggcggggccccttgcattccggtgtttaagccaacatcatgccagaccccaggtgggcacctctrcctcaaccgccctagggtggggtaagtgtccttggacgtgccccatcatctccaggaggccctctgcaccagaagctgccctggggtccccagccatggc

SEQ ID NO: 450850 - DNA, 201 bp, Homo sapiens
ccacggcggactccgtcatctccatctggtttgaggtccagcgaacctggagccacctggaaagcatcttcatcggctccgaagacatccgcacccagctsccgggggactcccagcgctttgacgacatcaaccaggaattcaaggtgagcacagcccggtggttcccacgcacttcagaaatgactgtgtgtggcgatc

SEQ ID NO: 450851 - DNA, 201 bp, Homo sapiens
gaagctgtccacggcggactccgtcatctccatctggtttgaggtccagcgaacctggagccacctggaaagcatcttcatcggctccgaagacatccgcrcccagctgccgggggactcccagcgctttgacgacatcaaccaggaattcaaggtgagcacagcccggtggttcccacgcacttcagaaatgactgtgtg

SEQ ID NO: 450852 - DNA, 201 bp, Homo sapiens
gaacagcatgaggctcagagagagagtcctgcatctgctgcccttcaagtgcctctgactcaaaattgtcaattgcaggatggcatattttggggtggcaygttctgatctcctttgcgtgcactatgtggtctgagcgtgtggcttctttcactcagcctagggtcttcaggtttatccgcgttgtggcaggtgtctgta

SEQ ID NO: 450853 - DNA, 201 bp, Homo sapiens
catagaccccatgtggatcgagtctctcaacacagtcatggatgacaacaaggttcgcgggccctggactctaagccccaaggccacccaaggcagggacracgggggctcacagggaggcgcctacggagcactcaggccctgcatgccaggcttggcgcaggtggcgtgtctggatctccacaggaagctatgagtgag

SEQ ID NO: 450854 - DNA, 201 bp, Homo sapiens
gcaacatagtgacaccccatctctacaaaaaaattttttaagtacaaagaaacagttataattttatttaaccccaaatatccaaaatattatttcaacaygtaactaatataaaaattatcaatgaggtatttcctgtgcttgttttcatcctgagccctgacaccctgcatgtctttttttgtttttttgttttgtttt

SEQ ID NO: 450855 - DNA, 201 bp, Homo sapiens
taatggacaacatggttatagatgtaagttatcaacataaggtaatatatttatgtatatgtattcttatctgttagaatctatagtttctagtttcttgrtgaacaggctatcattttataaatagacttattaaaatatatcttatgcaatctacttgacctggttttaaacctggaagtcctgcattccagaatcccc

SEQ ID NO: 450856 - DNA, 201 bp, Homo sapiens
taatgccagcactttgggaggccgaggcgggcggattacttgaggccaggagttcatgagcagcctggccaacatggtgaaaccccatctctattaaattwaaaaaaaaattagccaggcttggtggggggcgccttaatcccagctactggggaggctgaggcaggagaatcacttgaaccttggaggcggaggttgcag

SEQ ID NO: 450857 - DNA, 201 bp, Homo sapiens
ccttagcctggctgacctggaagccttcatgaaagtcgccagaatgggcttgaccaagcccctcaaggagggggactatgatgggcttgtggaggtgatgsggcacctgatgaaagtcaaggagaggcaagcagccaccgacaacatgtttgagcccctgaagcaaaccatcgagctgctcaagacctacggggaggagat

SEQ ID NO: 450858 - DNA, 201 bp, Homo sapiens
gttactagtgtgtagttagttacgtttttaaaacttgtttaaaaagcaggtgcatgggcccgtgtatccttctgaaacctgccgggcgagtacctggagcrgcttcttctcggaggctgagccccgcaaaaccgtcgtttccacaggccaaataacagccacgcaccacagccccaggcacctctccccacgagtaacaga

SEQ ID NO: 450859 - DNA, 201 bp, Homo sapiens
tgggtaagctggctggcctcatcccctctcccatcggtaaaacctatggctctgtgggctgatggttcttcacattttcccttgataaatattttatttayaattctaaatcaatatcttaaaaacgatgctatgtttcgacaggagaaattgtgaaatacaattgcttcatggggaggtaggggctaggaaattctatac

SEQ ID NO: 450860 - DNA, 201 bp, Homo sapiens
tggcttttagcatagttacaagtgtgtaatcagcacatattcaacagcagagggtgggggctcctgcctataatcccagcactttgggaggcaggaggagygcttgagcccaggagttcaagagaaggccagcctgggcaacataggcagaccccatctctacaaaaaaaataaataaatttaaaaaaattagcgggggac

SEQ ID NO: 450861 - DNA, 201 bp, Homo sapiens
agggcacaggggcacccacttgctccccagggatctgggtgtctgggagccagcccctgggggtgcctttcgagtgttgagacaaaaaatttcccggatgyctggtaacaggttcatgtgccccttccgggtgccctgggagagacgcttgggcggtgataaacaaccagctaaatatctccatgaaaggagctgggcaca

SEQ ID NO: 450862 - DNA, 201 bp, Homo sapiens
gaggacagagagcttctcttgtatctgcttcttctcaagtgccttcagctcaaaataaaccttaagccaaagtggcgtattttggtggcaaattctgccarcctccataatcaggtttgaatgccaagtgcaggagatatttagtgatgatcctgagacctagaggagggtgccaccttcaagcggtgggaagggaaggaa

SEQ ID NO: 450863 - DNA, 201 bp, Homo sapiens
gtagagggggcggtgggactccttggcaaatttatttcctgcttgtaggcaaatagggggaggacagagagcttctcttgtatctgcttcttctcaagtgycttcagctcaaaataaaccttaagccaaagtggcgtattttggtggcaaattctgccaacctccataatcaggtttgaatgccaagtgcaggagatattt

SEQ ID NO: 450864 - DNA, 201 bp, Homo sapiens
tgagccaccgcacctggcctccattgattaacttctatcattcttggtagagggggcggtgggactccttggcaaatttatttcctgcttgtaggcaaatagggggaggacagagagcttctcttgtatctgcttcttctcaagtgccttcagctcaaaataaaccttaagccaaagtggcgtattttggtggcaaattct

SEQ ID NO: 450865 - DNA, 201 bp, Homo sapiens
ctccggttgcattatcgacatccgagtggcattgtgtggggctgcgtggcacacagtgcacacctcagcatgtgcagagtccgtgctggtgacagaggtgrttccaggtgctacaagatgttgtgggatctctccggtttctgcaggtgctgtttgaggacgccgtggctcacatctgcaggattaatcgcatcctggagt

SEQ ID NO: 450866 - DNA, 201 bp, Homo sapiens
ctgccactttaacctggggcagccgctgattctgcgggacgccgctagcaacctcatccacgtcaacttcagcaaagcggtgggtgccaggagtggggacygcgtcaaaggctccttgggagcggggggagggcctgccaaggttccctcagcacggatttatggaggtcgatgtttatatcacagttcgcctaaagcttt

SEQ ID NO: 450867 - DNA, 201 bp, Homo sapiens
ctccatcagtttttgctttgtgtattttgaggctctgttgcttggtgtgtacagatttgggattattgtcttcttataggttgaccctttttcccattatrtaatgttccttttgtctctaggaattttctttgctctaaggttggcttgatctgatactagtatagctacttctgttttttctattgtttttgactagtg

SEQ ID NO: 450868 - DNA, 201 bp, Homo sapiens
ctcctgaccttgtgatcagcccacttcggcttcccaaagtgctgggattacaggcgtgagccaccacgcctggcctgtattttaaatttctaagcgtttasagattttcctgtttcctttctattattgatttctagtttgattccattatggtcaaagaacacactgtatataactttcattattttaaatgtattaagc

SEQ ID NO: 450869 - DNA, 201 bp, Homo sapiens
ctcgatctcctgaccttgtgatcagcccacttcggcttcccaaagtgctgggattacaggcgtgagccaccacgcctggcctgtattttaaatttctaagygtttagagattttcctgtttcctttctattattgatttctagtttgattccattatggtcaaagaacacactgtatataactttcattattttaaatgta

SEQ ID NO: 450870 - DNA, 201 bp, Homo sapiens
cctttcaaatcccccgttgcataattcccgcttcttgcctcctcccaggtgagccgccacctgtccaaactcttcgatagcctgtgtaaactgaagttccrgctcgatgccagtgacaaacctctcaaggtgggcctgggaatgtacagcaaggaggacgagtacatggtttttgatcaggaatgcgacctctcggggcag

SEQ ID NO: 450871 - DNA, 201 bp, Homo sapiens
tggctgcagactgcaggtcggagttccatttgaacatttggtctggccactgcttgtttgcatattcagtctgtgagcctcgagtaattgggtggccggcygcttcggcaccccagatcgggcagcaacgatgggacgtgccgaagacaccccacaggagatatccagtggggcctcgccttcccgctctgattccagggt

SEQ ID NO: 450872 - DNA, 201 bp, Homo sapiens
aacgtggcctcatctctctttctctcctctaaggacaaagagcccgtgccttgggaattcccttcttctcttgccttttccaggataaattccttcttccrgcgcatccagaccattgaggtaaaaacagaactcggtgcatcttgacctccacttcccagactgctcctaccctaggacacctgcagcgtccatccctac

SEQ ID NO: 450873 - DNA, 201 bp, Homo sapiens
tgggctcgccttcgtaacagctgacggtgctgatcatcctgtgtttggggcagggactcttattttccacagcagaagttctgaaaaccccactggacctygtccgcctttggctacatgagactgaacgagtgtatggtgacaaaatggttgacgaaaaagaccaggaaacattgcatagagtcaccatggcctccacca

SEQ ID NO: 450874 - DNA, 201 bp, Homo sapiens
ggttgggggtggctgaggttgagaaccacggcttagcgggagcgtcttcatcatctttggagcctgaaggttacagcatcattggagcagcttctcatgayccctccctgggtgctttttttgtcatcagtcctacatctgtgtaattattgaagagcgttctagtcatggcccactgtctcctgagtgaatgaatgagta

SEQ ID NO: 450875 - DNA, 201 bp, Homo sapiens
aaaagatatccataattgtcagtacgtggcctgcatgaaccccacttccggatccttcaccatcgactccaggcttcaggtaagcagaaaccatactcatycccgtcacctgccatgagtctgaggcttgcttctggcaaatgagaggaaaagctttggtttagggtgttagggctgcaggccgacattttctggagaact

SEQ ID NO: 450876 - DNA, 201 bp, Homo sapiens
tgatgatcctctttgacaagtacctgcccacgtgcctggacaagttgcgctttgggttcaagaagatcacgccagtgccggagatcacggtgatccaaacratcctgtacctgctggagtgcctgctcacggagaagaccgtgccccccgactcccccagggagctgtacgagctgtacttcgtgttcacctgcttctggg

SEQ ID NO: 450877 - DNA, 201 bp, Homo sapiens
cctgaaggttacagcatcattggagcagcttctcatgacccctccctgggtgctttttttgtcatcagtcctacatctgtgtaattattgaagagcgttcyagtcatggcccactgtctcctgagtgaatgaatgagtatgtgcatgaatgaaggaggtgctactttcttagaggggtgtgagctatacactctgagacgt

SEQ ID NO: 450878 - DNA, 201 bp, Homo sapiens
tccctgggtgctttttttgtcatcagtcctacatctgtgtaattattgaagagcgttctagtcatggcccactgtctcctgagtgaatgaatgagtatgtrcatgaatgaaggaggtgctactttcttagaggggtgtgagctatacactctgagacgttccattttggatggattatgaaacagccccagaaacaataag

SEQ ID NO: 450879 - DNA, 201 bp, Homo sapiens
acgtgcatacatgcacacacatgcacacacatgcacacacatgcacaccgtacacgcccccacaggcacatggacaggcctgcagtaacctctcctgtccrtcttccttccagaacgtcactgagaagcaaaaggcctgtgaaacagacctggccaaagcagaaccggccctgctggcagcccaggaggctctggacactc

SEQ ID NO: 450880 - DNA, 201 bp, Homo sapiens
gccaagaagagaacggaacttgttgccaaaatcgagaggctggagaacggcctgatgaagctgcagagcacggcttcccaggtaggagaggggggctggcygccagctcctgtgccgttccctggaggcctcgcaggagctgctactgtcacaggcatccacgggctggtcacactggggctcagcactgcctaaagtaag

SEQ ID NO: 450881 - DNA, 201 bp, Homo sapiens
acacagccagcgagatcgaggagaaggtcagagctgcctcggtgacgtgccctggcagccagggcttgggaggctgggccacgggcgatcggcgcctcccyaccatgagaaaggagaaaagcagcttcggtcatacgtgcccgagtgggcccagggcaggagaaggggtctgggctcccatcctgcacccagctgctgctg

SEQ ID NO: 450882 - DNA, 201 bp, Homo sapiens
tcaagagtacatgagaattgacacgtccttttcctctaacagctttgcatcagaaaatcacggcaacatttcttcccacggccattaagtttcattatgtyttcaacctcagggacctctccaatattttccaggtactgctcttgtagctttatgtcatgcctgccttacggtccagtgcctgatccacaggtgctttcc

SEQ ID NO: 450883 - DNA, 201 bp, Homo sapiens
taccgcccggctgcggagagggcatctctgctctacttcatactgaacgatctcaacaaaatcaaccccgtctaccagttctccctcaaggtgcgccctgmagctggggctgggtgcctccctcaaggtggggctgcatctgggctccacagccaggcctgttgcccacacagccatcgggcagtgccagggccaccctca

SEQ ID NO: 450884 - DNA, 201 bp, Homo sapiens
gtggtgaagggctccatctctgcacgcctccatggctctcggtggcggatccccaggccttcaacgtggtgtttgagaaagccatccagaggaccaccccygccaacgaggtgaagcagcgggtgatcaacctgacggacgagatcacctactccgtctacatgtacacggcccggggactcttcgagagggacaaactca

SEQ ID NO: 450885 - DNA, 201 bp, Homo sapiens
gcaggggcaggcaccccgcctccatggtgcgggagagcgagagggactgtcccaaccccgagcgggaccacccctcctgtcgaccagactgttacctcccrgagcaaaagcccagaagagaccccttctggtcctccctcctcccctgatcaccttcttggtgggagtgctcaggagaaatctggctggtccccacccttg

SEQ ID NO: 450886 - DNA, 201 bp, Homo sapiens
atgaataaacaaatattcctcctgtttatacagccctgctaaaatatttaaagatctgcattctctgaaattgattaaacagcctgtcttaatttgttttktgcggctataacagaatacccaaggctgagtaatctataaacaatagaaatttatttctcatggtcctggggtctgggaagttccatatgaaagtgctgg

SEQ ID NO: 450887 - DNA, 201 bp, Homo sapiens
ataaacaaatattcctcctgtttatacagccctgctaaaatatttaaagatctgcattctctgaaattgattaaacagcctgtcttaatttgttttgtgckgctataacagaatacccaaggctgagtaatctataaacaatagaaatttatttctcatggtcctggggtctgggaagttccatatgaaagtgctggcatc

SEQ ID NO: 450888 - DNA, 201 bp, Homo sapiens
ccctgtacaccttgtgcaaggagctgctctcgaagcaggtgtgtgtgtcctggagctcacggcgggtgtgggtgggagtttgagatgcgggcagcagccasggttggcttccagacctgcctgctggccacaggaaggtgagctcacgtctgcccacctgtgcccactgcccgcaggatcattacgactggggcctgagag

SEQ ID NO: 450889 - DNA, 201 bp, Homo sapiens
cttggaaaactgggcaatgccactgtggggtaatgggagtgggagagcagagccggtggggggtggcctctagggccagcctgactgtgtgaatcccagcrctgcccctccagagctgtgccaccctgggcaagacactcagcttctctgggcccgttttgccagagcaggacagggtgacgactccggccctctggttcc

SEQ ID NO: 450890 - DNA, 201 bp, Homo sapiens
atttctcatggtcctggggtctgggaagttccatatgaaagtgctggcatctggcaagggccttcttgctgtgtcatcccatggtggaaggctagagggcragagagagcacaaaacaggccaaactccttgtgtaacaaacccactcccttgatcatgacattaagccattcactctgctgtcacggcccaactgcctct

SEQ ID NO: 450891 - DNA, 201 bp, Homo sapiens
gagaaggccaacctgatgatcctctttgacaagtacctgcccacgtgcctggacaagttgcgctttgggttcaagaagatcacgccagtgccggagatcayggtgatccaaacgatcctgtacctgctggagtgcctgctcacggagaagaccgtgccccccgactcccccagggagctgtacgagctgtacttcgtgttc

SEQ ID NO: 450892 - DNA, 201 bp, Homo sapiens
aaaaagcaggtgtgttactagtgtgtagttagttacgtttttaaaacttgtttaaaaagcaggtgcatgggcccgtgtatccttctgaaacctgccgggckagtacctggagcggcttcttctcggaggctgagccccgcaaaaccgtcgtttccacaggccaaataacagccacgcaccacagccccaggcacctctccc

SEQ ID NO: 450893 - DNA, 201 bp, Homo sapiens
ccaccacgcccggctaattttttgtatttttagtagagacggggtttcaccatgttagccagaatggtctcgatctcctgaccttgtgatcagcccacttyggcttcccaaagtgctgggattacaggcgtgagccaccacgcctggcctgtattttaaatttctaagcgtttagagattttcctgtttcctttctattat

SEQ ID NO: 450894 - DNA, 201 bp, Homo sapiens
gcctcccgagtatctgggactacaggtgcccgccaccacgcccggctaattttttgtatttttagtagagacggggtttcaccatgttagccagaatggtstcgatctcctgaccttgtgatcagcccacttcggcttcccaaagtgctgggattacaggcgtgagccaccacgcctggcctgtattttaaatttctaagc

SEQ ID NO: 450895 - DNA, 201 bp, Homo sapiens
gtggaccaggactgccactttaacctggggcagccgctgattctgcgggacgccgctagcaacctcatccacgtcaacttcagcaaagcggtgggtgccargagtggggaccgcgtcaaaggctccttgggagcggggggagggcctgccaaggttccctcagcacggatttatggaggtcgatgtttatatcacagttcg

SEQ ID NO: 450896 - DNA, 201 bp, Homo sapiens
ctagttcgccattaaggaggctggtttttgtttttgtttttttgagacagggtcccactctgtcacccaggctggagtgcagtggtacaatcttgctcacwgtagcctctgccttcctagtccaagtgatcatcccagctcagcctcctgagtagctgggactacaggcccatatcatcacgcccagctaaaatgtttttg

SEQ ID NO: 450897 - DNA, 201 bp, Homo sapiens
gttggattaaaaatgtcttcattgtaatcccagcactttgggaggccaaggtgggcagattgcctgagctcgagtttgagaccagcctgagcaacgtgggwgaaagcccatctctacaaaaatatagaaaattagccagctgtggctggctagtgtagtctcagctactcaggaggctgaggcaggagaattgcttgaacc

SEQ ID NO: 450898 - DNA, 201 bp, Homo sapiens
ggagatccacttgaagctgcaggtacgtggtgggtgggtgtggctgcgtccaggtgagcagggagagccatcccggccgcgaccatggaccagcccatcamacgcaaccatgggggatgctgtgggctagatcctctctggacatcagatccccatggaacagggaggtgcagggaggaggtttctgggggacaggagacc

SEQ ID NO: 450899 - DNA, 201 bp, Homo sapiens
tgcctcactcttcccctccctgagcttcggctctttggcctccagctccaatccgacctttcctcatggccgtttcctcatgtcgcattcctcaagccacratggagatgcagccattctctccctagggccccgggctggattttctggaaagatttggggtgaggggtgccccatgcccatccaaggggagctgtggag

SEQ ID NO: 450900 - DNA, 201 bp, Homo sapiens
caaggagaggcaagcagccaccgacaacatgtttgagcccctgaagcaaaccatcgagctgctcaagacctacggggaggagatgccagaggagatccacytgaagctgcaggtacgtggtgggtgggtgtggctgcgtccaggtgagcagggagagccatcccggccgcgaccatggaccagcccatcaaacgcaaccat

SEQ ID NO: 450901 - DNA, 201 bp, Homo sapiens
acaaagagcccgtgccttgggaattcccttcttctcttgccttttccaggataaattccttcttccagcgcatccagaccattgaggtaaaaacagaactyggtgcatcttgacctccacttcccagactgctcctaccctaggacacctgcagcgtccatccctaccccccttgccaataatcccccaggcagaaaataa

SEQ ID NO: 450902 - DNA, 201 bp, Homo sapiens
tggtggctcatgcctgtaatctcagcactttgggaggccgaggcaggtggatcacctgaggtcagaagtttgagaacagcctagccaacatgatgaaaccscgtctctacgaaaaatacgaaaattaactgggcgtggtggtgtgcacctgtaatcccagctactcgggaagctgaggtagaagaattgcttgaacctggg

SEQ ID NO: 450903 - DNA, 201 bp, Homo sapiens
ggcagagagtacccaagggatgcttcccatgggtaccagggtggccaacccagaggagttgggtcaggacaaggaggagatagaatgtgggccccaggctrccacagggatttagagagctgagctgcccacaggggacaccagcaaggggcagagaccccaggcagcaggtctcacctgcctctggtatgccaggctgcc

SEQ ID NO: 450904 - DNA, 201 bp, Homo sapiens
tcatcccatggtggaaggctagagggcgagagagagcacaaaacaggccaaactccttgtgtaacaaacccactcccttgatcatgacattaagccattcrctctgctgtcacggcccaactgcctctcagaccccacctcccaacactgttgcactgaggattcagtttccaacatatgctttttggggaacacattcaa

SEQ ID NO: 450905 - DNA, 201 bp, Homo sapiens
catagtacagcccctctgcaatttcctttacactgtgccataagtatggttggaaacactagtttttgttgttgttgctactgctgctattttgagacaawctcactctgtcacccaggctagagtgcagtggtgcaatcatagttcactgtagccttgaattcctggactcaagcaatcctcccacttcagccgcctcag

SEQ ID NO: 450906 - DNA, 201 bp, Homo sapiens
taggaagaaaagactccccacatgagcctcctacattgaaagtaagatgtcaagtgtggacgtgaataagcactgaggccatacaaatggggtccttttargatgttttgagggagaaaacaatggcaaacccatcagcattcgaggactttgagtacctctgtggcaaaacgtaaagtcaatcgaggtatattagtatgg

SEQ ID NO: 450907 - DNA, 201 bp, Homo sapiens
ccccaaggagtggaagaacaagacggccctgcagaagctgtgcatggtgcgctgcctgcggccagatcgcatgacctacgctatcaagtgagtgtcccgcygcgccgggggccccgcccccgaggcccaggcctgatggaagcttgaccgagcggctgtgctagactctctgtggacttgagttgatcccctgaacttttt

SEQ ID NO: 450908 - DNA, 201 bp, Homo sapiens
tgaaggaaggaggtgacgtttagcacagaaacgagcctggggtctgtcctcagagcacctgtggcctgtctggcttctccccttttcatttctccaagtarcctgaaagcagccaggtttcccaaaggacactcatgtccctaatagaattaccctctgatggccaggtgcagtggctgacacctgtaatcccagtacttt

SEQ ID NO: 450909 - DNA, 201 bp, Homo sapiens
tggccggttgcactagttgccggggtctgctgaaagctgtcaccagccggctccagcactcctttgtcaaagccaccatgtcagaggtggtgaggtctgascaacccagcctgcatgcttctgcatcattaattcatccacagccgatgaccatttggcctggccaagtaattagcaaaggtgatctagagtcattcctgc

SEQ ID NO: 450910 - DNA, 201 bp, Homo sapiens
ctcctttcaggaaagggcgagctgttgggaacaagttgtgggctcctaggtcacccctcgcttggcgctgtctcgctcagagggcaggggctgctggtcgragcgtgcgcaccgttccatcacgaggccctctgccatgaaccagcttccgtgttgtgcccgcagctacctggatgtcatcgagcaggccatctcggaagg

SEQ ID NO: 450911 - DNA, 201 bp, Homo sapiens
tgctggccaagaagagaacggaacttgttgccaaaatcgagaggctggagaacggcctgatgaagctgcagagcacggcttcccaggtaggagaggggggytggctgccagctcctgtgccgttccctggaggcctcgcaggagctgctactgtcacaggcatccacgggctggtcacactggggctcagcactgcctaaa

SEQ ID NO: 450912 - DNA, 201 bp, Homo sapiens
ggccggttgcactagttgccggggtctgctgaaagctgtcaccagccggctccagcactcctttgtcaaagccaccatgtcagaggtggtgaggtctgagsaacccagcctgcatgcttctgcatcattaattcatccacagccgatgaccatttggcctggccaagtaattagcaaaggtgatctagagtcattcctgcc

SEQ ID NO: 450913 - DNA, 201 bp, Homo sapiens
ggccagtgcagggaaaggaatagcagatccaggtgtccccagaaagtcccaagggcatggacaggcaatagccggctgattgctggttgaaccagaggagstgaggtgtgctgggtggcatgagtgtgagcagagccttctgaaagtcgacccagactctcagagcactcgggcgttcacctgcccagggacgagcagttc

SEQ ID NO: 450914 - DNA, 201 bp, Homo sapiens
ctgcttaggctgctccaaggaggagcacagtgcggggcccctcgggaaagaaagggtgcccgaggcaaacaaggccaatccctcgcagaaaggaaagcccrgtaaagactctgctctcctgccacaggccttgtcccgctgaagaaagtccaccaaaaaatggcccccctgcctgggccacagcccaccccgagcgccccg

SEQ ID NO: 450915 - DNA, 201 bp, Homo sapiens
ttcagcccccctctgacccaccatcagcaggaacagctggcaaaacacagctagctagggagcccggtcctcctctgctaacagctgtagtggctgctggktgcctccaggacggagggtgagggcctgcctggcacctggggctcgaggaccctccttggctgggatcccacttctgcatctgcctggggtctgtcctca

SEQ ID NO: 450916 - DNA, 201 bp, Homo sapiens
acaaaccaaagagaacttgaaaggcagcaccatctgtgatctctccagcctgctgtaattaagatggtccagtcctttgcccccacctcctgcaggagccrgcttttggacagctcttctgcttgttagcacactccacgccacctgcccctcttgcacctggatgaggattcccccagaatcctgccaccacagggtgtg

SEQ ID NO: 450917 - DNA, 201 bp, Homo sapiens
ccatggtctacgtcttcaactgctccgagcagatggactacaaggtacgcggccggggtccggaggagggacccagagtcttcttttatagaagcagatcytagcaccctgtcctccgaggccccacagtaaactccagatctctggatacctgtgaatggcactggagaggaggtgccagggcccccacttgctggtagc

SEQ ID NO: 450918 - DNA, 201 bp, Homo sapiens
acctcttgaagcttctgtcctacccagcttcagaagtcctgctgccatgaccccttctgcccctttctgatggactggcaccttctggggctagactctgsggctggaaggaacaataacttggaatgagggcccccatgtgtcccgtactgccctttgctgaccctggccccagagtggccggcaggtgagcagcgcagg

SEQ ID NO: 450919 - DNA, 201 bp, Homo sapiens
gtcctgtggaaatatctacaagggcctggcccagacgggagcctggggctgctttgacgagtttaatcgcatctcagtggaagtcttgtctgtgattgccrtgcaggtaaagtcccctgcctgcggcctcggggtcacgtcgggtaactggctcgtcagctttcctgtgacctcacacgccagatagaccctccttgcctc

SEQ ID NO: 450920 - DNA, 201 bp, Homo sapiens
acaacctgcaggagtttatgaagaatttcctgatatatgggtgtgcagtcactgcggaggacttggacacctggacagatgacaccatccccaagacaccrcccaccctggctcagttccaggagcaggtgcgtgcagacctcacccaccagcctccttgtctccagagtcttccaggagaggatcaccaggcttgcttta

SEQ ID NO: 450921 - DNA, 201 bp, Homo sapiens
cgagaggacaacacctaaattatgaaccaggcaacatacctcccctttttgcttctcccctgcccctttcagatggacctggaagataacacagacctcayagagatgagggaggaggtgtccagcctggtcatcaatgccatgaaggaggccgaggagtaccaggattcctttgagaggtactcctacctctggacggac

SEQ ID NO: 450922 - DNA, 201 bp, Homo sapiens
attggaagccctttcgccaacagagaaccacttctcaaggccgagaggacaacacctaaattatgaaccaggcaacatacctcccctttttgcttctcccytgcccctttcagatggacctggaagataacacagacctcatagagatgagggaggaggtgtccagcctggtcatcaatgccatgaaggaggccgaggagt

SEQ ID NO: 450923 - DNA, 201 bp, Homo sapiens
cgtggtgagagcttgggccaggcacagtggcacgtgcctgtggtcccagctacttgggaggctgaggcaggaggatcgcttgagcccaggagttctgggcygtagtgtgctatccactaagtttggcatcagtatggtgacctcccaggagtgggggaccaccaggttgcctaaagaggggtgatcggcccaggctggaaa

SEQ ID NO: 450924 - DNA, 201 bp, Homo sapiens
tgtaaaataatggacacgtatgatttgtcataacatatatttacagcgagatgagctgtcctgtccaggagggagggatgtgcgtgtgctcgtgtgtgtaygcgtgtgcttggatgcatatgtgcccgtgtgcgtatttgcatgtgtggtggggaggcatgcttgtacagaggtgacatgaggacacgagggaacagctaa

SEQ ID NO: 450925 - DNA, 201 bp, Homo sapiens
agcctcctgagtagctgggactacaggtgcatgccaccatgcctggctaatttttctttttttttatatatttttagtagagacggggtttcaccatgttrgccaggatggtctcaatctcccgaccttgtgatccacccgccttggcctcccaaagtgctgggattacaggtgtgagccaccgtgcccggcctcagtcct

SEQ ID NO: 450926 - DNA, 201 bp, Homo sapiens
tcacttgagcccaggaggtggaggctacagtgagctatgatggagccactgcactccagcctgggctataagagtgaaaccacatctcaaaaaaaaaaaaraaagaaaaaggaaagaaaggaagaatttaatgcttttcctcagtgtcttccttggtctcctctttaccaaaagagcttctagcttttccaccactttttc

SEQ ID NO: 450927 - DNA, 201 bp, Homo sapiens
attccttttctttttattcatcatgaacaggtgttagatcttgtcaaatttttttgtgtttactgatatgattgatttttgtttagtctgctaagataatkgattacactgactttttttttcttgaaacagagtttcgttctatcgcccaggcctggagtgcagtggtgtgattttggctcactgcaacctctgcctcct

SEQ ID NO: 450928 - DNA, 201 bp, Homo sapiens
ccagaatggtctcgatctcctgaccttgtgatcagcccacttcggcttcccaaagtgctgggattacaggcgtgagccaccacgcctggcctgtattttamatttctaagcgtttagagattttcctgtttcctttctattattgatttctagtttgattccattatggtcaaagaacacactgtatataactttcattat

SEQ ID NO: 450929 - DNA, 201 bp, Homo sapiens
gaagctgccttcgctgttggcgtgggtggtgacacactcatggcggcttcttcggggcatcaccgaggacccggtccaaactcccatcggacccatcccgyctgtcatttgcagaacaacctgacagagctgaagtcctttgggtccccgccggatgctgtggtcaacgtcaccgccgccgtcatgattctgaccgcacct

SEQ ID NO: 450930 - DNA, 201 bp, Homo sapiens
ttcagcctcctgagtagctgggattataggcacatgccatcacgcctggctgatttgtttgtatttttagtagagacagggtttcaccttggccaagctgrtctcaaactcctgacctcaggtgatccaccagccttggcctcccaaagtgctgggattacaggtgtgagccaccgcacctggcctccattgattaacttc

SEQ ID NO: 450931 - DNA, 201 bp, Homo sapiens
tgggcggcagtggcaaacagagcctctcccgcctggcagcgtacatcagcgggcttgacgtgtttcagatcaccctcaagaagggctacgggatccccgayctcaaggtgagagcttactgttcaataggctgcctttcagggtagggtcagggagtaaagaaaaacttcactcccttttccaaaatgaagccagcgagta

SEQ ID NO: 450932 - DNA, 201 bp, Homo sapiens
ctcctgcaggagccggcttttggacagctcttctgcttgttagcacactccacgccacctgcccctcttgcacctggatgaggattcccccagaatcctgscaccacagggtgtgagctgggactcagtggggaggacaagcagggcttcccgggctgcaggcctcaccacggctctgtcagtgtctggagagaacccagg

SEQ ID NO: 450933 - DNA, 201 bp, Homo sapiens
ccaggatgaactcacctcaagatccttagtatctgcaaagaccctatttccaaataaggtgacacgtgaaggttctgggcggatgtgaattttgcgggggsggccgcaattccgcccagtgcaggtgcgttctgctcttatgcggttttacagggaaggaaggtgaggcttggagaagtcacttcctcaagtctcagagct

SEQ ID NO: 450934 - DNA, 201 bp, Homo sapiens
tcttgcacctggatgaggattcccccagaatcctgccaccacagggtgtgagctgggactcagtggggaggacaagcagggcttcccgggctgcaggcctyaccacggctctgtcagtgtctggagagaacccaggtttggagcaggagggacaaaaaacctccccggatagaagggagtgctgtgtccattatgagaatg

SEQ ID NO: 450935 - DNA, 201 bp, Homo sapiens
cacacacacacactggcatccgggatttttgggacctccgtgatgagtggcttccctggccccaagtgaatgctgtgccaacagctgaacaggtcccctcrccccgggggagggggctgctcctcagggtcatctgtgtccagctctgggctcgccttcgtaacagctgacggtgctgatcatcctgtgtttggggcaggg

SEQ ID NO: 450936 - DNA, 201 bp, Homo sapiens
tcctgggttcaagagattctcctgcctcagcctcccaagtagctgggattacaggtgtgcaccaccacgcccagctaattttcatacttttagtagaggcrgggtttcaccatgttggccagtctggtctcgagctcctgacttcaactgacccgctcgcctcagcctcccaaagggctaggattacaggcgtgagccact

SEQ ID NO: 450937 - DNA, 201 bp, Homo sapiens
gagggacaaaaaacctccccggatagaagggagtgctgtgtccattatgagaatgcataaaggcgcatgcagactgccacagaggactgagtagaaagccrcacatcctccgtaaacggtctgcagcaggaggcacaggtcggggcacagagcaaggtgcacagcagagggcacaggtttgggaccagatggtagcgtatg

SEQ ID NO: 450938 - DNA, 201 bp, Homo sapiens
  misc_feature (1)...(201): n = A,T,C or G
tcccctgtctcattacccaactattgatcaagcaatagaaaccattttaacatcagcctgaggaaaatacaatgcagaggtaaatcagttgtaggaagaaraaaaaaaaatctcgagaaaacctgaggttcaaagagttgaacacagcacacacgtggcctgctctacgtggatggggtgggtggggtgnnnnnnnnnnnn

SEQ ID NO: 450939 - DNA, 201 bp, Homo sapiens
gacaaaaaacctccccggatagaagggagtgctgtgtccattatgagaatgcataaaggcgcatgcagactgccacagaggactgagtagaaagccacacrtcctccgtaaacggtctgcagcaggaggcacaggtcggggcacagagcaaggtgcacagcagagggcacaggtttgggaccagatggtagcgtatgaatc

SEQ ID NO: 450940 - DNA, 201 bp, Homo sapiens
cctccgcctcctgggttcaagcgattctcctgcctcagcctcctgagtagctgggactacaggtgcatgccaccatgcctggctaatttttcttttttttwatatatttttagtagagacggggtttcaccatgttggccaggatggtctcaatctcccgaccttgtgatccacccgccttggcctcccaaagtgctggga

SEQ ID NO: 450941 - DNA, 201 bp, Homo sapiens
cccagacctgctattcgctggagggggccctctgtaagcagcacgtaccctgctaggccctgcagccccatctatggtctcctaaggcttggccaccccawccataaactggagagagcggtagtgctcaccacgcacggttcttacgaagctttgactcaggctaagcctggcacaggcccaggagcccctcgcccagaa

SEQ ID NO: 450942 - DNA, 201 bp, Homo sapiens
gtaagcagcacgtaccctgctaggccctgcagccccatctatggtctcctaaggcttggccaccccaaccataaactggagagagcggtagtgctcaccaygcacggttcttacgaagctttgactcaggctaagcctggcacaggcccaggagcccctcgcccagaaggcagagggcggtgcacacccctataaaccctg

SEQ ID NO: 450943 - DNA, 201 bp, Homo sapiens
ttcgtgttcacctgcttctgggccttcggtggcgccatgttccaggaccaggtgatgcacctggggggcccggccacccacacagggtctctcagcatccygcttagctgggccctgatttttacttctgtgtctcaacagcttgtggattatcgagtggagttcagtaaatggtggatcaacgaattcaagactatcaag

SEQ ID NO: 450944 - DNA, 201 bp, Homo sapiens
gccccatttcctgaaggagcaggtctcagcacatggagccgcaccctcatcgtttctgagcaatttctgctctcttaccggtgggcacttgttcttgttcygtgcagggctgaaggaagccaacgacatcgtgctctatttgaagcccctacggatcctgctggaggagatggaacaagccgacttcacgatggtgcgcag

SEQ ID NO: 450945 - DNA, 201 bp, Homo sapiens
aggcttggccaccccaaccataaactggagagagcggtagtgctcaccacgcacggttcttacgaagctttgactcaggctaagcctggcacaggcccagragcccctcgcccagaaggcagagggcggtgcacacccctataaaccctgggtcctcctcctcactctcggcctccaaatcaatagcgacatggaccctgg

SEQ ID NO: 450946 - DNA, 201 bp, Homo sapiens
tgatcctctttgacaagtacctgcccacgtgcctggacaagttgcgctttgggttcaagaagatcacgccagtgccggagatcacggtgatccaaacgatyctgtacctgctggagtgcctgctcacggagaagaccgtgccccccgactcccccagggagctgtacgagctgtacttcgtgttcacctgcttctgggcct

SEQ ID NO: 450947 - DNA, 201 bp, Homo sapiens
ctctacaataaactggaggccctgaagaagaggtgcggctcacacctatccagaccaggggagtcagtggtgcagattccctaagtcttaagtctgacggracttaagtcttgtgcagcctgctggccaggacagggcaaaaccatgggtcctgggttaatcaattgcctttccctggggagcacacactccccggcctca

SEQ ID NO: 450948 - DNA, 201 bp, Homo sapiens
gcaacaaaagcttcaggagggagcattcacctcagtaggatggcacccagagtcaagccaaggacagaagagttcccattgcatttgggagctaggcgcayctccatcactcagggagaacagcttcagggcgtgttgagggcagagccagatggcaatgaggtatggaggaggcagcaggaggcgccagaagtgaggcga

SEQ ID NO: 450949 - DNA, 201 bp, Homo sapiens
gagcccctcgcccagaaggcagagggcggtgcacacccctataaaccctgggtcctcctcctcactctcggcctccaaatcaatagcgacatggaccctgsctcagagagagcaaggtccgggcaccctcttacagactgggagggggatgggaagaaagctgcactcagctgcccaggagggctgctgcctacgtggggc

SEQ ID NO: 450950 - DNA, 201 bp, Homo sapiens
gcggtgcacacccctataaaccctgggtcctcctcctcactctcggcctccaaatcaatagcgacatggaccctggctcagagagagcaaggtccgggcamcctcttacagactgggagggggatgggaagaaagctgcactcagctgcccaggagggctgctgcctacgtggggcctcggggttggaggactcccagggc

SEQ ID NO: 450951 - DNA, 201 bp, Homo sapiens
gctggttttctgagaaaaaccagcactgtgggggaggaagaagaatatgtgagggattcacaggtggaacaaaccaaaggcagaagggaacccaggacgcrtcatcccagacacccagcaacaaaagcttcaggagggagcattcacctcagtaggatggcacccagagtcaagccaaggacagaagagttcccattgcat

SEQ ID NO: 450952 - DNA, 201 bp, Homo sapiens
ctgggagggggatgggaagaaagctgcactcagctgcccaggagggctgctgcctacgtggggcctcggggttggaggactcccagggcctggatgtgacrtggtgagaaacggtgctggcaccggggtcgggggggggggggcacgtttgaagcctgctctgctactcattcactgagacctccagcaagtcactggacc

SEQ ID NO: 450953 - DNA, 201 bp, Homo sapiens
ttgacagagtaagggatttcctggggacatagaaatgacagctttgtgcaaatgtcctgcgtggacttaggcagaaatcccagtgaggtgttcctgaggcwagaggctccagaggagcgtcttggctggaggtcacagttcatccatccctccatccatccgcccacccacccactcacccatccattcaccctcccgccc

SEQ ID NO: 450954 - DNA, 201 bp, Homo sapiens
taacccagaacaatggaaacaatgtctccattctttttttttttttttttttttttttggagacagagttttgctcttgcccaggctggagtgcaatggcrcaatctcagctcattgcaacctccgcctcttgggttcaagcgatttcctgcctcagcctcccgagtagctggggttccagacacccaccaccaggcccag

SEQ ID NO: 450955 - DNA, 201 bp, Homo sapiens
cctcaccaggcaccagtgtcacagcagtgaaggggtgagagacagacctgggaataaatggtgtaaattcacagtgacacgaggcagggcggctgagcaarcggatgtttgcacaaagtgccagggaacaagggctggtgtgggaagggaggtcttggcctctgtggaggtgggaagtcttcccaggtgattgaagtttgg

SEQ ID NO: 450956 - DNA, 201 bp, Homo sapiens
gtcttgaattcctgacctcatgatcgaccaacctcggcctcccaaagtgctgggattacaggcgtgaaccactgtgcccagccctgcatcttttttgttgwgatggtttctaaatgattttgagtaccgccaggaggccaagatcaaaggctcccccaggctaccaacaacaaaggaacgtggcagtgtcgtgcccttgta

SEQ ID NO: 450957 - DNA, 201 bp, Homo sapiens
gagcactcaggccctgcatgccaggcttggcgcaggtggcgtgtctggatctccacaggaagctatgagtgaggggcaccttgtcgtgagactttgtcacrtgcgttgtggttttgcatgcgcctcaccttacattttagcaggatgggttcagagtaaaggcctgggaagcagaaatggttatgtagaattgtctagaag

SEQ ID NO: 450958 - DNA, 201 bp, Homo sapiens
gaggagctgctgcaggtccgccactccgtgttcatcgtcgggaatgcgggcagcggcaaatctcaggtgtgtcacccgctccagggaccttgcagggatcyggcatggtgggggagggctggggcgaagggtcggccctccatcactccccgccaccccggagaccccaacccagtacatcctgggagccctccggcctga

SEQ ID NO: 450959 - DNA, 201 bp, Homo sapiens
ccaagtagctgggattataggtgcccgccaccacgcctggctaatttttgtatttttagtagaggcaagggttcaccatcttagccaggctggtcttgaaytcctgacctcatgatcgaccaacctcggcctcccaaagtgctgggattacaggcgtgaaccactgtgcccagccctgcatcttttttgttgagatggttt

SEQ ID NO: 450960 - DNA, 201 bp, Homo sapiens
gcaaatctctgagtttcctaatggacaacatggttatagatgtaagttatcaacataaggtaatatatttatgtatatgtattcttatctgttagaatctrtagtttctagtttcttgatgaacaggctatcattttataaatagacttattaaaatatatcttatgcaatctacttgacctggttttaaacctggaagtc

SEQ ID NO: 450961 - DNA, 201 bp, Homo sapiens
ctgcattccagcctgggcgacaagagtgagactccacctcagaaaaaaaaaaaaaaaaaagtattttagggcagtttttggggggggcggtttccagtggrtggtgcaaatcagtggtgtggactttaatgatgagtcacatcatctagacagaccagcaggccacacccgggggatgggccattattggctgttcctatt

SEQ ID NO: 450962 - DNA, 201 bp, Homo sapiens
cagatcagtggcccccacaaaagggacttactcccacgtggccctccgtttgcagctatggacgatccacccagtattgaccacacactcctcgacgctcrggtccttccgtccccctaaagagagaattagatgctcctttcctgagagtgaccccattctggcccagttgagtgaaacatctcaatggtctttctgtgg

SEQ ID NO: 450963 - DNA, 201 bp, Homo sapiens
tcggcagatcagtggcccccacaaaagggacttactcccacgtggccctccgtttgcagctatggacgatccacccagtattgaccacacactcctcgacsctcgggtccttccgtccccctaaagagagaattagatgctcctttcctgagagtgaccccattctggcccagttgagtgaaacatctcaatggtctttct

SEQ ID NO: 450964 - DNA, 201 bp, Homo sapiens
gccggctttggtggggagggtcttgtttcttttcttttcttttcttttttcttttttttttttttttttttgtgagagggagtctcgctctgtcaccaggytagagtgctgtggcgcgatctcggctcactgcaacctccaactccctggttcaagggattctcctgcctctgcctcccgagtagctgggattacaggcat

SEQ ID NO: 450965 - DNA, 201 bp, Homo sapiens
agttcatcaccctgtacaccttgtgcaaggagctgctctcgaagcaggtgtgtgtgtcctggagctcacggcgggtgtgggtgggagtttgagatgcgggyagcagccagggttggcttccagacctgcctgctggccacaggaaggtgagctcacgtctgcccacctgtgcccactgcccgcaggatcattacgactggg

SEQ ID NO: 450966 - DNA, 201 bp, Homo sapiens
agggctgctgcctacgtggggcctcggggttggaggactcccagggcctggatgtgacatggtgagaaacggtgctggcaccggggtcggggggggggggscacgtttgaagcctgctctgctactcattcactgagacctccagcaagtcactggaccgctaagcctgcttcctcatgggcctccacctcagggcctggg

SEQ ID NO: 450967 - DNA, 201 bp, Homo sapiens
cctgctgtgatgggtcttggagacgtggccctggggaggcaatcagaacatgagaatagagccatcacgaaggagattcgtgcccttatagcaacagacaygagagagctcactctgcccctccgccatgtgaggtcacaacaagaaggcggccatcatcatctgcccaccaggaagagagccctcacctggaaccaaaca

SEQ ID NO: 450968 - DNA, 201 bp, Homo sapiens
acacaaaaggactcactatgttgtccaggttggtctcgaattcctggccccaagcaatccttctgtctcggccttacaaagtgctgggattacagatgtcrgccactatgccaagcccaagctaaactaaactaaacatttttcaagtcaaggtcagtaatttacttgtctttgaactctcagagcctggttcataaaatg

SEQ ID NO: 450969 - DNA, 201 bp, Homo sapiens
aaataagatactggattttaggccaatgttttaccaacagatttagacctatatgttgtgagtgaatattccaacacactagaacaaatattagataaaayagattcccaagattatacctaactcaactaggaatcttacttttatgtcactgatactctgaagatgcctcattcctatttctcagagatcaaattttta

SEQ ID NO: 450970 - DNA, 201 bp, Homo sapiens
acattcacttcttcgtttaatatcaaggttgttaacaatggtcttaggagatgcaaagacgaaaaactacttaccttaaaaatctgtattcttgaagatayatactccacttgaataagatactgctcaaggtttaggcttcctggagaactcagaggattttgtagttgtacttaatatactcaatagccaaatttccta

SEQ ID NO: 450971 - DNA, 201 bp, Homo sapiens
actatatatgcaagggaaataaattaagttgttatatagaaacccttgacactatatgcaatttcttatgtcccatattctgataatatctgtcctcttgrctcttacttcttggaatttctcataaacacggaagcttcatgacaaattgtgtaaatcatcatttcctcctttatgaagtatattgaagacaaaagggat

SEQ ID NO: 450972 - DNA, 201 bp, Homo sapiens
tgctcaacagatgcatatatcccattcatagtttaagaatgaaaagaatgaattttttcatttacatataatattttttcaaatggctatgttgttagcayatttttaagttgtttcataactattaataaatggaactgttacttattttggcctagggacactactaaaattactaagggaactgtcaaaggagaaagt

SEQ ID NO: 450973 - DNA, 201 bp, Homo sapiens
taggttgcagctaggtaatctctagttctctaaagaataatacccaaatgacaggatttatgtgttgatgcaataatagctcagtctgtttcatgacctasctagagtcagaattggagcggtggctatagcacaggggtggctttctcctctctgaaggaaaagtaaagaagtaagaagaaagaggttgaaagaacagcc

SEQ ID NO: 450974 - DNA, 201 bp, Homo sapiens
gttttcagtggctgtgattaaaaacatgtatggtgcaaaaatcagcatgaaacaaaacaaagatggcagtgatttgataagctatacagtgctcaacagaygcatatatcccattcatagtttaagaatgaaaagaatgaattttttcatttacatataatattttttcaaatggctatgttgttagcatatttttaagtt

SEQ ID NO: 450975 - DNA, 201 bp, Homo sapiens
aaataaattaagttgttatatagaaacccttgacactatatgcaatttcttatgtcccatattctgataatatctgtcctcttggctcttacttcttggamtttctcataaacacggaagcttcatgacaaattgtgtaaatcatcatttcctcctttatgaagtatattgaagacaaaagggattaaagtcatttcacat

SEQ ID NO: 450976 - DNA, 201 bp, Homo sapiens
ctccgaagtagctgggaccacaggtgcgcataaccatgcctggatattttaatttttgtacacacaaaaggactcactatgttgtccaggttggtctcgarttcctggccccaagcaatccttctgtctcggccttacaaagtgctgggattacagatgtcagccactatgccaagcccaagctaaactaaactaaacatt

SEQ ID NO: 450977 - DNA, 201 bp, Homo sapiens
ggtctcgaattcctggccccaagcaatccttctgtctcggccttacaaagtgctgggattacagatgtcagccactatgccaagcccaagctaaactaaastaaacatttttcaagtcaaggtcagtaatttacttgtctttgaactctcagagcctggttcataaaatgtaaaaactgaataaatgaacaaccttattta

SEQ ID NO: 450978 - DNA, 201 bp, Homo sapiens
caagctggagtatagtggtgtgaacaggcttactgtagcctcaatctcccaggcttaagtgatccttccacctcagcctccgaagtagctgggaccacagrtgcgcataaccatgcctggatattttaatttttgtacacacaaaaggactcactatgttgtccaggttggtctcgaattcctggccccaagcaatccttc

SEQ ID NO: 450979 - DNA, 201 bp, Homo sapiens
tggatagtcctgccttcctaatttgaatgctcttattctctacaggttagggtcaagttattcagtaaaacaggctatcaggaggttaagcccaaacagtraggaaacaaattttatgatgcttgtttgactaaatgcatgcagtttacctcaagattaagggatttaaaaaaggttagaaaacagtgtaaccctatctcc

SEQ ID NO: 450980 - DNA, 201 bp, Homo sapiens
caacctttaactttcctcagtggctcagatgaaatactgtgaaggtacagagtaatgctatatggcacaaagcaaaaagtgctgtgcaaaagaagacagtrtgctaaatattaggaaatttctgagttccagaaaatttggatttttaagaaactatgtcatgtcaagatgtgctttggagtaacaattttcccaatatta

SEQ ID NO: 450981 - DNA, 201 bp, Homo sapiens
accaatgatgaatgttattagccaggtagccaccattctagtcttagtaaaataagcatcccataaatgtttatataattttaggtgtcagaatacacatmaggacaatctggactaaggaaacctgaaatttaattctgaaattaattaagtaaccatgcctaaggtgagcttgttttcttaactgtaaaatggaagtgc

SEQ ID NO: 450982 - DNA, 201 bp, Homo sapiens
caactctgataacatagttccaaacacttaaaaggacctgatttatgtattaaataaaggttaatttgttcttgagaaattgacaaaagatttggtcaaaygtaaatgaatatgcaataagtcacataagtctgtgtgtatatacatatatgactttaattttataagtgcatgtgtatacgcacacctttagctcattta

SEQ ID NO: 450983 - DNA, 201 bp, Homo sapiens
gtttctcaaagtgattacttcttctaatcttcatattgatgactcactagtacatttactttgatgggtttaatcaactctgataacatagttccaaacamttaaaaggacctgatttatgtattaaataaaggttaatttgttcttgagaaattgacaaaagatttggtcaaacgtaaatgaatatgcaataagtcacat

SEQ ID NO: 450984 - DNA, 201 bp, Homo sapiens
gacaagtgagcttatgttccccaaacttatatgaccacctaatcctttttacatggaccttctcagtggagcagtgttccatagaacacacattcttactmtctatttttccaaaattcctactgtttgcttcaatacaaaatcataagacactgtggctagaaattttttttcatataaacataaacgtgtactgacaca

SEQ ID NO: 450985 - DNA, 201 bp, Homo sapiens
gagttcgagattagaaacctaatacttttgttatgaattatgctaaaacggtaaaaaaattttcaaaatatagttgtctcaaatacactcttctcagatarcagaaggccaggcaagggcactgacttgaagggaaacaaaccacagtaatatgactgcctgaaagtaactatggaattcagtttctcaaagtgattactt

SEQ ID NO: 450986 - DNA, 201 bp, Homo sapiens
aggagttcgagattagaaacctaatacttttgttatgaattatgctaaaacggtaaaaaaattttcaaaatatagttgtctcaaatacactcttctcagayaacagaaggccaggcaagggcactgacttgaagggaaacaaaccacagtaatatgactgcctgaaagtaactatggaattcagtttctcaaagtgattac

SEQ ID NO: 450987 - DNA, 201 bp, Homo sapiens
tcctagctgcttttcttataatctatataaattcattagaataactcactaataatctaccaaaaaaacaaaaagcaaaaacaaaaacagctgtgtggtgyttaatatagcttttgataaaaggagtattaagagacagaatgtcagttttgaaatataggagttcgagattagaaacctaatacttttgttatgaattat

SEQ ID NO: 450988 - DNA, 201 bp, Homo sapiens
atgttgcccaggctggtcttgaattcctgtgctcaaacgatctacctgctttagcctcccaaagtgctgggactacagtaggcatgagccactgcagccasccaaggacacatatatattttaagatatatcctttaaagttaagaaaaattgagaaaagaaaaaaaatcacaataatcagacaccacggttctcaaaccg

SEQ ID NO: 450989 - DNA, 201 bp, Homo sapiens
caatctgaccaagggctaatatccagaatctacagagaacttaaacaaatttacaaggaaaaaacaactccatcaaaaagtggacaaaggatatgaacagmcacttctcaaaagaggacatttatgcaggcaacagccatatgaaaaaatactcatcatcactggtcattagagaaatgcaaatcaaaaccacagtgagat

SEQ ID NO: 450990 - DNA, 201 bp, Homo sapiens
ctgctgctaaaacttaagcatgcaagtcaatcacctgggtgtttaaatagatttctgggccccattatgagaattctgattcaagaggtctacaatggggyctgatcatttacatttcttaccagttcctaagggatgcttgataccgtcttctccttttacctttaggtaatttatctatcatgaagagtttcttatttt

SEQ ID NO: 450991 - DNA, 201 bp, Homo sapiens
atttcttaagctcagcagttagttcatgaatactcattttgttattatttttaaaatatttccttaaaatgaacttaaatattttaaattaaaaaggaacrcataaaagtaattatataaataaaacaacaaaatctaaaattctcattgttatataacatataaattcatatgtattctcttatacattacaataaaata

SEQ ID NO: 450992 - DNA, 201 bp, Homo sapiens
gattctcctgcttcagcctccagattaactgggattacaggcacccaccaccatgcccagctaatttttatgtattttaggtagagacggcgtttcaccaygctggccaggctggtcacaaactcctaacctcaggtgatccacccgcctcggcctcccaaagtgctgagattacaggcatgagccactgcgcacagccag

SEQ ID NO: 450993 - DNA, 201 bp, Homo sapiens
tgtaaagttgatgaatgactgaggtagcactagagagtaatgagaaaaaaatataaatttaataaattctgctaggaacattggttaattatatagaaaayatgtagtaacattcttacatcatagacagtaatgaatgtacgcatgtatggatgtaataaacatttagaaataaagagaaacttcaaagctcttagaaga

SEQ ID NO: 450994 - DNA, 201 bp, Homo sapiens
ctttagtacttatgctctagatgatcttcctcacgaccccatgctcatctctctgacctcccctgcaactgcttttagtcctgctgactctgcttagaccwgcaattctccttgctgttcctaaaacgtaccaggcatgctggtgctgagggtctttgctctgttaactctgcctgcattgctttaccccgatcacctcta

SEQ ID NO: 450995 - DNA, 201 bp, Homo sapiens
ctgagctgctttgagttttctccatgtcggttcccacacacataaagaaagagctccatgtatgtgaaattctcccacaaattcttctggagttgatacascaagtttgaggctccctctctccagcatgctccgtactgatatccgtaactcacttattagtcgctgttgttggatctgagctttatcctctggtttttc

SEQ ID NO: 450996 - DNA, 201 bp, Homo sapiens
atggagaagaatgtttatgtcagagagatggaacataggcagaagctcaaggagatggaggacattgtaaatcttagaatatgggaggatgtgcataggcratatgcaaatactatgccacttttcatcagggatttgagcatccttgaattctgacatccttggaagtttctggaaccaattcccatgcataccgaggga

SEQ ID NO: 450997 - DNA, 201 bp, Homo sapiens
cattccgggaggatatgccatctaataagtcacatggaacccctgaaatttccattcacaaaaggatcacatggaacccctgaaacttccattcacaaaargattgctttgggtaggcagcacataataaggtgccttttctgcaacattattaaatagaaagtttcttcatggtgccaggaggttatattccttgtaaaa

SEQ ID NO: 450998 - DNA, 201 bp, Homo sapiens
aacatatactacaataagatatacaaggatgtccagcaggcctctgaccttccctttggagtgactgtactcctcaggtcttaagtcatttgggcctgtgscttatgttcccaggggaggacctgctactctggatgattaagtgtgaggggacagaaagaagcccaagctgcagtgagagccccaaggcagagaagatct

SEQ ID NO: 450999 - DNA, 201 bp, Homo sapiens
ttctccctacttaagattttgatctaattggtctggggtgtaagctggacgcaggggtttataaaaattcccaggagattctaaaatacagccaagattgrgaactactgtctagattatcttccttcttaccaattctttcttctgctgtatctaatctacaattttacccattcattgagactttaattttaacaattg

SEQ ID NO: 451000 - DNA, 201 bp, Homo sapiens
tatacatttccttgtagctagctagctgcatcccacaaataataaaatgtattttcactattatccagttggaaatattttcttatttcctttctgatttytttctatgacttattttttaagttagatacatatcatttatcattcaacttaaaaatattgtttctcctgaatatcttaatatatatttctaatataatt

SEQ ID NO: 451001 - DNA, 201 bp, Homo sapiens
tgttctcttctaacttagttattatacacaaggagaagataatcttgatctttctaaaagcatacatttgaaatctttaaataaaagcagtcccacacaamtgcatttctgatcatttaaaaatgtattttcttttttttcaatttaggattttctaaacagattaaagaaaagtaataactatagtaatattttctcaat

SEQ ID NO: 451002 - DNA, 201 bp, Homo sapiens
atattagcccgacgcttcaactgaatattagtccagcaagccctgagggaaatctaactgcagatctaaaagagtcagtaaaatgtatcacctgcttttcygcttccttgtgaaattgcttttaactagggagtgtatttgtatgaatatgtagggattcattcataaacagaaaaaataaaaataaaatggatgaaaatg

SEQ ID NO: 451003 - DNA, 201 bp, Homo sapiens
acatatactacaataagatatacaaggatgtccagcaggcctctgaccttccctttggagtgactgtactcctcaggtcttaagtcatttgggcctgtggsttatgttcccaggggaggacctgctactctggatgattaagtgtgaggggacagaaagaagcccaagctgcagtgagagccccaaggcagagaagatctg

SEQ ID NO: 451004 - DNA, 201 bp, Homo sapiens
catatgtatacgtgtaccatgttggtgtgctgcacccattaactcgtcatttaacattaggtatatctcctaatgctatccctcccccctccccccacccsacaacagtccccagtgtgtgatgttccccttcctgtgtcctttgtagggacatggatgaagctggaaaccatcattctcagcaaactatcgcaaggacaa

SEQ ID NO: 451005 - DNA, 201 bp, Homo sapiens
aatgtgcaggttagttacatatgtatacgtgtaccatgttggtgtgctgcacccattaactcgtcatttaacattaggtatatctcctaatgctatccctyccccctccccccaccccacaacagtccccagtgtgtgatgttccccttcctgtgtcctttgtagggacatggatgaagctggaaaccatcattctcagca

SEQ ID NO: 451006 - DNA, 201 bp, Homo sapiens
ataattccatcttgctaagagattacgtgagatggggtgatgtcagttattctaaattgataaggcacgttttatggttcagcatatggtctatgttggtraacatatcatgctcagtttatagatatattttgtaattgttgtttaatgttctataaataccaaggatacagtagttgatagaattatccagattactaa

SEQ ID NO: 451007 - DNA, 201 bp, Homo sapiens
aaagttgttttctgtatctgtgtcacttttctctggctctttccaaggtccctctttatttttagtttttagcaatttaaatatgacataactaagtatgtttttttttttaacatttgcttgcttcgtgtttactgaacttcttgaatctgtagatttattactttcaccatatatgggactctttggccttaatatttt

SEQ ID NO: 451008 - DNA, 201 bp, Homo sapiens
tgcagggggaagcacatcacatgctgttggctcattctggcagtccaacctggcattgtctttatacaatcctgcatgcaattttgtatttacaataatcraaagcatttcatcttctattccatagcaatagtttcagggaatctccctacactggaatgtagtggcatgatctcggctcactgcaacctctgcctccca

SEQ ID NO: 451009 - DNA, 201 bp, Homo sapiens
attccttgttggaaagggtgtgcaatggtcactggatgggagagaaatcacagtctctttgctgatgcaacttgtgggaaacctaatattttgggttgccrggaaacatctgttcacaaaaaggtgctgcatctctggactcattgcaaagctacctgagggattcctgggcaattgattcatggagaggtgatgtactgg

SEQ ID NO: 451010 - DNA, 201 bp, Homo sapiens
tttttgtctcctgtacctggcagagtgcctggcacagaaaatgcactcaataaatacagaactaaaaagacaccgaggcaggagaatcacttgaacccggkaggtggaagttgcagtgagccgagacggcgccattgtactgcagcctgggcaacaagagcgaaactctgtctggaaggaaaaaaaaaaaaaaaaaaaaag

SEQ ID NO: 451011 - DNA, 201 bp, Homo sapiens
tctgtaatcccaccactttgggaggctgaggcaggagatcacttgagcccagaagttccagaccagcctgggcaacatagtgataccctatctctataaatttttttttttaattttccaggtatgatggcatattcctgtggtaccagctacttaggagactgaggtgagagatacagcttgagccagggaggttgagcc

SEQ ID NO: 451012 - DNA, 201 bp, Homo sapiens
gttagattagatcagcggctcttaacttttgaggggtcgtgggccctagagtcctgggaacgctatgcagtttcctcagcaaaatgcttgcatccacaacmtgcaagactgcagcagctgctgggctggggctgcgagaccagcgaaaagccctgacttgggggggtctcgggagtctctgcagtctccccacccacaccc

SEQ ID NO: 451013 - DNA, 201 bp, Homo sapiens
tagctgggactacaggggcatgccaccacactaggctaatttaaaatattttttgtaaagatagaatgttgctatgttgtccagactggtctcaaactcctggggtcaagcaatcctcctgccttggccttccaaagtgctgtgattacaagcatgagccaccatgcccagccttgttttgttttttgagacagggtcttg

SEQ ID NO: 451014 - DNA, 201 bp, Homo sapiens
tccctggaagatgcagcatcaagccaccctcttaaaagcagagagcagccctcaccagacagccagtcctgctgatgtcttttttttttttttttgagackgagtctcgctctgtcgcccaggctatagtgcagtggcatgatctcggctcactgcaagctccgcctcccgggttcacaccattctcctgcctcagcctcc

SEQ ID NO: 451015 - DNA, 201 bp, Homo sapiens; identical to SEQ ID NO: 393659

SEQ ID NO: 451016 - DNA, 201 bp, Homo sapiens; identical to SEQ ID NO: 393661

SEQ ID NO: 451017 - DNA, 201 bp, Homo sapiens
tggggcaggagaatggcatgaacccgggaggcggagcttgcagtgagctgagatcacgccactgcactccagcctgggcaacagagcaagactccgtctcaaaaaaaaaaaaaagaaagaaaaaatgggcctggcacagtggcttacatctgtaatcccagcactttgggaggctaaggtgagcggatcacttgaaatcag

SEQ ID NO: 451018 - DNA, 201 bp, Homo sapiens
agaatcgcttgaacctgggaggcaaatgttgcagtgagccgagatcatgccactgtactccagcctcggcaatgaagcaagactctgtcttaataataataaaaaaaaaaaaaaaaaaaaaaaagagggaaggcgcagtggctcatgcctgtaatcccagcattttgggaggctgcagcgggtggatcacctaaggtcagg

SEQ ID NO: 451019 - DNA, 201 bp, Homo sapiens
ggctggtcttgaactcctgacctcaggtgatctgcctgccacagcctcccaaagttttgggattacaggcgtgagccatggcgtccggccttcttttttcttttttttttttttttgagacaaagtctcactttgtcatccagggtggagtgcagtgtcatgatcacagctcactgcagctacaacctcccaggcccaagt

SEQ ID NO: 451020 - DNA, 201 bp, Homo sapiens
ccagcatctgaacccaggcagtccagggtcactaagtttattggtggcatagtcttctataagtgtttctgatgcttttctgagacctttctatcaatcargctacagatccagataggacacatgatgctgactcacctgcaatggctgatattcttaacaagttttaatgaaggacagtgaggatgaatgcaaatgcct

SEQ ID NO: 451021 - DNA, 201 bp, Homo sapiens
attctatattttaattaggccctgacatctggtatggactgtgagtgcttatttgcacacctgcaggctattggctgtaaaggcgcccagcctatgtggcrattaccagtgcagatggagattgcagtcatttaatttaatagagcaattgtgtgggccttgtagaatgtaccacaattgtgaaatgtgggccccgtccca

SEQ ID NO: 451022 - DNA, 201 bp, Homo sapiens
gtcccaattccaggtatcctgtgctgttccttatgtaacacgcacttcactctcctgtcaatctttataataaacacagtcagaagacaggattggcaacmaagctgtctttgaaagctttcaggtgagaaggaagagagctgggtctctaggaaagaattaaatttgtaaagacaatggaatttgccaaggatttaaaaa

SEQ ID NO: 451023 - DNA, 201 bp, Homo sapiens
gaatttgccaaggatttaaaaaatcactaccctcctctgttaaacaaatacccctatatggctccaactcatctatggaaactctgtctttcagtgtgcawcaaatggtatacatggggcactgagaaggaagcagatgtaacaggagatggtcagcgtggccttgtgtgtacttgtgtttccatgacatggggaagaccc

SEQ ID NO: 451024 - DNA, 201 bp, Homo sapiens
ctgagaaatactgagagacagaaatgttcgggagagaaagagaaaaaagtttacttccaataaatgcaagggagtcagacttcagaacaaacacaaaacayccatctttaagggaatatatggaaaaattaccaaggataccaagtttacatttgtctactcatagtggaaaaacagctttctcatgcaattgccatattc

SEQ ID NO: 451025 - DNA, 201 bp, Homo sapiens
atattttcttttcttgcttacagaacttgcaatttattctgatcaacaatttgcccagctaaagtactacatctgccccctcttcctgtggctgtaggggsacagcaaaggtcactggtctaacctccttaaagggactccgctaacaggtatatcttttgcgttgcttccccgtttctttccttttcctatgtggaacat

SEQ ID NO: 451026 - DNA, 201 bp, Homo sapiens
tcagtgttcacagaggaccctggcagctggaatgttggatgaatacatcgttagtggattcctgggccacagatatcaaggaggaggccaaagttgcatcrgtgtatgtgaaactccacaaagagctcctgaaaataactctaggagattttgagggctggcaaggattctacagcatgtcaaagggaccaagagccagca

SEQ ID NO: 451027 - DNA, 201 bp, Homo sapiens
cttctttgctctattatgagtttttgaagaaatactgaatgagtaggagtttggacaacttcttcctttcactttgtgtcatcaaatctcttcaggaaggrtattggaggactggagcagtctttcttccatccttggagctgtggtctccactgtgggagaaaataaaatgcttttaaatgctgccacctcactgggatt

SEQ ID NO: 451028 - DNA, 201 bp, Homo sapiens
attctacaactagatattaggggttcaaattcagaaagccactgcctcatgcccatgaaagactgtcttaatgtaaccttactaccagtcaaactcttgcraagccattaggagcaggtacctgttcacttgccagagagtatcccccatgcagaaccaaattcaccagcagaggattagcctaggtacagcatggctgat

SEQ ID NO: 451029 - DNA, 201 bp, Homo sapiens
gaggctgaggctgacagtgtaaataataaattaaacctctcttgagctttgttttttcaatacttcactgataaaatatgacttttaaataaaatttggarcttaaataccaagcttctagagagttgaactagaacagatttctcaatcttggtattattaacattttggactggttaattctttgttgtgggagcttgc

SEQ ID NO: 451030 - DNA, 201 bp, Homo sapiens
attcttggaaaattcatttcttacagcctaattatatggatttaagggttcaggatctctcctcaggttttcatcatgtattttttaaagagtatagcagkataacatcacatatgggtggattaataggctcttgagaaactgaaggttgaaacccacatgctgactttttacagttaaatcatactcctctcgtgctaa

SEQ ID NO: 451031 - DNA, 201 bp, Homo sapiens
agaagtagctatttggccaaatagatctgcttatctctatgtatgggtgcaagggtaggacatttgacttagttttgtttttgttttgtatttttgcactsaatctgctctggaacacaggaggacatcagggcacagtaactccagttccagtcaggaactggagtcagaaatttgatttctgcctccccatgaatccta

SEQ ID NO: 451032 - DNA, 201 bp, Homo sapiens
gtaaagcagatggctgtccccagtgtgggtgggctttatacaatctgttgaggaccaaaagagaacacaaaagtggaggaagggagaactcactctctctkcctgatgccttgagctaggccatgggtctcctgcccttggactaggatgtacattattggttctgctggttctgaggccttagggcttggaaccactggc

SEQ ID NO: 451033 - DNA, 201 bp, Homo sapiens
ggggagtgtaattggactggcaactctctttacatggaatccctctgtgatggttaattttatgtatcaatttgactagactacaggatgcccaggtatcyggttaaacatgatttctgggtgtatctgtgagagtgtttccagaagagattaacatttgaactggtggacagagtaaagcagatggctgtccccagtgtg

SEQ ID NO: 451034 - DNA, 201 bp, Homo sapiens
tgaaggggagagagagaaataagaatgacacaaaaaattttgaccaacaactgaaaggatgaagttgccatggccatttggggacaaattatgcttactcyctctgcctcaattttctcatctgccaagtgggggaaaataaccaaaatgatatggtgattatgacagataaatgagttaatacaagcaaaatgcttagaa

SEQ ID NO: 451035 - DNA, 201 bp, Homo sapiens
catctgccaagtgggggaaaataaccaaaatgatatggtgattatgacagataaatgagttaatacaagcaaaatgcttagaattgtgtctggtgcataayagttagctactgttacatcctcctcctcttctccctgtgtattccttcagagaactaaacacagtctgatatgatcttgtttattttttctttatatatc

SEQ ID NO: 451036 - DNA, 201 bp, Homo sapiens
agaagaaaacataggaaaagcacttcaggacattagtcaaggcaacaattttatggttaagatttcaaaagcacaaccaacaaaagcaaaaatagataatyttattgctgtatcttcagatttactaactctttcctctgtcatttccattctcctgttaaatctgtccagtgaatttttaaattttggatattttatttg

SEQ ID NO: 451037 - DNA, 201 bp, Homo sapiens
atgagttaatacaagcaaaatgcttagaattgtgtctggtgcataatagttagctactgttacatcctcctcctcttctccctgtgtattccttcagagarctaaacacagtctgatatgatcttgtttattttttctttatatatctcctccaccaaaatgtaagcttcatgaaggcaatggtctcacctgtcaagttca

SEQ ID NO: 451038 - DNA, 201 bp, Homo sapiens
aactactagaagaaaacataggaaaagcacttcaggacattagtcaaggcaacaattttatggttaagatttcaaaagcacaaccaacaaaagcaaaaatwgataatcttattgctgtatcttcagatttactaactctttcctctgtcatttccattctcctgttaaatctgtccagtgaatttttaaattttggatatt

SEQ ID NO: 451039 - DNA, 201 bp, Homo sapiens
cagtatgctctgtatgaagctgaaatcaatgcacctggttgttctgtaattagcagagctgctgccctgcctccactctctgcttccactgtcaaggtgtygctcatctctgggctggctttccatcccaagatggtttggcttgctgtgcatggctggagggaagcaggagagggcaaggacccaattagattgaaatgg

SEQ ID NO: 451040 - DNA, 201 bp, Homo sapiens
gcacctggttgttctgtaattagcagagctgctgccctgcctccactctctgcttccactgtcaaggtgttgctcatctctgggctggctttccatcccargatggtttggcttgctgtgcatggctggagggaagcaggagagggcaaggacccaattagattgaaatggaatcgagtctttggaggccccttgtcaggg

SEQ ID NO: 451041 - DNA, 201 bp, Homo sapiens
acttgcaatttattctgatcaacaatttgcccagctaaagtactacatctgccccctcttcctgtggctgtaggggcacagcaaaggtcactggtctaacytccttaaagggactccgctaacaggtatatcttttgcgttgcttccccgtttctttccttttcctatgtggaacatgactgaggtggatgtagctccaat

SEQ ID NO: 451042 - DNA, 201 bp, Homo sapiens
aataagacattattatatgctatgtattcatgagatatagtataattttaactgccattagatattctattttataaatatgttacaatttttttattctrctctttgatggacatttgtttccatttttgacatttactgaatgatgacgtaattaatatttctgaagatctccttgtgcacgtgtgcaaattgcttcaa

SEQ ID NO: 451043 - DNA, 201 bp, Homo sapiens
caacctccctggacaccagggaacgtcagtggatctgcctcagtggcctcaatcagacgggcatataaaaagcaatgcccagtggtttttctaaacatccwtggtctcttgccaacaattgaggtttaatgaagaggggaaaactagacctcagagagtaagtcttctgaaggtggatatttcctggaggcatgtgcaact

SEQ ID NO: 451044 - DNA, 201 bp, Homo sapiens
taagacaggtctcagttaatctggaaagtttattttgccaaggttgaggacccatccgtgacacagcctcagaaagtcctgatgacatgtgcccaaggtgrtcagggcacagcttggttttatacatttttgggagagctgagacatcaatcaatatatgtaagaagtaccttagttccttccagaaaggtgaggacaatt

SEQ ID NO: 451045 - DNA, 201 bp, Homo sapiens
gtttactcctttgacaatttcatcattttcatggcaacttcccctccattccttcatttgttcaaaatggcagcccttaagatataaacatgctattactyttatgcattgaatttagataaatataacacatgtaacacatttactatgaaatcaaaggaaaaagcctccctagaatgtagtgcagtaaaatctgtagtc

SEQ ID NO: 451046 - DNA, 201 bp, Homo sapiens
gacctcagccacttgtcctgaacattatgtaagtggatcaattcaaagccactggaaagtgcctgccccagcctaacgctgaataattctcctcatatatmacccccaccagggctccactctgagtgaggctgtgcagcatgtggttaaaagcatggcttctgtatgcagggatgtgagagagatagcatctagtgggta

SEQ ID NO: 451047 - DNA, 201 bp, Homo sapiens
tttcagattcctgcagctgtttctggaagcctggcaactgtgccacccagctgtaagccacatcaacacctgcaaatagcgaaacccctctgcgctccccsccacaaccccggccgctttttttttttttttttttttctctctcaatgctcagctggacccagatacctcttcatcctgggagccatcagtccggctaag

SEQ ID NO: 451048 - DNA, 201 bp, Homo sapiens
ttaagaatttccaaggaaccccaatattcttcagatcacagtaggaatgacacattctacatgtgtgttgctcagcaaagcaaatagagaataataactartgtgagattgtaattatgtatatcagtgatgttgctttgtaaatcaaagctaattgattctgagtacttgctacttctttaaccctcctgccagctcagg

SEQ ID NO: 451049 - DNA, 201 bp, Homo sapiens
tgtaggaacatgtgagagcagggtagcccattgtagttggtcagttctagaaacttagaagcataaagagatttctctgctatcgctgcattttagggaayacagcattcagattaaattcaacattatcacatttaaaaagaattcatctagaatattatatattgtatgatcaaatagttctgtttttatcatatggat

SEQ ID NO: 451050 - DNA, 201 bp, Homo sapiens
cattaatgagaagcatctcaagtaaaagaccaggggacttggggctttttaaaggcaggtacaaaaaggagtcatattcactgagaaaggtagaagtcagycatatgtaggaacatgtgagagcagggtagcccattgtagttggtcagttctagaaacttagaagcataaagagatttctctgctatcgctgcattttag

SEQ ID NO: 451051 - DNA, 201 bp, Homo sapiens
aatcaggcagatcacagatgttgttttctgtctagatgttactataattactcttaataacacccactgagtttgtcatttcatccattgatgactttttwaaaaattcttggaaaattcatttcttacagcctaattatatggatttaagggttcaggatctctcctcaggttttcatcatgtattttttaaagagtata

SEQ ID NO: 451052 - DNA, 201 bp, Homo sapiens
ataaaacttgcatatgaattacagttctgcttcctataattgtgtaaccttggcaagttacttcgcctgtcaaatgctcacattaaaagagtgtgtgtgtktgtgtgtgtgtgtgtgtgtgtgtaattgccagtacaattcaataattggcccacagaaggcacttaataattgctagttactactaagagaaccagatga

SEQ ID NO: 451053 - DNA, 201 bp, Homo sapiens
aatacccaaattggtacctagcctgctcaacacggcaagtttagtgagcacatgcttggatattgtactagaatcaaatttaggcactcatttctaaatacctattttcaatgcctgtacttaacttgctacaacccaatagtaaacagtttgtggactgacactagtttatgcactaccctttcaatagcattggaactc

SEQ ID NO: 451054 - DNA, 201 bp, Homo sapiens
tatttctgttgggtatgtatttaggagtgaagttgctgagctttaactgatactgctaaacagttttctaaattaattattccaatttacattcccaccayggttgttggagagtatcagttgttttactcaaaataacccttaatatttgaagttattttaatactagtaaatgtaggcatatacagatttttgtacttt

SEQ ID NO: 451055 - DNA, 201 bp, Homo sapiens
ggatctgcctcagtggcctcaatcagacgggcatataaaaagcaatgcccagtggtttttctaaacatccatggtctcttgccaacaattgaggtttaatraagaggggaaaactagacctcagagagtaagtcttctgaaggtggatatttcctggaggcatgtgcaactcccaacccccatcaggcattccagccgggg

SEQ ID NO: 451056 - DNA, 201 bp, Homo sapiens
cagtccacaaatctttgacccattgagtcttttggtgccctgaggcctatgtgtcactgtgacactaaggccagtctctacttttctctaatttgaaatgytttctaatttaagaagtgaaaaaatcacccaggtgaaatctgaatagtctgttgtttagttcattgtcctgtatcgatattaatttcttagtttttgacc

SEQ ID NO: 451057 - DNA, 201 bp, Homo sapiens
caactgtctaaggtataactttgagcacagttcccaaatatagtactttatgttctctccggtaatactaataactcacttctggagtcgcagaaagaacwtggatttggattcaggctacctcaatgcacctctgacatttactaggttgtggtgttggataaagcatttaacttctgagggtgtctatttccttgtctg

SEQ ID NO: 451058 - DNA, 201 bp, Homo sapiens
ttcattgtcctgtatcgatattaatttcttagtttttgaccaatgtatcttggctatgtgagattaggagaatctcaggtaaaggaactctctgtattatygttgcaatttttctgtaaacctgaaattacttcaaaataaaaaggttatttttaaacaaactaaccagggcaatcacagatgactcaggctacggaggta

SEQ ID NO: 451059 - DNA, 201 bp, Homo sapiens
attcctccctactttgggactagaagtttgaaacacggagaccttttgagaactctgttattattaatctaataaaagaggaaaaataataaagttgagarggttctgctattttttggaagtgtgagaatgtccagcccaaagcacgtatgaaaaagtaactcagacaaaacagaggaatgaaaagttctccatttctga

SEQ ID NO: 451060 - DNA, 201 bp, Homo sapiens
gagaactctgttattattaatctaataaaagaggaaaaataataaagttgagaaggttctgctattttttggaagtgtgagaatgtccagcccaaagcacstatgaaaaagtaactcagacaaaacagaggaatgaaaagttctccatttctgaaaaaagaagcagctacttagcaattatgtgctgtgagatcacttacc

SEQ ID NO: 451061 - DNA, 201 bp, Homo sapiens
atctatttatgctctttcagactttttgaagtaggcatttaatgttatgaactttccttttagcactgcttttgctgtatccgagaggttttgataggttktgtcactattattgttcagttcaaataattttttaatttccatcttaatttcgttgttgacccaatgatcattcaggagcagattgttaatttccatgta

SEQ ID NO: 451062 - DNA, 201 bp, Homo sapiens
ttgttccagttcttagggagaatgctttcaacttttttccatttagtataatgttggctgtgggtttgtcatagatagcttttattaccttaaggtatgtsccttctatgctgattttgctgagggttttaatcataaagagatgctggattttttcaggtgcttttttctgcatctattgagatgatcatgtgatttcta

SEQ ID NO: 451063 - DNA, 201 bp, Homo sapiens
ctcaggagatctgatcctttaaaagtgtgtggcacctctcccttcactgtctcttctgccaccatgtgaagaaggtgcttgcttccccttcaccttctgcyatgattgtaagtttcttgaggcctcccagtcatgcttcctgttaagcctgcagaactgtgagtcaattaaacctctttgcttcataaattacccagtctc

SEQ ID NO: 451064 - DNA, 201 bp, Homo sapiens
gattggatcatggggcggatatttcccttgctgttcttgtaaaagtgagtgagttctcaggagatctgatcctttaaaagtgtgtggcacctctcccttcrctgtctcttctgccaccatgtgaagaaggtgcttgcttccccttcaccttctgccatgattgtaagtttcttgaggcctcccagtcatgcttcctgttaa

SEQ ID NO: 451065 - DNA, 201 bp, Homo sapiens
gctgatttcctgaaggtaaaattgccagtttgaaggtgttggcttattttaaaaggtgataataaacacaatgtgatctcatactgctctgtggcattattatgattattattgctatactgcttggatgttctgattacttgttgacaaatgctgggctatttgaccccttgaacaaaggcctaagaccagagaagcaaa

SEQ ID NO: 451066 - DNA, 201 bp, Homo sapiens
ctgatttcctgaaggtaaaattgccagtttgaaggtgttggcttattttaaaaggtgataataaacacaatgtgatctcatactgctctgtggcattattatgattattattgctatactgcttggatgttctgattacttgttgacaaatgctgggctatttgaccccttgaacaaaggcctaagaccagagaagcaaac

SEQ ID NO: 451067 - DNA, 201 bp, Homo sapiens
ccatctgtgggcatggagtcagaaaagagagaggttagcagtctccccaagtggcctggctgcctacatctgtttatcacagagactggaagacagagtaygggaaagaggctggagcttttcaggatacaatgatcttgacccctagttccctccatgtcaatgttttgatcagtcagataagcatcttctcttctcctg

SEQ ID NO: 451068 - DNA, 201 bp, Homo sapiens
tgaaaaattccataggaaagagaactattttagccaaggtgtgcgagagaaataccgccactttcaagcactgttttcttctactggagtctgctcaatarggacgtcagctttgctggggtaagtaaaagcatcctggccttaacctatataatgggggagtaattgcctcttagaatcatcaagtctaagttctgaatt

SEQ ID NO: 451069 - DNA, 201 bp, Homo sapiens
gatttcctgaaggtaaaattgccagtttgaaggtgttggcttattttaaaaggtgataataaacacaatgtgatctcatactgctctgtggcattattatgattattattgctatactgcttggatgttctgattacttgttgacaaatgctgggctatttgaccccttgaacaaaggcctaagaccagagaagcaaactg

SEQ ID NO: 451070 - DNA, 201 bp, Homo sapiens
tgacatcacatattggtaggaccatgatgcccacctgagctgcaaaatcagcaggtttttattaaggatttcaaaaggggagggggtgtaggaacagggtktaggtcacaaagatcacatgcttcaaatggcaaaaaggagaacaaagatcacgtgcttctgaggaaacaggaccagggcaaaaggcagaacttctgataa

SEQ ID NO: 451071 - DNA, 201 bp, Homo sapiens
gtttgccatacctatcaacccatcacctaggtattaagtctagcatgtataagctattttttctaatgtttgccctcaccccaccccactccctgacaggmcccagtgtgtgttcccctccctgtgtccatgtgttctcattgttcagctcccacttataagtatgaacatgtgttgtttggttttctgttactgtgttag

SEQ ID NO: 451072 - DNA, 201 bp, Homo sapiens
tctttgcaccttttcccaaaacttagttcactatagatgtacggatttaactctgggctctctattctgctctgctgatctatgtgtctgtttttatgccrgtaccatgctgttttggttactatagcttagtagtataaagtcaggtaatgtgattcttctaattctgttgtttttgtttggaaaagctttgattcttct

SEQ ID NO: 451073 - DNA, 201 bp, Homo sapiens
atttttttatatttctgtaaagaatatcattgttattttgataggggttccactgaatgtgtagattgccttgggtagtatgggcattttaacagtattgwttcttccaattcatgaacatggaatatctttgctttttttgtatcttatttaatttcttacatcagctgttttatagtttttactataaagatcttccac

SEQ ID NO: 451074 - DNA, 201 bp, Homo sapiens
gctgttttatagtttttactataaagatcttccacttctttcattacattaattcctagatattttattttatttctagctattataaatggaattacttkttacatttctttttcagattgttcactgttggtatataaaaatgctactgattattgtatgttgattttgtatcctgcatctttactgaataattttctg

SEQ ID NO: 451075 - DNA, 201 bp, Homo sapiens
aacaaagataatttgacttcttcctttccaatttggatgcgcttggtttctttcccttgtctgattgctctagctaggtgaaagtagacatccttgtcttsttacagatcttagagtgaagactttcagtttctctcaattcaatatgatgcctgctatgggtctgccatacatggcttttattatgttgaggtatgttcc

SEQ ID NO: 451076 - DNA, 201 bp, Homo sapiens
atatagttgctcttagtacctgctaatgatactttgaatttctgtggtatcagttgtaaggtctactttttcatctctgattttatttgagtcttccctctttttttttcattaatctcactaaagattggtcaatgttgtttatttttacaaaaaaaatcaactttttgttttgttgatttttgtactgttttcttcatt

SEQ ID NO: 451077 - DNA, 201 bp, Homo sapiens
taaacttgcaaagctgctttcagagcaaaaggggagctggtactgatgcaaaaagtgagagtaattcgttgtgcatgcatccataggtaacctccagggcmcttgctgtatctgtgggccggacacagtggagccacgtgcagtgggtatctgagcccagctgttgtagcaggcaaggcaatcagggaagatgcagccaag

SEQ ID NO: 451078 - DNA, 201 bp, Homo sapiens
attaaaaggaaacttttctctgcaatttgctgattagaatcaaatgccctcctggaggaatgagatcctttggaagggcgcgaccagcttgtaaatgtgtrgcaagaagacaatactaccgctgggggtcctagggatgtgatgggccttgtaccctgaatgcatctgggaaagaactcatttagaaggcactatttttga

SEQ ID NO: 451079 - DNA, 201 bp, Homo sapiens
tacatcaattgttaaagttcttagagttggtgtggtgaggtcactaaatgtggtgacagtaaagcctggcctcaacgtggggtctgaactcagggggcagratgacccccagtcacacctgtagtacaagtgaggactgtgtttattttctagggctgccatataaattaccacaaacttgttggctaaaacaacagaaat

SEQ ID NO: 451080 - DNA, 201 bp, Homo sapiens
tcagtgctagaaaacaaaggggccaggtacagaaaccttaggacagagatgggaaatgacttacccaagagagtacagtagacaccaatctgagtcaagasttctctctactccagtcttcaatggttttacccatatgcatgataatgtgggaatttcctataatgttgggaagatattcttgtctaggtagctgtgaaa

SEQ ID NO: 451081 - DNA, 201 bp, Homo sapiens
tgagatatcctgtttgagactcagctcaagatattctttttcttttgattaaggattttttttgaaaagatggtttgtaaaaagataaatgaaatagcttrtgtaccataccaatgctgaaatggaaggataatttccatttatcatggacctccaaccttacagtcagtgagaagcatttatctttttacacattcttcc

SEQ ID NO: 451082 - DNA, 201 bp, Homo sapiens
tatgtaccataccaatgctgaaatggaaggataatttccatttatcatggacctccaaccttacagtcagtgagaagcatttatctttttacacattcttycacttattcattcaacaaatattaagggtactctgccaggcagtgtgcatagtgctggggagacaataaataagtgagacaaatgcatttcttgcatttg

SEQ ID NO: 451083 - DNA, 201 bp, Homo sapiens
gaggaaacaggggatgcaggacagacaaggcagtagacattcaccatcctgctcaaaatgcagcaattcattaactgctcccctgatccttacaagcagcracattgtctgtctaattcattactgtgttcctcatgctgaggacagttcctaggacatattagctcctcaaaaactgtcaattatatgtgtgggatacat

SEQ ID NO: 451084 - DNA, 201 bp, Homo sapiens
tatttattggctaattgttccgtcccagtccaaagaactctgacgaacttcaatcctgttgagtttacttattcctttgtttattcatctgtttattcaamatccaagtttgtgctatgtgccgggacagtggcggatcttgaaccagacgtagtccctgttcacgaggagcactctagagggttactagggtttggtttg

SEQ ID NO: 451085 - DNA, 201 bp, Homo sapiens
ctgagtcagagaattgcttgaacctaggaggcaaaggttgcagtgagccgaaaccacaccactgcactccagcctgggccacagagtgagacactgtctcaaaaataaataaataaataaataaataaataaataaataaataaataaataaagcaagctaaattcttctcaaaatggtcacaaaaatttgtttatgagag

SEQ ID NO: 451086 - DNA, 201 bp, Homo sapiens
tgagtcagagaattgcttgaacctaggaggcaaaggttgcagtgagccgaaaccacaccactgcactccagcctgggccacagagtgagacactgtctcaaaaataaataaataaataaataaataaataaataaataaataaataaataaagcaagctaaattcttctcaaaatggtcacaaaaatttgtttatgagagt

SEQ ID NO: 451087 - DNA, 201 bp, Homo sapiens
ctaaagattggtcaatgttgtttatttttacaaaaaaaatcaactttttgttttgttgatttttgtactgttttcttcattttgaattcatttatttctgmtctgatccttattatttcttttcttctactaattttgcatttggtttgctcctgcttttgtttctttggtctttaagatatattgttagattgttgattt

SEQ ID NO: 451088 - DNA, 201 bp, Homo sapiens
gagtcagagaattgcttgaacctaggaggcaaaggttgcagtgagccgaaaccacaccactgcactccagcctgggccacagagtgagacactgtctcaaaaataaataaataaataaataaataaataaataaataaataaataaataaagcaagctaaattcttctcaaaatggtcacaaaaatttgtttatgagagtg

SEQ ID NO: 451089 - DNA, 201 bp, Homo sapiens
tcagagaattgcttgaacctaggaggcaaaggttgcagtgagccgaaaccacaccactgcactccagcctgggccacagagtgagacactgtctcaaaaataaataaataaataaataaataaataaataaataaataaataaataaagcaagctaaattcttctcaaaatggtcacaaaaatttgtttatgagagtggga

SEQ ID NO: 451090 - DNA, 201 bp, Homo sapiens
tttgcatttggtttgctcctgcttttgtttctttggtctttaagatatattgttagattgttgatttgaagtctttcttcttttttaatgtaggaacttayagccataaaatgaaggtgatttttctctgctagtatgatttaatttcttgctttttattctttctgtatccattatatgttttttgatttagggtgccat

SEQ ID NO: 451091 - DNA, 201 bp, Homo sapiens
catgtgccacattttcttaatccagtctatcattgttgggcatttgggttggttccaagtctttgctattgtgaatagtgccacaataaacatatttgtgyatgtgtctttatagcagcatgatttataatcctttgggtatatacccagtaatgggatggctggatcaaatggtatttctagttctagaaccctgaggaa

SEQ ID NO: 451092 - DNA, 201 bp, Homo sapiens
ctagaaccctgaggaattgccacactgacttccacaatggttgaactagtttacagtcccaccaacagtgtaaaaatgttcctatttctccacatcctttycagcacctgttgtttcctgacttttaatgatcgccattctaactggtgtgagatggtatctcattgtggttctgatttgcatttctctgatggccagtga

SEQ ID NO: 451093 - DNA, 201 bp, Homo sapiens
ggcggagattgcagtgagctgactcagagccactgcactccagcctgggcgacaaagcgagactctgtcataaataaataaataaataaataaatattaaracaaaccaacagtccacaaatctttgacccattgagtcttttggtgccctgaggcctatgtgtcactgtgacactaaggccagtctctacttttctctaa

SEQ ID NO: 451094 - DNA, 201 bp, Homo sapiens
tgtaaatttgtttgagttcattgtagattctgcatattagccccttgtcagatgagtagattgcaaaaattttctcccattctgtaggttgcctgtttacwctgatggtagtttcttttgctgtgcagaagctctttagtttaattagatcccatttgtcaattttggcttttgttgccattgcttttggtgttttagaca

SEQ ID NO: 451095 - DNA, 201 bp, Homo sapiens
tgaggcaggagaatggcatgaacccagaagatggaattttcagtgagctgagatcatgccactgcactccaacctgggtgacagagcaagactgtctcaamaaaaaaaaaaaaaaaaaaaaaaaagatgaaagaaatgttggaagctagcagagattatttcataaggtttaagggaaaacagccatctccataatataaa

SEQ ID NO: 451096 - DNA, 201 bp, Homo sapiens
tttaatgtagacaaacaaccttatattggaagaagatgccatctacaactttcatagctggagagaactcaatgcctggcttcaaaatatcaaagaacagrctgactctctagttagagaataatgcagctagtgactctaacttgaagccaatgctcatttaccattcctaaaatcctagggtctttaagaattatgcta

SEQ ID NO: 451097 - DNA, 201 bp, Homo sapiens
agaggtgctctgatttttagagtttctggtttttctgctctgttttttacccatctttgtggttgtatctacctttggtctttgatgatggtgacgtacakatggggttttggtgtgggtgtcctttctgtttgttagttttccttctaacagtcaggaccctcagctacaggtctgttggagtttgctggaggtccactc

SEQ ID NO: 451098 - DNA, 201 bp, Homo sapiens
tgggtatcagcagtggaggctgcagaacagcagatattggtgaacagcaaatgttgcttcctgatcattcctccagaagttttgtctcagaggagtacccwgccgtgtgaggtgtcagtctgcccctactggggggtgcttccaagttaggctactcaggggtcagggacccacttgaggaggcagtctgtccgttctcag

SEQ ID NO: 451099 - DNA, 201 bp, Homo sapiens
tacctactcaagcctcagcagtggtgggtgcccttcccccagcctcactgctgccttgcagtttgatcttagactgctgtgctagcaatgagcgaggctcygtgggcgtaggaccctccaagccaggcgcgggatataatctcctggtgtgtcgtttgctaagaccattggaaaagcgcagtattaggttgggagtgaccc

SEQ ID NO: 451100 - DNA, 201 bp, Homo sapiens
taatggtacacttgcattagggtgcttaccatgaatggagcttacaagactagaaattgctccaggtgagtcagtgaatgagtggtgagtgaatgtgaagkcctagaacattactgtgtactactgttgactttataaataccatacacttaggctacactaagtttctaaacaaataaagtaattgcaatacaatgttgt

SEQ ID NO: 451101 - DNA, 201 bp, Homo sapiens
ctactgttgactttataaataccatacacttaggctacactaagtttctaaacaaataaagtaattgcaatacaatgttgtgacagccatgatgtcggcaytaggtgacagaaatttttcactccattgtaaccttacaggactaccatcgcatacacgatccattgttgatcaagatgttatttagcgtatgactgtatt

SEQ ID NO: 451102 - DNA, 201 bp, Homo sapiens
atgactgtatttacaatataaatacttcataatggatagttaaattctgttacaccacacaattgttgaagagtgttggtctacagagtggaaatactaaygcttaagctgcattacttgccaggcttctctgataattaagtgctattcgattgtaaaaggctttggaacatattaaaataaaaatacatacagacacaa

SEQ ID NO: 451103 - DNA, 201 bp, Homo sapiens
atttacaatataaatacttcataatggatagttaaattctgttacaccacacaattgttgaagagtgttggtctacagagtggaaatactaacgcttaagytgcattacttgccaggcttctctgataattaagtgctattcgattgtaaaaggctttggaacatattaaaataaaaatacatacagacacaaggcatttt

SEQ ID NO: 451104 - DNA, 201 bp, Homo sapiens
taattaagtgctattcgattgtaaaaggctttggaacatattaaaataaaaatacatacagacacaaggcattttattgttaatagtcagctaggaaatgmatgctcagcagaattgtctaaataggctcctaaagagtatggcaaaaaaaaaaaaaatggaactttgaagagaaagtttcaaatggcaaaaatacttagg

SEQ ID NO: 451105 - DNA, 201 bp, Homo sapiens
acggggtttcaccatgttggccaagctggtcttgaactcctgaccttgtgatctgccctcctcagcctcccaaagtgctgggattacaggtgtgagccgcygtgcctggcccaagtagcctcttcctatgcctcagttgatgcctctaaaaagtaggttacaatgaagcttaaatcaaataatgtgtaaagcatttagcac

SEQ ID NO: 451106 - DNA, 201 bp, Homo sapiens
tgaagtgctttgagagcatggcatgtgtgtgttcagttgagtgttttaggtcatgtcattttagggttaacgtcaccctcctggaaaaggacaggtagaarggaagccagacttcgacccacaggccaagagtgaccaattacattgatcatgtggatgaattgaggcacaggtaaactgctaccctggagactaagtaag

SEQ ID NO: 451107 - DNA, 201 bp, Homo sapiens
aaaagagacttgactctgaagtctctagctgcacaaccaacatacccagataacacttagatccaggaagagggtttatttctaaaataaaaggaacaatrtggatactggggaacaagatcacattctctgatatgtcacgcatatattgagttcatgctgtgtttgaggcattgtgggaaatacaactgtgaataaaag

SEQ ID NO: 451108 - DNA, 201 bp, Homo sapiens
gggatttatttcctctgagtagaatttaggaaaacttattggaggaggtaagatttgaaatgggcccttaacactgcataggactaaggtagactggaaawtggagttaggagaaaggactgtaaagagggagagaagagcctttggtcagtgggaagggaaaagctttcatcccagctagagtcattttcatagctgtgg

SEQ ID NO: 451109 - DNA, 201 bp, Homo sapiens
atccttctttcctggtgacaccatagaaccaccatggtggaaggccctggactgcctatctccagacttgtttgaagccaaaaggatgactttaggtgttyaagtcactgtcattttgggttttctgccatgtttaatgacaccaattcctactgagcacaggcaggtttcaagccgcacttgctcctagatcacacttac

SEQ ID NO: 451110 - DNA, 201 bp, Homo sapiens
ttatccaggctaacctctgtcttaaggtaaactgctttgggaccttaaatacatctgccatacccctttccagcagtacctagaatagtatggaaccgaayaagtgggagacagtatgtgtgaaacaggagccaggaatcttgaggaccatcttagaatccttcctaccacagatacatttttcttaccaactctggcttg

SEQ ID NO: 451111 - DNA, 201 bp, Homo sapiens
agagtcccttcagcatctcaaatggagcaagaaagttgtgattggctgtcatcaagagaccagggttcctaccttaaaaagccagatcactgtccagcaayaccagcttagggggtcctagatttgggggatcccactgtagtggaagagtcagaagaagtgtgactcacattagaaagttgctcagtattgtttcagatg

SEQ ID NO: 451112 - DNA, 201 bp, Homo sapiens
ccactcagagcctcagtcacttttgagggtggtgagaaaaaggatagaaaataatgtgtagacctagtgtatggtgtccacccaatatatgctgagtatgyaaatacctacgctatagaaattgttacaccatcattcaagtaacaccttcattatttttgccagaattgcataccatctattcagtagtttacttaatac

SEQ ID NO: 451113 - DNA, 201 bp, Homo sapiens
ttttttctaagaccgtgttaaaataagtgctttgctattaaaataaaagtacactaaccaaaattaccatgtgtactaccaaagataaaaataccttgcaytgggaaatgtgaaaagccacttttaaatgaagaagagtgttccttagggttcctgaataaataaattgggagctacccatatttcaaataacttaatttt

SEQ ID NO: 451114 - DNA, 201 bp, Homo sapiens
tgctattaaaataaaagtacactaaccaaaattaccatgtgtactaccaaagataaaaataccttgcactgggaaatgtgaaaagccacttttaaatgaaraagagtgttccttagggttcctgaataaataaattgggagctacccatatttcaaataacttaattttgttttttgagagtaccatggaattcaattcat

SEQ ID NO: 451115 - DNA, 201 bp, Homo sapiens
gcatcagtccttagaacaacctcagacacccactaacacatgccctagagaggctaagtaacccggaggtcacagaaccacagagttaattaacaaataamgacaacaaatacacccttggtgttcctgatttccgtcaaatagccgccttgctgagtcagcacaacaaaattctaaaaattagcagaatagttttcgtgg

SEQ ID NO: 451116 - DNA, 201 bp, Homo sapiens
gttagtttgctgagaatgatggtttccagcttcatccatgtccctacaaagtatatgaactcatccttttttatggctgcctaatattccatgctatgtaygtgccacattttctttatccagtctatcattaatgggcatttgggttggttccaagtctttgctattgtgaagagtgctgcaataaagatacgtgtgcat

SEQ ID NO: 451117 - DNA, 201 bp, Homo sapiens
gaaatgggtactcctggaactaaagtgaattttggagagaatccaagagttttacaatgttaaagttgaaatacctagaaaacaagtagaaatggcacatragcagtaggatattttgatgtaaagttcgagggagaaatccgagctccaaatacaccaaattggagactagcttgcaagataatttgtgagactctaaac

SEQ ID NO: 451118 - DNA, 201 bp, Homo sapiens
tgagaacatgtggtgtttggttttctgttcctgtgttagtttgctgagaatgatggtttccagcttcatccatgtccctacaaagtatatgaactcatccytttttatggctgcctaatattccatgctatgtatgtgccacattttctttatccagtctatcattaatgggcatttgggttggttccaagtctttgctat

SEQ ID NO: 451119 - DNA, 201 bp, Homo sapiens
cctgtaatcccagcactttgggaggctgaggtgggtggatcacctgaggtcaggagttcaagaccagcctggccaaaatgggaaaccgtgtctctacaaaraaacacaaaaaattttgccaggcatgatggcgggtgcctgtaatcccagctactcaggaggctaaggcaggagaatcacttgaacctgggaggcagaggt

SEQ ID NO: 451120 - DNA, 201 bp, Homo sapiens
atggtcaggatctagtgactttcagttacaaggaagtaggtcaaagtgcagcctgattaatgcttagttatgactctatttctgtccagaattcttgttarccctgtgaggacagcttcaatacttgctttgatctctgttgtaaggtggtgtctgccacatttctccactaaaaagtgattctttttatcattataatga

SEQ ID NO: 451121 - DNA, 201 bp, Homo sapiens
tgtataatgtgtaaggaaggtgtccagtttcagtttctgcatatggctagtcagctttcccagcaccatttattaaataaggaatcctttccccattgctygtttttgtcaggtttgtcaaagatcagatggttgtagatgtgtggcattatttctgagtcctctgttctgttccattggtctatatctctgttttggtac

SEQ ID NO: 451122 - DNA, 201 bp, Homo sapiens
gccttgcagtttgatcttagactgctgtgctagcaatgagcgaggctccgtgggcgtaggaccctccaagccaggcgcgggatataatctcctggtgtgtygtttgctaagaccattggaaaagcgcagtattaggttgggagtgacccgattttccaggtgccatctgtcacccctttctttgactaggaaagggaattc

SEQ ID NO: 451123 - DNA, 201 bp, Homo sapiens
catgatgcctccagctttgctttttttgcttaggattgccttggctatatgggctcttttttggttacatatgaaatttaaagtagttttttcaaattctktgaagaaagtcaatggtagcttgatgggtatagcattgaatctataaattactttgggcagtatggccattttcacgatattgatttttcctatccatga

SEQ ID NO: 451124 - DNA, 201 bp, Homo sapiens
cgcgggatataatctcctggtgtgtcgtttgctaagaccattggaaaagcgcagtattaggttgggagtgacccgattttccaggtgccatctgtcacccytttctttgactaggaaagggaattccctgaccccttgtgcttcccgggtgaggcgatgcctcgccctgcttcggctcatgctcggtgcactgcacccact

SEQ ID NO: 451125 - DNA, 201 bp, Homo sapiens
ctgacactccccagtgagatgaacctggtacctcagttggaaatgcagaaatcacccatcttctgcatcactcacactgggagctgtagactggagctgtwcctatttggccatcttgctatttctctcaagattctttctttattattgactttcataagtttgattattaaatgccttgaggtagtcttctttggatta

SEQ ID NO: 451126 - DNA, 201 bp, Homo sapiens
tttctctcaagattctttctttattattgactttcataagtttgattattaaatgccttgaggtagtcttctttggattaaatctgtttggtgttctacawccttcttgtgcttgaatattaatatgtttccttagatttgggaagttctgttagccctttgaaaaaactatctacacgtatctcttcctctatcactttt

SEQ ID NO: 451127 - DNA, 201 bp, Homo sapiens
tgtcacaccttagaagatttaccataattcaacgcattctaatattcagtccatatttaaacttctccacttttccaagtgtgtcttttacagattttttratggaataaagatccagtcaaggtgttcatattgactttgagtatgtttctttagaactctctcccgtctgttttttgacaatggagattattttattca

SEQ ID NO: 451128 - DNA, 201 bp, Homo sapiens
caggatggcatattggtcaagaatacatatttcccaagattaagtctttactctgccatttacagataagtgaccttgaataagttactcaaactctgtcytctcaattacctcaactataaaatgggaataaaaatagcatctgtgtaaatagggttgttgagtggattaaaaacatattagtcaaacgcctagcacatg

SEQ ID NO: 451129 - DNA, 201 bp, Homo sapiens
atcattgttgttgttcctatcatcattatcccccccttccttagacaataaagatcatcttcccaagacctcttcgccaaagttctgaaagacaaacagckgtaaaaagaaaccccactctcagcttgcatttttgttgtctgaaccttattccctaggttctgggggataaccttatgtgtgtgttttcttatgaaggaa

SEQ ID NO: 451130 - DNA, 201 bp, Homo sapiens
ggggggttactgaaaccaatctcttgcatatatgcagggacagctgtaatccaactagccttcacaataacatcatgaggtgctactgttttttatttctrttttatttataaggaaaagtgagtcataagatgcacacatatcccaaggtccaacagttgtgaagtaatggaaccaagatttgaactcaaaatgactgaa

SEQ ID NO: 451131 - DNA, 201 bp, Homo sapiens
tgtgcaggagagtgagttcagctggaagtaactccttccttctgagcaagcagctgacaaccttatgttgtcccccaattatctcccctcctgcctttttytggaatggggatgggggatgaagaatcgtgaaactgaagagaaacctcccacttgagctcagcaagagaaagatgagaagaagccagacaaaagcatccc

SEQ ID NO: 451132 - DNA, 201 bp, Homo sapiens
ccgttgactactgtggaagaaggcagtcatgaggtggtcatcttcctcagcttatgttaggcttttatgccccatctatatttttaggaaattgtttctcmgcacctaatgtgaactggtattaaccatttccagagaggcaatctgaagggaaaagttgtcgcagaaatcccttcaacgtctcaaccaacacctctacag

SEQ ID NO: 451133 - DNA, 201 bp, Homo sapiens
acaggcaggtttcaagccgcacttgctcctagatcacacttaccaatgaatagagattcaaccaatagtcagcatattaatttcctattgctgccctaacrtattaccaaaaacttagaagctaaaaacaacacaactttatttatcttacagttctgtaagtcagaagtccagcatgggtcctactagactaaaatcaag

SEQ ID NO: 451134 - DNA, 201 bp, Homo sapiens
ctaaaatcaagatgttggcaaagttgtgctcccttctagaggtgctaggggaaaatttatattctttcttacttaggttgctggatgaattttgttccttggcagttgtaggactgcaggcccatatttcctttcttgctttcacctgaggtctattcccagcttttagatgctgcccaggttccttggctcatgaccccc

SEQ ID NO: 451135 - DNA, 201 bp, Homo sapiens
tttcacctgaggtctattcccagcttttagatgctgcccaggttccttggctcatgacccccttcctccatcttcaaaccaacaacagtggatccagtctstctcactttagatctctcctcctgcttctttcatcatcgtgtaactcatcagcgcttctgcctgcctctttcaccttaaaggactcatgtgattacactg

SEQ ID NO: 451136 - DNA, 201 bp, Homo sapiens
aggttccttggctcatgacccccttcctccatcttcaaaccaacaacagtggatccagtctctctcactttagatctctcctcctgcttctttcatcatcrtgtaactcatcagcgcttctgcctgcctctttcaccttaaaggactcatgtgattacactgggccaacccagatgatccagcatcatctccgaatcttaa

SEQ ID NO: 451137 - DNA, 201 bp, Homo sapiens
tgacccccttcctccatcttcaaaccaacaacagtggatccagtctctctcactttagatctctcctcctgcttctttcatcatcgtgtaactcatcagcrcttctgcctgcctctttcaccttaaaggactcatgtgattacactgggccaacccagatgatccagcatcatctccgaatcttaaactctgtaaccttaa

SEQ ID NO: 451138 - DNA, 201 bp, Homo sapiens
ctctttcaccttaaaggactcatgtgattacactgggccaacccagatgatccagcatcatctccgaatcttaaactctgtaaccttaattccacttgcaragttccctttgccatgtgatgtaacatattccccaggtctggggattaggacatgggcatcttcagggagccattattctgccagagaatacaaggttcc

SEQ ID NO: 451139 - DNA, 201 bp, Homo sapiens
actgggccaacccagatgatccagcatcatctccgaatcttaaactctgtaaccttaattccacttgcagagttccctttgccatgtgatgtaacatattycccaggtctggggattaggacatgggcatcttcagggagccattattctgccagagaatacaaggttcccttggcaacctcatccttttgtcaacttatg

SEQ ID NO: 451140 - DNA, 201 bp, Homo sapiens
tttctggaagcctggcaactgtgccacccagctgtaagccacatcaacacctgcaaatagcgaaacccctctgcgctcccccccacaaccccggccgctttttttttttttttttttttctctctcaatgctcagctggacccagatacctcttcatcctgggagccatcagtccggctaagggtctatggtggacttgag

SEQ ID NO: 451141 - DNA, 201 bp, Homo sapiens
taactggagattttgaggaatttaatgcctatggctgaaaagaaccattacaatacaagcccaatttacctcataggattatttggggaataaaatgagayaatagaaataagtttctttgaaatatttttaaataattttaaattacaaattattgttttttgtttatcaaataagtgaagtatttcttagtgtctgtca

SEQ ID NO: 451142 - DNA, 201 bp, Homo sapiens
aatctgaagggaaaagttgtcgcagaaatcccttcaacgtctcaaccaacacctctacagacacagctggaagactgcagcagatcaatgggaactctacyatgctggcaaacgttcatcttgaccatcatgtttgctgcctgcatccgataaatatttcttgggaagatcttctttgctaggcattatgctagatgaggt

SEQ ID NO: 451143 - DNA, 201 bp, Homo sapiens
gggaactctactatgctggcaaacgttcatcttgaccatcatgtttgctgcctgcatccgataaatatttcttgggaagatcttctttgctaggcattatrctagatgaggtgggagatgctaagatgaagaaggcattgttcccacctccagagcttcccaatctgtttcgaagaaccgtgtgggaaggatcacgtaaac

SEQ ID NO: 451144 - DNA, 201 bp, Homo sapiens
catccgataaatatttcttgggaagatcttctttgctaggcattatgctagatgaggtgggagatgctaagatgaagaaggcattgttcccacctccagakcttcccaatctgtttcgaagaaccgtgtgggaaggatcacgtaaacctcttttaactaagctcaaagcctgaacttggaatccaggtttcgattctgtct

SEQ ID NO: 451145 - DNA, 201 bp, Homo sapiens
aatcgaagttgtttagctactaagttgcagaaccaggatttaaaccgaggtgtggactccaagttcatactttactaccctgaaatgacagaattatataraataatgtatatgaagtaccagccaagattatgacactcaataaatgacagcctttcttgctgctgcttagcttctggtgatggccggctacccttggtg

SEQ ID NO: 451146 - DNA, 201 bp, Homo sapiens
ccttggtgttccttagcttgcagacttgtaactccaatggtgcccattttccttcttaaatgatatgaagaatatgcaacatttggttcagtaactggcamtgagtgctccaactcaaaattccttgttacaactggtaaagactgaggttcaaattcctaatcaggaaacttttcatcttgaatggatgagaactatgag

SEQ ID NO: 451147 - DNA, 201 bp, Homo sapiens
aagttacctgtttttccccaagtgtcaggtgctagcattcatgaatggcaaaattcagactgtaaatgttcatctgaatccagtcatccattgatttttargttcatactgaagtggtgttgagaattagaagaaacatgctctctcgccctcaaataagcacttttcataccaatgtcagcaaagcaaacatcagcatta

SEQ ID NO: 451148 - DNA, 201 bp, Homo sapiens
tttaaatgtcaccacctcaaagaaaccttcccttgcccaccttatctaagctccttgttttcattatctcttctccatttccacacttgtttcttttctctttttttttttttttctttttttcttttcttttctttgcatgacagggtcttggtatgttgcccaggctggtctcgaactcctgggctcaagcgattctcc

SEQ ID NO: 451149 - DNA, 201 bp, Homo sapiens
ttaaatgtcaccacctcaaagaaaccttcccttgcccaccttatctaagctccttgttttcattatctcttctccatttccacacttgtttcttttctctttttttttttttttctttttttcttttcttttctttgcatgacagggtcttggtatgttgcccaggctggtctcgaactcctgggctcaagcgattctcct

SEQ ID NO: 451150 - DNA, 201 bp, Homo sapiens
taaatgtcaccacctcaaagaaaccttcccttgcccaccttatctaagctccttgttttcattatctcttctccatttccacacttgtttcttttctctttttttttttttttctttttttcttttcttttctttgcatgacagggtcttggtatgttgcccaggctggtctcgaactcctgggctcaagcgattctcctg

SEQ ID NO: 451151 - DNA, 201 bp, Homo sapiens
aaatgtcaccacctcaaagaaaccttcccttgcccaccttatctaagctccttgttttcattatctcttctccatttccacacttgtttcttttctctttttttttttttttctttttttcttttcttttctttgcatgacagggtcttggtatgttgcccaggctggtctcgaactcctgggctcaagcgattctcctgc

SEQ ID NO: 451152 - DNA, 201 bp, Homo sapiens
cttggaagacttctggaagttccttccggctggagtggagcttgagagggcttagggcaaaaaatgagtgtggctggagaagttagcaggttctgaattaygacgtcacttattataagtcatgtttaaggggctgcaatttatctggaccgtaataaggagccattaaagcatgtgaagcaggtttgtgaaaacatcata

SEQ ID NO: 451153 - DNA, 201 bp, Homo sapiens
gaagacttctggaagttccttccggctggagtggagcttgagagggcttagggcaaaaaatgagtgtggctggagaagttagcaggttctgaattacgacrtcacttattataagtcatgtttaaggggctgcaatttatctggaccgtaataaggagccattaaagcatgtgaagcaggtttgtgaaaacatcatacctg

SEQ ID NO: 451154 - DNA, 201 bp, Homo sapiens
gctcccccccacaaccccggccgctttttttttttttttttttttctctctcaatgctcagctggacccagatacctcttcatcctgggagccatcagtcyggctaagggtctatggtggacttgaggcaaacagggagaaggatgacagaaatgtgccagaagatgaattagaagagaaagcaaagggaggacaaagata

SEQ ID NO: 451155 - DNA, 201 bp, Homo sapiens
gattgcgacctcaacatattttttggtgggacaggattcaacccacgccaggctgtttagaggactgctatctggttaattcagtacatcactgtagaagrccctgggaagcttgaaaaagtactagtaaggaatccagggtcacaaactgaaatgcctgcagaggccaggcaggtaacataataggttctagaataagaa

SEQ ID NO: 451156 - DNA, 201 bp, Homo sapiens
gggacaggattcaacccacgccaggctgtttagaggactgctatctggttaattcagtacatcactgtagaagaccctgggaagcttgaaaaagtactagkaaggaatccagggtcacaaactgaaatgcctgcagaggccaggcaggtaacataataggttctagaataagaaaatggtgactgtcctttagcctggaat

SEQ ID NO: 451157 - DNA, 201 bp, Homo sapiens
caagtacaacctagagcagtggttcccaaatatgcttcctgggccggctgtatcagaattactcgggaactattagaagggcaaaacctcaggccctgccrcagacatgctgagtcagaaactcgggatcactcagaaatctgttttaaataggccttcaggtgattctgatggagttccagaaccatgacctggagaaca

SEQ ID NO: 451158 - DNA, 201 bp, Homo sapiens
cacggtgaaatccagtctctactaaaaataccaaaattagctgggcgtggtggcaggtgcctgtaatcccagctacccgggaggctgaggtatgagaatcrcttgaacctgggaggcagagattgcagtgagccaagatcacaccactatactccagcctgggcaatagagcaagactcagtctcaaaaaaaaaaaaggaa

SEQ ID NO: 451159 - DNA, 201 bp, Homo sapiens
ggcaattatgaagaatgttcctatgaacagtttttggcatatcttttagcacatatatgtgtgtgtgtgtatatatatatatttctgttgggtatgtattyaggagtgaagttgctgagctttaactgatactgctaaacagttttctaaattaattattccaatttacattcccaccatggttgttggagagtatcagtt

SEQ ID NO: 451160 - DNA, 201 bp, Homo sapiens
ctagagttttaagtaaaatctcccaattcatttaaattatggcagtggaatcaagtatttttcaaaacactgtgatgtctaaactaagtccatgtgcaaaytgggcccagcccatgggcagctatttcacaacctttggtcatgagctgtgggttccagaccaagctttgccagttttctgtgtgaacctgggtgagtaac

SEQ ID NO: 451161 - DNA, 201 bp, Homo sapiens
tattcttaacaagttttaatgaaggacagtgaggatgaatgcaaatgcctggaggattgcatagatttctgtaaatatgaaaggtaaagaagagataggayggtccctcctgaatactgcatcagttggcctaaaattgcatcatggagttttgttttcctcagtcatgtgacaattttgattcatgccttaaaataagag

SEQ ID NO: 451162 - DNA, 201 bp, Homo sapiens
ggcacatgacctgtgtgccctaacaacaactgggaggccattatagctggagcagactgaacaagagagaaggggaacttagaaagaggatcagagaagasaggaggggccagaatgtatagggctgtcagtattaactgcagagtaactaagggatacaaatacaaaggaattatagttagaattatagttatggtactt

SEQ ID NO: 451163 - DNA, 201 bp, Homo sapiens
gccaaagaaattctgagcaaaatgaatacagctagaggcatcccactacctgacttcaaaatatactacaaagctatagtaactgaaacagcaggtattgrtataaaaacagccacatagaccaatggaacaaaatagagaacccagaaataaatcagcatatttacaaccaactgacttgacaacgttgccaagaactta

SEQ ID NO: 451164 - DNA, 201 bp, Homo sapiens
agctaaagccatccagttaaagagaaaagggcaaaatacttgattattgctgatactaaaatgagattgtatattttgtatttcttttctgtcctgtgtcrtgcaggcttcctttgacaagagaatcagaaccgactggtgacatttgtttcaatgaaagcaacagtgtgaagagtaagtagtttttcctattattcatct

SEQ ID NO: 451165 - DNA, 201 bp, Homo sapiens
gtttaattttcaaatacttaagactttcatggataccttattgctattaatttttaacctaattctatgttgtcagaaagcatactctgcatgatttcagrctttttagatttattgatttttttgtcctaacatatcctgataagcatgtatccttgaaaaaactgtgcctgctggagttgttaggttatatgtctacaa

SEQ ID NO: 451166 - DNA, 201 bp, Homo sapiens
aatgtcaccacctcaaagaaaccttcccttgcccaccttatctaagctccttgttttcattatctcttctccatttccacacttgtttcttttctctttttttttttttttctttttttcttttcttttctttgcatgacagggtcttggtatgttgcccaggctggtctcgaactcctgggctcaagcgattctcctgcc

SEQ ID NO: 451167 - DNA, 201 bp, Homo sapiens
aataatcctgcattgattgacctctctaacagtctcctattgcctccaactcccttctttcgtcagatttttcttcccacaattataaaactggaagaaarataaatgtccagtgtcttggctgagacagtgtagctcacccagacaggttttctcttctcaagaggcatgatttattttttactttatatttttaaattg

SEQ ID NO: 451168 - DNA, 201 bp, Homo sapiens
aaaaggaaacttttctctgcaatttgctgattagaatcaaatgccctcctggaggaatgagatcctttggaagggcgcgaccagcttgtaaatgtgtggcaagaagacaatactaccgctgggggtcctagggatgtgatgggccttgtaccctgaatgcatctgggaaagaactcatttagaaggcactatttttgaagg

SEQ ID NO: 451169 - DNA, 201 bp, Homo sapiens
aaaggaaacttttctctgcaatttgctgattagaatcaaatgccctcctggaggaatgagatcctttggaagggcgcgaccagcttgtaaatgtgtggcaagaagacaatactaccgctgggggtcctagggatgtgatgggccttgtaccctgaatgcatctgggaaagaactcatttagaaggcactatttttgaaggt

SEQ ID NO: 451170 - DNA, 201 bp, Homo sapiens
aaggaaacttttctctgcaatttgctgattagaatcaaatgccctcctggaggaatgagatcctttggaagggcgcgaccagcttgtaaatgtgtggcaagaagacaatactaccgctgggggtcctagggatgtgatgggccttgtaccctgaatgcatctgggaaagaactcatttagaaggcactatttttgaaggtt

SEQ ID NO: 451171 - DNA, 201 bp, Homo sapiens
aataaaaatacatacagacacaaggcattttattgttaatagtcagctaggaaatgcatgctcagcagaattgtctaaataggctcctaaagagtatggcaaaaaaaaaaaaaatggaactttgaagagaaagtttcaaatggcaaaaatacttaggcagcaaaaagacaattttctaaaatgatgggtttgagaagaatg

SEQ ID NO: 451172 - DNA, 201 bp, Homo sapiens
ttagaaaagtttctttaggttcacaatttgtcaaatttggggaaatctctatcagattttttttaatgaactgcagattttcagttccttttaagttgcayggtaagcttaagtgctctttgaattggaacactcattaacagctttttttttttgtcaatgctctgttggtagtaacttacgtgtttgcttagatactcc

SEQ ID NO: 451173 - DNA, 201 bp, Homo sapiens
ataaaaatacatacagacacaaggcattttattgttaatagtcagctaggaaatgcatgctcagcagaattgtctaaataggctcctaaagagtatggcaaaaaaaaaaaaaatggaactttgaagagaaagtttcaaatggcaaaaatacttaggcagcaaaaagacaattttctaaaatgatgggtttgagaagaatga

SEQ ID NO: 451174 - DNA, 201 bp, Homo sapiens
ttcacaatttgtcaaatttggggaaatctctatcagattttttttaatgaactgcagattttcagttccttttaagttgcatggtaagcttaagtgctctytgaattggaacactcattaacagctttttttttttgtcaatgctctgttggtagtaacttacgtgtttgcttagatactcctctttgttgacatctaaat

SEQ ID NO: 451175 - DNA, 201 bp, Homo sapiens
taaaaatacatacagacacaaggcattttattgttaatagtcagctaggaaatgcatgctcagcagaattgtctaaataggctcctaaagagtatggcaaaaaaaaaaaaaatggaactttgaagagaaagtttcaaatggcaaaaatacttaggcagcaaaaagacaattttctaaaatgatgggtttgagaagaatgaa

SEQ ID NO: 451176 - DNA, 201 bp, Homo sapiens
atctctatcagattttttttaatgaactgcagattttcagttccttttaagttgcatggtaagcttaagtgctctttgaattggaacactcattaacagctttttttttttgtcaatgctctgttggtagtaacttacgtgtttgcttagatactcctctttgttgacatctaaatcaacgaggcaggcaatagggtatac

SEQ ID NO: 451177 - DNA, 201 bp, Homo sapiens
aaaaatacatacagacacaaggcattttattgttaatagtcagctaggaaatgcatgctcagcagaattgtctaaataggctcctaaagagtatggcaaaaaaaaaaaaaatggaactttgaagagaaagtttcaaatggcaaaaatacttaggcagcaaaaagacaattttctaaaatgatgggtttgagaagaatgaat

SEQ ID NO: 451178 - DNA, 201 bp, Homo sapiens
accgagttacctacttagaataatgttctccaactccgttcaggttgctgtgaatgcctttgcttcattcctttttatggctgagtagtattccatggtgrgtgtctgtgtgtgtgtgtgtgtgtgtgtgtgtgtgtgtgtgtgtgtgtgtgtgttctctttatccactcattgattggtggacatttaggctggttccgt

SEQ ID NO: 451179 - DNA, 201 bp, Homo sapiens
gcctggaggattgcatagatttctgtaaatatgaaaggtaaagaagagataggacggtccctcctgaatactgcatcagttggcctaaaattgcatcatgragttttgttttcctcagtcatgtgacaattttgattcatgccttaaaataagaggaatctggctttaatactgaatgatatttagtcttaaaaactccat

SEQ ID NO: 451180 - DNA, 201 bp, Homo sapiens
gataagtgggacacaggatgtgtatatgcatagaggcaagtccttctgcaagaatggccataatcaaaaaatgaaaaaacaataaatgttggcttggaggyggtgaacagggaacacttctacactgcttgtgggaaggtaaactagtacaaccactatggaaaacagtgtggagattccttaaagaactaaaagtagaac

SEQ ID NO: 451181 - DNA, 201 bp, Homo sapiens
tacattctcaccagcagtgtaaaagtgttcccttttcaccacatccacgccaacatctattttttttatttttaaatgatggctattctttccggggtaaygaggtatcacatcgtggttttgatttgcattttcctgataattagtgatgttgagcattttttcatgtatttcttggccatttgtatatcttctcttgaa

SEQ ID NO: 451182 - DNA, 201 bp, Homo sapiens
ctagagagttgaactagaacagatttctcaatcttggtattattaacattttggactggttaattctttgttgtgggagcttgccctgggtattataggaygattagaagcattgctggcttctgcccactacaggccactagcgtgctctccctcccctactttcgacaatcaaaactgtctctggacattgccaaatat

SEQ ID NO: 451183 - DNA, 201 bp, Homo sapiens
taaaaatacaaaaattagctgggcatggtggcacgcacctgtaatcccagctacttgggaggctgaggcagtagaatcgcttgtgcccaggaggcagatgmtgcagtgaactgagagcttgccactgcactccagcctaggtgacagagcaagacttctttaaaaaaataataataaattaaataaaaagaaatcctatgt

SEQ ID NO: 451184 - DNA, 201 bp, Homo sapiens
tttgtttttcttgcatttacttttagattcttggtcatgaagtttttgcctaagccaaagactagaagagtttttctgatattatcttctagaatttttakggtttcaagtcttagatttaagtatttgatccaacttgagttgatttttgtataagataagagataaggatccagttttattcttctacatgtggcttgc

SEQ ID NO: 451185 - DNA, 201 bp, Homo sapiens
gaccacagcctatatttgaatcctggctcatccatccatgaactagtttcaggattgtgggcaagttcctgaaactctctgcttcagttttattacttacraaatggggcagcgataatgccagtcccatagggttgtggtgaagatttaataaaatactgtgtataaagtgtttagtaaagtactatgcatatagtaagc

SEQ ID NO: 451186 - DNA, 201 bp, Homo sapiens
gctgtggggccctgcagatgccttaccttctttgagctgcactctccacatctgtagaacaagaataggtaaactcactgtgggctttgtcagcattataygatttatataaatcatcgtgcatagtgcctaacagctagcttaaatctgtggttaaaaactgtttttaagtgatggtgcttggaagaagaatttacagtt

SEQ ID NO: 451187 - DNA, 201 bp, Homo sapiens
ttttattcttctacatgtggcttgcattatcccagtaccatttgttgaatagggtgtcgtttcccccattttatgtttttgtttgctttgtcgaagatccrttggctataagtatttggcattatttctgagttctctattctgttccattggtgtttttatacgagtaccatgctgttttggtaactgtatccttgtaat

SEQ ID NO: 451188 - DNA, 201 bp, Homo sapiens
atacacactattacctctatcatctttgcgattataatgatttttaattatcacttcattccctttcctcctatttctgctgaaagtatctggaggtaacrccttcatgcagtcaagggattgccttaggaacttttgttgaaataaataatttcaaaaagcaattaaaacttatttcatcatacctttcaatcactctaa

SEQ ID NO: 451189 - DNA, 201 bp, Homo sapiens
actgactgatgaggtggaagactttgattgcctgaatatgtggtaagatcgtgtatgtatatgcctagaagccaaagtatgattttcgcaaagggttgtcrtaatacaaaacccttaagaaaagggaaagtgagatatcagaaaaaaaatacatttttggcttgagcaagggaatatttgatcgctctaggaggagaatct

SEQ ID NO: 451190 - DNA, 201 bp, Homo sapiens
gtatttggcattatttctgagttctctattctgttccattggtgtttttatacgagtaccatgctgttttggtaactgtatccttgtaatatagattgaakttgattaatgtgatgtctccagatttgttcttttttgcttactctttctttgactatgtgggcctttttttgttccatatgaattttagaaatgtttttt

SEQ ID NO: 451191 - DNA, 201 bp, Homo sapiens
aagaacgtgtttctttgacaatacctatttgctcagcaagtgaaaagcaaagacctgtatggaagaggtaaatcttaggtatagccaaaaatagctattgyctctttatcaccaaccagagtgaactccttgctgcctatgtgcccagtatgaggataaaagccctggtactgaggaagggttcagaggacttgctagcct

SEQ ID NO: 451192 - DNA, 201 bp, Homo sapiens
ttctgagttgtttcacttccttttgaaatggttttcattccactcccaaggatatcagcagttgggaccaagttcgaagaatgggccctataaaagattayaaattttattaaataaacaaactaggaagccagaacaatttaatcaaattggatgtgactaccaatcagagggcagaaaaccccatgaaggacctgctgt

SEQ ID NO: 451193 - DNA, 201 bp, Homo sapiens
ttatacgagtaccatgctgttttggtaactgtatccttgtaatatagattgaagttgattaatgtgatgtctccagatttgttcttttttgcttactcttkctttgactatgtgggcctttttttgttccatatgaattttagaaatgttttttctagttctgtgaggaataatggtggcattttttatgggaattgcatt

SEQ ID NO: 451194 - DNA, 201 bp, Homo sapiens
ctgcacagcaattagacctgacaagtcttagtctccagatctgtccctaattattaagttatcttgaattactgtctcaaattctgcagcagaattttctrctgggctcatatggagttaatatcatctgcctctaattgcttataaagacactaagaggctcaactgggtaaaaaggacctttgaaaaatgtaacgtaca

SEQ ID NO: 451195 - DNA, 201 bp, Homo sapiens
agattacaaattttattaaataaacaaactaggaagccagaacaatttaatcaaattggatgtgactaccaatcagagggcagaaaaccccatgaaggacstgctgtttttgtatatttctaacacatgaagaaaaatctttacctagaagccaaacattctaagccatgcctaacttgcctcctagacattatacaaaca

SEQ ID NO: 451196 - DNA, 201 bp, Homo sapiens
ctaattcagcatttgctttgggttgagaccacaggccattgctgatctgattatagaaaacaagaaaaaaatgaatctagtactgggattgtttagtcctrgaaataaaagacgagatgtgaacccaatagcccttcaggtatttgaagaactctcaggggaaaggtgataatatttcaacatggctcctcagtggagagc

SEQ ID NO: 451197 - DNA, 201 bp, Homo sapiens
agcactgttggtttgatcaccattttattttattttattattttattttggggacagggtcttgctatgtctcccaggctggagtgcagtggcatgatctyggcttattgcaacctccacctcccaggttcaagcgattctcatgcctcagcctcccaagtagctaggattacaggcttataccaccacacctggctaatt

SEQ ID NO: 451198 - DNA, 201 bp, Homo sapiens
attgcttttggcaggatggtcattttcacaatattgattctacccattcatgaatatgggatgtttttacatttgtttgtgtcatctatgatttctttcarcagtgttttgtagttttccttgtagaaatctttcacctccttggttagatatattcctaagtatttttactttattttttattttttgcagctatcataa

SEQ ID NO: 451199 - DNA, 201 bp, Homo sapiens
aagacgagatgtgaacccaatagcccttcaggtatttgaagaactctcaggggaaaggtgataatatttcaacatggctcctcagtggagagccagggccrataagcagaggttatagcaagctaaccccacatttggagagttgacaatttcagtggtccaaaatggaatggaatgctttgtgaggtagtaagttccctg

SEQ ID NO: 451200 - DNA, 201 bp, Homo sapiens
ctttcacctccttggttagatatattcctaagtatttttactttattttttattttttgcagctatcataaaaggggttgagttcttgatttaattctcakgtcagtcactgttggtatatagcagtgctactgatttgtgtacattaattttgtatcctgaaagtttactgaattcatttatcagatctaggaacttttt

SEQ ID NO: 451201 - DNA, 201 bp, Homo sapiens
ctgaatagctgggactacaggcatgcaccaccggtggtgcccatctaatttttgtatttttagtagagatggggtttcaccatgttgtccaggatggtctygatctcttgacctcatgatcttacctccttggccttcaaaagtgctgggattacaggcatgagccaccgtgcctggccttcattcttaaataattatttt

SEQ ID NO: 451202 - DNA, 201 bp, Homo sapiens
atccaggcaatttcttactgatggacatttagttattaaatacataatactacaaatactgtagtcatgaacaatcttacaaaggtagccagagttttatragtatttctaaggctgatttcctgaaggtaaaattgccagtttgaaggtgttggcttattttaaaaggtgataataaacacaatgtgatctcatactgct

SEQ ID NO: 451203 - DNA, 201 bp, Homo sapiens
gtcccttctatgctgattttgctgagggttttaatcataaagagatgctggattttttcaggtgcttttttctgcatctattgagatgatcatgtgatttytatttttacttctgtttatgtggtgtatcacatttattgacttgcgtatagttaaaccagccctgcgtccctggtatgaaacccacttgatgatagtgta

SEQ ID NO: 451204 - DNA, 201 bp, Homo sapiens
tctgattcagggggtctgacatggggatgagaagtgaagcttctcatttgcctattcttgtgctttctggattcacgcctgcctctggctactcaactctytaattcactaattggctatttctacttccccaagatgcttgccttgtccttctcagtcaactgtgttttcttacatctctaacaacttctggtccttact

SEQ ID NO: 451205 - DNA, 201 bp, Homo sapiens
gtggctcatgcctgtaatcccagcactttgggaggctgaggtgggtggatcacctgaggtcaggagttcaagaccagcctggccaaaatgggaaaccgtgyctctacaaaaaaacacaaaaaattttgccaggcatgatggcgggtgcctgtaatcccagctactcaggaggctaaggcaggagaatcacttgaacctggg

SEQ ID NO: 451206 - DNA, 201 bp, Homo sapiens
cccactctttgtctcccgttccatgtactctacaccaggagtccccagtccctgggccacgggcccatagcagtccatggcctgttgggaaccatgctgcrcagcaggaggtaagtggcaggcgagcattgcctgctgtcagatcagtggagacattaaattctcataggaatgcaatgctattgtgaattgtgcatgcga

SEQ ID NO: 451207 - DNA, 201 bp, Homo sapiens
tccccagtccctgggccacgggcccatagcagtccatggcctgttgggaaccatgctgcgcagcaggaggtaagtggcaggcgagcattgcctgctgtcaratcagtggagacattaaattctcataggaatgcaatgctattgtgaattgtgcatgcgagggatctaggtcacgccctccttatgagaatctaaggaatg

SEQ ID NO: 451208 - DNA, 201 bp, Homo sapiens
tgtgtgtgtgtgtgttttctgacccatggaaacatcttgccctttacctctaaatactttggggtggatttcctaaaaccaagagtgtttttatgtataaycacaatataattatcaaaatcaggaaatttgagattgttaaaatgctattacctaactgtagtttatattcagattttgcccattgtccaataatgccct

SEQ ID NO: 451209 - DNA, 201 bp, Homo sapiens
aattacatttaccttttcaggcttgctacaagggcttacttagtctctgaagagcttcctgcaggcttggggtctgtggactgaaaatcagttggattgaygaaagctatgagaagaattatgatgagggtcagatcatatgggcatcaggaaagtaaaatattaccatttaaactagaaataaaactttttttcctaagt

SEQ ID NO: 451210 - DNA, 201 bp, Homo sapiens
gggagttctagcttttctgctgattaaatgtcactgatttctcattttctggtgacattgttttacaattcttttaactacaaagtttaagtttctggagmcttttcttcttttcattttttataaaatacccttttattaagagatgaagttgggtagtcagaataggagtgggtattgtttagtagaaaaaaaacgggc

SEQ ID NO: 451211 - DNA, 201 bp, Homo sapiens
ctttgctggaagactagagaaattaatgctccatcttccatctttggatttcccagtgcagctgtgggaagcaagtgtaggaactcttccatggactggcyagcaggatttatctattaataggagggtagggcagccttgagcagtgatagcacagtgtagtaaggacagcatcagcttcaggtcaacatatttaacttg

SEQ ID NO: 451212 - DNA, 201 bp, Homo sapiens
tagtaagcacacagtaccagctgactaattttatagctgttcctgaaagattgtttctcctcatttcataaatgtacaaactcagaatccaagaaggtaartaacttgcccaagaccaaaagtagcagaactgggactcgaacttaggtcatctgcctcattaattcttcaaatatttatgggtgcctcctatgttccaag

SEQ ID NO: 451213 - DNA, 201 bp, Homo sapiens
agtgggtattgtttagtagaaaaaaaacgggctttggaataaaacttgcatatgaattacagttctgcttcctataattgtgtaaccttggcaagttactkcgcctgtcaaatgctcacattaaaagagtgtgtgtgtgtgtgtgtgtgtgtgtgtgtgtgtaattgccagtacaattcaataattggcccacagaaggca

SEQ ID NO: 451214 - DNA, 201 bp, Homo sapiens
agttctctattctgttccattggtgtttttatacgagtaccatgctgttttggtaactgtatccttgtaatatagattgaagttgattaatgtgatgtctmcagatttgttcttttttgcttactctttctttgactatgtgggcctttttttgttccatatgaattttagaaatgttttttctagttctgtgaggaataa

SEQ ID NO: 451215 - DNA, 201 bp, Homo sapiens
ggttttgataggttttgtcactattattgttcagttcaaataattttttaatttccatcttaatttcgttgttgacccaatgatcattcaggagcagattkttaatttccatgtatttgtatagttttgaaggttcgtcttggagttaattttcaattttatttcactgtggtctgagagagtacttgatattatttcgag

SEQ ID NO: 451216 - DNA, 201 bp, Homo sapiens
tttaggccatttacattcaacattagtattgagatgtgaggtactgttctgttcattatgctagttgttgtctgaatactttgtgggtttttttttcattrtgtcattgttttattaatcctgtgagacttatgctttaaggaggttcattttggtgtattttgaggttttctttcaagatttagaactccttttgccatt

SEQ ID NO: 451217 - DNA, 201 bp, Homo sapiens
attaatctgataggttgttctttataggtttcctggtgcttttgtctcacagctgttaagattctttccttcatcctgactttagataacccgatgactaygtgcctaggtaatgatctctgcgatgaattccacaagtgttcattgagcttcttgtatttggatgtctagatctccagcaagaccagggaagttttcctc

SEQ ID NO: 451218 - DNA, 201 bp, Homo sapiens
aattcaaaagccttgtcttcaagctctgaagttttttcttctacttgtttaattctattgttaaactttcagtgtgttttgcatttctctaagtgtacctkttatttccagaagttgtgattgtctttgtgatatctatttctctggagacttttccatccatatcctacattttttttaattttttaaagttggatttca

SEQ ID NO: 451219 - DNA, 201 bp, Homo sapiens
tgatggactcacagttccacatgctggggaggcctcacaatgttggtggaaggtgaaaggcatgtctcacatggcagcagacaagagaataggagccaagmgaaagggtttccccttataaaatcatcaggtcttgtgagacttactcattaccatgagaacagtatgggggaaactgcccccatgattaaattatctccc

SEQ ID NO: 451220 - DNA, 201 bp, Homo sapiens
gtatactttactcacctactttcgtttttagagatagagactctgggaagccataaagaaaagtgagaaatttaactttattcaaaccagtgttttccacwcatcttgatcaaggaactctttattgcctattacctcttgacatcctatagaactgtaaacaattttgttctttttaaaataaatttatatgtttgtttc

SEQ ID NO: 451221 - DNA, 201 bp, Homo sapiens
aatatctgttaagtccatttgttctagggtatagtttaaatccatcatttctttgttgactttgtcttgatgtcccgtctagtgctgtcagtcgagtaccraagtcctctacaattattatgttgccgtctatctcatttcttaggtctagtagtagttgttttacaaatttgggtgctccagtattaggtgcatatatat

SEQ ID NO: 451222 - DNA, 201 bp, Homo sapiens
ttgcatttctctaagtgtacctgttatttccagaagttgtgattgtctttgtgatatctatttctctggagacttttccatccatatcctacatttttttwaattttttaaagttggatttcacctttctctgatacctcctttagtagcttaataatcatccttctggattctttatctggcaattcagagatttcttct

SEQ ID NO: 451223 - DNA, 201 bp, Homo sapiens
agaaatccattaatctgataggttgttctttataggtttcctggtgcttttgtctcacagctgttaagattctttccttcatcctgactttagataacccratgactacgtgcctaggtaatgatctctgcgatgaattccacaagtgttcattgagcttcttgtatttggatgtctagatctccagcaagaccagggaag

SEQ ID NO: 451224 - DNA, 201 bp, Homo sapiens
cctacttgcttttggtgtccatttgcatggaatatctttttccatccctttatcttaagtttatgtgagtcttcatgtgccagataagtctcttgaagacrgcagatatttggtgaattttaatccattctgccattctgtatcttttaagtggaacatttaggccatttacattcaacattagtattgagatgtgaggta

SEQ ID NO: 451225 - DNA, 201 bp, Homo sapiens
tcaagatttagaactccttttgccatttcttgtagtgctggcttggtagtggcaaattctctcagcatttgtttattttaaaaaggtgttatctctccttyatttataaagcttagttttgctggatacaaaattcttggctgataattatttgttaaggaggctaacgataggaccccaatccattctggcttgtagggt

SEQ ID NO: 451226 - DNA, 201 bp, Homo sapiens
agctgttgttcagattcttttgtcccacagggcaatcccttgatgtggtgctctcctgctttctctagggatggggcttcctaagagccagactgcagtgwttgttattgcacttctgggtctagccacccagcaaggctactgggccctggtgctggggaatgtaggctggtgctggcgaatgtctacaaagagtcctgt

SEQ ID NO: 451227 - DNA, 201 bp, Homo sapiens
cccaaaatttggtccaaaaacagggaacttctattatgatttctcaagttccttaaccacagttacttctaactggagattttgaggaatttaatgcctayggctgaaaagaaccattacaatacaagcccaatttacctcataggattatttggggaataaaatgagacaatagaaataagtttctttgaaatattttta

SEQ ID NO: 451228 - DNA, 201 bp, Homo sapiens
cttttggtgtccatttgcatggaatatctttttccatccctttatcttaagtttatgtgagtcttcatgtgccagataagtctcttgaagacagcagatayttggtgaattttaatccattctgccattctgtatcttttaagtggaacatttaggccatttacattcaacattagtattgagatgtgaggtactgttctg

SEQ ID NO: 451229 - DNA, 201 bp, Homo sapiens
gtgtgttttgcatttctctaagtgtacctgttatttccagaagttgtgattgtctttgtgatatctatttctctggagacttttccatccatatcctacattttttttaattttttaaagttggatttcacctttctctgatacctcctttagtagcttaataatcatccttctggattctttatctggcaattcagagat

SEQ ID NO: 451230 - DNA, 201 bp, Homo sapiens
acctgttatttccagaagttgtgattgtctttgtgatatctatttctctggagacttttccatccatatcctacattttttttaattttttaaagttggayttcacctttctctgatacctcctttagtagcttaataatcatccttctggattctttatctggcaattcagagatttcttcttggtttggattcattgct

SEQ ID NO: 451231 - DNA, 201 bp, Homo sapiens
gagagtgagttcagctggaagtaactccttccttctgagcaagcagctgacaaccttatgttgtcccccaattatctcccctcctgcctttttctggaatrgggatgggggatgaagaatcgtgaaactgaagagaaacctcccacttgagctcagcaagagaaagatgagaagaagccagacaaaagcatccccacacac

SEQ ID NO: 451232 - DNA, 201 bp, Homo sapiens
cttaattggaaaagtaaaaaatttggcaatcctaattcagctgccaaaatttcttagaaaattttactgtagcatataatccaaaagaatggggaactttkgtttagaaagcagaaatcccttgttttgccaactgggacattaggagcaatcgcagtgccttttattcatgagtattgtgtatgcagactatacaggaag

SEQ ID NO: 451233 - DNA, 201 bp, Homo sapiens
tgttcagagagctgcttagttattatatctaatgacctagttcagccaggacaaaaatgtgaaatatactttttctttctcctgtcccccaccacaaacaygcacacatccatgtgcatgatgtacattccttaagtacactgtgcacacacacatttcttttctccagaccctttgtgtcaaacattttacaattcctcc

SEQ ID NO: 451234 - DNA, 201 bp, Homo sapiens
gtctggaaccaggcataggtatttaattcgtatgatgaggctgaggctgacagtgtaaataataaattaaacctctcttgagctttgttttttcaatactycactgataaaatatgacttttaaataaaatttggaacttaaataccaagcttctagagagttgaactagaacagatttctcaatcttggtattattaaca

SEQ ID NO: 451235 - DNA, 201 bp, Homo sapiens
gttgcttatcagcttagggagatttggggctgagaatatggggttttctaaatatacaatcatgtcatctgcaaacatagaccatttgactctctctcttyctattcgaatacctttatttctttctcttgcctgattgccctggacagaatttccaacactatgttgaacaggagtggtaagagagggcatccttgtctt

SEQ ID NO: 451236 - DNA, 201 bp, Homo sapiens
ccaattaggccaaaagcacgtcccacccacttcaatgctcccatggcacgtattccagtgttaggagcatgttatttatgtgattatttgtttagtgtgtyaccctagaacatagggattctaacctcagatactcaatcttaaacaaaatccttatgactctaatgtcagaaatcctatctttaggaacaacagggaagc

SEQ ID NO: 451237 - DNA, 201 bp, Homo sapiens
tatcatttcaagtctttgaaatttttttgagacttgctttatggctagcctgtggcctattttaataaatgtttcatgagcccttgaaatccttgtaggcygggcgcgatggctcatgcctgtaatcccagcattttgggaggccgaggcgggtggatcacctgaggtcaggagttcaagacctccttggccaacatggtg

SEQ ID NO: 451238 - DNA, 201 bp, Homo sapiens
tgtcatccttcccagagcagcaagggtggttttcaatttccctaactcacttaatgtctgtctggagttctgtgcccaccaaaagagctaactgaacaaayaccctgtacccatcacaaaccgacaacaccacaggctcctggacgtagagcagcattgacctaaaaatctttcaaacatccccaaggcaaaagggcgatt

SEQ ID NO: 451239 - DNA, 201 bp, Homo sapiens
gcttccatgctcccagcttctacttctaggcttatctcctccattctcttaaggtttccagtactctcagtctctctcaccctcctctagaggaaaatctrttcttgaaatgaaatgtcagccatttatattttgtatacattcaaagatttgttctaataattagcagtactatctctcaccatgaaagaatttgtctcc

SEQ ID NO: 451240 - DNA, 201 bp, Homo sapiens
ttaactgccttaaaagaataatacacattatcttacagtttctatgggtcaggaatctttgagcagcttacctgagttctctgtctcaggggtttcctacraggacacaatcaaggtattagccaagactgcaggcccacctgaagactcaactggggaaggatccacttccaagctcactgacatggtgattagtcacac

SEQ ID NO: 451241 - DNA, 201 bp, Homo sapiens
ggtcaggaatctttgagcagcttacctgagttctctgtctcaggggtttcctacaaggacacaatcaaggtattagccaagactgcaggcccacctgaagrctcaactggggaaggatccacttccaagctcactgacatggtgattagtcacactcagttcctccaaggctgttgcacagagggtctcatttcctcactg

SEQ ID NO: 451242 - DNA, 201 bp, Homo sapiens
gggatagtgacattaataacaggaacacataaccagcttctgcacacctcctatgtaattctctgatcattctccctttgcttcaatgctgcacagacttyattccattccctctttaccacggtcactcttaagacgcctactactattatcccatttttgcaagtgatgaactagacatagagaagcagaatcactcac

SEQ ID NO: 451243 - DNA, 201 bp, Homo sapiens
ttataacctaagtgatacacccagtctctgtaggtggtttttttcacctgttacttcttagagattgtgttatattagtatacacaaccattacttattcytcttaatggccacataatattgtatagtagaaatgtaccaaaatttatgtaacagctccttatagatgaatatttaggttgatttaaatcttttcctttt

SEQ ID NO: 451244 - DNA, 201 bp, Homo sapiens
ttgaatgctgattatgctagcagtgaagttgtcatgtggacatactcaggacctctggttagccatggtgttgcaggcagtggaattagctgtcgtttttyccttctttggaggagggtggttctgttctgagttgctgtcatggcttgagtactccaaaagtacttttaagagtgtaccagctgcagtagtagaaggggg

SEQ ID NO: 451245 - DNA, 201 bp, Homo sapiens
aataaaaaaattcccatagtcagggccctcaaaggaaagcataactactttcatggcaaatgaaggtctgtgcatatagatcaatagaacagaagagtccraaagtgaacccatacaaatgattttgacaaaggtaccacagcagttcaatgggaaaaggataatctttttgataaataatgttgaaacaattgaatagtc

SEQ ID NO: 451246 - DNA, 201 bp, Homo sapiens
taatctttttgataaataatgttgaaacaattgaatagtcatatgtaaaaagattaatcttgaaccctatttcataccataaacaaaaattaaatcaaaayggatcataaacctgaatgcaagatctaaaattacaaaatgtattttaagaaagaaaaaaaagttagtgaccttgagctcagtgaagattcctttaaaaca

SEQ ID NO: 451247 - DNA, 201 bp, Homo sapiens
gcaagctatatactaggaaaaaatattcgcgtgacatgtatttaacaaaagacaatatgtctaaaatatgtaaagaactcttataacttattaagacaacscattaaaaaatagggaagaatgatgtgattattatgcagtgcatgcctgtatcaaaacatcctagataccccataaatatatatacctactatgtaccca

SEQ ID NO: 451248 - DNA, 201 bp, Homo sapiens
aaaatttggcaatcctaattcagctgccaaaatttcttagaaaattttactgtagcatataatccaaaagaatggggaactttggtttagaaagcagaaawcccttgttttgccaactgggacattaggagcaatcgcagtgccttttattcatgagtattgtgtatgcagactatacaggaagcaaggtcttaaggaaaa

SEQ ID NO: 451249 - DNA, 201 bp, Homo sapiens
attatgcagtgcatgcctgtatcaaaacatcctagataccccataaatatatatacctactatgtacccacaaccattaaaaattttaaaaagagatttgmacagacacatcaaaaaaattacggatggcaaataaacacatgaaaagcgcaacattgttagtctataaggaaatgaaaattggaaccacaatgaaatatc

SEQ ID NO: 451250 - DNA, 201 bp, Homo sapiens
cttagaaaattttactgtagcatataatccaaaagaatggggaactttggtttagaaagcagaaatcccttgttttgccaactgggacattaggagcaatygcagtgccttttattcatgagtattgtgtatgcagactatacaggaagcaaggtcttaaggaaaaaaagaattctagcctgcttggttattgcttatttc

SEQ ID NO: 451251 - DNA, 201 bp, Homo sapiens
tggggaactttggtttagaaagcagaaatcccttgttttgccaactgggacattaggagcaatcgcagtgccttttattcatgagtattgtgtatgcagastatacaggaagcaaggtcttaaggaaaaaaagaattctagcctgcttggttattgcttatttcaaaatgcaagcacacaatttaaaatccggtcacacct

SEQ ID NO: 451252 - DNA, 201 bp, Homo sapiens
caccgttttagccgggatggtctcgatctcctgacctcgtgatccgcccgcctcggcctcccaaagtgctgggattacaggcgtgagccaccgcgcccggmctataatatatattttacatgtttagattatacaatataatatcatattttacatatttatattatacaatatagcctaggtgtgtaataggctatacta

SEQ ID NO: 451253 - DNA, 201 bp, Homo sapiens
ctgttagcagttaataagtaaaggtgttggcttatattctgagggtatcaaggtgctcagacagcctaatttgcctattataggatgaaatttgatccctytcttgatgttcagatttggggagccatattccaaaactcttggtactttcctccattgcgtaaagacacaattctaagaacatttgtgaaatgtaaaaga

SEQ ID NO: 451254 - DNA, 201 bp, Homo sapiens
tcatattttacatatttatattatacaatatagcctaggtgtgtaataggctatactatctagatttgtgtgaatgcactctgagatgttcacacgacaaygaaattgtctaatgacactgatattgtttggatttgtgtcctgcccaaatctcatgccgaattggaggggcctggtggaaggtgattggatcatggggcg

SEQ ID NO: 451255 - DNA, 201 bp, Homo sapiens
tgctaagtggaatagtcattggattacaaatttgcagacctaggtcctcattaagcctgtcacaagctgcttctgtaacctttcacaggtcagttagcctytctggactttagggtaatccactatgctcacctcatagcattgatgaccccagtgagaagctacaaagggaaatggaaagattctacaaatggaagaaat

SEQ ID NO: 451256 - DNA, 201 bp, Homo sapiens
tccctttcttgatgttcagatttggggagccatattccaaaactcttggtactttcctccattgcgtaaagacacaattctaagaacatttgtgaaatgtraaagacagggtccaagaccctgtaagcatggcctacacgttgcctctgcggtaatggctgcggtggaagtgctgggtcttggaattactccactattcct

SEQ ID NO: 451257 - DNA, 201 bp, Homo sapiens
tgatgttcagatttggggagccatattccaaaactcttggtactttcctccattgcgtaaagacacaattctaagaacatttgtgaaatgtaaaagacagrgtccaagaccctgtaagcatggcctacacgttgcctctgcggtaatggctgcggtggaagtgctgggtcttggaattactccactattcctattgacaag

SEQ ID NO: 451258 - DNA, 201 bp, Homo sapiens
ttgcctctgcggtaatggctgcggtggaagtgctgggtcttggaattactccactattcctattgacaagcaaattctggagcacagccagagtggaaatraaggatgagttactatattgaaacaggaaatagaatttaagaaaataggtacaaaattcagatttttctctctggaggaagatgtttccgaaaagaaaat

SEQ ID NO: 451259 - DNA, 201 bp, Homo sapiens
agaagtcccaaggtaagagaggtccatagattgtcaatggagtaaatcagtaatattaccaagacttggattatgacctcttcagtgggctgtctctttcmtcagtctccagcaaacttcctctcacatttattggccagaaatgtgttacacacccttgcctaaaccagtccttagcaaagcaaatggaaccaccatgat

SEQ ID NO: 451260 - DNA, 201 bp, Homo sapiens
agagtggaaataaaggatgagttactatattgaaacaggaaatagaatttaagaaaataggtacaaaattcagatttttctctctggaggaagatgtttcygaaaagaaaataattagcctttggtgaggttggaatgtaaggaatgaaaagtttgcatgaggaaggtgaaaaggcatgcttggagggagcacagaaaaga

SEQ ID NO: 451261 - DNA, 201 bp, Homo sapiens
atcaggaaacttttcatcttgaatggatgagaactatgagtgaatccatcaattttaaggaagaaggaaaattattttctccagaactctaatacgctgaraactctaaatgctgccaggctgcagaaagctgtgcactccagaaccttctagcttctaccctatttccccatttggccattcttcctcctaagttacctg

SEQ ID NO: 451262 - DNA, 201 bp, Homo sapiens
atcaacaggaaaagaaaagctaaaaattagttttttagataagaatttgagttgttgcctgaaaattacctgcagtagttcattctattaaaaaggactcycaaattcattgtcccaagcattgcttaccaccattcaagtataggcaattgctttgtgcagccaaaagaagataattttgcaagatctcaccattcagtt

SEQ ID NO: 451263 - DNA, 201 bp, Homo sapiens
tctgattatctgggttaaagccttggaataagttatcgtgtttacctgtgtttccttcatgatacaaactaaggactaaattgttattcaaaatgtcaatygtcattccagaagaggctttgaaaaaattataatctagatagatccaccagacagataccagccaggacttttcttatgaagcatacaaaatatttaatg

SEQ ID NO: 451264 - DNA, 201 bp, Homo sapiens
attccatgattgagattagccttccatgtttattctctccaaaaatgccttctccaactcccatactactccctgactacatgtccttctctctacagaaytataatcaaaaagaaaaaaacaaaaaaattttggttcagggcctcggtttccagattattaaaaaatctgagtcacagattttgccatttccttcactcc

SEQ ID NO: 451265 - DNA, 201 bp, Homo sapiens
acacctcaggaacttcttcccgtttctggaactcgttcttctacctggagcactcttccccaacctctctacctagctaactcctgcgtttcttcaggtamctttaaataaatgttccttttcccacgagcccttccctgactataccactgtgtgtgtgtgtgtgtgtgtgtgtgtgtgtgtgtgtgtgtgtgtgtgtgt

SEQ ID NO: 451266 - DNA, 201 bp, Homo sapiens
gtgaaactccacaaagagctcctgaaaataactctaggagattttgagggctggcaaggattctacagcatgtcaaagggaccaagagccagcaaacagtrcattacaaacctatttaataagaagcaaaagaaagacctgggtggaagggccctgcagggcttcaaatgaaagggaaatttcaaagcttcctggaagagt

SEQ ID NO: 451267 - DNA, 201 bp, Homo sapiens
ataaaagatcacagagtgtcccaatcttctgacacctcctccagtgcctagctgattccaccatacagcctccccaaattcctgccccccacgcaggacayggaagctttactttcacaagagcatttattaacttatttttctgatttaaataaataattcctattttctacagaggacttggaagatttaacaaggata

SEQ ID NO: 451268 - DNA, 201 bp, Homo sapiens
ctttgaaaaaattataatctagatagatccaccagacagataccagccaggacttttcttatgaagcatacaaaatatttaatggtgtctgtgcctagaaytggattcaagtcagataataaggcaaattcagagaaaatgattagaatctgaaagggcccagaaagacaaatctaacctcttttccagattcttaaatca

SEQ ID NO: 451269 - DNA, 201 bp, Homo sapiens
gtgtaagtaaataaacactaacatagcaattgtgtgaaacaatctagtttcaaaaatttattaaaatgtggaaaaaggacattttgtattctaataaatawagcttttactgaaatggattaggaagaaatgacaagttctacagagaaatcactctattccccttatctttgtttcttcctctgtaaatgggtttcggta

SEQ ID NO: 451270 - DNA, 201 bp, Homo sapiens
agatatcggtagacttccccaggtgcgacaaccaaaaatgcctctagacattgccaaatgtcctctgggggacaaaattgcttccagttgagaaccactgmtataggttggcttgaaaacaggcaatggttttaagttaggcgtgttcttgattttttcctcaggtaatgtcagcttacaaattctttacaaattgggaca

SEQ ID NO: 451271 - DNA, 201 bp, Homo sapiens
gaaataaaagtataaaagatcacagagtgtcccaatcttctgacacctcctccagtgcctagctgattccaccatacagcctccccaaattcctgcccccsacgcaggacacggaagctttactttcacaagagcatttattaacttatttttctgatttaaataaataattcctattttctacagaggacttggaagatt

SEQ ID NO: 451272 - DNA, 201 bp, Homo sapiens
aagcttctcatttgcctattcttgtgctttctggattcacgcctgcctctggctactcaactctctaattcactaattggctatttctacttccccaagaygcttgccttgtccttctcagtcaactgtgttttcttacatctctaacaacttctggtccttactgtctgccattctttcaatttcccattggtagcctat

SEQ ID NO: 451273 - DNA, 201 bp, Homo sapiens
actttaggctggaagaaatggaaaagaactcaagtgccttaagcagtaggtatcaggctctccatgtgaacttagcagtgtcccttaccatgcattttgarcttgtctaagtcagggtttctccccttcagttctactgatgttttgttggggagatgactggtgggaaatgttctgtgcattcaccatagatgtttaaca

SEQ ID NO: 451274 - DNA, 201 bp, Homo sapiens
atgccaagtgagccaacagaagccttttgaacaggagcatgtcacggagaaagcccatgatagcaaaagtctgcccagggagcatgtgcaggagagtgagktcagctggaagtaactccttccttctgagcaagcagctgacaaccttatgttgtcccccaattatctcccctcctgcctttttctggaatggggatgggg

SEQ ID NO: 451275 - DNA, 201 bp, Homo sapiens
acctaaaaatctttcaaacatccccaaggcaaaagggcgattgctatttggcaattcaaagtgagatctgcagaccaacagcatccacagcacctactacytccttagaaatgcagaattctaggcctcacccagaccatcctactgagtccaaatatacattttctcaagatccccatgtatttcatatgcatgttatgg

SEQ ID NO: 451276 - DNA, 201 bp, Homo sapiens
tcaatgtgtactattgtcttttaattgctttcagcttcatgaactttgaacaacttttatcacctctcagctcagcactgattcatccagcttctgtgagrgatttatttacttttaattagatccaacttaattattttgtcagtaaaacataccaaaagaatctataaaacaatttttaagtgaaatcacatttctgcc

SEQ ID NO: 451277 - DNA, 201 bp, Homo sapiens
tacattttctcaagatccccatgtatttcatatgcatgttatggacctaaaggacaattccttgtggtcattcacctggatttcttcttattttcgagagwtctttctgctttaaccaacaaaaagaagcacataaatactaagagtacattatttaaatagcccacactattattgtactgggcaaagaacacatttcat

SEQ ID NO: 451278 - DNA, 201 bp, Homo sapiens
caaaaggttgggaactgctgttagaggacacaagaccacagtccaggtatcacagccacatcccacagacaccacctcccgttggcttcctggatgacagkcacagtgttcaggaggaaatgagcagataagaaaagtcaacctggcacataaacccacaagggatgatacactttgcaggcatcatctgagggtagtatt

SEQ ID NO: 451279 - DNA, 201 bp, Homo sapiens
tttttcacctgttacttcttagagattgtgttatattagtatacacaaccattacttattcttcttaatggccacataatattgtatagtagaaatgtacmaaaatttatgtaacagctccttatagatgaatatttaggttgatttaaatcttttccttttatatacaatgctgcaataagtatatcctctagagaattg

SEQ ID NO: 451280 - DNA, 201 bp, Homo sapiens
ttaaatcagtatgctggccagggtgtcaaaaacacacagagaaatctcagcctctgagttctgactgggctttttcaagtatggacatattgttataagcrtagagatgactaggctgactgaacctttcccttgggccaagtgtcacaggaaaaacttattaataacaaaagcagtagcagaggctacattttgagttcc

SEQ ID NO: 451281 - DNA, 201 bp, Homo sapiens
gacatacctagccagtgcctggcatatagtaagcacacagtaccagctgactaattttatagctgttcctgaaagattgtttctcctcatttcataaatgyacaaactcagaatccaagaaggtaaataacttgcccaagaccaaaagtagcagaactgggactcgaacttaggtcatctgcctcattaattcttcaaata

SEQ ID NO: 451282 - DNA, 201 bp, Homo sapiens
atacctagccagtgcctggcatatagtaagcacacagtaccagctgactaattttatagctgttcctgaaagattgtttctcctcatttcataaatgtacraactcagaatccaagaaggtaaataacttgcccaagaccaaaagtagcagaactgggactcgaacttaggtcatctgcctcattaattcttcaaatattt

SEQ ID NO: 451283 - DNA, 201 bp, Homo sapiens
tatgctcacctcatagcattgatgaccccagtgagaagctacaaagggaaatggaaagattctacaaatggaagaaatcatatagtttttgtttttcctgaaaaaaaaaaaaaaaaaaaaagtagggggacttgccccctggagtttgaattggctgtggtttatctttattttcttgcatgcacaaatgcctttttatgt

SEQ ID NO: 451284 - DNA, 201 bp, Homo sapiens
tgtttctggaagcctggcaactgtgccacccagctgtaagccacatcaacacctgcaaatagcgaaacccctctgcgctcccccccacaaccccggccgctttttttttttttttttttttctctctcaatgctcagctggacccagatacctcttcatcctgggagccatcagtccggctaagggtctatggtggacttg

SEQ ID NO: 451285 - DNA, 201 bp, Homo sapiens
gtttctggaagcctggcaactgtgccacccagctgtaagccacatcaacacctgcaaatagcgaaacccctctgcgctcccccccacaaccccggccgctttttttttttttttttttttctctctcaatgctcagctggacccagatacctcttcatcctgggagccatcagtccggctaagggtctatggtggacttga

SEQ ID NO: 451286 - DNA, 201 bp, Homo sapiens
tataacccccttcccttccccaacttcaccagctgagctctagccacagtggagtcccctcagttctctgaacatgtcaaactctctttcccaccttagtmcctttgaacttccaagtcctctctgtctagaaatgcaccctcaccctccccaacctcctcagctcttggcttgactggatccttctcacccttcaagtct

SEQ ID NO: 451287 - DNA, 201 bp, Homo sapiens
ttctggaagcctggcaactgtgccacccagctgtaagccacatcaacacctgcaaatagcgaaacccctctgcgctcccccccacaaccccggccgctttttttttttttttttttttctctctcaatgctcagctggacccagatacctcttcatcctgggagccatcagtccggctaagggtctatggtggacttgagg

SEQ ID NO: 451288 - DNA, 201 bp, Homo sapiens
aacatgtcaaactctctttcccaccttagtccctttgaacttccaagtcctctctgtctagaaatgcaccctcaccctccccaacctcctcagctcttggyttgactggatccttctcacccttcaagtcttggtttaaatgtcaccacctcaaagaaaccttcccttgcccaccttatctaagctccttgttttcattat

SEQ ID NO: 451289 - DNA, 201 bp, Homo sapiens
gaggtgggatgatcacttgaggcctgtagttcaaagttacagtgagctatgattacatcactgcgtttcagcctgggtgacagagtaagactctgtctctaaaaaaaaaaaaaaaaaaaaaaaggaattatagcttctcaggtaaacttgtgtcatgggggttcatggtacagattatttcattacccatgtactaagcct

SEQ ID NO: 451290 - DNA, 201 bp, Homo sapiens
ctttgaaactagatgtgattagtgagttctgaaaccccctgacaactcagggggagattttgctgtccacccttgggtgcccccaagcagctggaacagaytgtatgtggaagttttctctagattcctgcctccttccctacagttcccaccctaagaagattgccgtttaagctccaggttaaagaaaatcctgatatt

SEQ ID NO: 451291 - DNA, 201 bp, Homo sapiens
agtaggaaaagcaaatgcctataatggcaaggggaatgtaacaaataaaacaggtggtgaaggtgaatgtatgacctctaggaagcagatgaggacagggkcaaaactttaccccatctaaccatcactggaccattagtgattgttgctagacagttccaacaagtctgtaatctggattgttaattgaaacgttcttct

SEQ ID NO: 451292 - DNA, 201 bp, Homo sapiens
aggagcatctcatagaatctaagagccaagagagcagtcagccctgtgtggatagtaatcggggaatataaagtcaaaagaagtctttttagccatctgtyctgtcttttagctcttcttcatgttttctttgtaagactggcctaggaacccactcatcagcttgaatgtggcccatcttagctgaccagcacagtagcc

SEQ ID NO: 451293 - DNA, 201 bp, Homo sapiens
gtcatctcactggagagtaggaaaagcaaatgcctataatggcaaggggaatgtaacaaataaaacaggtggtgaaggtgaatgtatgacctctaggaagyagatgaggacagggtcaaaactttaccccatctaaccatcactggaccattagtgattgttgctagacagttccaacaagtctgtaatctggattgttaa

SEQ ID NO: 451294 - DNA, 201 bp, Homo sapiens
catatcccttgttgcatggctgtactcaaatttgttagcacttaatgttagttcaaacccacttctactgctaaaggggtctcccggtgatggtcaaactkaattcccagcctacatgcctctacttgaatcaattggcctgtctcaccagcatttcatccacatgtatgggtgcatgtacatgaggtgtgtgcactcatg

SEQ ID NO: 451295 - DNA, 201 bp, Homo sapiens
tgtttttattgtaacttttctatgtttagatacactacttactattttgttacaatgacctacagtatttagtaaagtaacatgctgtacaggtttgtagyctagtcacagtaggttagaccatacagcctaggcatagagtaggctttaccatctgggtttgtgtaagttcactctatggtgtttacacaataaaaaaat

SEQ ID NO: 451296 - DNA, 201 bp, Homo sapiens
tagtcagaagacccacgtagccagaacttacaactgggtgggaaaagtgaggcttcctctgttgcaaaaaggcttcctccatgtgccaaaatgtaccaccrcagtttactccaggattatctcatcccagcccagtgatgacaaatcaaagaacttctatcttctcctgttttctaaattctaaatccctaaaaagacttt

SEQ ID NO: 451297 - DNA, 201 bp, Homo sapiens
attagtcggccttatccaggctaacctctgtcttaaggtaaactgctttgggaccttaaatacatctgccatacccctttccagcagtacctagaatagtrtggaaccgaacaagtgggagacagtatgtgtgaaacaggagccaggaatcttgaggaccatcttagaatccttcctaccacagatacatttttcttacca

SEQ ID NO: 451298 - DNA, 201 bp, Homo sapiens
ggccttatccaggctaacctctgtcttaaggtaaactgctttgggaccttaaatacatctgccatacccctttccagcagtacctagaatagtatggaacygaacaagtgggagacagtatgtgtgaaacaggagccaggaatcttgaggaccatcttagaatccttcctaccacagatacatttttcttaccaactctgg

SEQ ID NO: 451299 - DNA, 201 bp, Homo sapiens
gaagagaatgagatcattacatggcttcccaatttcatcttgataaactctgaagctgccatattgcagtagttttcaactataggtgggaagcttgactytcctttgagttcaaaggagaaaactgttgcttaaagaaaaatgtgttttttccctaagtatgagttactccttccagaaaaaaaataaaaaagccccatg

SEQ ID NO: 451300 - DNA, 201 bp, Homo sapiens
agaaataccgccactttcaagcactgttttcttctactggagtctgctcaatagggacgtcagctttgctggggtaagtaaaagcatcctggccttaaccyatataatgggggagtaattgcctcttagaatcatcaagtctaagttctgaattaggcccaggatatgactacttttctttacactgcatttgaaatttca

SEQ ID NO: 451301 - DNA, 201 bp, Homo sapiens
cattctaaagtgaaacagtgtgggtcatggatgagacaagaatggcagcagtggggattaagcaatgtgtatgggttctggaaattttatgacttagaacmaacaatagttattatgggtgaaagagagaagtgaaaaatgaagtccatgttgctggatgactgagtgaacaatagtgccactcactaaacaggagtcagt

SEQ ID NO: 451302 - DNA, 201 bp, Homo sapiens
cttccagaaaaaaaataaaaaagccccatgcatgcaggtctgtgatgaatacatttaggacagtcctgtggcctgctattaaggctggagtgacactatcyctaaccctaaggtgaaaagtaatgttaaaaataaaaattatactgagctgctagttattttgcctacaggagtgcatgcctgtgtctggtggaacttggt

SEQ ID NO: 451303 - DNA, 201 bp, Homo sapiens
tgaggacacgaaggcataagaatgatacaatggactttggggacttggggtgaagagtggaagggggacaagggataagactacaaatatggtgcagcgtrtactgcttgggtgatgggtgcaccaaaatctcacaaatcaccactaaagaacttatgtaaccaaactgtaccacaataacttatggaagaaaataaaaaa

SEQ ID NO: 451304 - DNA, 201 bp, Homo sapiens
caccaaaatctcacaaatcaccactaaagaacttatgtaaccaaactgtaccacaataacttatggaagaaaataaaaaatttcctttgaattaaaaagtyctcctggaggaggcatacaacttacatgtgtatatgtaatttgtaatatatgtgtatatatacttctatataatggaaatacctgttatgtataaacaca

SEQ ID NO: 451305 - DNA, 201 bp, Homo sapiens
tgctgccacctcactgggattgagtgaatgaggaaagttcagatgctgtttccaagtgaagttttatactttatgaagaactatttattatggctttaaarttatttatgtgtttactttagataatacgtggacatggtaaaaagcatgtttaatgcattatgaatatttactgaaaattaagctttctgtagagactgt

SEQ ID NO: 451306 - DNA, 201 bp, Homo sapiens
aagtttctggagacttttcttcttttcattttttataaaatacccttttattaagagatgaagttgggtagtcagaataggagtgggtattgtttagtagraaaaaaacgggctttggaataaaacttgcatatgaattacagttctgcttcctataattgtgtaaccttggcaagttacttcgcctgtcaaatgctcaca

SEQ ID NO: 451307 - DNA, 201 bp, Homo sapiens
tcattttttgccattgattagtattgcacctcaggaattaatgataatttctttactcaatcctcttttaaactatacctgtcattcttagctatatcatyactatttttaattacatcaaaacattcttctgcacagagatatttctctgcacatattgctgtctctttagtaagctccttgaagagtcattgctaggtc

SEQ ID NO: 451308 - DNA, 201 bp, Homo sapiens
agggcatgtctgactttttctgatttcaggatctgaataaatcaagctgggatccttaactctaagtctctgcttttggtctgattgtgctatggcaatgstactaattgtactatggcaaccgactgaaaatgatgttgaacaagagaatgagatggtttccttttgactttccttttactgctaagtggtcctcaggag

SEQ ID NO: 451309 - DNA, 201 bp, Homo sapiens
gttcctgaaagattgtttctcctcatttcataaatgtacaaactcagaatccaagaaggtaaataacttgcccaagaccaaaagtagcagaactgggactygaacttaggtcatctgcctcattaattcttcaaatatttatgggtgcctcctatgttccaagcactgaggatagggaaataagtgagcaaggcacaatcc

SEQ ID NO: 451310 - DNA, 201 bp, Homo sapiens
gagaggccccctgcagaaaacaaagaggccttgcccttcacaaacagacaaagccagacgcagctggagcctaagtttgtgtctctgttacttgcaaaacrtaacacccagcaaaatacagagactagatttgtatttttgttcccaacctgaaattaagaaatctaaagcaataagtccttcgtggaccaggtttccacc

SEQ ID NO: 451311 - DNA, 201 bp, Homo sapiens
gtgtacaaattctgaatatcaagaaagattgagagatttgcctaaagtcatgcaacaatttgatgaaagagaatcagaaccctggatatccctggttcttmggcacacttagatttcagctgcttctccgggggaaatgtgataacgcctggaggctgctttgcacagccagtacaacctgtggagaactccgtcctcatt

SEQ ID NO: 451312 - DNA, 201 bp, Homo sapiens
tgtttctgatgcttttctgagacctttctatcaatcaggctacagatccagataggacacatgatgctgactcacctgcaatggctgatattcttaacaarttttaatgaaggacagtgaggatgaatgcaaatgcctggaggattgcatagatttctgtaaatatgaaaggtaaagaagagataggacggtccctcctga

SEQ ID NO: 451313 - DNA, 201 bp, Homo sapiens
aaatggactattacagcatttctcagaatgtattccctttgctgggtgaagcatgactatatgtgtagtgtattataccttaaatatacctcaataaaacygtagaaaaatgaaataaataaaaggtgacacattggtgatctttggctgcctttttcccatttgaagggctgtggcatctgtgtctatcctgtagtgcta

SEQ ID NO: 451314 - DNA, 201 bp, Homo sapiens
cctgtcatcactaggagggttctgctggtatagtcatttggtgattagcctgcccatccacaaagaactaacaaggcaataattgcttagatattgcacaytggtgacattggtggccttgtcttgggtaatcttcatcattaagtatggattgagttacaccaatcattttagagtcaaaggcatagcttggaggtcacc

SEQ ID NO: 451315 - DNA, 201 bp, Homo sapiens
acagcaagggtgcttatagaaaaggtattcaaaacgagcagagtgccatctacactagagcaacatcgaggctagggatttaaacttatcatactgagttscacccatggtatgtatgtatcttagaaggaggaacgacgtttcctcactgtaaacttagataagcacggcttcaccctctggcagccatcctttgacttt

SEQ ID NO: 451316 - DNA, 201 bp, Homo sapiens
gagaatcttcttctgatccttacagttagaacttcatgttcagagagctgcttagttattatatctaatgacctagttcagccaggacaaaaatgtgaaayatactttttctttctcctgtcccccaccacaaacacgcacacatccatgtgcatgatgtacattccttaagtacactgtgcacacacacatttcttttct

SEQ ID NO: 451317 - DNA, 201 bp, Homo sapiens
tgtagaatgtaccacaattgtgaaatgtgggccccgtcccaattccaggtatcctgtgctgttccttatgtaacacgcacttcactctcctgtcaatcttkataataaacacagtcagaagacaggattggcaacaaagctgtctttgaaagctttcaggtgagaaggaagagagctgggtctctaggaaagaattaaatt

SEQ ID NO: 451318 - DNA, 201 bp, Homo sapiens
cactggagcccaggagttctaggctgcagtaagccatgatcatgccaccgtatcccatccctgggtgacatattgagaccctgtgtctaaaacacacacaygcactcatactcttagctaaaaatcaaagttattttgctaaagaagggaagactggattgggaggtaactagcaaactctgctccaggaggtgttttgat

SEQ ID NO: 451319 - DNA, 201 bp, Homo sapiens
tcggtgccaatcatggttgtgctcccaattgcattttccttgagggtcagcagtctaagagatgcctgcacgttagaaacaaaaaataaagaataaacgcygtaaataattaattaaaccaggaaaccccctttcagtgtccattcgtttttctgccatgtaagaagtaatggtaggatgcggaagacctgtgtccttagt

SEQ ID NO: 451320 - DNA, 201 bp, Homo sapiens
attaaaaacttttttattgttgttattattattttttgagacggagtctagctctgtcgcccaggctggagtgcagtggcgcgatctctgctcactgcaakctccgcctcccgggttcacgccattctcctacctcagcctccccagtagctgggactgtaggcgtgtgccaccacgcctggctaattttttgtatttttg

SEQ ID NO: 451321 - DNA, 201 bp, Homo sapiens
tctgtcgcccaggctggagtgcagtggcgcgatctctgctcactgcaacctccgcctcccgggttcacgccattctcctacctcagcctccccagtagctkggactgtaggcgtgtgccaccacgcctggctaattttttgtatttttgtagtgatggggtttctccgtgttggccaggatggtctggactcctgtcctcg

SEQ ID NO: 451322 - DNA, 201 bp, Homo sapiens
tggtacaagagaaggcccgcaagtccatcgagttcctcgagcagcgattcgagagtcgggactcttgcctgcgagccctgaccagccgtggcaatgaactygaatccatcgccttccgcagtgaggacatcactggccagctggtgagaccctgtggcaggaagggaaagcccacagccagcttccagaacaaggtctcca

SEQ ID NO: 451323 - DNA, 201 bp, Homo sapiens
ctcccgggttcacgccattctcctacctcagcctccccagtagctgggactgtaggcgtgtgccaccacgcctggctaattttttgtatttttgtagtgayggggtttctccgtgttggccaggatggtctggactcctgtcctcgtgatccgcccgccttggcctcccaaagtgctgggattacaggcgtgagccaccgt

SEQ ID NO: 451324 - DNA, 201 bp, Homo sapiens
tgttttctctgtttggaatgttctgcatccagccatctgtctggtgaatacctcgcctcctataagtctttgcttaatgttacttctgtgagacctgcccyaaccatcctatttaacactgctgcattctactccaaacctgcactctttatcttccaattctattgatttattttctaaatactagataattaatgtgta

SEQ ID NO: 451325 - DNA, 201 bp, Homo sapiens
catcagcctgggcagctgagggccagccaccatggaggcccaggtgggggagttccttctcccctaagtcactcgtagcacagtcagatcaggccaggcarggccagcgcatgcatgggagggatcggggaggtggccctgcccagggcccccgaggcagaggatccctcctcctcctccacatggcgcccccttctgccc

SEQ ID NO: 451326 - DNA, 201 bp, Homo sapiens
gagtgcactggcgcgatctccgcgtactgcaagctccgcctcctgggttcacgctattctcctgcctcagcttcccgagtagctgggactacaggcgcccrccaccacgcccggctaattttttgtattttttgttgagacggggtttcaccgtgttagccaggatggtctcgatctcctgacctcgtgatccacccacca

SEQ ID NO: 451327 - DNA, 201 bp, Homo sapiens
gttttatttctagtcttttttttttttttttttaagacggagtctcgctctgtcgcccaggctggagtgcagtggcacgatcttggctcactacaaactcygcctcctgggttcataccattctcctgcctcagcctcccaagtagctgggactacaggcgcctgccaccacacccggctaattttttgtatttttagaga

SEQ ID NO: 451328 - DNA, 201 bp, Homo sapiens
ttcaccatgttagccaggatgatctcgatctcctgacctcgtgatccgcctgcctcggcctcccaaagtgctgggattacaggcatgagccaccgcgcccrgccctatttctagtcttagaaataattatgcatcctactttttctttaagaaaaaattatctttaagggatcatggaatcttgaaatggaaaaagacttt

SEQ ID NO: 451329 - DNA, 201 bp, Homo sapiens
gatcacttgaggccaggagtttgagaccagcctgggcaacatggcgaaaccctgtctctattaaaaataaaaaaattagccaggcatggtggcgcatgccyatcatcccagttactcaggaggctgaggcacgagaatcacttgagctcaggaggtggaggttgcagtgagctgagatcgcgccactacactccagcctgg

SEQ ID NO: 451330 - DNA, 201 bp, Homo sapiens
cctcttcctgtctcacaggattaccatgataatcaaatgaaataacataattcctagtaaccatctgtcaccacttcatctacaccacagctttcccagtaaaatgggatatttaggccaccaagaaagcgtgatcaatgaaaattgcagaggaagtaagatgctaacttgctctacctgccactaccctgaacctttttt

SEQ ID NO: 451331 - DNA, 201 bp, Homo sapiens
ccaggcatggtggcgcatgcccatcatcccagttactcaggaggctgaggcacgagaatcacttgagctcaggaggtggaggttgcagtgagctgagatcrcgccactacactccagcctgggcaacagagtgagacgctgtctcagaaattattagggggaaaaaaaagaatagagtaaacaattgttttcatatttgtt

SEQ ID NO: 451332 - DNA, 201 bp, Homo sapiens
cctccagggttacatctaacactctaccttatgttttaagtattagggctatcaggatgaattgggaaaaagctaatctggaactagcattttcttactgttttttctgttctagttggtacctgaaggcccagcacattgctcccaagaatgggcgcccctataaccagttggctttgctggcagtgtatacggtaagaa

SEQ ID NO: 451333 - DNA, 201 bp, Homo sapiens
cgccattctcctgcctcagcctcccgagtagctgggactacaggcgcccgccaccacgcctggctaattttttatatttttagtagagacggggtttcatygtgttagccaggatggtctcgacctcctgacctcgtgatccgcccgcctcggcctcccaaagtgctgggattacaggcgtgagccaccgcacctggccat

SEQ ID NO: 451334 - DNA, 201 bp, Homo sapiens
taaaggcttcagcattctgtagttacgatggatttttactacctgaaatactatgttttagaacagaatatcgacaaaaaaactgcccttttcttgggttytgagccttccctacaccagttgcttccttgggaccataaattactggcaattggagttttgaggttgaaagctttctgaatgccttggcctaaaagagag

SEQ ID NO: 451335 - DNA, 201 bp, Homo sapiens
tggcttccctgtggaaaacccaggccaggtggcctgtagcacagaacgttcaccacatgctcaacttgttgtatttgcttgagggctattttttttttttwaatgtatagttttttgttttgaaagtgtgttatgtaggtggcattttcttttctttcttttttttttgggacagagtctcatgctgtcaccctgggctgg

SEQ ID NO: 451336 - DNA, 201 bp, Homo sapiens
ttttgaggttgaaagctttctgaatgccttggcctaaaagagagagaatgagaatgtgtatgtatgtgtttgtgtttgtgtggagagagcgtgtgtgtgtrtgtgtgtgtgtgttcatgtgttcatatctttaaaaccatggaggctttgactgtgaatttgccttgttctcaaattggtggccagtgaatattgtgcgtg

SEQ ID NO: 451337 - DNA, 201 bp, Homo sapiens
aagctaccttctttatgtatcttaaattttcattcatttcgtaagcgtttatctagtgttaggtatgtgctagacactgtactgggtgttgaggataaaakaatgatacagttcagtgcagggacagatagattaaaccaacaattgtaatgtcatatgtactatggtagtggtatatagcagtgctccccagcctttttt

SEQ ID NO: 451338 - DNA, 201 bp, Homo sapiens
gcaactacaggtgcccgccaccacagctggctaattttttttttttttttttttttgagacagagtcttgctctgttgcccaggctggagtgcagtggcgmaatctcggctcactgcgagctccacctcccgggttcacgccattctcctgcctcagcctcccgagtagctgggactacaggcgccctccaccacacccgg

SEQ ID NO: 451339 - DNA, 201 bp, Homo sapiens
ggagatgttggggcattagattctcatgaggagtgcatagcctaggtccctcgcatgcttagttcacaatagggtttgcgcacctgtgagaactaataccrctgctgatctgacaggagttagggttcaggtggtgatgcttgcctgcccaccgctcagaccagagactggtaccagtccgcggcctgggggttgggtacc

SEQ ID NO: 451340 - DNA, 201 bp, Homo sapiens
ctaataccactgctgatctgacaggagttagggttcaggtggtgatgcttgcctgcccaccgctcagaccagagactggtaccagtccgcggcctgggggytgggtacccctgatatagagtgttgaagggccatagggagaagtgaatctaacgtagcctggtggggccaaggaaggcttcttggagattgtcaagctga

SEQ ID NO: 451341 - DNA, 201 bp, Homo sapiens
aggaggatgctttgccatcctggagctgtcaggcacagctttgctttggcagcaccgtcgcacacatactggtgggagaggggacgtgtttatcacttttcctggagattatctgtttaagcacttctctgacagttacaataacaagggcagtgtgttgtgtttcccagcagaaggacacttgctgttgaaagatgtata

SEQ ID NO: 451342 - DNA, 201 bp, Homo sapiens
accactgctgatctgacaggagttagggttcaggtggtgatgcttgcctgcccaccgctcagaccagagactggtaccagtccgcggcctgggggttgggkacccctgatatagagtgttgaagggccatagggagaagtgaatctaacgtagcctggtggggccaaggaaggcttcttggagattgtcaagctgagtttt

SEQ ID NO: 451343 - DNA, 201 bp, Homo sapiens
cttccagatattgtctttttatttttttagtgatgtgattgattttccaacattttattatacagcaaagttgaacattctccagtgagctcacttatacscagtacctacatgctgtgattctcattttactgtatttgtcttatcatgttatctgtttatttctctctctccctctcttcccccatctatccacccatc

SEQ ID NO: 451344 - DNA, 201 bp, Homo sapiens
aaagaatagagtaaacaattgttttcatatttgtttgtctctttatagtttataaaatatttttacatttatttcctccagttaccctatagagtagttayttttacattcaggtgaagaaactgagtcccagagcatctcaaagacttccttgagatccaacactattccgtagagtcagatctcctgactactaatatc

SEQ ID NO: 451345 - DNA, 201 bp, Homo sapiens
gagctcacttatacccagtacctacatgctgtgattctcattttactgtatttgtcttatcatgttatctgtttatttctctctctccctctcttcccccrtctatccacccatccatccattttttcttcttttaaataatttttttaatgcctataatcctagcactttgggaggccaaggcgggcagattgcttgcag

SEQ ID NO: 451346 - DNA, 201 bp, Homo sapiens
tcgtaaactttcttaaaacattatgagcttttttgccccccgcttttttttaagctcatcatctatagttggtgctattatattttacgcgtggcccaagrcatttcttccatcgtggcccaggatacccctgccctacagctttttccaaagatgattttgttagactccaacaattatgacacttcccattgcttcaca

SEQ ID NO: 451347 - DNA, 201 bp, Homo sapiens
cccattgcttcacatcctctttctggtaggtgtgtggtgactggtgatatatcatttttggctttaatttgtatctccctgatgactaatgaagttgtatrctttttgttttttcagacagggtcttgctctatcacccaagccaaagagcagtggcacaatcacagctcactgcagacttgacctcctgggttcgggcaa

SEQ ID NO: 451348 - DNA, 201 bp, Homo sapiens
caaagtgctgggattacaggcatgagccactgcgcccattcctgttgttttgttttttgagacggtcttgctctgtcacctaggctagaatgcagtggcakggatgactcactgcagcctcaacctcccaggctcaagtgatcctcccacctcaacctcccaagaagctggaactataagcaagcaccaccacacctggct

SEQ ID NO: 451349 - DNA, 201 bp, Homo sapiens
ggggcaggatgctgacacaccgtagtgtcagggccctggctcacccacctgcttgcctgctcgctgtctggctcattcaccactctgtccccataggctgkcctggaggaccacagtcagatgaggcagatggagctcgaaatcagacctttgttcctcgtaccagacaccaacggcttcattgaccacctggccagtctg

SEQ ID NO: 451350 - DNA, 201 bp, Homo sapiens
tcatgctttctgttctttttgttcgttttatttaaaaattcttacgacaaacgctagaatccttatgggagtaagtttaatttacgtatcagttttgagaraattgacatcttaacaacatttttctagtttatgaacatagtatagctagccttttacctaggtcttttatacttttcactgtacaggtcttatacattg

SEQ ID NO: 451351 - DNA, 201 bp, Homo sapiens
gaccacgtatatctgtggtcccagctacttgggaggctgaggtgaaaggatcacttgagcccaggaggtcaaggctgcagtgagccatgttcacgctactrcactacacactgggcgacagagagagaccctgtctcaaaaaaaaaaaaaaatttaaaagccatactggtgactgtctagaagtatttcattgtgattttt

SEQ ID NO: 451352 - DNA, 201 bp, Homo sapiens
ggggccagggtgggaggactgcttccatccatgagttcaagaccaacctggccaatatagcaagaccctgtctctaaaattaaataaataattaccctggyatggtggtacacgcttagctactgaagcaggaggattgcttggacccgggagttcgaggctacagtaaactatgatcatgccactgtactccagcctagg

SEQ ID NO: 451353 - DNA, 201 bp, Homo sapiens
tttttttgtatttttagtagagatggggtttcaccatgttggccaggctggtcttgaacttgtgacctcaagtgatccacctacctcagcctcacactggrattatatgcgtgagccaccgcacctggcagttttaaaattttaattgtaaaatactcatagaatttatcctcttacccacatatatatgtgtgtatatat

SEQ ID NO: 451354 - DNA, 201 bp, Homo sapiens
tcccgggttcacgccattctcctgcctcagcctcccgagtagctgggactacaggcgccctccaccacacccggctaattttttgtatttttagtagagayggggtttcactgtgttagccaggatggtctcaatctcctgacctcgtgatccgcccacctcagcctcccaaagtgctgggattacaggcgtgagccaccg

SEQ ID NO: 451355 - DNA, 201 bp, Homo sapiens
aagaaagcgtgatcaatgaaaattgcagaggaagtaagatgctaacttgctctacctgccactaccctgaacctttttttttttcaacccccttaacctcyttaaagagcttctggcatgctcatgggtttttctttctagaactttccctgccctgaatttgttcagtatgcattgtcacttgtgaggacttcttttcac

SEQ ID NO: 451356 - DNA, 201 bp, Homo sapiens
ttagtagagacggggtttcactgtgttagccaggatggtctcaatctcctgacctcgtgatccgcccacctcagcctcccaaagtgctgggattacaggcrtgagccaccgcgcctggctgctcacgcctggctaatttttgtattttttgtagagacgggatttcgccatgttatccaggctggtcttgaactcctgagc

SEQ ID NO: 451357 - DNA, 201 bp, Homo sapiens
gacttgttaaaaaaaaaaaagtggggtgtggggagagcggtgttgtgatctgggggccagccatgtggtaaaaaggagtagaggtcaaggggctgcttctrttccctcagtttagggtcctgggaggctgacgggtttgggcagcttttgggaactaggcagaagagagtcctgtatgggaggccggagtcaaggcagaag

SEQ ID NO: 451358 - DNA, 201 bp, Homo sapiens
taacaaagtgaagttaccagtgtcaaaacagaggatgtttattgtgaaaaatgtcaaagtatccacagaaacccctgcagacccctgccagcaatgtcggrccttggttagctgacctaaggcctgggacgctcctggtttgaggcccagggcaggaatagtggggctgctacagacgcagccagtcagctgggagcccca

SEQ ID NO: 451359 - DNA, 201 bp, Homo sapiens
ttcctttatctttattatgtacttccctctctcaccactatgtgtcactgcagaatttagtaaaagtaggattagaatttttttttttttttttttttttwtgctgctttttgttcagcgtcatcaacatgatgctttaggattctatgtgggattttgtacttatcttttcctcttggttgaccttatattccgagaatg

SEQ ID NO: 451360 - DNA, 201 bp, Homo sapiens
ccagccctcgaagaaatctgcagtttctggcctgacgcggtggcttacgcctgtaatcccagcactttaggaggccgaggcgagcagatcacaaggtcagragttcgagaccagcctggccaacatggtgaaaccctgtctctactaaaaatgcaaaaaaattagctgggcgtggcagcgcactcctgtaatcccagctac

SEQ ID NO: 451361 - DNA, 201 bp, Homo sapiens
cgtggtgcttacgcctgtaatcccagctctttaggaggccaacgcgggcggatcacgaggtcaggagatcgagaccatcctggctaacacggtgaaacctygtctctactaaaaatacaaaaagttagccgggcatggtggcaggcacctgtagtcccagctactcgggaggctgaggcaggagaatggcgtgaacccggg

SEQ ID NO: 451362 - DNA, 201 bp, Homo sapiens
gcgattctcccgcctcagcctcctgagtagctgggactacaggcgcccgccatcatgcccagctaatttttgtagtttttaggagagacggggtttcaccrtgttggccaggctggtctcgaactcctgacctcaggtgatccacccaccttggcctttcaaagtgctgggattacaggcatgagccaccatgcctggctg

SEQ ID NO: 451363 - DNA, 201 bp, Homo sapiens
caaaggctcagagaggttaagtaacttgtctaaggataaacagccaggaagtggcagttagtacttgaactcacgtctgtgtaactatgaagcccaggctcttgtccaacctcctgtattgccttgtcttgcctcttgccagaatggccctgttttttatactttatttacctcattacttcctgtgtgtgcttcacaact

SEQ ID NO: 451364 - DNA, 201 bp, Homo sapiens
atcatgcccagctaatttttgtagtttttaggagagacggggtttcaccgtgttggccaggctggtctcgaactcctgacctcaggtgatccacccacctyggcctttcaaagtgctgggattacaggcatgagccaccatgcctggctgctttttaaaatgtataggctggtttcaaactcctggacttggctgggcatg

SEQ ID NO: 451365 - DNA, 201 bp, Homo sapiens
tattttcctagacacaactatctttagaatgacattctgctctgcagaatggaaaccagagtgagtagtatacctacctggtcacattttttatttcctgycaggggaggtggttaatttgcaggaatctcaaaacttgagtctagctttttctgtggtgtatttggagctggaagttgcatgtattttattccagagctg

SEQ ID NO: 451366 - DNA, 201 bp, Homo sapiens
aggcaggagaattgcttgaacctgggaggtggaggttgcagtgagccgagattgcaaactatactgcagcctgggcagcagagtgagactccatctcaaawaataataataataattaagaattaaaagcccttgcccatgaagcatctgttttcagcagcttctattccatggaaaggaataccttggccttttaatagg

SEQ ID NO: 451367 - DNA, 201 bp, Homo sapiens
attttcctagacacaactatctttagaatgacattctgctctgcagaatggaaaccagagtgagtagtatacctacctggtcacattttttatttcctgcsaggggaggtggttaatttgcaggaatctcaaaacttgagtctagctttttctgtggtgtatttggagctggaagttgcatgtattttattccagagctga

SEQ ID NO: 451368 - DNA, 201 bp, Homo sapiens
tacatatcttattcagtgaggtgttcagatcttttggcccccccactacttttttgcccatttttaaaattgagttttttcccttatttaagagttctttrtatattttggttacaagtcctttatcaggtgtgtgatttgcatctattttcttccagactgtggcttgtcttcacattcttcagcagtgtcttttgcaga

SEQ ID NO: 451369 - DNA, 201 bp, Homo sapiens
gctgggattacaggcgtgagccaccatgccctgcctgtcttacccatttttaagtgtagcttcagtagcattacgtacattcatattgtagtgtaacgaayctccagaatgcttttcattttacaaaactggaactccatatctattaaataacagctcccacttctctcttcccacaacctctgcaactaaccttctgct

SEQ ID NO: 451370 - DNA, 201 bp, Homo sapiens
tgggtattattactcccattgtaatgttgaggatataggaactcaggaagattattacataataatgtaataatcttggagtcttttgtccaaagtttccragtcaactcctggattagccagtatttggaccaaggtctgtctggcttgtaattttgtgatttcattatagcatactgactctctgataagaacaggaaa

SEQ ID NO: 451371 - DNA, 201 bp, Homo sapiens
acataataatgtaataatcttggagtcttttgtccaaagtttccaagtcaactcctggattagccagtatttggaccaaggtctgtctggcttgtaatttygtgatttcattatagcatactgactctctgataagaacaggaaatataaagtgaattgaacatcatgctttttctaagaacaagatgtaatttctgttta

SEQ ID NO: 451372 - DNA, 201 bp, Homo sapiens
ttcttttcagctcctagatcaatattagtgacttaatgagaccccactgtcaccccatgccgcaccagctttgtgaatgcctccagcttcggaggctgccttttttttttttagggacagaagggcaactttttattttgaagtaacttcatatttacagaacagtagccagaatagtgcagagaactcttacataccctt

SEQ ID NO: 451373 - DNA, 201 bp, Homo sapiens
ttattgtcaaataaataccggtgaggtgaggcttttctctttgtaagctgagtctcaggaaagtctgagctcatgtgtgttttttgtttttgagacagagyttcgctcttgttgcccagactggagtgcagtgatgcgatcttggctcactgcaacctctgcctcccggatttaagtgattctcatgcctcagcctcccga

SEQ ID NO: 451374 - DNA, 201 bp, Homo sapiens
gagccaccacaccaggccatgagctaatgtgtttgtatgttatataggcagaacagatggaaaagaagcaacatgaggaatttgacctgagccctgaccartggcggaaaggaaagaagtctactttccggcatgttggagatgacaccactcgcctggagatctggattcatccatcccatccacggtcttcccagggca

SEQ ID NO: 451375 - DNA, 201 bp, Homo sapiens
cacgcttagctactgaagcaggaggattgcttggacccgggagttcgaggctacagtaaactatgatcatgccactgtactccagcctaggggacagagcraaaacctgacttcccacctcccccgcaaaaaagagaaatgtttgcctattccaagtgcaacatattggaaggaagatattcttctgtattttgatcttga

SEQ ID NO: 451376 - DNA, 201 bp, Homo sapiens
ttagagcctctttctgtgggaagaagcagattggttttctttttcttaggccatgagaaacagcttagtgggatcctcaaagaaggtcagaaccagaaccrggtttttcagatgttgataatgtgaggtgggttgcaaggagcagcccctggtaggcaaggattggggctgctttgtccagatcactgctggactgtaagg

SEQ ID NO: 451377 - DNA, 201 bp, Homo sapiens
actgaagcaggaggattgcttggacccgggagttcgaggctacagtaaactatgatcatgccactgtactccagcctaggggacagagcaaaaacctgacytcccacctcccccgcaaaaaagagaaatgtttgcctattccaagtgcaacatattggaaggaagatattcttctgtattttgatcttgaaactatattat

SEQ ID NO: 451378 - DNA, 201 bp, Homo sapiens
ttacagaaaaaatttaccactgctgtaaaagctgggagaggtgaatgcagttaatgataaggttcttctgttaggaaattgattgttaatgagaatgttaycgccttttaagcagacagttttttttttttgagaggcagtcttgctctgttgtccaggctggagtgcagtggcgcaatctcagctcactgcaacctccgc

SEQ ID NO: 451379 - DNA, 201 bp, Homo sapiens
tcctcctgcttcaacctcccaaagtgctgggatacaggtgtgagctaccacgcctggccttatttttctgttttatcaaagtaacacaattaaagttacamctgtaggcctttcctcctgtgtgtagagagaaacttctcaagccacatgaatagagcatagagagttcaagaaatgttaggcatctgatagaccaattat

SEQ ID NO: 451380 - DNA, 201 bp, Homo sapiens
ggatgtcacttgtgtgagtgcttgtccctggcttaaattctctccaatgtgttaaagattagggagttagggaaagagaggtagtggagagactgtgcttaaaaaaaaaaaaagtcatctaaaaagaatgaaagatatctgtgccactatagcaagaccttttaagtatatactctgaaagtgtggctaatatgatcatga

SEQ ID NO: 451381 - DNA, 201 bp, Homo sapiens
tctggaaaaccctggatacattttctgttccatctttagttttctgcctctggatgcgtaaagcttcaacctgctggcttttagagggagaggacttgttaaaaaaaaaaaagtggggtgtggggagagcggtgttgtgatctgggggccagccatgtggtaaaaaggagtagaggtcaaggggctgcttctattccctca

SEQ ID NO: 451382 - DNA, 201 bp, Homo sapiens
tttgtagtttttaggagagacggggtttcaccgtgttggccaggctggtctcgaactcctgacctcaggtgatccacccaccttggcctttcaaagtgctrggattacaggcatgagccaccatgcctggctgctttttaaaatgtataggctggtttcaaactcctggacttggctgggcatggtggctcacacctgtaa

SEQ ID NO: 451383 - DNA, 201 bp, Homo sapiens
caaagagtggggcagtcccacctacttttcaaggaccagatcttgcaagaattcagccactaccacatagacagcacccaagccctgagggatccaccctrccatccagacacctcccaccaggccccatctccagcagtggggattacaattcgacgtgagatttgggtggggacaaatattccaccatgtcacttggct

SEQ ID NO: 451384 - DNA, 201 bp, Homo sapiens
tttgagatggagtctggctctgtcgcccaggctggagtgcagtgctgcgatctcggctcactgcaagctccgcctcccaggttcaaaccattctcctgccscagcctctcgggtagctgggactatgagtagctgggactacaggcgcctgccaacatgcccagctaattttttgtatttttagtagagacggggtttcac

SEQ ID NO: 451385 - DNA, 201 bp, Homo sapiens
caacatgcccagctaattttttgtatttttagtagagacggggtttcaccatgttagccaggatggtctcgatctccttacctcgtgatctgcccgcctcrgcctcccaaagtgctgggattacaggcgtgagccaccgtgcctgatcgttttttttttgagacgaagtctaactctgtcgcccaggctggagtgcactgg

SEQ ID NO: 451386 - DNA, 201 bp, Homo sapiens
ggagtgcactggcgtgatctcagctcactgccaggtctgtctcccgggttcatgccattctcctgcctcagcctcccaagtagctgggactacaggtgccygccaccatgcccggctaatttttttgtatttttagtagagatggggtttcaccatattagccaggatggtctcgatctccttaccttgtgatccgcccac

SEQ ID NO: 451387 - DNA, 201 bp, Homo sapiens
aggccaaggcaggcggatcccgaggtcaggagatcgagactaccctggctaacacggtgaaaccccgtctctactaaaaatacaaaaaattagccgggtgkggtggcaggcgcctgtagtcccatctactcgggaggttgaggcaggagaatggtttgaacctgtgaggtggagcttacagtgagccgagatcgcgccacg

SEQ ID NO: 451388 - DNA, 201 bp, Homo sapiens
tgaggcaggagaatggtttgaacctgtgaggtggagcttacagtgagccgagatcgcgccacggcactccagcctgggcaacagagcgagactctgtctcaaaaaaaaaaaaaataataataaaaataattaaaaatacataaataagtaaatacattaaaaaagaaagcttttggcctggttctctctggatagcacaag

SEQ ID NO: 451389 - DNA, 201 bp, Homo sapiens
ataatcccggcacattgggaggctgaggcaggaggattgcttgaatccaggagttcattcatgactagccttgacaacgtagggataccctgtctctactaaaaaaaaaaaattagccaggtgtggtgggtggtcctagttactcgggagcctgaggtgggagaatactctggtctggaaggttgaggctgcagtgagtct

SEQ ID NO: 451390 - DNA, 201 bp, Homo sapiens
cccctcccccgccgggcatctctacccacactgtgcttgttccctaccgagtggctgtgaagagtcaccagttttcagagaacaccattttttcttctttycttttttttttttttttttttgagacagagtctcgccttgttgcctgggctggagtgcggtggtgcaatctcggctcactgcaacctccacctcccagat

SEQ ID NO: 451391 - DNA, 201 bp, Homo sapiens
agccaggatggtctcgatctcctgacctcgtgatctgccctcctgggcctcccaaagtgctgggattacaggcgtgagccaccgcgcccgacttttttttyttttttcttaaatatatttttgagatagagtcttgccctgttgcccaggctggagtggaatggcatgatctcgtctcactgcaacctccgcctcccgggt

SEQ ID NO: 451392 - DNA, 201 bp, Homo sapiens
gtatggcgttaggtaggtagagaggttatattttcaaatatttttctggactgtgcacagtccctttattagtgtgcgaatgcacacatattccttgaactttttttttttttttttttttggagacagggtctcgttttgtcacccaggctggagtgcagtggcacgatctcggctcactgcagcctcaacctcctgggc

SEQ ID NO: 451393 - DNA, 201 bp, Homo sapiens
tcagctcttccctgacctaaagccccagttttctttcccaagctgattgaaatgatttgtatgtgatattttgtcaattaacttgggaattcttgacaatsgcctacacagtgcatctccctccagaagggtcaggactgtgactgagaaggtacaccgcagaggagaggtccgtaggctccccagggtgttccctggctg

SEQ ID NO: 451394 - DNA, 201 bp, Homo sapiens
aggctccccagggtgttccctggctggcggcccttttagtcgcctctatccccagtccagccccacgtgctaatgtagcccaggaagggagcctctcccgyccagctctttctcctctggaggatccagagtttgcccccagagctgcgatatacatgccacttacattctctggttttcattgatatagagtggaaaaat

SEQ ID NO: 451395 - DNA, 201 bp, Homo sapiens
gtgagagatggagtagccatctttggccttaatatccagatgattttgaggtctgtgggaatctgtatggtgtacttgagggacttgttcaaagccaatgkaaagatgtagttttggcatctcatgaataacctgatatcccgacttaagccagaactctggcattagagaattttccagcttgggagagttgactgagaa

SEQ ID NO: 451396 - DNA, 201 bp, Homo sapiens
tttctcctctggaggatccagagtttgcccccagagctgcgatatacatgccacttacattctctggttttcattgatatagagtggaaaaatgtgctcasgagcagagttaactgtggggatgatgtcacagacttcatctggagtccttcctctccaagcagggagtccagctttaacccctctcctaccaggaagtcc

SEQ ID NO: 451397 - DNA, 201 bp, Homo sapiens
acatccgtacactggggatatagcatacaccatcaacacatctgcacagctttgtccaccgaggggtagcagaaagttgtttattatagcaccagtcatcygcatgtctaccacctcagagttagaataatggtggggattaggacatatggggcaaagggtatttattggctgtgaaacaaaggctttttgtggactagt

SEQ ID NO: 451398 - DNA, 201 bp, Homo sapiens
aagccagatgtcagctggaagctgtcgtttgtgatctgaaacagtgatagagtggccacctttggatcagagtcctgagagcagcagagtcttggactggyttcattagaataactggagagccccaccccacccctgatgacatagggctcagcttccaggacagaggtggttccagggataaagctgagcctaggattc

SEQ ID NO: 451399 - DNA, 201 bp, Homo sapiens
cttccaaaaatatatatacacagaaaagtgcacataacagagccatacaggtgataaattgtgacaatgtaagcatacttgtataaccagcagtttatttrcttgtatcgctgtcattcttctcttccctttttttttttttgagacggagtctcgctctgtcacccaggctagaatgcagtggtgcgatcttggctcact

SEQ ID NO: 451400 - DNA, 201 bp, Homo sapiens
tgtgtgcaaaactaacacttgactgcttaaattcctggaaacagatcgagttttgagtattcctttattccttggatggatccgagttcttcctctctgcrtaaaactagtgatcctaagcccaacgtaatgcctacacgccagagcagatggatgcctggtgcctctttagtataggatctccctgagtataggagagtg

SEQ ID NO: 451401 - DNA, 201 bp, Homo sapiens
tttcttgccctgttagagacttttgggaataaaaaagttataaatcttggtgcagaatgtaggaacatttaggatatatttttatcaggttatgcagtagytaaacaccctgatttcccctccacttctaaaattcttatattttgacacatattttggaataagtttgggaaaggaccacagtaatgatgaaaaagcgag

SEQ ID NO: 451402 - DNA, 201 bp, Homo sapiens
tcttggtgcagaatgtaggaacatttaggatatatttttatcaggttatgcagtagctaaacaccctgatttcccctccacttctaaaattcttatatttygacacatattttggaataagtttgggaaaggaccacagtaatgatgaaaaagcgagataatgaccgggtgcggtggctcacgcctataatcctagcattt

SEQ ID NO: 451403 - DNA, 201 bp, Homo sapiens
tagttccctatgggatatccctagtgggagcctgccagggagtaagaaccgagaattgatgagctttggtgactcaaatctggaagcacaaaaaccaccastcccagaatttagctattataccagtgtgcattctaaaatgtttttctgaacattttggggttttttcatagggggtcgggtgggtgtggaagtagaggg

SEQ ID NO: 451404 - DNA, 201 bp, Homo sapiens
cagcactttgggaggccaaggtgggcagatcacctgaggtcaggagttcaagactagcatgaccaacatgtcaggctaaaatactaaactactaagtactraaatactaaacgtctctactaaaaatacaaaactcagccaggcgtggtggcacatgcctgtaatcccagctacttgggagactgaggcaggagaattgct

SEQ ID NO: 451405 - DNA, 201 bp, Homo sapiens
atagaactctttttagggcaggtatcctgagaaattttaaatttcagtatttcttttcttgcctgtagcttagccaagcacccattcaatttgtgttcctytaaaggcaaattcgtcagaactgtttcttctgtcctgagggcctttaggctactgctgagtctgggcaagtgttatttatttatttatttatttattttt

SEQ ID NO: 451406 - DNA, 201 bp, Homo sapiens
ttttaaatttcagtatttcttttcttgcctgtagcttagccaagcacccattcaatttgtgttcctctaaaggcaaattcgtcagaactgtttcttctgtyctgagggcctttaggctactgctgagtctgggcaagtgttatttatttatttatttatttatttttgagacagagttttgctcttgttgctcaggctgga

SEQ ID NO: 451407 - DNA, 201 bp, Homo sapiens
gcacattgctcccaagaatgggcgcccctataaccagttggctttgctggcagtgtatacggtaagaaatcctgtggacaggggaaaagtgctttgcaggragtatcttacaatatggagtttgataatatcagttcctggagcttcatttcatctcatcactgtagcccaaagaatatcccctcaaactccttttgttac

SEQ ID NO: 451408 - DNA, 201 bp, Homo sapiens
attagctgggtgtggtggtgcatacctgtagtcctagatgttcaggaggctgaagtgggaggatcacttgaacctgggaggttgaggctgcagtgagccawgatcacaccattgcactcagcctgggcaacagagtgtgaccttgtctcccaaaaaaaaagatgacttgaagtagagacctttccctatactctttgtgaa

SEQ ID NO: 451409 - DNA, 201 bp, Homo sapiens
cagttagcagccacaaatacctgctgtgtttcccatcaaccctggtaggatccagttgtgcccttctttttttttaattattttattttattttattttattttatttcatttcatttatttcattttatttattttattttattttattttattttattttattttattttattttatttttgcccaggctggagtgcag

SEQ ID NO: 451410 - DNA, 201 bp, Homo sapiens
aagtatgtaacataaacctgagaagggaatgcattcttagatgaaaaatttaggatccaaagagaacttaataggttgcaatggggagaagtaaatgacargatgaaatcagaaaagaaagaatgtaaaaccctaccctggtccaaaaagtcagccacacttagcatgtagcatgcagcacaatggtaaataatcggattt

SEQ ID NO: 451411 - DNA, 201 bp, Homo sapiens
tatatactggttttttttctaaacgtaagttttcatttcttcaggataaagccccagagttcaattgctggatcatatcataagtgcatttttagttttaraagaaactgccaaactattttccagagcagctataccattttacattccatcagcaacgtacatgtgatccaatttcccagcatccttaccaatatttgg

SEQ ID NO: 451412 - DNA, 201 bp, Homo sapiens
ttagcagccacaaatacctgctgtgtttcccatcaaccctggtaggatccagttgtgcccttctttttttttaattattttattttattttattttatttyatttcatttcatttatttcattttatttattttattttattttattttattttattttattttattttattttatttttgcccaggctggagtgcagtgg

SEQ ID NO: 451413 - DNA, 201 bp, Homo sapiens
gaggcggaaggatcacctgagtctgagaagtcaaggctgcagtgaaccatgatctcgtcactgtactccagcctgagggacagagcaagaccctgtccccygccccccaagaaaaggaaaaaagaagctcacagtttatcagtagtgcaaggtggggacaacaacagtaatgctgttaagtctattattaaaattgagtat

SEQ ID NO: 451414 - DNA, 201 bp, Homo sapiens
gagacaggagaatcgcttaaaaaccagaaggcagtggttgcagtgagctaagactgcgttattgcactctagcctgggcaacaaagtgagactctatctcaaaaaaaaaaaaagtgtttattgagttcctcttacatgcttggtggtattttaggcagaggcaattcagtgcagattgaaaaaaaaccgtgctcctgtttc

SEQ ID NO: 451415 - DNA, 201 bp, Homo sapiens
agccacaaatacctgctgtgtttcccatcaaccctggtaggatccagttgtgcccttctttttttttaattattttattttattttattttattttatttyatttcatttatttcattttatttattttattttattttattttattttattttattttattttattttatttttgcccaggctggagtgcagtggcacga

SEQ ID NO: 451416 - DNA, 201 bp, Homo sapiens
gttacgttgcagggtttgcagggcctcctcaaaccctcaacgatcccactagcaaaggcagagccaccgcccgtaccccactgtgaagggacctcatggasaaggcaattgtgactgtatttctgatacatttattagtggcccgcttgttccgaagcccgggaccttggagcctctctagattactggagtaatgcatgc

SEQ ID NO: 451417 - DNA, 201 bp, Homo sapiens
ttaacagacgcaaagtgcttagagtagtgtgctacacatagaagatgctatagaagttttgaccatctatatatgtatatatatgtgtatatatatatgtrtgtgtgtgtgtatatatatatatatatatttttttttttttttttgcgacagagtctcgctttgtcgcccaggctggagtccagtggcatgatctcagct

SEQ ID NO: 451418 - DNA, 201 bp, Homo sapiens
aaatacctgctgtgtttcccatcaaccctggtaggatccagttgtgcccttctttttttttaattattttattttattttattttattttatttcatttcatttatttcattttatttattttattttattttattttattttattttattttattttattttatttttgcccaggctggagtgcagtggcacgatttcga

SEQ ID NO: 451419 - DNA, 201 bp, Homo sapiens
caaagtgcttagagtagtgtgctacacatagaagatgctatagaagttttgaccatctatatatgtatatatatgtgtatatatatatgtgtgtgtgtgtrtatatatatatatatatatttttttttttttttttgcgacagagtctcgctttgtcgcccaggctggagtccagtggcatgatctcagctcactgcaccc

SEQ ID NO: 451420 - DNA, 201 bp, Homo sapiens
aatacctgctgtgtttcccatcaaccctggtaggatccagttgtgcccttctttttttttaattattttattttattttattttattttatttcatttcatttatttcattttatttattttattttattttattttattttattttattttattttattttatttttgcccaggctggagtgcagtggcacgatttcgac

SEQ ID NO: 451421 - DNA, 201 bp, Homo sapiens
tgctacacatagaagatgctatagaagttttgaccatctatatatgtatatatatgtgtatatatatatgtgtgtgtgtgtgtatatatatatatatatatttttttttttttttttgcgacagagtctcgctttgtcgcccaggctggagtccagtggcatgatctcagctcactgcaccctccgccttctgggttcaag

SEQ ID NO: 451422 - DNA, 201 bp, Homo sapiens
atacctgctgtgtttcccatcaaccctggtaggatccagttgtgcccttctttttttttaattattttattttattttattttattttatttcatttcatttatttcattttatttattttattttattttattttattttattttattttattttattttatttttgcccaggctggagtgcagtggcacgatttcgact

SEQ ID NO: 451423 - DNA, 201 bp, Homo sapiens
ctctgctgaaaatacaaaaattagctgggtgtggtggcacgtgcctgtagtcccagctactcgggaggctgaggcaggagaattgcttgaacctgggaggyggaggttgcagtgagccgagatcacgccactgcactacagcctgggcaacagagcgagactctgtctcaaaaaaaaaaaaaaaaggaagaatcccttgaa

SEQ ID NO: 451424 - DNA, 201 bp, Homo sapiens
agaacccagaacagattcggaacagacttttggagctcttggatgaggtaaactgtcatctttttgtcctcaggataaaggcttcagcattctgtagttaygatggatttttactacctgaaatactatgttttagaacagaatatcgacaaaaaaactgcccttttcttgggttctgagccttccctacaccagttgctt

SEQ ID NO: 451425 - DNA, 201 bp, Homo sapiens
tacctgctgtgtttcccatcaaccctggtaggatccagttgtgcccttctttttttttaattattttattttattttattttattttatttcatttcatttatttcattttatttattttattttattttattttattttattttattttattttattttatttttgcccaggctggagtgcagtggcacgatttcgactc

SEQ ID NO: 451426 - DNA, 201 bp, Homo sapiens
gcaggagaatggcgtgaacccgggaagcggagcttagagtgagccgagatcgcgccactgcactccagcctgggtgacagagcgagactccatctcaaaawaaataaataaataaataaataaataaataaataaataaaataaaatattttaggctttgtgggccatgtgccctctgctgcagctactcagctctgcctt

SEQ ID NO: 451427 - DNA, 201 bp, Homo sapiens
cctgctgtgtttcccatcaaccctggtaggatccagttgtgcccttctttttttttaattattttattttattttattttattttatttcatttcatttatttcattttatttattttattttattttattttattttattttattttattttattttatttttgcccaggctggagtgcagtggcacgatttcgactcca

SEQ ID NO: 451428 - DNA, 201 bp, Homo sapiens
ctgttcataccattctgtcatattccttcccccagtaaacacatgagcagtaaatacaaaatactgaacatattcgtggctccttcttttcttttcttttwttttttttgagttggagtcttgctctgtcaccaggctggaatgcagtggcgccatcttggctcactgcagtctccacctcccaggttcaagcaattctcc

SEQ ID NO: 451429 - DNA, 201 bp, Homo sapiens
gctgtgtttcccatcaaccctggtaggatccagttgtgcccttctttttttttaattattttattttattttattttattttatttcatttcatttatttyattttatttattttattttattttattttattttattttattttattttattttatttttgcccaggctggagtgcagtggcacgatttcgactccacaa

SEQ ID NO: 451430 - DNA, 201 bp, Homo sapiens
ggtttcaccgttggccaggatgggctcgatctcttgacctcgtgatctgcccacctcagcctcccaaagtgctgggattacaggcgtgagccaccgtgccyggcctccttcttttcttttttttccttttttttctgagatggagtttcgctcttgtttcctaggctggagtgcagtggtgcgatcttggctcactgcaac

SEQ ID NO: 451431 - DNA, 201 bp, Homo sapiens
gtttcccatcaaccctggtaggatccagttgtgcccttctttttttttaattattttattttattttattttattttatttcatttcatttatttcatttyatttattttattttattttattttattttattttattttattttattttatttttgcccaggctggagtgcagtggcacgatttcgactccacaacctcc

SEQ ID NO: 451432 - DNA, 201 bp, Homo sapiens
agtctgggcaacgtattgagaactcctctctacaaaaaattaaaaattagctaggtgtggtgacacatacctgtagtcccagctactcaggaggctgaggmaggaggatcacttgagcccaggaggttgaggttgcagtgagctgtgatcacaccactgtgctccagtctgggcgacagagtgagaccctgtctcaaaaca

SEQ ID NO: 451433 - DNA, 201 bp, Homo sapiens
ggatcacttgaggccaggagttggagaccagcctggccgacatggcaaaaccccgtctcttctaaaaatacaaaaattagccgattatgggggtgcatgcmtgtaatcccagctacttgagtggctgagacacgagaattgcttgaactgggaggtggaggttgcagtgagctgaaatcataccactgcactccagcctgg

SEQ ID NO: 451434 - DNA, 201 bp, Homo sapiens
acatgatgaaaccccatctctactaaaagtacaaaattagccaggcttggtgatgcacgcctgtaatcccagctactcgggaggctgaggcagaattgctygaacccaggaggcagaggttgcagtgagccaagatcgcgcccctgcactccagcctgggcaaccagagcaaaactccatctctaaaaaaaaaaaaaaaaa

SEQ ID NO: 451435 - DNA, 201 bp, Homo sapiens
gcaatctcggctcactgcaagctccgcttcccgggttcacgccattctcctgcctcagcctcccgagtagctgggactacaggcgcccgccaccacgcccrgctaattttttgtattttttagtagagacgggatttcaccatgttagccaggatggtcttgatctcctgacctcgtgatccactcgcctcagcctcccaa

SEQ ID NO: 451436 - DNA, 201 bp, Homo sapiens
ctgaagagaagtgagtatgtcaagggacccacctgtctttccacttctgggttccagggtccttgttttcagaatgtatttaggctggggaaggagaaatrggaaaagccaaagaaatgagaaaattgtcatctcagtaaaattaagccttttatcatatcagttgaagaaatggtctttgttttgccccaagatagccat

SEQ ID NO: 451437 - DNA, 201 bp, Homo sapiens
attttttagtagagacgggatttcaccatgttagccaggatggtcttgatctcctgacctcgtgatccactcgcctcagcctcccaaagtgctgggattayagatgtgagccacctcgcccccagcctaaatgctgtttctttatcttcatcttacatctatcaactttactgaactgtcttgttctataatggtaaccat

SEQ ID NO: 451438 - DNA, 201 bp, Homo sapiens
atgtgctcacgagcagagttaactgtggggatgatgtcacagacttcatctggagtccttcctctccaagcagggagtccagctttaacccctctcctacyaggaagtcctcctagaccaagcaaagatcatcttggaattggctttttgtcagtggtttgaaaggcttctttcattatgaagtctcttattaactgtatt

SEQ ID NO: 451439 - DNA, 201 bp, Homo sapiens
tgaagagaagtgagtatgtcaagggacccacctgtctttccacttctgggttccagggtccttgttttcagaatgtatttaggctggggaaggagaaatargaaaagccaaagaaatgagaaaattgtcatctcagtaaaattaagccttttatcatatcagttgaagaaatggtctttgttttgccccaagatagccatg

SEQ ID NO: 451440 - DNA, 201 bp, Homo sapiens
tatgaagtctcttattaactgtatttaaactgtcttgtgttgctttttccctgactcaagtgctggaggctttgtctaggagaatattcccgtaagtctcytacagaactccagcatcaagagagcggtggtcctctccccagtgggcttattccccccaagttaagacagaatgcttttgcagacaggccagtgagctac

SEQ ID NO: 451441 - DNA, 201 bp, Homo sapiens
tgctttggtgtggagtgagagatgcaatatcccatgttgcccagatttcgtttcttttgccgttttatagcttgtcaatttgattgtttgtggttttcctytttttttttttttttttttttttgccccgacatggacttattctgaaggagaaacattatttggaggaattttggcagcaggacacttttcttttccttt

SEQ ID NO: 451442 - DNA, 201 bp, Homo sapiens
tttactctttctcttggcttaggatacatagtgtctcttaaaaagggggtgggcggatttttttaaggagcattgtttcatattttcaccatcatgtctartatccctcttcttttagaaaagaggcctctcacatgcttttcttaggagagactgtgctactttttgtggcctggggggaaggtagatatgtcattgata

SEQ ID NO: 451443 - DNA, 201 bp, Homo sapiens
caacagcagatgtagcagttgacacgctgcagggaatttccaactgctgggcaggtttctgaaatccggacacgtgctgttcacactttggcttctgaggsaaggatcagtggttgaaagaggggaggagctggcaggggactgcagggagaaagatcttataatgcctgcccagggctttaggctgtgtcagctttctgc

SEQ ID NO: 451444 - DNA, 201 bp, Homo sapiens
gctattactcatttcggctctgttctttaatgccttttagcccctgcttctgtatttctagccttcctcatcacatgtttgaatacacgcaatggaaccakgcttacctgccctgggccaagacaagcttcccttctccttcacggaggcaagcccaggaccaggcaccccaagctcaaggggctgaactttttctaagcc

SEQ ID NO: 451445 - DNA, 201 bp, Homo sapiens
tcagctcactgcagcctcaacctcccaggttcaagctattcttctgcctcagccccccaaatagatgcaactacaggtgcccgccaccacagctggctaattttttttttttttttttttttgagacagagtcttgctctgttgcccaggctggagtgcagtggcgcaatctcggctcactgcgagctccacctcccgggt

SEQ ID NO: 451446 - DNA, 201 bp, Homo sapiens
aggaacctgtcaggggaagcccaaaatgatctggttgaaatgaaacagccaagaaagcccttagcattcaatttgcacttgggctgaaaattctccttttrggagtctggagcaggggtgctgggagaggagtggagagtggcagcgaggggccccagaaagctctatgctgtgaaagcactccactcttccctctgctgg

SEQ ID NO: 451447 - DNA, 201 bp, Homo sapiens
tttcccatcaaccctggtaggatccagttgtgcccttctttttttttaattattttattttattttattttattttatttcatttcatttatttcattttwtttattttattttattttattttattttattttattttattttattttatttttgcccaggctggagtgcagtggcacgatttcgactccacaacctccg

SEQ ID NO: 451448 - DNA, 201 bp, Homo sapiens
cttggggaatgtgccaccagcctggcaggaggctccttaagccagccagccacctcctaccctgcccaggccattgagggcagctgagcaaggtcatgtcrtgtgaattccagtaaaggggcccagcagtcctcacaccaccaggctggagtcttcaaaagaaaccagggcgaggtctgctgagctgcagcatctgtccct

SEQ ID NO: 451449 - DNA, 201 bp, Homo sapiens
ttcccatcaaccctggtaggatccagttgtgcccttctttttttttaattattttattttattttattttattttatttcatttcatttatttcattttatttattttattttattttattttattttattttattttattttattttatttttgcccaggctggagtgcagtggcacgatttcgactccacaacctccgc

SEQ ID NO: 451450 - DNA, 201 bp, Homo sapiens
tggccaggaagatagctgagcagcagcgtcgccaggaaaagatccaggtgaagtcggcctggggagcgtggttcccactatgggggttgctgtctagggcrtgagaggatgtgggcagagagcagagctgagcaggacactaagagtgagtcagtcctgcagtgttctctctagctctacccgtttttcactctaccacta

SEQ ID NO: 451451 - DNA, 201 bp, Homo sapiens
ggaaggatagaagagaagcatatgcttaatgtcattctgattaaacaaatcaatgttagttttgttttcattttggggagtattttttgttttgttttggsatggagtcccactctgtcacccaggctggagtgcaatggcgcaatctaggctcactgcaacctctgcctcctgggttcaagctatcctcctgcctcagcc

SEQ ID NO: 451452 - DNA, 201 bp, Homo sapiens
ctggtcttgaactcctgagctcctaagtgatctgcccacctcagcctctcaaagtgctaggatacaggtgtgagccaccagccctgcctatcttacccactttttttttttttttaattgagagaaggtctctgtcacccaggctggagtgcagtggcctaatcttggctcactgcaacctctgcctcccaggctcaagtg

SEQ ID NO: 451453 - DNA, 201 bp, Homo sapiens
ctcctgcctcagcctcccgagtagctgggactccagacgcccgccacgacgcctggctaattttttttttgtatttttagtagagacggggtttcaccatrttagccatgatggtctcgatctcctgacctcgtgatccacccgcctcagcctcccaaagtgctgggattacaggcgtgagccaccgcgcccggccgactt

SEQ ID NO: 451454 - DNA, 201 bp, Homo sapiens
aatgatagtgatggtcattgcaagcatagtttggatttcaaaatgacttgggaaaattggacaaggtaccagtagatgaatctctatctgtagacataacrggtggagacattcacttaggcaaagtaaactagatgcatcactggtcccatctcctgcctcccacctcccccgtcctgccactgccactgccaccagttt

SEQ ID NO: 451455 - DNA, 201 bp, Homo sapiens
gaaatttgggatcgttaggcggaacagtcagtgtgatagtacctcagaagacaatagcagaactatgtctggttacctaaagtaaacgcttgggtaaaatrtctttaggccgagtgcagtggctcatgcctgtaatcccagcactttgggaggccgaggcaggtggatcacttgaggtcaggagtttgacaccagcctggc

SEQ ID NO: 451456 - DNA, 201 bp, Homo sapiens
ggccgagatagaaaagagcccaggtggtgggagagtaggggctgcaaaaggagaaaaaggaaagaggatgggaaaaggggagggggtgagggaaacccacsacgacccggcccgcgggaggccgggctccgcaaagcgctactcccgctcagacaaacgaaggaatcgctaccgcacgcgcagcaccagctcagctggcag

SEQ ID NO: 451457 - DNA, 201 bp, Homo sapiens
aggctgaggcaggagaattgcttgaacctgggaggcagaggttgcagtgagccgagattgggcgaaaaaagcgaaactttgtctcaaaaaaaaaaaaaaatttttttttttttgtttagattcacattacttttttaattgaattaagtttcataccagagagtttagggactgtgaaggtttcaggaaatttgttgagta

SEQ ID NO: 451458 - DNA, 201 bp, Homo sapiens
agttcaagcaattctgccttagcctcccaggtagctgggattacaggcacctgccaccacgcccggctaatttttgtatttttagtagagattgggtttcmccatgttggccaggctggtctcaaactcctgacctcaggtgatccacccaccttggcctcccaaagtgctgggattacaggtgtgagccaccacgcccgg

SEQ ID NO: 451459 - DNA, 201 bp, Homo sapiens
aaggttaagaaaataatggtaggccgggtgcggtggctcacgcctgtaatcccagcgctttgggaggccaaggcaggcagatcacctgaggtcaggagatygagaccagcctggccaacatggcgaaaccctgtctatactaaaaataccaaaaattagctgcgcttggtggtgggcacctgtaatcccagcttcacagga

SEQ ID NO: 451460 - DNA, 201 bp, Homo sapiens
ccgggtgcggtggctcacgcctgtaatcccagcgctttgggaggccaaggcaggcagatcacctgaggtcaggagattgagaccagcctggccaacatggsgaaaccctgtctatactaaaaataccaaaaattagctgcgcttggtggtgggcacctgtaatcccagcttcacaggaggctgaggcaggagaattgcttg

SEQ ID NO: 451461 - DNA, 201 bp, Homo sapiens
ctgtctgtactaaaaatacaaaaattagccaggtgtggccgggcgcggtggctcacgcctgtaatcccagcactttgggaggccgaggtgggcggatcacraggtcaggagatcaagaccatcctggctaacatggtgaaaccccgtctctactaaaaatacaaaaaattagccgggcgaggtggtgggcgcctgtagtcc

SEQ ID NO: 451462 - DNA, 201 bp, Homo sapiens
tattaattgcttataaatagacttgctgaatttcttgaataatatccataaaatgttcaactcagctacttatttattttaaaaaattatcaataacaatggcaacatcattgattaagtacagttaagtgtgagacagtggacaacactttgtaaacctgaggatactcctccattgggtattattactcccattgtaat

SEQ ID NO: 451463 - DNA, 201 bp, Homo sapiens
tattggtattgcctgcttttagggaatatttgggagctgggattaaggtagagcctgactggcattcctttcattatcatttatgcttgctttttttgggwggggggagggagggacagaatcttgctctgtcgcccaggctggagtgcagtggtgcgatctcggctcactgcaacctctgcctcccgggttcaagcagtt

SEQ ID NO: 451464 - DNA, 201 bp, Homo sapiens
tcacaactgtaatcccaacattttgcgaggctgaggcaggatgatcacttgacaccaggagctcaaaccagcctgggcaacatagtgagacctcatctctwaaaaaaaaaaaaaaaaaaaaaaaaatgaaattagcaggatgtggtggtccacgcctgtagtcccagctacttgggaggctgaggcgggaagatcacttga

SEQ ID NO: 451465 - DNA, 201 bp, Homo sapiens
tcttttgccgttttatagcttgtcaatttgattgtttgtggttttcctttttttttttttttttttttttttgccccgacatggacttattctgaaggagraacattatttggaggaattttggcagcaggacacttttcttttcctttcttttccttttttttttttttttttttttttttttggagacggagtcttgct

SEQ ID NO: 451466 - DNA, 201 bp, Homo sapiens
tcaaggttgcagtgagctttgatcacgccactgtactccagcctgggtgacagagcaagaccctgtctcaaaaaatatatagatagtagtagtgtttgcayctttgaaaaatagagttgcattttgaagagtctagtaaaattgtgaccactttgacctaaccttccatcctttaaagcagtaattctaaaactcagtgtt

SEQ ID NO: 451467 - DNA, 201 bp, Homo sapiens
attcccatgcctcagcctcccgagtagctgggattacaggcacaggccaccacacccggctaatttttatatttttagtagagacagggtttcaccacatyggccaggctggtctcaaactcctgacctcaagtgatccgcccacctcagcctcccaaagtgctgggattacaggcatgagccactgcgcttggcctggca

SEQ ID NO: 451468 - DNA, 201 bp, Homo sapiens
tattccccccaagttaagacagaatgcttttgcagacaggccagtgagctacagacagaaggtttctctgtgcctctgggcaagccctggacattctgccyctcagtttctccatctactaaagagctcagactgtgcacttctcactcccacagtacactttacacagctttgaccatcctccctgctgcttggattgca

SEQ ID NO: 451469 - DNA, 201 bp, Homo sapiens
tgaggcaagagaatcgcttgaacccgggaggcggaggttgcagtgagccaagattgcaccattgcactccagcctgggcgacagagggagactttgtctcaaaaaaaaaaaaaaagtatatataaagtggcagtcacttgtattctttccttcggagacatcactattaactgattgatgtccttccagacctttttctaa

SEQ ID NO: 451470 - DNA, 201 bp, Homo sapiens
tttaaacttatgaaaatagtgaagcactatccaaaacctcagtctcttttcttccccttttccttacacctacaaacagtaaatgtacttgctggagcatrtgattcctgttttgggcttgtttccatttatatttagagagcaatactaggattaaaaacttttttattgttgttattattattttttgagacggagtct

SEQ ID NO: 451471 - DNA, 201 bp, Homo sapiens
tcaagtgcaatggagctgtcaaatgttaagattactaaaaagtgtccgttggattggatgaacttatcaagagttaatttagttggggaaactggaagccrgattgtagtgaagagagataaagcagtagagattgccagagagtaatatagaccattcttttaagcatcttggctgcgaagacaaggagggaagacagct

SEQ ID NO: 451472 - DNA, 201 bp, Homo sapiens
tgaggtaggagaatggcgtgaacgcgggaggcagagcttgcagtgagccgagatcgcaccactgcactccagcctgggcaacagagcgagactctctctcaaaaaaaaaaaaaaagcaaaaagactgagaaagtagcctgtacttaacgctttacatagaaagaggcccagctatagcaggggtagggaaagagtgaaata

SEQ ID NO: 451473 - DNA, 201 bp, Homo sapiens
gaggctcaatcgtccaggacttcatgctgaggctgacggagagcctttgaaagaatttgttttgttttgttttgtttttgtctcttaccaacatgacaaartggatgtagtatggaggcataatcagttctctttgtgctttatcagttaaatacagaggattcttaacacctttggggatgttcattcatagaatctgtg

SEQ ID NO: 451474 - DNA, 201 bp, Homo sapiens
cgtgaacgcgggaggcagagcttgcagtgagccgagatcgcaccactgcactccagcctgggcaacagagcgagactctctctcaaaaaaaaaaaaaaagmaaaaagactgagaaagtagcctgtacttaacgctttacatagaaagaggcccagctatagcaggggtagggaaagagtgaaatactgtttgaattgatcc

SEQ ID NO: 451475 - DNA, 201 bp, Homo sapiens
gtgctttatcagttaaatacagaggattcttaacacctttggggatgttcattcatagaatctgtggaacagttaggacttggggtatgtgatatgtagtsattataactttgctgaggtacaaatttgagttatgtgctaggtaggaggttaatgtgcagtagctatttcgcttagtgagtgtgccttcctgaggggtca

SEQ ID NO: 451476 - DNA, 201 bp, Homo sapiens
ctactgcctgtgtcttcagactgactgtgcatccttgtggccagtttcgctcctgccttctggagtctgcttcctgccaggaggcccctccccctaggaatgtgaataaaccatttcctctgtcctcccagctccagaggattccctgtgtggtattttttatttcttgtgtctgaacttccattggcagaccccttcgta

SEQ ID NO: 451477 - DNA, 201 bp, Homo sapiens
gaggtacaaatttgagttatgtgctaggtaggaggttaatgtgcagtagctatttcgcttagtgagtgtgccttcctgaggggtcagtatcttcttctcartgaagctttgttctttattcagtgatatgttaatttcttttgtgtggagtggagtggaattatattgtgtgctgtgaggtggtgttccctagggagatat

SEQ ID NO: 451478 - DNA, 201 bp, Homo sapiens
cttatttgctctaaggacattctgtaaaattaacaagctataaagtttgattgaaggtttcaacaaatgtgagaataattggctccatttagagaaacaasaaaaacaacctgtaaacttgagtttgtggggggaaacccgtgtgattgttctctttaaccagaggagcagtagcaagctggactgttaagactagaaaaa

SEQ ID NO: 451479 - DNA, 201 bp, Homo sapiens
ttggggggcacatgccttgggattggtttactctgttttctgagtgacagatgccaagccaatcagtgagaaaacacatagtcctgcacagtgtgtggcaygttgttaatgtgtgataaaggacgatccattgttttaggtgaaggtaatgtaatgccgtggtacaattcagtgatgttaacagtttgaagaaagactata

SEQ ID NO: 451480 - DNA, 201 bp, Homo sapiens
cctcccccgccgggcatctctacccacactgtgcttgttccctaccgagtggctgtgaagagtcaccagttttcagagaacaccattttttcttctttccttttttttttttttttttttgagacagagtctcgccttgttgcctgggctggagtgcggtggtgcaatctcggctcactgcaacctccacctcccagattc

SEQ ID NO: 451481 - DNA, 201 bp, Homo sapiens
tttcaccgtgttagccaggatggtctcgatctcctggcctcgtgatctgcccacctcagcctcccaaagtgctgggattacaggtgtgagccaccgcgccyggcctatttggttatcttatttttttactaacgaatgaattgtctgcaccataacagaatgttatgggagaagcacatcattcttttggagtaaaagctc

SEQ ID NO: 451482 - DNA, 201 bp, Homo sapiens
ctcccccgccgggcatctctacccacactgtgcttgttccctaccgagtggctgtgaagagtcaccagttttcagagaacaccattttttcttctttccttttttttttttttttttttgagacagagtctcgccttgttgcctgggctggagtgcggtggtgcaatctcggctcactgcaacctccacctcccagattca

SEQ ID NO: 451483 - DNA, 201 bp, Homo sapiens
taggctgaaaactttatagtttgttgtgtttttttggtagtcaggtttaggctaaaaactttatactttgttgaggaccgctagtgccttacgagtgctayattgtcattttcaccccatccctgtcctttgagggttgaagttagtgtttcttggcttttctactaactggttgtttttcctgaaggtaaaatatgcctt

SEQ ID NO: 451484 - DNA, 201 bp, Homo sapiens
tatcagccgggactgtatttttagtgcagcattgtagaaactaaaaatatcctgttatagtagatcctttttataggtctgtgtgtgtgtgtgcgcgcgcktgtgtgtgtgtttataatgtacgcacaagtgcctttgtgcatcagcagccactcttcacattacagctggactccattagtccttgaaaattaatgtaat

SEQ ID NO: 451485 - DNA, 201 bp, Homo sapiens
cagtcttgaactcctgacctcaggtgatctgcccgcctctgccttccaaagtgctgggattacaggcatgagccgtcacactggccaagatccatcattcttttgttttgttttgttttgttttgttttgttttgttttgttttgttttgagatggagtcttgccctgttgcccaggctggagtgtagtggcgcaatctca

SEQ ID NO: 451486 - DNA, 201 bp, Homo sapiens
gcccagcgatgcatgatatgccaaggagatattgctaggtaccgggagcaagccagtgatacagcgaattatgggaaagcacgcaggtacttttacctctrcttcgttatttctcttccctatgtggctctaagctaagccttactaagagcagtaggccatatgggtgttgtacaggtgtccctattggtccctgtagtc

SEQ ID NO: 451487 - DNA, 201 bp, Homo sapiens
ctgtctctctgcccagatcccctttctttttcctcgtatgtctgtctcactcttgcttatgtatttcacttttttgggtctatctttttccatctccctgtctctttccataacagttttaataatgttttagttagttccagccttttcgctgaatggatcccattggaaaatgcatttgaaaggaaacagttatacact

SEQ ID NO: 451488 - DNA, 201 bp, Homo sapiens
agtcttgaactcctgacctcaggtgatctgcccgcctctgccttccaaagtgctgggattacaggcatgagccgtcacactggccaagatccatcattcttttgttttgttttgttttgttttgttttgttttgttttgttttgttttgagatggagtcttgccctgttgcccaggctggagtgtagtggcgcaatctcag

SEQ ID NO: 451489 - DNA, 201 bp, Homo sapiens
tgtctctctgcccagatcccctttctttttcctcgtatgtctgtctcactcttgcttatgtatttcacttttttgggtctatctttttccatctccctgtctctttccataacagttttaataatgttttagttagttccagccttttcgctgaatggatcccattggaaaatgcatttgaaaggaaacagttatacactt

SEQ ID NO: 451490 - DNA, 201 bp, Homo sapiens
gtcttgaactcctgacctcaggtgatctgcccgcctctgccttccaaagtgctgggattacaggcatgagccgtcacactggccaagatccatcattcttttgttttgttttgttttgttttgttttgttttgttttgttttgttttgagatggagtcttgccctgttgcccaggctggagtgtagtggcgcaatctcagc

SEQ ID NO: 451491 - DNA, 201 bp, Homo sapiens
tcctgagttcaagtgattctcatgcctcagtgtcctgagtagctaggattataggcatgtaccaccatgcctgctatttttttttttttttttttttttgkatttttagtagagacaagatttcaccatgttggccagcatggtcttgaactgctggcctcaagtgatctgcctgccccggcttcccaaagtgctgggatt

SEQ ID NO: 451492 - DNA, 201 bp, Homo sapiens
tcttgaactcctgacctcaggtgatctgcccgcctctgccttccaaagtgctgggattacaggcatgagccgtcacactggccaagatccatcattcttttgttttgttttgttttgttttgttttgttttgttttgttttgttttgagatggagtcttgccctgttgcccaggctggagtgtagtggcgcaatctcagct

SEQ ID NO: 451493 - DNA, 201 bp, Homo sapiens
aattgcttgagctcgggaggcagaggttgcagtgagctgagattgcggcactgtactgcaacctgggtgacagagctagcatctgtctgggaagaaaaaawatatatatacacatatatatttatctatatatctgtaaggttattgttcacttttttcatatactatctcttgcatagagtccatgctttaaaaagttat

SEQ ID NO: 451494 - DNA, 201 bp, Homo sapiens
ctctacaaaaagttttttttttttttctgtcgtgggtttgggggaaggggagggatagcattaggagatacacccaatgtaaatgacgagttgatgggtgyagcacaccaacatggcacatgtatacatatgtgacaaacctgcacgttgtgcacatgtaccctggaacttagagtataattaaaaaaaataaggaataca

SEQ ID NO: 451495 - DNA, 201 bp, Homo sapiens
gaaggtttctctgtgcctctgggcaagccctggacattctgcctctcagtttctccatctactaaagagctcagactgtgcacttctcactcccacagtayactttacacagctttgaccatcctccctgctgcttggattgcaaaggacagggtactcttccaaaagacagacaacctttctctctccaaacaggtagaa

SEQ ID NO: 451496 - DNA, 201 bp, Homo sapiens
ccaggcacggtggctcactcctgtaatcccaacagtttgggaggtcgaggtgggtggatcacttgaggtcaggagttcaagaccagcctagccaacatagygaaacccatctctaataaaaatacaaaaagtagctgggtgtggtggtgggcacttgtaattccagctactcgggaggctgaggcaggagaatcgcttgaa

SEQ ID NO: 451497 - DNA, 201 bp, Homo sapiens
aaaatcctggacccattacataattctccatagtgcaagcagtagctggggcgtaaggtcagaggtcatagtggggtcaggtggctgacacacactgtaaygacaaggtggttaaaattagaccacagagaggaaactggcagtcttgtggaaatgcagaagtttcctatgcaagtgagaggctggagatgcagggaggcc

SEQ ID NO: 451498 - DNA, 201 bp, Homo sapiens
ctgacacacactgtaacgacaaggtggttaaaattagaccacagagaggaaactggcagtcttgtggaaatgcagaagtttcctatgcaagtgagaggctrgagatgcagggaggccactgtgcgtgctgcctgccaggctattactcatttcggctctgttctttaatgccttttagcccctgcttctgtatttctagcc

SEQ ID NO: 451499 - DNA, 201 bp, Homo sapiens
tcccataccttagagaaagttagttacttagcaccttccagaaacagaattatttttttcttccacattttatgccaacttgggtccttattgctaccaayctgattcagagtgtccgtgtgttgcttgggttccaagggcactatccagggatcactgtggcccaacctcagctgctgttagaaggttcctgtggaactc

SEQ ID NO: 451500 - DNA, 201 bp, Homo sapiens
caggtgattgagaagttcaggcaacttgtcaaggatccgaatgttgagaacccagaacagattcggaacagacttttggagctcttggatgaggtaaactktcatctttttgtcctcaggataaaggcttcagcattctgtagttacgatggatttttactacctgaaatactatgttttagaacagaatatcgacaaaaa

SEQ ID NO: 451501 - DNA, 201 bp, Homo sapiens
agcgaattatgggaaagcacgcaggtacttttacctctacttcgttatttctcttccctatgtggctctaagctaagccttactaagagcagtaggccatrtgggtgttgtacaggtgtccctattggtccctgtagtcatgccttacccctccagggttacatctaacactctaccttatgttttaagtattagggctat

SEQ ID NO: 451502 - DNA, 201 bp, Homo sapiens
agataggatcgcactctgtcacctaggctggagtgcagtgacacaatcatagctcactgcagtctcgacctcctgggctcaagtgatcctcctgccttagmctcctgattagctgggactacaggcactcaccatcatacccaggtaatattttgattttttgtatagacaggatctcactccgttgcccaggcaggtctt

SEQ ID NO: 451503 - DNA, 201 bp, Homo sapiens
agcaacaatctaatttctctattctttccccacctttcccccctttctattccacaaaaccgccatcgtcatcatggcccgtctcaatgagctgttgggtrcacctcccagacggggtagtggccgggcagaggggctcctcacttcccagaaggggcggccgggcagaggtgccccccacctcccggacggggcggctgg

SEQ ID NO: 451504 - DNA, 201 bp, Homo sapiens
gaactttgttccctggcctgcccatgactactctacatcagtctctcctgaaaagaggctagaatattacttgtgtattcagaattggactaacccagtarttagccagttcgctaaaactgatttctctaccttactgccctgtggcctgtaccccacccttattgtcacccctttctttgtacagagataacttcttta

SEQ ID NO: 451505 - DNA, 201 bp, Homo sapiens
cttgaactcctgacctcaggtgatctgcccgcctctgccttccaaagtgctgggattacaggcatgagccgtcacactggccaagatccatcattcttttgttttgttttgttttgttttgttttgttttgttttgttttgttttgagatggagtcttgccctgttgcccaggctggagtgtagtggcgcaatctcagctc

SEQ ID NO: 451506 - DNA, 201 bp, Homo sapiens
actttgagagacctgttatgttgaatatcctcaggatcctttctcagccctcggcagggttgtacccatgccattccctgggccccttgagctctgttttyattgcagtgctatgctcagcccttgggcctatccctgagacccgacggggactggttattactgtggaggggaagaggttcctaggggcaggatgctgac

SEQ ID NO: 451507 - DNA, 201 bp, Homo sapiens
accccacttggctaaattttttgtatttttagtagagatttggtttcactatgttgctcaggctggtcttgaactcctgacttcaagctagccacctgcckcagcctcccaaagtgctgggattacaggcatgagccaccactcccgggctgtcttgctctttttcttttttttgtgatggagtctcgctctgtggcccag

SEQ ID NO: 451508 - DNA, 201 bp, Homo sapiens
ttgtcctcttgtgactggcttatttcacttagcttaggtcctcaaggttcatccatgttgtagcatgtgtcagaatttcctccttttggagggtgaattayatttcattgtgtatatataccacattttatatgtacgttcacccattgatggatacttggattgcttccatctgttggctattgtgaataatgccacagt

SEQ ID NO: 451509 - DNA, 201 bp, Homo sapiens
acatagcgaaacccatctctaataaaaatacaaaaagtagctgggtgtggtggtgggcacttgtaattccagctactcgggaggctgaggcaggagaatcrcttgaacccgggaggcagaggttacagtgagctaagattgtaccactacactccagcctgggtgacagagtgagactccatctcaaaacaaacaaaaaaa

SEQ ID NO: 451510 - DNA, 201 bp, Homo sapiens
accctgcttccaattcttctgggtacatacccagaaaacgaattactagatcatttggtaattctgattttaggtttttagaacaaccatattgttttccrtagcagctacaccattttacattccaaccaacagcatgcaaggcttctgatttctccacttccttgccaacacttgttattttctgcatttctgatagta

SEQ ID NO: 451511 - DNA, 201 bp, Homo sapiens
caatggctttttgtcatttgaattaaattttctttttcacagacctctgacctagattcgcactttcttcaagttcttttcctctatccctcttttttctrtctgtctcatcttagttgtctgttagcaacattttcccaacttttctgccaattccaatcagtcagtcattctgtctcttccaatcagtgaatctcaggt

SEQ ID NO: 451512 - DNA, 201 bp, Homo sapiens
atcttctgtcctactgtgctcatgaaatttggtaaatattactctctatctctcttgtttcttctttctctacctttactaaaacactcctttaaatacartcttgtcccagcccccaccccagtccctctgggtttctctttcctctgccttccggcttaggtccctagtgagtgcctcagggcagttgtgctaaatccc

SEQ ID NO: 451513 - DNA, 201 bp, Homo sapiens
gccgagaatacacgtgagagtctttgacctgctccagcagtcttcacccctacgtaccccctcaacagcattatctccagcctcttttgatgtttctttctttttttttttgttttgttttgttttcttttcttttggtagagacagggtcttactctgttgctcaggctggtcttgaactactgggctctcaagcagtcc

SEQ ID NO: 451514 - DNA, 201 bp, Homo sapiens
acgtgagagtctttgacctgctccagcagtcttcacccctacgtaccccctcaacagcattatctccagcctcttttgatgtttctttctttttttttttkttttgttttgttttcttttcttttggtagagacagggtcttactctgttgctcaggctggtcttgaactactgggctctcaagcagtcctcctgcctcag

SEQ ID NO: 451515 - DNA, 201 bp, Homo sapiens
gttcccccagtaaaatatgaaggagtgtgtgagtgcctcatcctccttagacttgccaggaagatggactgagtcttggtcaggcgttggtgctccactcttttcagactctctcctcctctcagtcctgccccagtggagctttcagaaaaagtcctgcctgactccttccctatgaagctggcagactgcctttctgag

SEQ ID NO: 451516 - DNA, 201 bp, Homo sapiens
ttcccccagtaaaatatgaaggagtgtgtgagtgcctcatcctccttagacttgccaggaagatggactgagtcttggtcaggcgttggtgctccactcttttcagactctctcctcctctcagtcctgccccagtggagctttcagaaaaagtcctgcctgactccttccctatgaagctggcagactgcctttctgagt

SEQ ID NO: 451517 - DNA, 201 bp, Homo sapiens
cagctgctttcttacaaatcaacattgaggtagggattctcgtccaccttatttttgcagtgagtctcaaggttttggtacaaggtgggtggtaatgggcaaaaaggcgtatgtgggcaggggtccctagtggtggccagcagtctctgggaggagtcagttttggtttatctgagccttaggggacaggagagcatggta

SEQ ID NO: 451518 - DNA, 201 bp, Homo sapiens
ggagtacagtggtttagtcttggctcactgtaacctctgcctcccaggttcaagtaattctcctgcctcagcctccggagtagctgggactacaggcacgygtcaccacgcctggctaatttttgtgtttttagtagagatggggttttgccatgttagccaggctggtctcaaacgcctgacctcaggtgatccacctgc

SEQ ID NO: 451519 - DNA, 201 bp, Homo sapiens
ggccacgactgaagaagcaagtgtctgtgtcctcaaccgattccttagacgaggacagaattgatgagcctgatggattaggacccaggagaagttcagaraggaagagacatttagaaagaaactggtctggccgtggggagggtgagcagaaaaacagtgctaaagaatatcgaggcactcttcgtgtcactttcgatg

SEQ ID NO: 451520 - DNA, 201 bp, Homo sapiens
tctctgccagggtgacgcatctgctgttaagttgctctgaggcttgacttctcgcgttcattcaacattagatatttattgaacacttactatttaccagrcattcacagtgctagggattttgtggtgaatgagacaggcatagtctcttacctcatagattttacattccagttatggggatacagagcaaagaagtaa

SEQ ID NO: 451521 - DNA, 201 bp, Homo sapiens
agcctaggaattcagtaccagcctggtcaacaaaacgaggcttctgtctctgtaaaaaaattttcaaaattggctgggcatggtgatgcgggcctctagtyctagctactcaggagtctgaggcaggaggattgcttgagtccaggagttcaaggatgtcatgagctatgatccagcgtaggtgccagagcaagaccctgt

SEQ ID NO: 451522 - DNA, 201 bp, Homo sapiens
gggaggccgaagcgggccaatcacctgaggtcaggagtttgagaccagcctggccaacatggtgaaaccccatctgtactaaaaatacaaaaaagttaccygggcatagtggtgtctgcctgtaatcccagctactcgggaggctgaggcaagagaatcgcttgaacccgggaggcggaggttgcagtgagccaagattgc

SEQ ID NO: 451523 - DNA, 201 bp, Homo sapiens
tttgcctattttagaaccccatataaatggaatcacacaataagtacatgctcttgagaaaggcttttttcatttagcttaatctttttgagattcctctrtgttgttacatatattagtatatattagtagctcactcctttttattgctgagtagtattccattttatgaatatgtcacagtttatctggttgacagtg

SEQ ID NO: 451524 - DNA, 201 bp, Homo sapiens
ccccatctgtactaaaaatacaaaaaagttacctgggcatagtggtgtctgcctgtaatcccagctactcgggaggctgaggcaagagaatcgcttgaacycgggaggcggaggttgcagtgagccaagattgcaccattgcactccagcctgggcgacagagggagactttgtctcaaaaaaaaaaaaaaagtatatata

SEQ ID NO: 451525 - DNA, 201 bp, Homo sapiens
atgctcttgagaaaggcttttttcatttagcttaatctttttgagattcctctgtgttgttacatatattagtatatattagtagctcactcctttttatygctgagtagtattccattttatgaatatgtcacagtttatctggttgacagtgaatctgtttctagtttttagctgttatgaataaagttgctgtgaata

SEQ ID NO: 451526 - DNA, 201 bp, Homo sapiens
ccaagcctggctgaaatacattttttaacaaaaaggaggatagtactatgtataacaatctgcaacttactttttaaaattattatttgaacataaattaytcctgctataatgcaatatatacattcctaaaaattgctgtgctgtgcaaaatcatgcaataaaaaccacacagggcttatgcagaaaatggagttagga

SEQ ID NO: 451527 - DNA, 201 bp, Homo sapiens
atgactggtatatgaaaacctgaagattagtgagccgaggtcgcaccattgcactccagcccgggtgacagtgtgtgagactctgtctcaaaaaaaaaaawaaataaataaaggccgggattggtggctcatgcctgtaatcctagcactttgagaggccgaggcaggctgatcaacctgaggtcgggagtttgagaacag

SEQ ID NO: 451528 - DNA, 201 bp, Homo sapiens
gtgcaaaatcatgcaataaaaaccacacagggcttatgcagaaaatggagttaggagcacaaacctcaaaaactttctcagtgacatagtgaaaaagatargagcctgatttaaaactgttgtacaattttatacatgtgaaatggttaagaaatacgtaaatatggccgggcgtggtgcttacgcctgtaatcccagctc

SEQ ID NO: 451529 - DNA, 201 bp, Homo sapiens
tatatgaaaacctgaagattagtgagccgaggtcgcaccattgcactccagcccgggtgacagtgtgtgagactctgtctcaaaaaaaaaaataaataaawaaaggccgggattggtggctcatgcctgtaatcctagcactttgagaggccgaggcaggctgatcaacctgaggtcgggagtttgagaacagtctggcca

SEQ ID NO: 451530 - DNA, 201 bp, Homo sapiens
ctgatttaaaactgttgtacaattttatacatgtgaaatggttaagaaatacgtaaatatggccgggcgtggtgcttacgcctgtaatcccagctctttargaggccaacgcgggcggatcacgaggtcaggagatcgagaccatcctggctaacacggtgaaaccttgtctctactaaaaatacaaaaagttagccgggc

SEQ ID NO: 451531 - DNA, 201 bp, Homo sapiens
taagagttcttcaaatattcttgacacaaatacttgtcagatatacatcctgtgaatatttctcgtggtctgtgactggtttgcctttttttttttttttwaaacatagtcttgaacagcaaactttttttttttttttttgagacagggtcttgctctgtttcccaagggatcctcccaccttagcctccccagtagctg

SEQ ID NO: 451532 - DNA, 201 bp, Homo sapiens
cctcccacctcagccttccaaagtgttaggaatacaggtctgagccactgcatgtggccaataggtgtttgtctctgaaacttgagtgagtcttcctgccstggaatgatttggtttaccattgccagcattttctccaagccactgtgactattcctgcaacatgcttggtgctgattgtagcaaataatgtctttagac

SEQ ID NO: 451533 - DNA, 201 bp, Homo sapiens
ggctggctacagagccctgaatatactgcttctaggagaccagggaagatgacaaggaggtttagtttttagattgtttctacttgctttggatttgaatwgaaatttttttccctcccttgttttgctgagaaatagtttggtttcaatggaagtagattttctagaaccttgaaccacgattgtaaattggtggctcat

SEQ ID NO: 451534 - DNA, 201 bp, Homo sapiens
gctggatctctttgggaaataacagaagaaaagatgctaatttccctgaggatagtgtcactctaagatagaaggacctgtagtttgagcttttaactctttttttttttttttttttttttttttttgagaaggagtgtctctctgttgcccagggtgaagtacagtggtgcaatctcagctcacttcatcctccacctc

SEQ ID NO: 451535 - DNA, 201 bp, Homo sapiens
tttcatttgcctgtccgcagactgcttctcggaggagtgccgctctgtgatccaggaacaagccgcagctctgggcttggccatgttttctctactggtcygccgctgcacctgcttacttaaggagtccgccaaaggtaagcaggaggagtccccagcctggtgggctttccagttgcctggccttgtccagacctcaca

SEQ ID NO: 451536 - DNA, 201 bp, Homo sapiens
gagttaggaagagagattagtcttattctttaagtaatgttcattctatttttttaattgtgatgaaatatacataagataaaatttaccattttaaccctttttttttttttttttttttttttgaggtggaatctcgctctgtcacccagggtagagtgtagtggtgtgatctcggctcactgcagcctctgcctcctg

SEQ ID NO: 451537 - DNA, 201 bp, Homo sapiens
ctcccaaagtgctgggattacaggcgtgagccactgtgcccggccatatttgcctacttttaaaattgggttgtcttttattgttgagttgtaggagttcatagatagatagatagatagaaagattacattgagttgtaggagttcatagatagatagacagacagacagagagggtctcactgtgttgcccaggctggt

SEQ ID NO: 451538 - DNA, 201 bp, Homo sapiens
ccagactcgtgtgtgtgtgtctgtgtgtgtgtgtgcgcgtctgtgtgtgtgtgtgcgcacgcgcatgcacatgcatgagcctgtgtacccgcccctgcaawagtccactggcagttgccctgccctatatattgccattgcctatttgtgtctttctgggagtgattgttgatgtgggtctgtgtgtgctgggtttgtgtg

SEQ ID NO: 451539 - DNA, 201 bp, Homo sapiens
tcccaaagtgctgggattacaggcgtgagccactgtgcccggccatatttgcctacttttaaaattgggttgtcttttattgttgagttgtaggagttcatagatagatagatagatagaaagattacattgagttgtaggagttcatagatagatagacagacagacagagagggtctcactgtgttgcccaggctggtt

SEQ ID NO: 451540 - DNA, 201 bp, Homo sapiens
cccaaagtgctgggattacaggcgtgagccactgtgcccggccatatttgcctacttttaaaattgggttgtcttttattgttgagttgtaggagttcatagatagatagatagatagaaagattacattgagttgtaggagttcatagatagatagacagacagacagagagggtctcactgtgttgcccaggctggttt

SEQ ID NO: 451541 - DNA, 201 bp, Homo sapiens
atagagaataacacaccccaatggttctgtagatgccaaaactgtaacccccctgacgcttgtaaagtccttgttgctgctcatcgttttgaagggtttgsaaatgctcccaagggagcaggaatgaaatggctgctgtttagtgccccttcttggcatgctttcattggtctttgcctgagtttcttctttgcaaagata

SEQ ID NO: 451542 - DNA, 201 bp, Homo sapiens
tgacacaccgtagtgtcagggccctggctcacccacctgcttgcctgctcgctgtctggctcattcaccactctgtccccataggctgtcctggaggaccrcagtcagatgaggcagatggagctcgaaatcagacctttgttcctcgtaccagacaccaacggcttcattgaccacctggccagtctggcgcggctgctg

SEQ ID NO: 451543 - DNA, 201 bp, Homo sapiens
atagacagatagagattaatgtagcttctttcttgtgttaccatacctaccatacctacctccccccaccccacccccgaacacacacaccctaccctacscttcctaccattgtctcagatatttagtttactttgaaatctgtatgactctctagtgcttgggtgggatggaaggagggaatcatgggtatagagctta

SEQ ID NO: 451544 - DNA, 201 bp, Homo sapiens
gctttcatgggtttatatgcatgggtttgttacttcataactagttccaccactctcgtgtgacactcaggaggagataatttagtgatttcatgaagatkctccttaagtctttctgtgttgggtctcaaccctgtaggctggatattaatagggaccataccccaaaggtccaggaaaggaaaggtgaaaataataaga

SEQ ID NO: 451545 - DNA, 201 bp, Homo sapiens
tggtgtgatctcggctcactgcagcctctgcctcctgggttcaagtgattctcctgcttcagcctcccgagtagctgggattacaggcatgtgccaccacrcccggctaatttttgtattttttgtagagacagggtttcgccatgttggccaggctggtctcgaactcctgacctcaagtgatccactctccccggcctc

SEQ ID NO: 451546 - DNA, 201 bp, Homo sapiens
ctttgctggcagtgtatacggtaagaaatcctgtggacaggggaaaagtgctttgcaggaagtatcttacaatatggagtttgataatatcagttcctggrgcttcatttcatctcatcactgtagcccaaagaatatcccctcaaactccttttgttacggttactctcagaattaagttgtcagggattcctcacttca

SEQ ID NO: 451547 - DNA, 201 bp, Homo sapiens
tcttcaggaaaccagaaaagttagtttccataatcgacgttgtgttttcccctttatctctttgtttctgtttgtgtggtacctggtgagttctgtaaccrctgtggaccagccatcatgggagactcactggaccagatagagcaggtgctatttttagcccttaggttgagacagtatcccatatcctttaaggctgcc

SEQ ID NO: 451548 - DNA, 201 bp, Homo sapiens
ggatcctttctcagccctcggcagggttgtacccatgccattccctgggccccttgagctctgtttttattgcagtgctatgctcagcccttgggcctatmcctgagacccgacggggactggttattactgtggaggggaagaggttcctaggggcaggatgctgacacaccgtagtgtcagggccctggctcacccacc

SEQ ID NO: 451549 - DNA, 201 bp, Homo sapiens
cactctcgtgtgacactcaggaggagataatttagtgatttcatgaagatgctccttaagtctttctgtgttgggtctcaaccctgtaggctggatattartagggaccataccccaaaggtccaggaaaggaaaggtgaaaataataagatctccagaatggagtaggagtgatggttttgaggccatgggttttagatg

SEQ ID NO: 451550 - DNA, 201 bp, Homo sapiens
tgcggctggtctacctgaagaaatgattttttttaattgtggtaaaatatacacaacataaaatttaccatttcgtgccctccctgcacttgaccgccgcygctccgtgccggcagcctggggactgggagcactcgtgccttgggtatgccgccccactggctggacaaagcggcgcgtggatgtgcctgtggggccttg

SEQ ID NO: 451551 - DNA, 201 bp, Homo sapiens
ccttggtgaaggaaaagatgtgaaagggaatagttggtggagggcttgtactccataaagggagataggatttagcaacatatgtgaaaacaatttggggwtttgttgattagaagctcacaattggcagggcacagtggctcacacctgtagtccgaacactttggggggctgaggcaggaggattccttaaacttgaac

SEQ ID NO: 451552 - DNA, 201 bp, Homo sapiens
atgtgtgtgtgtgcatgtgtgcgcatgtgtgcatgtatgtttgtgtctgtgtgcatgtgtgtgcgtgtgtgtgtagaaatagggtctccccatgttgtcaragcttctcttgaactcctcagcctcgagtgatcgtcccaccatagcctcccaaagtgctgagattactggtgtgagtttccacctttgatgcacaaaagt

SEQ ID NO: 451553 - DNA, 201 bp, Homo sapiens
tcatcgtgtctctttaatgtcctttaatttgggatggtttttctgtctttctttgtcctacatgtccttgtcatttttgaagaatatgaagcatttgcacmgtgtcccacagtttgggtttctctggtgtttccttgtgattaaattcaggtcatgcagttttggcaagaactctggtgccatcttggtactgtgctgaag

SEQ ID NO: 451554 - DNA, 201 bp, Homo sapiens
gcgcatgtgtgcatgtatgtttgtgtctgtgtgcatgtgtgtgcgtgtgtgtgtagaaatagggtctccccatgttgtcaaagcttctcttgaactcctcrgcctcgagtgatcgtcccaccatagcctcccaaagtgctgagattactggtgtgagtttccacctttgatgcacaaaagtgtttaattttgataaagtcc

SEQ ID NO: 451555 - DNA, 201 bp, Homo sapiens
aagatgaatacactattgttactttctctgattgtgtagtctagtgtataggtcagcaaactttttctatgaagggccagatagtaaattactttataggscatatgttctttgttgccaccactcacctttactgttgtaccaccaaagtagccatggacaatatgtaaatgaatgagcatgactgtattccattaaaac

SEQ ID NO: 451556 - DNA, 201 bp, Homo sapiens
gggtggagtgcagtggcgcgatctctgctcactgcaacctctgcctcccaggctcaagcgattcttgtgccttagcctcctgagtggctgggattataggygtgcgcctggctaatatttatttatttatttgtttttgagacaaagtctcacactgttgcccgggctggagtgcaatggcacaatctctgctcgctgcaa

SEQ ID NO: 451557 - DNA, 201 bp, Homo sapiens
acctgcccattgcttcagcaccactggcttgggcctgcccgtgttcctacagctcccctcttcatcctgctctgtttctttctgcccacagcctgcctgcytctctatttcttctttatttgaactttttttgaataccttccctatcctctgatgttttaggttattttttcctgttctccaggcctcttccccctcctc

SEQ ID NO: 451558 - DNA, 201 bp, Homo sapiens
tctctgtgttgtccaggcaggtcgtgaactcctgaccttaagtgatccgcccacctcagccttccaaattgctgggattacaggcatgagccaccacaccygaccagttatataaccttgttttatgtgggtttctgtttaaagacaccttatttaatatatattattaattcattaacagagagctcactgcctaacagc

SEQ ID NO: 451559 - DNA, 201 bp, Homo sapiens
gcctgcctctctatttcttctttatttgaactttttttgaataccttccctatcctctgatgttttaggttattttttcctgttctccaggcctcttcccyctcctctcacactctctttttcctctcactctccattttgttatttgttcttgctctcgttccctcatcctcactccatattgtgcatactcaccatctc

SEQ ID NO: 451560 - DNA, 201 bp, Homo sapiens
tgtgttgtccaggcaggtcgtgaactcctgaccttaagtgatccgcccacctcagccttccaaattgctgggattacaggcatgagccaccacacctgacyagttatataaccttgttttatgtgggtttctgtttaaagacaccttatttaatatatattattaattcattaacagagagctcactgcctaacagcacta

SEQ ID NO: 451561 - DNA, 201 bp, Homo sapiens
gtccctgccctcgtccccgtcttctcactacacctcgccctcgtttccgtcttctcaccatgcctctgccctcaccctcatcccctgtcttctcaccatgmgcctgccctcgccccctgtctctgtgtgtcagtctggcatctctcagagcatttgtgtatagcagagagcatttgtgtattgggggcgggggcaggtgtt

SEQ ID NO: 451562 - DNA, 201 bp, Homo sapiens
ctcactgtttacttgtcatgtctgcattgttaattgagcaaaagcagcactattctatccattaaatttggtagggtggagattgactgaatcttttaccscacagtttgctgacttaaaaagttgaagggctattcttttagacaatgcacttaggcattttgaactcaaacatgctagtgtctctctgtgtcttggtag

SEQ ID NO: 451563 - DNA, 201 bp, Homo sapiens
gccacgtgtgttgttatctgtatgtgttcatgtgggatgtccgtatctatgtctgtatttgtgtctatacctgtttgtgtctgtatatccttgagtatatrtatctctgtatgggattcatgtgtccccaagtaggtttctttcagtgtatgtctgtgttttcatgtctctgtgtccacatctatagctgtcttttttttt

SEQ ID NO: 451564 - DNA, 201 bp, Homo sapiens
ccaaagtgctgggattacaggcgtgagccactgtgcccggccatatttgcctacttttaaaattgggttgtcttttattgttgagttgtaggagttcatagatagatagatagatagaaagattacattgagttgtaggagttcatagatagatagacagacagacagagagggtctcactgtgttgcccaggctggtttt

SEQ ID NO: 451565 - DNA, 201 bp, Homo sapiens
aagtgcctaggctgtaatgccggagttggtttctaagttagtgggaatagaggttgaaagagatcacacagaggagtgattgccttttaaagtattttagytgaagaattttttttttccttgagacatggttcctctctgttgtgcaggctggagtgcagcagcatgatcatcgctcactgaagcctccatctcccaggc

SEQ ID NO: 451566 - DNA, 201 bp, Homo sapiens
tttaattgaatactactttctaaatattgcattgactgcatgttataaaaatgaatacaatgtggatatgaagaatttttttttttttttttgagatggartctcactctgtcacccaggctggagtgcagtggtgcaatctcggctcactgcaacctccgcctcccaggttcaagcgattctcctgcctcagcctcccaa

SEQ ID NO: 451567 - DNA, 201 bp, Homo sapiens
gtcatatattatgtaggtgtatatgtgattatttttcttctcttgcattattagtggcatattatacacactggtatattcacctttttttttccctattrctactggacttcggagatccttctctgagtaattgccctcaaatccattgtatctctctagagcctggctgatagccttcataattttgtctagtatttg

SEQ ID NO: 451568 - DNA, 201 bp, Homo sapiens
agcggtctgcctgcctcggcctcccacagtgctgggcctctctttcttatctctactcttccttagtgtctctgtctttctctgtttcacccctgcccacyccacccccctggccatttctcgtttccctcttccttttcttcccctaccccacattctctcagtgtggtcttcggctggtgctgtgtacccaaagctcct

SEQ ID NO: 451569 - DNA, 201 bp, Homo sapiens
catatattatgtaggtgtatatgtgattatttttcttctcttgcattattagtggcatattatacacactggtatattcacctttttttttccctattgcyactggacttcggagatccttctctgagtaattgccctcaaatccattgtatctctctagagcctggctgatagccttcataattttgtctagtatttgta

SEQ ID NO: 451570 - DNA, 201 bp, Homo sapiens
ggggcgccatcatagctcactgcagtctcaaactcctgggctcaagccatcctcttgccttgacctcccaaagcactaggattacaggcgtgagccaccaygcctggcctgaagtcctacttttatcagatattagctgcgagactttgggcatgttctgtaacctggctgagctttagttttctatctgtaagatgatga

SEQ ID NO: 451571 - DNA, 201 bp, Homo sapiens
ctcccaggttgtaggcacgatctcggctcactgcaaccttcgcctcttgggttcaagcaattcgcctgcctcggcctcccaaattgctgggattacaggcrtgcaccaccatgcccagctagtttttgtatttttagtagagatggggtttcaccgtattggacaggctggtctcgaactcctgaccttgtgatccaccca

SEQ ID NO: 451572 - DNA, 201 bp, Homo sapiens
tttatcagatattagctgcgagactttgggcatgttctgtaacctggctgagctttagttttctatctgtaagatgatgacagtgataaccttgtttcccyagggctggagctcatagtttctgcttggaattttgcatgctgcctcttcccaaatctctcgtgattttcttagaggtgctattgaaagttgagaaggaca

SEQ ID NO: 451573 - DNA, 201 bp, Homo sapiens
tgaccttgtgatccacccacatcggcctcccaaagtgggcattatcacattttacagctgagaagattaagacttagactgatttatctgagatcatatgrcaatactaggtcagaacccagaactatcattttgtattagatttaggtgaataagaggcctaaacatacagttttatcctcttacatcaagagtctagac

SEQ ID NO: 451574 - DNA, 201 bp, Homo sapiens
ccaaactcctccccaggctgaaagccagttctcagcctccctgcctggagctggcaagcctgagcttcctagaggggtacctcctgagagaaaggtaggcrggattgctgaaggccttgttgggaagtgtggttccaggactgctgggccccaccccagcctcagaactttctttctcagaacggacacattttggctttg

SEQ ID NO: 451575 - DNA, 201 bp, Homo sapiens
ctctacaaaatatacaaaaattagccagacatggtagcacgtgcctgtagtcccagcttcctggggagtgaggcagggacattgcttgagcctgggaggtygaggctgcagtgagctatgttcccaccaccctgagtgacaaaatgagaccctgtctcaacaacaacaaaaggcagtatatttaatgtgccttcttgtttt

SEQ ID NO: 451576 - DNA, 201 bp, Homo sapiens
agaaatcctttctggctgggcatgggggctcatgcctggaatcccccagcattttgggagaccgaggtgagcagatcacaaggttaggagttcaagaccascctggcctatatagtgaaacccagtctctactaaaaatacaaaaaaagttagctgggcatggtggccaggcacctgtagtcctagctactcaggaggctg

SEQ ID NO: 451577 - DNA, 201 bp, Homo sapiens
gcaatctgcccgctttggcctcccagagtgctgggactactggcatgagccattgcatccagctagattccatatgaattttaagatgtttttatggatcygtggaaaatgccattgggattttgataggaactgcattgaatctgtagattgctttggttactgtagtcagcttaacaatattaagtcttccaattcatg

SEQ ID NO: 451578 - DNA, 201 bp, Homo sapiens
gtacactggttctctctttgtcctacttttcagaatcctcttaggtgctggcgcttgtcctcgcttctgggcctatctttcctgtggacttggtctccctkccctaagagcttgctgccgtcccagcgccccaggcctcactcgggggctacagcagacataggcccagttctcaccctttgcctctgcagctcagctgtc

SEQ ID NO: 451579 - DNA, 201 bp, Homo sapiens
tatccatttccagaactcttcatcattccaaacgccgtaaccattacacagtaactcctcattcccccttcccctggcaacttctactttctagctctatscatttccctattgtaagtatctcatataagtagaatcatgcaatatttgtctttttttttttttttttttttttgagacaaggtctctctgtgttgccca

SEQ ID NO: 451580 - DNA, 201 bp, Homo sapiens
aggccgtttgctgtcctctagggctcggggcagacagggaagaggcagtcctgctccccgtttaaaggtgaaccgtgtgcatagggaagcatcaagccacscactccgcttctttaaggatgcccatttccaaccctgtcctttggcatagggtttgatgcatgtgatcaggcagacccagtgacagtctaggccctgcca

SEQ ID NO: 451581 - DNA, 201 bp, Homo sapiens
cattacatacagagtctgctgtgttcaaaatccttcactgacttcccatttcactcagtgtaaaagccacattatttacaaggccttcatatatggacctyttctcctgccccccccccccccccgcccccgcattgcctctctctgagctcattcacgactgttctccccatggcttggttactctgcttcagccacact

SEQ ID NO: 451582 - DNA, 201 bp, Homo sapiens
tggggtaccgtgtaggggagccaaggccagtagtttgggggtaggagtcccctagagtctcagaagactgggctctttggagtacagggtccccggcctcycctttaagattctctccccagctggaaggccgatgactgggtggtcgggagggagacccagctctcctttctgtcccgtttgcagcactggttttgtttc

SEQ ID NO: 451583 - DNA, 201 bp, Homo sapiens
agcccggacggaggaaaggactggtagaagagccaagacacggctagcgtggcaccccctccccaggaccacattctccagggtgagaagagcagccagcyctctgcctcctgtcctcagtgacagccttctgctctctcatgcccacagaggagccaatccggctactgcgggaggtggtgctgttgacggatgaccgga

SEQ ID NO: 451584 - DNA, 201 bp, Homo sapiens
agagagataaaacagtgtaatagagaaaaacatctccttctgtgctctctttctttctctctctgcagttaggatcagcagctggttatctctggaatgcragtttaagcatgaaagagaggctttgctatcctggggcctgaccccaaggcatggctatttaaggactggtgcccgcgttcaacagagcaaacctggcct

SEQ ID NO: 451585 - DNA, 201 bp, Homo sapiens
caagtgagccttggttctgagtgcatacttgtaactagtcactgctggtttgtcccaaactcggatctggctttccgactccagccagggctctgccgtcstggtgtgtggtgtgttctgtggggttgggccagtgggtcaccttgcaactgctgatccctgctctctaatcacatcacagctgctgagagactccctggc

SEQ ID NO: 451586 - DNA, 201 bp, Homo sapiens
cctgcctcagcctctcaagtagctgagactacaggtgtgtgccaccacattgggctcattttattacaattttttgtagagacaaggtattgctatgttgyctatgctggtctccagcttctgggctcaagcagtcctcctgcctcactcgtccaaagtgctaggcgtgagcccccatgcccagctgaagttgtatacttt

SEQ ID NO: 451587 - DNA, 201 bp, Homo sapiens
cactgatttaatctataatgataaagaatagttgagtctctgcactagtaggtaagtgctttatctgtgataacccagttatttcattgtctcataattayatcatcatgacagagaaagccagcttaattttttggcctcatggatataaagactccatatcttgctgggaacagtgactcaacgccggtataatcccgg

SEQ ID NO: 451588 - DNA, 201 bp, Homo sapiens
agatgtacgtggctcacgaagcctaaattattttctgtgaccttttacagaaaaaatttaccactgctgtaaaagctgggagaggtgaatgcagttaatgwtaaggttcttctgttaggaaattgattgttaatgagaatgttatcgccttttaagcagacagttttttttttttgagaggcagtcttgctctgttgtcca

SEQ ID NO: 451589 - DNA, 201 bp, Homo sapiens
gaccttttacagaaaaaatttaccactgctgtaaaagctgggagaggtgaatgcagttaatgataaggttcttctgttaggaaattgattgttaatgagartgttatcgccttttaagcagacagttttttttttttgagaggcagtcttgctctgttgtccaggctggagtgcagtggcgcaatctcagctcactgcaac

SEQ ID NO: 451590 - DNA, 201 bp, Homo sapiens
ttcttttaaataatttttttaatgcctataatcctagcactttgggaggccaaggcgggcagattgcttgcagccaggagttcgagaccatcctggccaayatggtgaaaccccgtctctactaaaaatacaaaaatgagctggatgtggtgacgggcacctataatcccagctattcaggaagctgaagcatgagaattg

SEQ ID NO: 451591 - DNA, 201 bp, Homo sapiens
ttcttctgttaggaaattgattgttaatgagaatgttatcgccttttaagcagacagttttttttttttgagaggcagtcttgctctgttgtccaggctgkagtgcagtggcgcaatctcagctcactgcaacctccgcctcccaggttcaagcgtttctcctgcctcagcctccccagtagctgggactacaggctcctg

SEQ ID NO: 451592 - DNA, 201 bp, Homo sapiens
agctgctttagtagcccaggaggtcaaggctgtagtgagcccaaaatcatgctactgtactccagcctgggtgatactctctctctctctacacacacacwcacacacacacacacacacacacacacacacacacacacacacacacagacagacatgtacatatatacatatatgtgtgtgtgtgtatatataaataat

SEQ ID NO: 451593 - DNA, 201 bp, Homo sapiens
ctggtctcgaactcctgacctcaggtggtcagcctcccaaagtgctgggattacaggcttgagccactgtgcccggccgacagttcttcattatgcaggtstgaccttgcaggatgtttagcgttcctggctctgctcattagatgccagtaacggcccacacatacttccaaacagttcctgggatgggtggtcatattc

SEQ ID NO: 451594 - DNA, 201 bp, Homo sapiens
cagagaacctgacttgggatttggatcttgatggcctagggattaacaatagtgagagaatttgagtagctagtggaatagggagagttttcagtagggtrgaatacaagattttaaggaaattttttttttttttttgagatggggtttcgttctgtcacccaggctggaatgcagtggcgcgatctcagctcactgcaa

SEQ ID NO: 451595 - DNA, 201 bp, Homo sapiens
ggctgtagtgagcccaaaatcatgctactgtactccagcctgggtgatactctctctctctctacacacacacacacacacacacacacacacacacacasacacacacacacacacacacagacagacatgtacatatatacatatatgtgtgtgtgtgtatatataaataatcatataattatattataatcccttatc

SEQ ID NO: 451596 - DNA, 201 bp, Homo sapiens
aatttgtatctccctgatgactaatgaagttgtatgctttttgttttttcagacagggtcttgctctatcacccaagccaaagagcagtggcacaatcacrgctcactgcagacttgacctcctgggttcgggcaatcctcctgcctcagcctctcaagtagctgagactacaggtgtgtgccaccacattgggctcattt

SEQ ID NO: 451597 - DNA, 201 bp, Homo sapiens
ggatcttctactcggttctcctctaagcgctgtatggaggccgggcgcggtggctcacgcgtggaatcccagcactttgggaggccgaggtgggtggatcrcttgaggccaggagttcaagaccagccttaccaacacggtgaaaccgtttctctactaaaaatataagacgttagctggacatggccgggtgcagtggct

SEQ ID NO: 451598 - DNA, 201 bp, Homo sapiens
agcgggcgtctgtagcccaatctacttgggaggctgaggcaggagaatggcatgaacccgggaggcggagcttgcagtgagccgagatcacgccactgcaytccagcctgggcaacagagcaagactccgtctcaaaaaaaaataaattagctgggcatggtggtacatgcctgtaatcccaactactcaggaggctgagg

SEQ ID NO: 451599 - DNA, 201 bp, Homo sapiens
actccagcctgggcaacagagcaagactccgtctcaaaaaaaaataaattagctgggcatggtggtacatgcctgtaatcccaactactcaggaggctgargcacaagaatcgcttgaacccaggaggcagaggttgcagtgagccgagatcgtgccactgtactctggcctgggcaacagagcaagactccgtctcaaat

SEQ ID NO: 451600 - DNA, 201 bp, Homo sapiens
gcaagactccgtctcaaaaaaaaataaattagctgggcatggtggtacatgcctgtaatcccaactactcaggaggctgaggcacaagaatcgcttgaacrcaggaggcagaggttgcagtgagccgagatcgtgccactgtactctggcctgggcaacagagcaagactccgtctcaaataataataataaataattctg

SEQ ID NO: 451601 - DNA, 201 bp, Homo sapiens
tggctcatacccatatgtaccaactactcaagaggctgaagtgggaagactgcttgggccgaggcagttgagggtgcagtgagccaagatcatgccactgyactctagcctgggcaacacagcgagatcctgtctcaaaaataaataaatgaaataataaatagatatatttttattaaaagttagtgagtgctttttgtg

SEQ ID NO: 451602 - DNA, 201 bp, Homo sapiens
caaagcgctactcccgctcagacaaacgaaggaatcgctaccgcacgcgcagcaccagctcagctggcagcaacaacagcgctgagggagctggcctgacrgataatggatgtcgccgccgccgacaggataggaccaaggagaggccacgactgaagaagcaagtgtctgtgtcctcaaccgattccttagacgaggaca

SEQ ID NO: 451603 - DNA, 201 bp, Homo sapiens
tgagtcagaacctggagttagtttggtagggtgtggtttcaggtttgcagacatccccggttgatgcctatgaagggttggtgcctgatgtaactgaatasggtgctacttcaggttagtagtccttgttttctcttgactggttggactgaacctggtattactgtttaccaaagaatatttttggtttgaaaactgaag

SEQ ID NO: 451604 - DNA, 201 bp, Homo sapiens
aaataacatttatcaaagtccaggagacacatggaatttaaccgggaggattttgcatggacaattaagaatgacagtcacattttgcccttactttttgyttaaggatttgactagtttgtttaatatacaccttttattataaatgagtgtgtcagcgttgactgccggtttctagtcagacttctcagcaccagccct

SEQ ID NO: 451605 - DNA, 201 bp, Homo sapiens
ttacctcactaatgctcttgaccccattccttggataccttggttggtcccttccaagggagattggggtagctgctttaccatcgtggtacctgccatcygagtttccaccttgcccgagatccctgaaggccaaaaatttctgcctactgggaagaggcagaaatacctctatgtgtgcgctgtttctttaaaagaaag

SEQ ID NO: 451606 - DNA, 201 bp, Homo sapiens
tacatacagagtctgctgtgttcaaaatccttcactgacttcccatttcactcagtgtaaaagccacattatttacaaggccttcatatatggacctcttytcctgccccccccccccccccgcccccgcattgcctctctctgagctcattcacgactgttctccccatggcttggttactctgcttcagccacactacc

SEQ ID NO: 451607 - DNA, 201 bp, Homo sapiens
agtattagcatttggatatgtaattcttgctcgactttttttgttacttaaccagaatgacagtctttcccctatcttccttctttattcttatcttctayctttccctcccaaactctttccccgacataacagaaaacatgaaggaattaaaggaggccaggccgcgcaaagataacaggcgtccagatctggaaatct

SEQ ID NO: 451608 - DNA, 201 bp, Homo sapiens
ctaagttttctaaacatccagaacaacctttacaaatacaggtttgctcatgtcacttccctgctgaaaacccttcagtggctttaatgaagatcacattyttttttttttttttttttttttttttgagacggagtctcgctctgtcgcccaggctggagtgcagtggcgcgatctcggctcactgcaagctccgcctcc

SEQ ID NO: 451609 - DNA, 201 bp, Homo sapiens
gtctctgttcataccattctgtcatattccttcccccagtaaacacatgagcagtaaatacaaaatactgaacatattcgtggctccttcttttcttttctttttttttttttgagttggagtcttgctctgtcaccaggctggaatgcagtggcgccatcttggctcactgcagtctccacctcccaggttcaagcaatt

SEQ ID NO: 451610 - DNA, 201 bp, Homo sapiens
tctgctgtagacagagatctaacaatgagcacttgcttaaaatctgccatttcccagcttaaggtttttcatcctccccgagagtgttgatgagaactctsaaaactcaccaggtctcaggaagccggattaccagcatatcctgttcgcgtgcgtgtgtatattctgtgttacccacaggccactttccaccccacgtga

SEQ ID NO: 451611 - DNA, 201 bp, Homo sapiens
catctttagttttctgcctctggatgcgtaaagcttcaacctgctggcttttagagggagaggacttgttaaaaaaaaaaaagtggggtgtggggagagcrgtgttgtgatctgggggccagccatgtggtaaaaaggagtagaggtcaaggggctgcttctattccctcagtttagggtcctgggaggctgacgggtttg

SEQ ID NO: 451612 - DNA, 201 bp, Homo sapiens
ccatctttagttttctgcctctggatgcgtaaagcttcaacctgctggcttttagagggagaggacttgttaaaaaaaaaaaagtggggtgtggggagagyggtgttgtgatctgggggccagccatgtggtaaaaaggagtagaggtcaaggggctgcttctattccctcagtttagggtcctgggaggctgacgggttt

SEQ ID NO: 451613 - DNA, 201 bp, Homo sapiens
gaaggatacacaggtcttccctggggtacaagacggagaactgggatcatcatcttaactctactcttcctttttactcttctgtcctcttagagactttygcctgtatacatggattactgttacttagcaggggcgaccggttggccaaagccttggtgtgcccttggcacaattctgccaagacccttaccctctcct

SEQ ID NO: 451614 - DNA, 201 bp, Homo sapiens
ttcgaaactgcaaggaatggttgcttctgagattcccagccaagattctgtcattataatgtcttgggccatggtacagatgtccacattggtgctgtctratcactcagttggaactgaagattcatcacaatgtagatagatttgagcttttgatttggctcaagcttagaagtgaatccttcaaatagttctttctct

SEQ ID NO: 451615 - DNA, 201 bp, Homo sapiens
gccctgcataccaccaccccagccacacttatctgcagaggggcctggcccaggcagctgagtagtctctgagtatcccctcacccgaggccaccttcctytcccctctgcccacagccccttgcctcccttcacactctccttcctcctgtcctcttctctcgccaccaccaaccccacaaacctctccctcccgaatcc

SEQ ID NO: 451616 - DNA, 201 bp, Homo sapiens
ttttttcttaaatatatttttgagatagagtcttgccctgttgcccaggctggagtggaatggcatgatctcgtctcactgcaacctccgcctcccgggtkcaagtgattcttctgcctcagcctctcaagtagctgggattacaggcacccgccatcacacccagctaatttttgtattttcagtagagacagggttttg

SEQ ID NO: 451617 - DNA, 201 bp, Homo sapiens
tcagcctccctgcctggagctggcaagcctgagcttcctagaggggtacctcctgagagaaaggtaggcgggattgctgaaggccttgttgggaagtgtgrttccaggactgctgggccccaccccagcctcagaactttctttctcagaacggacacattttggctttggtcctactagtcctcccacccccgacttcac

SEQ ID NO: 451618 - DNA, 201 bp, Homo sapiens
ccaacatgctggaattgcaggtgtgagccatcgcgccagttccttttttttttttttgagctggcgtcttgctctgtcactgaggctgggagtgcagtggygtgatcacagctcacttcacccttcacctcctgggctcaagcaatcctcccaactcagcccatagagtagctgggactacaggctgcaccaccacgccca

SEQ ID NO: 451619 - DNA, 201 bp, Homo sapiens
tactcatcacatttaaggagcagaaggaggtagtggagtaagattatataggtcttttgtaggccattgtaaggactttggctttcattctgatgttaagygtagtctctttttgcccactcacttaggctggaatgtagcagatggaattgctactactcaggatcagaatccttaaatcctgacagaaataccttttcc

SEQ ID NO: 451620 - DNA, 201 bp, Homo sapiens
ctcctggctcccaggattctggcatttttttcatttggaaggaattcctaggacctgccagctctgtgtcatctgcagagctggcagttctcaccgtttcrtttctgtctacctataagtggtctcttgtcattgcctttccgtctctgctgctctctcctttctgtgcgtgtttctttctagcccttgtgttcaggctgc

SEQ ID NO: 451621 - DNA, 201 bp, Homo sapiens
cgtgcgcgcacacacacacgtgcagtatcagagaaggtagatgtgccaaggttctggtcttgagaaataccagggccttgcaaatgaggctgtgactgccycttcctccatggtgacctccctgcactccaccagtggggctgggggtagaactttacccctcctggactgcagtgtgtgtgggcccaaggagttaaggaa

SEQ ID NO: 451622 - DNA, 201 bp, Homo sapiens
gtgccctctgctgcagctactcagctctgcctttgtagggggaaagcagccactgacaatatgtaaacaaatgagggtggctgtgtttcaacagaattttrtttatggaaactgaaatttatatttcatataattttcatgtcatcaaatattctcttattttttttttcagccattaaaaaaatgtaaaaaccattctta

SEQ ID NO: 451623 - DNA, 201 bp, Homo sapiens
ttagtttttagattgtttctacttgctttggatttgaattgaaatttttttccctcccttgttttgctgagaaatagtttggtttcaatggaagtagattktctagaaccttgaaccacgattgtaaattggtggctcatgggccagatgtagctggcaaatgtgttttttggcttctttaatgcttaaattattttcatt

SEQ ID NO: 451624 - DNA, 201 bp, Homo sapiens
tcgaagtgcccctctctcgtccttgaggattctgattctgtaggagtgaggaatctgtattttttataaaagctgttcaggtgatagacatacactcaggrttgtggaattagcagtactgatctcactcatttaactgttgaagaaacagccctagaagatttatgtgacttcctgataattaacagcaaataaatggca

SEQ ID NO: 451625 - DNA, 201 bp, Homo sapiens
attgattgattttctaaggtctgaaaatgtataaagagtttaggcaaataagaaattaacagattgttgatttaaaaaaattatgtcttataggtaagtawttgtgccttgcaaaatgttaataccttagaattatatttttaaaaaattctgtaagacttccatgatgatgaagtcatcagaatccctttgagatggtaa

SEQ ID NO: 451626 - DNA, 201 bp, Homo sapiens
ttttttgagacggagtctcggtctgtcgctcaggctggagtgcagtggtgcgatctaggctcactgcaagctctgcccctgggtccacgccattctcctgyctcagccttcgagtagctgggctacaggcgcccgccaccgtgtccggctaattttttgtatttttagtagagacgggatttcaccgtgttagccaggatg

SEQ ID NO: 451627 - DNA, 201 bp, Homo sapiens
gaggcagagtctcgctctgccgcccaggctggagtgtgttggcgcgatctcggctcactgcaacctccacctcccaggttcaagctattctcctgcctcarcctccgatgtagctgggactacaggtgcccgccaccacgcgtggctaatttttggatttttagcagagatggggctttgtcttgttggccaggctggtct

SEQ ID NO: 451628 - DNA, 201 bp, Homo sapiens
ctgtgtagctaacaagcccttcgatcagagaaggaactccttgatgctccagccaccacccaagaaacccgctctaaggacctttcgggccaggcacagtrgctcatgcctgtaatcccagcactttaagaggccaaggccggaggatcccttgaacctaggagttcaaggccagtctgggcaatatagggagaccccgtt

SEQ ID NO: 451629 - DNA, 201 bp, Homo sapiens
actgccataaagacatacctgaggctgggtaatttataaagaaaagaagtttaattggctcatagttccacaggctgtacaggaaacatggctagggaggyctcaggagaatcacaatcatggtggaaggcaaagaggaaggaggcacgtcttccatggctggagcaggaggaagagagtgaagggggaggggctacagac

SEQ ID NO: 451630 - DNA, 201 bp, Homo sapiens
cacacttcgccagttgcgtccccgtggacagtcatgagtctagaggaaaggggcatctggtctcaggcccgtgctctcgggtggcctccacctgctccctytctcctcactggcctttctttccgtctagcttcctcttcaggaaatgtcctgactctcctcagctcccccttcacccctccttgcccgcctaccctccct

SEQ ID NO: 451631 - DNA, 201 bp, Homo sapiens
ttgcaagactccgtctcaaaaaaaagaataatctgtcagcaggtcagcctggacaatgaagattgaatggcaagggcaggggcatctgttaactaggttaytgctcataatcttactgtctttccttgttttttgttaaggtgactttcttgaaagcataatttccaaatgcatattttacatctggcattaaagtaaaat

SEQ ID NO: 451632 - DNA, 201 bp, Homo sapiens
acagttccctttcatcttcagaacctctgtcgtgaatgtgttcaagaggctttggttaagtcaggaagaagtgcccagggtgtgtgtccccagtctccctraggcctggactcgcccatgaacccaagtcggcttctagacagcatgtccctaacagcagccctgggcccccacctcttctaccatccaccccagacttac

SEQ ID NO: 451633 - DNA, 201 bp, Homo sapiens
ccaattctattgatttattttctaaatactagataattaatgtgtatatgtttattatttattttcctctactattctgcaagaatgtaagctccctgctkataggggtctctggtctgttttatccactgatacattgtgaacatctaaaacagtccctgacctgttgtaacttctcagtaaacatgcgttatatcaagt

SEQ ID NO: 451634 - DNA, 201 bp, Homo sapiens
ggccaggcgtggtggctcacgcctgtaatcccagcaatttgggagtaattgctgtaatcccagcaagatggacggatcacttgaggtcaggggttcgagaycaggctggccaacatggtgaaactcaatttctactaaaaatacaaaaattagccagacatggtggtgagcacctgtaatcccagctacttgggaggctga

SEQ ID NO: 451635 - DNA, 201 bp, Homo sapiens
aagaactctggtgccatcttggtactgtgctgaaggaaggctggaagggtgggctagaggccagagtagaggcttcagccaagccacaggtgaagcagaakcagttgtgtccaggggcagacccagtacactggttctctctttgtcctacttttcagaatcctcttaggtgctggcgcttgtcctcgcttctgggcctat

SEQ ID NO: 451636 - DNA, 201 bp, Homo sapiens
gctctcttagtggaggtaggggctatgtcagtttccacataccgttgtagttaacttttttgagaagcggaaaggcttggttccactggaagaaactctgstccacgggcggtggactagaaagtgtgcttattacatattcatttggtatcaacctgggtaagaatgatagtgatggtcattgcaagcatagtttggatt

SEQ ID NO: 451637 - DNA, 201 bp, Homo sapiens
aaaggcaagaagctggcctctcagtgtaaagcacatagttggattgctggggcagtgttaaatggagggtggggtgagcagatagcactctcttcctgctstgttttcaggaagtgattataaaagcagctctaagtttgaatgaaatcaaaagaatgaattgtcaccttcccccaacaaaaaccagatgagcacaaacat

SEQ ID NO: 451638 - DNA, 201 bp, Homo sapiens
ttggatttcaaaatgacttgggaaaattggacaaggtaccagtagatgaatctctatctgtagacataacaggtggagacattcacttaggcaaagtaaastagatgcatcactggtcccatctcctgcctcccacctcccccgtcctgccactgccactgccaccagtttaagttccactctggcagtttttgcctcact

SEQ ID NO: 451639 - DNA, 201 bp, Homo sapiens
tccgctcactgcaagctccgcctcccgggttcatgccattcttctgcctcagcctcccgagtagctgggactacaggtgcctgccaccatgcccgactaatttttttttttttttttttttttgtatcttcagtagagatggggttttactacgttagccaggatggtctcgatctcctgacctcgtggtccacccgcctc

SEQ ID NO: 451640 - DNA, 201 bp, Homo sapiens
agtcagagctgctgcgggcttcaactaacctgatcagtggtttaaagatatggtctctgaggtccattccagtccttatgttctgtagtactatgatttgtttttttttttctcatttccaccctgtcacatggcttagttttttggttttggtcttttgctcctgggttattcgtatcttgctcgttttttaaaaataag

SEQ ID NO: 451641 - DNA, 201 bp, Homo sapiens
tcccagctactcaggaggctgaggcaggagaattgcttgaacctgggaggcagaggttgcagtgagccgagattgggcgaaaaaagcgaaactttgtctcaaaaaaaaaaaaaaatttttttttttttgtttagattcacattacttttttaattgaattaagtttcataccagagagtttagggactgtgaaggtttcag

SEQ ID NO: 451642 - DNA, 201 bp, Homo sapiens
cgtcctgtgcccagagcagcaaagggttaagccgccagctttcccttcttgtttctggtgctctttaacctgctctgtgctccgcagacctgaccccagcktggagaagccccgcctggtgcagaagcacaaacaagcttcctctttgaagcctgtttagtttggaagcaggaaagcagattttgggatagaatacccgtt

SEQ ID NO: 451643 - DNA, 201 bp, Homo sapiens
aaggcatggctatttaaggactggtgcccgcgttcaacagagcaaacctggcctgactaccactgagggtagtcccacctcagagtcttcagatcagaggmctggaaaagtggaatcagaattgcaccttccttcttttgtttcccatattctcatgtagcttcctaatactcactgagtaaatactctggttgagagatt

SEQ ID NO: 451644 - DNA, 201 bp, Homo sapiens
ctcctccctgcctccaccctccccgtcttccttcccctccccatgtggcctggccagaacctcttaaatccaggcccttagacctaagggaaggctttctrctcttcaacagtagaacagtttctgtcaccaaggcagggcagcagaaccatcacgttgtcccaggctttcccttctcctcgctggggcgggctgccttgc

SEQ ID NO: 451645 - DNA, 201 bp, Homo sapiens
agtggacttgcggggcagaggcagaggcagaggcgcagtgcagagccggacccccagcccctgtcactccagctgccactgctcccacgtctccctaagcyatgcttgttctgtccctgctcacccagaaagacagatttgagagccacggtaccaggagagcatgcctggcaacagaagagctagacggagagcgcatgg

SEQ ID NO: 451646 - DNA, 201 bp, Homo sapiens
aagtaggcagttctccttgagcacttgacagtctagtttgaaaataagatgagtcctcctaaaacagtaagaaatagcaaacaaattgccatagttatcayttttaaaaagagtgcaagaatatattaagctctgtggtacatttggacatccagaaaaggagttctaagcagcagtttttcatttgcagtgtaccccaaa

SEQ ID NO: 451647 - DNA, 201 bp, Homo sapiens
agaccccgtctctacaaaaaataaaaaactagccaggcatgattgtgtgtgcctgtaggcccagctacttagaaggctgaggcgggaggatcacttgagcytaggaggtctagacaacagtgagccttgattgtgccactgtactccagtctgggtgacagagtgagaccctgtctcaaaaaaaaaaaaagtgtatataaa

SEQ ID NO: 451648 - DNA, 201 bp, Homo sapiens
acagctcctcctgtgggttctgcccaccttgctgcttttctcctgagttctttttgttcccattgccatttggagttgttcagagaccagggcagggtacwtggtttgggaagttggtcagaagtgtttgattcctaaccaaaccaccagggcaaagcagtcactgaaaatgctcctccaggcatgaggcgtggcctcttg

SEQ ID NO: 451649 - DNA, 201 bp, Homo sapiens
cctgtttacccatatcccgggccacaggtctgttagctctctcacgcagcatgtctcccttcatccctcctccctctctcactcccttttggcttttgttyggctgaggaaatggaaagctcacacaggaagtgctgggtctcatttgcttgagatgctgagtctgttttctctttggatgctgcagcaaatggcccgttg

SEQ ID NO: 451650 - DNA, 201 bp, Homo sapiens
tcctcagactactttaatttgtattatttcatttcatccttttagttctgaattaggtaatgtcagtggtagaaattccattttacagtccaggaacaatscaaaacattttacttataatcccacagttaatgacaggacggactttattgtgtgtccagagacctacccatccatctactgccattggtgtctctttgg

SEQ ID NO: 451651 - DNA, 201 bp, Homo sapiens
gagcctgtgcagctggagctgcagcgcccaggcaggcccctggatgctgggggcgccaagtccgcccacccagggctttgaggccacactctccggctcarcccacgctctgtcttgttgcctgagacagctcctcctgtgggttctgcccaccttgctgcttttctcctgagttctttttgttcccattgccatttggag

SEQ ID NO: 451652 - DNA, 201 bp, Homo sapiens
attcttcacttctcttcctggctggctacagagccctgaatatactgcttctaggagaccagggaagatgacaaggaggtttagtttttagattgtttctrcttgctttggatttgaattgaaatttttttccctcccttgttttgctgagaaatagtttggtttcaatggaagtagattttctagaaccttgaaccacga

SEQ ID NO: 451653 - DNA, 201 bp, Homo sapiens
cattagtagccaacatgtaaaagccagagtatttcacataaaaatccagattcagccaggtgcagtgactctcacctctgtgatcccagcactttgagagrctgaggcaggaggattgcttgagcccaggattttgagaccagtctgggcaacgtattgagaactcctctctacaaaaaattaaaaattagctaggtgtgg

SEQ ID NO: 451654 - DNA, 201 bp, Homo sapiens
ggcccccaggatagctataaagtccaagtgagatctggggctgtaaccacacccccacttccctgctcttacctagacccctgggccgcctaagctcttcygtgagcatgggggaggtgaggcctggtctccctctgcagcctgtccctccctgcttccggcgttgcacagaggctggtgagtggggccgactggaggtca

SEQ ID NO: 451655 - DNA, 201 bp, Homo sapiens
agtctgtgccgaggtggctgtaaaacagggccggtgaaggcccttctgggagagcacacacatgtgtgccctcaggccattggcttcctgcccagaaccaygggggcttcagtgctccaaacccatgctaaccttttctcatttttcctctttttgtttaatttaaggggggaaaatccaaggaaaaggtataaattgtcc

SEQ ID NO: 451656 - DNA, 201 bp, Homo sapiens
aaggccggaggatcccttgaacctaggagttcaaggccagtctgggcaatatagggagaccccgtttctataaaaaattagccaggcgtggtggcaggcgyctgtggtcccagctacttgggaggctgaggtagaaggatcgcttgagcccaggaggtcgaggctgcagtgagctatgatcacaccactgtactgcagcct

SEQ ID NO: 451657 - DNA, 201 bp, Homo sapiens
ttgtttcttctttctctacctttactaaaacactcctttaaatacaatcttgtcccagcccccaccccagtccctctgggtttctctttcctctgccttcyggcttaggtccctagtgagtgcctcagggcagttgtgctaaatccctgggtgcagctgtcagggggtcctccttgggaagaatactgtccactacttttc

SEQ ID NO: 451658 - DNA, 201 bp, Homo sapiens
tattcacacatttattccctcttctcctctctgtttccattgccactactactattctaggtcaagtagttgcttagagtgtagcagtcaaggcccctgcrttgcacagccccagaaggtgccatttgccttgtttctgtaagtggcacctcctggagtttgtagcataccaggctcctgcccaccaggctcctattcact

SEQ ID NO: 451659 - DNA, 201 bp, Homo sapiens
gccagtctgtgaaattggtttttgttgattaacataattggattattaaggctattttctcccgctgctctagaaagtagtaggaatagctttccccatcyccccgccccccaccaagttacagactgccgagggtgagctattcttgggttaaactgctttatctttgtggatacttcatgaacctaccttttaaactta

SEQ ID NO: 451660 - DNA, 201 bp, Homo sapiens
ttaaattttcccgtaccatgttgccctaagtcaggatttcccaacccttggtgctgtcgacattttgagccagatgactctgctgtgaggggctgtcctgygcgttgtaggatacttggcagcatccctgccttcttcccactgtgcaccaaatgtgctgactcagaatgtctccagacattgccacgtgttccctgggag

SEQ ID NO: 451661 - DNA, 201 bp, Homo sapiens
agcaccagctcagctggcagcaacaacagcgctgagggagctggcctgacggataatggatgtcgccgccgccgacaggataggaccaaggagaggccacsactgaagaagcaagtgtctgtgtcctcaaccgattccttagacgaggacagaattgatgagcctgatggattaggacccaggagaagttcagaaaggaag

SEQ ID NO: 451662 - DNA, 201 bp, Homo sapiens
ctccaggaggtgttttgatatttagtctagcgctttcccactgtttcatattgtctctgacttgttatgaaggctgccattttttccaaagaattaaacayaagttctctctctcccagatgaataattacagtaaaagctacagtttactgaggacttgctttgtcttagatattattctaagaattttacgtttttaaa

SEQ ID NO: 451663 - DNA, 201 bp, Homo sapiens
gtctccctctgcagcctgtccctccctgcttccggcgttgcacagaggctggtgagtggggccgactggaggtcagaaaaggggtgtggggagctctcagrgcctgtgcagctggagctgcagcgcccaggcaggcccctggatgctgggggcgccaagtccgcccacccagggctttgaggccacactctccggctcagc

SEQ ID NO: 451664 - DNA, 201 bp, Homo sapiens
ctcagctggcagcaacaacagcgctgagggagctggcctgacggataatggatgtcgccgccgccgacaggataggaccaaggagaggccacgactgaagmagcaagtgtctgtgtcctcaaccgattccttagacgaggacagaattgatgagcctgatggattaggacccaggagaagttcagaaaggaagagacattt

SEQ ID NO: 451665 - DNA, 201 bp, Homo sapiens
ctggtcttgaactcgtgtcctcaagtggtccgcctgccttggcctcctaaagtgctagaattacactagaattacaggcgtgtgccaccgtgcccagctgrttggtttttattgatttgcaagtctgaatatgaatctttgtcagctatgtgcattgtggatcacccagtttatagtttaattttaaattaatttacagca

SEQ ID NO: 451666 - DNA, 201 bp, Homo sapiens
gctgcagcgcccaggcaggcccctggatgctgggggcgccaagtccgcccacccagggctttgaggccacactctccggctcagcccacgctctgtcttgytgcctgagacagctcctcctgtgggttctgcccaccttgctgcttttctcctgagttctttttgttcccattgccatttggagttgttcagagaccaggg

SEQ ID NO: 451667 - DNA, 201 bp, Homo sapiens
agaattgatgagcctgatggattaggacccaggagaagttcagaaaggaagagacatttagaaagaaactggtctggccgtggggagggtgagcagaaaamcagtgctaaagaatatcgaggcactcttcgtgtcactttcgatgcagaagccatgaacaaagagtctcccatggtgaggtcagccagggatgatatggat

SEQ ID NO: 451668 - DNA, 201 bp, Homo sapiens
gggagggtgagcagaaaaacagtgctaaagaatatcgaggcactcttcgtgtcactttcgatgcagaagccatgaacaaagagtctcccatggtgaggtcrgccagggatgatatggatagaggaaagcctgacaaaggcttgagcagtgggggcaaaggctctgagaagcaggagtccaaaaacccgaaacaagaacttc

SEQ ID NO: 451669 - DNA, 201 bp, Homo sapiens
ctcagcctttctccctcccccgtctcattccaaggctgagggagggccttctcgcctggggacgcagccactttctccagtggagacagggcaggggttcwgagtttccgtcagatgcagtgaaatcacagttccctttcatcttcagaacctctgtcgtgaatgtgttcaagaggctttggttaagtcaggaagaagtgc

SEQ ID NO: 451670 - DNA, 201 bp, Homo sapiens
tctccctgtcggccagaaaccatgctttcttagccacgcagcataccatgtagcccgtgctctagcagcagcaacactcctgcccgcctgtctgtgcatgygtccgtggcacactcctgtcctgggcaggtttcctctgcacacttagcaggggtgccagtgtacctctcatcgtccaggtgaggccaaggacaattgcaa

SEQ ID NO: 451671 - DNA, 201 bp, Homo sapiens
caacaaatgtgagaataattggctccatttagagaaacaagaaaaacaacctgtaaacttgagtttgtggggggaaacccgtgtgattgttctctttaacsagaggagcagtagcaagctggactgttaagactagaaaaaagaactggctgatagtacaagtttaaactccgatttctccaaaccaaaaattcagaaaaa

SEQ ID NO: 451672 - DNA, 201 bp, Homo sapiens
ttttgcagtaagttttgaaatccagaagcatgagccctttaacttttgttctttttcacgattaatttggctgtatggggtcccttaagattccatatgatttttttttttttttttttgagatgggttctcactccatctcccaggctggagtgcagtggcacaatgtcagctcactgcaacctctgcctctcaggttca

SEQ ID NO: 451673 - DNA, 201 bp, Homo sapiens
ttgcacagcatcttcccctctctgaggggaattccagggttcatcttgagtttccttggttctctcctctttgcccatgctcctcttccttccagtcaaawccacaacagcaggcacatgtggaacacctaggatgatgatgagagtatcgttggcactgcagagtgatgagggcaggattgctgggcatgtgggcatgtg

SEQ ID NO: 451674 - DNA, 201 bp, Homo sapiens
cgtttcaccaggctgcccagaccttcgcattctgatgctatatatcttcctaattgtagctcggatgcatttatcacactgttggattggagtactgtttaaaaaaaaaaaaactctagaaattcttgtacttgctgcttttccatggatcgtcttccatagtctacagagcacactggagaagggtcgtagggagccctc

SEQ ID NO: 451675 - DNA, 201 bp, Homo sapiens
aggccaccacacccggctaatttttatatttttagtagagacagggtttcaccacattggccaggctggtctcaaactcctgacctcaagtgatccgcccrcctcagcctcccaaagtgctgggattacaggcatgagccactgcgcttggcctggcagcaggactttcagctaccttttcagagctctaagttttgtaaa

SEQ ID NO: 451676 - DNA, 201 bp, Homo sapiens
gtttcaccacattggccaggctggtctcaaactcctgacctcaagtgatccgcccacctcagcctcccaaagtgctgggattacaggcatgagccactgcrcttggcctggcagcaggactttcagctaccttttcagagctctaagttttgtaaatgtatagcttgggtgtgggtgtggggctcaggccagattcatact

SEQ ID NO: 451677 - DNA, 201 bp, Homo sapiens
tcatttccttgcttttctttgtagtgttatcacctagtatgtatatatgtatgtgtgtgtatatgtatatatatgtaaaatataatttggggccaggcacrgtggcttgcgcctgtaatcccagcactttgggaggccgaggcgggcagatcacttgaggccaggagttcaagaccagcctggtcaacgtggggaaacctt

SEQ ID NO: 451678 - DNA, 201 bp, Homo sapiens
ttaaaatctttgatgttccacagttttggtgattggtctaggtttggatttttaaaaattattcctgcgaagtatttgtcgggcttcatgtaacctatgakgttggttggttggttggttggttggttggttggttttcctatcagttttggaaaactcttagtgttcttttttcaaagactgcatctccccatgctttct

SEQ ID NO: 451679 - DNA, 201 bp, Homo sapiens
cctgggtaacatggcaaaaccccatctctacaaaaaaatacaaaaattagctggatgtggtggtacatgtctgtagtcccagctacttgggaaaattataygggagaatggcttaagcccaggggttggaggttgcagtgagacgagatcatgccattgcattccagcctaggaaacacagccagaccctgtctcaaataa

SEQ ID NO: 451680 - DNA, 201 bp, Homo sapiens
ggcggaggttacagtgagccaagattgcgccactgcaccccagcctgggcaacagagcaagactccatcttaaaaagaaaaatcaccgatgacctatcttyatcaaaccttagtctgtgtcatagttgaccaatcaccaatgacctatctttatcaaatttcagtctgtgtcatagttgacctccctttgtctttgggccc

SEQ ID NO: 451681 - DNA, 201 bp, Homo sapiens
accattggaatcagtgtgtaatacctctaccagcatcatccattgtcatgtggctgcctccccagccctgctgtgggtctacatgtaaacttgtgcatgaycctcaaaacagctttatcctcatgcttcttttacttttttttttttgagatggagtctcgctgtcgtgatctcagctcactgcaacctccacctcccagg

SEQ ID NO: 451682 - DNA, 201 bp, Homo sapiens
agtagaaatggggtttcaccatgttggccaggctggtctcaaactcctgacctcaggtgatctgcccgccttggcctcccaaagtgctgggattacaggcrtgagccactgcgcccagcctccatcattctttagacagattcacgtccctgctaccattggaatcagtgtgtaatacctctaccagcatcatccattgtc

SEQ ID NO: 451683 - DNA, 201 bp, Homo sapiens
tcccggtgttgtctgaaagattggtttcttgaaactgccattcaaatgaaacaaggtgtctctagagatcacatcacaaggcagccactttagtcagtgamacacacagcccgaaaacgatggtatcttctgaggttttaaaggatagggacagagtcatctcggattcgggagaagtactcagtcggggtgccatatggc

SEQ ID NO: 451684 - DNA, 201 bp, Homo sapiens
tcactagccctagtcttcagtgaggaaaaggaagctcggtaacgtggccagtgatgtgcatcttgtccgcctggggcgctgagagtttcatttgcctgtcygcagactgcttctcggaggagtgccgctctgtgatccaggaacaagccgcagctctgggcttggccatgttttctctactggtccgccgctgcacctgct

SEQ ID NO: 451685 - DNA, 201 bp, Homo sapiens
aagttgccgtggatacttggataaataacaattttctttaccctattgaaaggtcctacggttgcagagaccatgttttatttgtaactgtgtgctccatyatacctagtacagagtctggaacattctacatgctcagtatgtgcttgaggtactactgagccatggagaaggacaggccttccaggaggtgctctaggt

SEQ ID NO: 451686 - DNA, 201 bp, Homo sapiens
gacagagagtgtttggtctcagggcaagaaatgccaggaagtgggaattggcccatagagaccctgctgtaaaacagatctggtgtttcttgacagagtgscgctgggtctcttgttgccccttttcatagcactttctctcaccatgaagttgattgatttatctccccgtttgtacttaagggttatgcttcacttggt

SEQ ID NO: 451687 - DNA, 201 bp, Homo sapiens
ttttcctccagaaaccccacttccaaatggtccctctgacatgtgggacccttctttcatctctcttccttcattccctccctgtctttaatttgttaccytctttccttatgcagttagagaatcattgcacagcatcttcccctctctgaggggaattccagggttcatcttgagtttccttggttctctcctctttgc

SEQ ID NO: 451688 - DNA, 201 bp, Homo sapiens
gtttgtacttaagggttatgcttcacttggttgtggtgggggagtgaatatgccacactttgccttgaaatggaaatgcggatctttctgggactaggcarggtcctctcagagtgtgtctgggttctcagttacttctgaatcctagaggatttcctcctctcatgctgcctgctacagcgtttagaattcccagcagaa

SEQ ID NO: 451689 - DNA, 201 bp, Homo sapiens
ttcctaggagcccactctgctcttggaggcagaggatgtgaggccagatttgccccccttcctacagggcgaaataagttgagtaatgccacattatttamccaactaaactttccagtttcagcagtggtcttaaaactcacgggttcacgggtgttggtggagagaccttgatctcctctcggttgggccctatgcaga

SEQ ID NO: 451690 - DNA, 201 bp, Homo sapiens
atgccacattatttaaccaactaaactttccagtttcagcagtggtcttaaaactcacgggttcacgggtgttggtggagagaccttgatctcctctcggwtgggccctatgcagagtcctacgtcagtggatacagaattctagaatcctcatactgcacactcaggtagttggggatagataaatttgaggggtgggac

SEQ ID NO: 451691 - DNA, 201 bp, Homo sapiens
agttagctgtgtaaactggccccctcattcctcctcctacatctctggtggtagaaacccttgggctttttctctacaaggatctctgtgggtagatttcygtagggaatcgttgccacctgactttcattttcaggatgcctcagtttagagaaaatgaacagagccagcctgagcaaggaattttgtgagaagtagatt

SEQ ID NO: 451692 - DNA, 201 bp, Homo sapiens
gctggacaaagcggcgcgtggatgtgcctgtggggccttgccctgggcatcgctgctgctgccagcgcccttcacccatgcttcagcatggtgcctatackcacttcctgcaggagtctgctggatacctgcagctggagcacaggagagatttcagctcttctgggagtaggaagctctcctttgacactcgttccttag

SEQ ID NO: 451693 - DNA, 201 bp, Homo sapiens
ccatctatccacccatccatccattttttcttcttttaaataatttttttaatgcctataatcctagcactttgggaggccaaggcgggcagattgcttgmagccaggagttcgagaccatcctggccaacatggtgaaaccccgtctctactaaaaatacaaaaatgagctggatgtggtgacgggcacctataatccca

SEQ ID NO: 451694 - DNA, 201 bp, Homo sapiens
cactggctggacaaagcggcgcgtggatgtgcctgtggggccttgccctgggcatcgctgctgctgccagcgcccttcacccatgcttcagcatggtgccyatactcacttcctgcaggagtctgctggatacctgcagctggagcacaggagagatttcagctcttctgggagtaggaagctctcctttgacactcgttc

SEQ ID NO: 451695 - DNA, 201 bp, Homo sapiens
ttgtggtaaaatatacacaacataaaatttaccatttcgtgccctccctgcacttgaccgccgctgctccgtgccggcagcctggggactgggagcactcrtgccttgggtatgccgccccactggctggacaaagcggcgcgtggatgtgcctgtggggccttgccctgggcatcgctgctgctgccagcgcccttcacc

SEQ ID NO: 451696 - DNA, 201 bp, Homo sapiens
cggcagctgttgggcatgtgccctgggtctgtgagagtttgggcatgtccatttggttcccatccctagtgcccaccccttagaccctggccaggttattktgtcactggggactctgttcagtaacaggaaactggggaaagtttaattgttttctcctctccctttttcccatgcagctgaacaaaaggttcatcctca

SEQ ID NO: 451697 - DNA, 201 bp, Homo sapiens
gaggttgcagtgagacgagatcatgccattgcattccagcctaggaaacacagccagaccctgtctcaaataaataaataaatactatatttttagaagtwtggttgttgggtgaaggggttttggcatcttaatacttttgatacatgatgctagattattttttcttttttctttttcttttctttttttttttttttt

SEQ ID NO: 451698 - DNA, 201 bp, Homo sapiens
tcccacaacataaaaacttctccgctatcaatatcccacaccagagtgggacatttgttacagtcagtgaacctgtattgacacatcatcacccaaagttygtagtttacattagggttcactctcggtgttgtgcattctgtgggtaactagcttatttttatacatcactctgagtgagtaagtttggagtcatcatgg

SEQ ID NO: 451699 - DNA, 201 bp, Homo sapiens
caaataaaaagaggaaaaattatccgtaatccttctttctacccagaagtgagagcactgttattttgctgatcatatataatcgtatttaatttatagtmcacacacacacacacacacacacactctttcattttcaataaaactggaggttatattaatatttatatatactatttgtttttattttattttattatt

SEQ ID NO: 451700 - DNA, 201 bp, Homo sapiens
cacagtggcctacgatgccctccattatgtgaccccaccttcatcccactcccaagctctctgacctcaggtcctcctactgtccttcaacccagtgtgcyctagtcacattgacatccttgctgttcctcaaacaaaccaagcgctcatgcctcagggtctttgcagttgctcttttcttaaccggaaacactctgtact

SEQ ID NO: 451701 - DNA, 201 bp, Homo sapiens
caagggcaaaaatataagagtagtggcagtgcaatgtctgaggaccagaagatcaggacaatgtcctggactccaaactttggaggcaagattgcttataratgaacagtaattaatgatgatgactggtatatgaaaacctgaagattagtgagccgaggtcgcaccattgcactccagcccgggtgacagtgtgtgaga

SEQ ID NO: 451702 - DNA, 201 bp, Homo sapiens
tagagatggggtttcaccatgttgccaggctggtctcaaactactgaactcaagtgatttacctgcctcagtctcccaaagtgctgggattataggtctgygctaacatgcccagctgtatatactgtttgtaatctgcttttttcctaacatttttaatatattcttatatggaatcatttttatagttacccagaattc

SEQ ID NO: 451703 - DNA, 201 bp, Homo sapiens
cctctgagaggatatctctggtgctgcttctgtatatttccacagcatcctagccttccccagtcatggcacttcataattgtctgtgttacccatagagsaaggattatctctgccttgttcacagcttgtgcactgtgctttgtacataaaatgtgcccagtaggtttttgttgaatgaataaatgtatgggtccatgt

SEQ ID NO: 451704 - DNA, 201 bp, Homo sapiens
aataatataaaacctcatttgtagtgaatgcttatctagcaatacttttttttttcttttttggctcatgcatacacccctctctaaagtgaagagaatartgataaactgttcttaattctagaatgcagaggaaaacgtggtttgcatatgtgcagcaaaaaactttggaagattgaaattgcacaatgagtgtaggtt

SEQ ID NO: 451705 - DNA, 201 bp, Homo sapiens
taaactggccccctcattcctcctcctacatctctggtggtagaaacccttgggctttttctctacaaggatctctgtgggtagatttctgtagggaatcrttgccacctgactttcattttcaggatgcctcagtttagagaaaatgaacagagccagcctgagcaaggaattttgtgagaagtagattcaaagtagaag

SEQ ID NO: 451706 - DNA, 201 bp, Homo sapiens
ctagtaggactcataggcagtaactccactggggagattccaggatgattcttctttgttgtttttagcaagagggtctcactgtgttgcccaggctggtsttgaactcctggcctcaagtgatcctcccttctcatgttcccaaagtactgggattacaggcgtgagccaccacaccccgcccaggatgattcttacagc

SEQ ID NO: 451707 - DNA, 201 bp, Homo sapiens
gggtgatggagtgagactccatctcaaaaaaaaaaaaaaattttttttctcagagtatactttgttttttttgagacaacatcttgttttgttgccagtgstggaatgcagtggctcactgtggcctcaaccttctgagctcaagggatcctcccacctcagcttctgagtagctgggaccacaggtacatgctaccacac

SEQ ID NO: 451708 - DNA, 201 bp, Homo sapiens
atttcatttccttgcattactgaggagtctggatattgtgtagttttgtttatccagttacctgttgataaacatttgggttgtttctagtttttcactaktatgaataaagctgccatgaacatttatatgcaagtattttgtggacgtgttttcatttctcttacgtaagtacctaggaatggacttgccggatcatat

SEQ ID NO: 451709 - DNA, 201 bp, Homo sapiens
gaggaccacagtcagatgaggcagatggagctcgaaatcagacctttgttcctcgtaccagacaccaacggcttcattgaccacctggccagtctggcgcrgctgctggagagcaggaagtacatcctggtggtgcccctcatcggtgagtcaggcgggaagggcagagcggccttgcatgtgcacagcagccccctccac

SEQ ID NO: 451710 - DNA, 201 bp, Homo sapiens
gagggatgtggggcctcccactgtggcagccgtgggtaattttcggccgcctctctctggctggggatgctgctgcccacaccacccccaacccccaactrtgtcctgcagcagccttgacctgcacgcaccaaccagggcccccaagccaagaattcagctgggagacttttcaccttcttccttctcactgtcgtcttt

SEQ ID NO: 451711 - DNA, 201 bp, Homo sapiens
cttgttttgttgccagtgctggaatgcagtggctcactgtggcctcaaccttctgagctcaagggatcctcccacctcagcttctgagtagctgggaccayaggtacatgctaccacaccccgctaatttttgtatttttttgtagagatgagatttcaccatgttgcccaggctggtcttgaagtcctgagctcaagcag

SEQ ID NO: 451712 - DNA, 201 bp, Homo sapiens
ggctcttttttttcttttttcttttttttttgagacggagtttcactcttgtttcctaggctggagtgcaatggcatgatcttggctcactgcaacctctrtctctctagttcaagcaattcttctgcctcagcctccctagtagctgggattacaggcatgcgccaccacacccagctaattttgtatttttagtagaaa

SEQ ID NO: 451713 - DNA, 201 bp, Homo sapiens
tttcatgtaaccatcactacaattaagatatagaccattttcaacacccccaaaaattccctcatgcaaccagctcccttcccaaccccagtccctgacarcttctgatgttttctgtctctgtaacttagctttttccagaatgacgtataaataaaatcatacagtacatagagcaggggtgccaatcttttggcttcc

SEQ ID NO: 451714 - DNA, 201 bp, Homo sapiens
aagctcccctccggccctagtttcattggaagactcctgtgggggaaggatggattctggtctgggaaggtgttggctgggaaagtgaatggacagaggcstaggatgaaagctgattgctgaggctgataccttgtggggctctgtctcatcagtgatcaatgagctggacggcctggccaaggggcaggagacagacca

SEQ ID NO: 451715 - DNA, 201 bp, Homo sapiens
ttttatcaagttgtttgtctttattattacgtcttaagagttctctctataacctggacataagcccttatccgatttatattttgcagaaattttctcckggtgctttctcattctcctgtctcttctgtttctctttttcttctgtcttcttttggatggattattgtttccattccaccgttgtcgtcgtgcccctac

SEQ ID NO: 451716 - DNA, 201 bp, Homo sapiens
atcctgtcagtttgtttgttttttaataattatactaggtaccttgtgattttaattcgcatttctctaatggctaatgatgttgagcatcttttcatatkttcatttgtcatctgtgtatcttctttggtgaagtgtctattcacatcttttgcctattgttaaatcggattattttcttactgagtcttgagaggtctt

SEQ ID NO: 451717 - DNA, 201 bp, Homo sapiens
gggaaggatggattctggtctgggaaggtgttggctgggaaagtgaatggacagaggcctaggatgaaagctgattgctgaggctgataccttgtggggcyctgtctcatcagtgatcaatgagctggacggcctggccaaggggcaggagacagaccaccgggctgggggctacgcccgtgtggtacaagagaaggcccg

SEQ ID NO: 451718 - DNA, 201 bp, Homo sapiens
ggcctctccggctcaggccgactccaacagaatacccgagaggtcaggccagcttcttgcccgtagtatattccagagtgaagtcgttttttgataagtartcattcccaattctaaagtgatagcctccaaggagtcattgctttgaagaactcctttcatctccagctggactcttttccaaacaaccatcggcagagc

SEQ ID NO: 451719 - DNA, 201 bp, Homo sapiens
tgattctgataaaatcacctactttttagaaaatgtttgatttgtaattacagatacattggcaaaggggctatttatcagagtattgcagttgatgctgscaattaaaaaataaataatgggccgggtgtggtggttcacacctgtaatcccagcactttgggagttcaaggccggaggatcacttgagttcaggaattt

SEQ ID NO: 451720 - DNA, 201 bp, Homo sapiens
gtgagccatgttcacgctactgcactacacactgggcgacagagagagaccctgtctcaaaaaaaaaaaaaaatttaaaagccatactggtgactgtctaraagtatttcattgtgatttttgttttgttttgctttctttttttgttgttgttctcattgtgattttaatttgcatttccctgatgagtaatgatattga

SEQ ID NO: 451721 - DNA, 201 bp, Homo sapiens
agactcatgtttgaagccgctttttcctctgactgccctttcttgaagaatgtgcataccattggtttgagatgtgtaccttatttttgagaagcaagaasattttttaactgctcgctcagtttctgcaattcattcgtcatctttcttcactttctcatcaccttcatcttgtgctgcttgctgtggaatttactgatc

SEQ ID NO: 451722 - DNA, 201 bp, Homo sapiens
tgaggtgaaaggatcacttgagcccaggaggtcaaggctgcagtgagccatgttcacgctactgcactacacactgggcgacagagagagaccctgtctcaaaaaaaaaaaaaaatttaaaagccatactggtgactgtctagaagtatttcattgtgatttttgttttgttttgctttctttttttgttgttgttctcat

SEQ ID NO: 451723 - DNA, 201 bp, Homo sapiens
ctgtttctcagcagtgatccccaaagagttaacatctacagcctcaaacttttcaggctattaatctgtaatgaggactaggcagtttgcagttttggaamgaaaatgccaagaaaggactcagttctccaagtatctaagccactgcttctgagcatgcacaagggtcactgagtgtcccttccttactctcagggtggg

SEQ ID NO: 451724 - DNA, 201 bp, Homo sapiens
cactaccacatagacagcacccaagccctgagggatccaccctgccatccagacacctcccaccaggccccatctccagcagtggggattacaattcgacrtgagatttgggtggggacaaatattccaccatgtcacttggctgtatcagtttagggaaatgttatgacttgctttacactcagtcagcctctgttttgc

SEQ ID NO: 451725 - DNA, 201 bp, Homo sapiens
attgagtgagtgctccctcactgttgagtcaagttcatgttccctgttctggcattgcaggccctatactttgtggttccaggtagagcacagcacacacmgtacttgcgtgcctcaagtagtacatgtggtcccccctgcatccaccaactccatcattgttcatctcttccagcccaccttagaaatggtctcttctgg

SEQ ID NO: 451726 - DNA, 201 bp, Homo sapiens
ttcttctgctattggccatttgaataccctcttctggggagtgcctgttcctgatttttacccatgtttttcttggattctttgtcttttttcttactgatttatagggtgttttttttttccagtattctgaatataagtcctatgttggatagaagtattgaaaatatcttctcgcagtctgtggttcatcttttcagg

SEQ ID NO: 451727 - DNA, 201 bp, Homo sapiens
aaaaatataaacatttcctccagcttctagtgttcattactaggaaatgtaaaacatatctccagtgctcatcagtggcagcaacgtgagcagctttattrctggtcgagattagtctcatgtttggtcctgccttgatgcttattctgcagatacttacgaaacacgtattgccaacacagcctgggagatccagacaca

SEQ ID NO: 451728 - DNA, 201 bp, Homo sapiens
cctcagcctcctgagtagctgggactacaggcaagcgtcacctcacctggctaattatttttacttttttattagaggcaaggcctccctgtgttgcccargatggtctcaaactcctgagctcaagtgatcctcccgccttggcctcccagagtgacccacagataataggtgaaatcccttgctcaagtatagagtttg

SEQ ID NO: 451729 - DNA, 201 bp, Homo sapiens
ttagaggcaaggcctccctgtgttgcccaggatggtctcaaactcctgagctcaagtgatcctcccgccttggcctcccagagtgacccacagataatagktgaaatcccttgctcaagtatagagtttgtacacattgaatatccctagtccaaaaatctgaaatacaaaagactctaaaatccaaagcttgatttcaga

SEQ ID NO: 451730 - DNA, 201 bp, Homo sapiens
atcggcttctctcgggctttgtccccttgctggctgcccctcaggacccctgctacgtggagaaaacctcggataaggtcagccccaggccaaacatcccyccccattcgcccctcctcttaattctccagacttttttattcttgggaagttttctgtgcaaatggaacatgattaagtcattgagaagggtgttaaggg

SEQ ID NO: 451731 - DNA, 201 bp, Homo sapiens
atttttagctgggcatggtggcgtgcacgtgtaatcccagctacttgggaggctgatctcttaaacccgggagacagaggttgcagtgagctgagatggcrccattgcactccagcctaggcagtagaggggagactccatctcaatacaaaaccagaaaacaaatagagctgtcttacatcttactctcttgttttgttt

SEQ ID NO: 451732 - DNA, 201 bp, Homo sapiens
tccatctcaatacaaaaccagaaaacaaatagagctgtcttacatcttactctcttgttttgttttgtttttttgagacaaggtttccctctgtcatccargttggaatgcagtggtgtgatctcggctcactgcaagctcctcctcctgggcttaacccatcctcctacctcacctccccagtatctgggaccacagaca

SEQ ID NO: 451733 - DNA, 201 bp, Homo sapiens
aggtgactcaaattttgtgctgctctgtgcatgtctaggaatgactgtgaaagcatcatgagtagtgatttgggggttacaagtaagttttagcaagtaartgaattcacaatgcaaaatccatgaacaatgaaggttgattgtattgtggtgggtgccaggagggaggtatgtattgggtactgtggaagcacagagaga

SEQ ID NO: 451734 - DNA, 201 bp, Homo sapiens
gtggtgtgcaatgtcaataaatgaatttattttctacattttctgttctgtatacagtggagctgctgtatcagagctatcgctcatgtctagttttcagttttttttttttcagtctctttcatataaatgatactgcagtgtcctgtcaccttcttggagctaccatgtgaagaagaaattctgtcattgggccacttt

SEQ ID NO: 451735 - DNA, 201 bp, Homo sapiens
ctccacctcctgggttcaagtgatgatcctgcctcagtctccctagtagctgggattacaagtgcatgccaccacgcccggctaagttttgttgttgtttkcattgtcattgttgttttctgagacagcgttttgctctattgcccaggctggagtgcagtagcatgatcttggctcactgcaacctctgtctcccgggtt

SEQ ID NO: 451736 - DNA, 201 bp, Homo sapiens
tcggcagagcctagtcagggttctgacacacagggttctgccatgagaagcaaattggcagcagcagacaggcccccgaggcaatggaattcagttctcaraacatactcaccatgggtctctttcatgttgtgtggaattctttccactgggcagccgcataggtgtagggaaaatgtcctgccccattggataaaagtc

SEQ ID NO: 451737 - DNA, 201 bp, Homo sapiens
ttttcccttatgctttcttctaagagttttctagttttagctctttttaggtctttgatccattttgaatttgtttttgtatatggtcttaggtaagggtycagcttcattcttttgcatgtgaatatccaggtttttttaagctctttttattgaaaagactattccttccataagattggaattggtcttgacaccctt

SEQ ID NO: 451738 - DNA, 201 bp, Homo sapiens
gcagagatcttttgtgatttgcctttgcctgacttctgggaacagcaatataaagtgtaataggaagaacatctcaagatggccatcagagttgaacctgrtcacttccatagcatcgagggccaggagacataaccacctagaggtgagctacccctgatgacatggggcatagctgtgtcctttggggatcacttccat

SEQ ID NO: 451739 - DNA, 201 bp, Homo sapiens
agcaaaggagcatggcttccctgtggaaaacccaggccaggtggcctgtagcacagaacgttcaccacatgctcaacttgttgtatttgcttgagggctattttttttttttaaatgtatagttttttgttttgaaagtgtgttatgtaggtggcattttcttttctttcttttttttttgggacagagtctcatgctgtc

SEQ ID NO: 451740 - DNA, 201 bp, Homo sapiens
tggaatcataaaatatttgtccttttgtgattggcttatttcactcagcataatgatttcacgttttatccgtgccgtagcacgtggcaaaagttcatttmtttttaatgctgaataatattctgttgtatgcatacatctaccacaatttgtgtgtccattcacctgttgatggacacttgggttgcttccactttttgg

SEQ ID NO: 451741 - DNA, 201 bp, Homo sapiens
gtgctggaattataggcgtgagccaccgcgcctggccaggttttaagagttttatatgtaatctggttactagttcttcggcagatatgtggtttacaaayagattttcctagcctatcatttgccttttcatctttttacagggtcttttgcagtgcaaaagtttttaatttttatgaaatccagtatatcagtttttcc

SEQ ID NO: 451742 - DNA, 201 bp, Homo sapiens
cgaccctttttatgatgtcatgagggattccttaattttgcagctgcttcctgattacgtcagagaggagcctgtcaccccacagcctggagctgtactcrtacaagaattggaaacaaatgaagtgccgaatatctaatggcttccacagggagcaccagttcagacttcccaggccgcctcttgctaggtcttcctcaa

SEQ ID NO: 451743 - DNA, 201 bp, Homo sapiens
aggctgggcacagtggctcacgcctgtaatcccagcactttgggaggctgaggcaggtggattgcctgagctcaggagttgaagaccagcctgggggaaaycctgtctttactaagaggacaaaaaaaaaaaaaaaattagctgggtgtggtggcacacgcctgtagtcccagctactcagaaggctgaagcatgagaatc

SEQ ID NO: 451744 - DNA, 201 bp, Homo sapiens
ccactacttagggaagtcaaggcaggaggatcacttgagctctggagttccagacccgcccgggaaacatgatgagaaacccatctctacaaaaagatttraaaattaatggccaggcgccatggctcacgcctgtaaccgcagcatgttgggaggccgaggcgggcagatcacctgaagtcaggagtttgagaccagcct

SEQ ID NO: 451745 - DNA, 201 bp, Homo sapiens
cccacttcctgtagacaaggaggttttggtgggctgcttaggaactgtgccagccttgtgtctgactggtaactgactcatgagaaaagcagccttatgtyggaaagataagggccaacaaattgcctccaggtggtggtagtttggaggtgactgaccattcatttcctttctttgggaggagacagtggggagggaatt

SEQ ID NO: 451746 - DNA, 201 bp, Homo sapiens
gttccagacccgcccgggaaacatgatgagaaacccatctctacaaaaagatttaaaaattaatggccaggcgccatggctcacgcctgtaaccgcagcaygttgggaggccgaggcgggcagatcacctgaagtcaggagtttgagaccagcctggtctcgaggtcaacaaggcgaaaccccgtctctactgaaaatata

SEQ ID NO: 451747 - DNA, 201 bp, Homo sapiens
gtgatgcagccaggcagatagttggttctctgggctggaatggctcgtggaccccagtgccctcagaatcccctctgctgctatcagagcatcagacttakgtgtcatccatcctgtgtcttctcttcattactcttcttatgctcttgccaggaaactggctgtgtgcaccaagggaactctgatagttccatcgctgcc

SEQ ID NO: 451748 - DNA, 201 bp, Homo sapiens
taatggccaggcgccatggctcacgcctgtaaccgcagcatgttgggaggccgaggcgggcagatcacctgaagtcaggagtttgagaccagcctggtctygaggtcaacaaggcgaaaccccgtctctactgaaaatataaaaattagctgggcgtgatggcaggcacctgtaatcccagctactctggagcctgaggca

SEQ ID NO: 451749 - DNA, 201 bp, Homo sapiens
aatgcagacacccgtagaagggtgcctgtggactccgaagccctcctccgcctgccactctttttaaggggactgagccagtcttgtgacccaggtgtgaccccccccgcccagaggcccaccggtaccccaggagaaaagggagcagcttcatctcatctcctgagactccatgagggcatgcggggaacaggaagcagt

SEQ ID NO: 451750 - DNA, 201 bp, Homo sapiens
gtgattcaagaagatcatttttagacgagatcgggcgcgttcagggtggtatggcagtagacagaagatcatttttaaatgtgtatttttccaatcttaaytgatgactgtgctcctgttagttatacactagagagactgagttaattaaatctgagttcttgttacgatggctttacattatcagtaggcagctaaagg

SEQ ID NO: 451751 - DNA, 201 bp, Homo sapiens
tgaaaaaatagtcctccagttttctcaatggcctctgctccagatgcttccccagaatttactctattatgagacagtcactataaaaagttcctcctcargctgagtgaggtggcttgtgcctgtcatctcagcactttgggaggccaaggtaggaggagcacttgagcccaggagttcaagaccagccatgcaacatag

SEQ ID NO: 451752 - DNA, 201 bp, Homo sapiens
aaggatggattctggtctgggaaggtgttggctgggaaagtgaatggacagaggcctaggatgaaagctgattgctgaggctgataccttgtggggctctrtctcatcagtgatcaatgagctggacggcctggccaaggggcaggagacagaccaccgggctgggggctacgcccgtgtggtacaagagaaggcccgcaa

SEQ ID NO: 451753 - DNA, 201 bp, Homo sapiens
gactgagttaattaaatctgagttcttgttacgatggctttacattatcagtaggcagctaaaggcagagaccatgcagctccagctcagactgcccttcytgaggtaaccgttcctgggaaagtgatgtagaattgacagaggtgacccttatcatcttatcaaacacatatccatatgccagacctcatggtaagtgct

SEQ ID NO: 451754 - DNA, 201 bp, Homo sapiens
ctgggaaggtgttggctgggaaagtgaatggacagaggcctaggatgaaagctgattgctgaggctgataccttgtggggctctgtctcatcagtgatcartgagctggacggcctggccaaggggcaggagacagaccaccgggctgggggctacgcccgtgtggtacaagagaaggcccgcaagtccatcgagttcctc

SEQ ID NO: 451755 - DNA, 201 bp, Homo sapiens
ctaaaggcagagaccatgcagctccagctcagactgcccttcctgaggtaaccgttcctgggaaagtgatgtagaattgacagaggtgacccttatcatcwtatcaaacacatatccatatgccagacctcatggtaagtgcttcacatgcattttctacttggccttatgaccactctgagagagggaatatcactagcc

SEQ ID NO: 451756 - DNA, 201 bp, Homo sapiens
ctgataccttgtggggctctgtctcatcagtgatcaatgagctggacggcctggccaaggggcaggagacagaccaccgggctgggggctacgcccgtgtsgtacaagagaaggcccgcaagtccatcgagttcctcgagcagcgattcgagagtcgggactcttgcctgcgagccctgaccagccgtggcaatgaactcg

SEQ ID NO: 451757 - DNA, 201 bp, Homo sapiens
agtgatgtgcatcttgtccgcctggggcgctgagagtttcatttgcctgtccgcagactgcttctcggaggagtgccgctctgtgatccaggaacaagccrcagctctgggcttggccatgttttctctactggtccgccgctgcacctgcttacttaaggagtccgccaaaggtaagcaggaggagtccccagcctggtg

SEQ ID NO: 451758 - DNA, 201 bp, Homo sapiens
ctccctcattgttacctttttccagctaccctaattagtcctaaatgctttagctagattaatctttataaaatattcactcattgcttcatccaagaacmttgagtgagtgctccctcactgttgagtcaagttcatgttccctgttctggcattgcaggccctatactttgtggttccaggtagagcacagcacacaca

SEQ ID NO: 451759 - DNA, 201 bp, Homo sapiens
gaagcgactaggtcataaactctcatatgctatgccgaagagtttggacttcattctgaaagcactggggaaccattaattgattttttagtaaatggatraggtagatttgttcttagaaccagtcacttgggcaaattggtgagtttgaatgggagctgggcaagagtggagatagaggagtcaggttgtaggtctgaa

SEQ ID NO: 451760 - DNA, 201 bp, Homo sapiens
ttttctgtagctttccttttcattttgtcttttgaaaagcaaacatgtttgattctgataaaatcacctactttttagaaaatgtttgatttgtaattacrgatacattggcaaaggggctatttatcagagtattgcagttgatgctgccaattaaaaaataaataatgggccgggtgtggtggttcacacctgtaatcc

SEQ ID NO: 451761 - DNA, 201 bp, Homo sapiens
ccttactacccaggctacccgactccgtcaggacagtatgtgtgtagccctctacctaccagcaccatgagtcccgaggaggtagagcagcacatgaggarcctgcagcaacaggagctgcacaggcttctccgggtggctgacaaccaggaactgcagctcagcaacctgctctccagggaccgcatcagtccggagggc

SEQ ID NO: 451762 - DNA, 201 bp, Homo sapiens
caagataagggtattaatgtggtactgccgctaaggtctcatctgtattcttactcagcctgaaaagggttgaacatcagttgtcctttttctcactccasttccacccactgttagacttgcagacagtttcccaaagtttctggtatggggttgcctagtactgatggatgctttcttcatttttatttatttatttat

SEQ ID NO: 451763 - DNA, 201 bp, Homo sapiens
catctttccctctggattgaatgttcttcaaatcttggaatgccctggattcaaaagcacctcaaagtctagaatttgagtctttgaagagagaatttgattttttttttttttagacaaatccttgagacttgagagtgctctgagtggtactaaatgtatgtagtcttatctacatcatttaggaggtgtgttcaaggg

SEQ ID NO: 451764 - DNA, 201 bp, Homo sapiens
catggcgaaaccctgtctttactaaaaaatacaaaaattagccaggcatggtagtaatcccagctacttgggaggctgaggcaggagactggcgttaaccygggaggtggagcttgcagtgagccgagatcaccccattgcactccagcctgggcaacattgcaagactccgtctcaaaaaaaagaataatctgtcagcag

SEQ ID NO: 451765 - DNA, 201 bp, Homo sapiens
gcttctacagaaatgtccttctttgcctaccagtattagcatttggatatgtaattcttgctcgactttttttgttacttaaccagaatgacagtctttcycctatcttccttctttattcttatcttctacctttccctcccaaactctttccccgacataacagaaaacatgaaggaattaaaggaggccaggccgcgc

SEQ ID NO: 451766 - DNA, 201 bp, Homo sapiens
gcggaggttgcagtgagctgagatcgcgccattgcactccagcctgggtgacaaagcgagactcagtctcagaaaaaaaaccaaaaactagatacatacargtttcaaacaatgtatattggtttcggtaagtgtattgacaaattgaccagtccagcaactgagtacaaatttggaagggctatgttactattaaggcag

SEQ ID NO: 451767 - DNA, 201 bp, Homo sapiens
gttgttaaatttaggtgaagacatatggggaaaaactattttcctagacacaactatctttagaatgacattctgctctgcagaatggaaaccagagtgartagtatacctacctggtcacattttttatttcctgccaggggaggtggttaatttgcaggaatctcaaaacttgagtctagctttttctgtggtgtattt

SEQ ID NO: 451768 - DNA, 201 bp, Homo sapiens
aaaagttccttctcaaactgaacacagcctgccttcctgtaattcccacttaatgattttttaaaagttttctcaaaatcacaaagtctgttttttctatrtctgacacaccttagttatacttgaaattctctttacgttttcttttctctaagctaaacaaaccagtgcaatcaaatagattcttggccagtgctgcga

SEQ ID NO: 451769 - DNA, 201 bp, Homo sapiens
aggaagaagtcctcaaccaggtagaacaactgagagtagaggaagatgagtgtaggggaaatgttgcgaaggaggaagttgcgaataaaccagacagggcygagatagaaaagagcccaggtggtgggagagtaggggctgcaaaaggagaaaaaggaaagaggatgggaaaaggggagggggtgagggaaacccacgacg

SEQ ID NO: 451770 - DNA, 201 bp, Homo sapiens
ccattgttagatgcctctgtagtcactcccaataccctggaaacatctcccttttttagggtttaacagacttcacctgtatagttactgtcttttaataygactttcgtcctcttatgcttgaaacctagaagaggagctggcttgttctgctggccttgagccagatgtcataacttcaggcagtgccacgctacacat

SEQ ID NO: 451771 - DNA, 201 bp, Homo sapiens
tagaaaagagcccaggtggtgggagagtaggggctgcaaaaggagaaaaaggaaagaggatgggaaaaggggagggggtgagggaaacccacgacgacccrgcccgcgggaggccgggctccgcaaagcgctactcccgctcagacaaacgaaggaatcgctaccgcacgcgcagcaccagctcagctggcagcaacaaca

SEQ ID NO: 451772 - DNA, 201 bp, Homo sapiens
aaattccagggtgttttttttttcctgcctcctactaaataactgtatttccatgttgtgatataacaacaccaaaggcattttccaggtgtggacacagytctgggccatcgctcagctctttctgtctgcatctgcctttaagactacacactggacaattcgattgtgagctccgtgatactactctccaaccgccat

SEQ ID NO: 451773 - DNA, 201 bp, Homo sapiens
atcaaggtgggctgactgaatcagagaatctatagagccaaagactttcaattcccatcaagttctctcaagacctagtcccatggcgctttctgcttgcyggggtcattctccaggtgtcttttatcccttcattctcacttaatcagggtcagccacactcctcagttcactgagagggaagtgttgccttttctttta

SEQ ID NO: 451774 - DNA, 201 bp, Homo sapiens
ttagtagagcatcagcaggcagcttaatggaggaagaaaacagaaagggtatgccccatatatttaaagagacttcttcaaggttttacgtaaaagttctrtttacatctcaagagtcacatggctatcctacctgcagaaaaagctgaaaatatggtcacctggctggcagaaatgtatccagctattagccacatgtgt

SEQ ID NO: 451775 - DNA, 201 bp, Homo sapiens
ctggtggctccgcccctttggagctacttcctcatgctgcccgctcgcctaccgttcaggctgctgagccttttccttcgtggatccgctcccacggcagygcgccatggcctccgggagccgctcctggagaggaggtgcgctgccgcctcctccttccagcactcatcgagtctgggacgcgagcttccttatgacccc

SEQ ID NO: 451776 - DNA, 201 bp, Homo sapiens
ttttatctgtacctgtggcgaccgaaaatatctttccaccaaataactttgactcatttctcaaaatattgctcatatattgcttgtttttgttatatatrtatagcttctttactaatgttttccttgactgaacacattcattactccttccttcacaaccatagtacttatagatgcctcacattacatttctgacct

SEQ ID NO: 451777 - DNA, 201 bp, Homo sapiens
gcagaaaccatactgcaaaatctatctttgtgttcttagtgctaaacacaggagagatttgctaatgaatagatgaataaattacccagttacagccaagygcagtggctcacacctgtaatcccagcactttgggaggccgaggtgggcagatcaccttgaggtcaggagtttgagaccagcctggctaacatggtgaaa

SEQ ID NO: 451778 - DNA, 201 bp, Homo sapiens
acttaaacctgggaggcggaggctgcagtgagctgaaattgcaccactgcactccagcctgggtgatggggcgagactccatatcaaaaaaaaaaaaaaaacttggggaaaagaaatgccctactccctcatccccccaaaaaagtgctaggtcttgaaaacttacgttttcaattgagtaccctacacagcttggcattt

SEQ ID NO: 451779 - DNA, 201 bp, Homo sapiens
gagactgagacaggagaattgcttgaacccgggaggcagaagttgcagtgagccaagatcacaccattgcactccagcctgggtgacagagcaagactccrtctcaaaaaaagaaaaaaactcctgagctcaagtgatctgcctgccgctgcctctgaaagtcctgggattacaggcatgagccaccatggctgacctgca

SEQ ID NO: 451780 - DNA, 201 bp, Homo sapiens
tgcagtggcgcaatgatcttggctcactgcaacctctgccgcctgggttcaagcgattgtcctgcctcagcctctcgagtagctggtattagaggcatgtrccaccacacccagctactttttgtatttttaatagagacagggtttcgccatgttggccaggctggtctcaaacccctcacctcaggtaatccacccact

SEQ ID NO: 451781 - DNA, 201 bp, Homo sapiens
attctcagaattgtattctatttggtgtcccctgtcattgaatcatacacaccttttaaattttattgctctcctggaataattgctcatgccatcttttyttccttagcagtccaaaagttcagagctgctttctaataatattctgtcactttagcttaatgaactaattcttcccccaccatactttttttttttttt

SEQ ID NO: 451782 - DNA, 201 bp, Homo sapiens
cgggccaggtcccgggagcacccggtcgtggggcacccggacccggcattgccgcccagcggcgtgaactgctcgggctgcggggcagagctgcactgccrggacgccggagtgcccggctacctgccccgagagaagttcctccgcacggcggaggcagacggcgggctggcacggaccgtgtgccagcgctgctggctg

SEQ ID NO: 451783 - DNA, 201 bp, Homo sapiens
agaatggtgtgaacccgggaggcggagcttgcagtgagctgagatcgtgccactgcactccagtctgggtgacagagcaagactctgtctcaaaaaaaaaraaaaaagaatagcattaactccacctgtcttgtccctatgcctctcttttatccaattgctcatggacaactttgggcctcataggtaactttgactttg

SEQ ID NO: 451784 - DNA, 201 bp, Homo sapiens
caggtcccgggagcacccggtcgtggggcacccggacccggcattgccgcccagcggcgtgaactgctcgggctgcggggcagagctgcactgccaggackccggagtgcccggctacctgccccgagagaagttcctccgcacggcggaggcagacggcgggctggcacggaccgtgtgccagcgctgctggctgctgtc

SEQ ID NO: 451785 - DNA, 201 bp, Homo sapiens
aatgctgggattataggcatgagccaccacaccaggcttgcacccttatatatttcatcagaacacataaaatgttaatattttaaacctaactttacacrgagacaattaaagcagatagtatttccttttaatttttaataatagacttttttcaaaaatagtattgggtctgtcaaagaagtcatagtttcacatgaa

SEQ ID NO: 451786 - DNA, 201 bp, Homo sapiens
caagctgaagaagatcttagtgagcaagaacaaaatcagcttaatgtcctcaaaaagcatggttatgtcgtaggtaagcatcctctatgggaaaaccctcrttggtactatgctaaaattctttgttaagcaacctgaaatacagctgtccgaggctagccagtttttgtggggagagactgccttccttattctgcaaca

SEQ ID NO: 451787 - DNA, 201 bp, Homo sapiens
agcggcgacagcaaaacctacgggccaggtcccgggagcacccggtcgtggggcacccggacccggcattgccgcccagcggcgtgaactgctcgggctgyggggcagagctgcactgccaggacgccggagtgcccggctacctgccccgagagaagttcctccgcacggcggaggcagacggcgggctggcacggaccg

SEQ ID NO: 451788 - DNA, 201 bp, Homo sapiens
aagggatttattataaatcatagggataaattataaatcctctgtgttataagcataggggatttataactttttctcattctctgctgaatatttgggaraaataaggaaattgaagaccagaatttagaaagaggttcttcagccactttacttgctcctagaatggggtgaccattttgcatttaatgcatgcatact

SEQ ID NO: 451789 - DNA, 201 bp, Homo sapiens
tgaagagaaaaaggaaaatgaaacatggatatggatatgtccaacaacacaatacaactgtgtgccattactatagcacatttcttgggttttgtgtttgytcatactttgttagaaattttgccttacacacttagaacccttatatatttcgttttgggaggttgttggttttttgcttttggggttggttttttgttt

SEQ ID NO: 451790 - DNA, 201 bp, Homo sapiens
ccccatttgttcccttgaaaccaaagtttcatttagtaagctgctcttctctgtcttgcactttgaattttacagaaaaattacttttatactgaatggtratgtgataaaaatggaaagaaatcgggcctacagattttggattccaattctggtttcccctgtgaactaatctcttaacctatttcctcatttgtaaag

SEQ ID NO: 451791 - DNA, 201 bp, Homo sapiens
tcccccaccatacttttttttttttttttttttttttttgagatggagtctgactctcttgcccaggctggagtgcagtggcgcaatgatcttggctcackgcaacctctgccgcctgggttcaagcgattgtcctgcctcagcctctcgagtagctggtattagaggcatgtgccaccacacccagctactttttgtatt

SEQ ID NO: 451792 - DNA, 201 bp, Homo sapiens
gtctgtcagcactggtagtttgcttctctgttagtttacagataaacttatttgatgtcttaaaccagggtttcccagactgaaccaaggatctctgttgkgaaatgaaagtattaagactcaggctgtgcacagtgcctcacacctgtagtcccagcactttgggaggccgaggtgggaggattgcttgagcccaggagt

SEQ ID NO: 451793 - DNA, 201 bp, Homo sapiens
ggctttctccatgttgttcaggctggtctcaaactcctgacctcaggtgatctgcccgccttagcctcccaaagtgctgggattacaggcgtgagccaccrcgcccagcctcttgttaagaaagaagtttacaagttttgtgtccaatttgtaccttctttattcttttttaaccagattttgattccttaaatctttgca

SEQ ID NO: 451794 - DNA, 201 bp, Homo sapiens
cagccactttacttgctcctagaatggggtgaccattttgcatttaatgcatgcatacttaccactaggacataaggtcacgtataccattactttaagcrgaaattgctactgcccacaagccttgataaggagagcatatattttctatcttggtattgaatcaacatgttttcaggttcacattaattttgacattta

SEQ ID NO: 451795 - DNA, 201 bp, Homo sapiens
tccttatgaccccgtggacacggagggctttggagaaggtggtgacatgcaggagcgttttctgttcccggagtacatcctggatccggagccgcaacccwcccgcgaaaagcagctgcaggagctccagcaacagcaggaggaggaggagcgacagaggcagcagcggcgggaggagcggcgacagcaaaacctacgggc

SEQ ID NO: 451796 - DNA, 201 bp, Homo sapiens
cagtggccgacatcaagttttcctctgcaggtaattttatgccaagcactttttaaaaagtgaataaaagggcaggcacggtggctcacacctgtaatccyagcactttgtgaggccgaggtgggcggatcacctgaggtcgggagtttgagaccaacctgaccaacatggagaaaccccgtctctactaaaagtacaaaa

SEQ ID NO: 451797 - DNA, 201 bp, Homo sapiens
tccggccccctctcttgccatatattgttaacatcaaaggacagcgcatcaagaaaagtgtggcctataaaaccaagaagcctccttcccttatgtacaaygtgaggaagaagaaaggaaagataaatgtatgagaccgaccttgttcactccagatattaactgtattgaacacaacaaaatacattgaatttgtattaa

SEQ ID NO: 451798 - DNA, 201 bp, Homo sapiens
caggcattaatcctgatggccacacctataagaactaaggtacttagaaggaccgtgccttaattgcccaacattaatctatgtgaggccctgtggaggaytctaaaaacagtgtcagtgaagcacaattctcctgtccagaggcttctgccaggtgcttgcccaatgtgtggcccagagccctgagatttgtaagcttca

SEQ ID NO: 451799 - DNA, 201 bp, Homo sapiens
acttccctacactgtaatcttagtaacttgtttgagggaaacataaaaattatgtctggagttaaaagtattaaaggagtgactaataaccttactataayttgttctaggaagagttggaaggacattcttgtattcagaagaacagaaggataacattccctttgagtttgatgctgattcacttgcctttgacatgga

SEQ ID NO: 451800 - DNA, 201 bp, Homo sapiens
attactagtcatatcagcctcagaaacatttactttcaattgcacaagtactgctgtcttaattggcagaaaacaggaaaagaagtatacttccattttasactcagttctgattcattcatgaaagctgtttaggggtgaatctgtatgccgtcaagttctgtgttccatttgatagacttcattgctgacaaccaactt

SEQ ID NO: 451801 - DNA, 201 bp, Homo sapiens
gctgtcttaattggcagaaaacaggaaaagaagtatacttccattttagactcagttctgattcattcatgaaagctgtttaggggtgaatctgtatgccrtcaagttctgtgttccatttgatagacttcattgctgacaaccaacttattttatcattgtgattgttaccttggttagggaaacgtttacagaagccta

SEQ ID NO: 451802 - DNA, 201 bp, Homo sapiens
ttcattcagatcattgattgactcaaatgtgcatccaggatacagcctcacaacagattcattaatcatttccttcgaatctggttactgaccagtttccrattttctaattatctctgtatctccctacaaaaccacattggtttcttaggtacttttcttggcctcatcaggaacacttatagttacattctcagaatt

SEQ ID NO: 451803 - DNA, 201 bp, Homo sapiens
tgaaggaacagttttgaccgtccggccccctctcttgccatatattgttaacatcaaaggacagcgcatcaagaaaagtgtggcctataaaaccaagaagyctccttcccttatgtacaacgtgaggaagaagaaaggaaagataaatgtatgagaccgaccttgttcactccagatattaactgtattgaacacaacaaa

SEQ ID NO: 451804 - DNA, 201 bp, Homo sapiens
agacaggaagaatctatataaatttgatgcatagcaaactctgacataatttggtttattttgaagtctggcatatttttcatcactttttattttacggktaaatcataatatatcatattttcaataaaagtattttcttaaaaatctgccatttgcttcacagattttaaatcttctaacagaaaaagaagtaaatat

SEQ ID NO: 451805 - DNA, 201 bp, Homo sapiens
actccgaccgggcgcagtggctcacgcctgtaatcccagcactttgggaggcccaggcgggcagatcacaaggtcaggagatcgagaccatctgggctaamacggtgaaaccctgtctgtactaaaaatacaaaaaattagccaggaggtagtgggcacctgtagtcccagctactcgggaggctgaggcaggagaatggt

SEQ ID NO: 451806 - DNA, 201 bp, Homo sapiens
aaaggagtgactcaccaaagctgaaactgtcatgtcaccttccaaggtaactcatttgggtctttgaccttctctttgtattgagtgtactgagctgaatmgtctccctgtaacatgtatccattgttccccaaagccatctgggactaaggtaatacctatttcccttgccagacaaatattttaaaatgtaacgtccca

SEQ ID NO: 451807 - DNA, 201 bp, Homo sapiens
tcctccatcttgaactgaaaggagtgactcaccaaagctgaaactgtcatgtcaccttccaaggtaactcatttgggtctttgaccttctctttgtattgrgtgtactgagctgaatcgtctccctgtaacatgtatccattgttccccaaagccatctgggactaaggtaatacctatttcccttgccagacaaatattt

SEQ ID NO: 451808 - DNA, 201 bp, Homo sapiens
ctcacaacagattcattaatcatttccttcgaatctggttactgaccagtttccgattttctaattatctctgtatctccctacaaaaccacattggtttyttaggtacttttcttggcctcatcaggaacacttatagttacattctcagaattgtattctatttggtgtcccctgtcattgaatcatacacacctttta

SEQ ID NO: 451809 - DNA, 201 bp, Homo sapiens
gactgcacaagatgtgaaagatgcccactggttttatgacacccctggaattacaaaagaaaattgtgtatgtatttggtttcttttagaaacatttactwtctttttcttttttaatgggtttatattgcctgctgcccagatacagccaatttatcaagacaggggaattgcaatagagaaagagtgtaatgcatgtag

SEQ ID NO: 451810 - DNA, 201 bp, Homo sapiens
cattaatcatttccttcgaatctggttactgaccagtttccgattttctaattatctctgtatctccctacaaaaccacattggtttcttaggtacttttyttggcctcatcaggaacacttatagttacattctcagaattgtattctatttggtgtcccctgtcattgaatcatacacaccttttaaattttattgctc

SEQ ID NO: 451811 - DNA, 201 bp, Homo sapiens
caaactcctgatgtcaggtgatccgcctgcctcggtctctcaaagtgctaggattacaggcgtgagccaccagatttcttttttttttttttttttttgarggggaggagttttgctcctgttgcccaggctggagtgcaatggcgcgatcttggctcaccgcaacctctgctcccgagtagctgggactacaggcatgcg

SEQ ID NO: 451812 - DNA, 201 bp, Homo sapiens
agtgattcttctgcctcagcctcccgagtagctgtgactacaggcatgtgccaccatgcctggctaatttttgtatttttagttgagatgggggtttcacyatgttggccaggatggtctcgatctcctgaccttgtgacccacccgccttggcctcccaaagtgctgggattacaggcgtgagccactgcacccagccag

SEQ ID NO: 451813 - DNA, 201 bp, Homo sapiens
gagacctgggcatcatctctaacctacactattagtaatagtttcctgttttccacccttcacattgaactgcctctagattctctgcagaactaccaggattattattattattattattattattattattattatttatttatttattttatttttagacagagtcacccaggcaggagtgcagtggcacaatcttgg

SEQ ID NO: 451814 - DNA, 201 bp, Homo sapiens
tcaggatgtgcccaaggtcatcaggctaggtggtgacagagacaggattcaaacccaggactgcctgagtccaacgtggttgctgtctgttcttccaagtygtctccttgtggctatcctggcagtgtctggctggcagaccccacccaggcagttctcattcctctccgacctccagctacttcagcttgaatttctgga

SEQ ID NO: 451815 - DNA, 201 bp, Homo sapiens
agacctgggcatcatctctaacctacactattagtaatagtttcctgttttccacccttcacattgaactgcctctagattctctgcagaactaccaggattattattattattattattattattattattattatttatttatttattttatttttagacagagtcacccaggcaggagtgcagtggcacaatcttggc

SEQ ID NO: 451816 - DNA, 201 bp, Homo sapiens
aacaggagtttcaacataagagctgaagaggaagaaggatgaggatgctgcttaagaagtaaaggggcaggtggaacagaaatgagtgggcagaagaggtrcaaataagcagcactgggaatggggaggtaatagggctttgggtaaaagtttctccttggtccccctaccctccttccaggccttcctctaagctggaac

SEQ ID NO: 451817 - DNA, 201 bp, Homo sapiens
ccctgggtacttgagattagggagtggtgatgactcttaatgagcatgctgccttcaagcatctgtttaacaaagcacatcttgcaccgcccttaatccayttaactctgagtggacacagcacatgtttcagagagcacagggttgggggtaaggtcacagatcaacaggatcccaaggcagaagaatttttcttagtac

SEQ ID NO: 451818 - DNA, 201 bp, Homo sapiens
gacctgggcatcatctctaacctacactattagtaatagtttcctgttttccacccttcacattgaactgcctctagattctctgcagaactaccaggattattattattattattattattattattattattatttatttatttattttatttttagacagagtcacccaggcaggagtgcagtggcacaatcttggct

SEQ ID NO: 451819 - DNA, 201 bp, Homo sapiens
tccaagaaggccctttaaagagttaactagaaagcgtccttctgtgctgctctctctccccctaatcatctttccttccttctgtctgctatctggaatgyagatgagatgaattaagctctagaagccatattagaccatgagatgaccatgaggatggaagctgcacgctaggatggtgaagcaaaaagaagcataagt

SEQ ID NO: 451820 - DNA, 201 bp, Homo sapiens
aaatcttagtggttcccccatctacaggaaaaaatccagactccatagtaaaaacatcaaagccctcatgatctggttcccacctgtacttttctttctctttttttttttttttttttttttgagatggagttttgctcttgttgcccaggctggagtgaaatggcgcaatctcggctcaccgcaacctccacctcctgg

SEQ ID NO: 451821 - DNA, 201 bp, Homo sapiens
ggcgggggtgttctctgcgaagcacggagggggtgcgtggtatacggcttggcaatctttactgaatcccagaactgggaccgtaggtcctgtcagctgtyccagctgtctggaatgctgatattctccctggagataggtcattacaaacaacatcctactctgatgctcccaccctgaaggaaattcacccttgccctc

SEQ ID NO: 451822 - DNA, 201 bp, Homo sapiens
tcctgacctcaagtgatctgcccacttcggcctcccaaaatgttgggattacaggcgtgagccaccgcgcccagcctctttttttttttttttttcctgaracggagtctcactctgttgcccagggtggagtgcggtggtgcaatctctgctcactgcagtctccacctcccaggtttaagtaatcctcctgcctcagcc

SEQ ID NO: 451823 - DNA, 201 bp, Homo sapiens
tgccaccatggccggaatttttttttcttatttttagtagagatggggtttcactatgttggccaggctggtctcgaactcctgacctcatgatccacccrccttggcctcccaaagtgctgggattacaggcttgtgccaccgcacccggcatttttgtatttttagtagagacagggcttcaccatgttggtcaggctg

SEQ ID NO: 451824 - DNA, 201 bp, Homo sapiens
cgcccagctaatttggtatttttagtagagacggggtttctctatgttggtcaggctgatctcgaactccccacttcaggtgatccacctgccttggcctmccaaagtgctgggtattacaggtgtgagccaccacacctggcctctgcctacctgtacttttcatagccagccttgtttcttacctgtgcctttgcacat

SEQ ID NO: 451825 - DNA, 201 bp, Homo sapiens
atgtttaaattttattttagaaatagagatggggccaggcacagtggttcatgcttgtaatcccaacactttgggaggctgaggcggcagatcctttgagyccaggagtttgagaccagcctgggcaacatggcaaaaacctgtctacaaaaaaacttaaaaattagctgggcatggtgatgtgtgcctgtagtcccagct

SEQ ID NO: 451826 - DNA, 201 bp, Homo sapiens
gggttcaagcaattttcctgcctcagtgtccccagtagctgggattacaggtgcgtgccaccacacctggctatgttattgttttacttttttaaataacttttttttcttctttttaaatttaactcctcaaattccttttaccaactacccactttctttcttttttttttttttttattgatcattcttgggtgtttc

SEQ ID NO: 451827 - DNA, 201 bp, Homo sapiens
cacctggctatgttattgttttacttttttaaataacttttttttcttctttttaaatttaactcctcaaattccttttaccaactacccactttctttcttttttttttttttttattgatcattcttgggtgtttctcacagagggggatttggcagggtcacaggacaatagtggagggaaggtcagcagataaacaa

SEQ ID NO: 451828 - DNA, 201 bp, Homo sapiens
ggaggatcacttgcgtccaggaggtcaaggctgcagtaagccatgatcacgccactgcactccagcctaggtgacagagaccttgtctcaaaaaataatamgcccctgatccctagcctctccctactttggaccactgtgtacactgctgctatctacagtttcagtcccatcatctgcccactaaaaagcctaccatgg

SEQ ID NO: 451829 - DNA, 201 bp, Homo sapiens
ttgttttacttttttaaataacttttttttcttctttttaaatttaactcctcaaattccttttaccaactacccactttctttctttttttttttttttwattgatcattcttgggtgtttctcacagagggggatttggcagggtcacaggacaatagtggagggaaggtcagcagataaacaagtgaacaaaggtctc

SEQ ID NO: 451830 - DNA, 201 bp, Homo sapiens
tctcaaactcctgatgtcaggtgatccgcctgcctcggtctctcaaagtgctaggattacaggcgtgagccaccagatttcttttttttttttttttttttgagggggaggagttttgctcctgttgcccaggctggagtgcaatggcgcgatcttggctcaccgcaacctctgctcccgagtagctgggactacaggcat

SEQ ID NO: 451831 - DNA, 201 bp, Homo sapiens
gtctcaaactcctgatgtcaggtgatccgcctgcctcggtctctcaaagtgctaggattacaggcgtgagccaccagatttcttttttttttttttttttttgagggggaggagttttgctcctgttgcccaggctggagtgcaatggcgcgatcttggctcaccgcaacctctgctcccgagtagctgggactacaggca

SEQ ID NO: 451832 - DNA, 201 bp, Homo sapiens
tgctcgacgaccccagagccccgagtttcttctcccgaaccgcttgccacgtgtccaagccaaagctgacgtgtttcagcagggcgccgccccctcccagrccccgccccggccccccagacccctcaccgtgtagtgtatgtgaagcgtgtctccaaaagcagcgggctcggcacatggttctgggggctccacctacga

SEQ ID NO: 451833 - DNA, 201 bp, Homo sapiens
cttggctttaacagttgctttttgttttgttttgaatcacttgactgtgattatttttactgtctcttccctgatggaggctgaaaggaaggggtggggggtggctgtacagctgacacagcgtagagttgtagaaaagggcaggaaagaagtccagtgttctgggaaaggtggtggcacaggcagcagacccatgtggcc

SEQ ID NO: 451834 - DNA, 201 bp, Homo sapiens
agatggggaattgaatccaggggagtgcccagagtccgtgtcaaggagttgcctgtaagcaagtggctagtatcttggagcatcccacattgattatcacrggacccccagcagagaatatcttggttccttttaaacaaactcgggcttaagtttgcagctctagcttccctttactcacgtcaggtccctgtctgtgta

SEQ ID NO: 451835 - DNA, 201 bp, Homo sapiens
tagtctttagctaaagacctgtccgaagccgaggagcagtacgcccatgccctgcgcagccacttgcacaatgttgaccagctcttggccctgcagaggcrccggctcagtctcctggaggaaagttacaacatggagctggaagccctaaccaaggagtttgagacagaaaggtatgggggcctaagagaagatggggaa

SEQ ID NO: 451836 - DNA, 201 bp, Homo sapiens
catcaagagcatacatctagcaccctctccctcccagcaggcgcgcaacacacacctggaccgctgggcggcggcagcccccttagtgcggcagcctagcrttccccttaccgctgtaaggaacaggaagccccagaaggctggcgcttctcggagatctctccaccctgcacttctccgtgccaggtaggaactggcaga

SEQ ID NO: 451837 - DNA, 201 bp, Homo sapiens
aggaggccgaggggcgccctctgtaccctccaagatccggagggcgcaggttctgacgcatccgttagacgttctgtcctataacgtgggtcgggccaaayaatagcacccatttacgattacctactgtgtgtcaggagctagtctctaatcctcaaaaccaccctgaaaggtcggcatgattgtttccattttacagat

SEQ ID NO: 451838 - DNA, 201 bp, Homo sapiens
cagttcttgaaggtgatggccttttgcattatgtcctgctcaaccccatccaccccctgccctggccctgtcactgaggaaacctcattttcatcctgacytcccctcctccggaaatcctgagacccagatatacttagatttcaggcaacattgtttgggaggcgggggtgttctctgcgaagcacggagggggtgcgt

SEQ ID NO: 451839 - DNA, 201 bp, Homo sapiens
gtcatctattgcccaaaaccagtactatccaatagtagagtcataaggcacagtagacatcacccagtgacttgaaatgagtcccacaccttcatttcaaygtcagaaggctcagttccagaggggaactgacttgcccaaggtcacatagctagtcagtgagagaaccaggactccagcatgtgtttattgattcccact

SEQ ID NO: 451840 - DNA, 201 bp, Homo sapiens
ggcagcatttgctaatgggtctcgctgcacaccttctccctgtaactccactcccaggtgatggtggactacataggaatggagaatttctggaaaaggtrcaacaaagtgaaactggagcaactgagcctccaacatagacgagcccagctgctagatatcaatgggaagctgcgggagatgctgaagcagtacttggat

SEQ ID NO: 451841 - DNA, 201 bp, Homo sapiens
ttttttttttttttgagatgggggtctctgtcatccaggctggagtatagttgtgtaatcttggctcactgcaacctctgcctcctgggctcaagtgattytcctgcctcagcctcccaagtagctgggaccacagaggcatgccaccacacccggctaatttttaaattttttgtagagatggggtttcgccatattgcc

SEQ ID NO: 451842 - DNA, 201 bp, Homo sapiens
gggatctctcctgttcgagggctgagatctccggtcccacaaccgcccacaaccaggggcacttctggaagtcccctttctagggacatttttcttctaarctctgtaacgcgggccgaggcagaccgaggcttctttcccggatccaatcccctgcccccatgcctaagaaagaaaaaatggccaagacgcccctgtccg

SEQ ID NO: 451843 - DNA, 201 bp, Homo sapiens
tggtgtttattaattcatccatttgttcatcaaggttgcatgactattatgtgccaaagaataagcagaacactgctctttaaatgttcttaagtgtttayttataacaggttgttaataaagtaaaagcctgagttggcatatataaatttgggtttaaaatttgattttggttgagacagggtcttgctgtgtcaccag

SEQ ID NO: 451844 - DNA, 201 bp, Homo sapiens
aacatgtgtcagcacatacatttaaaaaaggaactagaaggatgcacatcaaatagctgaggatggttacgtttgggcatgggagagagaagagtaagggsaatgtcccacatgttgctctgtatatttttgtattgtttggatcttttacaatagaaattactttggttataatttttttcctgctcagatgttacttct

SEQ ID NO: 451845 - DNA, 201 bp, Homo sapiens
cagcagcagatggagcgggaggagtgaggggcgcagggtcatgactgggcgcggggcagggagccggggcaccaggacaggctgttcgggtggcggcagcyaggacagcgttcccgcggcgcccaggccagactggacgggacggggcgggtcgcgatgctagagctcctcctcctgcagcccttcctccaccttgtcccc

SEQ ID NO: 451846 - DNA, 201 bp, Homo sapiens
ttccacctgaacaccaaacaggctggccagcaaaggtgtccatctccccatgtgcctcaactcccccgacaaaagcaacagcgcaagaggcacagaggctytgaatgccctcagaggtcccactgacctggacctgtccagtgggaagcagggtcctttattccacattctcctgcttaaggagtgaggatggccgagaaa

SEQ ID NO: 451847 - DNA, 201 bp, Homo sapiens
tgccatggcaatgcggtgggcgcgcgcttgtcgtgttggtctcttgggaggtagcggggctaggccgggcgggtatccgcctctcccagcttaggtgagcstccccgggcgcctccggagcgccgcggccgcatgcagttcgtcgtggcggggagccggagcctgaccggggttccagcgctcgggccgtagccttggctc

SEQ ID NO: 451848 - DNA, 201 bp, Homo sapiens
aacaatagagaatatattaaactctttccaaaataacctgttgttcctacctgtgttgtaagtgttttgtttgtttttaagtaaatattggtgatttgttsccaaaaacctaaactgtttgttgctgtcaacttaaataacgaacagagagaggctctctaaaagaaaatggcatttattcaggaatagagcactgcaatg

SEQ ID NO: 451849 - DNA, 201 bp, Homo sapiens
cacctcctgatgaagtttccggttccggtgtcagcggcggttgaattgccatggcaatgcggtgggcgcgcgcttgtcgtgttggtctcttgggaggtagyggggctaggccgggcgggtatccgcctctcccagcttaggtgagcgtccccgggcgcctccggagcgccgcggccgcatgcagttcgtcgtggcggggag

SEQ ID NO: 451850 - DNA, 201 bp, Homo sapiens
tcggcacattacccgaaagtctcaatgtcatattttcacccccatcaatattattgatgattgctcattttctaatgtgggacctgaaatttaccaggtgmttaaagaatctttttgtttttcagattcattgattccaggtaaatcagaggaacaagcaacatgaacagaaatatgtagaaaaagctattatgcagaagc

SEQ ID NO: 451851 - DNA, 201 bp, Homo sapiens
aagcaagcctcatcaggcccattgcttgctctgctctcccttgtacttaccagtgcttgacaatatacagttatttactagcttggttattgacttcctayccagcactcagttttattcactgctgtatcctcagtgcctaggacgatgcttggaacgtggtaagtgctcctattggcgggaagaataaatccggaagag

SEQ ID NO: 451852 - DNA, 201 bp, Homo sapiens
ggtgcccaaagcttggacccatcgtgagaaatgagaagcagatacaaagcagtgtgggagtgcagaggagacaaagcaagcctcatcaggcccattgcttkctctgctctcccttgtacttaccagtgcttgacaatatacagttatttactagcttggttattgacttcctacccagcactcagttttattcactgctgt

SEQ ID NO: 451853 - DNA, 201 bp, Homo sapiens
ctcccttgtacttaccagtgcttgacaatatacagttatttactagcttggttattgacttcctacccagcactcagttttattcactgctgtatcctcartgcctaggacgatgcttggaacgtggtaagtgctcctattggcgggaagaataaatccggaagagcaggaccagtggacttgctacataatctgtagtct

SEQ ID NO: 451854 - DNA, 201 bp, Homo sapiens
tacccgaaagtctcaatgtcatattttcacccccatcaatattattgatgattgctcattttctaatgtgggacctgaaatttaccaggtgcttaaagaayctttttgtttttcagattcattgattccaggtaaatcagaggaacaagcaacatgaacagaaatatgtagaaaaagctattatgcagaagcataattgtt

SEQ ID NO: 451855 - DNA, 201 bp, Homo sapiens
caccagacttgcagaaaaagcatactccagaggaagctgaggcatgcctgctcgagagccagctgttccatgtgcaattttcctctgatagtttctggtcrctgttgccacggtgataatgactgggctatgtcattatctatccgccaacagtaagagaagctttgcagtcgagatattgtttagcagatggagtgtttt

SEQ ID NO: 451856 - DNA, 201 bp, Homo sapiens
acttcctacccagcactcagttttattcactgctgtatcctcagtgcctaggacgatgcttggaacgtggtaagtgctcctattggcgggaagaataaatscggaagagcaggaccagtggacttgctacataatctgtagtcttggagccgcacagggttggtggtaccctcgagcacaccagacttgcagaaaaagcat

SEQ ID NO: 451857 - DNA, 201 bp, Homo sapiens
gtccccgggcgcctccggagcgccgcggccgcatgcagttcgtcgtggcggggagccggagcctgaccggggttccagcgctcgggccgtagccttggctyctggactttccctggctccgccgccacgtgggagctgaggctctggggcttccgcctccggcgcgcgattatttctctagaacagttttcatttttaaaa

SEQ ID NO: 451858 - DNA, 201 bp, Homo sapiens
tgaacctcagctgcgtgtctcatgtattaaatgggcgcgacaacactggccttcagaggggatgtgggagtaaaaacaaaagcatctccagaggcccagtrgacatgcaccacctgcttgaacgtttgctgagtgaattcaccttggccagggcctgattgggctgggctagtgtctgtcctcccccgacagagacgggca

SEQ ID NO: 451859 - DNA, 201 bp, Homo sapiens
aaactgccatcggttgtacgtcctgagctgtgggacgtcagctttaaccctagcctgtctcagggcctcgccctccagccccccgccccttagggtgatcrtgggtttcttcccttcctcctgcacaatcgcttcccttcactgaattcccttcaaagccaaagtttcttgagcactttttcttgtgtgcagtcttgtgtg

SEQ ID NO: 451860 - DNA, 201 bp, Homo sapiens
cctcttctcctaaaagctgagtctatatagggatgacaggctcaggctgagcagtcgacttctctgggttttgctgtgtaagaataggtccctcaacatgmagatgtgtctgcgtctgagccagatgctgcctgggtcggttgcctggcctccgtctggtctccctccctcctactagggtggtcaagctgtgagatctct

SEQ ID NO: 451861 - DNA, 201 bp, Homo sapiens; identical to SEQ ID NO: 358022

SEQ ID NO: 451862 - DNA, 201 bp, Homo sapiens
actgcatttctctttcccacagcccagcagatagctcattggcttagcaatgggcacttaacagaatccagttgttgcagccagaattaaatgcaccagtytggcttaaaccaactggaactcatccctggggtgaaggtggctgggaattagacaagagtgtgtgttagccaaaaggcacatgcatgctgtcagcaggag

SEQ ID NO: 451863 - DNA, 201 bp, Homo sapiens
agagtgtgtgttagccaaaaggcacatgcatgctgtcagcaggagaatgaggagcactggttctgggcaggcagtggcaggggctccctcaggcccctgawtcccagcccacagctctttctactctgcagacagagttccttggagactggccctgcattcaggcagggagcagaggggtccctgcctgcagcacccaga

SEQ ID NO: 451864 - DNA, 201 bp, Homo sapiens
ttttaaaactccagcttttccaagcatcattcaccaaagcatttggttaggcttagagagaaaagctggatatgagaaaatagaatgtaaaataggagggraaaaaaaaagaaggtggagagggcagttaagatctgggtgattctttagggaaacggctggttgagaggctttgatggaatcccattctctgctgtggcc

SEQ ID NO: 451865 - DNA, 201 bp, Homo sapiens; identical to SEQ ID NO: 358024

SEQ ID NO: 451866 - DNA, 201 bp, Homo sapiens; identical to SEQ ID NO: 358124

SEQ ID NO: 451867 - DNA, 201 bp, Homo sapiens
agcagcattttccccaagggcctgagctcagggtcaagtccctgctggccatcttggggctgtcactgggggtctgggtcaaggacatcccaggaatggtractgccacatacctcatcttcttactccccagctactctcttttcctcattagccttcctgattatttattgatttcttttttttattcaactgacattg

SEQ ID NO: 451868 - DNA, 201 bp, Homo sapiens
cctgcacaatcgcttcccttcactgaattcccttcaaagccaaagtttcttgagcactttttcttgtgtgcagtcttgtgtgtttgggtgttggtgttttwaaatttgctttctattcccccctgcctctctccatgtcgttacgcagctgagcactggttgggatgcattcgaatgacttcagcaagatcctgctttcct

SEQ ID NO: 451869 - DNA, 201 bp, Homo sapiens
ctctccctcttctcctaaaagctgagtctatatagggatgacaggctcaggctgagcagtcgacttctctgggttttgctgtgtaagaataggtccctcarcatgaagatgtgtctgcgtctgagccagatgctgcctgggtcggttgcctggcctccgtctggtctccctccctcctactagggtggtcaagctgtgaga

SEQ ID NO: 451870 - DNA, 201 bp, Homo sapiens
attgcagctgggtggggagtggagcgtgacaggcacgggagaggacagcgattgttgactctagttcctgatgtttaatcagaaaaaccacttttcctgtwgagcacatttcctaaaaggctgctgctgtgtagggaggtgtggccttttcctggtgcagtgtgaaggagggaagtgacgggcagtcgtgaactgtctggg

SEQ ID NO: 451871 - DNA, 201 bp, Homo sapiens; identical to SEQ ID NO: 358027

SEQ ID NO: 451872 - DNA, 201 bp, Homo sapiens
tatctcctcaactctccctcttctcctaaaagctgagtctatatagggatgacaggctcaggctgagcagtcgacttctctgggttttgctgtgtaagaayaggtccctcaacatgaagatgtgtctgcgtctgagccagatgctgcctgggtcggttgcctggcctccgtctggtctccctccctcctactagggtggtc

SEQ ID NO: 451873 - DNA, 201 bp, Homo sapiens
aggggtccctgcctgcagcacccagagctgaacctgaagctacaaagatgggctgatgaggtggcccatgaggtgtcagcaacatcccaaccccctgggtmtccccagtgagtcagggcactgatttgctatagctggagctacatgcacctctcctcccctcagccaccttttaggggagaaaggagggcagatttgtaa

SEQ ID NO: 451874 - DNA, 201 bp, Homo sapiens
atcccatcacccagcctcatcactcagcttcttcctagtacaaaactgccatcggttgtacgtcctgagctgtgggacgtcagctttaaccctagcctgtstcagggcctcgccctccagccccccgccccttagggtgatcgtgggtttcttcccttcctcctgcacaatcgcttcccttcactgaattcccttcaaagc

SEQ ID NO: 451875 - DNA, 201 bp, Homo sapiens
taggtgggggtgcttaagggaggtttgtaggagtcctcggacgtgggatattgggggtatctagggcttggatggtttgtggaatgtcctcagcatcctcycgtcccaacccaaccttccttcttcctcattgtggacttggatttattctcaggctaggagtctccaaaactccgtgaaaccttattgctgctgggtgtg

SEQ ID NO: 451876 - DNA, 201 bp, Homo sapiens
ccacactctgaacaatgccacacttccatcaaatggattcatcccaaaggtaaagcccatcacttctagagggagaaaggtaatgttttcctaccactttyatttgatctcatttagaaggtacttgaggaatagagaagactgggttttctctgggattatacttaggcatttcttaacgactgggacatgttctgaaaa

SEQ ID NO: 451877 - DNA, 201 bp, Homo sapiens
cacaatttcatcattgtgctatcatagagcatacacacccgaccctagatggcatagcctactccacacctaggctgtacagtatggcctgttgctcaagkctacacacctgtacagcatgttactgtactggatactgtaggcaactgtaacacagtggtatttgtgtatctaaacgtatataaacacagaaaaggtata

SEQ ID NO: 451878 - DNA, 201 bp, Homo sapiens
tttatgatcctgggagagcaagaagcaaggagccagcaagtctggacacattccagaggccacgaggggttttatgtcctgagtcctggattccatccaakccatgaggggttttatgccctaggcttaggttgtagtgcggcggggcagccttccacccttaagcacagaacctggtgttccataggccacaagaagttt

SEQ ID NO: 451879 - DNA, 201 bp, Homo sapiens
agcatacacacccgaccctagatggcatagcctactccacacctaggctgtacagtatggcctgttgctcaaggctacacacctgtacagcatgttactgyactggatactgtaggcaactgtaacacagtggtatttgtgtatctaaacgtatataaacacagaaaaggtatagtaaaagatggtataatttcatgggac

SEQ ID NO: 451880 - DNA, 201 bp, Homo sapiens
tggctgcgtgatggatgaagaaatgcactcagacacaggtatcctgtgaaagaatggggtaggggactgggcagctcccagacactgaggagggtgctatraagagtcagcaggtgctataaagagtcagcaggcacagccctgtcaggctggggctccaggcatttattcagtacagatttaatgacaaagttctcaagt

SEQ ID NO: 451881 - DNA, 201 bp, Homo sapiens
ctgtaggcaactgtaacacagtggtatttgtgtatctaaacgtatataaacacagaaaaggtatagtaaaagatggtataatttcatgggaccaccatccratacaccatccatcaccaacagaaacatggttatgaggcacaggactgtaactgcagcccctgccatgaggtcaatggcagcctggatagggggattgga

SEQ ID NO: 451882 - DNA, 201 bp, Homo sapiens
gtaatgttttcctaccacttttatttgatctcatttagaaggtacttgaggaatagagaagactgggttttctctgggattatacttaggcatttcttaaygactgggacatgttctgaaaaatctgtcattacacaatttcatcattgtgctatcatagagcatacacacccgaccctagatggcatagcctactccaca

SEQ ID NO: 451883 - DNA, 201 bp, Homo sapiens
aacacagtggtatttgtgtatctaaacgtatataaacacagaaaaggtatagtaaaagatggtataatttcatgggaccaccatccgatacaccatccatcaccaacagaaacatggttatgaggcacaggactgtaactgcagcccctgccatgaggtcaatggcagcctggatagggggattggacttcatgtttgccc

SEQ ID NO: 451884 - DNA, 201 bp, Homo sapiens
tcagacacaggtatcctgtgaaagaatggggtaggggactgggcagctcccagacactgaggagggtgctataaagagtcagcaggtgctataaagagtcrgcaggcacagccctgtcaggctggggctccaggcatttattcagtacagatttaatgacaaagttctcaagtaaacaccacaccactagagggtaattaa

SEQ ID NO: 451885 - DNA, 201 bp, Homo sapiens
cttgaaatgaagaacgatgtcacctgcctatcacagccaggtgacaatggacaaggggcttcacctctgagctgttttccagctgcactgggcacattccycccctcaccctgactcacaaggtgttagcaataatggacacttctctaccttctgccacactctgaacaatgccacacttccatcaaatggattcatccc

SEQ ID NO: 451886 - DNA, 201 bp, Homo sapiens
acacagtggtatttgtgtatctaaacgtatataaacacagaaaaggtatagtaaaagatggtataatttcatgggaccaccatccgatacaccatccatcaccaacagaaacatggttatgaggcacaggactgtaactgcagcccctgccatgaggtcaatggcagcctggatagggggattggacttcatgtttgccca

SEQ ID NO: 451887 - DNA, 201 bp, Homo sapiens
gctgacctcctgagtagagagcagtcatgcgcccgcaaatgatcaaaggtctgttttaggaccacatgagtaaacaagctatttagataaacttctctacrttcctatgtatctacgccctaagcttttaagagaattcagctgccttcagccaaatcttttactgaaggtatgcaaacctcccagccttccaagaagttt

SEQ ID NO: 451888 - DNA, 201 bp, Homo sapiens
ggacacttctctaccttctgccacactctgaacaatgccacacttccatcaaatggattcatcccaaaggtaaagcccatcacttctagagggagaaaggyaatgttttcctaccacttttatttgatctcatttagaaggtacttgaggaatagagaagactgggttttctctgggattatacttaggcatttcttaacg

SEQ ID NO: 451889 - DNA, 201 bp, Homo sapiens
tttttataatttctcccaccaccctgacagatcccctacaaaagaccatgtttcttctcagcttgctcagtccagctgagccagctttccactggactccygaatgtgagaaggacacaggctcccaggaccatccagaagcatctctcatcaccttaaagctctgaaacactggctgggtgcagaggctcacacaagtaa

SEQ ID NO: 451890 - DNA, 201 bp, Homo sapiens
cacagtggtatttgtgtatctaaacgtatataaacacagaaaaggtatagtaaaagatggtataatttcatgggaccaccatccgatacaccatccatcaccaacagaaacatggttatgaggcacaggactgtaactgcagcccctgccatgaggtcaatggcagcctggatagggggattggacttcatgtttgcccac

SEQ ID NO: 451891 - DNA, 201 bp, Homo sapiens
ctaccttctgccacactctgaacaatgccacacttccatcaaatggattcatcccaaaggtaaagcccatcacttctagagggagaaaggtaatgttttcmtaccacttttatttgatctcatttagaaggtacttgaggaatagagaagactgggttttctctgggattatacttaggcatttcttaacgactgggacat

SEQ ID NO: 451892 - DNA, 201 bp, Homo sapiens
aactctgggagcccacaccatttattggagattaaacaaagaagcaggtggtgaggacgtgctggtcaaaaggaagcagtcacatcaagtgtttagtttayagctgtgtcggtctagcattttctttgaagcatatggaacatgttctgctactcgagataatgaacatttccttctacctcaaggtacaatcagtttatg

SEQ ID NO: 451893 - DNA, 201 bp, Homo sapiens
gacgtgctggtcaaaaggaagcagtcacatcaagtgtttagtttatagctgtgtcggtctagcattttctttgaagcatatggaacatgttctgctactcragataatgaacatttccttctacctcaaggtacaatcagtttatgatcctgggagagcaagaagcaaggagccagcaagtctggacacattccagaggcc

SEQ ID NO: 451894 - DNA, 201 bp, Homo sapiens
agtcacatcaagtgtttagtttatagctgtgtcggtctagcattttctttgaagcatatggaacatgttctgctactcgagataatgaacatttccttctrcctcaaggtacaatcagtttatgatcctgggagagcaagaagcaaggagccagcaagtctggacacattccagaggccacgaggggttttatgtcctgag

SEQ ID NO: 451895 - DNA, 201 bp, Homo sapiens
cacttcaactgacctttctgaaaactgaaaaaatgaacaccaaataagtcaaccacagatgtactaacccacatcaggcttgcttttttagaggcctgcgytgagccatcaactgaacaggctcacttctaaatcagaaagcagcctgtgctgcgtgcctaagggaacgtcacaagacagtaggtctggaaagaagcaccc

SEQ ID NO: 451896 - DNA, 201 bp, Homo sapiens
ttttatgccctaggcttaggttgtagtgcggcggggcagccttccacccttaagcacagaacctggtgttccataggccacaagaagttttaaactctggrcccaggacatgttccaaggctcttttcatattatgtcagactagcaagtcttgcctcagcttttctcccaacaattggactgatgggttgctccactggg

SEQ ID NO: 451897 - DNA, 201 bp, Homo sapiens
agttctgttacactgaatcattcccctttttttgttgttgttttcatgcattacatcttgcaagaactcagcataagttctaagaagttgaatcagaagtaaaaaaaaaaaaaaaatctactaaatttaagccaatgacacttcaggctagccagcctttcttctcagctatgctgccaagatttttgtattttgaattgc

SEQ ID NO: 451898 - DNA, 201 bp, Homo sapiens
ttccttctcattgtgactttgtaccctcttgtcatctttctcttccccctttcctcctcagtctctggtaaccactgttctacttcctgcatctatgataycaactttttttttttccagattccacatatgagtgagaccatgcagtatttgcttttctatgcctagcatatttcacttaacatgatgtcctccaggttc

SEQ ID NO: 451899 - DNA, 201 bp, Homo sapiens
ttcatttcaacatagtcactccaggttggcaagggtgatttgagcggttgcctttcagagttccagtggcatttggctttccctttaaacttgagtatatstattactcttcttgaccctgatctacaggtctttgtagtctctcctctccactgctgttttcctcttatttttccctgtgaagaaggagccatttatcta

SEQ ID NO: 451900 - DNA, 201 bp, Homo sapiens; identical to SEQ ID NO: 116722

SEQ ID NO: 451901 - DNA, 201 bp, Homo sapiens
gaccccaaagtcctgggaaaactaagagggttggccatcctatttatatggttatttctagttctcatattccatgattgtattttgagaaagagtacttkaagtttatgatatggccacagggtaagacaacttagattgaaatataagtacattagcagtactattattatgtttttaatcctaaagtgtgatttattt

SEQ ID NO: 451902 - DNA, 201 bp, Homo sapiens; identical to SEQ ID NO: 116723

SEQ ID NO: 451903 - DNA, 201 bp, Homo sapiens
agagttttttgtattttttgtttttctttttataggaaatctgttttgacagaaaactatatggcaaatgtgtgcgtgtgtgtgtgtgtgttggggaggamtagggatgaattcagtctgtaatctagaaaaactgtgtccaggataggaacagagaagggacaaactttatatgtatacacaggattactttttcctttt

SEQ ID NO: 451904 - DNA, 201 bp, Homo sapiens
gttttatagatgagcttgaggaggtggtgtctgatttacatagggcccaaagattggttggaccaggtgtggcatttacatagtgtgcgaagaagctggtyaccccaccctaatcttttattatgcagatgggttttctacctggccagcgccatgttatctgttccttactgtacatgtggttgacaaaagggaagatgg

SEQ ID NO: 451905 - DNA, 201 bp, Homo sapiens
ttccattaagaaaaacagaggctcctcgcaaaaaggagtctgtggtgcgttttctgttttctcccaagggagtctaggctgtcagaaattccttttttttwaggtcttttatgtggcattgagagtggcaagaaaaaagagggacaggcagaagcaaatggagaaacagaattcagttgacagagtttaacagagaaaaaa

SEQ ID NO: 451906 - DNA, 201 bp, Homo sapiens
aaatacatgttgaatcttccaaactgacacagacatatatgatgcattggttatttatcaggagctaaaatgtatttcaactattttgcatttatatgtcwtatagttcttagtgactcacaatgaactcatagttaatccagttactctatataatgtgaaagtccttgtcgaatagagcaaatgcaatccaggctttag

SEQ ID NO: 451907 - DNA, 201 bp, Homo sapiens
aaaatagggttttctttttaaattttcatttgaatgacactaagaaaaccaaactcttttaaaagtaatcattggtgtttactaaaacacatttttcactrtgctgaacatacgcccttgaggtaaaaatatttttctttgccaaaaccttgagaaagttataattgactaataattctctgctttggaagaaacacaacc

SEQ ID NO: 451908 - DNA, 201 bp, Homo sapiens
gcgccataccggggtgaccatgtggccagctaggaatcaaaagctcctcattctccatatcatatcatttctccttctttttgaaacaacctttaaataamctctaaactaggcaaaattatttttcctttaagccaaaaccatacatctgtgttcctttataaccttctttaccaaagcacatctttctttatacattct

SEQ ID NO: 451909 - DNA, 201 bp, Homo sapiens
aaagttaaagtctttgcctatacttggatcttgctctcctttcaaacatgcctgaagaggtgaaaaatgttatcaagttttcaaaacaggctagtcagagkcagaggcagaggcagaggtgagagtgaaactggttttgaggtcaagtaatccattgatttcactgctccacaaattttgttctcactttctttttcactt

SEQ ID NO: 451910 - DNA, 201 bp, Homo sapiens
gtgggaggattacttgaacccaggaggttgagcctgcattgagccatgatgagccactgcactccagcctgggtgacagattgagaccctgtatcaggggraaaaaaaaaaagaacttagcttatatcacaatatattataatcattaaagattctcagaaaatattttttgacaaagtaattaatccaatttttcagcaa

SEQ ID NO: 451911 - DNA, 201 bp, Homo sapiens
cacacagttctttttttcttctttttctttatttgctttatatgtatatatattctttatttgctttatatatatattctttattttatatatatatatawgtatatattctgttctcaatatctttgacagcagccttggaattttaacacagtctatgctgtgttttctttttgcccttccttttccctttcttttctc

SEQ ID NO: 451912 - DNA, 201 bp, Homo sapiens
cttgaactaaggtatttggaaacatcttccacaattgtgtcatatggaaatcaggaaaactaatatctttttactcattatgatgctactgttttgaagayaaaaggaactatctttgaaagagaaagaatacttcatttgtacatgtgggaaagaaatacttccattcttctctatgtacttagaagcttctatttctgt

SEQ ID NO: 451913 - DNA, 201 bp, Homo sapiens
ttaattttgaggaaactgccatcttcacaatattgaatttccatgtctttgaaattatctctacttatgtacatctttaatttctttcaataaaatatttyaaatgctgtgcatcattatgacacccattttttaaaatttatttcaagataatttttacttttggaagttattctaaattaaatactttaaaaatttatt

SEQ ID NO: 451914 - DNA, 201 bp, Homo sapiens
tttccttgtgagtatattgattatgtgtccctacctgttattatttgacttacactctctctgtccctgagagtattcctcgtgcattagcgttgggattsgatacacaatttatatgagaaataaatctttgttgttgcagatcactgacacacgtgagattttttgcaactatagcataaatgaactgacacatcatta

SEQ ID NO: 451915 - DNA, 201 bp, Homo sapiens
gatcacaatgcacatcatcatacttaggaaatgtaacattgttatattacaataatctatatttcatatttgaatttcctcaattgtcccaaaatgtcctyctttaccctgtagtttgtaaaatgtaaatccgagatttaacaagaatcacatagtgcatcaataagaaccacatattgcagttgtcaagtctctttcgct

SEQ ID NO: 451916 - DNA, 201 bp, Homo sapiens
atttttgaaaagtctagcccggtggtcttccagaatatccttcaatttggagatgtcagattggttcctcattataagattcacgagtaatagatatgtayacacaaacatatatgcaggaattctacctaggtgatgtatccaattttatctattttcaaatgactttttagctgtcataacatttaatttataaagcac

SEQ ID NO: 451917 - DNA, 201 bp, Homo sapiens
ccactgcactccagcctgggtgacagattgagaccctgtatcaggggaaaaaaaaaaaagaacttagcttatatcacaatatattataatcattaaagatwctcagaaaatattttttgacaaagtaattaatccaatttttcagcaaacctggtatatgcaaaacactatttctgtgtactgaagtagcatattaaagct

SEQ ID NO: 451918 - DNA, 201 bp, Homo sapiens
atgtgaggaaataaatttttgttgtttaagccatccagtctgtggcactttgttatgggagcattagcaaactaacatggcaccttcttgcctttgtaacrtcaggccttatttcaggcacagcctgggatatagaaagtttttaataaccatttttgaaccaaaggaatagaaaagagttagcacaacttgtgggactat

SEQ ID NO: 451919 - DNA, 201 bp, Homo sapiens
ttcagctgaattaaattagtgtttaattgaacaatgaaagatttgcgaatcaggcagcccccagaatcacagcagtttcagagagactccagggatacctygtggtcagaacaaatttatagacaaaaaaaaagggaagtgatgtacagaaatcagaagtgaggtaccaaaacaattggattggttacagctctgcagttg

SEQ ID NO: 451920 - DNA, 201 bp, Homo sapiens
ccctgtctctactaaaaatacaaaaattagccgggcattgtggcacacgcctataatcccagctactcaggaggctgaggcaggagaattgcttgaacccrcgaggtggaagttgcagtgagccgagattgctccactgtactccagatgggtgacagagtgaaactccgtctcaagaaaacaaaacaaaacaacaacaaa

SEQ ID NO: 451921 - DNA, 201 bp, Homo sapiens
gggcgcggttgtgtgcgtctgtaatcccagctacttgggaggctgaggcaccagaactgcttgaacccaggaggtggaggttgcagtgagccaagatcatmctactgcattccagcctgggtgagattactagactctgtctcaaaaaaaataaaaaaaattttaaaagtgatataaaaactattatgtcagtcctataga

SEQ ID NO: 451922 - DNA, 201 bp, Homo sapiens
aaattagccgggcattgtggcacacgcctataatcccagctactcaggaggctgaggcaggagaattgcttgaacccgcgaggtggaagttgcagtgagcygagattgctccactgtactccagatgggtgacagagtgaaactccgtctcaagaaaacaaaacaaaacaacaacaaaaagcaaaaactagtgaccttggg

SEQ ID NO: 451923 - DNA, 201 bp, Homo sapiens
tgatataacattcttatcaccatgcttttaacatgcagtcagccctgccaaattttcctctgccattgagaattggagtaattattataagtgcagacaamactaggtttctcttgcaggcagatttttgtgattgcaccctggactttcgttcagaattcttttcagtttcttaggaaagctaaatgaaattgctgcagt

SEQ ID NO: 451924 - DNA, 201 bp, Homo sapiens
catggtcacctcagtcccggtgggggttgggggtagggggtcgggggagccagtgagggggaagcgcacagtgaaggaggccttggatttggagacaaaaytcattttgggagcctggaagctctctggaactggacacaaactcttgtctctgtagtttgcttacccagggaacttgggtaagagctagtgaataactcg

SEQ ID NO: 451925 - DNA, 201 bp, Homo sapiens
gaaaagtcagggaagaaagaagggtctcaaggcacatggctttctgattctttactgtaaataacataaatgcaattaaaatacattacagtgcccgggcktggtggctcaagctgtaatcccagcactttggtaggccaaggcgggtggattgccttaggtcaggagttcaagaccagcctggccaacatggcaaaaccc

SEQ ID NO: 451926 - DNA, 201 bp, Homo sapiens
attatgcttttgtttgctaattttcctttgccacattcactggttatgtgaagaacatactctactacttattccttctaaagcaatgacactttaaattygtcctttccagtcactgtttaagtgcaatgagtgtgttgttggcaacataaggcaacacctttatagaacacggcctatagatgaatgagaaactaacct

SEQ ID NO: 451927 - DNA, 201 bp, Homo sapiens
acttagcctcacactcatccacactcacatccccactttcccacaatcactcacactcagtgtcctccatttactcagccccactcactctcgcccaaccrtacacacttgttccattcactcacactcctggtcgttcccttcacactcacactccttcacattcatgaccagccaccccactggcttccatttagtact

SEQ ID NO: 451928 - DNA, 201 bp, Homo sapiens
ttaaggccatttcacactctggcatatcatctctaggaaaaggcagaacccctcttatcttaatatcttccataatttgactgaatactgagctgaagcastttcacatcagagtgaaatctgattcaagtcatttttgtaataattagaccttaaggtttagattgagttatttgggtgatatttatgagaacaactgtt

SEQ ID NO: 451929 - DNA, 201 bp, Homo sapiens
acagacacactgagttccatttacatgtgcctaggactgtgcactcacttagcctcacactcatccacactcacatccccactttcccacaatcactcacrctcagtgtcctccatttactcagccccactcactctcgcccaaccgtacacacttgttccattcactcacactcctggtcgttcccttcacactcacact

SEQ ID NO: 451930 - DNA, 201 bp, Homo sapiens
gtgccaccatgcctggctaattttgtatttttagtagagatggggtttctccgtcaggctgacggatttggtcaggctggcctcgaactcctgacctcagstgatccgccggcctcagcctcccaaagtgctgggattataggcatgagccactgcaccaggcctgggataggtttttaagttaattttaaagcttactta

SEQ ID NO: 451931 - DNA, 201 bp, Homo sapiens
catttgatttcaggaaaggagaaaagtgaagttggagggaatttatgtagacctataggaagaactagaaatatttgtttgtattcagactcttaggggcratgagaaagttcattagtgaaaaaagctagaacacaaaaatttcaccttgtaagtatctgcggaaatatttctctttaatggttttcttatgttgctaag

SEQ ID NO: 451932 - DNA, 201 bp, Homo sapiens
gatggaaaagacattttctggggctttcttttgtggtactagagatttaagtggaaattacaaagagtctgacttaagctaattgtaaaaggaatcctctragaatccggactccaagtttaagaccagcctgagcaacatagcaagaccctgtctctataaaaaataaaaacaaacaaacaaacaaaaaatctggactcc

SEQ ID NO: 451933 - DNA, 201 bp, Homo sapiens
gttgaattagttttcaacattgaaaactgtttctctagagccttagtttgactaattctatgtaagttcaaagggtaaaattgggaacctagaattaacartgtatgttttcaatcttaaaagaggcaattttttctttctttttttttgtttgtttgttttttgtggtattatggagatatagtggtcagagttcaaagg

SEQ ID NO: 451934 - DNA, 201 bp, Homo sapiens
tagaaatttcttctgccagataccctaaatcatctctctcaagttcaaagttccacaaatctctagggcaggagcaaaatgctgccagtctctttgctaamacataacaagagttacctttgctccagttcccaacaagtccctcatctccatctgagaccacctcagcttggaccttattatctatgttgctatcaggct

SEQ ID NO: 451935 - DNA, 201 bp, Homo sapiens
agcctgtcttcttttccagtatgttgtatacatttaaagtccccaaagtaatcattagtttcttaatacccttctttaccccggcctccagattaatccasgacaatgcttatagctcatcattttcttatttcaatccttttggtggtttgtttgtttctacagattctcatgtgacatttaacactctcaatccagtag

SEQ ID NO: 451936 - DNA, 201 bp, Homo sapiens
gaagagcaagtcatgtcttacgtggatggcagcaagcaaagagagagagcttgtgcacgggaattcctctttttaaaaccattagatctcatgaaactttytcatatcatgagaacagcatgggaaagacttgcccgcgtgattcaattacctcccaccaggtccctcccacaacacgtgagaattaaagatgcgatttgg

SEQ ID NO: 451937 - DNA, 201 bp, Homo sapiens
tagaatgaatgggatataggctcctgcattttaaattttcttcttttaattacacaaaagtactttaatatgtgattggtggggagatttcaaactatccrgaaaaatatagcatcatggtctttctgactttatattcagtcactctttctttgtcccagatattaatattttagtatctattctttctgataaaaaata

SEQ ID NO: 451938 - DNA, 201 bp, Homo sapiens
aggaagtgagttgtgacacagagaggtgagagattagccaaacaccacacagttaggtaccaacagaccaagattagaatccacccgttctggtggcatcrcagaccattacttttaaaatggtttgcactgcttcttgaattgtttttgtattactttaaaatgataactcttctcaagggtgcagaataaacattatcc

SEQ ID NO: 451939 - DNA, 201 bp, Homo sapiens
atgttggattttgtcaaatgctttttctgtatctcttgataaaatcatgtgatttttgttttttaggctactgatgtgatagattacattaattgattttmgagttttgaatctgccttgcataccttttatattcactgcggattaattaaactttgtactcaggaaggagaacaatgaaaaaggtagaaagggtctgaa

SEQ ID NO: 451940 - DNA, 201 bp, Homo sapiens
aaatcatgtgatttttgttttttaggctactgatgtgatagattacattaattgattttagagttttgaatctgccttgcataccttttatattcactgcrgattaattaaactttgtactcaggaaggagaacaatgaaaaaggtagaaagggtctgaaagaatatagccttgcatacctgatataaatccctataattt

SEQ ID NO: 451941 - DNA, 201 bp, Homo sapiens
atattaacaaatacattccaacagtatataagaaagtgagaaataaaaatgttaccaagcccccaccgactgaacagactgcttcttgaccaaggggaccycagagaaaccttaaaaactgggtttccagccatgacaggatgggaggtcagatatgccttccttattaaccttcaaccaggattctttcctaaagagtaa

SEQ ID NO: 451942 - DNA, 201 bp, Homo sapiens
atcactcataacttcagacacaaggtactgcatgatccactccctgctttattgcaattttatgtcttgctagttcacttcagactctgttccagccaccstggcagtttagtatctcctcaagctcggtgtgtgtgcattttcatattctttgaattacctctccacactgccccctgcctccttcctctgccccagtgt

SEQ ID NO: 451943 - DNA, 201 bp, Homo sapiens
atacatgttcaaaaagcatgaaaacactaaaattctatactcagaagcttgattaaaggacagaaaatgagagatttttttgaattttttaaaaaagtcargtattagtttttaaagagttttttgtattttttgtttttctttttataggaaatctgttttgacagaaaactatatggcaaatgtgtgcgtgtgtgtgtg

SEQ ID NO: 451944 - DNA, 201 bp, Homo sapiens
agtgttctagcagccataggaatataaacttttctctgattcttcatcccaggactctgatgaaatcacactgatgaaatcaggagggcctttggcaacayatactgactctctgggtctttagcagtggtggcatttctttgccttggctggcactatcttatgtgctagttgtaatttgaaatttaaatggcaataaaa

SEQ ID NO: 451945 - DNA, 201 bp, Homo sapiens
tcagacttaccagcccccataatcatatgagccaattccttaaagtctctctctctgtattatctatctatctatctatctatctatctatctatctatctatcatctatctatctatctatctatctatctatctatctatctatctatcatctcctactggttcaatgttctggagaaccctgaatggtacatgtgaga

SEQ ID NO: 451946 - DNA, 201 bp, Homo sapiens
cagacttaccagcccccataatcatatgagccaattccttaaagtctctctctctgtattatctatctatctatctatctatctatctatctatctatctatcatctatctatctatctatctatctatctatctatctatctatctatcatctcctactggttcaatgttctggagaaccctgaatggtacatgtgagat

SEQ ID NO: 451947 - DNA, 201 bp, Homo sapiens
gacttaccagcccccataatcatatgagccaattccttaaagtctctctctctgtattatctatctatctatctatctatctatctatctatctatctatcatctatctatctatctatctatctatctatctatctatctatctatcatctcctactggttcaatgttctggagaaccctgaatggtacatgtgagatgg

SEQ ID NO: 451948 - DNA, 201 bp, Homo sapiens
cccataatcatatgagccaattccttaaagtctctctctctgtattatctatctatctatctatctatctatctatctatctatctatcatctatctatctatctatctatctatctatctatctatctatctatcatctcctactggttcaatgttctggagaaccctgaatggtacatgtgagatgggaaactcttcta

SEQ ID NO: 451949 - DNA, 201 bp, Homo sapiens
tttttaatgatatttcaccacttcttggataaaataaactccagactagtcaactttgatatagtagaatgagacttgaaatacaaagtctagtttgaggwacttagcattatttaccgtaccacttccggtaaagcacttaattcctcctaatctcagtttctttacctataaaataggtcacatctacctctggtaact

SEQ ID NO: 451950 - DNA, 201 bp, Homo sapiens
agtttcttgtcagatctgtgtacacgcacctaccaaagatagggtgggaatttgcattttttatcaatcccggagagccgataagtttagaaaaagaaatwtaaacttacttttttttagaatcaagaactaacttactagtgtttcgctgtacaaaatttacagttaattgaaacttggttttgccttctgaactgtttg

SEQ ID NO: 451951 - DNA, 201 bp, Homo sapiens
ataaaataaactccagactagtcaactttgatatagtagaatgagacttgaaatacaaagtctagtttgaggaacttagcattatttaccgtaccacttcyggtaaagcacttaattcctcctaatctcagtttctttacctataaaataggtcacatctacctctggtaactgtgataaatctcatatattattgcacac

SEQ ID NO: 451952 - DNA, 201 bp, Homo sapiens
tggtaactgtgataaatctcatatattattgcacacctgaatgtggagtagaccaagggcaaatctgacatgctgcctgtttttgtatatacagttttttkggggggaaaaagagccttgcctacttatttattcaccttttctacagtgacatcacactgcaaaggcagagttgaatatctgtgatacagactgtggcct

SEQ ID NO: 451953 - DNA, 201 bp, Homo sapiens
ataagcaaggatgaaaacctttcatgtgtcctctttttatacattctgtacttctcttgatcgagcagcaaaacaaacaaacaaacaaacaaaaccaccaraaaaccaaaacccctcaaaactaatagaagctagggttcaggggctctacttgaatgtgaatatccaagtcttttcttctgtgtctgtgccctgccatag

SEQ ID NO: 451954 - DNA, 201 bp, Homo sapiens
ttgcccactgtttccacaagtcttcatgacaaggtagtctacttcttttcatcatctaagatttaaacaggcattcttagaatgtctgtttcacaccaagmcattgaagaggctgctattgagaaaggatctgaatacaactgccaggattttcagcacagaagggcacgatcaaggcagtttttttcctatgctagtaag

SEQ ID NO: 451955 - DNA, 201 bp, Homo sapiens
tccttgagagcaaatgcagtcaaggttgtcaccaccctatctgaaaactactgaaccttaaaaaatgtattgcatattcattagtgatcactgctgcagaygggaccgtaaggcaatcttgcagatgaatgtgtaccttctacagatattttttagcaaagtgcactgtccatgaaattgtaaataaaaacatcttggaaa

SEQ ID NO: 451956 - DNA, 201 bp, Homo sapiens
agagcctgtcttcttttccagtatgttgtatacatttaaagtccccaaagtaatcattagtttcttaatacccttctttaccccggcctccagattaatcyaggacaatgcttatagctcatcattttcttatttcaatccttttggtggtttgtttgtttctacagattctcatgtgacatttaacactctcaatccagt

SEQ ID NO: 451957 - DNA, 201 bp, Homo sapiens
gtttaaagtttgggatcttgaacctcagaacataatggatgagtttggtgtcctactgaatcatccagaaaaataatttttcacagcattatcaatccttkgccttttccctttttaacctttctgattatattgcctatggaaaaagccaatctgtttcagtcaggtgaaacttgaacaacagggaataatagcaaataa

SEQ ID NO: 451958 - DNA, 201 bp, Homo sapiens
taatcactgacacttcataacttcaatactgacaaattttcattcagttgctatcaaaggttgaataattaaggcactttcttctggaatgtttcatttaktttggagtgcaatattgaaatctaattttgaagatgttcacttgtcgacataatatttttaaagttctcagcaattacttctgagggatagttaaggata

SEQ ID NO: 451959 - DNA, 201 bp, Homo sapiens
ttgaacctcagaacataatggatgagtttggtgtcctactgaatcatccagaaaaataatttttcacagcattatcaatccttggccttttccctttttawcctttctgattatattgcctatggaaaaagccaatctgtttcagtcaggtgaaacttgaacaacagggaataatagcaaataactatatatttgtttgga

SEQ ID NO: 451960 - DNA, 201 bp, Homo sapiens
cagtagtaggatttgtccatcaaatggaagatctacttttacttctctgagaaatcttcatactgcttgctacaggggttgggctaatttatattctcccmaacagtgtataagcttttccttttcaccatatccacaccaacagctattgttctttgactttttagtaatggccattctggctagggtaagatgatatat

SEQ ID NO: 451961 - DNA, 201 bp, Homo sapiens
taaggccgggcacgattgctcatgcctgtaatcccaggactttgggaggccaaggagggtgaatcacctgatgtcaggagtttgagaccagcctggccaayatggtgaaaccctgactaggtaaaaatacaaaaattagctgggcgtggtggcaggtgcctgtaatcccagctagtcagaaggctgagtcaggagaatcac

SEQ ID NO: 451962 - DNA, 201 bp, Homo sapiens
gatcagagaaaatggaaatgcagacatatgtagtcattcattttagttaaataactattaataatagacacagatgtttcagcccaggactctcctcatcmtttaattgcaggtttattacaggcacaaactggtatacaattagcctctctttataggtggcttaccatgtgcctggtaccgtgctaagggcatgaatta

SEQ ID NO: 451963 - DNA, 201 bp, Homo sapiens
ggaggccaaggagggtgaatcacctgatgtcaggagtttgagaccagcctggccaacatggtgaaaccctgactaggtaaaaatacaaaaattagctgggygtggtggcaggtgcctgtaatcccagctagtcagaaggctgagtcaggagaatcacttgaacccaggaggcagaggttgcagtgagctgagattgtgcta

SEQ ID NO: 451964 - DNA, 201 bp, Homo sapiens
tttggtaactaatacaatgattgaaatagccactgcacatccaattttatgtattgatgttctgattttcacaaaaatcttttaccctttttagcccttakttatagccgatgctggggagaatggaggccacaggttaacataattttctttttcttccttctacatttatccagtaatttctatctgatttccctccct

SEQ ID NO: 451965 - DNA, 201 bp, Homo sapiens
tgtatacatatgtaacaaacctgcacgttgtgcacatgtaccctagaacttaaagtatataaaaaaaaagaatattgcttctgagctccccaaacacccaraatatagtttgatcatggctccatcatgtagatgataattgactttcctttccaactacactatgagctttcaatagaagggaccatttctaggcctggc

SEQ ID NO: 451966 - DNA, 201 bp, Homo sapiens
tccaatgcttagctcagttcctggcctgtaatactaagctaataaagttgaatgagcatggtagtgtgaaaagaagttgaggattgaatagatatggaaarcataggaaagagaagcatgaaagatagtttcatgaaagaaagaaagacgtctcctttgggtagctggaaagatttttatgttattaattgaaacaggata

SEQ ID NO: 451967 - DNA, 201 bp, Homo sapiens
ggtcgtggtgccctgcagtgctggcattggccagacagggacgttcattgtgattgatattcttattgacatcatcagagagaaaggtgttgactgcgaaattgacgttcccaaaaccatccagatggtgcggtctcagaggtcagagatggtccagacagaagcacagtaccgatttatctatacggtggtccagcatca

SEQ ID NO: 451968 - DNA, 201 bp, Homo sapiens; identical to SEQ ID NO: 19802

SEQ ID NO: 451969 - DNA, 201 bp, Homo sapiens
cattttatttatctctttcagtggattattgatatattttactgaaggaatatcaatatgtttgcttactaagtactgcctcagacattggggtgtcacawaaaattcagtatatgcatgacattatgttattataaaatttaaaaaaaccttgaaatctagtcacaagaacttcatgtaagagactatggatgtgtgttt

SEQ ID NO: 451970 - DNA, 201 bp, Homo sapiens
atgcagctaataaagacatacccgagattgagtaattaattaagaaaaaagaggtttaacggactcacagttccacatggctggggaggcttcacaatcayggtggaaggtgaaaagcatgtcttacatggtggcaggcaagagggaatgagagccaagtgaaagcagaaaccccttataaaaccatcagatcctgtgagg

SEQ ID NO: 451971 - DNA, 201 bp, Homo sapiens
aggggagatcatgtgaagatactggaagaagatggcagatatgatttggctgtgtccccagccaaatctcatcttgaattgtagctcccataattcccacmtgttgttggagggacctggtgggagataattgaatcatggggacagtttcccccatactgttcttgtggtagtgaataagtctcacaagatttggtggtt

SEQ ID NO: 451972 - DNA, 201 bp, Homo sapiens; identical to SEQ ID NO: 116725

SEQ ID NO: 451973 - DNA, 201 bp, Homo sapiens
aacaggaagctagtgggttgcttggaaaggcagacgtgagctttgaactaagaagagacggaggtcttcctggaccctgggagggatctgacatgaggcaraaaaattcccaggatgatgttatcctcctagagggaatacacaaagtatgaaacctaaatcctgacactaactgcaaacatgcaaacagtagtttaagac

SEQ ID NO: 451974 - DNA, 201 bp, Homo sapiens
tttactagttatcaaagggttattttcatgcaaaataaaaatataccaataaaagccttaaaactttggagagctgattttctacttcatgttttttttttgaaatgtcagacatgactaaggagtgaggtctttttcttttctttctgtatagatataaaaccccctttcaatctccaggttttgttgattttgttccct

SEQ ID NO: 451975 - DNA, 201 bp, Homo sapiens
agcttcttgtctctcattattccttttaaatagtattctgttctttgttactgacataaactcatttctcagagaatagtaatggccaattaaaaaaaatkctttcttataccctgcattgcctctttttcctttgtattcctattttttcttttttcccctatttctaaatttttttctgctggaaatttctctaaaaca

SEQ ID NO: 451976 - DNA, 201 bp, Homo sapiens
tggcatcatggaacgtgaccaacctgggtgtgaatgctgctgagctgctcttctgaaatgtcagaagatactattgattgcaactctggcattttataacratagtaagttccttgacaggctctctaggctctagcttggccatttacactacaggggagaagggacatttcttatattgtgtgtgcatttttagctttt

SEQ ID NO: 451977 - DNA, 201 bp, Homo sapiens
aggtggaagttgcagtgagccgagattgctccactgtactccagatgggtgacagagtgaaactccgtctcaagaaaacaaaacaaaacaacaacaaaaarcaaaaactagtgaccttgggcaatttacttaaatgccctgtgctaatttattaatctgtataatgggaataatacaacagtggtatctatttgtagggtt

SEQ ID NO: 451978 - DNA, 201 bp, Homo sapiens
agcatcagctgaactcgttggcttgtgagtgctgcctttgtcagtttcactcttggcatcatggaacgtgaccaacctgggtgtgaatgctgctgagctgytcttctgaaatgtcagaagatactattgattgcaactctggcattttataacgatagtaagttccttgacaggctctctaggctctagcttggccattta

SEQ ID NO: 451979 - DNA, 201 bp, Homo sapiens; identical to SEQ ID NO: 116726

SEQ ID NO: 451980 - DNA, 201 bp, Homo sapiens
cttacttagaagttccaaggggctaatcttaaaacagacaaagcatagagacccagctgccaaattccagagattacctcaaggcagttagtcatcaaccyggccagtgctgagatgacaccagcctgtgctccagatggcccaaggcttgagatagcacaaaacattcagaccttggactcagcatccctccctcatgcc

SEQ ID NO: 451981 - DNA, 201 bp, Homo sapiens
ttttctgtctcattgatctgtctaatattgacagtggggtattaaaatctcccactattattatgtgggagtctaaatctctctgtagatctctaagaacwtgttttatgaatctgggtgctcctgtattgggtgcagatatatttaggatagttagctcttcttgttacattgatcctttaccattatgtaatgcccttt

SEQ ID NO: 451982 - DNA, 201 bp, Homo sapiens
ggttctgtgaaacctaagtgtaaactgaggaattttgactcctgccctacaaaaatttacaatccaggcagtaaagctgaacagtctagcctgaaaatctrttttaaaactgttttcccccagtccgaagatataaccttgaagcttactgcaaaccccccttttttttcttctccttagtcttaaaatatggccttggag

SEQ ID NO: 451983 - DNA, 201 bp, Homo sapiens
tccttggcaaaggcctgatctccttggttgagttgatatggttaaacttggaaatctaaaatttaagtaccacctgttctgaattctccttgagccattcytcacacaccattggtattgacatcaaggggccagctactctccctcaactttaccatacttcccagaggagtgtcagccaaacattttcagttgcctacg

SEQ ID NO: 451984 - DNA, 201 bp, Homo sapiens
cagagaatagaaacaatagaaacagtggggaaaaaacaggagaggagaagacaggaggaagaccaggagctgggagtggcactaaaagaaagctccagaartgtggcgtgagagaagagctagcaacaaaggcttccctttcttggtccacagaggactctacatgaactatacacattttttaaagctcagtatcctaac

SEQ ID NO: 451985 - DNA, 201 bp, Homo sapiens
cgtaatcagtgggagagttggcctccaagtaaggtggcaggaacctgattcagggtccaagttgatggagcaaatctttctctatctgggctttagttgayatcccaagattcaaattaggtggttgggccccagcagctgtagttttccagtagcagtgctactcagaaacaggtggatgggaattgtgtggtttctgga

SEQ ID NO: 451986 - DNA, 201 bp, Homo sapiens
cttgctcctgttcttagagaacaaactttttagcttttcctggttcagtatgatgttagctatgggtatgccatatatggcctttattgtgttgggatgtwtatcttctgcaccaaatttgtcaagagttgtgttttttatatcatgaagagctgctgaattttatcaaaggcattttctgcatctattgaaatgatcata

SEQ ID NO: 451987 - DNA, 201 bp, Homo sapiens
tgccagtaggtgggggagtaggctggcataatcagaggttgttttttgccctgggctccaggctaatgatcagatgatcattagggtccactggaatttargcattctccatttctcagtataattttagtgttctttacttagctttgtagcagaagaggatatttaccctgtaggtagactattaactgaacttactgt

SEQ ID NO: 451988 - DNA, 201 bp, Homo sapiens
gagtatctacatatataattagtattttatacattaagtgtctcacattttatttagcaattttatttattgtattgaagaactgccatgttctccaatattttttttttgctgttgtttttgtttaaaacaataatgaactaaacatctttgtatatgtctttttggctatatttgtgatcactgttttatcatttattt

SEQ ID NO: 451989 - DNA, 201 bp, Homo sapiens
tttcttaatatagctgtgcacaatttctgatgagttccagtctccctcccttcccggcaattctactgtatattctggaattcacagtgtgtgtacaaatsagaagaagctagattttactatagtagcaaatcaagcacacacacacatacacacagcaccctaaaacactactggttccttataaaacaaaggtttatt

SEQ ID NO: 451990 - DNA, 201 bp, Homo sapiens
tacttcactcccaactccacaatcctgggattcggaaagcaaatctccaaaactactgccaacttctagttatatgttattgatggaaacttttgaaaccygatacaggctgctgacatttgttttgtaaaggcaacttatcatttcagaataatacacatcatctaaaaagcatgtcataatgagatatatagcatctct

SEQ ID NO: 451991 - DNA, 201 bp, Homo sapiens
agtgttacagctcttaaaggtggtgcgtcaggagttgtttgttcctcctggtgggtttgtggtctcgctgacttcaggagtgaagccgcagaccttcgcartgagtgttacagctcataaaggtagtgcagacccaaagagtgagcagcagcaagatttattgtgaagagcgaaagaacaaagcttccaaagtgtggaatg

SEQ ID NO: 451992 - DNA, 201 bp, Homo sapiens
tcaaaaaaaataaacaaatattcaaaacattattagactgttgaattcatctaacacgtaggaatgttgaaatggttcaaatatcacaaaaatgatcaatragttggagaaaaggacttatagggaaactttaattagaaatataattagggaagacctttgttaccacatgactcataacacagatttgaatataacata

SEQ ID NO: 451993 - DNA, 201 bp, Homo sapiens
tggtgaggagctgtgttcctttggaggaggagaggcactctgctttttagagtttccagtttttctgctctgttttttccctgtctttgtggttttatctwcttttggtctttgatggtggtgacgtacagatgggtttttggtgtggatgtcctttctgtttgttagttttccttctaacagacagggccctcagctgca

SEQ ID NO: 451994 - DNA, 201 bp, Homo sapiens
gttgttgaattttgtgaaaggccttttctgcatctattgagctaatcatgtggtttttgtctttggttctgtttatatgctggattacatttattgatttkcgtatattgaaccagtcttgcatcccagggatgaagcccacttgatcatggtggataagctttttgatgtgctgctggattcagtttgccagtatcttat

SEQ ID NO: 451995 - DNA, 201 bp, Homo sapiens
aactaggaagcaaagccccaaaactctctctaccagattttatctccagtatttataaattggatgaattccttttcctagcaattcccaaattttgttgyagttcctggtctgctgagtaacctttttaccatctggtagattgagaccttatgaacacaagtaccaggccaatattcttgaaaaggcttcgtaggtatt

SEQ ID NO: 451996 - DNA, 201 bp, Homo sapiens
tactgatcgccattccaactggtgtgagatagtatctcagtgtggttttgatttgcatttctctgatggccagtgatgatgagcattttttcatgtgtttwttggctgcataaatgtcttcttttgagaagtgtctgttcatgtccttcgcccactttatgaaggggttgtttgtttttttcttgtaaatgtgtttgagtt

SEQ ID NO: 451997 - DNA, 201 bp, Homo sapiens
aaccttgtggcagttgcagattctcattctggatcaaaggaagggtaaaggctatgtctgttagctaacactacagtgttatgagtacactaacactacagtgttacgagtacactaaaggtactgggtaagtagtggcctctctgggatgtgtttggctggcaggcaggtggaggaggacccttaggaagtaaggaccag

SEQ ID NO: 451998 - DNA, 201 bp, Homo sapiens
aaagctaaggttcagggagtttggcctttttctggagcctgtggcccttgttgtgcctcattatgtccctgtttccattgatgttcttttgatccctgtcwcctagtcttttcttttggatggagtttgtgcaatgggtagaggttgggaggacttgcaacttcccgatggcaatttcctaactttcctgcttcttttctt

SEQ ID NO: 451999 - DNA, 201 bp, Homo sapiens
ttgctagagaggtgatatggtcatttggaggaaagaagacactgtggctttttgagttttcagtgttcttacactgattgtttctcatttttgtgggcttrtctacttttaatcgttgaggttgctgacttttggattttttttttaaacagtttggccactcttctgtagggctactgcagtttgcctgaggtccactca

SEQ ID NO: 452000 - DNA, 201 bp, Homo sapiens
ttatccagtccatcattgataggcatttggattggttccaagtctttgctattgtaaatggtattgcaataaacatacatatgcatgtgtctttttagtaraatgatttataatcctttgggtatacacccagtaatgggattgctgggtcagatggtatttctggttctagatccttgaagaataaccacactgtcttcc

SEQ ID NO: 452001 - DNA, 201 bp, Homo sapiens
atatggtcatttggaggaaagaagacactgtggctttttgagttttcagtgttcttacactgattgtttctcatttttgtgggcttgtctacttttaatcrttgaggttgctgacttttggattttttttttaaacagtttggccactcttctgtagggctactgcagtttgcctgaggtccactcaagtccctagttgcc

SEQ ID NO: 452002 - DNA, 201 bp, Homo sapiens
ctccatcccagagagctacagacctgttgcagcctgaatgtatctgtaagagttggctggaagccccagttgggaggtcccaccctgtgaggaggaatagrattggggacccacttaaagaagcagtctggccatgttttggtagagcagctgtgctgtgcttggggatcctttctgcccctggttggtttagactctcca

SEQ ID NO: 452003 - DNA, 201 bp, Homo sapiens
atctacctttgtcttttttttttaacctatttaattctctattgttggaatatccttacctatacctctttcagcaatacttttcattcttgaaggctcaygacgtactttatctatgaaataatttataattctttcatataaaagtaatcttaaaatcatttaaatctctatgaaaagacaataaatctcaggacccca

SEQ ID NO: 452004 - DNA, 201 bp, Homo sapiens
cctttccaggggagagaacagtcctgtctcagtgggattccaggcgccattgtgatatgaaaaaactcctgcagctagctcagtgtctgtcgaaacagccrcccagttttgtgcttcaaacccagggctctggtggtgtaggcacatgagggaatctcctgatctgcggattgcaaaattcatgggaaaagcatagtatct

SEQ ID NO: 452005 - DNA, 201 bp, Homo sapiens
aatttttacattcacatgcataaaacaatataggaggtttggggaaaatgtatccttagttatcatattttccagtgatatgttgtcaatactctcaaatdgagtcatcaaagaacaagttttggcagcaatctttgaagataatgcttcctttagtacattgccaaacttctcctttaaaaatgaaagaacaacttataa

SEQ ID NO: 452006 - DNA, 201 bp, Homo sapiens
tgggattacaggtgtgagccactgcacccagctgacacaacttctttctaaataatctttatgcaacttataagttataatccttattatcctgacttacragtatgacccaatctttgaatttagtttctttgtttactcgtcaaataatctctcatttttaattgtaagaaattagttctgtaacataagtgagcctga

SEQ ID NO: 452007 - DNA, 201 bp, Homo sapiens
ggccttgtagcacagtctcccatggcttctgttggcttggggaatgaggaccccggcttcttgcatttcctggttgaggcaatgcctcaccctgcttctgytcaccctctgtgggctgctcccactgcccagccagtcccagtgagatgaactgggtacctcagttggaaatgccgcaatcacttgccttctgtgttggtc

SEQ ID NO: 452008 - DNA, 201 bp, Homo sapiens
tgaggcaggagaatcacttgaatccaggaggctggggtcgcagtgagctgagatcataccactgcactccagcctgggtgacagagcaagactctgtctcaaaaacaacaacaacaacaacaacaacaacaacaacaacaaaattatagtattttaactttctaaagggttcgtagaatttcatccaattttatttttgca

SEQ ID NO: 452009 - DNA, 201 bp, Homo sapiens
agatttccttgctttttcatgtttcctgtttccctatgttgatatctgcacatctagtggaacagttgctttttctaaatttatggaataggttttgtaargagagactttttcctgtagattcgtcctaggacatcagttgggtgtggtgcattgcctttagttctagggggctcagtagcatggtctttgtgcagtttc

SEQ ID NO: 452010 - DNA, 201 bp, Homo sapiens
gacacaggcttgcaactgcggactttataagcttagtttttaatctgctatcagctagcataataccataaatgcataagaaactaagtattcagtcttamgagaaatgctatcttgacctgaccctttctccaaataaattgacaaaatatctcatcgtctaggatgccagacagaaataccagttgcaatgttttgttg

SEQ ID NO: 452011 - DNA, 201 bp, Homo sapiens
gatacaagaagaaggagaatatttgaataaacacaaatcaatgaaagaaactgaatttgtcatcaatcacaagaaaacttcaggagcatttatttttacawtttttttctctaaaagaaaggatgagagaacactctaacttgtattttgagcatgtctctgataccaaacctgaaaaggacatttcagggtgagaaaaat

SEQ ID NO: 452012 - DNA, 201 bp, Homo sapiens
tagatcaaatcctaatctttcagattgttacttcctcactcatattttcttcccatatgatgttgggatgtatggaggtataagtgatttggcatgattgkgttggggaataatgatggggcctccaggagccatgagcaggtcctggcactgcctcctcttcttgtggtagcagtttccctcattctacttgtctgctca

SEQ ID NO: 452013 - DNA, 201 bp, Homo sapiens
gaggcaggagaatcacttgaatccaggaggctggggtcgcagtgagctgagatcataccactgcactccagcctgggtgacagagcaagactctgtctcaaaaacaacaacaacaacaacaacaacaacaacaacaacaaaattatagtattttaactttctaaagggttcgtagaatttcatccaattttatttttgcaa

SEQ ID NO: 452014 - DNA, 201 bp, Homo sapiens
cagaaactctccaaactggattcagggcctgtgaagactacgggggctgtactgtagcaaggatcattggcatctgtggtgacaatggagaccacttgggrtccccagcttacttttatcttataagaagaaatatctcctgattcaaagcctatcctggtgagggagacagtctggcaggggcagggtgtcttgctccct

SEQ ID NO: 452015 - DNA, 201 bp, Homo sapiens
aagtgacattcttttttttctttgagacagagtcttgctctgttgcccaggttggagtgtagtggcgtgatcttggctcactgcaccctctgcctccctgsttcaagtggttctcctgcctcagcctcctgagtagctgggattacaggcgcctgcccctacacctggctaatttttgtatttttagtagagatggggttt

SEQ ID NO: 452016 - DNA, 201 bp, Homo sapiens
attaacaataatcgctaagtaagtggttttgaatgtggaatgtggtgacctattttcaccaaataggttcctgaggaagctgactctgagccagagatcgrcatgcaggatatttatgagggtgagctcttaggatcaaaatctatattactcagggttttctagagaaatagaaataatgttttacctgttatctgggca

SEQ ID NO: 452017 - DNA, 201 bp, Homo sapiens
caggagaatcacttgaatccaggaggctggggtcgcagtgagctgagatcataccactgcactccagcctgggtgacagagcaagactctgtctcaaaaacaacaacaacaacaacaacaacaacaacaacaacaaaattatagtattttaactttctaaagggttcgtagaatttcatccaattttatttttgcaacatt

SEQ ID NO: 452018 - DNA, 201 bp, Homo sapiens
cttcacagggacgcgcatgaaagaaactattaatacaattttattatttatcaatctcatttatttctttacatttttgctaaatgtgtatgtattcctaygtagtatatagactcattttgaatgtttccatttctatataaatgaaatcactgagtatataggtctttgcctaacatatttgtgatttatccataatga

SEQ ID NO: 452019 - DNA, 201 bp, Homo sapiens
ggctgaggaaattctcagagagggctgagagtgtctgccagtagccagacatgtatccttctgttctgaagggaggtctgagtgtcaaggcagagcatccrtgacacctgttcaggaagcaggagtgtctatgagcagctgggaatacatagaataggctctgtctgtaggggaggatcagaggtccttagcagaggtcca

SEQ ID NO: 452020 - DNA, 201 bp, Homo sapiens
tcctagaccctgaaaaggaatatgggatgaaagatggaagggccaggtgctttcagtgtctcaagaagaagagcatggtttaaaagcacttaggatttctyggaaagtagaatttctttctatgtcactgtatttgctccctccaaattactgttcttggacttttactgaggcagtccagctactcaataagtaacacct

SEQ ID NO: 452021 - DNA, 201 bp, Homo sapiens
attttttcatatgcctgttagccatttgtatgtcttcttttgagaaatatctagtaacgtcttttgtccacttttaaactatgtcgtgtgtgtgtgtgtgtgtgttgtgtgtgtgtgtgtgtgtttcctgttaagttgcttatatattctggatattaacaacttgtgagatgtataatttgcaatttttttttccctttg

SEQ ID NO: 452022 - DNA, 201 bp, Homo sapiens
aggttttatttaaaatctttttttataaggcacttcctctatgtttttgtctagtagttccatagttttgggttttatgtttaagcctttctatccatttygagttgacttttgtatatggtgagaggtaggggtctagtctcattttttgcatgtagatatccaattttcccagcaccatttattaaagagacttttttc

SEQ ID NO: 452023 - DNA, 201 bp, Homo sapiens
agtctggcttggaggttctgtttcttcactggaatcttctactccatatccttaggctccttttcctctccttaccatttaaatattggttagtattattktcttttcattccactacctgaatactgatgatttacaaatctttttctccatcataaagcttagtcatgggtacaagaagtacattaaagatatgcacct

SEQ ID NO: 452024 - DNA, 201 bp, Homo sapiens
tttgtatttatgtgctatcagttgtaatgtctactttttaatatctgattttatttgtcttttctcttttgttcttagttggtttagctaagggtttgccrgttttgtttattttttcaagaaaaaacttgtttcatcaatcttatgaattcttttagtctctaattcatttatttctgctctgagctttattatttcttc

SEQ ID NO: 452025 - DNA, 201 bp, Homo sapiens
tttatttctgctctgagctttattatttcttcctttccatgaattttgtatttgtttttgttttctttttttctaattccttgagatgcactgttaggttkttcattagaaatctttcttcttttttgatgtaggtgttttattgctatcaacttcgctcttagaactgcttttgctgtgtcccataggttttggtataat

SEQ ID NO: 452026 - DNA, 201 bp, Homo sapiens
ctctttaaattccacattttgatgctatggtatctaatataaaggataataatttattaaatttcttaacagtttttaactttaattcaatagcagatggwataatagaaaaaatatgttactgtaggcaatgccatttacttctctactttagtttgcccatctatataataaggactggattgggtatttttcagattc

SEQ ID NO: 452027 - DNA, 201 bp, Homo sapiens
gttaggttgttcattagaaatctttcttcttttttgatgtaggtgttttattgctatcaacttcgctcttagaactgcttttgctgtgtcccataggtttyggtataatgttttaacttccacttttaatttacatattgacccactggttgtttaggagcatgttgtttaattctcatgtatttgtaaagtttttgaaat

SEQ ID NO: 452028 - DNA, 201 bp, Homo sapiens
tagcattgggtctttaatggtcttagaagaaaggtggagaacatatacccccttttacttctgactgtaagttacatctatcagtttcattcacattttcrcaagacagacagattacacagctgtgaccttagcaagggaaatttggaaacggagtcttgtgttttcaggcagagcaaaatgaaactggattttataaac

SEQ ID NO: 452029 - DNA, 201 bp, Homo sapiens
ttctagattagaaaacattttttctaaaactgtttataaacagtttgattatgatgtgcctcagagaggatctttttggattgaatctgattggagacctwagtttccaggagaatacagatgtggatccaatgtcaagtttttgttaattgttgttttgtagattctttgctcctctctttttatttatctgtgtggttt

SEQ ID NO: 452030 - DNA, 201 bp, Homo sapiens
tttttagctctaacagttttttggtgaagtctttgtggttttctatttataagatcatgtctgcgaacagggacaatttgacttccttctgttcaattgartatcttttatttctttctcatgtctgattgctcaggctagaacatccagttctatatcgaatagacatggtgaaagtgggcattcttgtcttgctcctgt

SEQ ID NO: 452031 - DNA, 201 bp, Homo sapiens
aaacttcctttctctattcataactacttgtgtcatattataatcaatcaaagatgttctcaatgtgacaatgacaggtgcggtgatacaggtttggaacygggcaagtttatatgagctgtctttaaaccagcaattttgtcttcccagggaacattaaggagcaattttgtcttcccaggaaacattaggcaaagtctg

SEQ ID NO: 452032 - DNA, 201 bp, Homo sapiens
catatatggcctttattgtgttgggatgtttatcttctgcaccaaatttgtcaagagttgtgttttttatatcatgaagagctgctgaattttatcaaagrcattttctgcatctattgaaatgatcatatggttttttatttttttctgttaatgcaatatataacatttattgatttgcatttattaaaccatgtttgt

SEQ ID NO: 452033 - DNA, 201 bp, Homo sapiens
gttatgggagcattagcaaactaacatggcaccttcttgcctttgtaacgtcaggccttatttcaggcacagcctgggatatagaaagtttttaataaccrtttttgaaccaaaggaatagaaaagagttagcacaacttgtgggactatgcataatccacaaactattatccattaaaaaaattcaccaatcagccaaga

SEQ ID NO: 452034 - DNA, 201 bp, Homo sapiens
ttgttgtttctgaccattttgattttgaaccttcatactagaggactgaaagatgtatgtagcaccattacagctctgggatattctgagtttgattataratgtacgtgttttcatgatgaaaattattgtttttccatttccagttgtagcacttccttagacatttcttgtaaggctagtttagtggtgattaattcc

SEQ ID NO: 452035 - DNA, 201 bp, Homo sapiens
taggctgtgggagttgcaatggcagttgtgatggcaatggtgtggtttttctgaaagtggaagagctgggatggtggtcaggcctggtacgtgtaggtgcrggaggctgggtagctgtgtggtggtctctttgtggaggtaggcctgctgctagactggccattgagccagttgcagtttcacatgaacacagtagtttgt

SEQ ID NO: 452036 - DNA, 201 bp, Homo sapiens
agaaggaggggaggagataagttacctgaaatcatctgatgcattattatccccttcagtatggacataacgtcagaagaggatcactgaatcagataggrtaaagcattctttcgacctccctgctgggggcttgtctgtcctgttgtgctgtacttctgtgcaggtggaaacaagatgaactcaaaccacttgtctgat

SEQ ID NO: 452037 - DNA, 201 bp, Homo sapiens
taaaacacacataaaaataaagttatctgaaagctattcatctaaaactgatccaattagacagatgtatcactgcaagctacagtgctcaaatttatgayattcatagtgaaataatttactgttacaatatatttaagctccctggaaccttaatgtcaaccatattgttaggcacacatagtaggttctcaataaata

SEQ ID NO: 452038 - DNA, 201 bp, Homo sapiens
tgaaccaaaatgatagcagccataattggccattcttaattactgtattatttaaaatgattactcctatcctaacttactatagtcttttaaagaagatrtttaaaaatcacaacgtctaagtcataagatatttggtgaatggttgcctttccacagaaattattctgtcccccaaacccttgtctcagttggtgtcac

SEQ ID NO: 452039 - DNA, 201 bp, Homo sapiens
aggatcttcttttgccagtcttccccatttattgctctcctcccatcaaccacactgacagttgaagggttaaagagtggtgttgcatgagggtttgcackagggagtccattttctcctaagaattattatattacattatgttgccaagacatacaaatgaagaataactggttttaatacatagaagaatcaggcttg

SEQ ID NO: 452040 - DNA, 201 bp, Homo sapiens
ttattcagctaagacatggggaagacgaggtgtgaagtgctatcatctaattcctgttttttttccttagggaccccatttaaaacaaatataatattccmggatgagggaaatatacttctaatgtagtttttgtttgtatcatttaccgtacatctaagttgtggtaacttaaagggcatattaaaggtgctgaaataa

SEQ ID NO: 452041 - DNA, 201 bp, Homo sapiens
cctactaaaatgtgattcattgtctcaagtattccatacattacccagaatcactgtttaaggctggtattacaaaccactccatactattactttttgayctatcaaaaaaaaacaaggttctattgtccaaaagctgtgtatatgtaatagcaaaataatatctattgagtctttataagaaactaaacttttttaatg

SEQ ID NO: 452042 - DNA, 201 bp, Homo sapiens
ctatgctcttagtcttagctgcattggtagcctaggtgcctctatttggagacctccttactgagaaagtttggcagaaactttcctcaggtgcctctgcygagacggccttatctatgggacggggaaaccttgaagacactttttatagtgtcttcactagaagaaaagtagtcagtacttttccattcctgacccttc

SEQ ID NO: 452043 - DNA, 201 bp, Homo sapiens
tgtgtctttatagcagcatgatttctagtcctttgggtatatacccagtaatgggatgggtgggtcaaatggtatttctagttctagatccctgaggaatygccacactgacttccacaatggttgaactagtttacagtcccaccaacagtgtaaaagtgttcctatttctccacatcctctccagcacctgttgtttcc

SEQ ID NO: 452044 - DNA, 201 bp, Homo sapiens
ccaggagaatacagatatggtccaaaatctctcctaagacttgggaaatttccagctactattttgttaaatagattttctgtgcctttctccatcttttytctctctggtacttctacaatgcaacaatttgtttaattatgtcccataaatcccaccggcaatgttcattcttttttattcttattttcccccccactc

SEQ ID NO: 452045 - DNA, 201 bp, Homo sapiens
gagtaagagaaataatcttcatctcctgatgtgaggagtgagtagcatttgcacacggagaggggaggcattgttgggacctctatttgtagatgagttaygatattaagcagtacatttaaaaataacccattgttctaggaataaaccacagttttaagaataggccaaaagaagttagaaaatattttaaactaaatg

SEQ ID NO: 452046 - DNA, 201 bp, Homo sapiens
agtgagcctgaaagaaagagaacaggctccgataatggagtagtttttatcagacttatcttcccagtagtcccacactgtcccactcacacacagtcacrctcagtgccttcccaggggcagcccatagcagaataggatgcacactactctgggatggaaggaaaggcaagacttcaaggactgggctgcctagccaaa

SEQ ID NO: 452047 - DNA, 201 bp, Homo sapiens
ctgggttatttcaaaggactgtattcaagtatagaaattttatcttctgtttgatttagttggttggttgaagctttcaattgtattttttgtttgaattmttcagctttaagatttctttttagctcttttttatgatatctatttgttaaatttcttattcaaatcaataatagtttttctaatttcattgaattgttt

SEQ ID NO: 452048 - DNA, 201 bp, Homo sapiens
atgcccagattatagctaataagttgtagaacttcttttggataacatctactgtagcctagtttatgtgctctcttgctccatttctgttgtggtctatkccccatgttaacaaccagtgtaacctttaaaatgtaaatcatgaaactgctacttttgtgaagacggagtacatgtattttttttattactctcagtaag

SEQ ID NO: 452049 - DNA, 201 bp, Homo sapiens
tgaaatacttttcaggtattttgtacatatccttttctttggggtcagctactagagacttactgtgttcctttcatggtgttagatttccttgctttttyatgtttcctgtttccctatgttgatatctgcacatctagtggaacagttgctttttctaaatttatggaataggttttgtaaagagagactttttcctgt

SEQ ID NO: 452050 - DNA, 201 bp, Homo sapiens
acatgcatacctaaattggcaggctaatttaatcaataattctgtcctttccagagcaatacacacagattaaaaagctttaattcagccaggcgtggcakctcacacctgtaatcccagcactttgggaggccaaggtgggtggatccctgaggtcaggagttcgagaccagcctggcaaacatgatgaaaccccgtctc

SEQ ID NO: 452051 - DNA, 201 bp, Homo sapiens
aaatgtattaatatgtatatattttggtatgtatgtatatgtgtgtgtgtgtgtttgtgtgtggcatatatccacatttaatttctcagttaactttaggcatctatctaccacagaaagacattaagaatgccaggtgaaatcaaagagaaagtgaatgaatattcagcttctgatcgtacaaatagaagtttacagaag

SEQ ID NO: 452052 - DNA, 201 bp, Homo sapiens
atataatattcccggatgagggaaatatacttctaatgtagtttttgtttgtatcatttaccgtacatctaagttgtggtaacttaaagggcatattaaakgtgctgaaataaatgctgttgtcagtaactttggagatttgtgagataaggaagcagaaactaagggaagcagtgttactaagatagatttcccttctgc

SEQ ID NO: 452053 - DNA, 201 bp, Homo sapiens
aaaatacaaaaattagccggatgttgtgggggacacctgtaatcccagctatttgggaggccaaggcagaagaattgcttgaacccaggaggcggaggttrcagtgagctgagattgcatcattgcactccagcctgggcaacaagagtgaaacttcatctcaaaaaaatgaaataaaaaaggctttaattcctattactc

SEQ ID NO: 452054 - DNA, 201 bp, Homo sapiens
aatgtattaatatgtatatattttggtatgtatgtatatgtgtgtgtgtgtgtttgtgtgtggcatatatccacatttaatttctcagttaactttaggcatctatctaccacagaaagacattaagaatgccaggtgaaatcaaagagaaagtgaatgaatattcagcttctgatcgtacaaatagaagtttacagaaga

SEQ ID NO: 452055 - DNA, 201 bp, Homo sapiens
tatattttaatatttatcaaactatattattaaatgctcagaagtgagagaatgccctctaacatcaaagggttctggtgaaaatacattaaaataaatawccggaatacttggggaattaacaaaaagagaaataatgagcaaaataaaattcttgattccaatacttaagccttgtgttgtttctaagagtttctcctg

SEQ ID NO: 452056 - DNA, 201 bp, Homo sapiens
atgtattaatatgtatatattttggtatgtatgtatatgtgtgtgtgtgtgtttgtgtgtggcatatatccacatttaatttctcagttaactttaggcatctatctaccacagaaagacattaagaatgccaggtgaaatcaaagagaaagtgaatgaatattcagcttctgatcgtacaaatagaagtttacagaagac

SEQ ID NO: 452057 - DNA, 201 bp, Homo sapiens
gtataaaaagccaatgtttattgcttttgtatacactatcaacatgactaccaagactgtcccatgccacagtaccttgtcttattaaatgatatgaaggktgaagaaaggatttacttgtattatttaacaaatactctctgatattgagtagttgacaattttttcttgaaattgtttgcctatttttgaatacttcag

SEQ ID NO: 452058 - DNA, 201 bp, Homo sapiens
gtattaatatgtatatattttggtatgtatgtatatgtgtgtgtgtgtgtttgtgtgtggcatatatccacatttaatttctcagttaactttaggcatctatctaccacagaaagacattaagaatgccaggtgaaatcaaagagaaagtgaatgaatattcagcttctgatcgtacaaatagaagtttacagaagacaa

SEQ ID NO: 452059 - DNA, 201 bp, Homo sapiens
tgccatgttggtgtgctgcacccattactcgtgtcatttaacattaggtgtatctcctaatgctatcccccctccctccccccaccccacaacaggccccrgtgtgtgatgttccccttcctgtgtccatgtgttctcattgttcagttcccacctatgagtgagatcatgcagtgtttggttttttgtccttgtgatagt

SEQ ID NO: 452060 - DNA, 201 bp, Homo sapiens
ctagttctatggagaatcttcatggcagtttaataggaatagcattgaatctatcaattgctttgggcagtatgccattttaatgatattgattcttcctrtacagaacatggaatgttttctcatttgtttatgtcatctctgattcccttgagcagtgttttatagttttctttgtagatctttcccctccctagttag

SEQ ID NO: 452061 - DNA, 201 bp, Homo sapiens
catccatgtccctacaaaggacatgaactcatcattttttatggctgcatagtattccatggtgtatatgtgccacattttcttaatccagtctatcattkttggacatttgggttggttccaagtctttgctattgtgaatagtgccacaataaacatacgtgtgcatgtgtcttcatagcagcatgatttataatcctt

SEQ ID NO: 452062 - DNA, 201 bp, Homo sapiens
tgaactcatcattttttatggctgcatagtattccatggtgtatatgtgccacattttcttaatccagtctatcatttttggacatttgggttggttccargtctttgctattgtgaatagtgccacaataaacatacgtgtgcatgtgtcttcatagcagcatgatttataatcctttgggtatatacccagtaatggga

SEQ ID NO: 452063 - DNA, 201 bp, Homo sapiens
ggagcagagataaagtaaatagtccttacatatatgaaagatagttctatatttttgcatctaaactgcataaaattatatctgcaggcatatagtgtacmagtaatgtcttgacaagcagttgtttattataaatttttaactttttattcagatgcctttgatttcattaaacattaaaataggattcacagctgaaga

SEQ ID NO: 452064 - DNA, 201 bp, Homo sapiens
ctcctatcctaacttactatagtcttttaaagaagatgtttaaaaatcacaacgtctaagtcataagatatttggtgaatggttgcctttccacagaaatwattctgtcccccaaacccttgtctcagttggtgtcactggggcttttggaaattagaatttagattcaaatgaagctgcatcttcacgcagtgattttag

SEQ ID NO: 452065 - DNA, 201 bp, Homo sapiens
tagcaacaaaggcttccctttcttggtccacagaggactctacatgaactatacacattttttaaagctcagtatcctaactgtagagaatcccatattaktttgctggtgaggcattagggacttggaaatgagcccaaaatgttctggagaaatacttggtataactgaggatacttttcattgacactgtattaatga

SEQ ID NO: 452066 - DNA, 201 bp, Homo sapiens
caagacagaggaaactagcatttattgagctgttttatatacctgaagtgtgaatacacgcatgcacacacacacacactcaaatttattcatttagttcyctgacttaatttgcatgataatattgcatagcatgtgatattgtatgcattctacagaaaaagcatagtgacttagaagtcacaaagctttccaaagatc

SEQ ID NO: 452067 - DNA, 201 bp, Homo sapiens
tcttttgccattaaatataatggtagttataatgttttgtcaattcctatcaagttgaggaaatttcttccattctattttgtgagagtttttatcataayggtgtgttaagtttttccaaatgtgtttctgaatcaggaaaagccatggatgtcagctttcaccactcttactaaatatagtgatggaagttctatgtag

SEQ ID NO: 452068 - DNA, 201 bp, Homo sapiens
ctattttgtgagagtttttatcataacggtgtgttaagtttttccaaatgtgtttctgaatcaggaaaagccatggatgtcagctttcaccactcttactmaatatagtgatggaagttctatgtagtgtgccatggcaggaaaaggaaattaaaatcgtatagatgagaaagggagaaataaaactgtccttatttacag

SEQ ID NO: 452069 - DNA, 201 bp, Homo sapiens
cagctgaactcctctcgacgttcagactcttctcttctctccttctctgctgagctgcttctctgcctctctgctcttctgtacatctgttcatctgctcrtctgctcatggaccctggagtttggggtttatatgggtacaggatagggaagtgtggtgggccaaaaggcaacattcagtcatgaaaacaggaatgcttg

SEQ ID NO: 452070 - DNA, 201 bp, Homo sapiens
ttaaggctggtattacaaaccactccatactattactttttgatctatcaaaaaaaaacaaggttctattgtccaaaagctgtgtatatgtaatagcaaartaatatctattgagtctttataagaaactaaacttttttaatgtaagactacattgaatggaggctccatctccatgctattcatttattttattattgt

SEQ ID NO: 452071 - DNA, 201 bp, Homo sapiens
ggtaggtgtcagagaagacagggaaggttattgtgatgcagagaactatgggtatattaataaatggttagccaggctaatcccataaacagactctaaayattaaagcttccacttccaacctcatatatatatatatataatcaaatgttgataggcagtgggattggtgacttatctacttgccctggagaggactgg

SEQ ID NO: 452072 - DNA, 201 bp, Homo sapiens
caaccaggattctttcctaaagagtaagcagagaccagctttagaaaacaagacatggatgcctcattcctttatggcctttagccagtcatctgagggcwtgaccagacttcctcgcaatgcattccttcctaaaaactgaccaccatctccaggccggttttggctgacttgtgcagaggatgtgcggtaagcatgtac

SEQ ID NO: 452073 - DNA, 201 bp, Homo sapiens
ggaaaagtcagggaagaaagaagggtctcaaggcacatggctttctgattctttactgtaaataacataaatgcaattaaaatacattacagtgcccgggygtggtggctcaagctgtaatcccagcactttggtaggccaaggcgggtggattgccttaggtcaggagttcaagaccagcctggccaacatggcaaaacc

SEQ ID NO: 452074 - DNA, 201 bp, Homo sapiens
ggtgtggtgcattgcctttagttctagggggctcagtagcatggtctttgtgcagtttctttagctgtaatcctcgtcagttatatctgtgattgccttaktggactaggctgtgggagttgcaatggcagttgtgatggcaatggtgtggtttttctgaaagtggaagagctgggatggtggtcaggcctggtacgtgta

SEQ ID NO: 452075 - DNA, 201 bp, Homo sapiens
atcagcagacaattttaaatttggaagtgaatgctattgtgcttgggcatcgcttaaatcttttcctccccaccaaatgtttctctaatttgcctgaaaawcttccagttttctctcttcctcttttctctatttccattattttctttctctcccacctcctctcaggttctcacccttcccacaacaactaatgctctt

SEQ ID NO: 452076 - DNA, 201 bp, Homo sapiens
tctacatcttcactggagattttaaagggcaaggagacctagctccttgagatgtataactatttgctgacaagttggagtgtcattagccagtgttctaraaagtgaataatataatccccccccccagctctacattgatacatttcttagctaggagacaaatgttagtttgtatttcgtagaccaaactattttaac

SEQ ID NO: 452077 - DNA, 201 bp, Homo sapiens
ccccctccccccaccccacaacaatccccagagtgtgatgttccccttcctgtgtccatgtgttctcattgttcaattcccaccaatgagtgagaatatgyggtgtttggctttttgttcttgcgatagtttactgacaatgatgatttcgagtttcatccatgtccctacaaaagacatgaactcatcattttttatggc

SEQ ID NO: 452078 - DNA, 201 bp, Homo sapiens
agcaggctgttgaggatcagtcactattcctgctgccatttcaagtgctgcttctggcaacacaccagtgtactgctggccactagcctctggcctctgcyatggggggccaagaatatctctgactcttccagcaacttggcatctctctctctcaagaatcaaaggtctactcaagagcatctaattgattgagcctag

SEQ ID NO: 452079 - DNA, 201 bp, Homo sapiens
attgttggacatttgggttgcttccaagtctttgctattgtgaatagtgcccaataaacatacgtgtgcatgtgtctttatagcagcatgatttatagtcmtttgggtatatacccagtgatgggatggctgggtcaaatggtatttctagttctagatccctgaggaatcgccacactgacttccacaatggttgaacta

SEQ ID NO: 452080 - DNA, 201 bp, Homo sapiens
gaaagaaaaattttgtagttctgaggagagagcttctctggtaacttctagtgttattcatcactagaaaatattttgcttagtaacaaatactgtaatawgatgaaatgtgacaattttctaagccattcttggattcttcaaaggaaaaaaaaacttccattgtttatttggaataatatcagaaaatagagctttctt

SEQ ID NO: 452081 - DNA, 201 bp, Homo sapiens
catataagatcatattgtctgcaaagagggacaatttaacttcctcttttttcaatttggatgacttttatttctttatcttgcctaattgttcaggctgmcagtattggaatatattgagtaagagtggtaaagtgggcatctttgccttgttcaaattctcagaggaaaggctttcagcttttcaccatcaagtgttag

SEQ ID NO: 452082 - DNA, 201 bp, Homo sapiens
ctttctttgtccactggcaagagtatggccccttactgtcaattaatgcttcatatgttttgaagttgtgttattaggtgtatacctctttagtattgtgtttttttttgataaattaactttttgtcaccatgaaatgagtaattttttgtagcactttttgtcttgatatctattttgtatattgatatagctagctac

SEQ ID NO: 452083 - DNA, 201 bp, Homo sapiens
tgggtctttatgagaaataaagctctcctttccaaatttatgaaccttgtgattcttcaattggcaaaagtataataaatatattacattaaaacatgccrtgggcactcattaaaccaaggtgaatattattgtgttaatgtaaactagtcattttttaaaagaatttgaggcagggtctcactttgtcacctaggctgg

SEQ ID NO: 452084 - DNA, 201 bp, Homo sapiens
tacccatcactctcaaaagtttcctcatgtcccactgaaatccttcccttttcatccctacccactttcctatctctaggtgaccattgttttgttttctsctactacagagtatatttctttttctagaattttgtatgaatggaataatacaatatgtactctagtttgtctggctctttgaactcaacatattaattg

SEQ ID NO: 452085 - DNA, 201 bp, Homo sapiens
ttcagcattaacctaaaactcaaaagttcaaaatctcatctcagacaagttcattacttccaagatacaattggatacattctcttattccaaatgagtgwaattggccaaaacaaaggggccacagtccccatgcaagtccaaaacccaacagggcagtcattaaaattaaaagctctgaaaggatcttgtttgactaca

SEQ ID NO: 452086 - DNA, 201 bp, Homo sapiens
agagctggggagaagcgatggcagacagtggaggcaaaaccttggtgtttccagctcagaatgaggtagccggatgactgaaatataatgatttgttattrgagaatcagggttgccaattaaactcatactacattgagctgtgcaaagggcttgtagctctattttctacagaagatattttatctcctttgagaacct

SEQ ID NO: 452087 - DNA, 201 bp, Homo sapiens
ggattctagagcctgcttgctgacacaggcttgcaactgcggactttataagcttagtttttaatctgctatcagctagcataataccataaatgcataaraaactaagtattcagtcttacgagaaatgctatcttgacctgaccctttctccaaataaattgacaaaatatctcatcgtctaggatgccagacagaaat

SEQ ID NO: 452088 - DNA, 201 bp, Homo sapiens
tcaatgagcactaacaatgtggtagacatcatgccggatattgggaattcagagatttaaaacaatgcaccattatgaaaagtgggtgcacgttgaatacmgctgaagttggctttcaaatctgacataatcaccaccagctctgtggccccactaaagttctcaacttccctgagacccagtttcttcatgtataaaata

SEQ ID NO: 452089 - DNA, 201 bp, Homo sapiens
tttttccaattctgtgaagaaagtcattggtagcttgatggggatggcattgaatctataaattatcttgggcagtgtggccgttttcacgatattgattyttcgtacccatgagcatggaatgttcttccatttgtttgtatcgtcttttatttcactgagcagtggtttgtaattctccttgaagaggtccttcacgtc

SEQ ID NO: 452090 - DNA, 201 bp, Homo sapiens
tggcattgaatctataaattatcttgggcagtgtggccgttttcacgatattgattcttcgtacccatgagcatggaatgttcttccatttgtttgtatcrtcttttatttcactgagcagtggtttgtaattctccttgaagaggtccttcacgtcccttgtaagttggattcctaggtattttattctctttgaagcaa

SEQ ID NO: 452091 - DNA, 201 bp, Homo sapiens
gctaatgtgaaaagatatcgttatgtcattatttttttcccgatatttgaggcattttcacagaaatatgcagaagtcatgccataatttttttatgcctktttgtatagttttggagtaaatttctaaaaggctaaatttctacatatggacttactcaaattataagtttcaagtaaatggacaaatattaagggcaga

SEQ ID NO: 452092 - DNA, 201 bp, Homo sapiens
ttccagggcttttatagttttaggttttacatttagtgtttaatccatcttgagctgatttttgtatatggtgtaaggaagtggtccagtttcaatcttcwgcatgtggctggccagttatcctgatctgcttgtatttggataacaagttgctaatgtgaaaagatatcgttatgtcattatttttttcccgatatttga

SEQ ID NO: 452093 - DNA, 201 bp, Homo sapiens
aggtgtagatttttgtgtcgacgtgttttcaactcctttgagtaactatgaaggtacatgactgattgctgaatcttatggtaagagtatgtttggttttrtaagaaactgccaaattcttttccaaagtggttgtaccatttcacacttccaccaacaatgaatgagagttcctgttgttccacatccttgccagcattt

SEQ ID NO: 452094 - DNA, 201 bp, Homo sapiens
atactcattttgtctcagtgattggttgtctgtgtggtgagcaacaagacctagatggaacccctgggtgtttcagtaacactatgaatggagtgaattgyggaattccctctactaagcatagatctggtcctagagactgggttgtagtggagtgtgaaggtggagatgaaaacaaagatggaaaagacattttctggg

SEQ ID NO: 452095 - DNA, 201 bp, Homo sapiens
ttcttttcaggactaaataaaactgataccatcatgtggtatttcattcctttgctcacgaaaggattagttaagagacgattatttctgaaaaaaaaaaagatacttatattaaaatactctgccaattctgtaatactctctcttcaacattctattgcagaaaacatcaagtcacctagcttcagctctgcttgtctt

SEQ ID NO: 452096 - DNA, 201 bp, Homo sapiens
ttaatccaggacaatgcttatagctcatcattttcttatttcaatccttttggtggtttgtttgtttctacagattctcatgtgacatttaacactctcartccagtagaaactatcctaaacattttattttcactgtcaatcactttggttagcccctctcttctgaataatcattcctatgctatgccatttcccaaa

SEQ ID NO: 452097 - DNA, 201 bp, Homo sapiens
atagaaaaaagttgcaattccttgcctccactgtgagacaaatcccagccatatctccagcacacaagaacttctaaacgcctgaactgcagcggccaggygttcctccagaacctcctcccccaggagcttgctacaagtgccaaaaatctggccatcgagccaaggaatgtgtgccgcccaggattcctcctaagccat

SEQ ID NO: 452098 - DNA, 201 bp, Homo sapiens
acactaacactacagtgttacgagtacactaaaggtactgggtaagtagtggcctctctgggatgtgtttggctggcaggcaggtggaggaggacccttargaagtaaggaccagaataagaggagtacactgtctatgacacacagtgattgtcaaaaacagtgaccaagagggttatgaatgttcatttaaccaaattt

SEQ ID NO: 452099 - DNA, 201 bp, Homo sapiens
tctaaacgcctgaactgcagcggccaggtgttcctccagaacctcctcccccaggagcttgctacaagtgccaaaaatctggccatcgagccaaggaatgygtgccgcccaggattcctcctaagccatgtcccatctgtgcgggaccccactggaaatcggactgttcaactcacctggcagccactcccagaggccctg

SEQ ID NO: 452100 - DNA, 201 bp, Homo sapiens
cccacgtttatctttctctgtagcacttaataccttctgctgtgctatatatttcacgtatgcacattgattactgtctgcttctcttactgaaatgcaawttccaagagggagtttcttgtttctttggttgataccatgtctccagtgcctacaacagtacctggtactcaatacatatttgtgctgaatgaataaata

SEQ ID NO: 452101 - DNA, 201 bp, Homo sapiens
tcccccaggagcttgctacaagtgccaaaaatctggccatcgagccaaggaatgtgtgccgcccaggattcctcctaagccatgtcccatctgtgcgggaycccactggaaatcggactgttcaactcacctggcagccactcccagaggccctggaactctggcccaaggctctctgactgactccttccaagatcttct

SEQ ID NO: 452102 - DNA, 201 bp, Homo sapiens
aataatttgttggaaggatattgagtttcttacaaattggtgagaggactagagatcagatttagaaagagattggaaatcaagggacagtaaacagctgrggatccagctgagctcacaccattgaagcaggctgttgaggatcagtcactattcctgctgccatttcaagtgctgcttctggcaacacaccagtgtact

SEQ ID NO: 452103 - DNA, 201 bp, Homo sapiens
gaaagtgacaatgttttattaaatgttctcactgggttttgttgcctgtataccctacagcgcaaataatgaaggacagctaatctttcttttttcagtaytagttcagggtacaggatctttctctctactgtgttcacataagagattctccaagaattgtttccctacctggtggtccttgagagcctcttagaggaa

SEQ ID NO: 452104 - DNA, 201 bp, Homo sapiens
ggaagaaatttggggatatgaaagtgacaatgttttattaaatgttctcactgggttttgttgcctgtataccctacagcgcaaataatgaaggacagctmatctttcttttttcagtactagttcagggtacaggatctttctctctactgtgttcacataagagattctccaagaattgtttccctacctggtggtcct

SEQ ID NO: 452105 - DNA, 201 bp, Homo sapiens
gacagggttacagccacaacaagaaagtgagatacagttagtggaattctcaagtgctctcttaggatgaataaaccttaagaaagaacaccctgcttttrtaacagatgaagaaaggctatggaagagacagattctggtaagacagagcattctctaacactaaagatgacatttctgatctatgggcacgggctttca

SEQ ID NO: 452106 - DNA, 201 bp, Homo sapiens
gagtagaaatcaatgaattacaaaatggacaatcaataaagtcaacaaagcaacaaagccaaaagctagttctttgaaaagattaaaaaattgataaaacsctagcaagacagctcaaagacaaaagaggggaaaacatcccacaaatgaataataccagaaataaaaaatgagatatcacaaaaaagataataactttat

SEQ ID NO: 452107 - DNA, 201 bp, Homo sapiens
ctgtatagacaaaaatgtttggcctacaaagacacagccgtgaatattgaatgacccagttcagtatccattacctgaatgttgttgtgtccccactgtaygcaggggagatgtggtaggcatcgggatggatgatgacgatgatgataattaaatgagtgaacagacaaacaaacggcaggcatatttcctatcctctta

SEQ ID NO: 452108 - DNA, 201 bp, Homo sapiens
aggaactgacgtgagttctctctttctctttcctatctgaatatttatacagttgctttttcctctgccaggcacacggtgttggaaatcagcctacgacmaagggtaatatcaggattgtatgcttctttctgcatgtcgtgcttttatagaccattggttctggaagtaatcactgacaattactactgttagctacat

SEQ ID NO: 452109 - DNA, 201 bp, Homo sapiens
agggcatattaaaggtgctgaaataaatgctgttgtcagtaactttggagatttgtgagataaggaagcagaaactaagggaagcagtgttactaagatakatttcccttctgcctgtggctagcttgcacctctctatgaggtcatccatgcagatctttctatttcgagcttgtttcagtaatgtgcacttttaggtag

SEQ ID NO: 452110 - DNA, 201 bp, Homo sapiens
gctattttgatattaagcttagatgtttagatgtcgtagaattggtgaagtcttggtgacttgtaggctgttacattcaacttatattgaatatcttagtrtaccattctaaatttccatttttatctttattttggattttgagcagacagtattatgattctgtttaagacatgaagacatgccaattttcctacactc

SEQ ID NO: 452111 - DNA, 201 bp, Homo sapiens
gaccttacaaactgatgctaaaaatatccccggtctacataaagaaaatacacacaaacctctcatagcctttcttaaagaaagagtagagttacctttcytagatatcaaacattcagtctctatactgtcctttggtgatgggatttttttctctgccaatctgcattcactgcttattttaaactttggaaatgagca

SEQ ID NO: 452112 - DNA, 201 bp, Homo sapiens
cagtacctggtactcaatacatatttgtgctgaatgaataaatatattcagattattcagctaagacatggggaagacgaggtgtgaagtgctatcatctrattcctgttttttttccttagggaccccatttaaaacaaatataatattcccggatgagggaaatatacttctaatgtagtttttgtttgtatcatttac

SEQ ID NO: 452113 - DNA, 201 bp, Homo sapiens
gaactttagttttaaaaagtacagcttacattattcaagtttataatgacaatacacaaacagtcttggtacatataatgagccacatatttgtcttttawaaaacaattacctttatttacattagagatgatttcaaagctaaactgacatgctatttcatgaataatatctatctttatataaactgcaccctacata

SEQ ID NO: 452114 - DNA, 201 bp, Homo sapiens
ttataaacaaatgttgtagggcaaagaaaatttaaataatttgtctaagtcattgagatatttatactctcttaacttcagtagagttatcttccaattaygtaccctgtctattaaaatgcttagatttctattatttcccatctttcatgtatctgtgaccataaccaagtgatcagtagtatttccactctttctgag

SEQ ID NO: 452115 - DNA, 201 bp, Homo sapiens
ggctcgcgcacggtgcgcacacccactggcctgcgcccactgtctggcactccctagtgagatgaacccggtacctcagatggaaatgcagaaatcacccrtcttctgcgacgctcacgctgggagctgtagaccggagctgttcctattcggccatgttggctcctcccccctacaaggtttcttttaaatgtcaaactt

SEQ ID NO: 452116 - DNA, 201 bp, Homo sapiens
tcaatgtcctgatgctggtccaagctatcttttctccatacatgcattcactaactgagatgtcactcattcagtctggtgtttggcctttggtatcactycttgctaccatcatcggagatgtcagtgttaccatttggtggctggctgcaaagtgctctgctgcagggaggttccttgttctgaccccaggacgcttca

SEQ ID NO: 452117 - DNA, 201 bp, Homo sapiens
gagtactccaacattaaaaatatataagatggaagaaaacagcaagagactgagataaggcagctaatgtgatgagaggagaaccaaggaagagggagacytagaagataggtgaagaaggcatttgagaaaatatcaactatgacaaattctgtttataggttaagatgagaactgaaaattgattgttgatgcccttca

SEQ ID NO: 452118 - DNA, 201 bp, Homo sapiens
gtgaagaaattctgccttaaaactacaacattgactcttgcctgatttctagtgcaccagagtgtcctttagatttcagacttaccagcccccataatcayatgagccaattccttaaagtctctctctctgtattatctatctatctatctatctatctatctatctatctatctatcatctatctatctatctatctat

SEQ ID NO: 452119 - DNA, 201 bp, Homo sapiens
gcttgttcccatttagggctgtgggcttccaggcttagggtcagggcatttgctggggaactgccctcttttacccagtatttccctgtttcctgtctgtwtcaatatggtgggtctccaggatgaaaaggccttaagagcaaaaactgagatttcctggaggtgaagaaattctgccttaaaactacaacattgactctt

SEQ ID NO: 452120 - DNA, 201 bp, Homo sapiens
atcttctgcgacgctcacgctgggagctgtagaccggagctgttcctattcggccatgttggctcctcccccctacaaggtttcttttaaatgtcaaactytacataatcccaagagattctagttgcattctttgcatcagttgctgaggaactacaaaacaataaaggtcccattgggacttttattttaaaacttagt

SEQ ID NO: 452121 - DNA, 201 bp, Homo sapiens
cttaataaccaactaaagattcccaacctgctgggatgggtcccatgaccctccccttcttttttctcttagttttacccctatcaacttttttttttttwaaaaaaaccttactttttaataagcagttaaaatgtttcaccttcctaggatgagtccttggattatatatttatattttgcttttccccatgctgttgt

SEQ ID NO: 452122 - DNA, 201 bp, Homo sapiens
tttcagctaagttctgcgtgcttctagggaccagagagattgggcttccctcccatgctattgctggctgggcaaaggatgtctgtttgactgcctcaggygctctctgacaaacttttctctgttgcaactacaccaggggatcctgcattgggagggaaattgtaggagttattccctctttggagtcccctcctagga

SEQ ID NO: 452123 - DNA, 201 bp, Homo sapiens
ggtggatcacttgaggtcaggagttcgagaccagcctggccaacatggtgaaaccctgtctttactaaaaatacaaaaattagctggcctggtagtgggtrcctgtaatctcagctacttgggaggctgaggcaggagaattgcttgaacccaggaggcaaaagttgcagtgagccaagattgcgccactgccctccagcc

SEQ ID NO: 452124 - DNA, 201 bp, Homo sapiens
ggtggctcacgcctgtaatcccagtactttgggaggctgagtcaggtggatcacttgaggtcaggagttcgagaccagcctggccaacatggtgaaacccygtctttactaaaaatacaaaaattagctggcctggtagtgggtacctgtaatctcagctacttgggaggctgaggcaggagaattgcttgaacccaggag

SEQ ID NO: 452125 - DNA, 201 bp, Homo sapiens
actttattttcaatatgtttctaaaagagttctacttttggggcttgaaaacacatttcctcttaagtgtaggggattcataactcactatcaaaataaasgcaatcagaactaccagatttaatacataagtatcttagatatattctaaacatatacacttaaggataattactctatttgaatacagctttagtgaat

SEQ ID NO: 452126 - DNA, 201 bp, Homo sapiens
tacagaaagaactatgctactcccctaggtgttctttatccaatcactctggattattttaaccatagcaaatgatttttgtattgtctattttccttcayccaccccctttagaatatcagctcaatgacctttttgtcttttttactgatgttttgcaagcaacctagaaccaaagcttggcacttaagaggccctcct

SEQ ID NO: 452127 - DNA, 201 bp, Homo sapiens
ggtagctgagcctgagttgaatttcacattagtgcataaagagtaaggatgtcaatccaagctggagtcagggttatttgagtacttgtgtctcctacttrgcactgccatttgctttactctcttaccacagagaaacccatttcttcactgtggtgcatgcgaaaatttgcctggaaatcaggggccatactgctttgg

SEQ ID NO: 452128 - DNA, 201 bp, Homo sapiens
gagccagacaaatacacacatcaccgtcatccgccgtaaccacacatacacacacttattacaatcaggtgataaaataatttattattagaggcaaaaagcatataactaattttgaaccacacatatatgtgtccctgtacctgagaaacaggactttgattctgatcacggagtcaccaattgatataagagaaagaa

SEQ ID NO: 452129 - DNA, 201 bp, Homo sapiens
tgcagtaccaaagctctcagtgaacccatcatatttgttatcattttttttgaactgcatagtgttaggaggtgctccttgcaagttttactttgaaaacrtttattctttgatttgaccatcacaactgtgactgctgtcactgattcaccaaaaactgggtaaataatatcttgtttttattaatcttttaaaaatgca

SEQ ID NO: 452130 - DNA, 201 bp, Homo sapiens
aggacttagctgtcttcacatatgggaatatgtgattggagagaggtgaaagagaagtgaggaggaaaagtcagggaagaaagaagggtctcaaggcacayggctttctgattctttactgtaaataacataaatgcaattaaaatacattacagtgcccgggcgtggtggctcaagctgtaatcccagcactttggtagg

SEQ ID NO: 452131 - DNA, 201 bp, Homo sapiens
gtctataaaaataagtgtcatactaaataatatttgaagctttattgaaaagggtgacaagaaagaaggaccatttttaccagaagcccagccctggcaayagcagtaacagcagcaatgacaatataagtggatgatagggtttgactgtgtccccacccaaatctcatcttgaattgtagctgccacaattcccatgtg

SEQ ID NO: 452132 - DNA, 201 bp, Homo sapiens
ttttattttcttgaaaatttgttttaaggacttagctgtcttcacatatgggaatatgtgattggagagaggtgaaagagaagtgaggaggaaaagtcagrgaagaaagaagggtctcaaggcacatggctttctgattctttactgtaaataacataaatgcaattaaaatacattacagtgcccgggcgtggtggctca

SEQ ID NO: 452133 - DNA, 201 bp, Homo sapiens
gttttactaactcctcttaaattttctgtgattccacatctgtttggggacacctatcatgattaagttgtcagttggctcttgtgcctaatttcaagaawttttcatgtatttccttggaacacattgtagacattggctcaatgcatttctctatgaggaggctagaatagagttgatgcaatcttgttcccttcatga

SEQ ID NO: 452134 - DNA, 201 bp, Homo sapiens
gaaagttcattaaacacaagaaacacaataaaagaaagaatcttagtaaatgaggaaagaacaaatacatagtaagcaaaaacatgggcaagtacaatatrttttctttatcttcttgagttttctaaattatgtttgatggttgaagcaaaaacataacaccacttgatgtggttctaaatgtaaatagaggaaatattt

SEQ ID NO: 452135 - DNA, 201 bp, Homo sapiens
ttgttttcatgcattacatcttgcaagaactcagcataagttctaagaagttgaatcagaagtaaaaaaaaaaaaaaaatctactaaatttaagccaatgrcacttcaggctagccagcctttcttctcagctatgctgccaagatttttgtattttgaattgctttctcctaattccagcaacaaaaggtttgaatagta

SEQ ID NO: 452136 - DNA, 201 bp, Homo sapiens
actaatttttgaaatgaaattgtctttacagtgtggcacaacaattttttttgtaaatgtactaaaaaagaatatgctgtcttttgtgcaacattgtgtgtgtgtgtgtgtgtgtgtgtgtgtgtgtgtatgcatgcaggtttgtttgcatgtgttaaatcaaacttcttaaatgtggtattcaaatcctctatactaatt

SEQ ID NO: 452137 - DNA, 201 bp, Homo sapiens
aattatgtttgatggttgaagcaaaaacataacaccacttgatgtggttctaaatgtaaatagaggaaatatttagattgattagattataaattggggamggtaaaggaacacaacaggaaataagatttttaaattttgctcaaactggcaaaatgtcaatgcaagtagaatgtggtgtaatctataaataatgaaaaa

SEQ ID NO: 452138 - DNA, 201 bp, Homo sapiens
ttgttgcatgaatgttagaatgtgcttatagtgacagcaggtgactagtgggtgaagttgctaatattttagcacctaattgaaaagcctctaaatgaaastaaatatttagaaagacatcgctggaatttggaaacattgcaacagtgtaagccttgtggtcaactaccttctctcaatttatctatattcaaaaagaag

SEQ ID NO: 452139 - DNA, 201 bp, Homo sapiens
ggtctatggaaaagttcaagtctgatacttctttcttgattttctctctagatgatctgtccattgaagtggggtgttgaagtcccccactattgttgtaytgcagtctgtcttcccctttaaatctattaatgcttgccttatatacctgggagctttggtgttgggtgcatagatatttatagttgctatgtcttctta

SEQ ID NO: 452140 - DNA, 201 bp, Homo sapiens
taatggactcattttcacattgcagccaaaattatctattaaaaacataagtttgattgtatattattcaatatattttaatgatttgtcattgtttttasgatagaagtaaaacatttgatatggcctctcggcctagcatgtcttcctgcttctccctctaccttatatcatgctattaccccctcactcttggttctg

SEQ ID NO: 452141 - DNA, 201 bp, Homo sapiens
agacttaaggagtggtcccacagtagccctgtccacacaggtggtcctcctgccttgtgcctcatcttgtctgtactgatagtggtgcttttttttttttktttttttgaggcagaggaggaagggcgtcaatagtttaaagagcctcctaaacacatacattcaagtgttcctgccagtaggtgggggagtaggctggca

SEQ ID NO: 452142 - DNA, 201 bp, Homo sapiens
gtagaccggagctgttcctattcggccatgttggctcctcccccctacaaggtttcttttaaatgtcaaactttacataatcccaagagattctagttgcrttctttgcatcagttgctgaggaactacaaaacaataaaggtcccattgggacttttattttaaaacttagtagtagttttaaatgcatttatactttat

SEQ ID NO: 452143 - DNA, 201 bp, Homo sapiens
gagctgttcctattcggccatgttggctcctcccccctacaaggtttcttttaaatgtcaaactttacataatcccaagagattctagttgcattctttgmatcagttgctgaggaactacaaaacaataaaggtcccattgggacttttattttaaaacttagtagtagttttaaatgcatttatactttattacttaaa

SEQ ID NO: 452144 - DNA, 201 bp, Homo sapiens
gtgaataagggctttactgaatcccccatgggagctacccatcagtggtcaaagtcagtaaaaggctgcccattgaatagaaatgttttttaaaattagcycactgtggataagcttagcatgatttttcaactggttacttcatactgtttcttcaagatgaggaaagcttcacaactgttcatgtttgattaggcgcat

SEQ ID NO: 452145 - DNA, 201 bp, Homo sapiens
acagatcttatggtatgtattttaggatgtattaatcctattattaactttattttgcaagtcagtacacacagagatgtgaagcagtatgcccaagagtrtaaatcgaatacatggcagagccagcattcctactcagtgtgtttagccctcgagtctgtgcttttaatcaatttgctgtactgcctctcaaaatgctac

SEQ ID NO: 452146 - DNA, 201 bp, Homo sapiens
tactccagccggggcaacaaagcgagactccatctcaaaaaaaaataaaaataaaaataaaataaaaataaaaatttgtgaagaaggtagagctcatatgrtatgtattttttaccacaagaaatataatatcagaaaattgaatttagcaatatataaaaatgctaacatatcagtacaaatatggtttattcaaggaag

SEQ ID NO: 452147 - DNA, 201 bp, Homo sapiens
tccccactgtatgcaggggagatgtggtaggcatcgggatggatgatgacgatgatgataattaaatgagtgaacagacaaacaaacggcaggcatatttyctatcctcttagtgtttacagttttgctgcagaggaatgattttatgaaataacataagtaatttagctgagattatttaagcatgagtttttggaacat

SEQ ID NO: 452148 - DNA, 201 bp, Homo sapiens
atgattttaagtacttgaacagtttgacttaagaaggataaacattatgtctgtaatcttgtatatgatattcatttgcttagcaagccattttctgatgrattatataaaagcaaactttataatcaactgaatacaaattatcctgagtttggaaaaacaaattaatgaggttttatgatcttgagttccagacctctc

SEQ ID NO: 452149 - DNA, 201 bp, Homo sapiens
agtgtaaatcgaatacatggcagagccagcattcctactcagtgtgtttagccctcgagtctgtgcttttaatcaatttgctgtactgcctctcaaaatgytactacccccgtctcatataccttacattgcctttaatgaaaaagaaaacaatccagtaaaaaaataattaaacttgataaatttatgcatagatacatt

SEQ ID NO: 452150 - DNA, 201 bp, Homo sapiens
gccactgtactccagcctgggtgacagagcaagacttcatctcaaacaaataaacaaaaaaaattcctgagctcttgatttcaactctttctcttccagtstttctcatcttagaaaagagccccccatctgccagaggagtcatctccaggttctgcctttttcatccactcccacatttactccaacaccaatcctgtc

SEQ ID NO: 452151 - DNA, 201 bp, Homo sapiens
ggctgctatatttcaaattatgttgtaaattgtgctttagtcagattgtttctatgtcacagctagctgtgttcttatatgctgtaaaattgtttgtattstaataaagttcacttcttgatttatcatacttttacaagccaagatctcagatgataacacatatttattacggtgtttaatgctgctttccaccttttg

SEQ ID NO: 452152 - DNA, 201 bp, Homo sapiens
agccctgcctcctatctgccatcttcttcaagtgtgttttgtgtgttttcatgatagtagatattcttttttgctttcaggtataggactcaaacatttcttttttttttttttttttttttaagacagaggtctggagtgcagtggcgcgatctcggctcactcactgcaagctccgcctccaaggttcatgccattctc

SEQ ID NO: 452153 - DNA, 201 bp, Homo sapiens
ttctctaggggtgtttgggagagccccactgaggaaatgacattggaggattaaataaggatatgttcaaacctctctcttctcaaccagctcctaaccaygagagcctttttcctctttaggggaacaatcaaaaatacagtcagtgcccaagaggtcataatttgtagcatctatgtaatgattagattgctagctcag

SEQ ID NO: 452154 - DNA, 201 bp, Homo sapiens
tttcccttctgccatgtagtgacacagcaagatgaccatctatgagccaagaatcatgtcctcaccagacaacaaatcttctagcaccttgattttggacstctcagcctccagaactgtgagaaataaatttctgttatttataagctacctgatttatggtgtgttattatagcaatttgaatgaactaagacagtgca

SEQ ID NO: 452155 - DNA, 201 bp, Homo sapiens
taagaagttgaatcagaagtaaaaaaaaaaaaaaaatctactaaatttaagccaatgacacttcaggctagccagcctttcttctcagctatgctgccaaratttttgtattttgaattgctttctcctaattccagcaacaaaaggtttgaatagtacgatcatgagtacaaagatccttgcagaggtgggatccttctc

SEQ ID NO: 452156 - DNA, 201 bp, Homo sapiens
accttatgaacacaagtaccaggccaatattcttgaaaaggcttcgtaggtattgacttcacatacgaatttggaattattcctccttaatatggggtttmccatttgtaataaaagtgagtaatgcaaaatcagacacttattgaatctatgtaagtaatgaatgtttctgtgaataataaggagagtatgtaaaggtgt

SEQ ID NO: 452157 - DNA, 201 bp, Homo sapiens
atgattgcaaatgtaagaattatataaataaaaatgatttcaattaaaagatagagattggcagaatgagttaaaaactataacctaattttatgatatcdtatttattttatgtataatgatgtaggtaaattaaatttaaaaatgggaaagtatcatacaagtattaatctagagaaagctggattgatcaaagaaaat

SEQ ID NO: 452158 - DNA, 201 bp, Homo sapiens
ctaatttttgaaatgaaattgtctttacagtgtggcacaacaattttttttgtaaatgtactaaaaaagaatatgctgtcttttgtgcaacattgtgtgtgtgtgtgtgtgtgtgtgtgtgtgtgtgtatgcatgcaggtttgtttgcatgtgttaaatcaaacttcttaaatgtggtattcaaatcctctatactaattt

SEQ ID NO: 452159 - DNA, 201 bp, Homo sapiens
tcttctgatgagtttatcaatgtgctccttgttgcttaatcctttggacacctccttacatattatatttgacctcgctgtagaaatgatgctatcctttytcttcctaaaacaatttttcccttgcctttgtttacatcataattttcttgtttctccctaactagtggccacttaatttgaatttttaattctttttct

SEQ ID NO: 452160 - DNA, 201 bp, Homo sapiens
gagactttacagctgttgttaaattgatgacctttagatgggaagattatctatgggtgggcctaatgtaaacacaagaatccttacaagaagaaaatacyagcacaagaggaggtcacagtcagagagggattcaatgatgctactctgatgcctttgaaaatgtgggaaggacccgggagccaaggaatgtaggcagcc

SEQ ID NO: 452161 - DNA, 201 bp, Homo sapiens
tccacatttaatttctcagttaactttaggcatctatctaccacagaaagacattaagaatgccaggtgaaatcaaagagaaagtgaatgaatattcagcytctgatcgtacaaatagaagtttacagaagacaactgtcttaaaagccaggcattgttaaacaggattttctagattcttttatctagatctcatgactg

SEQ ID NO: 452162 - DNA, 201 bp, Homo sapiens
aggcgcacttttatttgctgaggtggatggtgagtgaggatacaaactggggaagttaagtatctactacattgcttaatttaatgaaagtggattgagasgttggggaaggtagttccggtagcagtgagttggctacagatgtggagaagagttttaagcaactgaagtgggagaggaaattaggggcaaaggaagagc

SEQ ID NO: 452163 - DNA, 201 bp, Homo sapiens
cagtaaaaggctgcccattgaatagaaatgttttttaaaattagctcactgtggataagcttagcatgatttttcaactggttacttcatactgtttcttsaagatgaggaaagcttcacaactgttcatgtttgattaggcgcattcctgaggcatgtctttctgtcatagcactgaccacactgaccgtagttatctgt

SEQ ID NO: 452164 - DNA, 201 bp, Homo sapiens
ctctcgcccaaccgtacacacttgttccattcactcacactcctggtcgttcccttcacactcacactccttcacattcatgaccagccaccccactggcytccatttagtactactcggtctcacccagccctacccatatgcacaccagagtcagctcactcacagtcgcacagtcagtccctcaaatgcagtcactcc

SEQ ID NO: 452165 - DNA, 201 bp, Homo sapiens
aggcatttaatgatttctgtcacacttctgataacgatctaaacttttactgtggccctgaagccctatctaatgtgtctcctgtctagctctctgacctyctgtctatcaatttctctatactcactattctctgtcagggctgcttgacggaggtgctggtattttggttgggaaaattccttctggagctttttcaaa

SEQ ID NO: 452166 - DNA, 201 bp, Homo sapiens
tgcatatgtgttttgaaaatctgttggccaatagccatcattgaattttataagagaaactgaatatcaacttgatactttatttgcaatatttcaattayatacctaccataaggttggcagttccataacagtgttttagagtattaacagagccatactaattggcccccagacaaaatctgcagtgccaggcctaac

SEQ ID NO: 452167 - DNA, 201 bp, Homo sapiens
cttggaatttacgcttttgtatagaagattaaaaagtgctcttatgaaagctctaataaatggcttgttgggcaatatgaatattcaaaagggtgccaaayatgcaacaaaatgtatctgaaatatcctattgtatgtacaatagagatttattgttctataagaaaggaaataagcctcattgaatattttagggtgata

SEQ ID NO: 452168 - DNA, 201 bp, Homo sapiens
atgtcaatccaagctggagtcagggttatttgagtacttgtgtctcctacttagcactgccatttgctttactctcttaccacagagaaacccatttcttyactgtggtgcatgcgaaaatttgcctggaaatcaggggccatactgctttggggaggatcattacctgtgacagggaatattcaggtagccatattggag

SEQ ID NO: 452169 - DNA, 201 bp, Homo sapiens
tgagttagtttttaaaagagaataaattaaattcaattaaaacaacaagatgtgtctgttattgaagatagatcaaatatgctacgaatgttgtcagggtwggaagaatagaaatgttgtagaatttactggaaaaaaattgaattaaatttgaattaaatttggcttacaaatttaaaggtaactgatatggtttggctg

SEQ ID NO: 452170 - DNA, 201 bp, Homo sapiens
tagcaaagttgctagatatattatataataatataatagaaaacaataaagtaaatcagttaccacataccttagcataaaaaaaagtcaaatattggccmcatgcggtggctcacgcctgtaattctagcactttggtaggctgaggttggtggactacttgacctcagtggttcgagaccagcatgaacaacatggcga

SEQ ID NO: 452171 - DNA, 201 bp, Homo sapiens
tgagttaagaagttgctttttgccttacataaaggttatttcagtttctgaggatatactcaatattttgttctaactattcactcttaggaatacatggkcatgaaagggatattcactacctaaagatgaatgacttattcagatgaaacttattttataggttactcttatttttagacaaactctatggcccaaggt

SEQ ID NO: 452172 - DNA, 201 bp, Homo sapiens
ttttggacagtgtgaaaaaaatcaggatggattatcacaaagaagagaattgtttcttatttggaagtcttagcaagtagaatttaatctcttctatttgkgataacacacatggaacacagactagagaaaatggttgcttctaagcactttaacttatttttccttgggatgataatatgaaaacaggtgactttagac

SEQ ID NO: 452173 - DNA, 201 bp, Homo sapiens
ttgatatggcctctcggcctagcatgtcttcctgcttctccctctaccttatatcatgctattaccccctcactcttggttctgctcattttgctgttctstcagttctcaaacttgcaatacttcaatccaatctgggccctgttagctcagccgccatagtcctctttctcctcattgcagcttcaagccctctgccct

SEQ ID NO: 452174 - DNA, 201 bp, Homo sapiens
tttcttgtgttttaggtgtcatatgtaggaaaatattgcctaattcaaggtcgtgaagatttacttcttctaagagtgtttaggttttagctcttatattyaggtctatgatccatttgagttaaaatttttatatggtttgaggtggggggtccaatttctttttagtattggtagctagttttcttagaaccatttgtc

SEQ ID NO: 452175 - DNA, 201 bp, Homo sapiens
gtggtgcgatctcggctcactgcaagctccgcctcccgggttcacgccattctcctgcctcagcctccagagtagctgggactacaggcgcctgccaccaygcccggctaattttttgtatttttagtaaagactgggtttcaccgtgttagccaggatggtctcaatctcctatcctcgtgatccgttcgccttgcctcc

SEQ ID NO: 452176 - DNA, 201 bp, Homo sapiens
gctactgattttcatttattttatttttttttgagatggagtcttgctctgtctcctagcctggagtgcagtggtgcgatctcggctcactgcaagctccrcctcccgggttcacgccattctcctgcctcagcctccagagtagctgggactacaggcgcctgccaccatgcccggctaattttttgtatttttagtaaa

SEQ ID NO: 452177 - DNA, 201 bp, Homo sapiens
tctgcccctggttggtttagactctccaaagcccataggctggaatggctgagttccccaaactacaaagatggtggcccacccctcccctgagtacttcrtctcaaggagaattcaaatttcttttgactaaagaacaccagcaggggtggcttgaggccccagttcagaggttgtacccattgaggaggaatggtattg

SEQ ID NO: 452178 - DNA, 201 bp, Homo sapiens
gttcaaaattttacagatctctagggcaggggcaaaaggcccctagtctctttgctaaagcatacgatgagtgaccttttctccagttcccaatgagttcstcatctctatctgagaccacctctgcctggtcttcgttgtccatgtcactatcagcattttggtcaaaactattcaacaagtctctagaaagttccaaac

SEQ ID NO: 452179 - DNA, 201 bp, Homo sapiens
aaaactcctgtaactaataaatgagctcagcaaagtttcaggatacaagataagtatataaaattaattgtgttgctatgtactagtaatgaacacatggrcaccaaaattcaaaatacaataccatataaaaacactcagagataaaaaagaaatacttaggtgtaaatgtaataaaacatgtataggacttgcatgctg

SEQ ID NO: 452180 - DNA, 201 bp, Homo sapiens
gaaatgggagacttgctcatgggtttgtcactgtctcagcctagaagtgacacatgtcatttcttacatttctgtgccagaaatattcagatgaccttgcytaagaacaagggggctgagaaatcctctcttccccatggctaaaagagtaggggaatgatattagtagtatctgtctttgagattgaaaaattccccatc

SEQ ID NO: 452181 - DNA, 201 bp, Homo sapiens
ctactgtatattctggaattcacagtgtgtgtacaaatcagaagaagctagattttactatagtagcaaatcaagcacacacacacatacacacagcaccytaaaacactactggttccttataaaacaaaggtttatttttcactttatattccacattggttggcagggagtcggtactccagaatcacccagagataa

SEQ ID NO: 452182 - DNA, 201 bp, Homo sapiens
atttaccctgtaggtagactattaactgaacttactgtggagttgaatgaaacataaaatacacaaggctgagtgtaagttagaccaaaaatcttttctcrtattaagagctggcagatattctctagccatccaaggattcttcaacatttccgtcttgctttctaggaatgagaattatccttcacaacattctctatt

SEQ ID NO: 452183 - DNA, 201 bp, Homo sapiens
tatgttattaattgaaacaggatatttaagataatgatacgaatctgctggggaaaagggaagttggtcaatttggtctgctcatgtaatatgtacaatayaataaggtgaccatagaatagtaatctccaacctgctttaaacattatgtgtctagtagaatagttagaaatttaggtttcatggaccaaaacaatttaa

SEQ ID NO: 452184 - DNA, 201 bp, Homo sapiens
gaccatttctaggcctggcatggtagctgacacctgtagacccagactgaggctgaggcaggaggattgcttaagaccaggagtttgagaccagcctgggyaacatagcaagactctgtagaaaaataaaacactggccagatgtggtggtggtggtgcgctgttagtcctggctacttggaaggccaaggtaggaggatc

SEQ ID NO: 452185 - DNA, 201 bp, Homo sapiens
ttggcaacactgcataaacatgtcattatggtcactggttgtctttataatgggtttggtgacacttgcattaaaaaaatctgtgaagggacagtcaccayaagaacccagttgcatcaaaattctttttccaaaagcctaaccaggtgctcagcttcttcgtacctgggcgacaatttctaagacttttgtcagttattt

SEQ ID NO: 452186 - DNA, 201 bp, Homo sapiens
gacattttgcatacagtataattcatcatttttacttctaggtatatccagcagaaaatgtatatatttgcctcaaaagacatgtaaatagacattcagarcatcactattcataatagccccaaacaggaaaaacataaatgtccatctagcaaaatagatgaataaatatgacagttatataatgaaatgccatacaga

SEQ ID NO: 452187 - DNA, 201 bp, Homo sapiens
ggcattcttagaatgtctgtttcacaccaagccattgaagaggctgctattgagaaaggatctgaatacaactgccaggattttcagcacagaagggcacratcaaggcagtttttttcctatgctagtaagactggcaccatatcagaatctctagccctctgagtaagtccttgagagcaaatgcagtcaaggttgtca

SEQ ID NO: 452188 - DNA, 201 bp, Homo sapiens
ctgtttcacaccaagccattgaagaggctgctattgagaaaggatctgaatacaactgccaggattttcagcacagaagggcacgatcaaggcagtttttytcctatgctagtaagactggcaccatatcagaatctctagccctctgagtaagtccttgagagcaaatgcagtcaaggttgtcaccaccctatctgaaaa

SEQ ID NO: 452189 - DNA, 201 bp, Homo sapiens
cagaagctaatgttctgaatgtcatagacatcattcctaccgaactccttttcatggaatggcctagagaaaacaatatcttgaaatacaaacctccattytaaagtgaaataaccccatcatgtttttttccttttaaagcaggaattctttttttttttttttttgggctgtcacttttatactggaatctggtggtga

SEQ ID NO: 452190 - DNA, 201 bp, Homo sapiens
aggggagtttccctacatgagctctctcttgcttgccaccaggtagctgtccctttgctcttcatttgtcttccaccatgattgggaggcctcccctgccrtgtggaactgtgagtccattaaacctcttccctttataaattagccagtcttgggtatgtctttatcagcagtgtgagaacagactaatacattggttct

SEQ ID NO: 452191 - DNA, 201 bp, Homo sapiens
cttttgtttcttggttaactcagtagcaaggctattgagtcctggcttaaagctcacatcttcaaagacaggggaccagaaccataaatgggcacactgamtagcatgcagcagaggtttaggaagaaaaaggacaatgaggtcacagaatccagtgcacctcatgataagtggcagcttttggctttgattagggaggtc

SEQ ID NO: 452192 - DNA, 201 bp, Homo sapiens
ccaggcccctcttccaaaactagggattataatttgacatgagatttgggcagggacacaaagtgaaattatatcatttgatgtcctggcttcctatttgygctttctttctttctttgcctaattttcctggctggaacgttcaatactatgttgaataggagtggtgagagagggcatccttgtcttgcgctggttttc

SEQ ID NO: 452193 - DNA, 201 bp, Homo sapiens
ttatccagtgatatccgttttttcttccttgttccttcttgataaaattcacatagtataaaattcaccattttaaatgcacaatattattgaattcagtrtagtcataaggttatacaaccatcatcattatcaaattctaaaacatccttatcatccaaaagagaaaccttgtgcccattagcatgcactcactatttc

SEQ ID NO: 452194 - DNA, 201 bp, Homo sapiens
ttttgctctttttgagtatttgaaaaaatactcaacttcttggtacaataaaaacttcagctgaattaaattagtgtttaattgaacaatgaaagatttgygaatcaggcagcccccagaatcacagcagtttcagagagactccagggatacctcgtggtcagaacaaatttatagacaaaaaaaaagggaagtgatgta

SEQ ID NO: 452195 - DNA, 201 bp, Homo sapiens
tttaccaagtaactgccatggaccaagccctgtgataggggtggaagtggtgtgatttttctttctttctttctttcttttttttttttttaagacaggaktctcactctcactctgtcgcccaggctggagtgcagtggcgcaatctgcaacctctgcctcctgggttcaagctattctcctgcctcagcctcccaagta

SEQ ID NO: 452196 - DNA, 201 bp, Homo sapiens
tgactaatttttgtattttttgtagagacgggattttgccatgttggccagtcttgtctcaaactcctggcttcaagtgatccaccagccttagcctcccraagtgctggcatcaggtgtgggccatggtgcccagcctgatctaatattttcacataaagaattttaattaatgcctctggttataatcatatacatctt

SEQ ID NO: 452197 - DNA, 201 bp, Homo sapiens
agggtagggttgggggtggtggtcagaggttctctttgagattctgaacgctttatggatgcttcatccaggaaaaggcataatcaaattttgcatatgaytttggggcttgttagactcctctggcagtccatccatggtatgaaacttggctaccctttgatttgtcactcagccctccatttactcagctccactcac

SEQ ID NO: 452198 - DNA, 201 bp, Homo sapiens
ttataatcatatacatcttactcctatttgaactattttgataggagtaactattttgatagttcaaatccagagtctttcaaggagtcctctttgtagamcactctgttcatacttctttcatatattaagtctgttactaatcctatatctgttttctatcttttaaaaaattattgaagtctttcaatttcagtagtc

SEQ ID NO: 452199 - DNA, 201 bp, Homo sapiens
cagcctttttagcactgtcaggggaaaaccacctattaaagcctcaataatggtggatgtccctccccgcaccaagcttgatcatcccaggttgacttcaractgctgggctggcagtgagaatttcaagctagtggttcttaacttgctgggctctgtgggcatgggacctgctgaggaagacctcttggctccctgact

SEQ ID NO: 452200 - DNA, 201 bp, Homo sapiens
cctgggtgacagagcaagactctgtctcaaaaacaacaacaacaacaacaacaacaacaacaacaacaaaattatagtattttaactttctaaagggttcrtagaatttcatccaattttatttttgcaacattccattttactgtggaaaaactgggtcagggtgtgcctatgtgtttaccagacacctccatccttcag

SEQ ID NO: 452201 - DNA, 201 bp, Homo sapiens
gtacagctgtagcaaatgtgcgtcagcccagtgtgctctgccatacaggctaggaagttttcctacaaagcttgtggttttgatgtaacaaaaccttctcwgtgttcttatgaaagtgtcatatgggcccaactccaagatcccttttctcagctcagcttttatctaaaatgatgactaaaagcctgttcggaggctgcc

SEQ ID NO: 452202 - DNA, 201 bp, Homo sapiens
ccctgccctggccactttgagtggaataatatcttggtacagctgtagcaaatgtgcgtcagcccagtgtgctctgccatacaggctaggaagttttcctrcaaagcttgtggttttgatgtaacaaaaccttctcagtgttcttatgaaagtgtcatatgggcccaactccaagatcccttttctcagctcagcttttat

SEQ ID NO: 452203 - DNA, 201 bp, Homo sapiens
gttgatatttgggcagcactctggagtgaagagaagagactgctcaccgctggtagcaacaggtccaggtggctctgggccctgccctggccactttgagkggaataatatcttggtacagctgtagcaaatgtgcgtcagcccagtgtgctctgccatacaggctaggaagttttcctacaaagcttgtggttttgatgt

SEQ ID NO: 452204 - DNA, 201 bp, Homo sapiens
agcagttcctgacattcaccacttcccaaacctgtatggcacacatggaaatgttgatatttgggcagcactctggagtgaagagaagagactgctcaccrctggtagcaacaggtccaggtggctctgggccctgccctggccactttgagtggaataatatcttggtacagctgtagcaaatgtgcgtcagcccagtgt

SEQ ID NO: 452205 - DNA, 201 bp, Homo sapiens
tggagagattttcctcatcccatggtttattgttagtaagaagctgttatttatgttcaagtgaagttttcccaaatgtttgccatttgcaaatatctttyattattttcgtcataccatggaccatctattctgtaacctgcttaatatttttctttaaatctccagccttttaaaaacatacataagtttaatttcctc

SEQ ID NO: 452206 - DNA, 201 bp, Homo sapiens
tgaactcacttatcagtttttgtatcttttttgcaatgtttcataaaattttctatgaagatgaccatgtcagctgtaactaatgacagttttactttttyttttttcaatagggctgccatttatttatttatttgcttgctttattgcactggatagaaccttcagtataatgttgaatagaagagatgtgaacagaca

SEQ ID NO: 452207 - DNA, 201 bp, Homo sapiens
ttatcagtttttcctcttatgggttgtgcttttggtatcaagtctgagaactctttgcctagctctagattcagatgattttctccattacgttggtttargttggggttcaatttttttgcttatgaatgtctaattgctccaaggccatttgttgaaaagtctacccttttcccactgaattgcttttgtaccactgta

SEQ ID NO: 452208 - DNA, 201 bp, Homo sapiens
gcttctattctcttattagctgtccccaatactcccttttctcacatgcaaacccctgtgtctctgcttttacatgttttttttggaagattcaagtcttytttctctttgaagagacctcttcctaatcacttcagttttactaactcctcttaaattttctgtgattccacatctgtttggggacacctatcatgatta

SEQ ID NO: 452209 - DNA, 201 bp, Homo sapiens
ccattaactggcgagatggtatctcattgtggttttgatgtgcatttctctaatcaccagtgatgatgagctttttttcatgtttgttggctgtgtaaatrtcttcttttgagaagtgtctgttcatatcctttgcccactttttgatggggtggatttttttttttgtaaatttgtttaagttctttgtagattctggat

SEQ ID NO: 452210 - DNA, 201 bp, Homo sapiens
gctttgagatactgagtattgtgtgtaatcaaattctactttggatgccagaaatcagaaaccaagaggcagctcttctgaataacacattcatgtaaacracactgccagttcctggcacatggtagttataggcacgtatatcaattcttgctgattttatcttgatttcttaggcgtttaagggtggtaagtaatcat

SEQ ID NO: 452211 - DNA, 201 bp, Homo sapiens
tggtaaatagcgacaggatgtattttactagacagttcttctgtaatagtgactttttttgacccctcatagcatcatccatgttttataattctatgttycttctttttttttttgagacggagtcttgctctgttgcccaggctggagtggcgcgatctcggctcactgcaagctccgcctcccgggttcacaccattc

SEQ ID NO: 452212 - DNA, 201 bp, Homo sapiens
tttattcttttttgtggcagttgtcaatgggagtttgtggtttggctttcagcttgactgttgttggtgtataggaatgctagctatttttttttttttttaaatggagtctcacactgtcacccaggctggagtggaatggtgttatcttggctcactgcaacctccacctcttgggttcaagcaattcttctgcctcag

SEQ ID NO: 452213 - DNA, 201 bp, Homo sapiens
tcattcctaccgaactccttttcatggaatggcctagagaaaacaatatcttgaaatacaaacctccattctaaagtgaaataaccccatcatgttttttyccttttaaagcaggaattctttttttttttttttttgggctgtcacttttatactggaatctggtggtgataataatctactcaaagttctccaagaaat

SEQ ID NO: 452214 - DNA, 201 bp, Homo sapiens
cccaaaaggaatgcagccctgtcaacaccttgattttatacctagtaagccctgtttcaaacttctgacttccagaaagggaagataatacatttgtattrttttgggtaatatgttgtagtaatatatgaaactaatacaaatgcaattgatttaattttaattctagatgtggaatcaggcttcaatttaagccttttc

SEQ ID NO: 452215 - DNA, 201 bp, Homo sapiens
attacctccttttttatggctaaataatattttgttgtgtatgcgtaccacattttctctatccattcatccattgatggacattttgggattggttaatragtacaaaaatacaattagataggaagaataagatctagtctttggtagcacaattgggcaattatagttaattaatttattgtatattttgaaatatct

SEQ ID NO: 452216 - DNA, 201 bp, Homo sapiens
tgtcttgaaggcagagtaaacattcttttctccctgtttatttaaattttaaggccaaagtgcacttaaattatccagaaggctaaaaatagcagcataayaaccacagaatagtttatctttctattagctgttctgccagtcagcattaaagttcattcccggggcaaaagcaggattgcaatagagcaaacagaaaca

SEQ ID NO: 452217 - DNA, 201 bp, Homo sapiens
ctttcctttttcctactgcaaaactttggtgttggatgtttggctttactgcaccaggcaagtggatgtcagttcatttcggtaacaaagatttggaatgytcccaacataaagaaatggtaggtttttgaggtgatggataacccaattagccagatttgatcattatccattgtatacttgtatcaaaatatcacatgc

SEQ ID NO: 452218 - DNA, 201 bp, Homo sapiens
gtcatatgaacatgtaatgtctatcccaaaaatgtaacaatgatttaacaacaacaaaatctgtcaatgcaatatacaatatcaacatcttaaagcataartacagccttttaaatataacttaaatggcattccgtagcaaacaaggacttgaaaggttgttatcatcatcttgataaagattctttacaaaggtctata

SEQ ID NO: 452219 - DNA, 201 bp, Homo sapiens
cagttcatttcggtaacaaagatttggaatgctcccaacataaagaaatggtaggtttttgaggtgatggataacccaattagccagatttgatcattatmcattgtatacttgtatcaaaatatcacatgcaccccattatatgtacaactattatgtatacataaaacttataaataaataatgaagagaaagaacatt

SEQ ID NO: 452220 - DNA, 201 bp, Homo sapiens
gcataagtacagccttttaaatataacttaaatggcattccgtagcaaacaaggacttgaaaggttgttatcatcatcttgataaagattctttacaaagrtctataaaaataagtgtcatactaaataatatttgaagctttattgaaaagggtgacaagaaagaaggaccatttttaccagaagcccagccctggcaac

SEQ ID NO: 452221 - DNA, 201 bp, Homo sapiens
gactgctgaaagtgccaattagtgaccctagtcattacttcccgtaaagaaaagtaggaaaacctaaagagccctgtagattggattcacagggctttggsgtaccatcaaacaaggtgcaattgctgctttacttcataaagataataagcattcaggaaccatgaagaggggaaaataaactatgaaaaaagattatat

SEQ ID NO: 452222 - DNA, 201 bp, Homo sapiens
gatcatggtttcctgagtgtcttcaagcctcagttgggagtctagcccacagatactgctaacatggcaagtggtaattatgcatatctttgctgtaaagmaggtagatagatggtctttagggcattctggaatcacagactttcctgtatatcccagtgaagtaatgaagaggtgttaaaattgcccctgggtagcgga

SEQ ID NO: 452223 - DNA, 201 bp, Homo sapiens
ttttgttttaatcttggaaaacatatttgcatcatatttcttaatttgtcacagcctgagaagtgacattattgaatgacagtaggagcttgaatattgtrctttgaaatgccattgaggataccattattcatgtgacagccctgagaagattagcaaataactacttaacattttataatgctttatcatcataaaaat

SEQ ID NO: 452224 - DNA, 201 bp, Homo sapiens
ttaaggcagagaaaagaatttgctatttaataagtacctttaagagtttatgctaacatcttaaatatttttgaaaatttagtttatacacattttaatcyttaagcctatattatatatgagatttcactcatgttttccaacagtggaattctatgtggtaactcaattataataatattttcttagaggtgccaaaaa

SEQ ID NO: 452225 - DNA, 201 bp, Homo sapiens
gaaaagaatagatttaatgcacatcatgataattatcattagtgggtgtttactgtttgttagacactgtactaagtgattttacaaactttaactcattwaataataaaaaaattctacatagcaaatattcttaccctgatttcgtagaggaggaaactgagagttagcatcctaaagctaaaaagtggtgaaattgca

SEQ ID NO: 452226 - DNA, 201 bp, Homo sapiens
tttttgaaaatatgtaatacattattattagccgtatttactgtacagtgctccagagcaccagaactcatttttttaaaatctagctgtaattttatatmttttaaacaacctctccccattctctcctcctccttacccttcccagcctctaatactcagttgtactctatacttccatgggctcaaaacagttttctt

SEQ ID NO: 452227 - DNA, 201 bp, Homo sapiens
ggtttttctcattgttaccacaagaaccaaggtttttttcatcttttacattttaaccagaagcaaaaaggtattatattctacccagcatttcttggtgytagagcttgaacatttttaggttatctgagttttctgtctttctgaaatagaaatggaaaccacagatttacctttacaatatggctattagagaaataa

SEQ ID NO: 452228 - DNA, 201 bp, Homo sapiens
tacactctaacaggtaatcaagacttatggcaacattgcccaaagagttaatggaaaatatggttttcacaatgataaaatcttccttgagtaacccaattctgagataggaatctttcctaagtgtccccgcagtatgacatacttcttctattatgatcactgtttattggtcagtatcccttgatagactataagctc

SEQ ID NO: 452229 - DNA, 201 bp, Homo sapiens
tggccagaatttgaagtgggtgagtagacttctgacatcatggtgttcttggtattcccagttttcttctttggatgtactgttttaaattctacttcctstataaacaatagtataaatgtctaccagtgaatcactgggtaactaagtgtacaaaaggccttgaaaaataagtataatatgtcgtatgtaactcagtta

SEQ ID NO: 452230 - DNA, 201 bp, Homo sapiens
agtccactattttatatagacatttgtacatttatttcctcaggataaatttctataagtgtaattattactttaaagtaaatgtctgatttttattttgattttttttcatttttttttttggggggagctgacccttcaattttagaccacttttctatggtacactctaacaggtaatcaagacttatggcaacattg

SEQ ID NO: 452231 - DNA, 201 bp, Homo sapiens
ttttaaattctacttcctgtataaacaatagtataaatgtctaccagtgaatcactgggtaactaagtgtacaaaaggccttgaaaaataagtataatatrtcgtatgtaactcagttacggaaggctatcttactttttgatgtaactaataataagctagtcaccaaatgcaactgtataataaaatgttggattataa

SEQ ID NO: 452232 - DNA, 201 bp, Homo sapiens
cagggtataatccctctcctggatgctttcatgggctggcattgagtgcctgcagctttcccaagtgtagggtgcaagctgtcagtgaacctatcattctkgggtctggaggatggtggctgtatctcacagctctactaggcagtgctacagtggggactctttgtgggggttccaaactcatattttccttccacactg

SEQ ID NO: 452233 - DNA, 201 bp, Homo sapiens
tttttgagacagagtctcactctgtctcccaggctggagtgcagtggcatgctgcaacctctgccttccaggttcaagtggttctcctgcctcagcctcccaattagctgggattatagatgtgtatcatcatgcctgggtaatttttgtatttttagtagagacagtttcagcatcttggtcaggctggtctcaaactcc

SEQ ID NO: 452234 - DNA, 201 bp, Homo sapiens
caattttattaatttttttgaacaagcagcttttgatttcattgattttctctattgtttttctgttttcaattttattcatttctgttcatatatttacygttttccttttgcttgctttgggtttagtttgcaattttctttttctagttttttgaggtagcatcttaggttattaaattgagatcttttcccacatga

SEQ ID NO: 452235 - DNA, 201 bp, Homo sapiens
tcttacaactacatgtaaatccacaattatgtcaaataaaaagtctaatttaagagcagcaaaatgtaaatcagattcctcccctgctaagagtcctccarttggtttctcataattcttcagataaaatccagacaaagtcccaaaagatgtagctcctgcttacctctctatgttctcccctttgctcttcctctaata

SEQ ID NO: 452236 - DNA, 201 bp, Homo sapiens
tcagataaaatccagacaaagtcccaaaagatgtagctcctgcttacctctctatgttctcccctttgctcttcctctaatataccaagctggccttaggsccattgtacttgctgttcattcccactgcctaacattttctatattccacatgatcaacttcctcacttagttcagtcttctactcaaatgtcaattcct

SEQ ID NO: 452237 - DNA, 201 bp, Homo sapiens
caatatggactggtgtccttgtaagaaaaggaaatttgatgcagacacacatagagggaagatatggaaagacataagaagaagatagccatctagaagcygaggagggaggcctccgtcagatcctttccccatgaccctccttcctcagaaggaaccacccctgctggcaccttccgcttggacttccagcctctagaa

SEQ ID NO: 452238 - DNA, 201 bp, Homo sapiens
gtgtcctggagctcaccagatgatggagataaagatgtaggaaagtgcataagggagcaagtgtgcctcagcagaggatgctcagggctggtgaagggcawttttttggcagcagcagtgtagaatatgcaacatgaactcctccaggccactgaattaagaggaatgcaagatagcagctcccacaggatagaaaactgg

SEQ ID NO: 452239 - DNA, 201 bp, Homo sapiens
acaagttgctaatgtgaaaagatatcgttatgtcattatttttttcccgatatttgaggcattttcacagaaatatgcagaagtcatgccataatttttttatgcctttttgtatagttttggagtaaatttctaaaaggctaaatttctacatatggacttactcaaattataagtttcaagtaaatggacaaatattaa

SEQ ID NO: 452240 - DNA, 201 bp, Homo sapiens
tcaatcttctgcatgtggctggccagttatcctgatctgcttgtatttggataacaagttgctaatgtgaaaagatatcgttatgtcattatttttttccygatatttgaggcattttcacagaaatatgcagaagtcatgccataatttttttatgcctttttgtatagttttggagtaaatttctaaaaggctaaattt

SEQ ID NO: 452241 - DNA, 201 bp, Homo sapiens
ggtggtagatagctaaggaaggacttctatagctttgcagatctgttttctataaattgctgtgtcacctaaacaattgttttcaataaacaatgtgatargtaattctatttataactctaagcacttactaaaaaaccttaatatctattcactttttattttagttaacaaatgcatgaaatgcctctgtaccaagtg

SEQ ID NO: 452242 - DNA, 201 bp, Homo sapiens
tgcctcataatataataaatataaataaatatttattatgttatatattttatataaataaatatttattaataatataataaatattaataaaataaaaataaatataaataaatacatctaaatataaataaatccacatgaatatagaatattcatatgagaatctttaaattttgtatctcacatcaaaattttttt

SEQ ID NO: 452243 - DNA, 201 bp, Homo sapiens
ccaagagaatcagctgataagctatcagcactcataagcttatttgcaaggttgctagataaaatatcaacatatgaatgtaattactttcctgtatgccyatatgtgaattttacaaatgaggaaatataatattaaaagtctaaataaaaatcatgcacaacaacaataaaagcagcaaactttcaagcgcctaaggaa

SEQ ID NO: 452244 - DNA, 201 bp, Homo sapiens
gatttacatctctagtcccaatctcttccctgagctccagctgctttttaaatatttggcaatatcaacatcaacatccacaattcatcatgtctaaatcygaactcttgatcctccttgctcttatttctctcatctctgtcagtcaatagtatcaccattcagtttcaaacccaggaattatctttaaatcttctcttc

SEQ ID NO: 452245 - DNA, 201 bp, Homo sapiens
caaacaaaagaactttgatctgtgtctcatgtcttatataaaaattaatcggaaatgaatcacagaattaaatgtatgatataaaactataacacttttakaaaagatataggagaaaatctttaagatctaggacaacaaagagttcttagaatattaagtgccatctacaaaaataatatttgataaattaaacctcat

SEQ ID NO: 452246 - DNA, 201 bp, Homo sapiens
atccattgaggtggagagcctgttagcaggactccatctcactttgctgagttgtatttccttcttccttttcacttgataaattccactcctcacccttstatgtgtctgtgagcctaatctttcctggtcatgtgacaagaactggtttcttcctacaacactgctttacaaggttgcagatcatgcaggtggtctccc

SEQ ID NO: 452247 - DNA, 201 bp, Homo sapiens
tttcagacactgttccctgtgagcataatagacaaagatccctgccctcctaaagcttagatcctagtggaaagagatagacaatgaacacagaagcgtgwaaatatgttacatgtcagattgtgatgagtgttatgaagggtgataaagttgtaaagggaagaagggagattttgagcaaaatatgagcaagttgaggcc

SEQ ID NO: 452248 - DNA, 201 bp, Homo sapiens
ggggaggaatgatggtagctttgcactagggtagtagcaatggaggtcgtaaaaaattgcagattctgaatatatttgaagttaagtgaacagggtttgaygacagattgatggggagtataaaaacaagaagtaacaaaattaagatttttagctgcaagtagaaaaacgaggttgccacggactgaattgggggtttta

SEQ ID NO: 452249 - DNA, 201 bp, Homo sapiens
taaatggttatttttatagttgcattatggactttggcattattcaaagaatacataatttaaattctgacaagcttttaaaacattttcttctaagcaakgcctgcaaattagtcttttctttccctttttagactggggctgtggctgagatgtcacatggcagataggatcacaaatttctgttgtatctggatggag

SEQ ID NO: 452250 - DNA, 201 bp, Homo sapiens
tggcgtatgaagtgacttggagattggtctttgggcccaagcatggctcttaagtttcagagatcaccagccagtgggttctgcctgctctctaatgtacrctctcacacagattttttccacctaaggcagatgcgtgtgtctaaggtgtgcgtgtgtgtgtgtgtgtgtgtgtatgtgtataggcaatggatgcatgag

SEQ ID NO: 452251 - DNA, 201 bp, Homo sapiens
aagtagaaagggtctgaaagaatatagcacaagtgatattgtatatgatttagaacaaaataaaaatgtaagtgggagatgatgtctgtttcctcctctcygacctcatctcctaccagcctgtccttccactctcaccaaactctggccatgcctcccccttgctgctccatgaacacaccaagaggctgctgttgtgga

SEQ ID NO: 452252 - DNA, 201 bp, Homo sapiens
tccttcagagatgccctgcccaatgaggaggaatctagagaagtagtctggccacagctgctttgccgctctgtggtgaattccacccatcccaaacctcscagcctttttagcactgtcaggggaaaaccacctattaaagcctcaataatggtggatgtccctccccgcaccaagcttgatcatcccaggttgacttca

SEQ ID NO: 452253 - DNA, 201 bp, Homo sapiens
atcatcctgagctcttcaacctctttggagcttcctatttcaggacaaagaactactttggactttcctgaaaagacttgctggctttgtattctaataarctatatgtacatgtcccatttgctccatgagattgtactttaaaaatttatagatgaacttgggataggccttttaaaattgaaaaacaaagttgcaaat

SEQ ID NO: 452254 - DNA, 201 bp, Homo sapiens
ataataataataataataatataagatgacatcttgtctcacagaaacctgaaatttttagtttttaggttgttgagaagtgccatgttttaattcaatcrcctatattctaatccaggcatttcaaatgcacattctattatgctatcttgactatcttacataattgttttagacaccccccccccttatctatttgca

SEQ ID NO: 452255 - DNA, 201 bp, Homo sapiens
ctctgcagtataactctccatttagaaatgactcacatatttatttctttggctctgatcatccaaactaaagtattagccataaaaaatgttttaggaaygtagaaatttaatattatgaatatatgtgagtttattgagagacactgtaacagtgagtatgtaatataattttatgtataattttaagactgccattgt

SEQ ID NO: 452256 - DNA, 201 bp, Homo sapiens
ataaaaataatctctgaacgtccacggagattttagtctattgggggagactggcaagcaagttagcagttaaagtggagtgttactatggaattatgtakcagggtagagtcctgtggaacttaaaaccaaggcaggtgtgaattgagaatgggggagagtgttagggaaggcttgttggggaaagcagtgcttaagctg

SEQ ID NO: 452257 - DNA, 201 bp, Homo sapiens
ttgcctcataatataataaatataaataaatatttattatgttatatattttatataaataaatatttattaataatataataaatattaataaaataaaaataaatataaataaatacatctaaatataaataaatccacatgaatatagaatattcatatgagaatctttaaattttgtatctcacatcaaaatttttt

SEQ ID NO: 452258 - DNA, 201 bp, Homo sapiens
atgtttgcctcataatataataaatataaataaatatttattatgttatatattttatataaataaatatttattaataatataataaatattaataaaataaaaataaatataaataaatacatctaaatataaataaatccacatgaatatagaatattcatatgagaatctttaaattttgtatctcacatcaaaatt

SEQ ID NO: 452259 - DNA, 201 bp, Homo sapiens
cccaatgagactggcaagttttacttcatgactcaaggtacaagtctgggttcttagttgcaactaacagaaaacctctgtccaacataggcagaaaaatwatttgttggaaggatattgagtttcttacaaattggtgagaggactagagatcagatttagaaagagattggaaatcaagggacagtaaacagctgagga

SEQ ID NO: 452260 - DNA, 201 bp, Homo sapiens
cacctgacagaatttatggagaagagggattgtgttgtgtttttagcatcataacctacagtgccttacatgcattaggtgcttaaaatatatgggtttartaaattatgtttaatgatgatgtcgcagggaaacctaatataatgctaataaatcatagcaacaaatgttgaaagagtacttgttatatactggacattt

SEQ ID NO: 452261 - DNA, 201 bp, Homo sapiens
ccaggaggcaaaagttgcagtgagccaagattgcgccactgccctccagcctgggccacacagtgatactctatcgccaaaaaaaaaaaaaaaaaaaaaaagcttgctgtcatgtgggtgcaacttgtggtgccccaaagcaattacagtagtaacatcaaagatcgctgatcacaggtcaccacaacatatataattgta

SEQ ID NO: 452262 - DNA, 201 bp, Homo sapiens
atcatcatcaatgatcttagctagatcttctggataatttgctgtagcttctacattagcatttccccttgcacttttttgttttatagagttttttttttccttaaacttcgtgagctaaccttcactagcaaatgtttcttctgcagtttcctcacctctttcacccttcatagaattgaagagagttagggccttatc

SEQ ID NO: 452263 - DNA, 201 bp, Homo sapiens
ccaatctctgccattgtcttcacatgaccttccttcctgtgtctcctctgtatctctgtgtccaaatctctctctctctatctctctttttttttttttttcaataaagacactagtcatgagattagggcctgacttaatccagtgtgacctcacttttacttgatgacatctgcaaaaaccacatttccaaagaagctc

SEQ ID NO: 452264 - DNA, 201 bp, Homo sapiens
cagctgtagatcagccatcacagaacaatttctttcgcatatcagatactgtctttcaaatctgtggcatgatttatactcataactgtgtgaccaatatrtactataaactgtctaatccctattgttatttaaaaagaatatagatgatctctctaattccttaaggagcttttcatatactgttccaaccatcaaaat

SEQ ID NO: 452265 - DNA, 201 bp, Homo sapiens
taacaaaattaagatttttagctgcaagtagaaaaacgaggttgccacggactgaattgggggttttaaaagatcaattttcatgaagggagaaggccaasattcagtttgtacatggcaaatttgaaatacccattaaacatccaactgtagatggggagtaagcagctggacaaaacattccaaagttttctgagagat

SEQ ID NO: 452266 - DNA, 201 bp, Homo sapiens
atatttgtttggaaaatagtaaaaaatagacaataagtcccatgttcattgtcttttgccaagttttgttaccagctcctttagaatctttttttttttttaattaaaagtggttacataaatccttattagggtgaagcctgataactgtgttctggtgggataattgtatttaatctgctcatttctgaatgccagaac

SEQ ID NO: 452267 - DNA, 201 bp, Homo sapiens
gctgagatattttaataagtgtatagatagaaaaagaaatactatcccaggacttgaacctgagtactccaacattaaaaatatataagatggaagaaaayagcaagagactgagataaggcagctaatgtgatgagaggagaaccaaggaagagggagacctagaagataggtgaagaaggcatttgagaaaatatcaac

SEQ ID NO: 452268 - DNA, 201 bp, Homo sapiens
tatatttgtttggaaaatagtaaaaaatagacaataagtcccatgttcattgtcttttgccaagttttgttaccagctcctttagaatctttttttttttttaattaaaagtggttacataaatccttattagggtgaagcctgataactgtgttctggtgggataattgtatttaatctgctcatttctgaatgccagaa

SEQ ID NO: 452269 - DNA, 201 bp, Homo sapiens
tgaacctgagtactccaacattaaaaatatataagatggaagaaaacagcaagagactgagataaggcagctaatgtgatgagaggagaaccaaggaagarggagacctagaagataggtgaagaaggcatttgagaaaatatcaactatgacaaattctgtttataggttaagatgagaactgaaaattgattgttgatg

SEQ ID NO: 452270 - DNA, 201 bp, Homo sapiens
ttagggacagtgattttcattagagaaacaactcaaaataagcatcaatatcaacagcaataaaatcttagacagttttccactgggtttaaagtttgggmtcttgaacctcagaacataatggatgagtttggtgtcctactgaatcatccagaaaaataatttttcacagcattatcaatccttggccttttccctttt

SEQ ID NO: 452271 - DNA, 201 bp, Homo sapiens
caataatttcaacatggacacttgaaaacagggtgtcatcagtggctatatattaccacgccctagtggggcttgaacctctttagataaggatgtaatgscctaaactaattcattctctttgtatcttatacttccttagaattttttccttcagactgtgaattcattgttatttgatgccactttgcaccatgctca

SEQ ID NO: 452272 - DNA, 201 bp, Homo sapiens
attagtggacagacagtaaagaagaatgcagcctcagagtttgtactctactgacagagatcctagtttgagtccgacacttgtatttacaatattccatyaaatcacatagttgcatctgaattcagatttatttagggtatatttatttttcattgaccttttgcactcattttccgtttgatcttctattgccatgta

SEQ ID NO: 452273 - DNA, 201 bp, Homo sapiens
gttaaaatttgagccaacagaagactgatgtagtcatccaagtgtggagagtaaaaatacaaggaaaatgtggcagatagaaggaggactgtagtcttctygcagagctgttggcttctgtctctactactgaagatgaatgtggaaaattggtacattttcctttaagtggatgtattttattttgctgatttgtaagga

SEQ ID NO: 452274 - DNA, 201 bp, Homo sapiens
aggtgtgggatggtttccaaaattagcacttctaacaagtttgcatgtgatgctgatggtgctggtcaagggattacgttttgaaaatgctgcattgagcwgcagatatgcttgtttggctttaggaggtcttgtgaaagtatcattttagaaggatattttttgaatacgcgtgacaaggtagaattgttgggtgatata

SEQ ID NO: 452275 - DNA, 201 bp, Homo sapiens
acttgtatttacaatattccattaaatcacatagttgcatctgaattcagatttatttagggtatatttatttttcattgaccttttgcactcattttccktttgatcttctattgccatgtagtgtggggaaatgctatgagtttttgaaaaataaatgcttcattaaaaataatggactcattttcacattgcagccaa

SEQ ID NO: 452276 - DNA, 201 bp, Homo sapiens
tggactcattttcacattgcagccaaaattatctattaaaaacataagtttgattgtatattattcaatatattttaatgatttgtcattgtttttaggayagaagtaaaacatttgatatggcctctcggcctagcatgtcttcctgcttctccctctaccttatatcatgctattaccccctcactcttggttctgctc

SEQ ID NO: 452277 - DNA, 201 bp, Homo sapiens
acttgaacccgggaggcagaggttgcagtgagccaagattgcgccactgtactccagcctgggcaatagagtgaggttccatcccccccaaaaaaaaaacmaaaaaaaaggaaaaggaaaaataaatctatggaactgctcatggggaggagggacggcctggccctgccactcatgttgacgaagaagtaaactgaggca

SEQ ID NO: 452278 - DNA, 201 bp, Homo sapiens
tcacttgaacccgggaggcagaggttgcagtgagccaagattgcgccactgtactccagcctgggcaatagagtgaggttccatcccccccaaaaaaaaamcaaaaaaaaaggaaaaggaaaaataaatctatggaactgctcatggggaggagggacggcctggccctgccactcatgttgacgaagaagtaaactgagg

SEQ ID NO: 452279 - DNA, 201 bp, Homo sapiens
ttaaaagtataaaaattagctgggcatggtggtgggcgcctgtagtcccagctactcgggaggctgaggcaggagactcgcttgaacccaggaggcggagsttgcagtgagctgagatcacgccattgcactccagcctgggcgacagagcgagacgccgtctcagaaaaagaaaaaaataaatcaaataaaaaaataaga

SEQ ID NO: 452280 - DNA, 201 bp, Homo sapiens
agtagagaaagggtttcaccatgttggtcaggctggtcttgaactcccgacctcaggtgatccacccacctcagcctcccaaactgctgggattacaggcrtgagccaccacacccggccgagacagggttttcaggcgatctgcctgcctcgggctcccgaagtgctaggattacaggcgtgagccactgggcctggctt

SEQ ID NO: 452281 - DNA, 201 bp, Homo sapiens
ggcacccaccaccacgcccgggtaatttttttgtatttttagtagagacggggtttcaccgtgttcgccaggatggtctcggtctcctgacctcgtgatcygcccgcctcagcctcccaaagtgctgggatgacaggcgtgaaccaccgcgcccggcctcgatttactcattttttttgagagagagagagagtctcactc

SEQ ID NO: 452282 - DNA, 201 bp, Homo sapiens
atagaaggcgatggggcctgcagtggcccaacggattctagaattttcctctaggaagatgcccgggaattttaaccctgttggctcgacccagaagctcrgggtggcagggaaaggatcactgtggccttccttccttccttccttccttcctggaatttcgctctgttgcccaggctggagcgcagtgacgtaatcata

SEQ ID NO: 452283 - DNA, 201 bp, Homo sapiens
aaaattagcttcctatcgggatcccacatcccctcacaatggaggcctgacctctggggagacacaatgtcagggtcactgtgaggtttttatttatgtayttttatttttatttatttgataccgagtctcactgtgttgtccaggctggactgcattagtgtgatcctggctcactgcaacctctgcctctcgggctca

SEQ ID NO: 452284 - DNA, 201 bp, Homo sapiens
gatagaaggcgatggggcctgcagtggcccaacggattctagaattttcctctaggaagatgcccgggaattttaaccctgttggctcgacccagaagctyggggtggcagggaaaggatcactgtggccttccttccttccttccttccttcctggaatttcgctctgttgcccaggctggagcgcagtgacgtaatcat

SEQ ID NO: 452285 - DNA, 201 bp, Homo sapiens; identical to SEQ ID NO: 278778

SEQ ID NO: 452286 - DNA, 201 bp, Homo sapiens
gccttggggtggcctcaccgaacccccactccaagctccgttcaacagaaatccaggaaatgggccggagaggctgggagaccacccaggagaccagcccraggccgcgccctggatccctgagccctcacttttgtaattaagataataaacctgtgctggctgtgcgggcacacacctgtcatcccagcactttgggag

SEQ ID NO: 452287 - DNA, 201 bp, Homo sapiens
tggcgcaatctcggctcactgcaacctccgcctcccgggttcaagtgattctcttgcctcagcctcccaaggagctgggattatagggcatgcaccaccamgcctggctaatttttgtatttttggtggagaggaggtttctccatgttggccaggctggtctcgaactctgacctcaggtgatccactcacctcggcctg

SEQ ID NO: 452288 - DNA, 201 bp, Homo sapiens
tcccggcctcttccagctcctggtgccgacagccacctctgaccctcctggacttgcggccgcttccctcccaattctgcctctgctgccccacggcggtmtcctctgcatctgtgtccaaatttcccttgtctcccgaagtcgcctgtcactgcggtggtgcccgccctaatgatctcatcctaactaattacatctgca

SEQ ID NO: 452289 - DNA, 201 bp, Homo sapiens; identical to SEQ ID NO: 278779

SEQ ID NO: 452290 - DNA, 201 bp, Homo sapiens
agggtcagggcccagctctagctgaactcccccggggggaggggggaggggggaggctcaggacccagctctaggggggattgaggaggatcagggcccarctctagctgaactcccctgggggtagggaggagggtcagggcccagctccagctgaactcccctgggtggggtggggaaagagggtcaggctggggaggg

SEQ ID NO: 452291 - DNA, 201 bp, Homo sapiens
tggaatgtggcattggcgctggatggacgggtctgtgtgcgctgactgcgtgtccgatgccagggcctgtgttccccctgcacgtccccaggaaggaactrctggaccagcagaatgaggggccaacgccaggggcagcactgcccggccacagaggactgtggccccacagatgacaccctcagctaccagctcctgcat

SEQ ID NO: 452292 - DNA, 201 bp, Homo sapiens
tgtcatgtcttctccctccgtaggttggtgttaatgaaaaacccccttttcagcatggactaaatcccgctaattctatttagggagcagtgtctactccrggccgggaactgctccggtttccaaccgcagcctcccgtgagggtcccagtgtggagggccggggtcatcccctcactctgggatggctcccaacccgct

SEQ ID NO: 452293 - DNA, 201 bp, Homo sapiens
aataaacaaaaaataaataaagcccccattccctttaggatctctacttcctataccaacccactgtcccagcttggaggggcgggaccagcctcgagccrcagttgattcccagagcacagagcacaggacggaagtggttctgcatggggtatagtgaggccagggaatagcaatgcattcctgtccgtgagtcctggc

SEQ ID NO: 452294 - DNA, 201 bp, Homo sapiens; identical to SEQ ID NO: 278784

SEQ ID NO: 452295 - DNA, 201 bp, Homo sapiens
ctgtgtgcgctgactgcgtgtccgatgccagggcctgtgttccccctgcacgtccccaggaaggaactgctggaccagcagaatgaggggccaacgccagsggcagcactgcccggccacagaggactgtggccccacagatgacaccctcagctaccagctcctgcatctggaagatgaccaggaggaggaaggacggtc

SEQ ID NO: 452296 - DNA, 201 bp, Homo sapiens
gatggggcctgcagtggcccaacggattctagaattttcctctaggaagatgcccgggaattttaaccctgttggctcgacccagaagctcggggtggcarggaaaggatcactgtggccttccttccttccttccttccttcctggaatttcgctctgttgcccaggctggagcgcagtgacgtaatcatagtttgctgc

SEQ ID NO: 452297 - DNA, 201 bp, Homo sapiens
aagtgatgtttccaggccgggcgcgcttgtaataccagcatttgggaggctgaggcaggcggatcacctgaggtcgggagttcgagaccagcctgaccaaygtggagaaaccccgtctctactaaaaatacaaaattagccaggcgtggtggcgcagctactcgggaggctgaggcaggagaatcgcttgaacccgggagg

SEQ ID NO: 452298 - DNA, 201 bp, Homo sapiens
atgagcctcctgcctcaatctcctaagtagctgggactacaggcatatgccactacgcccggctaaattttttttttttttttttttgagacagagtttcsctcttgtcgcccaggctggagtgcagtgtcgcaacttcggctcaccacaacctccgcctcccaggtggaagcgattctcctgcctcagcctcccaagtag

SEQ ID NO: 452299 - DNA, 201 bp, Homo sapiens
gctgggactacaggcatatgccactacgcccggctaaattttttttttttttttttttgagacagagtttccctcttgtcgcccaggctggagtgcagtgkcgcaacttcggctcaccacaacctccgcctcccaggtggaagcgattctcctgcctcagcctcccaagtagctgggattacaggcatgagccaccacgtc

SEQ ID NO: 452300 - DNA, 201 bp, Homo sapiens
acaggcatatgccactacgcccggctaaattttttttttttttttttttgagacagagtttccctcttgtcgcccaggctggagtgcagtgtcgcaacttyggctcaccacaacctccgcctcccaggtggaagcgattctcctgcctcagcctcccaagtagctgggattacaggcatgagccaccacgtctggctaatt

SEQ ID NO: 452301 - DNA, 201 bp, Homo sapiens
ttcaatctctgggggtacaggaacccctgcaggaggtttcaaaggcaagagtttcgcagagagaaaaaaaccatgaactttgcaggttggtggcggaatcyggtgatttaagaaaacgtgtttaagcctcggccgggccgcgcctgggctgtctgcggtgctcttccggaattctctacaatatctggaagtgaccaagaa

SEQ ID NO: 452302 - DNA, 201 bp, Homo sapiens
attctagaattttcctctaggaagatgcccgggaattttaaccctgttggctcgacccagaagctcggggtggcagggaaaggatcactgtggccttcctkccttccttccttccttcctggaatttcgctctgttgcccaggctggagcgcagtgacgtaatcatagtttgctgcggccctgaccccaatggcacaaatg

SEQ ID NO: 452303 - DNA, 201 bp, Homo sapiens
tggttctggaggacccgaccgaatttgctttcgtgacagggtcaagcgccctttcctcgccggccgcagccctcaccaaaggggatttgggggcctccggrcaggggtcctgaaggttttgaattgttcaatctctgggggtacaggaacccctgcaggaggtttcaaaggcaagagtttcgcagagagaaaaaaaccatg

SEQ ID NO: 452304 - DNA, 201 bp, Homo sapiens
cgacctcctgggctcaagtgatcctcctgcctcagcctcctgagtagctgggaccacaggcatacgccagcacgcccagctaattaaaaaaaaaaaaaaamaactttagcagccaggcacggtggctcactcttgtaatcccagcaatttgggaagctgaggcggacagatcactagaggtcaggagtttgagactatccc

SEQ ID NO: 452305 - DNA, 201 bp, Homo sapiens
atcccctcacaatggaggcctgacctctggggagacacaatgtcagggtcactgtgaggtttttatttatgtacttttatttttatttatttgataccgastctcactgtgttgtccaggctggactgcattagtgtgatcctggctcactgcaacctctgcctctcgggctcaagcgattctcctgcctcagcctcccaa

SEQ ID NO: 452306 - DNA, 201 bp, Homo sapiens
ttatttttatttatttgataccgagtctcactgtgttgtccaggctggactgcattagtgtgatcctggctcactgcaacctctgcctctcgggctcaagygattctcctgcctcagcctcccaagtagctgggattacaggcacccaccaccacgcccgggtaatttttttgtatttttagtagagacggggtttcaccg

SEQ ID NO: 452307 - DNA, 201 bp, Homo sapiens
taggaaggcttgaggacttcaaaggggcggctggtgtgcggggttggggacgatggcagggacaggagggaggtgctgttggcatgtgtggaatgtggcaytggcgctggatggacgggtctgtgtgcgctgactgcgtgtccgatgccagggcctgtgttccccctgcacgtccccaggaaggaactgctggaccagcag

SEQ ID NO: 452308 - DNA, 201 bp, Homo sapiens
gcctcagcctcccaaagtgctgggatgacaggcgtgaaccaccgcgcccggcctcgatttactcattttttttgagagagagagagagtctcactctgtcrcccaggctggagtgcagtggcgtgatctcagctcactgcaacctccgcctcttgggttcaaataataattctcctgcctcagcctcccgagtagctggga

SEQ ID NO: 452309 - DNA, 201 bp, Homo sapiens
aaaaaaaggaagctgcccagaaatccaggggtgatggatagaaggcgatggggcctgcagtggcccaacggattctagaattttcctctaggaagatgccygggaattttaaccctgttggctcgacccagaagctcggggtggcagggaaaggatcactgtggccttccttccttccttccttccttcctggaatttcgc

SEQ ID NO: 452310 - DNA, 201 bp, Homo sapiens
agtgcagtggcgtgatctcagctcactgcaacctccgcctcttgggttcaaataataattctcctgcctcagcctcccgagtagctgggattacatgtgtrtgctaccacacccagctaatttttatatctttggtagagacaggcttttgccctgttggccaggctggtctcgaactcctgacctcagggcatccacccg

SEQ ID NO: 452311 - DNA, 201 bp, Homo sapiens
aaggtccaggcctcagtttccccagctgtaggtgagaggccgcggactgtacaaggtccaggcctcagtttccccagctgtaggcgggcggccaaggactkcaaggtccaggcctcagtttccccacctgtaggcgggcggccgcggactgtacaaggtccaggcctcagtttccccagctgtaggtgagaggccgcggac

SEQ ID NO: 452312 - DNA, 201 bp, Homo sapiens
ggtaagcaggctgtgcggcttaaaacaacacaaatacactctcgtctctggaggccggaagtctgaagtgaaggtgtgcaaggtgccaggcgagtaccctyccggcctcttccagctcctggtgccgacagccacctctgaccctcctggacttgcggccgcttccctcccaattctgcctctgctgccccacggcggtct

SEQ ID NO: 452313 - DNA, 201 bp, Homo sapiens
ttgtctcccgaagtcgcctgtcactgcggtggtgcccgccctaatgatctcatcctaactaattacatctgcagaaaccctatttccacataaggtcccayttgtaggtgcctggggttcacgcaaagacagatctttgagggaactcaattcaccccaccccggggagtttgcctttgtggccggcccttccccctcaga

SEQ ID NO: 452314 - DNA, 201 bp, Homo sapiens
gccctgcgtctccgtccgaaccacaagctgctgtgggtggtcacttgacagaaagacccctgcccccccttccttatttgtttatttgctttttctgttgytttagagactggattttgccctgtcacccaggctggagtgcagtggcgaaatctcggttcactgcagcctccatctcctgggctctggtgagactacggc

SEQ ID NO: 452315 - DNA, 201 bp, Homo sapiens
ctgctgtgggtggtcacttgacagaaagacccctgcccccccttccttatttgtttatttgctttttctgttgttttagagactggattttgccctgtcayccaggctggagtgcagtggcgaaatctcggttcactgcagcctccatctcctgggctctggtgagactacggccttagcctcctgaatagctgagaccac

SEQ ID NO: 452316 - DNA, 201 bp, Homo sapiens
aggtggttctggaggacccgaccgaatttgctttcgtgacagggtcaagcgccctttcctcgccggccgcagccctcaccaaaggggatttgggggcctcyggacaggggtcctgaaggttttgaattgttcaatctctgggggtacaggaacccctgcaggaggtttcaaaggcaagagtttcgcagagagaaaaaaacc

SEQ ID NO: 452317 - DNA, 201 bp, Homo sapiens
ccctggacccggcgagaaatcgaaggtcccccaaggacccacgtccaggagccaacagcctctctgtgcaaaccagacaaccctgcaggaactgtgcttgragaaaccgtggaaactgcccccaaccctcccgtctctatttctttctctgttttattatctcattcttggctgtgaggtaaacaggagaaaatgagaagg

SEQ ID NO: 452318 - DNA, 201 bp, Homo sapiens
aggtgctgttggcatgtgtggaatgtggcattggcgctggatggacgggtctgtgtgcgctgactgcgtgtccgatgccagggcctgtgttccccctgcaygtccccaggaaggaactgctggaccagcagaatgaggggccaacgccaggggcagcactgcccggccacagaggactgtggccccacagatgacaccctc

SEQ ID NO: 452319 - DNA, 201 bp, Homo sapiens
caggggcagcactgcccggccacagaggactgtggccccacagatgacaccctcagctaccagctcctgcatctggaagatgaccaggaggaggaaggacrgtctgcaagtgttcaaagtgatgtttccaggccgggcgcgcttgtaataccagcatttgggaggctgaggcaggcggatcacctgaggtcgggagttcga

SEQ ID NO: 452320 - DNA, 201 bp, Homo sapiens
caaagtgatgtttccaggccgggcgcgcttgtaataccagcatttgggaggctgaggcaggcggatcacctgaggtcgggagttcgagaccagcctgaccracgtggagaaaccccgtctctactaaaaatacaaaattagccaggcgtggtggcgcagctactcgggaggctgaggcaggagaatcgcttgaacccggga

SEQ ID NO: 452321 - DNA, 201 bp, Homo sapiens
ctcctgaaacaagctctctgatcattaactcagaacctccaggtgaagtgaaggcttccaagccttccacattctgctctcacatgacctctgtgcaggcrggagtctgcaatggcctcaaggttcccatcccagtgctgtacattcactttctcccatttactcaatcaagcactaatctaggtactgctgtgaagggaa

SEQ ID NO: 452322 - DNA, 201 bp, Homo sapiens
ctgataagtcatttgtcattactataaattttaaaatctgttaataagatggcctatagggaggaaaaaggggcctctgggaaattatgctgaagatcacmgaaaggaaaatgtaactgtaattttataatacaataccatttgaactgaaatacaacatgctttgtaattctattgccctggattgagactggattaaaa

SEQ ID NO: 452323 - DNA, 201 bp, Homo sapiens
gcaaagcaaggtaaggagatatgaagatctccaggaaggagaagtggtcagaaacagaatgagtcaggaaaggtcagggtaataaggtgttgtctgagtaraggcctttgtagtgaaaggggagcagatagatacctacgtaaggaatgcccctggcagagaaaagagcagggacaaaggccctgtgcaggaagaatatca

SEQ ID NO: 452324 - DNA, 201 bp, Homo sapiens
gaacccccagttagtgcaaaggagagtgtcttcctatggtgacttctatcattaaaaatctacttctgaacttgggctgcaaagtagcaggaagaaaaccmccagctgagttaggtttccatgagcaagagattcttacccaaggttcaatcataaattacatgacttgaaagcaaattctctaaaatgagcatgttgccc

SEQ ID NO: 452325 - DNA, 201 bp, Homo sapiens
cgaactatggaaactagtgtgtgaaagacacagaatgagaaaaatgtctggaaaaaaattactttctcctctttgaggagtttccataattacctaaagtyatcttcaaatttaaaaggacacaccattccccagtcttaggaatgtggctgccaataaccttttctctcgacataagacaagtgaaaaagagtgaggtct

SEQ ID NO: 452326 - DNA, 201 bp, Homo sapiens
caggaaaggtcagggtaataaggtgttgtctgagtaaaggcctttgtagtgaaaggggagcagatagatacctacgtaaggaatgcccctggcagagaaargagcagggacaaaggccctgtgcaggaagaatatcaaggggccagagtggcagaagcccagggaggtgggctgaggtgcagaaggtacgggcggagtgga

SEQ ID NO: 452327 - DNA, 201 bp, Homo sapiens
tttcaaagattttactaaatcatttttttaaacaaaatatacattaaatctcagatttacagaatatagaaataatttatccaaagaaatttgcatttaawattgttaatattgcacccaacagtatgtctttgacacatttgcattgtcaatctttcccacaatttgcaaaaacaggagagaaatctgaaactaacagaa

SEQ ID NO: 452328 - DNA, 201 bp, Homo sapiens
taagaacaacaaagatctagaagacagaaaacatttaaatgcattctgaagatggatttccaacctcttgcatttcctagatgctaattaaccttactcartacttcatatgattgagaatttagtagtctgaaaaataatatatgtcaaataaaaacagcactatcataacgctttgaaagtctatttgattgctgcgat

SEQ ID NO: 452329 - DNA, 201 bp, Homo sapiens
aatctcctcatatactttatccagagcttcgtcccggttggtggaggccacactggcagccataaactttttattccattctgtaaattctttttcttcartttccttgtagcaaaggcatagggttctaagagtttcatttgcaaagatctgttttatttaaaaaaataaatccaccaatgcaaagaatagttaatttat

SEQ ID NO: 452330 - DNA, 201 bp, Homo sapiens
caacctcttgcatttcctagatgctaattaaccttactcaatacttcatatgattgagaatttagtagtctgaaaaataatatatgtcaaataaaaacagyactatcataacgctttgaaagtctatttgattgctgcgattgactgatgtatcctacatctcccatagaaggtaaggttttgttcccaaaattatctctc

SEQ ID NO: 452331 - DNA, 201 bp, Homo sapiens
cagtggctcctgaaattatctcattgcaaacttaactggacaccaaggaagttttgtattatgatacctaaaaaagagttgctctaaatcttttgtgaaartcatatttaactgggggtgagggggtaggagtggcaagggagaagtctcgtcttaactttttttttctttttttttttttgagatggagttttgttcttg

SEQ ID NO: 452332 - DNA, 201 bp, Homo sapiens
cagggccgcaggtggagctgcctgccagtcccgcaccctgcacctgcactcctcagcccttgggtggtcgatgggactgggcgctgtggagcagggggtgrtgctggtcagggaggcttgggcctcgcaggagcccaccgtgtgggggaggctcaggcatggcaggctgcaggtcccgagccctgccccgcggggaggcag

SEQ ID NO: 452333 - DNA, 201 bp, Homo sapiens
atgagataccatgaaaatatgaaaacagagctccatggacagacacacttgcagaagacagcaccttgcaaccctctcttggaagttcggtggatttgctkgtacattaaaggctgtgagaagtcctgtagtaaataaactgattttattttataagttaaatgtttaaaatgctttaatatttaaaatagcttttccaaa

SEQ ID NO: 452334 - DNA, 201 bp, Homo sapiens
caagagtaagtccttacttatcaatataacatcgaatgtaaatgggctaaactgtcaatcaaaagatatagagtggctgaatagatttaaaaaaaaaaaaracccagtgatctgttgcctacaacagacactccacctggactgaaaatgaagggattgaagaagatattccatgccaatggaaagcaaaaaagaacagga

SEQ ID NO: 452335 - DNA, 201 bp, Homo sapiens
tggccaattttgatttggatgattcagacagagagggtggcatcagacctcgagtaggtgcagtgaggggttaccagaaatgaccttgatctcttaatttyacacttctgccaatactgtggggagcctggagaaagtaaccagtatgtctttgtctgcaattgaaccgcaaacacgtttttactcaattttagaaatctg

SEQ ID NO: 452336 - DNA, 201 bp, Homo sapiens
cataaggtactcttgaatccattctatttggtggtaatttgcaaatgcatgtgcttttaatggtttactttagcacacagatgacttgtgacacatccccrccaccagggttctagaacactgttcagaaccactgttacgcatttcaggaaggctgagaagaaaaacagacaagatttctcaagaagacagaaaaggcca

SEQ ID NO: 452337 - DNA, 201 bp, Homo sapiens
tgaaaatgttcctggtatctttgtagctcaagtgcaatcttatcaaaagggaaaataaaaatggaaatataaagccactcataagcactgtaatcacatakgcaatcagaacagctcattccactcaaaaaggcgttctcaaagtaggtagataagaccttacataaggtactcttgaatccattctatttggtggtaatt

SEQ ID NO: 452338 - DNA, 201 bp, Homo sapiens
tctggatgttatagattctggaaaatatgcaagtcacagagaaaatgctaaaattttgctctttaatggatgtaaacatattaaaggggggcatgaaaatygtattgacctctgaaggaagcaatgatgaatgactttgatacattcttttcatctaggtcatgtaaggaagagtttatgggggccacttatgtgcatggc

SEQ ID NO: 452339 - DNA, 201 bp, Homo sapiens
cagatatcaagccgtctggtccacaatgccccgatttcagtggaatgaatgtgccttcaaaggccagctttaaatcagacccatcgagacacacttacccrtccagttctgctgtttccacatagcagaggctgttaggctcagagctagacagcaggagaatgtcagcctgtccaaaacaaaacacacaaataacaccga

SEQ ID NO: 452340 - DNA, 201 bp, Homo sapiens
caatacttcatatgattgagaatttagtagtctgaaaaataatatatgtcaaataaaaacagcactatcataacgctttgaaagtctatttgattgctgcrattgactgatgtatcctacatctcccatagaaggtaaggttttgttcccaaaattatctctccaaagagaaggtggtgtcttatattcaaatccttgaag

SEQ ID NO: 452341 - DNA, 201 bp, Homo sapiens
ggttgcagtgagctgagatagcaccactacactccagcctgggcgacagagtgagactctgtctcaaaaataaataaataaattgcctattggtaaagacyttaaaaatctgttcctttctctgacacagataataacctcgatattattcatatctgtctggacgctgctcagcagttgataaagggctcagacacatat

SEQ ID NO: 452342 - DNA, 201 bp, Homo sapiens
cataatggcaacttctgttctgctcctattttggtgaataaaagaaataaccttcttccattgtgccagtgtcaaatgctgaagttacaattatctcttargcatgagatcaaatattcaataaaacttaataaaaatttcaattctgcttagaatatcaaagaaaaagttattaaggctaaaactcacaattaagtcttt

SEQ ID NO: 452343 - DNA, 201 bp, Homo sapiens
gatggacaaaggacagaaaagcaatcccctctaagtctttaaagatcatagctgattaatttcccaagaaactctgaacgtacctgcaaaaatgactaagmcgtggcagaaatcggtgttcctaattacacagccacgtaacaaaattttatcagcatccaaaggaaaacttgtgtttctccaaaatagtgttcctgtaaa

SEQ ID NO: 452344 - DNA, 201 bp, Homo sapiens
tcccaactgccccaccatagtgcaaggtaaggtcgtgggtgggcacaagggcaggccggggcaggtgctctcaagggtgaggctgccgtctcacgactgamggctttatataggattcacgaatactcaggaattttccctagggaagttcattctcaacctcaccattctgttctggcagggcatgttaggatcttatgt

SEQ ID NO: 452345 - DNA, 201 bp, Homo sapiens
gcttctcaaataggtgggattacgggtgcccaccaccaagcccggctaatttttaatttatggtagagacagggtttcaccatgttggctgggctggtctygaactcctggcctcaggtgatctcccctcctcagcctcctaaagtgctgggattacagacctgagccaccacgcccggccgaataataggacttttaaaa

SEQ ID NO: 452346 - DNA, 201 bp, Homo sapiens
ctggccacctttttaattcttttagagacagagtcttgctctcacccaggcttcagtacagtggcataatcgtagctcactgcagcctcaaactcctgggytcaagtgatcctcccacctaagcctcccaagcagcagggactacaggcacatgccactacactgagatgtttttttttgaaaagacagagtcttgctatg

SEQ ID NO: 452347 - DNA, 201 bp, Homo sapiens
gtactggtctgtgatttcaagtgacatcttaaattttaaattggtttctctaaaggaatggggaaaaaatgaattaaatgaacaaatttttgagttcaaartggaagttaatcatccaaagttacattagccatacctggacatgaagcctaaataattagctgtttctattttcaaactctgttcaccttggaacttcag

SEQ ID NO: 452348 - DNA, 201 bp, Homo sapiens
attcttctgtcacataccctattcttaaaaataacaacaacaacaaaagccaatttaaatactttagaagatcatacttttcaaagattttactaaatcatttttttaaacaaaatatacattaaatctcagatttacagaatatagaaataatttatccaaagaaatttgcatttaaaattgttaatattgcacccaaca

SEQ ID NO: 452349 - DNA, 201 bp, Homo sapiens
actcctggcctcaagtgattctcctgcctcagccttccaaagtactgggattacaggcgtgagccacagtgcccggtcctgatcaccttttctccatcacyttttccctaacacttagtttccctttctccatcacttcttccctaacacttagtttccctgtccccgactttctcactactaaaggacccctacattcct

SEQ ID NO: 452350 - DNA, 201 bp, Homo sapiens
tcggtgttcctaattacacagccacgtaacaaaattttatcagcatccaaaggaaaacttgtgtttctccaaaatagtgttcctgtaaacttatctagtckgttattgggttcttcacattcaataaaaccttttaaaaatataagattcacataattaatcacatacaaaagtctttctggttttaatcaataggaattg

SEQ ID NO: 452351 - DNA, 201 bp, Homo sapiens
cccctcactgcccgggctggcggggcccgctggctgctggagcgtggggcccgcggacacccacgcctacccagaactcacgctggcccgcaagcaccgcrtgcagcccgggttcccgaccacgcctctccctccacaccttcccgcaagctgagggagccggctccggccttggccagcccagaaaggggctcccacagt

SEQ ID NO: 452352 - DNA, 201 bp, Homo sapiens
atttccagacaagacattaattttcactagcaataataatttgtatatatttgttttgttgtgctttgttttttttgttttttttttgagacagggtcccsctctgtcacctgggctagagtacagcagtgccatcacgactcactgtagcctcaacgtcccaggtcaagcaatcctcccacttcagcctctccagtagct

SEQ ID NO: 452353 - DNA, 201 bp, Homo sapiens
acgactcactgtagcctcaacgtcccaggtcaagcaatcctcccacttcagcctctccagtagctagaactacaggcatgtgccaccatgcctggctaatttttttgtattttttgtagagatggggtttagccatgttgtccaggctggtcttgaactgctgggctcaagcaatccacttgcctcggcctcccaaaatgc

SEQ ID NO: 452354 - DNA, 201 bp, Homo sapiens
caagattaaaacttctttgttttatcttgacttataaacagtaatataaactaaaaaagaaacattggtggagaatgagggaaaattcccataatcccacyatccacaggagaaacaacaggtgttgacattttatcattccctccagtgccttttaaaatgtctgtatctgaaattgtttctatcaagctgaatatacat

SEQ ID NO: 452355 - DNA, 201 bp, Homo sapiens
ctcccaggttcaagtgattcttctgcctcagcctcccaagtagctgggattacaggcacacgccaccatgtctggctaatttttgtgtattttgttgagayggggtttcaccatgttggccaggttggtctccaactcttgacctcaggtgacccgcccacctcggcctcccaaagtgctgggattataggcgtgagccac

SEQ ID NO: 452356 - DNA, 201 bp, Homo sapiens
cccagccctgttatcgctactcttaatgtcaacatgaaaaaataaccaaagataaagataaaaacatacaagcaaatcccctcctttttttttttttttttgagacaaagtcttgcccaggttggagtgcaatagcgcagtctcggctcaccacaacctctgcctcccaggttcaagcgattctcctgcctcagcctcccg

SEQ ID NO: 452357 - DNA, 201 bp, Homo sapiens
aacatgaggaaactgccccaagtgacacatcgtaacccctatttcttcatatctgctatcttctacagacagtcttgcatttgcaaagatgagctattacrtaatttcatactgcaggcttttactcacttaatatcctccccatagcagatggtggtgtcttcagtcagaagttcacaagcaaatcctatattttcagca

SEQ ID NO: 452358 - DNA, 201 bp, Homo sapiens
tctctcttgatattctggaattagaagtcagttattttgtgtctagaattttaaggtctaaattcttgaggtaagaaatagttatatttctttctctctcttttttttttttttttgagatgaagtctcactctgtcacccaggctgcagtgcaatggcgcagtcttggctcactgcaacctctgcctcctgggttcaagc

SEQ ID NO: 452359 - DNA, 201 bp, Homo sapiens
ttttgacacttgaataatttcactcgactactttatgaccaacaatttctttgtgtgtgtgtgtgtgtgtgtgtgtgtgtgtgtgtgtgtgtgttcttttktgttgttggagaaagggtcttgctctgtcacccagggtggagtgcagtggcacaaacatggctcactgtagtctcaacttctcaggctcaagtaatcctt

SEQ ID NO: 452360 - DNA, 201 bp, Homo sapiens
cagggtggagtgcagtggcacaaacatggctcactgtagtctcaacttctcaggctcaagtaatccttccgtctcagcctcccacgtagctgggactaccrgtgtgtgccccatacttggctaaactttctgtatattgttattgatgtggttggaagaaatgacagcttttacaaagtacataaaggcactaatactact

SEQ ID NO: 452361 - DNA, 201 bp, Homo sapiens
ccccgtctctactaaaatacaaaaaatcagccgggcatggtggtgtgcacctgtagtcccagctactcaggagacagcagaattgcttgaacccggaaggyggaagttgcagtgagccgaaattgtgccaccgcactccagcctgggtgataaagcaaaactctgtctcaaaaataaaaaataaaataaaaaaaagaacat

SEQ ID NO: 452362 - DNA, 201 bp, Homo sapiens
gaaacatggtgggtcatgattccttcacttcttccagactacactgctaaacgtgaatgttagcaaatgctcagattattttttgacacttgaataatttyactcgactactttatgaccaacaatttctttgtgtgtgtgtgtgtgtgtgtgtgtgtgtgtgtgtgtgtgtgttcttttttgttgttggagaaagggtct

SEQ ID NO: 452363 - DNA, 201 bp, Homo sapiens
taaagcaaaatgccagagaggacagccttacctgacatagagagagatgggtaccatggtgttgagaacaatgatatagccccagaaaatgaggaatccayggtaggagggtgtatcgtcttctccatcatagaggtaccaagaggaattgcccacctgtgcttcccaataagcatggccgatggcaagaccagcagaaag

SEQ ID NO: 452364 - DNA, 201 bp, Homo sapiens
tttgaagcttggagtgcccaataatttttctattccacctaaagaggtaagattttgtattagaaaaacatacgataatattagtgcaaaagacagcaatytagatgagagatctactgagatgaaaaataaataccgtgtaaaccatgtagttcatcaagtaatcaattttagttcttttaaatctggttttcccactat

SEQ ID NO: 452365 - DNA, 201 bp, Homo sapiens
tagaagtatgcattcaaattgaactaaatacttgaaaaaatttttcattgggaaatagaaggagtgcttaatatttggggtcaccacgtgggcagaaaagrgcaaacatagcaggtctgagactgcttcctccgaaggccggcttgcaaggttcgccctgggctggtatctggtaacttagatgtttggaggatttcccag

SEQ ID NO: 452366 - DNA, 201 bp, Homo sapiens
aaagcaggggaaaatgtttcttaaattattatttttatgtgattttaaacatgtatatgcaatcaaagaataagtattagaagtatgcattcaaattgaaytaaatacttgaaaaaatttttcattgggaaatagaaggagtgcttaatatttggggtcaccacgtgggcagaaaagggcaaacatagcaggtctgagact

SEQ ID NO: 452367 - DNA, 201 bp, Homo sapiens
tcaaatacaattttcatgaaatgagaaagcaggggaaaatgtttcttaaattattatttttatgtgattttaaacatgtatatgcaatcaaagaataagtwttagaagtatgcattcaaattgaactaaatacttgaaaaaatttttcattgggaaatagaaggagtgcttaatatttggggtcaccacgtgggcagaaaa

SEQ ID NO: 452368 - DNA, 201 bp, Homo sapiens
tgtaaaataagatcacttaagaagcaatatgataagtattatgtcgtagaagttatgagcatatatttatggaaggaataaaaagtcaaccatcctagtgrtacttggagattcgcaagtgggaataaaatttccagagacaaatttaaatttctggacatggagtccaaaagtgctatatctcacaactttgtcgtggaa

SEQ ID NO: 452369 - DNA, 201 bp, Homo sapiens
acctatatttgggcgattattccttaaggtgtaatgtcataagtattgcatgacattgtaaaataagatcacttaagaagcaatatgataagtattatgtygtagaagttatgagcatatatttatggaaggaataaaaagtcaaccatcctagtgatacttggagattcgcaagtgggaataaaatttccagagacaaat

SEQ ID NO: 452370 - DNA, 201 bp, Homo sapiens
tgttggccaggctggtctcgaactcttgtcctcaagtgatctgcatgcctcagtctcccaaactgctgggattacaggtggccctcgcccagccagaattwttttttcagggcaagaaaatttcacctatatttgggcgattattccttaaggtgtaatgtcataagtattgcatgacattgtaaaataagatcacttaag

SEQ ID NO: 452371 - DNA, 201 bp, Homo sapiens
cacaaaagtccaataagaagtatccaagccaatctgttgggaaaccagagaaaaacagagcactcattttggggagttagcaagaaataaaggatctaacmatcctgaaaacagaattcagcaagttaggcatgatgtggcttgaatactggaccagaaactaaaccatccttgactcaggcaagaaatagaaaatgtgct

SEQ ID NO: 452372 - DNA, 201 bp, Homo sapiens
gacgagtttcaccatgttggccaggctggtctcgaactcttgtcctcaagtgatctgcatgcctcagtctcccaaactgctgggattacaggtggccctcrcccagccagaattattttttcagggcaagaaaatttcacctatatttgggcgattattccttaaggtgtaatgtcataagtattgcatgacattgtaaaa

SEQ ID NO: 452373 - DNA, 201 bp, Homo sapiens
atgttcacgtcattggccccatctccgatggccagcgtgatggctttcttgtacctcttcaccaggtccaccaccatggccttctgcttgggggtgacgcggcagcagatgactgcgctgcactcgcaggccaggtccacaaagtttttctgccgctgctctttcttagcttctagcctccttttactttgggtccgcatc

SEQ ID NO: 452374 - DNA, 201 bp, Homo sapiens
ccttatctgcaaacaggatgagataaaaggtgcctggcacagagtggatactcaaatgttaatttccttttcctctcttaccctcaattctgaaatgaacrtgattttcttacctgttctttgtgacctttgaaacagtgatcactagaaatgaaggcactatgttgggagaaggtacaacattcttccattaaagcaaaa

SEQ ID NO: 452375 - DNA, 201 bp, Homo sapiens
tgtcactgattatatttgacaaataaatttgattttataaccaaaacatgtatatatatgtggcgtgtgatgtacacagtgtttagtgtgtgtatgtatayacacacacacacacacacacatatatatatatatatattttttttttttttttttttgagatggagtctcactctgttgccaggctggaatgcagtggca

SEQ ID NO: 452376 - DNA, 201 bp, Homo sapiens
gagaagtggtcagaaacagaatgagtcaggaaaggtcagggtaataaggtgttgtctgagtaaaggcctttgtagtgaaaggggagcagatagatacctaygtaaggaatgcccctggcagagaaaagagcagggacaaaggccctgtgcaggaagaatatcaaggggccagagtggcagaagcccagggaggtgggctga

SEQ ID NO: 452377 - DNA, 201 bp, Homo sapiens
ccaaaacatgtatatatatgtggcgtgtgatgtacacagtgtttagtgtgtgtatgtatatacacacacacacacacacacatatatatatatatatattwtttttttttttttttttgagatggagtctcactctgttgccaggctggaatgcagtggcacgatctcggctcactgtaacctctgccttccaggttcaag

SEQ ID NO: 452378 - DNA, 201 bp, Homo sapiens
aaaacatgtatatatatgtggcgtgtgatgtacacagtgtttagtgtgtgtatgtatatacacacacacacacacacacatatatatatatatatattttwtttttttttttttttgagatggagtctcactctgttgccaggctggaatgcagtggcacgatctcggctcactgtaacctctgccttccaggttcaagca

SEQ ID NO: 452379 - DNA, 201 bp, Homo sapiens
aagaagagaactaggggaaaccaaatttcagtgtttaaagtgtaagaccctaaataggcccttgactctgagataactttgacttaaaaaaaattgtgacaaaaaaacaaagtttaccatcttacctatttttgtttctttattttattttcattataatttttttgagagagggtctcactctgtcacccaggctggaga

SEQ ID NO: 452380 - DNA, 201 bp, Homo sapiens
tgaggcagagtctcgctctgtcaccaggctggagtgcagtggtgttatctcagctcactgcaacatccacctcctaggttcaagctattcttccacctcakcctcccaagtagctgggactacagacgggcaccaccatgcccagctaatttttgtatttttagtagagacagggtttcaccatgttggccaggatggtct

SEQ ID NO: 452381 - DNA, 201 bp, Homo sapiens
gtggtgttatctcagctcactgcaacatccacctcctaggttcaagctattcttccacctcagcctcccaagtagctgggactacagacgggcaccaccaygcccagctaatttttgtatttttagtagagacagggtttcaccatgttggccaggatggtctcaatctcttgacttcatgatccacccgcctcagccccc

SEQ ID NO: 452382 - DNA, 201 bp, Homo sapiens
tcctaggttcaagctattcttccacctcagcctcccaagtagctgggactacagacgggcaccaccatgcccagctaatttttgtatttttagtagagacrgggtttcaccatgttggccaggatggtctcaatctcttgacttcatgatccacccgcctcagccccccacagtgctgggattacaggcatgagccaccac

SEQ ID NO: 452383 - DNA, 201 bp, Homo sapiens
tggcctcccaaagtgctgggattacaggcatgagtcaccgcacccggccaagactgagctcttttaatgcccatataccgagggtagaaatctacaaaacrtatgacctgcaaactgaatgatcaggaaaggatcctaaccaccagaatgggcaggcagagttgtaaaaaaacaggggatgagagtttccacccactacat

SEQ ID NO: 452384 - DNA, 201 bp, Homo sapiens
tgcactagaggattaagtatctagtatcccttttccacatcaatttaattctcattttcaagttaaaagtgagtgactaagacaaatcattgaaaggccgttaagagaaaaaaaatgaagataccttctattcaaatcattttataggaatcatcaatttaagagccacctgggaagatgattcctctctctataaaggta

SEQ ID NO: 452385 - DNA, 201 bp, Homo sapiens
tactaaagtaaactcattaagcattaagcatttatttgtctgttgctactttttttttttgagacggagtcttgctctgtcacccaggcaggagtgtagtrgcactatcttggctcactgcaacctctgcctcccaggttcaagcaattctcctgcctcagtctcccgagtagctgggattccaggcacatgccaccatgc

SEQ ID NO: 452386 - DNA, 201 bp, Homo sapiens
attttgtgtgagtgtccccgtcttatcagagaagatataatggatctgcccgagctgttcattgagtgtggtggttctagcttttgcgggtgtgtccttckcagcatagtacatttgcaggtcccagttgatgaagtgactctgtccaagacgaatcacttccacgctaggaagacagaagattattttccgtagagagct

SEQ ID NO: 452387 - DNA, 201 bp, Homo sapiens
ttcttaccaaacttcccatgagcttagaattttgcaggaaacgtgctgttgggaaacgctttggtttctgtgagggacagagttgggaaaggactatattmtttataccttatcactttctgatggccagatggtcattgacaggaatcgaatggcaacgacgggtagtaagcacacagcaacagtcaggatgatagttaa

SEQ ID NO: 452388 - DNA, 201 bp, Homo sapiens
cccgatggtcccctgagaaacaaacaggacaaaacaaattgattctacacctatgtccagaggcccctccttacctggctttgcttatatagtgatggtgrtaagaccatatacggcctggacaggctaaaatatttatctggcactttacagaaaacgttagatgacccctggtctagatattcaaataccagtggctgt

SEQ ID NO: 452389 - DNA, 201 bp, Homo sapiens
caaaggcaaggtttcaattatgcaaaaaccaccttaggattttagcacattcttaaatgtcaagaggctcacaactgtcttaaataaaaagctcccccccyttttttttttggaaacatatatgaccatatatgggtctcactctgtcacccgggctggagtgcagtggcttgatctcagttctctgcaacctccacctcc

SEQ ID NO: 452390 - DNA, 201 bp, Homo sapiens
atttaaccagagacaaatcagcagcggtgagaacaaagcctttcccttcggcaacttaagttggcacagcgatatatggcataatattgacagcaaacgcrtttccagcagagaaaaggaacaaaataataaaaagtggtaaagttcccacaagtaagacactcatatctagagcaaacaccttgatatttttatcattaa

SEQ ID NO: 452391 - DNA, 201 bp, Homo sapiens
gtgattttcatcttcacttggtggtctgttatgtgcctgcattgcagatatgattttgattcataagcatagctttgcttttctcagaaatcttttcctgstgagtcctcccttccctgccatcaagtacagaagagagcactcagaggtgctcaaaaaataaaagagcatgtgttgtttaaaataaaagactgctacaaa

SEQ ID NO: 452392 - DNA, 201 bp, Homo sapiens
aagtaaaagttcctagaaaaagcaaaataggactataattcatattaatttgctagcgatattacaggctttttacggattttttagtaggtgaaccgagtttttttttttttttaatgagacagagtttcactcttgtcacctaggctggagtacagtggcgtgatcttggctcactgcaacctctgcctcctgggttca

SEQ ID NO: 452393 - DNA, 201 bp, Homo sapiens
ccttctaatgcaatttactctcaaatggttcagaaaacaataacctgtatgtatgtgtgtgtacatatatatgtgtgtatatatataggtatatataatgraattacatatatataattagatatatattagatctatatatagagatatgtaaatgaaatttcattatgttaacaattggtggatatggaagagtatgag

SEQ ID NO: 452394 - DNA, 201 bp, Homo sapiens
cggcctcccaaagggctgggattacaggcatgagccactgcgcctggcctgagctgagaaggaatggagaaaaatggcctctgaagggccccaagtttccmtaaaagtaaaatctgctcaaatttaggctgcaccttgattacttggaactgcctgttgttgtcttgcctcatttaaacatgaggaaactgccccaagtga

SEQ ID NO: 452395 - DNA, 201 bp, Homo sapiens
agactctgagggggacttaccaatgatagacattcgcttccggtcactgttgaagtccaaaatggcaagaacattgtaagtcctttcagtgcccagttcaytgatggtgatggtgttctgggtcctggcgaggaaggcaaagccaaagttcctggcagcgtttaccagggcaccttcatcgggagaggctgcctggtagtt

SEQ ID NO: 452396 - DNA, 201 bp, Homo sapiens
aattttactttgaagtaatatactaacagaatttaaaaagagatcattaaacatgacagattctgtacaaatacactttagagaggggattaaatgtcacttttttttttttgagacaaggtctggctttatcatccaggctgggatgcagtgatgcaatcccggctcactgcaacctctgccttccaggctgaagccatc

SEQ ID NO: 452397 - DNA, 201 bp, Homo sapiens
ggtgcgatctcggttcactgcaacctctgcctccctggttcacgccattctcctgcctcagcctcctgagtagctgggattacaggcgggtgccactgcayctggctaatctttgtatttttggtagagacggggtttcaccatgttggccaggatggtctcgatctgttaacctcgtgatctgccacctcaccctcccaa

SEQ ID NO: 452398 - DNA, 201 bp, Homo sapiens
gattaatgcaataattgtaatacatccctcactgttaaccagattttaaatcaaggtagatggcaagcatgataatcagtctagatctgtgtaagggacasagaaagcgttcagtaagtgtgcctaaggagggtgtaatagttaaacctgtatatttttattggttaaaaattcaatcatagtggagaaggcttgtagata

SEQ ID NO: 452399 - DNA, 201 bp, Homo sapiens
ggggacttaccaatgatagacattcgcttccggtcactgttgaagtccaaaatggcaagaacattgtaagtcctttcagtgcccagttcactgatggtgayggtgttctgggtcctggcgaggaaggcaaagccaaagttcctggcagcgtttaccagggcaccttcatcgggagaggctgcctggtagttgagctgacct

SEQ ID NO: 452400 - DNA, 201 bp, Homo sapiens
gtatttttagtggagacggggtttcaccacgttggccaggctggtcttgaactcctgacctcaggtgatacacccgccttggcctcccaaagtgctgggaytacaggcatgagacaccaaatactcaatcagttgaaccgcttctgccatcttggctagacaagatgtgacctatagtcagctctgtcatcctgtcacata

SEQ ID NO: 452401 - DNA, 201 bp, Homo sapiens
ggttaaaaattcaatcatagtggagaaggcttgtagataccaccttaaccaagtgatcaaagttaacatccccattaatgagacaaaccaataatatatamcttctggctaggcagggtggctcacgcctgtaatcccagcactctgggaggccaaggcgggccagtcacctgaggtcggcagttggagaccagcctgacc

SEQ ID NO: 452402 - DNA, 201 bp, Homo sapiens
catcaccacgcccagctaatgtttgtattttttgtagagacaggatctcaccatgttgcccaggctattttttctttaccatagctatattctccttattaaaaaaaaaaagaaaaaaaaaccacacaggctgggtgcagtggctcacgcctgtaatcccagcaatttgggaggctgaggcaggtagatcatgaggtcagg

SEQ ID NO: 452403 - DNA, 201 bp, Homo sapiens
gccagggctggtctcaaactcctgacctgaagcaatttgcctgcctcagcctcctaaagtgctgggattacaggcatgatccaccatgccctgccttcagktatcttcatagtaagctcttactgtctaaaaggaacataacaaatatgtgtgccaatgaattcaacccagtcacagaaatcctcttttctcttttttttt

SEQ ID NO: 452404 - DNA, 201 bp, Homo sapiens
tcccagcaatttgggaggctgaggcaggtagatcatgaggtcaggagatggagaccatcctggctaacacagtgaaactctgtctctactaaaaacacagaaaattagccaggcatggtggcacgtgcctatagttccagctactcgggaggctgaggcaggagaatcacttgaacccagaaggtggaggttgcagtgagc

SEQ ID NO: 452405 - DNA, 201 bp, Homo sapiens
ctgaggcaggagaatcacttgaacccagaaggtggaggttgcagtgagccgagatctcgccactgcactccaccctggtgacagaccgagactccatttcaaaaaaaaaaaaaaaaaaaaagaaagaaagaaaagttgaaacaaaccaaccaaccttagtttgatcactatccgatatcttaatgtttaaaagttaaataa

SEQ ID NO: 452406 - DNA, 201 bp, Homo sapiens
cagccatttctcctctctagcacgttgggcctcactggccgtgggtgcatgactcacttttgatcatgttcacgtcattggccccatctccgatggccagmgtgatggctttcttgtacctcttcaccaggtccaccaccatggccttctgcttgggggtgacgcggcagcagatgactgcgctgcactcgcaggccaggt

SEQ ID NO: 452407 - DNA, 201 bp, Homo sapiens
acaataataacaacattacattacctgcgcagagtagccattgaagaaggagtaccagaaatgaaccaaagtaaaggcaaagtttttgtaaaagaagtatygtaggaacttgcacatccttatgtaagaccatcggccatgcaccagcagtagcctctgcagatatcggaactgagcaaaggaatagtcactcgacatgac

SEQ ID NO: 452408 - DNA, 201 bp, Homo sapiens
tggagtgcaatggcacaatttcagctcactgaaacctctgcctcctgggctcaagcgattctcttggctcagcctcccaagtagctgagactgtgggcacrtgccaccactccaggctaatttttgtatttcgcatttaatctttaagcattctttatcacattccaaaggtaataagcatttttgagtcaaaaatatgtt

SEQ ID NO: 452409 - DNA, 201 bp, Homo sapiens
attctatctcaaaaaaaaaaaaagaagagaaaagaaaagagtgtggtgttgatggtatagtggtgagcatagctgccttccaagcaattgacccgacttcrattcccagccaacgcagcaggctgacctttcgtcctggctaacatggtgaaaccccgtctctactaaaaatacaaaaaaaattagccaggcatggtggcg

SEQ ID NO: 452410 - DNA, 201 bp, Homo sapiens
atattccactgcactccagcctggctgacagagcaagatgcagtctcttttaggaaaaaagaaaaaaccaataagaagaggaataaatctcacagccagayacacaaaagagtacatatgctacatgattccactgaaataagccaaaaaactgacagagctaacctgtgttattcgtagtcaggaaagtacttttcttgt

SEQ ID NO: 452411 - DNA, 201 bp, Homo sapiens
aaatcgtattgacctctgaaggaagcaatgatgaatgactttgatacattcttttcatctaggtcatgtaaggaagagtttatgggggccacttatgtgcrtggcagggaaatacttgccacccccttttgtttttgcttatgtccaacttgcctccctgctgtgttccttctcagtgacccatcacttgctccatgctgg

SEQ ID NO: 452412 - DNA, 201 bp, Homo sapiens
cagcaggtggcagaggcaaggccagatatcaagccgtctggtccacaatgccccgatttcagtggaatgaatgtgccttcaaaggccagctttaaatcagrcccatcgagacacacttacccgtccagttctgctgtttccacatagcagaggctgttaggctcagagctagacagcaggagaatgtcagcctgtccaaaa

SEQ ID NO: 452413 - DNA, 201 bp, Homo sapiens
ttaagaagtggttaattggctttaagtatttttttccgccaaaaaaaaaaaaaaaagtgtgatagatttccaacagtcaattgcctgatctatgaagcaawgacagccctagttttcagtctcatgatttccgctctctgtaaagcagtgtatgcacatctggagcgtgaggcgcgaggagcagagggagcaatgtcccga

SEQ ID NO: 452414 - DNA, 201 bp, Homo sapiens
gattacagatgtgagttaccacacccagctaagtttgattttttaatagaaaactacatttataaagttaatttgaaatgttactatctcataattcactrttagcttaaaaccatcagttcctctagaaaagtgttgccttcaacaaaactggtaagtcattatctacattgaatgtaatagtgaaataaatataaaaag

SEQ ID NO: 452415 - DNA, 201 bp, Homo sapiens
cctactttactgctctttccaccccaactattgcaaagcaaagggagggtcagcagttaacatacagctttcatgcaaacttaacagacagcatcagagartaagttcagaatcccttgcagaaagaataaaagtgaaacttacatccagggcatcctgtgtttcttgcttagtaggattcattcgatgtaaccgttcata

SEQ ID NO: 452416 - DNA, 201 bp, Homo sapiens
tccttcctttgcactacaacttgaagttagtggaggtcttggggaccacacacatagtaagactacaacctagtatggttatgtagcttgctcaaggccaytggaagagagctaagccattcccctgcctcagtcctatagaccttgaagacccacatgctgggagagggcaccatggtgatatcccaggaagtcagtggc

SEQ ID NO: 452417 - DNA, 201 bp, Homo sapiens
gcctcaaatggctcttaaacctgtgagaagatatttgggttcctaaaagagaaatgcaattcttcactgagatagtagtttttatcctataatagcaaaayattggcacatggtaatgcttgggatgacattctaggttcaaaagagagcagagaaacagacactctgaggtagcctttatggagagtaatttggccagat

SEQ ID NO: 452418 - DNA, 201 bp, Homo sapiens
aagtccaatcacctatgaactctccactaagcattattccctcaaaccaattctaaaatacacaagccattgttaaagctgaggtcaaagcttttaatggraaagagtatctggcaattttcccatgatgaacgattcaaacattttctttttttttctttttctttttcttttttttttttttgagatgaagtctcactc

SEQ ID NO: 452419 - DNA, 201 bp, Homo sapiens
agtattggtttgtgaaaattcattgagttatatacttatgatacgtacatatctctgtatacacatgttgtacttcaataaaaagtttaaaaaatactctscctacccaagatcttctatttttctactctagttattttgtctcaaaatagaaggaaaagcatttccgtggccagatgactttggacagaaagagcattt

SEQ ID NO: 452420 - DNA, 201 bp, Homo sapiens
agctgccttggggtgtaatgacataagcacgaacctgacaactttataacttgttccaacaaactgtgatacaagtccaatcacctatgaactctccactragcattattccctcaaaccaattctaaaatacacaagccattgttaaagctgaggtcaaagcttttaatggaaaagagtatctggcaattttcccatgat

SEQ ID NO: 452421 - DNA, 201 bp, Homo sapiens
actctgcctacccaagatcttctatttttctactctagttattttgtctcaaaatagaaggaaaagcatttccgtggccagatgactttggacagaaagarcatttagttttccaaaatactttgaccaggatgaaggccacagatgcatgagcagctgtttatccgccagcctcacttggaatggttggtgctctggggt

SEQ ID NO: 452422 - DNA, 201 bp, Homo sapiens
cagaccaagggagctgccttggggtgtaatgacataagcacgaacctgacaactttataacttgttccaacaaactgtgatacaagtccaatcacctatgractctccactaagcattattccctcaaaccaattctaaaatacacaagccattgttaaagctgaggtcaaagcttttaatggaaaagagtatctggcaat

SEQ ID NO: 452423 - DNA, 201 bp, Homo sapiens
aaattgaaggtgtaaaaacaaactaaaaaaacaaacaaaaacaaagcaaccttcctaagaaaactctttatttatggcacatttagaggcaaccagaaagwccttctttttctttcacacactaatttgtggctcatgaaattgatgtaatcaaagaaagatgctcaaaccacaaatcccacctctcagttctcatcaacc

SEQ ID NO: 452424 - DNA, 201 bp, Homo sapiens
gaagggctaattatacatcctggttgctgctctcctggggccaatggccagtgttaacagggaaggctgccatgtttcacaattactgcaaaccaacacasctaaaaactttttccctaaaggatgaactatttaatttaccaagacaaaaatgcaagtacaaaatcaaggatgttaaaaatacacttttcttgtgtattt

SEQ ID NO: 452425 - DNA, 201 bp, Homo sapiens
tgaggcaggagaatcacttgaacccagaaggtggaggttgcagtgagccgagatctcgccactgcactccaccctggtgacagaccgagactccatttcaaaaaaaaaaaaaaaaaaaaagaaagaaagaaaagttgaaacaaaccaaccaaccttagtttgatcactatccgatatcttaatgtttaaaagttaaataat

SEQ ID NO: 452426 - DNA, 201 bp, Homo sapiens
gctggagagataagaccaattataatcagcaagacatggccaggagctaaattataaggaagaaactgctactgagggggatcaggaaaggatgcagaagratgtgctggaaaaacagaggagggtttctcagaaaaagcatcttccgtccaaagaaacagtgtttgtacaggatgaaaagtctgaggaggtcatcttggg

SEQ ID NO: 452427 - DNA, 201 bp, Homo sapiens
gaggcaggagaatcacttgaacccagaaggtggaggttgcagtgagccgagatctcgccactgcactccaccctggtgacagaccgagactccatttcaaaaaaaaaaaaaaaaaaaaagaaagaaagaaaagttgaaacaaaccaaccaaccttagtttgatcactatccgatatcttaatgtttaaaagttaaataatg

SEQ ID NO: 452428 - DNA, 201 bp, Homo sapiens
ttccaaaagaaagctttgcaaaatattctgcaatttattactgatatcctcagtttttaaaaaccccctttttaagcccataaatatttatatgctttaaraaatgagagtagggaatcaaatcatttggtactatgggaagctgctaaaataatatttgatagtaaaagtatgtaatgtgctatctcacctagtagtaaa

SEQ ID NO: 452429 - DNA, 201 bp, Homo sapiens
aggcaggagaatcacttgaacccagaaggtggaggttgcagtgagccgagatctcgccactgcactccaccctggtgacagaccgagactccatttcaaaaaaaaaaaaaaaaaaaaagaaagaaagaaaagttgaaacaaaccaaccaaccttagtttgatcactatccgatatcttaatgtttaaaagttaaataatgg

SEQ ID NO: 452430 - DNA, 201 bp, Homo sapiens
ggcaggagaatcacttgaacccagaaggtggaggttgcagtgagccgagatctcgccactgcactccaccctggtgacagaccgagactccatttcaaaaaaaaaaaaaaaaaaaaagaaagaaagaaaagttgaaacaaaccaaccaaccttagtttgatcactatccgatatcttaatgtttaaaagttaaataatgga

SEQ ID NO: 452431 - DNA, 201 bp, Homo sapiens
gtaatcccagcactttgggaggctgaggcgggtggatcacaaggtcaggagtttgagaccggcctggccaacatagtgaaaccccgtctctactaaaaatrtaaaaaattagccacgtgtggtggtatgcacctgtaatcccagctacttgggaggctgaggcaggagaatcgcataaacccgggaggcagaggttgcagt

SEQ ID NO: 452432 - DNA, 201 bp, Homo sapiens
gtgatccacctgccttggcctcccaaagtgctaggattacacacatgaacaactgtgcctggccgaaatagatatatttcttcctgaagatttctaagggrcagagaaataaagtagtggggagagaggggtggggaggagggagagaatggagggagagaatggggggagagaagagtggggagagaagagtggggagag

SEQ ID NO: 452433 - DNA, 201 bp, Homo sapiens
acgagaattgcttgaacctgggaggtggaggttgcagtgagccgagatcatgccattgcactccagcctgggtgacaagagcaagactgtctcaaaaacamaaaacaaaacttgaaggtgtagtccccaaggtccctttcaagggatcctttcctggtactttatggttaaaagccgaaagcaatttcttctctaagctcc

SEQ ID NO: 452434 - DNA, 201 bp, Homo sapiens
ttagtagagatggggtttcaccatgttggccaggctggttttgaactcctgacctcatgatctgcccgcctcggcctcccaaagtgctgggattacaggtrtaagccaccgcgcccagccctgctggaaggaactttgtacatccaaccttcttactacaacaccgaggaaggtggttctcagagagggacccagactggg

SEQ ID NO: 452435 - DNA, 201 bp, Homo sapiens
ggctgaggcagatggatcacttgaggtcaggggttcgataccagtctggtcaacatggtgaaaccccatctctacaaaaaagcaacaacaacaacaacaamaattagccaggcatggtggtgtgtgcctgtaatcccagctacccaggaagctgagggaggagaatcatgtgaacctgggaggcggaggggttgcagtgag

SEQ ID NO: 452436 - DNA, 201 bp, Homo sapiens
tggagtgcagtggtgcaaacccagcccacaacagcctcgacgtacccaggctcaggtgatcctacctcagcctctcaagtaactggaactacaggcacacrcaattttgctcactgcaacctccacctcccgggttcaagcgattctcctgcctcagcctcctgaatagctgggactagaggcatccaccaccacgcccag

SEQ ID NO: 452437 - DNA, 201 bp, Homo sapiens
gcatagtggcatgtacttgtaattccagccactaaggaggctgaggcaggggactcacttgaacccagcaggtggaggttgcagtgagctgagatcgcgckactgcactccagcctgggaaacagagcaagactctgtctcaaaacaaaacaaacaaacaacaaacaaacaaacaaaaatcaaagcaaagcaaggtaagga

SEQ ID NO: 452438 - DNA, 201 bp, Homo sapiens
cacagtgctgggattacaggcatgagccaccacgcctggccagcccttttttttttttttttttaactgagcgacatgtaattttactatgtctcgattcrtccaccatgggggtaccatgtaattcatcatttttcaaagacagtcaaaggaagatacagttgaaaatgtatacacagcaacagaagaaaggcaatctta

SEQ ID NO: 452439 - DNA, 201 bp, Homo sapiens
gaaagtcattcactagaagctataaacgcacttcctaaatccggccatctagcaatcatatacaaatgctagagggcaaactatttaaccagagacaaatsagcagcggtgagaacaaagcctttcccttcggcaacttaagttggcacagcgatatatggcataatattgacagcaaacgcatttccagcagagaaaagg

SEQ ID NO: 452440 - DNA, 201 bp, Homo sapiens
tttctgagagaagagatggcaagaaccagcccaatcctttcttgacaacattaaattgctcaatcaactgggcctgaagcctactaatgattaatgatgaygcactactgtagagatgttttgagtcacagctttctgttccttgtagctcaaaggatcctgctacagaaggtgacatttttcttaaataaagaaaaaaaa

SEQ ID NO: 452441 - DNA, 201 bp, Homo sapiens
agacgaatcacttccacgctaggaagacagaagattattttccgtagagagctcggatacgagtggcaagtagtagagattttattctcattgtacagacragagcaagctgcttatttactgctatggtctgaatgttagaatccccctccaaattcatatgttgaaacccaatccccaattcaacagtattgaggtggg

SEQ ID NO: 452442 - DNA, 201 bp, Homo sapiens
gcttaaaggtcttacctctattttgttgtggttgtgttgagaggcatcccgatggtcccctgagaaacaaacaggacaaaacaaattgattctacacctaygtccagaggcccctccttacctggctttgcttatatagtgatggtgataagaccatatacggcctggacaggctaaaatatttatctggcactttacaga

SEQ ID NO: 452443 - DNA, 201 bp, Homo sapiens
gtgtctatataatttatcattatgaccatttgtgataaaatgactagctttccttgatacaggacaaacttgctgtgacaaagctggcacaaactgcatcraaggattctgcaaaggaacctacaagccattctggcttgttcccatgaaattcacattaattatgctcctttaaatggaaaaaggcaccttaaagagatc

SEQ ID NO: 452444 - DNA, 201 bp, Homo sapiens
atgaagtgaaggcagactacgctttattacagaaacaccaaaagaactccttttgctctttctataaagtgcatgtgtgtctatataatttatcattatgwccatttgtgataaaatgactagctttccttgatacaggacaaacttgctgtgacaaagctggcacaaactgcatcaaaggattctgcaaaggaacctaca

SEQ ID NO: 452445 - DNA, 201 bp, Homo sapiens
cctacacatttagtttttatgcatattccttctctggaaatttcatacctgctacatatgaaacattaaggttgagaaaagagagggacttatgtatgcckcactgactgaagtaaaaagtggaagatgtagtgaagtggatgaagtgagggaatgaagtgaaggcagactacgctttattacagaaacaccaaaagaact

SEQ ID NO: 452446 - DNA, 201 bp, Homo sapiens
atatagtaattaatcagattacttgaagcccaaaactactaaagtaaactcattaagcattaagcatttatttgtctgttgctactttttttttttgagayggagtcttgctctgtcacccaggcaggagtgtagtagcactatcttggctcactgcaacctctgcctcccaggttcaagcaattctcctgcctcagtctc

SEQ ID NO: 452447 - DNA, 201 bp, Homo sapiens
gcatgaaaaaggttcaatttaagggagattctccaccgctggctttgaaggtgaagtggaccagctggcagggaatgaggacagtctctaggagtggaggrcaacccagttgataaagaataaagaaatggggacttcagttctacaaccacagagaactgaatcctgctgcaaccacacgtgaacgtggaaaaagacact

SEQ ID NO: 452448 - DNA, 201 bp, Homo sapiens
ttagagaagtcatgatcattcttaattatgccccaactgtaaggagacacagccccaaaactacaaatatagaagaaataaattgtcttttcagaactagwtttttattcatttaagagctctacttagtaaataacaataataacaacattacattacctgcgcagagtagccattgaagaaggagtaccagaaatgaac

SEQ ID NO: 452449 - DNA, 201 bp, Homo sapiens
ctgttaccctaatttggattgctgaccttaagagaagataactgcgccaggcacggtagctcatgcttgtaatcccaacactttgggaggccgaggtgggyggatcacctgaggttggaagttcgagaccagcctgaccaacatagagaaatgccgtctctactaaaaatacaaaattagccaggtgtggtggcgcatgcc

SEQ ID NO: 452450 - DNA, 201 bp, Homo sapiens
tttcatataaacaaaactatatctgtgtttgagaaattctcagtgctttatatcaacaaattaaatgtttgtgttaaaatgatatatgtgacaaggctacrtgtaacactttcatgtgatagaaaaatgagtcatgaaattttggagtggaagggaccttaaatatcttgtccaatctcttcatgttacaaataaggaaat

SEQ ID NO: 452451 - DNA, 201 bp, Homo sapiens
ctcaccatgttgcccaggctattttttctttaccatagctatattctccttattaaaaaaaaaaagaaaaaaaaaccacacaggctgggtgcagtggctcmcgcctgtaatcccagcaatttgggaggctgaggcaggtagatcatgaggtcaggagatggagaccatcctggctaacacagtgaaactctgtctctacta

SEQ ID NO: 452452 - DNA, 201 bp, Homo sapiens
gtcattcctgctgtttttattttattttattttgttttttgagacagcatctcactcccactgcctaggctggagtgcagtggcacaatctctgctcactrcagcctcaacctccaggattcaagtgatctgcccatctcagcaccacccacagcccccaagtagctgggactacgcaactcgctgccaagccaccaaaca

SEQ ID NO: 452453 - DNA, 201 bp, Homo sapiens
tctcaccatgttgcccaggctattttttctttaccatagctatattctccttattaaaaaaaaaaagaaaaaaaaaccacacaggctgggtgcagtggctyacgcctgtaatcccagcaatttgggaggctgaggcaggtagatcatgaggtcaggagatggagaccatcctggctaacacagtgaaactctgtctctact

SEQ ID NO: 452454 - DNA, 201 bp, Homo sapiens
gtagctcatgcttgtaatcccaacactttgggaggccgaggtgggcggatcacctgaggttggaagttcgagaccagcctgaccaacatagagaaatgccrtctctactaaaaatacaaaattagccaggtgtggtggcgcatgcctgtaatcccagctactcaggaggctgaggcaggagaatagcttgaacctgggagg

SEQ ID NO: 452455 - DNA, 201 bp, Homo sapiens
gaacatggcaaatgcatcactgtggttcttttttcctaagaacatagttaatatttcgccaggtgtggtggctcatgcctgtaatcctaacactttgagargccaaggtgggtggattgccagagctcaggagttcgagaccagcctgggcaacatggtgaaaccccgtctctactaaaatacaaaaaatcagccgggcat

SEQ ID NO: 452456 - DNA, 201 bp, Homo sapiens
tttcttctatttccctttcaaaagtaaaagttcctagaaaaagcaaaataggactataattcatattaatttgctagcgatattacaggctttttacggawtttttagtaggtgaaccgagtttttttttttttttaatgagacagagtttcactcttgtcacctaggctggagtacagtggcgtgatcttggctcactgc

SEQ ID NO: 452457 - DNA, 201 bp, Homo sapiens
cagtgcagtggcacgatcatggctcactgaagcctcaatctccccaggctcagtgatcctcctacctcatcttcccatgtagctgggattactggtacacrccaccacacctggctaattttttgtattttttgtagagacggggtttcaccatgttgctcaggctggtctcaaactcctggactcaagtgattcgcctgc

SEQ ID NO: 452458 - DNA, 201 bp, Homo sapiens
cacgactcactgtagcctcaacgtcccaggtcaagcaatcctcccacttcagcctctccagtagctagaactacaggcatgtgccaccatgcctggctaayttttttgtattttttgtagagatggggtttagccatgttgtccaggctggtcttgaactgctgggctcaagcaatccacttgcctcggcctcccaaaatg

SEQ ID NO: 452459 - DNA, 201 bp, Homo sapiens
tgttttttttttaaatgcacctggcatataacagtgcttaataaaaattttaagacaacttaagaaaaacaagcccctctaagattatctacattgacttkgtgcaatccctctcattatgtattggtgaactcagaggaacaaaatgtttcaagtctaagtcacataatcagttgataaatctccaaagcaaacccgtcc

SEQ ID NO: 452460 - DNA, 201 bp, Homo sapiens
ggtggatcacctgaattcaggagtttgagaccagcctggtcaacatggtgaaaccctgtctctactaaaaatacaaaaattagctgggcgtggtggctggyaactgtgatcccagctactcagggggctgaggcaggagaatcgcttgaacccaagagaaggaggaggaggttgcagtgagccaagatggtgccactgcac

SEQ ID NO: 452461 - DNA, 201 bp, Homo sapiens
aattagagaatgattagttttgtctgggtcttaaaagtaacgaatgtgaagatagacaagatcatttagaaaagatatgttggagaacacaacctatcatkgctcagaccctgaaaagtggctgcaatgctgcggcgttccaactaaaaagaagcttcaaaaatcctgccctagttacagaacacaaggtctggcaaattc

SEQ ID NO: 452462 - DNA, 201 bp, Homo sapiens
cttaagctatgtaatccgcacggcagacactaaaggttgattctggcgctaactagtgtgtgtagagttccctcggttacagcaacagttcttgcacagcwaaactcatgctctctggataactggatgctttgccacaattaggaaaaaaaatttttaagtaggccttttaaaatgtaaaaacagttcacaaaaataact

SEQ ID NO: 452463 - DNA, 201 bp, Homo sapiens
aataacatactgtttggggaagatatcttacttagcatgaaacaacttccaacaaggctgaactggaaaactggaatgcttatagaagatattcaacagattttttttttttttttttttttttttttagacagcgtctcactgtatcacccaggctggagtgcagtggtgccattgtggctcactacaacctccacctcc

SEQ ID NO: 452464 - DNA, 201 bp, Homo sapiens
ataacatactgtttggggaagatatcttacttagcatgaaacaacttccaacaaggctgaactggaaaactggaatgcttatagaagatattcaacagattttttttttttttttttttttttttttagacagcgtctcactgtatcacccaggctggagtgcagtggtgccattgtggctcactacaacctccacctccc

SEQ ID NO: 452465 - DNA, 201 bp, Homo sapiens
taacatactgtttggggaagatatcttacttagcatgaaacaacttccaacaaggctgaactggaaaactggaatgcttatagaagatattcaacagattttttttttttttttttttttttttttagacagcgtctcactgtatcacccaggctggagtgcagtggtgccattgtggctcactacaacctccacctccct

SEQ ID NO: 452466 - DNA, 201 bp, Homo sapiens
ctgaactggaaaactggaatgcttatagaagatattcaacagattttttttttttttttttttttttttttagacagcgtctcactgtatcacccaggctrgagtgcagtggtgccattgtggctcactacaacctccacctccctggttcaaacaattcttatgcttcagcctcctgagtagctgggattacaggcacgc

SEQ ID NO: 452467 - DNA, 201 bp, Homo sapiens
cagttaagcctttacaattaagaagtggttaattggtttttaaccaattagcctgtacaattaagaagtggttaattggctttaagtatttttttccgccaaaaaaaaaaaaaaaagtgtgatagatttccaacagtcaattgcctgatctatgaagcaatgacagccctagttttcagtctcatgatttccgctctctgt

SEQ ID NO: 452468 - DNA, 201 bp, Homo sapiens
atcatactttatgcttattgcctgggtaaaattggcttggtgagtcaaatagacttagacctctgcttccatgattcaggacctggtatcgcccctttctrtccttccccacatcatctgctgataaacccttccatgtatccaccctaatctgaactctgttaccttgcttcattgcaatattagattcatccttggaaa

SEQ ID NO: 452469 - DNA, 201 bp, Homo sapiens
agttaagcctttacaattaagaagtggttaattggtttttaaccaattagcctgtacaattaagaagtggttaattggctttaagtatttttttccgccaaaaaaaaaaaaaaaagtgtgatagatttccaacagtcaattgcctgatctatgaagcaatgacagccctagttttcagtctcatgatttccgctctctgta

SEQ ID NO: 452470 - DNA, 201 bp, Homo sapiens
gttaagcctttacaattaagaagtggttaattggtttttaaccaattagcctgtacaattaagaagtggttaattggctttaagtatttttttccgccaaaaaaaaaaaaaaaagtgtgatagatttccaacagtcaattgcctgatctatgaagcaatgacagccctagttttcagtctcatgatttccgctctctgtaa

SEQ ID NO: 452471 - DNA, 201 bp, Homo sapiens
aatcttttgtgaaagtcatatttaactgggggtgagggggtaggagtggcaagggagaagtctcgtcttaactttttttttctttttttttttttgagatrgagttttgttcttgtcgcccaggctggagtgcaatggcccaatctcggctcactgcaacctccgcctcccagattcaagcaattctcctgcctcagcctc

SEQ ID NO: 452472 - DNA, 201 bp, Homo sapiens
cacggtagctcatgcttgtaatcccaacactttgggaggccgaggtgggcggatcacctgaggttggaagttcgagaccagcctgaccaacatagagaaaygccgtctctactaaaaatacaaaattagccaggtgtggtggcgcatgcctgtaatcccagctactcaggaggctgaggcaggagaatagcttgaacctgg

SEQ ID NO: 452473 - DNA, 201 bp, Homo sapiens
aggcaggagaatagcttgaacctgggaggcagaggttttggtgagctgagatcacgccattgcactccagccttgataacaggagcgaaactccatctcaaaaaaaaaaaaaaaagagagagagaagataactggggtgcagttagaagacaaaaagatccttcttcccacatcacagtgaatatgtgaaactcctcttcc

SEQ ID NO: 452474 - DNA, 201 bp, Homo sapiens
ggtgtgcaccacctcacccggctaatttttgtatttttagtagagacggggtttcgccatgttggccagactggtctcaaactcctggcctcaagtgaccygcccacctcagcctcctaaagtgctgggattataggcatgagccaccatgcctggctgatctccctaactctaaatctttacccctctgtctctaaagtc

SEQ ID NO: 452475 - DNA, 201 bp, Homo sapiens
caccacaagcaggggcactagtgtggtgtaccaagccagggtagagatttgaggaactgcctaaaagaataaaagggcttatgtgtgtgtccatgaaggcrtatcaagcttacaggtaacttattgctaattctaagcttgctaattccaagtctcatcaccgtcatcacataagtctacatcctgcagagtatataggaa

SEQ ID NO: 452476 - DNA, 201 bp, Homo sapiens
ccacacccagttaatttttttgtatttttagtggagacggggtttcaccacgttggccaggctggtcttgaactcctgacctcaggtgatacacccgcctkggcctcccaaagtgctgggattacaggcatgagacaccaaatactcaatcagttgaaccgcttctgccatcttggctagacaagatgtgacctatagtca

SEQ ID NO: 452477 - DNA, 201 bp, Homo sapiens
actctgtgcccaccaaatgtcaaagcactggaaggacagagggacaagagggatggccctttcaggacgggaacccacgtctggctggagagataagaccrattataatcagcaagacatggccaggagctaaattataaggaagaaactgctactgagggggatcaggaaaggatgcagaaggatgtgctggaaaaacag

SEQ ID NO: 452478 - DNA, 201 bp, Homo sapiens
tttgatttcttgtggaaggcttacaaagtaaagtatcaataccaaacaagtgcttgttgagttctaaagttaaaaaattaaaatcgttctttccttaggtrtacaattttattgccaagcaataaaattggcaagaaaaccaaagttattgttcagtactttgtattgttctactctgtgcccaccaaatgtcaaagcact

SEQ ID NO: 452479 - DNA, 201 bp, Homo sapiens
ctcactcccactgcctaggctggagtgcagtggcacaatctctgctcactgcagcctcaacctccaggattcaagtgatctgcccatctcagcaccacccrcagcccccaagtagctgggactacgcaactcgctgccaagccaccaaacaatttgtgttttttctagagatggggttttgtcatgtttgccaggctcatt

SEQ ID NO: 452480 - DNA, 201 bp, Homo sapiens
aaattaagtcaaatgtcattcctgctgtttttattttattttattttgttttttgagacagcatctcactcccactgcctaggctggagtgcagtggcacratctctgctcactgcagcctcaacctccaggattcaagtgatctgcccatctcagcaccacccacagcccccaagtagctgggactacgcaactcgctgc

SEQ ID NO: 452481 - DNA, 201 bp, Homo sapiens
gatccacccgcctcggcctcccaaagggctgggattacaggcatgagccactgcgcctggcctgagctgagaaggaatggagaaaaatggcctctgaaggkccccaagtttccctaaaagtaaaatctgctcaaatttaggctgcaccttgattacttggaactgcctgttgttgtcttgcctcatttaaacatgaggaaa

SEQ ID NO: 452482 - DNA, 201 bp, Homo sapiens
tcaagtgatccacccatattggcctcccaaagtgctgggattacaggcgtgagctaccacatctagccccagtattaggttttatgggaaagaaagaatargcttttatccagccttttaagtcttaagttatctaattcaacacacgtacagcgctattgtaaagctattttaatttgtcttcctcccatcatgttatgc

SEQ ID NO: 452483 - DNA, 201 bp, Homo sapiens
atagacgtgctttgtggccgcatcccagcctgggggtaagggatcagctgtccccggtgcgcctgtactccgcggtgccatccgccacgatggcatcaagyggcgagcgcttcttgcggatgctgcgcccggaggagatgaggtccgcgtagccccgctggtgcgagaaggcgtaggccgagcgccgcgttgacacgcccc

SEQ ID NO: 452484 - DNA, 201 bp, Homo sapiens
aagtcacataatcagttgataaatctccaaagcaaacccgtcccctcccattatctagaaggctactttataactgaataaaaatcatgtttgacttgtcmttttggcacggctagttacgttaaaggtacgtaatggaaaataaactagagctggctggctatggaggaaagagatagatctaactccgagcaagcaata

SEQ ID NO: 452485 - DNA, 201 bp, Homo sapiens
atatgctctcccagcccttcttactaaggacaatgggtacttgtccaagcccatccaccattctgtcagtcgcatcctaagaagagatcagagaagattcyctcctagaccacgcaaaatagaccgatcatctttggcacgtgtggccatgacccacatgaggatttataagcgacctagtcaccgggacttcatgtggtt

SEQ ID NO: 452486 - DNA, 201 bp, Homo sapiens
gtggctcatgcctgtaatcctaacactttgagaggccaaggtgggtggattgccagagctcaggagttcgagaccagcctgggcaacatggtgaaaccccrtctctactaaaatacaaaaaatcagccgggcatggtggtgtgcacctgtagtcccagctactcaggagacagcagaattgcttgaacccggaaggcggaa

SEQ ID NO: 452487 - DNA, 201 bp, Homo sapiens
ggaaaggactatattctttataccttatcactttctgatggccagatggtcattgacaggaatcgaatggcaacgacgggtagtaagcacacagcaacagycaggatgatagttaaccaaatgtatggctgtctcagagcgtttgaagctgtgcctgtaaagaacatggcaaatgcatcactgtggttcttttttcctaag

SEQ ID NO: 452488 - DNA, 201 bp, Homo sapiens
gcagagagaaccttcttagtggggtcacagcttcccttgcgtccaagagctgtctgtcccacagcctggtcagactcccacagcctcgtcagactcccacrgcctcaaaccccaggtttgccactcacttcctcactcactcctctttgctcatttttctgccaacgattcgtcatgtatttctaggactatctgctcact

SEQ ID NO: 452489 - DNA, 201 bp, Homo sapiens
tctcccatctcgacgcagagagaaccttcttagtggggtcacagcttcccttgcgtccaagagctgtctgtcccacagcctggtcagactcccacagcctsgtcagactcccacggcctcaaaccccaggtttgccactcacttcctcactcactcctctttgctcatttttctgccaacgattcgtcatgtatttctagg

SEQ ID NO: 452490 - DNA, 201 bp, Homo sapiens
aaaaccatagaaacaattgaagagagaatggctaaaggacatgaaaagacagttcatacaaagggaaattcaatgctgttctcgctgaggctggagtccartgatgcgatctcagctcactgcaacttccgtctcctgggttcaagagattctcctgcctcactctcctgagtagctggggttacaggcgcccaccatcat

SEQ ID NO: 452491 - DNA, 201 bp, Homo sapiens
aacctccctggtaaaatctgataaagtctattgattagataatattgtactgtgttaaattttctggttctgaacattgcactgtatatataagtgagtgyttctgttcttaggaaatacctactatggtatatagtacagtatttaggggaaagggacattaggcctgcaatttattctcttttttatatttttattttc

SEQ ID NO: 452492 - DNA, 201 bp, Homo sapiens
ttgagaaaagcagaaggaaaattaaagggtgctttgtcttgctcttgatctttctctttctttctttctttctttccttccttccttccttccttccttcyttccttccttccttccttccttccttccttccttccttccttccttctttctttctttctttctttctttctttctctttctttctttcttttttctttc

SEQ ID NO: 452493 - DNA, 201 bp, Homo sapiens
atagtacagtatttaggggaaagggacattaggcctgcaatttattctcttttttatatttttattttctttttttatcatgtaatcttgctccttctaaygcaatttactctcaaatggttcagaaaacaataacctgtatgtatgtgtgtgtacatatatatgtgtgtatatatataggtatatataatgaaattacat

SEQ ID NO: 452494 - DNA, 201 bp, Homo sapiens
tgactttatgaaacatctgctctatgaaaacctaagctgtaaaatctaaaaaaagaaaatccaccccctacacattccagccatttctcctctctagcacrttgggcctcactggccgtgggtgcatgactcacttttgatcatgttcacgtcattggccccatctccgatggccagcgtgatggctttcttgtacctctt

SEQ ID NO: 452495 - DNA, 201 bp, Homo sapiens
gctcttgatctttctctttctttctttctttctttccttccttccttccttccttccttccttccttccttccttccttccttccttccttccttccttcyttccttctttctttctttctttctttctttctttctctttctttctttcttttttctttctctctctctctttctttcttttcagagatagagtcttgct

SEQ ID NO: 452496 - DNA, 201 bp, Homo sapiens
caattcacacacacacacaaagtcctgagagtctttcataaaaaaatagacgtgctttgtggccgcatcccagcctgggggtaagggatcagctgtcccckgtgcgcctgtactccgcggtgccatccgccacgatggcatcaagcggcgagcgcttcttgcggatgctgcgcccggaggagatgaggtccgcgtagcccc

SEQ ID NO: 452497 - DNA, 201 bp, Homo sapiens
ttgatctttctctttctttctttctttctttccttccttccttccttccttccttccttccttccttccttccttccttccttccttccttccttccttcyttctttctttctttctttctttctttctttctctttctttctttcttttttctttctctctctctctttctttcttttcagagatagagtcttgctattt

SEQ ID NO: 452498 - DNA, 201 bp, Homo sapiens
cttacaaagaatctcttatagttgaatagtaagtctctttgtcccactatgtataacccagggaatcggaggctcagtttgtcactcacatccttaaggakaaaacaaaatgatggtattttattcatcaggtcaaagcagtcagagatatgttataattaatatctcacaaaaagttgcagcctgctgttaaattttagg

SEQ ID NO: 452499 - DNA, 201 bp, Homo sapiens
ttcccaagaaactctgaacgtacctgcaaaaatgactaagccgtggcagaaatcggtgttcctaattacacagccacgtaacaaaattttatcagcatccraaggaaaacttgtgtttctccaaaatagtgttcctgtaaacttatctagtcggttattgggttcttcacattcaataaaaccttttaaaaatataagatt

SEQ ID NO: 452500 - DNA, 201 bp, Homo sapiens
actaaaagcctttcctcttagatctggaacatgtcaaggatgcctactttcaccagaagtcctagctagagcaatcggacaagagaaagaaataaacggcrtccaaattggaaaggaataagtcaaattatccttgtttgcggatgatatgatctcatatttggaaaaacctaaagactccaccaaaaaactatcagaact

SEQ ID NO: 452501 - DNA, 201 bp, Homo sapiens
actagaaaatctagaagaaatggataaattcctggacacatacactctcccaagactaaaccaggaagaagttgaatctctgaatagaccaataacaggakctgaaattgtggcaataatcaatagtttaccaaccaaaaagagtccaggaccagatggattcacagccgaattctaccagaggtacaaggaggaactggt

SEQ ID NO: 452502 - DNA, 201 bp, Homo sapiens
tgtaaaaaaacaggggatgagagtttccacccactacatgcgtctctgacatttctgcaggcacccaatcccggtccctttgctgtgtctcggactacacrtctgatggcgtgccaccaagcaccaagagcaaagttgaccctggaccccatggagccaattctcctgccaccccatcagatatctacatttggtagagat

SEQ ID NO: 452503 - DNA, 201 bp, Homo sapiens
gaatggggaaaaactggaagcattccctttgaaaactggcacaagtcagggatgccctctctcaccactcctattcaacatagtgttggaagttctggccmgggcaattaggcaggagaaggaaataaagggtattcagttaggaaaagaggaagtcaaattgtctctgtttgcagatgacatgattgtatatctagaaaa

SEQ ID NO: 452504 - DNA, 201 bp, Homo sapiens
ctcactggtagacattcttttatcattccttaacaaaaagaatatttcctcgctacagcaataatccctcttgcctttttttttttgagatggagtctttytctgtcgcccaggctggagtgcagtggtgcgatcttggctcaatgcaacctctgcctcctgggttccagtgactctcctgcctcaggctcccgagtggct

SEQ ID NO: 452505 - DNA, 201 bp, Homo sapiens
cctcactggtagacattcttttatcattccttaacaaaaagaatatttcctcgctacagcaataatccctcttgcctttttttttttgagatggagtcttkttctgtcgcccaggctggagtgcagtggtgcgatcttggctcaatgcaacctctgcctcctgggttccagtgactctcctgcctcaggctcccgagtggc

SEQ ID NO: 452506 - DNA, 201 bp, Homo sapiens
gtaaccaaaacagcatggtactggtaccaaaacagaaatatagatcaatggaacagaacagagccctcagaaataatgccgcatacctagaactatctgayctttgacaaacctgagaaaaacaagcaatggggaaaggattccctatttaataaatggtgctgggaaaactggctagccatatgtaggaaactgaaactg

SEQ ID NO: 452507 - DNA, 201 bp, Homo sapiens
tcttttgagttaaaggcacagatacactaatgatacgtaccaaccaagaaccagtgatgattaaggcacggtttccaccgggtggaaaaaaagattcctgyacaggaggtgcaaactttgcgtagacgccacctctattcctctggttttccatccttgcatgaagaagagaactaggggaaaccaaatttcagtgtttaa

SEQ ID NO: 452508 - DNA, 201 bp, Homo sapiens
caatgcttccaaaaattgaaaaagcattcacaaaagtccaataagaagtatccaagccaatctgttgggaaaccagagaaaaacagagcactcattttggrgagttagcaagaaataaaggatctaacaatcctgaaaacagaattcagcaagttaggcatgatgtggcttgaatactggaccagaaactaaaccatcctt

SEQ ID NO: 452509 - DNA, 201 bp, Homo sapiens
ttttgtctaatttgacggaatacctaatatactagaacaactagaaaatgctttatcaccatcattagaaataagactaatattgaccatcaattccctcrtcactttatcacacctggcaaatgtgtatgttaacagtttaatctgacctcatgctggcctgagagaagctctgtagggaaaaatcttgaggaactgtca

SEQ ID NO: 452510 - DNA, 201 bp, Homo sapiens
agctggaggtgacattagggattattttcttttccgatgagaaaactgaaacctgagcataagcccaaggtgacaccggattttggcaataggatgaggaygaatatccaggtcattagtttgagtatttttaatacaagatactcccttatagtgacagagggaggaaaaaggaacagaattcagacatagagatgaggg

SEQ ID NO: 452511 - DNA, 201 bp, Homo sapiens
ctgcactagaggattaagtatctagtatcccttttccacatcaatttaattctcattttcaagttaaaagtgagtgactaagacaaatcattgaaaggccrttaagagaaaaaaaatgaagataccttctattcaaatcattttataggaatcatcaatttaagagccacctgggaagatgattcctctctctataaaggt

SEQ ID NO: 452512 - DNA, 201 bp, Homo sapiens
tctgactaaggctgcagggaggcgtgtctggagcgctgaaaccagaacactatgatgatttctgtgaatgtgatgctaaggttgttcggctagaattttasggaacaccatggaggaaatattttcagcctgatatcaaatctggggtccagagagaaaagtctcagcttgctcatggagaagagctacaagagaagccca

SEQ ID NO: 452513 - DNA, 201 bp, Homo sapiens
tttctaaggggcagagaaataaagtagtggggagagaggggtggggaggagggagagaatggagggagagaatggggggagagaagagtggggagagaagrgtggggagagaagggagggaggggagagagagaaggaggggaagaaggaggaaagggagagagaaggggagagagacagacagacacggggttcctggtg

SEQ ID NO: 452514 - DNA, 201 bp, Homo sapiens
tgttaaaatgatatatgtgacaaggctacgtgtaacactttcatgtgatagaaaaatgagtcatgaaattttggagtggaagggaccttaaatatcttgtycaatctcttcatgttacaaataaggaaatcaagccagaggaaggtgatgtgatttgcctgctgcaggttgataggaaaactagaatgaggactcagttat

SEQ ID NO: 452515 - DNA, 201 bp, Homo sapiens
ctgtgcctggccgaaatagatatatttcttcctgaagatttctaaggggcagagaaataaagtagtggggagagaggggtggggaggagggagagaatggrgggagagaatggggggagagaagagtggggagagaagagtggggagagaagggagggaggggagagagagaaggaggggaagaaggaggaaagggagaga

SEQ ID NO: 452516 - DNA, 201 bp, Homo sapiens
gctgctgtgaacagtgttgctgtgaacatgggtgtgcatgtatctctttgagatcctgctttcaattattttgtggatatacccagaagtgggattgttgmatcatatggtaatcctttttgaaattttttgaaacatcaccatactgttttgcatagtggctgcaccattttatatatttcatcaacaacacacaaaggt

SEQ ID NO: 452517 - DNA, 201 bp, Homo sapiens
tgtttctttattttattttcattataatttttttgagagagggtctcactctgtcacccaggctggagagcagtggcatgatcatggatcactgcagcctygacctcccagcctcaagtgattctcctgcctcagcctcctgagttgctgggactataggcacacgctatcacgcctggctaatttttgtattttttgtag

SEQ ID NO: 452518 - DNA, 201 bp, Homo sapiens
tgccacgatctcggctcactggaacctccacctcccaggttcaagcgatttccagctaatttttgtatttttagtagagatggggtttcaccatgttggcygggctggtctcctgacctcaagtgatccacctgccttggcctcccaaagtgctaggatgacaggcatgagccaccatgcccggcctatttttaaattttt

SEQ ID NO: 452519 - DNA, 201 bp, Homo sapiens
aaaagtacctggggccaggtgaggtggctcatgcctgtaatcctagcactttgggagactgaggcaggcagactgattgagcccaggagttcaagaccagsctgagcaacatggcaaattcccaactctacaaaaaatacaaaaattagctgggcatggtggctcatgcctgtagtcccagctacttgggaggctgaggtg

SEQ ID NO: 452520 - DNA, 201 bp, Homo sapiens
agacattcttttatcattccttaacaaaaagaatatttcctcgctacagcaataatccctcttgcctttttttttttgagatggagtctttttctgtcgcycaggctggagtgcagtggtgcgatcttggctcaatgcaacctctgcctcctgggttccagtgactctcctgcctcaggctcccgagtggctgggattaca

SEQ ID NO: 452521 - DNA, 201 bp, Homo sapiens
catctctggacttgctttttgccagaggggagctcactgccctgaagggtgactgaaaggatttaccacaagctgactgaagaggccataggcctttaccraacatcagcagtaacctggcagcactcctcataggcctgtggtggtggtggacatggggagaggcccctgagcctgtggaaagggcagaatagtggaaag

SEQ ID NO: 452522 - DNA, 201 bp, Homo sapiens
cccacatctgtttgccagggtgggagaaccagcaggagatgaaatagaaaagccacaaaagaaaaggcatcatggtaaaagcaagccatgttctactgccytcagtgatgtactgtctgcggtcacttacactcaacattggcagagaccacgtggtccacaaagcctaaaatgtttacttgctggccctttacagaaaaa

SEQ ID NO: 452523 - DNA, 201 bp, Homo sapiens
aacctactcatctgacaaagggctaatatccagaatctacaatgaactcaaacaaatttacaagaaaaaaacaaacaaccccatcaaaaagtgggcgaagsacatgaacagacactaatcaaaagaagacatttatgcagccaaaaaacacatgaaaaaatgctcatcatcactggccatcagagaaatgcaaatcaaaac

SEQ ID NO: 452524 - DNA, 201 bp, Homo sapiens
ccaaatgcctactgggaacagccagttaaacacgattacaatgatagcctatgcagtcagcaaaaaaagaatgaggtgaccccataaatatggtaggaatkacctccaaattacactgttaagagacaaaagcagaagggtatctaccatcttgtgctttcagctgtgtgatgcatagaattcatacacaatatgaatgca

SEQ ID NO: 452525 - DNA, 201 bp, Homo sapiens
gggacatggatgaaattggaaatcatcattctcagtaaactatcgcaagaacaaaaaaccaaacaccgcatattctcactcataggtgggaattgaacaaygagatcacatggacacaggaaggggaatatcacactctggggactgtggtggggtggggggaggggggagggatagcattgggagatatacctaatgcta

SEQ ID NO: 452526 - DNA, 201 bp, Homo sapiens
gccgagcatggtggtacatacctgtagtcccagctactcgggaggctgaggcaagggaattgcttgaactcaagaagttgaggttgcagtgagccaagatygtgccactgcacttcagcctggtgacagagcaagactctgcctcaaacaaaaacaaacaacaacaacaaaaaaaccacttgggaaactctccaggacact

SEQ ID NO: 452527 - DNA, 201 bp, Homo sapiens
caagcaaatcccctcctttttttttttttttttgagacaaagtcttgcccaggttggagtgcaatagcgcagtctcggctcaccacaacctctgcctcccrggttcaagcgattctcctgcctcagcctcccgagtagctgggattacaggtgcctgccaccacacccggaaaatttttgtatttttagtagagaccaggt

SEQ ID NO: 452528 - DNA, 201 bp, Homo sapiens
ttataggtgtgcaccaccatgccgggctaatttttgtatttttaatagagatggggtttcactatgttggccaggctggtctcgaactcctgacctcaggygattcaacttccttggcctcccaaagtgctgggattacaggcatgagtcaccgcacccggccaagactgagctcttttaatgcccatataccgagggtag

SEQ ID NO: 452529 - DNA, 201 bp, Homo sapiens
acaagcaaatcccctcctttttttttttttttttgagacaaagtcttgcccaggttggagtgcaatagcgcagtctcggctcaccacaacctctgcctccyaggttcaagcgattctcctgcctcagcctcccgagtagctgggattacaggtgcctgccaccacacccggaaaatttttgtatttttagtagagaccagg

SEQ ID NO: 452530 - DNA, 201 bp, Homo sapiens
aagaaggtgctggcctatccatttgtcatttcggacttacatgcaaatttctattttaaaatttcagaaatactgaaatgtaaaacatctacaatttcgtyaattgaaagataagccaaattttttttttaatgctggagttaagaattgtatactaaattcattaggggaactggggcataaacatatatttaaaaagta

SEQ ID NO: 452531 - DNA, 201 bp, Homo sapiens
ttcactcttgttgcccaggctggagtgcaatggcaccatctcagctcactgccacctctgcctgccgggttctagtgattctcctgcctcagcctcccaartagctgggactacaggcacttgccaccacgcctggctaatttttgtatttttagtagagagggggtttcaccatgttggtctggctggtctcgaactcct

SEQ ID NO: 452532 - DNA, 201 bp, Homo sapiens
gctactggaaaaaactgcattttaatgaaaacaattcagaaagttaacaactcaccgcatatttactctccttaatacacaagaattttgtgttcataaastgaggttgttcgtggtacttgcgatcgtttgctttgacttgccatgtacattctttaaaaaaaagggagaaaagttcgtaagtagcaaattaacatgttg

SEQ ID NO: 452533 - DNA, 201 bp, Homo sapiens
gttttctgtaaaaaaagaaaaaacttacaattttttatttacaagttaaggaaaagttgtaaacgttcaggattttacttccacagaataaaaagccatayattcttttatcatacctagaaaatgaacatatacacattgtgattacctcataggaattcaacaggactgatattgtgaacattcacagcccaatggtaa

SEQ ID NO: 452534 - DNA, 201 bp, Homo sapiens
cctcccaagtagctgggactacaggcacttgccaccacgcctggctaatttttgtatttttagtagagagggggtttcaccatgttggtctggctggtctygaactcctgacctcaggtgatccacccacctcagtctcccaaagtgctgggattgcaggcatgagccactgtgcccggcaggaatttcactttaattttg

SEQ ID NO: 452535 - DNA, 201 bp, Homo sapiens
acttgccaccacgcctggctaatttttgtatttttagtagagagggggtttcaccatgttggtctggctggtctcgaactcctgacctcaggtgatccacycacctcagtctcccaaagtgctgggattgcaggcatgagccactgtgcccggcaggaatttcactttaattttggtcaagtatcatgagtttagtacctt

SEQ ID NO: 452536 - DNA, 201 bp, Homo sapiens
aattattagaaaaaaatagctcatccagatagcagaacccaagaaagagaaactagagggggggtttggcatgggggaaaaagaggcttctagaaagcctkcaagggcagaatggcagtaacagagacctcgggaaaaccagctaaaatccgaggcttctctgactaaggctgcagggaggcgtgtctggagcgctgaaac

SEQ ID NO: 452537 - DNA, 201 bp, Homo sapiens
agcctaaaatgtttacttgctggccctttacagaaaaagtttgctggccttggtctagaccctgcctctgatgctggcctgaccctgggcagaccatatayatatatatatatacacacacacacacatacacaaggatggttatttatataactcataccgccaatttaacaatactaatagttaacatctaagactgat

SEQ ID NO: 452538 - DNA, 201 bp, Homo sapiens
caggtgtggtggctcatgcctgtaatcctaacactttgagaggccaaggtgggtggattgccagagctcaggagttcgagaccagcctgggcaacatggtraaaccccgtctctactaaaatacaaaaaatcagccgggcatggtggtgtgcacctgtagtcccagctactcaggagacagcagaattgcttgaacccgga

SEQ ID NO: 452539 - DNA, 201 bp, Homo sapiens
agtagagagggggtttcaccatgttggtctggctggtctcgaactcctgacctcaggtgatccacccacctcagtctcccaaagtgctgggattgcaggcrtgagccactgtgcccggcaggaatttcactttaattttggtcaagtatcatgagtttagtaccttctgattcaaggcagaaggcacttaagctcaatcct

SEQ ID NO: 452540 - DNA, 201 bp, Homo sapiens
tttgggtgagatggggctcccggggtgcatgcactccccacactgagaatctccccacaggcagattctgtgaccagaacaggaagaatcattgcagaaaygggatttcatgcatatcacatcttctacaggttaaaattattagaaaaaaatagctcatccagatagcagaacccaagaaagagaaactagagggggggt

SEQ ID NO: 452541 - DNA, 201 bp, Homo sapiens
ctctaagaggtaatccatctaaatgtttgctatggaaaggtagcggacacacaacatacaggagtcaatggcctccccacatttgggtgagatggggctcscggggtgcatgcactccccacactgagaatctccccacaggcagattctgtgaccagaacaggaagaatcattgcagaaacgggatttcatgcatatcac

SEQ ID NO: 452542 - DNA, 201 bp, Homo sapiens
tccaagtccccaccagagtagctagatatagagtgtcgattggtgcattcacaaaccctgagctagacacagggtgctgattggtgtgtttacaaaccttragctagatacagggtgccgattggtgtatttacaatccgttagctagacataaaggttctccaagtccccaccagagtagccagatagagtgtggattgg

SEQ ID NO: 452543 - DNA, 201 bp, Homo sapiens
gtgcccagccccagtccttacttttggttgagggttacctttcctttcattctggctaaagagttgaggtcagttggaaaaacccagactcaatcttccttttttttttttttttttttggagagagtctcactccattgcccaggctggagaacagtagcacaatcatggctcactgcaacctctgcttcctgggttcca

SEQ ID NO: 452544 - DNA, 201 bp, Homo sapiens
tgcccagccccagtccttacttttggttgagggttacctttcctttcattctggctaaagagttgaggtcagttggaaaaacccagactcaatcttccttttttttttttttttttttggagagagtctcactccattgcccaggctggagaacagtagcacaatcatggctcactgcaacctctgcttcctgggttccag

SEQ ID NO: 452545 - DNA, 201 bp, Homo sapiens
atttctgcagcagagctcatatctactttccagctacctggatgttgacaggcaactataaaggcttcttaatttggaagctctttagaggaacctcttaycacttaccagaagagtagaagctcttctggtaagtgacccagcctagaccctgcttctgtagaccatccagagcttttgaaagtacctagtcccctgtat

SEQ ID NO: 452546 - DNA, 201 bp, Homo sapiens
gcagtctcggctcaccacaacctctgcctcccaggttcaagcgattctcctgcctcagcctcccgagtagctgggattacaggtgcctgccaccacaccckgaaaatttttgtatttttagtagagaccaggtttcaccatgtcggccagactgatctcaaactcccgacttcaggcgatccacctgcctcagcctcccaa

SEQ ID NO: 452547 - DNA, 201 bp, Homo sapiens
aaaggatctaacaatcctgaaaacagaattcagcaagttaggcatgatgtggcttgaatactggaccagaaactaaaccatccttgactcaggcaagaaayagaaaatgtgcttggtataagagatgaaaatagcatttatattttgtaagtggcacaggtgcagtgggagtcaggtggatgtgcatgccaccctatatac

SEQ ID NO: 452548 - DNA, 201 bp, Homo sapiens
ttgttttttttgttttttttttgagacagggtcccgctctgtcacctgggctagagtacagcagtgccatcacgactcactgtagcctcaacgtcccaggkcaagcaatcctcccacttcagcctctccagtagctagaactacaggcatgtgccaccatgcctggctaatttttttgtattttttgtagagatggggttt

SEQ ID NO: 452549 - DNA, 201 bp, Homo sapiens
cgccgcgttgacacgccccggcggaacacctgctgccgtcgctgccactgctcctccgccttcaaccgcttgcgatgcttctggatctgcaagggggagaratggggagggatgaaaataagatccacaccagggaggaggcctggccagacggttgacagaaatgaacactgatgaactcccctgacacctgccccattt

SEQ ID NO: 452550 - DNA, 201 bp, Homo sapiens; identical to SEQ ID NO: 303817

SEQ ID NO: 452551 - DNA, 201 bp, Homo sapiens; identical to SEQ ID NO: 303697

SEQ ID NO: 452552 - DNA, 201 bp, Homo sapiens
ctatgtttaactatttgaggaattgccagaagttttccaaagtgagtacaacattttgtgttcccaccagcagtgtatgtgggttccaatttctctacatyttcactaacagttgttatcatccgtctttctgattatagcttttttagttggtgtgaagtctcattgtgattttaatttgcatagaggcacatatttttg

SEQ ID NO: 452553 - DNA, 201 bp, Homo sapiens
catgaagaaatatgtccaacatcatctgccattagagaaatacaaattaaaaccacaatggtctgggtgcagtgcctcacgcttgtaatcccagcactttkggaggccaaggcacgtgaatcacctgaaatcaagagtttgagaccagcctggccaacatggtgaaaacccgtctctactaaaaatacaaaaattagccgg

SEQ ID NO: 452554 - DNA, 201 bp, Homo sapiens
taactgtaaatattcatttaccggtttttgtgtgggcattatgtttcatttctcttgggtacatgcctagtaggggagttgctacatcttacggcaactctatgtttaactatttgaggaattgccagaagttttccaaagtgagtacaacattttgtgttcccaccagcagtgtatgtgggttccaatttctctacatct

SEQ ID NO: 452555 - DNA, 201 bp, Homo sapiens
aactgtaaatattcatttaccggtttttgtgtgggcattatgtttcatttctcttgggtacatgcctagtaggggagttgctacatcttacggcaactctatgtttaactatttgaggaattgccagaagttttccaaagtgagtacaacattttgtgttcccaccagcagtgtatgtgggttccaatttctctacatctt

SEQ ID NO: 452556 - DNA, 201 bp, Homo sapiens
ttcctgtctgatgatctttagactaggacattggctttttcctctgcctttggcttgaactgaaacattagctctcctgggtctctagcttgccaactcgccctgcaaatcttgggattttccagcctctataattgcataagccaatttcttataataaatctctttgcttatgtatacatcctattcattctatttctc

SEQ ID NO: 452557 - DNA, 201 bp, Homo sapiens
ccaggaggtggaggctgcagggagccaagattgtgccaccgcactccagcctgggcaacagagcaaaaccctgtctcaaaaaaaaaaaaaaaaaaaaaaarggattattgatacacacagcaaccaggatgaattatgctaagggaaaaaagtcaatcccaaaaagttgacaaaaagtcaatcccacagtacatgctatgt

SEQ ID NO: 452558 - DNA, 201 bp, Homo sapiens
catgtgtgggttttttttccccgaaccatttcaaagtaatttatagacatcatggcacttcctctgcatccctgtatgagcacacttaagcatatgtcttytaaagtgaagggtacaatgcacactaacattacctacaataccattatcgcacctaaggcaataacaattccataatattacctacaatccagcccatat

SEQ ID NO: 452559 - DNA, 201 bp, Homo sapiens
gcaggagacttgcttgaacccaggaggcagaggttgtagtgagccaagattgtgccattgcactccagcctgggcaacaaaagtgaaactccatctcaaamaaaacaaaacaaaaaatcaaaaactaacatcatttctaggggttaaggaggaagtggaacaggagggaagtagatgtggctataaaaatgggagcatgtg

SEQ ID NO: 452560 - DNA, 201 bp, Homo sapiens
gtcctcccatgaagaagtagaatttatttttcatgccgtaaatcttgactggtcttctaacttgtttatttcttggtctgggccttaagaggcattgaagyttccgggattgggagtaagctgccatggaaagaaactcaggctggactactgcatgatgagagatcacatcaaagagaacagtccagccagcccaacttg

SEQ ID NO: 452561 - DNA, 201 bp, Homo sapiens
cccgtccctgtgcgtcgcgagcgggctccggacagcgccagatgcgagcgcgccgggaagggctgcgaagactcgctcttcgggagctcgaatggcttctkaggaccccgcagggcgggtttccaggcctgccacggcctccagtgtgggcgtgacgagcgctcctccctggagttcagccctcggcttgggactgcccgc

SEQ ID NO: 452562 - DNA, 201 bp, Homo sapiens
tgttgggcaggctggtcttgaactcctagcctcaagtgatccacctgccctgaccactcaaaatgctgggattgcgggcgtgagccactgtgtccagcccmaattgtcttttatagcttttttttttttccaaactaggatccaagcaaggttcatatattgcattgagttatacatctccaactttttttaatctagaag

SEQ ID NO: 452563 - DNA, 201 bp, Homo sapiens
ccgtggaaaccgggcctcccgtccctgtgcgtcgcgagcgggctccggacagcgccagatgcgagcgcgccgggaagggctgcgaagactcgctcttcggragctcgaatggcttcttaggaccccgcagggcgggtttccaggcctgccacggcctccagtgtgggcgtgacgagcgctcctccctggagttcagccctc

SEQ ID NO: 452564 - DNA, 201 bp, Homo sapiens
aagcatatgtcttctaaagtgaagggtacaatgcacactaacattacctacaataccattatcgcacctaaggcaataacaattccataatattacctacmatccagcccatattcatatttcttcaattgccccccatttttttttctagatgggatttcaccatgttgggcaggctggtcttgaactcctagcctcaag

SEQ ID NO: 452565 - DNA, 201 bp, Homo sapiens
ctggagggctccaaatgcaaagctcctgttgtcatctcccacggagtcaggctgtgttaccttcccagcattggtatgtgacagtatgcttggagtattgycaaccagggacacttgtctgagcttctgtgtccagagtttttactgggactccagcacataggcttgatcaattgtccacttggttggactgagactcca

SEQ ID NO: 452566 - DNA, 201 bp, Homo sapiens
tcacaaccccccaaaatcctatactcattggcagtcacgacccatttcctcccaagccccgcccaagcctaagcaatccctcatgtttctgtctctataawcttgcctattcgggatatttcacataaatggaatcatataatatgtagcctttttcatcctatctttcacttactgtaatgttttcaaggttcatccatg

SEQ ID NO: 452567 - DNA, 201 bp, Homo sapiens
ccgtctcaaaaataaataaataaataaagcttataataaattgtctttaatatagtcacagttgtagacccatcactaccataaattttagaacatttttrtcacaaccccccaaaatcctatactcattggcagtcacgacccatttcctcccaagccccgcccaagcctaagcaatccctcatgtttctgtctctataa

SEQ ID NO: 452568 - DNA, 201 bp, Homo sapiens
gagctcgaatggcttcttaggaccccgcagggcgggtttccaggcctgccacggcctccagtgtgggcgtgacgagcgctcctccctggagttcagccctsggcttgggactgcccgctgggttgctcggaggccccggagcatcggaaagggcggctggaggctcccggagcgggctcagcctgggagcccagcgactac

SEQ ID NO: 452569 - DNA, 201 bp, Homo sapiens
tggtgtgattacagctcactgcagcctcaaactcctggtctcaagcaatcctcccacctcagtttcctgagtagctgggactacaggcttgcaacactatstctggctgacgtcctgattttagcccagtgagacctgtactggacttcttactgacagaactgtaagataatgcatctgcattggtttaagccactaact

SEQ ID NO: 452570 - DNA, 201 bp, Homo sapiens
aacccacaaaaatacacctaactgatttttgacaaaagtgcaaaagcaatttaatggaggaaagatacccttttcaagaaatgggactgccaggctaggcrtggtggttcatgcctgtaatcccagctctttgggaggccgaggtgggtagatcacctgaggtcaggagttcgagaccagcctggccaacatggtgaaacc

SEQ ID NO: 452571 - DNA, 201 bp, Homo sapiens
caacaaactcccgtgacatgtgtttatttatgtaacaaaccttcacatgtacccccaaacctaaaataaaagttaaaaaaaagtatcaaattgttaactcytctggaataaacatttccttgtctttttttaatttaaattattatttttaaaatgcccatattccctgagtcctcgcttctttttacctctccaatcgcc

SEQ ID NO: 452572 - DNA, 201 bp, Homo sapiens
tcccagcactttgggaggcctaggcgggtggatcacgaggtcaggagatcgagaccatgaccatcctggctaacatggtgaaaccccgtctctactaaaamtacaaaaaaattagctgggtgtggtggtacacacctggagtcccaactacttgggaggctgaggcaggagaatcacttgagcctgggaggcggaggttgc

SEQ ID NO: 452573 - DNA, 201 bp, Homo sapiens
tgagtcctcgcttctttttacctctccaatcgcctggcttcatggtgtttcacatttgctgactgcttccagaaaaacattcccactgaaggcctcccaaygcaaggcagatatagagcaagctagacacatgccttcctttccagttgctttctgactttttaaagtcccagatgcctgggcttggggaaaggacaggaa

SEQ ID NO: 452574 - DNA, 201 bp, Homo sapiens
aatcaatagaggttatctaaaacttaaaaaaatagggccaggcacagtggctcacgcctgcaatcgcagcactttgggaggctgaggcgggcggatcacamggtcaggagatcgagaccatcctggctaacacagtgaaaccccgtctctactaaaaataacaaaaaaaagtagccggtcgtggtggtgggcgcctgtagt

SEQ ID NO: 452575 - DNA, 201 bp, Homo sapiens
gagtctgagaccagcctggccaaacatggcgaaaccccgtctctactaaaaatacaaaaatttgccgggcctgctggtgcacgcttgtaatcccagctacttgggaggctgaggcatgagaatcacttgaaaccaggaggcagaagttgcagtgagctatgattgcccccctgcactccagcctgggtgacacagcgagac

SEQ ID NO: 452576 - DNA, 201 bp, Homo sapiens
acgtaggaaagcactgtttatagtaacaacccaactaggacagaccaggtatatttagacaacaaacaaggaagctttttactaaattgggatgatctctaagaagaaggtacgtagaaaaagcaaggtgggagaacacgctatgtgcttgtactatgcacgtcaatgaaaaaatacacaaagaattgacaggccaggtgg

SEQ ID NO: 452577 - DNA, 201 bp, Homo sapiens
cgtaggaaagcactgtttatagtaacaacccaactaggacagaccaggtatatttagacaacaaacaaggaagctttttactaaattgggatgatctctaagaagaaggtacgtagaaaaagcaaggtgggagaacacgctatgtgcttgtactatgcacgtcaatgaaaaaatacacaaagaattgacaggccaggtgga

SEQ ID NO: 452578 - DNA, 201 bp, Homo sapiens; identical to SEQ ID NO: 108271

SEQ ID NO: 452579 - DNA, 201 bp, Homo sapiens
gtaggaaagcactgtttatagtaacaacccaactaggacagaccaggtatatttagacaacaaacaaggaagctttttactaaattgggatgatctctaagaagaaggtacgtagaaaaagcaaggtgggagaacacgctatgtgcttgtactatgcacgtcaatgaaaaaatacacaaagaattgacaggccaggtggag

SEQ ID NO: 452580 - DNA, 201 bp, Homo sapiens
ggggctctgatgctagttttgtccttcttgaggggttgagttagtcacaaagccttggtttcttcatctgtaaaagagggattgtgcgaacttctatgtcrgaattaaagagaactccaagtaagccatagaaaaaccaaaggctggccgggcgcagtggctcacgcctgtaatcccagcattttgggaggttgaggtgga

SEQ ID NO: 452581 - DNA, 201 bp, Homo sapiens
ccaggagcaaggggctctgatgctagttttgtccttcttgaggggttgagttagtcacaaagccttggtttcttcatctgtaaaagagggattgtgcgaamttctatgtcggaattaaagagaactccaagtaagccatagaaaaaccaaaggctggccgggcgcagtggctcacgcctgtaatcccagcattttgggagg

SEQ ID NO: 452582 - DNA, 201 bp, Homo sapiens
gagaggctggcactgacctggtcacctcccatctcccagtcttgagccgggtaaatctgtggacctctcagcaaacaagaggcattcttgccagacccagragcaaggggctctgatgctagttttgtccttcttgaggggttgagttagtcacaaagccttggtttcttcatctgtaaaagagggattgtgcgaacttct

SEQ ID NO: 452583 - DNA, 201 bp, Homo sapiens
cacagctgtcgcacagccccgcacaagcccgcacagcaccagcagacaggtagcccccacaggcaacagcgcccacctcgccgcgcccagaccccggatcrccgacgcggacgccaggcgcctgggcacacggcgcctgcgcagacaacaccacgccccaggcctggcgagcgcaccctgcgggtggggcggacctacgtc

SEQ ID NO: 452584 - DNA, 201 bp, Homo sapiens
cgcagccccgcacacaccgaggtccactctccgcacagcccacgctcacacggaggaaagatggcagcactgtgagaacacggacctgggtcttggcaggmatgaggtgagccggccacttcaagaggaacaacagacagaacttactgccaatggtaaaacttacacagtctaatgaaaaagaaaatttggaaactttca

SEQ ID NO: 452585 - DNA, 201 bp, Homo sapiens
ttcaccttccactaaaagcctaacagcttcccatgcttactttctgaggggaaagtgatttcctgatactgtaaaatgaagcaggtcaacatctggaagcyccgtgtaaggcagtgaaccaaaagcaaggctgtccgaatgaccgatgtagatgttaggaacccctgcctgggtcaaaggccaaagtgagacagaccagta

SEQ ID NO: 452586 - DNA, 201 bp, Homo sapiens; identical to SEQ ID NO: 108244

SEQ ID NO: 452587 - DNA, 201 bp, Homo sapiens
ctatattcagagaacccactcctggcctccactcgcgtggctaagtatagctccctggcagagttcaatggaacaaaagcttccaggcgtacacgacctcrcggatggcagaacattctcggaggagcacctcagctgccacgactcagaggagctcagagagaggctggcactgacctggtcacctcccatctcccagtc

SEQ ID NO: 452588 - DNA, 201 bp, Homo sapiens
ggtttctattaagtctcggcatctcacaggagggctttttttgtttgtttgtttgtttggtagcatccagatccctaaaggaagctatattgtaaattgtsttctatttctgggtcccaatatctaaatgaggcgattgcacctgttgggaatgaaggacaggaatttcacaagccgaaaataaagctgaatgttttccct

SEQ ID NO: 452589 - DNA, 201 bp, Homo sapiens
ggtcacagctcagccctgggtccacgccggctcgtgtagagggagcgatggcagtgcacgcagccccgcacacaccgaggtccactctccgcacagcccaygctcacacggaggaaagatggcagcactgtgagaacacggacctgggtcttggcaggaatgaggtgagccggccacttcaagaggaacaacagacagaac

SEQ ID NO: 452590 - DNA, 201 bp, Homo sapiens
cttttctgtttttgcttttttgagacagggtctttctctgtcacccaggctggagtgcagtggcacaatcttggctcactgcatccttgacctcccaggcycaagggatcctcccacagcctcccaagtagctgacactacaggtgcacgccaccaggcccagctaatattttgcatttttcgtagatactgggtctcatc

SEQ ID NO: 452591 - DNA, 201 bp, Homo sapiens
tccacccaggcatcatgaatcaagccccagatattcccacccaggagcaccatggtgcgggaaagcgagctggaaaactgtgaggtggatgcttgtgtccstgaagggaaatactttccgaggtgagtggctcgaacacaaggacggcagggctatttgagccaccagcccagctggccaggtttccggccacgtgcatgc

SEQ ID NO: 452592 - DNA, 201 bp, Homo sapiens
aactgaggtgggaagatcccttgagccaggaggtcgaggctgcatggagctttgatcgtaccactgccctccagcctgagcaacagagtgagaaaaaaaamagactttttttctatttctggaaaaaaataaagaatttataagtatgatggttctggtaatagaagtaggtggctaggcagagtggacacttcacactgc

SEQ ID NO: 452593 - DNA, 201 bp, Homo sapiens; identical to SEQ ID NO: 108257

SEQ ID NO: 452594 - DNA, 201 bp, Homo sapiens
ggggtatttgagacgcccaccttaatgcaggttggacccagctccgggctgccgggcttccccgccccggggtctttcgtgtgagccccgtggcgggggaycctggcccaggacatggcgcggagaaggctgtgggcggcgggacagggtgccttcggctgccgggttaagagtggatcccgggatacatcctccagcgcc

SEQ ID NO: 452595 - DNA, 201 bp, Homo sapiens
ccgcacagcgccccacggccccttcatggtccccgcacagcgcctcacaacccgcacacagcgcctcacggaccctttacggcccccgcagagtctcccayacggcgccccacacagagcctcacggaccccgcacagcgcctcaaggtctccgcacagcccccagcacagcgcctcacacagcccttcgcacagcccccc

SEQ ID NO: 452596 - DNA, 201 bp, Homo sapiens
gccctcatggtcacagctcagccctgggtccatggcggctcgtcgggatggccctcgtggtcacagctcagccctgggtccacgccggctcgtgtagaggkagcgatggcagtgcacgcagccccgcacacaccgaggtccactctccgcacagcccacgctcacacggaggaaagatggcagcactgtgagaacacggac

SEQ ID NO: 452597 - DNA, 201 bp, Homo sapiens
cccacacagctgtcgcacagccccgcacaagcccgcacagcaccagcagacaggtagcccccacaggcaacagcgcccacctcgccgcgcccagaccccgratcgccgacgcggacgccaggcgcctgggcacacggcgcctgcgcagacaacaccacgccccaggcctggcgagcgcaccctgcgggtggggcggaccta

SEQ ID NO: 452598 - DNA, 201 bp, Homo sapiens
cagcctggtcttgaactcctgaattcaagtaatcctcctgccttggcctccgcaagtgctgggatcacagatgtgtgcccctgtccctggctgatactaattttttttttttttttgagacggagtcttgctctgtcgcccaggctggagtgcagtggtgcgatcccagttcactgcaacctccgactcctgggtttaagc

SEQ ID NO: 452599 - DNA, 201 bp, Homo sapiens
ggcagcactgtgagaacacggacctgggtcttggcaggaatgaggtgagccggccacttcaagaggaacaacagacagaacttactgccaatggtaaaacwtacacagtctaatgaaaaagaaaatttggaaactttcaccttccactaaaagcctaacagcttcccatgcttactttctgaggggaaagtgatttcctga

SEQ ID NO: 452600 - DNA, 201 bp, Homo sapiens
caagcgccgcaacccagtccaaggctttgctcctacagggccttacagggggtatttgagacgcccaccttaatgcaggttggacccagctccgggctgcsgggcttccccgccccggggtctttcgtgtgagccccgtggcgggggaccctggcccaggacatggcgcggagaaggctgtgggcggcgggacagggtgcc

SEQ ID NO: 452601 - DNA, 201 bp, Homo sapiens
tcctgtggggaagccaggtttctctactgactcttgtgtagaggagaagactaggcgtggtggctcatgcctgtaatcccagcactttgggaggccgaggygggaggatcacttgagcccaggagtttaagacaagcctgggcaacatagcaagaccctgtttctacaaaaaaacaaaaaaattaaaaaattggttgggtg

SEQ ID NO: 452602 - DNA, 201 bp, Homo sapiens
tttctatttctggaaaaaaataaagaatttataagtatgatggttctggtaatagaagtaggtggctaggcagagtggacacttcacactgcatactcccmtattttccgaaatctgagctttttttttttttttttttttttttttttttttgagatggagtcttgctctgtcaccctggctggagtacagcagcaccat

SEQ ID NO: 452603 - DNA, 201 bp, Homo sapiens
agggcaggaggagggagaggagcagaaaagatggggggagggcaggaggagggagaggagcagaaaagatggggggagggcaggaggagggagaggagcakaaaagataactattgggtactgggcttagtacctgagtgatgaaataatctttacaacaaactcccgtgacatgtgtttatttatgtaacaaaccttcac

SEQ ID NO: 452604 - DNA, 201 bp, Homo sapiens
ctcctttttgcttcccctgggaacaggcagcggggaggcccaggaaacttcagaaatgaagctgagaggcgagagaaggtgggcagtgagatcacagggcrcttctcatccgcacaaggcccttgtgaaactcaactgttttgcattggcaaaaagaggggctgagatggagacacagcccagccagcgggtcctggtccc

SEQ ID NO: 452605 - DNA, 201 bp, Homo sapiens
cagtttgcgtgaaaggtacatacagggagttaccagcagctcaagatgtcttgagaaaagtgtgccagtaggtgtgagtatgacagagggatgagggtggaggatgtgggcaggagacaggtcctggttgcagagggccctgtgggccaggctgtgaagcaaggactttgtcccagggtagtggagctgttggaaaggtaa

SEQ ID NO: 452606 - DNA, 201 bp, Homo sapiens
ggtatgcgaggagaagctccgctatgcggcctacaactgcgtggccatcgacactgacatgagcccttgggaggagtgaggcgtgccgccggctgtgggaycagcaagactgcacgtgtccctcttggccttgcccagggcgaagacaccttccctgccctggtttggctgacgtgctcagcaaaaccccatgtgccctgc

SEQ ID NO: 452607 - DNA, 201 bp, Homo sapiens
gccacgggctctgggtgaagctgacaaaggtgcgctcttccctgcccaggacccggtaaaagacccctggggccagagaaacctctggctgtttgcctttyctcccctgtattgagttggcattgcgttcggcgccctttgccctgggctgggcacgacaggcggctgggcagttccctgacggctgtccccatcctacgc

SEQ ID NO: 452608 - DNA, 201 bp, Homo sapiens
ggcagggagtgatagccaaactccttggtcacctgctccaagaaggaagcagtagctgagcacctgccctcacatactgctcttttcccctctccctccayaccagagatgtggtgagctctgttcttctaccaacccagtctcaacacacaaagtgccaccaccttccctgactcagaacccacatccactcaatgtgaa

SEQ ID NO: 452609 - DNA, 201 bp, Homo sapiens
gcctgggatcgagacctcagccggcagaggcatacgcagaagctgtacaaaggctactgtgagtgagctggaatggggtggggaggaaggagctctgcgtytgggcccagtctaattaggggcttggggttgcttagctatgtacccccgacatggacctacgagtgcgacgaggacctgatccacttcttgtatgaccac

SEQ ID NO: 452610 - DNA, 201 bp, Homo sapiens
cctgagccccagctcctgggacccagaacacagcctgtaagccaccagtactccaagaactctggcccccaccattcctcagtgccacctttctgctgctraaaggccacagtgatgccccccagtgtgaggcgggaggtgtgccctcttccccagccaagcctttttacccactccccaggtggcagctatgcaggcagg

SEQ ID NO: 452611 - DNA, 201 bp, Homo sapiens
tgggcagggagtgatagccaaactccttggtcacctgctccaagaaggaagcagtagctgagcacctgccctcacatactgctcttttcccctctccctcyataccagagatgtggtgagctctgttcttctaccaacccagtctcaacacacaaagtgccaccaccttccctgactcagaacccacatccactcaatgtg

SEQ ID NO: 452612 - DNA, 201 bp, Homo sapiens
ctccccaagcagggagcctgggatgggcagggagtgatagccaaactccttggtcacctgctccaagaaggaagcagtagctgagcacctgccctcacatwctgctcttttcccctctccctccataccagagatgtggtgagctctgttcttctaccaacccagtctcaacacacaaagtgccaccaccttccctgactc

SEQ ID NO: 452613 - DNA, 201 bp, Homo sapiens
aggcacagtggctcacgcctgtaatcccagcactttgggaagccgaggcgggcagatcacgaggtcaggagttcaagaccagcctggccaatgaagtgaarccccatctctataaaaataaaaaattagccgggcgtggtggcacgcgcctgtagtcccagctacatgggaggctgaagcaggcgactcgcttgaacccag

SEQ ID NO: 452614 - DNA, 201 bp, Homo sapiens
ggacctgaccaagtccccattcccacagtgccaaggtatgcgaggagaagctccgctatgcggcctacaactgcgtggccatcgacactgacatgagcccwtgggaggagtgaggcgtgccgccggctgtgggaccagcaagactgcacgtgtccctcttggccttgcccagggcgaagacaccttccctgccctggtttg

SEQ ID NO: 452615 - DNA, 201 bp, Homo sapiens
tccctgctgcctccatggggactgccttgcctggctgtctctgcttccctgtgagcatcttgtggaaagacagggactatctccacagtgaaaaggttacytccctgcctctctccaacccctaggtgaagctcctggaagtgatggaaggaatggacaaggagacgtttgagttcaagtttgggaaggaactaacattca

SEQ ID NO: 452616 - DNA, 201 bp, Homo sapiens
aggtgaggccctgagggaggatctcaagggtcctgcttgctgccctatcaaagtggtagaggcttttcaccagctaatgatgatgggggacctattcattmccccattatgggagctgggctcttgagtgcccagctgagggcatctgtcatttcagggggtggtttccgggacagcctggcagatatgtcagaagagctg

SEQ ID NO: 452617 - DNA, 201 bp, Homo sapiens
cccacagtgccaaggtatgcgaggagaagctccgctatgcggcctacaactgcgtggccatcgacactgacatgagcccttgggaggagtgaggcgtgccrccggctgtgggaccagcaagactgcacgtgtccctcttggccttgcccagggcgaagacaccttccctgccctggtttggctgacgtgctcagcaaaacc

SEQ ID NO: 452618 - DNA, 201 bp, Homo sapiens
cccattcccacagtgccaaggtatgcgaggagaagctccgctatgcggcctacaactgcgtggccatcgacactgacatgagcccttgggaggagtgaggygtgccgccggctgtgggaccagcaagactgcacgtgtccctcttggccttgcccagggcgaagacaccttccctgccctggtttggctgacgtgctcagc

SEQ ID NO: 452619 - DNA, 201 bp, Homo sapiens
cacctcccgatcatcgagatccgcatcgtggagtgccgaggtgaggtttaaggctataaggagggaaagagagcccggcgtggagatgggggcaaacagasagtgagtgtggagagaagaggatgggcttggagttggggtgaaggcgatgctgaactaactccaggatttggagctttggggcctgagccagctgggaca

SEQ ID NO: 452620 - DNA, 201 bp, Homo sapiens
cccgatcatcgagatccgcatcgtggagtgccgaggtgaggtttaaggctataaggagggaaagagagcccggcgtggagatgggggcaaacagacagtgwgtgtggagagaagaggatgggcttggagttggggtgaaggcgatgctgaactaactccaggatttggagctttggggcctgagccagctgggacatgcca

SEQ ID NO: 452621 - DNA, 201 bp, Homo sapiens
tggagctgttggaaaggtaaggaaggtaatgacagtattagatttttttgttttagaaagctctccctggtggctgaactaaggaggggactggagacaargacagggatggactagacttgaactgaaacggtggaattggatacaggcagaggggaaagttccagggcctggacggaggctgactgcccactcattcct

SEQ ID NO: 452622 - DNA, 201 bp, Homo sapiens
ttcacgtctctgcccctccccaggaggagttcaacgtgtcctgcctgacagacagcaatgccgatacctactgggagagcgatgggtcccagtgccaacaytgggtacggcttactatgaagaagggcaccattgtcaagtaagtaggctctgggcaggacagggtgggtgggctatgtccctgtgggttcacaaagactc

SEQ ID NO: 452623 - DNA, 201 bp, Homo sapiens
aactaaggaggggactggagacaaggacagggatggactagacttgaactgaaacggtggaattggatacaggcagaggggaaagttccagggcctggacrgaggctgactgcccactcattcctgctctggccacctctcctcactagcaagtgaagcagttcctactgctgtcccgccagcggccaggcctggtggctc

SEQ ID NO: 452624 - DNA, 201 bp, Homo sapiens
cgggaccgtcgcgcgtgcttctgccggtgtgggaggcagagggcctggggctgcgtgtgggcgccgcaggcccagcccccggtaccggctccgggcccctycgcgccgcccgcgacagcattgagctccggcgcggcgcctgcgtgcgcaccacgggcgaggagctgtgcaatggccacgggctctgggtgaagctgacaa

SEQ ID NO: 452625 - DNA, 201 bp, Homo sapiens
gaaggcaccgaccctgaagtactgtaccgcagagctgtcctcctgcagaggtggctgtggtcctggacctatgggcccttcccttcccccaacattgagcyttgtgtgtctgcatggaggaggttcccaaggtctcatagtataagctgttcaagggtcagagaagcccccaggtcctgccttttcctgtccctttatgtt

SEQ ID NO: 452626 - DNA, 201 bp, Homo sapiens
ttcaagggtcagagaagcccccaggtcctgccttttcctgtccctttatgttggggagttgggggtgttacaggtatgctaaactctttagctgcagtctrtctacccatgccagattcatcaagatcctcgatagtgtcctgcaccacctggtacctgcctgggaccacacactgggcaccttcagtgagattaaggtga

SEQ ID NO: 452627 - DNA, 201 bp, Homo sapiens
gctaaaagggcagggagagggacacgttggtggtcaagaagagggaaatgaggaggggcttttggagatcccgccaaagaggtgttctgtgaacccctccygctgacacacctactgaagggtccactgagacagcaaagcaggaagggtggaaagggtccgccaggggcagtgcctgacatgtgctagaggtgacgtaga

SEQ ID NO: 452628 - DNA, 201 bp, Homo sapiens
tttggagatcccgccaaagaggtgttctgtgaacccctcccgctgacacacctactgaagggtccactgagacagcaaagcaggaagggtggaaagggtcygccaggggcagtgcctgacatgtgctagaggtgacgtagaatctgggatcagcgacaaaagatcacacctagaaccgtggtcaaggatgtgagccagatt

SEQ ID NO: 452629 - DNA, 201 bp, Homo sapiens
ttagaacattctggtatgtgagtttttgttgcacataaggtatttatgttggacaaatatttaagagaaaaattattgaatttaggtatgtataacctcasatttggagaatactgctaaacagtttttcaaagttgttgttcattttaaataacagcatatgggccaggcactattgctcatgcctgtaatcccaacact

SEQ ID NO: 452630 - DNA, 201 bp, Homo sapiens
aattattgaatttaggtatgtataacctcagatttggagaatactgctaaacagtttttcaaagttgttgttcattttaaataacagcatatgggccaggmactattgctcatgcctgtaatcccaacactttgggaagccaaggcaggaggattgcttgaggccagaagtttgagaccagcctgggcaatatagtgagac

SEQ ID NO: 452631 - DNA, 201 bp, Homo sapiens
ctctttttttttcttcctttattgagacggcgtctcactctgttgcccaggctggagtgcaatggcgagatctcggctcactgcaaccactgcctcttggrttcaagcgattctcctgcttcagcctcctgagtagctgggattacaggcgcccgccaccatgcctggctaattttttgtatttttagtagacacggggtt

SEQ ID NO: 452632 - DNA, 201 bp, Homo sapiens
agaatttgctcatcatcccaaatagaatatctatactcattagcagcctctccctggctcttcacccttctcccgttcctggctaccatgaatctgtgtcygtctgtatagatttgcctattttggatctcttctcttctgttctcttctctttttaaagatggagtgtctcactgtgtcacccaggctggagtgcagtgg

SEQ ID NO: 452633 - DNA, 201 bp, Homo sapiens
gtgcaatggcgagatctcggctcactgcaaccactgcctcttgggttcaagcgattctcctgcttcagcctcctgagtagctgggattacaggcgcccgcmaccatgcctggctaattttttgtatttttagtagacacggggtttcaccatgttggccagactggtctaaactcctgacctcagatgatccactcacctc

SEQ ID NO: 452634 - DNA, 201 bp, Homo sapiens
aaaggaggaggcagatttgaaaaagaataatattaataaaaatgaaaagtatatagtcattaaaattaaaaactcaatggacagattagagacagctgaargggaattagggacttggaaggtacaggaaatttcacagaaagcagtttagagagattaagagatggaaaatatgaaagagagattaagagacaagtagga

SEQ ID NO: 452635 - DNA, 201 bp, Homo sapiens
aagaataatattaataaaaatgaaaagtatatagtcattaaaattaaaaactcaatggacagattagagacagctgaaggggaattagggacttggaaggyacaggaaatttcacagaaagcagtttagagagattaagagatggaaaatatgaaagagagattaagagacaagtaggacagaatgagaaattctaatata

SEQ ID NO: 452636 - DNA, 201 bp, Homo sapiens
tgtccttaaacagggaatactcattagcaaactaattaaggaccttaacaggagggacggtaatttgttgggttttagaagacttagtacaataaatatawtgattgagtttgggtttgccaaggaattaaagagtccgcacttccctaataaaaataaaatgaaaatacttttttggaaaactgacagtaaggcagtaat

SEQ ID NO: 452637 - DNA, 201 bp, Homo sapiens
attaaacattacctgaattggtagagaaattattaatagctgttgctttttaaaaatagacatttactgccagtctctggggaggagggagaagcagaaasgtgcaggtgctgatggctttgaagggcattagctgtgcctcttccattctcattttctcttccctcattcccttttccaaactgagaacctggattccat

SEQ ID NO: 452638 - DNA, 201 bp, Homo sapiens
gcagggaatgcagaggctactcagccttcactgaagttctataaggtttcactggaatgggacttctgggctgccctgattttactcttgtgtcagcagtytgggccacaactgccaatttctaaaggccgaggaaagatagtgattgtcccaaggcaatgatggaagagaagagtggaactcaagttgctttttctactg

SEQ ID NO: 452639 - DNA, 201 bp, Homo sapiens
agtagagacagggtttcaccatgttgcccaggctggtctcaaactcctggcctcaagtgatccgcccgcctcagcttcccaaagttttgggattacaggcrtgagccatcactcctggccctattttggctatttcatatagtggagtcatacaacatgtggccttttgtgtctggcttctttctgtcagcataatgctct

SEQ ID NO: 452640 - DNA, 201 bp, Homo sapiens
atgttttcctggatgtttagttggttgtctttgaatatgtccaactccagttatttctgggaatacccaaaggcacacctgttcactatcacccagtgaaytgccatgtgtttgtctcctgtcatggtaacatttgcattcagggagaggcctctgctctctgcagaacagtgtgaaatcacctcatttttgccttcaatg

SEQ ID NO: 452641 - DNA, 201 bp, Homo sapiens
ccagactgagtctactttcaagatctattttgcactggagatgtaaatttccacttaaaaatgcaaagtgagcattaacacagaggcgtggctaaagttayttgctctgaaaaagatgcgcagatatttttgtgtctggtgggaaaggagagagtgtcaaaggatggacaaaggccacctctgtgtgaaggtggcttttgt

SEQ ID NO: 452642 - DNA, 201 bp, Homo sapiens
ttcctggctaccatgaatctgtgtctgtctgtatagatttgcctattttggatctcttctcttctgttctcttctctttttaaagatggagtgtctcactstgtcacccaggctggagtgcagtggcgtgatctcggctcactgcaacctccacctcctgggttcaagtgattctcctgcctcagcctcctgaatagcagg

SEQ ID NO: 452643 - DNA, 201 bp, Homo sapiens
aaacaacctaatgtcaagttaggaagtgtggcaaaaaggaacaaagtcagggtgactgccattctagaaagggtggtgagggaaggtctccttgagcagaycctgtgggagtggaagggtaagtcacgagactctctggaggaagaagattccaggtggaaatgccttagtgggtgttaaacgctttaacgggtgttagcc

SEQ ID NO: 452644 - DNA, 201 bp, Homo sapiens
agatgctgcttccctcaggctgtgatgaccttcaactggccctcatccccaagaacctcagcttcttcctctgtattaaggaaataaccatagccccgtcygtctgtcacaatgtagaagcggggatgagaagtgaaaagtgaggtcttgcaaaggtctcgcaagtcctctgcaaagctaaggggtattactggacagcga

SEQ ID NO: 452645 - DNA, 201 bp, Homo sapiens
gagatgggtttcaccatgttggccaggttggtctcaaactcctgacctcaggtgatccacctgccttggcctcccaaagtgctggccaggcatgagccacygcacctggccaccactgcctgtttttgtaccgcttggcaagctaagaatggttttcacatttttgtttcttttttttttggagacggagtctcactctgt

SEQ ID NO: 452646 - DNA, 201 bp, Homo sapiens
tatctatctatctatctatctatctatctatcttctatctatctatctatctatctatctatctatttatatctatctatctatctatcttctatttatawctatctatctatcttctatttatatctatctatctatctatctatctaatctatctatctacctacctatgtatctataatctatctatctatccatccc

SEQ ID NO: 452647 - DNA, 201 bp, Homo sapiens
atacgtctctctgatgtaactactgcgctcaggcaacccactgtggagcttcacagtggttctctgccaaagattctgaggtttttagcctgagatgatakgtcaaaaccagggaggtgctcatgggggaaagcagcactggacagagtctagatgctgcttccctcaggctgtgatgaccttcaactggccctcatcccc

SEQ ID NO: 452648 - DNA, 201 bp, Homo sapiens
tctatctatctatctatctatctatctatctatcttctatctatctatctatctatctatctatctatttatatctatctatctatctatcttctatttatatctatctatctatcttctatttatatctatctatctatctatctatctaatctatctatctacctacctatgtatctataatctatctatctatccatc

SEQ ID NO: 452649 - DNA, 201 bp, Homo sapiens
gagagaagagagaagtgcatggactgaggtctgtccagggcctgtcaagagccagtaaccgttgctgtgcgtcaaggatgccaagatggtgcctgctccaygagcaacaaagcccaggggcccagcaagccaaggctgcttgcctcttcccctggggccagctgtgcatcttgtggatggctgaagttgagcaacccataa

SEQ ID NO: 452650 - DNA, 201 bp, Homo sapiens
cactgctgcctgtttttgtactgcttggcaagctaagaatggttttcacatatttgaatatttgaaaaaaatttttcaagaataccattttgtggcacacraaaattatatgaaattcaagtttcaatgtccacaaataaagttttataggaacatagcatgctcactcatttaggtattgttacggctgcttccacacta

SEQ ID NO: 452651 - DNA, 201 bp, Homo sapiens
tctcctctatcgatatctatctatctatctatctatctatctatctatctatctatctatcttctatctatctatctatctatctatctatctatttatatctatctatctatctatcttctatttatatctatctatctatcttctatttatatctatctatctatctatctatctaatctatctatctacctacctatg

SEQ ID NO: 452652 - DNA, 201 bp, Homo sapiens
ctctcctctatcgatatctatctatctatctatctatctatctatctatctatctatctatcttctatctatctatctatctatctatctatctatttatatctatctatctatctatcttctatttatatctatctatctatcttctatttatatctatctatctatctatctatctaatctatctatctacctacctat

SEQ ID NO: 452653 - DNA, 201 bp, Homo sapiens
ttggcctcccaaagtgctggccaggcatgagccactgcacctggccaccactgcctgtttttgtaccgcttggcaagctaagaatggttttcacatttttrtttcttttttttttggagacggagtctcactctgtcacccaggctggagtgcagtggcacaatctcagctcactacaagctccgcctcccgggttcacgc

SEQ ID NO: 452654 - DNA, 201 bp, Homo sapiens
gccctctcctctatcgatatctatctatctatctatctatctatctatctatctatctatctatcttctatctatctatctatctatctatctatctatttatatctatctatctatctatcttctatttatatctatctatctatcttctatttatatctatctatctatctatctatctaatctatctatctacctacc

SEQ ID NO: 452655 - DNA, 201 bp, Homo sapiens
tcacacagtgtgtgtccttttgtgacagacttatttcactttgcataatgtccttaatattcatccatgttgtagcatgtgtcagattttccttccttcttaacattgtgtaatattccattgtacgcatagactacatttagcttatctgttcacctgtggatggacacttgggttgctatagtgaataatattgctgta

SEQ ID NO: 452656 - DNA, 201 bp, Homo sapiens
caccatgcccagccctctcctctatcgatatctatctatctatctatctatctatctatctatctatctatctatcttctatctatctatctatctatctatctatctatttatatctatctatctatctatcttctatttatatctatctatctatcttctatttatatctatctatctatctatctatctaatctatct

SEQ ID NO: 452657 - DNA, 201 bp, Homo sapiens
atcacacagtgtgtgtccttttgtgacagacttatttcactttgcataatgtccttaatattcatccatgttgtagcatgtgtcagattttccttccttcttaacattgtgtaatattccattgtacgcatagactacatttagcttatctgttcacctgtggatggacacttgggttgctatagtgaataatattgctgt

SEQ ID NO: 452658 - DNA, 201 bp, Homo sapiens
gagacaagtaggacagaatgagaaattctaatatacatgtaatggggtttccagaaggtaagaagatagataatggggtcgggcatggtggctcatgcctrtaatcccagcactttgggaggccaaggtgggtggatcacttgaggtcaagtgttcaagaccagtgtgggcaacatggtgaaaccccatctctacttaaaa

SEQ ID NO: 452659 - DNA, 201 bp, Homo sapiens
gccaccatgcccagccctctcctctatcgatatctatctatctatctatctatctatctatctatctatctatctatcttctatctatctatctatctatctatctatctatttatatctatctatctatctatcttctatttatatctatctatctatcttctatttatatctatctatctatctatctatctaatctat

SEQ ID NO: 452660 - DNA, 201 bp, Homo sapiens
aatcacacagtgtgtgtccttttgtgacagacttatttcactttgcataatgtccttaatattcatccatgttgtagcatgtgtcagattttccttccttcttaacattgtgtaatattccattgtacgcatagactacatttagcttatctgttcacctgtggatggacacttgggttgctatagtgaataatattgctg

SEQ ID NO: 452661 - DNA, 201 bp, Homo sapiens
gtatgagccaccatgcccagccctctcctctatcgatatctatctatctatctatctatctatctatctatctatctatctatcttctatctatctatctatctatctatctatctatttatatctatctatctatctatcttctatttatatctatctatctatcttctatttatatctatctatctatctatctatcta

SEQ ID NO: 452662 - DNA, 201 bp, Homo sapiens
cccctttgatgatagcagcttttttcgggggagcaggggtggccaaacttcctagccttattttatcttcctttctagttctccccagaggctgctgggtycacctctccctctgccagacagacaggctcagacatgcaagaacggaagggggtgtgggggttggtgggaggattaagttggggaaagccagtcttgtct

SEQ ID NO: 452663 - DNA, 201 bp, Homo sapiens
ggattacaggtatgagccaccatgcccagccctctcctctatcgatatctatctatctatctatctatctatctatctatctatctatctatcttctatcyatctatctatctatctatctatctatttatatctatctatctatctatcttctatttatatctatctatctatcttctatttatatctatctatctatct

SEQ ID NO: 452664 - DNA, 201 bp, Homo sapiens
cgtacacacacgtacactcactcactcactcactcatctattcatctatttttggcctaagtgcctttggacacttcttcggaaaagcacatgaactcttyggagtctcctgttccacttggtaaatttcctatagccacgcactgaaagtccctgctgccctccttcctctgagcttgtggggcccacagatcccctgct

SEQ ID NO: 452665 - DNA, 201 bp, Homo sapiens
caaactcctgagctcaggcaatctgcccacctcggcctcctaaagtgctaggattacaggtatgagccaccatgcccagccctctcctctatcgatatctatctatctatctatctatctatctatctatctatctatctatcttctatctatctatctatctatctatctatctatttatatctatctatctatctatct

SEQ ID NO: 452666 - DNA, 201 bp, Homo sapiens
ctgggggtgatgggagacagtgacagatcatcaggcatttgattatcataaagagcatgcaacctagatcccttgcatgcacagttcacaacagagtttgygctcctataagaatctgatggctctgctgatttgacaggggatcaggcagtaatgggagagatggggactggctgtaaatacagataaagcttcactcgc

SEQ ID NO: 452667 - DNA, 201 bp, Homo sapiens
aaggctgcttgcctcttcccctggggccagctgtgcatcttgtggatggctgaagttgagcaacccataacaggctcctgacccactgtgagatggtggcwtgtgaaaggaccagcatccaacagtcttgcccttactatattagtaatttcctggggctacaggagctatttactacaaactgagtgacttaaaacaatg

SEQ ID NO: 452668 - DNA, 201 bp, Homo sapiens
gcccgattcgtgcattgttcattgctcaattaaactcctttaaatttaatttggctgaagtttttcttttaatgatactatgatgtgtcattattatttcrcttttcaaattattcaaaattattttcaattttatggtatggtacataccgtaaaatttctgtactcttttaaagcttacatttcagtggttttcagtat

SEQ ID NO: 452669 - DNA, 201 bp, Homo sapiens
tggaatcacacagtgtgtgtccttttgtgacagacttatttcactttgcataatgtccttaatattcatccatgttgtagcatgtgtcagattttccttccttcttaacattgtgtaatattccattgtacgcatagactacatttagcttatctgttcacctgtggatggacacttgggttgctatagtgaataatattg

SEQ ID NO: 452670 - DNA, 201 bp, Homo sapiens
atctcatctaagtggaatcacacagtgtgtgtccttttgtgacagacttatttcactttgcataatgtccttaatattcatccatgttgtagcatgtgtcrgattttccttccttcttaacattgtgtaatattccattgtacgcatagactacatttagcttatctgttcacctgtggatggacacttgggttgctatag

SEQ ID NO: 452671 - DNA, 201 bp, Homo sapiens
gtcacactgcaagtgagtggtggcactagtcacccaggagtcctcctgactccatggtatcctgaccccagaccagcagccttatttgtggttaaagaacrtggaaaaacagcttatgtttgaattttaaaatcatgccagtactaaagatctgcattccatgaatattgagctttgctgtgtgcgggttgctacgaattt

SEQ ID NO: 452672 - DNA, 201 bp, Homo sapiens
tcaaactcctgagctcaggcaatctgcccacctcggcctcctaaagtgctaggattacaggtatgagccaccatgcccagccctctcctctatcgatatctatctatctatctatctatctatctatctatctatctatctatcttctatctatctatctatctatctatctatctatttatatctatctatctatctatc

SEQ ID NO: 452673 - DNA, 201 bp, Homo sapiens
tattgcattgccaattgatggaaggacaaaaaaaggaaacttaccaatgagcagtttcagatgaacttaaattctcagaaatcttgaagaatgaatgaacyataactttctgaagttgcaaaaatgttcaagtcggaagtgacccatgggaagcaacctggtccttaattaggactggaaagaaaacggaggcccagcgag

SEQ ID NO: 452674 - DNA, 201 bp, Homo sapiens
tctcaaactcctgagctcaggcaatctgcccacctcggcctcctaaagtgctaggattacaggtatgagccaccatgcccagccctctcctctatcgatatctatctatctatctatctatctatctatctatctatctatctatcttctatctatctatctatctatctatctatctatttatatctatctatctatcta

SEQ ID NO: 452675 - DNA, 201 bp, Homo sapiens
gggttggtgggaggattaagttggggaaagccagtcttgtctttgtagattaccagaactgacacacgtacacacacgtacactcactcactcactcactcatctattcatctatttttggcctaagtgcctttggacacttcttcggaaaagcacatgaactctttggagtctcctgttccacttggtaaatttcctata

SEQ ID NO: 452676 - DNA, 201 bp, Homo sapiens
gtctcaaactcctgagctcaggcaatctgcccacctcggcctcctaaagtgctaggattacaggtatgagccaccatgcccagccctctcctctatcgatatctatctatctatctatctatctatctatctatctatctatctatcttctatctatctatctatctatctatctatctatttatatctatctatctatct

SEQ ID NO: 452677 - DNA, 201 bp, Homo sapiens
ggggttggtgggaggattaagttggggaaagccagtcttgtctttgtagattaccagaactgacacacgtacacacacgtacactcactcactcactcactcatctattcatctatttttggcctaagtgcctttggacacttcttcggaaaagcacatgaactctttggagtctcctgttccacttggtaaatttcctat

SEQ ID NO: 452678 - DNA, 201 bp, Homo sapiens
cagctcttcactgcatgggagggcttttgttgaacagtgagtttctgtgccccgctccctttttggccccttttgcccaagtggagtgacactttatcaaytgggggggcaggcaacgaatagaggatattaatgattgctaacggacccccatctgctgttccgcctgcagcttttatgaaacccacattttaaaattaa

SEQ ID NO: 452679 - DNA, 201 bp, Homo sapiens
gggggttggtgggaggattaagttggggaaagccagtcttgtctttgtagattaccagaactgacacacgtacacacacgtacactcactcactcactcactcatctattcatctatttttggcctaagtgcctttggacacttcttcggaaaagcacatgaactctttggagtctcctgttccacttggtaaatttccta

SEQ ID NO: 452680 - DNA, 201 bp, Homo sapiens
tctcttctgtttgttctgtgtttcaagtaatatgtttctatcatgattaaagtcattttttttttgtcaaagaagtccagctgtttgaaccatctgaaccrgaagagtggaaaggaattgaggtgtttctccctccttctagaaagttaagggtagcagaatttgaacaccacaagcctcagagagaagtgacagaggtga

SEQ ID NO: 452681 - DNA, 201 bp, Homo sapiens
tgggggttggtgggaggattaagttggggaaagccagtcttgtctttgtagattaccagaactgacacacgtacacacacgtacactcactcactcactcactcatctattcatctatttttggcctaagtgcctttggacacttcttcggaaaagcacatgaactctttggagtctcctgttccacttggtaaatttcct

SEQ ID NO: 452682 - DNA, 201 bp, Homo sapiens
gggtttttttaattaaaaattttgctcacttttcagaaaccaaaagagaaaactatcacagaaaatgtttttctcttctgtttgttctgtgtttcaagtamtatgtttctatcatgattaaagtcattttttttttgtcaaagaagtccagctgtttgaaccatctgaaccggaagagtggaaaggaattgaggtgtttct

SEQ ID NO: 452683 - DNA, 201 bp, Homo sapiens
gtgtgggggttggtgggaggattaagttggggaaagccagtcttgtctttgtagattaccagaactgacacacgtacacacacgtacactcactcactcactcactcatctattcatctatttttggcctaagtgcctttggacacttcttcggaaaagcacatgaactctttggagtctcctgttccacttggtaaattt

SEQ ID NO: 452684 - DNA, 201 bp, Homo sapiens
tcggttgcacccaaaatggacatccaacacaaagagcccattttgaaggctggccagaggctgaccaagggtcctagtaggaaaatttcttacctctgagwtggctgtttcaaatgttctcatctctccttagaactccttccctttctcattcccatctgatgatattgcttctcattgattgtagtgagaaaatagaag

SEQ ID NO: 452685 - DNA, 201 bp, Homo sapiens
tgcaagaacggaagggggtgtgggggttggtgggaggattaagttggggaaagccagtcttgtctttgtagattaccagaactgacacacgtacacacacrtacactcactcactcactcactcatctattcatctatttttggcctaagtgcctttggacacttcttcggaaaagcacatgaactctttggagtctcctg

SEQ ID NO: 452686 - DNA, 201 bp, Homo sapiens
aagtaagcagatgttacagggtggggcttccaggaaagctctttaaaagaagacagaaaaaaaaaaaaatgttggtgtcaggggaataaattggcacgcayctttcatcatctgttgtcccatttcttctccctggaatgctgatgcaatgctggaggcagagtcgccattttgtagtcatgcggtgactgtgagcacgaa

SEQ ID NO: 452687 - DNA, 201 bp, Homo sapiens
taggggtgctgcaattcaagatgagctttgggtggggacacagccaaaccatatcaagaacaattgatccaaaggctgcaggattgtccacaactttccaytggaatcctaaagacatttgaaactctaaggactttgaggtagagattgactttctcttgcatatgccattaagtaggtttgcagtaaatagttgttgaa

SEQ ID NO: 452688 - DNA, 201 bp, Homo sapiens
aggttgcggtgagccaagattgcgccattgcactccagcctgggcaacaaggtagaaactccacgaaaacaaatgaaccttggctgcatggagcaacatgragaaatctccaaaaatgattttgagtgaaagaaaccaagcacaaaagaaggtgtactgaaagattccatttatatgaaattcaaaaagcaaaactaaact

SEQ ID NO: 452689 - DNA, 201 bp, Homo sapiens
gcgccaccacatccagctaatttttgtatttttaatagagacggggtttcaccctgttggccaggctggtcttgaactcctgacctcaagtgatccacccrcctcggtgtcccaaagtgctgggattacaggcgtgagccactgcacgaggcctgataaatttcaatgatttgactgttctggtggatgaaggccttggat

SEQ ID NO: 452690 - DNA, 201 bp, Homo sapiens
catgcgccaccacatccagctaatttttgtatttttaatagagacggggtttcaccctgttggccaggctggtcttgaactcctgacctcaagtgatccayccacctcggtgtcccaaagtgctgggattacaggcgtgagccactgcacgaggcctgataaatttcaatgatttgactgttctggtggatgaaggccttg

SEQ ID NO: 452691 - DNA, 201 bp, Homo sapiens
aaaattaagaatttttgttcattaaaagatgacagtaagagggtgaaaaggtaagcaactattcagaatacacacacacacacacacacacacacacacamaaaaaaaaaactcttacaagccagtaagaataagataacccagtagaaaaagggacaagacactgggatgggtacttcataaaacaggctatccagatta

SEQ ID NO: 452692 - DNA, 201 bp, Homo sapiens
aactaaaaagactgataataataactgttggtgaggatgtaaagcaaagggaattctcatacatggctggtaagagaataaattgacatagccactttgaraaaacagtttagcattctctattaaagtagaagatatgcgtatattatgacccaacaattccactcctagatatgtgcccaatagaaatgcatgcacgtg

SEQ ID NO: 452693 - DNA, 201 bp, Homo sapiens
tatacatgtttacatatacagcacagtcatcatgcatagaagtacatagaattaatttcagaggcatacatccagtctaaaaacagtgattacttctagaraagggactgagtatttgctgagagggctatccgtatgattggtataactaaaaataaacaaacaaaagaagaagaaagaaaggaggaagagaggaaagag

SEQ ID NO: 452694 - DNA, 201 bp, Homo sapiens
tcctaaggctgttttaaaagtttccgttccctccctcccttcctcccaccccatcccccttcttcctttccttcctccctcccttcctcccttctcttcctccctttctcccttgtcttcctccttttctcccatcctcccttcctccctctttccttcttttttcccttcctcccgccctccttccttcttccatcatta

SEQ ID NO: 452695 - DNA, 201 bp, Homo sapiens
aagtacatagaattaatttcagaggcatacatccagtctaaaaacagtgattacttctagaaaagggactgagtatttgctgagagggctatccgtatgaytggtataactaaaaataaacaaacaaaagaagaagaaagaaaggaggaagagaggaaagaggggagggaaggaagaagagatgagcaaacctagaatttt

SEQ ID NO: 452696 - DNA, 201 bp, Homo sapiens
ttcctaaggctgttttaaaagtttccgttccctccctcccttcctcccaccccatcccccttcttcctttccttcctccctcccttcctcccttctcttcctccctttctcccttgtcttcctccttttctcccatcctcccttcctccctctttccttcttttttcccttcctcccgccctccttccttcttccatcatt

SEQ ID NO: 452697 - DNA, 201 bp, Homo sapiens
cttcctaaggctgttttaaaagtttccgttccctccctcccttcctcccaccccatcccccttcttcctttccttcctccctcccttcctcccttctcttcctccctttctcccttgtcttcctccttttctcccatcctcccttcctccctctttccttcttttttcccttcctcccgccctccttccttcttccatcat

SEQ ID NO: 452698 - DNA, 201 bp, Homo sapiens
tcttcctaaggctgttttaaaagtttccgttccctccctcccttcctcccaccccatcccccttcttcctttccttcctccctcccttcctcccttctcttcctccctttctcccttgtcttcctccttttctcccatcctcccttcctccctctttccttcttttttcccttcctcccgccctccttccttcttccatca

SEQ ID NO: 452699 - DNA, 201 bp, Homo sapiens
ctttcttcctaaggctgttttaaaagtttccgttccctccctcccttcctcccaccccatcccccttcttcctttccttcctccctcccttcctcccttctcttcctccctttctcccttgtcttcctccttttctcccatcctcccttcctccctctttccttcttttttcccttcctcccgccctccttccttcttcca

SEQ ID NO: 452700 - DNA, 201 bp, Homo sapiens
atctctttcttcctaaggctgttttaaaagtttccgttccctccctcccttcctcccaccccatcccccttcttcctttccttcctccctcccttcctcccttctcttcctccctttctcccttgtcttcctccttttctcccatcctcccttcctccctctttccttcttttttcccttcctcccgccctccttccttct

SEQ ID NO: 452701 - DNA, 201 bp, Homo sapiens
gcatttggtggctcaacacaagctctagtaccaggaggtatggcatctgctacaaaaacaaaatgcagtcgtcacaatttgtgctcatcaaaatgcattarcatagtttctgccatcaaaacctgcttgacattaagaaggggtcctcttgctagggtacccaaccacagagctgctccctcagagggtgaaaatatgctt

SEQ ID NO: 452702 - DNA, 201 bp, Homo sapiens
gatctctttcttcctaaggctgttttaaaagtttccgttccctccctcccttcctcccaccccatcccccttcttcctttccttcctccctcccttcctcccttctcttcctccctttctcccttgtcttcctccttttctcccatcctcccttcctccctctttccttcttttttcccttcctcccgccctccttccttc

SEQ ID NO: 452703 - DNA, 201 bp, Homo sapiens
tggtccaagaagagggctgcctgcaagctatgaatagagcttacagagtgtttaaaggtggaaagagactttgctcctgattctagactttatctcctatsctcaaggtccatgtcttggtagctctgctcagatctacccttccagagtctgtaatataaggctgacccgagtttgaatcctagctctgccacttagtag

SEQ ID NO: 452704 - DNA, 201 bp, Homo sapiens
ggtgatctctttcttcctaaggctgttttaaaagtttccgttccctccctcccttcctcccaccccatcccccttcttcctttccttcctccctcccttcctcccttctcttcctccctttctcccttgtcttcctccttttctcccatcctcccttcctccctctttccttcttttttcccttcctcccgccctccttcc

SEQ ID NO: 452705 - DNA, 201 bp, Homo sapiens
atcagccatttctccagggagccctggataagccattgctaaagaatcattttagaaaccaagatctaggtgctaaatgtgtccaacctggcccccccccgcttttttttttttgagacaagatttcgctctgttgcccaagctggagtgtggtggtgctatctcgcctcaccacaacctccgcctcctgggctcaagcca

SEQ ID NO: 452706 - DNA, 201 bp, Homo sapiens
tagagagagttcccataggcctcacatccactgtttcctgttattaacatcttatgtaagtagagtccatttgtcacaattaatgagccaggtacattatyattaactaaattccacacttgattcgtattttcttcaggttttcctaatgtcgtttatgtactgttttctgttttaggatcccactggggacaccacatt

SEQ ID NO: 452707 - DNA, 201 bp, Homo sapiens
gggaatttaatcaactagcgggacctttccaacttacatttcccagtgtttgttggatgatacgtttgcctaataagttaaagcttccaaaaatagaaagkaaagcttggtgacactaagctctggcatgctgtcatcttctggctaggggtcttgtgcttctgtttttctatttctgaccaaagacataaaatgtgttgt

SEQ ID NO: 452708 - DNA, 201 bp, Homo sapiens
ctctgcctatggagagttgtactaacttatactctttagaggatataatgacctaatataggcaagaaaatatagtacttattattagaataacaatccayctataaaatgcatctgttatggaaacacagctcatggtgagaaccgtaaatagctttgttttccattttctatactgcctccccaaccaatacagacagt

SEQ ID NO: 452709 - DNA, 201 bp, Homo sapiens
cctggaagccaggaaaacaccatctgcatgggtcagccccactgaccagcacaggggaagaagcactggatctgactggctcagtggtccgtaaggaatayggcaggaccgactcctggctgacaaaggtgggagtcattgaactagtggaattctggccatcacctcacgcacctacttcatggcatgctttcatctgaa

SEQ ID NO: 452710 - DNA, 201 bp, Homo sapiens
gccaaactcacctggaagccaggaaaacaccatctgcatgggtcagccccactgaccagcacaggggaagaagcactggatctgactggctcagtggtccrtaaggaatacggcaggaccgactcctggctgacaaaggtgggagtcattgaactagtggaattctggccatcacctcacgcacctacttcatggcatgct

SEQ ID NO: 452711 - DNA, 201 bp, Homo sapiens
cactctttaggaggtggagagggaaacagggggattggtctaggtttgtgtgggtcagagccaggtgagaagttatagtagttgctgggcaaagtaaatargaaggagacagaaaggcccaggcacgcagaagaccccagctaaaagggcagggagagggacacgttggtggtcaagaagagggaaatgaggaggggcttt

SEQ ID NO: 452712 - DNA, 201 bp, Homo sapiens
tccttgctatttataatacactttgcaatgctcattatttcttaactttgtcttcccagatagactgggagctccatgaggtccgagacaacctgaagacrcccagctcagcagagactggctacggcaatcactcagtaactatttgttgaattggacataatagaagagctgaagaattttaaacaagtcaccatcagt

SEQ ID NO: 452713 - DNA, 201 bp, Homo sapiens
tacaggtgggagccaccatgcctggtcaaaactctatgcattgaaataacaaatataagaaatagataaaaatataatacataatgaatataataaacaaatataataaatatacaaatatataaatattgtattctatatgtaaactcatgtattttatatatgaatatattatatgcgtaacataatatattgtgtgtg

SEQ ID NO: 452714 - DNA, 201 bp, Homo sapiens
tttagtttgcctggtaaatctagaaataccagggtgacccccactgagacatcatagtacccaaaggaaaatgttgcttccttcattctgtgaccatagasagtttaaaagtgtgtagccaaaacttttgttagttttagaggagatgcatctaatgattttgctgtggttgttaggccagaagttcatttagagttcatc

SEQ ID NO: 452715 - DNA, 201 bp, Homo sapiens
ttacaggtgggagccaccatgcctggtcaaaactctatgcattgaaataacaaatataagaaatagataaaaatataatacataatgaatataataaacaaatataataaatatacaaatatataaatattgtattctatatgtaaactcatgtattttatatatgaatatattatatgcgtaacataatatattgtgtgt

SEQ ID NO: 452716 - DNA, 201 bp, Homo sapiens
tatacaaatctagaacgacatttgctgcctaaaggacaatgacgttagatctacacagcaagagttgaatagagctttgttcatcttctcacaaatttgggtggatctaaattgcttattttaggacaatttaaacttcctagtttaaaactttatggttatctggttaacttaggtgaagtctattacattagacagcaa

SEQ ID NO: 452717 - DNA, 201 bp, Homo sapiens
attacaggtgggagccaccatgcctggtcaaaactctatgcattgaaataacaaatataagaaatagataaaaatataatacataatgaatataataaacaaatataataaatatacaaatatataaatattgtattctatatgtaaactcatgtattttatatatgaatatattatatgcgtaacataatatattgtgtg

SEQ ID NO: 452718 - DNA, 201 bp, Homo sapiens
gaaactttgaaccacaaaagacagggactactttaagccttcgcttttgcagattgatacgtgtatctcgtccttttgcagttacttgtcattatctgccyaagaatagtatttctaagaagttgtttctgtgtatcttctggggaagaatttgtccttcagttacatgtgattgcaacatgttgataaaagcaaaagaaa

SEQ ID NO: 452719 - DNA, 201 bp, Homo sapiens
gattacaggtgggagccaccatgcctggtcaaaactctatgcattgaaataacaaatataagaaatagataaaaatataatacataatgaatataataaacaaatataataaatatacaaatatataaatattgtattctatatgtaaactcatgtattttatatatgaatatattatatgcgtaacataatatattgtgt

SEQ ID NO: 452720 - DNA, 201 bp, Homo sapiens
aataaaagtgcaagatgtgcttcagatgtcccccaagagtttaacacaagcagaggtattgaggggcttctgtgtattgaccaaagaagaaacatttttttggctgggcatggtggcttacgcctgtaatctcagcactttgggaggctgaggcgggtggatcacctgaggtcaggagttcgagaccagcctggccaacat

SEQ ID NO: 452721 - DNA, 201 bp, Homo sapiens
aatttttttgtagagacaagggccttactatgttgcccaagctggtcttgaactcctggcctcaagagatactcccaccctagcctcccaaagtgctgggwttacaggtgggagccaccatgcctggtcaaaactctatgcattgaaataacaaatataagaaatagataaaaatataatacataatgaatataataaaca

SEQ ID NO: 452722 - DNA, 201 bp, Homo sapiens
ctgtcatccatcaactatttatctgtctatccattctctatctatctgtctctctgtctgtcaatcagtcagtcaatccatcgccagaattggctcacatkattatggaggctgagaagtcccacaatctgatctaccatctgaaagctggagacccaggaaagctggtggtgtaattcagtcctgggaatggaggtggtg

SEQ ID NO: 452723 - DNA, 201 bp, Homo sapiens
cctgtcatctctctctctctctcctatctatctatctatctatctatcatctatctatctatcatctatctatctatctatctatctatctatctatcatmtaatctatcatctatctatctattcatcatctatttatcaactatcatctctcatctatcaactatttgtttgccatctattatctatctatcatctatt

SEQ ID NO: 452724 - DNA, 201 bp, Homo sapiens
ggcgtgaacccaggaggtggagcttgcagtgagctgagatcgcaccactgcactccagcctgggcgacagagggagactccgtctcaaaaaaaaaaaaaaagaaaaaaaaaaagtgtaattaaatgatgcacaacagaatagaatgggttggaatttaatagaactgaaaagaacagaataggatagcatttttaaaaagt

SEQ ID NO: 452725 - DNA, 201 bp, Homo sapiens
gaagaactgagattcaaatgctttgcagtgtaggtctgcttctgccacaaaatggcagccaggggaggaaggagaaagtgaggaaagggggaaaattagcrctcgggctttgtcagatctcaggagaggcggacgctggctaagccccatcgccttatctttattttgtgagaagcaaactgtggggtttggttgcaagag

SEQ ID NO: 452726 - DNA, 201 bp, Homo sapiens
ttgtcaggctcctacattttactttgaattggtaaaatagtaacttgaagtagactgtaaaacactaggaatgcatattgcaatatctagaacagtcactrtacacacacacacacacacaaagagatattgccaaaaaaggcaacagatacattaaaatgaaatactaaaaactttaagtaattcaaaagaaggcaggaa

SEQ ID NO: 452727 - DNA, 201 bp, Homo sapiens
aagaagaactgagattcaaatgctttgcagtgtaggtctgcttctgccacaaaatggcagccaggggaggaaggagaaagtgaggaaagggggaaaattarcgctcgggctttgtcagatctcaggagaggcggacgctggctaagccccatcgccttatctttattttgtgagaagcaaactgtggggtttggttgcaag

SEQ ID NO: 452728 - DNA, 201 bp, Homo sapiens
gtaatttttttttttggagactaggtcttactctgtggcctaggctgaagtgcagtggcgtgatcctggctcactgcaacctcaacctcctgagctgaagwgatcctcccacctaagcctcctaggtagctgggaccacaggtgtgtgcaaccgaacccggctaagtttattttttgtgtgtatttttttggagagatgga

SEQ ID NO: 452729 - DNA, 201 bp, Homo sapiens
gacagaaatagcatgggactcaatcggactctagtttgcattggtaagggtaaatgtggggccctgggctgtgaaatgtttgccaatcagatttgaggaaycataaaaagttcagaatcagcttttgcttctgccccctgctctacattcctcttgggtgcccagtggtaaactggcaagaagcagcagctgagggcatgg

SEQ ID NO: 452730 - DNA, 201 bp, Homo sapiens
ccataggcatgcccatactggaaacctcgcattagtttctgtatttttttcctggtgatatgtgatcaatacaaagtatttgaatacctgatgttacataytttcccccatctcagccaccactaacccttcccctcatcctcctcaagggaaccttcattaatgatttcatgtgctccttttctggcctttctaatgcct

SEQ ID NO: 452731 - DNA, 201 bp, Homo sapiens
ttacttcctgtcaagaggcagcaggcttcgtgagctggggaagtgccagaagcagccttcgaattagacagacctggacccaaaccctttctcttcccccmacccattttggcatcttggcacgagactgtccccatttctggaaagggtgttcacaagaacagtctggctgggttgttgggatgaccgagtgtgatcatg

SEQ ID NO: 452732 - DNA, 201 bp, Homo sapiens
tctagcagccatgaaggcatgactcattggggatcatcttagaatcctgcttaccacacacgttaaaaaaggtttaaagaagcaaaattagttttaaaaawatgcgttgttattattttatagagacagggtctcactatgtttcctaggctggtctcaaactcctgggctcaagcaatcctcctgcctcagcttcccaaa

SEQ ID NO: 452733 - DNA, 201 bp, Homo sapiens
tacttcctgtcaagaggcagcaggcttcgtgagctggggaagtgccagaagcagccttcgaattagacagacctggacccaaaccctttctcttccccccrcccattttggcatcttggcacgagactgtccccatttctggaaagggtgttcacaagaacagtctggctgggttgttgggatgaccgagtgtgatcatgc

SEQ ID NO: 452734 - DNA, 201 bp, Homo sapiens
gacttagagctcatccagcacaaataaaagcagccttgagagtagggtcaattattgaacctcacagctgactgaggtagtggataacaagtgggatagayaatgtgctaaccaaaaaacataaaagaaaaagcagaggaatgggatgtccttggagagagtgggcgctttaaaaagttctaacaatattcctgggaatat

SEQ ID NO: 452735 - DNA, 201 bp, Homo sapiens
gtcaccaaccatccaaccaaacaataccaattaaatagtaacaacaacaaacccagggcaaaatctgatttccagagttgctatgttatattgttttaaawgtctagtttttaccaaaaattatgaaacacgccaagaaacaagagagtctgtctcatatgcagggaaaaagacactcaatagaaactgtccccaagaggg

SEQ ID NO: 452736 - DNA, 201 bp, Homo sapiens
aaactacagaaaatggaaagtgcggataacgggaactattgtatataaaatgtctagaagaggcaaatccatagatacagaaagatttgtggctgccaggrcctgggcgtggggagacaggaaaatgggagatgactgctaatgggtgtggaggtgctttctgcggcgattaaaatgagataatgataatgtttgcacaac

SEQ ID NO: 452737 - DNA, 201 bp, Homo sapiens
agaattcattcatttggtcaacaaatgtctactgagcacctacaatacatcaggcagggttctaggcactggggatacaatagggaacagaacagataagyctcctgccctcatggtaggtgtgtggttttcaggttactctggaaaaaggatgaacattgggaaagatggaggagagagtgagtattgtgtagaggactg

SEQ ID NO: 452738 - DNA, 201 bp, Homo sapiens
gtatatagatataaacatatgacaggtataacataaagggggagggtaaaagtatgtatatgtttgtcaggctcctacattttactttgaattggtaaaatagtaacttgaagtagactgtaaaacactaggaatgcatattgcaatatctagaacagtcactatacacacacacacacacacaaagagatattgccaaaa

SEQ ID NO: 452739 - DNA, 201 bp, Homo sapiens
caggctggtctcaaactcctcacctcgggtgatccgcacacctcagcctcccaaagtgctgggattacaggcgtgagccactgcatctggccaaattattmttatagctcagttttctaatctgtgtaatagggataataataataatacttactccatggtgatgttggagtgattaaatgagacactatatctagattt

SEQ ID NO: 452740 - DNA, 201 bp, Homo sapiens
tcgattatgttaatcctgagatggcccagatgctgaagttatcagacaaatactttacttgttataaccaagcccatgaggtaaaggtaaacaccttaaartggaaagaaaaaagtgtttggcaaagaaatagaaactattataaaagaatacaatacaacttttgaaaatgaaaattgtaatatctgaaaaacaaaactc

SEQ ID NO: 452741 - DNA, 201 bp, Homo sapiens
gaattgttcagagctgaatttctcattttcccccattctatttcccaactttgatctgagggcagcctagttgtggacctaaaatcctgagaaaaaccctrtatttctggccagaggactgagaaaatggatccctgggaactagataatagggcagcagtccccaacctttttggcactggggaccagtttcatggaaga

SEQ ID NO: 452742 - DNA, 201 bp, Homo sapiens
taggtcatgtgcttgagccctagcagccccggcagcaagggaggctggaaaaggcaggagtgaaggggctcagcttctgtactaggaggttccacgccctrcctcctacacgattcatacataaatagaggattccctgaacccaggaagggagttcagatgctgggcagccaggataattacaaatattctctacgttag

SEQ ID NO: 452743 - DNA, 201 bp, Homo sapiens
gacttcatagtttcacttttaatatgtacgtatattaagttaacacctcaattttttttttttttaaagacggagtctcactctgttgcccaggctggagkgcagtagcatgatctcggttcactgcaacctccacctcccgggctcaagcaattctccttcctcaacttcccaagtagctgggattacaggcatgcgcca

SEQ ID NO: 452744 - DNA, 201 bp, Homo sapiens
cagctacttgggaggatggtgtgggaggactgcttgagtctaggagtttgagaccagcctgggcaccacagttagaccctgtctaaaaaaaaaaaaaaagdgattgttagaataggttaaacacacacacacacacacacacacacacacacacacacacgcacatgcagtctagtattctagtatgcctcttgtttagag

SEQ ID NO: 452745 - DNA, 201 bp, Homo sapiens
taccactacattgtaaactttacaagccactctatatctcttagtgtcaccttagtatctctagtgcctagagctttgacctgcagcagtaggaggtcctkgattattaattggattaatcttgaattttccactgcacttagctcagttcattcatttaacaaaggatgtttttcctctaaccaaaatatgggtagcaat

SEQ ID NO: 452746 - DNA, 201 bp, Homo sapiens
acagtttagcattctctattaaagtagaagatatgcgtatattatgacccaacaattccactcctagatatgtgcccaatagaaatgcatgcacgtgggcwccaagaaacggacaagaacagttaaagcagagctgctcccaacagcctcagaatttactcagcccaattgtccttaacagtaggatggataaataaattg

SEQ ID NO: 452747 - DNA, 201 bp, Homo sapiens
cctcttgggttcaagcgattctcctgcttcagcctcctgagtagctgggattacaggcgcccgccaccatgcctggctaattttttgtatttttagtagasacggggtttcaccatgttggccagactggtctaaactcctgacctcagatgatccactcacctcggcctcccaaagttctgggattacaggcatgagcca

SEQ ID NO: 452748 - DNA, 201 bp, Homo sapiens
ccatgttgcccaggctggtcttgaactcctgagcttaagccatcctcccatctcagcttcctgaagttctggtattacaggtgtgagccaccatgcgtggmggcagcctggccacttttaatctatccattcatttactaaatatacacattttctgagtcccgattttgggcaagactctggggcaggcaagaaaaatga

SEQ ID NO: 452749 - DNA, 201 bp, Homo sapiens
gcactcaggaggagctactattttccctgcctgtttacatgcggcctggggccttgtgggctatttgaaaattaggacacgagaagtccaagcagcacctrgtaattaaactgagtcctctatcagagagaggcgtgaccttgaagggcatccatacaggagccaggggcaaagcagaaggtgggagggattctccaggct

SEQ ID NO: 452750 - DNA, 201 bp, Homo sapiens
gctgcacctgcatcattttgcattcccaccagtggtgatgaagcttccaatttctcccagatcatgatttaacactcatttttattaaatgcaacaacccytcctgcatctggcctgagtgtcctgggccagccaactgcttgctctccatctttcctgtttggtcagaggccctgggtgcagccagtgggttacgcactc

SEQ ID NO: 452751 - DNA, 201 bp, Homo sapiens
agactctggggcaggcaagaaaaatgaggtgcaactaactctattactccatggtccaagaagagggctgcctgcaagctatgaatagagcttacagagtrtttaaaggtggaaagagactttgctcctgattctagactttatctcctatcctcaaggtccatgtcttggtagctctgctcagatctacccttccagagt

SEQ ID NO: 452752 - DNA, 201 bp, Homo sapiens
gttgctcatcagaaaaatgggaattttatatatatatataaaaaatataattatatatttatttataatatgtgtatatataattatatgattataataatcacaaatgggattatatataatatataattatacattaatttataatatatatttatttataatatatgtgtgtatatatacgcatatatacatatgtat

SEQ ID NO: 452753 - DNA, 201 bp, Homo sapiens
cacctgcatcattttgcattcccaccagtggtgatgaagcttccaatttctcccagatcatgatttaacactcatttttattaaatgcaacaacccttccygcatctggcctgagtgtcctgggccagccaactgcttgctctccatctttcctgtttggtcagaggccctgggtgcagccagtgggttacgcactctgat

SEQ ID NO: 452754 - DNA, 201 bp, Homo sapiens
tctcccagatcatgatttaacactcatttttattaaatgcaacaacccttcctgcatctggcctgagtgtcctgggccagccaactgcttgctctccatckttcctgtttggtcagaggccctgggtgcagccagtgggttacgcactctgatcccctcagtgacttctcctgggaggtcaccaaggatactcattcagtc

SEQ ID NO: 452755 - DNA, 201 bp, Homo sapiens
agttgctcatcagaaaaatgggaattttatatatatatataaaaaatataattatatatttatttataatatgtgtatatataattatatgattataataatcacaaatgggattatatataatatataattatacattaatttataatatatatttatttataatatatgtgtgtatatatacgcatatatacatatgta

SEQ ID NO: 452756 - DNA, 201 bp, Homo sapiens
gggattggtctaggtttgtgtgggtcagagccaggtgagaagttatagtagttgctgggcaaagtaaataggaaggagacagaaaggcccaggcacgcagragaccccagctaaaagggcagggagagggacacgttggtggtcaagaagagggaaatgaggaggggcttttggagatcccgccaaagaggtgttctgtga

SEQ ID NO: 452757 - DNA, 201 bp, Homo sapiens
tcgtttagaagcagatgtgaacgatggcccaggtgtgacgatcatggtagaacttgatgcaggacatgtgtgtggcaggaaatacaggcatgttttcacayattccatcaggcacaaatgtgctcttcgtgtccaagagattatcttctaaacttggcctttccagtggcacatgtcagtaaatctctgatacttgactag

SEQ ID NO: 452758 - DNA, 201 bp, Homo sapiens
cccaggtgtgacgatcatggtagaacttgatgcaggacatgtgtgtggcaggaaatacaggcatgttttcacacattccatcaggcacaaatgtgctcttygtgtccaagagattatcttctaaacttggcctttccagtggcacatgtcagtaaatctctgatacttgactagatctgcttctagaaacagaaagaagct

SEQ ID NO: 452759 - DNA, 201 bp, Homo sapiens
ggaggcttagcgggtgaagcccttgacaggagttggagacaggagtttgagaccagcctgggcaacatggtgaaaccctgtctctactaaaaatagaaaamattagccaggtgtggtggtgtgtgcctgcaattctagctactcaggaagctcaggcaggagaactgcttgaacccaggaggcagaggttgcagtgagcta

SEQ ID NO: 452760 - DNA, 201 bp, Homo sapiens
tcactgtaatcccagcctgtaatcccagcactttgggaagccaaagtgggcggatcacctgaggtcaggagcactttgggaggccgaagtgaggggatcayttggggtgaggaattcgagactggcctggcccagatggtgaaatcccatttctaataaaaaatgcaaaaattagctgggcgtggtggcaggcacctgtaa

SEQ ID NO: 452761 - DNA, 201 bp, Homo sapiens
aaaaaaagaaagaggggcttcccaaatcactccagctaatgtggaggctgctctcccacctccaagaatgcctcctcctcccgttatgatgttttcttcayagcatttatcactctctgagatttccacttatttatgtgtttacagtcagccttttcccactagaatagaagccttaagagtagagggactttaattttt

SEQ ID NO: 452762 - DNA, 201 bp, Homo sapiens
caaatagtgattatccaaagaaagaatagggaagcgtaaatagggctggagaagcaacttgttctgggtagggaagcaccatgcttcgggagctgcagggyagtgagtttaacggtggagaatacagctgggatgtggtgagggatcaatctcggtgtgcatggtgcagcccttcgtagatgaccctgatatcagtggaca

SEQ ID NO: 452763 - DNA, 201 bp, Homo sapiens
cagtaaatatttcctgaatgagtgaatgaatgaatggatttggaatgttacccccagtacccctcgttccaggaggcagttagagttttacgtaaacagaratgtgatctgatcaacatgctgtttgagaaggaccactctgggagcccgagagtagaagagggaagacccgggtcagtgaggcaggtaaacaagtgcgtg

SEQ ID NO: 452764 - DNA, 201 bp, Homo sapiens
gtgacctactggatggaagtaagaaataaggtcacctctaggaggttttctgatttctggtacaaggcctgggtatgtggtggggccattcacaggacatragactggaggtggcgcagcctaaaggcaagatactgggttcagctgacacctggaacacccaggtagaaatgtctaatgatcagccaaaacctgggcctg

SEQ ID NO: 452765 - DNA, 201 bp, Homo sapiens
cttcttcagaagaagtttaacttcagaactttaacttcagtaacttcagaactttttagaagtttaagtaacttcttcagaagaaacatgtaatcttcatytttatatgtccaaacctgtctcccttttacaatcacacatgaatcacagtttggatgggaagagatttctagaattacctcagaatttggtcaatgttct

SEQ ID NO: 452766 - DNA, 201 bp, Homo sapiens
ttgctctggccagcctggagacagttcccattggttcctggacttgatctgaatcaactccttcttcctcaccatctcttgcctggtgctgctggctgagrcgttgcacctgtgggggctgtccactcccagctcacgtcttctggcagctccttactctattctaatgcgcctagtggtactgccgattttctcttttcc

SEQ ID NO: 452767 - DNA, 201 bp, Homo sapiens
caccatctcttgcctggtgctgctggctgagacgttgcacctgtgggggctgtccactcccagctcacgtcttctggcagctccttactctattctaatgygcctagtggtactgccgattttctcttttcccagacacctctctccacactccttctcccacattggcctggccctcatggctctttgatcctcatggaa

SEQ ID NO: 452768 - DNA, 201 bp, Homo sapiens
ggccctcatggctctttgatcctcatggaacattctattgtctcctaggtgagaagaaaaggcatcccagcttatattcagacacatggccttgaactcgyaataactcacacatgtaagccacaataacttcatttgcatgcaaccaccttgaatgaatggtctcagtaaatgtgtcatttattctcaatattctggagt

SEQ ID NO: 452769 - DNA, 201 bp, Homo sapiens
ttgtgtatactccccacgtaaggagggtaggcttcatctaaaagcctgcgtgtcaaatactcctttctaatacatcctggtgtgctctgccttgaagtgtktttttcctgtctgcccatccagcatcttatttatgccccattctgtccctctctctcgttgcctttgttctgtggtctcctgggtgatggagttattgtt

SEQ ID NO: 452770 - DNA, 201 bp, Homo sapiens
tttcctttctttctttctttctttctttttctttctttctttctttctttccttccttccttccttccttcctttctctctctctctctctctctctctttctttcttcttttttgagacagagtttcactctgtcacccaggctggagtgcagtggcgccatctcagctcactgcaacctccccctgctgggttcaaaca

SEQ ID NO: 452771 - DNA, 201 bp, Homo sapiens
tctgtgacttgtccgcgatcccacagtcagaaagcatctgagggagactgaacacagttcttctggatgcaaactcagttctcatttcccaacctgactcrgcctctgggtggaggcagcttctttagagaggacgcgcatctgatgtccttgcagagaaaccctctgcagaggctgctggattggcaagggcatagggga

SEQ ID NO: 452772 - DNA, 201 bp, Homo sapiens
ttctttcctttctttctttctttctttctttttctttctttctttctttctttccttccttccttccttccttcctttctctctctctctctctctctctctttctttcttcttttttgagacagagtttcactctgtcacccaggctggagtgcagtggcgccatctcagctcactgcaacctccccctgctgggttcaa

SEQ ID NO: 452773 - DNA, 201 bp, Homo sapiens
tctttctctttctttctttctttctttcctttctttctttctttctttctttttctttctttctttctttctttccttccttccttccttccttcctttctctctctctctctctctctctctttctttcttcttttttgagacagagtttcactctgtcacccaggctggagtgcagtggcgccatctcagctcactgca

SEQ ID NO: 452774 - DNA, 201 bp, Homo sapiens
tttctttctctttctttctttctttctttcctttctttctttctttctttctttttctttctttctttctttctttccttccttccttccttccttccttyctctctctctctctctctctctctttctttcttcttttttgagacagagtttcactctgtcacccaggctggagtgcagtggcgccatctcagctcactg

SEQ ID NO: 452775 - DNA, 201 bp, Homo sapiens
atagttattaccttttctttctttctctttctttctttctttctttcctttctttctttctttctttctttttctttctttctttctttctttccttccttccttccttccttcctttctctctctctctctctctctctctttctttcttcttttttgagacagagtttcactctgtcacccaggctggagtgcagtggc

SEQ ID NO: 452776 - DNA, 201 bp, Homo sapiens
cagaagttgtacatatcactgccactcacatcccattggttggctcttagtaacatagccctacctagaggtaggtgaggctgggaaatgtagtctttacrtgggtgtctgggaaaccaactaaaatctctattaattattagaagttttaaaaagataaatgtttcatgcatgtgtgagaaaacggcattctctaattgt

SEQ ID NO: 452777 - DNA, 201 bp, Homo sapiens
ttgatagttattaccttttctttctttctctttctttctttctttctttcctttctttctttctttctttctttttctttctttctttctttctttccttycttccttccttccttcctttctctctctctctctctctctctctttctttcttcttttttgagacagagtttcactctgtcacccaggctggagtgcagt

SEQ ID NO: 452778 - DNA, 201 bp, Homo sapiens
caatttctccatgtatttctatccattttttgttttatatattttgaggttaattaggtgcattcatatttggcattgtcatgtatttagcattccccatrtatttctatcaattttttggttttttgtattttgaggtttgttcattagatgcattcatatttagctttgtcgtgtcttcttcgagaacgaacccttttc

SEQ ID NO: 452779 - DNA, 201 bp, Homo sapiens
cttttgatagttattaccttttctttctttctctttctttctttctttctttcctttctttctttctttctttctttttctttctttctttctttctttcyttccttccttccttccttcctttctctctctctctctctctctctctttctttcttcttttttgagacagagtttcactctgtcacccaggctggagtgc

SEQ ID NO: 452780 - DNA, 201 bp, Homo sapiens
tgtggggagacttttgatagttattaccttttctttctttctctttctttctttctttctttcctttctttctttctttctttctttttctttctttctttctttctttccttccttccttccttccttcctttctctctctctctctctctctctctttctttcttcttttttgagacagagtttcactctgtcacccag

SEQ ID NO: 452781 - DNA, 201 bp, Homo sapiens
tcctcatccctgactgtggggagacttttgatagttattaccttttctttctttctctttctttctttctttctttcctttctttctttctttctttcttyttctttctttctttctttctttccttccttccttccttccttcctttctctctctctctctctctctctctttctttcttcttttttgagacagagtttc

SEQ ID NO: 452782 - DNA, 201 bp, Homo sapiens
tctcatctatcaactatttgtttgccatctattatctatctatcatctatttatctattaatcatctatttattaactatcaatctatcatctgtcatccrtcaactatttatctgtctatccattctctatctatctgtctctctgtctgtcaatcagtcagtcaatccatcgccagaattggctcacattattatggag

SEQ ID NO: 452783 - DNA, 201 bp, Homo sapiens
catgagcagagcagagacaagatacatgtagtcccagagaaaccaaggatgtcttgtctagttccccaggagccctggatgtacgttctgttactggattstaggatgcactcttgagtcctttgatacatccttgtttttacttttttaatgtaataattacaaaatgatggccaatgagattggcgaaaatataaagag

SEQ ID NO: 452784 - DNA, 201 bp, Homo sapiens
gaagtttaataaagaacagaaatttattgtctcatagttctggagtctgggaagtccaagatcaagatgctggaaggttcagttgtctggtgagggtttgstctctgcattcaagatggtgcttttgagtgctgcatcctctggaaggaggaatgctgtgtcttcacatggtggaaggcagaagggcaagcaaggtgtatt

SEQ ID NO: 452785 - DNA, 201 bp, Homo sapiens
tagcaataatggcaaaccgctattaagcacttcccacactgcaggctgcactgtactttccgtgtattgtgtgtggtatattggacacgaccctatgcctyaggtctgattatgttacagatgaggaaactgaaccacagagttcagttacttgttcaagggtacacagtcattggacacaggcggtctggctttggctcc

SEQ ID NO: 452786 - DNA, 201 bp, Homo sapiens
tattttctagaattgtatataaatagaaccatttagtatgtactcttttctgtctggcttctttcactaagcataattattttgagattcatccatattgwtgaatatatcaacagttcattccttctattgctgagcagaatttcattgtataggtatatcacaatttgtttttccattcacctgttgatggttatttga

SEQ ID NO: 452787 - DNA, 201 bp, Homo sapiens
accgaaatgatcacacaatgtacattcccataagcagtgcatgtttcagttgctccatcttcccaccagcacttggtgttttgagtctttctaattttagycattctaataggtatgcagtggtatttcattccagttttaatttgtattttcttaataactgatgttgaagatcttttcatgtgcttattggcccatctt

SEQ ID NO: 452788 - DNA, 201 bp, Homo sapiens
ccatgctgagtgggcctggctcacccagctctccccgcctggccctgaggactgccccccagttgattttgcggggtcctcccgaggacctttgtttagcrcctggccagggaggcccagcccctggagacccctgcccaccgcagcagtctctggtgcctggcctttgttccctttactaaatctaaaatgcttccacat

SEQ ID NO: 452789 - DNA, 201 bp, Homo sapiens
gtggattaaaagaaagaaaatgtttaaagagctctccaaatgtccgccctaagaagttccatacagtattccattgtgcaaggaacacaaccaatagcacktacaagctgacagagttagagaggtacaaattagcctatgtagcacctgggggcttatggagaagaaaaagaagaatcaaagcaaatgggcatggccaag

SEQ ID NO: 452790 - DNA, 201 bp, Homo sapiens
gtagcacctgggggcttatggagaagaaaaagaagaatcaaagcaaatgggcatggccaagaaggtctgaaaggtgggtgagggtgagtgtagggggatcwggaaataccagcggtttcactgataaaagttacaaacgaaatacatttgaaatgtgacttgcatttgggccattggctgaggaacacagatacatacagg

SEQ ID NO: 452791 - DNA, 201 bp, Homo sapiens
aatttttgtatttttggtagagatggggtttcgccatgttgcccaggctggtctctaactcctaagactaagctatccacctgccttagcctcccaaagtkctgggattacaggcatgcaccatggctcccagccattcagcactttacaactcacacttcattatgtttttgcattcactgttgtggttaaaaagtatga

SEQ ID NO: 452792 - DNA, 201 bp, Homo sapiens
aaaaataagaactttggattacataagagattctctgattaatgtccctgcatgatcagggatcttaaaaaaaaaacaattacataaaactgcctaggctyaccccagaccaattaaaaccgaatccctagaatagggctcaggcatctcttatcgtgttttgttttgtattttttttttaaatctatgctggtgaatctg

SEQ ID NO: 452793 - DNA, 201 bp, Homo sapiens
agtgacattgtacattaatcaattaatggaatatatgtagctgtggccccatgagggagttcttgttaattccattccacaagtggccagggtccactgcyagcctcatgatcccaggtcccgggtcccctctgctaatcttcacttttgggcaccacggtttctctctggttgggtaagtcattccacgaccagtaaggc

SEQ ID NO: 452794 - DNA, 201 bp, Homo sapiens
atcagggatcttaaaaaaaaaacaattacataaaactgcctaggctcaccccagaccaattaaaaccgaatccctagaatagggctcaggcatctcttatmgtgttttgttttgtattttttttttaaatctatgctggtgaatctgttatccactgaaggtgagaatcttcagagttgtgcttctcaaactacaatatgc

SEQ ID NO: 452795 - DNA, 201 bp, Homo sapiens
tgggaggctgaggtgggcggatcacgaggtcaggagatcgagaccatcctggccaacatggcgaaaccctgtctctactaaaaatacaaaaaaaaaaaaacaaaaaattagctgggcgtggtggcatgcgcgtgtagtcccagctacttgggtggctgagacaggagaatggcttgaaccatggagttggaggttgcagtg

SEQ ID NO: 452796 - DNA, 201 bp, Homo sapiens
gtttcaggaccactgttggacttgggagatgctagactggatgacaggtgagatcctttgcagttctgaactgctctgatccctgaaaccaggagagcttyacaggtttgccaaggtgggttccacccagggacacacctcttagtatctaaccaggaaataaggcctccctctctgtggtttccagcatcttctgaactc

SEQ ID NO: 452797 - DNA, 201 bp, Homo sapiens
ttgggaggctgaggtgggcggatcacgaggtcaggagatcgagaccatcctggccaacatggcgaaaccctgtctctactaaaaatacaaaaaaaaaaaaacaaaaaattagctgggcgtggtggcatgcgcgtgtagtcccagctacttgggtggctgagacaggagaatggcttgaaccatggagttggaggttgcagt

SEQ ID NO: 452798 - DNA, 201 bp, Homo sapiens
tccctttgccactgcagcacatggcgtgtgtcccaatatcacgcttctgggcacatgttgttaatccactttgcatatgtttatgtctttgtggctcagcyagattgcaagtttctcggagaccaggatcatgcctttgacctcctgacacagggcacagtgcaattccttgtacttgttaggggtctggaaatatttgta

SEQ ID NO: 452799 - DNA, 201 bp, Homo sapiens
ccaggcatgttttttaagtctttaaaaaatactgttaaagcaaactatatatggatatggcctgaaaaggactccctacttcttcttttttttttttttttgagatgaagtcttgctttgtagcccaggctggagtgcagtggcacgatcttggctcactgcagccttcacctcctgggttcaagagattctcctgcctca

SEQ ID NO: 452800 - DNA, 201 bp, Homo sapiens
taagggagaaccatgtctgtgtttcactacgcagaaaatggtttcatcgtctttgtcctgaaagccactgcctggaagggctgtgcagcgctcagagtggragaggcagacctctgagacaaatgacttcagcatcactacagctgtggctagaatgagaacagcctcaaatttcactaatgaagagattttctgagttcc

SEQ ID NO: 452801 - DNA, 201 bp, Homo sapiens
ttcatggtagccatcaatcctggctactgattgaagtcaactgtagagcttaaaaaatgacagatgtccaccaaaggcctatgaattagaatctgccttaytttattttattttattttttcgagacggagtctcactctgtcacccaagctggggtgcagtggcacgatctcaactcactgcaacctccgcctcccaggt

SEQ ID NO: 452802 - DNA, 201 bp, Homo sapiens
cgagccaggtgtgggatatagtctcgtggtgcgccgttttttaagcccgtcggaaaagcgcagtattcgggtgggagtgacccgattttccaggtgcgtcygtcacccctttctttgactcggaaagggaactccctgaccccttgcgcttcccaagtgaggcaatgcctcgccctgcttcggctcgcgcacggtgcgcgc

SEQ ID NO: 452803 - DNA, 201 bp, Homo sapiens
gagccatttccatccaccaaagatgggcttgaaatgtggtctacctttcaacatggtgccactgagggcttctgagctggctgtgatcatctgacaaaacrctgtgttggccaactcatagaagagtttgctagctggcctggccccaagcagaagcagcaggttactgcccaaattctccaagtgggatgaccagcggct

SEQ ID NO: 452804 - DNA, 201 bp, Homo sapiens
gctgctttgtttacctaatcaagcctgggcaatggcgggctcccctcccccagcctcgctgctgccttgcagtttgatctcagactgctgtgctagcaatmagcgagactccgtgggcgtaggaccctccgagccaggtgtgggatatagtctcgtggtgcgccgttttttaagcccgtcggaaaagcgcagtattcgggt

SEQ ID NO: 452805 - DNA, 201 bp, Homo sapiens
agggcttctgagctggctgtgatcatctgacaaaacgctgtgttggccaactcatagaagagtttgctagctggcctggccccaagcagaagcagcaggtyactgcccaaattctccaagtgggatgaccagcggctatataaagggcaaacaaacaagaaagcctttctttctgagaatgtttccactgcagttaggtta

SEQ ID NO: 452806 - DNA, 201 bp, Homo sapiens
tagaatacaggagtatcacactcacaatggattaatccattagcaacagtaaaactgccatcatggcatcatggcacgcagtgcatgcctaagaagaatayggcaagcaaaagttttttctttgaattgtgccaccccagggctctatggctttggataaataatgtaccttgtttttgtatcagattccttatctacaga

SEQ ID NO: 452807 - DNA, 201 bp, Homo sapiens
tataaactagccctttcatttagcaaaataaaatgcctatccgcttggtaatctgtgcagtggaagtcagagccagagtcttgtttttaaagattttgttyaattcaccacccccatacctcccctcccactgcctagcatcaggctggacaagaagaaaagggacactggcctgcagatgctgccacgtgacatgtcctt

SEQ ID NO: 452808 - DNA, 201 bp, Homo sapiens
tccagagcaccaagtcaaaaggtgcctctaagccctgggcagagtgccaggctctgaaaaacactggctggatctcctcagggaccctggctgagacaggygagtgatttgttcttcaaatgacctttccctccttggaaaagagcacccggaataaaagtgcaagatgtgcttcagatgtcccccaagagtttaacacaa

SEQ ID NO: 452809 - DNA, 201 bp, Homo sapiens
cgaaactgaagttgccttccaatacagatagagggtgcgcagttatgtacaagaagttttaaaactagggcacaggctgggtgtggtggctcatgcctggwaatcccagcactttgggaggccgaggcaggaggatcacttgaggtcaggagtttgagaccagcctggccaacatggtgaaaccttatctctactaaaaat

SEQ ID NO: 452810 - DNA, 201 bp, Homo sapiens
aaattcagtaaatcccaggctgtcacagtttaccacagctgccgtaacaaagcaccatgaagcatgctgcgcctacagagatgtcctgcctcacagttccrgaagccacgtgtcccagatggaggtggcggcagggcgggttcctctgaggctgtgagggaggcgctgtcccaggccctccctggcttccgctgggggtgc

SEQ ID NO: 452811 - DNA, 201 bp, Homo sapiens
gccagcctggagacagttcccattggttcctggacttgatctgaatcaactccttcttcctcaccatctcttgcctggtgctgctggctgagacgttgcayctgtgggggctgtccactcccagctcacgtcttctggcagctccttactctattctaatgcgcctagtggtactgccgattttctcttttcccagacacc

SEQ ID NO: 452812 - DNA, 201 bp, Homo sapiens
agtagctaggactacaggcatgtgccaccacgcccggctaattttttgtatctttagtagagatggggtttcaccgtgttagccaggatggtctcgatctsctgacctcgtgatccgcctgcctcggcctcccatagtcctgggattacaggtgtgagccaccgcgcccagcccaccacacacttttaaataaccagttct

SEQ ID NO: 452813 - DNA, 201 bp, Homo sapiens
gtggatacatgttattagacattctcaaaccccaccgcatgtacaacacaaagagggaaccctaatgtaggctatggactttagttaataataatgtatcratattgtgtcatcaatggaaacagatgtaccacataagtgcaaagtattaataataggggaaaatggtgagggcatgtggggatacacaggctctctctg

SEQ ID NO: 452814 - DNA, 201 bp, Homo sapiens
ggaccagcttctcagagcagagtctccaaacataatgtcgcttccagatgatgcaaatctgatatcagagaatgactaaaagcttgcaactttgcttttartctgttgtggatcaagtttcttttcaaataaatcaaagtctgtgaacttaggaaggaggaaaattgctggatatcttttttggcggagggatggggggcc

SEQ ID NO: 452815 - DNA, 201 bp, Homo sapiens
aaacaaacaacctaatgtcaagttaggaagtgtggcaaaaaggaacaaagtcagggtgactgccattctagaaagggtggtgagggaaggtctccttgagyagatcctgtgggagtggaagggtaagtcacgagactctctggaggaagaagattccaggtggaaatgccttagtgggtgttaaacgctttaacgggtgtt

SEQ ID NO: 452816 - DNA, 201 bp, Homo sapiens
agggttgtgatgacatgcaagtgctgttcccagtctgcccatctgtcttgggaaatcaaggcctaggaagatggactgacttgcccaaggccacctggccrtggtaaacggcacagcaggacttgatctcacagtctggctttagactcagttcctcactactctcctgtaatgcatgacaggtccttgatgaatagccgt

SEQ ID NO: 452817 - DNA, 201 bp, Homo sapiens
aggtatttatgttggacaaatatttaagagaaaaattattgaatttaggtatgtataacctcagatttggagaatactgctaaacagtttttcaaagttgytgttcattttaaataacagcatatgggccaggcactattgctcatgcctgtaatcccaacactttgggaagccaaggcaggaggattgcttgaggccaga

SEQ ID NO: 452818 - DNA, 201 bp, Homo sapiens
aaaacaaagaggaagtgtgtgaacttctgaccctctttgccacatgccatttggtgggtgggtggcatgagcaagcatcctgcagtgggtgtttttatggsaccaagtgacaaagagccaaagagggtgagaactcatgagtagcaagtggaaaactaccaagagctgtcccatcactcctgcaacaaacttcacctcgct

SEQ ID NO: 452819 - DNA, 201 bp, Homo sapiens
acttctgaccctctttgccacatgccatttggtgggtgggtggcatgagcaagcatcctgcagtgggtgtttttatgggaccaagtgacaaagagccaaasagggtgagaactcatgagtagcaagtggaaaactaccaagagctgtcccatcactcctgcaacaaacttcacctcgctcaagggagggtagctgaggctc

SEQ ID NO: 452820 - DNA, 201 bp, Homo sapiens
gccccgctccctttttggccccttttgcccaagtggagtgacactttatcaattgggggggcaggcaacgaatagaggatattaatgattgctaacggacycccatctgctgttccgcctgcagcttttatgaaacccacattttaaaattaacacatggaaaagacagtcttagctcaaaagtgtcagctaggaaaggaa

SEQ ID NO: 452821 - DNA, 201 bp, Homo sapiens
atctaggcttttcttttggattccattgtggctttaaaaaaagtcagttgactgtttatttatggcttctctaaaggtgatctctttcttcctaaggctgytttaaaagtttccgttccctccctcccttcctcccaccccatcccccttcttcctttccttcctccctcccttcctcccttctcttcctccctttctccc

SEQ ID NO: 452822 - DNA, 201 bp, Homo sapiens
tgtaacacaggacattacaataaatactacataaattttttgtataataaaacttgtaaataatgtaggctgtcaatgcatccgtttgttcaaggaacatrtatctacaaggagctgttgatatacaataaataacagactcagtctctgtcctcacaaagtttacagttgacactcacacgcaaacacaaaagtccttta

SEQ ID NO: 452823 - DNA, 201 bp, Homo sapiens
gccaggcttaaatgccatctcctcggtgaggactctcatgtactgcttagttaaaaacttaaccccttaccctcctgttttatttttctttaaagcactakcgctatctgatgcactccctgtattcacttgctgatagtttgtgtctgtctctcttaaccaaagtggaagctcatgaagtgagatatttttctgttttgt

SEQ ID NO: 452824 - DNA, 201 bp, Homo sapiens
agagttctgagaactaaggggcaaggtgccttcctagctgccgacttgagttgggcgtggagttgcttcatctccttctctgtgtctcctcaccagttctrttgaaggaattggagcttgtacccatgaaggtccttttctagtttttggattttgtaagctttgttttacatttctcccatcccttctttgtgaatattt

SEQ ID NO: 452825 - DNA, 201 bp, Homo sapiens
agtattaacatgtgagggtggaatatggagagatcagactggggaagtaggtaaggccagatggtgaagggtcttgtaagccaagttcaagggcttggacyttattctgagggttgtaaggacagttgaagtatttaatatggaagtgataagatctgagtttccacacagcttgggacagggagaccatggggaagcttc

SEQ ID NO: 452826 - DNA, 201 bp, Homo sapiens
ctgtagcaagctgggcagtacaatgatgttggcaggatcctgtttaggtggaggatggccacctgggcatcaagaatcttctaccctgattccacattgaytccccaaagtgggcttcagacagctctttacttacgtcttctgattaaagcagcagacagggtcccagctagagaaaagttctgggagcaggagaggtgt

SEQ ID NO: 452827 - DNA, 201 bp, Homo sapiens
gcaaccaattctattgggttagggccccacccttctgacctcatttaaccttaattatctcctaaatgccctatctccagatacaatctcactgtggggaytgaggcttcaacatataaattttgaggacaacacaattcaatccctctcctgggaccctgagaaccatcccatgtgacctgatactgtgaaagtttgcaa

SEQ ID NO: 452828 - DNA, 201 bp, Homo sapiens
gggccacaggatcagatgagccagcttatcagtctggatggtgccggctgatccatcaagtgcagagtctgcaaaatatctgaagcactgattttaggagyggtttagggagggtcagaatcttgtaacctccagctgcatgactcctaaataattttttctaatcttgtggctaatgttagtcctacaaaggcagtctag

SEQ ID NO: 452829 - DNA, 201 bp, Homo sapiens
atacatacagggcagcaaggcaaataaatggggttttacaggcccaggtcctaggagtcagttagggaacaatcccaggacttagtgatgcaaaattggggagttggagtatactttaccatgaatggaggctcacttttatctaggagaagatgacaggctgatgagagtgatgactgacagcttaacagatgatttggt

SEQ ID NO: 452830 - DNA, 201 bp, Homo sapiens
cttggggtgaggaattcgagactggcctggcccagatggtgaaatcccatttctaataaaaaatgcaaaaattagctgggcgtggtggcaggcacctgtaatcccagctacttgggaggctgaggcaggagaattgcttgaacccgggaggcagaggttgtggtgagccgggatcgtgccactgcactccagcctgggtga

SEQ ID NO: 452831 - DNA, 201 bp, Homo sapiens
tcccaaagtgctgggattacaggcgtgagccactgcatctggccaaattattattatagctcagttttctaatctgtgtaatagggataataataataatwcttactccatggtgatgttggagtgattaaatgagacactatatctagatttgttcagaatagtacttgaatcagagtaaatccacaataaatgttggct

SEQ ID NO: 452832 - DNA, 201 bp, Homo sapiens
aggggagacctttggcaattctggctaatgagaagtaagcagatgttacagggtggggcttccaggaaagctctttaaaagaagacagaaaaaaaaaaaaatgttggtgtcaggggaataaattggcacgcacctttcatcatctgttgtcccatttcttctccctggaatgctgatgcaatgctggaggcagagtcgcca

SEQ ID NO: 452833 - DNA, 201 bp, Homo sapiens
ggtccattcatggacatggggaagacagcagcagaagcaagtttgggatgaagatgatgagttttcagtgtggaacttttagctgagtatgttttgtgagygtttctgtgtgagtcagtctagaaatggcaactgaagccatagatgtttggaattttccagctaagagagaaaaggagtaggcttaggaaaagccccaga

SEQ ID NO: 452834 - DNA, 201 bp, Homo sapiens
cctcagcctccaaagtgctgggattacaggcatgagccaccatgcctggccaacaatgaaggcatgtcctgagaaatgcattgttaggtgattctgtcatygtgtgaccatcgtagaatgtatttacgcaaacctagatggtataaggcactacactcctaggctgtatggtgtatcctactgctcctaggctacagactt

SEQ ID NO: 452835 - DNA, 201 bp, Homo sapiens
aaaataaaaaaggaagaatctgtcagtgagcgaggtgtccaaaaggggtaagtacgggatccagagtagagtactggggtgcacaggtgggtctggaggtytggctgcaggaagcaaagctggttcctgccggacagctctctgggagcccgagtgtaaggccaacttaaaggaaggcagagcaggtcaactggggggctt

SEQ ID NO: 452836 - DNA, 201 bp, Homo sapiens
aacagaagattctgaggcagacacacgtagcccagatggaagcggggttccgcagacattctgactgcccctcctacgcactcacttttcctggctgactragccccagggtcaggaatgcaccactgagagaaggtagcccctctctctttctgccggatattggcaattctgctgtaacaaacacccccaagattttag

SEQ ID NO: 452837 - DNA, 201 bp, Homo sapiens
attttttttttttttaaggacagataatttttttctactgccaaatttttttgaattggaaatttttctggttacttacaaccacaattggcatcattcaraaaccattaatttaattacattacttaaacaacttattatacttagagtattatatttcatcatagggaagaagtggaacagtatctagtttattgctta

SEQ ID NO: 452838 - DNA, 201 bp, Homo sapiens
cagataatttttttctactgccaaatttttttgaattggaaatttttctggttacttacaaccacaattggcatcattcaaaaaccattaatttaattacwttacttaaacaacttattatacttagagtattatatttcatcatagggaagaagtggaacagtatctagtttattgcttagatttcaggaaactcagctt

SEQ ID NO: 452839 - DNA, 201 bp, Homo sapiens
tacattacttaaacaacttattatacttagagtattatatttcatcatagggaagaagtggaacagtatctagtttattgcttagatttcaggaaactcascttgtttattcttgaccccagtgggaaaggggattcaaaatactttttgtctcagagttggggtagaattgaatatttgcatgacatttacatcctgtaa

SEQ ID NO: 452840 - DNA, 201 bp, Homo sapiens
aaattgttgaatgaagtttgatctgatcttcctggtagaattgaaaatgagtggggtttagacagtgttggaatggaattttgactttataactctcattrggtgattttggggaagttccttaatctatctgagcctcagattcctacttattgaggataacaatccacaagacagcatatgtaaagtgtctagcttatg

SEQ ID NO: 452841 - DNA, 201 bp, Homo sapiens
ggagtgctgattggtcacagatgaaatcatagggagtcaaagctatctttttgcactgagtcagtaacctgggcaggggccacaggatcagatgagccagyttatcagtctggatggtgccggctgatccatcaagtgcagagtctgcaaaatatctgaagcactgattttaggagtggtttagggagggtcagaatcttg

SEQ ID NO: 452842 - DNA, 201 bp, Homo sapiens
caagtgttgccaatatggagaagctgaaccctccatacattactggtaggaatagaaaactgtgaagctgctttgggaaagagtttgacagttcctcaaawagttaaacatagagttttcatgtgactcagttgttccactcctaggtacatactcaaaagaaatgacatttgcccacaagaaaccttgtatgtgaatgtt

SEQ ID NO: 452843 - DNA, 201 bp, Homo sapiens
gccacatgcagccgaaatggggctaactggaattgagatgtgctgtgagggtaaaatacacactaaactgtgaatttagtaaaaaaaaaaaaaaaaaaaaagtaaatctcttatattgaatatatttttgatcttttgggttaaattgaatatattacttaaagtaatttttttttttggagactaggtcttactctgtgg

SEQ ID NO: 452844 - DNA, 201 bp, Homo sapiens
agggataagttctagtgttctacggcattttagggtgaatatggttaacaataattaaatgtacatgttcaaaaagctggaagagaggtttttttttttttgagatagagtcttaccctgtcacccaggctggagtgaagtggagtgatctcagcttactgcaacctctgcctcctgagtttaagcaattcttgtgcctca

SEQ ID NO: 452845 - DNA, 201 bp, Homo sapiens
ccaaagagattttgcagatgtcgactgaattaaagatctcgagatgaaggattagctcggattattcaggtggtccctagatgtcatcacaagtaagaggraggccaagggagattgactacagaagaagagtagacaatgtgatcacagaggcagagactggaggagcgtagggggccgccagaagacagaaaggccagg

SEQ ID NO: 452846 - DNA, 201 bp, Homo sapiens
agaaatggttcacctgatacaccgctctcatcctcttcttccctcccgtgttcctgtgcttcctatcagcacgcactgtcctttccctgtgggcggtagtyacacccccaaagacctggacaacctagggaacaggagccagtgagtctagacctcagagtcctgagaacgacacagaaaacaagtctgcagtgtgctgca

SEQ ID NO: 452847 - DNA, 201 bp, Homo sapiens
cctgggtggggtgtagcagggagccgttttgttatttttgctttttttttcgcctaaagaaaatttgccaggtccccttccaattctgatcccactagatkccagaagtcttctgaggttaagctcaaggacaaagagatggttgttttccaggtgcaattttggtgagccaagctttgactcccgaaagagggtctggaa

SEQ ID NO: 452848 - DNA, 201 bp, Homo sapiens
aaggacaaagagatggttgttttccaggtgcaattttggtgagccaagctttgactcccgaaagagggtctggaatttggaaatcagctggtttgtccccycttgccccccagatttctcaaacttgttcagatcatagatctctcaaaacaaaatggcttatcagctcctctcatctccttccgtttataacacctgcgt

SEQ ID NO: 452849 - DNA, 201 bp, Homo sapiens
ccccttgccccccagatttctcaaacttgttcagatcatagatctctcaaaacaaaatggcttatcagctcctctcatctccttccgtttataacacctgygtagtaataccttgcatagctcactaagcacacctccttccatatgagctgtgttatattgtggtacatcatttggaactgctgagtctatatggaaatc

SEQ ID NO: 452850 - DNA, 201 bp, Homo sapiens
gccaaggacagttgtcttgtacaagatcagtggggctggacccatccatttgtgagtcctgaagtcgagctcaatgatattgtcttttgcagtgactgaaygggctcccatgccaggcctggctggatgttggcctgggagccctctttgcgcacggtggtacaagtcctctccctgctgtgcagaactaagagctctgga

SEQ ID NO: 452851 - DNA, 201 bp, Homo sapiens
ttacatttcagtggttttcagtatattcacaaggttgtgcaaccatcaccactatctggttctagaacattttcttcacccccaaagaagcttcatacccrttagcggccactttccattccttcttccccacagcccctggcaaattctgacggttttaatggttaaatcttttcaattacatcacaagacaccatggaa

SEQ ID NO: 452852 - DNA, 201 bp, Homo sapiens
atttgggtaaaatgataagaatgtgaatgtgaatcccgggcagtggtgaggatcaaaggtcaaaggggaccgtgagaatgaaggtgctttgtcaactgtcraggggcatacagatacggatgattcttgctcttggttgggaaggtaacactcattcaggcaacatgagagtactcgtctttagcagaaaatggtacccag

SEQ ID NO: 452853 - DNA, 201 bp, Homo sapiens
cagtggttttcagtatattcacaaggttgtgcaaccatcaccactatctggttctagaacattttcttcacccccaaagaagcttcatacccattagcggycactttccattccttcttccccacagcccctggcaaattctgacggttttaatggttaaatcttttcaattacatcacaagacaccatggaactcattac

SEQ ID NO: 452854 - DNA, 201 bp, Homo sapiens
ggtcgtactaatgtggaggctggttcccattgacgaggtggggactcagtgaggagattgttactcaggaaggaggatggtacccagtggggaggatgcgyccaagggggagggttgctcagcagggaggttggtatccagggaggatgatggtacccagtgggaaaattagtactcactggggagactagcacccattgg

SEQ ID NO: 452855 - DNA, 201 bp, Homo sapiens
agacctgaacagacacctcaccaaagaagatatatggataccaaataagcatatgaaaagatgttcaacatcatttattgttagggaattgcaaataaaaatgacaaaagatacaactacatacctattacaagggccaaaatccaaacactgacagcaccaaatgctgacgagaaagtggaacaacaagaactctcattc

SEQ ID NO: 452856 - DNA, 201 bp, Homo sapiens
atcacttgaacccggggggaagagtttgcaatgagctgagatcacaccactgcactctggcttgggtgacagagcgagactccatctcaaaaaaaaaaaaattgtgttaaacatctagaagaagacgacatacagctgagttggattttttccccctcctctcccatttagaaaagtctgaactcagaggtctcatgtcaa

SEQ ID NO: 452857 - DNA, 201 bp, Homo sapiens
tgttcaaataaggcaaacgccgagctgtaaccgatccagctgtttcagaatctcacctccgatttctgtacgtcacttcctttttttttttttttttttttataaatttgttcagacccgagtcatccctggagtctcacacttgatcttagccaaaaggccgagaagcgatcatccctggagtctctctgaatctgccgt

SEQ ID NO: 452858 - DNA, 201 bp, Homo sapiens
ttatacacattatataaaaggccagaaagaacctcaaaaactgttgacagtgttggcttctgagcaatgatttctgtttgtctttttttttttttttttttaagacagagtctcgctctgttgcccaggctggagtgtagtgacatgatcttggttcactgcaacctccaactcctggattcatccaattctggtgcctca

SEQ ID NO: 452859 - DNA, 201 bp, Homo sapiens
gcacgatctcaactcactgcaacctccgcctcccaggttcaagcgattctcctgcctcagcttcctgagtagccaggattacaggcatgcaccaccgcaccagctaatttttgtatttttagtagagacaggatttcaccacgttggccaggctggtctctaattcctgacctcaggtgatccacccacctcggcctccca

SEQ ID NO: 452860 - DNA, 201 bp, Homo sapiens
gacactccaaatggaaggttacagctgaccttagggacagtgtcccctttgatgacttgggacctccccttatgggagcagagacagctggccggttgcartgggtctgtaggtcctgaactgaaagtgtgacaggtttctagggcgggactggagtgaaccaaatatcttgataggataaattttgcagaaatattttat

SEQ ID NO: 452861 - DNA, 201 bp, Homo sapiens
cagatgtcgactgaattaaagatctcgagatgaaggattagctcggattattcaggtggtccctagatgtcatcacaagtaagagggaggccaagggagaytgactacagaagaagagtagacaatgtgatcacagaggcagagactggaggagcgtagggggccgccagaagacagaaaggccaggaaatggattctttc

SEQ ID NO: 452862 - DNA, 201 bp, Homo sapiens
tcaattttatttagtcttttttttgtattcataaaggaaaaaaaaagggtcttcagtgcttgtgtgagcctggcacttggttttatgcccttgggctgtaraggtcagtttctcaagttcaactgctacagttctttttgccttttttttttgagccaggcagggtctgctctgtcacccaggctggagtacggtggtgcg

SEQ ID NO: 452863 - DNA, 201 bp, Homo sapiens
ccctattccctcccctccccattgcatttgggtttgacatgacatgaatcattgtggttttactcctgggtagaattgtttttctgtattgcattgccaaytgatggaaggacaaaaaaaggaaacttaccaatgagcagtttcagatgaacttaaattctcagaaatcttgaagaatgaatgaactataactttctgaag

SEQ ID NO: 452864 - DNA, 201 bp, Homo sapiens
tgtatcatgacatacaactgtacctttcttctggatcattctctatgcaaatgagctctaacctctccatcttaacaacacaacaaccttctcccttgagsctgagcccctccctgctcccttctcactgctgtgcttccctttacagccacacacctggcctgtcctcactgttctgaaagtgcactcatcaaggtcacc

SEQ ID NO: 452865 - DNA, 201 bp, Homo sapiens
ttatttagtcttttttttgtattcataaaggaaaaaaaaagggtcttcagtgcttgtgtgagcctggcacttggttttatgcccttgggctgtagaggtcrgtttctcaagttcaactgctacagttctttttgccttttttttttgagccaggcagggtctgctctgtcacccaggctggagtacggtggtgcgatcaca

SEQ ID NO: 452866 - DNA, 201 bp, Homo sapiens
tccctggacccatgaccctcagctgaaatgtcttagtttagaatgtgacatgtctaagtgggatgacaatcaaaatagacccagctgggaagttgccagcmtccttgaaggttgttagatgtggcaaacaccttccttccttctttaagggtggtaagaaaacaacagctcaggaagtcataataattctaacagcagcat

SEQ ID NO: 452867 - DNA, 201 bp, Homo sapiens
cgtggtggcttgcacctataatcccatctactcgggaggctgaggcaggagaatcacttgaacccggggggaagagtttgcaatgagctgagatcacaccmctgcactctggcttgggtgacagagcgagactccatctcaaaaaaaaaaaaattgtgttaaacatctagaagaagacgacatacagctgagttggatttt

SEQ ID NO: 452868 - DNA, 201 bp, Homo sapiens
ccctcagccacacctcatctattcgttagttaattaattaattttttattgagacagggtctcgctctgtcacccaggctggagtgccgaggtgtgactayggctcgctgcaacctccacctcctgggttcaagtgattctcccacctcagtctcctgagtagctgggattacaagtatgcaccaccatgcctggctaatt

SEQ ID NO: 452869 - DNA, 201 bp, Homo sapiens
ggctggtcttgaacttctgagctcaagcgatcctcccaccttagcctcccaaagtgctgcaattacaggtgcgagccaccacgcctggcccaccccctccrttagaaaatagaaagctcttgctgctttctcttcactggggccaacagaacctcctcgtctaaactctcctctctcaacaaaaattctccccacagcctt

SEQ ID NO: 452870 - DNA, 201 bp, Homo sapiens
tctttcagtaactctagcctgataatcactgcaaaatacccaacaatgactgagtgttagaaagttataggcaactaaccatttttgacttgtataacatyttattatacttagaataacttatagggtgatatccaaattgcattatatggtctatggcatagactgctagtttaccgtactctgcaacgtaaagctaca

SEQ ID NO: 452871 - DNA, 201 bp, Homo sapiens
gttggattttttccccctcctctcccatttagaaaagtctgaactcagaggtctcatgtcaactggataattgttttattggccttattcttaacttagtktgatttaggaaaagacaaggacatctagagtcatgttgtaatcacagttctgtgatatttcatgtttttctaactcataaaaatacagtgaggaaatcaa

SEQ ID NO: 452872 - DNA, 201 bp, Homo sapiens
tcagaggtctcatgtcaactggataattgttttattggccttattcttaacttagtgtgatttaggaaaagacaaggacatctagagtcatgttgtaatcrcagttctgtgatatttcatgtttttctaactcataaaaatacagtgaggaaatcaacagcttggactgtgggaaaagaagtaaagctgaaactctgatac

SEQ ID NO: 452873 - DNA, 201 bp, Homo sapiens
cagtgaggaaatcaacagcttggactgtgggaaaagaagtaaagctgaaactctgatacgcacaggcctgagtatgttgtttacagaatgaaaagcgagtyccacataagctgagacttggcttcagtcatgcctgggaatctacaaactcaatgccctctcactggcagaacataaaagctaaagattacccctaatccc

SEQ ID NO: 452874 - DNA, 201 bp, Homo sapiens
aaaaacatgacttcattgtgtgggtgcctgtgttgaagatgatttagtagcttctgccgtgaggcatttgctagaataaaatcctttctgccctcatcatygtcagcacactggttcgggcctttagcactcctacctggatcgtggaactaaagaattttagcagctgacaaggaccttaaagattgtagcctaactctc

SEQ ID NO: 452875 - DNA, 201 bp, Homo sapiens
tttggagtggcctgcctggtgtctgagccacacctgacacccagtgttctttccactgggcctttattgcaattgttttcctctctctttagtctcttccygctccagtaggattgtacattccactgacctaatcttcccgaaatacagatctcatcacgtcactgccctgctgaaaaaacccacagtggctccccactg

SEQ ID NO: 452876 - DNA, 201 bp, Homo sapiens
acacactaaactgtgaatttagtaaaaaaaaaaaaaaaaaaaaagtaaatctcttatattgaatatatttttgatcttttgggttaaattgaatatattayttaaagtaatttttttttttggagactaggtcttactctgtggcctaggctgaagtgcagtggcgtgatcctggctcactgcaacctcaacctcctgagc

SEQ ID NO: 452877 - DNA, 201 bp, Homo sapiens
tttcaccatgttagtcaggctggtctcaaactcctgatctcaggtgatccacctgcctcggcctcccaaaatgctgggattacaggtgtgagtctctgtgycaggcatcccagtcactattccttctgccaacacactcttccccagctcttcatgtagctggctgcttcttttcattcatctcacagcttcaatgtcact

SEQ ID NO: 452878 - DNA, 201 bp, Homo sapiens
gctgggacaacaggcgtgtgccactatgcccagctaatttttgtacttttggtagagatggggtttcaccatgttagtcaggctggtctcaaactcctgayctcaggtgatccacctgcctcggcctcccaaaatgctgggattacaggtgtgagtctctgtgccaggcatcccagtcactattccttctgccaacacact

SEQ ID NO: 452879 - DNA, 201 bp, Homo sapiens
ttccagggttcaggcgattcttctgcctcagcctcccgagtagctgggacaacaggcgtgtgccactatgcccagctaatttttgtacttttggtagagayggggtttcaccatgttagtcaggctggtctcaaactcctgatctcaggtgatccacctgcctcggcctcccaaaatgctgggattacaggtgtgagtctc

SEQ ID NO: 452880 - DNA, 201 bp, Homo sapiens
caaggatgtcttgtctagttccccaggagccctggatgtacgttctgttactggattctaggatgcactcttgagtcctttgatacatccttgtttttacwtttttaatgtaataattacaaaatgatggccaatgagattggcgaaaatataaagagtgttgcaaatagcactcattcaacgaatcctaatctttcagca

SEQ ID NO: 452881 - DNA, 201 bp, Homo sapiens
tactattctgcttttctttttttttttctttttgaggtggagtctcgctctgtcgcccaggctggagtgcagtggaggatctcaactcactggaacctccrcttccagggttcaggcgattcttctgcctcagcctcccgagtagctgggacaacaggcgtgtgccactatgcccagctaatttttgtacttttggtagag

SEQ ID NO: 452882 - DNA, 201 bp, Homo sapiens
gcgccccatggcccagtcatgtcaacacgtaaaattaactcttacacctgctattccaagtatggtttgaggaccagcattggcctcacctgggagcttgytagaaatgcagaatcttgggcccacttttgccaagatgcctgcattggaataagatgcgaatcttttcaatttattgagccagagcttcatatcagtaaa

SEQ ID NO: 452883 - DNA, 201 bp, Homo sapiens
tcctccccagctgtttgtgtttcaggccttctgagggggatcatgctgaaggcacctccagggagagaggatgtggggggagcagcaatggcagagacctrtgtcccaaatggaacccatggctccaaggctgaggctcctcaagcctccagctagaccccctttttcctcatctccctccctgggaactcaacctagcca

SEQ ID NO: 452884 - DNA, 201 bp, Homo sapiens
gtctatggatctaaatgttaatcttatccaaaaccaacctcacacccagaatggtgtttgaccaaatatctgggcgccccatggcccagtcatgtcaacaygtaaaattaactcttacacctgctattccaagtatggtttgaggaccagcattggcctcacctgggagcttgttagaaatgcagaatcttgggcccactt

SEQ ID NO: 452885 - DNA, 201 bp, Homo sapiens
aagcaaaggaagcattcctaaatgcagaaaaagccagagaacaaagatgttcatctagggatttgctatacaaatgaagagtgaaaaagtgtcacctgaamcatccaagagcaggggaaagattaaatggacaccggcatttcctggagtaggatataacacagcaagtctaaataacagttatgaatgttagttaaaaac

SEQ ID NO: 452886 - DNA, 201 bp, Homo sapiens
ccgttagttcctgaattttgtgttttgtacctcaattaggttgactctgggcaagacgtataatggtttatgtgaattttccatcttggcaaaaattggartctcagcagagcaacctttgtaagcctgttgtattagtcaggcttctccagagaaacagaacaaatagaatgtgtatatatttatagaaagagatttatt

SEQ ID NO: 452887 - DNA, 201 bp, Homo sapiens
tagccctggagaaattttattgcagtgtttcgggtactgagaacacaggatccttgctggcctcagtttcccgtagctctgatttttttttttttttttttgagatggagtctcgctctgtcccccaagctggactgcagtgtgtgatttcagctcactgcaacctccgcctcccaggtttaagcaattctcctgactcag

SEQ ID NO: 452888 - DNA, 201 bp, Homo sapiens
atccattttttgttttatatattttgaggttaattaggtgcattcatatttggcattgtcatgtatttagcattccccatgtatttctatcaattttttggttttttgtattttgaggtttgttcattagatgcattcatatttagctttgtcgtgtcttcttcgagaacgaacccttttctctgcatccagtgatcctct

SEQ ID NO: 452889 - DNA, 201 bp, Homo sapiens
aggaaccattgggatgaggcggtttctgcctttgagtaactttccatgccaccacccaggagattagagcttcttcttctttttttttttttttttttttttctgagacagagtctcgctctgttgcccaggctggagagcagtggtgtgatctcggtgcactgcaacctccaccaccctggttcaggcaattcccctgcc

SEQ ID NO: 452890 - DNA, 201 bp, Homo sapiens
actgaggcctcagcctgccacctgcctccccgttttccttttgccttcagaaactagttatttttacaaaggagggaggagtgctcctccctccaattccrtttaaaacaaacatggttttggcacaacaagcctgcctcctcgaagtaatggccgctcccccgtgccagttgctattctgccctcatgagagtggagcgt

SEQ ID NO: 452891 - DNA, 201 bp, Homo sapiens
aaagaaaggatgctgattgccagcctttagagacagctgagagcttgccaggtagcagagagagcggaagaagattctaggcaaaaggaatgagaagacakctattgggggaagggagcactaaaagaaggctgtcaggcaggggaaggctgatggtggagagcctttatgggaattgtgattttaatttaatttgagaca

SEQ ID NO: 452892 - DNA, 201 bp, Homo sapiens
cactacactgtgtggtcaatacaattatggaggtaaacacaggtgccggtgacataggggaagggcaggtagatctgaagggggatgaggaagggtgttgrcaaagctttcgagaggagctgagaatacagttgagttgggaagaacaaatagtgattatccaaagaaagaatagggaagcgtaaatagggctggagaagc

SEQ ID NO: 452893 - DNA, 201 bp, Homo sapiens
gtatgtgtgtgtaggaagtgggtgggaaagggaatataagcaagtaaacagtgtcactacactgtgtggtcaatacaattatggaggtaaacacaggtgcyggtgacataggggaagggcaggtagatctgaagggggatgaggaagggtgttggcaaagctttcgagaggagctgagaatacagttgagttgggaagaac

SEQ ID NO: 452894 - DNA, 201 bp, Homo sapiens
acgctgggagctgtagaccagagctgttcctattcggccatcttggctccttattctcattaccttcttgagttgtggctcagacactacaacagagctcygtcacctctttctaaaagctgggaaatggttattgtcaacgccagccccattttggaggcacctggttgcaggggaccacagctaggtgagtcacaactg

SEQ ID NO: 452895 - DNA, 201 bp, Homo sapiens
caagacagaagtggcaattgcccggggccattcagagctgccaaagcattttcctgcttattagccattccagcctcacaactagcaaccttgagagaaargtctggagagaatttttatccccgtatccaaaaagatggagtaacttgtgcaaaaatcacgctgtcagctggagttggaacttgggtcttcaggctctgt

SEQ ID NO: 452896 - DNA, 201 bp, Homo sapiens
ttcagcatcttacagaacaggattcatatgtacttgtgtattcacatgcgaattcatgcacacattatcacctaagagagtctgagtgtcctggtcctcaragtatgtggttttcagaatttacactgtatacaaatctagaacgacatttgctgcctaaaggacaatgacgttagatctacacagcaagagttgaataga

SEQ ID NO: 452897 - DNA, 201 bp, Homo sapiens
caagaagattctcgaaacctcctatgagattggatttactgtcaaaaaagcaaaacacactgacttcaaaagaaaaaagcaaacattatttttgaaacaaycttttaatttcttatagaagtactgtaatttgtgttcttggagatttagaaaattcagagaaagttccaagaaaataaagaagaaaattgaaagctccca

SEQ ID NO: 452898 - DNA, 201 bp, Homo sapiens
aggggctgtctattgataatctttcatttttacagccatttttctatgcacacacaaacaccacatatatattctttacaaaaatgagattccactctgtwtactgttttatatcatgcttttaaattaagataaaaattaaaatttaataggactgcattaagtgggaacaattttgctgctgtcaactcgagagagcat

SEQ ID NO: 452899 - DNA, 201 bp, Homo sapiens
ctacgtatgattccaactatatgatattttgaaaaaggcaaaacggtggagatagtggttgacaggggttggagggagggcaggatcaacaggcagagcayggaggatttgtagggacgtcaaactgttctttatggttctgtaatggtggatccatatcatgatacatttgtccaaaccaaagagtatacaacaccgaga

SEQ ID NO: 452900 - DNA, 201 bp, Homo sapiens
gtgtgatactggtattgtggttatgtttttaaaaagtctttatgtttttagctgggtgcggtggctcaggactgtaattccagctacatgagaggattgcytgaggccaggagtttgagaccagcctgaacaacatagtgagtacctgtctctaaaaaaaaaaaaaaaaaaaaaaaaaaagtctttatattttagagttat

SEQ ID NO: 452901 - DNA, 201 bp, Homo sapiens
gattgcctgaggccaggagtttgagaccagcctgaacaacatagtgagtacctgtctctaaaaaaaaaaaaaaaaaaaaaaaaaaagtctttatattttaragttatatactgtaatatgtatgaatgaaatgctatgaggttttagatttgtttcaaaacactccaatgtgtgtgtgttgggaggaagtagataaaacag

SEQ ID NO: 452902 - DNA, 201 bp, Homo sapiens
tctttgaagccaaacagtttttgagtgataagaaagcaattcagtggaacttactgttcagcatcttacagaacaggattcatatgtacttgtgtattcayatgcgaattcatgcacacattatcacctaagagagtctgagtgtcctggtcctcaaagtatgtggttttcagaatttacactgtatacaaatctagaacg

SEQ ID NO: 452903 - DNA, 201 bp, Homo sapiens
taaacattgtgttgaatctcctagacaaacgaagaaaagcaataaaatgaaatgaaagatatatgaagtgggaaggaaaatataaaactcattattcatasatggtatcatagtatacgtaaaatatccaaaagaacatacaggtataaaaattcaaagggcccaaaatagcaaaacactttttagaagaataaaaagatg

SEQ ID NO: 452904 - DNA, 201 bp, Homo sapiens
cttgctagagaggatttgaaaagcttcctagaaggaaagaaaggatgctgattgccagcctttagagacagctgagagcttgccaggtagcagagagagcrgaagaagattctaggcaaaaggaatgagaagacatctattgggggaagggagcactaaaagaaggctgtcaggcaggggaaggctgatggtggagagcct

SEQ ID NO: 452905 - DNA, 201 bp, Homo sapiens
ggatgactgaggtctggtagaagcaggctcagaggaaaaatatgctaatcttgctagagaggatttgaaaagcttcctagaaggaaagaaaggatgctgaytgccagcctttagagacagctgagagcttgccaggtagcagagagagcggaagaagattctaggcaaaaggaatgagaagacatctattgggggaaggga

SEQ ID NO: 452906 - DNA, 201 bp, Homo sapiens
tttgaagaattcattcatttggtcaacaaatgtctactgagcacctacaatacatcaggcagggttctaggcactggggatacaatagggaacagaacagataagcctcctgccctcatggtaggtgtgtggttttcaggttactctggaaaaaggatgaacattgggaaagatggaggagagagtgagtattgtgtagag

SEQ ID NO: 452907 - DNA, 201 bp, Homo sapiens
cactttttagaagaataaaaagatggaaggatttgctctactggatatcaggttatcataaaaccacagccatttacatagtgtatatatatatatatatrtatgtgcataagtagataaatggatcaatcaaagagaagggagaaatctagaaacagactcatgcgtattttgacactcgatatttcacaaagttttctt

SEQ ID NO: 452908 - DNA, 201 bp, Homo sapiens
gtttgaagaattcattcatttggtcaacaaatgtctactgagcacctacaatacatcaggcagggttctaggcactggggatacaatagggaacagaacagataagcctcctgccctcatggtaggtgtgtggttttcaggttactctggaaaaaggatgaacattgggaaagatggaggagagagtgagtattgtgtaga

SEQ ID NO: 452909 - DNA, 201 bp, Homo sapiens
agaggcatacatccagtctaaaaacagtgattacttctagaaaagggactgagtatttgctgagagggctatccgtatgattggtataactaaaaataaawaaacaaaagaagaagaaagaaaggaggaagagaggaaagaggggagggaaggaagaagagatgagcaaacctagaattttgagccaggccccccaagatc

SEQ ID NO: 452910 - DNA, 201 bp, Homo sapiens
tgtaatggtccatggcccagggactgggggctcctggagtaggggaaatgctggagaagagggattccttagttctgtgtatggaccaacacaaatcttgrgctcagcctcaagttgtatatacccaggacagacctaaaagtactactgcaaagattttcacaactgacctgacactagaaccctgcaaacagaaggcaa

SEQ ID NO: 452911 - DNA, 201 bp, Homo sapiens
agtttgaagaattcattcatttggtcaacaaatgtctactgagcacctacaatacatcaggcagggttctaggcactggggatacaatagggaacagaacagataagcctcctgccctcatggtaggtgtgtggttttcaggttactctggaaaaaggatgaacattgggaaagatggaggagagagtgagtattgtgtag

SEQ ID NO: 452912 - DNA, 201 bp, Homo sapiens
gcgatacatttttgttttttccctgttctatatttgttttaacacacacacacacacacacacacacacacacagacatacacacacacacaaacatatgygcacacacaattataaaaagaaaaaacagaatggttacatatactaagtacagtaaattacgaaatgctgagtatcagtctttaaacatgaagtagattt

SEQ ID NO: 452913 - DNA, 201 bp, Homo sapiens
aagtttgaagaattcattcatttggtcaacaaatgtctactgagcacctacaatacatcaggcagggttctaggcactggggatacaatagggaacagaacagataagcctcctgccctcatggtaggtgtgtggttttcaggttactctggaaaaaggatgaacattgggaaagatggaggagagagtgagtattgtgta

SEQ ID NO: 452914 - DNA, 201 bp, Homo sapiens
agggttatatggatgttcactttgggataaaccattgagcgatacatttttgttttttccctgttctatatttgttttaacacacacacacacacacacayacacacacacagacatacacacacacacaaacatatgcgcacacacaattataaaaagaaaaaacagaatggttacatatactaagtacagtaaattacg

SEQ ID NO: 452915 - DNA, 201 bp, Homo sapiens
taagtttgaagaattcattcatttggtcaacaaatgtctactgagcacctacaatacatcaggcagggttctaggcactggggatacaatagggaacagaacagataagcctcctgccctcatggtaggtgtgtggttttcaggttactctggaaaaaggatgaacattgggaaagatggaggagagagtgagtattgtgt

SEQ ID NO: 452916 - DNA, 201 bp, Homo sapiens
aagaatttttgttcattaaaagatgacagtaagagggtgaaaaggtaagcaactattcagaatacacacacacacacacacacacacacacacacaaaaamaaaactcttacaagccagtaagaataagataacccagtagaaaaagggacaagacactgggatgggtacttcataaaacaggctatccagattaataaac

SEQ ID NO: 452917 - DNA, 201 bp, Homo sapiens
ccaacctggcccccccccgcttttttttttttgagacaagatttcgctctgttgcccaagctggagtgtggtggtgctatctcgcctcaccacaacctccrcctcctgggctcaagccattcttccacttcagcctcctgagtagctgggaccacaagtgtgtaccactacacctggctaatttttgtattttttttgtag

SEQ ID NO: 452918 - DNA, 201 bp, Homo sapiens
ggaaaaagatgagtcatggtacatggttgatttctggattgtatcaaattgggaagaatttatgtaatcccaaactggtatatttgcaccaaaattcttgwtaatgacaggttgaggctgggtgtggtggctcatgcctgtaatcgcaaagttttatatatttttttgggagaccgaggcaggtggatcatttaagatcaa

SEQ ID NO: 452919 - DNA, 201 bp, Homo sapiens
ttaagaatttttgttcattaaaagatgacagtaagagggtgaaaaggtaagcaactattcagaatacacacacacacacacacacacacacacacacaaamaaaaaactcttacaagccagtaagaataagataacccagtagaaaaagggacaagacactgggatgggtacttcataaaacaggctatccagattaataa

SEQ ID NO: 452920 - DNA, 201 bp, Homo sapiens
tatctcgcctcaccacaacctccgcctcctgggctcaagccattcttccacttcagcctcctgagtagctgggaccacaagtgtgtaccactacacctggmtaatttttgtattttttttgtagagacagggtttctccatgttgcccaggctggtcttgaactcctgagcttaagccatcctcccatctcagcttcctga

SEQ ID NO: 452921 - DNA, 201 bp, Homo sapiens
gggtaccccagtcaacacacacaggactcttgcaaacaggctccttgactgacatgcttctgtataactttcataaaaagatattgatgttcagagtaatyctggggctatgtagatccagaaaccgtcaaagaaagtttagattctactcagtagatttttaccatgaagcacatttcaccgtgttctcattcttggaaa

SEQ ID NO: 452922 - DNA, 201 bp, Homo sapiens
tttttagaagaataaaaagatggaaggatttgctctactggatatcaggttatcataaaaccacagccatttacatagtgtatatatatatatatatatawgtgcataagtagataaatggatcaatcaaagagaagggagaaatctagaaacagactcatgcgtattttgacactcgatatttcacaaagttttcttcaa

SEQ ID NO: 452923 - DNA, 201 bp, Homo sapiens
ggttagattgaccttctaattttttacatgtctctccagcacagatggtcaaatcagcttttgaggcctgagtcctgatacagtcctcaaaaggcaggtgctttttttttttttttttttttttgagatggagtttcactcttgtccaagttggagtgcagtggctcactgcaacctccgcctcctgggttcaagcaattc

SEQ ID NO: 452924 - DNA, 201 bp, Homo sapiens
atatggtgaaatgttgacaggtttctctttgaaaatgagaataagatacagatgtccactctcattcctattaaacattgtgttgaatctcctagacaaaygaagaaaagcaataaaatgaaatgaaagatatatgaagtgggaaggaaaatataaaactcattattcatagatggtatcatagtatacgtaaaatatcca

SEQ ID NO: 452925 - DNA, 201 bp, Homo sapiens
tgaggggcagccctacagccctgagatagaatggcttttccattggtttttccgatacccgagggagggcatgactatccccattggtgtttttccttcayttgagaagcatctaggccagtgattctcaaagtgtggtccctggaccagcagcagcagtgtcacctgggaacttgttagaaacacaacttcttgggttcc

SEQ ID NO: 452926 - DNA, 201 bp, Homo sapiens
aacaaaaggtggggtttttcttaggtcctgctaaaagtagttttcttctctattttaatctcattttgcttgtttccttctctacagtttttataaatacwctgtgacttcatagtttcacttttaatatgtacgtatattaagttaacacctcaattttttttttttttaaagacggagtctcactctgttgcccaggct

SEQ ID NO: 452927 - DNA, 201 bp, Homo sapiens
gcattttgaatgtaaaatcttcagaaaaataaataaggatgaaaactaggaatttttgagtttcctcatgttttctgcagtattcccaatgtctttatgtytttctatttccaatggctctccaaatgggtttacctgtcgcattgcactagacttgttcactgtagaattgtataggggctcctggagttgtcttcaagt

SEQ ID NO: 452928 - DNA, 201 bp, Homo sapiens
tttttttttgagatggagttccacttttgttgtccaggctggagtgtaatggcacgatttcggctcactgcaacctctgtggaataccacagtaggctctkaccagtcttgattctttccttcttgcctccctatcatcttgtctccaaactgaagaccgagtgatccttgctatagtttctcatcacatggggtctgcag

SEQ ID NO: 452929 - DNA, 201 bp, Homo sapiens
gttaagcaaataaacgaatttgaaggcaaatttgtggaatcccagccagtgcctctgcctccaccctgcagaggccacccttctaaggttcagagggctcrgcagcatctgcttagagtagagctggcaagaagggggaggtgttgtcgtagaaattactagaacatttcaggatttattcattctctgtctacatttttg

SEQ ID NO: 452930 - DNA, 201 bp, Homo sapiens
gaagggaggtgcagaaacagcagcgcaacttcttccaagtgcctacatttccccatcgccttccaagctaggcatccagagaatctgcaccctgtggttcygggatatgacagcagcagggtgtatgggcatgggcttgtcctctcaggttgagccagtttgcacaggtgtcaacaccccatgggtaccatggtgcagcct

SEQ ID NO: 452931 - DNA, 201 bp, Homo sapiens
tcagtctgcttatttttttggggtggtttaggggtaaaaataagtagataactgaacaaagctggctggcaggaaccttcggctgaccgcagggctttggyggtggtcaagacctggaattggatttgaggcctggccagcgtgaaggatatgccataggagcccaggaggatgactctgccaggcctgcttttgacatgt

SEQ ID NO: 452932 - DNA, 201 bp, Homo sapiens
tggagcaggcaaagcatggatgtcatgaactttcctaacacactaggtgaggggcagccctacagccctgagatagaatggcttttccattggtttttccratacccgagggagggcatgactatccccattggtgtttttccttcacttgagaagcatctaggccagtgattctcaaagtgtggtccctggaccagcagc

SEQ ID NO: 452933 - DNA, 201 bp, Homo sapiens
cccaggaggatgactctgccaggcctgcttttgacatgtctgtcatgcttcatgctttatgctgctctgggccattaagcaagaactaaatctgatgcccmatcaaggctgagctctttttttttttgagacactgtctcactctcttgcccaggctgtagtgcagtagtgtgatcatggctcactgcagcctcagtctcc

SEQ ID NO: 452934 - DNA, 201 bp, Homo sapiens
tcatggctcactgcagcctcagtctcctggactcaagtgatcctcccacctcagccttctgagtagctgggagtacaggtgagtcaggtgagtcccaccayacccggctaattttttttttttttttggtagagatggggtttcactgtgttacccaggctggtctcaaactcctgggctgaagaccatccactcgcctca

SEQ ID NO: 452935 - DNA, 201 bp, Homo sapiens
caaagcaccatgaagcatgctgcgcctacagagatgtcctgcctcacagttccggaagccacgtgtcccagatggaggtggcggcagggcgggttcctctraggctgtgagggaggcgctgtcccaggccctccctggcttccgctgggggtgctggccaccctgggcgttccttggcttctagaagcatcgcccagatct

SEQ ID NO: 452936 - DNA, 201 bp, Homo sapiens
ccccagctaaaagggcagggagagggacacgttggtggtcaagaagagggaaatgaggaggggcttttggagatcccgccaaagaggtgttctgtgaaccmctcccgctgacacacctactgaagggtccactgagacagcaaagcaggaagggtggaaagggtccgccaggggcagtgcctgacatgtgctagaggtgac

SEQ ID NO: 452937 - DNA, 201 bp, Homo sapiens
ttactggacagcgacttggatgaggatggccagacattgtcctccttcaggaccagcttctcagagcagagtctccaaacataatgtcgcttccagatgaygcaaatctgatatcagagaatgactaaaagcttgcaactttgcttttaatctgttgtggatcaagtttcttttcaaataaatcaaagtctgtgaacttag

SEQ ID NO: 452938 - DNA, 201 bp, Homo sapiens
aagagaggattttgattgtctgcaacacaaaaaaatgataaatgtttgaggtgatggatatgctaattaccctgattggatcattatacattgtacacatrtatcaaaatatcactctgtgtcccataaatatgtacaattattgcatatcaactaaaaataaaaagaatcaatgccctttagatgggtatatgagatctt

SEQ ID NO: 452939 - DNA, 201 bp, Homo sapiens
gaggctcagctctttctgtggcttcttcttgagcagcctgttgaccaagatgtggcccatgccactccctatattcggagtccattttctgatgccctctytcagctcttcgcctgcactcatctgtgactgcctggtactgctaggaagcctctgtttgtgtctcatctctccaggtggactggagctcctgggggtcct

SEQ ID NO: 452940 - DNA, 201 bp, Homo sapiens
cataggggaggggacagggtgggtgcagcccaagatcactggagttcctgggaagcggggagtctgtggttctctaatggctgatttttctggggaaaagrtggtgttgactgtcccagcttggatgagaggatttgcgcattgcatctgaaaccaagaaagactaggatcgtctttggaatgtttgggatggttgattcc

SEQ ID NO: 452941 - DNA, 201 bp, Homo sapiens
tataaagtatataacataaaaatcagaaataaacataaggaatgtaagtattgaaattacattgtgagcttgctttttgtactcagaccttccccacagtrttaggatggtttcattggcaaataaaagaaactgaacccaacccagcttaggacttcaggaaaattgattgaatgattgcttgattgcttctatgattga

SEQ ID NO: 452942 - DNA, 201 bp, Homo sapiens
ctgctccccaactcccataggctaagatggccctgcaggacaggtaggaccttggcaggcaggacaggatgggagtggggaggctgcagacgtctgtagarctccatgctgttcctggatgcctccccatgcattgtcccatctggttcctgctcccttgcaggactgggcagatgccattccccttttagagctgggaaa

SEQ ID NO: 452943 - DNA, 201 bp, Homo sapiens
acacactgattacctaatttatctgttccccgattattacactctcaattgctgcagagtctcagaagcagcatggtgtaacagaaagaatatgaggcttrgaatccaaaagccagagtgtgaattccagctccactgacttgctgcgtgacttgaagcaagtcattacgtgtctctgtttactcattttatgactttcct

SEQ ID NO: 452944 - DNA, 201 bp, Homo sapiens
attgtcctccttcaggaccagcttctcagagcagagtctccaaacataatgtcgcttccagatgatgcaaatctgatatcagagaatgactaaaagcttgmaactttgcttttaatctgttgtggatcaagtttcttttcaaataaatcaaagtctgtgaacttaggaaggaggaaaattgctggatatcttttttggcgg

SEQ ID NO: 452945 - DNA, 201 bp, Homo sapiens
ggtaagcagagacttgtcccttggccctcaagacagaagtggcaattgcccggggccattcagagctgccaaagcattttcctgcttattagccattccarcctcacaactagcaaccttgagagaaaggtctggagagaatttttatccccgtatccaaaaagatggagtaacttgtgcaaaaatcacgctgtcagctgg

SEQ ID NO: 452946 - DNA, 201 bp, Homo sapiens
ggggtgggtggggtgggacagccgcactttataactttgctttcagcatgatgtggattagtgtctcccatgtgggaaaattatgtttaccacttagagasctgatagtgcttgcttaccccataacgctggacggtggcaggcttaactcccccatcaagggccttaatgtatttggggccctagtcctagcaacagcag

SEQ ID NO: 452947 - DNA, 201 bp, Homo sapiens
aggaggggcagtgtcatctgtttttaccttttcttttcttcttcttctcttcttctttttttttaatgtagtctggtctttccaactttgttttcagccartgcagaagatgtctatttgtgctgcacggcccagaagggaactgccagttcagaaaatgtcaggtcaacttgatgctcccggttgacatttggcactggc

SEQ ID NO: 452948 - DNA, 201 bp, Homo sapiens
cattagctgtgaaatccaacagcctgcaaaacaacctgtgaccacaggggaaagtccggcagtcactggaagggcttagagctcctcaaggcccattctcrgagaattgtcattatttgacctctctggtcacactacttgcaaggctgtttttatttgagctgacttagagctcatccagcacaaataaaagcagccttg

SEQ ID NO: 452949 - DNA, 201 bp, Homo sapiens
gagggatattttccatgggtagaggatctaggcttttcttttggattccattgtggctttaaaaaaagtcagttgactgtttatttatggcttctctaaakgtgatctctttcttcctaaggctgttttaaaagtttccgttccctccctcccttcctcccaccccatcccccttcttcctttccttcctccctcccttcc

SEQ ID NO: 452950 - DNA, 201 bp, Homo sapiens
ataaatagtaggaggggcagtgtcatctgtttttaccttttcttttcttcttcttctcttcttctttttttttaatgtagtctggtctttccaactttgtyttcagccaatgcagaagatgtctatttgtgctgcacggcccagaagggaactgccagttcagaaaatgtcaggtcaacttgatgctcccggttgacattt

SEQ ID NO: 452951 - DNA, 201 bp, Homo sapiens
actttaacttgccgtattcccatccccaccctccccagcaccacattagctgtgaaatccaacagcctgcaaaacaacctgtgaccacaggggaaagtccrgcagtcactggaagggcttagagctcctcaaggcccattctcggagaattgtcattatttgacctctctggtcacactacttgcaaggctgtttttattt

SEQ ID NO: 452952 - DNA, 201 bp, Homo sapiens
gcctgacttttggcctctgccccgcctgtggagtcggtgcgggctccagattccagaggcgaaggatacatcctagtgccagctcagatctgaaacaggcktgcccttcgttttcaggtaacttctgttctggtctctgaggctgtgctggagcactggccgggattccaggcggcattttgtatttggagacagcaatct

SEQ ID NO: 452953 - DNA, 201 bp, Homo sapiens
ggtgatatgtgatcaatacaaagtatttgaatacctgatgttacatactttcccccatctcagccaccactaacccttcccctcatcctcctcaagggaaycttcattaatgatttcatgtgctccttttctggcctttctaatgcctatatatcaacctatattttaatgcttaacatatagtgtctataatctgcttct

SEQ ID NO: 452954 - DNA, 201 bp, Homo sapiens
aagtgcatgagccaggctggcgtggcacgtgaggctgcataattttcgccgcccttccctaggtgttctgctgagagctgggctgtctgcttagaaatcarcctccaggcctgacttttggcctctgccccgcctgtggagtcggtgcgggctccagattccagaggcgaaggatacatcctagtgccagctcagatctga

SEQ ID NO: 452955 - DNA, 201 bp, Homo sapiens
acaagggggtggcagatgccatgccttcctttccctggaaaattccccatgactctttcaggatgcaaggaggccccaactgctatttttgtttaggtgaytgagaaaaccaagtgtggagaagaaactccgttgacgtgataaaaagagcagaattaatatttgctatctctttttctggtgccaagaaagttactggaa

SEQ ID NO: 452956 - DNA, 201 bp, Homo sapiens
ggagtgcagtggtgcgatctcggctcactgaaacctccgcctcctgggttcaagcgattctcatgcctcagcttcccaagtagctgggattacaggcaccygccaccacgtccggctaatttttgtatttttagtagagatggggtttcaccatgtgggccaagctggtctcaaactcctggcctcaagtgaaccgcctgc

SEQ ID NO: 452957 - DNA, 201 bp, Homo sapiens
cctgggcaccctctttcacgtggcagcatttttatcgctgtgacaacctggagtcaccttgccatttaccacagttgccttggatgaccaagtaaccctcytgcccttcatggggggatgtcctttgaagaacaccattcattctggaagtgcaggcctggcctgaaccactttggggacgggtacctgtcacaggaagag

SEQ ID NO: 452958 - DNA, 201 bp, Homo sapiens
ctcaaaacaaaatggcttatcagctcctctcatctccttccgtttataacacctgcgtagtaataccttgcatagctcactaagcacacctccttccataygagctgtgttatattgtggtacatcatttggaactgctgagtctatatggaaatcctgatgtactctcgtagaccactagccacactgagagtgttggaa

SEQ ID NO: 452959 - DNA, 201 bp, Homo sapiens
tctttctgtcagcataatgctctcgggttcacccacgttgtagcatgtatcagtatttcatttcttcttacggctgaatagtgttcagttgtgtgggtttgccatattttgtttattcatttattgatgaacatttgggttgtttccatcttctggctattatgaattgtgctgctatgaactataatgaacattctgcat

SEQ ID NO: 452960 - DNA, 201 bp, Homo sapiens
ttctttttttttttggtgggcagtgaggtgggggttcctgggtggggtgtagcagggagccgttttgttatttttgctttttttttcgcctaaagaaaatytgccaggtccccttccaattctgatcccactagattccagaagtcttctgaggttaagctcaaggacaaagagatggttgttttccaggtgcaattttgg

SEQ ID NO: 452961 - DNA, 201 bp, Homo sapiens
ctcaaactcctggcctcaagtgatccgcccgcctcagcttcccaaagttttgggattacaggcgtgagccatcactcctggccctattttggctatttcayatagtggagtcatacaacatgtggccttttgtgtctggcttctttctgtcagcataatgctctcgggttcacccacgttgtagcatgtatcagtatttca

SEQ ID NO: 452962 - DNA, 201 bp, Homo sapiens
tggtaagaacagggagctttgtggcactttaacttgccgtattcccatccccaccctccccagcaccacattagctgtgaaatccaacagcctgcaaaacracctgtgaccacaggggaaagtccggcagtcactggaagggcttagagctcctcaaggcccattctcggagaattgtcattatttgacctctctggtcac

SEQ ID NO: 452963 - DNA, 201 bp, Homo sapiens
aagcgggggaagatgcaaagaacctgggtctttggtgacgtcgttaagcagctgatgtaatcagcctggggttttcctttctgtagattttttttttttttaaggacagataatttttttctactgccaaatttttttgaattggaaatttttctggttacttacaaccacaattggcatcattcaaaaaccattaattta

SEQ ID NO: 452964 - DNA, 201 bp, Homo sapiens
atcgcttgaacccgggaggcgcaggttgcagtgagccgagatcacaccactgcactccagcctgggcgacagagcaagactctgtctcaaaaaaaaaaaawaaaataaaaataaaaataaaaataaaaaaggaagaatctgtcagtgagcgaggtgtccaaaaggggtaagtacgggatccagagtagagtactggggtgc

SEQ ID NO: 452965 - DNA, 201 bp, Homo sapiens
gagcctcagattcctacttattgaggataacaatccacaagacagcatatgtaaagtgtctagcttatggcccggcacaaaacaggcccattgtaaatagyggtctttcttccagtatgttatatagatcaagtcgtttcaatagatgaatactctaaaaactcaaattttatggtaaacagttaagaaagtgaatccact

SEQ ID NO: 452966 - DNA, 201 bp, Homo sapiens
ccaagtgtacaagagtttccttttctctgaaagagaccagtaccagtccatggcctcttaggaactgggctgcatagcaggagttaagcagcaggcaagcsagtgaagctttatctgtgtttacagccactccctattgctcacattagtgcctcagctctgcctcctgtcagatcagcattagattctcctaggagggcg

SEQ ID NO: 452967 - DNA, 201 bp, Homo sapiens
ctctactaaagatacaaaaaaaaaaaaaaaaaaaaaaattagctgaccacggtggcaggcgcctgtgatcccagctacttcaggaggccgaggcaggagartcacttgaacccaggaggcggaggttgcagtgagccgagatcgtgacatggcactgcagcctgggtgacgagagcaaaactatggctcaaaaagaaaaga

SEQ ID NO: 452968 - DNA, 201 bp, Homo sapiens
actaatttacatttccaccaagtgtacaagagtttccttttctctgaaagagaccagtaccagtccatggcctcttaggaactgggctgcatagcaggagktaagcagcaggcaagcgagtgaagctttatctgtgtttacagccactccctattgctcacattagtgcctcagctctgcctcctgtcagatcagcattag

SEQ ID NO: 452969 - DNA, 201 bp, Homo sapiens
tggagttggagagaaacaggttgatttggaagttcttctgcaggtagaacggaaaggcgaattctgcaagatgctctggggtccactgagctcagctgctkaggctcagctctttctgtggcttcttcttgagcagcctgttgaccaagatgtggcccatgccactccctatattcggagtccattttctgatgccctctc

SEQ ID NO: 452970 - DNA, 201 bp, Homo sapiens
aggcgcctgtgatcccagctacttcaggaggccgaggcaggagaatcacttgaacccaggaggcggaggttgcagtgagccgagatcgtgacatggcactscagcctgggtgacgagagcaaaactatggctcaaaaagaaaagaaaagatgatgctgagtgagagaagccagatgacacaaaagtctacttgtatgattc

SEQ ID NO: 452971 - DNA, 201 bp, Homo sapiens
agctctttctgtggcttcttcttgagcagcctgttgaccaagatgtggcccatgccactccctatattcggagtccattttctgatgccctctctcagctyttcgcctgcactcatctgtgactgcctggtactgctaggaagcctctgtttgtgtctcatctctccaggtggactggagctcctgggggtcctttccttt

SEQ ID NO: 452972 - DNA, 201 bp, Homo sapiens
ggactatgccaggaactcctcacatatggaggattcgaggtaagccatttgctcaaggacacttacccagcaatggcagcctccactaatgagacatcgcsaactcctgtaatcaatggtctttgtttctaaacagcttatgtggaattctccgtttttttgtctgtaaaagttttctttagccccaatctctttggatat

SEQ ID NO: 452973 - DNA, 201 bp, Homo sapiens
actgtggatttatccatgtgtcacctctcccaggcagaattacattctgaaggcatctctaattgagattgctccatggggaaggactcttagggctcagraagcaggtggtaaagccctggagtgaggcaggaaccccaaagccctatgacaccccatataggtacccccaaacctgcctatacttcaggccaggccccc

SEQ ID NO: 452974 - DNA, 201 bp, Homo sapiens
aagccctggagtgaggcaggaaccccaaagccctatgacaccccatataggtacccccaaacctgcctatacttcaggccaggcccccagtatagagatgraaaaatagtcccacttttggtcacagattctggaaaactgtgagattctggggaaatccattttgagtaataccttttagaagaagaaaaaaatggaagt

SEQ ID NO: 452975 - DNA, 201 bp, Homo sapiens
aggacatttgtgtgactctcagtttttgaatattggtgaatagtgctgcttagaacattctggtatgtgagtttttgttgcacataaggtatttatgttgracaaatatttaagagaaaaattattgaatttaggtatgtataacctcagatttggagaatactgctaaacagtttttcaaagttgttgttcattttaaat

SEQ ID NO: 452976 - DNA, 201 bp, Homo sapiens
ctgaccagcttagaaaaataatcatggtagacaccttagttcattattctaataagctgttgatctggtcctccctgttgccagcatctccaccttctacmaaatgggtggtctttttcttctttccacctcatggagaagataatttgaaggaccacaggaagttatttgcttcttcgaagcattttccaacagtataga

SEQ ID NO: 452977 - DNA, 201 bp, Homo sapiens
tctttctcaggcatttgatcttcagctctgtgaaatttcttcgctttttcttaagggtttctggtacagcaggaaactttttcttcttctctttgacactytccatggttccagcgggaaaagaggaactattcctttattattaaaagatgaaatctgcaatatccagcaaacattactttccctactggatctttaaat

SEQ ID NO: 452978 - DNA, 201 bp, Homo sapiens
tcaggaggatctcttaaggccacaagtttgagaccagcctgggcagatcccacctctacaaaaaaaatccaaaatgagcccagcatggtggcatgtgcctrtagtcctagctactcaggaggctgagacgggaggatccctcctggctgcagtgagctacgatcataccactgcactccagcctgggcaacacagcaagcc

SEQ ID NO: 452979 - DNA, 201 bp, Homo sapiens
aatccaaaatgagcccagcatggtggcatgtgcctgtagtcctagctactcaggaggctgagacgggaggatccctcctggctgcagtgagctacgatcayaccactgcactccagcctgggcaacacagcaagcccctgtctcaaaaaaaacaaaacaaaaaagtttttaaattaaaaaaaaactttgaaatggagtcca

SEQ ID NO: 452980 - DNA, 201 bp, Homo sapiens
gtgcagtggtataatctctgtctactgcagccttgacttcccggcctccagcaatcctcccacctcaccctcttgagtagctgggaccacaggtacaccaycatgcccagctaatttttgtgtttctggtagagacggggttttgccgtgttcaccaggctggtcttcaactcctgagctcaaaagcaatccacctgcctc

SEQ ID NO: 452981 - DNA, 201 bp, Homo sapiens
tattttaattttttttgagatggagtctcactgtgtagcccaagctggaatgcagtggcctgatctcggctcactgcagcctccgcctcctgagctcaagygattctcgtgcctcagccttccgagtagctgggactacaggcgcgcaccaccatgcctggctaattgtttgtattttagtagagatggggtttcaccatg

SEQ ID NO: 452982 - DNA, 201 bp, Homo sapiens
tttcatttcatcgcagttatttttattttatttttatttattcatttattgttttgaggcagggtcttactctgtcacccaagctgtagtgcagtggtatratctctgtctactgcagccttgacttcccggcctccagcaatcctcccacctcaccctcttgagtagctgggaccacaggtacaccaccatgcccagcta

SEQ ID NO: 452983 - DNA, 201 bp, Homo sapiens
tcttttttagtatattatgaacttatatgttttaacacatttgtgtttcatttcatcgcagttatttttattttatttttatttattcatttattgttttsaggcagggtcttactctgtcacccaagctgtagtgcagtggtataatctctgtctactgcagccttgacttcccggcctccagcaatcctcccacctcac

SEQ ID NO: 452984 - DNA, 201 bp, Homo sapiens
cagctaagcattaataggcctaaaatgtcagtagcactgaggttgagaaactctggcctacttttataatttcatcaggtgtttgtgaaatggtcttattstaactgttatttcttctttctttgttagctggaattctttcataaagagaaactctttgatcagttagttacccaaggtatagttcatacagtaaaggca

SEQ ID NO: 452985 - DNA, 201 bp, Homo sapiens
tctaattcagattaaactctcagtattgcatgctttgatcaggaggcataatgtgtagtttgtgtgtgtgtgtgtgtgtgtgtgtgtgtgtgtgtgtgtgkgtgtttaagtgatgttagtggtcactgatcattgcctatgtcagcatttcactaccagggtaatttggcaatgtctggagatacactgattgtcacaggt

SEQ ID NO: 452986 - DNA, 201 bp, Homo sapiens
tcgaggtgctgtatttttacaactgtagtatcatagtgtgtatttttttttaaaactaattgatcccgtttagagagatgtgcctttcaaggtacgttacwgagtgactatgcgttagtaaatataggtatttccatagtttatttaattagagattaaaagatgagactaaatgatacatttatggacaaagttgaatat

SEQ ID NO: 452987 - DNA, 201 bp, Homo sapiens
actctgttgcccaggctggactgctgcagtggcgcgatcttggctcactgcaagctccgcctcacgggttcacgccattctcctgcctcagcctcccgagyagctgggactacaggcgcccaccaccacacctggctaattttttatatttttagtagaggcggtgtttcaccatgttagccaggatggtcttgatctcct

SEQ ID NO: 452988 - DNA, 201 bp, Homo sapiens
tcctgacctcaggtgatccatgtgccttggcctccaaagtgctgggattacagacgtgagccgccttgcccggtcccttgcatttcttcttttttttttttgagacagagtctcactctgttgcccaggctggactgctgcagtggcgcgatcttggctcactgcaagctccgcctcacgggttcacgccattctcctgcc

SEQ ID NO: 452989 - DNA, 201 bp, Homo sapiens
gatcatttatgttgtaacatgtatcagtacttcatttctttttagggccaaatagttattctgttttatggctacagtgcattttgtttatccatttaccrgttgatgttcatttgagttattcattcagatgttcaactgaattgtgaataaagcattttttgtttcttttttttttttttttggagatagggtctcact

SEQ ID NO: 452990 - DNA, 201 bp, Homo sapiens
agcatttataaggacacacggcacttgtaacctttccccaagttgaagatgtctgtatttttttcagaataattaatgtaattttgaggtggaaaaaaaamccaaaaaccagttgacagccttgatttagcttgccagaaataagttgcctgaacagagacttgtgaatggtggtatgagggctttccttgctgtaattta

SEQ ID NO: 452991 - DNA, 201 bp, Homo sapiens
gataaatcaatattaggaagctatgttagaataagtaaactggtggcattaccagatgaatagggaatttttttgaaagaccaagtttggagagatatcartaaatttggcttggaaacactgagtcttaggagttcctgggaaacacacaggtgaagatatccagttggcgatttgatataaggatctggagacagaaaa

SEQ ID NO: 452992 - DNA, 201 bp, Homo sapiens
tcttgacatctgcaagaaaatttgaggcaagaaaagttaaatggaaggatagattaaagtattatgtgacatgttcaaacactgcacatacttataattckgagaataatcatgctgtaatctttcattgtaggtcatgtgaaactaacagactttggactatgcaaagaatctattcatgatggaacagtcacacacaca

SEQ ID NO: 452993 - DNA, 201 bp, Homo sapiens
cacatttattgaaagattgcctcttgcctaatgaatatttttggcagttttatcaaaaattagttgacaatataaatgtaagagtttatttctgggctctyaattctattctgttgatctatatgtctttctttatgccagtaccacactgccttgatggctgtagctttgtaacatgttttgaaattgggaagtgtcagt

SEQ ID NO: 452994 - DNA, 201 bp, Homo sapiens
tagttttggaaagatccctgattttctgctgacattgccaaatgaggttggataatacctaatttcatagatattttcaatgaagtaaatttgaataactrcaagactttttttctttgtcaacttaatgaactttttctaacttaccttagctttggggtgcttgatgcttatgaaaataaataattgtcttcttttact

SEQ ID NO: 452995 - DNA, 201 bp, Homo sapiens
tttgttgttgttgtttttccattttttttttctcctgtttgtaaggatttaatcaaggtctgtatatagtttggttactatgtctcttaggtctcttttcstttatagattccccttgtgatttattgaagaaactgggtcatttgtcctgtagaattctcaaattttgattttgctgatgttatccccatagtttcattg

SEQ ID NO: 452996 - DNA, 201 bp, Homo sapiens
tgccatcccatcatcacacctcagaagttgacagtttccttagttgtttttttttttttttcctttttcttttctttcttttttttttttgggggggggggatagggtctttctctgttgcccaggctggagtgcagtggcatgatagtggctcatggcagcctcaacctcccaggctcaagggctcctcccgtatagctg

SEQ ID NO: 452997 - DNA, 201 bp, Homo sapiens
ttttttgggggtgggtaaggcacacgattcaacccataacaatatgtttgtgagtaaatcagttagtgtgttagttattgtccttctcccacctcagaatytgagaaaatacagtttctttttccattccttaggatgtagttggagaaggaggaggatgatgatggtgattattttttggtcatggagcataatgtcccc

SEQ ID NO: 452998 - DNA, 201 bp, Homo sapiens
atatctgtggccaaatttcccctttttataaggataccaggcatattggattagggttcctctctactccagtaggacctcatcttcactaattacatctkcaataaccctttccaaataaggtcacattctgaggaactagaggttagaatttcaatgtacgaaattttttgggggtgggtaaggcacacgattcaaccc

SEQ ID NO: 452999 - DNA, 201 bp, Homo sapiens
ggcttctggtggtttgctggtaatctttgtcattctttggcttgtaggtgcatcacccggatctctgccttcatgttcacatggtgttctacctgtgtgcrtatctgtggccaaatttcccctttttataaggataccaggcatattggattagggttcctctctactccagtaggacctcatcttcactaattacatctg

SEQ ID NO: 453000 - DNA, 201 bp, Homo sapiens
atgcctttccatttatttaggtcgtctttaattttattcagcaatgttttattgttttcagtgtgtaagtcttacactttggttaatttttttttttttttgagacagggtctcactctgttgcccaggctggaatatagtggcacaatcactgccacattgtagccatgacctcctgcactcaagtgatcctgccacctc

SEQ ID NO: 453001 - DNA, 201 bp, Homo sapiens
tttattttgcttaatttaaccattttaaatatgattctctgggaattttttcttcaaagtatagaatatgtgtgcattcgtttgctaggcttgctgcaacraagtaccacaaaccgggtggcttagacaacagaaatttattatctcatagatctggagactagaagttctagatcacattgttagagttggtttctttga

SEQ ID NO: 453002 - DNA, 201 bp, Homo sapiens
caaatatttcaggtagttgggactttcctttttttggtttgttttattttgcttaatttaaccattttaaatatgattctctgggaattttttcttcaaartatagaatatgtgtgcattcgtttgctaggcttgctgcaacaaagtaccacaaaccgggtggcttagacaacagaaatttattatctcatagatctggag

SEQ ID NO: 453003 - DNA, 201 bp, Homo sapiens
ggctgaggcaggaggatcgcttgatatttttttagaataagaaaaatctcagagcagacagaaacattatttttattagcagttcaaagatctctggtctrtcctctccagcatctttattttattttattttgagatggggtctcactctgtcacccaggatggagtgcagtagcacgatcacagttcaatgcagccttg

SEQ ID NO: 453004 - DNA, 201 bp, Homo sapiens
aaagtgctgggattacaggcatgagccactgtgcctggccaataaactatattttctcaagccaaagtagacaagcacagtctaaaaaggaaaaaaaaaaatcagtttgactaaggttctttatccaagctttttttcctctttaaagctgctgaaaagaaatgctgcttctcgtctgggagctggtcctggggacgctgg

SEQ ID NO: 453005 - DNA, 201 bp, Homo sapiens
tgggcatgatggtgggtgcctgtaatcccagctactcaggaggctgaggtgggagaatcgcctgaacccaggaggcgaaagttgcagtgagccaagatcgygacattatactccagcctgagtgaaaagagcgagactccgtctcaaaaaaaaagaaaatatgtgaatattagaagctatgcttcttacagtaggttttat

SEQ ID NO: 453006 - DNA, 201 bp, Homo sapiens
taatagagacttgaaaaattcttctccattgggattcacactcttactgttggcaaccctttgccacaatttgattaaattaaggctggcctcctagaagrtgagaccactttgagagtgtccctagctctaccagccttcccagttgtctcagcattctctgttgaagccccaaacatatgtgtgaagccatcctagagt

SEQ ID NO: 453007 - DNA, 201 bp, Homo sapiens
ctaatattctaataaaagctgaaaattcagaatactcccatttgacatggagacttatcagctactgtcatttagtaagtgttcttactttcagaaacaamgaccaataataacaacctaatggtactttaaaaatacgaaatatgtaaacaaaaactcaggtatcaaaaaattaaatatttattgagcatctgttatgtg

SEQ ID NO: 453008 - DNA, 201 bp, Homo sapiens
gatctactagctttacaaaggatgatagtgcttcaaattcaacataactggcttaagagactaagcaatctgaaatgtaactattataaaatctatagccmtgtattatttgacccaggactgccaaattgagcttattacctgcagcagtggttcataaagtcaatccagccagaggttggctggttgaatgtaactcat

SEQ ID NO: 453009 - DNA, 201 bp, Homo sapiens
ttttatttttatttattcatttattgttttgaggcagggtcttactctgtcacccaagctgtagtgcagtggtataatctctgtctactgcagccttgacrtcccggcctccagcaatcctcccacctcaccctcttgagtagctgggaccacaggtacaccaccatgcccagctaatttttgtgtttctggtagagacgg

SEQ ID NO: 453010 - DNA, 201 bp, Homo sapiens
agacagggtttcaccatgttggccaggctggtctcgaacttctgacctctggtaatgtacccgccttggcctcccaaagtgctgggattacaggcgtgagycactatgcccagcctatcaattgatttttaaatgttaagccagccttgcagttcaaggataaactccacggagttgtagtgtattaccctttttatatat

SEQ ID NO: 453011 - DNA, 201 bp, Homo sapiens
gcctcagcctcccaggtagctgggattacaggcatgcaccaccacacccagctaatttttttatttttaatagagatcacccctgacctcaggtgatctgyccgcctcggcctcccaaagtgtagggattacaggcgtaagccactgcgcccagcccacattcagttttgacatccattgaatcttgcctgcaacaattaa

SEQ ID NO: 453012 - DNA, 201 bp, Homo sapiens
ctctcgagtagctgggattacaggcacccaccaccacgcccagctaatttttgtatttttagtagaaatggggtttcaccatgttggccaggctggtctcraattcctgacctcaggtgatccgcccaccttggcctcccaaagtgctgggattacaggtgtgagccattgcacccagcctattcagtgtatattttctaa

SEQ ID NO: 453013 - DNA, 201 bp, Homo sapiens
cataatttcatacttaacacaaaaagttttaagagtagtataaagaattcctatgccaggctcagtggctcatgcctgtaatcccagcactttgggaggcyaaggtgggcggatcatgaggtcaggagtttgagaccagtctggccaacatagtgaaaccctgtctctactaaaaatagaaaaattagctgggtatggtgg

SEQ ID NO: 453014 - DNA, 201 bp, Homo sapiens
ctaaaattagtgagggtgatttaattgtagactatcatttttctacctatgggtaaaatgttaaagagtctttaatcaatatatatattttttaacctcargtctggaatctacagatattttaaagtttgtagatataaaacctggaattccaagccagttctagtttttaaatatatgtgtgtcacagaagaataagaa

SEQ ID NO: 453015 - DNA, 201 bp, Homo sapiens
tttagtagagctgggctttcaccatgttggccaggctggtcttgaactcctgacctcaggtgatctgcccaccttggcctcccaaagtgctgggattacargtgtgagccactgtgcccgcccggaaaaactttattttgacataatttcatacttaacacaaaaagttttaagagtagtataaagaattcctatgccagg

SEQ ID NO: 453016 - DNA, 201 bp, Homo sapiens
gcctggctaatttttgtatttttagtaaagatggggtttcaccatgttggtcaggctggtctcgaactcccgacttcaggtgatccacctaactcggcctmccaaaatgctgggattacaggtgtcagccactgcacccggccacaagtatctatttctagcaaacacagttcagttctctgagaaggattttgcagtaac

SEQ ID NO: 453017 - DNA, 201 bp, Homo sapiens
acttacgtgttcactgcaaaaaatccaaactgcacagaggcatatataaagtgaatgttttccattaccccatctcagtttctagtgggaactatggttaatagttcaatattggcaggaaaaacacaaaatagattttagaataaaatagattatagaataaaaatgttcactattttgttcttatagatgatctctttt

SEQ ID NO: 453018 - DNA, 201 bp, Homo sapiens
tatccatgctgctgtacttttaagtactcttttgtatcttgtttttatagaaatttttcttatttttattttatttatttatttatttatttatttatttwtttgagacggagtctcactttgtcacccaggctggagtgcagtggcgtgatctcggctcactgcaagctccgcctcccaggttcatgccattctcccgcc

SEQ ID NO: 453019 - DNA, 201 bp, Homo sapiens
aagtgctgggatgacaggcatgagccaccgcacctggtctttttttttttttgtgagacaggttcttcctctgttgcccaggcttgagtgcagtggcatgrtcatggctcaccacacccttggacaccaggctgcctcagctcactgcaacctctgcctcccaggttccagtcattctcgtgcctcagcctctggagtaac

SEQ ID NO: 453020 - DNA, 201 bp, Homo sapiens
atctagccaccttggcctcccaaagtgccaggattacagacgtgagccactgcgcctggccctatactctcttttaaaaaaatttgtttttttttttttttgagatggaggttcactctggtgcccaggctggagtgcaacgatgtggtcttggctcactgcaacctccatctcccaggttcgagcaattctcctgcctca

SEQ ID NO: 453021 - DNA, 201 bp, Homo sapiens
ttgaccccgtgatctagccaccttggcctcccaaagtgccaggattacagacgtgagccactgcgcctggccctatactctcttttaaaaaaatttgtttktttttttttttgagatggaggttcactctggtgcccaggctggagtgcaacgatgtggtcttggctcactgcaacctccatctcccaggttcgagcaatt

SEQ ID NO: 453022 - DNA, 201 bp, Homo sapiens
aataataaacactgcacttaggtgacctacaaattagattttctgctcaagcagctttcccaaagctcataaagtttccaataattaatggtgccaccaakaatattacctccccgcgcaaaagaatgttacctaaatacatttaaagcatagatactttggagagtcaccacgtaattgctaggtaactctttagtctga

SEQ ID NO: 453023 - DNA, 201 bp, Homo sapiens
aatgtctggagatacactgattgtcacaggttgggggagggaatgctataggtaccttcaggagtaagagtcagcacagcacagccccctacagctaagcrttaataggcctaaaatgtcagtagcactgaggttgagaaactctggcctacttttataatttcatcaggtgtttgtgaaatggtcttattctaactgtta

SEQ ID NO: 453024 - DNA, 201 bp, Homo sapiens
gagcacctgcgtatgaatctatgacagagcaatgcttttaatgaatttaaggcaaaaaaggtggagagggagatgtgtgagcatcctgcaaggtgaaacaagactcaaaatgacagtttcagagagtcaatgtcattacatagaacacttcggacacaggaaaaataaacgtggattttaaaaaatcaatcaatggtgcaa

SEQ ID NO: 453025 - DNA, 201 bp, Homo sapiens
atgaagtcaggctggagtgcagtggtgtgatctcagctcactgcagcttctgcctcccgggttcaaactatcctcctgcctcagcctccagagtagctgaractacaggcgtgcgccatcgcgcccagctaattttttgtatttttagtagagatggggtttcaccatgttggccaggatggtctcgatctcttgaccccg

SEQ ID NO: 453026 - DNA, 201 bp, Homo sapiens
actgcagatttcatagcacttcacccctaatttcatctatacatctcctaagaataagggcattttttttttttttttttgagaagcagtctcactctgtygcccaggctggagtgcagtggtgcaattttggctcactgcaacctccacctcctgggttcaagcgattctcctgcctcagccccacaagtagctgggatt

SEQ ID NO: 453027 - DNA, 201 bp, Homo sapiens
tgcaacctttgcctcttgggttccagtgattctagggcctcagcctcccaaatagctgggactacaggtgtgtaccaccacgcctggctaatttttgtacrtttggtagagacagggtttcaccatgttggccaggctggtctcaaactcctgacctcaagtgaccgcccacctcagccccctaaagtgctggaattatgg

SEQ ID NO: 453028 - DNA, 201 bp, Homo sapiens
gattacaggtgcccgccaccacacccagctaatttttgtatttttagtagagacagggctttgccatgttggccaggctggtctcgaactcctgaccgcargtgatccacccttcttggcctcccaaagtgctaggattacaggcatgagtcactgcgcccggcctccactgtcttaaaacaaaagttccagtggagaact

SEQ ID NO: 453029 - DNA, 201 bp, Homo sapiens
tgggattgattactgaaaagattccactgtctttttttttttcctgggttcaagtgattcttctgcctcaacctcctgagtagctgggattacaggtgccygccaccacacccagctaatttttgtatttttagtagagacagggctttgccatgttggccaggctggtctcgaactcctgaccgcaggtgatccaccctt

SEQ ID NO: 453030 - DNA, 201 bp, Homo sapiens
aggctggagtgcagtggcacagtctcggctcactgcaatttccacctcctgggttcaagcgattcttgtgcctcagccacccaagtagctgggataacagkcatgtgccaccctgcctggctaatttttgcatttttagtagtgacagggtttcgccatgttgtcagcctgatctcgaactcctgacctcaagtgatctgt

SEQ ID NO: 453031 - DNA, 201 bp, Homo sapiens
actttgatttagtcagttttagtcactttgttccatgttagaggccttctttagatgtctggtgtcattcactgattattcttttttttttttttttttttgagttggagtcttgctctgtcgtctaggctggagtgcagtggcacagtctcggctcactgcaatttccacctcctgggttcaagcgattcttgtgcctca

SEQ ID NO: 453032 - DNA, 201 bp, Homo sapiens
gactttgatttagtcagttttagtcactttgttccatgttagaggccttctttagatgtctggtgtcattcactgattattcttttttttttttttttttttgagttggagtcttgctctgtcgtctaggctggagtgcagtggcacagtctcggctcactgcaatttccacctcctgggttcaagcgattcttgtgcctc

SEQ ID NO: 453033 - DNA, 201 bp, Homo sapiens
ttgtgattctccagaattctttctgttgtttttgttttatagcaacctgtttaatgagtataatatcttctcttacccctctgagagttttattttatttttttttaatgtttattattatttttttgagacaagagtctcactctgtcgtgcaggtttgagtgcagtggtgcgatcttggctcactgcaacccctgcctc

SEQ ID NO: 453034 - DNA, 201 bp, Homo sapiens
tttgtgattctccagaattctttctgttgtttttgttttatagcaacctgtttaatgagtataatatcttctcttacccctctgagagttttattttatttttttttaatgtttattattatttttttgagacaagagtctcactctgtcgtgcaggtttgagtgcagtggtgcgatcttggctcactgcaacccctgcct

SEQ ID NO: 453035 - DNA, 201 bp, Homo sapiens
ttattagcagttcaaagatctctggtctatcctctccagcatctttattttattttattttgagatggggtctcactctgtcacccaggatggagtgcagyagcacgatcacagttcaatgcagccttgacctccccaggctcaggtgattctcccacctcagcttcccaaatagctacgactacagacacgtgtcaccat

SEQ ID NO: 453036 - DNA, 201 bp, Homo sapiens
ataggtctgctgccaatgaattatcttagtttttcttcatttgagaatatctttagttttcccttcattaatgaaggatattttcattgatatctaattcygggtagacagtttgttttagcaatttaaagatattccacaccgggcacggtggctcacacctgtaaccccagaattttgggaggccgaggtgggtggacc

SEQ ID NO: 453037 - DNA, 201 bp, Homo sapiens
ctacccaatgaaaaaccatagtacccctttatgcataaaataaacaattataaaaataagtaaataattgattgcccattctatgaacaaggaggcaaacrattatcaggccaccctcctcttgacctgctgttctgtttgtttagagcacaaataatttggtgtcatgtacttttttacttttacttacttagattacat

SEQ ID NO: 453038 - DNA, 201 bp, Homo sapiens
atttgtgattctccagaattctttctgttgtttttgttttatagcaacctgtttaatgagtataatatcttctcttacccctctgagagttttattttatttttttttaatgtttattattatttttttgagacaagagtctcactctgtcgtgcaggtttgagtgcagtggtgcgatcttggctcactgcaacccctgcc

SEQ ID NO: 453039 - DNA, 201 bp, Homo sapiens
tatttgtgattctccagaattctttctgttgtttttgttttatagcaacctgtttaatgagtataatatcttctcttacccctctgagagttttattttatttttttttaatgtttattattatttttttgagacaagagtctcactctgtcgtgcaggtttgagtgcagtggtgcgatcttggctcactgcaacccctgc

SEQ ID NO: 453040 - DNA, 201 bp, Homo sapiens
gtatttgtgattctccagaattctttctgttgtttttgttttatagcaacctgtttaatgagtataatatcttctcttacccctctgagagttttattttatttttttttaatgtttattattatttttttgagacaagagtctcactctgtcgtgcaggtttgagtgcagtggtgcgatcttggctcactgcaacccctg

SEQ ID NO: 453041 - DNA, 201 bp, Homo sapiens
ctttaatcactgtagaattattcaggttatatatttcttcttaagtgagcttgaaggaattggcataaagttattcataatattctcttattagccgtttmacatctgtaggttctgtattgacattagcactttcattgctggtattggtaatctatgtcatctttgtttttttcttggtcagtatcactaaaagtttat

SEQ ID NO: 453042 - DNA, 201 bp, Homo sapiens
aggtgatccatctgcctcggcctcccaaactgctgggattacaggcacgagccactgcgcctggcctactgctatcttttttttttttttttttttttttwtttgtgacagagttttgctcttgttgcccaggctggagtgcagtggagtgatctcggctcaccacaacctccgcctcccaggttcaagtgattctcctgc

SEQ ID NO: 453043 - DNA, 201 bp, Homo sapiens
tagcagcccaattccaagagaaattcctgttagaaaataagttccagttaattgaaagaaaaaaaaatcaaagaggattatataagctaacaatgacacamattaaaaataaacatatacaataataaaagctcacagaaaataagtaactggatgcattaagtagattaccaataatgaaagaaaattaactgaatttag

SEQ ID NO: 453044 - DNA, 201 bp, Homo sapiens
taagacccagtctcttacagaaaaaatgtatttattttcttttcttttttttttttttgagacgtagtcgcgctctgtcgcccaggctggagtgcggtggygcgatgtcggctcactgcaacctccacctcccgggttcaggtaattctcctgcctcagcctcccgagtagctgggactacaggtgcatgctgccacgccc

SEQ ID NO: 453045 - DNA, 201 bp, Homo sapiens
ctgacctcaggtgatctgcctgcctgggcctcccagagtgttgggatgacaggcgtgagcccctgtgcctggcccaggtctttttttttttttttttttttgagatggagtctcgttctgtagcccacgctggagtgcagtggtgcgatctcagctcactgcaacctccacctcccaggttcaagtgattctcctgcctca

SEQ ID NO: 453046 - DNA, 201 bp, Homo sapiens
tacttgggagactgagtcaggaggattgcttgaacttaggagttcaagggtagcctgagcaatgtagtaagacccagtctcttacagaaaaaatgtatttmttttcttttcttttttttttttttgagacgtagtcgcgctctgtcgcccaggctggagtgcggtggtgcgatgtcggctcactgcaacctccacctcccg

SEQ ID NO: 453047 - DNA, 201 bp, Homo sapiens
aggtcagaatgcatgatactttacacagacatagccatttaaagttgccttaaggtgaaattttagaaactcatcctctttttcccaatgatttatatgaygggctcgtgtaacttatgttatggaaaaattccttgggtttcattttctctctttttttttttgagatggagtctcactctgtcgccaggctggagtgca

SEQ ID NO: 453048 - DNA, 201 bp, Homo sapiens
aaggtgcttaaaaaggtgatttccactccccctttttagtcctcacacaccatatttttacacttgatctcagccaaaaggctgggaagcaatcatatcatatttttaattgttgtaacattttggcctaaaatttgcagtcaaaaaaatgtatctcaagccaggtacagtggtgcacacctgtggtcccagctacttggg

SEQ ID NO: 453049 - DNA, 201 bp, Homo sapiens
ctgaaagataaacaattttataatgttactttgattttgccagaattttaaatatcattaaactgttttactttaatgactattaacttagaatatttttytaaatcttaatatagaatatgttaaactgtacataatcatcacagttactgttttatacaactttagtgaccaaacagaactcttatattaaacaaatgt

SEQ ID NO: 453050 - DNA, 201 bp, Homo sapiens
gaaggtgcttaaaaaggtgatttccactccccctttttagtcctcacacaccatatttttacacttgatctcagccaaaaggctgggaagcaatcatatcatatttttaattgttgtaacattttggcctaaaatttgcagtcaaaaaaatgtatctcaagccaggtacagtggtgcacacctgtggtcccagctacttgg

SEQ ID NO: 453051 - DNA, 201 bp, Homo sapiens
aagaaaaaaaaaaaaaaagctctcgcttatgaaaggagaaagttaaaaactgaactgaactgaatacaataagtactatgtgaagtaagatacaaagtgcyatgaaatatatgattacattaaaaatgtaattgtgtatttggacctctaattacctgtaataaagtgactgagaatgaaaggtgtaatataaaagaacag

SEQ ID NO: 453052 - DNA, 201 bp, Homo sapiens
tgaaggtgcttaaaaaggtgatttccactccccctttttagtcctcacacaccatatttttacacttgatctcagccaaaaggctgggaagcaatcatatcatatttttaattgttgtaacattttggcctaaaatttgcagtcaaaaaaatgtatctcaagccaggtacagtggtgcacacctgtggtcccagctacttg

SEQ ID NO: 453053 - DNA, 201 bp, Homo sapiens
ttttaaatatcaaccatatgctcctgataccaaaatttattgccttaacctctaccctgagttcatgacatatatttggaaccactttcttatcaattctmcttagcctctcaaacttaacatgttcaaaacaaaattattgatttttctcctcaaaatcagttccttcctcaacccaatgaaatgacaccaccatccagc

SEQ ID NO: 453054 - DNA, 201 bp, Homo sapiens
agtactttgggaggccaaggcagatggagcgcatgagcctaggagtttgaaatcagcctgggcagcataacagcaccctgtctctgaaaaaaaaaaaaaaraaaaagaaaaaaaaagaaacagagttttggccaatttagttacttctgattctcaccctcagccccaggcaactaacctatttctcatctctatagattt

SEQ ID NO: 453055 - DNA, 201 bp, Homo sapiens
acaaatacaactatgtcaaagtcaaagcaattttatctgattcacctgtttttaacatttagattttaaagtttcataaagtgattattaggttgaggggygcaggcatggagagaacaggacaagatactctactagtttaagaattatgtgtatgacaatgttactgttgaggatgggtatgttctattccacttgttt

SEQ ID NO: 453056 - DNA, 201 bp, Homo sapiens
aagcatttataaggacacacggcacttgtaacctttccccaagttgaagatgtctgtatttttttcagaataattaatgtaattttgaggtggaaaaaaamaccaaaaaccagttgacagccttgatttagcttgccagaaataagttgcctgaacagagacttgtgaatggtggtatgagggctttccttgctgtaattt

SEQ ID NO: 453057 - DNA, 201 bp, Homo sapiens
taattcaaacagtcctatttgctaaacccaaaaaccaaagctgaaatcccataacatcaaatcctcatattaacttaatgttcattatatgtcacatctaatcattttgtgctgagtattttattcaatttatagatttgagccatctcagcaagctgaagtacatttaaacacctagagtaacaatttgatcaagacaaa

SEQ ID NO: 453058 - DNA, 201 bp, Homo sapiens
aaatttggagaaatcaaaatgttacaaatgaaacctgctttctgtagaaatgatggggaagaggtaactaaagagatgtaagaacacccaagtcagtcacrgtcatgagggtaaagcatgacttaacatagctgaagttatctaaacttcttgtactaaaacgtctcaggctaacaacatcaaaatcaaagtaaaactcaa

SEQ ID NO: 453059 - DNA, 201 bp, Homo sapiens
gcaaaaaaggtggagagggagatgtgtgagcatcctgcaaggtgaaacaagactcaaaatgacagtttcagagagtcaatgtcattacatagaacacttcrgacacaggaaaaataaacgtggattttaaaaaatcaatcaatggtgcaaaaaaaaacttaaagcaaaatagtattgctgaactcttaggcacatcaatta

SEQ ID NO: 453060 - DNA, 201 bp, Homo sapiens
tgataactatactttcacaaggaaatataacttataaaccatgcagaatagaaaattatttttgttcctttagatttctaaaggaatgaaataagctgtgrgaagaaactttaactggagcatcttaccagtgttattcatgttttaactctgcttcagtagtttttcaggtttattacaaacctgcagtagccaactgaa

SEQ ID NO: 453061 - DNA, 201 bp, Homo sapiens
tggggaaaataattgtttgggagtgttttttccctgtttttgagttcactggatttgtcactaacttaattcttaagcttttcttccccacattgctcackatgtaatacaagtagtgttgtatcttatgggatgggaaataagctctaaagttagcatggagttggggcatggtggcttatggctataaccttgaggtca

SEQ ID NO: 453062 - DNA, 201 bp, Homo sapiens
aaacataactgccatcccatcatcacacctcagaagttgacagtttccttagttgtttttttttttttttcctttttcttttctttcttttttttttttgkgggggggggatagggtctttctctgttgcccaggctggagtgcagtggcatgatagtggctcatggcagcctcaacctcccaggctcaagggctcctccc

SEQ ID NO: 453063 - DNA, 201 bp, Homo sapiens
taaacataactgccatcccatcatcacacctcagaagttgacagtttccttagttgtttttttttttttttcctttttcttttctttcttttttttttttkggggggggggatagggtctttctctgttgcccaggctggagtgcagtggcatgatagtggctcatggcagcctcaacctcccaggctcaagggctcctcc

SEQ ID NO: 453064 - DNA, 201 bp, Homo sapiens
tcctctctactccagtaggacctcatcttcactaattacatctgcaataaccctttccaaataaggtcacattctgaggaactagaggttagaatttcaaygtacgaaattttttgggggtgggtaaggcacacgattcaacccataacaatatgtttgtgagtaaatcagttagtgtgttagttattgtccttctcccac

SEQ ID NO: 453065 - DNA, 201 bp, Homo sapiens
ccgctgctgttacagccaccaggagttttatttcgggagcaagggggctctgctgcatcttccaatcttccagggtttgtttgtttgcttttttttttttmcccccttccgtgtgactttttaaaataagcatttataaggacacacggcacttgtaacctttccccaagttgaagatgtctgtatttttttcagaataat

SEQ ID NO: 453066 - DNA, 201 bp, Homo sapiens
cttacgcctgtaatcccagtactttgggaggccaaggcagatggagcgcatgagcctaggagtttgaaatcagcctgggcagcataacagcaccctgtctytgaaaaaaaaaaaaaaaaaaaagaaaaaaaaagaaacagagttttggccaatttagttacttctgattctcaccctcagccccaggcaactaacctattt

SEQ ID NO: 453067 - DNA, 201 bp, Homo sapiens
gctttttttttcctaggctcatccattctttagacacattaactgggaagaacttctggctcgaaaggtggagcccccctttaaacctctgttggtaagtrtacatgaaagtgtataattgggtgcagtggctcacgcctgtaatccccaaactttaaagggccaaggtgggaggattgtttgaggccaggagttcaagac

SEQ ID NO: 453068 - DNA, 201 bp, Homo sapiens
ttatcctactacagcactccagcctgggtgacagaaacctaattgctaaacacacacacacacacacacacacacacacacacacacacacacacacacamacacacacacacccctatgtgtttttgttgtgtatgttggctgtgtactggtagttttgaagaaagatatattcactttaatatcttaactactctaaag

SEQ ID NO: 453069 - DNA, 201 bp, Homo sapiens
ttcgtctcaaaaaaaaaaaaaaaaggagtaaagagtttcctgtgaaagagagttgtcagtatgtattacataatgttatttgacacttcttgtgtgagccytctagaggtaacactgagtagcaggaaagatttgtgcctcaaatgcttctgtcctagacagtaacggtagaagttattagcacaatatgcaggtgccagc

SEQ ID NO: 453070 - DNA, 201 bp, Homo sapiens
aattagccaggcatggtggtgcacacctctagtcccagctattcaggaggctgaggcaggagaatctcttgaacctgggaggtggaggttgcagtgagccragatcataccactgcactccagcctgggcgacacagtgagattccgtctcaaaaaaaaaaaaaaaagattctgtttaaatatctcagaggaatataatca

SEQ ID NO: 453071 - DNA, 201 bp, Homo sapiens
attctttttttttttttttgagatggagactgaagtcttgctctgtcacccaggccggagtgcaatggcaccatctcggctcactgcaacctccgcccccractggttcaagtgattctcctgcctcagcctcccaagttgccgggattacaggtgaccaccaccaccatgcccagctagtttttttatttttagtagaga

SEQ ID NO: 453072 - DNA, 201 bp, Homo sapiens
gtggctcatgcctgtaatcccagcactttgggaggccgaggcaggtggatcacgatgtcaggagcaggagaccagcctggccaatatggtgaaacccagtytctactaaaaatacaaaaattagccaggcatggtggtgcacacctctagtcccagctattcaggaggctgaggcaggagaatctcttgaacctgggaggt

SEQ ID NO: 453073 - DNA, 201 bp, Homo sapiens
catagctccattagattttctcccttttcaatttataggtaaactgcattccaaaaaaaaaccccaccatgcacctccttggttatgtaatcacattcattaagaaacagtgctgtctgaatagttacagagtaagcaaatgtattaaataggtattctaatagggctgaagtaaaatgctattcttgtatttgaacagga

SEQ ID NO: 453074 - DNA, 201 bp, Homo sapiens
agtctaaacattaattttggcttgttacttaaattgaaaagtgaatctcaattatataagttgagttttaataatgaaaatatgtaaatattggctgggcrcagtggctgacacctgtaatcccagcactttgggaggctaaggtgggtggatcacctgaggtcaggagttcaagacgcctggccaacatggtgaaacccc

SEQ ID NO: 453075 - DNA, 201 bp, Homo sapiens
ctcggctcactgcagcctctgcctcccaggttcaagcgattctcctacctcagcctcccaagtagctgggattacaggggcgcgccacatcacctggctamtttttttgtattttagtagagatggggtttcaccatgtggcccaggctggtcttgaacatctgacctcaggtgatcacctgcctcagtctcccaaagtgc

SEQ ID NO: 453076 - DNA, 201 bp, Homo sapiens
gcatagctccattagattttctcccttttcaatttataggtaaactgcattccaaaaaaaaaccccaccatgcacctccttggttatgtaatcacattcattaagaaacagtgctgtctgaatagttacagagtaagcaaatgtattaaataggtattctaatagggctgaagtaaaatgctattcttgtatttgaacagg

SEQ ID NO: 453077 - DNA, 201 bp, Homo sapiens
cacgatctcttgacctcgtaatctgcccgcctcggcctcccaaagtgctaggattacaggtgtgagccactgcgcctggctttttttttttttttttttttgagacagggtcttcctctgtcacccaggctggagtgcagtggtgcgatctcggctcactgcagcctctgcctcccaggttcaagcgattctcctacctca

SEQ ID NO: 453078 - DNA, 201 bp, Homo sapiens
ggcatagctccattagattttctcccttttcaatttataggtaaactgcattccaaaaaaaaaccccaccatgcacctccttggttatgtaatcacattcattaagaaacagtgctgtctgaatagttacagagtaagcaaatgtattaaataggtattctaatagggctgaagtaaaatgctattcttgtatttgaacag

SEQ ID NO: 453079 - DNA, 201 bp, Homo sapiens
cctcctgagtagctgggactacaggcgcgtgccaccacacctggctaattttttgtatttttagtagagatggagtttcactgtgttagccaggatggtcwcgatctcttgacctcgtaatctgcccgcctcggcctcccaaagtgctaggattacaggtgtgagccactgcgcctggctttttttttttttttttttttg

SEQ ID NO: 453080 - DNA, 201 bp, Homo sapiens
tggcatagctccattagattttctcccttttcaatttataggtaaactgcattccaaaaaaaaaccccaccatgcacctccttggttatgtaatcacattcattaagaaacagtgctgtctgaatagttacagagtaagcaaatgtattaaataggtattctaatagggctgaagtaaaatgctattcttgtatttgaaca

SEQ ID NO: 453081 - DNA, 201 bp, Homo sapiens
acaatcaacaatctgttcagctacacttggtcagctacatttgataatttgatatgtatgcacaaaataacgtagtgaacaaatgtgttttaactaatgtytcaatatatctagtgtaagctgggtattttgcattaaccacttcttttctgtgaggtaattataccacacttgccaaggggatttctctacagaagctct

SEQ ID NO: 453082 - DNA, 201 bp, Homo sapiens
tttgaatgaacataaatagaagtgatttatttttttattatcttaaagataggaaggaattagtatacgtatcaggtgtataaatggtttaaatttattthaacatgtcagatgtgttcaagttgtcatataaataaactatgtatgtaaggaatgggttaaaagctgttctgctgagaaactgaagctatttaagtatat

SEQ ID NO: 453083 - DNA, 201 bp, Homo sapiens
tttttttttttgccttacagcaaacataaatttgacttttgcaagtcacagagaactgttgtatttaggtttttaaatttaaaaatgtaattacctgacaratgagaagaattggcttctgaaattcagcttgacatattgaacaaatatcatccacatctgaacactgtctcttgctggcagccactccataactctatg

SEQ ID NO: 453084 - DNA, 201 bp, Homo sapiens
agaaccatgaaaaatgattggacatacaccttttcaattgtggcaataattgaaagaatcgataaaagttcatctttggacagaaagcctttaaaaaaaaatcactccctcttccccctcctcccttattgcagcagcctactgagaactttgactgttgctggtaaattagaagctacaataataattaagggcagaaat

SEQ ID NO: 453085 - DNA, 201 bp, Homo sapiens
agaaaagagcaaggctttgctttttgaaattgcaactcaaatgagatgggatgaaatcctatgacagtaagcaaaaacagaaccatgaaaaatgattggamatacaccttttcaattgtggcaataattgaaagaatcgataaaagttcatctttggacagaaagcctttaaaaaaaaatcactccctcttccccctcctc

SEQ ID NO: 453086 - DNA, 201 bp, Homo sapiens
agagcacctgcgtatgaatctatgacagagcaatgcttttaatgaatttaaggcaaaaaaggtggagagggagatgtgtgagcatcctgcaaggtgaaacaagactcaaaatgacagtttcagagagtcaatgtcattacatagaacacttcggacacaggaaaaataaacgtggattttaaaaaatcaatcaatggtgca

SEQ ID NO: 453087 - DNA, 201 bp, Homo sapiens
agtttttacattagtactttactctgtggatctaatctttcactttttttttttgtcccggggaatttaactctcctagggttagttcttcgacttagtatggagatgggagcctttttggtctgtctgttccttacacagacttgtagatgatctccctgtttttagcactccaccttctgccttctacagtcttcagtt

SEQ ID NO: 453088 - DNA, 201 bp, Homo sapiens
gcattctggagctgagtgagagaagatggagatcttacctctcaacacgcggactttcactaaactcgagtttttacattagtactttactctgtggatcyaatctttcactttttttttttgtcccggggaatttaactctcctagggttagttcttcgacttagtatggagatgggagcctttttggtctgtctgttcc

SEQ ID NO: 453089 - DNA, 201 bp, Homo sapiens
aaaatgtagagatgggcactcaccatgttgcccaggctggtgttgaactcctgggctcaagtgatccacccgcctcggccacccaaagtgctgggattggrttacaggtatggcccactgcgcccggcctatttaattaaattaattaatttatttatttttaagagacagggtctcactctgtttcccaggctggagtgt

SEQ ID NO: 453090 - DNA, 201 bp, Homo sapiens
gagaattgcttgaacccaggatgcaatgagctgatatcgtgctactgcacttcagcctgggcgacagaacgagactccgtctcaatttaaaaaaaaaaaaagatattccactgtttctactcctcaaggtttctaataagaaatccacagtcactcaaatcaatgtatgtacaatacataccttgtaatgtatttttttct

SEQ ID NO: 453091 - DNA, 201 bp, Homo sapiens
ggctggagtgcagttgtgtcatctcagctcactgcaacctttgcccccagggttctagcgattctcctgcctcagcctcctgagtagctgggattacaggygcctgccaccacgcccggctaatttttttgtgtttttaatagagatggggtttctccatgttggccaggctggtctcgaactcctgacctcaggtgatcc

SEQ ID NO: 453092 - DNA, 201 bp, Homo sapiens
gggagaatcccttgagccagggagattaaggctgcaatgagccgttattgctccagtctgggaacagagtgagaccctgtctcaaaaaaaaaaaaaaaaaattctccttttgacatactcataacactgcaggtatattagtccatatttaaagtttattagtgcacttggagctgcatttcacccaagtaacttgactga

SEQ ID NO: 453093 - DNA, 201 bp, Homo sapiens
aactgttttactttaatgactattaacttagaatatttttctaaatcttaatatagaatatgttaaactgtacataatcatcacagttactgttttatacwactttagtgaccaaacagaactcttatattaaacaaatgtttaaaatacaagtttcttcactgtatgaaaaacattacctatgtttcaaagaagccaagt

SEQ ID NO: 453094 - DNA, 201 bp, Homo sapiens
tcatgtacaatttgagagttaactgcagatttcatagcacttcacccctaatttcatctatacatctcctaagaataagggcattttttttttttttttttgagaagcagtctcactctgtcgcccaggctggagtgcagtggtgcaattttggctcactgcaacctccacctcctgggttcaagcgattctcctgcctca

SEQ ID NO: 453095 - DNA, 201 bp, Homo sapiens
ttgggggcgctgaggcaggagaatcgcttgagcctgggaggtggaggttgcagtgagccaagattgcaccattgtgctctagcttggacaacaagagcgaractccatctcaaataaataaataagtaaatattgtctgtagatctttttttttctggggaggatcagttggtgctaagaaagttctgccattcatttgcc

SEQ ID NO: 453096 - DNA, 201 bp, Homo sapiens
agaaactctttgatcagttagttacccaaggtatagttcatacagtaaaggcaggatgtatgtttgattctttcctagttttcaaaataatgaattagttycctagcatcttccagaattgaccaatgaactttgtgtgtgtgtgtttttttcttttttagtatattatgaacttatatgttttaacacatttgtgtttca

SEQ ID NO: 453097 - DNA, 201 bp, Homo sapiens
cttacaagagacatggcagtctgagttgttatctgttactgagaccttaatctcaactggttttctggagcaatagaattggggaagctgaaggaatatawaaagggggaagaaaactatttagtttcacagttttgcccaaggctttacaacttaagacgtcacttttatgagttctgcccacaaaactttttaccaaac

SEQ ID NO: 453098 - DNA, 201 bp, Homo sapiens
acttaatgaactttttctaacttaccttagctttggggtgcttgatgcttatgaaaataaataattgtcttcttttactttgttgcactcctaagagcaaratgggtcaccagcagctgtattggagtcacccatgaaaattcaatcagggttcttgctcttgttgtgtctgctcaaactggcaaggtctgatccagaaat

SEQ ID NO: 453099 - DNA, 201 bp, Homo sapiens
ctggaggatggtagacactcaatagtttgtgaatatatgaataaacttgatctgattacagatttcttttttaaaaagtctctttaggtaattcacttacrtgttcactgcaaaaaatccaaactgcacagaggcatatataaagtgaatgttttccattaccccatctcagtttctagtgggaactatggttaatagttc

SEQ ID NO: 453100 - DNA, 201 bp, Homo sapiens
gcaatagaaagctgttttgagcaggggagagtaaaatgatatatataatacgcatttaaatgtatatatatctcattgagggttttgggggtcaggtgtakaggtaaagagaccagttaggaaattctagcagttaatctaggtgggggagagatggttcaatttttgcctttgtgctaatccacgtgaaaataaaattaa

SEQ ID NO: 453101 - DNA, 201 bp, Homo sapiens
ctgcccacctaagtgctgggattacagacatgagccaccacgtccaggccacatttcattttaataactttcaagcgagactttctgctaggtcagatgtrgttcccctgtttacccttaccatcctgcacttgcctacattgacttgtctttttttccctgagactttgggctcctgtcgacttttagactcctatggac

SEQ ID NO: 453102 - DNA, 201 bp, Homo sapiens
taatgagctgagatcacgcccctcactgcactccagcctgggcgacagagctagaatccatctcaaaaaaaaaaaaaaattatatatatatatatatacayatatatatatatacacacatacatacacacacacatatagtgacatcccacttatctggataatgtggttctagcaacctcatttcaacaaatattttaa

SEQ ID NO: 453103 - DNA, 201 bp, Homo sapiens
acccgggaggaggaggttgtaatgagctgagatcacgcccctcactgcactccagcctgggcgacagagctagaatccatctcaaaaaaaaaaaaaaattatatatatatatatatacatatatatatatatacacacatacatacacacacacatatagtgacatcccacttatctggataatgtggttctagcaacctc

SEQ ID NO: 453104 - DNA, 201 bp, Homo sapiens
agactcaaaatgacagtttcagagagtcaatgtcattacatagaacacttcggacacaggaaaaataaacgtggattttaaaaaatcaatcaatggtgcaraaaaaaacttaaagcaaaatagtattgctgaactcttaggcacatcaattaattgattcctcgcgacatcttctcaaccttatcaaggattttcatgttg

SEQ ID NO: 453105 - DNA, 201 bp, Homo sapiens
tggggtcacgcttgttaccaggcagatctcgaactcctgggctcaagcgatcctcctgcctctgcccacctaagtgctgggattacagacatgagccaccrcgtccaggccacatttcattttaataactttcaagcgagactttctgctaggtcagatgtagttcccctgtttacccttaccatcctgcacttgcctaca

SEQ ID NO: 453106 - DNA, 201 bp, Homo sapiens
gaacccgggaggaggaggttgtaatgagctgagatcacgcccctcactgcactccagcctgggcgacagagctagaatccatctcaaaaaaaaaaaaaaawtatatatatatatatatacatatatatatatatacacacatacatacacacacacatatagtgacatcccacttatctggataatgtggttctagcaacc

SEQ ID NO: 453107 - DNA, 201 bp, Homo sapiens
aattggctaatgaatagagcaactcatttgttaggttgtagccagaattctctacataaagtggatctctttaaacattaataaaaaaaaataggtcaggtgcagtggctcacgcctgtaatcccagcactttgggagtctgaggtgggcggatcacaaggtcaggagttccagaccagcctggctaatatggtgaaaacc

SEQ ID NO: 453108 - DNA, 201 bp, Homo sapiens
acattgcagaatttcaacttatgtgacagttttccccccacaaaatagaagcattttatttagctgccaagaaatccaaagttgtggtggtaaaagtgagmtattgaagctttcgttgccagttaaagtattgttgagcttttcacaattacttaaattggctaatgaatagagcaactcatttgttaggttgtagccaga

SEQ ID NO: 453109 - DNA, 201 bp, Homo sapiens
ttggagtgcagtggcgcaatctcagctcactgcaagctccacctcccgggttcacaccatcctcctgcctcagcctcctgagtagctgggactacaggtgyccgccaccacgccaggctaattttttgtatttgtagtagagacggggtttcatcgtgttagccaggatagttttgatctcctgacctcatgatccgcccg

SEQ ID NO: 453110 - DNA, 201 bp, Homo sapiens
ttaggccacagacttaaaatgatgtttggcttagcatctcaaccaaaaattagtcatagcagtcggggagaaaaacctcactgactacatgtattttattyctgaaacagctatagatttttggtactttttttttttttttttttgagacagggtctcaccttgtagcctaggctgggtgtagtgtagtggtgtgatcac

SEQ ID NO: 453111 - DNA, 201 bp, Homo sapiens
aggcacactgaagctttgtgagaggggaaattgatattaacattttttccagcttgttttgagctcgatatattcactttttttttttttttttttttttmattgagacagactctcgcactgtcatctgggctggtgtgcagtggcacgatctctgcttgctgcaacctgtgcctcccgggttcaagcaattctcctgcc

SEQ ID NO: 453112 - DNA, 201 bp, Homo sapiens
ccacatgtcttctagttttactgatggattatgtgtgtgtttgttttcttattcttgtttgggattgattactgaaaagattccactgtctttttttttttcctgggttcaagtgattcttctgcctcaacctcctgagtagctgggattacaggtgcccgccaccacacccagctaatttttgtatttttagtagagaca

SEQ ID NO: 453113 - DNA, 201 bp, Homo sapiens
catagcgagactccgtctcaacagcaacaacaaaaaagaaattcatgtaatcttaagtcattttagacaagctccattaggtgagtatggtgattaatctkctctgtattgtactctcaagtaaaaagcattagtgtaggaggagaatgagaagatagatcactcatgtagaaagcatttaaatgacagagacaattgcta

SEQ ID NO: 453114 - DNA, 201 bp, Homo sapiens
gaagaaactttaactggagcatcttaccagtgttattcatgttttaactctgcttcagtagtttttcaggtttattacaaacctgcagtagccaactgaaytaattatctctaaacagggatttagccagtggactaggcacactgaagctttgtgagaggggaaattgatattaacattttttccagcttgttttgagct

SEQ ID NO: 453115 - DNA, 201 bp, Homo sapiens
caaaataaggaaactggtgttctatgcttatcttgtacattttccccacacttggaatcagccattcctccagggagtgcaggttcacagtctgggctctragagaattataaggtcaatgtggtcatcttttagtattaagtcagatattctaaattattatttacttcctacatttggcccaagagtctaaccagatat

SEQ ID NO: 453116 - DNA, 201 bp, Homo sapiens
tacgagagagcaaaataaggaaactggtgttctatgcttatcttgtacattttccccacacttggaatcagccattcctccagggagtgcaggttcacagkctgggctctaagagaattataaggtcaatgtggtcatcttttagtattaagtcagatattctaaattattatttacttcctacatttggcccaagagtct

SEQ ID NO: 453117 - DNA, 201 bp, Homo sapiens
aactcctgacctcaggtggtctgcccgccttggcctcccaaagtgctgggatgacaggcgtgagcccccgtgcctgggcgtatttaacatcttcatatggrgcctgaattttcctgtttttttttctattcctgtcagtagggtagaattttgtttgctagcatatcaggctcaatggaattctgctttcttgaagtgtgt

SEQ ID NO: 453118 - DNA, 201 bp, Homo sapiens
tttttcccttcgttgaatgctggtgcagtgaatgctgggtgcatcttcatgttggtttctgagtccttttgacatgaccacatggtctggtgttgtacgaragagcaaaataaggaaactggtgttctatgcttatcttgtacattttccccacacttggaatcagccattcctccagggagtgcaggttcacagtctggg

SEQ ID NO: 453119 - DNA, 201 bp, Homo sapiens
acaccaccatgcccagctaatttttgtgtttctggtagagacggggttttgccgtgttcaccaggctggtcttcaactcctgagctcaaaagcaatccacctgcctctgcctcccaaagtgttgggatgataggcatgagccactgcacctagcagttatttttattgatgctcaatttttcccttcgttgaatgctggtg

SEQ ID NO: 453120 - DNA, 201 bp, Homo sapiens
acaggtgtgagccaccgcacccagccaggtttattcttttttgaaagtacagtactctgttaaaattcctgtgtaaactgggacttttcttttcactttcytgtgtttcaagaacagtaggtgttccagggcttttgtcctgctgggtacaagcaagtaggattttgagaaggtgtgaggaggaggtcagaaaaattggtg

SEQ ID NO: 453121 - DNA, 201 bp, Homo sapiens
ttaaggtgaggttatactgcataagggtgacccctagttcaatcaatgcatggtgtttttaaaggaggagaaaaagagacagacacagggaggagagcacwgcacgcagctgaaggcagagattggaatgacacctctgcaagccaaggaacacggagcattgctgggaaccaccggaagaagccagaagacaggcctgga

SEQ ID NO: 453122 - DNA, 201 bp, Homo sapiens
gacacagggaggagagcactgcacgcagctgaaggcagagattggaatgacacctctgcaagccaaggaacacggagcattgctgggaaccaccggaagamgccagaagacaggcctggagctggctttccctcacagccccagaaggaacccaccctggtgccaccttgatttcggacttctggccttcagaactgggag

SEQ ID NO: 453123 - DNA, 201 bp, Homo sapiens; identical to SEQ ID NO: 419900

SEQ ID NO: 453124 - DNA, 201 bp, Homo sapiens; identical to SEQ ID NO: 419855

SEQ ID NO: 453125 - DNA, 201 bp, Homo sapiens; identical to SEQ ID NO: 419881

SEQ ID NO: 453126 - DNA, 201 bp, Homo sapiens
gaaataagccaaaagttgcttctcaagaggagaatagttatatacagaaacagtgattcttaaacatttgttctatgatttatattgagggaccttttaakgactccatacagcatctctatcttccatagataatttagtcaccataggatctgattggtccaataaataaagtagcagaacaactttcataacagcctg

SEQ ID NO: 453127 - DNA, 201 bp, Homo sapiens
taagccaaaagttgcttctcaagaggagaatagttatatacagaaacagtgattcttaaacatttgttctatgatttatattgagggaccttttaaggactccatacagcatctctatcttccatagataatttagtcaccataggatctgattggtccaataaataaagtagcagaacaactttcataacagcctgaact

SEQ ID NO: 453128 - DNA, 201 bp, Homo sapiens
aataagccaaaagttgcttctcaagaggagaatagttatatacagaaacagtgattcttaaacatttgttctatgatttatattgagggaccttttaaggwctccatacagcatctctatcttccatagataatttagtcaccataggatctgattggtccaataaataaagtagcagaacaactttcataacagcctgaa

SEQ ID NO: 453129 - DNA, 201 bp, Homo sapiens
gccaaaagttgcttctcaagaggagaatagttatatacagaaacagtgattcttaaacatttgttctatgatttatattgagggaccttttaaggactccatacagcatctctatcttccatagataatttagtcaccataggatctgattggtccaataaataaagtagcagaacaactttcataacagcctgaacttgt

SEQ ID NO: 453130 - DNA, 201 bp, Homo sapiens
caaaagttgcttctcaagaggagaatagttatatacagaaacagtgattcttaaacatttgttctatgatttatattgagggaccttttaaggactccatacagcatctctatcttccatagataatttagtcaccataggatctgattggtccaataaataaagtagcagaacaactttcataacagcctgaacttgtta

SEQ ID NO: 453131 - DNA, 201 bp, Homo sapiens
acagagtgagactccatctcaaaaaaaacaaaaaacaaacaaacaaacaaaaccaaataaaagtctgaaaatgaacaagagtagtttttctgagttgatgyattttcaaactttatctcacgtgaccccttgacaatccagtgagctgagtattattttcactttacacatgtcctttgtaacgtctgtgacaacaggtac

SEQ ID NO: 453132 - DNA, 201 bp, Homo sapiens
tgcttttcttgaactctggccactggacccctaaaaatttcatcaagatggcatatgtgtgtctagcaaaatgtctaagaaagtgtaattgtctcatcacaaagtccaatcagcatgatgacattaatttagatagaccaaggtgttatcctatggaacgaagaaatgataaaggtctcttttgactgaattattattatg

SEQ ID NO: 453133 - DNA, 201 bp, Homo sapiens
agttttactgtccatggttctaaagctgtgaatggctagattagccccagaatcttgatgtttacgagcctctttgtctttgacttctattccagagtctktctcctgcctctcctttctcctgttgtacattgaattttccaggcagtccaaaatattgcagtaaactgacagccactctgtctcttccaagagaaaaca

SEQ ID NO: 453134 - DNA, 201 bp, Homo sapiens
tctttttatttgatctatgaactgattcaaataaaagaattggttgaggaatcataatgtatggtgagtcaagtcaaacttttattgcccagacttagagttttctttctgcttacacaaatcaagtaagactttagtaggttgcctatttattttaattctagggaaaccatgatcacttactccaaaccaaagatctct

SEQ ID NO: 453135 - DNA, 201 bp, Homo sapiens
cattaaataataattcactgtaatgagttgttgaaagcctctccaccagaatgtcaacgtgtgaaggtagagattttgcctacttcactgctgtaaactcrcacaagttctttaacatagttggtgcttaacacgtatttgttgagtagatcaatcaatcgatcaatcaatcagtaatacaatagataaataagcgaagcc

SEQ ID NO: 453136 - DNA, 201 bp, Homo sapiens
gacgctggtctcaagttttccatctgaaaaatgatttaagactactttccctataagtttatgaggattaaattgttaggagtaaatatatatgtgtgtgwatatatatatatatcacaatgaaaatgcctggggcttcctttttttcacagttgagcaccttctgctccactggcaaagggtataagtagaagcaagtta

SEQ ID NO: 453137 - DNA, 201 bp, Homo sapiens
ttaataacatgcagatgtggaatatccatccctaccaccatgaccgtttttttctcatgaggccattgttcaaggacaggaatagctgaggaaaaaggctrcttatcatgatcttcctctgctgaggctgttctttgggcagcaattcacatagaacaaaaatatgtttacattttatgcccagttggagaggtctgtcta

SEQ ID NO: 453138 - DNA, 201 bp, Homo sapiens
tctcaatcctcatacttctgttttcccctagatgacctttgtttaaaaatataattaaaatactaagaattcattctacttactgaacatttattatttgycagacaccataccaaacatattattttatcacattaataacagcaaaaacccatggttgattgccctgccttagagaagtggaaggaagaagcctgcata

SEQ ID NO: 453139 - DNA, 201 bp, Homo sapiens
attaaaatactaagaattcattctacttactgaacatttattatttgccagacaccataccaaacatattattttatcacattaataacagcaaaaacccrtggttgattgccctgccttagagaagtggaaggaagaagcctgcatagttatttaccagatttggtttgcaactgtatcatattcctatgttatctgcac

SEQ ID NO: 453140 - DNA, 201 bp, Homo sapiens
ttttcaccaatgtatacgtaatactttgcagagttcatggcactttgtagattatcaataaatatttgctgaatgaatgaaaattagaaaactgatatttaaaaaaatgaaatgaaattaatatttattgaatacctactccgtgctgatcgccgagctaaatattctcatctatattttatctgaacaatagtccaatga

SEQ ID NO: 453141 - DNA, 201 bp, Homo sapiens
acaatattttaagtccctacaatagtatcacattgttttttgaataaaatgcaaacttcttaaccttcaagcttacatggtcctcagtgactagaccctarcctcatctctccccatcaactctgatctcattccaatatagactgcaatttggttcagtgaatgaacctggttctctttcagcctttacagataatcctt

SEQ ID NO: 453142 - DNA, 201 bp, Homo sapiens
gatcaatcaatcagtaatacaatagataaataagcgaagccattcaatatgtagtaatcatttcatgtgtgccatttactgttctaaggtctttcatgcattttttttttcatttaaacatcacaacagccctgtggagtaggtacttttgtaatctgtattttatatatgagaaaacaggtttaggaagattaataacat

SEQ ID NO: 453143 - DNA, 201 bp, Homo sapiens
cctgagcagctgggattacaggtgtgtaccaccatgcctggctaatttttgcatttttatttatttatttatttatttatttatttatttatttatttatwattttgagatggagtcttgctctgttgcccaggctggattgcaatggcatgatctcagatcactgcaacctccacctccctggtgcaagtgattctcctg

SEQ ID NO: 453144 - DNA, 201 bp, Homo sapiens
acttagaggatgtagggaccacagaaagctgctgtgtgtttccttgttttttaagctcaagagaaatatgatcaaagctatgctttcttttttttttttttgagacagaatcttgctctgtcctccagactagagtgcagtggcgttatcttagctcactgcaacctccgcctcccaggttcaagcgattctcatgcctca

SEQ ID NO: 453145 - DNA, 201 bp, Homo sapiens
gaacttagaggatgtagggaccacagaaagctgctgtgtgtttccttgttttttaagctcaagagaaatatgatcaaagctatgctttctttttttttttyttgagacagaatcttgctctgtcctccagactagagtgcagtggcgttatcttagctcactgcaacctccgcctcccaggttcaagcgattctcatgcct

SEQ ID NO: 453146 - DNA, 201 bp, Homo sapiens
agaatcgcttgaacccaggaggcagaggctgcagtgagctgagattgagccactgcactccagcctgggcaacagagtgagactctgtctcaaaaaaaaawaaaaaagaaagaaaataatgtgttggtttttaaaggtttaaagtcagtggtaaatttcagtgttatatgtacattgggtatccctctgggaggatttttg

SEQ ID NO: 453147 - DNA, 201 bp, Homo sapiens
attttgttgaagttatcaaatgctttgcttttgtataaaataatcttaacagcaagacagaacagacttaaacttcttggatttggggtgaaagtttattsaattttatattttggagccagtggctacaagttatgtataaatcagtccctagagtaaaaaaacttggctaattcaaacccttaagtttattctctttac

SEQ ID NO: 453148 - DNA, 201 bp, Homo sapiens
actctaattttctctgtgtcgttctaattttagtatatgagctgccaaagtgagcaccaatttttttttgaatggctgatttactttcttcaagaataatkggcttacattaattgtaaaattgttgtaaacctgggcagcatagtgagactgtctctacaaaaaaattatttattttattatttttttttatttgagatg

SEQ ID NO: 453149 - DNA, 201 bp, Homo sapiens
caagttcaaggacataccctgcacaaaagacacaattgaacatcaatgaagctgaatgggcactcctccccatacaccaatactacataagaaaatagtcrgggggtggggggggaagcagtattgtccttttcacctggtttattcttgagtacttttccaactaacaaacaaccctctctgattaagacttttaaaatt

SEQ ID NO: 453150 - DNA, 201 bp, Homo sapiens
tgatcaaagctatgctttcttttttttttttttgagacagaatcttgctctgtcctccagactagagtgcagtggcgttatcttagctcactgcaacctcygcctcccaggttcaagcgattctcatgcctcagcctcctgagcagctgggattacaggtgtgtaccaccatgcctggctaatttttgcatttttatttat

SEQ ID NO: 453151 - DNA, 201 bp, Homo sapiens
acccagcctcctgccttttcttaaaaacaaataatatgggttttagaattttcaaaatgtatgtgatttttcttatacttaaagtcacattatgttttgtkgtgcattcttgctatagctagggtatccctcttatgatactttaggcctttttctgttcctttttgccccagagattagggcctatagatcaggagtatg

SEQ ID NO: 453152 - DNA, 201 bp, Homo sapiens
aaggaagggggaaccctaggaaaaatattttagaacatgaccatgtatgacccttacagacaaaagcctttatatatcagtaaaaaaaaaaaaaaaaaaawgaggccgggcgcggtggctcaagcctgtaatcccagcactttgggaggccgaggtaagtggatcatgaggtcaggagatcgagaccatcctggcgaacat

SEQ ID NO: 453153 - DNA, 201 bp, Homo sapiens
aatcccagcactttgggaggccgaggtaagtggatcatgaggtcaggagatcgagaccatcctggcgaacatggtgaaaccccgtctctactaaaaatacaaaaaaaaaaaaattagctgggcgtgatggcaggcgcctgtagtaccagctaatcgggaggctgaggcaggagaacggcgcaaacccagggggcagagctt

SEQ ID NO: 453154 - DNA, 201 bp, Homo sapiens
gttccaattttacttaaaaacaacaacaacaacaacgacaacaagcggccgggcacgacggctcatgcttgtaatcccagcacttcagaaggccgaggcgrgcggatcacctgacgtcaggagttcaagaccagcctagccaacatggtgaaaccccgtctctacgaaaaactacaaaaagtagcagggcatgacggcggg

SEQ ID NO: 453155 - DNA, 201 bp, Homo sapiens
ctgttgtatattgttctttaagaaagttcattgtcactagtaaggttttggggagctggcaagttttgattggcaagtaatggcaactaggtaaaacgatycttagagtcactgcaggttgtttttagcagctaattagataaaactggtttaggtcagccgggcacggtggctcacgcctgtaatcccagcgctttggga

SEQ ID NO: 453156 - DNA, 201 bp, Homo sapiens
gctgaggcaggagaacggcgcaaacccagggggcagagcttgcagtgagccgacatcgcaccactgcactccagcctgggagacagtgagactccgtctcaaaaaaaaaaaaaaaggccaggtgtggtggctcacacctgtaatcccagcactgtgggaggccaaggcaggcagatcacaaggtcaggagttcgagaccag

SEQ ID NO: 453157 - DNA, 201 bp, Homo sapiens
tcaacaaatcctgcagccacctggaacttccttcagtttctccttcaagttgtaatactgcgactggtcactgtcaattctgaagcctctaccttccatargagctagatgaaaaccgttaaaaatgcttttttgttaacagaaacccaagatgctaccagcggttgttaaggcagcaaaacagccaacatgtttatttca

SEQ ID NO: 453158 - DNA, 201 bp, Homo sapiens
ctgaggcaggagaacggcgcaaacccagggggcagagcttgcagtgagccgacatcgcaccactgcactccagcctgggagacagtgagactccgtctcaaaaaaaaaaaaaaaggccaggtgtggtggctcacacctgtaatcccagcactgtgggaggccaaggcaggcagatcacaaggtcaggagttcgagaccagc

SEQ ID NO: 453159 - DNA, 201 bp, Homo sapiens
agctatgctcttcagtattgtcagcctgccacatatatccagtttaggaatttctcttaaacacaaagtactctagaaacttacaaagagcagccgggtgyggtggctcacacctgtaatcccagcactgtggtaggtaggccaaggcaggtggatcacctgaggtcaggagttcgtgaccggcctggccaacatggtgaa

SEQ ID NO: 453160 - DNA, 201 bp, Homo sapiens
atcttggttttaaagaataacacaaatgacagaaaacaactatgcattatggaacctttatttttcatgtgatttctgtacataaggagtatgagagtaamccttttacaaatggaactaatttactagaacaatgacaaaactgaactggtatttgatgtgaatccacaggagtttaagcttcaaatccagccaagaaat

SEQ ID NO: 453161 - DNA, 201 bp, Homo sapiens
aatgacctagaactccacttaataatccttcctcccacccctgacagaaaacagttatttcttatattttcaaggcttgaggcataatctttcagtatagtccataagcactgtttataatctgacagtgttaatactgttttgagtataaatattttgctgaaatgacttgacaaaataaaaacgtattaactttctttt

SEQ ID NO: 453162 - DNA, 201 bp, Homo sapiens
aatctgacagtgttaatactgttttgagtataaatattttgctgaaatgacttgacaaaataaaaacgtattaactttcttttaaatctgccaaattacayattcatatagccaagtgggggaggggactctaacaggccttaattcctgaaaggaagacattaaatatacttaagttttcctggttgtgaagcccctatc

SEQ ID NO: 453163 - DNA, 201 bp, Homo sapiens
cagcctggccaaaatggtagaggttttaccatttctactaaaaatatactccagcctgggtgacagaaggagactctgtattaaaaaaaaaaaaaaaaaaraaagaaagaaaaagaaagatagtttgaggccgggcatggtggctcacgcctataatgccagcactttgagaggtgggaagatggcataaggccaggagtt

SEQ ID NO: 453164 - DNA, 201 bp, Homo sapiens
ccaaaatggtagaggttttaccatttctactaaaaatatactccagcctgggtgacagaaggagactctgtattaaaaaaaaaaaaaaaaaagaaagaaaraaaaagaaagatagtttgaggccgggcatggtggctcacgcctataatgccagcactttgagaggtgggaagatggcataaggccaggagttcaagacca

SEQ ID NO: 453165 - DNA, 201 bp, Homo sapiens
agccgagatcgtgccattgcactccagcctgggcaacaagagcaaaactctcaaaaaaaaaaaacaaaaaaaaaaaaaaaaaaaaaaaacgaaatgtgcaraaccttctaactaaaagtaacttccttatttcagaaaaggaaaatcagatctagaagttatttctcaagtagctagaaagcaagagttgatcagaaatga

SEQ ID NO: 453166 - DNA, 201 bp, Homo sapiens
gaggggagcatcaagataaatagctaatacatgcggagcttaatacctaggtgatgggatgatagttacagcaaaccaccatggcacacatttacctgtgtaacaaacctgcacgtcctggacatgtattccggaactttaaattaaaaaaaatatatcaacaatcacaaggaggcctagaagagtcattgccaatcctac

SEQ ID NO: 453167 - DNA, 201 bp, Homo sapiens
aaaccccgtctctactaaaaaatcaaaaattagctgggggtggtggtgcacacctgtaaccccagctactcaggaggctgaggaaggagaatcgcttgaayccaggaggtgaaggttgcagtgagccaggtggaggttgcagtgagccaagattgcgcctctgcacttcagtatgcgcgacaggagtgagactatctcaaa

SEQ ID NO: 453168 - DNA, 201 bp, Homo sapiens
tgtctctactaaaaatacaaaattagctgggcatggtggcacatgcctgtaatcccagctactcgggaggcggaggctgaggcagaagaatcgcttgaacmcaggaggcggaggttgcggtgagctgaaatcacaccattgcactcaagcctgggtaacaagggcaaaaactccatctcaaaataataataataataataa

SEQ ID NO: 453169 - DNA, 201 bp, Homo sapiens
gggagatgatgaaaaaacactttctatgcttacctggatgggctttttttttttctccacagaattaccatactgagatttttgtgatatatgcaagattbgtgtgtgtgtgtgatgctggttattattatgtcatagtggacacttattaacgttgccttcacttttcttttttttttatttatttattttattttattt

SEQ ID NO: 453170 - DNA, 201 bp, Homo sapiens
gtttatttaggttgaaataaactatacaaaattgactttctttgccaaaaataacagcaatattttccatattatttctagataagccacaaaacaaaatrtggaacacttcacaaatttacccatcttccttgagtagaggccactctaattttctctgtgtcgttctaattttagtatatgagctgccaaagtgagcac

SEQ ID NO: 453171 - DNA, 201 bp, Homo sapiens
cgtgatccgatctgcgctcaggttaaagattcccagcttttttagattcattctaaaagaatcctgtcagtgaattagagcaaactgtttaaaaatcctgrtaaccgggggaggggagcatcaagataaatagctaatacatgcggagcttaatacctaggtgatgggatgatagttacagcaaaccaccatggcacacat

SEQ ID NO: 453172 - DNA, 201 bp, Homo sapiens
cgcacccagcctcctgccttttcttaaaaacaaataatatgggttttagaattttcaaaatgtatgtgatttttcttatacttaaagtcacattatgtttkgttgtgcattcttgctatagctagggtatccctcttatgatactttaggcctttttctgttcctttttgccccagagattagggcctatagatcaggagt

SEQ ID NO: 453173 - DNA, 201 bp, Homo sapiens
tcttgccttttttttttacaaataatgtgtattttagaattttttaaactttttttttatacttacatactatcatacaacttaaagtcacattatgtttkgtgccttcttactatagctctgttataactggggaagcgagatgaatacgatagtaacttccttaaagaacagtctctgcttacagtcaaataagggaga

SEQ ID NO: 453174 - DNA, 201 bp, Homo sapiens
tcttcatttggagtcaaagggagatgatgaaaaaacactttctatgcttacctggatgggctttttttttttctccacagaattaccatactgagattttkgtgatatatgcaagatttgtgtgtgtgtgtgatgctggttattattatgtcatagtggacacttattaacgttgccttcacttttcttttttttttattt

SEQ ID NO: 453175 - DNA, 201 bp, Homo sapiens
cacgccagtaataccagcactttgggaggcgggcggaccacttgaggccaagagtttggaccagcctggccaacacagcaaaatcccatctctactaaggraaaaaaaaaaaaaaattagccagctgtggtggtgcatgcttgtaataccagctactcgggaggctgaggcaggagagaatcactcaaacccaggaggtgg

SEQ ID NO: 453176 - DNA, 201 bp, Homo sapiens
agaaaaattttgttgaagttatcaaatgctttgcttttgtataaaataatcttaacagcaagacagaacagacttaaacttcttggatttggggtgaaagyttattcaattttatattttggagccagtggctacaagttatgtataaatcagtccctagagtaaaaaaacttggctaattcaaacccttaagtttattct

SEQ ID NO: 453177 - DNA, 201 bp, Homo sapiens
ctaactcctacaacttatttctcataccctgacagatgaggctcaacccaatacaaagtagacttacattagagagcttctgatagctacaccaaaactckcctttgaacaatatgtctactcactagaaatacaaagtcacggacttccaatttccaccagaaaaattttgttgaagttatcaaatgctttgcttttgta

SEQ ID NO: 453178 - DNA, 201 bp, Homo sapiens
aaggccaaatggaaatcttaagacaaatttgattatcatcttatttatgtgtgagaagctccataaacagtttcaaaaattaatcaaaacctgtactcttygagttagtagaaagtgaaattaaaagctacctaactgtaaccaatcaaatacaaattttcataacataacagcaccaaatcatctctcatcattaaaact

SEQ ID NO: 453179 - DNA, 201 bp, Homo sapiens
accacccccagtgataagataaatgcacacagacacaattttatgacagccattttgttgccacacagaagggccacttgggcagtgtatttaggcctgcmtggttaaaaacagccaggtgcctatgaggtctcctatgtcattagtctgtaagtacttagtaaaaagcagtatttgaatctcatggttcattgctgtaac

SEQ ID NO: 453180 - DNA, 201 bp, Homo sapiens
tgatttaactgaattaatttgtatttaattagatttttgggggccccgttttcatgtttatacaaccctatgtattgacgtcctctgtcattttttccatkgcttgttttgcttaaaatccctttcccatccaggatcagtgcaaaacagatgtgacttggaagaacctcggagcagtcagacctatcttgtagttacaag

SEQ ID NO: 453181 - DNA, 201 bp, Homo sapiens
caaaatacactatggggtcagcagggagactctgtggtgttaacctgtattctttctgtattttttttttaaagcagcctcctatatttatctagagcackgtacagtcagttctccatatctgcatccatggattcaaccaaccacagatgaaaaatattccaaaaattaaaaaataaaaatataccaattaaaaaatac

SEQ ID NO: 453182 - DNA, 201 bp, Homo sapiens
gtattaaaaaaaaaaaaaaaaaagaaagaaagaaaaagaaagatagtttgaggccgggcatggtggctcacgcctataatgccagcactttgagaggtggraagatggcataaggccaggagttcaagaccagcctgggcaacatagtgagaccctgtctctacaaaatacaaaaaaattagccaggcatggtagtgcatg

SEQ ID NO: 453183 - DNA, 201 bp, Homo sapiens
tattccctttttacagatgagaggactatagagaagttggtatgttgcccaagattacatagctattacagtaagcagatctagatccaaactcaggcatycaggctctgaaactcaggccttacacactgcacccatcttgtcacaaatgcgtgagtgtggaaaggattcacatgtaacgtacaaatgcttagatacatg

SEQ ID NO: 453184 - DNA, 201 bp, Homo sapiens
tgggaggcggtggttgcagtgggcggagatcacgccattgcaatccagcctgggcgactgagcgagacaccatctcaaaaaaaaaaaaaaaaaaaaaacargcaaacaaaaactgaataaatgctagagttagattagaaaccaagagttgtggcatgtggacttattttactctctcaacaaatcctgcagccacctgga

SEQ ID NO: 453185 - DNA, 201 bp, Homo sapiens
tagtgcatgcccgtagtcttagctactcaggaagctaaggctgcaggactgcttgagcccaggagttcaagcctgcagtgagctatgatggcaccactgcmctccagcctgggtgacactgcaagacactgtctctctttaaaaaacagaatacagggccgggcatgggggctcacacctgtaatcccagcactttgggag

SEQ ID NO: 453186 - DNA, 201 bp, Homo sapiens
tcctgggaggcggtggttgcagtgggcggagatcacgccattgcaatccagcctgggcgactgagcgagacaccatctcaaaaaaaaaaaaaaaaaaaaamcaagcaaacaaaaactgaataaatgctagagttagattagaaaccaagagttgtggcatgtggacttattttactctctcaacaaatcctgcagccacct

SEQ ID NO: 453187 - DNA, 201 bp, Homo sapiens
ccactgcactccagcctgggtgacactgcaagacactgtctctctttaaaaaacagaatacagggccgggcatgggggctcacacctgtaatcccagcackttgggaggctgaggcagggtggattacctgaggtcaggagttcgagaccagcctggccaacatggtgaaaccctgtctctactaaaaatacaaaaattag

SEQ ID NO: 453188 - DNA, 201 bp, Homo sapiens
aacaagagcaaaactccatctcaaaaaaaaaagaaaaaagaaaaacatatatgctgaacgtgggggtgtgtgtacacatacacacacacacacacacacayatatacacacacactctcacacacatatatatttaacctttattttaaaagtccaaatactcatctccaaagaaattccccaacttatagtgtcttccta

SEQ ID NO: 453189 - DNA, 201 bp, Homo sapiens
ctctttaaaaaacagaatacagggccgggcatgggggctcacacctgtaatcccagcactttgggaggctgaggcagggtggattacctgaggtcaggagwtcgagaccagcctggccaacatggtgaaaccctgtctctactaaaaatacaaaaattagtcgggcgtggtggctcacacctgtaatccgagctactaagg

SEQ ID NO: 453190 - DNA, 201 bp, Homo sapiens
ttgggaggctgaggcagggtggattacctgaggtcaggagttcgagaccagcctggccaacatggtgaaaccctgtctctactaaaaatacaaaaattagycgggcgtggtggctcacacctgtaatccgagctactaaggaggctgaggcaggagaatcgcgtgaatccaggaggtggaggttgcaatgagccaaggttg

SEQ ID NO: 453191 - DNA, 201 bp, Homo sapiens
ctgagccaattccagcttcatggtacctgctacctgcaatacagaaattactgtactgtaactcagtgacacagagcactatacaaatatagttaatatattaataccttaagatgctaatctaatgatagcccccttactgccaaagtgatgcaaaattacctgcttcatagccctggtttgggcagcggatccgacacg

SEQ ID NO: 453192 - DNA, 201 bp, Homo sapiens
tgagccaattccagcttcatggtacctgctacctgcaatacagaaattactgtactgtaactcagtgacacagagcactatacaaatatagttaatatattaataccttaagatgctaatctaatgatagcccccttactgccaaagtgatgcaaaattacctgcttcatagccctggtttgggcagcggatccgacacga

SEQ ID NO: 453193 - DNA, 201 bp, Homo sapiens
caattccagcttcatggtacctgctacctgcaatacagaaattactgtactgtaactcagtgacacagagcactatacaaatatagttaatatattaataccttaagatgctaatctaatgatagcccccttactgccaaagtgatgcaaaattacctgcttcatagccctggtttgggcagcggatccgacacgagatac

SEQ ID NO: 453194 - DNA, 201 bp, Homo sapiens
aattccagcttcatggtacctgctacctgcaatacagaaattactgtactgtaactcagtgacacagagcactatacaaatatagttaatatattaataccttaagatgctaatctaatgatagcccccttactgccaaagtgatgcaaaattacctgcttcatagccctggtttgggcagcggatccgacacgagataca

SEQ ID NO: 453195 - DNA, 201 bp, Homo sapiens
attccagcttcatggtacctgctacctgcaatacagaaattactgtactgtaactcagtgacacagagcactatacaaatatagttaatatattaataccttaagatgctaatctaatgatagcccccttactgccaaagtgatgcaaaattacctgcttcatagccctggtttgggcagcggatccgacacgagatacag

SEQ ID NO: 453196 - DNA, 201 bp, Homo sapiens
aggaccagggcgattaatagtgtcggtagtgttagaccgtggtttagcacgagtagcaacagtgaacagctaaaccccgggactggccaccagcagggagyctcccacggagcccgttaatctgcagatcttagccccacttcagaccctctgagtcgaaaattcggggcaatctgaatttttaacaaacaccagcaccgt

SEQ ID NO: 453197 - DNA, 201 bp, Homo sapiens
tgtggtgagccgagatcgtgccattgcactccagcctgggcaacaagagcaaaactctcaaaaaaaaaaaacaaaaaaaaaaaaaaaaaaaaaaaacgaawtgtgcagaaccttctaactaaaagtaacttccttatttcagaaaaggaaaatcagatctagaagttatttctcaagtagctagaaagcaagagttgatca

SEQ ID NO: 453198 - DNA, 201 bp, Homo sapiens
gagaaccctgtctctactaaaaatacaaaattagctgggcatggtggcacatgcctgtaatcccagctactcgggaggcggaggctgaggcagaagaatcrcttgaacccaggaggcggaggttgcggtgagctgaaatcacaccattgcactcaagcctgggtaacaagggcaaaaactccatctcaaaataataataat

SEQ ID NO: 453199 - DNA, 201 bp, Homo sapiens
agagaggaacctcaccgattcagaacaggcctcggagagctagcgcccaagccctgaccttcacccaagatcccccttctagggccgctgtcagccgaagrcaggaatcttgaggccctgtctctggacaccatcgagttaactgtctgccctgtaccattctgcctctgcgcaggtgacgagcaaaagggcacctgtgtc

SEQ ID NO: 453200 - DNA, 201 bp, Homo sapiens
gatcacctaagggcaggagtttgagaccagcctgaccaacatggagaaccctgtctctactaaaaatacaaaattagctgggcatggtggcacatgcctgyaatcccagctactcgggaggcggaggctgaggcagaagaatcgcttgaacccaggaggcggaggttgcggtgagctgaaatcacaccattgcactcaagc

SEQ ID NO: 453201 - DNA, 201 bp, Homo sapiens
ggcgggtgcctgtaatcccagctactcgggaggctgaggtgggagaatcacttgatcctgggaggcggtggttgcagtgggcggagatcacgccattgcartccagcctgggcgactgagcgagacaccatctcaaaaaaaaaaaaaaaaaaaaaacaagcaaacaaaaactgaataaatgctagagttagattagaaacc

SEQ ID NO: 453202 - DNA, 201 bp, Homo sapiens
tttccatattatttctagataagccacaaaacaaaatgtggaacacttcacaaatttacccatcttccttgagtagaggccactctaattttctctgtgtygttctaattttagtatatgagctgccaaagtgagcaccaatttttttttgaatggctgatttactttcttcaagaataattggcttacattaattgtaaa

SEQ ID NO: 453203 - DNA, 201 bp, Homo sapiens
tcaccaatacttaagacacgcccagtttcttcaagatcaacagaggtatcagctccaagaatacgctcttcaagaatagaggacatctcagcagtccctayggaagacaattcaattcaattaaaaaaataatctgggccaggcacagtggctcacagctgtaatcccagcacttttggaggctgaggcaggcagatcacc

SEQ ID NO: 453204 - DNA, 201 bp, Homo sapiens
acaggcaggagccaccatcccggcaggtaaaccactctttttagcctgaaggagagtaggtcagtctgtttcccattagtgtcctacatctttgtttgctyccttaagaagaatgtaggaccctgagggcaggaatccacctcctcctcattttgcaggtccacacaggtctctgacttctgcaaatgtcagaacacttaa

SEQ ID NO: 453205 - DNA, 201 bp, Homo sapiens
tccagcttcatggtacctgctacctgcaatacagaaattactgtactgtaactcagtgacacagagcactatacaaatatagttaatatattaataccttaagatgctaatctaatgatagcccccttactgccaaagtgatgcaaaattacctgcttcatagccctggtttgggcagcggatccgacacgagatacagac

SEQ ID NO: 453206 - DNA, 201 bp, Homo sapiens
ccagcttcatggtacctgctacctgcaatacagaaattactgtactgtaactcagtgacacagagcactatacaaatatagttaatatattaataccttaagatgctaatctaatgatagcccccttactgccaaagtgatgcaaaattacctgcttcatagccctggtttgggcagcggatccgacacgagatacagaca

SEQ ID NO: 453207 - DNA, 201 bp, Homo sapiens
aaaataaaaacgtattaactttcttttaaatctgccaaattacatattcatatagccaagtgggggaggggactctaacaggccttaattcctgaaaggargacattaaatatacttaagttttcctggttgtgaagcccctatcatttacactcaaatgataataagaaatgtagtttgggccgggcatggtaactcaca

SEQ ID NO: 453208 - DNA, 201 bp, Homo sapiens
cagcttcatggtacctgctacctgcaatacagaaattactgtactgtaactcagtgacacagagcactatacaaatatagttaatatattaataccttaagatgctaatctaatgatagcccccttactgccaaagtgatgcaaaattacctgcttcatagccctggtttgggcagcggatccgacacgagatacagacag

SEQ ID NO: 453209 - DNA, 201 bp, Homo sapiens
agcttcatggtacctgctacctgcaatacagaaattactgtactgtaactcagtgacacagagcactatacaaatatagttaatatattaataccttaagatgctaatctaatgatagcccccttactgccaaagtgatgcaaaattacctgcttcatagccctggtttgggcagcggatccgacacgagatacagacaga

SEQ ID NO: 453210 - DNA, 201 bp, Homo sapiens
ttggaatgtaagcagacacatcaccagcctgtgtttctatgactggcaaagcagtcaaggagccaccaccaaaagcatcgttcattttggctgctctctcyagcaaccgggagtgtaggtagaacacatcaccaggataggcctcacgaccagggggtcggcggagcaacagagacatctgacggtaagcaacagcctatg

SEQ ID NO: 453211 - DNA, 201 bp, Homo sapiens
tcaataaatactgagggaactcagagaccagtggcggcatgggtcctccatatgctgagcgccgttcccctgggcccactgttctttctctatactttgtmtctgtgtcttatttattttctcagtctctcaacccacctgacgagaaatactcacaggtgtggaggggctggcccccttcatctggtgcccaacatgggg

SEQ ID NO: 453212 - DNA, 201 bp, Homo sapiens
aaggacataccctgcacaaaagacacaattgaacatcaatgaagctgaatgggcactcctccccatacaccaatactacataagaaaatagtcggggggtggggggggaagcagtattgtccttttcacctggtttattcttgagtacttttccaactaacaaacaaccctctctgattaagacttttaaaattgctattt

SEQ ID NO: 453213 - DNA, 201 bp, Homo sapiens
ttgcttgaactcaggagacagaggttgcagtgagccgagatcttgccactgcactccagcctggcgacagagcaagattctgtctcaaaaaaaaagaaaamgaataagaaaacctatcaataagaacttacattttttctaatgccttttagaaaaggaaaaaggaagtcttccagaggtcacaaagattccattacctag

SEQ ID NO: 453214 - DNA, 201 bp, Homo sapiens
ttaccagaacaaagaagccatactaatatcaaaagaaaaatatgtaacagtagttcatttgactataacaagagaaccatgacagggctaaatggtaacawtatggtttaagaacctgagagtctatacaaactagagaaaaaactaacaaatgaaaaacaactcaccacagttatacgatgtatgtaatttatatcttca

SEQ ID NO: 453215 - DNA, 201 bp, Homo sapiens
ggtgctcaccagtccggcccgccgaggaagggcgcggaccacggccgcagcaacgcgcacggacagcatctttgcagttactccgcaggcggtacttctgmagccgcagcctccggactgactgggacaaaatggccgagccgcaaagaaggtcaagacagccggcccacctgacccggaagtactgcccctcgcgttcac

SEQ ID NO: 453216 - DNA, 201 bp, Homo sapiens
actcaagctgtagcaagtgataaagtccggctgcttagaaacatgaaatgtaagataaagttggaaaaggtcaattggttcatgatgtagaaggccttaayatataaagagtgttgaacttagaggatgtagggaccacagaaagctgctgtgtgtttccttgttttttaagctcaagagaaatatgatcaaagctatgct

SEQ ID NO: 453217 - DNA, 201 bp, Homo sapiens
aaggggaactcagaattaatctgtttcgacctcacctttcaaagataaatactgtacactgaagatgctaaattggccaatgtcttacagctaatgataaytttgggctctgtaattattcttccacatcaagtggctctttttccgtagtagacattaccaagagtatcaagactatcttttcccatatctgcatgccta

SEQ ID NO: 453218 - DNA, 201 bp, Homo sapiens
gtaccaatattcaagtaaaatagatcaagaagcatttgcttaccaatttctcaatttgatcttggttttaaagaataacacaaatgacagaaaacaactaygcattatggaacctttatttttcatgtgatttctgtacataaggagtatgagagtaacccttttacaaatggaactaatttactagaacaatgacaaaac

SEQ ID NO: 453219 - DNA, 201 bp, Homo sapiens
tcttgagtacttttccaactaacaaacaaccctctctgattaagacttttaaaattgctattttgaataatcttaggacagcacattgataagcctaataygctcactatcatatcctcaaataactattacagaagcaaagaaattggacaggttaataagcttttttccactgtattttctttggcaatgattcttggg

SEQ ID NO: 453220 - DNA, 201 bp, Homo sapiens
gttaactgtctgccctgtaccattctgcctctgcgcaggtgacgagcaaaagggcacctgtgtcgcctgctctgtccagccggagaagccacgggtgcaaratggcggcattcgccacagcccctcgccctcctgcagagagcgcccgagccggcgcaccaccaccctgcagccccacccggccgcctgcatcatgccggc

SEQ ID NO: 453221 - DNA, 201 bp, Homo sapiens
ggctttcagaccaactcgcctacgcgtcttggaaccaattggaccctgttaaaaaataaaaagaaaaaccctaagcataatcagttttgatgtttgttagwagctgcaactatatctaacgaacattaaacctacctttccatcaatagcattaccaagggcatcaactacacgacccaacagctcctcaccaactggaac

SEQ ID NO: 453222 - DNA, 201 bp, Homo sapiens
gaccttcacacaatgtcagactccactgactagcttcaacaagagctgacagcagttttctgaccttcagcgggacgcgaccctaagaatcgaaagagagraacctcaccgattcagaacaggcctcggagagctagcgcccaagccctgaccttcacccaagatcccccttctagggccgctgtcagccgaagacaggaa

SEQ ID NO: 453223 - DNA, 201 bp, Homo sapiens
agaaacatgtgctgtgttgacttaaggtttaacggatttagggctgtgcaggatgtgctttggtaaaaatgtgtttgcaggcagtatacttcgtaaaagtyatcgccattctccagtctcgagtacccagggacacaatgcactgtggaaggctgcagggccctctgcccaataaagcctgggtattgtgcaaggtttctc

SEQ ID NO: 453224 - DNA, 201 bp, Homo sapiens
gaattgcttgaacccggagacggaggttgcagtgggccgacagggtgccactgcactccagcctcagtgacagagtgagaatcagtctcaaaaaaaaaaamaaaaaaaaaacttacaaagagctcagccttgaattatctagcccagttgactgtaccaatattcaagtaaaatagatcaagaagcatttgcttaccaatt

SEQ ID NO: 453225 - DNA, 201 bp, Homo sapiens
aaagtagcttttgatatatgtgaaaaccttttatacagctcctagtacacagtaaacactcgcatatttttaaaatgcagtctgtactttattattattgkttttttgagacggctcactgcatcctccacctcctagtctcaagcgattctcagcctcccgagtagctgggactacaggggtgcgccacctccaccaggt

SEQ ID NO: 453226 - DNA, 201 bp, Homo sapiens
gaggcaggagaattgctttaacccgggaggcagaagttgcagtgagccccagattgcaccactgtcctccagcctgggcaataaaagtgaaactccatctaaaaaaaaaaaaaaaaaaaaagaaagaaaaaaagaaaagaaaaagaaaaaggctgtccaagtaaaataaaatacagagacaaatctataaatttaaaacat

SEQ ID NO: 453227 - DNA, 201 bp, Homo sapiens
aggcaggagaattgctttaacccgggaggcagaagttgcagtgagccccagattgcaccactgtcctccagcctgggcaataaaagtgaaactccatctaaaaaaaaaaaaaaaaaaaaagaaagaaaaaaagaaaagaaaaagaaaaaggctgtccaagtaaaataaaatacagagacaaatctataaatttaaaacatt

SEQ ID NO: 453228 - DNA, 201 bp, Homo sapiens
ggcaggagaattgctttaacccgggaggcagaagttgcagtgagccccagattgcaccactgtcctccagcctgggcaataaaagtgaaactccatctaaaaaaaaaaaaaaaaaaaaagaaagaaaaaaagaaaagaaaaagaaaaaggctgtccaagtaaaataaaatacagagacaaatctataaatttaaaacattt

SEQ ID NO: 453229 - DNA, 201 bp, Homo sapiens
tttttcccttcccttcacatatttcttagaatcacttaggagtctgagtgcttttgcaggggaagaggggagatgtaaaaacaagggaatatctaaaagcrtatttgatattcataatggtatttttaaaattttttgttctaatgtttccttttttgcttcccttattttaaataacattaaataaaagttagagcatct

SEQ ID NO: 453230 - DNA, 201 bp, Homo sapiens
agttttgattggcaagtaatggcaactaggtaaaacgatccttagagtcactgcaggttgtttttagcagctaattagataaaactggtttaggtcagccrggcacggtggctcacgcctgtaatcccagcgctttgggaggccgaggcgggtggatcacctgaggtcaggagttcaagaccagcctgaccaacatgatga

SEQ ID NO: 453231 - DNA, 201 bp, Homo sapiens
gccctgagtgcttttttttccctttacctcttgacactgttttagttggggatgacaagaatgacccaatcaactttcacaagctaacaggaaaaaatatsgtttctaaaaacaacaaggccgggcatggtggctcacgcatgtaatcctagcacattgggaggccaaggcaggcagatcgcctgaggtcaggagttcaag

SEQ ID NO: 453232 - DNA, 201 bp, Homo sapiens
gccctgtaccattctgcctctgcgcaggtgacgagcaaaagggcacctgtgtcgcctgctctgtccagccggagaagccacgggtgcaagatggcggcatycgccacagcccctcgccctcctgcagagagcgcccgagccggcgcaccaccaccctgcagccccacccggccgcctgcatcatgccggccttcggtgctc

SEQ ID NO: 453233 - DNA, 201 bp, Homo sapiens
actatatctccttccttaattagtttatcatttccaaacacgacaacaccaacattgtcaggttccaagttcaaggacataccctgcacaaaagacacaaytgaacatcaatgaagctgaatgggcactcctccccatacaccaatactacataagaaaatagtcggggggtggggggggaagcagtattgtccttttcac

SEQ ID NO: 453234 - DNA, 201 bp, Homo sapiens
ttcctttaaaaagagaaagtaaatataaatcttcctaaacttaaaaggacttccctgtgggggaaagaaagagagatcagactgttactgtgtctatgcakaaagaagaagacataagaaactccattttgttctgtactaagaaaaattcttctgccttgagatgctgttagtctgtaaccatagccccaaccctgtgct

SEQ ID NO: 453235 - DNA, 201 bp, Homo sapiens
aagttctgacctggaaaaagttttaatgactagcctaactacagatttgaaaataattttaacttcatatcttaaacataactttaaaaaaagatgccaasaattgcattcatacctgatagtgcccaacaaggcttggtgctggctgacgacatgagacaagaaagcattctcaaactttgtaatcttgctgggctccag

SEQ ID NO: 453236 - DNA, 201 bp, Homo sapiens
gccgacaccacaatggtgtacttcatggcatctgagaaaatatattttacaattttatcaatattgtggttttaaattggaggctactataaaaattaccyaagtgctaaaaatatttaccattaagagttaatcaggccaggcgcagtggctcatgcctgtaatcccagcactttgggaggccctaggcgggtgatcacc

SEQ ID NO: 453237 - DNA, 201 bp, Homo sapiens
accagcctggccaacatggtgaaaccccatctctactaaaaatacaaaaaaaattagctgggcatggtggtgggcgcctgtaatcccagttactcaggagrctgaggcaggagaatcactggaacccggggggtggaggttgcagtgagctgagatcgtgccactgcactccagcctgggcaacagagcgagactccattt

SEQ ID NO: 453238 - DNA, 201 bp, Homo sapiens
tttctctctctctaaaggcttttttcccttcccttcacatatttcttagaatcacttaggagtctgagtgcttttgcaggggaagaggggagatgtaaaarcaagggaatatctaaaagcatatttgatattcataatggtatttttaaaattttttgttctaatgtttccttttttgcttcccttattttaaataacatt

SEQ ID NO: 453239 - DNA, 201 bp, Homo sapiens
ggccgaggtaagtggatcatgaggtcaggagatcgagaccatcctggcgaacatggtgaaaccccgtctctactaaaaatacaaaaaaaaaaaaattagcygggcgtgatggcaggcgcctgtagtaccagctaatcgggaggctgaggcaggagaacggcgcaaacccagggggcagagcttgcagtgagccgacatcgc

SEQ ID NO: 453240 - DNA, 201 bp, Homo sapiens
aattttccataataaaaagtaaaatgcatttagcaaatcagtcaatataccattagtctcaaccaatgccttagaattatccaaatcttttttaacatttmttttaatcattaaaataatacctgtccgtcagtgatggaaatgacatttgttggaatgtaagcagacacatcaccagcctgtgtttctatgactggcaaa

SEQ ID NO: 453241 - DNA, 201 bp, Homo sapiens
ttctcagcataattctatatgaaaaattggcaataaatacaaagcactgaatttagttacttcatgtctttgccagtgagtataattaatttggataaatrtggtattggttaatttttagtgttttcttcttccaggattagatttatgaagggtggttctcatgtatatttggaaaggggttagtatcacattgttccc

SEQ ID NO: 453242 - DNA, 201 bp, Homo sapiens
ctagaacgaaacatgctactctatgcaataactgggtgacagatacatggggtttcactatgccattctcctaacttttctatgtatttgaaattttccayaataaaaagtaaaatgcatttagcaaatcagtcaatataccattagtctcaaccaatgccttagaattatccaaatcttttttaacatttcttttaatca

SEQ ID NO: 453243 - DNA, 201 bp, Homo sapiens
tacaaatgaagtgatataatttctatttgattcaaaattatctagaagggagaacagtagtggttaaaaatgaaactagaacgaaacatgctactctatgyaataactgggtgacagatacatggggtttcactatgccattctcctaacttttctatgtatttgaaattttccataataaaaagtaaaatgcatttagca

SEQ ID NO: 453244 - DNA, 201 bp, Homo sapiens
tactgaaatacatacaaatgaagtgatataatttctatttgattcaaaattatctagaagggagaacagtagtggttaaaaatgaaactagaacgaaacaygctactctatgcaataactgggtgacagatacatggggtttcactatgccattctcctaacttttctatgtatttgaaattttccataataaaaagtaaa

SEQ ID NO: 453245 - DNA, 201 bp, Homo sapiens
gctaggattacaggcatgagccaccgcacccagcctcctgccttttcttaaaaacaaataatatgggttttagaattttcaaaatgtatgtgatttttctyatacttaaagtcacattatgttttgttgtgcattcttgctatagctagggtatccctcttatgatactttaggcctttttctgttcctttttgccccaga

SEQ ID NO: 453246 - DNA, 201 bp, Homo sapiens
agacaaaagcctttatatatcagtaaaaaaaaaaaaaaaaaaaagaggccgggcgcggtggctcaagcctgtaatcccagcactttgggaggccgaggtargtggatcatgaggtcaggagatcgagaccatcctggcgaacatggtgaaaccccgtctctactaaaaatacaaaaaaaaaaaaattagctgggcgtgatg

SEQ ID NO: 453247 - DNA, 201 bp, Homo sapiens
acagatacatggggtttcactatgccattctcctaacttttctatgtatttgaaattttccataataaaaagtaaaatgcatttagcaaatcagtcaatayaccattagtctcaaccaatgccttagaattatccaaatcttttttaacatttcttttaatcattaaaataatacctgtccgtcagtgatggaaatgacat

SEQ ID NO: 453248 - DNA, 201 bp, Homo sapiens
tgggtgacagatacatggggtttcactatgccattctcctaacttttctatgtatttgaaattttccataataaaaagtaaaatgcatttagcaaatcagycaatataccattagtctcaaccaatgccttagaattatccaaatcttttttaacatttcttttaatcattaaaataatacctgtccgtcagtgatggaaa

SEQ ID NO: 453249 - DNA, 201 bp, Homo sapiens
tacaggcacctgccaccacacccagctaatttctttgtatttttagcagagacggggtttcaccatgttggccaggctggtctcgaacttcatgtcacatytagtacagaggtatttaggacctcctatttcaaattggcttcagatatgttaaattattattattattattattttttaaacaaaattcacagtttattt

SEQ ID NO: 453250 - DNA, 201 bp, Homo sapiens
aacctctgcctcccaggttcaagtgattctcctgcctcagcctcctgagtagccaggattatgggcgcatgccaccatgcctggctaatttttgtattttyagtaaagacagggtttcaccatgttggccaggctggtctcgaactcctgacctcaggtgatctgcccaccttggcctcccaaaatgctgggattataggt

SEQ ID NO: 453251 - DNA, 201 bp, Homo sapiens
tggtggctcacacctgtaatcccagcactgtgggaggccaaggcaggcagatcacaaggtcaggagttcgagaccagcctggccaatatggtgaaaccccrcctctactaaaaatacaaaaattagcagggcatggtggtgggtgcctgtagttccagcttctcgggaggctgaggcaggagaattgcttgaacctggagg

SEQ ID NO: 453252 - DNA, 201 bp, Homo sapiens
cctcccaaaatgctgggattataggtgtaagccactgtgcctggccatctacaaaagatttaaaaattagccaggcatagtggcatgtgtctgtagccctrgctatttgggaggctgaagtgggaggatcacttcagccaaggagcttgaggctgcagtgatcacaccactgcattcaagcctgggtgacagaccaagacc

SEQ ID NO: 453253 - DNA, 201 bp, Homo sapiens
ttatatatgcaatttgaatgaacacttatggtccaagtcatattacctgtgaaagccaatttaataaatagtgctatgcacctgaattagagaaacaaaaytggtagttaggaggatacaggccaggtatgatgtctcatgcctgtaattctagtgctttgggaggtcaaggtgggaggatcactgaaggccaggcagggc

SEQ ID NO: 453254 - DNA, 201 bp, Homo sapiens
ctacctggaaggctgaagtgggaagattggttgagctgaggagtttgaggccaccgtaagccatgattgtaccactgcactccagcctgggcaacacagaragactccatctcaaaaaaaaattataataataataattaaataagactataactttcctattttaagcatctaacaggtgttgtttccatttggagtgag

SEQ ID NO: 453255 - DNA, 201 bp, Homo sapiens
atccactaccactggaccagcctaaagtcttgttccttttttttttttaaccaatttgccatttttgttgcaaacatgtcttgctctgtatttcacagcckagcacgctacctagcacatcataggtgctcaataaacattgatttaactgaattaatttgtatttaattagatttttgggggccccgttttcatgtttat

SEQ ID NO: 453256 - DNA, 201 bp, Homo sapiens
gttaaaattattcatagtggaggccgggtgcagtggctcatgcttgtaatcccagcactttgggaggctgaggtgggtggatcatttgagatcagaagttygagaccagcctggccaatgtggtgaaaccctgcctctactaaaaatacaaaaattagctgggtgtggtggtgggcgcctgtaatcctagctacttgggag

SEQ ID NO: 453257 - DNA, 201 bp, Homo sapiens
gacagagtgagactccatctcaaaataaaataaaataaaaatatctgtgaagagaaatttggccatgtgatcaaaatgtaaaatgcccctatcttttgacycattaagtccatgtcaaaaaacttaccttacaaatatattctcacatatgcaaagtaaaagatgacacagttgttcatagcagtgtggttattttggcaa

SEQ ID NO: 453258 - DNA, 201 bp, Homo sapiens
gcagatcacttgaggtcaggagttcgagaccagcctggtcaacatggtgaaaccccgtctctactaaaaatacaaaaattagccgtgcggaggtggcgcarcacctgtaatcccacctactcgggaggctgagccaggagaatcgcttgagcctgggaggtggaggttacagtgagctgagtttgcaccactgcactctag

SEQ ID NO: 453259 - DNA, 201 bp, Homo sapiens
acaaaataaaaacgtattaactttcttttaaatctgccaaattacatattcatatagccaagtgggggaggggactctaacaggccttaattcctgaaagraagacattaaatatacttaagttttcctggttgtgaagcccctatcatttacactcaaatgataataagaaatgtagtttgggccgggcatggtaactca

SEQ ID NO: 453260 - DNA, 201 bp, Homo sapiens
gtaagttcttactgtacataaaattttgagtcttgcttttttaacttagtatttcataagtattttctaaaatcactcaatgtattttttctaacaaaaartttgatagaatacagggctagccactttataagcagacaattttgcacataaaaattgaaaatctctgtgaagggctgggcagggtggctcacatctgta

SEQ ID NO: 453261 - DNA, 201 bp, Homo sapiens
ttatgctttataagaagaggaagagatggctgggcacagtggctcatgcctgtaatcccagcactttgggaggacaaggcaggtggatcacctgaggtcargagttcaagaccaggcaggccaacatgatgtaaccccatctctattaaaaatacaaaattagccgggtgtggcggcacacgcctgtagtcccagctactt

SEQ ID NO: 453262 - DNA, 201 bp, Homo sapiens
tcaacttctgcgttccacactcgcgcagggaagccgcccccgggtcctaaaccactcccgattgcgacggccgccgtcggcgctctgcgctccctgcgcgrgacctgggcgggaccctcggcgctcacccggccaggggctgcagcccgcacccggacccaggcccatttaaagccccacagcgtcgggccacgatcaata

SEQ ID NO: 453263 - DNA, 201 bp, Homo sapiens
tgggaggctgaggcaggagaatcacttgaacctgggaggcggaggttgcaacgagctgagatcacgccactgcactcagtctgggcaatggagtgagactwcatctcaaaaaaaaaaaattactcatagtggaattacaggttaaagaatatgaatatttttaagggtcttgaaatatattaccaaatagttttccacaaa

SEQ ID NO: 453264 - DNA, 201 bp, Homo sapiens
ccttctggaagtctttgggtattggaaataactggtcctggcttgggttcctgcccacaaggccccctggacagcacgaaatccaggctctgcggggtgayagacgggatctgatcagatggtcgcgaggacccggtttaagctacagaaggcctggggccgacaactcccgcagacgccttggcttcacggcgggcccca

SEQ ID NO: 453265 - DNA, 201 bp, Homo sapiens
actggttccaggtatctgaatgctttggttgacagtgcggtggcccttgaaacaaaggatacctcgctagctaggtaattcttatgacagttttaatttcygcaatcatatctgctataaggtcttaaagactttttgttctcagcataattctatatgaaaaattggcaataaatacaaagcactgaatttagttacttc

SEQ ID NO: 453266 - DNA, 201 bp, Homo sapiens
caatatatcagcccgaagctagctgcctccttctggaagtctttgggtattggaaataactggtcctggcttgggttcctgcccacaaggccccctggacmgcacgaaatccaggctctgcggggtgatagacgggatctgatcagatggtcgcgaggacccggtttaagctacagaaggcctggggccgacaactcccgc

SEQ ID NO: 453267 - DNA, 201 bp, Homo sapiens
gaactcagggggcggaggttgcagtgggccgagatcgtgccactgcactccagcctgggtgacagagcaagactctatctcaaaaaaaaaaaaaaaaaaaattagccaggcatggtggtgcacgcctgtggtcccagctacctggaaggctgaagtgggaagattggttgagctgaggagtttgaggccaccgtaagccat

SEQ ID NO: 453268 - DNA, 201 bp, Homo sapiens
atggcacaaactggggacatagaagcgggagagctgaagacaccactaaggtttttcctggaagttttaaatattctggaaaaatagtttagatacaattmtaattgtcacattttaatttttaatacatgtataattttaagttattagaacgtttcacaagctctcacagtacattgtgcttgattttcgcgactcaga

SEQ ID NO: 453269 - DNA, 201 bp, Homo sapiens
agtgagattagaaggaaggcagagaagcctggcagaaccatcaaggggcagcagaggacgtggtaggcactaggaagctaggcttaactgcagggggtaakaaatggcacaaactggggacatagaagcgggagagctgaagacaccactaaggtttttcctggaagttttaaatattctggaaaaatagtttagatacaa

SEQ ID NO: 453270 - DNA, 201 bp, Homo sapiens
gggcagatccatcctgggcagaggaataggtgctcaaagtggggaggataaaggtcaaggttgccaagactggcaccagcccagcctggagaagcaagcaytcacccctggagcaggttctagctacacccagacacagtgaaagggcaattgctagaattatgtgaagcacctggaacaagttctgctccataaaactgc

SEQ ID NO: 453271 - DNA, 201 bp, Homo sapiens
cttctaaatagatgcaaagacagacatccttcctggggcagatccatcctgggcagaggaataggtgctcaaagtggggaggataaaggtcaaggttgccragactggcaccagcccagcctggagaagcaagcactcacccctggagcaggttctagctacacccagacacagtgaaagggcaattgctagaattatgtg

SEQ ID NO: 453272 - DNA, 201 bp, Homo sapiens
tccagcttatagggtctcccacaccatcagccccgctatggggcctggacggaagggctggggcaatggcctggggagggggctcgggaaacaaggctgtmgaacagggaaagctccagcaaagggaagccctctatgctgtacgtttcctggaaaggacgatcccggggggcagctgctgctgtcaacccggtaaagctc

SEQ ID NO: 453273 - DNA, 201 bp, Homo sapiens
agcctcctgctcctgtcttaaagggatgaggacagctcctctgaatgagggggcatggaccttgaggggcacctggggagtgagaggacagagggaagagkactagacagaggagggggacaggcagacctgctccctccaggctgggctggccctaccgggctgggtggggtaccccctccagcttatagggtctcccac

SEQ ID NO: 453274 - DNA, 201 bp, Homo sapiens
gctgtgaagctacctgggtgggtggtggggggaggcaagcaggagccccagtaaggagtcagggccccttggcagctgcggtcaactttgaggtttgcagmctcctgctcctgtcttaaagggatgaggacagctcctctgaatgagggggcatggaccttgaggggcacctggggagtgagaggacagagggaagaggac

SEQ ID NO: 453275 - DNA, 201 bp, Homo sapiens
atttcctgcaccttcccccagtgaaagatactgacacttgatatactttttaaaacttgctaaaagcaaaactgtacaatttggacttttttattagtagyaaagtataaaagttctccatatttttacaatttacttttagactctcatttgtctactggaaaaatcacttttaaaagaggattaggaaaataaaggtag

SEQ ID NO: 453276 - DNA, 201 bp, Homo sapiens
agagcaaaactccatctcaaaaaaaaaagaaaaaagaaaaacatatatgctgaacgtgggggtgtgtgtacacatacacacacacacacacacacacatayacacacacactctcacacacatatatatttaacctttattttaaaagtccaaatactcatctccaaagaaattccccaacttatagtgtcttcctatgct

SEQ ID NO: 453277 - DNA, 201 bp, Homo sapiens
cagctgtgaagctacctgggtgggtggtggggggaggcaagcaggagccccagtaaggagtcagggccccttggcagctgcggtcaactttgaggtttgcrgcctcctgctcctgtcttaaagggatgaggacagctcctctgaatgagggggcatggaccttgaggggcacctggggagtgagaggacagagggaagagg

SEQ ID NO: 453278 - DNA, 201 bp, Homo sapiens
ctgggaatcaaacccgggaatgtccagtgcaaaagcttgagggcctgaggactgcctctcactgtgtcatgcctatactggatgttagaacatgtgaattmcacacacacacacacacacacacgtgtatatatacaaaaatatatattttaaaatatgcatataaatttacaagcaaagcatgaggaagaaaacaaaacc

SEQ ID NO: 453279 - DNA, 201 bp, Homo sapiens
caagagcaaaactccatctcaaaaaaaaaagaaaaaagaaaaacatatatgctgaacgtgggggtgtgtgtacacatacacacacacacacacacacacayatacacacacactctcacacacatatatatttaacctttattttaaaagtccaaatactcatctccaaagaaattccccaacttatagtgtcttcctatg

SEQ ID NO: 453280 - DNA, 201 bp, Homo sapiens
tagggtgagtagtgccccagaaggacctcacaaactccagtgaagggactcacaggcacagtctcaactgtgtccctgaggtccccagccaggtttctctrccctgcagcccacgtggggtagagggaccatctaggcagctgtgaagctacctgggtgggtggtggggggaggcaagcaggagccccagtaaggagtcag

SEQ ID NO: 453281 - DNA, 201 bp, Homo sapiens
ttggctcactgcaaccgccccctcccaagtccaggcgattctcctgccacagcctcccgagtagctgggactacaggcacccaccacaacacctggctaattttttttttttttttttttttttagtaaagacggggtttcaccatgttgaccagcctggtctccaactcctgacctcaggtgattcacccgcctgggcct

SEQ ID NO: 453282 - DNA, 201 bp, Homo sapiens
tggctcactgcaaccgccccctcccaagtccaggcgattctcctgccacagcctcccgagtagctgggactacaggcacccaccacaacacctggctaattttttttttttttttttttttttagtaaagacggggtttcaccatgttgaccagcctggtctccaactcctgacctcaggtgattcacccgcctgggcctc

SEQ ID NO: 453283 - DNA, 201 bp, Homo sapiens
cccaagtccaggcgattctcctgccacagcctcccgagtagctgggactacaggcacccaccacaacacctggctaatttttttttttttttttttttttwagtaaagacggggtttcaccatgttgaccagcctggtctccaactcctgacctcaggtgattcacccgcctgggcctcccaaagtgctgggattacaggc

SEQ ID NO: 453284 - DNA, 201 bp, Homo sapiens
ggggaggggcttagcgcccgcctggccttagccttgccagtgctaaaactgtggctaaatactgaggattgtgttgtttggttgggtttgtttgtttgttygtttttgagacaaacacaaatcactctgtcgtccaggctggagtgcagtgatgtgatcatagctcactgcaacctcaaactcctggcctcaagcaatcct

SEQ ID NO: 453285 - DNA, 201 bp, Homo sapiens
attaaacaatattatagcaattatgaaataatgaaattatttaatatatttaagacataatacatttaagataatcgctgtgaatattttggcatactctctttcaactatatatttgcaagagtaagttcttactgtacataaaattttgagtcttgcttttttaacttagtatttcataagtattttctaaaatcactc

SEQ ID NO: 453286 - DNA, 201 bp, Homo sapiens
ttaaacaatattatagcaattatgaaataatgaaattatttaatatatttaagacataatacatttaagataatcgctgtgaatattttggcatactctctttcaactatatatttgcaagagtaagttcttactgtacataaaattttgagtcttgcttttttaacttagtatttcataagtattttctaaaatcactca

SEQ ID NO: 453287 - DNA, 201 bp, Homo sapiens
cacccagctatttattttttgtatttgtagtagagacggggtttcaccgtgttggccaggctggtctcaaactcctgacctcgtgatccacccaccttggmctcccaaaatgctgggattacatgcatgagccactgcacctggccctacattcctagttttttaaggtaccaataaaaatgaaaaataaatagctcatgg

SEQ ID NO: 453288 - DNA, 201 bp, Homo sapiens
taaacaatattatagcaattatgaaataatgaaattatttaatatatttaagacataatacatttaagataatcgctgtgaatattttggcatactctctttcaactatatatttgcaagagtaagttcttactgtacataaaattttgagtcttgcttttttaacttagtatttcataagtattttctaaaatcactcaa

SEQ ID NO: 453289 - DNA, 201 bp, Homo sapiens
gaactgttgtatattgttctttaagaaagttcattgtcactagtaaggttttggggagctggcaagttttgattggcaagtaatggcaactaggtaaaacratccttagagtcactgcaggttgtttttagcagctaattagataaaactggtttaggtcagccgggcacggtggctcacgcctgtaatcccagcgctttg

SEQ ID NO: 453290 - DNA, 201 bp, Homo sapiens
acattcctagttttttaaggtaccaataaaaatgaaaaataaatagctcatggaatccataggcggttctctctgcttaaaggcaggggtgctgaggagargtctcgctgcaagataattgtcattaggcaggtcctgtcaccagcggggtgggaccctctgtgtcctcaagggaatggttgtggccttgccacaggcagg

SEQ ID NO: 453291 - DNA, 201 bp, Homo sapiens
tgttcttggaatctaatgttgacaattcataaatatgtatttgggattctagttctccctttacatttttttccccttgtttttataaatagagatggggrtcttgctatgttgcccaagctggtctcaaactcctgggctcaagtgatcctcccaccttggcctcccaaagtgctggggttagaagtgtaagccaccaca

SEQ ID NO: 453292 - DNA, 201 bp, Homo sapiens
gccgagatcgcgccactgcactccagcctgggtgacagagcaagactcggtctcaaaaaaaaaagaagaaaaagaaaaatatttgatggtggtcacttttsaaataattttttaactgaactcctttttttggtaattgtaggagcaactttcagccagaggcatggatgcttctctgtctcatcagtccttagtagcact

SEQ ID NO: 453293 - DNA, 201 bp, Homo sapiens
ggcatgagccaccatgcccagctaattttgtatttttagtagagacggggtttctccatgttggtcaggctggtctcgaactcccgacctcaggtgatcckcccgcctcggcctcccaaagtgctgggattacaggcgtgagccactgcgcccggcctgactttttcagcttttacttcatacaattttacttcatacaat

SEQ ID NO: 453294 - DNA, 201 bp, Homo sapiens
ggcaatttatgtataagctcaaagagtagtgttttaggtataagagcatccctactgtatggcagcagaaatctagacttgaattaaataagttcagcagataacaaataccagttgtatgttagttgtataagcactggggaagcagggatgaatcatataatttcttgccttttttttttacaaataatgtgtatttta

SEQ ID NO: 453295 - DNA, 201 bp, Homo sapiens
aggcaatttatgtataagctcaaagagtagtgttttaggtataagagcatccctactgtatggcagcagaaatctagacttgaattaaataagttcagcagataacaaataccagttgtatgttagttgtataagcactggggaagcagggatgaatcatataatttcttgccttttttttttacaaataatgtgtatttt

SEQ ID NO: 453296 - DNA, 201 bp, Homo sapiens
aaaggcaatttatgtataagctcaaagagtagtgttttaggtataagagcatccctactgtatggcagcagaaatctagacttgaattaaataagttcagcagataacaaataccagttgtatgttagttgtataagcactggggaagcagggatgaatcatataatttcttgccttttttttttacaaataatgtgtatt

SEQ ID NO: 453297 - DNA, 201 bp, Homo sapiens
ctactaaatggcagagctgagattcaaaaccagtcttataaagttcatatgactaccacttttggccatatcttagctaggactactaatattttgttttwgtttttgtttttgagacagagtctcattctgtcacccaggctggagtgcagtggcgtgatctcggctccctacaacctccgcctcccggggtaaagcgat

SEQ ID NO: 453298 - DNA, 201 bp, Homo sapiens
agcaggtggaggttgcagtgagctgagattgtaccattgtactccagcctgggtgacagagcaagaccctgtcccaaaaaaaaaataacgacaaaaaaaamcaaaacctcaataataaaaagacaacccaattttaaaatgggcaaggggtatacacagacatttctcctacgaagatacacaaatggtcacaaagcacgg

SEQ ID NO: 453299 - DNA, 201 bp, Homo sapiens
tcaaggacataccctgcacaaaagacacaattgaacatcaatgaagctgaatgggcactcctccccatacaccaatactacataagaaaatagtcgggggktggggggggaagcagtattgtccttttcacctggtttattcttgagtacttttccaactaacaaacaaccctctctgattaagacttttaaaattgctat

SEQ ID NO: 453300 - DNA, 201 bp, Homo sapiens
cacttgagcccagcaggtggaggttgcagtgagctgagattgtaccattgtactccagcctgggtgacagagcaagaccctgtcccaaaaaaaaaataacracaaaaaaaaccaaaacctcaataataaaaagacaacccaattttaaaatgggcaaggggtatacacagacatttctcctacgaagatacacaaatggtc

SEQ ID NO: 453301 - DNA, 201 bp, Homo sapiens
tcacttgagcccagcaggtggaggttgcagtgagctgagattgtaccattgtactccagcctgggtgacagagcaagaccctgtcccaaaaaaaaaataaygacaaaaaaaaccaaaacctcaataataaaaagacaacccaattttaaaatgggcaaggggtatacacagacatttctcctacgaagatacacaaatggt

SEQ ID NO: 453302 - DNA, 201 bp, Homo sapiens
aaacaatattatagcaattatgaaataatgaaattatttaatatatttaagacataatacatttaagataatcgctgtgaatattttggcatactctctttcaactatatatttgcaagagtaagttcttactgtacataaaattttgagtcttgcttttttaacttagtatttcataagtattttctaaaatcactcaat

SEQ ID NO: 453303 - DNA, 201 bp, Homo sapiens
agttttccacaaaagttgtatcagtctatactctcagtagtctacagcggtgtccctgccttttcagaaacattggataacatcattcataatccttgttwtatgatcatggaaacgctctcattatgctttaaatttgcatagttttaattactacttgatcaggtttttcatacgcatgttttttcaggctatgccatc

SEQ ID NO: 453304 - DNA, 201 bp, Homo sapiens
caactgtgtctttaaccatgaccatctcaagtcatttccacagttaagtgcttagatccaacacattttctaaaagctctttgcaagcaagcaaaatcctraagtgtgtcttcaaagagattcatgaatggggggaggggggagggatagcattgggaaatatacctaatgctagatgatgagttagtgggtgcagcgcac

SEQ ID NO: 453305 - DNA, 201 bp, Homo sapiens
gctggactctatagctcagcaaaaacaccagggaaaggactatacagttttaggggagatcttgaagtcttctagcacaactttttttaagagtcagggthtctgtcacctaggctggagtgcagtggcgtgatcatagctgactgcagcctgtttcaaactcctgggctcaagtgatcgtcccaaagtgctgagattaca

SEQ ID NO: 453306 - DNA, 201 bp, Homo sapiens
aacaagagcaaaactctcaaaaaaaaaaaacaaaaaaaaaaaaaaaaaaaaaaaacgaaatgtgcagaaccttctaactaaaagtaacttccttatttcaraaaaggaaaatcagatctagaagttatttctcaagtagctagaaagcaagagttgatcagaaatgaccaactgctatcaagtttagtgttcctctaagta

SEQ ID NO: 453307 - DNA, 201 bp, Homo sapiens
tctcaaaaaaaaaaaacaaaaaaaaaaaaaaaaaaaaaaaacgaaatgtgcagaaccttctaactaaaagtaacttccttatttcagaaaaggaaaatcaratctagaagttatttctcaagtagctagaaagcaagagttgatcagaaatgaccaactgctatcaagtttagtgttcctctaagtactgaaaaggactta

SEQ ID NO: 453308 - DNA, 201 bp, Homo sapiens
atcaacaaaataaaatggcaaggaagggggaaccctaggaaaaatattttagaacatgaccatgtatgacccttacagacaaaagcctttatatatcagtaaaaaaaaaaaaaaaaaaaagaggccgggcgcggtggctcaagcctgtaatcccagcactttgggaggccgaggtaagtggatcatgaggtcaggagatcg

SEQ ID NO: 453309 - DNA, 201 bp, Homo sapiens
cctcacacccaagtgagaagcctggaaatccccaggggtgagagaacactgctttcatctacccttccaaaacgggtcccactgtcacccgtgcatgcccstatctgaaggacactggtgtctgatcatcccaaaaactggaattttttctcattgtggcctggctgtttccctggatctttggaaactgtggtcactgtc

SEQ ID NO: 453310 - DNA, 201 bp, Homo sapiens
tcaacaaaataaaatggcaaggaagggggaaccctaggaaaaatattttagaacatgaccatgtatgacccttacagacaaaagcctttatatatcagtaaaaaaaaaaaaaaaaaaaagaggccgggcgcggtggctcaagcctgtaatcccagcactttgggaggccgaggtaagtggatcatgaggtcaggagatcga

SEQ ID NO: 453311 - DNA, 201 bp, Homo sapiens
caacaaaataaaatggcaaggaagggggaaccctaggaaaaatattttagaacatgaccatgtatgacccttacagacaaaagcctttatatatcagtaaaaaaaaaaaaaaaaaaaagaggccgggcgcggtggctcaagcctgtaatcccagcactttgggaggccgaggtaagtggatcatgaggtcaggagatcgag

SEQ ID NO: 453312 - DNA, 201 bp, Homo sapiens
gggcaatgagccagttcagacagccccaagactttccctagtcaatcccaggcagagagaagccctgcccactacaggaacagggttgctgaaacagcaamtaggaagctggtctacaccaagaaccttgggaatcaggaaggcccaggaaaaataagtatctacaggaggttcagggacgatttggacctcacacccaag

SEQ ID NO: 453313 - DNA, 201 bp, Homo sapiens
tcaaaagtttttcaatgtccttctgttagttaatggttttttcagtcattcagtaggtattactgagaatctgtcatgtgccaggcattgaaccaggcacsactggagtaagcagacaggagtgtgggtcctcaccccaagggcagccatgccagccctggaatgaccaatcaggggcttgtagatgagagagaaataaac

SEQ ID NO: 453314 - DNA, 201 bp, Homo sapiens
aaaactttagatcaataaacttgactgtataaagtgttttcaaaatccatatacatatatcattttacagatgaggaggcaaagctgaggaaagctgaatmatttgaacacgggcacacacattctttggcttgaaaggagccaaactgggaatcaaacccgggaatgtccagtgcaaaagcttgagggcctgaggactgc

SEQ ID NO: 453315 - DNA, 201 bp, Homo sapiens
ccctctaaatggctgcagtctttgtacactcaaactttacatggcaggggagggtgctggtctttccaggcttccagcttccccatgtgaggctccgcccmgaggactggtttctttgccctctgagagcagacaggcttctacaataacttgctgagccctttggccttgggcttttctgcttagtttctgcagggaagg

SEQ ID NO: 453316 - DNA, 201 bp, Homo sapiens
aggtatatacccttgtaaccttggatttggcattggtttcttggatatgatgccaaaagcacaagcaaacaaaataaaaagtatataaattagacatcatsaaaatttaaaacttttgttctcaaaggacaccatcaagaatatgaaaagacaggctgggcattgtggctcacacctataatctcagcacttcgggaggct

SEQ ID NO: 453317 - DNA, 201 bp, Homo sapiens
agctcactgcaacctctgccttccagggtcaagtgattctcctgcctcagcctaccaagtagctaggattacaggtgcctgctaccacgcccagctaactkttgtatttttagtaaacacatggtttcaccttgttggccaggctggtctggaactcctgacctcaagtgatctgcctgcctcagcttcccaaagtgctgg

SEQ ID NO: 453318 - DNA, 201 bp, Homo sapiens
gtatatacccttgtaaccttggatttggcattggtttcttggatatgatgccaaaagcacaagcaaacaaaataaaaagtatataaattagacatcatcaraatttaaaacttttgttctcaaaggacaccatcaagaatatgaaaagacaggctgggcattgtggctcacacctataatctcagcacttcgggaggctga

SEQ ID NO: 453319 - DNA, 201 bp, Homo sapiens
gggaggcagaggttgcagtgagccgagattgtgccactgcactccagcctgggaaacagagtgagactgcatctcaaaaaaaaaaaaaaaaaaaattagcyaggggtggtggtgcacgcctgtagtcccagctacttgggaggctgaggtgggaggattgcttgagcccgggaagcagaggttgcagtgagccaatatcgt

SEQ ID NO: 453320 - DNA, 201 bp, Homo sapiens
agtgagccgagattgtgccactgcactccagcctgggaaacagagtgagactgcatctcaaaaaaaaaaaaaaaaaaaattagccaggggtggtggtgcaygcctgtagtcccagctacttgggaggctgaggtgggaggattgcttgagcccgggaagcagaggttgcagtgagccaatatcgtgccactgcactccagc

SEQ ID NO: 453321 - DNA, 201 bp, Homo sapiens
gtcatcttacctcatgttccttctttaatttggtttcctttaattctgtgaacatgcttattatggatatttgaagtttttcctgataaagccaacatctkgtcattctcacaggcagcttctgttgcttgcttttttctattacagttcctgtcttattctttgcattcctcttttttgttgttgttgttgttgctggaa

SEQ ID NO: 453322 - DNA, 201 bp, Homo sapiens
atatgggacttgtatctacaacatgtaaagaactcttacaactcaataataaagcctgggcacagtggctcacacctgtaatcccaccactttgggaggcygaggcagacagactgcttgagcccaggagtttgaggtcagcctaggcaacatggcgaaactacatctctaaaaaattaccaaaattagccaggcatggtg

SEQ ID NO: 453323 - DNA, 201 bp, Homo sapiens
tcaagctgacttcctctctttcactgagcacacctgactgtaaaattccactaatttacagctgttgttttcaacaatgccctgggcataaactgctctaygagcaattccaatcaaattctagctctcttagaggaatagtttctgaggtcagttagatatttgttttatcttctggatggctctcctagatgtcttaac

SEQ ID NO: 453324 - DNA, 201 bp, Homo sapiens
aaacctgggaggcagaggttgcagtgagccgagattgtgccactgcactccagcctgggaaacagagtgagactgcatctcaaaaaaaaaaaaaaaaaaaattagccaggggtggtggtgcacgcctgtagtcccagctacttgggaggctgaggtgggaggattgcttgagcccgggaagcagaggttgcagtgagccaa

SEQ ID NO: 453325 - DNA, 201 bp, Homo sapiens
caatcaaattctagctctcttagaggaatagtttctgaggtcagttagatatttgttttatcttctggatggctctcctagatgtcttaactacaaactamttgccctacagtttagcctgtatcttgaatctgctcccaatttctttgaccacaacttctactctttttgagattgcccttaggcttgaacctttctaag

SEQ ID NO: 453326 - DNA, 201 bp, Homo sapiens
gtgaaactccatctaaaaaaaaaaaaaaaaaaaaagaaagaaaaaaagaaaagaaaaagaaaaaggctgtccaagtaaaataaaatacagagacaaatctmtaaatttaaaacatttgggaagcaataattgccattcagggcatacacacaaacagggtggtctttggtacgtcagaagaacaaacagatggttagaggt

SEQ ID NO: 453327 - DNA, 201 bp, Homo sapiens
tgggaggctgaggcgggtggatcacctgaggtcaggagttcgagaccagcttggccaacatggcaaaaccccatctctactaaaaatacaaaaattagccmggcatgggggcgggcacctgtaatcccagctactggggaggctgaggcaggagaattgctttaacccgggaggcagaagttgcagtgagccccagattgc

SEQ ID NO: 453328 - DNA, 201 bp, Homo sapiens
taaacctgggaggcagaggttgcagtgagccgagattgtgccactgcactccagcctgggaaacagagtgagactgcatctcaaaaaaaaaaaaaaaaaaaattagccaggggtggtggtgcacgcctgtagtcccagctacttgggaggctgaggtgggaggattgcttgagcccgggaagcagaggttgcagtgagcca

SEQ ID NO: 453329 - DNA, 201 bp, Homo sapiens
cacaggaaattgagatattagcaaaagagagattgatgacccataggcttgaagatgtactggaactaaagtaaggggcgaggataaataaaaagagggaraaattggagaaacagagtgcttggaagccctgatgaatttgaggaaaaggatggtgatagagttgacctagccagctagaagagtagtactttttagtca

SEQ ID NO: 453330 - DNA, 201 bp, Homo sapiens
gccttctcactgtgtccttacatagtggaaggcatgaggcaactctccgggacttcttttataaggacactagttccattcatgagggcagagccttcatratttaatctacctaccaaagacccactttctaataccataacatggatgatgaggtttcaacatattaatttgggggaaacatgaacattcagatgataa

SEQ ID NO: 453331 - DNA, 201 bp, Homo sapiens
ttgagagtgttatctaaaaatccatgtgaatcttgtattctcttccataatacatttctgtttgttttaatataaaaatacttttaagttggaggagggggttaagtgggttggtgattattgcctcaaattttttatacaattatttctccaggaaaacacacactgtttattcatggcttgaagcagtcttttttttta

SEQ ID NO: 453332 - DNA, 201 bp, Homo sapiens
aaaactgcagcattaactcctgcttgagtttctgggtttccagcctgctgatcagcccaccttaaaaatttcagacttcttgccctacaggtttcaaactstcagcccctacagccacacaagccaattcctttaaataaatctctttaaaaaaatacacactctcatatacgtatacatgtacagatacagatcagatac

SEQ ID NO: 453333 - DNA, 201 bp, Homo sapiens
agtgttgagaccctgaaaccatttaaccttctgatatggttaggctttgtgtccccacccaaatctcatcttgaattgtaatcctcataatccccacttayctagggagagacctggtgggaggtgattggatcatgggagtggtttctcctatgctctttttgtgatagtgagtgagttcttatgagatctgatggtttt

SEQ ID NO: 453334 - DNA, 201 bp, Homo sapiens
tactactactacacacactcacatatgttaggtgtaatatactgattttgttgaattacatttatttatgtaaatgccaatctctttcactggactgagaygttcgatagatcttcgatagcaggaaccatgttgtattcacctcagtgaagagttcattacttggtacatagtaggtgctgcataatacttttggataaa

SEQ ID NO: 453335 - DNA, 201 bp, Homo sapiens
tgaggttttgatgttttcattttcatttgattcaaaaaaaattttttgagacagagtctcactctgatacccatgctggagtgcactgttgcaattatggytcactgtggcatcaaccttcaaaggctccggtgatcctcccccatcagcctcctgagtagctgagactacaggtgcatgccaccatgcctggctattttt

SEQ ID NO: 453336 - DNA, 201 bp, Homo sapiens
gtagctcaataatagcttaatgtaaccccaaatccctcggttcaagcaatcatcctgccccagtctctcaagtagctaggactacagatgtgtgccgctayacctggttaattttttaaattttcttgtagagaaggggtaacactatgttgcctcgactggtctcaaactcctggcctcaagcagtcctcctgcctaggc

SEQ ID NO: 453337 - DNA, 201 bp, Homo sapiens
atctgtcttttgttagacatttaagtattcatttctgttgggttatattacctaggaattggaattgctgggttataggatatatgttttcactttaacarattgtgctaaacagttttccaaagtgtttgtacaatttacattcccaccagcaatagatgcaagttacagttgctctgtatccttgtcaacacttggtat

SEQ ID NO: 453338 - DNA, 201 bp, Homo sapiens
aaggggtaacactatgttgcctcgactggtctcaaactcctggcctcaagcagtcctcctgcctaggcctcccaaagcactgggattacaggcatgagccrccatgcccagccaggtggatattaacattcatgtagccactccaacatacctaccatgaggagaagtaatggaaaagacataatgaaaagagacgctggt

SEQ ID NO: 453339 - DNA, 201 bp, Homo sapiens
tatgttttgcctggagagaatacctgttgtcaggacacccacttctcattatgcctctgctgccaataactatgtgggtttggaccattttttgctatcartaacatgaatgcttttagttagatgatttctaagtcacattgtaggattcagtagcttcctttttggttagaatggaaaaaacactagaccggtaatcag

SEQ ID NO: 453340 - DNA, 201 bp, Homo sapiens
gactggtctcaaactcctggcctcaagcagtcctcctgcctaggcctcccaaagcactgggattacaggcatgagccaccatgcccagccaggtggatatkaacattcatgtagccactccaacatacctaccatgaggagaagtaatggaaaagacataatgaaaagagacgctggtattaattgattgcagttaatata

SEQ ID NO: 453341 - DNA, 201 bp, Homo sapiens
agtgccagccctgttaatcactattctgtactgtctttcaggttcttatgcctttgtttgaaaaacatggttccctgtgaaattttacatgtagaagaaarcttcacactacgagagctctcaggatataattatttcagacagatactgggaacataagatggcttatcaatctaagatggccttcctgtccttcggatt

SEQ ID NO: 453342 - DNA, 201 bp, Homo sapiens
ttctacattcagtgtaataatgtttaaaactatgtagaaatggatccttaaaaacctctcatttagtctttctagagctgtcataatatttgatgactatwaatgtaaattccatttaatggtgaaatttcaacaaaactggaatgagctatgggatttttcttttgcaaccagatagacaaataaataggcaaagagagt

SEQ ID NO: 453343 - DNA, 201 bp, Homo sapiens
tgtctgtactctgatttcaggggtgtgtatgtgatctaggtttggacaataaaaatattgaaccctccttccctggacctacaattgtttaagggaaggaracatgcaaaagttggtataaatttcaattctaaaagaataattgtacaataaaaaatcttacaatcgtgtaactgaagctaacgtaagtgttcagcttac

SEQ ID NO: 453344 - DNA, 201 bp, Homo sapiens
agaggtgagtaatatgtatttcttatttattttttttttttgagatggagtttagctctttcgcccaggctggagtgcagtgaagcaatctcagctactcrggttcaagcaattctcctgcctcagcctcctgagtagctgggattacaggtgcacaccaccatgcctggctaatttttttgtatttttagtagagacgga

SEQ ID NO: 453345 - DNA, 201 bp, Homo sapiens
acttgaactccagtgccagccctgttaatcactattctgtactgtctttcaggttcttatgcctttgtttgaaaaacatggttccctgtgaaattttacaygtagaagaaagcttcacactacgagagctctcaggatataattatttcagacagatactgggaacataagatggcttatcaatctaagatggccttcctg

SEQ ID NO: 453346 - DNA, 201 bp, Homo sapiens
tccagttttaatttaagtgttctctttctaacacccttcccaccattgttttgttttattttcactcagaatacagtattcctcatcttgccaaacacagwtccctctaccccttttctgaatttcttctcccactttcacagagacctgttatcctcttccataatttcagctactccttccccactgacttttaccctt

SEQ ID NO: 453347 - DNA, 201 bp, Homo sapiens
tgcctggtaagctctaaatatctctaaatgtttgttgcagaatgaatgagaataaaagtattctcttagaacatatccctgacattaggtgtgggataaargtggaaaatgcagtttgcctcataaaaatagctttcagaaatgacttttctacaacagccattcaccagtattctaaagggcacctgtcaaggagtcact

SEQ ID NO: 453348 - DNA, 201 bp, Homo sapiens
catggagaaatttcaagaacttacagtctctctcctggggaccagggacaaaggccagctacatgcttttttttgttttgttttgtttttttgagatggartctagctctgccacccaggctagagtgaagtggcacaatctctgctcactgcaacctctgccttctgggttgaagcgattctcctgcctcagcctcctga

SEQ ID NO: 453349 - DNA, 201 bp, Homo sapiens
attctgaatgcatgaacagtgatgctgaaaagcagggggtcttcaaactatactcaagggccaaatcattgcctctttttataagtgaagttttattagamtactgctccacccattcatttaaatgtggtctatggctgctttaggacttaaaatgccagaatacttgtgacagaaaccttctggccctcaaagcctaga

SEQ ID NO: 453350 - DNA, 201 bp, Homo sapiens
ggtttcaccgtgttagccaggatggtcttgatctcctgacctcgtgatctgcccgcctcggcctcccaaagtgctgggattacaggcgttagccaccaagsgcggccttttatattttttaatgatttaaaaaaataaaaacgacagtacttagtgatgtaaaaattgttatgaaattcaaatatcagtgtccataaatgg

SEQ ID NO: 453351 - DNA, 201 bp, Homo sapiens
acaagccaccacacctggctaatctttttatgaaaatttttttgtagagatgagatctcactatattgcccaggctggtcacaaactcctgggctcaagtsatcctcctgcctcagcctgccaaagtgttgggattacaggctggccactgtgccaagccccagagtgataatcttgattggttattggttatatgtgtgt

SEQ ID NO: 453352 - DNA, 201 bp, Homo sapiens
ggtacttttcccttaaagtgtctgttttaaacacacatttgtttttctgctacatcgagttcattgaatctcatttgtattttcttcgtatgttaccttayacagttatacgcaggatgtccctgttttttcagttagctgttagataaattcaccatacattcgctttcaaccttgtgtttaaaaaaaattagttacatg

SEQ ID NO: 453353 - DNA, 201 bp, Homo sapiens
tcacctacggtgccgcaaaatgctggtgcctttactgcactttacgactagcgggagggggccgggctagcgggctactgggctgcggagaccagagcccrgctccactgaagaaacccgccggctgctggggcagggcggcgaaaggtcagtcggccgagaggagtccgtggagccaccgtttcatagcctcagggaaag

SEQ ID NO: 453354 - DNA, 201 bp, Homo sapiens
tatttaaaaatatattttatgatgaaaactatcttgataaatttccttgtttattttatatgataaaaatcattggttgctccctaataaaatatcatttmacttacattacagtgctgggcatgtattacaagttgctcatttttagagctaatttatgtagcatatttgcatgtgtgtgtgtaaaagattgtgacagag

SEQ ID NO: 453355 - DNA, 201 bp, Homo sapiens
atgctgcactgtttggcctgagccaacatgggcagaaatacaggcggcagcataagcagatgccaagaacctgtcttgcttctactgttttcattgggttrctatatctcctttgtagtccaacctgcaaattactttgagaaggggagatacacccctggaccaatctaggactatatttgttcccttgctaaagtagga

SEQ ID NO: 453356 - DNA, 201 bp, Homo sapiens
ggctctagagagatctgatttaaaagttttgctctgccacttgctagcaatatagatgtggacaggctatttagataatttacttagcaaaataaacttgractgaagggtaggagattgaggcaaggaaggtagaccctaaagcagtttgccaaatacaaaatctcttggaatttgagagtgttatctaaaaatccatgt

SEQ ID NO: 453357 - DNA, 201 bp, Homo sapiens
tttcatttatcagctcattgctatcctgcttccttctctaaactatactgaagcagatcatgctaggtcacaattaactaagtgtcaaattccacgaagaratttaggctcttaacttatgtgacctcttaatagggcttgacacggttgatcatcttgatgatctctgccttttggcttctctgatccctttcttcaagt

SEQ ID NO: 453358 - DNA, 201 bp, Homo sapiens
tgtcgtatactctgtggcctaactcatttgactcctagtatttattcagagaagtgaatacatgtgctcacaaaaagacttgcacaagagcgtttgtagcrgttttattcgtaatagcctcaaactgaaagcaatggaaataccaatcagaaggagaatggattaaaaatatatgtgcgatacaatcatgtgacagaatac

SEQ ID NO: 453359 - DNA, 201 bp, Homo sapiens
tgtaaaggcaaagaaatagaaattaaattactttaattctgctattctttgtgaccactttgaatctttgtgtttaaaactttaaaacaatgaaatagtgyaaactttaaggtataatacatgtttgatctaaaatttattcacaaaatatcttactgaatttttattttagtagaaatacattcttattcattaactatt

SEQ ID NO: 453360 - DNA, 201 bp, Homo sapiens
ggggccgggctagcgggctactgggctgcggagaccagagcccggctccactgaagaaacccgccggctgctggggcagggcggcgaaaggtcagtcggcsgagaggagtccgtggagccaccgtttcatagcctcagggaaaggatcgggcgtgctcacgagccctctaacccatggcttaaacacccgcttcctaagcc

SEQ ID NO: 453361 - DNA, 201 bp, Homo sapiens
cctaagcctgggtaagtgcagtagctcttcgctcgagaggagccacgtggaagagagtcgggaggggccctgcgccctactcctcctctccagaaacaggragggctgggaaggattttcctgatttgtccccggatttggccgagtgcacagattttaattccagtcttctcatcctcctgtagttcaactaggtgtctt

SEQ ID NO: 453362 - DNA, 201 bp, Homo sapiens
attgacagacttctgcttttgatttcaagtatcagtgttgattgactgtctgctgtaagcataatagtgatggatataaagccactagtaatacccttcaraataataagatttaaatacattaaaagatacaatgctgaggccgatttcagacaagggagagatctctatgacctaaagattctagaactcaagctgggc

SEQ ID NO: 453363 - DNA, 201 bp, Homo sapiens
ccaatatcctgaggcagaattgctgggcatattcaaggaatagcaaggaggttagtttggtaggagcaggatgagaagggagagagtggcaggaaatgagrttagagaggtgggggtaggatggcagatcttgtcaggtttacagtctacagaagatattttgggcattcagtcccagggagatgcctttagaagtagaaa

SEQ ID NO: 453364 - DNA, 201 bp, Homo sapiens
tgaagattaaatgggataagtaaactgtatatctaaaggcctgcaatatagtgcacaattaacattagctagtattactaccaaaaatattctctagctakctggttttacagaatttctgtgtgttctaggtaaaattgcagtttaggaccatcatccatccctcctgacaccaaacaaaaagtgaatttgtaattagaa

SEQ ID NO: 453365 - DNA, 201 bp, Homo sapiens
gcaatatttaaatgtggaatctatacttgtagttgagtaaatccatttgtgaataagatacttcctttaaaggggccttaatagattcactaataaatatrtgtgaaatatgttttaatgtattgaaagcacttagtgcctgaaacatactaagtgctaaagttattttaaaataattaaaatatactttaaaaaaaaaat

SEQ ID NO: 453366 - DNA, 201 bp, Homo sapiens
aggattgcttgagcccaggaatttgaggctgcaatgagctatgatcacatcaccgcactctaacctgggtgacagagtgaaaccctgtctcaaaaaaaaaagtgaatggactttgcttcttagtagtttagtaaacaaaatctgctagtgagcagagaaaatgttcatttgggaactgaattctttttttaaaaaagcttt

SEQ ID NO: 453367 - DNA, 201 bp, Homo sapiens
tactatgaagctggccttttaacctacatgttcccagaaattgcctttgttagaggaaatcttggttaatatttgtagagctcagactcttaattgattgragtcattattttctaacaattcacaaataagtgataattaaagataacattgctttaggataaggacctgtatttactaaggttaaaagatttgaagtta

SEQ ID NO: 453368 - DNA, 201 bp, Homo sapiens
ggccctcaaagcctagaatatacactatctggctctttaaagaagtttgccaacacctgctccattgtaaggaggatattagtcgggttctaacagaattkcttgttgaactagggtttaaaacacatggtagagactccactgccataaccagagagaagactgccaagaattaggctaacttgttctcaggcaaaaagg

SEQ ID NO: 453369 - DNA, 201 bp, Homo sapiens
cctgtttggctaatgctataacccaaattaattgttctttcctctatgtttttatttatttatttatttatttatttatttatttatttatttatttttttgagacagagtctcgctctgttgcccaggctggagtgcagtggcaccatctcggctcactgcaagctccgcctcccgggttcacgccattctcctgcctca

SEQ ID NO: 453370 - DNA, 201 bp, Homo sapiens
tgtttctatgtgttctcatcgttcatctcccacttataagtgaaaatatgcagtgtttggttttctgctcctgcattagtttgctgagtataatggcttayacttccatccatgtcctgcaaaggaggtgatctcattcctttttatggctgcataatattccatggtggatacatggaatattacattttctgtatctag

SEQ ID NO: 453371 - DNA, 201 bp, Homo sapiens
cttaattccttgcacaactaacttgaagtcgtatgatacctagttgaccttaattgtgtcttgttcagtccaacaaatgcttactatgtctcatgcataargctatgtgctctttattctcagggataaaaagaagcataaatcactatttgtaccatctagggattatattcaaatgaagaacacagcacacctgtgccc

SEQ ID NO: 453372 - DNA, 201 bp, Homo sapiens
aatggtttctcctcttcttttctttgaacctaccaatgtgtggttattttccttgcaatattgtgttgtaagatatccttccaatttagaaacagaaaggrtagtaattgcctcatgttagaatatttagctatagaataataggaatcaaaattattttagacatcaaagagtatggaaaatcaaagataatctgaggca

SEQ ID NO: 453373 - DNA, 201 bp, Homo sapiens
caggtcatttctttgtttatgcaaatgagcataagcttttagaagaagccaggccacaccttgaatgctttgctgcttaggaatttcttccacaagatacycaaatcatctctctcaagttcaaagttccacagatccctagagcaggggcacaataccaccagtctctttgctaaagcatatcaagagtgacctttactc

SEQ ID NO: 453374 - DNA, 201 bp, Homo sapiens
ccctcgagaatcatgtagaaaagaggagctgtcttctcttttagcagaacatctgtcagagatggtttcccctgacttagacaattgtgtttttttccctwcagaatgattgagtctcagaattgttctttaatcctcagtatttccattaagaagagcttctatcaagtgcttcaaaagtacccaatgtgaaggagtaat

SEQ ID NO: 453375 - DNA, 201 bp, Homo sapiens
atgtgtgaaatatgttttaatgtattgaaagcacttagtgcctgaaacatactaagtgctaaagttattttaaaataattaaaatatactttaaaaaaaawatatatatatatgttttgcctggagagaatacctgttgtcaggacacccacttctcattatgcctctgctgccaataactatgtgggtttggaccatttt

SEQ ID NO: 453376 - DNA, 201 bp, Homo sapiens
aaaaccaagcagcaaactacatgctacaaaacaacaatttttggaattaatgaatgaggctaattttctggagtcctctctctcttttaaaatgtaagaaktgttagtatggccaggcatggtggctcatgcctgtaatcccggccctttgggaggccgaagtgggcagatcacctgagatcaagagtttgagaccagcct

SEQ ID NO: 453377 - DNA, 201 bp, Homo sapiens
agcactttgggaggctgaggcgggtggatcacgaggtcaggagatccagaccatcctggctaacacggtgaaaccccgtctctactaaaaatacaaaaaaattagccgggcgtggtggcgggcacctgtagtcccagctacttgggaggctgaggcaggagaatggcctgaacctgggaggcggagcttgcagtgagccaa

SEQ ID NO: 453378 - DNA, 201 bp, Homo sapiens
catgccttataaacatcttcagtctttatcaactctttggagattcagccattcttttttgtactttagggaattaaatcattttataatgtataaatctragcatggccgatggcagaagaaattttgtcatacgtttttaaagaaataaaaatgtattatgttttaaaattcctttaactgtttttcttacaaaactcc

SEQ ID NO: 453379 - DNA, 201 bp, Homo sapiens
agttattctgggtaatcaaggaagtgaaacattgcctgaaataacagtaataatttgtttttaagcttcaaaatgtagccagaggaacttagttttaccayggagaattcttaacaaacaaacctttcacctgccgttatttctcaataagagtgtaaattttttgtacttttctggaggtagacagataaagggattatg

SEQ ID NO: 453380 - DNA, 201 bp, Homo sapiens
ctcaattttttggtggggacggggaggtgggatggggtctcattatgttgcccaggccagccttgaactcctgagttcaagttatcctcccacttcaaccmcctgagtagctaggactacaggcgcacatcactgcacccagctaccttcttaatattttgaaggtcaaaagacattcatatgacagctgattcccaaaat

SEQ ID NO: 453381 - DNA, 201 bp, Homo sapiens
atcgtgtaactgaagctaacgtaagtgttcagcttactatcaagtacataaaaactttaaaaatcctttaaaaataacaaaaaattccaaatactgtaatyaagcatttgattcatttaaaatcaagtatggagcaacatacaatatagcatttaatatcacatttgaactggtaaatcactaggacaacttagttaaata

SEQ ID NO: 453382 - DNA, 201 bp, Homo sapiens
cactccatgtaaattgtgtattcagtgaaaggctgatcaaagaccccaaaaaatgcagccttttgtctcttatctacctatgacctggaagcccccacttygagttgtcccgcctttccagactgaaccagtgtacaccttacacgtattgattgatgtctcatgtctccccaaaatgtataaaaccaagctgtgcaccga

SEQ ID NO: 453383 - DNA, 201 bp, Homo sapiens
gaaggtcctctcccagattctccagacctccctgggcctatcacagtgcctatatatccaccatctgagatccattcctcccttggaaagtgaagctaaakggaacattctttggaagcaggttcagctcccctatctctcatctctggactctaggacttcaccttcctggcccagccagcactgtccctctcccttatt

SEQ ID NO: 453384 - DNA, 201 bp, Homo sapiens
acacaatgcacaggtatacccatgtcacacaggacgtaaagtcatcacaagggcacacccatttggcatatgtacagtctcaggtgcatatcagtctcagracctggatgttgatattgtgaaaggagaataaatctcagaacccccaaatcattcaaccaaggggaaagtcaagctgggaattgtgtcaggcaaacctgc

SEQ ID NO: 453385 - DNA, 201 bp, Homo sapiens
atgttcccaggaattaggtgttgatttgctaagaggcagagtccccagagttgttggtatctcccagagctagggagtgagtattagctttagggcttaasatgggaaggccatagccctgactggaacttgggatatctgtgtccagagctttagtgttgctctctactccacccacatgcactgttctcttcttcctct

SEQ ID NO: 453386 - DNA, 201 bp, Homo sapiens
acccactttggccaatgaaatgtgaacagaaatggcatatgtcacttgtggacaaaaacatttaagcaagaatttcccttgctgtcttccttgactggagmgaccatggaagcctgtgttgagatgaagaggctgccaacagatcaaaacacttgaaaacttgagcagccacatggactacaactgtgctggagacttgcc

SEQ ID NO: 453387 - DNA, 201 bp, Homo sapiens
ggaagcctgtgttgagatgaagaggctgccaacagatcaaaacacttgaaaacttgagcagccacatggactacaactgtgctggagacttgcctggaccsacagcaggcttggtatgcatggggaatagaattttgttgtattacactcctcagatttggatgtcatttgttattacagcattacctagcctattctgac

SEQ ID NO: 453388 - DNA, 201 bp, Homo sapiens
aacatttatgatacttaagtgccaggcaccatgcaaaatgctttaaattcattgtctcatgacaaatctatgaagtggattgctgtgggctgtttttgttyatgcagaccacttttctacttttctatacccctttttgtggttcctgtaggaaactcctttcccacttaacatggtcttggtggggctgtcagctacagt

SEQ ID NO: 453389 - DNA, 201 bp, Homo sapiens
ggagactggacattctccaccccgactcataggacaaagtgccctgcagccatccctgaagaggaggtagcagaaggcaccaaaaatgttcccaggaattrggtgttgatttgctaagaggcagagtccccagagttgttggtatctcccagagctagggagtgagtattagctttagggcttaacatgggaaggccatag

SEQ ID NO: 453390 - DNA, 201 bp, Homo sapiens; identical to SEQ ID NO: 276522

SEQ ID NO: 453391 - DNA, 201 bp, Homo sapiens
tcccctggagcttgaaataacgccactgccagggtttcctcaatagttatctcctctattccctgcagtttgggtcactctgaacctcagggtgcctgggyctgggctgagcttgcttgggagaagctcaggaaacaagggcccctggatgtaaagctgagggtgacctctgctatgtggttggagatggggagccctggg

SEQ ID NO: 453392 - DNA, 201 bp, Homo sapiens
ataaatgtcagctaagtcccagaaccagttgcagaactactgactgtaacttttatccatattcccttccatgtgaaatgtgtctatttttctgttctttmactgactcctcttttcttttatcctcctttattgcattcttgaatataggttgttgtggtggtattactactactcagcaagattctggttttacttctc

SEQ ID NO: 453393 - DNA, 201 bp, Homo sapiens
aagctgtgcaccgaccacctttagcacgtgttgtcagaacctcctgaggctgtatcatgtcatgagtgtgtgctcaaccttggcaaaataaactttctaarttgattgagacccatctcagatacttttggattcacaacatgaactcagcttcctttacagacccctgagacctgcacattgatccctgccatgcccctc

SEQ ID NO: 453394 - DNA, 201 bp, Homo sapiens
ctttccagactgaaccagtgtacaccttacacgtattgattgatgtctcatgtctccccaaaatgtataaaaccaagctgtgcaccgaccacctttagcaygtgttgtcagaacctcctgaggctgtatcatgtcatgagtgtgtgctcaaccttggcaaaataaactttctaagttgattgagacccatctcagatactt

SEQ ID NO: 453395 - DNA, 201 bp, Homo sapiens
ggcaatgtaaactgatagcttatcttcacaggtgcaggacaatagacagaactcaaagtcatccctctgctcacctgagacaaatgtgtatctgattgctkcttctgccctatttttatgcaaaaatgcagatccactgagccagactaaggcatcagtgtgactattcctttactccccactccatgtaaattgtgtatt

SEQ ID NO: 453396 - DNA, 201 bp, Homo sapiens
tggaacactggtattcggagcaaaactctgctttattacctgtatgtgtccatctgcccatctatccatccgtccatcccatccatttatttctctgaccmtctttcaatgccaagacactgaagacaattagtcttgtttcacttgccaacttcaattctgaagctgagtctggatcagggattggtaaactttctgtaa

SEQ ID NO: 453397 - DNA, 201 bp, Homo sapiens
aatggcgtgaacccgggaggcggagcttgcagtgagccgagatcccgccactgcactccagcctgggcgacagagcgagactccgtctcaaaaaaaaaaaataaataaataaaaaaaaataataataaaataaaataagaaaaccaatacaagaagagaataataaatgtcagctaagtcccagaaccagttgcagaacta

SEQ ID NO: 453398 - DNA, 201 bp, Homo sapiens
tagttgagtggcctcggctaagtcactgaatggccggagggtcattgcccttcctctctggtctgagacctatcttcttgtgattttttttttttttttttgctacattcattcaatcaacaaatatttgctgaatgaccacctgtgtgtcaggcactgtgctgggcatggggatgtagtagtaaagaagacaggtggccg

SEQ ID NO: 453399 - DNA, 201 bp, Homo sapiens
ttgtgggaccttgtgatcgtgtgagttaatacttaataaactccccccctttatatattttctttctttccttccttccttccttttttttttttttttttggaatgacgttttgctcttgttgccctggctggagcgcaatggcgcagtatcgctcactctgcaacctctgcctcctgggttcaagcgattctcctgcct

SEQ ID NO: 453400 - DNA, 201 bp, Homo sapiens
attattgggaacatgaacagggagtgcccttgtgtttgtactgtgattatatgcttaaacgattgtagtgtgtccttggtgtatgtgagtgattggctgtrtgattgattatgtgtctgtgtatgtatgtgtgtgggtagagacacgtaggtgggtaagggtgtcggcaattatgtgtttgtgtatggtgtttttgttgtt

SEQ ID NO: 453401 - DNA, 201 bp, Homo sapiens
ccactaattttttgtatttttagtagagatggggtttcaccgtgttgcccaggctggtgtcaaactcccgggctcaagtgatcctcccgccttggcctccygcagtgctaggagtataggtgtgagccactgcgctgggcaggtttgttttctggctgctttttcaatccatctctttgtggttctcaatccgcaagggcc

SEQ ID NO: 453402 - DNA, 201 bp, Homo sapiens
cgtgttgcccaggctggtgtcaaactcccgggctcaagtgatcctcccgccttggcctcctgcagtgctaggagtataggtgtgagccactgcgctgggcrggtttgttttctggctgctttttcaatccatctctttgtggttctcaatccgcaagggcctgcagggggcgtccagtgcctagggaaaaggggctcctgg

SEQ ID NO: 453403 - DNA, 201 bp, Homo sapiens
tgcgtgccactacaccccactaattttttgtatttttagtagagatggggtttcaccgtgttgcccaggctggtgtcaaactcccgggctcaagtgatcckcccgccttggcctcctgcagtgctaggagtataggtgtgagccactgcgctgggcaggtttgttttctggctgctttttcaatccatctctttgtggttc

SEQ ID NO: 453404 - DNA, 201 bp, Homo sapiens
ttggcctcctgcagtgctaggagtataggtgtgagccactgcgctgggcaggtttgttttctggctgctttttcaatccatctctttgtggttctcaatcygcaagggcctgcagggggcgtccagtgcctagggaaaaggggctcctggcctggactctcaacctcatggggcctgcagagggcgtctagcatacgggga

SEQ ID NO: 453405 - DNA, 201 bp, Homo sapiens
gttccagaaaggggctggaaatgagcaagaaaccaaattactcaacttctgaaagtccctgatcctgggaaggggtctgcttcacttcctatccttttgcraatcctctattcatgtctggagggtctcagtccagctggaggggcagagcttggctctgcagtcccagagtgtgggtggaacattgcacagaacttctgg

SEQ ID NO: 453406 - DNA, 201 bp, Homo sapiens
gtggtgtgatctcggctcacttcaagctctgcctcccaggttcacgccattctcctgcctcagcctccagagtagttgggactacaggcacccgctgccamacctggctaattttttgtatttttagtagagacggggtttcaccatgttagccaggatggtcttgatctcctgaccttgtgatctgcctgcctcggcctc

SEQ ID NO: 453407 - DNA, 201 bp, Homo sapiens
ggggtcagcgcagcctaaactcccgccctccctggctccaccccggaaacggaccgttactattacgtcacagggatgccgttgcgcactaggtttgcctrtcccccggaaggggtggggtgttcatgtctcccagaggaggcggagtcgaaacgtcatcttacggggtgaggccaggggcggggtcggttgattaagatg

SEQ ID NO: 453408 - DNA, 201 bp, Homo sapiens
atcagtctcaaggctgggagtcagggtttggttcaagattagggtcagaggtaggaatgtgtctcctccctaggttcctcactgccagctcttctctgtartactaagatacctgggagtaggaggagtgggaaagatgggacatagccacccactagattccctgagggacaatcacaagagcagggtaaggatgagaag

SEQ ID NO: 453409 - DNA, 201 bp, Homo sapiens
tttatcctcctttattgcattcttgaatataggttgttgtggtggtattactactactcagcaagattctggttttacttctcatcttgggagttaccatyaagacgttaggtatggctgtgtgacccactttggccaatgaaatgtgaacagaaatggcatatgtcacttgtggacaaaaacatttaagcaagaatttcc

SEQ ID NO: 453410 - DNA, 201 bp, Homo sapiens
ggctggagtgcagtggcacgatcttggctcactgtaagctccgcctcccgggttcacgccattctcctgccttaacctcccgagtagatgggactacaggygcccgccaccacgcctggctaattttttgtatttttagtagagacggggtttcaccgtgttagaaagaggatgttctcgatctcctgacctcgtgatcca

SEQ ID NO: 453411 - DNA, 201 bp, Homo sapiens; identical to SEQ ID NO: 276672

SEQ ID NO: 453412 - DNA, 201 bp, Homo sapiens
ttcctctggttgaaatgtgaggaatggatacccctcttctctccctcatcccaccctctttctccctctcattcttgtcttcccttgtctgagccacatasagagagcagacagagagatccatgggtgctaggtggttttattggaagcactgcagtctgggagttcagaagctatgctttcaccacgttcaccctttca

SEQ ID NO: 453413 - DNA, 201 bp, Homo sapiens
tgcagatccactgagccagactaaggcatcagtgtgactattcctttactccccactccatgtaaattgtgtattcagtgaaaggctgatcaaagaccccmaaaaatgcagccttttgtctcttatctacctatgacctggaagcccccacttcgagttgtcccgcctttccagactgaaccagtgtacaccttacacgta

SEQ ID NO: 453414 - DNA, 201 bp, Homo sapiens
cctcactttactccccgccccctaagtctccagccgcctttgctctcgcaggctctaggcggctagagaggctccagagcgccctgcagatgggttgcttytcgcgtgccccttgtgatgggaggattaggtcgcaggctccaccctacgtcatcctcccaagcttctcaagcgtctggcgcttggggtcactgccctcaa

SEQ ID NO: 453415 - DNA, 201 bp, Homo sapiens
gctgcggaacctctgcagactccaagggttttatagcgtccggtagcgacacggagccggctcccccttttccagccttcctccccatctcccattctccrtcccccacgacctataccagaggtccttaggcctccacgtctctccttttgccgagtagcccaaggtttccacccatctgccaggtctggggcgtcaagt

SEQ ID NO: 453416 - DNA, 201 bp, Homo sapiens
aatttttttgtatttttagtagagacggggtttcaccgtgttagccaggatggtcttgatctcctgacctcatgatccgccctccttggcctcccatagtkttgggattacaggctttggagcttcttgaaggaggtagcacctaaagaaataattttccaccaggtgcagtggctcacacctgtaatcccagcatttttg

SEQ ID NO: 453417 - DNA, 201 bp, Homo sapiens
atgtgccttgtttagagccttacacactttcctggctgggtgtggtcgcttatgcctgtaatcccagcactttgggaagctgaagcaggaggatcgcttgcgtccaggagtttgagaccagcctgggcaacatggtgataccccaggcatgatggcatgtgcctgtgatcccagttacttgggaggtgggaggatcgcttg

SEQ ID NO: 453418 - DNA, 201 bp, Homo sapiens
cacttgagcctaggaggttgaggctgcagtgaaccatgttcatgccaccgcattccagcctgagtgacagtgcaagaccctgtctcaaaaagaaaaatttwaaaaaaagaaaagaaagaaagaaatagtaggaggagctgggtgcggtggctcatacctgtaatcccagcactttgggaggccaaggcgggtggatcatga

SEQ ID NO: 453419 - DNA, 201 bp, Homo sapiens
ttgggaggcccaggcgggcagatcacctgaggtcaggagtttgagaccagcctggccaacatggggaaaccctgtctctactaaaaatacaaaaattagcygggttggtggtatgcacctctaatcccagctactcaggaggctgaggcaggagaatcgcttgaacccaggagttggaggttgcagtgagccgagatcaca

SEQ ID NO: 453420 - DNA, 201 bp, Homo sapiens
ccgatggggaatgagggggagaagaagagcagctggccatctcaagctgcaccctccttgagaggaggtccggtgagcactgcagggaaccctagaggtgrgaatgtaatgaagtgaaagcctcccaggcagaggcaccccgtgccaggtctgagccacgggccctgagactctagcctcaaccctgagtcctgaagcccc

SEQ ID NO: 453421 - DNA, 201 bp, Homo sapiens
cagtttggaagatgagcccacccctctttgatgctcttggcttctcatgcctccccctttttgtccctagaacatgcctcaaaactactcttttgccactygttaaccacttccgtttgtggggacctcctggtcatgagcagcatcatcccgaagccttcaaagtgttctggattcatcacaggaccctccagcctcagc

SEQ ID NO: 453422 - DNA, 201 bp, Homo sapiens
tcatggaggaggctttgtgcactgcttgctgccacttgaaccctgtgcccatcaaaaaaaagcagtcacaagaccaagcgactcagatatccaaacgcggkaaccccctgcctcaggaccaccgtgtctagagaaccgctgcccccactatgcctggttacagtccctgacccctcccacccctagctgaactctccagga

SEQ ID NO: 453423 - DNA, 201 bp, Homo sapiens
atagctctcagcactaggccctgactctaaacccccaccaaacccccctcccccaggtccagagctttctagctaaatctcaaggcccagtccttcaggarcaagctccttggacccacaggccccagcctgggaactcccacagccagcactcccatgtgggagctcccaggctgaacccctccggcttttcctttccca

SEQ ID NO: 453424 - DNA, 201 bp, Homo sapiens
caaaaacaaacaaacaaaaaccctttcattatcatttggaagaggacttattcttaaaaatgcaggccttagtacttacatagttggatgatgcttttagraaaatgacttgggacactccccctatattttacacatttcagtggcagaacaggataacaattcagacttcctgtgtgtctgaccacggacaacacacag

SEQ ID NO: 453425 - DNA, 201 bp, Homo sapiens
tcaaaaacaaacaaacaaaaaccctttcattatcatttggaagaggacttattcttaaaaatgcaggccttagtacttacatagttggatgatgcttttasgaaaatgacttgggacactccccctatattttacacatttcagtggcagaacaggataacaattcagacttcctgtgtgtctgaccacggacaacacaca

SEQ ID NO: 453426 - DNA, 201 bp, Homo sapiens
cgtgagccaccacacatggcctaaaaattgttcttcttatttgaaaatgagtttatgagggacattttgtcaatctggcttcaaaaaagatgaatgaaatsaatggtaaaaatttgtttaacgtgctcgtttcagcagcacatacactaaaattagactgatacagagaagattagcatggcccctgcgcaaagatgacac

SEQ ID NO: 453427 - DNA, 201 bp, Homo sapiens
gcaccactgcactccagcctgggtgacacagcaagagcctgtctcaaaaacaaacaaacaaaaaccctttcattatcatttggaagaggacttattcttamaaatgcaggccttagtacttacatagttggatgatgcttttaggaaaatgacttgggacactccccctatattttacacatttcagtggcagaacaggat

SEQ ID NO: 453428 - DNA, 201 bp, Homo sapiens
ggtaaaaatttgtttaacgtgctcgtttcagcagcacatacactaaaattagactgatacagagaagattagcatggcccctgcgcaaagatgacacgcamatttcattttaaaaaagcaaataaatatttgtttaaaaatcatttttaatcatgtaagtatttctccatttttcagactgtttctcttttcatcatttaa

SEQ ID NO: 453429 - DNA, 201 bp, Homo sapiens
cagattataatctgtctatcttgttagtaatatctgactgaattttttggaatagctatgtgtagaacccattttattacacagatttaggaatctcagargatctgattccttagtctcttaaatcttcagtggcattaaatgccaacacattgtccttggtcaagactacaacgtagaaaggaacaagctaattaacta

SEQ ID NO: 453430 - DNA, 201 bp, Homo sapiens
gaacaaattgtgtaggatgtagtacctcatcagtggggaattcttttgcctctactaacctggagcactgggaaaagcacgggagtagggaacatagtggrtaagaaaaagagggtttattttcctttatactcagtttacagtagtgattccagcaggatgcactattttgttcagaaaaagctgatgctaagaaacttg

SEQ ID NO: 453431 - DNA, 201 bp, Homo sapiens
gagcctgtctcaaaaacaaacaaacaaaaaccctttcattatcatttggaagaggacttattcttaaaaatgcaggccttagtacttacatagttggatgrtgcttttaggaaaatgacttgggacactccccctatattttacacatttcagtggcagaacaggataacaattcagacttcctgtgtgtctgaccacgga

SEQ ID NO: 453432 - DNA, 201 bp, Homo sapiens
tatactcagtttacagtagtgattccagcaggatgcactattttgttcagaaaaagctgatgctaagaaacttggagctgtggctgacgaccctgggacakagctgaagttctgttgcattctcggggcagtgttcagctcctgtaaatgtagaaagaaccgcctgaatcagggtaactctgtatagagctcagttctgta

SEQ ID NO: 453433 - DNA, 201 bp, Homo sapiens
gtttaaatattatttcttagaagaaggggacagagtgcagtttgtaaacactggtttaaaaactcctttcttttagaaaggagagaaagtgaaatgtaaawaacacatatttgtgctgaaccatgaatgataccgtcactgaaatatctaaaaaccatattgcttaaaggcacttcttgcaatgtgtaattcagctaagat

SEQ ID NO: 453434 - DNA, 201 bp, Homo sapiens
tttatgtttgtttgtggttgaaaagccagacacattaatttccaaggctcattggctgctaagaaaaattgtcactgtggccaggcacagtggctcatgcytataaccccagcactttgggaggccaaggcgggcagatcacctgagcccaggagtttgagatcagcctgggcaacatggcaaaaccccgtctctacgaaa

SEQ ID NO: 453435 - DNA, 201 bp, Homo sapiens
ttatttcttagaagaaggggacagagtgcagtttgtaaacactggtttaaaaactcctttcttttagaaaggagagaaagtgaaatgtaaaaaacacatayttgtgctgaaccatgaatgataccgtcactgaaatatctaaaaaccatattgcttaaaggcacttcttgcaatgtgtaattcagctaagatgataatcaa

SEQ ID NO: 453436 - DNA, 201 bp, Homo sapiens
ttgaaaagccagacacattaatttccaaggctcattggctgctaagaaaaattgtcactgtggccaggcacagtggctcatgcctataaccccagcacttwgggaggccaaggcgggcagatcacctgagcccaggagtttgagatcagcctgggcaacatggcaaaaccccgtctctacgaaaaaataccaaaattagct

SEQ ID NO: 453437 - DNA, 201 bp, Homo sapiens; identical to SEQ ID NO: 370307

SEQ ID NO: 453438 - DNA, 201 bp, Homo sapiens
tccctccttccctccctccctccccttctttctttctctcttctttcttaagcacagtgtgagaaaatgtctctttagctgatgtgagtaaagagatcaartatctttgaaaaactatgaaagctctaggaaaggctaaggcttcacattcagaatgtcaccttgacagggagctttaaagggagatagaagaagcataga

SEQ ID NO: 453439 - DNA, 201 bp, Homo sapiens
agatgaatgaaatcaatggtaaaaatttgtttaacgtgctcgtttcagcagcacatacactaaaattagactgatacagagaagattagcatggcccctgygcaaagatgacacgcaaatttcattttaaaaaagcaaataaatatttgtttaaaaatcatttttaatcatgtaagtatttctccatttttcagactgttt

SEQ ID NO: 453440 - DNA, 201 bp, Homo sapiens
ttttcctttatactcagtttacagtagtgattccagcaggatgcactattttgttcagaaaaagctgatgctaagaaacttggagctgtggctgacgaccytgggacagagctgaagttctgttgcattctcggggcagtgttcagctcctgtaaatgtagaaagaaccgcctgaatcagggtaactctgtatagagctca

SEQ ID NO: 453441 - DNA, 201 bp, Homo sapiens
tgctaagaaacttggagctgtggctgacgaccctgggacagagctgaagttctgttgcattctcggggcagtgttcagctcctgtaaatgtagaaagaacmgcctgaatcagggtaactctgtatagagctcagttctgtaggtatttttcttctcttttttcttttcttttcttctcttttcttttcttttcctttcttt

SEQ ID NO: 453442 - DNA, 201 bp, Homo sapiens
atgataattctgaagaaaaaagtgaatggttcaatcaccgatacaaaaattaacaaacatgatagtggcaagcaacatcaggtgggttttgtttattagcratgttttcgccattttttttttatgtttgtttgtggttgaaaagccagacacattaatttccaaggctcattggctgctaagaaaaattgtcactgtggc

SEQ ID NO: 453443 - DNA, 201 bp, Homo sapiens
ggaggtggaggttgcagtgagctgagactgcaccactgcactccagcctgggtgacacagcaagagcctgtctcaaaaacaaacaaacaaaaaccctttcmttatcatttggaagaggacttattcttaaaaatgcaggccttagtacttacatagttggatgatgcttttaggaaaatgacttgggacactccccctata

SEQ ID NO: 453444 - DNA, 201 bp, Homo sapiens
tggagggaggaaaggaggataaagaaaatctgctctcataaaaccatttcaggacctcactttataggtgagactctcttgggaaggcctttgtgcccctrctccatggcccagggcagatagattcacttttacctgaatcttatactctggagcaaatagtgtatcaggctgactatacatttgcaggccttacacgcc

SEQ ID NO: 453445 - DNA, 201 bp, Homo sapiens
gggaacaagggaagagaaaaggaggaaagaagttcctggagggaggaaaggaggataaagaaaatctgctctcataaaaccatttcaggacctcactttayaggtgagactctcttgggaaggcctttgtgcccctgctccatggcccagggcagatagattcacttttacctgaatcttatactctggagcaaatagtgt

SEQ ID NO: 453446 - DNA, 201 bp, Homo sapiens
tgcagaagggggcagcttatgaagatgggagaaagtgggactgaagttgtaggggagcaggagggtagtgattttccgcttttctttctttctttcttttwctttctttctctttctttctctctctctctctttctttttctttctctttctttctctttttctttcctctttttctttctttctttttctttctctttc

SEQ ID NO: 453447 - DNA, 201 bp, Homo sapiens
ctgggaagcactcatatgggacagagggctggcaggaacatggcatgtgaagaagaaaacttctttttgcagtcaagggccacccagaatattgctcttcwgagagggacaagggcctcattcttccatttggtctctgtcttccatcatgcactcaggtcaagccatgcaagtctgcctaccatttgagttagttggcac

SEQ ID NO: 453448 - DNA, 201 bp, Homo sapiens; identical to SEQ ID NO: 271793

SEQ ID NO: 453449 - DNA, 201 bp, Homo sapiens
agtgggactgaagttgtaggggagcaggagggtagtgattttccgcttttctttctttctttcttttactttctttctctttctttctctctctctctctytctttttctttctctttctttctctttttctttcctctttttctttctttctttttctttctctttcttccttctttctttcattcttctttgttctttc

SEQ ID NO: 453450 - DNA, 201 bp, Homo sapiens; identical to SEQ ID NO: 271724

SEQ ID NO: 453451 - DNA, 201 bp, Homo sapiens
aacccgggaggcggagattgcagtgagctgagatggtgccattgcactccagcctgggtgacagagcaagattctgtctcaaaaaaaaaaaaaaaaaaaaaagaaagaaagaaagaaaagaaaagaaaaaagaaacgcagccgggcacagtggcttacgcctttaatcccagcactttgagaggctgaggcgggcggatca

SEQ ID NO: 453452 - DNA, 201 bp, Homo sapiens
acccgggaggcggagattgcagtgagctgagatggtgccattgcactccagcctgggtgacagagcaagattctgtctcaaaaaaaaaaaaaaaaaaaaaagaaagaaagaaagaaaagaaaagaaaaaagaaacgcagccgggcacagtggcttacgcctttaatcccagcactttgagaggctgaggcgggcggatcac

SEQ ID NO: 453453 - DNA, 201 bp, Homo sapiens
ctgaggcaggagaatcacttgaaccagggaggtggaggctgcagtgagctgagacggcaccactgcactgcagcctgggcgacagtgagactcttgtctcraaaaaaaaaaaaaaaaaaagaaagaaagaaagaaaaagaaaaagagaagagaaaacaaagaaagaaacgaaacaaaagaaatgaagcctgacttcaagaa

SEQ ID NO: 453454 - DNA, 201 bp, Homo sapiens
ttcaatgtcaagagagggagtttgttcttggtcctataggtcataggaaaccccgatcgattttaaaatcagaggagccaaatttattttattttattttwtttttatttatttttttgagatggagtttcgctcttattgcccaggctagagtgcaatggcatggtcccagctcactgcaacctctgcctcccaggttca

SEQ ID NO: 453455 - DNA, 201 bp, Homo sapiens
atgttaaaaaagaaagaaaggaaggaaggaagataaatctagctatagtattgaggatggaatggagggagaagaagagaccagtggctggaatgttttgygatttgaaggtgtttagccctcactcaactcaagagtggaattacttggagttcccagaatgcacctgactgtttcaagccttcctaaatgctcttccct

SEQ ID NO: 453456 - DNA, 201 bp, Homo sapiens
taaaatcagaggagccaaatttattttattttattttttttttatttatttttttgagatggagtttcgctcttattgcccaggctagagtgcaatggcayggtcccagctcactgcaacctctgcctcccaggttcaagcgattctcctgcctcagccttccaagtagctggggttacaggcatgcaccaccacgcctgg

SEQ ID NO: 453457 - DNA, 201 bp, Homo sapiens
ttgaacccgggaggcggagattgcagtgagctgagatggtgccattgcactccagcctgggtgacagagcaagattctgtctcaaaaaaaaaaaaaaaaaaaaaagaaagaaagaaagaaaagaaaagaaaaaagaaacgcagccgggcacagtggcttacgcctttaatcccagcactttgagaggctgaggcgggcgga

SEQ ID NO: 453458 - DNA, 201 bp, Homo sapiens
tgaacccgggaggcggagattgcagtgagctgagatggtgccattgcactccagcctgggtgacagagcaagattctgtctcaaaaaaaaaaaaaaaaaaaaaagaaagaaagaaagaaaagaaaagaaaaaagaaacgcagccgggcacagtggcttacgcctttaatcccagcactttgagaggctgaggcgggcggat

SEQ ID NO: 453459 - DNA, 201 bp, Homo sapiens
aggcatgcaccaccacgcctggctaattttatatttttagtagagatggggtctctccatgttggccaggctgttcttgaactcctgacctcaggtgatcygcccgcctcagcctcccaaagtgctgggatacaggggtgagccactgcgcccggctgaaaccccatgttaaaaaagaaagaaaggaaggaaggaagataa

SEQ ID NO: 453460 - DNA, 201 bp, Homo sapiens
gaacccgggaggcggagattgcagtgagctgagatggtgccattgcactccagcctgggtgacagagcaagattctgtctcaaaaaaaaaaaaaaaaaaaaaagaaagaaagaaagaaaagaaaagaaaaaagaaacgcagccgggcacagtggcttacgcctttaatcccagcactttgagaggctgaggcgggcggatc

SEQ ID NO: 453461 - DNA, 201 bp, Homo sapiens
tgacctcaggtgatctgcccgcctcagcctcccaaagtgctgggatacaggggtgagccactgcgcccggctgaaaccccatgttaaaaaagaaagaaagraaggaaggaagataaatctagctatagtattgaggatggaatggagggagaagaagagaccagtggctggaatgttttgtgatttgaaggtgtttagccc

SEQ ID NO: 453462 - DNA, 201 bp, Homo sapiens
cgctctgtcccccaggctggagtgcagtggcacaatctcggctcaatgcaagctccacctcctgggttcacgccattctcctgcctcagcctcctgagtarctgggactacaggcgcccaccaccacgcccagctaattttttgtattttcagtagagatggggtttcatcgtgttagccaggatggtctcaatctcctga

SEQ ID NO: 453463 - DNA, 201 bp, Homo sapiens
aagagaagagaaaacaaagaaagaaacgaaacaaaagaaatgaagcctgacttcaagaagttccaacatagcatggaggaggtgtgcagggagcacaggcsttggggaggggggctatgttgggtactcagggaagaggtccttgatctgattaattaattattcaaccaaaatgtcaggctggattctaggcactggaag

SEQ ID NO: 453464 - DNA, 201 bp, Homo sapiens
cacaagatctgatggttttatcaggggcttctgcttttgcatccttctcattttcttttgctgctgccatgtaagaagtgccttttgcctcccaccatgaytctgaggctttcccagccatgtggaactgtaagtccaattaaacctctttttcttccccagtctctggtatgtctttatcagcagtgtgaaaatggacta

SEQ ID NO: 453465 - DNA, 201 bp, Homo sapiens
tgtggaaaaataaataatctcctttggaaaccaaaaaagaaatcttttcatgttcacagaactaaagttactaaattctgtgatggttctttggcttgagkgttctatatgtcagtggtccttactctgatttgttaaggaattaattatgattagaagagcacaagagtgctcactctttgaggatcttccaaggttcaa

SEQ ID NO: 453466 - DNA, 201 bp, Homo sapiens
gtatagcatgctgtcaataaaggttaaatagaaccaatatgaaataaacaacaatttctataacaatgggtggttgtggtattgatttatttttccccagyacatcttaaaaatcacacatgggcatttgcttatagaacaatacagtctaagaaaaccagtaagaggagaatctgaacacacactgaaagcacggaatac

SEQ ID NO: 453467 - DNA, 201 bp, Homo sapiens
gaatagaaaccacccgcactccccagctccacaggttctgctcctcagggagcctgtgagcaaacatccagaaagaatgtagtgagtgtcttgaggctcartgccaaacccaccaagccacaacttagggctactaggttggggcagtaggaatgaaaatgtaggaaggaaaagcacatacaaatcccattgactgattcg

SEQ ID NO: 453468 - DNA, 201 bp, Homo sapiens
gtataagtagctcaaaaaataactacttatagaaacttgtatgccagtatgagcatttcatgtccttttctgatatgtgaacaagattaaaggaaaaacaygtttcctagggtgcatatggtgttcaggaaaaacactgccaacaaaaggttgtcttaaaaacatgtatatatgttgcttagaaatccaccatgaaacaga

SEQ ID NO: 453469 - DNA, 201 bp, Homo sapiens
gttcatttataacagctgaagacaaagatgttagtatcttaatcactttggaatcaatatcattgtgtgtgtattttctctttttcttctaacagagaackgggtttaactttttaaattgtaaattaacaattcataagtgtataaatttatggggtacaaagtgatgttataatttatgaatacagtgtggaataatta

SEQ ID NO: 453470 - DNA, 201 bp, Homo sapiens
aagttgaggtcaggtaatgtgattcctccagttttgctctttttgctcaggatggctttggctattctgggtcttttgtgactccatctaaattttaggatttttttttttctatttcagtggaaggtcatcggtattttgctcaggactacattgaatctatagattgctttagctagtatggacattttaacagtattg

SEQ ID NO: 453471 - DNA, 201 bp, Homo sapiens
tttagttcctgtcttccttgcttccatggaaagtttgacattctttattctagaacaagacacttgaatacagaaactagggaaaatgctgaacatgaggmtcccctttgacaccattatttcacatcttctctccaccatatagccctccagaaaatacccttttgtaaatcacacttactccagtaccactcttagtcc

SEQ ID NO: 453472 - DNA, 201 bp, Homo sapiens
ctgtgtaagccataaaatcatatatgccaattttgttggttctgttaaacaggaaaataagggcaacattattatgttttgatttaaatttgcaggatttwtgataagaaaaattattgtttgttattgctaacctttttctaaaatagatattaaatacattttaaaatagagtcacaaagctttgaaccaaagtagaaa

SEQ ID NO: 453473 - DNA, 201 bp, Homo sapiens
ctagtaggatccaattctcagaaattcatgatgcaaatgcagttaaattgaagtagatatcatagagaaataaaaatggtcattttattttcagttagttmtttgggtttgagaggatattaagttacagtatgagacactgatctgtcaaaattatgaaacattgatctgtgagataaaaatgtaagccacggtacattt

SEQ ID NO: 453474 - DNA, 201 bp, Homo sapiens
tgagaggatattaagttacagtatgagacactgatctgtcaaaattatgaaacattgatctgtgagataaaaatgtaagccacggtacattttctgacttrcagtctgagactgcacgtttatttttctgttatgttttgctgttcctagaaattaataatgacagaaataaacacatttaataaagtaagatttccagca

SEQ ID NO: 453475 - DNA, 201 bp, Homo sapiens
acagtatgagacactgatctgtcaaaattatgaaacattgatctgtgagataaaaatgtaagccacggtacattttctgacttacagtctgagactgcacrtttatttttctgttatgttttgctgttcctagaaattaataatgacagaaataaacacatttaataaagtaagatttccagcagtggattttaacacaat

SEQ ID NO: 453476 - DNA, 201 bp, Homo sapiens
cttagccataaaaaagaatgagataatgtcctttgcagcaatagggatggagctggaggccattatcctaagagaactaatgcaagaatagaaaactaaaygccacgtgatctcacttatatgtgggagctaaacactgagtacacatgcacacaaagaaagaaacaacagacattggggcctatttaaagatggagggta

SEQ ID NO: 453477 - DNA, 201 bp, Homo sapiens
aaatgaaaagcagatcagccacctagctatggttcatgaatcacagtgattctcactttatctttctctcttttattttttaataataataataaaagtasatagaaagtatctctgagccaagtgggtgccagagtacattgatgctaaagctttaacttgacccagccgtccactggaagttgctatagctgagaaaaa

SEQ ID NO: 453478 - DNA, 201 bp, Homo sapiens
tgggaaaggcaggcgcggccttcgttgtcagtagttctttgatgtgaaaggggcagcacagtcatttaaacttgatccaacctctttgcatcttacaaagytaaacagctaaaagaagtaaaataagaaggcaatgcttgtggaatgtacagtgcatattggcggcgcacgcctcattacgattcgcctgcttgcttctcc

SEQ ID NO: 453479 - DNA, 201 bp, Homo sapiens
actttacaaaccatgaattgtttctggtttattaaaatatgcatctagtaattatagatataaaagtagtattggccatgttcaagtaccttacaggctaytctagattaatttgaaaagataattttgtgaaatgcacaagtgctaattatgcatcaaagtgagtagcatttgaacaattcaggtgtactaaaagcaaga

SEQ ID NO: 453480 - DNA, 201 bp, Homo sapiens
atcattacttcagtaataaaatctctagggaaaactaggttaaagctggggatgttgtcttctggaatttaagaatagaagttaatgtatgagttcacatrtataactcatattccaactatagacggtccctaacttaagatggtttcacttaacaatatttcgactttatgatggtgcgaaagtgatacgaactgagta

SEQ ID NO: 453481 - DNA, 201 bp, Homo sapiens
tgtctcattttaagcatatagttacatcctaaatatatttttcatttacaactgttagaaatgagttaattttaaggatactactaccagggtaaaaatayagattgaatttaagaaatttataagaatattgtcaataaagttgtacattttcattctatccatggctaaagaaagattatccacacactcatacgtagt

SEQ ID NO: 453482 - DNA, 201 bp, Homo sapiens
gggtaaaaatatagattgaatttaagaaatttataagaatattgtcaataaagttgtacattttcattctatccatggctaaagaaagattatccacacamtcatacgtagtcattaatacagaaagatgggaaagatggtttgggacaattttatttgttttattattattttttattatactttaagttttagggtaca

SEQ ID NO: 453483 - DNA, 201 bp, Homo sapiens
tactttaagttttagggtacatgtgcacaatgtgcaggtttgttacatatgtatacatgtgccatgttggtgcgccgcacccagtaactcgtcatttaacwttaggtatatctcctaatgctatccctcccccgtccccccaccccacaacaggccccggtgtgtgatgttccccttcctgtgtccatgtgttctcattgt

SEQ ID NO: 453484 - DNA, 201 bp, Homo sapiens
cctgactttgtgcttcacactgtcctggtctttgtggttgaaaagatgaaaacatctctgtaactgaagaattcatatatactacaggttttattctttaraatattctctcttccttacttaaaggccttgagatgtgtatcttaagtgaactaagtttacttttttccttgactcaaggaatctttactatttttgtaa

SEQ ID NO: 453485 - DNA, 201 bp, Homo sapiens
ttcttttgaaaatgcttctggagtccattgatacattctgtgagacctggtgggaagaaataggcctcaaggcacactgagtttttgagttgccctctacrtttttcaagctgatcattattgagtccctattatctgacagatactctgctaagttatttatttaaattatctcattaaacattatcacaatcatattag

SEQ ID NO: 453486 - DNA, 201 bp, Homo sapiens
tcttagcttccttgcattgggttagaacatgctcctttagctcggaggagtttgttattacccaccttctgaagcctacttctgtcaattcgtcaagctcrttcaccacccagttttgttcccttgctgccgaggggctgtgattctttcgaggagacaaggcgttctggtttttggaattttcagcgtttttgtgctggt

SEQ ID NO: 453487 - DNA, 201 bp, Homo sapiens
ttctcatgctgtgtttttcagctccatcaggtcatttatgttcttctctaaactggttattctagttagcaattcctctaaccttttttcaaggttcttarcttccttgcattgggttagaacatgctcctttagctcggaggagtttgttattacccaccttctgaagcctacttctgtcaattcgtcaagctcattcac

SEQ ID NO: 453488 - DNA, 201 bp, Homo sapiens
tgaagtatctagcactagtctagaaatagcacctaggggaggagattctgttaaattgtgaatatatgtcttgaaacctgtaagacattttgccatggctmgaaagtgacaagtttgtgcctagtttattattacattagttgattgtcatgttacagagtagacaacacaatactgaggtaaaaagaaatagacaagaag

SEQ ID NO: 453489 - DNA, 201 bp, Homo sapiens
catttctgtatctgataatgacataatgacattttcaccaaataagtatataaaaattagtcttaatgcttgtacttatcccactgtatgtaaaagttaaygtaacataatggattaagtgtttttcaattagaaaataatttttaaaacttatccttttttaaatgagcgtagcagtatcctaaacagtattatagaagt

SEQ ID NO: 453490 - DNA, 201 bp, Homo sapiens
gccttcctcctgtatcatttctgtatctgataatgacataatgacattttcaccaaataagtatataaaaattagtcttaatgcttgtacttatcccactstatgtaaaagttaacgtaacataatggattaagtgtttttcaattagaaaataatttttaaaacttatccttttttaaatgagcgtagcagtatcctaaa

SEQ ID NO: 453491 - DNA, 201 bp, Homo sapiens
tcaatatttaataattatgatagcagaactcatataatgtactcagatgccttcctcctgtatcatttctgtatctgataatgacataatgacattttcascaaataagtatataaaaattagtcttaatgcttgtacttatcccactgtatgtaaaagttaacgtaacataatggattaagtgtttttcaattagaaaat

SEQ ID NO: 453492 - DNA, 201 bp, Homo sapiens
aagggaagttattggaaataacatcaaaagagtaaattggatcagatggtagaataccttgaaagctaggcagtgaaatttgggatattctgtagatgatrggaggtgcttaagcttttgagcagtagaccagcatgctcagagttgcttttaagatttgtatttgtcagtgctaggtttttttttttttaattttatttt

SEQ ID NO: 453493 - DNA, 201 bp, Homo sapiens
ttaccctgtacttattaaaaacaacatataaaagacttcatactaattacaaaggcataaaaattacagaatggagagattgtgtgtattagtccgttttyacgctgctgataaagacatacctgaggctgggcaattttcaaaggaaagaggtttaattggacttatggttccacgtggctggggaagcctcagaatcat

SEQ ID NO: 453494 - DNA, 201 bp, Homo sapiens
gagaaagccactcatgtttttatgggaagaaacctgagaataacaactgcaaaagcaagagaatactcggtcttatcaggaatggcaaaacattgtgtttrgagtagaatgaatgatgagacaagtaatacaagtttaggtcacagagaaatcttatcataaaaggtctagtatgtcatgataaagacttaagatcttatt

SEQ ID NO: 453495 - DNA, 201 bp, Homo sapiens
atttaaatttttctctacataggaatcctccaatctttctcagcgttatagcatttgggcctaacctccctcaagaaaggagcaaactctaagtgattccrtatgtcctcctattgaaaatcattaattccgagctttagtatagtgatgagacatttagggaacatttgggtattgctgtcaagtaattttattgcctcc

SEQ ID NO: 453496 - DNA, 201 bp, Homo sapiens
caagatgaaaagtataatctgctctgtcatgagtcctgggacaggcattgtacagaaagctcaaagaattgtacattgttgttttaagaaccaacacagtrgttgtttcttgctggtaaaattatccacaaaaaactggtcaaggtcagaatagagatttcatcaggatgcatgtaattgcttacaaatctttgctacttt

SEQ ID NO: 453497 - DNA, 201 bp, Homo sapiens; identical to SEQ ID NO: 27566

SEQ ID NO: 453498 - DNA, 201 bp, Homo sapiens
aattagccgggcgtagtggcgggcgcctgtagtcccagctacttgggaggctgaggcaggagaatggcgtgaacccgggaggcggagcttgcagtgagccragatcccgccactgcactccagcctgggcgacagagcgagactccgtctcaaaaaaaaaaaaaaaaaaaaaagaaaaaagacctcagattataagaagct

SEQ ID NO: 453499 - DNA, 201 bp, Homo sapiens
tattcctaggatttttcagagttggaatttcatggttgcttttggctttaaaatgaagcttattgaaattatagtaaaaatacagtaacagggaaaaattwaacagttttggtaaatggaaacaatttgtctctgatataatttttttttctatttctgttactctctcccatttttagggcagtattttaaccacatact

SEQ ID NO: 453500 - DNA, 201 bp, Homo sapiens
agtgtaaagcatatagtttagtttggagacccaggatatttacagataccagtagagaaggaagatgtgggatagaattaatatctacttgcattttgttattgtttgtggaacaataaaaggttttctggcatagtcattctgatagcggcatgagactgcagaggattaaacatttatgcattgtgatttggctctgag

SEQ ID NO: 453501 - DNA, 201 bp, Homo sapiens
gctttggaaggccaaagtgggagaatagttaggaccaggagttcaagaccagcctggacaacatagcaaaaccctgtctttacaaaataaataaataaatwttaatatgtctatggagtaggatgcctgtatatgtgtttggtgttagcaatgaagggggttatactattgagatttgatattgatgatcaaggcttttta

SEQ ID NO: 453502 - DNA, 201 bp, Homo sapiens
tggagagcaaatttggtctgatactgatactttttttttcccataagagttgtcttacttttggaccacctgtcgatatccagaaactctgaagattcccrgaaccattccaagtattattgatagtgtgataggtccaaaattttgacattttaaaacttcagaacgaggagcattttggagaccttaaattcaggaggg

SEQ ID NO: 453503 - DNA, 201 bp, Homo sapiens
tgggattacaggcatgggtccccatacccatcccttaatgtctagtttcttaagggtttttatcatgaaaggaggttagattttattgaaagctttatccrtgtctactgagatgatcatgcggtttttgtttttaattcattcatatgctgaatcacatttatttatttgagtatgttgaaccaaccttacatctcagga

SEQ ID NO: 453504 - DNA, 201 bp, Homo sapiens
cttattgtaggtcagttatctgtcaagaatttaaaaatgaatatgagtgaatgatacttgcgaagtgaaggatagatatagtaagtgcagtagctactcaraagagtgtgagagagaaatagagaattaggaatcatgttcagttaagaaaatgtatataaacaaaatgggagatatattagagcttaacagtaaacattt

SEQ ID NO: 453505 - DNA, 201 bp, Homo sapiens
acacagacccttgctactcaaatgtgtggtggttcttgaatcagcaccgtctgcatcacctggaagcttgttagaaatgcagaatttaaggcttaatcccrgacctactgaatcagaatgcgctttttaacaatacttctctctactcctgggtgattgattcatgcattgaatttgaaaagcgcttcactcgttgccaga

SEQ ID NO: 453506 - DNA, 201 bp, Homo sapiens
ataaggaatataaatataacaagaaaaatctgtatataccaggagtttacaactagtttaaagtgtaaagcatacaaaaagtttataattaaaaatataarcaaatgccatttatttgatggagtaacagggatcagatctgaccttccactgtaaacagcaaaacatgaacaaaatatataaagctctaatttttaaggc

SEQ ID NO: 453507 - DNA, 201 bp, Homo sapiens
cagaggggaggaatctagagaggcaggcagtctggctacagtggttttgtggcgctgcagttggcttcacccagttcggacttcccagcagctttgtttaygctgtaaagggaaaatcgcctactcaagcctcagtaatggcagatgcccctcccccaaccaagctcaagtgtcccatgtcgacttcagactgctgtactg

SEQ ID NO: 453508 - DNA, 201 bp, Homo sapiens
ggatagttagcttttcttgttgcattgatccctttaccgttatttaatgcccttctttgtctcttttgatctttgttggttcaaagtgttttatcagagaygaggattgcaacccctgttttttttctttttcttttttccatttgcttgataattattcctccatccctttattttgagcctgttgtgtgtctttgcatg

SEQ ID NO: 453509 - DNA, 201 bp, Homo sapiens
catcaagatgttgatacccagaagatgtatcttagaatacaggacagacaatctgctgaggatcacagaaattaagatatcaatttaaaagtaatacagtrtagtaaatttaataattatttgagtgtaaaatattgctgaagaagtgctaccaaaagtgagtttcatgggccattgtggtccacgaattgtttctggtta

SEQ ID NO: 453510 - DNA, 201 bp, Homo sapiens
tcttttgcatttgctgaggagtgttttatttccaattatttggtcaattttagaataagtgtgatgtggtgctgagaagaatgtatattctgttgatttgrggtggagagttctgtagatgtctattaggtctgcttggtccagagctgagttcaagtcctgaatatccttgttaattttctgtctcattgatctgtctaa

SEQ ID NO: 453511 - DNA, 201 bp, Homo sapiens
gtctggctagcattctatctattttgtaatcttttcaaaaaaccagcttctggattcattgattttttgaagggtttttttgtgtctccatctccttcagktctgctctgatcttagttatttcttatcttctgctagcttttgaatttgtttgctcttgcttctctagttcttttaatagtgatgttagggtgtcaattt

SEQ ID NO: 453512 - DNA, 201 bp, Homo sapiens
cctcgttttggtatcaggatgatactggcttcataaaacaagttagggaggagtccctctttttctattgtttggaatagtttcaaaagtaatggtaccakctcctctttgtacttctggtagaattcggctatgaatccatctggtcctgggctttttttggttggtaggctattaattactgcctcaatttcagaactt

SEQ ID NO: 453513 - DNA, 201 bp, Homo sapiens
gatggggtttcaccatgttgtccaggctggtctggaactcctgggctcaagcaatccaccctccttcgcctcccaaattacaggcatgagccaccacgccsagcccaaacctgtatgtacattaagggtcaactgtatgtagttttcttgttattatgttataatcctgtgacttgactggctctctttttaagatgctag

SEQ ID NO: 453514 - DNA, 201 bp, Homo sapiens
aagggcatgatcccgttcttttttatggctgcatagtatattatggtgtatatgtatcacattttctttattcagtctatcattgatgggcatttaggttkattccatgtctttgctattgtgaatagtgctgcagtgaacatatgcatgcatgtatctttataatagaatgatttatatttctttgggtatatacccagt

SEQ ID NO: 453515 - DNA, 201 bp, Homo sapiens
ggactgatttaagaattgataattatacagtcttcacagaactcagaaaaatagtaaatttttacattcatattgggtgtttaccaccttgggaaatatarcaaaaggaagaaatatctaatgtttttgattttctagtattgccgtaagaaaacaaaaataattctctacttgtccactatttctggtcccagactgaaa

SEQ ID NO: 453516 - DNA, 201 bp, Homo sapiens
ttttaactgacagattatgtccccctaattgcaggcattagaataatttaccattgtgataatgcttgaaagttggattatattacagacctgtaagacgkcattagactttgagtcaaaagtattcattcattttttttgtgtatttttgtgttaaattaacagctttaaaaatgtttatagggatacatagtaaaatag

SEQ ID NO: 453517 - DNA, 201 bp, Homo sapiens
ttttaagtatgttgaactcaattttatgatttctaatgttagtgtatatcttatgggtagaccaatttttttttgcctgtactgacatattttgatgttgrtgtatttgaaaactttgttaacacacatgatctaatttatatagtatgtgtgtttttatcttataccatgtggtaacacatgtttatttgtggactgatt

SEQ ID NO: 453518 - DNA, 201 bp, Homo sapiens
tcttataattttctgttgcttccctccaagccacttcattctccctagtgtaaaaaggtcagtcttagaatagcttatgtatttttgcttccaaatgcaasagaaacttgtagacagaatatatggctccctatatagtagtatttgagaaaccaaataccataaaaaggctgtcttttgcagacataatccccttaatgt

SEQ ID NO: 453519 - DNA, 201 bp, Homo sapiens
cttaggcagtataagataaacttattagatttatgacatatgcaactccatttttaaagcagagaaattccacattaaaacaaaattcttataattttctrttgcttccctccaagccacttcattctccctagtgtaaaaaggtcagtcttagaatagcttatgtatttttgcttccaaatgcaacagaaacttgtagac

SEQ ID NO: 453520 - DNA, 201 bp, Homo sapiens
acatttcctaagttcttttaaaactgtacaaaatatttatttttacattgctttctgaaagctgatatgttatttagggatcttaataaataagaacaagrctagattaattcaaagaaatttaaggtatttagattaaggtttacactttctgtggataaggagtttgagcagggattagttgggtcctctattagggtc

SEQ ID NO: 453521 - DNA, 201 bp, Homo sapiens
actctccactacccttcccagtctctggtaaccattctgctactctctatcttcatgagttcatttttttttagcacccacaaatagatgagaacatatgmaatttatctttctgtgcctggcttatttcatttaacataatgacctctagttccgtccatgtttttgcaaatgacaggatctcattcttttttatggctg

SEQ ID NO: 453522 - DNA, 201 bp, Homo sapiens
tcttattattttgagataggttccctcaatacctagtttattgagagtttttagcatgaaggggtgttgaagcagaaaggtatgaaggccttttctgcatytattgagataatcatgtggtttttgtcttcggttctgtttatgtaatggatgactttattgatttgcatatgttgaaccaatcttgcatcccagggatga

SEQ ID NO: 453523 - DNA, 201 bp, Homo sapiens
ttcctatccatgagcatgggatgtttttccatttgtttgtgtcctctcttatttctttgagcagaagtttgtagttcttctttaagaggtcctttacatcycttgtaagttgtattcctaggtatttaattctctttgtagcaattggtgaatggaagttcactcaagatttggctctctgtttgtctgttattggtgtat

SEQ ID NO: 453524 - DNA, 201 bp, Homo sapiens
ggtattgcctaggttatcttctagagtttttatgatttttaggtcttacatttaagtctttaatccatcttgagttaatttttgtataaggggtaaggaargggtccagtttcaattttctgcatatggctagccagttttcccaacaccatttattaaatatggaatcctttcccttttgattgtttttgtgaggtttgt

SEQ ID NO: 453525 - DNA, 201 bp, Homo sapiens
atattggccctttgtcagatggatagattgcaaaaattttctcccattctgtaggttgccttttcactctgatgatagtttcttttgctgtgcagaagccytttagtttaattagatcccatttgtcaattttggcttttgttgccattgcttttggtgtttcagtcatgaagtctttgcccatgcctgtgtcctgaatgg

SEQ ID NO: 453526 - DNA, 201 bp, Homo sapiens
atttgtttaagttccttataaattctggatattggccctttgtcagatggatagattgcaaaaattttctcccattctgtaggttgccttttcactctgaygatagtttcttttgctgtgcagaagccttttagtttaattagatcccatttgtcaattttggcttttgttgccattgcttttggtgtttcagtcatgaag

SEQ ID NO: 453527 - DNA, 201 bp, Homo sapiens
aaataatagctacaatttcctacattcttaaggtttttttttttttcttcaaattttggcttctactgttacttgtctatcgcagaattgattttagatgwtacatttatattttagaacaaaatttatttttagttatttaagatatgaagataatcgcaaacattttaaagtttaaggaatagtaattttttctttaac

SEQ ID NO: 453528 - DNA, 201 bp, Homo sapiens
cctagctccccaccaccaacagaccccggtgtgtgatgttcccctccctgtgtccatgtgttctcattgttcaattcccacttatgagtgagaacatgcartgtttagttttctgttcctgtgttagtttgctgagaatgacggtttccagcttcatccatgtccctgcaaaggacatgacttcatcctttttatggctgc

SEQ ID NO: 453529 - DNA, 201 bp, Homo sapiens
taaaggtaatctatctcagatctctttttttaatgagaatgtttaaatgagaataattatagaaaataactcttgtcattgtgaattgaattagatagtayatataaaaatctaaaaaagttttaagcacaagcaaatattgaatcagtgtgaattaataataataggtaaaacgtgggtttaaaacttgaagtctttatt

SEQ ID NO: 453530 - DNA, 201 bp, Homo sapiens
tttcaaaaactaactctttttggtgattcataatgaaccctgacatactacattttcttggattcttggatgtactgtaagtaaaacttttttttttttttgagactgagtgtcgctctgtcacccaagctgctggagtgcagtggcgctatcttggctcactgcaacctctgcctcccaggttcaagcgattcttgtgcc

SEQ ID NO: 453531 - DNA, 201 bp, Homo sapiens
actggaaatgtgacactgacagtctgtctggaggtcagggctaaactggctgatgatttagatgtcacacttatgtacattaagttgggaattgaaatcaygtgtttgggctctgtttatgagagagattagagatgaagagaagatgactacagtcagaatctgggtgccaaataataagattgagcaaccatgaaagta

SEQ ID NO: 453532 - DNA, 201 bp, Homo sapiens
gaagcacctgaaatgctcatcaataggatacttgttgaatatacaatggtttaccgaacagtcattaaaaaggaggaggacagtatccaaatctgctatgrcattattgtaaggatatattatttgtttttgttttgttttgtttgaaacaaggtctggctctgttgcccaggctggagtccagtggcgtgatctcagctc

SEQ ID NO: 453533 - DNA, 201 bp, Homo sapiens
ggattatacttgaatacagtatataaatctctctactgaaaatgtctacaatgaaatgattttgacaattgaatatgtaattaaatttaaaatatttatctgtgctttctacaacaatttcaaggaagtgaggcattattatcaatggaagatattttgttttcacaaaggattactacatccctcattagagaccaatct

SEQ ID NO: 453534 - DNA, 201 bp, Homo sapiens
tggattatacttgaatacagtatataaatctctctactgaaaatgtctacaatgaaatgattttgacaattgaatatgtaattaaatttaaaatatttatctgtgctttctacaacaatttcaaggaagtgaggcattattatcaatggaagatattttgttttcacaaaggattactacatccctcattagagaccaatc

SEQ ID NO: 453535 - DNA, 201 bp, Homo sapiens
ccaaactatgaaatactcctctctttattttctaaaatcctacatttaaaattttcactaagttcactatttgaaattccaccatttattgattcattagrtaagaaaatttctttgctactgtaaccattagacagttgtagatactggctttacttctttcatcctggcctgatgctgtggctaggcaagtaaagaaga

SEQ ID NO: 453536 - DNA, 201 bp, Homo sapiens
ctgtctctacatatagtattttcctatttatccagctcattacataactatttttactttattatttcaaaattggaaaatgatataactaataataatcmccatacataggaagggatttgactgtaaagataaatttaggccgggagtggtagctcacacctgtaatcccagcactttgggaggctgaagcgggaagga

SEQ ID NO: 453537 - DNA, 201 bp, Homo sapiens
ttaccatgttctcagtgggaagtttgctgtaatgcattttttgctcaaaaatatgttaaacataaaattcatttttttttcatttggggtcttcattttcmaaaaagggaaataatatataaagctttgaaaagaaaactacatagtagcatttacataggaacgtttcttgataaaatacagatatacgacccaggaaca

SEQ ID NO: 453538 - DNA, 201 bp, Homo sapiens
ataagattcccaaatattcccacatattcactgtaaagagctcaagttttgaggagttcggaaaagcagctgtatttgtttgggttgtcatgtatgtatatatatctccacccaatatacaaattggttttgtttctttaaatgtatgatggaaactaatgcatttgagtatctaataatcacaatattttcatcttgaaa

SEQ ID NO: 453539 - DNA, 201 bp, Homo sapiens
cttgttacttgtcaggttgttccatctactgcttttttctctcaaaatttggatttgtttcttgaaatttcattttattataattcacagctttcctgaaygtgctcccataccttgcctgttcaaattatagctaggtaatgtttatattcttgccagggaaacttgattgtggaaggaaaagtgtgctgctattcattg

SEQ ID NO: 453540 - DNA, 201 bp, Homo sapiens
atggattatacttgaatacagtatataaatctctctactgaaaatgtctacaatgaaatgattttgacaattgaatatgtaattaaatttaaaatatttatctgtgctttctacaacaatttcaaggaagtgaggcattattatcaatggaagatattttgttttcacaaaggattactacatccctcattagagaccaat

SEQ ID NO: 453541 - DNA, 201 bp, Homo sapiens
ccctctgcctggaatggtctcccattcctgccgtattaagccaatttcttctcaagcttcatctctcaagtcaagcatcatgtcttcatgctattttaaaytctcactaccatgtaccatatacctttctttcatagtctttaaggtagctgcaattttataatcatttgtcagattatttaaataatatcttttttctta

SEQ ID NO: 453542 - DNA, 201 bp, Homo sapiens
aatggattatacttgaatacagtatataaatctctctactgaaaatgtctacaatgaaatgattttgacaattgaatatgtaattaaatttaaaatatttatctgtgctttctacaacaatttcaaggaagtgaggcattattatcaatggaagatattttgttttcacaaaggattactacatccctcattagagaccaa

SEQ ID NO: 453543 - DNA, 201 bp, Homo sapiens
ttccctcagctggtagtaaactaaggttcagatattcagttttggaaaatattccattgtccatcaaaagtttttcatcttaactatgttttctgaccaamtttttaatgagttcccattgcttgtgcaagaatttgctgttgattggggagggaatacatgaaaatttaactggatagtaatgactgtaggctggacctt

SEQ ID NO: 453544 - DNA, 201 bp, Homo sapiens
acctttttcctataaacgtatttgattttgtaaaacagggaagttgttggagtttgatgtatgtattgcttatgtagttatatatatatatatatatataaattatattttgcttttgttatgtttagtggagaaacgataactaaagataatttttaggcattttttaagacttctaactgcagacagttttttagagtt

SEQ ID NO: 453545 - DNA, 201 bp, Homo sapiens
tattagattagattttatttaaagttattgtatgcagccacataatagttaatctatccatatattatttgccataaatatagagctatgatacggagccyatagtgaaaattttagaattttagcaacaattttatggctattttaactatcttctgataaataaattgtattaacaataacaccatgacctgtctctaa

SEQ ID NO: 453546 - DNA, 201 bp, Homo sapiens
aacctttttcctataaacgtatttgattttgtaaaacagggaagttgttggagtttgatgtatgtattgcttatgtagttatatatatatatatatatataaattatattttgcttttgttatgtttagtggagaaacgataactaaagataatttttaggcattttttaagacttctaactgcagacagttttttagagt

SEQ ID NO: 453547 - DNA, 201 bp, Homo sapiens
tgttttttgagatggagtttcgttcttgtcgcccaggctggagtgcagtggcgcaatctcggctcactgcaacctccgcctcctgggttcaagtgattctyctccctcagctccctgagtagctgggattacaggcacgcgccaccacacccagctaatttttgtatttactttagtagagatggggtttcaccatgttgg

SEQ ID NO: 453548 - DNA, 201 bp, Homo sapiens
aaacctttttcctataaacgtatttgattttgtaaaacagggaagttgttggagtttgatgtatgtattgcttatgtagttatatatatatatatatatataaattatattttgcttttgttatgtttagtggagaaacgataactaaagataatttttaggcattttttaagacttctaactgcagacagttttttagag

SEQ ID NO: 453549 - DNA, 201 bp, Homo sapiens
taaacctttttcctataaacgtatttgattttgtaaaacagggaagttgttggagtttgatgtatgtattgcttatgtagttatatatatatatatatatwtaaattatattttgcttttgttatgtttagtggagaaacgataactaaagataatttttaggcattttttaagacttctaactgcagacagttttttaga

SEQ ID NO: 453550 - DNA, 201 bp, Homo sapiens
ataaacctttttcctataaacgtatttgattttgtaaaacagggaagttgttggagtttgatgtatgtattgcttatgtagttatatatatatatatatatataaattatattttgcttttgttatgtttagtggagaaacgataactaaagataatttttaggcattttttaagacttctaactgcagacagttttttag

SEQ ID NO: 453551 - DNA, 201 bp, Homo sapiens
tgtctttggaagaactcggtgggaggtaattgaatcatgggggcacatcttttcctgtgctgttcttgtaatagtgaataagtctcatgaaatctgacagwtttaaaaaggggagttcacctgcactagctctttcttcttgcctgctgccattcatgtaagatgtgacttgctcctccttgccttctaccatgattatga

SEQ ID NO: 453552 - DNA, 201 bp, Homo sapiens
ccattgtggtccacgaattgtttctggttagaattaagagtaattcatgtttgttatatgaaagtattgatctgcaattgtgttttttttcaaaaaaaaaatgattcttcaggataaatatttcaagaagcattgttctaaatggttacattcctttgctgtaatgaccagacagtatcaaggtctcccaaacaaattgag

SEQ ID NO: 453553 - DNA, 201 bp, Homo sapiens
aatatgtatattgtttttactgtttttgttaaaggaaccttgaaatatcttttaattctcgaacactttacctacctaacagctaacctttttttttttttactgtattttaccctttgcctagcaataaactcaacaatttaaaaatatttctgatttattctaattatatttttcaccagttaaccatcgccccctagc

SEQ ID NO: 453554 - DNA, 201 bp, Homo sapiens
caaattaggttgcaattgtgcatactaaaaacaattatagactttctattcatcaggtcatatgatagcatcttatctcttttatttattttctgatactytatcttattaatcacattttctaaaagcttatgatggaattgggaaactcttactcttatcaagaccacattttctgtacccttacatcataacgtgcta

SEQ ID NO: 453555 - DNA, 201 bp, Homo sapiens
tagagatatactaaaagttttatgagattattctggagttaccatctgtaattttcaaaagtaaactaaaattgctcagcggataatacctgtattccatytggaatatcattatttgtgcatagttgcttattaatcattatcttggaatcagaataattgatcgatacagcaaagatttttgtaaatatcagcagtctt

SEQ ID NO: 453556 - DNA, 201 bp, Homo sapiens
gtgagcccagattatgccattgcactccagcctgggcaacaagagtgaaactccatctcaaaaaaaaaaaaaaaaaaaagataaattcaaagtcacactgkgtttcacatgtagcatactgtgtactctccagtgtttctgcaaaagccgttcttcagcatgttagtcattagtagactctgacacattctatatttgtca

SEQ ID NO: 453557 - DNA, 201 bp, Homo sapiens
ttgctctttaaaaagttatgcttatgtattatacatattcacatttaattcaaaatccttattttttaaaattttattcatagaaacattggcatttaggrcccatatatttacctgactgacatttgctggtaatacatgtctgtcaaactaaagtattagaaactgaatagattttgaactaggagttcacatgcaatt

SEQ ID NO: 453558 - DNA, 201 bp, Homo sapiens
gtgtcttggagttgctcttctcgagtagtagctttgtggcattctctgtattttctgattctgaatgttggcctgccttgctagattggggaagttctcctggataatatcctgaagagtgttttctaacttggttccattctccccgtcactttcagatacaccaatcagacgtagatttggtgttttcacatagtccca

SEQ ID NO: 453559 - DNA, 201 bp, Homo sapiens
ccaccatgctcagctaatttttgtatttttagtagagatggggtttcaccatgttggtcaggctggtcttgaactcctgacctcatgattcacctgcctcrgcctcccagagtgttgggattacaggtgtgagccaccgctcccggccatgtttttattttttattttggggaggtggggggtcttgctttgttgcccagg

SEQ ID NO: 453560 - DNA, 201 bp, Homo sapiens
tgtgtcttggagttgctcttctcgagtagtagctttgtggcattctctgtattttctgattctgaatgttggcctgccttgctagattggggaagttctcctggataatatcctgaagagtgttttctaacttggttccattctccccgtcactttcagatacaccaatcagacgtagatttggtgttttcacatagtccc

SEQ ID NO: 453561 - DNA, 201 bp, Homo sapiens
atggggtttcaccatgttggtcaggctggtcttgaactcctgacctcatgattcacctgcctcagcctcccagagtgttgggattacaggtgtgagccacygctcccggccatgtttttattttttattttggggaggtggggggtcttgctttgttgcccaggctagtcttgaactcctggcctcaaacaatcctacagt

SEQ ID NO: 453562 - DNA, 201 bp, Homo sapiens
atgtgtcttggagttgctcttctcgagtagtagctttgtggcattctctgtattttctgattctgaatgttggcctgccttgctagattggggaagttctcctggataatatcctgaagagtgttttctaacttggttccattctccccgtcactttcagatacaccaatcagacgtagatttggtgttttcacatagtcc

SEQ ID NO: 453563 - DNA, 201 bp, Homo sapiens
tggctgcccttaacattttttccttcatttcaactttggtgaatctgacaattatgtgtcttggagttgctcttctcgagtagtagctttgtggcattctytgtattttctgattctgaatgttggcctgccttgctagattggggaagttctcctggataatatcctgaagagtgttttctaacttggttccattctccc

SEQ ID NO: 453564 - DNA, 201 bp, Homo sapiens
tataatttaaaactaatgaattgtttatttatggaatattcaagttaatatttttagattgccattggcagcgagtgactgaaactgtggaaagcaaaackgcagctccatcccatagcaaacattaggcataaaatctttatcaaattcttatctcgtacagagttgaggacaggtaaaagggaacttgtcgtagttgtt

SEQ ID NO: 453565 - DNA, 201 bp, Homo sapiens
gactctttatccaatttgccagtctgtgtcttttaattggaacatttagtccagttacatttaaagttaatattgttatgtgtgaattcgatcctgtcatwatgatgttagctggttattttgctcgttagttcatgcagtttcttcctagcctcgatggtttttacaatttggcatgattttgcagtggctggtacctgt

SEQ ID NO: 453566 - DNA, 201 bp, Homo sapiens
caaagcttgctaggataacagttgataatatcaaattgcttattaatagttttatcaggatgtaatttacatgttaaacaagtcaaccatttaaagtatayagttcaatgattttttagtatattcacagaattgtgcaactcagagtaaattttaaaccattttcattacccccaaaagaaatgcaattcttattagcaa

SEQ ID NO: 453567 - DNA, 201 bp, Homo sapiens
ttgcatagaggtgttcatagtattctctgatggtagtttgtatttctgtgggatcgtatcccctttatcattttttattgcgtttatttgattcttctctyttttcttctttattagtcttgctagcggtctatcaattttgttgatcctttcaaaaaaccagctcctggattcattaattttttgaagggttttttgtgt

SEQ ID NO: 453568 - DNA, 201 bp, Homo sapiens
agaactgtcagattcttttacctttataaactattgttatgggcatctatttggaaacaaaaggcaaatgtataacctctagtttttgttgttttttaatrgaatattcagcattatatcaactgtacacacatatggtctgacacatgccactgcatcattatagaagagccaaaggataaccaattttgcataggtagg

SEQ ID NO: 453569 - DNA, 201 bp, Homo sapiens
tgcattttttaatgtttttgtctttttttaaattatactttaagttctggggtacatgtgcagaacatgcagttttcttacacaggtatacatgtgccacrgtggtttgctgcacccatcaacctgtcacgtactttaggtatttctctaatgttatccctcccttagtcccccaccccctgacaggccttgctgtgtgat

SEQ ID NO: 453570 - DNA, 201 bp, Homo sapiens
agaaaaataaccactgacatgaaacataatttcctatcgtgcctgaggcagaaaagagaaataataatgaagattcacacaattacaacaaattaggttgyaattgtgcatactaaaaacaattatagactttctattcatcaggtcatatgatagcatcttatctcttttatttattttctgatactctatcttattaat

SEQ ID NO: 453571 - DNA, 201 bp, Homo sapiens
gtggtttgctgcacccatcaacctgtcacgtactttaggtatttctctaatgttatccctcccttagtcccccaccccctgacaggccttgctgtgtgatrttcccctctctatgtccatgtgttctcattgttaaactcccactgattagtgagaacatgtggtgtttggttttctgtccttgtgatagtttgctgagaa

SEQ ID NO: 453572 - DNA, 201 bp, Homo sapiens
ttggcttttgttgccattgcttttggtgttttagacatgaagtccttgcccatgcctctgtcctgaatggtactgcctaggttttcttctagggtttttawggttttaggtctaacgtttaagtctttaatccaccttgacttaatttttgtataaggtgtaaggaagggatccagtttcagctttctacatatggctagc

SEQ ID NO: 453573 - DNA, 201 bp, Homo sapiens
tacaaaggacatgaactcatcatttttttgtggctgcatagtattccatggagtatattgccacattttcttaatccagtctatcattgttggacatttgkgttggttccaagtctttgctattgtgaatagtgccgcaataaacatacatgtgcatgtgtctttatagcagcatgatttacagtcctttgggtatatacc

SEQ ID NO: 453574 - DNA, 201 bp, Homo sapiens
ttcctgaatgtgctcccataccttgcctgttcaaattatagctaggtaatgtttatattcttgccagggaaacttgattgtggaaggaaaagtgtgctgctattcattggattaattgtggatgacatctttgctgtttcctattaaatatgacatataggtagctagattatttaaagtaaaatatcattaagtcaagta

SEQ ID NO: 453575 - DNA, 201 bp, Homo sapiens
tctaatgttatccctcccttagtcccccaccccctgacaggccttgctgtgtgatgttcccctctctatgtccatgtgttctcattgttaaactcccactkattagtgagaacatgtggtgtttggttttctgtccttgtgatagtttgctgagaatgatggtttccagcttgttctatgtccctgcaaaggacatgaact

SEQ ID NO: 453576 - DNA, 201 bp, Homo sapiens
ccttagtcccccaccccctgacaggccttgctgtgtgatgttcccctctctatgtccatgtgttctcattgttaaactcccactgattagtgagaacatgyggtgtttggttttctgtccttgtgatagtttgctgagaatgatggtttccagcttgttctatgtccctgcaaaggacatgaactcatccttttttatggc

SEQ ID NO: 453577 - DNA, 201 bp, Homo sapiens
ttatatcaaaaaacaaatcaaacgcattcaagtggaaaatgaatatgaaaaaatatcagatttactagttgtcagaatgtaagttatatttacaattaatyattttatagccattaaatttaacagaataattttaaaatcagtaacatcaattgctattggggatgcttgaaaaattcatatattgctgttagaaatgtg

SEQ ID NO: 453578 - DNA, 201 bp, Homo sapiens
gcactccagcctgggcaacaagagtgaaactccatctcaaaaaaaaaaaaaaaaaaaagataaattcaaagtcacactgtgtttcacatgtagcatactgkgtactctccagtgtttctgcaaaagccgttcttcagcatgttagtcattagtagactctgacacattctatatttgtcactcatcaggttagtttaatat

SEQ ID NO: 453579 - DNA, 201 bp, Homo sapiens
gcagcagtttctgttctaaagctgattactactgtgccacatgtatggacttctttccttagaagtgacttataaatatgtagatttcacaattaatgcasaataatgataatgggttaatcgtaaataggaaggtacatttttcacttatggaatgatcatgttcaaaattgttatccacatttataaatttttagctaa

SEQ ID NO: 453580 - DNA, 201 bp, Homo sapiens; identical to SEQ ID NO: 27574

SEQ ID NO: 453581 - DNA, 201 bp, Homo sapiens; identical to SEQ ID NO: 27564

SEQ ID NO: 453582 - DNA, 201 bp, Homo sapiens
ctaaaacttaaagtataataataataaattaaaaaaaaaaaacaaaacaaactggccttatgaaccttagaccaatcttgagggtataaaagccttcgcastgaagtggccataaaaaaaaaaaaaagagaaaattattatagaaaaagcagtagaaatcatggtgctgtttattatcatttgaaaagtatttttttattt

SEQ ID NO: 453583 - DNA, 201 bp, Homo sapiens
caccttgtctgtttttaaattttattatatgttatcatcattttcaaccagtttccattgttgattgaatcatgccttatctcactggttaatggttgagmaaggatttttagagtctttttgtgttggaattttgttgtccatataatgatttgtatactggacagctaaacatcatagacagatgtctgcttttttttt

SEQ ID NO: 453584 - DNA, 201 bp, Homo sapiens
ctttggtattaaccaagagtggtttcagtgtgcttttgtaaaaaaaaaaatactagagttcaaaaattcaggtctatatttgaagctctgtcaataattcrtatacctcatatcaaaaagcttaccaagggacaagatgattttgttagtgggagtggtttactttttacttttgcttccaaccctaactcagaagaaggg

SEQ ID NO: 453585 - DNA, 201 bp, Homo sapiens
tttcctgaatgtgctcccataccttgcctgttcaaattatagctaggtaatgtttatattcttgccagggaaacttgattgtggaaggaaaagtgtgctgctattcattggattaattgtggatgacatctttgctgtttcctattaaatatgacatataggtagctagattatttaaagtaaaatatcattaagtcaagt

SEQ ID NO: 453586 - DNA, 201 bp, Homo sapiens
ctttcctgaatgtgctcccataccttgcctgttcaaattatagctaggtaatgtttatattcttgccagggaaacttgattgtggaaggaaaagtgtgctgctattcattggattaattgtggatgacatctttgctgtttcctattaaatatgacatataggtagctagattatttaaagtaaaatatcattaagtcaag

SEQ ID NO: 453587 - DNA, 201 bp, Homo sapiens
tgccaaataactacagctgaatgcaaaatatactaatacaggcaaatgcacaatacagcagagggatatcgttttatttatttaccactttttttttttttggtatgagtaagccacaattttagctttgaaagtgcttattgtgcggtttttcttgatccctgcagcctctggctaccttcacttttttttaaagagaaa

SEQ ID NO: 453588 - DNA, 201 bp, Homo sapiens
cttggtctacttttttagaatgaagggtttagtgttctccagagaaacccagcaagatatctatctatctatctatctatctatctatctatctatctatctatctattgtctgtctacctattgaaagactaattttaagtaattggcttacatgactgaaatctgtagaaccgactggaaggctggaaactcaggcagg

SEQ ID NO: 453589 - DNA, 201 bp, Homo sapiens
aattacccaatctcactattcctcctagcatttgagcaagaccccccctttgaaaaaaaacaacaactgggatcctgcctctgaaacaacctcattttttwaaaaaaagactgggatcctgcctctgaaacaacctcatttcctgagccattttatctgccagcagacaccagaaaacacaacactttcctggatctccaa

SEQ ID NO: 453590 - DNA, 201 bp, Homo sapiens
cattttgggatgctggggtaggaggatcacttgagcccaggaatttaagaacagtctgagcaacaaagtgagaccccatttccacacacacacacacacarttagctaggcatggtagcatatgcctgtagtcctagctactcaagaggctgaggcaggaggatcctttaagcataggaggttgaggttacagtaagctga

SEQ ID NO: 453591 - DNA, 201 bp, Homo sapiens
aatatatgggggtatatatatatatatatatatatatatatatatatatatatacacacacacagtgggtaaatatatatatatatatatatatatatatactgtgtactcataaaattaaaaataaacaatttaaaaacatcaatagtaataatagccattttaactagagtgagatcgtatgtcattgtggttttatat

SEQ ID NO: 453592 - DNA, 201 bp, Homo sapiens
aagattacttgagcccaggactttgaggttacagtgagccttgattgagccattgcactccagactactagacagagtgataccctgtctctaaataaatraataagaactatacattctttgtagttcagtatggaagaagtagaaattctaccatgagaaccagaataaacaggtattatgttttctctaatcctttag

SEQ ID NO: 453593 - DNA, 201 bp, Homo sapiens
aaatatatgggggtatatatatatatatatatatatatatatatatatatatatacacacacacagtgggtaaatatatatatatatatatatatatatatactgtgtactcataaaattaaaaataaacaatttaaaaacatcaatagtaataatagccattttaactagagtgagatcgtatgtcattgtggttttata

SEQ ID NO: 453594 - DNA, 201 bp, Homo sapiens
tccagaatttaagaaaacatttagtgtttttcatatatcaccacaaatgtaaaaatgatgctagtcaaatggtttagaagcattaatcaatacataaattstttcctttagaaaaaccaaaggctaggtgtaattgagaatgatcacatattgatttctagctcttattcaaaatctcatttcttcagaaaaggagaatat

SEQ ID NO: 453595 - DNA, 201 bp, Homo sapiens
tcatgagaatatcatgggagaaaccacccccatgatccaatcacctcccaccaggtccctccctccacacgtggggattacaattcgtgatgagatttggrtggggacactgagccaagccatatcagtatctttttaaatgtagagttatttctgttctacttactatgtatgcacaaacatgagagggaataatttagg

SEQ ID NO: 453596 - DNA, 201 bp, Homo sapiens
atcttagcaaatactactttctattcaggttcatttataacagctgaagacaaagatgttagtatcttaatcactttggaatcaatatcattgtgtgtgtrttttctctttttcttctaacagagaactgggtttaactttttaaattgtaaattaacaattcataagtgtataaatttatggggtacaaagtgatgttat

SEQ ID NO: 453597 - DNA, 201 bp, Homo sapiens
gatagtggaagcaaatgaatccaataaatctccttaaaatatttctgcttcaagaaattcagtatccttccagaaaataattgctattttgtctttttttwaaaataacaaattgtgaagtatatagataatatattcttcaggaagtaattcttttgattctatattttataattacactagcatctataattgaataat

SEQ ID NO: 453598 - DNA, 201 bp, Homo sapiens
tcatgaagcttacagtaatgaagaatgagaaataatataagtaaataaattttaatgttgctattataaatgttttcccagaaaaaatgaaatgatacagytgagtgacaatttatattattctaataatttaagcttcttaaaatttgatctagctgatacagttgaaactcggcatttgttatgtatataagctgcatc

SEQ ID NO: 453599 - DNA, 201 bp, Homo sapiens
aggatgtgaaaataaaaaatgttttatttctagaataggatcgatgagacgcttgtgggtcaattaacagaatttgaagaaagtgtataagaattggcagyaaacatgttgatcacattaatggtcaaccaagcaataaattatccttcacttcattgctctttaataaggagaaattggaaagttattagcagatagaat

SEQ ID NO: 453600 - DNA, 201 bp, Homo sapiens
cagagaaggctagttagagaagaagtcagcaaaggaatccaatgttaggactaagctcgcacttgtgttatcccacttagattataataattctgtgaggkgggtattataatattttgaatcaggatctgagaatcagattaatcatcctggctttgatttttgcctcactccaaaaccatgcatttttcatgacaccag

SEQ ID NO: 453601 - DNA, 201 bp, Homo sapiens
agcaataaattatccttcacttcattgctctttaataaggagaaattggaaagttattagcagatagaatactggaaagcgtgcataaagagagctgcttraacagtgctggacttgttgcaaattcgcctccttttttgggaggggggatttccttgacaatcaattcaactgatgggattcaggcaaggtttgcagtgg

SEQ ID NO: 453602 - DNA, 201 bp, Homo sapiens
tgcttctagattggttatgttgctcactaggtcctcctggaatagtccacatgaaccaaaatgggcggtacatcgggtctgtgttggatttaataaaatgyctttgccctttctcactcattccttccagatgacagagctaggcatgagttggggatgactggaaaaaaagtaaaatatagctactagaatgggacacat

SEQ ID NO: 453603 - DNA, 201 bp, Homo sapiens
ctgggtcttacatgccctgtgagtaggctgtcagcagaatacttctctagaggtagttatattaaaaatacattaaggttgagaaactcagaatcagaaarattcattataagatataagtttgcatagttcaccttgagattgctatggcaggttcataaatggattgacaaatgaaaagtgggtcactgatcattttat

SEQ ID NO: 453604 - DNA, 201 bp, Homo sapiens
ttatgactaggtaataaaatctcatttttactgaaatttagctccataaaatgcattctatttaaaatctgaacatgtgccaaactatcatcaatactgtrtaacaccagtataattaggtagaagtactggataaactgtatgtaatatgtgcagcagaatcctaaatcattctaatggaaaacagattatgccagcaac

SEQ ID NO: 453605 - DNA, 201 bp, Homo sapiens
tgagtttatattattaatgtctctctacagagaatagtactttatcccctaatttaaatatatagtaactcagttcttgccacatcccattgttcatggaygtgaacaggaacacacatctacctagtctcttctagaaaaataattatcaggaaataacagaacttaaagacaggattagaatagagagcatatcagata

SEQ ID NO: 453606 - DNA, 201 bp, Homo sapiens
atttccttatgagcataatctgtgatattccaaatgtgctctttattgctattcttgtcaatattctcttcttccacaattaactggtgttacagtcccartttgtaaatggctttgagtgttttgagcagttttctaccctcactttcataaattgagtggaatcttgcactttttacatgttctgctttggaatttatt

SEQ ID NO: 453607 - DNA, 201 bp, Homo sapiens
tatatattcaggtttctgcttctggtggttattctaaatgcagttattatcaagtaatgcttaccgcttgccaacaatgtgctagacacagagcagagcakagcatctgacatgctttccattctgcactctgatccataactttcatccataaatctttttgcaattttacaaacatgcattctccaaacattcccatga

SEQ ID NO: 453608 - DNA, 201 bp, Homo sapiens
ttttaataacaaatatattacttgtataatcagaaaaacaccagactacttctttggaaaataaatgaagaatttcaatgtgtttaatggttttcattccrtgatcagtgtgtgttgggggaaataagggccgcagagggatcctgtggatttctattccccacccacttaatgatagtagccctcatttcattgtttttt

SEQ ID NO: 453609 - DNA, 201 bp, Homo sapiens
ttgtttgtttttgagatggagtctgactctgttgccaggctggagtgcagtggtgtgatcttggctcactgcaacctcagcctcccaggtacaagcgattytcctgcctcaacctcccgagtagctgggactacgggcgcgtgccactacacccagctaatttttgtatttttagtagagacagggtttcaccatgttggc

SEQ ID NO: 453610 - DNA, 201 bp, Homo sapiens
tgggttagactcgtgctgctatttacagatgacagtatctaagactaaataccctttcatacaacttgggaataaaataaaatgattactttgaggatttktaagaagtaaaagtatgtgtagattattatattagctttatacttcttctgtaataaattaccactgatttaatgggttaaaacaatgcaaatttatttt

SEQ ID NO: 453611 - DNA, 201 bp, Homo sapiens
agacagggtttcaccatgttggccaggatggtctctatctgttgacctcatgatccgtctgcctcggcctcccaaagtgctgggattacagacatgagccmccttgcctggccaaatgtttttaatattacaaaaatcagacaaatgaaattcctcatttgtcctcgcatgctcttgttgttcctaaattccttcagttgt

SEQ ID NO: 453612 - DNA, 201 bp, Homo sapiens
ttaatgatataaaacagagagatatttttctcacttctgagaaagtttcagtgtctttccctcagctattttgtgaaggttatgttgaagaatgccatgtrattttattgcttatatgatactgaagggcactgtaaatattatcctcaggttactaaaataaatttgagatatttgtcataaatgttgatggtgaagtgt

SEQ ID NO: 453613 - DNA, 201 bp, Homo sapiens
tgaggtagacatgacaggtactactctagctttccatctatttcatctattttaaagcattggtactaatgatacaagaatgcaaatcataatctacatawttttagtgcttataaagtatataaatattatgttgtctattaaaaaaagcttgactttttttaatcaataaaataaataatatcctagctacttaaaatg

SEQ ID NO: 453614 - DNA, 201 bp, Homo sapiens
ttttgggacttcacctgccttgctatgaataaagtatgtattcttaggatacataaacttgtatattattttaatcttaatatttctaatcatctcttacrcacagcctacttctttctctataactgatggtgattaattgcctaattacttgccccatatgcttctcattattttgtgttgtattagctttcttttttt

SEQ ID NO: 453615 - DNA, 201 bp, Homo sapiens
ttacttgccccatatgcttctcattattttgtgttgtattagctttcttttttttcatctattgaattagagtaggggaatttaaagttcccagacagtaygttatggttctttgtatcctctgaagtccctaatacagcactctctccatactgggctatgtgatacatttggaaaagcatgaggtttgaagttcagact

SEQ ID NO: 453616 - DNA, 201 bp, Homo sapiens
ccactaatttttatatggatacttaaagaaattgcaagtaattataatagaaatgaacaatgatttatagattatatcataatgtcatttatttttagtgrcagttctgtgaattatagcagagatcatcatcttccataaggagatattaaggatccaatacattaaataagaggcccacatttatacagtttggggttc

SEQ ID NO: 453617 - DNA, 201 bp, Homo sapiens
aaggattattatcagggtttgtgtccactccttggccagtggccaagagtgctcaattcaacaacggaataaatttcatccctattctgaagagcccataraaccagacacatgatcctccagcactttgggaggctaggctggaaaattgcttgagcctaggagttcaagactagcctagacaatatagagagaccctca

SEQ ID NO: 453618 - DNA, 201 bp, Homo sapiens
tattggaaggatatgaagaggcacacagaaatgaaaagctaaacagcactcaagtcaggcaaaagatgggaatcttagagaactgagatagaagcagggcyagcctcataattgaagggtccagtgcaaaatgaaaatgtagtactacttgttcagaaatcactgaaaatttcaagatggtgacagaagaatatattacca

SEQ ID NO: 453619 - DNA, 201 bp, Homo sapiens
agtgcaaaatgaaaatgtagtactacttgttcagaaatcactgaaaatttcaagatggtgacagaagaatatattaccaaatgtagtatcctttcaagagbtgggcatctcacaagttcatgaatctgaccatgggtggcaggaattaatggataagctccatagtataaatcagctactatggttttctgtcttcgtcct

SEQ ID NO: 453620 - DNA, 201 bp, Homo sapiens
accttcacatttatcaactgatgaatagataaagaaagtgtggtacatatacagcatggagtactattcagccataaaatggctcacgcctgtaatcccarcactttgggaggccaaggagggtggatcacctgaggtcaggagtttgagaccagcctggacaacatggtgaaacctcgtctctactaaaaatacaaaaat

SEQ ID NO: 453621 - DNA, 201 bp, Homo sapiens
ttcatcaacagaaacctaaaacattttgcagcttctaacttatctaaccttatgatttatagccatgtatcatgtttatacatatgattgtagtatttgtstatgttggtgctatactgatgaataatggaaagtaattcagctactttaaactgaatcgtttaaattagttcagcgatgacattctgtcttcatgttatc

SEQ ID NO: 453622 - DNA, 201 bp, Homo sapiens
agtctttacctttgaaaagtattggaagctttagtttcctagccactatggattatgccaatacttttaggtattacctttatgccaaattacaggacaayaattttctttttagaaacattattttctagactataattttttggctaacacttatagctcttagattgccacatcttgaatattataacacaaattatc

SEQ ID NO: 453623 - DNA, 201 bp, Homo sapiens
gagtttgtgacttaaaaaaagcctttatttcaaaaagcaaaaataaaatgaataatgaattatcttatatatttcttccactaaacatatttcaaatgaawtatagtatgtaagttaaaaagccaaaaatacttaacccataactgtaagatctacattataggtaactacaaaataaaaatactcattatctataatata

SEQ ID NO: 453624 - DNA, 201 bp, Homo sapiens
aaggatcccagggagaaaagtgcaaagccagttcaccatcgtagtttaacttaaatgtgttaagtatcagttgaaagtctcaaatcctctactcattcgaraatccacttaatataacatttatgggatttgctattaatcttatccaaaacctgtgttattttggtacttatggacttagaaaagtctgtatgtctcaaa

SEQ ID NO: 453625 - DNA, 201 bp, Homo sapiens
ttaatttaatcaagacccatttgtatgcccaagtctatcaatggtagatataatttcctgaagctttttcagatctttctatgcagtagatggctatggtrttccttaactgtatttttaaaattatctgctaaatcttccagattagaagaaaggcctagaggtttagagactggttatttccatatgtactcactcttt

SEQ ID NO: 453626 - DNA, 201 bp, Homo sapiens
tggtctcccggttgccaatattcagaagaagtattaacagaagacatgattctcttccttcttcaccttcttccagtaatacagttggtgtccacagttcstctccttccagcactaactcaagctcaggtagcacaggtaaacggaggagcatattccgtactccttccattagcttccaccataagaaggggagtgagc

SEQ ID NO: 453627 - DNA, 201 bp, Homo sapiens
acaaattgaacagaatagagaatccagaaataaagccaatatctataagcaattgatcttctacaaagcagaccaaaacatactgggaagaggacaccctmttcagtaaatggtgctgggacaattggagaggcacatgtagaagaatgaaactggatccctatcactcactatacagaaattaactcaagatggattaaa

SEQ ID NO: 453628 - DNA, 201 bp, Homo sapiens
aatttttaaagctaattttaaaaattaacttgacatcttgactttatattcttgatagtttcacttaaagaatatataaagtgattttgaaatttcaaaarcaagtatgggaattaagatgggttttgtggagaataaagtgggtctgataaattaatccattcccctgggttcagatgctatgttttataatgtggtaga

SEQ ID NO: 453629 - DNA, 201 bp, Homo sapiens
ggcaccataattttcactctgctccaagcaactggcagcctggcacccaggcttcaggccatccctagcataaaggtgagtcttcaccagggacccacctstttccacccaggagcctatctgctttctgccatcatcaacctgccatccacagcctgcagacccatgccaaccttctctttgccgtccctcccatgctta

SEQ ID NO: 453630 - DNA, 201 bp, Homo sapiens
ctctttccattataattaatctcaacaactattaagtctattctttcagttgctaagtgttcgggccacccttgactcctcctttttaagttttacatgtkctaatatcttgataaattctacaggctcttgtaatagggataaaattgctcattattgactaatctaccaaggggattgaatgacaattattaatttctt

SEQ ID NO: 453631 - DNA, 201 bp, Homo sapiens
tctttatcccataaatttcccctgcactgcagacatatatgtatattaactatctacttgagatcttcacatggatgtttacgaggcctctgaaacatgtsccaaaccaaactcctgatttttgtgcattagcgccccacattttgctctttccattataattaatctcaacaactattaagtctattctttcagttgcta

SEQ ID NO: 453632 - DNA, 201 bp, Homo sapiens
cccaagtctatcaatggtagatataatttcctgaagctttttcagatctttctatgcagtagatggctatggtattccttaactgtatttttaaaattatstgctaaatcttccagattagaagaaaggcctagaggtttagagactggttatttccatatgtactcactcttttcacacagagaaaattttgttttcact

SEQ ID NO: 453633 - DNA, 201 bp, Homo sapiens
gacatttatagaatactacaattaataaaataattatatattattttcaaatgcgagtggaacatcgtcaagacacactatatactgggtcacacaataartcccattaaatttaaaaggtagacatctatggggtacattttttgagaaaaatggaatgaaactaggaatcaaaaataataaaataactataaaagcatc

SEQ ID NO: 453634 - DNA, 201 bp, Homo sapiens
gcacttctccttcctgccaccttgtgaagaaggtgccttgcttccctttcatcttccaccatgactgtaagtttcctgaggcctccccagccatgctgaaytatgagtcaaacatctttcttttttaaattacccagtcctgggcagttctttatagcagtatgaaaacagactaatgcaaggtactagaacaaactgctc

SEQ ID NO: 453635 - DNA, 201 bp, Homo sapiens
ttgataaattttgacatttggctgttctttgtatttcaatagattttagcccaaatcatgataaactccataaaattttcaaacatgtgctttagaaatcyctctgtgacttaaatttcaacatagcctagggggtgaatattttttcaataaatggctaaaaaagagataaaagaattacaaatctttaaactatgttta

SEQ ID NO: 453636 - DNA, 201 bp, Homo sapiens
ccaccatgactgtaagtttcctgaggcctccccagccatgctgaattatgagtcaaacatctttcttttttaaattacccagtcctgggcagttctttatwgcagtatgaaaacagactaatgcaaggtactagaacaaactgctcagatttgaatttcagctctcacaattactaggtgcatatgattttgggcagggtg

SEQ ID NO: 453637 - DNA, 201 bp, Homo sapiens
aaacaatttgtttaaacaaagataattctggattagggaccccgtggccagagttcaagtccccaaactgacacttataaattaagttccctggctgcaarcctcctcatctataaaatgaagaggttgagctacagttatctaaagttccttctagctctttcctgtgccttcacggctaaagctaaatgttaaaaagtc

SEQ ID NO: 453638 - DNA, 201 bp, Homo sapiens
gttaaaaatatgcaaacttaaataatatgttgttaagtaatagatatgtatatagtaagaccataagaaaaaagatttaaagagtaagaagatgctaaacwccgtattcagggtaagattatctgttagaggtagtgggggaaggcatgtgcagttacgaaggggcacacagaggtctttctaggtattattatttacaat

SEQ ID NO: 453639 - DNA, 201 bp, Homo sapiens
tatttgaagccaaacaattttaattcatctatatcttcttctaaacaatttcctttatatctatacttatagtcttcaaggtgacattttatctagatatrtagggatttactgtttacaacttaaaacattattttaattgcgtattctcagatggaacaatcctaatttgctgttgtttaaattgtattatttatttcc

SEQ ID NO: 453640 - DNA, 201 bp, Homo sapiens
agaagtataatatgagagaaatagatagtaaaataatatcaaaattaaacttctagaaatgaaaactaagatagctgaaataaaaatttcactgaatgggrttaaaagcagataagacactgcagaagaaaagatcaatgaacttgaaggtgtaacagtagaaaacatacaaaataccaagagaaaaggaggttttacaaa

SEQ ID NO: 453641 - DNA, 201 bp, Homo sapiens
ttttgttatagcagcccaaacatattaagacaaagtggttgggtactttgaaactaatattttaactaaagcactctgagctttagaaatcatatttatartaactataatacatttccaaagaaagtataatttagtgaaaataaagggtcaaggggctgggtgtggtggctcacacctgtaatcccaggcctttgggag

SEQ ID NO: 453642 - DNA, 201 bp, Homo sapiens
caaagagtatggtactggtataaagcagatacgtacacaaattgaacagaatagagaatccagaaataaagccaatatctataagcaattgatcttctacraagcagaccaaaacatactgggaagaggacaccctattcagtaaatggtgctgggacaattggagaggcacatgtagaagaatgaaactggatccctatc

SEQ ID NO: 453643 - DNA, 201 bp, Homo sapiens
agtcaatggaaaaattaagttcatgctacctgctatatcctgaataataaatttcctgtatatttaacccagaaagtctcaagtgttctgctagcatttakgaaactggggcatactaattgatttatatttattgagtaaaatatcagacccctcacagttattttcaaatttaatatgcaaaattttttcctgtagcaa

SEQ ID NO: 453644 - DNA, 201 bp, Homo sapiens
aggctggggtggaggcagtagatataaaaagaagtgattgtgaaatacattttagagatgtaattaactgatgtcttgaatgtggaggggcagagccaaarcaatttggatgatatttccaatcagagtttctatcatgcctttcctgatcagtcactaaatgcccactgtttttatcctggaaatttgtgtttctagctt

SEQ ID NO: 453645 - DNA, 201 bp, Homo sapiens
gggaggtctgagtttgagatttgagacttaaagaaggtgaggtgaaaatcgtgtttaatcaaaaattcctttgtgatgtgcttcttgaaaattccttgacrtcccttcagtcagtaagaactaagcactttgtcgttgctggagccctagataagaatagcttcatttacacatcatgtagtataaaaattatattctaga

SEQ ID NO: 453646 - DNA, 201 bp, Homo sapiens
aggtgaggtgaaaatcgtgtttaatcaaaaattcctttgtgatgtgcttcttgaaaattccttgacgtcccttcagtcagtaagaactaagcactttgtcrttgctggagccctagataagaatagcttcatttacacatcatgtagtataaaaattatattctagattataaaatctagattcaggctcagtacatcaag

SEQ ID NO: 453647 - DNA, 201 bp, Homo sapiens
ttgctatatactatattattttctatagtacttttttatatccaacaagtatttaaaaattactgcgttatgccttttagaatgaagtattaaactcaaawcagcatagacaactagtaatgtctaaacataagtgccaacatgcagttgtttttatagtgtggcactgaatgattctttttaaaatcttgaatctttgct

SEQ ID NO: 453648 - DNA, 201 bp, Homo sapiens
cttggattccatcatgtttttcagaaaaatgtaattaaattttttaacctgtaattgaatatttctccttaatatatcacatgtacataaagctatctcamtttttaacatatgacataaacattatttacaccatattctccagctatgtttcagcagctcaactagatttttcaaatatttcaacattttaaaaaatat

SEQ ID NO: 453649 - DNA, 201 bp, Homo sapiens
aaagaggctttcaattgcattttcttctttgtataaattgatgacattacagttacaatttgtacttattttatccaataactgaatttttgataagttakgcaagtgaatatttatgtatcatgttatagctaacatttgaatttctatttcagatttattctcactaaggaataacatctttccaactacactaaaaag

SEQ ID NO: 453650 - DNA, 201 bp, Homo sapiens
tccaacaacatcaacaaaaagaaagaaagaaagaaatactttgatgcatttaataagtaacagaattctgtaggaaaatacatacagttagaccttgaacyactcagggttgccaaacccccatgcagctagaaatccatgtataacttctgactcccccaaaacttaactcttaatagcctgttgttgattggaagatta

SEQ ID NO: 453651 - DNA, 201 bp, Homo sapiens
gttatactgacattgccaccgctcaacaaatttatcaaattcagcttttggaaatcatgttcagactctgagacagtctttgaatgttcataatattgtcmgttctttgctccctgactaaactattttgttgacagtgaacaattattcagtcatgtgcagtcaaagtgatcaatgtggtcaaatattttgaaattattt

SEQ ID NO: 453652 - DNA, 201 bp, Homo sapiens
ggctgacatgacaactttagggaaaaaaagcaagcattactcggaaatgctaagacaactaagcaagtatagggctatatagcaagtaaatgtctttaaayattcctctgtattacatatgagtgctttttctggataatgtattttcatcaaaataaccaacatattataaaaaatgatgctttaaaaaggaaactgctg

SEQ ID NO: 453653 - DNA, 201 bp, Homo sapiens
ttgcctttagaagcaggattgaataaaaatattccattcatttttgtctttctgaactttgagatgagtcattttcatttagaagctgtcacaatttgtaygtttgttgggcaaaattagtaatagtttattcatacacttaactcacttcttaaatgatttaaagatcggtttgagtaatacttagcacctacattgtta

SEQ ID NO: 453654 - DNA, 201 bp, Homo sapiens
acatcacactctggggactgttgtggggtggggagagtggggagggatagctttaggagatatacctaatgctagatgacaagttaatgggtgcagcacascagcatggcacatgtatacatatgtaactaacctgcacattgcgcacatgtaccctaaaacttaaagtataataataataaaaaataaaaaaaaataaaa

SEQ ID NO: 453655 - DNA, 201 bp, Homo sapiens
gttattacaaattgctgaactacctgctacaagtgtgagccactcagagagtaacctaccagcagatagtgaaagagaagaaaatatagggttacaaaatrgtgaaacaatgctggggacaaactccccaaggaaacttggattttatgagcaacataaagcaatagcggaacatgtaaaagggatccatcctatttcaga

SEQ ID NO: 453656 - DNA, 201 bp, Homo sapiens
tacatatgtaactaacctgcacattgcgcacatgtaccctaaaacttaaagtataataataataaaaaataaaaaaaaataaaattgtttaaaaatgtttytcattagttgaatcctttgaatacttgctaaagagttatgggactgactctttcatttactgttgttgttggtgttttttatttttttttttgagacaga

SEQ ID NO: 453657 - DNA, 201 bp, Homo sapiens
attttttcctgtagcaatttaatttataagtaaattttaaaattgtaggtgtataaacaaatttacttcctaaatatttaaatgtaataaaaacacttagraatataatttttgtatttcaggatgattaaacatgcagtaaaataatgaagtcacatgttgctactggaatcaaaagttcctagtttttgtgatgtcttt

SEQ ID NO: 453658 - DNA, 201 bp, Homo sapiens
ctgagtatcttacattctggtgatttctaaacttcttaccggcctgaaaggtattacaagacctagacactgtattcctctctaacttcctcttggagccwctcctctctgttccagtcatccaaggcttctctatgccccactaatggaccaggcttacacacactttacattttaatttttatttcaatagatttgggg

SEQ ID NO: 453659 - DNA, 201 bp, Homo sapiens
ctactggaatcaaaagttcctagtttttgtgatgtcttttataataatgttgtatatgattgtagaaataatactaaaatactacattatcagattttcarcacttttcttctgaaaataatgggctgttacttttgagtcagagaatcagtggtctgtttgcatgtgttggagctgagaaactgatatcccaaaatatgg

SEQ ID NO: 453660 - DNA, 201 bp, Homo sapiens
tattaattaatatgcctcatgcctgtgatttttcagaaaacttttagggggccaagcctatggctcccacaaatgcatttcaagtcgtttaactgccatcwttcttaccagacaacctacttgtctttataaaatagatttatttggtaataagagttcctatttaaaaaaaaaacttgctttgaatttccagctgtcaga

SEQ ID NO: 453661 - DNA, 201 bp, Homo sapiens
gtatctagaggcggagacttaggtttggtgaacacttaatgactcatattcccaaatattttgttgtatccaagttcttttaattaatcgagatttactgmctgcctcctctttcccttttgtccagagtcatttaatgggccctgactttgtgcttcacactgtcctggtctttgtggttgaaaagatgaaaacatctct

SEQ ID NO: 453662 - DNA, 201 bp, Homo sapiens
aagtgtattttatatgtttgcatatttgtatatgagaaacactgcgcagtggtatcatgtgttacctaagaaagaatagaggagtagagggaaatagttgrctttccttcatatatctgtgccaatgttattttttcttttggttttgtgctagaaatacaaattgaaaaaaaaattttaatgaaacgtaagtattgaaga

SEQ ID NO: 453663 - DNA, 201 bp, Homo sapiens
tataattatgattttttatttttaataaatattctggtgttaatcctacatagtctaatattagtattgcttgtgctagtttctgttggttagtatttgtrcgatatctattttccattcttttatttttgtttttctgcatttgctcatttttatatgtctctagtgacagcatatagttggcttttatggtaaaattca

SEQ ID NO: 453664 - DNA, 201 bp, Homo sapiens
cccaggagggtggattgcttgaggccagaagttcaagaccaaccttgccaacatggcaaaccccatctctactaaaattacaaaagttagctgggcatggyggtgcatacttgtaatctcagctatgtcaggagactgaggcatgagaattgcttgaacccaggaggcggaggttgcaatgagctgaggtcataccacggc

SEQ ID NO: 453665 - DNA, 201 bp, Homo sapiens
gactctgtctcgaaaataaaaacaacaaacaacaaaaaaactctctatgtagatctcctttggttctgtttatattttctggctttttcctttttatttaygtatttatttgattccatctccttgtacacctgataatgtttaattaaataataggagtaatttgaggctctaacattattaactttctgcagaaaggat

SEQ ID NO: 453666 - DNA, 201 bp, Homo sapiens
aatttagaggatttaatgagaaataaatgtaaagagcagattagtcatccccccaaaattgtattattattttttcatcatcatgatcatcattacaaccrccaccaacatcaccactgctaccatacttccaaaccatgtattgtgggctccaaaagttattattataacatttttatcattgtgactatgagtctgatt

SEQ ID NO: 453667 - DNA, 201 bp, Homo sapiens
atttaatgagaaataaatgtaaagagcagattagtcatccccccaaaattgtattattattttttcatcatcatgatcatcattacaaccaccaccaacaycaccactgctaccatacttccaaaccatgtattgtgggctccaaaagttattattataacatttttatcattgtgactatgagtctgatttcaatagcta

SEQ ID NO: 453668 - DNA, 201 bp, Homo sapiens
agcatttaaacttttaaaaagctgcctgtgtttttataagttaaatatataatattaactatttagttgtgctatcctgaagagttaaaaagtatttgctwgggattctgactggtgtaagatatcccattgtggctttaatttacatttatctcatgaatgatgaacattttttcatatgctagattgccacatgtatgt

SEQ ID NO: 453669 - DNA, 201 bp, Homo sapiens
tatgaaaaatgtctttaaatttgtttatatggtgtgtggcttattcaacctgcccatttattttttcgttatgcaagtacgcactgatgatctaatatgarctaaggacttctggtagttattaaggctgttcccaagggcacttgagagaattacacttctccatctgccgccatatgactactttctttagccagtgaa

SEQ ID NO: 453670 - DNA, 201 bp, Homo sapiens
tgtttatgtggttgcttcatagtgtcactgatctgtaatttagtttatttttgtagtagctgctaatggtttttcctttctgtatttagtgcttccttcargagctcttgtaaggcaagtctggtggtaacaaattccctcagcatttgcttgtctgagaaagatcttatttctcctcctcttatgaagcttagtttgacg

SEQ ID NO: 453671 - DNA, 201 bp, Homo sapiens
ctcacacctgtagtcccagcactttgggaggccaaggtgggaggattgcttgagcccaggagtttgaggccagcctgggcaatatggcaaaaccctgtttytacataaaatacaaaagaaatagccggccattgtagtcccagctactcgggagactgaggcaggagaatggcgtgaacctgggaggcggagcttgcagtg

SEQ ID NO: 453672 - DNA, 201 bp, Homo sapiens
ggaacagctctaaaagttatttaggaaaaagaattatttgaacttataaccagaaaaatgtgagaagctaagtatccaggatgactcctagggtctataaygggagattctttgatagcagtgcctttcactggtacaaggaatctgcacgaagaaaaaattagaagatgacgaagtttgtttattctatgctgatattat

SEQ ID NO: 453673 - DNA, 201 bp, Homo sapiens
acatcaccagtagattatataatcttcagatgactgcagagatctcttcaaaattaggctgcctgtggttactcaggggatcttcttggaagagtgtttcrttattattgcacaccctatgtgaagttatctctaaaatgggattcactaatctgaaaaggcagtacaacatttctccttgtcttcagctaaagtaatcag

SEQ ID NO: 453674 - DNA, 201 bp, Homo sapiens
tcaatttgtttttattgtggacaaacagacttggttaatagcaccataaactaaaaacagtgttaggatcagggtcatatcacaggtcaaatgataataasaatttccttgctaataatagtttgatgagagccatgggaaaaactgtccttaggagactgcctgtgtcaatctattataaacaaatgtgggtggcctcaa

SEQ ID NO: 453675 - DNA, 201 bp, Homo sapiens
gtgtatgtattcagggaggtaaagaaaggcaatggcttaggaggattacataattgttttgagataattatccttggctacaagaatcaatagcaaacatractccagtcaaaggttggacaggcagttggtgggcaaatgttcttgcagaattattgttttgtgtaagggtagggtaggctttgtgcagtgctgtgggtt

SEQ ID NO: 453676 - DNA, 201 bp, Homo sapiens
tctttctattctgtctgagcttcagaaagtcttaaataatcgctcttagctcataacaagaccagggcttaaaatttaagttccttaaaagaagacacttrccctattctcagagagctttaactttaagagccaatttagcttcgaggattttcttctgactagaaaaaaaaaagatagtagggttagaaaagatagcag

SEQ ID NO: 453677 - DNA, 201 bp, Homo sapiens
tatttgagaagttagatgaagtaataattttcttggaaacctttaactaacagaattcaacaatatatcaaaaatgcagttcactccagaaatgtgaggtkggtttattaattgggagtgtactaatataaatgtatctattaagacatcacaggagaaaactacatgatcttacagatcttagataaaaattgttaacat

SEQ ID NO: 453678 - DNA, 201 bp, Homo sapiens
ctttgtattcctcaaataatttcaatatggaaattaggtaaagtaaatattgtcaagaattttagtcagacagaaagtaattaccataaagcttaataaartatcagatattaagcaatgttatttcctgatgaatcctctgaaatgagctgttgatgaaagataaccactgggtaacaaataagacaattttgcaaatgg

SEQ ID NO: 453679 - DNA, 201 bp, Homo sapiens
gggagattgagagtaaaataaaagaacattagaatacatgatatatttatttacaagtatatttgagaagttagatgaagtaataattttcttggaaaccwttaactaacagaattcaacaatatatcaaaaatgcagttcactccagaaatgtgaggtgggtttattaattgggagtgtactaatataaatgtatctatt

SEQ ID NO: 453680 - DNA, 201 bp, Homo sapiens
atcaatcattcaatcagtgaatgtattttcttaaataaaataattcttgttcctaagaactgaaatgtattttgctcacatgtcttcataaggtgcacatratttgaatcgggaataatttgcttagcaacccccttcagtacaagctgagacatcatgctgccagttcagtattaacagttctaaacggtgccacgtcag

SEQ ID NO: 453681 - DNA, 201 bp, Homo sapiens
gagccttttcaaattgtctgtctctctcccccaagttcaggaaaccatctgtctccctctactcacatttttcccactaactgaatcctctttattccaasgattaagttcagtgtctttaaatagaaaaatgtggagattttatgaattgccaaatgaaaatgaaaggttcggaatcactaaaattgatggtgttctgat

SEQ ID NO: 453682 - DNA, 201 bp, Homo sapiens
tcccagtatttaaagtaagataaaactatatataaaaataaaaaaagaaaaagaaaacactgatttttaactgacagattatgtccccctaattgcaggcwttagaataatttaccattgtgataatgcttgaaagttggattatattacagacctgtaagacggcattagactttgagtcaaaagtattcattcattttt

SEQ ID NO: 453683 - DNA, 201 bp, Homo sapiens
aaacacccagatttgagtgtcattggattggctttgactagcttgccttgtttgacatggcaattctgaaacaatcactatatccaaaagtatttggtggmgattgactagataatttgttgatgttgcatgacaagccctggaacacagaatgaaatttagaggggaaaggtgattccacaattgacatattggtgatat

SEQ ID NO: 453684 - DNA, 201 bp, Homo sapiens
tgtgtatatgtgtgtgtgtgtgtgtgcatatgtgtgtgtttgtgtgtatttgtatgtgacattttaaggctttattaccatatggctgaatcgatgccctratttcaaattgttaatttggtactgtcttttaagtgcctactatatgcaaggtacatataccaaatgtatgtcttccaaattcccttgttaaaaatcacc

SEQ ID NO: 453685 - DNA, 201 bp, Homo sapiens
atttaaacttttaaaaagctgcctgtgtttttataagttaaatatataatattaactatttagttgtgctatcctgaagagttaaaaagtatttgcttggkattctgactggtgtaagatatcccattgtggctttaatttacatttatctcatgaatgatgaacattttttcatatgctagattgccacatgtatgtttt

SEQ ID NO: 453686 - DNA, 201 bp, Homo sapiens
tgtgataaacatttttattcctctattcctgcctttctcaaactccaaattataacttacctacagaatcccctgtattgaggttggtttttaactgtgcytttaatttattctgtagtttttaaaactgctttagtatttacaatagttggcagtcatgaaggtagtaaattatgacctttattcgttatcataagaacc

SEQ ID NO: 453687 - DNA, 201 bp, Homo sapiens
aaacatttttattcctctattcctgcctttctcaaactccaaattataacttacctacagaatcccctgtattgaggttggtttttaactgtgcttttaakttattctgtagtttttaaaactgctttagtatttacaatagttggcagtcatgaaggtagtaaattatgacctttattcgttatcataagaaccccagtt

SEQ ID NO: 453688 - DNA, 201 bp, Homo sapiens
ataagtcattttaattttctgcatctttttttactcactatgctaattgatctctaaaattttcaaattataatgttctgtgagtaaataaaataatgaaragtaaatgttttttagtctcatatactaaggcacatttaatgcacctcccagtctttaacatgcattctgattggattatttattcatttggggaaatct

SEQ ID NO: 453689 - DNA, 201 bp, Homo sapiens
aaattaagataatcaccttgagttgattttctgatttttatcaggaagataaaataacttccctgtgctttttcatatgcaatattttgatagtaaaatartggtttactgtttgaaacctagaggaaagagaaaagaaaataataataaattgtgttaatccacacttggaaattttctataccttgtaaacatttattt

SEQ ID NO: 453690 - DNA, 201 bp, Homo sapiens
cgatctcctgacctcgtgatccacccgcctcggcctcccaaagtgctgggattacaggtataagccagcgcctccggccatatgctgagatttgaggggtraaggaagtatatttccagctgagggaaatgctaatctgaaggcactgaggcaagagtttacaaagcagtggggtattagtttgttattgctgctgtaaca

SEQ ID NO: 453691 - DNA, 201 bp, Homo sapiens
atttaaatcttgattactaagtcctttttgccatgttatgttacatagtcacaggcttgacaccatgggcataaattatggggctaaaattctgcctaccrtggtggttgaattttactgcacatgaagaggtcagtgaactgagtggctaacttgctttttagcctgtatattttggcattaatcagccaaaaatggttg

SEQ ID NO: 453692 - DNA, 201 bp, Homo sapiens
gccatttcattgtgtcattgtgaagattaaatgagtacatggctcattgttaagtgttagctactattattattattatactttaagttctgggatacatktgcagaacattcaggtttgttacctaggtatacctgtgccatggcggtttgctgcacccatcaacccatcatatacattagacatttcttctaatgctat

SEQ ID NO: 453693 - DNA, 201 bp, Homo sapiens
atcaagagcaaaattattaatttcaaaaaatttacaaaatgttagaatttgacttacagaaaattgtatacatatagttaaaacagctgtataaaactacttaatatgaatattttctttaaaattattacattttaatattgtaaaatattataaatgaagtataaatatttcactaagaagctttatggatttctttag

SEQ ID NO: 453694 - DNA, 201 bp, Homo sapiens
agctttaacattttagaagactgatatgatttggctgtgtccctacccaaatgttgtcttgaattgtagttcccataatccacacatgtcgtgggaaggasccgacaggaggtaattgaatcataggggtggttacctccatgctgttcttgtgatagtaagtgagttctcatgagactgatggttttataaggggctttt

SEQ ID NO: 453695 - DNA, 201 bp, Homo sapiens
gcttatgtatttttgcttccaaatgcaacagaaacttgtagacagaatatatggctccctatatagtagtatttgagaaaccaaataccataaaaaggctrtcttttgcagacataatccccttaatgtttgtgtgtggagttattccttttggataatacgtactctgttaaaataaaatgttataccagtctcttatca

SEQ ID NO: 453696 - DNA, 201 bp, Homo sapiens
aagaaacttcacaggagacccatgaagttcttaagttatagatgcagaaacattttcagcttgaacaaagtggggaacagagacagtttagaattagaagaaaccgtttgggctctcagaattatgctgatagggagtagactgagagagctgctcaactgaatgatgactcagagggcagaaccagaccccagcagttaa

SEQ ID NO: 453697 - DNA, 201 bp, Homo sapiens
caaaatttattgtaaataagttttccattaaatggcagtatcttattgggaatgcatttcttaaaaaaaaaaaaacacaaaaagaaacccatacactaacrtattttttaaaaaaatctatcattctgcaaaccaacacttcagagattacacatttttttctacatcttgccatgtgcttgtggagcaaacatttttttg

SEQ ID NO: 453698 - DNA, 201 bp, Homo sapiens
tgccgcgcaggctggagtgcagtggtgcaattttggctcactgcaacactgtaacctctgcctccctggttcaagtaattctcctgcctcagcctcccgartagctaggattacgggcataggccaccatgcctggctaatttttctatttttagtagagatggggtttcaccatattggccaggctgggggatttctggt

SEQ ID NO: 453699 - DNA, 201 bp, Homo sapiens
aatgttttccctccccaactttttaacaccacatcaacaggactccagtataataagtgaattatagctgagagagctggaaagcacatgctgcaacttasaaaaaaaaagaaaaaaaactcattaatacaagaatgagagtcaggaatagtagtcagaatcacagaatttttgttgctatttgttgtcattacatttatt

SEQ ID NO: 453700 - DNA, 201 bp, Homo sapiens
atcaacatttgttatgtagcaaatactcatatagtttgcattttgtggagctgagaggtacttatgtaaaattgtttccaaactttaccttctccctattytctaaaacaaatttctggcctggtcgacttcaattcttttactccgtagctacagtctgaatggggctgagggggattcttctttgtcagatactttctc

SEQ ID NO: 453701 - DNA, 201 bp, Homo sapiens
ctgggtatcctctaatgcaattctgatgctatcttcctgaagatactgtcagatccaatagattgggggctcattccccaagagtcctcttcagacatcarttgcaagtctggccctctgaacatctgagtgaccagcttcaagctgaggtttctataaccccctttttgtgttggattaactttctggagtggctcacag

SEQ ID NO: 453702 - DNA, 201 bp, Homo sapiens
tgggggctcattccccaagagtcctcttcagacatcaattgcaagtctggccctctgaacatctgagtgaccagcttcaagctgaggtttctataaccccmtttttgtgttggattaactttctggagtggctcacagaactcagggaatcactaacttaatttaccagtttattataaagaatattccaaaggatacaga

SEQ ID NO: 453703 - DNA, 201 bp, Homo sapiens
ggagtcctcaggaaacttatgctcatgatggaaggagaaggggaagtaagcaccttcttcacatggtggcaggaaagacagagagagagaaagagagagcwaagtgggaagggccatccttttaaacaaccacatctcgtgagaactcactatcaagggaacagcaagggggaaatctgcctccatgatttaatcatctcc

SEQ ID NO: 453704 - DNA, 201 bp, Homo sapiens
agatatcctaaagctcttagaacttagttctcttggatttttatggaagcattccttcctccaggatatgaggtgggaccctctcaggggaaggacttaayacaattagaaaagcaggggaagattagagtcctgccccaagaaagaaaggagagagattctgtttcctgaggcctttccctgagatctaatgcacccatt

SEQ ID NO: 453705 - DNA, 201 bp, Homo sapiens
ttaatcctttttgtttatgcaaatctcagctgtcattacaggcctaagtccatgaaaccttccatgacgactttaaccctcctggggagtttcttttgcascactctgagttgtgagcaatacctgcttggcaccagacaattaagtacagtctgttctgcaacaatgcatttttctgtagtgggaattagctccaacatg

SEQ ID NO: 453706 - DNA, 201 bp, Homo sapiens
tatcgaatttctcgatctcagccatatcgggtttgtcagacatggttgcggaggaaaagcggagcgaggcgcgcgagtacgagcgaagtctggtctgcgcmgtggccaccaccgagttgtcgccataatatttttaataatgtttgcatttcttctatattgctaacttctttgagaaatattattatgatctttgtctaa

SEQ ID NO: 453707 - DNA, 201 bp, Homo sapiens
tagcaaatggtgaatcctgccaggtctggatccttccttccgggcagcaggttcccttctagcccaggctgggtctagaaatgccatccaggcgctggggyctagaatcagtggcttcaggaatatgcagggtgcttcattttaatgtagctgagctggttaccagttgcaagacaaaatcctctgtactcctccctctcc

SEQ ID NO: 453708 - DNA, 201 bp, Homo sapiens
gagctagctggagctcagattcctacccctaggagggaggattctcctctggcaggaggggaaacctctaaatggtttctctgtgagcactggcagaattyggttctgtgttgtgttctcttgtgacaagacagcaccgagtcccaatgcaaagcctcacaatcacttcactctccctcccacaagctcacaaattttctg

SEQ ID NO: 453709 - DNA, 201 bp, Homo sapiens
tcagctttctacatatggctagccagttttcccagcaccatttattaaatagggaatcctttccccattgcttgtttttctcagatttgtcaaagatcagatagttgtatatacgtggcgttatttctgagggctctgttctattccattgatctatatctctgttttggtacctatcctctttaatgcctctccttcaca

SEQ ID NO: 453710 - DNA, 201 bp, Homo sapiens
tgctgagaatgatggtttccagcttcatccatgtccctgcaaagaacatgaacccatactctttcatggttgcatagtatcccatggtgtatatgtgccaygttttctttatccagtctatcattgatgggcatttaggttggttccaagtctttggtgttgtgaattattaataatattgtgttagctattattattaat

SEQ ID NO: 453711 - DNA, 201 bp, Homo sapiens
tgtgaattattaataatattgtgttagctattattattaatggtcattgctatgattttttacctacttaccaaagatttcaatattacactctatgcaasacaaataaacagtttttagactgaaaatctatgctaaacttaataattttgtgtatgtcatttggttcaataatgctacttaagaaacacagtattaacc

SEQ ID NO: 453712 - DNA, 201 bp, Homo sapiens
tctgtcgctaaaaacagaggaggtcaaatgatttttctaggtatagtagtcacagtaaatatctactgtcacatgtagggaagcagcagaaatatactgtsgcttctgttattggaaaactgtctgtatcttttctagctgtctcctccaagcatccttcaatggggaattaaccttgtacaattaaatttgcagcagagt

SEQ ID NO: 453713 - DNA, 201 bp, Homo sapiens
gaattaaccttgtacaattaaatttgcagcagagtaaaaactttttaagaaaaagagccatcttttaaaatattagcctgttgccatttagttcaaattaygcgattgataattcaaaaccacttacatgctcatttttatgctatgtgaattgaatgtcataaaattcatttattatgaacaaaatattcaaaatgcatc

SEQ ID NO: 453714 - DNA, 201 bp, Homo sapiens
aaaggttggtgtgaatgaatcatgtcaccttcatttgagttctctcttcaacctttttagtagaagaaaaaaatgtgaaggagaggaaatatgcttgtagrtataagttatattaagtattaatactcatgcacttacatgcttttaatataagttcaatgagaaaaaagagctctaaaatatttgtcaaactttttttaa

SEQ ID NO: 453715 - DNA, 201 bp, Homo sapiens
tactgttctttgtgaattttctcactcatacgttgtatctcaggttgggatccctagaagcagacgttgagacaggatttcagttgcccatatttattgayggtattttctcaagataaagggagtgagggaagtgagaaagttcaggggaattcactaaagcaagaaggtggttttcactgcagtctagattcagccata

SEQ ID NO: 453716 - DNA, 201 bp, Homo sapiens
ggatccctagaagcagacgttgagacaggatttcagttgcccatatttattgacggtattttctcaagataaagggagtgagggaagtgagaaagttcagsggaattcactaaagcaagaaggtggttttcactgcagtctagattcagccatatctcatggggataagaaggagcatgacttttaccatataattgtccc

SEQ ID NO: 453717 - DNA, 201 bp, Homo sapiens
tagacatatttaatttaatttcacaatgttcaatcattaaactgtcactgagtacctgttagctactgaaaagtaatagtgaactattattaatatatttwaaaaaaatacatgccctcctcctttatccaggaagaggtcaaaatctctgggggcaagagtcaagtataccaatacagtcataccttagagatactgaga

SEQ ID NO: 453718 - DNA, 201 bp, Homo sapiens
tgctgtttggtagcattttacccagagtagaactttgaaaattagagtccatcctctcaaactctgctgctgctttatcaactaagtttatgtcatattcyaaaacttttcttgtcctttcaacagtgttcacagcatcttcagcagaagtagatttcctcccaaggaaacactttttctgctcatctgtaagaagcaact

SEQ ID NO: 453719 - DNA, 201 bp, Homo sapiens
tgattcaattacctcccactgggtctttcccatgacatgtggggattaagggaactacaattcaagatgagatttgggtagggacacagctaaaccacagyagtgggtaaaatgccatcaaaccacattgcatgctgcagagtaatcttttgtggaaagaagagtcaacaaatgtggtaaacttcattctcttactttaag

SEQ ID NO: 453720 - DNA, 201 bp, Homo sapiens
tattatttttaataacatatttttaaataaagatacacacttttagccgggtgcagtggctcatacctgtaatcccagcactttgggaggccaaggcgggyggatcacgaggtcaggagatcaagaccatcctggctaacacagtgaaaccccatctctactaaaaatacaaaaaattagccagctacttgggaggctgag

SEQ ID NO: 453721 - DNA, 201 bp, Homo sapiens
gctgaggcaggagaatggcttgaacctgggagttggagcttgtagtgagccgagatcgcgccactgcactgcagcctgggctacacagcgagactgtctcaaaaaaaaaaaaaacacacacacacacacgtttataagatgtaatgctattgaacacttaataggctaaagtataggctaaatgtaagttttatatgcact

SEQ ID NO: 453722 - DNA, 201 bp, Homo sapiens
gaatggcttgaacctgggagttggagcttgtagtgagccgagatcgcgccactgcactgcagcctgggctacacagcgagactgtctcaaaaaaaaaaaamacacacacacacacacgtttataagatgtaatgctattgaacacttaataggctaaagtataggctaaatgtaagttttatatgcactgggaaacccaaa

SEQ ID NO: 453723 - DNA, 201 bp, Homo sapiens
acctgggagttggagcttgtagtgagccgagatcgcgccactgcactgcagcctgggctacacagcgagactgtctcaaaaaaaaaaaaaacacacacacrcacacgtttataagatgtaatgctattgaacacttaataggctaaagtataggctaaatgtaagttttatatgcactgggaaacccaaaaattcatcaaa

SEQ ID NO: 453724 - DNA, 201 bp, Homo sapiens
tcttttgaagggtttttcttgtccccatctccttcagctttgattttagttatttcttgtcttctgctagctttgtgatttgtttcctcttgattttctasttcttttagttgtgatgttaggttgttaacttgagatctttctaactttttgatgtgggcatttagtgctataattttccctcttaacaccaccttatct

SEQ ID NO: 453725 - DNA, 201 bp, Homo sapiens
ctgcatccctttattttgaacctacgtcattgcatgtgagattagtctcttgaagacagcataccaatgggtcttctgattccttatccagcttgccactyggtgccttttaactggggaatttagcccatttacattcaaggttaatatggatatttatggatttgattctgttatgatgttaactgtttattttgctac

SEQ ID NO: 453726 - DNA, 201 bp, Homo sapiens
tgactgtttctgttaagaagctcattgttgataagtttgtaaagcgacttatgtcttaaatatagttccaaatcgatttttaatgaaacccatgggttttaggagatcagaaaactaatttatgttgtgtagtaactcattctatgaccctgggaaatttggttctcattcttctacatgcaaaatactgtcattttaaga

SEQ ID NO: 453727 - DNA, 201 bp, Homo sapiens
gactgtttctgttaagaagctcattgttgataagtttgtaaagcgacttatgtcttaaatatagttccaaatcgatttttaatgaaacccatgggttttaggagatcagaaaactaatttatgttgtgtagtaactcattctatgaccctgggaaatttggttctcattcttctacatgcaaaatactgtcattttaagat

SEQ ID NO: 453728 - DNA, 201 bp, Homo sapiens
ttttagttttgagattttacagggttgagggtctcctattttctgactttactatggtccctttgcatttacccacaaatttgaatatgcaaaatttctgkgggtttttttttttttttttttttttttgagacggagtctccctctgtcgcccagactggagtgcagcagcgcgatctcggctcactgcaagctccgcct

SEQ ID NO: 453729 - DNA, 201 bp, Homo sapiens
actgtttctgttaagaagctcattgttgataagtttgtaaagcgacttatgtcttaaatatagttccaaatcgatttttaatgaaacccatgggttttaggagatcagaaaactaatttatgttgtgtagtaactcattctatgaccctgggaaatttggttctcattcttctacatgcaaaatactgtcattttaagata

SEQ ID NO: 453730 - DNA, 201 bp, Homo sapiens
ttatttcgccttgtgttctcttcacctcccattgcattactaatgcctggaatattacttctagtactatgaatttttcttttctttgtttattcatttaytgtagtatatcacatttatataaaatgattagattgctgtattaatactgtgattacagagggcatttattttgttcagttagttgtatatcttttggac

SEQ ID NO: 453731 - DNA, 201 bp, Homo sapiens
tgggtgtgtgcacatgtgctccaggtgaatgctcactctaagcagccagtaccggactgtctttgtcagtgagctgtccttagctttaggaaactaaggcytacattgcctgcagacactgagagcctgaaaaacatgggcatgcccagctttgctctcttcaccaatgacttggcctggactgggacaattctgaaatga

SEQ ID NO: 453732 - DNA, 201 bp, Homo sapiens
aaggtatcagcaaatttggttcctgatgaggcccttctttctggtttgcagatagctgccttgtggctgagaaatcatctatcttgagtctccttataagrgtgctaattctgttatgagaaccacaccctcattatttaattacttcctagaagtaccccttccaaacactaccatattgaggtttacgtcttcaacata

SEQ ID NO: 453733 - DNA, 201 bp, Homo sapiens
gctaattttttttgtatttttagtagagacggggtttcactgtgttagccaaggtggtctccatctcctgacctcgtgatcctcctgcctcggcctcccaragtgctgggattacaggcgtgagccaccgtgcccagccgataactttttgttttaaactagccgtttctaaattagagtagctgccatttttatcacttt

SEQ ID NO: 453734 - DNA, 201 bp, Homo sapiens
tggcttgtctcagttttagacatgacttcctcactgagctaaatcatttgtagcatttaatttagggtgagagaaattgtaactcttcctttcacttgaayacttagacgccattgtagcatgattaattggcataatttaaatattgttgtgtttcaggaaatagggagatccaacgagatggtcagagactagagaatg

SEQ ID NO: 453735 - DNA, 201 bp, Homo sapiens
ctcagttttagacatgacttcctcactgagctaaatcatttgtagcatttaatttagggtgagagaaattgtaactcttcctttcacttgaacacttagaygccattgtagcatgattaattggcataatttaaatattgttgtgtttcaggaaatagggagatccaacgagatggtcagagactagagaatgaccaatca

SEQ ID NO: 453736 - DNA, 201 bp, Homo sapiens
gcagtgctcggaattcaatgggaagttcaatttaattggcatgtggtttgattaaaattatgctctgacagttttaaaattagattaaaatagactaattratttagattaatcaagataaattttaaaactctaaaattatgtgtatacacttttaataaaatatatagcttcttaatgtatactttgtccctaggttga

SEQ ID NO: 453737 - DNA, 201 bp, Homo sapiens
gttgaggcacatggatccttctgctaggtaaatataattaaaaacaaaatactctcccaacctagaaatcctctccacaaaggtagcaggtaaagaacacrtctgtattattgagtaagagttaaaccagaatgtggtgaacatcataggcaaatctcttcactaaaagattgcaaaaacagcaactttgctcttttatgt

SEQ ID NO: 453738 - DNA, 201 bp, Homo sapiens
ggtaaagaacacatctgtattattgagtaagagttaaaccagaatgtggtgaacatcataggcaaatctcttcactaaaagattgcaaaaacagcaacttygctcttttatgtagtcaagcagatacaacccattatacatacgtttttaagatacataacatctagtcctcaaataaaaaggacttagtaccacttgtca

SEQ ID NO: 453739 - DNA, 201 bp, Homo sapiens
tttctaagaaaatggagaggagggaaatctgtttttttcaatagagagaattatgcttcatattttaaatttttctttgtccttgcactacttatgatggrattctttaggccccagaggaatcatttactcttatttctgacccagttatatagtttgaaatcccacagcagattgtaccttatctgagagcaggcatct

SEQ ID NO: 453740 - DNA, 201 bp, Homo sapiens
ttctttaggccccagaggaatcatttactcttatttctgacccagttatatagtttgaaatcccacagcagattgtaccttatctgagagcaggcatcttrttggagacagagatgctgactctagcatgatgaagggacaattgtcaagtctgacactgagagaagcgacaatacttacaaaaagcagatggagaagtgt

SEQ ID NO: 453741 - DNA, 201 bp, Homo sapiens
cagttatatagtttgaaatcccacagcagattgtaccttatctgagagcaggcatcttattggagacagagatgctgactctagcatgatgaagggacaaytgtcaagtctgacactgagagaagcgacaatacttacaaaaagcagatggagaagtgtaaaagaggggaggagagagagtaggatgaaatggacagtcat

SEQ ID NO: 453742 - DNA, 201 bp, Homo sapiens
cacattatgactctactgttgaactgtggttctgactcagtgacgcctacagtagaagaaaagatgcttaaggtgggacagttgtgacctaaaaattaaarctctaaatatttaagcttattttaagagcactaacacagcaaagcatatgcacagagaagaacatgaattatacactaatcaaattttaataagtggaga

SEQ ID NO: 453743 - DNA, 201 bp, Homo sapiens
gggacaattgtcaagtctgacactgagagaagcgacaatacttacaaaaagcagatggagaagtgtaaaagaggggaggagagagagtaggatgaaatggrcagtcattcggcttttctaatgggaagaaacaatcctgccacttaggtgactcctgacggcattgttttattaccaaacaaaaattaaaattgaccttta

SEQ ID NO: 453744 - DNA, 201 bp, Homo sapiens
gcttagtaaatatggatgcacagtgtctgaaaccagactgccagggttcaaatcacagcatggccatttactatcatcattgtgaccttgaacaagttacytcatcctttctcatttcattttcgtcattgatgaatagtgattattaatagtgctttacctcataagactgtgacgaggataaaaggagttttcagagag

SEQ ID NO: 453745 - DNA, 201 bp, Homo sapiens
gtctgaaaccagactgccagggttcaaatcacagcatggccatttactatcatcattgtgaccttgaacaagttacctcatcctttctcatttcattttcstcattgatgaatagtgattattaatagtgctttacctcataagactgtgacgaggataaaaggagttttcagagagacagaaaaagtgaaagagaagatc

SEQ ID NO: 453746 - DNA, 201 bp, Homo sapiens
tatctgccacattttctttatccagtctgttattgatggacatttgggttggttccaagtctttgctattgtgaatagtgctgcaataaacatatgtgtgygtgtgtctttatactagaatgatttataatcccttgggtatatatctggtaatgggattgctgggtcaaatggtatttctagtcctagatccttgaggaa

SEQ ID NO: 453747 - DNA, 201 bp, Homo sapiens
gtaggctgcctgttcactctgatgatagcttcttttgctatgcagaagctctttagtttaattagatcccatttgtcagttttggctttttttgctgttgmttttggtgttttagacatgaagtctttgtccatgcctatgtcttgaatggtattgcccaagttttcttctagaatttttatggtcctaggttttacgttt

SEQ ID NO: 453748 - DNA, 201 bp, Homo sapiens
tgtggaatactatttagccataaaaataacaaactagtgaaagtattttgcagcaacttggaagtaattcaggaatggaaaactaaataccccatgttctyatttataagtgggagctaagctgtgggtatgcaaagccagagtgatataatagacactggagacttagaagcagggaagtgtgaagggagtgaggggtga

SEQ ID NO: 453749 - DNA, 201 bp, Homo sapiens
gtatgcaaagccagagtgatataatagacactggagacttagaagcagggaagtgtgaagggagtgaggggtgaaaaattacctattgggtacaatgtacrctatttaagtgataagtacactaaaatcctagacttcaccactatacaattcatccatgtaaccaaaaaccacttgtacccctaaagctatagaaataat

SEQ ID NO: 453750 - DNA, 201 bp, Homo sapiens
gttatgtgaatatagtctctccctctctttcaaaatatcttattgtttgtaatattttcagactgtgatcgactgtgcagtctgaaactgtgattgactgygcagaactgaaactgcagaaagcaaaacaaaagataagtgtagactactgtataatgacattaaaaataagctgaaacactgacatttacatagttctta

SEQ ID NO: 453751 - DNA, 201 bp, Homo sapiens
agccagagtgatataatagacactggagacttagaagcagggaagtgtgaagggagtgaggggtgaaaaattacctattgggtacaatgtacactatttargtgataagtacactaaaatcctagacttcaccactatacaattcatccatgtaaccaaaaaccacttgtacccctaaagctatagaaataataataacaa

SEQ ID NO: 453752 - DNA, 201 bp, Homo sapiens
tggaatacagataattctggattagctagttgtatcttgtagttactagctgtattagtcagggttctttagagtgacagaactgatggaatatatatatmcacacacacacacacacacatatatacacttaataaactcacatatatatacacatatatatatatatatatataaacacatatatatatatgagtttat

SEQ ID NO: 453753 - DNA, 201 bp, Homo sapiens
tagtcagggttctttagagtgacagaactgatggaatatatatatacacacacacacacacacacatatatacacttaataaactcacatatatatacacwtatatatatatatatatataaacacatatatatatatgagtttattaagtattaactcacatgattacaaggtccacaataggccatctgcaggctgaga

SEQ ID NO: 453754 - DNA, 201 bp, Homo sapiens
atacattctctgaaatctaggcagaggttcccaaacctcaactcttatcctctgtgtgcccgcaggcccaacaccacatgtaagccaccaatgcttggggyttgtaccctctgaagaaagacctgggctgtacgttggcccctattagccatgactggagctagagcagctgggatgcaggctgccatggcccaaggctac

SEQ ID NO: 453755 - DNA, 201 bp, Homo sapiens
ggagaggctgcttcccttgttgggagaggctcctgtacggtgatgggaggctgcagtgaagatctctgaaatgacctggagacattttccccattgtcttkgctataacatttggctcttcattacttaggcaattttctgcagtcatcttgaatttttccccagaaaatgggtttttcttttctacctcatggtcaggct

SEQ ID NO: 453756 - DNA, 201 bp, Homo sapiens
ttgacaagctgaagaatagaaaggatgttttataatatatgtggaaatgtatatggttccagaaacatatcactgaaccaggattaaacatttcggttgtrtctatcagaaatcttgaaggcttaggccacattgtttttgtaaagtgcatgatttaactccataaagctatacctaaagatacagatctataatataaag

SEQ ID NO: 453757 - DNA, 201 bp, Homo sapiens
aaaggagatgtgccgttttacatagcatggatgatccttgatgacattatgctagcagtgtcatacattctaacaagatatatgtgtatatatttgcacamatataatcttttaatgttttctttaaaaactcagttcctcaaaatcagctcttctttatttgaaatagtagctgacagtatgggtagcacaataaagtat

SEQ ID NO: 453758 - DNA, 201 bp, Homo sapiens
ttatgtttagaacaattctatacagtagtttctaatattatcccagttagactgatgagaaaagctaggtctagagaggtaagtaacctttctatcaacamacatgtagtaagtggtaaagctacaatttaaacccctccagtatgactcctgaactcatagtcatagcaccatattatgctgtttcactgaattttagtc

SEQ ID NO: 453759 - DNA, 201 bp, Homo sapiens
tcatgcataatgtaaaattacacaaatattaatgtttccattaaactcctaatatgtataatattctgatctagaaaataatatattctcacttcttattwtgcctttccaatttatttcttcttattttatttcatttgattcctgattgtcctgcttctgtagaaaggtttcaaatgtggccattctatgtagtctatt

SEQ ID NO: 453760 - DNA, 201 bp, Homo sapiens
tttaatctcaagaaaacattttccttcttcatttataagaagcaacttctcaagcattcaaattttgttatgagtttgcagcaattcagttacttctttargctccacttctaattctagccctcttaatatttctacaacacctgcagttatttgcttcccttaagtgttgaaattttcaaagcccctcaccttccttct

SEQ ID NO: 453761 - DNA, 201 bp, Homo sapiens
taaaaatgttgtgaatagaaatcagacatagtgtgatcatgtcattttcttcaggcttagtaagagttaaattgtttcacttttcactgtagttgatattrattggtttatatatttgttttgtgagttaacgcatataattaggccaagttaaaaggaatcatatgtcagttgtattcatatttaaatatgctgtgaaat

SEQ ID NO: 453762 - DNA, 201 bp, Homo sapiens
acttaagaccagctgtaattgtaagattatagaatgttttccctccccaactttttaacaccacatcaacaggactccagtataataagtgaattatagcygagagagctggaaagcacatgctgcaacttacaaaaaaaaagaaaaaaaactcattaatacaagaatgagagtcaggaatagtagtcagaatcacagaat

SEQ ID NO: 453763 - DNA, 201 bp, Homo sapiens
cttacttgggtgacataggattcatattgattactgtaatttggattacagaagaaaaagtgctatttattcacatagaatatcaattttaaaatgtgagrccaggcgcggtggctcatgcctgtaatcccagcactttgggaggccaaggccggtggatcacgaggtcaggagatttgagaccatcctggctaacacggt

SEQ ID NO: 453764 - DNA, 201 bp, Homo sapiens
gcaccttttgtctttgtcagggatggggaaaagtaaccatctgaaatatgcctagagaattctctatacataagcctcttccaaggagaaaacactttacyagtcaaatatttatctcaccaaggagaaagaattcttactgaattccaggcctctctaacctttctgtccacattacatagaagaaataaaactgtgatg

SEQ ID NO: 453765 - DNA, 201 bp, Homo sapiens
atacatagaagtcaaatcaataattaagcagtacaacaataaacttcatgttagtattatgatgaacatcatatttttatgtgaaaagctacacacataayaatgaaggcaaatattatcaaatttattaatatgcattgaatagcgctagagtgtacagaaggcagatcgacctttatctcattacattaatgagatgag

SEQ ID NO: 453766 - DNA, 201 bp, Homo sapiens
aagaaaaagcaccttttgtctttgtcagggatggggaaaagtaaccatctgaaatatgcctagagaattctctatacataagcctcttccaaggagaaaamactttaccagtcaaatatttatctcaccaaggagaaagaattcttactgaattccaggcctctctaacctttctgtccacattacatagaagaaataaaa

SEQ ID NO: 453767 - DNA, 201 bp, Homo sapiens
cttgggctcatcagataaattaggacataaaactaactgctactcccaaatctagaaaggcaggcgattatagagaaaagcagctaagatccgtttaactrcagcagaagtcactgaaaccataaactggtagggacacttaaatggtaattccgatgaagatctgactgaatgctgagtgtggactagcttgagagtaag

SEQ ID NO: 453768 - DNA, 201 bp, Homo sapiens
gctttacatgtattaagcaatcctggctttagatattagggacaataaaaatttctgcaattttcccagttttatatagccattgtttgcaagtatgaaawcctgtcttttgttactgaaatattatcttttattttggcttttttgataacttttatgtttgccttgagcaagtcacttatcttttctatttgtgttttc

SEQ ID NO: 453769 - DNA, 201 bp, Homo sapiens
aattgttgtgactttccttataagattgaaaacaataaggtgtttttaatactttttttctgtgttctcttgaaagtagctttacatgtattaagcaatcytggctttagatattagggacaataaaaatttctgcaattttcccagttttatatagccattgtttgcaagtatgaaaacctgtcttttgttactgaaata

SEQ ID NO: 453770 - DNA, 201 bp, Homo sapiens
tggtaaaatcttactcatgcttcttatttcaaggtatacattacttcttcaaaaaagactgggctaggttttcctggaatctaataattatcttacataaygctcatcatactttaaaaaaaaaaaatctgcgtcttgtgcaatttgaatctgtccctagcaccattttatgtgctgctgcattctcagctctttcttttc

SEQ ID NO: 453771 - DNA, 201 bp, Homo sapiens
agagttcgagaccagcccagccaacatggtgaaaccccatctctactaaaaatacaaaaatcagccaggcgtggtggtgggcgcctgtaatcccagctacytggggggctgaggcaggagaatcgcttgaacctgggagacagaggttgctgtaagctgaggtagtgccattgtactccagcctgggctacagagtgactc

SEQ ID NO: 453772 - DNA, 201 bp, Homo sapiens
ttttttttttttttaagatagaatcttgctctgtcaccaggctggagtgcagtggcatgatctcagctcactgtgcaacctccacctcctgggttcaagcrattctcttgcctcagcctcccaagaagctgggaccacaggcacacgccacagtgcccggctaatttttgtatttttagtagagacgaggtttcgccatgt

SEQ ID NO: 453773 - DNA, 201 bp, Homo sapiens
ggcgacatactcagaccataggaccataacattaaaaatattacatatttatcaatagtgaatttgatagattatagcatatttatatttatataactgtattatatattatatatatttttatagctatgttgcttataaaattattaagtggagggaaaagcagattttagaacagcatattgtataacacgatgtgaa

SEQ ID NO: 453774 - DNA, 201 bp, Homo sapiens
gcgacatactcagaccataggaccataacattaaaaatattacatatttatcaatagtgaatttgatagattatagcatatttatatttatataactgtattatatattatatatatttttatagctatgttgcttataaaattattaagtggagggaaaagcagattttagaacagcatattgtataacacgatgtgaaa

SEQ ID NO: 453775 - DNA, 201 bp, Homo sapiens
tctttaataatttagaactgattcagttttctattctttctcatgggtttctgatttcttgaccactgttattatcacaagcaattgtatctacatgtatrctgtagaatgaaattagatgtaattgtaccaagaaaggctttattcccaattagtaattaagaaagttttaaattttttgattatttatatttttgagtt

SEQ ID NO: 453776 - DNA, 201 bp, Homo sapiens
catactcagaccataggaccataacattaaaaatattacatatttatcaatagtgaatttgatagattatagcatatttatatttatataactgtattatatattatatatatttttatagctatgttgcttataaaattattaagtggagggaaaagcagattttagaacagcatattgtataacacgatgtgaaaaacg

SEQ ID NO: 453777 - DNA, 201 bp, Homo sapiens
tactcagaccataggaccataacattaaaaatattacatatttatcaatagtgaatttgatagattatagcatatttatatttatataactgtattatatattatatatatttttatagctatgttgcttataaaattattaagtggagggaaaagcagattttagaacagcatattgtataacacgatgtgaaaaacgta

SEQ ID NO: 453778 - DNA, 201 bp, Homo sapiens
ctatactgtatcttctgcagactctttttttattaaacaaatattacatttattaaaatttactttttactttttgacatatagtttacacaaagttaaakaaaagttttaactagcttcatttcttttctggccattattaatattaatttattgccatattatttaatcctatgtttttcttttagaagaggacggtta

SEQ ID NO: 453779 - DNA, 201 bp, Homo sapiens
ctttttcctcccgtaatgtaaatatgaactcaagaaagccaggcctcattaaaaaaaatgtttaaaaacatgtatcccttttcgtgttattcaacctactktgttctcactcaaagcaaatattgaaaattatattcttacttgagtgtaagtaagcatgtaaacaatcatgtttctccaaccttttcaaatgtaatttac

SEQ ID NO: 453780 - DNA, 201 bp, Homo sapiens
cgtttctttggaaggcagtggatttttctcttgcgtctctgtcttcttcagtttcggcttatcgaatttctcgatctcagccatatcgggtttgtcagacwtggttgcggaggaaaagcggagcgaggcgcgcgagtacgagcgaagtctggtctgcgcagtggccaccaccgagttgtcgccataatatttttaataatg

SEQ ID NO: 453781 - DNA, 201 bp, Homo sapiens
ggatttttctcttgcgtctctgtcttcttcagtttcggcttatcgaatttctcgatctcagccatatcgggtttgtcagacatggttgcggaggaaaagcrgagcgaggcgcgcgagtacgagcgaagtctggtctgcgcagtggccaccaccgagttgtcgccataatatttttaataatgtttgcatttcttctatatt

SEQ ID NO: 453782 - DNA, 201 bp, Homo sapiens
atctttaataatttagaactgattcagttttctattctttctcatgggtttctgatttcttgaccactgttattatcacaagcaattgtatctacatgtaygctgtagaatgaaattagatgtaattgtaccaagaaaggctttattcccaattagtaattaagaaagttttaaattttttgattatttatatttttgagt

SEQ ID NO: 453783 - DNA, 201 bp, Homo sapiens
tttagtttggggaatagaaagaaaactcccaaacagattactttgagataactccaagaccttttggtccttatgattatcctcaatttaaagaaaaacayatgtacacacactgccagatgtggtggcttgcacctgtaatcccagcactttaggaggccaaggcgggtggactgtctgagctcaggagtttgagaccag

SEQ ID NO: 453784 - DNA, 201 bp, Homo sapiens
agttacataacctctcatttcttcagttttctcatctgcagtgcaaaggtaataatagtatctacttcatgtaatgtggtaaggcttaaatgagtcagtgaaaaaaaaaaagtgtgtgtaacattgtggctatttactgctaaactggttccattctgcatccagtaaatgtaattcctacggattttcaggtggctcttt

SEQ ID NO: 453785 - DNA, 201 bp, Homo sapiens
ggagaggcctaaggaaacttaaaatcatggcggaaggctgaggggaagcaaggtacttcttcacaaagcagcaggagagagagagagcttaagggaaactrccacttttaagccatcagatctcatgagaactccctcagtatcaccagaacagcataggggaaaccacccccatgatccaatcacctcccaccaggtctc

SEQ ID NO: 453786 - DNA, 201 bp, Homo sapiens
ttttgcttgtctcctgggggctccacaccagagatacgggtcagtaatcactcagtgcagtcagcccaggatggaggggctatgctgtgggtccaagccasaggttccctgtctggtgatgagcagttggaggtgtgtgggacccatgggagactaactacctcctctctttgggtcaactgcagcttattggaggtgtag

SEQ ID NO: 453787 - DNA, 201 bp, Homo sapiens
tctcctattaacgtaatgctaatactttcaatcaaaattaacccttcctttattgatgtatctataaaacgtaattattatgggatttcagttatggaatwctttttgtctcagagttattttaacaggcaaaatataaatttctttgtttcatgtatgactcatcttttctttagctcttcattcttctgtgtaggtaat

SEQ ID NO: 453788 - DNA, 201 bp, Homo sapiens
ttgaagcaattcacaagctaaaataatctgttagttaagatcagaaaataaaactccctcaaatcatgtgtgctggcaacacaacagagatggaagcaatyatgtgtgaaaggttaataacatgatattttaagattaaaaagatgaaactaagcttttccgtatttgtcataaagacataaaatttcaaaaacaaaatga

SEQ ID NO: 453789 - DNA, 201 bp, Homo sapiens
ttagaatatccataaataatggaggaacttattataaacaataggggataaaacaaagaacctctcttctgacacatgagaacaaatgacttcacatctcmtctatttttagagaatgatgttgaagtctattcatttatcctctgttattcatttttggataaataatgatgctcttttaaaacctgaagtccaaatgcc

SEQ ID NO: 453790 - DNA, 201 bp, Homo sapiens
gcctcagaaattggcaaacactgcaaattagggcctcttatttttggcaagcctgttgttaaatattgactagcacattactatgtgtataactgtatgattctatactgacaacataaatatttgcctgcaaatgaatagataagtttgaatttcttccacctttggcttaacatgcaacctgatcctctttgaacaaga

SEQ ID NO: 453791 - DNA, 201 bp, Homo sapiens
atttataaatttttagctaatatttcatattctttgtggagtaagagattggatatttggcacagaggattttcttttgtaaaacagatatttaaaaataygaccactttggtaggtagaggttttccttagcctatcactgaggaaaatgtctcccaatctagaatcaactatctagttgccatgtgtgtgaaggagagt

SEQ ID NO: 453792 - DNA, 201 bp, Homo sapiens
acagagtgttaatagatgactttcctaaagtttctagaactgtttcagggttgtggagtaataaaaataattccttggaaagttctacacagcaggctaamtaaatatacaggtcgagcatccctaatctgaaaatccaaaatccaaaatgctccaaaatttaaagctttttgagcactgacgtgacaccacaagtggaaa

SEQ ID NO: 453793 - DNA, 201 bp, Homo sapiens
attgagatttattgaataaacttgacatatttaaactgtttgccataattatgagcctagtacctgtatgccacaacagtattttaaagtactgtactttrcaccttcttcactaagaattgatctgataaatccctttttgctagattgtgtcatgtccatctttttaataccttccttgttcattattaagtgctgtta

SEQ ID NO: 453794 - DNA, 201 bp, Homo sapiens
aactaacaaggaattataagtttcttataatatatcagtcaatcaccagactcctttcatacttggaaatgtttccatgcatgggcttaagttaatgtagwattcaaacatttgagttctgttgtagcagataaaatgaagcctcaaatcattctctaatctgaagtacatcctggcagaactactgtgacttgtctgtta

SEQ ID NO: 453795 - DNA, 201 bp, Homo sapiens
tcattgaaccaatacacttcttctcctatctactttaggaatttttcctcatttcctggtcatccatttctcaaatgttttcttataactttccggtgtcstctgcattagcttttaaaatgtttatgattttataaagagcttctaatttcacattgattatttcaattaaacctaattccttgcttaaaatgagaggaa

SEQ ID NO: 453796 - DNA, 201 bp, Homo sapiens
taccacagagatgtactttttaaaaatgaccaaatcaagagcaaaattattaatttcaaaaaatttacaaaatgttagaatttgacttacagaaaattgtrtacatatagttaaaacagctgtataaaactacttaatatgaatattttctttaaaattattacattttaatattgtaaaatattataaatgaagtataaa

SEQ ID NO: 453797 - DNA, 201 bp, Homo sapiens
atttcttatgtgtttctctaatagactgtaattaatctgaaggcaagaatgacgttttatttatctctgaatctgatttttcaataaatctcaccaaatgsagaggataactagaaaattgagttctttaaagatattgggaataggacaaaatgctacctcagtaaaagtgacttaattttataaataaaacgggattaa

SEQ ID NO: 453798 - DNA, 201 bp, Homo sapiens
actgcactccagcctaagcaacatgtagaggaaaccccatctctacaaaaaaaggaagaaaaaagaaaatgcattcaatatacctaagctaccaaacatcrtagcttaatctagcctaactacaaatgtgctcagaacccttatattagcctacagttggacaaaatcatctaacacaaagcctattttataataaaatat

SEQ ID NO: 453799 - DNA, 201 bp, Homo sapiens
tgctaaggaaatttctcccttggaaactttacaaaggctacactgagagaaaataacctagagttttataatgaacacatacatgatttttcatttgtcartttcttacagtgacctgatgaaagctgagagcataatattgaagtccagctctgtaaaggcatttctgctaatgtgatcttggtatccagctgaaaataa

SEQ ID NO: 453800 - DNA, 201 bp, Homo sapiens
cagttttctcatctgcagtgcaaaggtaataatagtatctacttcatgtaatgtggtaaggcttaaatgagtcagtgaaaaaaaaaaagtgtgtgtaacattgtggctatttactgctaaactggttccattctgcatccagtaaatgtaattcctacggattttcaggtggctctttgatctgctgcattaaaatgtggt

SEQ ID NO: 453801 - DNA, 201 bp, Homo sapiens
cttggtatccagctgaaaataataaaatatgctcactagaatttcccaattaaatatttgcttaataatgaaatttgctttaattttccattgaaaactcrcttcttttttattttattttattttatttatttctttttttgagatacagtttctctcttattgcccaggctttagtgcaatggcgcgatcttggctcac

SEQ ID NO: 453802 - DNA, 201 bp, Homo sapiens
gacctcgtatattattacacactatacattctccaatatattattataaattgtatcaccattcaaatctccttcctctgtttgtgtgtgtgtgtgtatgwatatatatatatcttccagtgtgtgtgtgtgttgtgtatatatagatagatagatagagaatatatacatagatatagattgagaatatatatatatatg

SEQ ID NO: 453803 - DNA, 201 bp, Homo sapiens
gcaattctcttgcctcagcctcccaagtagctgggattacaggcatgcgtcaccacgtccagctaattttgtatttttagtagagacggggtttctccatrttgatcaagctcgtctcaaactccggacctcaggtgatccaccctcctcggcctcccaaagagccgggattacaggcgtgagccactgcgcccaccctaa

SEQ ID NO: 453804 - DNA, 201 bp, Homo sapiens
atcatccatcctcacagaatctgtttgcagttattggaataaaattattttctttatagagatctatttaatattgttatagacacctgcccatcataatrattaaatttttattgataaaaacaattataaatatgtataggtacatgtgatattttgatacatgcagataatgtttaatgatcaaatcaaggcattttg

SEQ ID NO: 453805 - DNA, 201 bp, Homo sapiens
tacatatatcatttatcacctttgctcaacactcattttctctcctgccaccctgtggagaggtgccttctgccatgtttgtaagttttctggggcttcgcctcccatgcagaactgtgagtcaattaagcctcatttctttataaattacccagtctcaggtatttttttatagcagcgtgagaacagactaatacagta

SEQ ID NO: 453806 - DNA, 201 bp, Homo sapiens
aacatgtgagtgctgtccctttacggtagaactatttgtttacttttggatatacatccagtaatgggagtgttgggttgaatggtagttctattttaagktctttgagaaatctccaaattgttttccaaagtggctgaattaatttacattcccaccaacagtgtataagcattctcttttctccacagcctcatcaac

SEQ ID NO: 453807 - DNA, 201 bp, Homo sapiens
cttccttgttctgttttgtttaagctgatgttgatttctaatttctaatgtacttcatttacttataaattgttattgctgcagttattattttgcaagactcatttataagataatatatagaaagtaacattcgatgtatcaaatttttaaagctaattttaaaaattaacttgacatcttgactttatattcttgata

SEQ ID NO: 453808 - DNA, 201 bp, Homo sapiens
gttaaagaaccatgttttgtcatagtaccagaattgttttttctggttccttctcatttgggtggctatgtcagagggaagatctggggctgaaggctgcwgttcagattcttttgtcccacggcatgttcccttgatgtagtactctctgtctcttcctagggatgtggcttcctgtgatccaagctgtagtgattgtta

SEQ ID NO: 453809 - DNA, 201 bp, Homo sapiens
ttccttgttctgttttgtttaagctgatgttgatttctaatttctaatgtacttcatttacttataaattgttattgctgcagttattattttgcaagactcatttataagataatatatagaaagtaacattcgatgtatcaaatttttaaagctaattttaaaaattaacttgacatcttgactttatattcttgatag

SEQ ID NO: 453810 - DNA, 201 bp, Homo sapiens
cttagttgtttaagaaggattggtgttagctctttaaatgtctgataaaatttagcagtaaagccaccaggtccttggctttttttttttttttttttacygggagactatttattatggcttaaatctcattacttgttatggtctattcagattttggttttctttatggctaaattttttgggttgaatatcctcaaa

SEQ ID NO: 453811 - DNA, 201 bp, Homo sapiens
tggttcatcttttagtctttctactcaagctatcagtagtatacatcccagaattacagtgttataatactctgtatttgtctgtcaacttactattaccrgtgaactttgtaccttcagatgatttcttattgcttgttaacatcctttactttcagattgaagaactctatttagcatttattgtagaacgtgtctagt

SEQ ID NO: 453812 - DNA, 201 bp, Homo sapiens
gagtctgcctttcccagctcactgactcaaatgttaatctccattggcaacagcctcacagacacaccctggatcaataccctgtatccttcaatccaatraatttgatactcagtattaaccatcacaccagcatagagtagtagaggccatggatgtggatatattgtgtacattgaggtcgtggttgggtgtacatgc

SEQ ID NO: 453813 - DNA, 201 bp, Homo sapiens
catcttttagtctttctactcaagctatcagtagtatacatcccagaattacagtgttataatactctgtatttgtctgtcaacttactattaccggtgarctttgtaccttcagatgatttcttattgcttgttaacatcctttactttcagattgaagaactctatttagcatttattgtagaacgtgtctagtgttga

SEQ ID NO: 453814 - DNA, 201 bp, Homo sapiens
ttttatccttcttcccaccttctatcctggcatactttttgtgaaagtgattttctctggtggtatgattacatttcttgctttttattatttgtgtatcrattgcagttttttgcatttgaggttaccatgaggcttgcaaataacatcttataacaaattactttaaactgttcaaaacttaacactgattgcataaac

SEQ ID NO: 453815 - DNA, 201 bp, Homo sapiens
tgtcagcaaatgaaaagatatattaataaattacaactaagctaggtgtggtggctcacacttgtagtcctacctcttcaaggggccaaggtaggaagttygaggccagcatggacaacataaagcaactccatctcaacaaaatattttaaaagtttctgggtaaaataatgaccatggtgaaaatcgaatcaagaactc

SEQ ID NO: 453816 - DNA, 201 bp, Homo sapiens
ccctcaaattttgtttgtctgggaaagactttgtatctccttcatgtttgaaagatattttctttaaatatatcatgccaccctctcctggcatatcaggwttctactaagtcccctgccaaacatattggagcttctttgtatgttacttgtttcttttcccttgctgcttttaggaccccttttaaaaaaatacttgat

SEQ ID NO: 453817 - DNA, 201 bp, Homo sapiens
gattattatcttacctgcatcctactatgctaatattaatatttcctttgcaatgtagagcaggtaaaaccttttaccattaacagtaatatttagagtcyaggagtataagtattaaaaatgagtataatccttgtccataatacccaagatttggggaagaaattggactactgtaaaagaggtggaacagaaagagtt

SEQ ID NO: 453818 - DNA, 201 bp, Homo sapiens
tttatttatttgtgacagagtctcactctgtcacccaggctggagtgcagtggggcagtctcagctcacggcagccttgacttcccagaatcaaacgattyttctgccccagcctcccaagtagctgggactacaggtgtgtgccaccacacccagctaatttttgtatttttagtagagataaggtttcaccatgttccc

SEQ ID NO: 453819 - DNA, 201 bp, Homo sapiens
atttatttgtgacagagtctcactctgtcacccaggctggagtgcagtggggcagtctcagctcacggcagccttgacttcccagaatcaaacgattcttytgccccagcctcccaagtagctgggactacaggtgtgtgccaccacacccagctaatttttgtatttttagtagagataaggtttcaccatgttccccac

SEQ ID NO: 453820 - DNA, 201 bp, Homo sapiens
aaaaaaaaaaaagacctaaagatatcttttaaagtttgaatggatattgataaatttactccaaatctgaggcaaagataatttcttataatatttaaagwatacttgtatttagcttagtattataaaactaatattgaatttcatgcccttctgaatttctgtgaaaatttaccatttctaaaaattattcataaccct

SEQ ID NO: 453821 - DNA, 201 bp, Homo sapiens
tgctttatgtggctttttttttctgccagtaccatgctgttttggttactatagctttgtagcgttaagttgaggtcaggtaatgtgattcctccagtttygctctttttgctcaggatggctttggctattctgggtcttttgtgactccatctaaattttaggatttttttttttctatttcagtggaaggtcatcggt

SEQ ID NO: 453822 - DNA, 201 bp, Homo sapiens
ttattaagttttttcctatagagtagtttaagcttcttatatattctagttattaatcccttgtcagttaggtagtttgcaaatattttctcccattctgyagttgtctgttcattttgttgtttgttttctgtgcagaagctttttagcatgatgcgatcccatttgtctatttttgctttagttacctgtgctttgggg

SEQ ID NO: 453823 - DNA, 201 bp, Homo sapiens
atccatgatgatcaagtggttttcatacgagggatgcagggatggtttaacagatgtaagtcaataaaagtgacacacaagcaaaacagaattaaaaacasatatcacatgatcatctcaatagaattagaaaaagcctttgacaaaatccagcattgctttatgattaaaatcgtcagcaaaatcggcatagaagggaca

SEQ ID NO: 453824 - DNA, 201 bp, Homo sapiens
tgctaggggacccagcaagcccacagggcttttcctgcttcttcctctacttctgcatttcacttggttctctaatttgtttcagctctagggaaggtcaraatcttcttccatgatctagaccttcaggttccccagtcagggtgtgtgttcaggggcagacaattcccctttctacttccacagtttgggcacccacat

SEQ ID NO: 453825 - DNA, 201 bp, Homo sapiens
ttgcctccagtccaccgtaatgttccccttttcccaagtctcatcttaatggaaagacgatgggccaggctgccacctcctaagcctttcagtgcccaggragtcattgtctcccaactgggccctcagtttacagttttaacatgagatcattgcaactctgatgctgaactagtgtttagtgtttaaaaatagcctttt

SEQ ID NO: 453826 - DNA, 201 bp, Homo sapiens
aattatttgtcttctattccattttttttcaccaatgttttatagttttcagtgtagagatcattcaccttcttggttaaatttattcctggcgatatttktttttgtagctattataaatgagattttttttgtgtgctatcagcatatagatacactactaatttctgtaggttaattttgtatcctgcaattttactg

SEQ ID NO: 453827 - DNA, 201 bp, Homo sapiens
ccctctcctggcatatcaggattctactaagtcccctgccaaacatattggagcttctttgtatgttacttgtttcttttcccttgctgcttttaggaccycttttaaaaaaatacttgatttggggagtttgattattaaatatcttaggtagtcttatgcgggttaaatctgcttggttttctttaacctttttgtact

SEQ ID NO: 453828 - DNA, 201 bp, Homo sapiens
taattgtatgttttttgtcctttattctgttaatgtgatgagtcacacttgatttgcatatgtagaaccattattgtatccctagtgtaagtcccacttgytgtgggacttttttactgtgagtgactgtgactttttactgtgctatttaattcagtttgttagtattttgttgaggatttttgcatctgtgttcatcag

SEQ ID NO: 453829 - DNA, 201 bp, Homo sapiens
tgttagtattttgttgaggatttttgcatctgtgttcatcagaaataatgacctataattttcttgctttgttatgtccttgtctgattttggaatcaaastaattcaaacctcatagaatgattcaggaagaatttcatcccttcaattatctgaaatagtttgggaagaattggtattagttctttaatgatttggtag

SEQ ID NO: 453830 - DNA, 201 bp, Homo sapiens
tcctttatcaacaaacgcaaatcattcaaaggtttgtatttgaagttttttaaataagcacataaagctagtggccatgtagcaaacctctaaattttttwaaaatgtttcttttgttcttatttttgtgaaaatttgttatgtctttcaactttagaagaagttttttttcccataaaaaaaaaatctcaccatggggtt

SEQ ID NO: 453831 - DNA, 201 bp, Homo sapiens
tgacctataattttcttgctttgttatgtccttgtctgattttggaatcaaagtaattcaaacctcatagaatgattcaggaagaatttcatcccttcaaytatctgaaatagtttgggaagaattggtattagttctttaatgatttggtagaatacagcagtggaggtgtcagattctgggcttttcattgctggatga

SEQ ID NO: 453832 - DNA, 201 bp, Homo sapiens
tctttctttatcttttgactttgagcctagggctgtcattttgcatgagatatgtctcttgaacgcagtagatggttgggtctctctttttttttaatccrattttccatttttgtcttttaagtggagtatttaggctgtttaccttcaaggttaatattgatatgtgaggttttgttcccatcatagtattgttagcta

SEQ ID NO: 453833 - DNA, 201 bp, Homo sapiens
aggcaggcagatcacgaggtcaagagctcaagagcatcctggccaacatggtgtaaccctgtctttacaaaaaatacaagaattagttaggcgtggtggtrcgcacctgtagtctctgctacctgggaggctgaggcaggagaattgcttgaatccgggaggcagaggttgcagtgagctgagatcgcgccactgcactcc

SEQ ID NO: 453834 - DNA, 201 bp, Homo sapiens
tcaatgttgagagcatatgtatttaaaagtgttatgtcttcttgattaattattccctttatcattaagtaatattctttctgtctcttgtgacagttttyaacttgtagtctgttttatctgacttcaatatagtcacccgtgctctcttttgattaccacttgcatgggttgtcttcttctatccttttactttcagca

SEQ ID NO: 453835 - DNA, 201 bp, Homo sapiens
gtacttatgggtgcttttatggtagcaagtattgtcctttcatttccatgtttagaattcctttgaacatttattatagggccattctagaaatctcttarcatttgtttgtctatgaaagacttcgttattcatttgattatgaagcttcattttgaaggatataaattcttggctggcatgtttttttctttaagaggg

SEQ ID NO: 453836 - DNA, 201 bp, Homo sapiens
taatttttaagttccaaaagccatttttgtctaatagataattgcatcatgtttgccaattgaattatattagaaagctcaaatgtgttttcctgcaaaamacacacacacacacacacacacacacacacacacacacacatttccttatcttttatttagggtgatatcaccactctctttgttagtattatgtgaaat

SEQ ID NO: 453837 - DNA, 201 bp, Homo sapiens
cctccctcccacaatttatatttttgatgtcacaatttacatctttttatattatggaattttaaaaacttattgcagctatcattatttttgaatctttygacttttaacatttatactaaagatatatatactatttatagagcaccataacagtcttggggattctgaatttgactgtatatttacctttacctgaga

SEQ ID NO: 453838 - DNA, 201 bp, Homo sapiens
ctgataaggtttttgttgagaagtcagctgttagtctaatgggattttctttatgggtaacttgtcccttttctcaagctgcccttaagatttttttctcycccttcatgttgaccttggataatctcatgactatgtgctttggtgatggtcatcttgtgtagtatcttacaggtggtctctgattttctttcttgtatt

SEQ ID NO: 453839 - DNA, 201 bp, Homo sapiens
aaatatttctgagggtgaggactcctttgatatatgccaatgtatcaaaatacttttttcttctggcaagtgaaataagaagaaaaatcagcacaaccackatatctggcatttattttctctcttttaccagctggtttccttgaattcaacctaagagtgcggttttcatttatgtgaaaaaagtgtaaggttaacagt

SEQ ID NO: 453840 - DNA, 201 bp, Homo sapiens
gggactgagcattatcccagactgtatgaagccaggtacaggaacagccaaggcatagaattgtggaacacaattgtggcttgggcccgggtggtagggarcagcacaataatgacttcactccctctcaggaggtgggtgtttctgcagcttagactctagggagataatacagctccagggaagctaagtactagaatt

SEQ ID NO: 453841 - DNA, 201 bp, Homo sapiens
ggacccaggaggaggtcatcaaaacatggtgaccagcctttcccatgctattctcgtggtagtgaataagtttcacaagatctgatgggtttatcaggggyttccacttttgcatcttcttcattttctcttgccaccactatgtaaggagtgcctttcacctcctgccatgattctgaggcctcctcagccgtctggatc

SEQ ID NO: 453842 - DNA, 201 bp, Homo sapiens
ttttgttctcagcattacttttacaaatattaaccagcaatccatgcaagttggacatcttgttgaacacctgaattcttgtgtgtgtgtgtgtgtgtgcktgtgtgtgtgtgtgtggggggtgaatttttatctctattcaatatgtgttatttatataaataatttctatttagcagtctataatttttcctgaaactc

SEQ ID NO: 453843 - DNA, 201 bp, Homo sapiens
acttttacaaatattaaccagcaatccatgcaagttggacatcttgttgaacacctgaattcttgtgtgtgtgtgtgtgtgtgcgtgtgtgtgtgtgtgtggggggtgaatttttatctctattcaatatgtgttatttatataaataatttctatttagcagtctataatttttcctgaaactcatttcccgtgttaaat

SEQ ID NO: 453844 - DNA, 201 bp, Homo sapiens
tagcatccaggatttgatcctgtatctctctgattgtaagaatcatgattattatcttacctgcatcctactatgctaatattaatatttcctttgcaatrtagagcaggtaaaaccttttaccattaacagtaatatttagagtctaggagtataagtattaaaaatgagtataatccttgtccataatacccaagattt

SEQ ID NO: 453845 - DNA, 201 bp, Homo sapiens
ttaaccattgtttgctctcaagcttttttacttttgacttaagtaccacaaaaatattaacttattttctttttattccttataccataattgccagaaargtttcctattctagcttggaaagaggatctgttccctaaaaatcaatgaatcatgacagtgtgatcatattataatgcctgaatgctctggcattagcca

SEQ ID NO: 453846 - DNA, 201 bp, Homo sapiens
atgtggtttgattaaaattatgctctgacagttttaaaattagattaaaatagactaattaatttagattaatcaagataaattttaaaactctaaaattrtgtgtatacacttttaataaaatatatagcttcttaatgtatactttgtccctaggttgatttaaacatggagcaaaatataatgcttcaggtgtaaata

SEQ ID NO: 453847 - DNA, 201 bp, Homo sapiens
aaccaatgagtgaacaagggagtagtacaagagccaacccacttttgctcaacagggggatttctgtaacaggaaatcttagctatgagcccctcatttgrctcatagagaatttgttagtaggaatcaaggtttgactgtcccctactcaatcctgaatcctcttcttttttttttttcttcacatttcctttcctttcc

SEQ ID NO: 453848 - DNA, 201 bp, Homo sapiens
ggaaagtatgtatgtgtgacgggagcaataagggggggcctggtcagaaaagtagcatgtttgcaaccatctgaaacaacgaatgcattcatgtaaagatyccttgtgttcttagcccagatactagcagtatttatagctttcatcagctaaaccctgttatatgatgtgtatcactacatacctgcttggatgtttcac

SEQ ID NO: 453849 - DNA, 201 bp, Homo sapiens
gttgaagattagttcattgtagatgtgtggcttttttctgggttctctattctgttccactgctctatgtgtctgtttatgtattggtaccatactgtctyggttattagagccttttgtatggtttgaagttggataatgtactgtctctggttttgtttttaatgcttatgattgctttgggtatttaggcattttttg

SEQ ID NO: 453850 - DNA, 201 bp, Homo sapiens
ctccttcagaaattttcctgggaataaaatctgagaattttttaaatgagcataattttggaaaactgagtttctttgcagttcctagtagccacaatatwgggaaatgttccattttaaactatttaattaacaaaatgttaattaatacaaaaatactgttgttaattgttcaacaaaaacaactgtagtagatatagg

SEQ ID NO: 453851 - DNA, 201 bp, Homo sapiens
tgttatatgatgtgtatcactacatacctgcttggatgtttcacagttatctcacttttcattatgctcagtatctcccattcacccttattttcagttcrtcctgcttcttcttcgcccattcatcccatctccaattgaacctgcttctcctgaagtgtttctcatatcaggaatatcaccatcaaccagcctcccatt

SEQ ID NO: 453852 - DNA, 201 bp, Homo sapiens
cactgctctatgtgtctgtttatgtattggtaccatactgtcttggttattagagccttttgtatggtttgaagttggataatgtactgtctctggttttgtttttaatgcttatgattgctttgggtatttaggcattttttggttccatgttatttttagcattgatttttctaattctgtataaaatgacattggtca

SEQ ID NO: 453853 - DNA, 201 bp, Homo sapiens
ctaactcttattttgagtctggaaaatagataggactctatcccttttgcaaaaagcatttcctctagacaattgcattatcctctaaatttcctttctcygatatcatccctacctctaatttcttctgcatacaacagacagaatgatgttggttaaatacaattgaattgtgctagaaacacttctatgatttcccac

SEQ ID NO: 453854 - DNA, 201 bp, Homo sapiens
tagaaatggcatctttatgttattctttctcctaacttccctttatatcacttaccaaaatttgtcgttttttacctggtaaaacatttgcttattggaartctatctctccttcgaagtagaagcagtgaaatagcgagaacaatgaccctttgcttacaactctctatgtcatgagagcattgtgtgctgctctctata

SEQ ID NO: 453855 - DNA, 201 bp, Homo sapiens
gctaaatagtatatccatcttctcatgtgtttatcttttgtgttgcaaatagtccagttatactctttaagttatttttaaatgtgtagccaaattattartaactatagtcaccctgttatgtcatcaaacacttggccttattctttctaactactttttgtacttactaaacatccctttttcccccaccactcccac

SEQ ID NO: 453856 - DNA, 201 bp, Homo sapiens
agtaaacatgggagtgcagagttcttcaatacacttattttctttttaaaaaatttttaattcttgtggatacagagtagttgaatattatttatggggtygatgagatactttgatataggcatgcagtgtataataatcacatcatgctaaatagtatatccatcttctcatgtgtttatcttttgtgttgcaaatagt

SEQ ID NO: 453857 - DNA, 201 bp, Homo sapiens
gcattcaatttaatagagaaacatgcttacagttttttaaaaatttctggatacgtagttgctatatatgtttacaggatatgtaagatattttgttgcakgcatacaatgagtgataatcacatcagggtaaatgagttatccatcacttcaagtatttatcatttctttgtgttacagacattccaattatattctttt

SEQ ID NO: 453858 - DNA, 201 bp, Homo sapiens
atgcttccaatttttatttgcaaagtagcatattaataattgccttgcaattttgagatgaagagtaaataatataaatttttataagacacttggcacadagtgctcaataaaggtaaaaggtgttattgttgctatagtttcctggaataaataactgctgtacagtgtttctcatggtgcttgcaataaaggaagcaa

SEQ ID NO: 453859 - DNA, 201 bp, Homo sapiens
tcaatcattaaactgtcactgagtacctgttagctactgaaaagtaatagtgaactattattaatatatttaaaaaaaatacatgccctcctcctttatcyaggaagaggtcaaaatctctgggggcaagagtcaagtataccaatacagtcataccttagagatactgagaatttggttccagatgccacagcaaagcaa

SEQ ID NO: 453860 - DNA, 201 bp, Homo sapiens
cagtttttcttctgcagtttcctcacttcttttagccttcatagaattgaagagattaagggccttgttgtggattaggccttggtttaagggaatgttayggctggtttgatcttctattgagatcacaactttttctgcaccagcaataaggctgtttcactttcttattatttatgcattcactagagtagtactttt

SEQ ID NO: 453861 - DNA, 201 bp, Homo sapiens
agacctagcttttggcttgtctcagttttagacatgacttcctcactgagctaaatcatttgtagcatttaatttagggtgagagaaattgtaactcttcstttcacttgaacacttagacgccattgtagcatgattaattggcataatttaaatattgttgtgtttcaggaaatagggagatccaacgagatggtcaga

SEQ ID NO: 453862 - DNA, 201 bp, Homo sapiens
tgtttctcctacccttagagtacctctggtcacttttactgcttctacttctccacaccacgtcctactcctaaatttgtgctataaaatctgctacattytttaaatattatattctatagtagttctactctggaaacattgttttattacctaatgaattcttctaggaactaaccagctaatccttttataataacc

SEQ ID NO: 453863 - DNA, 201 bp, Homo sapiens
attctgaatgtatcggcagaataaatacaattatatatgattattttcattgactttagaaagcaacagaataattattccttgcacattttaaatatgcwacagacttcagacatatgttttaaataatcatcagtattatcattgtcaaaattaacttccttattattatcatcattttttctatcacctttgccacaa

SEQ ID NO: 453864 - DNA, 201 bp, Homo sapiens
tttttaacttctatttttaagttcaggggtacatgtgcaggttcgttatataggtaaactcgtgtaatgggggtttgtggtgcagagtattttgtcacctrggtgttaagtctagtccccattagttatcaggaaatgtattcttaacctgtcatttgaatatgtcagagtttatagtatccaggttgccttacctacagg

SEQ ID NO: 453865 - DNA, 201 bp, Homo sapiens
aaactgttgtttatttaaagcctgttttatctgatactaaaatagcaacccctgctctttcttgtttttcatttgcatgatacatctttctttatcttttkactttgagcctagggctgtcattttgcatgagatatgtctcttgaacgcagtagatggttgggtctctctttttttttaatccgattttccatttttgtc

SEQ ID NO: 453866 - DNA, 201 bp, Homo sapiens
agcaagtattgtcctttcatttccatgtttagaattcctttgaacatttattatagggccattctagaaatctcttagcatttgtttgtctatgaaagacwtcgttattcatttgattatgaagcttcattttgaaggatataaattcttggctggcatgtttttttctttaagagggtaaaaataggcccccaatctctt

SEQ ID NO: 453867 - DNA, 201 bp, Homo sapiens
gctttctacaacccttagggtaacataacttttcttaacatggttatcaaacactgcataatgtggcatctgcttaccctttggttttatttcttgtgacrcttctagtatgctaagctcttgctctactgatgtgtaaattcaataccaatgtttcagacacctgagtcctttctcatgctgaaccccctctgcttgata

SEQ ID NO: 453868 - DNA, 201 bp, Homo sapiens
ctgatcttcctcaataaaaatatcaagcaagttaaagctggaaaaatctttatcatatattcaagatctcagtctcaatactgttggcaggtttctgtttytagtgatgcaagggttctggttttttttaatgagaataattttcaaggttgaattaaggacttatggttgttgtattagtcagtgccattttaactctcc

SEQ ID NO: 453869 - DNA, 201 bp, Homo sapiens
ctgaggcaggataatcacttgaacccaggggtggaggtttcagtgagctaagatcacaccactgcactccagcctgggtgacagagtgatactctgtctcaaaaaaaaaaaaaaataggtaagacaggtaaacatagtaaccaacctgaaagtagtaaacatagacatacatgaatttttaccttttatagttaaaatttt

SEQ ID NO: 453870 - DNA, 201 bp, Homo sapiens
agattgtgaactccttcagaaattttcctgggaataaaatctgagaattttttaaatgagcataattttggaaaactgagtttctttgcagttcctagtarccacaatatagggaaatgttccattttaaactatttaattaacaaaatgttaattaatacaaaaatactgttgttaattgttcaacaaaaacaactgtag

SEQ ID NO: 453871 - DNA, 201 bp, Homo sapiens
atgtggcatctgcttaccctttggttttatttcttgtgacgcttctagtatgctaagctcttgctctactgatgtgtaaattcaataccaatgtttcagayacctgagtcctttctcatgctgaaccccctctgcttgatatattacttcctaatctttattttcacctacctggaccaacccttactttttcgataaatt

SEQ ID NO: 453872 - DNA, 201 bp, Homo sapiens
ctggctcagagggtcctacacccatagagcctcgctcattgctagcacagcagtctgagatcaaagtgcaaggcagcagcgaggctgggggaggggcgccygccattgctgaagcttgagtaggtaaacaaagcagcctggaagctggaattgggtggagcccaccgcagctcaaggaggcctgcctgcctctgtagactc

SEQ ID NO: 453873 - DNA, 201 bp, Homo sapiens
tttgggacttgatgtgttgaaaaattcttctggacctatttcctgtagaagatatgtctgtattcatcattttttggatgatgattcaaaaaatcgtcatyctttggatgaatcacctcattaattttcattaattttcatcattaattggatgaatcacctcattaatctttcactcacaatgtaaaattcaggcaatag

SEQ ID NO: 453874 - DNA, 201 bp, Homo sapiens
agtaagagttgtttaaaggctttcattttgcctgctagatagatattttaggttggtgcagaagcaattgcagtttttgttatatagtaatggcaaaagcytaaattacttttgcaccaagctaatatttatgtgaatgttgccactgtatatatacaactaaagacaaaatgctgggtagcaaaaattcatttgcaaagc

SEQ ID NO: 453875 - DNA, 201 bp, Homo sapiens
taagtgttgtaaattcaaatgttacttccatcagaaggtctccttgactgctgatgttgttggatgtcccactttgcattcttacagagtactgtacttcscctatgactttgctaatcaaatattattgtgataatgtcctatttaattcactatttcttctatactgctctgtatgagaggacagatcaagtataccac

SEQ ID NO: 453876 - DNA, 201 bp, Homo sapiens
aaggacatccacaccaaaaccccatctatacgtcaccatcatcaaagacaaaaggtatataaaaccacaaagatggggaaaaaacagagcagaaaaactgaaaattctaaaaatcagagcacttctcctcctccaaaggagtgcagccccttgccagcaatggaacaaagctggacggagaacgacattgacgagctgaga

SEQ ID NO: 453877 - DNA, 201 bp, Homo sapiens
tttcattaattttcatcattaattggatgaatcacctcattaatctttcactcacaatgtaaaattcaggcaatagtgaaaatggagtatataagattctyttttaataaaagaaattctaatctgcgtatgaaagtaaacatttgtcatgtgatgttacagtatcaatttctcagacgtatatttgatttttacccgttg

SEQ ID NO: 453878 - DNA, 201 bp, Homo sapiens
attttgatgggttattgctatcaaccctcatttgagagtaagagttgtttaaaggctttcattttgcctgctagatagatattttaggttggtgcagaagyaattgcagtttttgttatatagtaatggcaaaagcctaaattacttttgcaccaagctaatatttatgtgaatgttgccactgtatatatacaactaaag

SEQ ID NO: 453879 - DNA, 201 bp, Homo sapiens
ggtaaaacctgtgcttccagttatgtttaataatgcacactcccagcttttcttccctttcataagcagatttgtatctgttgcttactgctggagacagkaatcaataatgatgaataacaatgtatgtaattcactcagaagaggcatattacatggactttagaagcgaattacatgaaaatcccccctgaaatgcca

SEQ ID NO: 453880 - DNA, 201 bp, Homo sapiens
aacgaaatgaagtgagaagagaaatttagagaaaaaggaatgaaaagaaacgaacaaagcctccaagaaatatgggactatgtgaaaagaccaaatctgcrtctgattggtgtacctgaaagtgacggggagaatggaaccaagttggaaaacactctgcaggatattatccaggagaacttccccaatctagcaaggcag

SEQ ID NO: 453881 - DNA, 201 bp, Homo sapiens
tgaatcacctcattaatctttcactcacaatgtaaaattcaggcaatagtgaaaatggagtatataagattcttttttaataaaagaaattctaatctgcrtatgaaagtaaacatttgtcatgtgatgttacagtatcaatttctcagacgtatatttgatttttacccgttgtttaatatcctcacttttctctttgta

SEQ ID NO: 453882 - DNA, 201 bp, Homo sapiens
aagctgtgtaagccataaaatcatatatgccaattttgttggttctgttaaacaggaaaataagggcaacattattatgttttgatttaaatttgcaggatttatgataagaaaaattattgtttgttattgctaacctttttctaaaatagatattaaatacattttaaaatagagtcacaaagctttgaaccaaagtag

SEQ ID NO: 453883 - DNA, 201 bp, Homo sapiens
tcatatccagccaaaataagcttcataagtggaggagaaataaaatcctttacagacaagcaaatgctgagagattttgtcaccaccgggcctgccctacragagctcctgaaagaagcactaaatatggaaaggaacagccaataccagccactgcaaaaagatgccaaaatgtaaagacaatcgaggctaggaagaaac

SEQ ID NO: 453884 - DNA, 201 bp, Homo sapiens
gtggtgaagatcttgatccattcaagaaactgaaagaaaatgagtgtgaggagagtcatgtttgcaagtgaaagagttgtgttaatatgagatgaaggtgrtaaaatagataaggtgatataaggcaggggctggctgtacatcatggtaaaaagtttaatttttattatataaaccagaatgctgcaataacagtataaa

SEQ ID NO: 453885 - DNA, 201 bp, Homo sapiens
aaatgtaaagacaatcgaggctaggaagaaactgcatcaactaacaagaaaaataaccatctaacatcataatgacaggatcaaattcacacataacaatrttaaccttaaatgtaaatgggctaaatgctccaactgaaagacacagcctggcaaattggataaagagtcaacaccaataagtatgctgtattcaggaaa

SEQ ID NO: 453886 - DNA, 201 bp, Homo sapiens
ggccctaacaggaagcatgactgggagtcctcaggaaacttatgctcatgatggaaggagaaggggaagtaagcaccttcttcacatggtggcaggaaagmcagagagagagaaagagagagcaaagtgggaagggccatccttttaaacaaccacatctcgtgagaactcactatcaagggaacagcaagggggaaatct

SEQ ID NO: 453887 - DNA, 201 bp, Homo sapiens
gtccagagcatattaaaattgggaattttttttttttgtggagcaagatgaccaaatggaaacctccactgacttgtctacacaaaaaagcacctacatasgaactgaaaatcaggttaaccatcctagtacgtggttttaactttatattgctaaaagaggcactgaagatggtaggaaagaaagtcttgaattgctgat

SEQ ID NO: 453888 - DNA, 201 bp, Homo sapiens
ttagggtgcaattgagcctatcacccaggtagtgagcacagtacccaataggtagtttttcagcccttgccctcctttgcctctcgtctagcagtccccaktgcccattgttgcagtctttatgtccacatgtacccaatgttttgctgccatttttaagtgataacatgtggtatttggtttagaatgaacaattaacca

SEQ ID NO: 453889 - DNA, 201 bp, Homo sapiens
actaacaagaaaaataaccatctaacatcataatgacaggatcaaattcacacataacaatattaaccttaaatgtaaatgggctaaatgctccaactgaragacacagcctggcaaattggataaagagtcaacaccaataagtatgctgtattcaggaaacccatctcacgtgcagagacacagataggcccaaaataa

SEQ ID NO: 453890 - DNA, 201 bp, Homo sapiens
ttcacatgggatttgtgtggggacacagaatcaaaccatattactcattaaaaacaaaaagcaaaacaaaactacatatcctttacatctagaatatgacrcacagttatctgggtacaagtattcctaatgatttcaatctctaaatatactaagttttccaattcatattttttatcagtctgtctcattcataaatga

SEQ ID NO: 453891 - DNA, 201 bp, Homo sapiens
tttttttttttgtggagcaagatgaccaaatggaaacctccactgacttgtctacacaaaaaagcacctacatacgaactgaaaatcaggttaaccatccyagtacgtggttttaactttatattgctaaaagaggcactgaagatggtaggaaagaaagtcttgaattgctgatgccacccctcccccattctctgacag

SEQ ID NO: 453892 - DNA, 201 bp, Homo sapiens
ggatcaaattcacacataacaatattaaccttaaatgtaaatgggctaaatgctccaactgaaagacacagcctggcaaattggataaagagtcaacaccrataagtatgctgtattcaggaaacccatctcacgtgcagagacacagataggcccaaaataaagggatggaggaagagctaccaagcaaatggaaaacaa

SEQ ID NO: 453893 - DNA, 201 bp, Homo sapiens
caaatggaaacctccactgacttgtctacacaaaaaagcacctacatacgaactgaaaatcaggttaaccatcctagtacgtggttttaactttatattgstaaaagaggcactgaagatggtaggaaagaaagtcttgaattgctgatgccacccctcccccattctctgacagtagctgcacagcacaggagagagaat

SEQ ID NO: 453894 - DNA, 201 bp, Homo sapiens
cagcttcagtctacagctcccagtgtgagcgatgcagaagatggttaatttctgcatttccaactgaggtaccgggttcatctcactggggattgtcagasagtgggtgcaggacagtgggtgtagcgcaccaagcatgagctgaagcagggcgaggcatcgcctcacccaggaagctcaaggggtctgggaattcccttt

SEQ ID NO: 453895 - DNA, 201 bp, Homo sapiens
aatactagcaaagggtttatagctgtctttaatctaccacactgagttccatatttatggataattattgaattaagaaataatagaattgaattttagtycaaaaattaattacacttgaatgagaaagagaatgtcataattattaaattatatttttcctatcaatgaataatatgcatttttacaagcacagggtca

SEQ ID NO: 453896 - DNA, 201 bp, Homo sapiens
gcatttccaactgaggtaccgggttcatctcactggggattgtcagagagtgggtgcaggacagtgggtgtagcgcaccaagcatgagctgaagcagggcraggcatcgcctcacccaggaagctcaaggggtctgggaattccctttcctacccaagcaaaggggtgacagacggcacctggaaaatcgggtcactccca

SEQ ID NO: 453897 - DNA, 201 bp, Homo sapiens
tagagatacaattgattttggtgtattcatcttgtatctgtcaaccttatcaaacttgtttattagttgcaatagtttatttttgtttgtgtatgtgtatktgtgttccttaggaattattaaaaatataagatcataagatcattccctttgcaaatagaggtacatttatttctttttttctaatctggattcctttat

SEQ ID NO: 453898 - DNA, 201 bp, Homo sapiens
tccttttgcatcttcaccatctctgctctgcatttaataaatatgaatcattttatagaaatacagattgttataaattatggttattttaatcataaggrtagtaattctcaaagcttagtttacagtttgacaatggtaaatgaaaaatttatatgttcacaaaaatattttgcaaacataggatttgtactttctaac

SEQ ID NO: 453899 - DNA, 201 bp, Homo sapiens
aaactacaagtgcttgctgttgagcaagtgtgaagcaagctttctcctaccacttttgatgtcctaaattatgtctttactctgatttggcaaacatggtstaggtaaatcatcttggagagttcttcctagaatgagtttacaaacaaatccactttatacttataaattataataattccgcttatattgattcatcat

SEQ ID NO: 453900 - DNA, 201 bp, Homo sapiens
gagggagctcacatttatataacttttattacagtatattgctttgttttataattattattaatctcattgtttttcatttataaattaaattttaccayatatatgtatgtataagaaaatacatagtatttatgacattccgtactatctgtagtttcaggcatccactgcgggggggtcttcgaagatatgcctgat

SEQ ID NO: 453901 - DNA, 201 bp, Homo sapiens
agttttctcttttttgttatgtcctttcctggttttgctattagggtggtactggcttcatcgaatgacttagggaagattctctctttatcttttggaakaatttcagtaggattagtaccaattcttctttgaatgtctggtagaattcaattgtacatccatctggtcctgtacttcttttcactggcaattttttaa

SEQ ID NO: 453902 - DNA, 201 bp, Homo sapiens
tgtgaggcaccacacctggctaggtgttggttttgttaaacccattcggccattctttaccttttaagtggagcatttaggccatttacattcaatgttawtattgagatacgaagtactgttatattcatcatattcatcatattagttgttacctagatacactgttttttttttcactgtgttattgttttataggcc

SEQ ID NO: 453903 - DNA, 201 bp, Homo sapiens
gatttggcaaacatggtgtaggtaaatcatcttggagagttcttcctagaatgagtttacaaacaaatccactttatacttataaattataataattccgyttatattgattcatcatgaattgtgctcataccctattaaaaaaaaagaaaaaaaaagacactcattagacttaaaatttattagtggcttaattagatc

SEQ ID NO: 453904 - DNA, 201 bp, Homo sapiens
atctgtctggaaactttttcacttatatattgaattttttttaaatttatttttgttgattttcacctttctctggtatttccttgagtagcttaataatmaaccttctgaatttttatttgctatttcaaatatttcatcttggtttggatccattgctagggagcttctgtgattttttggggatattaaagaaccctg

SEQ ID NO: 453905 - DNA, 201 bp, Homo sapiens
cactcctgcccctgtgttctggctgttcagatcagacaggtacctctttttgtctgtaagaacattgatattccaagtagagaggaattatgactctgccwctcatgcaatcctgaacctggggagtgctcctcctgtggggacataatcaccctgaaatgttccaggaaggctgtctatagatgtgtcctcgctgagttc

SEQ ID NO: 453906 - DNA, 201 bp, Homo sapiens
tgactctgccactcatgcaatcctgaacctggggagtgctcctcctgtggggacataatcaccctgaaatgttccaggaaggctgtctatagatgtgtccwcgctgagttcctgtgggaggagtctcagttgtgtctgcagttgtggacaaggcagaaacaagggccccttctccaagacccttcatgtgctgcctgactg

SEQ ID NO: 453907 - DNA, 201 bp, Homo sapiens
ggatccttagagcacaatatatgccagactggctttagacagcataatggttttgcccataagtaaataagtaaatctttgtcatcacacattgctatttytttttagacttgctcttcagttatgggcaactgtgtacaaatatgctatattaatttaatagccattaaagaagaaagaacgtatatactttcaaactga

SEQ ID NO: 453908 - DNA, 201 bp, Homo sapiens
ttataagaacaagaaataagagcaaggaaatattagaaaatctgtaatttgtgtatatatacaaaatatacttcatcttatgcttatttcccaacttggcrttagaaataagtatccaaggtacttctgttttctctgttttgtcttgttttttctacttggaaactaatactcaaagaccttgagccttatttaaaggcg

SEQ ID NO: 453909 - DNA, 201 bp, Homo sapiens
attagaaataagtatccaaggtacttctgttttctctgttttgtcttgttttttctacttggaaactaatactcaaagaccttgagccttatttaaaggcratctacttactatacactatatctaatggaaaggttaaaacatttgtgatgataaataacccaagctactagctacattcctttaaatcgttaagaaaac

SEQ ID NO: 453910 - DNA, 201 bp, Homo sapiens
atgtaaatgggctaaatgctccaactgaaagacacagcctggcaaattggataaagagtcaacaccaataagtatgctgtattcaggaaacccatctcacrtgcagagacacagataggcccaaaataaagggatggaggaagagctaccaagcaaatggaaaacaaaaaaaaaggcaagggttgcaatcctagtctctga

SEQ ID NO: 453911 - DNA, 201 bp, Homo sapiens
tttgcactggaagaactcagctggtacccatggagggagcatttagactagccctagccagagagaaattgcccattcctggggttggaacttgagtttcracaagcctcatcaccattggctaaactgtctggggtcctaaataaacttgaaaggctcactaggccacagggactacaaatcctaggcaagtcttagtac

SEQ ID NO: 453912 - DNA, 201 bp, Homo sapiens
acacattcaaagcgagcagaaggcaagaaataactaagatcagagcagaattgaaggaaatagagacacaaaaaacccttcaaaaaatcaatgaatccagragctttttattgaaaaaaaaaaaaaacttttttgaaaagatcagcaaaattgatagaccactagcaatactaataaagaagaaaagagagaagattcaaa

SEQ ID NO: 453913 - DNA, 201 bp, Homo sapiens
tggaagcgccatgtggtttctgcttctcagcatggctactgggttctttctgcaaaggagtaacctcagaaggagcattataactgaccatgatggaaggmctttcctgatctaatcctgaaagtcatgcagagtcatcatattctattaatcattgcaagtcaataagactagccaagatgcaaggacaggaacattaga

SEQ ID NO: 453914 - DNA, 201 bp, Homo sapiens
gcccattcctggggttggaacttgagtttcgacaagcctcatcaccattggctaaactgtctggggtcctaaataaacttgaaaggctcactaggccacasggactacaaatcctaggcaagtcttagtactatgctgtgcttggagcaagtggacttgggggctataaggagaggcctcttctgcttgagaaaagcagag

SEQ ID NO: 453915 - DNA, 201 bp, Homo sapiens
gcaaaaactggaagcattccctttgaaaactggcacaagacagggatgccctctctcaccactcctattcaacatagtgttggaagttctggccaggtcartcaggcaggagaaagaaataaagggtattcaattaggaaaggaggaagtcatcttgccctgtttgcagatgacatgattgtatatctagaaaaccccatt

SEQ ID NO: 453916 - DNA, 201 bp, Homo sapiens
caaagaagttaaaaaccttgaaaaaagattagacgaatggctaactagaataaccagtgtagagaagtccttaaaggacctgatggagatgaaaaccatgkcacgagaactacgtgacgaatgcccaagcttcagtagctgattcgatcaactggaagaaagggtatcagtgatggaagatcaaatgaacgaaatgaagtg

SEQ ID NO: 453917 - DNA, 201 bp, Homo sapiens
atacaggcaaaatgcattataaaatgtataagactggagtcaggaaactgaacctgggacaaactacccaaatttctgagtatgtggctgtaactttccgratttataaaatagaagtacaggaatgaaatcacttgtatgtaattttttatccgtatttcagattctttagtaggttatatcataagaacataaatattg

SEQ ID NO: 453918 - DNA, 201 bp, Homo sapiens
tcttctccttagcacagggatcattctcaaggatagaccatatgttaggtcaaaaaacaagtcttaaaacatttaatataattgaaatcatatggattatyttctttgatcatgattgaataaaactagaaataaataacacaagaaattttgaaagatgtacaacacatggaacttaaatagtttgtttctgagtgacta

SEQ ID NO: 453919 - DNA, 201 bp, Homo sapiens
atagattcaatgccatccccatcaagctaccaatgactttcctcacagaattggaaaaaactactttaaagttcatatggaaccaaaaaagagcccgcatygccaagtcaatcctaaaccaaaagaacaaagctggaggcatcgcgctacctgacttaaactatactacaaggctacagtaaccaaagcagcatggtactg

SEQ ID NO: 453920 - DNA, 201 bp, Homo sapiens
acaggtcaatatcattgataaacgttgattcggaaatactcaacaaatactagcaaactgaattcagcaacacattaaaaagatcattcataatgaccaastgggatttattccagggatgcaaggatgattcaacatatgcaaattagtcaatgtaataaattgacaagatgaaggacaaacaccatatgatcatttcaa

SEQ ID NO: 453921 - DNA, 201 bp, Homo sapiens
caaatatattgaaacatttaatgccatgtttctcagagtgtgacccacaaaatgttgctgatacaaaatgatataagtattttcttagctatctttcttcyttttaaaacagaacagctgaaactgggtaatttataagagacaaaattcatttattatatttctggtgtctgggaagtccaaagtcaagggggtgcatct

SEQ ID NO: 453922 - DNA, 201 bp, Homo sapiens
cacagaattggaaaaaactactttaaagttcatatggaaccaaaaaagagcccgcattgccaagtcaatcctaaaccaaaagaacaaagctggaggcatcscgctacctgacttaaactatactacaaggctacagtaaccaaagcagcatggtactggtaccaaaacagagatatagaccaatggaacagaacagagccc

SEQ ID NO: 453923 - DNA, 201 bp, Homo sapiens
tgattcaacatatgcaaattagtcaatgtaataaattgacaagatgaaggacaaacaccatatgatcatttcaattgacactgaaaaatcatttgataaartaataaaactgtaaaaaatactggatatagaaggaacacacctcaacataataaaatccatatgtgatagacccagagctagtatcatacagactaggga

SEQ ID NO: 453924 - DNA, 201 bp, Homo sapiens
agctgaaggcagcacagtgtatcccatggcaaggagactgacagtgctaacatgctagctcaggtctctcttcctcttataaagccacgagttcccttccrtgataacccattaatccattcatgagggcagagcctttatgatccaatcagctcttaaaccccccacctctcaatactgctacattagagattaagtttc

SEQ ID NO: 453925 - DNA, 201 bp, Homo sapiens
aaagagcccgcattgccaagtcaatcctaaaccaaaagaacaaagctggaggcatcgcgctacctgacttaaactatactacaaggctacagtaaccaaarcagcatggtactggtaccaaaacagagatatagaccaatggaacagaacagagccctcagatataatgccacatatctacaactatctgatctttgacaa

SEQ ID NO: 453926 - DNA, 201 bp, Homo sapiens
ccaaaacagagatatagaccaatggaacagaacagagccctcagatataatgccacatatctacaactatctgatctttgacaaacctgacaaaaacaagmaatggggaaaggattccctatttaacaaatggtgctgggaaaactggctcgccatatggagaaagctgaaactggatcccttccttacaccttatacaaa

SEQ ID NO: 453927 - DNA, 201 bp, Homo sapiens
tgccacatatctacaactatctgatctttgacaaacctgacaaaaacaagaaatggggaaaggattccctatttaacaaatggtgctgggaaaactggctmgccatatggagaaagctgaaactggatcccttccttacaccttatacaaaaattaattcaagatggattaaagacttaaatgttagacctaaaaccataa

SEQ ID NO: 453928 - DNA, 201 bp, Homo sapiens
tttgtggacttatattaatttatttctatcaaaaacattgctttcctttgatgtggtctacaatcaggaaaaatttgcaaaaggaaatttatccttattttatatatatatatatatatatatatatatacacatgacatatatatacatacatgatatatatgtacatatatattgacatacacacataaatatccttga

SEQ ID NO: 453929 - DNA, 201 bp, Homo sapiens
gcatttcagcataatattattgttcaaaataatttatggattttacttgcttttagtttttgacatttgatttctatttagttaatagtcttaaacaatgrgataattccaaatacaggcaaaatgcattataaaatgtataagactggagtcaggaaactgaacctgggacaaactacccaaatttctgagtatgtggct

SEQ ID NO: 453930 - DNA, 201 bp, Homo sapiens
ttgtggacttatattaatttatttctatcaaaaacattgctttcctttgatgtggtctacaatcaggaaaaatttgcaaaaggaaatttatccttattttatatatatatatatatatatatatatatacacatgacatatatatacatacatgatatatatgtacatatatattgacatacacacataaatatccttgaa

SEQ ID NO: 453931 - DNA, 201 bp, Homo sapiens
tgttctgttccattggtctatgtgtctgttttggtaccagtaccatgctgttttggttactgtagcatttcagcataatattattgttcaaaataatttayggattttacttgcttttagtttttgacatttgatttctatttagttaatagtcttaaacaatgagataattccaaatacaggcaaaatgcattataaaat

SEQ ID NO: 453932 - DNA, 201 bp, Homo sapiens
ggaacttaattcagcaagcaaaattcaaaaacccccattaaaaagggggcaaagaacatgaaagacacttctcaagagaagacttacaatggacccacaarcttatgaaaaaatgctcatcatcatcaatcattagagaaatgcaaatcaaaatcacagtgagataccatctcacaccaatcagaatggcttctgttgaaa

SEQ ID NO: 453933 - DNA, 201 bp, Homo sapiens
ggaagggggtccagtttcagttttctgcatacgtctagccagttttcccaacaacatttattaaatagggaatattttccctattgcttgtttgtgtcagrtttgtcaaagatcagatggttgtagatgtgtggtgttatttctgaggcctctgttctgttccattggtctatgtgtctgttttggtaccagtaccatgct

SEQ ID NO: 453934 - DNA, 201 bp, Homo sapiens
aaagtcagagcacagacccccctaactttgcccccacttggggaagcattttttaggcataaagctacaaaagaaagatatagcagttttcaagtcacacytgacttttagagcaccatagtaaagaggacctcttgttaaaatacaccgtgggcttgatgaatttccttatgagcataatctgtgatattccaaatgtgc

SEQ ID NO: 453935 - DNA, 201 bp, Homo sapiens
tgagaagtgtctatttatgtcttctgcccgctttttaatggggttatttgttttatgcttgttaagttgtttaagtttcttacagattctggatattagamctttgtttgatgcattgtttgcaaatattttctccagttctctaggttgtctgcttcttctgttgatagtttcttttgctgtgcagaagctctgtagttt

SEQ ID NO: 453936 - DNA, 201 bp, Homo sapiens
ctaagatttctaatatttaatgtaaatattattcacttatcattcatgcagcacttgctctatgccagggacaggctttggttcagtgatctcaaaaatarttagtagtgttacccaaattcaagcagtggcgtagattggatactccaattagtggaccctgatcttaagatttagatgtaagtgacttattaagtaagt

SEQ ID NO: 453937 - DNA, 201 bp, Homo sapiens
ccttatgagcataatctgtgatattccaaatgtgctctttattgctattcttgtcaatattctcttcttccacaattaactggtgttacagtcccaatttrtaaatggctttgagtgttttgagcagttttctaccctcactttcataaattgagtggaatcttgcactttttacatgttctgctttggaatttattgtat

SEQ ID NO: 453938 - DNA, 201 bp, Homo sapiens
tagtttattacagaatattttcatattaggatcatttatgtcactgccccacctacaacacaaactaacaagagaagaactgacaagaacatccttcataytgtgttactttcctgtttactggaatgctttttgtaggttgtttttgtatatttctaaactttatttttctccttttggtgtcaatcagtaaatctgctc

SEQ ID NO: 453939 - DNA, 201 bp, Homo sapiens
gagttggaagatttggaacaaatcccaattttgttgtatcatccttatttagtgaaaatgttaataattattaagcatctgtcatgaattaggtaccttgctaactaactactttatatattttaataatccacaattgtagtgtgccagagttggagccttcaagttttagtgattaattgaaaagcacaacttatttct

SEQ ID NO: 453940 - DNA, 201 bp, Homo sapiens
tgtttactggaatgctttttgtaggttgtttttgtatatttctaaactttatttttctccttttggtgtcaatcagtaaatctgctctactattcagtgtstacatagctgtctaatacacttttttttttatcctggatggttgagtttgctggaatattttgagacaattaacatttataacattttaatccagctatc

SEQ ID NO: 453941 - DNA, 201 bp, Homo sapiens
atttattatttttaatttcatcttattaataaaaataataatgtaaatggtcacagaatttctttccccagtaaccttttattgaggctacagtagacaayatatttactttcagtggaagaaatagtaaacttcccatgaattaaagtagatcagattttatagaaatgtttctatgccctatgcaggtgaattcaatat

SEQ ID NO: 453942 - DNA, 201 bp, Homo sapiens
gttggacaggaaacaatatttcaattttgtgtctaattttttgagtgatttggataaaataaaaacatttgtgatgatctaatcagtgggataaattcatytgaaaatctttatatcaaataggtaagttagcaaacatgccaaactaaagaaatgaaccacttctattttagcttgactttcatttgctacaattatttt

SEQ ID NO: 453943 - DNA, 201 bp, Homo sapiens
gtctctcttcctcttataaagccacgagttcccttccctgataacccattaatccattcatgagggcagagcctttatgatccaatcagctcttaaacccyccacctctcaatactgctacattagagattaagtttcaacatgagttttcaaggggacattaaaaccataccaagtttagaaactgaaagtaaggtgttt

SEQ ID NO: 453944 - DNA, 201 bp, Homo sapiens
aagccctaattaattatttggaaatctttatcaataaataagccctatgtttctaaaaatagttatgaaatatatatgtgtgtgtatatgtatgtgtatakgtgtgtgtgtgtgtgtgcatatgtgtgtgtttgtgtgtatttgtatgtgacattttaaggctttattaccatatggctgaatcgatgccctaatttcaaa

SEQ ID NO: 453945 - DNA, 201 bp, Homo sapiens
gctaataacaaaaacagaaaactattctgtatgtttttgcttttaaattttatttctagaatttgtttgtattgtgtttaccaaaaaatggtttgtaatamatttattttttttaaattctgagaaaaactgagtttttaaaaagttttaaatgtgaattctaatgagaaattaaaggagattttgccttttattagtaga

SEQ ID NO: 453946 - DNA, 201 bp, Homo sapiens
aaatctgtgaatactaaaatccttcattaactggtgccaacatttttccaaaggagtttctaattcttaaatattgttcagtggattgagataatcaatcktaatcaacagtaaaaagaaaataaagtactgatttatttcagttctctaattcaaaataggattaatatatgcaaattttgttcaataagagttttatct

SEQ ID NO: 453947 - DNA, 201 bp, Homo sapiens
tatttataggaatgatgcaaacttgtagacattttaatatatatgagatagtccatgaagactttcagaaataagcaggtatgactttaaaaaattgaagkttatgtgagttgatgagagacaggtagaagaatatagcttcttcaactattagtatattatatacatattagtaattctcttttatttaaatgaccttac

SEQ ID NO: 453948 - DNA, 201 bp, Homo sapiens
tatggtgtccagcctgggagtttaaaaaatggaaagataggataatagttttaaaagcagtaaatattcttccagctgtctctaatcaattcacatacctycaattctttaaagtcacactttcttatttctaaaaagcttcagggactatcttatatattcttagaaatacatattgaatttttcattttcacttcattc

SEQ ID NO: 453949 - DNA, 201 bp, Homo sapiens
tgtggacttatattaatttatttctatcaaaaacattgctttcctttgatgtggtctacaatcaggaaaaatttgcaaaaggaaatttatccttattttatatatatatatatatatatatatatatacacatgacatatatatacatacatgatatatatgtacatatatattgacatacacacataaatatccttgaaa

SEQ ID NO: 453950 - DNA, 201 bp, Homo sapiens
atgaaagacacttctcaagagaagacttacaatggacccacaagcttatgaaaaaatgctcatcatcatcaatcattagagaaatgcaaatcaaaatcacwgtgagataccatctcacaccaatcagaatggcttctgttgaaaagtcaaaaaatggcagatgttgatgaagatgcagagaaaaggggacacatacactat

SEQ ID NO: 453951 - DNA, 201 bp, Homo sapiens
tactataactgataacagtagcaaatcctgtggatactacctgaagtcattttgtggcaaagctgaaccccctgaaacttctctaatcagtaagaactagmacactgtgccaaggacagcaggatgttttgcagagagaaatacccactgcactgagctaagaagggagaaatcctttctctgtgccacactgttgcagtg

SEQ ID NO: 453952 - DNA, 201 bp, Homo sapiens
gtggacttatattaatttatttctatcaaaaacattgctttcctttgatgtggtctacaatcaggaaaaatttgcaaaaggaaatttatccttattttatatatatatatatatatatatatatatacacatgacatatatatacatacatgatatatatgtacatatatattgacatacacacataaatatccttgaaat

SEQ ID NO: 453953 - DNA, 201 bp, Homo sapiens
agtcaccatgggaatacccgtgattgacttgcctatttggctgcatttcactctcacacattgtgatgggataaaaacactatattttctaaactgaattktcaaaaaggcactaaggatgactgagcaaagcattctgttatcaatagcgctgtactcagataccagcatgtgaaatctacatttatgtctgcaattttg

SEQ ID NO: 453954 - DNA, 201 bp, Homo sapiens
cactgagctaagaagggagaaatcctttctctgtgccacactgttgcagtggaacccaaattgtgttttctgttcctggtaggtaatcatgtgtattaaaraatcttattctgtttttaattttactctgtataggggtgtgtgtatgtgtgtgtttggttttgattttgtctgcttgtttatttttaattcacaagcttt

SEQ ID NO: 453955 - DNA, 201 bp, Homo sapiens
tggacttatattaatttatttctatcaaaaacattgctttcctttgatgtggtctacaatcaggaaaaatttgcaaaaggaaatttatccttattttatawatatatatatatatatatatatatacacatgacatatatatacatacatgatatatatgtacatatatattgacatacacacataaatatccttgaaata

SEQ ID NO: 453956 - DNA, 201 bp, Homo sapiens
ctacaatcaggaaaaatttgcaaaaggaaatttatccttattttatatatatatatatatatatatatatatacacatgacatatatatacatacatgatmtatatgtacatatatattgacatacacacataaatatccttgaaatatatatatatatatctgacatatatttgaaatatatatattcttggaatatata

SEQ ID NO: 453957 - DNA, 201 bp, Homo sapiens
gagtttggaaatagcctctcctcctcaacttttttggaatagtttaaacagtttatatttgttcttctttaaatgtttggtagaagttagcagtaaagctrtcaggtcctgggctttttttcattgggagacttcctagtactgtttctctttcactacctgttattgtatacattttagaaatattttgcaattttattg

SEQ ID NO: 453958 - DNA, 201 bp, Homo sapiens
aatatattctaatcattgtaattgcatccattatagttaggacatggaaaagaaaaaagaagagggggtaagagaaactacaatatgtataaattcagcarcaacacactaatgatgtattagagtaaactttataattgaacatacttgtatttgtcatagctaaaaccttcaacttctgtacttgtatatccaaaattt

SEQ ID NO: 453959 - DNA, 201 bp, Homo sapiens
atatatatatacacatgacatatatatacatacatgatatatatgtacatatatattgacatacacacataaatatccttgaaatatatatatatatatctgacatatatttgaaatatatatattcttggaatatatattatatccttgaaatagatgtatctccttgaaatatgtcattgaaatatatatctgtacata

SEQ ID NO: 453960 - DNA, 201 bp, Homo sapiens
gcataggcactttatctcggtgactcctcactgttctgcattatttccatgttacatgagtctcatcagagttttcacaaagccattcaagatgaggacayagttctgataagaacatgtttcattcaacataatgccatgtaaaggattcctgcatttaaaaataaactaacatagtagattcatgagattagacgtttt

SEQ ID NO: 453961 - DNA, 201 bp, Homo sapiens
ctgccgttagaccagttactatttgctaacaaaagagagagtaattttattatctgtggacattgatatgtaatacttaccaagcatgccaataaataatrttttgaatgaaatagagcatgacataatgaatattagcaatacaatttttattgagtcaaataatgctccactaatgaacaaaagtaatctacttgtttc

SEQ ID NO: 453962 - DNA, 201 bp, Homo sapiens
gtatataataagaattactgggaatcatctcttacattaacacaatgtttaaaatgcttatttgaattttaatatgattaaattgaatttatataactattagctaggaatatttgctgtccattttattatacttggtacatattaatataaagatgatttctttttaaggtggtattcaaattaactctcagaaacact

SEQ ID NO: 453963 - DNA, 201 bp, Homo sapiens
tgtataaggtgtaaggaagggggtccagtttcagttttctgcatacgtctagccagttttcccaacaacatttattaaatagggaatattttccctattgyttgtttgtgtcagatttgtcaaagatcagatggttgtagatgtgtggtgttatttctgaggcctctgttctgttccattggtctatgtgtctgttttggt

SEQ ID NO: 453964 - DNA, 201 bp, Homo sapiens
gtggctgcatttttttcccttgtggaattaatattttctgtatttcctgtgaactatagtgattggaaagtcgcttaaaacttttcttgattacctaacartggatctgtcattggaatactaatttggaatactaagccacttccaatgaaacattcctagagcagcaatagcattcagaatattattttgcaatattat

SEQ ID NO: 453965 - DNA, 201 bp, Homo sapiens
tatataataagaattactgggaatcatctcttacattaacacaatgtttaaaatgcttatttgaattttaatatgattaaattgaatttatataactattagctaggaatatttgctgtccattttattatacttggtacatattaatataaagatgatttctttttaaggtggtattcaaattaactctcagaaacacta

SEQ ID NO: 453966 - DNA, 201 bp, Homo sapiens
atttttgtataaggtgtaaggaagggggtccagtttcagttttctgcatacgtctagccagttttcccaacaacatttattaaatagggaatattttcccyattgcttgtttgtgtcagatttgtcaaagatcagatggttgtagatgtgtggtgttatttctgaggcctctgttctgttccattggtctatgtgtctgtt

SEQ ID NO: 453967 - DNA, 201 bp, Homo sapiens
aacagaattagtacacaatgccaatacatgactgaatggaaatcagcatattccttaacatgctgcagtcagcattatataggagacacctataacagcayttacttaaaaaaaaagctgcaattgtttgtggatatactcatattttttttttcctttcaccagaccaatgctgactttcagttctattgatctaacatt

SEQ ID NO: 453968 - DNA, 201 bp, Homo sapiens
atataataagaattactgggaatcatctcttacattaacacaatgtttaaaatgcttatttgaattttaatatgattaaattgaatttatataactattagctaggaatatttgctgtccattttattatacttggtacatattaatataaagatgatttctttttaaggtggtattcaaattaactctcagaaacactaa

SEQ ID NO: 453969 - DNA, 201 bp, Homo sapiens
tgactctacacacacagacacagaaataattataaatgtccaatgtagccaccttttaatttactatcctaacatgtattccgattagtactttaaaattstttttctcagactttggtattcatcctatgttgatataagatagttttttcattttcttctttacgttcgtatctgttactattagctgctgtatggagt

SEQ ID NO: 453970 - DNA, 201 bp, Homo sapiens
tataataagaattactgggaatcatctcttacattaacacaatgtttaaaatgcttatttgaattttaatatgattaaattgaatttatataactattagctaggaatatttgctgtccattttattatacttggtacatattaatataaagatgatttctttttaaggtggtattcaaattaactctcagaaacactaat

SEQ ID NO: 453971 - DNA, 201 bp, Homo sapiens
ttaaagaaaataaaaaatttaaggcaaatccagtcattttaatatacagtaaacaaacgaaccattatagatgtctcaaaagaacatgcatctcagatatrtagtttacttaaaaataagtaaaatataaactgacaaactagctttgaaaggaagaggtataatggcatcaatttgttattaatgagaaaaagtcataat

SEQ ID NO: 453972 - DNA, 201 bp, Homo sapiens
tatatgtcataaaagtacaaaactaaaaagaatttatgtaattcataaaaatgtaaaaaaatacttggtgtgagtgtattattttctatacttttggaagtttttttttttctccactttggttttagtatgttaaaataatcatataaatgctggattatgtataaatatattacaagtacatatacatgtcttcatata

SEQ ID NO: 453973 - DNA, 201 bp, Homo sapiens
atgtagcaaacctctaaatttttttaaaatgtttcttttgttcttatttttgtgaaaatttgttatgtctttcaactttagaagaagttttttttcccataaaaaaaaaatctcaccatggggtttctattttgatgctatcttgtggatgggacatttggctaggtcatcaaatggtctgcatctcaccagctgctgttt

SEQ ID NO: 453974 - DNA, 201 bp, Homo sapiens
aaattgagttcatttttaaatgttgactaagaaagactctgacacagataatttgctgaataaaaacaaatctattttcccccactctgctgctaaatatacccagatgcatttgattgaagatatattaaggaatggagaatagaaggaaaaaaaaagaaaaaaaaaaacagaagtaaacgggagaaaacaaacccacta

SEQ ID NO: 453975 - DNA, 201 bp, Homo sapiens
tccacttaatccagagctgagttcaggtcctgaatatttttgttaattttctatctcggtgatctgcctaatattgttattggggcattaaagtctcccaytattattgtgtgagagttgaagtctttttgtaggtctctaggaacttgctttatgaatctgggtgctcctgtattgagtgtatatatatttaggatagtt

SEQ ID NO: 453976 - DNA, 201 bp, Homo sapiens
ttgaaggtgctgaatttacctgccccttttgcccctctccgagagagccacgcacactagctgcttctagtcgaccatcttggccacctccctaaaaattaaaaaaaaaaaaaatgcttaagtgtttttagtaaacataagtatgatttcttatatgagtttttaaaaatttttaaaaagaaaaagaaaacatcatgtttc

SEQ ID NO: 453977 - DNA, 201 bp, Homo sapiens
acagtgttagttcctttcagccacaactaaaaattcctaaatgttcaagttatttatctattagatctttataagggtaatgtgctatttacttgatttgyatttggctattttttgaaaagtcatacatttttcacagtcttcaaaatcgatttataatcacttagaaaaaaattaattgagcagtatgcttaagatttg

SEQ ID NO: 453978 - DNA, 201 bp, Homo sapiens
aatgaaatagagcatgacataatgaatattagcaatacaatttttattgagtcaaataatgctccactaatgaacaaaagtaatctacttgtttctttagwgcttgttaacagttccttgattattcatgtgtccagaaaaaaaaaaattaatgctcgaagccctaaacctggtgaatataataagcatgactccccatgg

SEQ ID NO: 453979 - DNA, 201 bp, Homo sapiens
tgaaatagagcatgacataatgaatattagcaatacaatttttattgagtcaaataatgctccactaatgaacaaaagtaatctacttgtttctttagagmttgttaacagttccttgattattcatgtgtccagaaaaaaaaaaattaatgctcgaagccctaaacctggtgaatataataagcatgactccccatggat

SEQ ID NO: 453980 - DNA, 201 bp, Homo sapiens
tctctagatccatgtttgttttaccacactgcaaaagcatgggcattaaattcacactgctaacaatgtacaaaatgtaccactaaaatattgtagctttrtattgattgattcattgccttctgcaatatttactgtatttttgaacttgatatttcttatctattaatcattaattaaaaataataaaaacaagtcata

SEQ ID NO: 453981 - DNA, 201 bp, Homo sapiens
atatgtcataaaagtacaaaactaaaaagaatttatgtaattcataaaaatgtaaaaaaatacttggtgtgagtgtattattttctatacttttggaagtttttttttttctccactttggttttagtatgttaaaataatcatataaatgctggattatgtataaatatattacaagtacatatacatgtcttcatatat

SEQ ID NO: 453982 - DNA, 201 bp, Homo sapiens
ttgactttttttctaagaggcaggaaatagcttgcaatagtgaaaccagatagaatccgagctgttacaaaagttgatcccaatttataaacagataccayttggattgaaaatctatataaagtataaattttactattaaaatgtagtttaataaaaaatagtcttgccgggcgcagtggctcatgcctgtaatcccag

SEQ ID NO: 453983 - DNA, 201 bp, Homo sapiens
acctgttttttcacataaaatgtaagccattaattgttgtaagcaacccaccagagaacacatagaaaattgcagaattgggaattacagtttatgaaatwtttttttaaaaagccagaaaaccacattatcaatataatagggaaaaccaaagatgaaaaatgtaaattggttgaagaagttaatcgagatgccaacatt

SEQ ID NO: 453984 - DNA, 201 bp, Homo sapiens
agaaatttgaacaaggattgctattagatgtaatgaaaacttatttacatgaacagtttagaggttactactggggaaaaaaaggcaagtaaagtgaaaamcacaatgtactatgtggttctctttttagttaaaaaaaataagtgcaaatgaatccagaaagcttggtatagtgatgatctctggtttgtaggaatgtac

SEQ ID NO: 453985 - DNA, 201 bp, Homo sapiens
ctttttcaccaaacctgatattattaagttttaaaaagttataaatgaaaaatattgtatttatttctggttgataatggagttgaatatctgctcgtaakgttgattagtgatttatatttccttttctataaatttcctgttactattctttgctcccttttattctttgtgttttctgtttcttactggctcatagga

SEQ ID NO: 453986 - DNA, 201 bp, Homo sapiens
atatttaaattaatcttcctcccatcttagaatttggaaagcagggaagggggtcccaggggaagagtagccagtggacagttgaggagagcaaggggtakttataaagagattcttgatatgtcttcctgtatcacagggcgtgctaaactttctttttcaagggcggatgtgtgtgtgtttacagcatactcaaagtaa

SEQ ID NO: 453987 - DNA, 201 bp, Homo sapiens
aaatgtgaatattgtgactaagggattgcattttgagtcttattctgttttaatttaaatctaactaactacctgtggctattggacagcacagctctggrcagacagtaaaagagagctgatgccggcctggaggatgagagagctgtggaggcaggactcatgagagagggtctttggtcattcatttctgtggaaaat

SEQ ID NO: 453988 - DNA, 201 bp, Homo sapiens
ggaaagacaagctattctttcttggtgttaataagcattaagagttgttagaatatcctgtcttctatttttttttcgtttgtttgttttgttttgttttktttgagacaagttctggctctctctcccaggctgcagtgcaagtggtgcgatcttgaccctgcaacgtctgcctctcgggctcaagccatcctctgacct

SEQ ID NO: 453989 - DNA, 201 bp, Homo sapiens
aggactaatgaatctggagatgtagacagcatccaagccttaaagagccttcctaaagaatatggataatcttgacctatagtctattttcctcttatttrgctgagaaactctcaagggaaatacaagttcatattaaaaataaaagacatgtgaaggatatttacctctagtagatttatatctactccaggttattca

SEQ ID NO: 453990 - DNA, 201 bp, Homo sapiens
atgttccctttcctgtgtccatgtgttctcattgttcaattcccacctatgagtgagaacatgcggtttttggttttttctccttgcgatagtttgctgaraaggatggtttccagcttcatccatgtccctacaaaggacatgaactcatcattttttatggctgcatagtattccatggtgtattataaataaatttta

SEQ ID NO: 453991 - DNA, 201 bp, Homo sapiens
cattttgagtcttattctgttttaatttaaatctaactaactacctgtggctattggacagcacagctctggacagacagtaaaagagagctgatgccggyctggaggatgagagagctgtggaggcaggactcatgagagagggtctttggtcattcatttctgtggaaaataagtgaccttttcaatctatgatgaaaa

SEQ ID NO: 453992 - DNA, 201 bp, Homo sapiens
catgaacccgggaggcagagcttgcagtgatccgagattgtgccactgcattccagcctgggcgacagagccagagcaagactctgtctccaaaaaaaaamaaaaaaaaaaaagcaacaagaatatgggcaaaaattgtccaaatcaactttttaaattctggaaatccaccaaaggctttcgataccacggagtgtttat

SEQ ID NO: 453993 - DNA, 201 bp, Homo sapiens
agaagctctttagtttaattagatcccatttgtcagttttggctttttttgctgttgcttttggtgttttagacatgaagtctttgtccatgcctatgtcytgaatggtattgcccaagttttcttctagaatttttatggtcctaggttttacgtttaagtctttgatacatcttgagttgatttttgtataaggtgtaa

SEQ ID NO: 453994 - DNA, 201 bp, Homo sapiens
aaaagttatttaaaaagaactgctatatattggactaatagattctggacagtctttaaactagtagatgagcctaattagaacaattttttcatttactsattcattcattcagcaaatatttattgttttaacactatgttaggcactagggatgtagcaatacacaaaacaggcctagatccctgccttcctgaggct

SEQ ID NO: 453995 - DNA, 201 bp, Homo sapiens
taataaaaggaaaataatgtaaggaaaatttaaacaattatattgaataagtcttggtaactactggacatgggggaaaggaaagagtcaaaaaacaatgyccagaatttgaaagctgggcaactaagattattgtggtgacaagaacaaaaaaaaattcttttattattatcaaaaccttgcattagatcctttgtaaat

SEQ ID NO: 453996 - DNA, 201 bp, Homo sapiens
atataaaaagaagaacctctagcagatacacataagaaataaaaaaaacctctagtaaatatacatagataaagataaagaaatcaaattataccaccgcaaaaaaaaaatcataaaattacaaaggaatatgacaagagaagaagaaagaaacaaagaaactgcaaaatgttcagaacaacaagatggtaattttccaaa

SEQ ID NO: 453997 - DNA, 201 bp, Homo sapiens
tttaagaaagcaaagagcaggttcttcatcttcaaaaatgaacagtttggtaagtatatacatatgtctgcctctaataaaataatgctgtctatatccgrcatgttcatgtctcttgcaaaatgaacacagactacaggatagacacctcatatttgaagggaaaatttgtttccatagttgacattacaagtcagagaa

SEQ ID NO: 453998 - DNA, 201 bp, Homo sapiens
atacataatgttctgtggcatttatgcttttagatatttcctcaaatttgcctattcacaatatgtgattatttgcccatttttaaaagaaagtattatcttttttttcctctggtatattaagcccttttacaacaaatgtttcctggttttttttttatcttctattttacttagaatagcaataactagtaggtactc

SEQ ID NO: 453999 - DNA, 201 bp, Homo sapiens
aatcatttgtttagttttatttcaaaactgtaaaaaagacttagaatatacaatctatgctattgtttggtaatatattttttagttctttagaatatatrtataattctaggctgggggcgttgtctcacgcctgtaatcccagcactttgggaggccaagcggggtggatcacgaggtcagtagttcaagatcaacctg

SEQ ID NO: 454000 - DNA, 201 bp, Homo sapiens
cctgattggtcttgaacacctgacctcaggtgatccactcacatcacctcccaaagtgctgggattacaggtgtgagtcaccgcacctgagcagttacttyacacttaattaattaatttaaaatgcatgaaatatgttttttaacttgtagcactgtaaggaagaaatggtagggattatttagttctagatacatgtga

SEQ ID NO: 454001 - DNA, 201 bp, Homo sapiens
ttaattaatttaaaatgcatgaaatatgttttttaacttgtagcactgtaaggaagaaatggtagggattatttagttctagatacatgtgaaacaagtgwtgtatatttggaaaattgtagctgtctgtgtgaacactggcacattttctatattcctcttccaaaataatttaagcaactgcatgtatttaagaatgta

SEQ ID NO: 454002 - DNA, 201 bp, Homo sapiens
aaaaggctcagtcatttctccaaataagatgtatgaaaggccaactgttatatgaaaaggtgctcaacatcactaatcaccaggaaaatacaatcataagyacaatgagttatcacttaacacatgttaagataactgctgtcaaaatgacaaaacatgacaggtgttgaagaagttgtagagaaaaagcaacccttgtac

SEQ ID NO: 454003 - DNA, 201 bp, Homo sapiens
aaataatttaagcaactgcatgtatttaagaatgtatccatggttcagttattttattttaaagcaattataatagaaacatgtgtttttaatgcttgttkgaaccaagtgactacttttaatgcctgacatgtattatcacattcagtcctcacaacagtactatcaactaaatgattctgtggtgatcaaattttgcga

SEQ ID NO: 454004 - DNA, 201 bp, Homo sapiens
tctctgtcgttttattttaggtgtatatctggtgagtaatataacaccaaaaaattattttaaatataatttcataaattatctgttaataagtgagtttytgtttgtattttttgtaattgtaattaattatatttggacagatctacatcttattttgtgttgtttcttgcctcttttctctgcctctttttattcttc

SEQ ID NO: 454005 - DNA, 201 bp, Homo sapiens
aatacgatgtacataaccaaacacagtattttgtgctcaattttgccattgcagaggatagacacttatcttccttgatctggatattatagttcttaackctgacagctcttaatgctgccaaagtttcatcagcactctggctgctttatcagactctgcttatcagactctgcaattgctttgagcttgcagtgaata

SEQ ID NO: 454006 - DNA, 201 bp, Homo sapiens
gaggctgagatggaagcattgcttgaacccaggagttcgaggctgtagtgcattatcatcacatgaataaccactgcactccagcctaagcaacatgtagaggaaaccccatctctacaaaaaaaggaagaaaaaagaaaatgcattcaatatacctaagctaccaaacatcatagcttaatctagcctaactacaaatgt

SEQ ID NO: 454007 - DNA, 201 bp, Homo sapiens
ctgccaagttatagaattaaaaagccttaattatctactgggtgtaagaaatttatgtaatggtaacaacacataatgatgatgaattctgcttctcttaytgactcactctctcctacccctccttctccccacgcaagttaagtaatattagacaaacctgactattgtttcttcacagcagttagtccttactcagat

SEQ ID NO: 454008 - DNA, 201 bp, Homo sapiens
taagtgctgttagccatactgtctaatgaaaggtacataatatcaactctgattactgctgtaatgttttccaggcatgcttggtgatgagcctggcataygaaacaatttcctacagtaataaaactaattaaagtaggcagtcatccacacaacacttcctaatgaattataataagctcattaatctcatctgttctt

SEQ ID NO: 454009 - DNA, 201 bp, Homo sapiens
gaactacatgtgggataccatgtttaaactagaaggcaccctgcatccctcaagattcccaattccttagagataagggatagagattgttggttgacttaaaaaaaaaactctttattaactctaacattaaaccatattgaattaatttactatgatttatttcaaaaccagatgtgttgataacttggtaaaaattgc

SEQ ID NO: 454010 - DNA, 201 bp, Homo sapiens
gcgccactgcactccagcctgggtgacagagcgagactccgtctcaaaaaaaaaaaagtacataccttgacaacttataagaacaagaaataagagcaagraaatattagaaaatctgtaatttgtgtatatatacaaaatatacttcatcttatgcttatttcccaacttggcattagaaataagtatccaaggtacttc

SEQ ID NO: 454011 - DNA, 201 bp, Homo sapiens
cttcatcttatgcttatttcccaacttggcattagaaataagtatccaaggtacttctgttttctctgttttgtcttgttttttctacttggaaactaatactcaaagaccttgagccttatttaaaggcgatctacttactatacactatatctaatggaaaggttaaaacatttgtgatgataaataacccaagctact

SEQ ID NO: 454012 - DNA, 201 bp, Homo sapiens
tctacaaccatctgatctttgacaaacctgacaaaaacaagcaatggggaaaggattccctgtttaataaatggtgctgggaaaactggctagtcatatgyagaaagctgaaactggatcccttccttacaccttataccaaaattaattcaagttggattaaaagacttaaatgttagacctaaaaccataaaaacccta

SEQ ID NO: 454013 - DNA, 201 bp, Homo sapiens
gacagggtatttggagaacggggtatatttcatcacttaaaagacaagataatcacagaaagcagccatcagttttagcctttctcatgaacaaagacagmaaatgagtaaacattaatgtgttggaactaccaatgaaaagaaacttaggcagtataagataaacttattagatttatgacatatgcaactccattttta

SEQ ID NO: 454014 - DNA, 201 bp, Homo sapiens
atcctaaatttccatgaacttatcacatgaacttgaaaaatgcttggacttaacttatgaatggtcttttatttataagcctgtttggcactctgtagacmcaatatataacataatgaaatgtacatacacataaacacatctagatatgtatacacacacataaacaaagatccaatagcttttatcttaggactctag

SEQ ID NO: 454015 - DNA, 201 bp, Homo sapiens
aaaagacaagataatcacagaaagcagccatcagttttagcctttctcatgaacaaagacagaaaatgagtaaacattaatgtgttggaactaccaatgaraagaaacttaggcagtataagataaacttattagatttatgacatatgcaactccatttttaaagcagagaaattccacattaaaacaaaattcttataa

SEQ ID NO: 454016 - DNA, 201 bp, Homo sapiens
tttttgtaacaagaacagttaaaatcttatttaacgaaaattcctaacacaaaacaatgttatcaactatagccctcatgttgtacattagatatctaggsttgttaattttatatcttttgacctaaatctcctcattttctccctgccccacctgccatggtagccactttttaattctctgtctctatagggttgacc

SEQ ID NO: 454017 - DNA, 201 bp, Homo sapiens
atggactttgtaaaattgaaatcaaggtttacatcactctgaataagctggaaaaataccgtaacctgcagtaggaaaatcaaagatgaatgaatcaaatrcttattctgcttaattcatgcctctgatcattttaaacttaactaattggtattatgagttcccaactgaacatgtgttattatataactgcattcagta

SEQ ID NO: 454018 - DNA, 201 bp, Homo sapiens
aaggaactgttaacaaaggacgtgatttcttcctgtgcaggaaaaaacaaacagacattcacatggaaataaaaaaataaaaatcctttcttacactcctrtgaccagcttctaagaagttggctctaagaacatgaatagtttatttaacagtgctcctgtaacatctccattggatcacagatactcaggtttaaatac

SEQ ID NO: 454019 - DNA, 201 bp, Homo sapiens
acctcaatttctagtttctctgattaaaaaaaaagaaccaaatggagcaaattaattcatctcttttttttcatctgtaaatccaaaagctgtgtgaaaakctgtataaattaaatttaaattaatattccattctgaaagtctactttagggtttatgatcacacattactctgttagacctcttttggtatctggttag

SEQ ID NO: 454020 - DNA, 201 bp, Homo sapiens
catgttccaaaaaagtaacatacgggtgtgtgactaaaaatgttaatgacaaagtactgatttctcagccctgatatttctatactgatatccatcccagwagcatgttaattcccactgaaattctgattattgatactactgataaaaataattatcctctatgtacggtctcttatgtgtcagacactgtgctatgtg

SEQ ID NO: 454021 - DNA, 201 bp, Homo sapiens
aatttaaattaatattccattctgaaagtctactttagggtttatgatcacacattactctgttagacctcttttggtatctggttagtcacagtttttasagcagtggtctaataccttcatggtcacaccttctgtcttcagaaagttcatttagtttcagactgttagccagacatcttacaaatatttcccattgct

SEQ ID NO: 454022 - DNA, 201 bp, Homo sapiens
cggcattagactttgagtcaaaagtattcattcattttttttgtgtatttttgtgttaaattaacagctttaaaaatgtttatagggatacatagtaaaayagctatatgttcatgtgtgaggattggataagcatgtgaaatactccacagaatttgtgctcaattttgggacttcacctgccttgctatgaataaagta

SEQ ID NO: 454023 - DNA, 201 bp, Homo sapiens
aaattaaaaacaagacagcctgggtgcagtggctcaaatctgtaatccctgcaatttgggaggccgaggtgggcgggtcatgaggttaggagatcaagacyatcctggctaacacggtgaaaccctgtctctactacaaatacaaaaaattagccaggcgtggtggcacgcgcctgtagtcccagctacttgggaggctga

SEQ ID NO: 454024 - DNA, 201 bp, Homo sapiens
tgttcatagccttaagcttacaaatttattaggttatcttgggataaagtcttcttctgatacaatgcctggaatactccctttgtcctacatggatgagygctttactcctaaatagtactttatgatctgggtctactgtagcacaaggaaacacatgtttgaaaataaacatttagttaatgaatggattttattttc

SEQ ID NO: 454025 - DNA, 201 bp, Homo sapiens
ggtggcacgcgcctgtagtcccagctacttgggaggctgaggcaaggagaatcccttgaatgtgggaggcagaggttgcagtgagccgagatcgcgccacygcactacagtctgggcaacagagcaagactctgtctcaaaaaaaagcaaagatgataattagaagatctgattttgaaaatttcttaatcttgaaatcct

SEQ ID NO: 454026 - DNA, 201 bp, Homo sapiens
ggcacagataacttcttggaaagatgaagattgtaaaggatggacctcattctactttttatcttgttcattttaagccctgctcccagttttctactcamgctatcatgacctgtcatttctactctgtgccacaggatagcaacaggctaagcatctagcagcacggagatgagatgagcaatctgttgtaatagctta

SEQ ID NO: 454027 - DNA, 201 bp, Homo sapiens
tccaaacattcttcctcaattgcttgaaaatcttaggagatatgccactgtatcaagagacaatgctatttccttatttgactaatatgctaaaaaaatasatttctaacatactggctttgaacaactgttttctcttgaccatcccgtaaaagataaattattaataatttcaatactaaattaataaatgccatttac

SEQ ID NO: 454028 - DNA, 201 bp, Homo sapiens
aagattgtaaaggatggacctcattctactttttatcttgttcattttaagccctgctcccagttttctactcacgctatcatgacctgtcatttctactstgtgccacaggatagcaacaggctaagcatctagcagcacggagatgagatgagcaatctgttgtaatagcttacttactacggactcagaagtgtcttt

SEQ ID NO: 454029 - DNA, 201 bp, Homo sapiens
aagccattaatatttttcaggaaatggagccatatgaatcattctcctcaattcttataaattttaaggaagaaaatcacaagtatcactcattaaacatraaattacatttgttgataactggcatacattttaggttaatagccctaatcctttatgcttttatttgtttttccagttactaatcatattttcctttca

SEQ ID NO: 454030 - DNA, 201 bp, Homo sapiens
tactgtcattttaagatagctttagaaaagtaaataccaatgtttatttttaaattttaaattttatgaaagaattggatcaaacaaaaaaataaggaaaracttgagtagtgtttttataaagataggttgaaatgctctgttctcttactgtataatcgaaaaaaatcagtaagatgggctacattacattagaaaagt

SEQ ID NO: 454031 - DNA, 201 bp, Homo sapiens
tttctactcacgctatcatgacctgtcatttctactctgtgccacaggatagcaacaggctaagcatctagcagcacggagatgagatgagcaatctgttstaatagcttacttactacggactcagaagtgtctttaaagcttcttcatcagtaggtcaaagaacttcaaatatttctgctacagcagcaccgtaaggag

SEQ ID NO: 454032 - DNA, 201 bp, Homo sapiens
aggccataccaattatgacattgttccagtggaagcacaatttattttaggattatcagccttatagaatggtttctaggattatatgagtacgatagttrtaaactggccatacaatgaggacaagaaatagtcaaatatttgtggtattcattaagcccattaaaatataatatcttggtcaaatatgggtaagcgaag

SEQ ID NO: 454033 - DNA, 201 bp, Homo sapiens
gtcttaaatatagttccaaatcgatttttaatgaaacccatgggttttaggagatcagaaaactaatttatgttgtgtagtaactcattctatgaccctgrgaaatttggttctcattcttctacatgcaaaatactgtcattttaagatagctttagaaaagtaaataccaatgtttatttttaaattttaaattttatg

SEQ ID NO: 454034 - DNA, 201 bp, Homo sapiens
tgtttatacttgatcttagccaaaaggctgagaagcgatccaactcaatgtttaattgtgggtttcatattttcaggtatagatcactgattcccaaactkctgattacaactcactcctaaaacgccacaaaataaggatttaataataaaaacatttcagaaatgcaacctttgtatgttttcttggtaattctcattg

SEQ ID NO: 454035 - DNA, 201 bp, Homo sapiens
ccagctcctgttacccatcattctattctgtatttctgtgacttcaaatgttttaatttttagctcctgtatatgagtaagaataggcaaaatttgtcttyccacacttcattaattttatttaaaataaggtcctccagtctcattcatgttgttgcaattgacaggatctcatctgatttttatggctgaataatattc

SEQ ID NO: 454036 - DNA, 201 bp, Homo sapiens
gattcttagtttcttttgagaatcatttacatattccttttttgaattttttatcttttaaaacagggtctcactctgcacccaggctggagtgcagtggmacaatcatagctcactgcagcctcaaccacttggctcaagcgatcctcccacctaagcctcctgagtatctgggactaaggcatgtgccaccatgtccaa

SEQ ID NO: 454037 - DNA, 201 bp, Homo sapiens
attctattgtgtgtatgtaccacattttctttatccttttgcttgctgatggacacttaagttgattgcatgtcctggctattgtgaatagtgctgcaatraacatgggagtgcagatatctctttgatatattaatttcttttttccgagtgcatacttagcagtgagaaagctggatcatatggtagctgtatttttag

SEQ ID NO: 454038 - DNA, 201 bp, Homo sapiens
agtttactttatcagtgtttcatagtttttattgtagagatctttcacttctttggttaagtttattccagtaaagtttacatattttattattattgctrttgtaaatggtaatgcttaccaggcaaagtctctttttctcttccttcactttcccctaaacagaaggagactctgtggtaaggtggcctggagctgagg

SEQ ID NO: 454039 - DNA, 201 bp, Homo sapiens
ccaggtactatgattgctcacctgacttttggttcttatgaatgtgctttcttgcctgaatatttgttcagtttggtgttccgatgtggggacaatcactyggggttctattcagccacattgctctacctcctacattattaaacttactataaatagtcatgttgtaacaatagcagtatgaaatatgtatgttagaat

SEQ ID NO: 454040 - DNA, 201 bp, Homo sapiens
gggatttgttcacctattttctatcaaaaaaaatcccattggatattaagcagcaaattatttatacaatgttgggaaataatgtggtaacacttgtttaytttttaatgttccatatggatttaatttttgtgttattgtctgtagaataaaggacaataaaaaaattaccaagactttatctggttgttctggtatgtt

SEQ ID NO: 454041 - DNA, 201 bp, Homo sapiens
ttgataagtttgtaaagcgacttatgtcttaaatatagttccaaatcgatttttaatgaaacccatgggttttaggagatcagaaaactaatttatgttgygtagtaactcattctatgaccctgggaaatttggttctcattcttctacatgcaaaatactgtcattttaagatagctttagaaaagtaaataccaatgt

SEQ ID NO: 454042 - DNA, 201 bp, Homo sapiens
gccttcctattaattattccagctacttcagagtttatagccctaaaagggatcagtttgattccctcacccatgcagagggaacactcaaactccccctygcatccctgctaatgattccttctatcctgcagcgtgtatcattcatgcttagttatgcgagtccaacagatccttgatgttaccttgctgatctggctc

SEQ ID NO: 454043 - DNA, 201 bp, Homo sapiens
gggatctaaagtgagtctcttttggatggcatgtgtaggttggatattccatatccaaaatgcttgggacaagcagtatctcagatttgagatttttttgkggggcggtggggttggtgggggtggatttggaagtgtttgcattgtatttactaatccctaatctgaaattttgaaatctaaaatttgaatgctccaatt

SEQ ID NO: 454044 - DNA, 201 bp, Homo sapiens
tgggatctaaagtgagtctcttttggatggcatgtgtaggttggatattccatatccaaaatgcttgggacaagcagtatctcagatttgagatttttttkgggggcggtggggttggtgggggtggatttggaagtgtttgcattgtatttactaatccctaatctgaaattttgaaatctaaaatttgaatgctccaat

SEQ ID NO: 454045 - DNA, 201 bp, Homo sapiens
ggtagttctatttttagttctttgagaaatcttctaccattttccgtaggagttgaactaatttacattgtccatgaacagtatataagtattcccttttmtccatatgtataccaacatttgttatttttcaactttttaataaaagccattctgactggtttgagatggtatctcatttgcatttctctgatgattagt

SEQ ID NO: 454046 - DNA, 201 bp, Homo sapiens
ccctcatgcagttgaaaatccatgtataacttttgatgcccctcaaccttaactactaacagtctactgttgactagaagtcttactgataacataaacayggttgattaacatgtattttgtttatgtattatatactgtattcttaaagtaagctagagaaaagaaaatgtttttaaggaaatcataagaaaaagaaaa

SEQ ID NO: 454047 - DNA, 201 bp, Homo sapiens
atttttatttactagacacataatcctaaaattaggaataagggagataatcacataagtaatgactaatgaaccttgttagttaacttagttaattgggtttttttttacttttttcattaagaaaattgcaattattttcaagatatcataacaggtcgtgcatatgcagaataaaatgcatgttaaatgtctttgtgc

SEQ ID NO: 454048 - DNA, 201 bp, Homo sapiens
ataagatgaggctatggataaggttaaggcacaaaaagtttactagtgttatgacggtgaattgaaaatgttattttgagtgtcctattagcatgtatgargaaagaaaatcagttgaaaaatcaaaatatatatcatcaatcattcaatcagtgaatgtattttcttaaataaaataattcttgttcctaagaactgaaa

SEQ ID NO: 454049 - DNA, 201 bp, Homo sapiens
aatccttgtaataaagagtcctaaattaatatatgttcctccctcacgcctgtaatcccagcactttgggaggccaaggcgggcagatcacgaggtcaggmgatcaagaccacggtgaaaccccgtctccactaaaaatacaaaaaaaaaaaattagccgcgcgtagtggcgggcgcctgtagttccagctactcgggagg

SEQ ID NO: 454050 - DNA, 201 bp, Homo sapiens
tgaattttttatcttttaaaacagggtctcactctgcacccaggctggagtgcagtggaacaatcatagctcactgcagcctcaaccacttggctcaagcratcctcccacctaagcctcctgagtatctgggactaaggcatgtgccaccatgtccaactttttctttctttctttctttctttttttttttatggagac

SEQ ID NO: 454051 - DNA, 201 bp, Homo sapiens
aggacataaaacaaggaactcaggatggagccacattcctgagagttttcactgatagttttgccctttctacctgggagctcctaaaggtatttaaaagrgatgagagacatatttttaaaaagctttatttggaggggaataaagtgttatcaatgaagttcaaatgtataaaagatgatgaaacttagcaaatggaaa

SEQ ID NO: 454052 - DNA, 201 bp, Homo sapiens
aaagtgttatcaatgaagttcaaatgtataaaagatgatgaaacttagcaaatggaaaaattgactgtgtttgttacaaatctttattattatttttagcrtcttttacagggtaggaaataaaaagttgtattatattaactaaattggaaattcacagaaatctatattggaatttaaaattcttaattttaaaagact

SEQ ID NO: 454053 - DNA, 201 bp, Homo sapiens
tttcaagagagataggtgcagtagggggtggtctggaatatccctcttgctccccaggccctttctttcggcatccgatgagccctggcccagggtattgratgaggtttggagggttgggtgtgtaccagtgacctcatttgtacaggaggagccatctcaatatgaagcatctccattttatactcagtgatacagcat

SEQ ID NO: 454054 - DNA, 201 bp, Homo sapiens
cctgtgttctagattactttttgtttttcctctatgagctagcattgctttgtgggttacattagagaaagaaactctgaaaaacattttctttatttccratactttgttttaactatggaaaagacatgcatcacttggagataattagaagcaaagaatccccgtgactgtacaacagatccccaggtatggacaatg

SEQ ID NO: 454055 - DNA, 201 bp, Homo sapiens
aggaaagcagacaccattttcccctgtaagagggaaaatggatcacaggctagctgcttaactcaggcagcaagtggaaactttgaatgctctcctcaaamtatctgttctattcttgcaatccccctcacttgtatttttacccattggtgttcatttcctttgatcttagggaaatacttgttttctcatttcttctaa

SEQ ID NO: 454056 - DNA, 201 bp, Homo sapiens
tctaccaggattgtaagtttcctgaggcctccccagccattcggagttgaactgtgagtcaattaaacctctttccttaataaattgcccagtctcgggcrgttctttatagcagtatgaaaacagactaatatagtttgcttttacaaagtattttttaagggtaaaattaattgtatgtctccttatttagtttatcaa

SEQ ID NO: 454057 - DNA, 201 bp, Homo sapiens
aattaaacctctttccttaataaattgcccagtctcgggcggttctttatagcagtatgaaaacagactaatatagtttgcttttacaaagtattttttawgggtaaaattaattgtatgtctccttatttagtttatcaaagtaggtctgtgcatacattaatgaaggtatacaggtaattctggtctttcactaatatt

SEQ ID NO: 454058 - DNA, 201 bp, Homo sapiens
agcttaagtcaagcaaaaggcagtggcaaaagttgcgggcattgtgcaagcagcatgtattaaacaatccaggaaacttggcaacccccagagacacagaygttgcccacttctgccctgcagtgtggcctctgctactgttgtctctgctttgtctccttcagagcttcccagggactgtgcctcaggctgaattgtgcc

SEQ ID NO: 454059 - DNA, 201 bp, Homo sapiens
attgtgcaagcagcatgtattaaacaatccaggaaacttggcaacccccagagacacagatgttgcccacttctgccctgcagtgtggcctctgctactgytgtctctgctttgtctccttcagagcttcccagggactgtgcctcaggctgaattgtgcctcaggctggctctggtccaagaggagcttgtggtgtgcag

SEQ ID NO: 454060 - DNA, 201 bp, Homo sapiens
ccctagaattgacagtgttcagattgataggcccaaccaaatgcacagtccacatacaaatatataattttaaatttgcagaaagtaaaacatatagagcrtccataagagggaaaaattattcacctgaaaaaaacaaggataacgctaactagcatcagccttctttttttttttttttttttttttgaggcggagtct

SEQ ID NO: 454061 - DNA, 201 bp, Homo sapiens
ttttgtgaatcatgtgagtgttggttgtagacatcatgattctttactcctatatactttagcatgtattttctaagaagaaggatattctcttacatcasaaagtaagtatcaaaatctgcaaatttaaccttgccacagtattttatttaatataaatctatattcagtttttcctagttgtttcaattaaaacaaaat

SEQ ID NO: 454062 - DNA, 201 bp, Homo sapiens
ctaaggtaaaatcccagcacttgccttaaaaaccatctaattcataatggaggcagagacttctggaaaggaggactccgggaaagaaacatgaatgatakaattgctacaattcaaagatatacagagaaaataggtgaaagcatttgaaatctactttagaaatattattctttgaatagcatagtagtcatgacagtg

SEQ ID NO: 454063 - DNA, 201 bp, Homo sapiens
aacacaaaacaaacaaaacgaaacaaaaaaagaaataaaaccaagaaaaaaatcagaagaaaaaaacaaacagaaattcagcaaacgtgaaatgctattgmcacttgaaagtcactttgagatccaagaagagacatgcctggtcttaatcagaccgtgaagttacttctccagcaatgcagtttaagtggttctagcatg

SEQ ID NO: 454064 - DNA, 201 bp, Homo sapiens
tgaaggaaaattactatatgataaaattgaaaaacttattaggttcatgatcattgtttgataacctatacttactctttaatagtaacttacataaagckttttaaaaatatataatctattgtatttattacacttatgtttggacataaagctttatgtcatcccgtctatgatctggaagttgaaacaaggtggttt

SEQ ID NO: 454065 - DNA, 201 bp, Homo sapiens
aaatcagaagaaaaaaacaaacagaaattcagcaaacgtgaaatgctattgccacttgaaagtcactttgagatccaagaagagacatgcctggtcttaaycagaccgtgaagttacttctccagcaatgcagtttaagtggttctagcatgtgagtttacttcagcatctcagtgagttgtccacaattgtcaaagtgta

SEQ ID NO: 454066 - DNA, 201 bp, Homo sapiens
atttatttgctatcgttatataatcagtgtctagaaagattaaaatggcagaattgattaaaacactttttccattctctactcaagttattggtttatgyctacaggctgagtgcctcggatatcaggatagaaattttatactgaaggaaaattactatatgataaaattgaaaaacttattaggttcatgatcattgt

SEQ ID NO: 454067 - DNA, 201 bp, Homo sapiens
taccttttaacttcactgagtcagagctcttacagtaaatagcaaaatcaaacaattatataatctattgaatgtagtaatctttgggaaagccttttagrtaatacttcagtatgcgatcaccttcttggccttctttctgttttgtattcttaacacaaccattaccttggtgagctcaagagaaaccaagagaacagc

SEQ ID NO: 454068 - DNA, 201 bp, Homo sapiens
aattaattattttatagccattaaatttaacagaataattttaaaatcagtaacatcaattgctattggggatgcttgaaaaattcatatattgctgttasaaatgtgagttttcacaaaattttaaaaaccattgtaaatatctactaaaattaagataaataacactctttgactttcaaactgttcctaaaaatccaa

SEQ ID NO: 454069 - DNA, 201 bp, Homo sapiens
tttatgcttgttcttaaaaataatagagttgtgtatttaaaagctttcccattagtgaatagttacccaataatcatgaacttatcaattaaatctattarggagaatggcaataatgacgttcctaagagaaggacaccaatgaattatttatattttggctatttttcttttattcagtagtttgtgtaccattctaat

SEQ ID NO: 454070 - DNA, 201 bp, Homo sapiens
tctttcaacttttaccattcagtatcatgttggttgtgggtttgtgatatatggatcttattattttgagatatgtttatttgatgcctagattgttgagrgtttttatcatgaaaggatgttggattttatgtaaaactttttctgcctctactgagataatgatagggttttttaaaaattttgtttatgtgataaatc

SEQ ID NO: 454071 - DNA, 201 bp, Homo sapiens
ttgcctccaggaattttaatgttcctacctttgcttagaaaatacttggctttcttttatcttttactaattccttctgaccattgggattctggatacattttttttccccccagaatgctttctctgactctactaccttggtctatgtgtttgttttcttttgctgtgaggcaaattactacaaactggaacttccca

SEQ ID NO: 454072 - DNA, 201 bp, Homo sapiens
gggattgctgtgacaaatggtatttctgtttttaggtctttgaagaatcaccacagtgtcttccacaatggttgaactaatttacactcccaccaacagcrtataagcatttcgtgtcctctgcaactttgccagaagctgttattttttgacttcttaataacacataccattctgtgaggtggtgtctcattgtggttt

SEQ ID NO: 454073 - DNA, 201 bp, Homo sapiens
aatttgcagaggtttcaaacaaattggttttgggccatattgggtccattgtacaatgcaaaaatgtatatagaaacctcaatttctagtttctctgattaaaaaaaaagaaccaaatggagcaaattaattcatctcttttttttcatctgtaaatccaaaagctgtgtgaaaagctgtataaattaaatttaaattaat

SEQ ID NO: 454074 - DNA, 201 bp, Homo sapiens
aatggttgaactaatttacactcccaccaacagcgtataagcatttcgtgtcctctgcaactttgccagaagctgttattttttgacttcttaataacacrtaccattctgtgaggtggtgtctcattgtggttttgatttgcatttctctaatgatcagtgatgttgagcttttttgatatgattgtttgctgaatgtat

SEQ ID NO: 454075 - DNA, 201 bp, Homo sapiens
cttaataacacataccattctgtgaggtggtgtctcattgtggttttgatttgcatttctctaatgatcagtgatgttgagcttttttgatatgattgttkgctgaatgtatgtcttctttttgagaagtgtctgctcatgtcctttgtacactttttaatggggttgtttttgtcttgtaagtttgttttagttccttac

SEQ ID NO: 454076 - DNA, 201 bp, Homo sapiens
tatatgatgtaaggaagaggtccagcttcaatcttctgcatatagctatccagttatcccagcaccatttattgaataaggaatcctttcaccattgcttrtttttgtcagggttgttgaagatcatatatttgtagctgtgtggccttattactgggttctctgttttgttccattggtctaagtgtctgttttgtacca

SEQ ID NO: 454077 - DNA, 201 bp, Homo sapiens
actttcaatactatgttgaataggagtggtgagagaaggcatccttgtcttttgctggtttttcaggagaatgcttccagcttttgcccattcagtgtagygttggctgtgggtttgtcatagatggctcctattatttttaggtatgttccttcaatacctagtttatcaaaagtttttaacatgaaagagtgttgagtt

SEQ ID NO: 454078 - DNA, 201 bp, Homo sapiens
atgcttccagcttttgcccattcagtgtagcgttggctgtgggtttgtcatagatggctcctattatttttaggtatgttccttcaatacctagtttatcraaagtttttaacatgaaagagtgttgagttttattgaatgccttttctgcatctattgaaataattatgtgggttttgtctttagttctgtttatgtgat

SEQ ID NO: 454079 - DNA, 201 bp, Homo sapiens
tattgccttttaaagtagtgatttagaaaagaaatattttaaaagtcaaactcacatttagggtatatctttaccatgacagtgttagttcctttcagccrcaactaaaaattcctaaatgttcaagttatttatctattagatctttataagggtaatgtgctatttacttgatttgtatttggctattttttgaaaagt

SEQ ID NO: 454080 - DNA, 201 bp, Homo sapiens
agtttccctaatgttttcttccatagttccatagtttgaggtcttagatttaagtgttaatccattttgatttgatttttatatatggcaagagataggcrtgtaggttcattctctgcatgtggatatccagttttccagcaccatttattgaggaatctgtcctttcctccatgtatgttattggcacttttgttgaaa

SEQ ID NO: 454081 - DNA, 201 bp, Homo sapiens
tcttttactcagaaaaaaatattaatccttaatttttagatcaaatgtattaaaagcaattcagcaataactagaggaaaacattcaacttcagtgcctgraaagattcatattcagttcttgtaaattgttgttttccagctattgaaatattttgaattttatatttacaggaacattagaactattaaatataaaaca

SEQ ID NO: 454082 - DNA, 201 bp, Homo sapiens
caacaacagaatcataaaagttcaagatcattaaagtgaaacattgctctgataaaagacagtggattgcttagccattaagttttttatagttttctgargactaaacctgaacaaaattgatgttgttaattttaatgtgctcattctatccttttctaccttttccctctggcattctccctgatttcttgcaaacat

SEQ ID NO: 454083 - DNA, 201 bp, Homo sapiens
aaaacattcaacttcagtgcctgaaaagattcatattcagttcttgtaaattgttgttttccagctattgaaatattttgaattttatatttacaggaacmttagaactattaaatataaaacattaaggactaagtttaatagcattttgtgtaaatgtgaaaaattatgtaggcttggtacttgatttattaagatttc

SEQ ID NO: 454084 - DNA, 201 bp, Homo sapiens
acttattggctctacctcttgatctgtagcatgtattatattactctttattggacatgcctaggttgtaggcaggggagacagagggttgtatcttatayatataaacctagaacagtgccctatagctagaaaataaccagctctagtttttggtaaaatacctatgtgggtattcacactcatcttgaaattatttta

SEQ ID NO: 454085 - DNA, 201 bp, Homo sapiens
aaaatttgaacaaactgaaaatcaacaatatttcttgggctcatcagataaattaggacataaaactaactgctactcccaaatctagaaaggcaggcgaytatagagaaaagcagctaagatccgtttaactgcagcagaagtcactgaaaccataaactggtagggacacttaaatggtaattccgatgaagatctgac

SEQ ID NO: 454086 - DNA, 201 bp, Homo sapiens
gacagagggttgtatcttatacatataaacctagaacagtgccctatagctagaaaataaccagctctagtttttggtaaaatacctatgtgggtattcayactcatcttgaaattattttaccacttgtaaatgcagcagtcactgagccagatcctttttaacttctaagtctgtcaagtaaaattcttgaataaattt

SEQ ID NO: 454087 - DNA, 201 bp, Homo sapiens
cagctctagtttttggtaaaatacctatgtgggtattcacactcatcttgaaattattttaccacttgtaaatgcagcagtcactgagccagatccttttyaacttctaagtctgtcaagtaaaattcttgaataaattttaaaaatttagttgttaaaatagatttattaatatgtgaaaatgttctcttgatttaatgt

SEQ ID NO: 454088 - DNA, 201 bp, Homo sapiens
gaatggcaataatgacgttcctaagagaaggacaccaatgaattatttatattttggctatttttcttttattcagtagtttgtgtaccattctaatattwtgacttcaattataaaataccacaatttattagtgactgaagtcacacagcccaatttatgataaacctattttctagtcacaaaccaaactgtcattct

SEQ ID NO: 454089 - DNA, 201 bp, Homo sapiens
tattgaatcctacctccctgtaacttgtgtattgttctctgttgcaacacacaattctgcagtgttggccaggctggactcaaactcctgattttaagtgrtcctcccgccttgtctttccaaagtgctgggattacaggcgtgagccatcacgcccgacatagatatttatagcttttttatatttttggcttttataaa

SEQ ID NO: 454090 - DNA, 201 bp, Homo sapiens
agtagatttatttattttggtggtatagatttagttaaagagttatccttaggatcactgataatgtggaggaacaatatttcagattccaaacataggaytctacatgtgtcatgtaagaaagtgtaaaatgaataaaaacacttaggaccaatttgaactgacaattctgtgctttcattaatagactattgaatctca

SEQ ID NO: 454091 - DNA, 201 bp, Homo sapiens
taatgatgaaaaaaattcacttaagacctctcatttcctctcaaatattttatcctatcttacagtagtgatttaataaaatatccatttaataaaattarccattgggaacttaaataatacaacaaatcctatcaagctatacacataatatcagcctaccaagttttctataacttatcctcttttttctctaccagt

SEQ ID NO: 454092 - DNA, 201 bp, Homo sapiens
tttggtggtatagatttagttaaagagttatccttaggatcactgataatgtggaggaacaatatttcagattccaaacataggattctacatgtgtcatstaagaaagtgtaaaatgaataaaaacacttaggaccaatttgaactgacaattctgtgctttcattaatagactattgaatctcaaccagttttcacctg

SEQ ID NO: 454093 - DNA, 201 bp, Homo sapiens
gacctgcttaacaagaaagacttcggcagccacctttaagcctgaagctttaaaaatgctgagcaaaattgtcaaagcataattaagggtaggggaattargttcacttttctcccctaagtgtctttgccagagacagaaacttcaacaatagagctaagtggaaaaatggagccatgtcagttaccacaccatgctaaa

SEQ ID NO: 454094 - DNA, 201 bp, Homo sapiens
agtggaaaatgaatatgaaaaaatatcagatttactagttgtcagaatgtaagttatatttacaattaattattttatagccattaaatttaacagaatawttttaaaatcagtaacatcaattgctattggggatgcttgaaaaattcatatattgctgttagaaatgtgagttttcacaaaattttaaaaaccattgta

SEQ ID NO: 454095 - DNA, 201 bp, Homo sapiens
tggtggtgcgtgtatactttgctaaagtgaatccaatatgtaaaaatacacatttataaagcaagggaattcagccagtttttttgcatacaatttataayaaatatactcaatagcaaatccttctgcattcgtcagcaatattagctgatgtttattaatggctgatgtttattaatctacagactggccctaagccta

SEQ ID NO: 454096 - DNA, 201 bp, Homo sapiens
agatagatataatttgaatattctgagaaactgttgatgtcagattctcagctaaggaaattatctgctttgaagctcttcagttatattattagcagtcrgtttatgtctttgtacatgaacacgtcttctttttctcacatagtttattttactttagtaaatctgatgggaagccttatgtcagaatatgtaacaaac

SEQ ID NO: 454097 - DNA, 201 bp, Homo sapiens
actaaagaaaccactagtgaaatgaaggataaaacaaggaaaaagtgtgtggggtctgggcaaaaatgaaactatttggttatgcaattctatctaaggtwaaatcccagcacttgccttaaaaaccatctaattcataatggaggcagagacttctggaaaggaggactccgggaaagaaacatgaatgatagaattgct

SEQ ID NO: 454098 - DNA, 201 bp, Homo sapiens
aatgaaaagcagatcagccacctagctatggttcatgaatcacagtgattctcactttatctttctctcttttattttttaataataataataaaagtacrtagaaagtatctctgagccaagtgggtgccagagtacattgatgctaaagctttaacttgacccagccgtccactggaagttgctatagctgagaaaaaa

SEQ ID NO: 454099 - DNA, 201 bp, Homo sapiens
taaaaatacacatttataaagcaagggaattcagccagtttttttgcatacaatttataataaatatactcaatagcaaatccttctgcattcgtcagcartattagctgatgtttattaatggctgatgtttattaatctacagactggccctaagcctaaaatcaaaggtgaacacatcacaaatggtttatttacaaa

SEQ ID NO: 454100 - DNA, 201 bp, Homo sapiens
tctttatagcagtatgaaaacagactaatatagtttgcttttacaaagtattttttaagggtaaaattaattgtatgtctccttatttagtttatcaaagyaggtctgtgcatacattaatgaaggtatacaggtaattctggtctttcactaatattcagtacataatcttccatctaaaatctgcttttttcttctgtg

SEQ ID NO: 454101 - DNA, 201 bp, Homo sapiens
gtaaacaaacatgcccagctaattttttgtattttagtagagacaggctttcagcatgttggccaagatggtctcgatctcctgatcatgtgatctaccckcctcagcctcccaaagtgctgggattacagggtgatatgtttttaactgtcaaggctaagagttgtttatatcatttacatcctaatttccactgactaa

SEQ ID NO: 454102 - DNA, 201 bp, Homo sapiens
aatagcatttatctctctaggaagtcctgcataacaaaagaagttgggatgccattaagttttatgaagtgatactatgatttcttgaagggaacttactrttacgctgctggaagcctgtaaggtctgttaactaaagaagttcaaagatagccacagttgttcagtatatagttttgctttgtatttttttgattcagt

SEQ ID NO: 454103 - DNA, 201 bp, Homo sapiens
atttcttcattgtctggctgggattttctctttcttcattcaatctggtgcaatatgttgttttgtgaagaatattagcccacacatagatatgttgttcraaaagggtagttcctcacagtttagttgaaggcaggatctgaagccatattgatgaattttttatactctgaaataaaatgctgatactaatgtgaatat

SEQ ID NO: 454104 - DNA, 201 bp, Homo sapiens
ttgactgctttctagctctgcattttcgtttatacaaaaaataatgaaaatttgttattttaatcagacgtactcgccttctgattcagataaaattactrattttagtgagctgcaatagtgacaaaatctatctcctgttatgcctttgtatatgttgtattcttgactgttcagctattccacataaggtacatagct

SEQ ID NO: 454105 - DNA, 201 bp, Homo sapiens
gagacaaagcaataagggagtaatacagatttacagtgagaaaatcaaggcttaaatagctacatactactttctcatggtcatgagtctccagatacctwttaaggtaacataaatgctgtgtctgagaatatcttaagcacaaatgacatatttttaaaaataatagccttaatattttccatgaaatttctatgttct

SEQ ID NO: 454106 - DNA, 201 bp, Homo sapiens
aggtacatagctttttattgtattgacatcatatcaaagtccagatctaaaccatttcatgcaataaaataagtaagtcctatgagttccaatttgtagaygatacattcttggtagggagcttagtttctacaaggagtctcgagtaaaagcagcatttgttgaataaatgacatgttgcacatacatgtgtttctgtgg

SEQ ID NO: 454107 - DNA, 201 bp, Homo sapiens
taatgtacagcatggtgacagtagttaataatactgtaatgtatagtttaaatttcctaagaaagtatgtcttaagtgttctcaacacacgcacacaaacrcacacacgcacaatagtaactgtgtgatcaacttgattatggtactcatttcacagtgtgtatgtatatcaaatcatcatattgtacaccttaaattaat

SEQ ID NO: 454108 - DNA, 201 bp, Homo sapiens
aaccaaggctacaaataaacaattagcaaaatattttaaaaatacaaagaaataaaaagattcatgtgaaaacagtaaaattcttaaaaatatacccttgrtttcagaggtggttgaagtaatttattgtccccattaagttggatgaataaagaacaaaatattgtaaacaacaattaattttaatgacatgaagatgat

SEQ ID NO: 454109 - DNA, 201 bp, Homo sapiens
ctgaccattctctataaaacagcaactgctgtttttttaatctttccgtatctgctttaccatgcttccttttttctcaataatatttatcactattttamataatatatgtttgcttacttatttaatgtgaggctcacccaatactggagcaaaagatactttagagcatgtactattttatatatatatatataatga

SEQ ID NO: 454110 - DNA, 201 bp, Homo sapiens
ttttagcactaatcttttcttatcgagcaccttgttatagatatttctacttttccttcttctctctccttcctactttgtaattcccctcttattttaayctatttcaacatttctgtgatgttttttgtatttgccataaaaatgaaagaaagataactccacggagaaagatttgtgtgcatatttaaatatgtatct

SEQ ID NO: 454111 - DNA, 201 bp, Homo sapiens
atctcagatgtagctggagcaaattcaacttttgggattggaggacaaagcaatctattttctgatagattgtatttatttttaattgtgttccactttarcctttgttttagcactaatcttttcttatcgagcaccttgttatagatatttctacttttccttcttctctctccttcctactttgtaattcccctctta

SEQ ID NO: 454112 - DNA, 201 bp, Homo sapiens
caggcttctggccccacctgggatctgtgaccctgaagaaaagtagcagatacaaggttgtctctggtgagcaggagtctctcagcaaagcctttcccctktcctccttctctaagaaatctcagatgtagctggagcaaattcaacttttgggattggaggacaaagcaatctattttctgatagattgtatttattttt

SEQ ID NO: 454113 - DNA, 201 bp, Homo sapiens
gtgggtgacaatgatcaatgtgatctgtataatgttgcattttcattcctgagctcatctttggccttggcatcattaagcaatccctatgattctctctstgtctctcttgcttttgttttatttaaataatcttgggggcggttccaagatggccaaataggaacagcttcagtctacagctcccagtgtgagcgatgc

SEQ ID NO: 454114 - DNA, 201 bp, Homo sapiens
agtggacctccagcaaactcaacagacctgcagctgagggtgctgactgttagaaggaaaactaacaaacagaaaggacatccacaccaaaaccccatctrtacgtcaccatcatcaaagacaaaaggtatataaaaccacaaagatggggaaaaaacagagcagaaaaactgaaaattctaaaaatcagagcacttctcc

SEQ ID NO: 454115 - DNA, 201 bp, Homo sapiens
gggcacagataacttcttggaaagatgaagattgtaaaggatggacctcattctactttttatcttgttcattttaagccctgctcccagttttctactcacgctatcatgacctgtcatttctactctgtgccacaggatagcaacaggctaagcatctagcagcacggagatgagatgagcaatctgttgtaatagctt

SEQ ID NO: 454116 - DNA, 201 bp, Homo sapiens
tcaaaccacagtgcaatcaaactagaactcaggattaagaaaatcactcaaaaccgctcaactacatggaaactgaacaacctgctcctgaatgactgctsggtacataactaaatgaaggcagaaataaagatgttttttgaaaccaatgagaacaaagacacaacaaactagaatctctgggacacatttaaagcagtg

SEQ ID NO: 454117 - DNA, 201 bp, Homo sapiens
taaatggaactaccagccattcatttgttcaagacagaaaccacgatcctaaatttgtgtcattccaccttcaaaatatagtagtctcattttatttcccraactgtgaaaggtaaaaacctaaagtgagggtataatataaacataaaaccagaaatattaaaaatagatacatttttcctttaaaggaacagaaaaatg

SEQ ID NO: 454118 - DNA, 201 bp, Homo sapiens
tggtgtctctgcattgtcttttcatactgctcttcccttctgtcccccaacacacaatctttgtgtctttctatctctgtcacacacacacacacacacayacacatacatacacacacacacacacacatagatgctccttagcttagagtcaggcttctggccccacctgggatctgtgaccctgaagaaaagtagcag

SEQ ID NO: 454119 - DNA, 201 bp, Homo sapiens
gcattgtcttttcatactgctcttcccttctgtcccccaacacacaatctttgtgtctttctatctctgtcacacacacacacacacacacacacatacayacacacacacacacacacatagatgctccttagcttagagtcaggcttctggccccacctgggatctgtgaccctgaagaaaagtagcagatacaaggtt

SEQ ID NO: 454120 - DNA, 201 bp, Homo sapiens
tttttaaaaattcttttatcctatttgatgaccttcagggtttgattgtgacattacgtggattcaactgactggctttgtttctggaagattttaggggrtcactgcttagcccccaactcctggactatgtgctctcactctgggggcttgtattaagccctgactttgttctcttggctccttgatgttaggaaccca

SEQ ID NO: 454121 - DNA, 201 bp, Homo sapiens
gtgtttcaaaacggggacttcaaatatggtaattgcacctgaaatatgatttgtattatctgatggtagagaatctatattcccatggacaggctacaatragagagaaggtttataataaatttcatacatacaatgtacattatttaataatctgatatccttctgcagagtatgattatacacactccttcactcatg

SEQ ID NO: 454122 - DNA, 201 bp, Homo sapiens
actcagtacgagggaggatctgctgttcactgtgcagtattagcacaagggcagggtgctggcaggggagaggttggctggttctgtgcctgccaaggctstgtctgctctgcaatggcagttggcggagggtgggggacagacagtctgtgaggtaagcaaagaaaaatccatctgggcagacacacaccagccaagtga

SEQ ID NO: 454123 - DNA, 201 bp, Homo sapiens
aagatatgttttgtttattctagggtattagtcagttttcacaatttaaccatgaatttttacaatgataataaatagaggtagtacagaaattggatctsggaataataatgcaactagttgtatcagttcaatgcacctatttgaatcctttacatgtcacatgcttgtgaatttttgccaatgatgaagccaaaaatt

SEQ ID NO: 454124 - DNA, 201 bp, Homo sapiens
gaattctttagtgaactttttgaaatgtaataattggcattgtctttcaagttaccattacaaaaacaagtgagaattaaagtagaaactataacattaattttttttatgtcttatcttaaaaataaacccttggaacatacatttcaactggcttaatcacatatgagacaaagaaatgagaagttataactaggcaag

SEQ ID NO: 454125 - DNA, 201 bp, Homo sapiens
ctaaacaaaataaagataatctcaaaactgaggcagatacataaactggtgagagaacagtaatcaaattgtgtcattctttgtgggaaaatctaaatgtmatcacatctctgcacaaatgacccaaagaactcaggaactagcactgaatcattgcaatgagaaatgcctactctgggtagatgattaacaagtatcaat

SEQ ID NO: 454126 - DNA, 201 bp, Homo sapiens
caccgagtatccctctgtcacctgctcattttcccgtaatagttaatcactctgaaataatattcttattttctcttactttctcaccatgaagttttccrtactccaggactttgtggaaactgatcttgttaaggatgtccatagtttcctcattgttaccatcggtggacttcatcctctttctcttctctgtcatgt

SEQ ID NO: 454127 - DNA, 201 bp, Homo sapiens
acttcatgtatttctgttctgagaatggaggttcttggacaaatgtatttgaagtacagagcacagagggttaatacatataatattcaaataactattamcaaatatcaaggagacaatgagcccaatgcaaattatatcaaaaaacaaatcaaacgcattcaagtggaaaatgaatatgaaaaaatatcagatttacta

SEQ ID NO: 454128 - DNA, 201 bp, Homo sapiens
gtaacacaaagtgtttcatgttacttttctgcaatttattttatttttcttaatttttgtgggtacatagtggtatatatatgtatgaggtacatgcgacrttttcatacaggcatgcaatgtgtaagaatcacatcatggaaaatggggtagccatgccctcaaggatttatcctttgtgttacaaaccatccaattata

SEQ ID NO: 454129 - DNA, 201 bp, Homo sapiens
caaacgcattcaagtggaaaatgaatatgaaaaaatatcagatttactagttgtcagaatgtaagttatatttacaattaattattttatagccattaaawttaacagaataattttaaaatcagtaacatcaattgctattggggatgcttgaaaaattcatatattgctgttagaaatgtgagttttcacaaaatttta

SEQ ID NO: 454130 - DNA, 201 bp, Homo sapiens
atgtgtaccacattcatttatttttctgcctaaatattcttgacatacaaataatttttccatttagtatcatatttcaagatttaacttagtcttctccyaaagtgctgtgttctgcacgtgttcttattatacttcttatcacacttacttgaatctgtttgtgtaactttttttttgactggtttctcagtacatcat

SEQ ID NO: 454131 - DNA, 201 bp, Homo sapiens
ctcgccttacaatggggttacataccaataaacccaatagatattaaaaatattgtgaaatcggaaatgcatttagtacccccataaactccttgtaaagwtgaaaatttataagttgagccatcaaagatccagatgctccttgacttatgatggggttacatcctgttaaattcatgataaggtcaaaaaattgttaag

SEQ ID NO: 454132 - DNA, 201 bp, Homo sapiens
taaaataatattagacttaagtgttttataatgatattgggcttatgttgttattttttgtttcgtaaaatgtgtaattcaactactgtttttattgtacyatgtggatgcattaagtagccatgctgacagatgcaataaaatgagtaaaataaacaaatattttgatttttttaagatataaatttagcctttttttca

SEQ ID NO: 454133 - DNA, 201 bp, Homo sapiens
cataatagtaattctaatgcagtacttatcgttcggtttttttttttacataaaaatacatgaacgtgtaaaagatactttgttgatgaaattatatactsgaggcaaaactatgctacaagagaatcatttcaaaacaagtaagcacatgttaaatgctagatactagaaataatctacccaaatactttttgaaaagca

SEQ ID NO: 454134 - DNA, 201 bp, Homo sapiens
taatgaacaaaatttctatatacacctgctgtcactatgagcaacaacaggacaactctttccagcttggatttgtttgaactagacataccaaaatgagytggaaacacttctcgaaccttgccctcccattctgaaatgagaattccatgcaatgactgtacaagttttgtcaagctatggtggaacatggtatcacaa

SEQ ID NO: 454135 - DNA, 201 bp, Homo sapiens
taattattgtaaaacagaaatcttatgtaatctcactgtttaaatcatttcagaaatcatttcagaaattaaccattactcttagaattaagagaaaaagwattttattttttctctataggctgtgatggttttggctctacctgtcttcatagtctcctttaataccctcccccatttatttctgtggtctaaccactc

SEQ ID NO: 454136 - DNA, 201 bp, Homo sapiens
gtgctaaaataatattagacttaagtgttttataatgatattgggcttatgttgttattttttgtttcgtaaaatgtgtaattcaactactgtttttattktaccatgtggatgcattaagtagccatgctgacagatgcaataaaatgagtaaaataaacaaatattttgatttttttaagatataaatttagccttttt

SEQ ID NO: 454137 - DNA, 201 bp, Homo sapiens
ctgagactgggtaatttataaaaaaaaagaagataatttatcatagttctggaggctaagaaatccaagaacaaatagctggcatctggtgagggctgctstctgcttccaagatggcaccttgaacgctgtgtcttccagaatggaggaacccaatttctttctttgccctgtccaaagagggaagggcaaaagaaacca

SEQ ID NO: 454138 - DNA, 201 bp, Homo sapiens
gacctctgggaaaaatatttcaagaggaaaacattagcaaatactttcatgttgtctattagcatcatattgctgttcaaattattctcacacactgtccraatcatttcagaaaggttggtacaagataaagaacttgtcaacattaatacatactaaaaataatggcatacctcttcttccttctacagttcacacatt

SEQ ID NO: 454139 - DNA, 201 bp, Homo sapiens
ttacagaagacatcatcatgacttattgattctaaaaacacgaattattttagcttactgcttgagttttttattaatttaataataaatttggaattttrtttgatattgagagcatagtaaacaacattatcaactttgtgcttgtttttcaaaatccatatgatgatttataagacaaataaggtaaaacctgtgctt

SEQ ID NO: 454140 - DNA, 201 bp, Homo sapiens
tcctcaaacagttctgtgtgcataatttagcaagtaaattgagtgtcataaaacctatataaggttaccatcattactcattaaataaatggccaaggtarcacttatgacaaatctgtcttatggtaacatctgcaccctcttttctgctttatgtcaaaacccagattccttttatttaacttttatttttagttcaga

SEQ ID NO: 454141 - DNA, 201 bp, Homo sapiens
aagtttggagagaatcaaacccatagtttattacagtggaaattgtgcagataaattactcttcaaaattgtttttttttaaggaaaaaatacaatatcartacaaacttactgtatagttcactggcccaaaataaagcacttgctgaggaaaattaacaagctatacttgaatccatcccatatttattaactgatgtt

SEQ ID NO: 454142 - DNA, 201 bp, Homo sapiens
tttttgttatgtgtacgtatttgaaatcatagattatataatattattttactatgttcttttatccatttcataaaaccatattattcaattattcacaygtatcttggacattaacattcttatctcaatagggcaaatttttaattttccccaaactgtttttcagggcatgctatattccagctacattgtattgca

SEQ ID NO: 454143 - DNA, 201 bp, Homo sapiens
ttctgctgaaaaatccactgatagtctgatggagattaccttatgcatccgacttgatgtgtttctcttgcttcttttaaaattccctgtttgtctttacyttttgacagtttaattacaaatgccttgttgaggacaatttttggttgaatctgtttggcaacttttgtgtttcatgtatctggaaatccatatctcttt

SEQ ID NO: 454144 - DNA, 201 bp, Homo sapiens
caacagatatatttacaaataactcaggtaaatacgtggcaaaataattttgaaacctagcccttgcattttagatttctaattatataattttagcagtsaaaagatcttaggaataataaaataaagtaattgtataaaggcattggtgagcacttgtttaggatataggatagaaacgtggtggcatacaattctaga

SEQ ID NO: 454145 - DNA, 201 bp, Homo sapiens
tcctcctccaaaggagtgcagccccttgccagcaatggaacaaagctggacggagaacgacattgacgagctgagagaagaaggcttcagaggatcaaacktttccaagctaaaggaggaagttcgaacccatggcaaagaagttaaaaaccttgaaaaaagattagacgaatggctaactagaataaccagtgtagagaa

SEQ ID NO: 454146 - DNA, 201 bp, Homo sapiens
cacacacacacacacacacagagacacacaatcaaaatagaattttttacaatttcatgagaagggaatcaatcttcagattgttaaacactaaaagcacycctatgcttgcctgtaagctggaatcattttttaaaatttttggtaataatcacataatatgaaaaccaccttattaaaaaatgtttaagtaagtataca

SEQ ID NO: 454147 - DNA, 201 bp, Homo sapiens
gtccaacaatgatggactggattaagaaaatgtggcacatatacaccatggaatactatgcagccataaaaatgatgagttcatatcctttgtagggacayggatgaagctggaaaccatcattctcagcaaactattgcaaggacaaaaaaacaaacaccgcatgttctcactcataggtgggaattgaacaatgagaac

SEQ ID NO: 454148 - DNA, 201 bp, Homo sapiens
ttataagagtgctaattctgttatgagaaccacaccctcattatttaattacttcctagaagtaccccttccaaacactaccatattgaggtttacgtctycaacatacgaattttgagaagacataaacagtcactaacatacattacaatatttggcatatagtaggtatttaataatttgagtaattgataaatacta

SEQ ID NO: 454149 - DNA, 201 bp, Homo sapiens
aacaccgcatgttctcactcataggtgggaattgaacaatgagaacacttggacccaggaaggggacatcacacactggggccattgtggggtagaaggasgggggagggatagcattaggagatatacctaatgttaaatgaccagttaatgggtgcagcacaccaacgtggcacatgtatacatatgtaacaaacctgc

SEQ ID NO: 454150 - DNA, 201 bp, Homo sapiens
attctatttgcatgtctgtttagggacaaagggatgttttattcaacttctaccctctgtaccttcctcagacctagcacatgttgttgctcagaaaatgytgaattagtgtatgagcacaagaagcagagttttaaatattctagtcctctatgtaggttatctgtatattgaaggaaatttttcccaaagggataacat

SEQ ID NO: 454151 - DNA, 201 bp, Homo sapiens
gggagggatagcattaggagatatacctaatgttaaatgaccagttaatgggtgcagcacaccaacgtggcacatgtatacatatgtaacaaacctgcackttgtgcacatgtaccctagaacttaaagtataattttttaaaaaagatcaaaaaaattacatcaggattttattttagtgattaaagaaaataaacacct

SEQ ID NO: 454152 - DNA, 201 bp, Homo sapiens
accagttaatgggtgcagcacaccaacgtggcacatgtatacatatgtaacaaacctgcactttgtgcacatgtaccctagaacttaaagtataatttttwaaaaaagatcaaaaaaattacatcaggattttattttagtgattaaagaaaataaacacctaaaaaaaatcttttattattgacattgaagtcccttaca

SEQ ID NO: 454153 - DNA, 201 bp, Homo sapiens
gtgggggacagacagtctgtgaggtaagcaaagaaaaatccatctgggcagacacacaccagccaagtgatgtgggaccctggggaagctacagtatgggragagagtgtgcaggctggtgtgtggccgtaggcgtcgtgccactggagctctctgcagctcaggcacaatccaccagtgcagaagctatgggctcccaag

SEQ ID NO: 454154 - DNA, 201 bp, Homo sapiens
aaatctctgtcttgttggtgattttttaggtaatcaccaatattatatgctggcaccttgaaaaacaaacagtaacactaactcattttcaaacacatcartttcatttgctatatttacttgaaacaagtctacatgtcaatgaatagatcgatgtatatatccctcattgggggaaagacaagctattctttcttggtg

SEQ ID NO: 454155 - DNA, 201 bp, Homo sapiens; identical to SEQ ID NO: 27569

SEQ ID NO: 454156 - DNA, 201 bp, Homo sapiens
gagaagtctctcccagagctgcaagctgtgctacctggagttgggggaggggtgatgcagaaactcccttggctgccccagcttgtgtctcattgggtcaygtgcatcttagcttcatgggctccaagtttagcaccaggacttgcccaggaattgcagtccttgtgggctagactgcatttcaagtttatttagtacccc

SEQ ID NO: 454157 - DNA, 201 bp, Homo sapiens
agtaacacacagtttgctccctattgtataaaatgaagtgtgtagaaaaaaagatgcagtaaatatagaattatcaatcttcaactctggggatggatcayactattttaagaaaaattttctgtagtttctataatgaccacttatttctatttttaaaacaatgtttatttttaataaagcagaaaagagaattggggg

SEQ ID NO: 454158 - DNA, 201 bp, Homo sapiens
ccacctctcctttcactgtctctactccataccccactccttttctgggttctactatggtgccttgtctctggttggtaaaatttcttgaattccaagcaaaaaaaaaaaagaaaaaaacagtatcaggaacaaatccttttgaaaatcaaatggtttataaattctttgattttatcaatactgaggaagggcttaatc

SEQ ID NO: 454159 - DNA, 201 bp, Homo sapiens
tgtcttagattattgataccaggaggaaagaggatttaaaaagctgctttctgtcctctctgtgatttcaggagggtgaaccagagcttttgtttaccttyggatctgtactaaaagccttttcaagtagagaatatatggtgaggcagtgggaaaatactcactcttaagccttatgtggatgtgtatactggtagaatc

SEQ ID NO: 454160 - DNA, 201 bp, Homo sapiens
ttctttctttaatcttctaagtgtatgtgatagacatttgtcataaactttcatatgtttacggccttctattaagctaaaaatatttaattcttaattattgtacctaagtctataggaaacttagattttattctctacatctgaatatggcacacgtgcatacgtaataccataataaataattcaaacacatcattt

SEQ ID NO: 454161 - DNA, 201 bp, Homo sapiens
acccaatatgtgttttacaaataacaacctttgtatctataaatctgcaagacagagagtttgttcaatatgagtaataaaatcataattttcattaaatcttattctaatataacatcatacaacacagggactacaagttaaattagaatccacttacttcaagcccccaaatttttaaataagttaactgaatttcag

SEQ ID NO: 454162 - DNA, 201 bp, Homo sapiens
taattttcattaaatcttattctaatataacatcatacaacacagggactacaagttaaattagaatccacttacttcaagcccccaaatttttaaataakttaactgaatttcagaaaaatgaagtcacttttttactactacatgacgtttgttgggagtctagtcttttatttaaggtaatgtgcttggaaaagagaa

SEQ ID NO: 454163 - DNA, 201 bp, Homo sapiens
ataagtttaaagatttgtacaataaactacttttatcctgcaccagatttgtcaggagacatgaaactaatgttagtttacaatgtgctctgacttctaaygcacatggcaagacttaaaaaaaaaattcagagtgtctcagcacaggcctataaacaccatagtttttgtgatgagggagattgttaaataaatgatgaa

SEQ ID NO: 454164 - DNA, 201 bp, Homo sapiens
gtggtctcactgagtcactgaggttggagtgtagtggtacaatcatagctccctgcagcctcaaactcctgagctcaagtggtcctcctacctcagcctcyttagtaactaggactgtaggcctatgccaccgtgactggttaattttattattattattattattacttgagaaatggagcctcactgtgttacccaggc

SEQ ID NO: 454165 - DNA, 201 bp, Homo sapiens
ttgccaggttttataaaaaaatatattgcagttgaatcatgatttttggcttcagtacctcgatgaatggtgaggtcatattctgacatggggaagaggartagaagcagtctgtgaatgtctaactttggtgtctaggaagacagttgtttccttactagagagagaacacacaatagggaaaaattaggggtaaagaga

SEQ ID NO: 454166 - DNA, 201 bp, Homo sapiens
tattctgacatggggaagaggaatagaagcagtctgtgaatgtctaactttggtgtctaggaagacagttgtttccttactagagagagaacacacaatakggaaaaattaggggtaaagagagatgagtcaatatttggatataccaaattagttctccatggatctattgagtataagccctttggaattcgatttttc

SEQ ID NO: 454167 - DNA, 201 bp, Homo sapiens
tttctttgttttgcttgcctgattgctctggcaaggacttccagtattatgctgtataagagtggtgagagtggatattcttgtcttgttctaggtcttaraaagaattctttcaacttttaccattcagtatcatgttggttgtgggtttgtgatatatggatcttattattttgagatatgtttatttgatgcctagat

SEQ ID NO: 454168 - DNA, 201 bp, Homo sapiens
ttttttcagtttagaaagtgcaattatagcagatagatgcacaaagtaaaccaaattcaagacctagagagctaaaaggtgttctttttctctacaagctrtctacttcactgtgaaaataaagtgctaccttttgtaaaacacagtttttcaagcaagtagacaaatgttgcattggaaagtaaggctctatctgtgtcc

SEQ ID NO: 454169 - DNA, 201 bp, Homo sapiens
cctgactaacatcaattgaagattggggttcaggaggcctagatgatccaccatgacttattcaaaagttgaagatgaaaggaaagaataaagactctttycatccagttctctagtctgaaaggaaaagaaataggcaaaggacagtaggcttttctatatcattatattcattcaaatgattctcttaaaataataatg

SEQ ID NO: 454170 - DNA, 201 bp, Homo sapiens
tgatgtagtttaatttctgaaccttccaaactaaggaccaatttctgatttcttctgtgagattcactctgaagggatgagctgggttattgccttgccayagcctagtaatttgggttattctagggtttggtcacagctttgatttagctttcagttagtgactaaacactaaagcaagagattagtaattggaattgt

SEQ ID NO: 454171 - DNA, 201 bp, Homo sapiens
cctagaatgaccatttgggattgaattcctgactacctgataaaattacatcacatagaccatgaacccagaatacaaagttgtatgcttttatctgggcytttctatgttctatttcaagacatctgactcaaacaatgaagtgagacatctaatttcatttctgctgcttactcaatgtcacttttaacaatatattaa

SEQ ID NO: 454172 - DNA, 201 bp, Homo sapiens
tgtctctctttaagttagtatgtgtgatttaattccctagaatgaccatttgggattgaattcctgactacctgataaaattacatcacatagaccatgawcccagaatacaaagttgtatgcttttatctgggcctttctatgttctatttcaagacatctgactcaaacaatgaagtgagacatctaatttcatttctg

SEQ ID NO: 454173 - DNA, 201 bp, Homo sapiens
aaacggagccattatccaaggctccagttgtatgaccacttggagcatgatggcctctaggtgagaagaaataattttacaaggaggttaaatatgtgaargaaagtatctagtgctggagataacacaaataagaagtaaaatagactaatcattctgaaaacaatgttgtcactagagtcgtttcacctttgtgaaaga

SEQ ID NO: 454174 - DNA, 201 bp, Homo sapiens
tcattattgactaatctaccaaggggattgaatgacaattattaatttcttagacctatagttcttaaagtatggtcaagggactcttaagagtccccaasaccatttctaggaattcatgatgtcaaaactattttcataatgataccaagatattaaaaaccctaatgtttccttgtctttagcatgataatgacagca

SEQ ID NO: 454175 - DNA, 201 bp, Homo sapiens
tttgcctccttaatttgtaaacttgtggtcacgttatatatgggcacacacacacttttatgggaaatgagggtttcctcatttaaaagctatctttgttaaaaaaaagaaagaaacttgatacagaggagaaaatatgtaggtagcataagtattctttgggaagaaataaaaatggcaggtgaatgctaattttatcct

SEQ ID NO: 454176 - DNA, 201 bp, Homo sapiens
tgatgaacatatagagcatttatatctcatttaatacccatgatgactctaagtagcagactctagaattatccctactgtacggatgaacatatagaggmctaaaaaggataaaaaacttgcctgctgtcacaataagtgctatgtgtcccttacgttagtctgacaataaagactaagccctctgctatcataccacac

SEQ ID NO: 454177 - DNA, 201 bp, Homo sapiens
catatagcttctacatttctgagccattacactgaggtcttttaattttttttccctgagactaaataaacgtgatggaaactgagatatatttttattaytgagtacgtctgctgttgaagacctgaataaacaaagaacaaaactgaattatggtgctgcagcctaatatcatcacctactaatcaaatatagaaactc

SEQ ID NO: 454178 - DNA, 201 bp, Homo sapiens
aaacacagtttttcaagcaagtagacaaatgttgcattggaaagtaaggctctatctgtgtccatatcaagtctattcttctggctcagaaagtaaaaacmaacaaaaagctatggtattttggaaggtggagtgtggtaaggtggcaaagggataagttggtgaaaggtttaggtgtacaaagtatgaaccagtttctct

SEQ ID NO: 454179 - DNA, 201 bp, Homo sapiens
tatatttcaaatgtggaagaaaataaattttgtcagtttaccgtagaaagattcttttagtaatagcttggaaataagactagataaggcataattgtatragctacactgattgatcatgtactagttattgatattggtaagtaatttaaatatactaattcatttaatctgaataacaaccatatcagaagtatagta

SEQ ID NO: 454180 - DNA, 201 bp, Homo sapiens
tattaatgttggcattcacactgaggctgggcttttgcatttccacaccaaatagttatcttttaaaaacataacattacagatacattttggcctgaagrtattttcataagttccctatttatatgttgttgatgaaattaaggattccagtaaatcataataatcattgctagtggaggagaacacagtaagattaat

SEQ ID NO: 454181 - DNA, 201 bp, Homo sapiens
gatggacttgacatgcgaatggaagtaagccagacaaaaaggcatcagtatttctcatctccctttttgcttttacttcccatttgcaacccatctcaagrgaggacaatggaaggaaaggggtaaaaataatatttaagaaagaaacaggagaaaaagtaaaagaaaaagcaaaatagtgagacagaggaacagttgcag

SEQ ID NO: 454182 - DNA, 201 bp, Homo sapiens
gtcactttttcattgttactgattttgatcaaccaagttttaaatatgtactgtgaaaaatttattttcacctttattttgaagtactgtgcatcatttcrtagcaaatctatggcatggatatgcaggaaaaagtggataaaattatattttgacaacttcctaaattattatgtctctcagagataataatgatcagtg

SEQ ID NO: 454183 - DNA, 201 bp, Homo sapiens
ggctgtttcatcattgtgcaaacagagtgtacttacacaaacctagatgatatagactactacacacctacattataacgcagttgtaatacaatggtaawatatttgtgtacctaaacatccctagacatagaaaagataatgcattgtgccaagacattaatgttagctatgacatcacgaggcagctcgtttataatc

SEQ ID NO: 454184 - DNA, 201 bp, Homo sapiens
accaaatattttggtgaaagttttgtatattttttttcaaaatgttaagacaataaaaatatttgagttcaacaatgtattcttagaaatatatttctagytttatagtgcttaagtttattagaatatgacaataacatatgccaaatcaatgcttaaattgatactttttataattttcttgatcttgagaagtcttaa

SEQ ID NO: 454185 - DNA, 201 bp, Homo sapiens
atgtgttgtgaattatgtttacaagatgttataaatatgggccgataaagttgatatttataattccttaaagtcacgtattaaatctgatatattttatytcttcacaagtcaaaataaacttagaaagttttgagaaacaaaaatatagactagaatattatatgcatgtaagactgtacaaatccagtctaaaatgta

SEQ ID NO: 454186 - DNA, 201 bp, Homo sapiens
tgagactagatgccaaagtatgcatgtgttgtgaattatgtttacaagatgttataaatatgggccgataaagttgatatttataattccttaaagtcacrtattaaatctgatatattttatctcttcacaagtcaaaataaacttagaaagttttgagaaacaaaaatatagactagaatattatatgcatgtaagact

SEQ ID NO: 454187 - DNA, 201 bp, Homo sapiens
gtggacacatcgggattggcacatgttgaatgctgtgagactagatgccaaagtatgcatgtgttgtgaattatgtttacaagatgttataaatatgggcygataaagttgatatttataattccttaaagtcacgtattaaatctgatatattttatctcttcacaagtcaaaataaacttagaaagttttgagaaacaa

SEQ ID NO: 454188 - DNA, 201 bp, Homo sapiens
gcttcattcttgaagtcagccagaccaagaaaccaccaattgtggacacatcgggattggcacatgttgaatgctgtgagactagatgccaaagtatgcakgtgttgtgaattatgtttacaagatgttataaatatgggccgataaagttgatatttataattccttaaagtcacgtattaaatctgatatattttatct

SEQ ID NO: 454189 - DNA, 201 bp, Homo sapiens
cggacatagcatctttaagaacggtaacagtcaccacgagggtctgcagcttcattcttgaagtcagccagaccaagaaaccaccaattgtggacacatcrggattggcacatgttgaatgctgtgagactagatgccaaagtatgcatgtgttgtgaattatgtttacaagatgttataaatatgggccgataaagttga

SEQ ID NO: 454190 - DNA, 201 bp, Homo sapiens
aggctgcccatgtgtaccggagagaatacagactctggagatgtaaagacttgaatttgaattaaaggttgagtcccatgttcaccatttattatctgtgktacttttgagcaattcaattcagctctttaaatttagtctcaacatctataaaactgctataatgaaacatgcttggcaagtttgttgtgagcattagag

SEQ ID NO: 454191 - DNA, 201 bp, Homo sapiens
actaacatcaattgaagattggggttcaggaggcctagatgatccaccatgacttattcaaaagttgaagatgaaaggaaagaataaagactctttccatscagttctctagtctgaaaggaaaagaaataggcaaaggacagtaggcttttctatatcattatattcattcaaatgattctcttaaaataataatgaact

SEQ ID NO: 454192 - DNA, 201 bp, Homo sapiens
ttatttctccaaaggacctgtattagttaagttcaggtggattatgtcaataacatattaacacaaaatctcagtggtttcatataacaaaagtttacttmccttttatttttttttctaaaatatcaattatggagccagggctctgttccgtaaagtcattcagggtctcataactccactaaccaaggataatgggaa

SEQ ID NO: 454193 - DNA, 201 bp, Homo sapiens
tcattaaactgtcactgagtacctgttagctactgaaaagtaatagtgaactattattaatatatttaaaaaaaatacatgccctcctcctttatccaggragaggtcaaaatctctgggggcaagagtcaagtataccaatacagtcataccttagagatactgagaatttggttccagatgccacagcaaagcaaatat

SEQ ID NO: 454194 - DNA, 201 bp, Homo sapiens
ataatggaacacaattccacaagtatcagaaaatgtgctaccttgttgagtaaattgaaaaaggcaggcattacttccattctgcttaagaaaaaaaaaaratttattttaggtctgctgtgtgatagttgacaagcagtaaggactggcttgtttgtcctataccactctttgtttctttctttcttttttttttttttt

SEQ ID NO: 454195 - DNA, 201 bp, Homo sapiens
tcaagcttcaacaccaccactttttctacacactaaacttgacttccagcaaatatttattgaagatttactgtaggccctaggattctagtaacaaatawagctgtgcagcatacagtctaatggaagattctattttttttaaaaaaaaaacgttaatgaagaaaagagcagtatgcaggacatagcagttttggtggt

SEQ ID NO: 454196 - DNA, 201 bp, Homo sapiens
ttttgcttcaagagtagataaatccacacagactgaactactatgctatgatgtaagtagctctgtaaaaccatttttaacttcattattggcattcagamctccacagcttattgacctctgcggctgctgtgtccatgcattgatttaacaggatttagcggtgcaccattcatcttttgctcttaaacaatccccaaa

SEQ ID NO: 454197 - DNA, 201 bp, Homo sapiens
atatttctctataaattctattgaagtaagtttcaactagggaaactatgatggctttgaaattcgtttttatgtgttgagggtatgcagtacatttactaaaaaaaaatgattatcaagtgataaaatggttgattttggttaaaacaacttctctaacttctctcttcatacatacccacttagctattgccacactag

SEQ ID NO: 454198 - DNA, 201 bp, Homo sapiens
aggctggagtgcagtggcgcgatctcggctcactgcaacctctgcctcccgggttcaagcaattctctgcctcagcctcccgactacctgggattacaggccccccccaccacgtccagctaatttttttgtttttaatagagatggggtttcaccatcttggccaggctggtcttcaactcttgaccttgtgatctgcct

SEQ ID NO: 454199 - DNA, 201 bp, Homo sapiens
agtaaatattgttcacaaaaatgaattaactgtgaatttctcagttattttgacatcatgtagccatgcagttgctaggtcattacaaggcaataaaaagyagatgtatttcctaaagaaatactgtaagatctggccaagtcagtggatttgctacataacaaaggcacaatcagagtttctgctaattcagtcctagat

SEQ ID NO: 454200 - DNA, 201 bp, Homo sapiens
aggttaaaggattcccttgttgtgaatcacattaccttttacaaagaattttgaatattctagtaaatatgctcttccaggaatgttacattttattctawttttattccttttaatatagcattcctgttaggtttttcaatttgtgtttgattgtacagttatgtaaattctttttgacagatttgttattaagggaag

SEQ ID NO: 454201 - DNA, 201 bp, Homo sapiens
tataagatagttttttcattttcttctttacgttcgtatctgttactattagctgctgtatggagtatgtttaatacaataaaaaataaagtgatacctamaatttataatcagaataaaatgttaccatctttatacatcttttacactaatatgttttctacaaagcagtacagttttattttagacatatgttcatga

SEQ ID NO: 454202 - DNA, 201 bp, Homo sapiens
gaactattgaggggtagatgccaagtagcttgttagagatcatgcatttaacaaatggtagggataagattcaaaaccagctgggaaaaattacaaaatcygtattttttttctatatctcacagaaatcttcccttcttggtaaacatccttgagcctcctattattcttttatggctagtttactgtcttcaaggctgc

SEQ ID NO: 454203 - DNA, 201 bp, Homo sapiens
accacaatactttagtaaataaccttgtacatctcccttttggcacatgtgggaggatttccactggatagatgcctagaaacgtaatggctcacagtgcrtgcctatcatacattttgatagatgataccaaattactctccaaaagcagttgctttccagggagtaactgtaggagaagggaggagaaaaaccctgttt

SEQ ID NO: 454204 - DNA, 201 bp, Homo sapiens
ctttactacatgtcatgacttaaaatattaaataaaatttatgtgacataatgtcacgagtaataggattataaagtttatccataaacatagaatttcaragttttaaatgcatgagttaattttccagctgtcttaatacttttctcatttgatacaagatcacttttatgcacgtgaccatgtttgtccatttttgga

SEQ ID NO: 454205 - DNA, 201 bp, Homo sapiens
acattaggtttcatttgctctttttgtttacaggttcttcagctgaaagctggatggcttttttttttttgagaccttattttttatttatctctaatatrggtgtttagtgctccaactttctccctaagtattgctttcacagcatccaacaaattgtatatgctgtatattattttaatttggtataaaatacttttt

SEQ ID NO: 454206 - DNA, 201 bp, Homo sapiens
cctttaaaattaagaagttagaaaactaagattgtttatcttttatttttcaagttatattatttttaattggatcagttaagtttatctcttaattttcygtgagaggacaactgctttgttccttatttagctaactgaatgggctgggacagcttccatagcataagagataatatttattgattcagggtctgcgac

SEQ ID NO: 454207 - DNA, 201 bp, Homo sapiens
ttctattttgttgaaagtttttatcaggaatgaatattggaaaaaaaggcaagtacattttcttcacttttctctccctcccctccgtgcctctttcccarctaaaagtttatcaatttgattaatcctctctgagaggcaaccaaatgaagccaaaagttacatttactttctttacttgtatgctattttatttagttc

SEQ ID NO: 454208 - DNA, 201 bp, Homo sapiens
tagcatttcttagaactttatataaatggaaacatatgtagtttttgttgtctggcacttttcacttaacataattattttgatgttcttatgtactgcartgtgtatcagtaggctatttattctaattgtggagtagtattctattgtatagataacacacactgtatccattgacctgctaatggatatttggattgt

SEQ ID NO: 454209 - DNA, 201 bp, Homo sapiens
agggtgtctctgactatctttcccaaaggaaaagatctagacccaataaggagaacaatattctttttcttctcttccctgttatcttattatctattgcraaaaagaagaccaagatgagatcatacctcagtggacctttttatgagtataataacttacaagcataatgacaaggaccatttaaattccaaagaaaac

SEQ ID NO: 454210 - DNA, 201 bp, Homo sapiens
taaaaaaacccagtgtttagtaacatgaaattaaagaaataatggaacacaattccacaagtatcagaaaatgtgctaccttgttgagtaaattgaaaaargcaggcattacttccattctgcttaagaaaaaaaaaaaatttattttaggtctgctgtgtgatagttgacaagcagtaaggactggcttgtttgtcctat

SEQ ID NO: 454211 - DNA, 201 bp, Homo sapiens
aaaagtaattgaagaatagaatagaagaagcaatgtaaaggcttcttagaaaacattaaactagtagagattattcagcctgaagaatagaaggctgaagygcaatatgcagcgaaatgtttaactatagtgtgagatgatttatgttaactataaaggagaacctccctgggctgaatgatagttattagaccatggtac

SEQ ID NO: 454212 - DNA, 201 bp, Homo sapiens
aggaaaataagggcaacattattatgttttgatttaaatttgcaggatttatgataagaaaaattattgtttgttattgctaacctttttctaaaatagayattaaatacattttaaaatagagtcacaaagctttgaaccaaagtagaaatggtggaggaaccttgtactttacagatgggctgccagctaattgcacct

SEQ ID NO: 454213 - DNA, 201 bp, Homo sapiens
ctttgtcacccagcagcttggagatcccaggaactgcagaacgccaaatagcgtgtaagagccctggctcagggaactcttagagctgaactccccaaagrgcctcaacttttctctcctcttttctctcttttttcttctcctcttctcgtgctcacaacatgctgactaggggggcatgtttcagccctgtttgtgcca

SEQ ID NO: 454214 - DNA, 201 bp, Homo sapiens
aagttgaatattatctaaagtaaaaccaaaggttttccattctgaaagtgaatcaaaatctgttgatggttcatagatacaatattgcaaagataattacrtttaatccccaaagcaaccatatgatgtttttagggggagcttcttgaaaatgaagtagctatttaaatataagtttaaacatcacaagggaaaggatct

SEQ ID NO: 454215 - DNA, 201 bp, Homo sapiens
tggaaagttggatacaaaatcggttcaggtcctgcaggacaattatcaattactagacaaaaacatttgtatcatcattggatacaaatttgcaagttacyttttaacttcactgagtcagagctcttacagtaaatagcaaaatcaaacaattatataatctattgaatgtagtaatctttgggaaagccttttagataa

SEQ ID NO: 454216 - DNA, 201 bp, Homo sapiens
tattatatagaatgctagatgagatccaatagggtgagggcaaaggaaaggctgctatttattattctatatttcaacaagtaaatgatagcatctaaacaaaaaaaaattcctgcaaaatgtcataaattaccacacactaatatcaaagtgcctaaaataaacaaactcctatcatgaaggaaagtaaaattcaactaa

SEQ ID NO: 454217 - DNA, 201 bp, Homo sapiens
gcctagaaaataaggtgaagtagaaaaaacagaacttgcaatcagaatcaataaggcctgaatatctgttctctggctcttcccatgtaccagttctctaytcacttccatcaattatgtttgtaaaaggtggttgaatgaagaaagcagaattgcacagaaggataagttgaaatgtaatgcagtgggaacagggcctca

SEQ ID NO: 454218 - DNA, 201 bp, Homo sapiens
attcctggccctatacctggaataacttaaagcacggcttttggttttgcatcatttacactgcactaactcttttcaaatattaattaaagttaaacttsattaaaagttttgaatttttaaactgtgctttgatactaaatacagtccaaaggacttttataaagaaacagtttattatctagtgacaattcttaacct

SEQ ID NO: 454219 - DNA, 201 bp, Homo sapiens
atatacattattctcagccccacactgcacttattccaaaattgaccacatagttggaggtaaagcactcctcagcaaatgtaaaagaacagaaattatarcaaactatctctcaaaccacagtgcaatcaaactagaactcaggattaagaaaatcactcaaaaccgctcaactacatggaaactgaacaacctgctcct

SEQ ID NO: 454220 - DNA, 201 bp, Homo sapiens
ttatatagccatataattcataaaagctgtgtaagccataaaatcatatatgccaattttgttggttctgttaaacaggaaaataagggcaacattattaygttttgatttaaatttgcaggatttatgataagaaaaattattgtttgttattgctaacctttttctaaaatagatattaaatacattttaaaatagagt

SEQ ID NO: 454221 - DNA, 201 bp, Homo sapiens
aacaaccaatgatatgagagggcttttttttttttttttgagaactgcccttaataatgaagatctactcctaaattaatgttacaatgggactcgttgamtcacatcagttttctaaattgattccaaggtaaaaatttctgggagatcattctcttgattctgctaccctctgaagaaagcaacaaataattaggcaat

SEQ ID NO: 454222 - DNA, 201 bp, Homo sapiens
ataacttaaaaagatatagtaactcagattacagctgtgcgtgtaaagaatcaataaacatttaaatatattcacaatggatgttttctttatgaagaatrtaatttagtatgggaccattgaatttgcttttccaaagcatttcacaaactaaatatcttagaatatgtggtgacatctgtagttatatagtttaagtaa

SEQ ID NO: 454223 - DNA, 201 bp, Homo sapiens
cttaacatttattatggtgagaacatttgaaatttagattttgaaatgtgcatactctattattaactatattcaccaggctgtgcaatagaactcaaaarggaaaaaaaatcccacatttctgagattttgtaccctttgaccatcatctcattctccccacctccagcctctgtaacccattgtgtattttaaacacaa

SEQ ID NO: 454224 - DNA, 201 bp, Homo sapiens
cacatttctgagattttgtaccctttgaccatcatctcattctccccacctccagcctctgtaacccattgtgtattttaaacacaacatttgaggtaagygtttaattatttgggtttttagtatacccagtgaaaactggatttaagggacacagttcaggagatttcattaattttgtatggaatagttgaactaact

SEQ ID NO: 454225 - DNA, 201 bp, Homo sapiens
ttatatttacaattaattattttatagccattaaatttaacagaataattttaaaatcagtaacatcaattgctattggggatgcttgaaaaattcatatrttgctgttagaaatgtgagttttcacaaaattttaaaaaccattgtaaatatctactaaaattaagataaataacactctttgactttcaaactgttcct

SEQ ID NO: 454226 - DNA, 201 bp, Homo sapiens
tcagaggtggttgaagtaatttattgtccccattaagttggatgaataaagaacaaaatattgtaaacaacaattaattttaatgacatgaagatgatcayggatcctggacttgatattccaatctaagtatttcttttaatcttggattagcacttgatttggttaaaacattgttggattacctcacataaagtaaga

SEQ ID NO: 454227 - DNA, 201 bp, Homo sapiens
aatgtttcaaagtgaaatattcagctaaagtagtgaaaaagaacaagtgagataagtactgctcttttgatgtgtgattctgtaaccttctcatttttaayattcttgtatttctagtcttttgagaagtgagctccaatttatatagcacagatgtagaattttaatctacatctactgtgcaagaacaggagatcagag

SEQ ID NO: 454228 - DNA, 201 bp, Homo sapiens
gagcctatctgctttctgccatcatcaacctgccatccacagcctgcagacccatgccaaccttctctttgccgtccctcccatgcttatcagcacccaawgtccagaggggctcgagacagcagggttctggtgtgtcggtgccaccctgagcatgtgcatacccagcagggtcatggccgtgcccaggctttgtcacaa

SEQ ID NO: 454229 - DNA, 201 bp, Homo sapiens
cttttactttttgttctatgcaacttggagtattttatgtcaccctcaagatcttttttatttgttaaaacaattatttttcttttcctgagtgtatagcytatgaaacaattgatatagacccaggagtactggattatatcttcctagtaatgttttgttattttatttttttttttagacagaatcttgctttgtcac

SEQ ID NO: 454230 - DNA, 201 bp, Homo sapiens
tctgggactccaattgcatatattttgatgttacaccgtataccgtgtcattaagctttttcctgtatttttgttgttttttgtttccatgtttcaatcaragaattttatctgaccttcattatgcttcactaattttctcttcatctgtattaaatgcactgttaaagccatctaataagatttaaatttcaattatca

SEQ ID NO: 454231 - DNA, 201 bp, Homo sapiens
taatttaatttctttcattctcttctacccttacattgttttgatcacctcttcacttcatctttcagagaaagaaaaagatattcatttgtttgacaggytgacattaaaaatctctttttaaaagtttttaaaaattgttgttaacaattaatatttttgaaacccattggacagtctaaatgctctcaataaaagatc

SEQ ID NO: 454232 - DNA, 201 bp, Homo sapiens
aatcttatattatctgacaaccttaaacaatttttaaaatagtatgccctaaattcatgaaaatcaaaggtataggagagtaaaaatcctcagaatacgtrtggcaagatattctaagaggctttgcacagttataatattcttggctttttcttttactaacatgctgcttctccaagtagagaataatttaatttcttt

SEQ ID NO: 454233 - DNA, 201 bp, Homo sapiens
acaactcctaccctggtcagtagctttcactgatagcctaaacactgttaaggctgccttctatcttttcaggcctcagtttttatagtctatatgcaaaraacatgctaggtaccatggagacataatttgggtgcgttaaatgattttaaagccttttatggaaatataaatcctgttggaagataattataaataaga

SEQ ID NO: 454234 - DNA, 201 bp, Homo sapiens
agaaatcatctatcttgagtctccttataagagtgctaattctgttatgagaaccacaccctcattatttaattacttcctagaagtaccccttccaaacwctaccatattgaggtttacgtcttcaacatacgaattttgagaagacataaacagtcactaacatacattacaatatttggcatatagtaggtatttaat

SEQ ID NO: 454235 - DNA, 201 bp, Homo sapiens
atgtgtgcatttactcagaatttaaatgaaaatggagaatagaaaggattaaatactcgggtccaaatagagatattgttaatcttatattatctgacaamcttaaacaatttttaaaatagtatgccctaaattcatgaaaatcaaaggtataggagagtaaaaatcctcagaatacgtatggcaagatattctaagagg

SEQ ID NO: 454236 - DNA, 201 bp, Homo sapiens
accctctctcagtttcttgggctatattatttatatctctgtaagtgaaagaataacacacaacttaaacttctttggaggcctattgccccacagtagtrtaagtataagaatgagtgtgatgtttttgccagaaaagaagtatagaagagatgctggctatataataaatttttattttataggtggggttagaaagga

SEQ ID NO: 454237 - DNA, 201 bp, Homo sapiens
tacattttaaattaacccattttccattctaaatgtacattgctcatttctctcttctgttacatagcattgcgattttttaaaaatctgctcatatcttytctttcatagaagctagcttccatgacaaagttttcccattcatttattcattcattcaaaaccacttatttagccctttattgtacgcctaaccctctc

SEQ ID NO: 454238 - DNA, 201 bp, Homo sapiens
agtggattgcttagccattaagttttttatagttttctgaggactaaacctgaacaaaattgatgttgttaattttaatgtgctcattctatccttttctrccttttccctctggcattctccctgatttcttgcaaacatctaatcacttcctatctcatctgcctgacatctccctttgttagccttggtaaaatgctc

SEQ ID NO: 454239 - DNA, 201 bp, Homo sapiens
gctctttaaattcacgaaaatcattagcccttttgcactgtatatattattgttgtatattttccctgggtgttatattcatattgccttcctttacaccygaattctgcttggatgcgtctcctctgtgttcttaaaacaagacaggtaattcctattatgttgcatattataatttcttcttattgtactttccttaac

SEQ ID NO: 454240 - DNA, 201 bp, Homo sapiens
aactcatagtggtctataagaaaaagcaaagaaaatactgttgcctcaaacagttattttaacagctgagatttttatattgaaataaactaataagaacrtttagtgtttgaaaattatggtaggcacttgaaatatttatatgttaatagttaaatcactcaggcaaaattgaacatatttataaaaaatttattctaa

SEQ ID NO: 454241 - DNA, 201 bp, Homo sapiens
aacatatttttgaataaatgttaaacatacattttaaattaacccattttccattctaaatgtacattgctcatttctctcttctgttacatagcattgcrattttttaaaaatctgctcatatcttctctttcatagaagctagcttccatgacaaagttttcccattcatttattcattcattcaaaaccacttattta

SEQ ID NO: 454242 - DNA, 201 bp, Homo sapiens
atggaataacatatactttataatttttcatcagctgtattacaaaaaaaggaatccttattactttaatttacttgacacttgaatttgtattttcttcyttttatactttatatttcattttacatactaaattctaattcttatagttttaattttttcttatatatgcaacatatttttgaataaatgttaaacata

SEQ ID NO: 454243 - DNA, 201 bp, Homo sapiens
cataaatccagaccatatcagatcccttatgttttgtttctgttatagtataaaattgaaatccgattatgtgaattcgttgggatgctttatttaacaayacttaattatttttcaagggctaatattaagattttgttatccaatggaataacatatactttataatttttcatcagctgtattacaaaaaaaggaatc

SEQ ID NO: 454244 - DNA, 201 bp, Homo sapiens
tcctatttaaaaaaaaaacttgctttgaatttccagctgtcagagctgtgtaattttatgtgtgcttgtttttatttgagagattatatcctcttaaaagraaaacaagtaacagagtaatgaagataaaataatctcatttttataaaaagtgtattttatatgtttgcatatttgtatatgagaaacactgcgcagtgg

SEQ ID NO: 454245 - DNA, 201 bp, Homo sapiens
aaagaaagggagataatcagtgaatgaaagggaataccatatcaggtccaacctcttcaacagctaatatctactctttaatatgttaccccactttacastcagcatgcttataaatagtgcttcttggtatcaattttgcctttccctaaatacctacatattttttacaccatcattttactgaataccaataattaa

SEQ ID NO: 454246 - DNA, 201 bp, Homo sapiens
aacagaaagaaaagaaagggtcaagaaagtgaaaacgaggaagaatctttttgagcaaaaaggaagaaggttgccatgttttctgtaaaataagaataatraaaaaaaagaaagcttgtgggattcaattgcaaaggaagttcttaattaaggaaaggaacatgttaagatagtaacaggatagtttggacaccagacttg

SEQ ID NO: 454247 - DNA, 201 bp, Homo sapiens
ggaggtagagttggaagggatcttaaaaatagacctaaaaaacaaacaccttaaatgcatagatgacatctattgcttcctctctgtcaggttaaatttgrcctcattgaaatttctacccaaccttgcaaaaaaataccaggatgcataaaccaggaagtatgtctgcattcaaacattgcttctgagccatttcttggt

SEQ ID NO: 454248 - DNA, 201 bp, Homo sapiens
tatccttgctagggctgtgtcaaatttaaataccaccggaaagataattgaaaacgctaaataatcttgaattgtttcttctgaatatttctctttacttrgttaacatccaagactatgtatcttactgacaaattgtttaatatctgtcaaagttatatttcttttttctagaaaccctcagaagaggaaacaattttt

SEQ ID NO: 454249 - DNA, 201 bp, Homo sapiens
catatttttgtttaacttaactcttggtttatggttttgacacatggtcataaaaacatgctttgataaggtgtgatctaatttagtacctactgaaattytatgtcccaatatgcccttactgctttttaaacctaaggctgttttgaaccaaaagccaattttctaatactggaaggctcatttgctccacattattga

SEQ ID NO: 454250 - DNA, 201 bp, Homo sapiens
tgctgctcttcactgcttcgtgctgacaagggacattgttttggggaaaacagcagtcacatctctctcagaggcctatgtaagggtccctggtagaaacrgagccattatccaaggctccagttgtatgaccacttggagcatgatggcctctaggtgagaagaaataattttacaaggaggttaaatatgtgaaagaaa

SEQ ID NO: 454251 - DNA, 201 bp, Homo sapiens
gttcatgttgagtaattaggttatgtgctacataaattaatacatttttatgtggtaaaaacagcgtaagtggtaacagctgcctctaaagtatctttgtkcttattcagatttaaattacctgttgatttgagtaagtaattataattttgtcctaacactgtgtaacatatggtgtttacattcttctcaagagctcct

SEQ ID NO: 454252 - DNA, 201 bp, Homo sapiens
tatttgtttctcatgtcaaatctagcagattcaataaaaaatacaatgattctctgtttatctgagttatatataatcataataaagttttataataggayccctcatatcagctgctctctttaaattatcctcctggtttgatgaagtaaaagatagatttttattaaaaaatttctgtagcacattttgtggtgtgtt

SEQ ID NO: 454253 - DNA, 201 bp, Homo sapiens
cacctttctaagtctctgatcaagttacattgtttcatagcaaattttggataggatatcagtgaattataagcatgtccaaatagatacctacgtttacytaggttttaaaatctttccaaaattttgttttgtttttaagaaatattcaaaaatgttcgatgaaacagagatgtgttgtaagtgcttttcttgcaagga

SEQ ID NO: 454254 - DNA, 201 bp, Homo sapiens
actcagttcttcactgctggtgctcaagaggcctcagttccttaccatgtagccttttcgctggtcaacatggcagttggcttccccctgactacacaatytgagagagagaagacaaaatgcacaatgtcttttgtaacctagtctcagaagtaatataccatcacttttgtcaaatttattggtcacaaagatcaaact

SEQ ID NO: 454255 - DNA, 201 bp, Homo sapiens
caattaccctgatttaatcactccacattgtatacacacattcagagatcacatgcacccaaaaatatgtgcaactatgaaatatcaataaaaaaggtagytaataaaagaagggcaaattaaatccaaacgaagcatgtagaaagacataataaagaacaaaactctataaaattaaaaacaaataataagcccaaattg

SEQ ID NO: 454256 - DNA, 201 bp, Homo sapiens
tagaaaaaagttctagtattaaatagtacaattgggaaattatagtttataataatttgttatatttcaaaatagctagaagatttgtaatgttcccaacmcaaagaaaagatacatgtttgaggtgatgtatatagcaattaccctgatttaatcactccacattgtatacacacattcagagatcacatgcacccaaaa

SEQ ID NO: 454257 - DNA, 201 bp, Homo sapiens
acagtcatttaaacttgatccaacctctttgcatcttacaaagttaaacagctaaaagaagtaaaataagaaggcaatgcttgtggaatgtacagtgcatrttggcggcgcacgcctcattacgattcgcctgcttgcttctcctgttcaatcgtttctttggaaggcagtggatttttctcttgcgtctctgtcttcttc

SEQ ID NO: 454258 - DNA, 201 bp, Homo sapiens
ggcagtccttagttttaacccagttatggctggctgtaagttccatcccgtcatgaccattatgtttcctcaacttttctattttcctacttcctttgctstgctctcagtcactgggagacgaaagtgctgctggttagcacagaagaaactgctgctgctgcggcttctactgttgtctgccatctctgttaccatcga

SEQ ID NO: 454259 - DNA, 201 bp, Homo sapiens
tcagcctctcttattcttttttttttttttcttttgagatggtgtctcgctcttgtcacccaggctggagtgtgatggcatgatctcagctcactgcaaasttttgctccctagctcaagcaattctcctacctcagcctcccaaatagctgggattacaggtgcccgccaccacgcccagctaatttttgtatttttagt

SEQ ID NO: 454260 - DNA, 201 bp, Homo sapiens
tttatctgggtgggcctctgcgtacctcagcctctcttattcttttttttttttttcttttgagatggtgtctcgctcttgtcacccaggctggagtgtgrtggcatgatctcagctcactgcaaagttttgctccctagctcaagcaattctcctacctcagcctcccaaatagctgggattacaggtgcccgccaccac

SEQ ID NO: 454261 - DNA, 201 bp, Homo sapiens; identical to SEQ ID NO: 27575

SEQ ID NO: 454262 - DNA, 201 bp, Homo sapiens; identical to SEQ ID NO: 27565

SEQ ID NO: 454263 - DNA, 201 bp, Homo sapiens
aaactaggctaatgtcataagtgctggaactagtctttggtcttatagcaataagattctaaagctatacagttaggttattgctggatttgtctctcctrcttttggtatagatcctacttgctctgtctgggccatctctactttttgatctattgctgttttcctcatttttgtctcttttcattccctggagattga

SEQ ID NO: 454264 - DNA, 201 bp, Homo sapiens
tgaactttgccacaaaaggcatatttgttttagcaaacattgataacctgctaggaagatgagaatatgcctattacactgttgaagattggctacataayttgagttatctacaatatgttgcaaaaggcagatacttggcaagtttaatgccatccatctgatgtaattgaacttaaggttggatgaatagcacttcat

SEQ ID NO: 454265 - DNA, 201 bp, Homo sapiens
gtcttattattgagttgtttgagttttgcatatattctggatattaaccatttatcagatatatagtttacaactattttcttccattctgtatcctgtckctttgctcttttgattgtttcctttactgggcagaagttttgtcatttgattaattccatttgtctatttttgctttaattgcctgtgctttttgaggtc

SEQ ID NO: 454266 - DNA, 201 bp, Homo sapiens
tatatctttaaatgtttcctaattgcccttacaagttcttctacaggttgtataacagtctatatttcctctatcattggagcacttatgtctcctcattwtaattgctaatcttccttttcccagtgatattctaagatgcaggaaaatgatcttgtgaacttgtaccttgttatatcttctcaacctggaaggtatttg

SEQ ID NO: 454267 - DNA, 201 bp, Homo sapiens
agtgagcagagggtctttattatcaacagggaaaagcaatagtattatatgattagcatagacaacagttctactaagaagatattcataatagaggcctytaaagaaaattgttttttgaaatgttccctaagccaggaagttttaaacttccattcccatttcattactaaattggagtttaatatcaatattcattta

SEQ ID NO: 454268 - DNA, 201 bp, Homo sapiens
aagtactatataattctgactgtacagatttccaacatgtagattcatttatgtcattttggtagcttgaaatcagccatgtgggagtatttatgcctcaraaattggcaaacactgcaaattagggcctcttatttttggcaagcctgttgttaaatattgactagcacattactatgtgtataactgtatgattctata

SEQ ID NO: 454269 - DNA, 201 bp, Homo sapiens
tttgatttttataattacaacagttgttttatttgagggatttctatacaaagtatacccgtgattattattacttcatagacatgtgaagtgagagttaraaattttaaattatttttctcaagtaagtgtaatttcagggcaacagcctgaaatttgtgtctttgtattacatcctattatatttaagtagatttatct

SEQ ID NO: 454270 - DNA, 201 bp, Homo sapiens
accggtgcacaccagcatacccggctaattttttttttttttttttttttgtagagacaaggtttttccatgtttcccaggctggtctcagactcctgggytcaagccttctgcccaccatggcctcctaaagtgctgggattacaggcatgagccaccatgcccagcctaaagtgactttctgttacctattctaaagtt

SEQ ID NO: 454271 - DNA, 201 bp, Homo sapiens
ttctattatcattgctttgtggggtgtcagtatcacctaacaaacatttgaagtgattttgaagatattgttataaaacagcagttgtaatggattactcrgggtgctgcattgtacaatgaaaataggcttaagtagaaaactgctggctatctagaagtgtcttttgtggcaggaaatattttagatagtttgttcatc

SEQ ID NO: 454272 - DNA, 201 bp, Homo sapiens; identical to SEQ ID NO: 148584

SEQ ID NO: 454273 - DNA, 201 bp, Homo sapiens
tttttttgctttctgtgacttaagctatcactcttagattttaatgaacaggatttctgacaacataacaaaacagaaatcaggtttgatgggcttcagcrtacatgaagtgcatatcctctctgaaaaaaattcaagcatgcaacacatctggcacgtttctgtactttgtatccgtctctcctggccaatcttgtgcat

SEQ ID NO: 454274 - DNA, 201 bp, Homo sapiens
atggggagaacaatgtcattggtaattcctatgttttgggacttcattgtgataggaaatataggaggagaagtaagtttggaaagaaatgattaattctsttatcaggttattttttagaatggacatccaattgtagatgtctggtaaacaggtatgcctgaaatatttatcttgaacggtgtcagggcttatttttca

SEQ ID NO: 454275 - DNA, 201 bp, Homo sapiens
atcatttgaataatctacatgagaataatggtaacatgaattagaagtatggaaatagggatgaggaaaatgaactttttgtgagaatgtatctacaggaygcactgacgtatttgttggggattgatggggagaacaatgtcattggtaattcctatgttttgggacttcattgtgataggaaatataggaggagaagta

SEQ ID NO: 454276 - DNA, 201 bp, Homo sapiens
ggctgaggcaaggagaatcccttgaatgtgggaggcagaggttgcagtgagccgagatcgcgccactgcactacagtctgggcaacagagcaagactctgtctcaaaaaaaagcaaagatgataattagaagatctgattttgaaaatttcttaatcttgaaatccttaatgagactttccagtatgtaaaaatgttaatg

SEQ ID NO: 454277 - DNA, 201 bp, Homo sapiens
aggctgaggcaaggagaatcccttgaatgtgggaggcagaggttgcagtgagccgagatcgcgccactgcactacagtctgggcaacagagcaagactctgtctcaaaaaaaagcaaagatgataattagaagatctgattttgaaaatttcttaatcttgaaatccttaatgagactttccagtatgtaaaaatgttaat

SEQ ID NO: 454278 - DNA, 201 bp, Homo sapiens
ggtcttactatgttgcccaagctggtctcaaactcctaggcttaagtgaccctgctgcctcagcctcccaaagttctgggattacaggcatgggtccccayacccatcccttaatgtctagtttcttaagggtttttatcatgaaaggaggttagattttattgaaagctttatccatgtctactgagatgatcatgcggt

SEQ ID NO: 454279 - DNA, 201 bp, Homo sapiens
aactgtaggactttggtagaagaacaaatccgatttatatttgattaataagaagtagttagttgcagatcgttagcatctcatatcacatttaattttttggtatgttgaactgcagaatttacttattattgataatagtagaataatatgactgtaccctatttgagatagccaaacactttactattcatttacttt

SEQ ID NO: 454280 - DNA, 201 bp, Homo sapiens
ccaggctcaagagatcctgccacctcagccttatgagtagctgagactacagacacacaccaccacatctggcaaattttaaaatttttattgtatgtagrtgggggtcttactatgttgcccaagctggtctcaaactcctaggcttaagtgaccctgctgcctcagcctcccaaagttctgggattacaggcatgggtc

SEQ ID NO: 454281 - DNA, 201 bp, Homo sapiens
attaagaaaatgtggcacatatataccatggaatactatgcagccttaagaaaggatgagttcatatcctttgtagggacatggatgaagctggaaaccakcattctcaggaaactattgcaaggacaaaaaaaccaaacaccgcatgttctcactcataggtgggaactgaacaatgagaacacatggacacaggaagag

SEQ ID NO: 454282 - DNA, 201 bp, Homo sapiens
caaatctctatgtaggggaggcttagaggttgcaatctggttggaagtagactctggcagggactcattcggagctggatttttttttttttttaagactrcaatgttttggtcttagactttttttgtttttccttaaaactaccatgataggcatgctatcttttacttcaatcgcatattaattttgagggagttaga

SEQ ID NO: 454283 - DNA, 201 bp, Homo sapiens
gtagctggaattacaggtgcctgccaccatgcctggctaatttttgtatttttttagtagaaacagggtttcatcatgttggccaggctggtctcaaaacwcctgaccttgtattccgcccgcctcggcctcccaaagtactgggattataggcatgagccaccatgcccagccctctttagggctttctaggtatagaat

SEQ ID NO: 454284 - DNA, 201 bp, Homo sapiens
caaatgtccaacaatgatagactggattaagaaaatgtggcacatatataccatggaatactatgcagccttaagaaaggatgagttcatatcctttgtarggacatggatgaagctggaaaccatcattctcaggaaactattgcaaggacaaaaaaaccaaacaccgcatgttctcactcataggtgggaactgaacaa

SEQ ID NO: 454285 - DNA, 201 bp, Homo sapiens
atggcaacaaaagccaaaattgacaaatgggatctaattaaactaaagagcttctgcacagcaaaagaaactaccatcagagtgaacaggcaacctacaamatgggagaaaattttcgcaacctactcatctgacaaagggctaatatccagaatctacaatgaactcaaacaaatttacaagagaaaaccaaacaacccc

SEQ ID NO: 454286 - DNA, 201 bp, Homo sapiens
acttgatccaacctctttgcatcttacaaagttaaacagctaaaagaagtaaaataagaaggcaatgcttgtggaatgtacagtgcatattggcggcgcaygcctcattacgattcgcctgcttgcttctcctgttcaatcgtttctttggaaggcagtggatttttctcttgcgtctctgtcttcttcagtttcggctta

SEQ ID NO: 454287 - DNA, 201 bp, Homo sapiens
ggacagtttgacttcctcttttcctaattgaatgccctttatttccttctcctgcctgattgccctggccagaacttccaacactatgttgaataggagtsgtgagagagggcatccctgtcttgtgccagttttcaaagggaatgcttccagtttttgcccattcagtatgatattggctgtgggtttgtcatagatagc

SEQ ID NO: 454288 - DNA, 201 bp, Homo sapiens
ctcttagggaggcagaggcaggaggatagcttgagcctaggatttgagacctgcctgggcaatatagcgagaccccgttctccataaaaaggaaaaaaaawacaaagtctttatattattttaaggattcttagcacttccatatgttttatttatttaaatattttatattaaactataaaaattgaagcagttattaaa

SEQ ID NO: 454289 - DNA, 201 bp, Homo sapiens
ggcagatatttcccacactgttctcgtgatagtgagtaagtttcacaagatcgatggttattataagcggtggggcgggggtggactcttgcacaagctgkctctttgccaggtgccatccatgttaggcgtgacttgctcctccttgccttccgccatgattgtgaggcctttccagccacatggaactgtaagtccatt

SEQ ID NO: 454290 - DNA, 201 bp, Homo sapiens
actacactttagaagtgcttccttttcatcctaaccaggagtttgaattaggaatagaaacattcctggagcccttcgtctctgccagagtggagagtggyccccttgggagccctccttccttccacccacaacctcagacagcattcaaaccatacaacagccaccccaaacgagctaggtagactgaaaggaaggaag

SEQ ID NO: 454291 - DNA, 201 bp, Homo sapiens
tcctcaagaaaatttccagagctaggtataactcacaaaatcttttttcagtcttataaagaatgagaacacttgttaaatgtgccaacctccctttagcrgaaacagctccattaagccagtatatttggcactttctcaatgcacgatgtgtgtgtggggtgtgtgtgtgtgtgtgtgtgtgtgtgtgttttagtttat

SEQ ID NO: 454292 - DNA, 201 bp, Homo sapiens
aggctaccacctatatacaaaaataaatggtatgccatgttgatcctagaacattttctagggtcaagagagtagtaaagctactgtttaaaataaaatgktttagttaatatgtatgttcatgtgtttttatctaaacaatcaagaaatgatgatgaagagataacatgtttgaaaaaaccctgaaaattttttaaacat

SEQ ID NO: 454293 - DNA, 201 bp, Homo sapiens
tttttttggtatcaactactaaaaagttaataattgtggtgaacctcttaaagtcagtgacagaatcctattaatctctgcaacttcagccatcactgctytgctggacacaatgtggatgttttcaataattttggaaaaaaatgccatcatcttttccttttgggattaaaaatatattcaaattattgaagtatgaaa

SEQ ID NO: 454294 - DNA, 201 bp, Homo sapiens
ctcatatgtgaaagaatattagttttttttggtatcaactactaaaaagttaataattgtggtgaacctcttaaagtcagtgacagaatcctattaatctytgcaacttcagccatcactgctctgctggacacaatgtggatgttttcaataattttggaaaaaaatgccatcatcttttccttttgggattaaaaatat

SEQ ID NO: 454295 - DNA, 201 bp, Homo sapiens
tgacagggaagttaaaaaaagtcactggcctctgacttagaattaaatgaaatacagcaacccaataatgaattctgagtatccagggaacaataatactytaaagcaaactcagagatcacaaaggggcatgacaggaatacacccaacggtacacaggcactggaagaaccttgtactacatttatactttagtcttag

SEQ ID NO: 454296 - DNA, 201 bp, Homo sapiens
gggtttcaccgtgttagccaggatggtctcaatctcctgaccttgtgatccacctgcctcagcctcccaaagtgctgggatttcaggcgtgagccaccgcscccggacgagaatattatttcataaagatgaatacccttaaaattagaaacaggaagagaaacaagtactcatttttattttatgttagatttgaagatt

SEQ ID NO: 454297 - DNA, 201 bp, Homo sapiens
ctctctaaaagccaatgatacttattcaggaatggacactgacatgagaaacgtatgccatagtaagctgtgtatgtattcagggaggtaaagaaaggcartggcttaggaggattacataattgttttgagataattatccttggctacaagaatcaatagcaaacataactccagtcaaaggttggacaggcagttggt

SEQ ID NO: 454298 - DNA, 201 bp, Homo sapiens
ttatgatctttgtctaagaagcctattatctagattgagaatctaaacaaatacaaaggtaagcaattagtatcatctaataaatgtctcagttaattctrtcacacacttagataagtttatcaaacgtgtaagaacataatttaattaagcagagcatgtttcagtaaacaaatgtgagtgagctttttataaagtttc

SEQ ID NO: 454299 - DNA, 201 bp, Homo sapiens
cacatttcagtcctgtggaacctctgtctactctcggccctatgaactaatctctatattactcacaaaagaaaaagatgaacacaatcaagaagaacagyagtttttttttagtaacaaggcagatttccaccaaaggggagtcttaaattctgatcagacaatcaaaagttctcacaacgaggggggtcatcattctta

SEQ ID NO: 454300 - DNA, 201 bp, Homo sapiens
ccaggagccttttggtggagtctttagacgtttttttgttttttatttttgagatggagtcttgctccatttcccaggctggagtgcagtggtgcgatctyggctcactgcagcctccacctccggggttcaagtgattctcttgcctcagcctcctgagtagctggaattacaggtgcctgccaccatgcctggctaatt

SEQ ID NO: 454301 - DNA, 201 bp, Homo sapiens
ctttgtgttatttcaatcacccattaaaactgtacacttagcacatttctttttggtttgtaattaacatattaaaaatccagaagaatttgagctttggrgagataattgaatattttatttaatttcttaaaagtgaggatggacattatgtagattatatgactgttcatcattttgcaaagtgaagcccattgaatt

SEQ ID NO: 454302 - DNA, 201 bp, Homo sapiens
ttacagttctgtattagatatcatttataaaagagatttccattgactttgttgaagatcagatggctgtaggtgtgtgactttgtttctgggttctctaktctgtttcattgatctatgcatctttttttgtaccagtaccatcctgttttggctactgtagcattatagtatagtttgaagtccatagtacagtgtgat

SEQ ID NO: 454303 - DNA, 201 bp, Homo sapiens
cattttgcaaagtgaagcccattgaattactgtcagtattacacaactaaagactaatcaactatgtctcgtaacctgagagagattcttgatatagctarcattgttttttcaacaaagattaataattaatttgatacttattctttttattttggtcagcccaaaaggtagtgcaaggaaggagcagagaaaaggaag

SEQ ID NO: 454304 - DNA, 201 bp, Homo sapiens
cttaatcccggacctactgaatcagaatgcgctttttaacaatacttctctctactcctgggtgattgattcatgcattgaatttgaaaagcgcttcactmgttgccagatgttttgctctaaattccttcttctgtgtactaaggcataatataggaaagactcaaaggatttctccctacagctggagttcataagctt

SEQ ID NO: 454305 - DNA, 201 bp, Homo sapiens
agacacaaaaaacccttcaaaaaatcaatgaatccaggagctggtttttcgaaaggatcaacaaaattgatagaccactagcaagactaataaagaagcaragagagaagaatcaaatagacacaataaaaaatgacaaagaggatatcaccactgatcccacagaaatacaaaccagcatcagagaatactataaacacc

SEQ ID NO: 454306 - DNA, 201 bp, Homo sapiens
gagagaaagggaaggaggtgcctttaccagtgctaagtcccctgggttgaatagaagtggccttattcatgcgattgggcctctgatagttgttgcagttygtgttgcaaatgggccaaataagttgtatgcttaattaaatcagagctttttcagtctagcaagaaatcattggtgagaaaagtctacaccattttgaag

SEQ ID NO: 454307 - DNA, 201 bp, Homo sapiens
ggtgggggcctgcacagggtcaggatgtaggaggtgcagaagacagagtttgtagtgtgtgtgaatatgtgtgtgtgttctgtatgtacgtggataatatytaatgaattccgctcaccaactgtgaaaaattctgatggataaaatttgtcactctttatccctgaagagatttgaataagttggtagaaaggagcagaa

SEQ ID NO: 454308 - DNA, 201 bp, Homo sapiens
ttttcagtctagcaagaaatcattggtgagaaaagtctacaccattttgaagggacttaaatccagctttgaaagggtgtttctaacacatagtagggctrtggagagaagagtaatccatggaatatgagtatcttgagacagtttactgaggtgccttttaataatctcatttgtcttttctacctttcctgaggattg

SEQ ID NO: 454309 - DNA, 201 bp, Homo sapiens
ttaaaaagattgtgaaaaacctggagtgaattatttgtgtcttatggctcactgccattttagatgaattattgtgttgttaaaataaattgactttttttctaagaggcaggaaatagcttgcaatagtgaaaccagatagaatccgagctgttacaaaagttgatcccaatttataaacagataccacttggattgaaa

SEQ ID NO: 454310 - DNA, 201 bp, Homo sapiens
gtcctggattgtttccccaatgttttattttagtagttttatagtttcaggtattaggtttgtcttcagtctactttgaattgatttttttttttttttttgagacaggggcttgttctgtcacttaggctggagtacagtggtgcaatcatggctcactgcaacctcagcctcctgggcttaagccatcctcccatctta

SEQ ID NO: 454311 - DNA, 201 bp, Homo sapiens
caacccctgttttttttctttttcttttttccatttgcttgataattattcctccatccctttattttgagcctgttgtgtgtctttgcatgtgagatggktctcctgaataccgcacacccatgaatcttgactctttatccaatttgccggtctgtgtcttttaattggggcatttagcctgtttacatttaaggttaa

SEQ ID NO: 454312 - DNA, 201 bp, Homo sapiens
actctagcaggaaagacttgaacactgttttctttctttctttctttctttctttctttctttctttctttctttctttctttctttctttctttccttcyttccttccttccttccttccttccttccttccttccttccttccttcctttctttctttttctttctttctttctttcttctttctttcttttttttttt

SEQ ID NO: 454313 - DNA, 201 bp, Homo sapiens
tgagagcactgctctaatgcattttgtattttcagaagtctgtgtaagatatatttgaagagtgttttatcactgcttccacaatttaggaatgctttctrattctgtctttctgattacatggcaagtccgtcacatttaggtgatgagatttattcatttattcactgaaattactacctttcttctcatttatagaaa

SEQ ID NO: 454314 - DNA, 201 bp, Homo sapiens
tattactctagcaggaaagacttgaacactgttttctttctttctttctttctttctttctttctttctttctttctttctttctttctttctttctttcyttccttccttccttccttccttccttccttccttccttccttccttccttcctttctttctttttctttctttctttctttcttctttctttcttttttt

SEQ ID NO: 454315 - DNA, 201 bp, Homo sapiens
agttgggattcttgatctcattaatggcctggaattgcatgacaagcttttccatttagacaattaacatattaatccacttcatgtagtatccatctgcwtatatataatttttcagaaatattttccatacctccttgcactcatggactgtagctattttcaaaagcaatataatcactagatggtgtaaaacactaa

SEQ ID NO: 454316 - DNA, 201 bp, Homo sapiens
gctagtctcgaactcctgacctcaggtgattcacctgccttggcctcccagagtgctggaattataggcatgagccactgtgacccgccgtaaataaactktttaaattctgtttattacaatcttcccaaactggctggactaagggtctcattttcacagcactgctgttaatgttgatggatctggtatcctatagaa

SEQ ID NO: 454317 - DNA, 201 bp, Homo sapiens
actcatgaaatgttttctctgtattgtatgtaaatcattgttactctccagtatgtatagtattttaatctatatagtccagagcatattaaaattgggawttttttttttttgtggagcaagatgaccaaatggaaacctccactgacttgtctacacaaaaaagcacctacatacgaactgaaaatcaggttaaccatc

SEQ ID NO: 454318 - DNA, 201 bp, Homo sapiens
ggagaacttccccaatctagcaaggcaggccaacaatcaaattcaggaaacacagagaacaccacaaagatactcctcgagaagagctactccaagacacrtagttgtcagaaccaaagttaaaatgaaggaaaaaatgttgatgttaagggcagccagagagaaaggtcaggttacccacaaagggaagcccatcagact

SEQ ID NO: 454319 - DNA, 201 bp, Homo sapiens
actacattttcttggattcttggatgtactgtaagtaaaacttttttttttttttgagactgagtgtcgctctgtcacccaagctgctggagtgcagtggygctatcttggctcactgcaacctctgcctcccaggttcaagcgattcttgtgcctcagcctcctgaatagctgggattacaggcacccgtcaccatgcct

SEQ ID NO: 454320 - DNA, 201 bp, Homo sapiens
cctacaacacaaactaacaagagaagaactgacaagaacatccttcatattgtgttactttcctgtttactggaatgctttttgtaggttgtttttgtatrtttctaaactttatttttctccttttggtgtcaatcagtaaatctgctctactattcagtgtctacatagctgtctaatacacttttttttttatcctgg

SEQ ID NO: 454321 - DNA, 201 bp, Homo sapiens
tattttcatattaggatcatttatgtcactgccccacctacaacacaaactaacaagagaagaactgacaagaacatccttcatattgtgttactttcctrtttactggaatgctttttgtaggttgtttttgtatatttctaaactttatttttctccttttggtgtcaatcagtaaatctgctctactattcagtgtct

SEQ ID NO: 454322 - DNA, 201 bp, Homo sapiens
gggaggggtacatggagcagctctgccaaggcactctttccccaggcagcactgtgcagctttacctctggccccaagggacagggcacagcagtgactgrgaagggcataaagaggggctccacaaaggaatcatttttgcaagaggaagtatgcaatttcaactcagtcctgagggagcaggacaaagctgtgtctggg

SEQ ID NO: 454323 - DNA, 201 bp, Homo sapiens
gacgcagaagacgggtgatttctgcatttccaactgaggtactgggttcatctcacgggggagtgctggacagtgggtgcaggacagtgggtgtggcgcascctacatgagccgaagcagggtgaggcattacctcacctgggaagtgcaaggggtcagggaattccctttcctagtcaaagaaaggggtgacagacggca

SEQ ID NO: 454324 - DNA, 201 bp, Homo sapiens
cagcagatataaaaattatttgcaaattaacagtatgttaacaaacaaaggaaaggagatggcataaaatatcagtgtcttatgttataaaatgaaatgtyatatatatatatataggtatatgtctatataagcaatgcatcattgctattcattatcaaatactattcatcaaaaatgagtgcttatgattctaggaca

SEQ ID NO: 454325 - DNA, 201 bp, Homo sapiens
atagtaaaagaaagaaagaaaagaagagaaaagaaagaaaaagaaagaaagaaacagtatttaattttatcagcattcctattacacagctggcatagatwtttaacttactttgtgttaggtctcctgctttatgcaatttataatcttattttatttactttttgtaatcctataaaggctgttaaaatctgtctgtaa

SEQ ID NO: 454326 - DNA, 201 bp, Homo sapiens
ttcttctactgttcccgcatgtgaatcttttactttaaagaaaaagttaaccaaacttactttcatgctttatagaacgagcatcactttagttatgccaygtcgctacagttttcataagtaaattttattttatttttttgagatggagttttttttttttgctcttattgcccaggctggagtgcagtggcttgattt
